United States Patent Application Publication US 2011/0183924 A1 - sequence listing, part 261

SEQ ID NO: 735341 - DNA, 187842 bp, Homo sapiens
ctccaaggctgagggatgaggagacctgctgaggacccagggccttatctttccatcccactccataggtcccagtattgactgatgctgtcttcacctcctagcctcacttttaaccttctggcacccgcccaccactgtccagttcactattgaagccctgccgtccagtgctgcagagggaaaggatgttcttctactggcctgcaatatttcagaaactattcaagcctattattggcacaaggggaaaacggcagaagggagccctctcattgctggttatataacagacattcaagcaaatatcccaggggccgcatacagtggtcgagagacagtataccccaatggatccctgctgttccaaaacatcaccctggaggacgcaggatcctacaccctacgaaccataaatgccagttacgactctgaccaagcaactggccagctccacgtacaccgtgagtgattcccccatacctctgggtgctggcggtcagttctgcttcacacacatgagattgtcaggcctgggctgtgcctgcatccccctctgcattttgtcccgtgttgagatttgggcatttagtgcaggacacacacatggtaggtaaacttcaacagatcagaattcctttcctgcatccaggccctgcagacactgatggcgggggcgggggggcctcagcagggggaggtcagtctcagccaagcaccccatgccctccccatgaacctgaccctgagaaagaccctggagaactgggtcagggcctggcctgagggcgtcctgggaacctcacaaaagcccagcctcaggactcctgactccgtgtgaccccgggaagcctgtgtcagggctggggtgtggtctcctgggcagggcttactgggagcaaggatttaccagatgtctgcgggctgtggttcctgaagcttctcatcagtgagggctcagctcccagagtctcatctagacaaggacagagcctaccactttccctgggactcagcctggagagggcagggggacaggattactagggcattggccccctgaatgaggagcttaagagatgcccttgggcagtcagtggcccaggggtaggaacagaggggagaaaatgttcctggcagcttcttgtccaccggggatcatgcccaggggtgctctcccatggaggcaaataacagatgctgttgatgtgaacacctcctctgtgccaagcttcatgtcagatcctgtgaataatttaaagttcattcacagacaaagtggcaagcctcagaccattttccatttacatattgtatggaggggaaactgaggcacagagagatacagacaccggccacggtgggcagatcgcagctggcagagtcacatgagggctgtctgcagctgctgccacgtcctctccttcatccctggtgccttactaggtgtctgtggaccttagaacagccactggttcggatgttttcttcttaggtgtctacagctcggagggggagattctggtctggagagttatgagtaaatacagaattaatcagttttttcttaactaaatcacctgcctcaacaatcagtcagtgctggggaagttcaggcctcctcgctcaggtccacaccccgcatctctggacatgaaatggcttcgtgtgttttctgatgtgtgggtatcattccaacaggaggataaaggggaggactttgctttctctccccattcacaccctgcaccagccagggcccagtgtgagacacatactccgtagttctctcatgaaggagggagggaatgaatgaaggaatgatctataacctcttcagagacagagacctggatacaagatcctaggaggttctgggcccaacgtgagacacacactctgtagttctcttatgaaggagggagggattgaatgtaggaatgatctataacctcttcagagacagagatgtggatacaagatcctaggaggttctggccacacctgttttctgtccctctagagcctaagacccatgtctcattcatctggcccgtttctcctaaatctgcccctgggagctgagtctcatctgaccctggggctgcagggctgtgggaaggttttcaggggagggatcaggcttgcgggtagtcccacacgtttgccttacaccctggagctctacctggttctcactatgaatatcccataataatcccccctatcctttctggggagtagaaaaaaagtaaatatttaaaaatatgccagagcatctgttcttcttagcaagttcagatagttattagttagcaggaataaatcgttattttaccagagcctcacctgctgggggtttatgggagcctaactgactgaggggggtgggaaatatccaactccagccccctctagccatcatgtcccacctaaaggagagaaaaaactgagaggcacttgtgacattcacagcccagggcacagactctatccaggaccacagaacccctccctccccccactcaccaccgcatcactgaacgcctgctcacccaagttcctgttgcccagtacatcatgtcctggctttcaacaaaaactacaagacagactagaggcaaaaaaaaaaaaaaaaaaaatgcagttcgaaagacagaacaagcatcagaaccagatgcagatgtggcagggatgtggcagggatgttgaaattatcagaccaggaatttaaaacaactctggggccaggagcggtggctcatgcctgtaatcccagcatttgggaggccgaggcaggcagatcacctgaggtcaggagttcgataccagcctggccaacatggcaaaaccccgtctctactaaaaatacaaaaaattaggcaggcatggtggtgggtgcctgtaatcctagatactcggaaggctgaggcaggagaattgcttgaacctgtgaagcggaggttgcggtgagcctagattgtgccactgcactccagcctgggcaacagagcgagattccatctctaaaacaaacaaacaaaaaacaatactggctaatatgctaaaggctgcaatggaaagcatagacaatgtgcagaacagacggatgctgtgagcagagagatggacaggctaagaaagaataacaacagctactatatctatctatctatctatctatctatctatctatctatctatctatctatatatatgtatatatatgctagagatcaaactcactgtaacacctggatctcagagtggttgtgaggatgtttattaggagattaaagagattaaagcagagttatacacagggcgagagctcaactgatgctatcaactagtattcttatttttttgatgttgttattggcaataaaatcaggaacaatgcagtaaaaatttggttttatcatgtacgagttctgtgaccttccttgacttactgaggtactgtaagtctcagattctaactctgcagatggcggtgatgcccctctccctcaaggtgatgtgaggatgagatgagctgtaggtaggttggtgcccactgtgcctggcacatggaaggcccctgaaaatagtcaatgaacatcatccccgctcatcagcatggagttgacagtgagggctcgctctctgtgacaatcatggaatggaaaagaagaaacaagaggaagactgggcgcagtggctcatgcctgtaatcccagcactttgggaggccgaggcgggcagatcatctgaggtcaggagttcaagaccagcctggacaacatggcgaaatttcatctctactaaaaatataaaaattagcctggcatggtggcacaaacctgtaatcccagctacttgggaggctgaggcaagagaatcgcttgaacttgggagatggaggttgcagtgagccgagattgcgtcagtgcactccagtctgggtgacagagcaagactccatccaaaaaaaaaagaaaaagaaaaaagcaacagagggaagaggtgtgacatgagaggaagaagggatttaaaggtacaggagcagggcgaggtgcaagcacctgtgggagaatgtaggagttggtacatcccagtgtgtcaagtctgagacacagaaaatggtgcaaccgtggagagcaagggagtcagctatgaggacagcccaacagaccacactcaggctctggagcatttccttcctccctgactatgcccctgccctgcaatgccccttatggtttcccttggaacaaacttgggccttgtcccctttgccttcccctttctgcagaaaacaacgtcccaggccttcctgtgggggccgtcgctggcatcgtgactggggtcctggttggggtggctctggtggccgccctggtgtgttttctgcttctctccaggactggaaggtaccgcagcttttccccagcctcctcccacccctaggctgaccccagtcagggaggagggagaccccgccctgtattcagggccaggctttccgcatcctcccaaggaatccttccctctcattccatggctcctcccttgccagctgctgatcctaggctgcctcttcctttatgaatgtggcacagttaaggttgcacccctgagtgctgtcctagttccctaacacagcaaagccacagctgcctggagggaggaagggagggagggagggagggagataagacgggagtgctcagaacctggtaccttctgctgttcattgaatttacccacccagtgaggagggatttgcaggcttgagatccatggtgggggtcctgggcatggtcacgcagtggggagtggcaaagcctggacaggctgggtagggtcagcaccccatcgtgattgatgtccctgaggtgtgagatgggagaacctggacctcaggacctgctgtcctttatgtctcttgccaaggggtggagagagagaggacaaggccattgccccatttcagcatctccaggcctgaaaggagggtctggccatggcagggatactgagttctgggagaatatgatacatgctccttgcctccccatgcccccagctcccccagtgtcctgcacacacagccggccctgctttccctctggggccttgacccttcctctcaggcaaacgcaggtggtctgattccctccctgagtcctcagtccctttcctgggtccctgggtcaatgttctcctcacccggcatctgcctgggggggtccttcctctctggccaggacagacgtgactgcttaaggcctatcctcagctccccgtcctcggccgctcctaccacgaaactgatggagacaggaggccttcactccagtccttgaaaatggagtcccttccttgtcctttattctgcccctaaacctgtgatttctccctgcaccctcatgaataatcctgacctttcctagggccagcatccagcgtgacctcagggagcagccgcccccagcctccacccctggtgagtgtcccttcagcccaggtgtgggagcccctaggcctgccctacggtgtccactcctgccagtcaccccctgggggcctctgaccctttctttggggctgcaaggaggatgtcaggaaacatgacacaggggaccccgactgtcttgttcagactgatctgtgggctctgggtcgtgggtcacctcctcgacctcagctgctcaggtctcccctgggaagaggctccctctccctgattctctgggagctgaggacccctacactctcctgcaggaggggcccaggctctcctcccaccctgctgctcactcctgtctctgtccccaggccatggtccctctcacagatccaccttctcggtaagcctgttccctccccagcccttttctactggggtcccaacagtgcaggctcagggcagggggaccatcaaccccacagcacagcactgacccacctttccccagaacagtcaggtcaaagtgagtgcctccagccaggatccgggcctctctacagggccaggaccacccacgccatgtgctgacccctccccgggaccctctacacctgaggagaaccctggagtccagcaggtgcagaatggacactgggaccatcagtcagaggcccacattaacaagggtgcggggtgggcccagccaggacaggggtcagggtgttgtgtccacactgggaggctgagctcaggggcagagctggtcaatcctgaggggaaatgagtggaagtggaggcagggaagtaagtcctggccgatcagagacaggaaccttccaggctgggcttccgtgaccctccctccctgtcccctgacatctcctctctcccctgcccaggcccctctacccagccccagaacagccactcccatctatgaggtgagtgtgggccatggatgttctggtcccgcaggctccaggggacccaggatctgcccccaccagcacctggctgagctcagattcaggaaaatgcagtgaaaatgagaacaggtggtggtgagcagaggagggaggggcctgggaacagggaccccctgagcacagccaggttcagccccagagaagccctgggtgggcccagagcctgggagatgccagacactgttctgagaaggctacaggggttgaggcctcttctctgtttttacaggaattgctatactctgatgcaaacatttactgccagatcgaccacaaagcagatgtggtctcttaggttcctctgggagctgctcttgtgggttgatggagcgtccccaaagctcccagccctggggacggggaaggacatggagcctgagccagagaaccagctctgagtcctgaggagacacaggcctggggacagggagggatgggagtccctgctgaatatctggagaccctgacaggttgccctgggctctgggtgggccgggacaaaggcctctcatcaccacaggaagcgggggcttgcaaggaaagtgaatgggcctgtggcccacccggggtcaccaggaaaggatctgaataaagaggacccttcctctcattggctctttttctgctcacgggaacttagcagaaactcacctgaaactccgtgtccattctctcccgggtcacacagggaaaatatctccaccttgtctcaaccacagtctctcttccctgggaggcagaaataggggttgggagtcaggctggggtgggccctacacaggaaagggcaagattcacatgagccctgcccagccagccgagcgctcagctgtcctcacactaccccagggaccaaggccatgcacagccccagcctgggtccctctgtgaatgcatgtggggtctcaggagcacagaagatggggccatctgatgtccacaaaaggtgagcaatgcgggagcaaccatgggtggtataggttgcggctgtggcccctacgcagcctccagtgtcctgacccctgctgccctcttcacccaggccctggaggcccagtctatcactgtcctccacaaatgaacttacctgtccccaaatccaggatcctgtgtgcttatacctggccactaggttctcctctgtcccagtggctactgctcaggacatctttatccctggtggggcacagagaggggctgtcagagcaaccaagattaatacagacgcataattcagtccttgagcactacccaggactctggcccctcattgctcatcagttcccactttaccccctggcatggatctcactgagcaagccaactctttacacaggagcatccaggtcagaggtgcaggactcccccatctaaagctcatgcaggctcccatggcgatgggacaacctgtctgctcctctccctggcccacagccctatctcgcctgcagctcctccacacacctgggacagcagttctcagcccttccctgagggcccctggaagggtgatgatctcatataggttcacttgaaccaggtgccaccttcccacaagtgagctggtgcctgcactaaagcacagagccacagttcccaagagtgttctgccactgccacaggtcccaagagtgttctgccactgccacaggttgttcgtcctgagatgagaggtaagaaaacaacccgcaatgggttgttttatatcgggatttgcatcaggatttagctctaaatgacccctgatcccacctgcacacagcgtcagatgagacaaggtgaggcctctttagttttctgttgaggctgtgacaaattaccacaagcttagtgacatagaaacctgaaccaaagtgcccacatggctgtgttctttctagaggctccagggaagagtgcatttcctctccttttccacctcctagaggcctcctgcaaccttggctgtgtcctctttctccatcttcaaagccagcagcacagcatcttgaaactattctgtgccctgcttccatccccacatctccacctcctcccacctccctctctcacttaaaaggaaggagccttgtggttattttggacgcacctgggataaaccacaacaacctccccatctcatgatccttcctttaatctgtaaagtgtcctttaccacgtgacatgtccacagatctggggatgaggatgtacacatctttgagaggcccttgttctgtccatcactcctctcaaggccatcttctcatcatcgttcactacaaactacacatgggcacctggatgggttcatcatgactgtggcgtcagttcctgcattaacatccccagcaccctccagatcctgagagagggagacggagggctctccatgcccctagtacctctccaccttcttcttggtgacatgcttagttgctaagaataacagaaagcggaggtgactgaaagatcacaactcaccggcccttcaatagttcgtggacatcagcaccacggacagtgactcagtgaggctaatttccaggtggcagcagggagcatgcagataggagggaactgcaggaaaagctgcccattctattctatatgagaaagagtgtaagaaagaggaagctattacagggataatgctattcttctctaatccataaattgcgaaacctttgcatgtctggatatcatggtttttagcacatctgctgccactccctgcagggctgattgctgcatccaggatgtggtctcttggggggctcacagcctgctttggcctcatggtgagtctccctgcccctgacactcaggccactgtctctgcctacaacatggtgggaaccttccatgattaacgtctgattctctgtgcctgacctttgaagcacatccatcactcagcctggagcatccgctgagctcagcatcctgctcctccatccccagctgagcccttgaggagatgcttgagaggatctcctgggctcctctgtgagctcctccaggctgagccttgtgcttggtgtcagaggcctttgccatctgcttgttctttccataggcaaataatcctcctcagggacaagtggggcctgaagatctgtctgaatatctatctatctatctatctatctatctatctatctatctatctatcatctatctatatgtatgtatatatgagaatgctttattaggcaaaactgcatactatgaacatgctttaaaatgcaacaggatgagatgtgaagacataaagaacaagtgtgtagtgacacatggctatcagaacacactgaagaatccacaccgcggccgagagcagtggctcacgcctgtagtcccagcacttttggaggctgaggcaggcagatcacttgaggacaggtgttcgagaccagcctgaccaacatggtgaaaccccatctctactaaaaatacaaaaaatttagccgggcctggtggctcatgcctgtagtcctggctgttcgggaggctgaggcaggagaattgcctgaacctgggagacacaagttgcagtgagctgagatcgcaccactgcactccagcctgggagatagagtgaggctccatctaaaaacaaaacaaaacaaaaagaatccacactgcttccccgcttcactttacccagaaaaggaatgttctaggccacttcctcttcagcacacatccccagggaactaaaataggttcacagtcacccccatcttcctcattcccatcacctcttacccacagaggcatctctggtcctacagatccagccctgccttcaagaggcacaggtccaacccatccagtgtccctgctagtcacacacagcactcagggtacaatggagggcttctgtgctttggatgggaacaaaccccacctcacattcccacacctgagaagccaccagggtcctctctgtcctgtcctcacactcaatgtctgtcctgggtcacccttgtcatctctcctggaaataggcatggctcctgacaggtaggattgaggctttgtcttttcaggagtccctcccactctgagcacatgaaactgctcagctccatgcaaccctctctcaccaggggccttgttctctgggtccctgaatacctgggtccatgccatgtacattttaagaaaaatgacagtgactctcaccctgacatcctcacccaaggcacgtgtctgacaagaatcaccaggtgagatacctgtggctccacacacctgaggcttcactgcgcaggggtgtcctcatccctctcctcccacccctagggacagtaagcaccacaggctgccttggaccaccagctccccctcccagacacagcctcagatctatactgacatgctacatggagaggctctgatgaacagcaggtattaggaaatcccaccgaaccaggtgccacttgcggccccactcctcctcatatctgtgactgggacagacacacataacacacctctgttcaccgcccagcccccaaggtcaatcacagtctgcttctcccctagatccactgctccccatgtcttccgtcctcagctgcatcctgggtggcctccttgctgttcttgtaccccagaggcaggttccaacctttgtgatgttgcctgcaatgcccaaactttcccttccccttccccttcccttttcccctcccccttcccctccccttcccctccccacccctatcccttcgtcttcccttgtcttcccttcccttccctataaagccaaacatacccatccacctaccttgtggtcaaagtcatcagcctcctgctccactcagtgttctctgaccctgcatatggaggtggtggcccctcctagaacacccaccactcactgtcagccttgcgtggtaatcacagattttgcaggggttacctgtgttcaggtgtgtcacctgtggaaccagaactcttggaaggactggcagagggagctgcttaggatatctcagggctcctggcatctggtctaccacagggctattaacaacagcacttagggacaaggtggaggatggacggttaagagggtaaatatggatgatgtgtgggcaaagaataggacacaggaacacatgcagtactcaaataattatgccaagaaaggtgaggacatggagatggacattcccatatacttctgatgggactgcagtttagtccctacagcaacattgacctcatcatgtttaacgcgcacacgctctgaccactatcctacttctgaaggcctccctgtgctgtgagctctgagaaggccaagcttgcctgttctgtctctgctaaagccagagaccagccaatagcccagcacagggtacttcataaatacatgttgaaggaatgagctccaggaacagtactccacatggtagagatgtgtgtatgaggatgttcactgcagaaggtcatgtcaatgtgacaagtgacgagcagcctcaaatccagcaacaggggtgtgggtaaaagatcatagtgtagccatgcaatggaaccaatgaaaaaaccacaattagagcaaatccacatgtattaataaaggaggtgccctccatacatgctgcacctaacagaatgttgccaaataagaatgaaaaatgatgatatttgggctgtaaaaactagaagtcagctaaataagaatgcatcgaaagtatttgtgaatgcttacaattttataatgccttggcatccgttttggatggaagttggactttctcataccagaagcagggctcagtcacctttgaaatagtttccagttctccacctccttccagttcctcagtgtgattgatcagatatctgatttatacaactgcctcctggtgacctcctccctatgggacttccggatacagcccgtatgactgccccactgaccccacaccctgcctgctgcagtgaccacctctaattacctggatctcatgtctgcttgcattaaatccaccaattaaaactccctgaggacaatctgtttgaataatattctgtaccctaataaaggccttgacccatgggttccccctctgtcctccccatactgcccctgacctctgtgtgtgtgtgtgggtgtgggtgtatgtgtgtgtgtgtgtgtgtgtcctccagacagggcctgtatcccccaggacctgtaagtaataaatctttattttcatcttatgtctctcgcaatcattggcaagagctctgcatcttaaagatcgcaaatttaagaaattggtgtagtcggcacaatagagtacctcttctgtttagcacaagatatctcggagctgctgaggcttttaacatcctcgccggtgtggctgcctcactggtgaggccgttctgttcagtgcaattcagttgctccactgtgtgctgctgtgttgctgctgtagagtgctgccatgttgttctccccaaattgttaccgagtaggaacctgtaatgtgctcccaaggtggtctaccccatgagaagggggattctccatctagggcaagggctaggtgtgtttctggaatcctaatagggaaggcatccacagagggtgaactccactcctccttagagtgaggagtgacatttcccatttattttccccatggaggtgccatgtattgactttttctttcactgtcccaaggttgagccaaggtgagctatggagaccagggcaagataccatttctgttagcaaagcaaatgggtgacaacgtgtggagaagctgtggttctcctgatggatatagcagagtgccatttagtaaaatcttgtcaggaggctgcccctggttagaccggcagtgtctgtagtcactaaggtggatgcgaattttaggccctgggccatggataatccctgcagacacagccgtggcttcatgtgatggggcaatcccgggctagtggctcccttgtttctgcatttcttgctgtggttgcacaatcaacacctcaggggttgattgggtcaccttggaaagagaaacagctgcctaggaggctggtgcacatggaggccaccctcaattttattctgctaacaagttgtaagattaaaacaacagggggctttgggtaccatcaggaacttgtcaagtaaacatccaaagacagaaagaagaaaaagaaaaagacattaaccgtctagaaatacaagccattttaaagattttgcttaaaagatgcgcttgggctgggagcggtggctcacacctgtaatcccagcactttgggaggccaaggtgggtggatcgactgaggtcaggagttcaagaccagcctgaccaacatggtgaaacctcgcctctactaaaaatacaaaaaattagcagggcatggtggcaggtgcctgtaatcccagctacttgggtggagaatcgcttgaacccgggaggcagagacggcagtgagccaagatcgcaccactgtactccagtctgggcgacagagtgagacttcatctcaaaaaaaaaaaaaaaaaaaaaaaaaagacgggcttgtttcgtcgttgtggagtcatcccagagagaggctactccctagagtcactgaccacctttcctcctccatcttttcctcttatcattctagagacagaaaacaagaatctcagctttaggtggctaacctcaccccccaagaaaagaaactaccactttgattgactacaaatccaagaaaaataaaagagaaactttaaaaagtactgagcaaaccacaggtctagcaaacataatgctagccctaggttacttattcatttacaacaaacccctagatataggaggaaaaaataaaaggtaattaaatatatacacatacaatattttaatataaatatataataaatagttaaattatgtatgtataatatgtaactaaatcaaagtaaaatttcatactttgattctattggaaattcaaaattcatttattaacttatatattaaggaatttatgtaaaaaaagatttttaaaagggcaccaatttgcttttgtgtctctacaacataggatctaatttaactttacatttgctaaatacactaattgacaaatattcatggatttaatcaatactggggctcaaattgtagccacacgtgggaatcccataaatttaaacactctgtccctattatcttgagaagaaaactaaatataaaattgaaaaaaacaggtatgtctcaatttacctgtaactttgcctaaatttcccggagtcatatacccattgctgtaaaacattctctattggacataggtgctctgagacaataaataaaatagaagtgtttttggtacttagacattggcttgacaaaatgggatcccatgaaacctcagttaagatagtgaatacggcccaatgtgagttgaaatggggcctttaaggattaaaacttattacatgaaacctagtaagtaatggggtgattatccatactgcttctccatttcatagcccaattttgacagttgtcaaatctggaaaaaacaaacaaacaaacaaaaaaacccctgggaatctgttgcctcacagagacacaaagtagacatcaaaattgtatatctcagttccagttccaaaatggtggcatagaagcaagctggctttactccttcacacagaaaaccaaaaacaaatatacagcaccaaaattattaccagatatattccagaactcaaatatgaaaatgaaacagttttcagagccacagagaagtgaaaaaaactcccgacagatgacaaaagaatcagatttccccatctgtaatgtccctccctgccccattctgcctggtaccaggtgtgtggaaaattttaccccaactcatggtttctacactgggaaatgtaagatcaatgcgggcaaccagtttctgcacaatcctgggttccctgtccctgccttaacccacaagaagcattgtgagtgcccgaagggagaaatttccctgaggacagtcaaagagtggggaggcaggactaccatctccttccctggaaactctgctgtgtaactcagccaagggagacatgaaatcagactggtgtttcagcagctccatgttgtagtaggtttgtttcacaggtatcctgggcatggacatctagccagctttcccacactgccaggatatcccctttgggacctccctcagttaggaagggcacactctgatcatttactagggccaaggtaaaccctaaaggtaacttagagatgaaaaggaggtagtgacctagcagtaaagaactctaagaaaatctatccaataaaaatcaaaacaagccagacaaagactaaaataaataatgaatccttcaatgtaaagacctggacttacatccacaagaaacagtaagcaggtaaccatgatctccccacatggacaaagtgaggaacaagtgactgatcctgatgagatggtgatgtgtgagctctctaatcaagaattcaaaactgcagttttaaggaaactcaatgatcttcaagaaaacatggaaaagcagttcagaaatttatcagagaaatttaacgaagggattgaaataatttaaagaaaacaaacaggaatcttggaattgagaaatatatttgctgaacaggaaaatttattagagtctctcaacagcagaatggatcagaggaaagaatcaacccaaataagactcccccaaggcataaaataatcgaattctcaaaagtcaagggcaaagagaagattttaaaacagaaagagaaaagaagcaaatggcataaagaagctccaattctgtggcaacagattttcagtggaaatcatacagaccaggagggagtgacatgacattctcaaaatgctgaaaaaatattgacatttgagaatactttatccagtgaagttatccttcaatataaaggagagagaaagtttcctagacaaacaaaagctgagataattcacaccatcagactagtcttcctgtaaatactaaagggtaaatactaaatacttcaatgtgaaagtaaaaaaaaaaacactaacatgcaaaacaaccacaacaacaataacaacatttgaaggtataaaatccactggtgaaattaagtacgtagacaaacccagaatactcaaatagtaattgtggaaagtaatccaatcataactctagcatgagtctcaaaatataaatctatcaaaaacaataatacattttaggaggccaaggttggcagattccttgaggtcaagagttcaagaccagcctggtcaaaatggtgaaaccccatctctaccaaaaaatacaaaaatttgcagggtatggtagcacatgcctgtcgtttcagctatttgggaggctgaggcaggagaattgcttgaacccaggaggtggaggttgcagtgagctgagattgcactactgcactccagcctgggtgacagagggagactctgtcttaaaaaaaaatagctacctgtttggagaaaggtaatataaaatatgtaaatagagacaaagtcaaaatttgcaaaggatgaaattaaagagtagagtttttttggggggttttctgtttctattattttatttgtgatctaagataagttgttaccttttcttctcttgaagatactttgttatatctatgtttttggaagtcttatggtaactgcaacgcaaaaaatctatgatagatccactgaaaataaaaaacaatgacttaaaacatactaccagagacaatcaaccacaaggaagacagtaaaaaatgaagaaaggaagaggggagttacaaaacaaccagaaaacaggcaacaaagtggcagtagtaagttcttacttaaaaatattgaacactgaatataaatggactctattctccaattaaaaggcatagagtggctgaatgctgcctatatgctgcctacaagaaaccacttcatgtaaaaagatacaaatagactgaaagtgaagggggtggaaaaagatatttcatgcaagtggaaaccaaaagagagcaggagtagctatactgatatgagataaactacaaatcaaagactataaaaagagacaaagaaagtcactatgtaatgataaagcgctcagttcagcaagaggagatgccaattataaatatctatgcatccaacacttgagctcccaagtctcccaagtatttaaagcaaacaatagtggatctaaaaggagagatagactgaatacaatattaattaggggactttaacaccctgctctcagcaatggccagatctttcagacagaaaatcaacaaggaaacttcaaagttaaactacacactagatcaaataggcctaactggcatttacgggacatttcactaactatctaactgttacagaattcacattattttcatcagcacatagaacattcttcagaacagaccacatcttaagtcccaaaaccagtcagaataaattcaaaaaagtttatatcacatcaagcatttgttctgaccacaatggaataaaactacaataaatgaataactttctggacacatacaacctaccaagatggaagcatgaaaaggcagaaaaacccaacaaaccaacatgaaactgtaacaaaaggaaaacccaggaccgaatgacttcactgctgaattctaccaaacatttaataagaactaaaaccaattctactcaaaatgctttaaaaaattgaagaggatggaacactttcaaactcattctacaaggtcagcattatcctgataccaaaaccagacaaggacaggacaaaaacaaacaaacaaacaaacaaacaaacaaacaaaaaaacactacaggattgcttgaggccaggagtttgagatcagcctgggcaacatagtcagaaccaatctcttaaaaaaaaaaaaaaagaaaaaaattagccaggcatggtggcatgtgcctttagtcctagctactcgggaggctgaggtgagaggaccaattgagcccaggaggttgaggccgcagtgagccatgtttgtgtcactgtactccagcctggggaacagagcaagatgctctctcaaaaacaaaaagcaagctgggtgtggtggctcctgcctgtaatcacagcactttggaaggctgaggtgggagaactgcttaagcccaggagttcaagaccagtctggacaacatagggggactccatctctcaaaaacaaccaaccaaaacaaagccaaaaaagaacataggccaacatcactaacaaacatagatgtaaaagtcctcaataaaatattaacaaaccatgtttagaaacacatcaaaagagatcattcactatgattaagtgagattcatcccagggatgccagtatggctcaacatatgcaaatcaataaatgtgatccatcacattaaagagaaccaagaacaaaaaccatataatcactccagcaagtgcagaaaaggcatttaataaaagaatgggttgagggagtggagcccatagtcagagcagcagtggtctgggattttggaagtagaaagaagggcagcaccactggccaggaccaccagggaacacccccataggccctgggtgttgtgctccagggagggttccctctggagttattaatcttggtgtccactttgcccagctgcccctcacagggtcagggaggatgaagggaaagcttccttctaatgaaagttcagggactcacagttcctagagcctgtagggagaggaagatcttcgaggaagagcacctgggcattggggcgtttgagaggaagatctatgccaggtccaagtggacaacctgtggactctctctccagggacatacgggtatctgggaatctcctgtagcttaaagaggtaaagacctctccctttagcctgaggactggaggatgctggttcaggtgaatgagtcctgcaggggctggtacaggcctggagggtggtggtgtccagggccttgggttcacccttagcatgattcaggccgggcggtgtttcacatgagcaagagggcctgggttcattgcttcaggacaatggtgaaatctcatggtggaagaaatcttgtccttgccagtgcccagctttcatttggtcttggcccagagtgtcctccctagagaagactcttgtcccttcttcacactgcccttcagggatatgccagccttatgggataagatggggtggagactgtagatgtgggtgggaatctctccacagagtgctccttctctcagcggttgcaccttgtctcagggcttcagcttgaaatctgggatctccaagcccttccctccccagtcctggccaggaccacatgggcagatgcattgtgtgaagtgcatttcatttggggtgtcctctctgcatggcaccctcccgttgattctctttgcgcatgtcagagtgcaggcaccatccacacctcctgctggaggagggacggagctgttgactcctgagagctgatcatgtgttcccaccctcacacacaatcatggtccatcctctgagggacatgtgttgccaccactgtggagatggtgcaactgacagtaacaaacagtaaaatctggtactgaatgggaccttaagccaacaatgacaatgtcattccaaggtgtttcatttttattgattcaatgcaagtcacctgatttcattgactattcacaatagctcgataaagtaaatgcatcatcaccaccactttaaagaggaaaaaggtgcttgggcagtttgtgactactgtggtggctgctgcattgctctctggtaaagccaagtaggtggtgggtgcggcctctgggctgggatgatccaccctcctggtggtggcaggggagccaagctggagccatggcctgtgcagtggtagcagctgaactgaccgctgctgcaggatttgcaagctgttacattttgcgaagccatgaagcacataaaacctcaagtagaacaagtgtttcaaagtctaccaaaatctgccttcagagattattactacagaggtggatatgaacccaaaatgacaaaacgggaagcagcattaatactagataatgaatgaacactagtaatagtagggtaagccctactgccaataaagaaaaaaataagagatgctcattaacatgttatgctcttaaatcacgcagacaaaagagggtctccttatatagtagccacaatcaatgaagctaaagatttactgcaagatcaagctaaaaacagtaggtgtataatgaatttttaacttcatattagtttatgtatatgaatatcaagtttttataataaaatgcctccaaacaaagaatatttgatttagggtttaataacttctaagaggggactcagatgtttcctgtttcacagtcagtctgagagggtcatttttcctggagctgacctgggtggaggcctcacactgatactccccagcatcctctctcctgatggggtttatgctgagcatacagtggccctgggacagctccattctctccatgagtcacagacgctggtcatggaagatccactggataaggttccagagtcatctgtggggcaggtcaggatcacaacatccttttcttctgtgactctggtgttgctgactcagatggggtcggagccactgaccctgtggacaatcagtggaggtgctcaactgaaagtgggctgagggcacgtcttctcctccatccctgggtccttaaggtaactgtggaccccagaccaactgacacaggagctagaaagaaattatttaggaagttagtgagggtaagagcgtccttggcaaggtttcccctttaacaaaaagcagcccaagataattccttttctaacaaagagcagcctgaaaaattgagctacagatgtagatgagcaagatggaagcttgcacaggtgaattccagtaggtgtgccaatagaaaagggctgcctggaagccaggtatgttcaacatggagactccatcctcccttttctccattaccacatgtacagtaaaaaaccaggcaacatggcaccggccaggtagacaatccatctgcatgacaaaagatcagagtggggcagccagcaaatggcacagctggtctaaacaatctttcaccccctgtataaatcagacactgcctcctgaagctcatctataaaaccttctgcatttcactatggaagtggcaacccattttccccaggacccctctctctgtgcagagagctcttctctttctttcccctatgaaacttccactcttaacttcactctgggtgcctgcatcctagttttccatggccatgggacaatgaacctcgagtattaccccagatgaatgatgctgtttcacaatcactggttcagctcccttcttcttagggtttcacagctcggtggggagaataccacgcctcagtggtctggggagtgaggaacaaatgaagaattaatcagattttacttagaacgctatcacctgcctcaaccatcagatccatgttgggaatgtccaggcctcctctcttagatctatacccacttcactggacctgaaatcctgtgtttcccgatgtgttggtgtcactcctatgagaggataaaggagagaactttgctttctctccccactcacaccctgcacaagacagggcccaatatgagacacacactcgctcagtagttctctcatgaaggagggagggagtgacctcgagtgattctgccatctgtagtctgtgtaccctggccagtggctgtatcttcatatgcctcagtttcccctcagtaaaataggacacacaatgagaactaaaaataaaattctaattccccagtgaactgaaaggatggcctcttggccaagcggatcccagagttcctgatcatgacaggatgggaggttacacctcattacagcccctccctttggaagtttagaggtgacaactgactagcattaacgctaaaatcgagatcatgagactgacagaacagactctctgtggccataagataccaaattataaactcaacctaaggtcatgcaggcaagggctaagccacactttcctacatttaaagaataagctatgttctaacacagaattttctttctctctagcggctaaagtaacactagccttcgagataagcaatattgaaatgatcgcggctcatccaccaacactggctaactgacccctgttccaacagccacaactacacttcaattggacaggagactgatttcagtaactttctcctaataagagaccactgagcatggcctggttctgctggtatacagacacggtgcactgagtaccataatgcttgtttcatcttttgatgtataagacctaatttaatacatttaaatctgaattctccaccccaaagtgaacatggggtgcatgtagcatgcatgtttgttgatcacgcatgtgcgtgtacttcctttgtgagtatccatagctccacctataacctgttgaatatgtatacctggccaactcattcagcataaatctatcttccacattcccctcccttgaagtgcctgctattggtctctgctggaggctgcatcttctaccctggggaatggccagcctgcaggctgtaaccctgtgtaagaaataacctggttgggtgcagtggctcacacctgtaatcccagtggtttgggaggttgaagtggtagaatagtttgagctcaggagccagagactagcctgggcagcatagcaagatcctgtctcttaaaaaaattttagggaggagagtgaggatcagaaaaaatacctattggctattatgcttagtacttggatcatgaaataatctgtataccaaacccctgattacatatataacaaacctgcatgcgtatctttgaacctaagataaaagtttgttttaaaaactatctgggtgcagtggtgcatgcctatagttccagctactcgagactgaggtgtgaggagtgcttgagctcgggggattgaggctgcagtgaattatggtcccacctgtgagtagccacttcactcaaacctgggagacagagcaagaaccggtctctaaaaaaaaataaaaatagaaaaataaaatgaaaaatatatgaaataaagtctcctttccaaacgtacagatctccgatttttctgccaacaatgataaatggtcagtggcttgccatgttgtctgtgaattacttttaaaatattcacgatcacctgacctaaaggttggtaccaaggaaccgcctgaatacaccgtctctgattatttgcctccaacagagtgttccctgggcctgatctctggtggacaatgagctgctgggaacatcctctcttctctattcctcccctggggatgctgaccttcccttggagtctcctaagttccccagggcagtcggctaatgtcctagggagcttacctgtcttctccataccaagtctcatgtgaaggacgaggctttgcccttgcccagatgaggctctgggggctgagccctggctggctaccagctgcaagagccatggcccttggacagctggtaaatccttgttcccagtcagccctgcccaagatgcctcaacccagccccggcacaggcttcccagggtcacatggagtcaggatcctgggacaggggactggacaggggtttccagggctgagtttctgaacaggggcttcccaggggtcccctcactccaggatctgacatggtcctacaaggaacgtccatggggaggggacccaggagggggaactgacactgacctccccttactgagcctccccccaaccccatcagactgtccttcctctgtagcaagtgcctgcagggtctggatgcaggaaagaaattctgatctgtggaagtttgtctcccctgtgtgtgtcttgcactaaatgtccaaacccccaaatgggatgtaatgtagagggggacacaggcacagcccaggcctgaaaatcctgtgtgtgtgaagcagaactgacccccaacacccagagctcatgagacatcactgtgtacgtgaaactggccagttacttcttcattcacaagatctgtttttatgacttgtagggtgtaggatcctgtgtcattgttggtgacattctgtatcagcagacatgtattggggtatattgtctctcagcctctgtggcaggtcctggggtaattacttgagttcctagtacatatcctgtaattcccctttgtaccagttgtagccaagcctaaggcagattgtgggtgagtggaagaatctccttgccttctgcagcttcaacagtgacttgggcagtggtaggcaagttccagaaagttaaaagtgaggctaggagtggggagagagcatcagttaatactgggccctatgcattgaggtggaaagatggggccctaggtcctggacaggtctcttcatccctcagccttggagtgtgtgtgtgtgtgtgtgtgtgtgtgtgtgtgtgtgtgtgcgcgcgcgcgcgtgcgtgcgtgtcctactgggccaaggtcagcagcatgacctcccttccttcagtgcctctgaccttggcatttccctgtttggagtccttttccccaggggtctgcctggctccctccctactgccttcaggtcctgctcacattagggcatccttgggagaccccttccctgacacctctagagaccctgggtcttccctttctgacctttcgctgctgtgttccctccagggctcttgtcaatacttgacctcacattctagatacccttgcatgtctgtcttcctccctatgagagcatgagctctgtgagaacagggacttgtgtgatcttggttgcaccccagtgcctgggacaggctgcggactcctgtggatgagctcatgagtgttcccagggcccttcacaacgtgggatttattttccaatggctgaggttgttggctaagagctctgttggagttcaatcaggctggtgggaaaaatattagagatagttatagagatagacacaaatcttcttggaagaccaaaaagtttgcataactttggtaatagatctgactgaaggtggtccctttacctttagttaaacaaattaaagtagtaacaaaggaaggcagagtagtttgtctagccagcttgtttactcatgtgatcttaagactaaccattgatgtgccacaggtgcttaattgctttctacttgggaagtccacaatgtcaattaccctctaacggtgttgactcaagcctttgttaattaatcttactgaataaatatgagtctcactagctgatcaaggccatggtcacaactgtttataggactcagcagggagtctgtaagcggccctgacagactcagctggactggcaaagcaaaatatgtgtgtgtcagtgtacactattcacccgtcccccacagctggtgcccctatatgaggagtgctgccacagagctctgtttagtgtcccttgttttttttcttgagtattaccccaacttaaattgtgattattgtcatctgttttcaacattaactgctcagtgatgattcacttggaaaacattaacaatcgagattgtttcttcactaacaacctcagattatttagattttcctgttgtaatcccttcttcctgtttagtgtccaacagaagccctctgtccctctcaggtccccgttctctccaagaaaccccagccagtctctgtgctccctcctcccatccactcccagggagccctcccctcacctgtgagcagaagcgcctgccagggatgtgcactctgtgaggaggggctgagggaggccccatgggctctgctgtctgctttgtcctcctctgtggagaggagcttgggcttcagaaaataaggaggccagaaagtaaggaacaggctgagaaataatggggatgtgtcgaaaggtcacagatgccaacatctttgtcctatgcaatattatccataaaattacaggtttgagatatgcttaaattttcttctaacatgcattaaaataaacatataacttttaatagttatattaaattgtatttaatataaattaaatgctcttgtcagagctactgtgactgtcagctctgctgtccttcctctctctgtgctaagcctcctcccagggcagaagcacttcccagggccaggggtgggggcggggaaaggtaagtggcaatgaggatctgcacaggtagcctttccgcctcctcccctctcagtcctgcctccttgtcttcttttcctctttttctccaatctacatttcagttccttagaccacgctgtgagaagcaaggcttattgggacccccatcccttaacaggatgacctgtgctccccataagtgacctctgctgtgtctagggattggctctgtcagcacctcacagagagtccctggggcccccaaactcagtgttattttctctatgacacagaaacccctctgggtatgcaaggttttcctcatgttttctaatgtctgggaaggttggatttactcccagcagggaggtcacagagatgtccagggagtggggtcctagaaatggacaaatctagagctaaagcccaggtctacgattttcagttgtttttttctgcagtgctatgtgaccctaatttcctaggagtaactaaaatgcaaacctcagacatttgtagacattttatgatttttctctacagcttgtaccactgttattattatttgctttatgctttttcctaaataaatttactttacaaaacatccttgtcctagtagggtgcaggggctcacgtctgtgatctcagctgcttgagaggttgaggtgggtggattgcttgaggacgggaatttgagacaaaacatctttgtcctatgcaatattatccataaaattacaggtttgagatatgcttaaattttcttctaacatgtattaaaataaacatataacttttaatcatcatattaaattgtatttaatataaatttatatacaatacatttttatataataaattatatatataaatgtatatataatagtttttcttttttgagatggagtctggctctgtctcccaggctggagtgcagtggcacgatctcagctcactgcagcctccgccttctgggttcaaacgattctcctacctcagcctcccgagtagctgggattacaggcgcctgccgccacgcccagctaatttttgtacttttttagtagagatggggtttcgccatgttggccaggctggtctcaaacacctgacttcaggtgatatgccgcctcggcctcccaaagtgctgggattacaggcatgagccaccatgcctggcctatatattttatataattatataaagttttctataataaattttatataataatatataaaatggatatttatttaagataaagttattagttttatatatttacatatatttaggaataaatgtgttactgtgggagcccagtgcccaggcaggtagtcagtacatgatggttgtcattagggttaatactttggaattctggattttttcccaagagagtgtctacgctggaatattgggcttgtggctttctgctgatgtgcatgtgtgaagaagctacttccacttattaggacttgtgtatctgtctcgcagtttcactacctattttctcgtgatgttggtcaagtcgcctaacttttctgtgcctcatttacctaatttgtagaatatgggtaacagtacacaagtgtgagtgtgtatttcccaggactgaccactagagggcgtgaaggcaccggcacttactattacagcaatgggtgtagtagtgctcatggtcgtaaacatcattctcccatgaaaggaaccagggcttcctgggagaaataactgattccagggctggggccggaaagcacaagcggagcctggagcatctcgtgaggccagaaagtaaggagccggctgaaaaataatggagatctgtcgaaaggtcacagatgccaaccagaaggagctttgaatgaccaattttgagacaaaatgagcactataagaaataatgatagtaataaattccaacccataaatacccatgagttcctactaatataaataaataattgaatacataaatatataaggatgaagaaacagctttttcttacagcagaattccaattaatgaatgtagaaggaatgatcaaatagaaaatcactatttggctaacagcacagtcaattgtttgtaggcaagaattatcaatggactttaaatatgaatgggtaaaagtatgatgatgctacaactagtgagtaccaagggggaaaaaaaagtacgttgagaagaaacaggctacttccatattcccaaagtatcacttcaggagctacttattgattataatgggacaaatagtaacttacagtagagaaacctggcaacagagtctctccgaggtacaaaggctctcttcaggaaggaggtaaggggaaggaagaagaaaacactgtcctgcctcaattatttgctttccccattctcaagtgtacttcatagacattcaaagatatgtgttgatagtgtccacgatccacatggctctattatagtcatttattcacacatacattcagtgaggctttgagtgcctaatgtgtgcctgatatttgctagatggtggatgctgagaagatcaggtgtgctgctgtctctagggtgactgaatccacctgccccactttacagatgtggaaattaaagtgaaaaggatttataggattagttcactgtcacaaggtcactagccttaaagttacaggagtaaagcaagtttcctgacttgctagattttctgctgcaggtgctgacaatggtgagctccaataggagagaggacactcagagtgaagtgggagccctgaacaccctggattagccaagaggacatgccgggtccagctgtgaccgcacaaaggaccattggggatatttgtattctctttttcacttagagcttgaaatgaggaaaactaagtgcagaaaaccaagagtggaagatttttcacaaagcactggtaacatgcatcagaaaaccctgtgctgatgtctgtcacggtgtttctcactgaacggtaatagtctggctttgagtgtgttccctctacagcctggagttctgcgaggcagggaccaggtgtgattcatctttgtctctccagtgacagtacacagcaggctctgataaatatttcttacaaaataaaatggaataaaaagtagacatctgcacaggtgtgggatgactgagcagcagcagaagcaggaaaagtcagcgtccccagatcagctgatgtggtgttcggattctagataggggtgaggtgccaggatggggatgggggtcctgtggctctgctgccctgggggacacccctaggtttcacagtgcctgctgtggttgctgcactttgcttccccatgggaaagtgatcagagggtgtggggcttcaggtgaccccatgtgggaaatggccaagggaaggtggggtgggcggcacatggttttttttaaccaatatttgaaggtaggttgtatgaaaaggtgttaggcttatttcagcttatggggagtaggacagggattggtgagtgtgtatcaggtatattttggctcaggatggaaaagaactgtcacagtaacataaggtcttttgggaaattacatgtttactggcagagttcaggccagggctgggtgtctgaaaatacctgtcagggtcacttttatggttacaagggcagagcttggcttggaaccaggtttcttactaataccacatattaagtattataaaaactgtcctttgcaataggacattgctctatgatgcaggttgaggtccctctgtttaagtaattgtgggtggctgtgattctctcatctagtctgcgacttggacttcacctccatctgcagtccctctcctttgctgttgacactggtcagagttaagcgcatttactgacgatggtcacagggtggcagcactgcctctctggtattttctaaaacctcttcctggaactgagccagtctaagaggatgtcatgactaagaaaagggcactaatgaggtgaacagataattttttttttcttgtttctcctgtgaagtaacagagtggaggtgagcatggaataattgccttttagaaatggaagacaatggagagaagtgtttcgcaaaccttaatgtgttcacagatcccacacagatctttttattcaatacagattctgatttttctggtgaggcctgagattgtgcatgtctaaggagcttttggatgatgccattgctgctggttggcggaccacactttgagtagcaaggctcgaagatcatttagaggttaattctcactgcatctaatttatggatgaaaacaaaccaaggtccagagagagcatatacagcttgcctaacaaagccattccctaagtgcctgacttcttgcatttaaacccagggcttcagcctttgtccagttctcactccacacatcacacggtttgttcactgttgtgaacgacagttgtggcagcatctctttagtttaggaatccagagccccaatttcactaccctctttggtcttggctcatgctgtgacttcgaatagttttgcccttacttaaaatcttcagtggctcttttgtaatcacaagatcaagttcgaatatctctgtctagtgttcatggctttataacatatggtatctctttagtaaccttacctaacttccctgttttaaaattgtctcttgctgccatagccctccttgctccttcctgctccctaacaaactgtgttcacttctctctcagtggtagtgatgatggcatggcctctgatgttagactcatgtaacttctaatcccagatccaccaccaacattggcaagttgattcatctttctgaggataagcatcctcctctgaaataaacttagatggcggttgagaggggtaaataaaataacacacaaacccactctcatccctgagaccctcttcaaaactagcatataaaaatagctatttgaagaggttcagtgaaattcaaggtaacacagagaaggaattcagaatcctatcagataaatttaatagactgaaataatttttaaaaatcaggcagaaattctgtagctgaaaaattcaattgacaaaccgaagaatgcactaaatctttcaacagcagaattgatcaagcagaagaaagaatttgtgagcttgaagagataatatatgaaaactcagagtcagagagacaaaagaaaaaagaattaaaagaataatgcatgcctacaaggtttgattattaagctactcaaagagatacaagagaagggtgaaaaccaacataaagaaatgtaaaaaacaatcagaatataaatgaaaaattttctaaaatgctagctagtttttttttgagacaggctcttactctcatcacccatgctggagtgaagtggcacagtcatggctcactgcaggctcaacttcctgggctcagatgattctcccacattagccttccaagtagctaggactaaaggcgtgtgccaccaggccaggctaattttttgtatttttagtagagatggggttttgccatcttacccagggctggtcttgaactcctgggctcaagtgatccaggagattcactgccaaaaaggatataaccaagtcatatagtcataggttatctaaagtcaatgtgaaggcaagaattctaagagcagtgagacaaaagcatcaattaacttataaaggaaaacctatcagtctaacaccagatttctcatcagaaaccttacaaaccagaaggtattggggtcctaatcttttggcttcttaaacagaatagctctcagccaagaatcttgtgtagagtgaaattatatttcaaaatgaaagagagaaatacagtctttttcaggcaagcaaatgcttcaggatttgtcacggctagaccatcctacatggaatgttaaagggacttctaaatcacaaaacaaaagatttaaatagaacagaatagaacctcttgaaaccaaaaaattcaaatggcctataaaacaataacacaataagaaaacaaagtagataacgatcaacatgatgactggaacaaatattaacattgaatgtaaatgacctaacactccacttaaaagacacagattggcaagataaataaaaaatcacaaaccaaatatcagctgtcttcaagagactcacttaacatgtaaggattcttatagactcaaggtaaagagatgataaaagatattccatgcaaatggaaaccataagtgagaaggaatagctatccttatatcatataaaacagactttaagcaacaacagtaagaaaaagacaaataaggcaactatataatgataaaaggatcaatcaaacaagaagatattacaatcctaaatatatatgcacctaactttggagctcccacattcataaaacggttatgatgagacctaagaaaaaagatcaacacaaaacagtgagggtgtcctgggttttctttttattggacagcagtgtactagcctatcactttcccagtcaggggatttttggtctccccattcccctaccatgggttcatgccaaagtccatattttttattagtgtttggaattggattttttttttttgaggtggagtctcgctctgttgcctaggctggagtgtagtggcacgatctcggctcactaacctctgcctcctgggttcaagcaattcttctgcctcagcctcctgagtacctgggactacaggtgcatgccaccacacccagctaatttttgtatttttagtagaaacgagatttcaccatattgtccaggcttgtatagaactcctgacctcatgtgacagggaaacaggcactcagtgaacttcatgcgattgaggagttaatgataatgagagaagggctgtgaggggacagcactggggacaccagagcctgtgacgggctgagttgctgtgccttgggagatgcccttttgactgagccctgggaaggagggggtgtgggggcaggagctgcctgcagagggagtggcctcaggtgggcggccacctggctgcagggaagaggtgacagagttcgtgtgcagagcttggagggtgaggaggaggtgggttgaggtgaccttggtgagggtgaaccatggggggctgtgggccctgctgagggaggccagccagccctggacctacagggtggtttggtcttttttgtcccattcccagcatccactgagtggtgaaactctgcaggccagggaccatcccactggccagaaggagcgcacagtaggtgcccactcagtgcatgttgggctggacagaacctcactctgccccctgcccccagctttgggagctgcagcaaggtccctccccctagggatctccatgcctctgtctctgaggggtgagatggggagacttcaaagggccatctcagagtgtgggggatagagacgcagaagtgtgggggatagagggaggcctgggctctagacccaaaggaccttacacacctcctgagtcttttcaaatggtttcttctgttactttaaaaatgatgtaagtcatcatatttattgtaaatcccaggaatctaatcatgcgtaaaataaggtgtcttatccttgaccccaccccttccccaattaaatttccaggatgttaccactgtttgcagttggtgtgaatctctctttaataatactctgtttatctcacttgtcgttttacgccaaaatacccattgaattatattattgctgaagaccattcttttttttttttttttttttgagatggattcttgctctgttgcccaggctggagtgcaatggtgtgatctcggctcactgcaacctctgcctcctgggttcaagtgattctcctgcctcagcctcctgagtttctgggattacaggtgcacaccaccacacctggctaatttttgtatttttagtaaagacagggtttcaccatgttggtcaggctggtctcgaactcctgacctcatgatccaccctccttggcctcccaaaatgctgggattacaggcatgagccaccacacctgcccagaccattctgttctactgaatcatgtgtggtgggcacctcttatatcaatacatatggattttatcttgtgtttgttattggctcccctttttctcattgcatggctacactcaatgctttgtccacacccctgttcctgggttggaatcttgtgacagaaaatgaagtaacaaaggctaaagctttctaaagtggagtcaggagattgcaagacaattgcactttcaccagcaagagctcaaaccacagaatgttccaatagatttggataaacagctgaagtcagtattcaccagccttcaacatctcaactaggagaaccctaaaattaactaagcacatagaatggaatggacttgtgatttaggattccttctcagccaatgagctgcttctgaaaacaactttttgtggaaattacctgtaaagaaaaccctctcctgtgcttgtcttacagaacactagtcagggctgccctgattcagtggacccgaattgctattatttgtttcctaaacatatggtattttctgtgaccttcatctcaatcttttttttaagttactgggctgtttcccagttttcataatgacgagacattctgcagtgtttcatacacatgtcttttccccatgtggagtattgatccaggagctcattcagtcaacgcatgtttatgaagcatcctgtgccaggctgtgggctggtcactgtcttcagcagagagaggacaggcacagtcttgccttcacagagctcacagctcagggaggctcttagaagtgggatactggtcggagcatgtgcacattaaacatgatgaggtcaaggttgctatagggactaaaccacagtcccaccaagatcgcattgagttcctgtggtagaccagaggtcagggcccctaagatgtcctgagcagctccctctgctcagaagttttggttccacaggtgacacacctgagcacaggtgacccctgcagaacctgtgattaccacccaaagccaagagtgagtggtgggtgttctaggaggaaccgtcacctccatgggcagggttggggaagactgaggggagcaggtggctgatgactttggccagaaggtagggggatgggcaggtgtgcgctcatagggaagggaagagaagggagggcattgcaggcaacaacacaaaggttggaacctgccttcatggactgagaaaagcagggagtccacccaggctgcagctggggagggaagacatggggagcagtgggtctaggggagaagcagactgcgattgaccttggggactgggcagtgagcagaggtgtgttatgtgtgtctgtccccatcatagatatgaggaggggtgaggccgcgggtggcacctgggtcggtgggatttcatagtgcctgctgttccctagagcctctctgtatagagggtcagaatagatctgaggctgtggtctgggggaaggggctggtggtgcttaccatctctaggggtgggaggagagggatgaggatgcccctgagcagtgaagcctcaaggtgtgtggagccacagttgtctctcattagacatgtgttttgcgtgaggatgccagggcctggtggttattactgttgtcaagtttgcatgacaaggacccaggtatccagggatccagagcacagggcccctggtgaggggatgaggctcagatggggctgaccaggttcatgtggtcagagtgggagggactgatggagagacagagcctcaacccctcctgtcaggagctgtggctatgtccaggagagatgacaaggatgacccaggacattgagtgagtcattgagacattgaaggtgaggacagggcagagaggaccctggtgactgctgaaatgtaggatgtgaggagggctctgacccatgcaagttacaggacctccccacccccgagcccacagatgacccttaaattgggcatcctgagtgctgtgtgtgcccagcagggacactggataggctggacctgagtctctgtaagggcagcgctggtctgtaggaccagagtcttctctgtgggtgtgacgtgggcaggaattagcaagatgggggtgacaaggcttggcttggaggatctggtacagaagcccatgggcttggtcagctcagcttctcaggggctcagctggggctggaggagcaggatgctgtgctcagggcatgctccaggcagcgtgatgtgtgtggttccagggtcaggcacgggggtcaaaaattaaccatgaaaagttcccaccttctgtaggcagagaaaatggcctgattgtcagggtcagggagacttaccatgtggccaaagcaggctctcagcctcccagagaccacaccctgggtgcagcactcagctctgcagggtatggcaatagatgtgccaagaaccccaacatccagatgcatgcaaaaattttgcgatatataaaatagagcagatcaagtttccctgcaataacgttgttcctggttgtgtctttttcttgtaaactagacatggacatctttccagcagtctgttctcatctgccaccttcctgctgcagcacctcagaatgaacattcctgagacactgtccgtggtgctgacgaccaagagctatggaacagagtgtgatgtagaatcttctagttacctctgctctcctttcacttttaacaacagagcatcattaacaatgagaaggtggagaggtgttcaggatcttgaagtgacttctgtcttgctctcccataaccctgaagctgctgtagacattattgcagaaactgacaccacagtcaggatggccttgtccaggagcccatgtgcagtttgtagtgagcaaggatgagaaaatggtcttgaaaggggtgatggacagaacaggggcttttcaaaaatgtcacatcatcacccccagcatccgtgaatctgtcacatggtaagagaccttacagattaaatgaaggattatgagtttggaagattattgtagtttatccagatgggtccaacataatcacagaatcccttccttacaaatgagagagggaggtgggagagtcagagaaggaggaggagatgtggggatagatgcagaagacagagcggtgtcaagatgctgcactgctggctttgaagatggagaaagaggacacagccaaggatgcaggaggcctctaggaggtggaaaaggagaggaaacgcactctgccctggagcctccagaaagaacgcagccatgtgggcaccttggttcaagtttctgtgtcacttagcttgtgggaatttgtcacagcctcaacaggaacctacagaggagtcaccttgtgtgcaggtgggatccagggtcatttacagctaaatcctgatgtaaatattgcaggttgcttttcctacttcctatctcatggccaacaaccctggacaatggcagaacacccttggaaaccacggctctgtgctttagtggagggaccagcttgtttgtgggaaggtagcacctggtccaagtgaacctacatgagatcgttactctccccagggccctcagggaagggctgagaacagctggcccaggtgtgtggaggagctgcaggtgaggcagggctggaggggcctgtgggtccaggtagaggggcagacaggttgtcccatcgccatgggagcctgcacgagctttaggttggggaaccctgctcctctgacctggacgctcctgtgtggagaggaggcttgctcagtgagatccacgccagggggtaaattgggaactgatgggaaatgaggggctagagtcctgggtagtgcctgggaggaccttgctcaaggactgaattcttggtctgttcccaccttggttactctgacaacccctctctgtgtcccacggggataaagatctcctgagcagtggccattgggacagaggagaacctggtggccagagctaagcatccaggatcctggatttggggacaggcaagctcattgctgggggacagtgatagatacggcctccagggcctgggtgaagagagcaggagggctcaggacactggaggctgtgtggaggtcacacccacgatctgtaccacccatggatgctcctgcattgctcacctttgtgtggacatcagatggccccaacttttgcactcctgagacatctcatgcattcacagagggacccaggctggggctgtgcatggccttggtctctagggtagtgtgaggacagctgagcactcagctggctgggcaggactcctgcgaatcctgccctttcctgtgtagggtccaccccagcctgactcctaaccccctactcctgtctttccagggaagagagactggggttgagataaggtggagatatttttcctgtgtgacccaggagagaatggacatggagtttcaggtgagtttctgctaagttcccatgagcagaaaaagagccaatgagaggaagtttcccctttattcagatcctttccaggtgaccccgggtgggccataggcccattcactttccctgcaagcccccgcttcctgtggtgatgggaagccttcgccttggcccacccagagcccggggcagtctgttgaggtctctatatattcagcagggacccccatcccttcctgtccccaggcctgtgtctcctcaggactcagagctggttctctggctcaggctccatgtccttccccatccccagggctgggggcttcagggacgctccatcaacccacaggagcagctcccagaggaacctaagaagccacatctgctttgtggtcgatccagcagtaaatgtttgtgtcagagtgtagcaattccagtaaaaacagagaagaggtcttgacccctgaggccttctcagaacagggtctggcatctctctctgggcccacccagggctactctgggactgaacctggctgtgctcagggggttcctgctcccaggcccctccctcctctgctcaccacctcctgttattttcactgcagtttcctgaacttcagctcagccagatgccagtggggacagatcctgggtctccctggggcccaagggaccagaatatctgtggcccccactcacctcatagatgagagcagctgccctggtgctgggtaggggaatctgggcaggggagagaggggtgtcaggggacagggaaggattcctgctgtgtaggaattccagggctctcctcaggtgatggagggtcccagggtggggttagcacagggagtggatgatcctggccctgaacagaggcccagctcatggccagggcaggtctaaccttatccaagtcattctgggtagggtgggtttgtgctggggattgacagtccccctgccctgagcctgcacagctggggccccagtggaaatgggattgggaacggacagtcttacctaggagatggagctgtcagagggtccatggcctggggacagagacaaaagtgagcacgagagtgttaggatagctgggcccctcctgcaagagtgtgtgggggtcctcagttcttagagaattggggagagggagcctttctcaggttattttaggggtcaagtaagcaagtgaggttgaggaagtgacccatgacccagagcccggaggttagggctgacccggccagttggggtttcctgtgtgatgttttatgggatcctctttgcagccccagggatagggtcagaggcccctgggtgtaactggcaggagtggacaacttggggctggcttagtagttcccagccacacccagactgaagggacactcaccgggggtggaggctgggggctgctgctccctgaagtcactctgatcgctggccctaggaaaggtcagggttatttgtgaaggtgcaaggttaaaagtcacaaattggagttaaaataggggaccaggaaaggagcctatttccaagaggggtatggagacctcctttctttatggagttctgtggtaggaggggcccaggtgaggggagttgaggaaaggccttacaaagccacatctgtcctggccagaggggaaggactctcaggcagatgctgggccaggagaacattgatccagtgacacaggaaagggactgaggacccagggaaggaatcagaccaccaggggttgcctgagaggaagggtcaaggcaccagggggaaagcagggccaggcacatgtgcaggacactgaggggactgcatgcatcttggattctcctggaactcagtgtccctgctgtgaccagacactccactcagggctggagatgctgaaatgggacaatgatcttgtcttctgtctctgccctttggcaagagacataaacgacattccaggatatgccatattggggccccggttctcccttctcacagctcagtgtctgcagttaccatgtcagtcaaaggggtgctgaccccacccagcccgtccaggctgttccagtctccactatgtgataatgcccaggatcccccctcagatgccctctcactgggtggatggattcagtgaacagggggaggtaccaggtattgagcaccgctcccccctgctccaggcagctgtggctttgctgtgctaggaaactaggaccatgctcaggggcatggccttaattggactgaattcactgaggacaaagctgttgaggaagcagcccagggtcagcagctggtgaggaaggtgccatggaatgagagggaaggatccctggggagtcgggaggctggggagagcctggcactgaatacaagacagggtctccttccttctcgcctggggtcagcgtgaaggatgggagcagaatggggaaaagctgtggtacctgccagtttttcggaggagcaggaaacacacaagtgcagccaccagaagactcccaaccaggaccccgatcaggatgcctagagtgttgtcatctgctgaaagaagaaggcaaaggggatgaggtccaaatctgttccagggggaaccatgaggggccttgcagggcaggggcatggtcagggaggaaggaaatgccatggagcctgagtgtggtctgttgtgctgtcctcatagctggctcccttgctctccgtggttgcaccattttctgtgtcttaggcttgaattactgggatgcatcaactcctacattctcccacaggaagcctgcacctcatcctgctcctgtgttttttagtccctccttcctctcacatcactcctcttccccctgtttctttttttccatcccatggcagtcgtaaagggcaggcccttgctgccaactcaatgctgatgagcagggatgatgttcattgactgttttcaggggccttccacatggaaggcacagtgggaatcaatctacctgcagcttttctcaccctcccattgccttgagggagaagggtatgtgatattgtgaaatacgtatttggtgttcatcaccattgatatggttaggctctgtatccccacccaaatctcaccttgaattgtaataatccccatgtgttatgggagggaccttgtgggaggtaattgaatcatgagggtgggttttttccatcctgttcttgtgatagtgaataagtctcaggagatcagatggtttcataaagggaagcttccctacacatgtcctcttgcctgctgccatgtaagacatgcctttcaccttccatcatgattgtgagacctctccagccatgtggaattgtgaatcaattaaacctctttcttcatacattaccaagtctcaggtatgtcttcattagcagtgtgagaatggactaatacagtaaattggtaccagctagtggagtgctgctataaagatacctgaaaatgtggaagtgactttggaactgggtaacaggcagaggttggaacagtttggagggctcagaagaagacacaggaaaaaagtttgaaacttcctagagacttgttgaatggttttgattaaaacgctgatagtgatatggacaataaagtccaagctgaggtggtctcagacagagatgaggaacttcttgggaactggaacaaaggtgactcttgttatactctagaaaagagattggtggtattttgcccctgccctagagatctgcagaactttgaacttgagggaaatgatttagggcaactggtggaaaaaaaattctaagcagcaaagtgttcaagatgtgacttgggtactgttaaaaacactcagttttatgtatttacaaaggtatggtttggaattggaacttatgtttaaaagggaagcagagcataaaagtttggaaaatttgcagcctgatgatgcaatagaaaagaaaaatccattttctgaggagaaattcaagccagctgcagaaatgtgcataaacaatgaagagcaaaatgttaatccccaagacaatggcaaaaatgtctccagggcatgtcagagaccttcctggaagccccttccatcacaggactggaggcctaggaggaaaaaatgtttcctgggccaggcccagggctcccctgctgtgtgcggcctagagacttggtgccctgcatcccagccactccagccatggctaaagagggccaaggtacagctggggccatggcttcagagggtgcaagccccaaaccttggcagcttccatgtggtgttgagcctgcaggtgcacagaagtcaaggattgaggtttgggaaccttcgcctagatttcagaggatgtatgaaaatgcttggatgtccaggtgaaagtttgctgcagaagcagagccctcatggagaacctctgctagggaagtgttgaagggaaatgtggggttggaaccccgacacagagtccctactggggcactgcctaatggagctgtgagaagaagaccacaatcctccagaccccagaatggtagatccactaacagcttgcaccatgcacctagaaaagctgcagacactcaacgccagcctatgaaagcagccaggagtggggctgtaccctgcaaagccacaggggtggagcccaaggctatgggagttcagctcttgcatcagtgtgacctggatgtgagacatggatacaaaggagatcatttcagagcattaagatttggctgccctgctggattttgggcttgcatggggcctgtagcccctttgttttggccagtttctcccatttggaatgggtgtatttacccagtgcctgtacacccattatatctaggaagtaactaagcttgcttttgattttacaggcttataggtggaagggacttgccttgtctcagatgaaactttggacttggacttttgggttaatgctggaatgagttaagactttggggaactgttggaaggcatgattagttttgaaatgtgaggacatgagatttgggaggggtcgggtggaatgacatggtttggctcttcttcacccaaatatcaccttgaattttaataatccccacgtgttgggggaaggacccagtgggaggtaactgaatcatgggggtggattcttcccatgctgttctcatgatagtgaataagtctcacaagatctgatggttttagaaaggggagttcctctacacatgccctcttgcctgccgccatgtaagacatgccttttgccttctgccatgatttcaaggcctccccagctatgtggaactgtaagtcaattaaacctcatttttaaaaaaattacccagtctcaggtatgtctttatcagcagccaagaccagctcggtcgcggagatcctaacccagcagtgctagaggaattaaagacacacatagaaatatagaggtgtgaagtgggaaatcagggttctcacaggcttcagagctgagagccccaaacagagatttacccacatatttaataacagcaaaccagtcattagcattgtttctatagatattaaattaactaaaagtatcccttatgggaaaccaagggatgggccgaattaaaggaataggttgggctagttaactgcaacaggaacacgcccttaagatgcagattgctcatgctattgtttgtggcttaagaacgcctttaagcggttttccaccctgggtgggacaggtattccttgccctcattcctgtaaacccataaccttccagcttgggcattagggccattatgaacatgttacagtgctgcagagattttgtttatgaccagttttggggccagtttatggccagattttggggggcttgctcccaacagactaatacacccattttctggtatgtgactctaaagtccttagaatcttcaaagtgatgtctttttcaagctaataattgactgatgactggcagcccctaggcaacttcagaatgaggctggtcactgacccaggtaggattagagggttgggactttcagcctcacccctaatccctggggagggacctggagtttgaattaatcaccaatgaccaatgaatcaattaatggccaatgattgaatcaattaatggccaatgattaaatcaatcatatctatgtcatgaaccccaaaaggactgggtttgaagagctgaacccatggaagtttctggagtgtggtgcatctggggagggcatggaagctccacaccccttcccacatgccatgctctgtgcatctcttcatctgcatcctttgtaaagtcctttattacaaaccggtaagcctaagtatgtgtttccctgagtcctgagagctgtttgagcaaactaatccaacccaaacagggagtcatggaaacctcaatgtgaagccagtcataagaagctctggaggcccagacttgtgactggtgggaaggtggtggcaattttgtgggactgagccctctgctgatatgtccaggtagatagtgtcaggatggaattggaggacacctagctgatgtacggtgcagaactgattggctgctgggtgtgtgggagaaacccccccgcatcacatttggtcacagaagtgtgtctgtgttgatgattgttattgtggagtgagagcagaggaaaaacacagtttgagtttttccaaacagggtggaatcccatctgccaatttagaatctgaaacttatagtttcagtacttcaattaagattgaagtacttcaattcagtacttcaattaagattcagtacttcaattaagattcagtacttcaattaagattacagaactggtaagtgaaagtgatacaacaaaaatgtaaccaaagtctgctcaacttaacagctaataacaacaaagttcataaaaataataccagtcgatattgatagcactgattgagccctggctctgtgcatgaccttgttaagggctttaatcgcattaatctctgaataaatatcctcacaaccaccctgagatccaggtgtttgtaacaattctacagatgaggaaactgaggcccaggaggttgagtgtcttgcccaaggtcaaatacctggtacctattgtaaccaggatgataactggatgagtctaatccctgagttcttacccacattgctccccaggctctgaaggaatctcatccttctcattccgtgtatcattttacaccccccctccctcctaggaaaatatacaaggaaaggagtgagaggggccgagggtcactcacattttacagtcagcttgagggggtcgctcctgttggagctgactgggttggagacctcacactgatactccccagcgtcctcctgcctgatggggtctatggtgagcatatggttaaaccaggacagcttcatcctcttcgtgacctgcagacgctggttgttgaaaatccactggaaagaggttccagtgttatttgtgtggcaggtcaggaccacggagcccttctctgtgactgtggtgctgctggcttggatggagggctgagccactgactctgtggatagagtgaccaacagaaagtgtcttggggccatgctgcatcctcagagatctcagagtcaaatttagaacattctcctgtgaataaaggagaaagatgaaggacagggaggagcagagagaaccagagacacccatagcagcgagcagtagggactacagtgacctcagagaccccagggaccaggaggacccagctgcctcagaccaggaccagggagccctgaaaaccctcccacagatgagcggccccagagtcacatgagatgcaatacctggggtggctttaggagcaggcagtcagagaaatggaacatgggtctcagcccctaagggacaaggaagaggtgtggccagctcctcctaggatcctacatccaggacccagtctgtaaagaggttatgattattcctttcttttttcattaattccctccctccttcatcagagaactactgagtgtgtgtctcagttgggccttgtgcaggtacagggtgtagtgggaagagaaagctgagtcctttccttcatcctcccatgggagtgacatcaacaaatcaagaaattcatgatttcacgtccagtgagggaagaaatgtggatctgatgggagaggcttggacaatcctggcattgagtctgatagttgagacaggtgatttcgttctaagtaaaaactgactaattctccatttgcccgtcattcctcagaccagaatctccctctctgagctgaggatgcccaagaagaaaggagctgaaccaacatctggtcctggggtccacagatgccccacggtggtggccacgaccagattctgggctgcagacacacggtggtgtgacgttgagcactgacagcctgtgtgatgctgatgcaatttctctttaataaaatggggtaaatgtcaatggtccctggcttgccatcctctctgtaaattaacattaaaatatttacaattacctgacctaaagcttggcacagaatagctccaaataaacatcatctattattattttactccaaaaaaaaaaaaaaaagagttctctgggcctgattcctggtggagaaggagcggtccagagtgtcttttctctgctttccctcctcctgaggacagtgcacttcccgggacatcttttaagtttcccatccagtttaatggcctgggaagtttgtttgtctgtcctctccactctgactctcaggtgaaagatgaggctctgcccttgcccagatggggctctgggggctgagccctgcctggtgaccagctctaggaaccacggccctgggacagctggtaaatcgttgctcacaatcagccctgcccaggaagccacaacccagccctggcacaggctccccagggtcatctggagtcaggatcttgggacaggggcctggggcaggggcttgaagggctgagcttctctcagaggatcctcaggccaggccctgactgagtcctataagatctttctcaggtcatgtctatgaggaggaggccaagcggggttggactgagactgattttcccccgctgcatctcccgcatcagactatccttcttgctgtagggaatttccacggagtccggataagggaaaggaattctgatctgttatagtttgtctcccctgggtgtgtcctgcactaaatgcccaaaccccaacatgggacgtaatgcagagggggatgcaggcacagcccaggcctgacaatcctgcgtatgtgaagcagaactgacccccaacacccagaggcacggaggaatcactcaccgtatacacggagatggtgagatgcctgttcaatctgagaatttctgtatgtgacttgtagggtgtagtatcccgtgtcctctagggtgacgttctggaaatgcagatctccactgggtgatattgtctctcgaccgctgtatgcaggccctggagtcctaacgtgagtgtctattacatatgctgcgattagctggttgggctccaccgttttccctttgtaccagccatagctgtaaagattctcgggcagataaaccacagagagatgaacattctccccttcagcaacttcaaagggcgctgatgcaataaagagccaggcagtggtgggtgcgttccagaaagttaaaagtgaggctaggaaagggagagaatatcagtcaatatttgacctatgcattggcatggaaagacggggtcctgggtgcaggtctcttcacccctcagccttagagggtgtgtgtgtgtgtgtgtgtcctactgggtcaaagtcagcagcatgaccctcattccttcagtacctctgaccttggcatttccttgtgtgaaccctctttcccaggggtctgcatggttccctccccactgccttcagttcctactcacacaagggaatccctgggagacttctttcgtgaagcctcctctagagaccctgggtcttccctttctgacctttcccagctctgttccctccagggctcttgtcagcacctgacctcacattctagatctctttgggtgtctgtcttcccccccatgagattgtgagctctgtgagggcatggacttgagtgatgttagttgcaccccagtgcctgggacaggctgcagactcctgtggatgagttcatgagcgttcccagggccttccatatcctggggtttatttgctaatgtctgaggttggcagatgaagacagagtttcatgccctggtggtgtttttatttaaattgtcactgtgatatagttttactatcattttcaaaatgtagtggccactgacaatgaacttgaaaacatggaccaactgagattgttttgccccttggcaattccagttcacttagattttttggttctccttagacgctctctcccctgagtctctaacaaaagccctctgtctcctctcagagccccatcctccccaggagaccccagccagtctctgtgctccctcctcccacccactcccagggagtcctcccctcacctgtgagcaagagcccctgccaggggatgcattctctgtggggacaagctgaggggggccccatggtctctgctgcctgctctgtcctcctctgtggagaggagcttgggctccaggaacgctctagacagggttactgtgactgttgtctctgctgtccttccttcctctatgctgagcttcctctcaggcaggagcacttcccgtttatgggcaagggcggggctctgcctacaatgtctctctgtcccctcccctctcagtcctgcctcccttgtccctcctttctccttcctttttgcctatatttggttccctaggcaaaactttgagaagcaacgctgatggggtcctcataacaggacgacccactctccccagtactgacctctgctgtgttctggccttggttctgtcacagccggtagattatttccctttgtgacacacaaaaccagctgggccctgggtctcctcatgctctccagtgctccaggaaggcagaatgatgcccagcaggaaagtgacagaggtggctctgggggctagaaaggggctcactgggtgatggctgggaaggacccacccgctatcttcagtgtcaccagcctggcctctgacccagggacagagacccaggcctggaggtctcgggaggatccccagctcctaggtgtggagggaggtgtcctgtgtgtcctgggaagagaggactttgatggaaggaggtgggaggctctgggttctgctgtccttggtgaaggtttcagggggaccctctccatgtctggggtctgtgcccccagcttaactctcattctctttgcaaatacatatattttgtggatctgcagttgcctgaactgtctcatgtccctaaatctttgtatccctttttacagaaggtcaggaagggtgtgtacatgagtatgaggactatctgatcagggcgagtgtttgtttcccaaagatctctttagatatggtataatacataagataaatgtactgaattagcaattttaagtgtagaattaaatgatactaattctattcacaatgttgtacaaccatcaccataattttttaccagaaaatcttcattataccaaatggaaacttcatacttttaatcaataactccccacttccccctgccccacccactggtagcctctgatactatcaatctctgtgaatttgcctagtttacatgtctcatataataaggaattatatacgtgtattatttttttctggattatttctcttagggtaacacttttaagattcatccacgtcgtagcatatattacagcttctttcctatttatggctgagtaatatcccaatatatgtttatacctcaattttaattcattcatctcttaatggacatgtgggtggtttccacatttttgctattgtgaaaaccgctgcaatgaacttacacttggaagtatctgtttgggtttctgtgttcatttctttgggggtacatataggagtataaatatggggtcatgtggtagttctatgtttaagtttttgagaaacagccaaactgttttccagtttgctgtgctattttatattcccatcagcaatatacgagggttccattttctctacattcttgtaaacacttactatttaatattttttaaaacttatagccattctagtaggtgtgaagtgatagctcattgcagttttgattttcatttccctggtggctgatgaagttgagcattttttcatgtatttactgacaattttaatattttttagagaactatttattcaaatcatttgctgtttaaaaaaaatgggttatctttttattattcagttgtaatagttctttatatattttagatacaagtcccttatggggtacatgatttgcaaaatttttctcatattctgtgtcttctcactttcttcatggtgttctttgaagcacaaacatttttaactttgatgaagttcacttatctatttttaattttgttacttatgctcttgatgtcatattgaagaaaccattgcccaatccaagatcattaagttttactcctatatgttcttctaatggtttgataagttttgctattccatttaggtttttgaaacattttgagttaacttttgtatgggctgtgaggtaggggtctaactacactatctcgcatgtggttatccagttgttccagcacaatatgaagaggctaccattctttccccattgaggaatcttggcacccatgtcaaaaaccaatgggctgtaatggtgagggtttatttctggactcttgattctattccattgatctctatgtgcattcttgtgccagaagcacactgttttaatgattgtagtgttttagtaagttttcaaattaggaagtgagtcctccaatttttttttccagattgttttggccattctggggtgacttttaaaaaagatgtagttcaatggttctcaaagcaggagtggttcagctctccttttttggcagtctggagacctttttaggaccttaatctaagtagataaattattcccactttcttttctgagttgctatgttacagtgtatattgacacccatgaaataattgagagaccctggaagtgcttgcctacatagtgagggacaattagttccatgatcatgggcacagaagattttgttttgggaaacaattttgttggtggagttatattcatgcttactcttttatttgtcttcatagcctgcatctccttcagacttcatatctgtttattttcttgtttgtcctctggggtttgggtgttgggtgaccagtcagctggagctggaggaggtgcttagcaaggcagtgaccctggttgggaggagcagggctcagcagggtgaaagtagctgggccttgagtcaggagtggcatctggaaggcctgactgtaagggtcagaagggccagcaggtgggtgtcctaggcacaaacggtggctgctgctgtggactggaggaaggtaagaggccccgagtattccatgttcttactggctccccaactgaggattcctctcctgggctggtgctgtcctgcagcagggaggggttagacagggacggctgcacatcaggccggagtccatgtcatcctcttaggcactgtcactacagattgaggattctgttcataagccaagcctttgcacaaggaagggacccgggctctcaaggaagagcagctcctggtcagacctccatctccttctctctcattgcctgaggcctcaagcttggtctacctggcacaggggtctggatcctcctcccagggttggggtcttactgagctgggcacctgcaggtgggagaagatctggaggggccccatctgccttcaccagattgatgttgagggtccctgagtcctgcaccactatcaggtgctgagcaacttccagtgtcagtgacaaccaccccatggtggaagcagaaccacctcgtgagaaagcacctccaagcctcagtgcttgccatgtgtgggaatttgctggtttcagttgggggcatgttggtgggtggtcatgaattcagggccggattctatgctcacagtgcacatgctggatgtggtacagaccccaggcagggctcagtggggtggttttgggtgtgcacaggtatcttttctggaggagctggtggtgatttggctcccagaagttcctgagctctgcagactcaccaagcactcaatatttgagtgaacattgggcgagagagcagaaggtaagtgtcagggcatcggggttggtgcctctgggaagaggaggaacattctgggaacaaagctctcccccggcttacagggagcttcccatcgctcctgccttgaggatcagggaaactagggcctctgctcttccaggggctgcttgcaggcagtttgctctgggagggggtgacccaggagttgcctctcattttgcatttgagatttaaaaggagaagggacagtatatcttgccaggtcacaaaaattacaggcatcatattgactgaagggcactcctgtcatcactgcaatataccagaatggtcttttaaaaaaataagtgatttaggtttaccagcaactgtaatgcttgttttattcttctagttcaccgttaatgtcacttttgtagttttagcactggcaatgttgattttatgttgactctgatgattttaagctttcatttgttcacatagagatcatcttctttctgaatattaatgcattttttctctatttctactggttattcctgtacatagagtagagaatcacttttcccaaggaggtggaaagcttctgactaccaaaaaaaaaaaaaagtgtcaaaatgctttaaagtcagtaacttaaagatcaaatccaagagtgggcaacagattctgcccagggtctgaaaggtggagaggtgactggtgaggatgtttaaaagacctctcctctctactccctaaatgggggccatccagtgttcttgaggttcagagaaggcccagggctggggcagcagggcactgtcagctcccagctcccaggggccaggagtaagaccccaacactgtccagacactgattgcattcattttgggggagagtagattcttatttaaagaataatacaaaagtctacaaatatgaacataaacagaaattcctttgctacaattttccccttaataagacattccttcctaatgacatatgtgactgcattcatggctgagatgttttctaggatggtgagagcatcagagtggactatctggtgccttggggtcatgcattttcttcttccaatgtctacaggatcccccatgtcccactttgtagtgtaactcagtgtgtgtcattctggtttttgttgtatagatccttggaaagcccatgtcattcctgctgtgaggtacaggcagccaaatggcatcatctctaaacatgccttctcctggtacatcaaattatggaataaatgaaagccattttgacagatattgaagatataagtttctactcttcccacacatgcttctcccaagtgaaggattttactggtgaattgttattagagattagtgtggatcagtgactctgccaggggaaattttgccctctaggggacatttggcaaagtctggaaacattgttggttgtcagagctgggggagggagtcctgctggcattgagtgggtggatggtgctgaacaccctgcagttcacagagccccaccagtttgaccacccaaatgtcaatgctgaggagtggagagccctgctgtgccctcccgcagcttccctgaagcttcccctcacctgctcctcccatgtctccccaccacttccccacttcacccgcctccttacacctcagtcccctccacctgaactcaccccttagtccaaggccagccctgatctccgctctcctggtctccttgctccttagcaggaggcgcccactagatggcgcccttgcccttactggagctcaccgtctccctttccaccctgagacaaatgtggctgcttttactgccacaaccccagccctccacactctagatttgctcagggagcagctcctggacagacctcagggaccccagggaggagcctcactctggagattttgatggcatggtctttgaacttcactgttacccccagtcaggatccaggatgttgggagtgcatgattctgcccggtcccacttcagcaggaccccactgctgagttgtctgtggggacccgggcctctcatctccttcttgcattgcaggagagggatcttagcactgctttcacataaagtcagataatggaggagtgcaggtgagtttgggaaggtggacatgaagagaggttgtgtccctagaggtggcagcagtgagaggatgggcaggtgggaggaacacagcccatccagggttgccagccatattaggagcgacagcctttcctctaagcctccagcctttttcctgaaacattccagaactttccacttcagcacttcccactgaggctcctcaggtctgtccctgagctcccagctgagcctacctacccatctgaaatcctgagtcctgtgtcaccctcgttccccattattctgtgcagttctgtgggacgcccagctctcctgacacccccagtcttcagaatggccatcagcgctgtcgctgtggcaccagggtgactgccgcctggaggctgagtcctggcttcctgacagctgtggggcccgctctaggctcccttgtcctgatcattcatcacctccaggatgcacagcagctgggccagggggaggagcagggacaggtgtcagccaccctgtgtgtctgcaagtcaggctgggggtgtgggaggacgccaggaatgactgaactttctgatttagagggtgagagcttgcactgatggaatttgggatttaataggaaaagcatagcgttttcctattttgtaggcagggtggctggagtttggaatcatagattcccctgggatgtcactgtggacctcagtcccacccgttaggggcacagatttcagaatccacaccctggggcaaagcaggcatgggaggctccatcagcctggccagggctctctatttgtgcagctgctgcaaggagatgtgcactctgatgggaacagtgctccctcctccttggggggcagtatctagctccctgcagcccctctccctgcaggccctgccctctctgaacctcaccttccccaacccgccccccgcaatcccatctcagctgtaatcccaacactttctcatccattatgggtggactgcttgagcccaggggttcaagactatgctggctggacaatatagcgagttgttgtctctacaaaaagacaaaaattagctgtgcatggtggcatacacctgtagtcccagtcactcaggaggctgaggtgggaggattgcttgagctggggaggctgagttggcagtgagttgagattgtgccactgtatacttcagtgtaggtaacagagcgagaccctgtctcaaaaaataaaagtaaaaaaaaaaaaagaaatatggaatacattattgttaactctaatcaaccatgctatgcaatagtccaccagtaataccagtaatagccaataatgaattatctgaaaaagaatacaatttattcttagctatctactgctaaaatttttaagctatcttttatgatagctgaaacaaaagaagtaaatttaaccaaggaagtaaaagacctttataatgaaaactgtaaaacattgatgaaataaattgaaaaagacacacgcacaaatagaagatattccatgttcatgaattggaagaactgatattgctaaaatgtccttaccacccaaagtggtctacagattcaatgcaatttctgtcaaaacaccaatgatattcttcgaagaagtagaagatcctaaaattagaaaccacaaaaattcctaaaacctgcacaaaacaccctgagttgccaaagcaatcttaaacaaatagaacaaagctagtggcattacacttcctgacaatcaaagcatactgcaaagctatagtaaccaaatcagcatggtcctggcataaaaacaagcacatagatcaatgaaacagaataaaaatcccagaaataaacccatgcatctctagctaactgattttcagccaaggagccacatgcacacaatggggaaaggacagcctcttcaataagtggtgctggggaattggatattcatatgcagaagaatgaacctagaccctatccctcaccatgcacaaaaaattaactcaaaatgtattaaataaagacttaaatgtaagaactgaaactatgaaactactagaagaaaatatagggggaaaatccatgacattggtctaggcaaagagtttttggataaaatctcaacagcataagcaacaaaaccaaatataaacaaacgggatttcatcaaactaaaaagcttttatacagcaaagaaaaaaaaggccagcagagcaaagagacaacctacaaatgggaggagaatatatttgtaaatatatacatatatatttgtaaatatatacatctgataagaagataatatccaaaatatataagaaaattatgtttctgtatagttttatctgactgggatacagaggccacatccacagtcccatcctcaaaggccacttgttcccaaaatgtcaagcacatccctcaatgatccatcatcaacacctatgtctgtaggatgaagggtgaatcatgaagcactaaaaaggaagaaggaagccaatcccaaaacaaaatgatgcagggtctggaaagtccaaagcattttttttttttttttactgcatcttcctcctttcttctccacattcccaatcctcactattgattaacaaaacaaaaaaaactgggacccaccatcttccctactgtcaggagatctagcgagattgtttgagtcttagaccaaactttgccataagccaaatttctggctgactttacaatgatatgagctagcacagtctctttttctgccagtcaacttgtgctcggttttatttgcaaccaaatagaggtggtaaccaaatataggtgaccctaaaattagtcatcaggatgaaatcctaaaatgtgcaacaaactgggttgaattcaggattagtagcaacatctctgttgtgggcttgaaaagggggcacccttttatgcagtagcaaaattgctaaattgttgtttgctgagtctttggactctcatcccggattttctatgaccattcaaacagggctgcaatgaacatctatggttgtttagcttggcacacttctacatttctatatagtaatatctagaagtgcatttgctcaatcacaagatatgcacattttataattgactgctatcgaactaccttaaatagccttaatttgttctcaacattgtttaacagggtctgtttaatgtcctacgtccagcaaggacagtatcacttttcttaatatttttcaaattattggaccttaacaaatacttaatgtgcaattaattgattcctttgtattcccatgccttcttttatatgtttccttatagtacacaaaaccacattattgtttctttacttgtgtcattccaccctggaccattcctatctaaactataacattatgagagagagagagagagaaaacaatatgaaaatataaattgattaatcaaaaaaatttaaataggacaaatcaggaagacacaagagagattttaaaattattcagagaataccacaatagctgtaccaatatattttaaaacttagatgaaacggacaactatctcgataaatgtaaattaccaaaactgactcatgaaaaaatggatattatgaatagagcaataatcagtaaagcaattaaaaagacagttgataatttttatttactgacaacaataacaaaatttcaggtcctgatatttttatggtgaattttaacaaattttcaagctcctcctcaaccaattctcagaaggtttaaaactttaacaagaaaacactttctaacacattttcagaagctgttatagcatgataccaaaaccacacaagaaaattatagaccaatctcacttacaaatatacatgcaaaatcaaacaaaatcttagtgaaccaaattcagaattaataatagcaaacaagcaaaatatgttatcatacgtatggcttatatcaggaatgcaagtatgtttcaacatcagaaaatacttctccacattaacagactaaaggagaaaaacgcttgtttaattatctcaataggtttttagagaattttgaaaattttataaagttatgcgtattctgtaaaattgatgaaatccaaccttgatttatttttaaaaattgcctttcctatagaattataggtaaaggaaacacatgcatcctcacagagctacttcaaggctaagttacttcccataagtaacgtatcctgtaatgtgtgcttggcacatattcaatactaaacaaatatttgcaaatcctcaaaccacttctcgctcaaataacccacctttgtcttttgcctttatgttagggttgattttctcaattgtatcttggagatcctttggtgggtctttcagcaattaccctgaatttgcttttctgtttacaattttaattcctgggaactctttcttgttctctgactgcacccttttcatgagagttcagccatcaatcctccagaaccccaccccccccgcccccccaaaaagcaataaagatgtctaaaagcttccttctgggctttcgaatgatgtttaccccaggcatttgttctattcgttcatcacccattttccctacaacttgcctacacttgatatcagatttttatttattagtcacctatcttcttcattggcccattttcctattttgccactggttgttctcaaatgtgttatgattcctggttgtacagtcaagtggttgataatcttggatatacgataaagatttgctctgtagctgtgtgtaagcctatataaaagcttttgtatttttcttcttaaaaaagacaaaagatggttgggaagatccctccagttcaccagttcgaggctgcagtgagctatgatagcgccgctgctctagcctgtctgtctgtgaaaaacaaggggggcggggggcgggggggaagactggagatgtaaatctcccgcagggccctacccgtatccgcaacaggtctctaacaggaacagcctcaggcctgtgttggaacaaggtaggttacagaaatctggaagccagatctgtaacttcagggtaaggactggctctcagggctgatcccccgggctgggtgtcccagaggcacccgcccccgccccttccccaaggcaggccaggacaccttcactcctctccttaggctccccacccccttctcctccccactgtgcctcctggagtagcggtggcggtgccacaggggagcggggcggggcgggctctgagggcaagggggatgggccccgccggggtcactggcggccaccctggaaactcgacgcaggccggcccttctagtgaatcgtcccagccacagctggcctcccagccgcgcttggggcgcctcggggcgcgaatggtgcaggttggggagactcaccacgcaccgtcgggggtcggtccggttattcctcaccgctcggctccagtgggcgcgcgggcctctcctcctcagttcctgcgctgcagtccctccctcacccttcgcagcttgggaatccaactgtgtcattccgacggagcgccgtgaggacctccgagggtgttagcgccaagtgatctctgtccagcgctctgaatatccaagtaaaggagttcaatgaagggcgggtcaacggaggagaaaccgtgactctctcaagggagcccaaggcctccttgtctaattagtgacgcgccaatggatggaggctcttcccaccatctcttcccagcatccagtgacaccaccgccaagggacgggctcggcggaacctgcaggaaagaagcatcggctgagcctgactgcagcgctgtgaagagacaggggaggggatcagtagttggtcccgcgcccaccccctgtttccgcgaggggcggagttgactggccatgcaggcagagggcgaaatgtgaaattccactactcctaccgtttttccctgacccgatggggcggagtgtcgtcaggctaagttccctggcggtaaggtggggagattgaggcgcacacctgccgaacggtaacgcaggattagctaaggcgagctcaggacagaagcctcccgaggagcaggagggcaaaataataaataaataaataaataataaataactcactccttggtctttatttgcggcaggaattcagaaggtgaaagcggggccttaggatctttctgaccttttgggttttaagcaggaggtgtcagaaatgttaccacagggctagctggcttgtggccagcaagcgttcacaatgccctcgatttttcatccctctctgtgggttctttttttcattgtaaggcagaatttctacgattgctcacccactcagagaacctgagctggtttagaccaggtgagacaggctaggtttaccctggtgatgatgtgttgttgccatggcgatcctgcccagtaccagaggccctgcagattcagatgcttggtgcctgtgcttggctgaggggccaatgggtgaagctgccatctgcgggatgatgactgaagcctctaagtcagaatccgcccaggctgagccttagggcagctccatggagcctcggctggcctgggatagagagtccaccactgtgccagcccccagccactgcctaggtcctgtgctgagagccccttgtccagggaaatggcgtccagtggaaaagggaccacccccttgcccttcactcaaggcaggttggtgacaaccctgaagctaatccgttcctagaggagctgcttctgggtccgagttttctctgcagcagagcagctccctggatgggatctgttcaaagtccgcctttcacgcggaattttccgtccttgcaattttccacctccaccactaggggatcctctctgaccgcctcatgccggctctggcctctgagcaggggtttctcttctgcatgtgcgaccttgcgcatgcctagtggccttttgggacctagagctgctccacaccccgatggggttacagagtgcctcgcctccactccaccccaccagggttccttccctggctgggatgggatttcagaagcgccgaggaacagcccagacaggtgtgggagagtagccaaggcccctgtcccggggtggccaggacagcggtggcctcgcataggacctggctgggctgctgcaatcagtgtcctgccccttggagagcaacagtgaaaacaacaagactatcttcacccaccttaagaaagaacagaaccagtatccccaactctgctgtgtatcccaacccaattccattccccaccccactctcagtagccaatatgcaaaatattagaatactcttactgttattattttcaaccacactctgcatcctgaaaaaccatatatttcgttatgtgcttttaaacttcttgaaaatgaaatactgaggctgggcgcagtggctgacacctgtaatcccagcacttcgggaggcggaggcaggcggatcacgaggtcaggagatcgagaccatcctggctaacacagtgaaaccccatctctactaaaaatacaaaaaattagccgggcgtggtggcgggcgcctgtagtcccagctacttgggaggctgaggcaggagaacggcgtgaacccgggaggtggagcttgcactgagccgagatcgcgccactgcactccagcctgggcgacagcgccagactctgtctccaaaaaaaaaaagaaaaaagaaatactgaattttcaaatacttgctttttttttcggtcaaaattatgttctcaaatttcactcctgtagatgtgcgtggctggctgtagtttttgcatttttattattaggtattctcctgttgcattaatatgccacattttatttctctcatgtttttggtgaccacttggggtgttttttggttttgtatttttgctgtatacatgctgccatggtggacatacctctttatacatatttcctgttgtatgcagacacaattttaggatgtgacatcttcagcttttctattgtgtcgtgtgtcttttccttcgtgctttgtgttatttacatattctggacacagattctttgtcaactgtatgtgctgcacatctctttcccagtttgtgtcttcttcttcttttttttttcttaaaaaaaactttctttatagtgttttttttttctttctttctttgttttgttttgtttttttgagatggagtcttgctctgtcacctaggctgaagtgcactggccgatctcggctcactgcaacctccgtctcctgggttcaagtgattctcctgcctcagcttcccaagtagctgggattacaggtgcctgtcaccacacccagctaatttttgtatttttagtacagatggggtttcaccatgtttgtcaggctggtctcgaactcctgacctcaggtgatccaccctctttggcctcccaaagtgttgggattacaggcgtgagccacagcacctggcctgtgttctttcttaagtagatgttacttttaatataatagaatgtatcatattttgcttttatattagtactttttctatctaattcaaacacatccccaagggtctttgtgtgtagactgaccaatttctcaagaatcatgaatgaatactgcttctctttccccaatttatctgtaatgctacctttattataaagtttctatgcatgtgtagaaatagttcctgatttttcactctgtgccaccagcataccaatagcacgctgtcttaaatattaaatagcagagctttatgagacaacttgatgtgcagtaggcaattgcccccttgttactcttcttcagggttctttgttgtaccacatgaattttagaattggcttgtccagctaaaagacaactgcaaggattttatttggaagttcataattctatacataatttggggaaagtattttcataataccaagtcttcctattaatgaacacagactctctctctctctcccccacccccacctgtttagttatttatatctttatggtctgttagttattgtttattgtctttcaaccaggtttcatgtttttctacatagaggccttgcatgtgaaagtctttcttcctagcttgctattacaaattttttttaattgcactttttgggtacagtggcttgtactgtaatccccgatacctgggaggctgaggcagatggattgcttgagtccagaagttcaagaccagcctgggcaacataatgaggtccctgtctcaaaaagtttgttttaaaaattgcatttgctgttattcaacaaatgtcattgtgtctcatatatggatttttatatctgataaccttgttcaacaatcttttgattctaacaatatatcagattcttttgagttttccatatagacaataatgtcatctgtaaattataattgtttcttctttgttatttcttggaccttttattttatatttttgtcttgctgcaaggcaatatccctctatatattgtggggtcttttttctcataaagtggggatggtgaacacccttgtcttgctctctgattgtataaagcatgctttctgtagcattttgtagacgctcttttttagattgaggtaattcacttttatttctggtttactgagtttttagcataaattcaggctgaatttgagctaaagctttttctggagacatcatttgaaaaattcatatgatttactttctttaagtcaccaaagttatgatttacattgaactgagtttctactgtttaactgtattcttgggagaaaacccacttgtcactgaacaatatctgttttatttactgctgtcttgtgtctaaattttcttttaggattttttgtatatgctcagattagcctgttattctcctttctgtatttttttctggtttgggggtcaaagttataatagcctcacaataagagctaagaaaccagccctaatggaggccggggcaggaggtttggagttcaagaccagtctgggcaaaatagtgagacccccatctctatgaaaaatagaaattagccaggcatggcagtgagtacctgtagtcctaggtacttgggagggtgaggcaggaggattgcttgagcctaggaatttgaggctgcagcgaactatgattgtgccactgtactccagcctggatgacagagcgagaccctgtctcaaaagaaaaaaaaagaagaaataaaaaggaaaagataaaagagctaagcatctgtttccttttttccattttctgggagagtatgtgtaagactgtaattaactgtttcttgaataatgggagaactctgtaaaataatctggctttggtgttacctgtattggaaggatgaaaaataccaattcagtttcattattggttgatagggctactcatgctttttgttttgttttgttttgttttgtttttgagaggaagtctctctgtattgccctgttgtccaggctgagatgcaacgttgttcacaggcctgatcctggctcactacagcttctaacttccgatctcaatagatcctcccgcctcagccttcccagtagctaggactacaagcatgcagcatcacatccagcctcttttcctgcctgacccagttctggtttcctttagttttctaggtgttcatccattttatctaatgtttaatgcatttggcataagggtgctcagtgtcctttcattgtctgttgtctgtaactgttgccattttcattcctatttatgagtactggcgtcttctctcactttttcttaataatcctgctggaactttgctttttaaagaacatcttttgacttgttgattcttttttcatacatattaactattttcttattttttgcctttatatttatttcttttcctgtttgaaacattgctcttttcttactataaaaatgggtaagtagctcatgaattaccacctcttttaaaaatcttttctactgtaagcattttagcagtttacatttgcccacaagtaccacttcagctacaccctatgtgcttttacataaagtcttcatttttggtaagacatattctcaaattttaattatcacttgtttttaaatccatgatgttttatttgaaatgttgtttctaaagatacattttctggttatacttttattcttctaatttagcacagtggccacaaaacatggtctgtgcagtgcatacaatcgatgagtaatttctgagctgtagtatttggcataatatatggcaaaatttcctaagttttccatgtgtgctttaaaaaacttccagtaaaatacataaatctgttagatcaagcttctcacattgttcaaatagtctatatgtttactgattcatttgactgcttgatttatcaattacaggtaggaatgtattcaaatctcctattaaagtgtgacactcaagtggctttttaaagacagagatgccaaaccaatgaatacatgattttccccaaagcctgcacaaattctctaatgaaattttaccatgaaagtttgtttaattaaggcttactaaagcagtatgttgtcttttactttttaaacagagaatatatattttaatacatcgtttaagtttatgattaattatctattactgaggataagaatctttgcctgtgctcattcagcatttgcacttcatttatgatctgccttctcatagcttctgttaatttttatactagagacatttatttgtttgtataaatgttgaaggtttttttttgttgttgttgtttttgagtcagagcctcgctctgtcacccaggctggagtgcagtggcatgatctcggctcactgcagcctccatctcctgggttaaagtgattctcctgcctcagcctccagagtagctgggactacaggcatgtgccaccaagcaaggctaatattttgtatttttagtagagatggggtttcgtcctgttagccagggtggtctcgatctcctgacctcatgatctacctgcctcggcctcccaaagtgctaggattacaggtgtgagccaccgtgcccagctgggttttttatattataaggagatgtaatagatagatagatgtttcaaagatagtcaaatgtttttaaaatttaaaacacttttttacaggttgactttcaccatttaatttcatctatgtgttttgccttagagaaattttaaatgctatgtagatctcatgacttataattatgaagcattttgttttctgttttccacgaaacttagcttaactttgagcatataatagttgtaaaggtaggagagtaacactgaaaaaaggaattgcataaaaatggcacattttctgtagagttgtttatcgcctgaaaataggccccatttcatggaagtaagatgatcaggctcaggtccccagacgaaactcttggcatggtttttggagatagtccagggctcagtactggctctatcatttgctacttctcccaaagtaaccaatatctcatccaccctgagcccatttccatatctctaacatgaggataatagcatctaccttacacaccaagtagagggatcaaatgtaggaactaaatcaaagtaccagcactgaataacctacatcctcccacttcccaaaaggaagagagatgtatcccctgttgacaaacgagaccattttgcaggagagaaaggaaatgccagttcacttgcaatgtaaacatgctctctctttttagggatgtccagggacctgagagagaacccatgcttaccaaagagtttctagttccagacacacaggactcgaagggtgacaagtatggttttcagggtccctgaatccacccagtcctcacagaaactcctaaaagctgtcgattgacagcgttgagttcacagctctggtcctcacatgctgatactgcttgtgatatcgaacccgacaggaccccacatcacaattgatttaccaactacaatataatacctcctgaatctccaaattggctcacccaggaacaaaggcttggggtaaaactggattaggagatataagctctgaattttctgagggtgagacacacaaggattctaagtgacacgccacagagtaacgggtctgtgactggaggacccacagatttgtcttactggagacaccacatgcacacaaactccatccttagctgtggaaacaagggtcttttgctatcttagccgaattctgggagtaatttttggaggggaggagatctttgggattgcctctttcaggccctttacaaaaatacctacttcttaaatggtaaagcttacactaaactgaaaaaattacatccttggctttttatgaagtaggtgttggattgaatcactactggaagaagtatggcatcgcaaattctaagcagtggtcaaaggatggatctgttaaattagaaaaatctctaaatttataaaaagattttagattcctttattctaaacaattgacctatttgtactcatgggacaatcaaatttcaaaggagatatgtaacgatttcatggcttgcattaaaaatccttctgataaaattaaagataaaaaatctgaccccctgccaaaaaaatcttttgaagttcatactgcctgctttcaatattctgtgggattcacaatgaaaggtgccttatattgtggcctagcttcaagtttatgccttcgccaccatggcctgggttcaattcccagtcagggccccagcgcctttggtttaatgtttgcgtggcatttgacttttttacctatttagtattggtgagattacctttggtaaaaaaaagtttaaagagtggaaatcgcaattctttgtgttggctaaaatctgattataagagatctggaaggttttatttttctttttcaaagagctctatggtcagaagtcggcttcatgaaaagctaatatttaattatatgtacatacagtctttctggattttctcttttgcctcctgttttgaaaaatatttggatttgagtgaaactccgttttagaaattaattgcttggtacaatatacccatgtaactaccctgcacatgtaccccctgaatctataataagagttgaaattttgacaaaataaaattagattttgaattaaaacaaataggtgcttggttcctctgctcacttctttttaaaaggaattcctctcccatgtacttcttcttttcccttctttaccttccttttggcatctttggtatcacatgaagggatctagagggaattttaagtgactctgaaattccttgagaaatacacaaaaagatcccactcaccccttttgggggtctcctgttctccttgtggagtccagagtcagggacaggctcctccaggtctgcagctctgctctcttttatttcatcttggctgattgctttggttttgtgagtaccaggcattactttgtactgtgagagacacgtcctttgtgagtgcaacggctgctgggtcactggtgagggctgcagtttggagatggctgagagccgttgcaataaatggttgtgattgcagggggctccttgtttctttgcaagtttagatgagaaaggtgcagtttggacacagtttaaaggctgtgaaaacaccaccaatgaatatgatttcctttggggatggtctgattaaaagtgggctgattgttgctgtgctactagccttgaagacatgtttctacagcattgtgcagtgtggaaaaattgtgtggcttggtcttgtggcatgtcccttcttttagagacctcagattcaatgtgaaattcgggatttttgattttcaaagatctagatgccctgccttccagatgtgcctactcttcacatattttaaaattagatcctataaactgcaaatactttgttggcttctgtgagatcagaggtccagttagaaaaggaagacagtttgttaaaattaaaaactatttatctaatctaactagattggcctccaaatatgactttctgacattcagctggttactctgaaaagatttctaaatctcttgaggctcatctatatgtttccttgcaaagaaaaaaaaaaaaaaaaaaaagcaagcccaagcactagtaagaaaaagatttgcaatgtttcatgaaaggagtagatgagtgaagcatttatttgtagatactgggttggatacctgtgcaaagaagaagaggtcaataataaaaattgccaggggatttcttggaacttaacaagctgaattaaatatagaaatgtcaggaaatcaaggcaggaaatactcacttgtggttaggcagacagggcagggttctgagcttgagatggagcaaacagttgtggtgggtgaagttcacatgctttagagctcagctgtcctagtaaagaagcctaagagtctctaaagctcttatgagaagatggattttttttgcctagattaaaaggttaaagaattgctttaagttggataaaataaagctaaatgtttaagcaagttgtgaaaggtttatgaaaaaattaattaaaatatttttgtgtgtaaacatattgactaaagttgaaggggtataattcagcatttctgtaaattgagcattgaaataaaaacacaatgggtttctcttagagcactaacctgctctttaacaaaaattgtaaagggttatagaaagtctataaaaatgttaccttatggtcaaacattaaaattgggtaaatatgtctatcaggttttattaagaattaggtttaacattaatagtacactaatgtaaaggtgaaatttggcttatttggtacaaaaatcatacaggaagcattgtgaaatataaaatgatttttagctttctttgggctatatttctataaatatgttattgatgagggttccaaagttatgggagactcctataattctgctatatctcagtgtacattatcagtcataattataattgtcatgttaaattattgtgggccacagaggtaacagatttccttgtcaattgtgtctttgactatgactaccctaaaacgttcagtcacccatatacacatgttaccttgttttggccctctttagaaggtaattttataatcagctataaagccctaacaggtgctcttaaatgcaaattttgataactttggagattgtgacatcagaagagaggaaaaatgttcgggacacttggagagctaaaatgttcattgatatcaagcaggacaggaattaactgcatgaagtgaactaataggaggctgaagtgatctttttgactttttgcttaaaacgttgctgatcctttgttttgcttttcagagtcaaggcaaattttcttttgagctattgacagcttttaacgattaatcaaaatatactcctatgaacaccatttggagcattatttgtttctctctacccgatttccccagaatttggaaactatttgtgggtattcttaatttatggcaatatagttatttgcataagtgcaataagaatgtgttttctttggtaacaggacacaatttgaaaaactggttattttaccaaggttttgaccagaatgctgtgctttcctttaaggaatcaaacttgacttgtggagctaataaagcctttggaaaactgaccttatatcctgtgaacacagtccctgtacagggttactgatctgtgggaagaaaagaatgtcacattctgacaggtcaggaatcccaagttatcttgaaacttcaagaggacaggaattcacccaaccatatgtatttgatggtagaaatccatggcaggggctcagctttaaaaagtcttatctcagattccttctataaaacaaagtcccattaaaaccaattttaaaagcctatgtgaaaaataattattcttgctgcacctcgtacaaataaagtggcaaagcataataaagcaaattggtcctgtcgtaatttgtctttagtaaaaacgggaaactggggtcgggtgcagtggctcactcctgtaatcccagcactttgggaggctgaggtgggcagatcatctgaggtcaggagttcaagaccagcctggccaacatggtgaaaccccatctctacaaaaatacaaaaatgagccgggcatgatggcgggtgcctgtaatcccagctactcaaggggctgaggcagggaagcggaggttacagtgagtcaagatcgtgccacttcacgacagcctgggtgacagagcaagactccatctcaacaacaacaacaaaaaagggtaactggagagagggaagttatgtttcaaaaacttttggaaactatagtacacctgtttttaaattctagtctggcattcagtttttattattttctacagtttgggttaaattcgtatttctctggctacaagtctcctaaataatcttttcatttgtttcctttttctttccctttttccccatttttcttaattggaaatcactgaaacctaagctgtgctttcttaaagccctgtgaactgaagactagacaaccgaaacttctgaaggaagtagcagcaacctatttatatgtgttgctgttgcctactattatgttttagcaggtgctgcctctacacccccgaaacagagagtgctactgggaacaaatcgactttttccactccagtgctgcattcggtgccccataacgatgaccccctctcagcaggaagtagccagaaagattacaatgctccatctccctatgattcttgtgataaataaatatacaagcatgatagaaatcatgcgcaaattgacagtggggattgtggcaggccagatttcactaatggaggtccccatcacaactacttcagtactgactgagtggttaagttcagtatcaaaagctgaaagtgccagcgcctttctacaaaggctagaatgtaacaaaagcccaccaagggttttacctaggcctttcctgggccttacagcatgacaaaacaaagaaggaattcttaaccagacctgtttaggattaaacaaatttaattgggggtctgaagaaactcgccaggcctccacaaacaagttcattgggggtctaaaggaaccccccccaaacctctgtgattgagcaggagacaaggtcagggtaattgccccagcacctggactcatttagatttaagtaaatgtactgaggctccagagaaaggtctccaagacttagactagagttacagattaaaagaagttaatcacttatatctttagataaatgcacactgacacgtagacatacatcttagaaaatatataagctctggaaaaccttgtaatttacagttggtctggagatattttctgggccttctctctgtaaccggttccagaaataaaaaactctcttcctccccagtttatctgcatctcgttattgggccgtgagaaatagcagccagaccctgagtttggtctgggaacacactggctgggcttcctgcctggcggtagagcttcactgtcctccttcccagccaaaatgtggcccttgaaggcttcctccccaactgaccggttttgggttctaggtactcagggaacaccgtcttcaaggaggccattttcatactgttcctggtttgatttttctgaaattaggaaatgccccttgaggcatccaggattgtctttatttcccctgaagcttcccctcctgaagaaaaaagttctcaaacaccctcaggactcaaaccccaagttcaccctgtgaaacattcccatttcctaaacccaggcaggctcatggccctcagcctctcagaccccatggaaacctcctcccccacttcacgggttctctccatattgagagcctcccctcctcggcacacaacccagagactcaccccaacatgtgtagcaaatcaccctggaaacaatcatggctgaacgtggtagcccatgcctgtaatcccagcactttgggaggcccaggaggtggatcacctgaggtcgggagttcgagaccagcgaggccaacatggtgaaacctcgactctactaaaaatacaaagttcactgggcattgtggtgtgtacctgtaatctcaactactcaggaggctgaggcaggagaatcacttaaacctgggagacagagattgcagagagccaagatcgcaccattacactccagcctgggcaagaagagtgaaactacatctaaaaaaaaaaaaaaaaaaaggaaaaggaaaagaaaaaaaaaatcatgaggcaacattgcatttaacaatattttatttatcaaaagacacttgtctttctcaggtaagtgaaggtctagagatgaaacgagtcccgatgtaaattgccccatgggcattgctgagatcacaagatcatcactgcagcatgcagcacaatagtaaatttctcaggatggaagttcaacaatccaaaaggtagtattttttttcatgatgctcagtccatcatacgaaataaaaataaattccttttcatgatcatccattcagtagaaaaaatgatagtaaatttgttctcatgaagatttttaccgtaacatataggatttatcgttattattattattctttgttttttgtttttttgaagcggagtctcactctgttacccagtctggagtgcagtcgtgcgatctgggcacactattaacctccacctccagggttcaagcatttctcctgcctcagcttcccgagtagctgggattacaggcatgcgccaccacacccggctaattttcgtatttttactagagatggggtttcaccgcattggtcgagctggatttgagctccggacctcgggtcatccgcccatctcagcctcccaaagtgctgggattacaggcgtgagccaccgcgcccggcctcaatttatcattattcacgcatccacaaactgggttcttatattttgtacgtgattttttccattgaggagagatatctgtgcatattcatgctgctcatatttcatccacaaactcggttcatatttcatccacaaacataattttttccgttgagaagagatacttgtacatatttatgctgttcaaattcacatttcatcattcttttacaagaaatagataatgtattttaaggttttccagtggtattacagatattttactgggtgtatagatagaaattaaaccaaacttctttgttctggccgccagtcatgcatcctgttttcaacatagttcacatacaactggttgtgtaaaaatgaaattattttgtttagtacaatcatcaacagttggttgattagatttttaattatcaagttaatcattgtcattatgcttctcatcgcactcgtcattaattgctgtgggaggaaatttgttatgttccctatgagagggtgtatcacaaattcaaataagaattcaacgacaatggactgtataaaggaaataagcaagtccatggaaaacatatttttttccggaaaggattaaaatatttttaaaaaggaattaaaaaaaaattgggcacggtggcaaatgcctagagtcccagctgctcaggagatggagacagaaggattgcttgagcccaggaataagttggaggctgtagtgaacagtgattccaccactgtactccagccagggcaatagagggaaaccctctttctaaaaagacaaaaagaaacaaaacaaaacaaaaaaacaccacatcaaaaaacccaacaacaaaatgaaaaaccaaataacagcaatacaattggagctattcgatccaaagaagtaaatgaaacataaagcaaataaaagagaaaagctaatacctgtgtcctgcaggactcagtccaagttctgctctgactccctcctggtgagccaccccttaaaaagtcacttggggcggggttactttgacagacagtcttctgtcaaagagggaggcggtaaatagcacttttttttttttaatttaacgcctttccaacaaattagcggctatgttgtctaagagtgcaaatgtcagaggtgggtacaggcagcaagaccctccccacaggggcagcagaaggaggaatgactaagggaacaagactttagtgtgctcaactacacaggacaggaaacagatgctttttacaaaagctggtggacttgaaggcagaatattttcaagttcctgtaactgcgaactatgacctgtagcctgtgagagtgactttctgtggcaaaggagcttttgtgaatgtgaggaagttaattatcttaacagtgggaggttctcccggcttatctagctagaccctcgtgaaatcccaagtgtccttaggaaggggaagcagagagagatttgagtccagaagaggaagaaggtgatgtgaggcccagtaggggaacaaagggcgatggcatgtaaacacttagcccccagaagtgggagagggctggggttcatcacaccagaatccctaacaatcagccttattttaattacccttgaaatggaaggaggccttagagagccagaggcttggaggggcaccctctgctgcatacacagatcccaactgctgtgggctccaaataattgcaccagggaaatcacaaattatcaaaaataaaggatgtaaagcttttaaaaaatattaaaagcccaacaaataaaaaaagttctaaatctataaaattgacctcagtctgtatatttagatgagtcatgtgtatatagcgtttcacttcaaaatatatgataaatctctcattcattggcttaaaaataaacacttcaatcaagtctttatcagaaaaattgaaacgttaactcaattgccttttagttcatgtgactttacaaaacttaaaacaataaagtcagttttaaaaattattagtaaagtaaaagaaaaatatcttcacaatgtagacattttgtccacatgagacatgtgaaatattgccattactaaatatttgcaggtcaaaaactgtttccaaaacattttaaataatcatctggcctgtctgttttagagcattcaattctagctgaggtctggggacatgtgaaaggagccacggcccgactccgtgctgggaagagtcagacattttccacagctctgtcctttgctgtgggctctgcaactcctaccaattaaaattgcttacgtttttgttttatttttactaaagaggggttcctaaaagctaacattatactgagtatatgtaactaaaactactaagaaaacaatttcacaattatacaaatgtgccaagtaaatgaaaaaataaactgtattttaataaaggttataaaaagaaaaacatatagtggtgtgaggactgtctcaggtcttcactgagcaagggatcatgacattctatggcggacagctgaccttggctttctgctcctcttgattatgtctactaagtgacatacttactctttttccacctgtcttgcctctaagggtaacaggttttatgagatccctcctagtgctttgcaggtcagcctccctttgctgcattccaattttactgcctataccctccagctggcttttgatgacaaaagtcctggtcccagccattctcagattctgtcatccccgtgggcactatggagctcagcactatgggaggttccccaaaaatctcgttttctatgaggaatggccaccacctgcatctcagtgatgctagtgacccctttcctactcctgtgctcactggtcctcatgaagatcctggttggtctgtagccccctatttttcctattaaagagaaattacagtaagacccatttgtgtgcaaaatcaattttaggcttattacacttggcctgataatttgcataaaatgcagcaagaattcatcggccatataggctacttttgagttaattttcctgggtttttacctaaaaatatactattttggttagagtcttgtgaaaataaccaatgtgttcaattgttttattttaaaaggctcttactgaacactataaatatgtataagttgaatatacaaactatattgtcataaaatcacaacccaaaatgtggagaacgcagagggaaaggtaaatttgctcgcaaaaacatacttcacccaaataactggaaaaaaaaaaagactttcatgacccttctttaaccagagcagcagctttcaaacaaggtgtttgccttggaaatgccattcacaagccaaacggcccttgagagctgtctgtcaggcactgtagaatctagcagctcctcacagagttagaaatagtttcaggaaagagattccctgcttttagtaactgcactttatattcccagatagcgagattgtatgtaaaccatttttatcttattctggaactcttttgggtactttttttttttttttttaaatgatggagtctggctctgttgctcaggctggggtgtagtggtgcgatttcagggtatgagaaaatgcagctggacctggctctttccaggaagaccctcacagccaaggagtccaaagcctggggttttcatctaattccagtgtgactggggtaggagcagctttggtgctgggtgtgtgtgtgtgtgtgtgtgtgtgtgtgtgtgtctatgcctgtgtctgtttagggtgttaggctcgtggttgtctagatacaaatgtcccagggctcaggagccccagggttatgtcaggggcaccagatgaaggtgtcaacagaagttagggcacaagggacaaaggtgagagcaaggttagattcatttaggtgcaagaaatcatagagggaggagggagaggaagccctcctgctaccaccgaggaagaagcgcagcttaaggcagaaagcctgtccggagaggaagtgagtttgagggcagggctctctgggtaaagtacggtctgggacaccagcctgggggaagggtacagaatgcagagtggcctggcgtggggactaagaacagaggagagcagctttcactgggagggtcagtgttttcagtgtccagcactgagcaaggtgagatttgggcagcttgctgtgaaataaggtcaggctctggcattgtccccattgcgtgtgtgtgtgaggggcactttgggagagtgaactctccacctccatcctctcatacgtccttcaaccgagcttgccagttaccctgattccaaggagatctatttattgttgacaatactggatcctagcagaggctgggtaggagcctgggcacaagcaagtggaggagggggcctgggcctgaaagacctgggaggtttgagagaggacacagcccacagaatggagcagatggggtagagtcggcaagcattcagggctcctagtaagttggacaatggagaccctgaaagatccagtaaaacggggagaacaaacaggtccccaactcacatccttgcagtgcctggagcttcagactccagacaggtggggaaggaaaattgagggatgtgaacatgttggagaatgtcgtgccctgaagaatgaagaaaaggggggtgaggaatgagagcaggaacggcttccagtgcctggtgcccaggagaactcagaaaatgggtgtggtggagaggaatcgaggaaccggaagtggtggaagtgtgcagggcccctccgagatcactgtgactgccaggcgtcctccctggctggagagcttcactgtcctccttcccagccaaaatgtgtcccttgaaagcttcctccccaatggactggttctgggtcctatatatttgaaggggtggcctgcctctccacacctgtgggtatttctagttgggtgggaggagagacagagaaaagaaataagacacagagacaaagtataaagaaacaacagtgggtccaggggaccagcactcagcacaccaagggcctgcaccggcaccggcctctgagtttcctcagtttttattgattattattttcattatttcagcaaaaaggaatgtagtaggagagcagggtgataataaggagaaggtcaatgaaaaacatgtgagcaaaagaatctatatcataattaagttcaagggaaagtactatgcctggacgtgcactcaggccagatttatgtttctctccacccaaacatctcagtggagtaaagaataacaaggcagtattactgcaaacatgtctcacctcccgccacagggcagcttttctcctatctcagagttgaacaaatgtacaattgggttttacaccgagacattcagttctgaggggcaagcaggagacagtggccttcctccatctcgactgcaagaggctttcctcttttactaatccacctcagcacagaccctttatgggtgttgggctgggggacagtcaggtccttctcatcccatgaggccatatttcagactatcacatggggagaaaccttggacaataccccgctttcaagggcagaggtccctgcggctttccacagtgtattgtgcccctggtttattgagactagagaatggcaatgacctttaccaagtatactgcttgtaaatattttgttaacaaggcacatcctgcacagccctaggtcccttaaaccttgatttcatacaacacatgtttttgtgagctccaagttgggtcaaagtggctgggtcaaagtggctggggcaaagctacaaattaacaacatctcagcaaagccattgttcaaagtacaggtctttttcaaaatggagtctcttatgtctttcctttctacatggacacagtgacagtctgatctctctttcctttccctacatatattcatggaccacagtcttcaaggagtccatttcctcactgtttttggtttgatttctctgaaattaggaaatgccccattgaggcacccaggattgtctttacttcccccagagcttccactcctgaggcaggagcttctcaaacaccccccaagactcaacacctaatttcaccctctgaaaccttcccatttcttaaatccaggcagggtcatggtccttagcccctcagatgctgtggagaccttctttccctttcatacattctctcaagattaaaagccacccctcctcagcacacaccccagagactcaccccaacatgcattgcaaatcaccctggaaacagtcataagaccacactcatttaataatattttatttatcaaaagacactctttctcaggtaagtgaagttctggagaggaaaagaggagtcctgatgtaaattgccctgcaggccttgctgagatcacaaggagattgttactgcagcttgtagcacaatagtaaatttcttctctggatggaagttcaacaatccagatcgtagtatattccttttcattatgctcagtccagcaaatgtgatgataacaaattccttttcatgatcatccattcagcagagaaaatgtttgtaaatgtgttttcatgaagatgtttaccataacatacaggatttaccattatcaatgcatccacaaactctgctgttgttttttatacataattttttccatcgagaagtgatagttgtacatattcatgctgttcatatttcaaccacaaactctgctggtttttttatacgtaattttttccattgagaagtgatacttgtacatatttgtgctgttcatatttcatgtttcatcatccttttacaataaataggttatattgtattttaagtttttctaactgtagtgcagaaattgtactgggtgtatacatagatatcaaaccaaatttacttgttctggctgataatgcatcatttatttcatagattatgtatttctttgacacatttcacgtacaactaattgcataaaaatgaattttcttttagtatagacatcagcatgtgcttaattcggaatttaattgttgagttaaacatcgtcattgccttttccgttgttattaattgctctggtgggaattttgttatctcatacataagacagtgtgccacaatatctcttaaaatttcaatggcaataaactttatatttaaaaacagggaatctatggaaaacacatttttttctaaaggattaaaatatttttttaaaataattttctaaaaagttaggcacggtagcaaacgtctagagtcccagctactcaggaggctgagacaggaggattgcttaagcctacgagttgggggctgcagtgaactgtgattgcaccactacattccagccagggcaatagaagttaaccctttttctaaaaaaaaaaaaaaaagaaagaaagaaagaaaaaaagcaacaacaccaaaacctcaccaacaaaatggtaaagaaaaaaaaaacagcaatacaatgtaagctatttgatccaaagaagtcaatgaaatttaaaacaaatgaaagggaaaaagtaatacttgagtcctgcaggactcagtccaagttctgctgtgcctccctcacggtgagccacccctttagaagtcacttgggtcataagttaacccgataggaagtgtcctggccaatgaactagggaggtggtaaatggcaccattttaaatttaaattcacggccttttcaacggatcagtagccatgttgggtaagagtgcaaatgtcagaggtgaaaagaggcagcaggaccctcccctagtgcttgggcaacagaaggtggaatcactaaggggacaagactttagcatgctcaagtacacaggacagaaaacatgctttttacaaaagctggtaaatatgaagagggaacattttcaagttcctgtaaccaagaactaccgcctgtaaccggtgaaagtgactttctatggcaaaagcgtttttgaaaaggtgaggaagttaaatatcttaatgttgggaggttcttctggtttatctggctagaccctaatggaatcccaagtgtccttatggagcggggagcagagagagagatttgagtccagacgaggaagaaggtgatgtgagtctgggtgcgggacagggggagaatgatgctatgtggggatctgggctggggaatgacttagctgcatgagcggagtgacttagactcctgaactagaagaaatctagggctcatcacctcagcagccctaaccatcaaccttatttttattacaggtcttccatcgacggactccctaaaaagccagcggcgtggaggggcgccctctattggacaaatagatcttgactactttcggccctcaaatagcctgactaggcaaataacaaataataataatttttttttaaatcatggaaaatattttaaaaaacaattaaaaagttataaatctataaaatctgcttctgtctgtgtgtctgtatatttagatgtctcatgtgtacataatgtttcactaccaaaatatatgatgaaaccctcattaatcggcttagaaaactaaacacctaaatattttctcagaaaatacaaaaactttaactcaaatcccttttaattcacctgactttaaaaatctttaaaaaataaagcatgctttaaaattattagtaaagtaaaattagaacatcttcagaatttagacatttggtttaaattatacaggtcaaatactgcccttagtaaatattttcaggtcataaacaactcctgtaatcttttaaataattgaattacatgtctgttttagagctttaagttctagctaaagcctggggacaaatgaagggcaccatgccccctctctgtgctggaaagagacattttctacagctctgacccttgcagtaggctttgcaactgctacctatcaaaattgcctacatcctaagtttattattaaaaggagttgcttggagttaacattataatgaatatatgtaactaaaactatttctcatacaaagtatatgaaaaagtagaatgtatttttaataaaaagttataaaaagacatgaacatgtagtttttataaaaaacagtaattttgtctagttttgcagttctaaaaagttatgttaaattcaaaaataaaaaataacaagacaagactcaaggtttaaataagttgtaaaagatttgtaaaaattagttctataaaaattttacaaaaaaaagcattggttaaaatttaaggaattattttgtttttacagaaattaaacattcattaaaaacactctgatacaaggccttaatttgggttcatgtatcagaatagcagggttttcttagaatattaatctattctttaaaagaactatgaatgttatgcaaactttataaaaatcttaccttagagtcaaactgattaaaattccatagattttacgtaaaattttattaaaaattaacttcaacaaaaataaaatttgattttctcctttaaacaaaagttttgcgtaatattaaataataaagcatttttgtttaccttttaaactataaacacacacacacatacacatacaccaacactaaagtcagctgacctcatactgtctttattggatattcttgtttaaaaaactatcttctttggaaaataaagttttttattttaaaccatattttaaattatcattttgactaaatccataacatacagtgatctgtaataattctattttataatatcaagtgttttgaagaactccaggaacagccatgagagaacactgtggtttagtaacactttatttcctcagtttgaaaatagttgtctttcttggggaggccggtttcagcagatgaaaacaagagtcatgatgaaaattacccagcagtggttagtgtgaccataggaacattgtcatcaggtcagcagaaaacatatcagcaaatttttctcatactggcagtgtgtaggggtggatgtttacagttcctgaagccccagtggtcgtgtggtcttttagttttgccatttataggcaacttgtggtaactagctcaattagacacattccttatcacaaggacagagggctttctgtatcctagggttcttgccttggcattccagaagaatcaggtcacacgtggacgtggagaatgagtgcaaggttttattgagtggaagtagctctcagcagatgggggagccagaaaggagattggtttctccctggattggggccgttcagcagccctggctctcctctgactgccccaggcaaaatccacatcgttctataagtcggtgccctgctggtgtgctggtgcctgttgtcatgttcctcttcatgtccagccgcctgtgtgttcctccgctgatgtgctcctctcgacgtcaagcctcctgtgtgtctgactgctagggtcttggggtttttataagcacaggatgggtcttagcaggccaggatgatcttgggaaagacaacattcggtcaggaaaacaaaaatgcctgttgtcatctaggtccgtggggacaagcccaggtgtggagcttttagccagggaccacagcctcctgtatccaacacttcccttcaccttttctatatcattcaaagggatcatgcccttcccatcccagcacttcactttcatgtcatttgccccctctgaagaggtacatctaactgccattagaatatggatgatgaccagtcttagctgcttcctgctgaaagggggcattgttttgggggaaaacggcagtcagattcctcccaggggtctctataataaaagatcgaggtggctactttcaggaggtcctctaatgtactatctggtcccaagtcccatttctgcaacctcctcctgatgtcaggagctgcctgagtaataattttatcctttaggattatctgtccctcgattgaattaggagatagagaggtgtgatttaccaaggcctctcttagcctctccaggaaggcagtgggattttcatcaaatccctggttaattatggacaacttagtataattgagaggcttggtcttagacctacgtaagccctctattatgcacacctgaaagtgtctcctcttccagtcttccatctcattattgggatcccatttagggtccttcactggtgctacttctcttccagttggataatattcgctcccttccctgatgctataggtgatgcaaagctcatccccaaatctctctgctgctggcagagcagcctgcttctcagtgtctatcaggttctgactcaaaagtaacataacgtctctccaggagagttcaaatgttagggtgaaattctggaaagcttctatatatctatcagggtcatctgaacacttgcccagatctcccttaatttgctttaagtcttgtagggaaaagaggacttggaccttactgggcccaaattcactgggcatctgtaggaggggcaagagtgagactgggcttgtttgggatgaagatttctaggaggggccaggtgagaggctgaagctggatacggaggttggggtggacccagaggagcagggcttgagggagctggcacgtcagctgggggtgcgtctgggactcgtgtctttaattccctgggcttgaccctggcagccttccccgagacagcaaacaggagggctggaacaatcctacatgtcagcaaaggtctggattgctttgcaaggtatagaaagcctgcacatttggggcctcagaccatgtgtcctcacatccagagaaaagttctaattgcaggatggtattgaaatgaatggtcccttcctgaagccaagccagtccttcctgtaaaccataatttggccaaacctatgtgcggagggctatgagatgcttttcctctggattctgagggtcaaaacagtcccaatggttcaggatacactcaaggggagtacaagctgggggtggtgaggagaactggctgcccattctgaaagacagggaatagaggtgttcctcatttcccttccttcttttggcaaaaagctcagggtgtgatggggagggaaagcaagcatcttcacttcactttccacctcttacccctgcgccctggcaaccttggcaggtgccggccacaggtacaaatgcggtatgtacccatgaagcagggagaacctggagattaggaattaactgccctcacctatgtttccttttctccctgctgttgaaaaactttgagttccctgggcctttttatcccatgaggcatggcctccttctgtgggatggggttcagtcagcaggaattggtcctgtccatttacattgtgcctgttgcctggctttgaattcctcagacctgctttctctttctagggcctcagcctgaagcttggaattgagtttgggactgaaaaagcatttcagaggctgtttatatccatttagtgcctcaaataagccctgctgaatttgcaattatcagccagcaggggtcactcctctgttaacttccctattagaaacagagcggtggggattctcacttagaaaagaaaaaaagagaaaaacagttaaagaggcaaaaagtggggaatgctgggggaagaaccccttgcttagtgcaagtgggcccctctaatccttataactttcccatccttcccccagttcagaccaggttgaattccttggccatggaaggaaaggttccattgatgcagtgggtgagaagcactctgtagggtcctggctaccatcggttttctcacacccccctcatcccaggcagtggagggagacacttctgcgacattgctccccctgccccttcatggctattgggtgtggcctttgcctgctgcaggcatgcctaggtgctggagctgggagggaaaagggtaaggagaggtgccctggaagccgctcatgcctggggctgtcaaggtggaggcatacatggcacctctaggaaaaattggtctgatttgcacctttggcggctgagccaaatgctcattttacttagtaacattgcctcagcctgtagcaaaactcttaacattataaaggaagagataagatccatttcaaataatgtgtgagagagaaaagagatgaaaggaaaacagagtcttttacctgcaggaaagggagagaagtggcagagttttggaagaaaggcaggcccaacagtttcccattcactcacactcaccttccgagatcccagacgagccaccagttgaaatgggaaaagtttccttgtccccctcacaggaggtggagtgggggtgtggcttgcttctttagtactccgctgctcaaacctctagggaagcatacagactggcaagttgtggggctacaaccccatggcagcatctaggggtagatgtttacagctgctgaagccccagtggacatgtggtaccatgtgctcttttagttttgccatctataggtggctttgtggtaaccagctcaattagacccattccttaacccaaagacagagggctttctgtatcccgcggttgttacctaggtgtaccagaaaaatcaaatcacacgtggtcttggagaatgagtgcaaggttttattgagtggaagtagctctcagcagatgggggagccaaaagggagaatagttttcccctgaagtcgggttattcagcggcccaggctctcctctggctgccccagccaaactctatgtcaatccattggtcggtggcctgccagagtgctggtgcctgttggtggattcctctcagcgtcgagagtttttccctctcaggaaagggagagaagtggcagccacccatgtgttcttgcactgatgtgctcctctcgacgtccaacctcctgtgtgtctgcctgctagggtcccagagtttttttaggcacaggatagggcatggtgggccagggtgatcttgggaaatgcaacatttggtcaggaaaacaaaaatgcctgtcctcatctaggtccaggggcacaagcccaggtttggagccctagccagggaccccggcctcctctacccatcactttccttcaccttttctgtatcattcaaagggaccatgcccttcccttcccagcacttctcttctgtatcaataggtgatgtttttaaaatttcccaactctagtgcaggcatggtactagacatatacatagaaataaaaccacacttattcttctggctggcaagacatagtatttttgccaaattatgtgttgttttgaagcattttatgtacccctggtcatataaaaataaagctattttgttcagtacaaacagcagcattttctggattagaaagttaatcatcttaaaagatcatcacggatttttccattgcactcatcactaattgctttggcaaaaaatttcttatctcacgcatgacaaaatcagccgcagtatctcctagtaatttaatggtgatgatctttataaaggaaataagcacatcaagggaaaacataattttttttaaaaaaagagtaataaaactttttaaaagtcttttttaaaagactgcttttctaaaatagtaaaataaaactccaccaataaaaccaccaacaaaacagaaaagaaaaaataatgatatgatcggagctatttgatgaaagatggtaaattaaatttaaaatgattagaagagaaaaagcaatacctgtctcccgtaggtctcagtccaggttctgctatgcctttctcctggtgagccacctatttaagagtcgcttaaagcatatgttaatccaacaacagcagattaaaaaccaatgcaatctgaactatttgatctaaaaacataaataaaatttaaaacaaataaaagagaaaaagcagtacctgtgtcctgtaggtctcagtccaagatctgctctgactcccttgtggtgagttagccctttagaagtcacttggggtggggcatatgttaattccactaacattggttctggccaatgagtcaggaaggtggtaaatggcaccttttcttcttgctgatttctttcagttcctttggagtctggacattagtcctttgtcagatgcctagtttgtgactactgtttcctatactgtgggttgtgtgtttaccctgctgatatttcttctgccttgcagaagattttcggtttcattaggtcctattgatcttattctatttttatatttttgcgtttgcttttggggcattagtcatgactacttggcctaagccaatgtctagaaaagctttttggatgctatcttgtagcatttttagactttcaggtcttagatggaagtttttatatgctttgttaaagatcaggtgactgaaagtaccgggctttgtttctcggttctctattctgttccattgctctatgtgcctatttttatacttcctgcaccatttattgaataaagtgtcctttccccaattagtgtttttgcatactttgttgaagattagttgtctgtaagcatttggctttatttctgggttctctattctgttccattgctctatgtgcctatttttatacttcctgcaccatttattgaataaagtatcctttccccaattaatgtttttgtgtactttgttgaagattagttgtctgtaagcatttggctttatttctgggttctctattctgttctattgctctatgtgcatattttataccagtatcatgctattttggtgattgtagccttgtagtataatttaaagcctgccttcagatttgttctttttgcaaagtattgctttggatatgcggtcacgtttttggttttgtataaattttaggattcttttttctagttctgggaaggagaatgatgatattttgatgagaattctactgctctgtagatggctttggagagtatggtcactttcacaatattgattctacctattcataagcttataatgtgttcccatttgtttgtgtcaactgtgatttctttcagcactattttgtagttttccttgtaggaaacttacattaacctacttggttaagtatatttctaagtattttacttattaaaaattctcagggaaatgcaaagtaaaactgaggtgggaaattaaagaaaaataaaattaaaaagaaagggaaataagctttcttgtattaagctaacttgtcccagaggcagcaacaggcacagcccagacccaggaaaagtcttgataatattatttattgtattctggagactcttccagcactccttcaatgtagggagaagaaaaacaaattttcctttgttttatggtatgagtttatagattcttgttctctttaactagtaacttcaagtattctgttttatctaagaagtatggcaaaggtcatgagaagcctgagcaggcctgaactacagctctctaggcaccatagtgaagataaaccaatgcaagcctctttagagcaaaacctagataatagacatctgggttgcatagcaacagttatgtgcaatcctgagttatgaacctgttacaatttgattaactgtctttttcctgcctctgtatccctgctttcacaccactgtaagcttgcttcaagctggcccacccccttttgtgaagtgtgtataaaagtcaagtgctgtctttgttccaggccctgtctttggacgtgagtctgctgggcctgagagcactcaataaaagattctcctgttttaacccaaagcctctctctcatcctcctaaatcccacaacaaaaccacaatgagatgctatcttaatcttgctagaagcccataatttaaaagtcagaaaacaatagatgttggcatagatgtggtcaaaagggagcactttgacactgctagtgggaatttaaactagtccgaccactatggtaaacagtatggggattccttaaagaactaaaagtagaccattcattccagcaatcccattactggctatctacccaaaggaaaagaagttattccataaaaaagacacaagaatatggatgtttatagcagccgattcgcaattgcagtgatatgggaccaacttaagtgcccatcaacgaacgagtggataaagcaaatgtggtacaccatggaataatacttgataataaaaaggaacaaaataatgtcctttgcaacaagttggatggaactggaagccattattctaagtgaagtaactgaggaatggcaaatcaaatattgaatgttttcacttttaaatgagagttaagctatgagaatgcaaaggcataagaatgatataatggacttggggactcagggggaaaggttgggagggggatgaggaataaatgatgacatattgggtatattatacactgctcaggagacagatgcctcaaaatctcagaaattaccactaaggaacttttatccacataaccaaaaaccacatatattccacacactattgaaagaaacataaacattattttaaaaaataaagccacttttaaaattagcaaaataaaataaatatgtcttcagagtttagatattggatccaaattagacagatcaaatactgcctttactaaatattttcatgtcattaacaacttctaaaacctttcaaacagttttttgacatgtcttggaaccatccatttctagctaaggcctgggcacctgtgaaatagggccatgcccccccttatactgggaagagtaagatatttcaagactaagatgttttctacagctccatctttttctttaagctctacatcaaggacataattaaaattggttgtctcctaagtggtttactaaaaatgcatacttaagagttaccattataattaatatttgtatctaaagctacttaaaaattttcacacacaaatctgactgaacaagtaaaatatattttaagtcaaagtttataaaaggacatgagaacatagcttttatgaaaaaattagttttgtcaagtttagaggttttcaaatattttaaattcaggaaataaaataacaaaaagacaaaagaaaatggttgaacaacttagaaaaggtttgttaaaattcatcttataaaacaatctacatgtaaaaagtgggctaaaatttgaaagagattatttaggttttccataaattaatccagaaggggtaggaagtcttaagaatgaggaaggacaggaggaaggggaggtcatcctgacactgcagaggcagaagtgcagctgaaggtatgaaggctaagaggggaggggagtttgagtgctgctgcctggctgtcagagcagaggagggtcctgggcaccagacttgaggaagggatgaaaatgctgggcagacctgtagtgggcccttgagatggcagatagtggtttccagagagagggccattgttttccagtgcccagcactgagcagagagagttttgggcagtgtaaaaaaaaaaagagaacttacctctttctcgttttagaaaaagaacagtctaagaatatcagcagggaaactctcagtgcttcaaggggttaaacgcccttttggctttcttgtgttggtttcatcatagaggaggagaaacttcttggaagtgttcctaaaaacacaacacgtctgcttctcctttcaaaaaaggaagtgctaaaacacgaacactctagatccaaatattaatacggatgtctaaatgcttccgttttccaaggggcagaaagctaaaggttgtaacctattcatttcagtcaaagttggtgaaagggaagcaaaggaactgggtggggcttggaaggatgacgaagctcaagctcattggccagcaacctctctcctgggggcgggaggggtgagcatacgtcattgctttggcttctataaaatgaggaggactcaccgagtgtgaagagtccttctggtgattgcagctgagagcacactcacgacgttctgcaaggattctctgattatgattctgaagggaaaagcgatggaatggacagcagagattgtaattttctttatcttgaattacggaagaaagtatctaggacagaaatccacgacaagtccttggaaccagcagatctcttcgttcacggagacgttgacgtattctctattgaagaagattcttaccttcttactggacaaggttttgtcagttctgcgtgactggattgtccgggagactctgaggaaactgatgtcacatgtttttccaaagaagatgtttctggaaccaacaactgtgattgtggtttgaggacttctgagagttccagtacaggaaataagcagaacatcagctggaggctaaacggatccagacttcactcttcacttcccttcctattcagtctattgtgcctgctgactgagaagcttggctggtatgtgagcaaataaacggaactattcagaaggagatgttgacatattctgtattgaagaagatccttatcttctcacctgacaaggttttgtcagttctgtgtgactggattgtccggaagactctgaggaaactgatgtcacatgtttttccaaagaagatgtttctggaaccaacaactgtgattgtggtttgaggacgcctgggagttccggtatgcgaaataagcagaacatcagctggcggctgaagggatgcagcctccactcttcacttcccttgccattccatctattgtgtctgcctgactgagaagcttggctggtatgtgaggaaataaacggaattataaacaaggagattgtttctcatctacttcattctgttgtggcttttctattttggggttcagggtgtgtgacaaggaccaaggagatgaaaggtttcatgatggagaaagcccaggcaatcagattgaagagctatccacagggaatcttggctgctgaggggctgcaccctgcaacggactgaccatatgacagaaaagggttttaaaggctcaacttctggactgagaacccagagtaatttgggaacctcctctgtgaggagatatgaaagctgggaatcatgacatccctaggaatggaaggcacatttcctgatggaaggggtgctttggaaaacaggagcagagtagacacagcagccttgtggatacgggtgggcagcatgcatgggtgatgtgaacgtggagtgtttgtgatcgaaactcaaaatgtctgacaaagtgaaaacctagaaaccacaatgaggaggaagagtttgtgagggcaatcactctccccatgtgtgaaaatcgggggctcttaaaatctcatctggagaggtgcagtctaccaaactctgggactttagcctccccttttaaaaaaccgtgcatcaataccaacgtccgaaaccacagaaataacacctggcttgcatggagacaaggacaaaaagccgtcatgatgagttgttctgctcacttgctgcctctgttcagtgcacaggatattgtccacccactagcaggctactgcaagagaagtgtgcaatatgttccctatgtgccatatatgtgccatatggcccatatgacaactgagtcagaaaatatctgatgccctcagagttacactccacctggagcttgcccccagccatccaggacctaggctccctaccctgtccaattttctggtgttttgggggcttcattctctaaggtgtgcccactctttactcaaaccaaaacacccacatattcctgcccatgaacaaccaatcaaccacttctcagttccacatcctgctgttgggtctctagtggtgacactgtaactcccaggtcatagtggtgacactataacacctagctaaattgatgccttgtctctaggaggccatgggctcctgcaggtctcatctgactctctgtagccttccctgacaatgctcacaatacccaagccagagccacattgacagcaagctgctctcatcttacctttgccagacctggccactggaaaaggctgaccctcatcctgcaatgcctatacctccaacctttgtctcaagctggtgtcctggagggacttctaagcagaaaacagattcagactcccatcctctcctgaatggcctcatatccaattctcagaccctcagccttcattgtaaggacacttcatccatgcccttgagtattctgtctgcactgtgtattctgcaatagattctcctccctctgcgaccctcaactccttccgcagactttttgttttcttgatcatctaccatagtcttccactgggacactgccaagcccattctggagagtgagttgtgcaagtacactgccccccatctacctttcgggaggtgtatacacccttctttctcccaggtctggaggctttctattttcatcctgaggcatctccacctgctcttggattcttcaaattgacaaccaccagttaacaagaactatgtgtcaccaaatagccaaacaatggcaattacaaaaataaaattaatagctgtaacccccattagcaaggatacacaaatcaaatcagggatagtgggtgaggaagtctgcctaacattcaaggaaggattctgaagtgatacaaaatcattgcctttgctatctttagaatggacactttcagccaggcacagttgctcagcctgtaatcccagcactctgagagccccagttgggtggatcacttgaggccagcagcttgagaccaccctgggcaatgtgcagaaaccccaactctactaaaaatacaaaaatagccagttattgtggcacatgcctgtaatcccaactccttgggaggctgaggcacaagaatcacttgaatctgggagccagagtttgtaatgagcgaagatcatgccactgcactctagcctaggcattagagtgataatctgtctgtggaaaataaaaacattcctcttcaaagttttcttctttaaatcataaatgttggaattaatatatcctctttgaaactcactttcttcaagcttctttatttgatggtagtaaatctttgttaagctttatgaggcaagagtaatggaagaagcatattatatatatttatactctaacctcagtgcttgttctagcaagctcaggcatgcgtgaatgtgcccaggcatgttccagcccataccttatatcctttccttattgggaaatgctgttactcctataagcattcttgtaagcaacttcctctttttctttgtctccactatctttacctattgaggacagttttaggttcttagccagttggatgtagcatagactgtgaggtccaaccccagccaatggagatagcacacagcagtagcgacctcatgcttaacagataaatattcctgtctccctttgtttggggtgctctcagctgatgagcaacaccctttctaaagaaattaaagttgtcttgctgagaaaacttttggtctaaatgctgattcttccttgcagcactgaagaagaagcaattatttccaacactttctcatacacaaaaaaagaagaaggtggaagaaaactttcttgtgcaccctatccctcactcagaaagacaacagaaggctcctagtggcaagccctagaggattcatttcttttgggaaccctcttggctgggatactaggactcaggtcaaactcagcattttcagtgtgtgggaagtgtgcttgggtttcactgttacttccaataatgtgatttggtccttggggttcaccaaattttggtatggagtggtgaaccctgttaagtttaagtgtctataaaattaacaaagcaaaataaccattctgccccatggttcagagaccaaatattgtgtaggaaatgctttagcgagagaaacagagaagaataaaaaatgtcctcaagcgctgcattatttcttgttatcgtccagatcttagaggaaaggctttcattttccctcattcagtatgatattagctgtgcatctgtcatttatggcttttattatgttggggtatgttccctgtgtatgtagttttttcagggtttttgttatgaagtgatgttgaactttatcaaacgtttttcagtttcagttgaaacgatcatatgctttttgtccttcattctcttgatatgatgcatcatgttgatgatttccatatggtgcactgtccttgcatcctgggcatgaattccacttgatcatgacaaatgaatttttaatgcattcttgaattccgtttgctggtattttgttgaggatttttgcatcaatattcatcagagatattggcctgcagtttctttttttttcttttttctttgttttgttgtttgtttgtttgtttgttttgatgtgtctatgtctggttttggtatctgggtagtagtgttccatccccttttattttttagaataatttgaataagactggtgttggttctttaaatatttggtagaattccgaagtgaagtcattgggccccgggcttttctttagtggaaggctgtttattatggcttcaatctcgttacttattattggtctattcatgttttgaatttgttccttatttaatcttggtaggctgtgtgtatctaggaatttgtccatttcttttagattttcaaatttattggcacataattgcccattgtagcctctaatcgtcatttgagttcctgcagtaccaattataatgtctccttcttcatttttgattgtatttatttggatcctgcccctttttttcttacttaggctgcctaataatttcttaattttgttgaactttttcttttgtttgtctcgctctgccaccaggctggagtgtagtggtgtgatcttggctcactggaacctccgtctcccaggttcaagcaattctcctgcctcaccctcccaaatagctgggactacaggcaagtgccaccactcccagctaatttttgtatttttagtagacacgggttttcaccatgttggccaggatggtctcgatctcttgacttcataatccacctgcctcagcctcccaaagtgctgggattacaggcatgagccactgcgcccagcctaattttgtttaaattttcaagaaatcaacttcttctttcattgatttctgtattttttatttccattttatttatttaaactctaagctttattctatcttcttctcattttagctttggtatgcttattgcctctctagctctttaatgtgcattgttagattgtttatttgaagttcttcctctctacaccataagacgtaagcatgtcctcattatgtcataagatgtaaccacttacagctataaacttccttcttagttctgcttttgctgtatctcataggctttgttatgttgtgtttccattatcaattgtgtcagaaatttttcaatatttttcttaatttcttcattgagcaactgatcatttgggagcatatttttaaacttccatgtacttacatagtttccaaaatacctcttgtgatcaatttctagttttattccactatggttcaagaagatgcttgatattatttcaattttttttcacattttaagatgtgttttgtgacctaacatatggtctactttttttttttattaaactttaagttgtggggtacatgtgtagaccgtgcagttttgttacataggtatacacgtgccatggtggtttgctgctcccattaacctgtcatctacattaggtacttctcataatgctatccctcccctaacctccaccctctgacaggacctggtgtgtgatgttcccctccctgtgtccatgtgatctatttttgagaatgatccatgtggattagaatgctgtggaaaagactttggattcctaatatccagggagggagacgatgatattactttcaatatcacacgggtgtacacactctctgtgacattgttcctaatatccagtggaagagaggatgatataacacccagggagggagaggatgatattactcttaatattgcagggtgtgtacccatgcctatgatattgttcctaatatcaggagggggagaggatgatattactcagaatatggcagggggtgtacacacactctgtgacatggttcttaatatacaggggagaatgggacaatattactctcaatatcgcagggggcgtacaaccctgtgatttgttcctaatatacaaaaggggacagtatgatattgttcctaaaatcgcagaaggtgtacaacgccctgtgatattgttcctaatatccagggcgggagaggatgatattacccccaatatcacagggggtgtgcactttccctgttacattgttcctatgatccgagtggggggaaatgacattagtcccaatatcgcaggatgtgtacactactcccccatgatattgttcctaatatcaagggggagagaggaggatattactcccaatatcgcaagggaggtacatcctccatgcaatattgttcgtaatattcaggaggagagaggaagatattactctcaatatcgcagaaagtggacacccaccctgtgatgttcttcataatatccagggaagcagacgattatatgactttcaatatcgctgggagtgtacatcccttttgggatattgtttctaatatccaggaagggagaggattatattacttccagtattgcagccagtgtacacatttcttgtgatattgttcctaatatccagaaagggaaaggatgatattactcccaatattgcaggtggtgtacacccccctctgatattgttccttacatcaaggaaaagaaagaagaatattactcccaatatcgaagagagtgtacacccctcctgtgatattgtatttaatatccatggggaaagaggatgttgttactcccaatatcgcagggggtttacacccacactgtgatattgttcctaaaatccagtgaaggagaaaataatattgctcccaatattgcagggtgtatacaggccctcccccgttatattgctcctaatatccagcggtggagaggatattactttcaatttttgcagggagtgtgtaccccctctctgatatttttctaatatcaaggatgggaaaggatgccattactcccaatatcgcaggaggtgtacatgccctgtgatattgttcctaatatccagggaggtagaggatgatattactttcaatattgcaggggctgtacaccctctatgatgttgttattaatatttaggttgggagaaaatgatatttttcctaatatcctgggaaggaaaggatgatattactgtaaatattccagggagtgtacaccttcctaatattctaatattgttcctaatatccaggggtgggagaggattatattactcccaatatcgcagtgggtgtacacccctcctgtgatgttgtttctaatatccaagcgaggagaaaatgatatcactctcaataccgcagggggtgtacaccttccccatcatatcgttcctaatattcagagggaaagaagatgatgttactttcaatatcgcaggggttgtacacaacccctgtgatatttctcctaatatccaggaagaaagaggatgatattgctcccattatagcagacggtatacgcctccctgtaacattgtttctaatatcaagactgggagaggatgatatcacttccagtatcgcaaggggtgtacacctcccccgtgatattgttactaatatccagggggaagaggataatattactttcaatattgcaggggctgtacacccccgtgatattgttgttaatatttaggttgggagaaaatgatattagtccaaatatcgcagagagtgtacacacttccgataatattgttcttaatatccatgggggagacgatgatattacacccaatatcgcagggggtgtagtctccccttgtgatattgtccctaatattcagggaagtaaacgatgatgttagtgtgaatattccagggagtgtacaccccctttgtgatattgtcctaatatccgcaggagagaagataatattactcccaatatcgcagggggtgaacacaccccctgtgatattgtttctaatatccaagcgaggagaaaataatattactcccaatgtctcaggggatatacaccttccctatgatattgtttctaatattcaggtggaaaacgggtgatattactcctaatatccaggaagaaaggggattatgttactccccttatagcagggggtatacacctcccctgtaatattgttcctaatatcaaggctgggatatacgtggggggaaggatgatattactcccaatatcacaggggttataaaaccttctgtgatattgctcctaataaccatggcggaagaagatgatattactcctaatattgcaggaggtgtacactcccccattatgttgttcctagtatgcagaaaaggagaggatgacattattgccaatatcgcagggtgtgtacaccacccatgatattgttcctaatatttagagggacagaggatgatattactcccaatatcgcagggggtgtacacgcatcccctgtgatattgttcttgaaatcgaggggaaagagaattatatttctctaaatattgcagagggtgtacaccgccccctgtgatattgttcctaatagccgggggcggggggagataattaaattactttcaatatctcagagagtgtacatcccccttgtgacattgttcctaatatccagagcaaaagagaatgatattcctcccagtatcgcaggaagtgtacatttaacctgtaatattgtttctaatatccagggggaagagaatagtaatactcccaatatcgtaggggttgtacaccttttctgtgatattgttgcaaatatttagaagagagagagaatattactcgcaatatcacagggaatgtatacttcccctgtgatattgttctaatatctagaaaaagagaggataatattactcctaatattgcagggggtgtacacccccacttgtgatattgttcctaatataaaggaaggtcgaaaaacaaacggggagcccagggggaaggaaggcaggcgaggaagaggcagcgccggggcgccggagggagcagccgggccgcggaagcgcgagcacgagaccggtcgcggtcgcagtcgcatttttgccgttgtcgcggccgccgccgccgaggcttacccggggatgtctgagcccgcgcctcgcggcccccaagctccacgctgcgcccgctgtcccggcctctaagggccgccacgtccctgcggcgcgcgcaggcagaaagcggcttcgtgccggcggagggggcccgggcgggccgggaaaggctgccccaggccccgcgcctaccccatcaccgcggccggcgccgggccgggaggatgagcggtgtggggctctgaagcatggagggggttttgtacaagtggaccaactatctcacaggttggcagcctcgttggtttgttttagataatggaatcttatcctattatgattcacaagatgatgtttgcaaagggagcaaaggaagcataaagatggcagtttgtgaaattaaaggtgacagctttggaggggaccacccttgattggatacataaattctgttcattcagcagacaacacaagaatggaattaatcattcctggagagcagcatttctacatgaaggcagtgaacgcagctgaaagacagaggtggctggtcgctctggggagctccaaagcatgtttgactgatacaaggactaaaaacgaaaaagaaagaagtgaaaccagtgaatcgctgaaaaccaaaatgtctgaacttcgcctctactgtgacctcttaatgcagcaagttcatacgatacaggaatttgttcaccacgatgagaatcattcatctcctagtgcagagaacatcaatgaagcctcttctctgcttagtgccacgtgtaacacgttcatcacaacgcttgaggaatgtgtgaagatagccaatgccaggtttaaacctgagatgtttcaacggcaccatccggatcccttagtttctcctgtgtcaccttctcctgttcaaatgaggaagcgttctgtcagccaccctggttcttgcaccagggaggagtagccactgtataaaagaaccagtatctgcacttcaccgactctcccagcgacgccgaagaacctactcagatacagattcttgtagtgatattcctcttgaagacccagatagacctgttcactgttcaaaaaatacacttaatggagatttggcatcagcaaccattcctgaagaaagcagacttatggccaaaaaacaatctgaatcagaagatactcttccatccttctcttcctgaagaaactgtagtgtccaactttctctaagtattgctatgcaaaagctgctgtaattgaactattgttatagggagtagttttttcccttaggactctgcactttatagaatattgtaaaacagacaaacaagaaaacaaaccacatacttttgaagcgtgttttatctttatatagtttgtttgcaagagtattttcctaataacttcacagtatgaatgtgcatcttttttttctttttttaacaaatgatggtgtaacattttgacatccataaggacaaatgtagatatttttctaaaaaaccgtgaggggactgacagcttggtcagggtgtattgtagcttataaacatgaaatcttacaaggtttcagtttgacagaagtgtgatatatgtaacttgtgccatggaccaaatggtcactttaccacagctaaaaatgagttatgatagcagcttgatggtgattgcattgtattcctttaatcaaaaaggaaacgcaatattctaagtatctttagcccaaataccatgacatattgagcatctttaaataaccagactgtattgtccttcatatgtgaagttgacactactgatttgtcaataccaaattttgggttaaagtgtttaatttttatttatttattttcttgttgcctcaaaagatgattgcattctaacttttgtgacctaccaaatttaagatgtgtatacattgttctttacgttgttctagaaaagagattttaatgctgtagtgacttagctcacttacatcagagaaataaacaactttcaatggaaaaaaatatatataaaggaaggaagaggatgatattacttctcatatagaaggggttgtacaccccccttgtgatattgttcctaatattcagggagggagaggattatattactcccaatatagcagggagtgtacacccccccccccgtgataatgttcctaatattcagggaagcagaggatgatattactttcaatatcacagggggtgtgctgtccccctgttatattgttcttaatattcaggggggagaggatattattatgcccgatatcacaggagaagtacaccccacaagtgatattgttcctaatatccaggggtaaagaggatgatatcgcaggtggtgtacacccctccccgtgatattgtttctaatataaagaaggagagagcatgatattactcccaatatcgctggaggtctacaccccccttgtgatactgttcctaatatccaggaagggaaacaatgatattgctgtgaatattccagggggtgtacacccctttgtaatattgttcctcatatccagggggtagagaggatgatattactcccaatatcgcagggggtgcacggccccactgtgatattgtttttcatatccaggaggggagaggatgacattactctcaatatggcagggggcgaacaccccctgtgatattgtgctagttaggttgggagaaaatgatattactcccaatatcgcagggggtgtacaccgctcctgtgatattgttcctaatatccatgacgggagaggatattactcccaatatcgcagggggtgtacctctcccctgtgggattgttcacagtatccaaaagggaagaggatgatgttactcccaatatcacagggagtgtacaccaccattgtgatattgttcctaatagccagggaagaaaacgatgatattattgtgaatattacagggggtgtacacaccccctgtgatatggtttttaatatacaggttggaaaaggatgatattactcccaatatcacaaaaggtgtacacacccccccatgatattgttcttaatacttcggtggggagaaaatgatattagtctccatatcacaggggtgtgaactcctccggtgatattgtttttaatatcaagaggggaggagatgatattgctttcaatatcgctgggggtgtacatccctcctgtgatattgttccttatatccaggcgaggggaaaataatattactcccaatagtacacaccccatgtggtattgttcctaatactcagggggaaagaagataatattactttcaatatcacagggtttgtacacctttcctgtggtatagttttcaatatccagggggaaggtacatgatattactcccattgcagcaaggggtgtacacacctcctgtgatattgttcctaatatccagaagtggtgaggatgatattactcccagggggtgtacaccccacctatgatattgtttctaatatccaggggaaaagagtgtgatattatgcccaatatcgcagagggtgtacacttatcctgggatattgtttctagtatttggggagggaggagaggatgctattattctcaatatcgcagaaattgtacacccccgctgtgatattcttcataataatcagggaaaaagaggatgatattactaccaatattgcagggggttacacttcccctttggtagtgttcctaatatccaggaagaaagaggatgatattaatcccattttccaggaagtgtacacccaccgtgtcatgttgttcctaatatccagcagggaagaggatgatattactcccaatatcggagagggtgtacacttcccctgttatattgtttctaatacccagggggaagaaggatgacattactgccaatatcacagggtgtgtaccccaccctgctattgttcctaatattcaaaaggaaagatgaaaatattactcccaatatctcagggtgtgtacacctctcctgtgatatcgttcctaatatccacaggaagagagaatattactctcaatattgcaggggggtgtacacccccctgtgatattgttccaaatattcgggcggggagaggatgatattagtcccaatatcgcagggggtgtgcaccaacctgtgatattgttcctaatatccatgcgggggaggacgatatcactctcaatgtcgcaggaagtgtacacctctcttgttatatttttcttaatatccaggagggaaaagatgatattactgccaatatcgcagggtgtgtccaccccccttttatattgttcctaatatccaatggaaaagaggatgacattgctctccatatcccagaaggtgtacaacgcccctgtaatattgttcctaatattttgggggaagagaggatgatataacttataatatcacaggaggtgtacaccacccctatgtattgttcctaatatcctttaagggagaggatgatattactcccaatatctcaggtggtgcctattccccctgtgatattgtttttaatatccaggggaagagagtatgatattacgcccaatatcgcagggggcatacaccctctctgagatattgttcataatatatagagggagagaggatgatattacttccaatatcagaggtggggtacaccccccggttatattattcttgatatccaggaggggagaggttgatattactggatatatagcagggagtgttcacatcttctgtgatactgttcctaatatccagaaaagtagaggatgatattactcccaatatcgcagaacgtgtacacctccctgtgatattgatcctaacattcaaaggggagaggatgatattactcaaaacatcacagggcatgtacactcccctgtgatattgttcctagtatccagaagggagcaagataatattactttcaatatcgcagggggtgtacacccctctttggtatgtttcctaatatccagaaggaaagagggtgctattactttccatattgcaaggggtgtacacccccctgtggtatggttcataatatccagggagggaaagggtgctattattccccatatcgcgaggcatgtacaccctgctgcggtacggttcctaatatccagggggaaagaggatgctattacttcccatatcgcggggtgtgtacacccccgtgtggtatgttttgtaatctccgggaacgaagagggtgttattacccctcatatcgctggaaatgtacactcccctgtggtacggttcacaatatccaggggattgagggtgctattactccccatatcgcggggggagtgcacctccctgtggtatggttcgaaatatccagggtaagagagggtgctattattccccattttgcaggaggcgtacacccctctatggtatgttttgtaatatcccaggtaaggggtgctattgagagaagagagcaaaagaccccccccatattgttctgtattattttatactcagtacctgttttaagaagaaacaaggaagcgaaaccaaaggcaggcagcccggcgccaggcaccagatccaaaaccagacccgaaaccaggcctgggccttcctgaccttagcctgaaagttaaaattcaacccatgacctagcaactgatgttatccatagattccagacattgtatggaaggacattgtgaaatttcttgttctgttctgtttcactctgagtactggtgcatgcagcccttgtcacatacccactagattgctcaatcaatcatggccctttcatgtaaaaaccttagtgttgtgagcccttaaaaaggacagaaattgtgcactcaacaagcttggattttgatactctagtctgctgatgcttccagctgattaaaagccacttccttcactacctcggtgtctgtgggattttgtccgcggctcctcctgctacactgtgactccccttatagagaggggtgtacacccccctttggttcctaatatccagcgggggagtaggtgctattactccccatattgcggggagtgtacacccccttgtagtacggatcgtaaaatcaaggagggagagaaggtgtaattatccccatatcacagggagtgtacacccctttgtggtatagtttgtaatatccacgacgggagagaatgctattactccccatatcgtggagggtgtacaccgccctgtagtatggttcgtaatatccggaaggggagaggttgctattactccccatatggtgggaagtgtacacccccatgtgatatggttcataatatccaggggggtagaggatgatattacccacaatatcatagaaggtgcacacccttttgtgatattgtccataaaatccagaaggggagaggatgatattacttccaatatcacagggggtgtgtagccccatatgatattgtttgtaatatcaaggtagggagaggatgctattccttacaatagctcaaggggtgtaaccttcttgtgatattgtttgtaatatccagaaggggagaagataatttttttattttaaaagtaaactttaatgtcaaaaatgcaaacttgagaagggcagaaagatcaaacagaaggctgccacttcacaattggagggttgcacagtggccgggcagaggcgctcctcactccccagacggtgaggcagccgggcagaggtgctcctcacttccgagatgttgcaggagccgggcagaggtgctcctcacttcccagaacagggggctgccgggcagaggtgctcctcactgcccagacggtttgcaggcctggcagaggcactcctcacttcccaaacggagcagcggcaagccagaggcgctccacacttcccagatggtggggcagccgggcagaggcgatcctcacttctcagagggtagggcggcccagcagaggcgctcctcacttcccacatggtggggcggcaggctagaggcgatcctcacttcccagacggtggtgtggccatgcagaggtgctcctcacttcccagatggtgtggccgccgagctgaggcactcctcacttccctgacagtggggcggctgggcagaggcgctcctcacttcccagacacttggactccgggcagagactctcctcatttcccagatggtggggctgccgggcagaggcgctcctcacttcccagacggttcagaggccgggcagaggcgctctggggagaggataatgttactcccaatatcgcagggggtgcacactccctgtgatattgttccgaatatccagagggggaaaggatgatatagctcccaaaatcgtggggagtgtacacccccctgtgatcttgtttgtaataccaagaagaaaagagaatgctattatttccaatatagcagggggagtacaaccccctgtgatattgttcgtaatatctagggggagagaaaattatattagtcttaatatctcaggggacgttcatccccctgtaatattgttggtaatattcagaatggagaagatgatattgttcttaaaatacaggaaaaaatatgataatattacttccaatatcgaagggggtgtacactctcctgtgatattgttcccaatatccagaatgaaagaggatgctattactcccaatatcccagggagtgtacacccctttgccatattgttcataatatccaggggaagacaggataacattactcccaatatcaccgggggtgtccacccactagtgatatttattgttcatcatatccagaaaaggagaggatgatattactcccaatattgcaggtggtgtacggtccctgtgatattctttgaaatatctagaaaaggagaggatgatatcactccgagtatcacagggggtgtacacccccctgtgatattgttcgtaatatccaggggagaaaaggatgatataattgccaatatttcaggggatgtgcacctccctgtgatattgtttgtaatatccaggggtggagaggatgatattactcaaaataacgtaaacatcctgtgtgtacatcccctgtgatattgtttataatatccaggggggtagaagatgacattacccccaatatcacagagtgtacacacccctgggatactgttcataatatccaggcgggaaagaatgaactacttccaatatcgcaggatatgtacacccccctgtgatatatttcctaatatttatgtgggtaaggatattacccccaatatcacagaaggtgtacatcctctttgtgatattattcctaacatccaggaaaggagagaatgatattactcccagtatcgcagggggtgtacaccacccctgtgatattgttgctaatatccagggggagaggataatattactcccaaaatcacaggggacgtacactcctcctgagatattgttcctaatattcatggggaaaagaatgctactactccaaatacagcagagggtgtacaccatccccgtgatattgttttttatatccaaagggtgaaaggctgatattactcccaatatcgcagggggtgtacaggccccccatgatatcattcttaatatccagggaggcaaagaatgatgttactcccaatattgcaggctgtatacaccccccgtgatattgttcctaatatccagagtaagagaggatgacattgctcccaatattgcaggggttgcacgcacgccctgtgataatattactcccaatatcaacagtgggtgtacactcctcctgtgatattgtttgttatatctaagaaagaagaggatgatattactgtcaatatcacagaaggtgtacagccccttgtgatgttgtttctaatatccagcggtgagaggatggtattactcgcaatattgtagggggtgtccaacggccctgtgatattgtttctcatattcaaaaaggaaaagaataatataactccaaatatcgcagggtgtgtacacttccctgtgatattgatcctaatatccaggaagagagaggatgatattaatcccaatatcacagggggtgtacatcgcttctgtgatattcttcctaatatccagggggggaggggatgctattactcttaaaatcgcagggaacttacactcccactatgatatttttcctaatatccaggaagggagaaaatgatattactcctaatatcacatatcacaatgggtgtacatctccccgtgatattgtttctaatatcaaggatgggagaaaattatattactctcaatatcgcagggggtgtgcacacctcctgtgatattgttcctagtatccagcggaggagatgatattactttaaatattgtagaaggtgtacaacccccctttgatattgttcctaatatccagggggaaaggagatgatattactcctaatatcgcaggggctgtacaaccctatgtgatattgtttcttctaatatccaggggtggagaagataatattactcctaaaatcgaaggggacatacactccccctgtgatatttttcctaatatccagaaggaaagaggatgatattactcctaatattacaagaaatgtatacctgtcctgtgatattgttcctaatatccagaggggtaaatgattatattactcccaatatcgcaggggtgtacaccttccctgagatattgtttctaatatgcagtggaggagaggatggtattactcccaacatcacaggagatgtaaactccccttgtgatattcttcctaatgttcaggacgaaggagggtaatattactcactgtattgcagcagggggtgtagagccccctgtgatattgtttttaatattcaaggttggagaaaataatattccttccaatatcgcatggggtgtacacccttctttttatatagtttctaatatctggggggagaggatgatattactcccaatatcgcagggggattacacccccactgtgatattgtttttaatatccagggtgggagaggataatattactccaaatatcccagggctatacaccctccgtgtgatattgtttctaatatccagaggaagagaagatgatattactcccaatgtcacagggtgtgtacaggccttctttgatattgttcttaatatccatgagggagaggatgatattactcccaatatcgcaaagactgtacaccctttctgtgatattgcttccaatatccagggagggagaggatattacactcaggatcacagggggtgtacaccccaacctgtgatattgtttctaatatctagggaaaatgagggtgatattactatcaatatcacaggaggtgtacactcccttatgatattgttcctaatatccaggagaatgacaggataatattactcccaatatcgcgggtggtgtctccccccactccgtgatattgttcctaatacccagagggggagagaatcatattactcccaatatcgcaggggatgtacacctacatccggcggagtagaagataatattactcacaatatcgcaagaagtgttcaccttccctgttatattgttgctaatatccagggagtgagaagatgatattactttcaatactgagcgtgtacactacccctgtgatattgtttctcatatccagtagaggagaaaatcatgttactcccaatattgcaggggtgaacacctcctttgtgatatttttcctaatatcaggaaagggagagtatgatattacccttaatattgacaggggtgtacacccccctttgatattgttccaatatccaggggggcagaggataatattattcccaatatcgcagagggtgtacaccccccgtgatattgttcctaatatccagagaaataaaaaatagtattatttccaatatcacagggcgtacattttccctgtaattttgttcctaatatctggggggtggggtggcaggataatattactctcaatattggagagggtgtacacccccctgtgatattgttcctaatattcagggtgggagagaatgatgttactcccaatatctcaggagtcgtatacacccccttgtgatattttttctaatatccaggaggcagaggatgatattgctcccaatatcgcagggggtatacacccgagctgtgatattgtttctaatatgcaatatgggggaaggatgattttactttcaatatcgcagggaatgtacactttccttgtgattttgttcctaatatccaggggtggagaagatgctattactatattactcctcatatcgcaggcggtgtacaactccctgtgatatggttcagaatatccagagtgaaaaaggagggtgacattactcccaatatcgggggggtgtacacccctttgtgatgtggttggtaatatccaggggggcagatgagggtgatatcactccccatatcgtggaaggcgtccacttttttgtgatgtggttctttatatcccgaggggagaaggtgatattactccccatatcgcgaagggcatacacccccctgtgatatagctcataatattccggagagtggaggaagatactatgccctatatcgcgggtggcctacaaccccctatggtttggcttataatatccaggggggagagggtaatattgctccccatattgtggagacgtacagccccctgtgatatggtttgtaatatctttggggggcgagggtgatattactccccatatcgcggggagcatacacccccgtgatctggttcatagtatctcaaaggaagaagttgatgtgtacaacttaagggaaaaagttgaagtgaagtgtacacacgccctgtgacgtggttcataatatccaggcgggggagaggagagtgatatttactccccatatcgcgggtgttgtaaactcccctgtgatatagttcataatatccaggggagagaggagggtgatattgctcctcatatcgcgaagggtgtacaaccccctgtgatatggttcataatatccagaagggtagaggacgatgatattactccacatatcttgggaggtgtgatatggttcgtaatatccagcgatgagagaatgatattactccccatatcgcaaaaggtgtgatagggtttgtaatatcctgagggggagagggtgatattaatccctatattgcagaaggactacaccctcccatgacatggtttgtaatatcccagggggtagagtgtgatattactttccatatcacagggggtgtgatatgattcgtaatattcgaagggggagagggtgacactactctccatatcacggggtgtgtgatatggttcttaatatcccaggggttagaggttgatattaccccctttttggggggtgtgtacaccccctgtgatatggttcgtaatatcccgggggagacagggtgacattattccccatatcgaggggatcgtacaccccctgtggtgtggttcataatatccctagggggagatggtgatattactccccatatcagggggcgtgcactcttctgtggtataattagtaatatccagggggcagaggtcgatattcgtttccatatcatgaagggagtacacttccctgtgatatggttcctaatatccaggggggagagggtgatattattccccatattgcggggggacatacaacccctgtgatatggttcataataaccagaaaagaagagggtgatattaatccccgtattgcagagggcatacaccccccctgtgatatggtttgtaatatctaggggaggaaaaggtgatattactttccatattgctgggtgcagacacccctttatgatatggttcataatatccaagttggagagggtgatattacttcccatatcatgggaggtatacccttccctgtgatatggttcgtaatatccagaaggggagagattgatattactccccatattgtggggggcgtacaccttcctgtgatacggtttgtaatatctaggggatatagtgggtgatattactcaccatatcacgggggttgtaacatggtttgtaatatccaggggaggagagggtaatgttactccccatatctcggggcatgtacaccctcctgtgacatggttcgtaatatccaggtcgggagagggtgatattactcctcatattgccgggggtgtgttatggttcataatatcctggggaaggaggctgctatcactctccacatcttgggggatgtacactctcctgtgatatggttcataatatccagggtgggtgagggtaatattactccccatatcgcgggaagtgtacatacccctgtaatattgtttgtaatagaagagagggtgatattactccccacatcgcgggtggtgcccacccccctgtgatatggtttggaatatccagggggatgaggagggtgatattactccccatatctcggtgggagtacatccctctttgatcaagttcataatatccaaaaggaaacaggagagtgatattactccccatatcgccgggggtgtacacgggagggggagtacacccccggcgatatggtctgtaatatccagggaaggagaggagggtgatattactcaccatatcgcaggtggtctacatttacctgtgaaacagtttgtaatatccagggggggaaatgagaatgattttttttttttgagtctcactgtgtcacccaggttggagtgcagtggcacgatcttggctcactgcaacccccgcctcctggactcaagcaattctcctctcccagcctcctgaatagctgggactacaggcgcaccccacaacgtctggctaatttttgtatttttattagagacggggtttcaccatattggccaggctgatctcgaactcctgaccctgtgatccatccgcctcggcctccaaaagtgctgagattacagatgtgagccaccacgcatggcccaaggagaacgatattactccccatatcccagggggtgtatatccccctgtgatatggttcagaatatccggaaggaaagacagggatattacttcccatatcgcaaggggtgtgacatggttcgtaatatcccatgggggagagggtaatattactcttcgtattgtgaagggcatacactcccctgtgatacagttcataatattccggggagtagaggaagatattatgctccatatcgcgggtggcataagccccctgtggtttggttcataatatccagggaggagagggtaatattactccccatattgtggggacgtacaccctcctgtgatatggtttgtaatatcccagaggggagagagtgatattactccccatattgcagggacatacacccccctgtgatatggttcaaaatgtcttttttttttgaaggactggttctttatttcaaaaagacacttgtcaatattcattatcaaaacagttgcactattgatttctctttctcccaatcggccccaagtagaccacatcaaaggagagtacatattaagccaataagctgtaggatgtacacctaacagacctcctagaaaccttaccagaaaatggggacagggtagggaaagaaactttaaaagatcaacaaactgccagcccacggactgcaggggctgtcacagccagatggggtggccagggtgccacaaacccaaagaagcaaagtttcaaaataatataaaatttaaaaagttttgtacataagctattcaagatttctccagcactgactgatacaaagcacaatgagatggcacttgtagagacagcagcttcaaactcagaaaagggtaatgagatgagtttcacatggctaaatcagtggcaaaaacacaatcttctttctttctttctttctttcaaggaggcaagaaaagcaattaagtgctcacctcaacataaggggaacatgatccattctgtaagcagttgggagggggtagagatggaacaaaattttggtctcagaggtcttgccatcttaatttggtcacttctaatgaaaaaaataaaaaatagaaataacattatccaaaggtatcttaaagctgaaaacttgaacagcacattttttgttgttgttgtttggctaactcctcctggaaccacctttctggcttagctagtactttgtacagagcaatgaggcttcccatagtggagtctccctgggctctgtttggctctcagcaaggcaggcctataccttttcctctcctccatggagagaggaatatgcattaaggtgaaaaatcaccttccaaaagtgagaaagggattcgatcgctgcttcagggctgtggtattatatggaatgttttacaaaaggttgctacaaaacaacaaaagaggtaattacaaaatgtgtacatcacaacatactttttaaagacattatgcattgtgctcacattcccttaaatgttgtttccaaaggtgctcagcctctagcccagctggaatctccgggaagaggcggacagtttggtgaaaaagacacagggaaggagcgggcggcggaaggagggggcggcgaaaggagaaagcagccttccagttaaagatcagccctcaattaaaggtcagcttcgggcaggctggcctcaggcggagtctggttcagagggaggagcagcagcagggtgagactgaggcgttctacatctcattcaggtcaagcagagtctggtccagcatcctttgtgtacagaggtgctcccctttggtgcatttcagtttatcttccaagtcatcaattgtcttttccagcttggctaccgatctctcagcaaactcagcatgggtctccgcctcctttattttatcagtaagaatcttgatctcttcctcatatttgtcttctttttgagagtacttttcttcagcagcactcagacacttcaggttctggtccatcagtctaatctgctcatccatctctcggcaaagggattctgccagctcagctcgttcctctgtgcgttccaagtctccttcaatgatcaccaacttacgagccacctcttcatacttcctatctgcctcttctgcaatgtgcttagcttctctgagttggatttcctggagttccatcttttcttcatcttttaaggcccggttttcaataaccttcttacctctctcactctcatcagcagctttttccgcttcttccagcttttgcagggcagtagccaggtgctcctgagcacggtccagctcctcttcaaccagctggatcccacgttcaaggaggccacctcagcctcagcctgttcccgggcccacctttctccctcaacttctcgctggaggcgctcagctcgctcctctgcatcatctgcctgctgctgcagaacctggatcttgcgcttcaccgcctcgatggtggtgatcccagccatggtgcccacccagctactgctagagctccggttcctgcctcctccgatcggcgttgcagcctcctctcacccttacttccgcctcggttcaaaatatcttaagggaaggagttgatattactccccacatcacgggaagtttacatcccctggtgatatggtttgtaatatcccagggtggatagggtgatattactctccatatcgcgaaggagtactcccccctgtgatatggttcataatatccttggggggagagtgtgatattactccccatatcgcgagggccatatactcctttgtgacatggttcgaaatatcccggtgggggagggggtagagggtaatattactccccatacagcgaagagcatacgcccttctgtggcaaggttagtaatacttcagggaaaagagtgcaatattacttttcatattgcagggaacatacactcccctgtgacatggttcgtaatatcccgggggctgagagggtgatatttctccccatatcaccgggggcctacacctgggtgtgatatggctcataatatacagggagggagagggtgatattactccacataccgagtgaggggttacacaccctcgtgacatgttcgaaataccccaaggaggagacaatgatattactttccctgtcgcgggggctacaccctcccagtgatatggttcacaatatcccggggtggagagggtgatattactccctatatcaccggggggtgtacacttccctgggaaatggtttacagtatccccggggggagagggtactattactccccatatcacgttacatatcagggtacacccccacgtgatatggtttgtaacatcccaggaggaagaaaatgatattactccccatatcgcggtggcatacacccctccccgttaaatggttcataatatcttggggtggagagggtgatattactccccatatcacgtggggcatacaccccactatgatatggttcataatatcccggaggggagagggagatattactctccatgtcgcggggggcatatacacccctgtgatatggtttgtgatatcccgggggcggagagggagatattactctccatatcgtggggtcgtacacttttctgtgatatgattcgtaatatccagacggggagagggtgatattacttcccatattgcgggggcgtacacccctctgtgatatggttcataatatcccgaagaaaagagggtgatattactcctcatatcgcggggaacacacaccaccctgtgatatggtttgtaatattcagcgggggagagagtaatattactccctgtatctcggatggcgtacactcccctgtgatatggttcataatatccagaagaaaagagggtgatattactccccatattccagggaatgtacaccaccctttgaatatggttcgtaatatccaggaggggagagggtaatattgctcccaatatcgaaggaggtgttatacggttagtaatatccagagaaggagagggtgacattactccccacatcgtggtgggtgtgcacccacctgtgatatggttcataatattcaggttaagagaggtgatattgctttccatatcgccaagggtgtacactcccgtgaaatacagttcgtaatatccaaaaggggagagggtgatattactcccatatcgtggggggtgtacacccctctgtgatatggttcataatatccagggtggaataaggtggtattactccctgtatctcggggcatgtacatcgcctgtgatatgattcataatatccagaagaagagagggtgatattaatctccatattgctgggggtgtacaaccccctgttgtatggtttgttacactgagttggggagagggttacattactctcaatatcgagtggggcatacacacttatgtgatatggttcataatatcccagggaggagagggtgatattactccccatatcgcgggaggcatacaccccaatgtgatatggtttgtaatatctacatttttttttttgagacgaagtctcgctcttgtcccccaggctggagtatgatggccggatctcggctcactgcaacctcagcctcccgggttcaagcgattctcctgccttggtcccccaagaagttgggattacaggcgcacaccaccacgcccggctactttttgtatttttagtagagaaggggtttcaccatgttggccaggctggtctagaactcctgacctcagatgatccacctgcctcggcctcccaaagtgctgggattacaggcgtgagccactgcacctggcctggtttgtaatatctatgaagggggaaggtgatattactttccatatcacgggaggcgtacaccacgatgtgatatggtttgtaatatccagggggtatactgggtgatattactccccatatcgcggggagtgtatacccttttgtgatatggttcctaatattaagctgaggagaaggtaatattactccccatatcgcaggggtttttatatggttcataatattcaggaagagagagggtgacattactctccatatcacggggtgtgtactcccccatgtgatatggtttgtaatatccagggaaggagaggttaatattactccccatatcgcagggggtgtacacctctctgtggtttgtaatatccaaagggaagaggatgatattatcttcaatatcttggggggatacagtccccagtgatattgttcataatatccagagggggaggggatgatattactcccaatattgcaggtggtgtacaaccccctgtgatattctttataatatagagggggatgatgatattactcccaatatagtaaacaacctgtgtgtacaccccctgtgatattgtttataatatccaagggtggaaaggatgatattactcctcatatcgcagggggtgtatacccctctgtgacattgttcctaatattcaggggaggagaagatgatactactcctcatatcacaggggatgtacacccccctgtgatacttttggtaatatccaggggaggagaaaattatattattccccatgtcacagagggtgtacaccccgctgtgatagtgttcataatatccaggtgaaaagaggatgatattactccgaatatctcaggaagtgtacacccttctgtgatattgttcataatatccaaaggtggagaggaggatactactccccatatcgcagtgggtgtacacccccctgtgatatggttcataatatccaatgtaggagaggatgatattactttccatatcgcggagagtgtacatccccctgttatattgtttgtaatattcagggagaaagaggatactactactccccatatcacacggggtgtatattcccctgtgatatggttcctgatatccaagagatattataatcctctcttggattatgctacctctcatatcgcatggggtgtacacacactttgtgatatcgtttgtcatatccaaggagggagaggattatattaatcccaagatcacggggggtgtacaccctcctgtgatattgtttgtaatattaaggggggagaggataatattactcccaatataattaacaccctgtgtgtactcctccttgtaatattgttcataatatccaatgggggagacgatgatattactttcaatatcgcagaggatgtacatccctttgtaacaatgtttgtaatataaaaggcaagagaggatgatactacttccaaaattgcaggacatgtacaccccccggtgatattgttcctaatatccagtggggaagaggatgatagtagtcccaatatcgcaaagggtgtacacaccccctgggatattgttcctaatataaaaggaggagaggatgctattattcccaatatcacagaaggtgtaaaatcccctgtgatattgttcgtaatattcaggaggggagaggattatattactcccaatatcacagggtgtgtacacagggaggggcaagggccagaagcgggcgggaatccccatgtttgggcggacccagtttctaatggccagcatttgccaatcaaagcttaccagagaactctaaaagccagggctttcctgctagacaagactcatttctggaactgctttaaaaagaaacaaaacttcccaaggaccccttttcctctctgtctgcctaaaataatgttttaaaaactcctaaagcagctgaattcagcccccttcctgggggaatgtatagacggaactcccacctttcccggcatcccaaggccagagtatgtgaaactcctgggtctctatgtgtgtctgagcggctgctctgccaacactccacacagccctgtgtcctggacccaaggcccttatgacctgagctcaagaggggatctcctgatccatgggttgcaaagatccatgggagaagcatggtttctggggcggggtcacacgctcagtcactgtttccctcggatgccggagatggttcctttggctctctgccaatacagggtgaatcatcatccatccctcttttctttgttctcccgggtcaagttgtttgcctagtcagtcccaatgtgagaacctgaatatttcagttgacgcgctgacttcaaaatccccgggcttcgggaggcggagcttgcagtgagccgagatcccgccactgcactccagcctgggcgacagagcgagactccgtctcaaaaaaaaaaaaaaaaaaaaaaaaaaaaaagtccccgggcttttcttttcactcagtggaaggcagctgcttctaattggccatcttggcccgcccccaccacgtgaccttctgtaaaatgcctccactctccaggaacgctctcattatataactttgcctgaaaccaacagcacgctcattgcacatatcatgggctcatttatttcacttataaagaacctggccaaggaagagatagtgcctaaagtggccagtattctgaccgatatgttagaaaaatggtgtgccgaccaattcatgacatgtgtcccaaaactagcaacggaaattgtattcgccgtgttgaggtctctaatccagatgatgctcatctatgtactggaaaaggcagagtcctttcctgacaagctgctgaaactcttcagaaacatctcatatttcctgaagaagatgatgtctggacaagcagcacaggtcgttcagatttaactttctattcatatatccagcacgatattcgcacaattgtcacgaaaccttaccagttgatgagtcctgcacatttcctttaatttcaggaggaagagggtaatccggatgagttttctgacctactctgctgctgtgattaaacaaccaccaggaaattttgacgacactgttctcctgagctcctccctttcctccgggaacaaaacaattgaatttacaaaaataaagtgttatttgactggagtgaggtctcatgtctgcttatgcggtggctcgctgctcagaacagggtgagtctctgggttgtgtgctgaggaggggaggctctcaatctggagaaaacccactgcaggggacacctccatggggtctgagggactgaggatgaggagccggactgggtctagggaaggaggaggtttcagagggtgaaattctggcactaaagcctgggggtgtttgggaacttcctccttccgaagaagtttcagggagggataaagacaaaccctgggctccttgaggggcccttactaatttgagaggactctatcgggaaggagagtgacaatggcctccttgaggactgaggcccctgaataaatgaggcccagatacagtccatgggggatgagaccttcaagggtcacattttggttgggacagaggaaaagtgcagctctgcagccgcagaggaaaacccggcagtgtgaaagcgaccttggaggggccctgtgcgctctgaatgcgtctgagcccccatcccctgtccccgcctctctttctggattcttccagctcggctgtctccgccatcttctgagcgctccaccctgacttattcaagtttcccttctgccttccaagtactccaaaatctttcagatctgtgtccctacccctgtttttagcatgtgttggggctccaggtccctgaaggtttctggcctgaaatccacctccccagcggagtggactgcgttctagagactccacactccgcgaggttcccaggcccctgagggacaaccgagtggcctgcgcacttcagggctccacactcggcaaggtctttcaagcccttggggtccccttcttagttttttccacctttctgggctgcagtcactccataaatgctgggatctgatccccacccccactctcgtttcctcaattctgcgggctacacgctctggcaaggtcctccgggccctggatcccctccctctccctatgcccacgctcctagtcagcccttctggggtccactattttcaggaactaaccgttctcatggagccttgctaaccggaaagctgtgtggaagaaaggctttgaggatagaggtggagatttggctcttccatagtgccactcacccaccccaccatgctgccactgccagacccggacccctgtttcagaacaagtgaccagattcgctcctggacagccctggacactggccttttctctgaaaactactcaccctttctctagtccccacttcatgccagcctcataccctcttccttcccccacgctggcttccgggatcctcctctgctcagacaacctcttctgtgtcccacccccgtttttagaatgctttggggcaccaggttgggggaaggtttctggcctgatatccatctctttccaaactcccttcttcccttgaaaggcttcttgccttcagccccacttctggctccgaggtttcaggacaccctcctcttcatcctcattcttttgaccaccagctttttaggaattcgaacgtccctctcatcttcgtgaatcctgtccaggcatttgttgaccccttcatctgatacccctgacctcacattgccaaaagtctacccctacccagtacactggaattagacaaaatcccaggagttttacctcaactctgagtgtgcccacaggagctctccctgaagccacgtccttttaagcagggtctagggttcctcccttgtcttaatgaactctttgtcacacggaggacgttatggagcccttatgatctttcactgcctttctgcccagcgttttgtctttccatggacatttataatattttccatggacattttgttctctcaatgtccacccctaatttccaacatcccaaagattctcatgtgtttcctgaaagccatttacaggaatggctgtgcccagacccccttccccaggatcctccttcacacctggtaggtgcctctcctagagagatttgcactcagttgtcgtgcagtcacatggcccagatggttgttaatcacccccttcctggcaacagctagcagccagggaatcactggcacagaaacctcagggtgaccaagatgaggccacctctgtgctgaaggctgtgctccagagcctgcttgggatcaggcttaagcaggtcttcagccagacctgatgttacctggtttccttgagctgccctgcctgagctatcgggagcactccctcaatgcacatcttgattccctatctcatgctctgcttctagaaaccatgagctatcaattgctactggcaatggtcctgggaagtcaaccctaagtatggattctggggttggatgactccccacaggacttcagtgagcaacaatcactgctggcagttggaggacagagtcgctagggcatgtgaccactgtgaaaccaccgatgtttcacctggggtaattttggatgaactacggtagaagcactgaaggtacattgcttttggtttggaagattgtaggtaaataatagcgatatgaatgtggaattggatggctgcaaacgagtgccattgatgcattgaaagaggaaaagtcaggctgtcacctgtcactcagcaatttaaagtgtgagagttgggactagatgtggtggctcacatctataatccagagattcgggggaagcttgaagaggtaggatcttttgagtccaggagttccagaccagcctggacaccagagcaagacctcatctctacaacaaaattttcttaaaaattagatgggcttggtggcacgcacctgtacttgtagatctagctaatggggagcatgagataaaaaaatcacctgagtcagggacttaggggttacaatgaggtatgattgtgccagtgcacacactcccacctggccaacagagtgagattctgcttccaaaaaaataagaaataaatcaggtttgagagttggaaagcatcatcttctcctagagccaaaggacatgtacaactgagacccaggaacaaagcttcatcacaaagagaccatcatcagtggagccgggagatgcattccccctcaccctgccttgaggaggcagtggagtcatctgtctgggatcctttctgacccagccctatttgtttgtctctttggcttctttggatttgtatattttagctgttataacactgtaaaacaaacagagtgatttttttgagttgtgtgaatgatgctagctccatagtcaccctgagagtgatgggaacttttgaatttgtggcaagttggagggtagtgtaagtgacctgagattgccaaattggggctagcactggatgtgaggttaggctagtggaaaaatatgcccagaaccagaggagtgtgggctcactgcaggtggttaggctcagatccaaattgtacagatggatagctttggggtaaagaataacatagttgagaagtgcatgtgttagtctgttcatgcactgctataaagaattacctgagactgggtaattatttataaaactcaggtttaattgggtcatggttccacaggctgtacaaaaagtatgatgctggccatcagctcaacttctggggaggccccagaatagttagagtcatggcaaaaagtacaagggaagcaggctcatcttccacggccagagctggagcaagtggtaggagaggtgatacacactttcaaacaagtaggtcttttgagaactccatcaccggacagcacctatgggatggtgctaaattattcatgaaatatccgcctccataatccactcaactgtcaccagcgcagccagccccacctccaacagtggggattacaattccatatgaggtgtgggtggggacacagctccaacctcaatcagtgggcatcctggattgggtctactatagaaggagaaccaggagctgactatgatcttgaaccctacccatgatggccgggcggggtgactcatgcctgtaaccccagcactttgggaggctgaggtgggtggatcgcctgaagtcaggagttagagaccagcctggccaacatggtgaaaacctgtctctactaaaaatacaaaaaattagaccggcgttgtgctggatgcctgtaatcacaccactacgctccagcatgggaaaaaataccaaaacttcgtctcaaaaaaaaaaaaaaaaaaaaaaaaaaaaagactgcccatgaccactgcaccagtgagagggacaccagcatcactgagatgcaagggctggacattcttcataggtcagagctcaaagcaggggacactgatacagagatgggctccatccatagcaccaaagtggtgagaggatgtgggaatggcagaggccagcactttgccatcaatgcaagggggtataaggaggtgacaccagtgccagagtacatcacggggggactgccctacaatatctaggacttacctcttagagcgtgtttcattagcgacaacagatataaatggcagacaggtgtgtccctgcattaacaggaaatagaaatcatcaagaggaacagaaggcagatgtcagcagccccttagaaagtcatcatccttcatacagttaaaatctgagacagttctcacacgagaaggcctaactcaaaaagaggctgggttctcatgaggcaggtttatgcaaaaccaaggaaggtgtacaagtttggaattctccagtttcccttggaaaagacctacagtcatttgcttaggtaactgagcactgaacaaaggtgagtattgttgtcttttagaagctcttggccaagaaggccttgttggcataaaacccatggtttggaaacatcaccatgacccctgttagagtaatggcctaagggtgggggtcaggaaattgatgtattccttgccaacttctgcctctaagtgagtgaactctgtttgtgaacctctctcctctgtggttatgttcctaggctctcatgtataatcaggagtcatagacttagaaacaggaaaaatacttacagtgtttttgtggcctgtgagctatgacttataattttaggaaaaaaacaattgcaaatggaaagcctaagtctatcaatgctcatccaagacaacataatcaataaaaaccaatatcaaatctcaaggcaaattatttcctgtatatagatggcagagatgagcaccaccatcaaaaactcaaggaccagtgctgtgggtccagtcatctgtttcatggaattcaccagtctggtatcttcaaaatccagaaggatgatggcagatggcaggaaagtaatgcaaacgtcatcaggtgtgaccccactgtagcagctgtgatggatgttttctctcaccatagcaataaataacacaacctcggtcacactgtatgcattgttggtctgcaaaatccatgttttgcaaaactcttcaggaaggtggatctgtaatattggcattgacatgagaacaacagcagtatttattcacaatctcaagctctctgtcttcccgtctctctcattagccatccaagtagtcctgaggaaccaagcccatcagaacattctgcaacataatacacagctccattctccattcaaattttgttgttgttgttgttgttgatgagacaacatcttactccatcagccaggctgacgtacagtggggctatctgggctgactgtagtcttgagcttccaggctcaaggcatcctctcacctcagcctcctaagtggcttgaactacagacacacagcgacatgctgggctagtttttgtatattttgtagagacgtgctctcaccatgttattcaggctggactcaaactcctgagcgtaagtgatccaagcaccttggcctcaaagtgctgagattacaagcctgagccactgcacccagcccaatctccattctactgataacaatgtcattaccaggtctgatggacaggaaatggtaaggtttctgaaaacctaaggatcacacagcgagttccaaaggctgaaagtgcatacctgtcgacactgataccaatgacatccaatggtgagaatgacattccttgtagtcctagctctgctcataacaaatctatactgaagtgtaagagtttgatggtcatggggattttccatgtctctgcctttcagcgatgtgccatatctgtgaagtgttcagaaatgcaacagcctgaggcatgctgggcatatcctctaataaaaaggaaaatgccattttatggtcctgtatttctacaagttggaacacatgggcctgtgatccagatgggggaaatgggaatattcccactcattcaccttcatccacgaagcccatttgaaagctttgggcttcccatccttgtagattttagtgttgtgggctgggtgcagtggctttcacctgtactgccaacactttgggaggcctagacaggtgaatccactgaggccaaaagttcgagaccagcctggccaagatggtgaaaccccgtccctactaaaaatacaaaaattagcaaggtattggggccagcacctgtaatcccagctgctcgggaggctgaggctggagaatcgcttgaacccaaaaggcagagactgcagtgacccgatcctgcctttgcactccacctgggcaagcagaacaaaacttctgtcttgaaaaaaaaaacaaaaaacgaacaaaaaagatgttagagttctgggtttagaggtctataccccagaaagagaatggtttcaacaagggacaaagaagttgctttaaacgttgacttgccatttcttttcagtgtgtttgttctcttgcgtcaagagaccaccagaaaagtggtgcaattactctcctgtcaagaatcattgactatcatctgcaagagggtcagatcctggtatataattagggcagaaatacttagtctgagaagggtatgacatccagaggccctattaatgatgtccttttctccatgcctgactctgaccccatgtgctggactgcccctgtgtggatggcctcatggcctgctcggactctgaggtcccaccccaagtggcacctccatggagggctctactcttgtatgggctctgacactcacactgagacactctcccatggacacctcttcacccacttggggtctgaaactgggctactccatccctccctaacctggaacagagagctttcactgctattacacaagtcatagaggctaactcctcatttttccaagctaattattgaaacattagtcctgggttgataagacaagataagttaacttttcataaatttgcttatcaagttttgaataaattcaaataaattcaccttccccacacaccttagttgtcgacatcacacgcgcacccatactcacagggtgagcacgaaggcttcactgtcagtggagaaagtggcaaaacccttctgtgcctcatcctggtctagacctggccctcatcctttcccactcttcccctcactcccttggattcatccacactggcctcctgcctgctgctccacctccctgcgaagctcacccctgcctcagggcctttgcacgtgcagtggcttcaagccatatcctcttcacccagatctcccagatctcctgaatgatcttcttttatcattcaggtctcagcttgcatgtaatcttctcagtgaggattacccaaaccacatagttcattcattcattcaaatattcattcaatggcatattgacaaagcagctacttcatgccaggccttgggccaggtgttatggatatggcaacaaacaaaacaagagttttctgctctcaaatttttacccacttaaaggagatatcatacatcatctgtaaataaatacatcatctgtaaataatgatgtaaataaatacatcatctgtaaatctgtaaataatgatgtaaataaatacatcatctgtaaataaataaagtataataaaagaaaatagtaggtttttttggttggaggtgaccgtgaagtttgcaaataccatcttacaacacattattttattttatttcatttcatttttaattttattattattatactttaagttttagggtacatgtgcacaacgtgcagatttgttacatatgtatacatgtgtgaagttggtgtgctgcacccattaactcgtcatttagcattaggtatatctcctaatgctatccttcccccctcccccaccccacaacagtccccggtgtgtgatgttccccttcctgtgtccatgtgttctcattgttcagttcccccctatgagtgagaacatgcggtatttggttttttgtccttgtgatagtttgctgagaatgatggtttccagcttcatccatgtccctacaaaggacacgaactcatcattttttatggctgcatagtattccatggtgtatatgtgccacattttcttcatccagtctatcattgttggatatttgggttggttccaagtctttgctattgtgaagagtgccgcaataaacatacgtgtgcgtgtgtctttatagcagcatgatttataatcctttgggtatatacccagtaatgggatggctgggtcaaatggtatttctagctctagatcactgaggaatcgccacactgacttccacagtggttgaactagtttacagtcccaccaacagtgtaaaagtgttcctatttctccacatcctctccagcacctgttgtttcctgactttttaatgatcgccattctaactggtgtgagatggtatctcactgtggctttgatttgcatttctctgatggccagtgatgatgagcatttcttcatgtgttttttggctgcataaatgtcttcttttgagaaatgtctgttcatatccttcacccactttttgatggggttgtttgtttttttcttgtaaatttgtttgagttcattgtagattctggatattagccctttgtcagatgagtaggttgtgaaaattttctcccattctgcaggttacctgttcactctgatggtagtttcttttgctgtgcagaagctctttagtttaattagatcccatttgtcaattttggcttttgttgccattgcttttggtgttttagacatgaagtccttgcccgtgcctatgacctgaatggaaatgcctgggttttcttctagggtttttatggtttgaggtctaacatgtaagtctttaatccatcttgaattaatttttgtataaggtgtaaggaagggatccagtttcacctttctacatatggctagcctgttttcccagaaccatttattaaatagggaatcctttccccacttcttgtttttgtcaggtgtgtcaaagatcagatagttgtagatatgtgacattatttctgaggactctgttctgttgcattggtctatatctctgttttggtaccagtaccatgctgttttggttactgtagccttgtagtatagtttgaagtcaggtagcatgatgcctccagctttgctcttttggcttaggattgactttgcaatgcggggtcttttttggttccatgtgaactttaaagtagttttttccaattctgtgaagaaagtcattggtagcttgatggggatggcattgaatctataaattaccttgggcagtatggccattttcacgatattgattcttcctacccatgagcatggaatgttcttccatttgtttgtatcctcttttatttcattgagcagtggttttagttctccttgaagaggtccttcacatcccttgtaagttgggttcctaggtattttattccctttgaagcaattgtgaatgggagttcactcatgatttggctctctgtttgtctgttattggtgtataagaatgcttgtgatttttgtacattgattttgtatcctgagactttgctgaagttgcttatcagcttaaggagattttgggctgagacaatgggttttctagatatacaatcatgtcgtctgcaaacagggacaatttgacttcctcttttcctaattgaataccctttatttccttctcctgcctaattgccctggccagaacttccaacactatgttgaataggagtggtgagagagggcatccctgtcttgtgccagttttcaaagggaatgcttccagtttttgcccattcagtatgatattggctgtgggtttgtcatagatagctcttattattttgagatatgtcccatcaatacctaattattgagagttttcagcatgaagggttgttgaattttgtcaaaggccttttctgcatctattgagataatcatgtggtttttgtctttgggtctgtttatatgctggattacatttattgatttgcatatattgaaccagccttgcatcccagggatgaagcccacttgatcatggtggataagctttttgatgtgctgctggattcggtttgccagtattttactgaggacttttgcatcaatgttcatcaaggatattggtctaaaattctcttttttggttgtgtctctgcctggctttggtatcaggatgatgctggcctcataaaatgagttagggaggattccctctttttctattgattggaatagtttcaggaggaatggtaccagttcctccttgtacctctggtagaattgggctgtgaatccatctggtcctggactgtttttggttggtaagctattgattattgccacaatttcagatcctgttattgctctattcagagattcaacttcttcctggtttagtcttgggaaggtgtatgtgtccaggaatttatccatttcttctagattttctagtttatttgcgtagaggtgtttgtagtattctctgatggtagtttgtatttctgtgggatcagtggtgatatcacctttatcattttttattgcatctatttgattcttctctctttttttctttattagtcttgctaccggtctatcaattttgttgatccttttaaaaaaccagctcctggattcattaattttttgaagggttttttgtgtctctatttccttcagttctgctctgattttagttatttcttgccttctgctagcttttgaatgtgtttgctcttgcttttctagttcttttaattgtgatgttagggtgtcaattttggatctttcctgctttctcttgtgggcatttagtgttataaatttccctctacacactgctttgaatgtgtcccagagattgtggtatgttgtgtcttttttctcgttggtttcaaagaacatctttatttctgccttcattttgttatgtacccagtagtcattcaggagcaggttgttcagtttccatgtagttgagcggttttgagtgagtttcttaatcctgagttctagtttgattgcactgtggtctgagagacagtttgttataatttctgttcttttacatttgctgaggagagctttacttccaagtatgtggtcaattttggaataggtgtggtgtgatgctgaaaaaaatgtatattctgttgatttggggtggagagttctgtagatgtctattaggtccgcttggtgcagagctgagttcaaatcctgggtatccttgttaactttctgtctcattgatctgtctaatgttgacagtggggtgttaaagtctcccattattattgtgtgggagtctaagtctctttgtaggtcactcaggacttgctttatgaatctgggtgctcctgtattgggtgcatatatatttaggatagttagctcttcttgttgaattgatccctttaccattatgtaatggccttttttgtctcttacgatatttgttggtttaaagcctgttttatcagagactaggattgcaacacctgcctttttttgttttccattttcttggtagatcttcctccatccctttattttgagcttatgtgtgtctctgcacgtgagatgggtttcctgaatacagcacactgatgggtcttgactctttatccaatttgccagtctgtgtcttttaattggagcatttagcccatttacatttaaggttaatattgttatgtgtgaatttgatcctgtcgttatgatgttagctggttattttgctcattggttgatgcggtttcttcctagccttgatggtctttacaatttggcatgtttttgcagtggctggtactgactgttcctttccatgtttagcgcttccttcaggagctcttttagggcaggtctggtggtgacaaaatccctcagcatttgcttgtctgtaaaggattttatttctccttcacttatgaagcttagtttggctggatatgaaattctgggttgaaaattcttttctttaagaatgttgaatattggcccccactgtcttctggcttctagagtttctgccaagagatcagccgttagtctgatgggcttccctttgtgggtaacccgacctttctctctggctgcccttaacattttttccttcatttcaactttggtgaatctgacaattatgtgtcttggagttgctcttcttgaggagtatctttgtggcattctctgtatttcctgaatttgaatgttggcctgccttgctaggttgcagaagttctcctgggtaatatcctgaagagtgttttccagcttggttccattctccccatcactttcaggtacactaatcaaacgtagatttaatcttttcacatagttccatatttcttggaggctttgtttgtttctttttactctctttcctctaaacttctcttctcacttcatttcattaatttgatcttcattcacttatatactttcttccacttcatcaaatcggctactgaaggtattgcatgcatcatgtagttctcatgccatggttttcagctctatcaggtcatttaaggtcttctgtacattgttttctctacttagccattcgtctaatcttttttcaaggtttttagcttccttgtgatgggtttgaacatcccctttagctcagagatgtttgttattactgaccttctgaagcctgcttctgtcaacttgtcaaagtcattctccatccagctttgttccattgctggtgaggagctgcgatcctttggaggagaagaggtgctctggtttatagaattttcagcttttctgctctggtttctccccatctttgtggttttatctacctttggtctttgataatggtgacctagagatggggttttggtgtggatgtcctttttgttgatgttgatgctgttcctttctgtttgttagttttccttcgaacagtcaggttcctcagctgcaggtctgttggagtttgccggaggtccactccagaccctgtttgcctgggtatcaccagcggaggctgcagaatagcaaatattgcacaacagcaaatattgctgcctgatccttcctctggaagcttcgtctcaaaggggtgcctggctgtatgaggtgtcagttggcccctactgggaggtgtctcccagttaggctagatgggggttagggacccacttgagaaggcagcctgtccattcacagagctcaaacactatgctaggagagccactgctctcttcagtgctgtcagatggggatgtttaagtctgcagaaatttctgctgccttttattcagctatgccctgcccctacagatggagtctacagaggcaggcaggcctcattgagctgcggtgggctcctcccagttcgagcttccagaccactttgtttacctactgaagcctcagaaatggtgaacacccctcccccacccagtctgccgccttgcagttccatctcagactgctgtgctagcagtgagcgaggctccatgggcgtgggacccactgagccaggcacaggatataatctcctggtgtgccatttgctaagaccattggaaaagcacagtattaaggtgggagtgtcccaattttcccagtacagtctgtcacgggttccctcatctaggaaaggtaaatcccctaaccccttgtgcttcccggtgacgcaatgccccaccctgcttcagctagccctccatgggctgcatccactgtccaaccagcccaatgagatgaacaaggtacctcagttggaaatgcagaaatcacccatcttctgtgtggatcaggctgggagctgcagaccggagttgctcctattcggccatcttggaatggcaatctatgtttgctttttacatttgaaaaaactggtgtcacgtacctaggtattaatcattgtggtatcctcttgccgatttacctctttatcattaactagtgaccctccttgtcttttgttgttacagtctgtgattttagtctattttatctaatatgagaatagctactctggcacttttttggtttccagcttcatgaaatatccttttccatttccctgttttcatttccctttcggtgtctctatagatgaagttgatttctttaaggcaccataagttgggtcttatttctttatccatttgaccatttagagaatttagaacactgtcagtgttattattcataagtaaaaacttaagagtgggtgtagtggtgtacatctgtatttcctgcactttgagagactgaggcgagctgatctcctggggtcaggagtttgagaccggcctggtcaacatgatgaaaccctgtctctactaaaaatacaaaaattagccaagcatgctggcatgtgcctgtaatccaatttacttgggaggctgaggcaggagaagcttgaacctgggagacaaatgttgcagtgagctgagatcacacagagaagtcatctccactctcctcatcagaacctcttgttcacagcatttgtgagcacaaatcaatgatggttattctttcctactaattagggatattttattacacagcaatagcctccagcaaagggaaccatcatacatgattcctacaagttgacagggctggaattatcactgaaaaactaaggtggctatacttgattcccaatgtccaatttttcatgaatagagaaatttatcctttttccccccagccagaaaccaagttttgctcttacgcccaggctggaatcaagtggcacaatctcagctcactgcaacctctgccccccagcttcaagaaattcaccttttgaacaaggagatattaaggatacactatgtgtatgctaccggtggttgcaggagactcagaaaagagagaaacagtcactggcctcgtgcaactgatattctcgggaggagagaaaggcaatcaagaaagaaacatgctgtatttcagacagctgtaagtcctccacaagaaaagaaagcaggtgaggaacataggaaatgtgtcaaccataaggttcccgctaattctataagttggtcagggatatcctccaagaataagcagcatctgagcaatcacctgaagggaggaaggaaggaagactgtgagtggtggcttacacctgtaatcccagcactttgggaggccaaggagggcagattgcctgagctcaggagttcacgaccactcagagcaacctgttgatacccaatctctactaaaaacacacaaaaaaattacccgggtgtggtggcacgcacctgtagtcccagcttccatgcccagctgatttctctctctccatatatatatatatatacacatatattgtttttgcagagatagggtctcactgtgtcacccagtcatcaagcaattctcttatactgttttggaaaagcatgggaattacaggtgtgaaataccctgctggtcctgaaaaatgtgatatttgggattctctgcctggcttgttttacccaaaataatgacctccagttccttccaggttgctgcaaaagacatgattttcactgttttataactgaatagtattcctgtatgtatacataccacattttctttatttattcttctgttgattgacatgtagggtgattccatgtctttgctactgtaaataatgctgcagcaaatatttgtgtgcattttgatctattcctttgagtaggtacccagtactgcaactgcaggactgagtagttgttatattttttgttctttcagaaatctccatagtgtttgccataaaatctgcactaatttacattcccaacaacaatgcataagatttccccttttctccacattctcactaacatttgttatgtttttgtctttttcataatacccattctgactggagtaagatatctcattgtggtggttgttgatatttttgagacggggtctcactctgttgccagactggagtgcagtggtgtgatcgtggcttgctgcaacctccacctcccgggttcaagcaattctcctgcctcagcctcccgagtagctgggactacaggcgcgtgccaacaggcctggctcattttttgtatttttagtaaagacagggtttcaccatgttggccaggatgatcacagtctcttgagctcatcatacacctgcctcagcctcccaaagtgttggaattacagtcatgaggcagcgcacccaacctcaatgtggttttaatgaccatttctctgacgattcatggtgtggagaatttctttgaaataccttttggccatttatatgtgctcttttaaaaactgactcctgtccaggtgcggttgagcatgcctgtaaccccagaacttcgggaggctgaggccaatggatcacttgaggcaaagaggcagaaatcagcctggccaacaaggcaaaaccccatctttactaaaaatacaaaaaatcagccacgggctgtgactcgtgcctgtggtgcaagttactcaggaggttaaggcacaggaattgcttgaacccggtaggcacaggtcacagtgagccaagatcatggcactgcactacagcatgggtaatagagaaagacctgtctcataaaaacaaatgaataaataaataagataaaaaataaaaaagtctctttatgtcctttgccgactttttaatgggattctttggagttttctgttgtagttgagatctttgtttactctcggtattagtcttttgtcaaaggaaaagtttacaaataatttcttccgttctgcagtttgtctgctcactctgttgagaggattatttctttggctgtgcagcagctttttgtttcagtaaagcttttgaatttatataattaaaattttcagtttggtttaaatttgcactggtcgatttttggttttgttgcctgtacttttgaagtcatactcttgaactctttactagacaataaccagaagagttttctctagttttcttctcacatttttattatttcagtacatatatttaagtctataattcatcttcaattgatttttgtagaaatagtgagaaataggagtccaggtttattcttctgcaaatgacaattcaattgttccagcaccaattattgaaaagggtgtgctttcctcaacgtatattcttatcagctttgtcaaagatcagttggctataaatgtgtggctttctttctgggctctctagtctgttacatcaatctgtgtgtctatctgtatactactaccatgctgtattggtgatgatggctttgtaatataatttgaagtcaagaaatgtgatgctcccagctttgtttatttgcttcagaaaggctgagtcaacagctgcagagatgaagctgcccctcctcgcagggctccttcccggaaaaagatcatggctcccactgaccatataaccatggctggaactcctgaaattcccaaagggaggccctacccagtgaggggggatgaatgaaggtcctacttaaggaatctgtctggccacaatcaggcacagcagctgtgctgccttgtgggggaccagaccacctggattccctggagcctgcaggctagaatgtctgagtccatggaaacacagaaatggaggccgccctcacctccccagaaaactgtagtctcaggcagtctccagccgattgccactggttggctgctattccaagccagtgggtcttaacttgagaggtgctgtggaagtggggcccacggaatgaggctgcttggctccctggattcagccccttttctaagggaatgtacagatggaactcccgccttgcccagctttccaagtatataaaactcctgagtctctgtgagtgtctgagcgagtgctctggcaacattcgacacggctctgtgtatctgacccaagacccttatggcatgagctaatgggaggatcttctgatccatgcgtggcaaagatgcatgggagaaacatggtttgtgggtaggggttgtgcattcactactgcttctcttggctgtaggtgaaggtttctttggctctgtgctgatactgggtgcaccatcacccaccccctttgtttcttctcctgggtcaagtcatttgcctaatcagtcccaatgtaggaacctggatacttcagttcaaggtgctgaattcaccgtgcttttcattcaggggaagacagctgcttctcattgggcatcttggcctgcccacttcacgtcactttttgtaaaatccacaccactccaggaatatccattacttaacttcgcctgaaataaacagaaggctcattacacttatcatgggctcacttacttcgcctataatgaaggtgccatggaaatgctagtggatgacgtggtccattttcttagggatgagatagaaaaatggtgtatggctttttaatttaattaaaatttttagtttggtttaaatttacattggtctctttttggttttgttgcctgtacttttgaagtcttactcgtgaactctttactggacaatgaccagaagagttttccctaagtttcttctgatattttgaccatttcagtacatacatttcagtctataattcactttaaattgatttttgtaaacatggtaagaaataggagttcagatttattcttccgcatatgataatgcaactgtcccagtaccaattattgaaaagggtgtgctttccctagtgtatattcttgtcagctttgtcaaagatcagttgcctatgaatgtgtggctttcattttggattctctcgtctgttacatcaatctgtgtgtccacatttatacctgtaccatgctgtattggtgactatggctgtgtaatatattttagagttaggaaatgtgatgctcccagctttgttcatttgcttcagctgaaaaggttgagtccacaattacaaagatggcagccgcccatccccggaggacctccaacccagaaagagatcaggcttcccaccaaccctataaccctggctggagttcctgaaattccaacagggaggaccttcccagtgaggagggatgaatcaaggtcaaatttaaagaaacagtctggccactatcaggcacagcagcagtgctgccttgtgggggacccctcctgctccagaccagctgccctccctggagcccgaaggctagattgtctgagtctacggaaacagagacggtggccgccccaaccacccagaactcggtagtctcaggcacttggcttgctatcttgccactgcttggctggtattccaagcccgtgggacttgagaagtgctgtgatgatggggaccacaggatgaggctgtctggctccctgtgatatggctgtgatgagtggaggaacaccagggctcatgtctcacacagaattggagaaaatgacacaaacacatgtacagtggttttatggcgtgcagtttaataggcaagaacgaaggaagagctccccatactgagacagagggaggggggctccaaagccaaaagaggaaacccggagtgctgtggataccaatgagttatatgaagaaactggagggggcggtgtctgatttgcatagggttcaggcgattggttcgaccaggcatgtcatttatgtggcccacggaaaaactggccctcccacctagcctttgaatatgcacgtgccggacaccctgatttcctacactcatggggatatatgggggtggccatatcgccaggcacaggtggggacaagggccagaagagggcgggaatcgctatgtttgggtggacccagtttctaatggccggcatctgcagatcaaggttaccggagaactctaaaagccggggctttcctgctagacaagactcatttctggagctgctttaaaaagaaacaaaacttcccaaggaccccttttcctccctgtctgcccaaaataatttcttaacaactcgtataacacctgaattcagcccccttactgggggaatgtaccaacggaactcccacctttcctggtttctcaaggctagattgtgtaaacctcctgggtctcggtctgtgtctgagcagctgctctgccaacactccacacagccctgtgtactaggcccaaggccgccgtgactcagcccatgggaggatctcctgatttcttggttgcaaagatccatgggagaaaaatggtttctggggcggggtcacacactcatggcttctcttggctgtgcaagaaggttcctttggctctgttccaatatagcgtggttcatcacccacccctgttttctttgttctcctgagtcaagttgtttgcctagtcagtcccaatgtgagaacctgaatatttcagttcacgtgcttatcgtgaaattcactgagactttaattcagtggaaggcagcctcttctaattggccatcttggcccgccccctccacgtcacctcccataaaatggccacgctctccagggacgatgccattatatatctttacgtgaaaccgacagaacacttattacactttttgtgagctcatttacttcacttataatgaacatggccatggaaatgctagtggagaaagtggtcgattttctgatggatgtgataaaaaaatggtttgccgaccaattaatgacatatgtctcaaaactagtaacgagacccttaatcgctgggttgaagtttctaatcaagaagatgctcatctatgtattcaacaaagcagcttcccttgcttctgaaatgcttccaaacaacatctcatatttcctgaagaagataatgcctggacaagcagcacaagtcattcaggtttactttcagctcataaatccagcaggatattcgcacaattgttgggaaaccttatcagttcatgagtcgtgcatgtttcctttaatttcaggaggaagagggtaatctggaagagtttcctgacctactctgctgctgtgattaaacaaccaccaggaaattttgatgacactgttctcctgagctcctccctttcctcggggaagaaaagcattgaaactacaaaaataaagtgttatttggctggagtgaggtctcatgtctgcttatgcggtggctcgctgctcagaacagggtgagtctctgagttgtacgctgaggaggggaggctgtcaatctagaaaaaacccattgcatgggacacctccatggggtctggggggctgaggatgaggagctggactggatctagggaaggaggaggtttcagagggtgaaattctggcagtaaatcctgggggtgtttgaaaacttcctccctcagaaggagaagactcagggaggaataaggacaaaccatgggtcccttgaggggcatttactaacttaagaggactttatcgggaagcagagtgacaatggcctccttgaggactgaggcccctggataaatgaggcccagatccagatccagtccatgggagatgagaccttcaagggacatatttttgttgggacagaggaaaagtgcagctctgcagctgcagaggaagccttggcagtgtgaaagcgaccttggagggggccctgtgcgttctgaatgcttctgaggtccatcccctgtccccgcctctttttctggattttttgggctccatggtctccgccatcttctgagcgctccacgctgccaccttcagttttctcttctgggctccaaatactccaaaatctttcatatctgtgcccctacccctgtttttagcatgtgttgggactccaggtccctgaaggtttctggcctgaaatccacctccccagcggtgtggattctgctctagagaccccgcacttggcaaggttcccaggcccctgggggacaaccgagtggtatgtgcacttcagggctccacactcggcaaggtctttcaagcccttggggttccctcctcagttttcttcacatgtctgggatgtagtcactctataaatgccgggatgtgatccccaccccagtgattttttttagttccatgagtgttgctatctgaatagtcatcctgagagtgatgggaccttttgaatttgcagcaagttttagattagtgtgagtggcctgagatcgcaaaactggggctagcattggatgtgaggttaggctggtggaaaaatttgcccagaacctgaggagtgtgggctcactgcaggtggttaggatcagcacagaattgcaaggatgtatagctttggggtaaagaataacatggttcagaagtacatgtattagtcttttcatgcattgctataaagaattacctgagactgggtaattaattataaaaactcaggtttaattggctcatggttccacaggctgtacaaaaaggatgatgctggccatcagctcaacttctggggaggcgtcagaaaacttagagtcatggcaaaaagcacaagggaatcaggctcatcctccatggccagagctggagctagtggtaggagaggtgctgcacacttttgaacaatcagatctttttagaactctatcaccagacagcacctagaggatggtgctaaattattcatgaaatatccacccatatgatccactcaattctcaccggcccaaccaggaccacctccaccattggggattacaattacacatgagatgtgggtggggacacagatccaaactcgatcagtgggcatcttggactgggtctactatagaagaagaaccaggagctgactatcatccttaagactgcccatgatggccaggcagggtggctcatgcctgtaatcccagcactttgggaagccaaggtgggtgaatcccctgaggtcaggagtttgagaccagcctcgccaacatggtgaaaccctgcctctactaaaaacacaaaaaattagatgggtgttgtgccagacgcctgtaatcacagctactccagaggctgaggcatgagaattgcttgaacctgggaggcggaggtggcggtgagccccaatcgcactgctacactccagcatgggcaacaataccaaaacatcgtctcaaaaaaaaaaaaaaaaaaaaaaaaggctgcccatgaccactgccccagtgagagggacaccagcatggctaagatcaagtgctggacattcttcatgggtcagacattaaagcaggccacactgttacagagatgggctccattcatagcaacaaagtggtgagaagatgtgggaatggcagaggccagcactttgccatcaatgcaaggtgggcataaggagctggcaccagtgccagagtgcatcaggggaggactgctttgcaatatctagcacttacctcttagagtatgtttcattagggacaacagatataaatggcagacaagtgagtcccttcagtaacaggaaatagaaatcatcaagaggaacagaaacagatgtcagcagccctcatataaagtcatcatccttcatccagttaaaacctgagacagttctcacataagaaggtctaattcaaaaagagactgggttctcatgaggcaggttcatgcaaaaccaagggaagtatacaactttgggattctccagcttcccttggaaaagacctacaatcatttgcttaggtaactgagcactgaacaaaggtgagtattgttatctttcagaagctgttggccatgaaggtcttgctggcataaaacccatggttggaaacatcaccatgacccctgttagagtaatggcctaagggcaagggtcaggaaattgatgtattccttgccaacttctgcgagacgagtgttggtccactcatctctttcacggaattcaccagtctggtatcttcaaaatccagaaggatgatggcagatggcaggaaactaatgcaaacaccatcagttgtacctccactgtagcagcagtaatggatgttatctcttcattgtaatatccagggagggagaagatgacattattctcaatattctaaacaccctgtgtgtacagcctctgtgatattttttgtaatatccgtgtgggagagaattatattactcctaatatctcaggggttgtgccccctctgtgacaatgttcctaacacccaggaggggataggatgatatcacttttagcatcacagggggtgtacaccccactgtaatattgttcataatatccgggggggagagaatgatattactcccaatatcgcaaagactgtacaccaacctgtgatattatttgtaatatccataagaggaagaataatattactcccaatgtcacaggaagtgtacacccttctgtgatattgttcaaaagatccagttagggaggggatgatattactctcaatatcttaaacaccctgtaggtaagccctctgtgatattcctcataatatccagagggagaggatgatattactcccaatattgcatgaagtctacaccccacctgtgatattgttcctaatatccaggatgggagaggatgatattactcccaatgtcgcaggggatgtacaccttccctgtaatattgttcgtaatatctagaaaaggagaggataatattactttcaacatcgcagggggtgtacaccttccttgttatattgttgctaatatccagggaaaaagaagatgacattaccaccactattgcagaaggtgtacacccccccttgatatagttcctaatatccagaaaaggagaggagatattactccaaatattgcaagaggtgtacattcccctgtaatatttttcctaacattcaggaagaaagagagtgatattgcccttaatattgaagggagtgtgccccccccgtgatattgtttctaatatccaagaaatgaaaggatgatattactcccaatatcacaggggctgtacagccccctcccatgatattgttcccaacatcggggggggggtgaaatagtattattcccagtatcacaataggtgtacacacctgtcgtgatattgttcctaatacccatgggggaaaggacgatattattcttaatatctcagagggatgtacaccctccctgtgatattgttcctaatatccggggtgggagaggatgatattacccccaaaatctcaaagggtgtacacccctcttgtgatattgttcctaatatccagggtggagaggataatattattcccaatatccaggaaaggaaacgatgatgttactgtgaatattccagggggtgtcctcccctctgtgatattgttcctaatatccaggttggggagattatgatatttctccaaatatcacaaggggtgtacaccaaccctgtgttattgttcctaatatcgatggggggagaggacgatattactcccaatatcacagggggtgtacaccacctttatgatattgttcctaatatccatgaagaaagaggatgatattactttcaatatcgcaggggatgtacactccccctgtgatattgttagtaatacctaggagaagaaagtgtgatattactcccaatatcgcaggggatgtacacgcttcctgtgatattgttcctaatatttagggggaaaggggatgatattactcccaatatcgaatggtgtgtacacccccccgtgattctttttttttttttttttttttttttgagatggagtcttgctctgccgcccagactggcgtgcaatggcgcaatctcggctcactgcaacatttgcctcccaggttcgcacgattctcctgcctcagccttcggagtagctgggattataggcagctgtcaccataccaggctaatttttgtatttttagtagagttggggtttcaccatgttggtcaggctggtcttgaattcctgacctcaaataatccacccaccttggcctcccaaagtcctgggattacaggcataactttccctgtgatattcttcctaatattcaggaagaaagaggatgatattgctcccaatatcgcagagagtgtgcactcctcctgtgatatggttcttaatattcagaggaggagaggatgatattactttctatattgcagaaggtgtacacctccctcgtgatgtctttcctaatatccagtgggggagaggttattagtctcaaaatcacagaaggtgtaaacccccatttgatattgttcctaatattcaggggtggggagagaaaggtattactcctagtatttcagggcatgaacacccccaccgtgatatcattcctaatatccagaaggggaggcaatgatatttctcctaatatcacaaagggtgtacaccccttctgtgatattgtaaatattctgtgtgtacacccccctgtgttatagtctgtaatatccgggtgggggagagggtgatatttctccccatattgtaggggatgtacacccttctgtgatatggttcgttatatccagggaagaaaaaggtaatattgctgcccatattgtggagagtgtacacccccatgtaatatggttcgtaatatccaggagtggagagggtgatactgctccttacatcgaggaaggtgtacaccttattgttatatgattcgcaatatccaggggaggagagagtgatattgctccccatgtcgcagggggtgtaaaccctccgtgatatgattggtaatatccaggaaaggaaagggtgatatttctccccatatcgcgggggacgtacatcctcctgtgatatggttcgtaatatccaggaggaaagaggaaaatattgctcttcataacccgaggggtgtacaacccctgtgatatggttcgtaatacccagaagtgtacacccctctgtgatatggtttgtaatatccagggggttagagggtgatattgctccccatatcgcagtgggggtacacccccctggattggttcataatattcatggggggagaaatttacatttatcctcatatcagggggggtgtacaccccccgtgatatggttcgtaatatccaggggaagaaagggtgatattgctccttatatcgcggaaggatcaccctcccctgtgatatggttcataatacccagacgggaagagggtgatattgttcttcataaagcgaagggtgtacagccccctgtgatatggttcataatatgcaaaaggggagagggtgatattgctccccatatcacggagggtgtactcccttctttgatatggttcgtaatatccaggggtgtagatggtgatatagctcgccctattggggagggtgttcacccctctgtgatattgttcgtaatgtccagggaaagagaggatgatattactcccaatatcgcagaaggtttacaccactctgtgatattgttcataatatccagggaaggagaagacgatattactcccaatatggcagggggtgtagaactcctgtgatattgtttgtaatatccaggcaaggagaggatattactctcaatatcgcagaaggtttacacccctatgtgatactgttcatgatatccagggaaaaagaggatattactccctatatcacaaagggtgtacacccctttgtgatattttttgtaatatccaggggagagaggataatattactctcaatatcagaaggggtgaaaaccctcctgtgtcattgttcataatatttagggaaggagagagtgatattactccaaatatcacagtgggtgtacacccccctatgatattgttcctaatttccagaaggggagatatgatattattgccaatatcgcagaaggtgtacaccttactctgacattgtttgtaatatccagatggggaaatgatgatattactcctaatatcacagggggtgtacacccccttgttttattgtttgtaatattcaggggaagagacgattatattactcccaatatcgcagggtgtgtacaacactctatgatattgttcataatatccaggggaggagaggaagtgtacacccccccgtgatattgttcgtaatatccagaggtagagaggatgatattactcccaatattgcaggtggtgtacacctttctgtgatattgtcatgatattaagaaggggagaggatgatattactaacaatatcacaaaaactgtacactccctgtgatattgttcataatatccagaagaagggaggatgatattattctgaatctcgcagaagatatacaccaccctgtgatatggttcataatatcctaggggaaagaggatgacataactgtcaatatcgcagggggtgtacaattccctgtgatattgttcacaatattcagagggaaaaaggataatattactttcaatatcgcaggcggtgtacacattactgtgttattgtttataatatccggaatgagagaaaattttctcccaatatcacaggaggtgtacactcccctgtgatattgttcgtaatatccagggaggggagaggatactattactcccaacatctcagggagtgtaggccccccctttgatattgttcctaatattcggaagtggagaagatgatattacttccaaaatcgcagggggtgtacactccctctgtaatattgtttctaatattcatgagtggaaagaaagatattactcccagtattgcaggggacatacaccacactgtgatcttgttcacaatattcgggggggagaggatgatattactcccaatatcaaagtaggtgtacacccccttctgatattgatcgtaatatccagaattaaagatgataacgttactcccaatattgcagggggtgtacatttttgaatactgttcataatattaagagggggaggggatgatatctgtcccaatatcgcaaagtgtgtacacctcctgtgacattgtcccaaatatccagaggaaaaaaggatgttattactcttaatatctcagagagtgtacacctccctgtgatattgtttgtaacatccagaagaaagaggctgatattactcttaatatcgcagggggtgtacacccccgccccgggatattattcgtaatatccagggggaagtggaatgttcagaatgggagaggatgatattacttgcaatatcatagtgggtgtacaccccactgtgatattgtttgtaatatccgggaaaggagaaaatgacattcctccccatatggcaggggctgtacaccacctatcatattgttcaaaatatccagaaggggagaggatatgtctccaagtatcacagggggtgtacaccccgctgtaatattcttcctaatatccagggtgtgagaggataatagtactcccaatatcccagggcatgtacaccccccttgtgatgttgttcctaaaattcatggggagaaagaatattactcccaatatcacagggggtgtacatacactctgtaatattgttgccaatatgcagcaggagagaggatgatattactcccaatatcacaggggctgtacaccccgctgggatattgtttctaatatcaagggggaaaaaggatgatattactcccaatgtcgcagggtgtgtacttcctctttgtgacattgttcctaatatccaggagagaagagggtgacattccttccaaaactgaaaggggtgtacacaccctttgagatattgtctttaatatccagaacgaaacaggatgatataactcctaatactgcaggggggtacaccctctctgtgatactgtttctaatatccaggaggggaaagaaaaatattaatcccaatatcacagggggtgtacattccccctttaatattgttcctaatatccaggaagacacaggatgatactatttccagcagcacagggcatgtacacccctttgtgatattgttcctaatatccaggaaaagagaggatgatattactgtcaatattgcagggcgtatacactggttctgtgatattgtttctaatatccgggggtggagaaaatgatattactcccaatattccagcgggtgtacacccgttctatgatattgttcctaatatctgggggagagagaatgatattattgtcaatatcacaggggatgtacagattccctgtgatattgtttctaatattcacagggggagaagggtataatactcccgatatcgcagggggtgtacactccccctgtgaagttgttcctaatatccagggattgagagaatgatattactcccaatatcacaggcggtgtaaaccccctgtgtgatattgttcctaacatccagaggaaaagatgatgatattattttcaatatcacagggggtgtacgcatccctgtgatattgtttctaatatccaggggaggagaggatgatattattgttaatatcgcagggggtgtaccccaccctgtgatactgttcctaatatccggggtggaagaggataatattgctcccaatatcgcaaagggtgtacaaccttcctgagatattggtcctaatatccagggagggagaggatgatattactttcaatatcacagggagtttacacaacccctgcgatattgttcctaatatccagcggaagaagagttaggataatactattttcaaaattgctgggtctgtaccccctccccgtgatattgtttctaatatccaggaggggagaaagtaatatgactcccaatatcttagaagatgtacaccctccccataatattatttcttacatccagggggtagaggatgattttgctttcaatatcacagagggagtaaacctttccggtgatattgtttttaatatttaaaaagagagaagataaaattactcccaatacaaaggggatgtattgtgtactcccccctctgatattcttttttaatatccagatggagagaggatgatattactttcaatattgcatgggatgtataaatcccctgtgttattgttctgaatatacaggtggggagagtatgatattactccaaatatcgcagggggttctttccccctgtgatattgttcctaacattcagggagggagaggatgatattactcttaatattgcagggggtgtacccacgcctatgatattgttcctaatatccagagggggagaggatgatctaactcagaatatgacaaggggtgtacacacagcctgtgatatggttcctaatatacaggggagaaggggataatatttctcccaatatcgcagggggtgtacaaccccctgtgatactgttcctaatatacagaaggggacagcatgatattgttcctaatatcgcaggaggtgtacaacgccctgtgatattgttcctaatatccagggcgggagaggatgatattaccctcaatatcgcagggggtgtgcactttccctgttatattgttcctatgatccgggtggggggaaatgacattagtcccaatatcgcaggatgtgtgcaccgctcccccgtgatattgttcctaatatcaagggggagagaggaggatattactcccaatatcgcaagggatgtacatcctccatgcgatattgttcgtaatattcaggaggagagaggatgatattactcttaatatcgcagaaagtggacacccaccctgtgatgttcttcataatatccagggaagcagacgattatatgactttcaatatcgctgggagtgtacatcccttttgggatattgtttctaatatccaggaagggagaggattatattactctcagtattgcaggcagtgtacaccttttttgtgatattgttcctaatattcagaaagggaaaggatgatattactcccaatattgcaggtggtgtatatccccctctgatattgttccttatatcaaggaagagaaagaataatattactcccaatatcaaagacagtgtagacccctcctgtgatattgtatttaatatccatggggaaagaggatgatgttactcccaatatcgcagggggtttacacccacactgtgatattattcctaaaatccagtggaggagaaaataatattgctcccaatattgcagggtgtatacaggccctcccccgttatattgctcctaatatccagcggtggagaggatattactttcaatttgtgtagggagtgtatacccccctgtgatatttttctaatatcaaggatgggaaaggatgacattactcccaatatcgcaggaggtgtacacgccctgtgatattgttcctaatatctagggaaggagaggatgatattactttcaatattgcaggagctgtacaccctctgtggtattgttcttaatatttaggttgggagaaaatgatatgagtccaaatatcgcagaaggcatacacacttccaataacattgttcttaatatccgggggagagggtgatattactcccaaaatctctggggggtgtacacccccttctgatatttttcctaatatccagggaaggaaacgatgatattactataaatattccaaggagtgtacaccttcctaatatcctaatattgttcctaatatccaggggtgggagaggattatattactcccgatatcgcagtgggtgtacacccctcctgtgatattgtttctaatatccaagctaggagaaaatgatatcactctcaataccacagggggtgtacaccttccgcatcatattgttcctaatattcagagggaaagaagatgaagttactttcaatatcggaggggttgtacacaacccctgtgatattgctgctagtatccaggaagaaaggggattatgttactccccttatagcagggggtatacacctcccctgtaatattgttcctaatatcaaggctgggatatacgtggggggaaggatgatattactcccaatatcgcaggggttatacaaccttctgtgatattgctcctagtaaccagggcagaagaagatgatattactcctaatatcgcaggaggtgtacactcccccattatgttgttcccaatatgcagaaaaggagaggatgacattattgccagtatcgcagggtgtgtacaccacccctgtaatattgttccaaatatttagggggagagaggatgatattactcccaacatcgcagggggtgtacacacatcccctgtaatatagttcttaaaatctaggggaaaaggggatcttatttctctaaatattgcagagggtgtacactccccggtgatattgttcctaatagccgggagggagataattaaattactttcaatatctcagagagtgtacatcgcccttgcgatattgttcctaatatccagagcaaaagagaatgatattactcccaatatcttaggagtgtacatttaacctgtaatattgttcctaatatccagggggaagagaatagtattactgccaatatcgtaggggttgtacaccttttctgtgatattgttgcaaatatttagtagagggaaagaatattactcgcaatatcacagggaatgtatacttcccctgtgatattgttctgatatccagaaaaagagagggtaatattactcccaatattgcagggggtgtacaccccccttgtgatattgatcctaatataaaggaaggaagaggatattactcctcatatagaaggggttgtccaccccccttgtgatattattcctaatattcagggaagcagaggatgatattattttcaatatcacagagggtgtgcagtccacctgtgatattgttcttaatattcggggggagaggatgttattatgcctgatatcgcagtagaggtacacccctcaagtgatactgttcctaataaccaggggtgaagaggatgatattactcccaatatcgcaggtggtgtacacccccccatgatggtttctaatatacagagggggagaggaaaatattactcccaaaatcgctggaggtctacaccccccttgtgatattgttcctaatatccaggaaaggaaacgatgatattactgtgaatattccagggggtgtacacccgctttgtaatattgttcctcatatccagggtgtggagaggattatattactcccagtatcgcagggggtgcacgacgcccctgtgatattgtttttcatatccaggaggggagattattatcaatatggcaaggggtgaacaccccctgtgatattgtacttaatagttaggttggcagaaaatgatattagtctcgatatcgcagggggtgtgcactccgcctggtgatattgcttttaatatcaagggggagaaaatggcattactcccaatatcgcagggggtgtacaccgctcatgtgatattgttcctaatatccaggtggagagaacataatattactcccaatatcgcacaaggtgtacacccctcctgtgatatggttcctaatatccatgggaggagatgatgatattactcccaatatcacaggggatgtacaccacccttgtgatattgttcctaatatccagggaagaaaacgatgatattattgtgaatattacagggagtgtacacactccctgtgatattgtttttgatatacagggtgggagaggatgatattactcccaatatcacataaggtgtacaccccccgtgatattgttctaaatatttcggtggggagaaaatgatattagtctccatatcacagggggtgtgtgctcctcaggtgatattgtttttaatatcaagagggggaggagattatattactttcattatcacagggggtgtacacccctcctgtgatattgttccttatatccaggcgaggggaaaataatattactctcaatatcgcaggaggtgtacacaccccatgtgatattgttcctaatattaagggggaaagaagataatattactttcaatatcacagggtttgtactcctttcttgtgatatagtttttagtatccagggggaaagagcatgatattactcccattgtagcaaggggtgtacacacctcctgtgatattgttcctaatatccagaagtggtgaggatgatattactcccaatatcgcagggggtatacaccccacctatgatattatttctaatatccatgggaaaagagtatgatattacacccaatgtcgcagagggtgtgtatttttcctgtgatattgtttctaatattcaggcggggagaagatgatattactctcaatatagcagaaattgtacatccccgctgtgatattcttcataataatcagggaaaaagaggatgatattactaccaatattgcaggggggttacacttcccctatggtagtgttcctaatatccaggaagaaagaggatgatattaatcccattatccaggaagtgtacacccaccctgtcatgttgttcctaatatccagcagggaagaggatgatattacaccccccccccgtgatattctccttaatatccaggaggggagaggctgatattactggatatatagcaggggtgttcataccttctgtgatattgttcctaatatccagaaaaggagaggatgatattacttccaatatcgcagaaggtgtacacctccctgtgatattgatcctgacattcagaaggggagaggatgatattactcaaaataccgcagggcatgtgcattcccttgtgatattgttcctaatacccagaagggaacaggataatattactttcaatatcgcagggagtgcacacccccctttggtatggttcttaatatccagaaggaaagagggtgctattactttccatattgcaaggggtgtacaccccactgtggtatggttcataatatccaggcagggagagggtgctattactccccacagtgcggggcatgtacaccctgctgcggtacggttcctaatatccagggggagagaggatgctatgactccctatatcgcggggtgtgtacacccctgtgtggtatgttttgtattctccaggaacggagagggtgttgttacccctcatatcgctggaaatgtacactcccctgtggtatggttcgtaatatccaggggattgagggtactgttacccccatactccccatatcgtggggggagtgcacctccctgtggtatggttcgaaatatccagggtaagagagggtgctattattccccattttgcaggaggcgtacacccccctatggtatggttcgtaatatccggggtgaggggatgctatcaaaagaagagagaaagagaccccccatattgttctatattattttatactcagtacctgttttaagaagaaacaaggaagtgaaaccaaaagcaggcagcccggcgccaggcaccagacccaaaaccagacccgaaaccaggcctgggcctgcctgaccttagcctgatagttaaaattcaacccatgacctagcaaccaatgttatccatagattccagacattgtatggaaggacattgtgaaatttcttgttctgtgctgtttcactctgattaccggtgcctgcagcccctgtcacatacccactagattgctcaatcaatcatggccctttcatgtaagatctttagtgttgtgagcccttaaaaaggacagaaattgtgcactcaacaagctcggattttgagacgctagtctttcgatgcttccagctgattaaaagccacttccttcactacctcggtgtctgtggggttttgtccgcgactcctcctgctacactatgactccccatatcaaggggggtgtacacccccctgtggttcgtaatatccagcaggggaaaaggtgctattactccccatattgcagggagtgtacacccccttgtagtatggatcgtaaaatcaaggggggagggaaggtgtaattatccccatatctcagggggtgtacacccctttgtggtaaagtttgtaatatccagggatattacagggatattatccccaaattaatacttttataatttcttatgcctgcctttactgcaatctctgaacataaattgtgaagatttcatggacatttatcacttccccaatcaatacttttataatttcctatgcctgtctttactttaatctcttaatctcatcatctttgtgagctgaggatgtatgtcgcctcaggaccctgtgatgattgcattaactccacaaattgtttataaaacatgtgtatttgaacaatatgaaatctgggcaccctgaaaaagaacaggataagagcgatgttcagcgaacaagggagataagcataaggtctgactgcctgtggggctgggcagaacagagtcacatttttcttattgcagaaaatgagtaggagaaatatcactgggaagggaacgcattcctaggggaggcctatggacggccgctctgggggtgtatcccttatgtggttgaagataagggatgaaatacaccctggtcccctgcagtgccctcaggcttgctaggattagaaattccagcctggcgaattctagtcagaccagttctctgctcttgaaccccgtttcctgttaagatgtttatcaatgacaatgcgtgcacagcaggacatggaacctcaatagtaattccattttctccctggccttgtgaccttgctaggcccttctgcccttgtgatcttttattgccatttgaagcatgtgatctctgtgacccactccctattcgtatccccctccccttttgaagtccctaataaaaacttgctggttttgcagatcaggtggtcatcacagaacctgccgatatgtgatgtcaccccggaggctcagctgtaaaatttctctttcgtactctttcactttatttctcagaccaggtgacacttaaggaaaatagaaaagaacctactttgaaatattgggggctagttcccccaatagacattgttcctaatatccagaaaaaaagaagatgatattactcccaatatcacaggggttgtgaaccccacctgtgatatggttcctaatatccaggaagggagagaatgatattactctccatattgcagggggtgtgcacatccctgtgatattgttcctaatatccaggggaggagagggtgatattactcccaatattgcaagggttgtaaactccaccctgtaatattgctcctaatatttaggatttagggggggagaggataatattactcccaatatcgcaggggatgtatatgccctctttgatattgttcctaatatccagggggggagaggataatattactttccatatcacaaagagtgttcacccccctgtgatattgttcctaatatccaaaaaggaagaggatgatatcaatcccaatatcacaggaagtgtacaccccccccttttatattgtttctaatatccaggggaaatgagggtgatatttctctcaatatagcagaatgggtacactccccctgggatattattcctaatatccaggggaaaaaaagaggttgatattcttcccagtatagcagggaatgaatacaccctttgtgatattgcttctaatatcaaggggaaaagaggatgatatgactcccaatatcacaggggatgtaaacctgtggcgttgttgctaatatcaaggagggaagagtatgatattactcctaatgtcgccgaaggtgcacactttccctgtgatattgttcctaatatccaaaagggaagagaatgatattacccccagtattgcagggtgtacaccacccctgtgatattgctcctaatacccaggaaaaaagagaatgctattacccccaatatctaaggggacgtataccttccctgtgatattgtttctaatatccaagtggggagaggatggttttactctcaatattgcagggagtgtacactccccctgtgatactgtttctaatactcgggctgggagaaatagtattactcccaatatcgcagtgatattgtttccctgtgatattgtttctaatatctagtgggggagataattatattactaccccatacacaggggagggtgtacattcccctgtgatattgtttgtaatatccagggaaggagaggatgttactcccaatatcacaggggttgtacaccccttttttgatattgttcctaatatctggggggcagagaattatattactgtcaatatcacagagtgtgtacaccccctctgttatattactctttatattcagggcggtagaggatgatattactccctatatcacagggggtgttcacccctcctgtgatattgtttataatatctaaggggaaagaggatgatatcactctcaatatcaaaggaaatgtacacctttcctgtgatattgtttttattatataggggggcagaggatgatattaagaacaataccacaggggatgtacacccacgtattgatattgtccctaatatgtatggggaaagaggacagtgtaactcccgatatcgcagagtgtgtacacccccttgtgatattgtttctgatatacacggggagaaaagataatatttcttccaaaattgcagggggtgtacaaccccctgtgatattgtttttaatatccagtgggggagagaatattactcccaatattgcagggcgtgtacacaacccctgtgatattgttcctaatatccagagtaggggaggatgacattactttcaatatcgcaaggggtgtacattcccctgtgatattgctcctaatatccatgaggggagaggatgatattattcctaatatggcaggggctgtacaccttccctgtgatattgtttctaacatccagtgggggagaaaatgatattactccctatatcacagaaggtgtacactttccctgtgatattgttcctaatatccagaaggggagaggataatattactcccaatatcgcaggaagcttacaactcccctgtgatattgtttctaatatccagggaggtagggatgatattactcccaatatcgcaggggatgtacactcccccgtgacattgtttctaataaccagggggtgagaggatgatattacgcttaataccgaagggggtgtacacacccttgtgatattgtgcctaatagccagggggaagaaaattatattaattttaatatttatggggaaaaaggatgatattactcccaatatcacaggggctgtacaccgaccttttgatattgtttttaatatccagaagagaagaggataatattgctcccaatatcagaaaaggtgtaaaccccttctgtgatattggtcctaatatccagggagggagagaataatattactaccaatatcacagaaggtgcccacccccaaggtgatattgctcctaatatccaaagataatagggtgatgttactcccaatatcacaggaggtgttcacaccccttgtgatattgtttctaacgtacagggaagggagaggatgatattattcccaatatcacaggaggtgtatactcctctgtgatattgattttaatattcggggggaaaggatgatattactccctatatcgcagagggtgtacaccctctgtaatattgatcctaatatccagggcgggataggatgatattactcccaatatcgcagaaagtctacacaacccccagtaatattgtttttactatccagggggaagaggatgacattactcccaatttcacagagtgtgtacactcaccatttgatattgtttctaatatctagggggagagaatatattactcccaatatcacaggaattgtacaccacctctgtgacattcttgtgaatatccggggaaaaagagaataatattactcccaatattgcagagcgtgtacacccctccatgatatcgatactaatatttttttaaagaggatgatattactcccattgtcacaggatgtgtacaccccccttgtgaaattgttcataatattctggggggagagcataatattactccccatatcgaaaaaggtgtccaccctccttataatatggttcctaatatccaggatattacttaatccaggatacttgtaataccctaaatatacaattgcttgaacctccacctcccaggttcaagcaattcttctgcctcagcctcccgagtagctgggactacaggggcacaccaccacacccagctaatttttttttcttgtatttttagtagagatggggttttgccatattggccaggctggtctcaaactcctgaccttgtgatctgcccacctcagcctcccaaagtgctgggattataggcgtgacccaccgtgccaagccaggaagaggatgctctatagatttccccaataagagatggctttgcagggccattccaaaatatgtcaaagaaatacatttggggataaaatactttgatttcctttagggaatgttatctattatgtgatgctataccagagtcaggttggagtcggttatcttattgcaacaaagagtctgttccgtcactgttgggatctctattttttcctcttatttcttgagacagggtctcactctgtcacccagtctggagtgcagtggtgcgatcttcattcactgaaacctctgcctcctgtgttcaggtgattctcgtgcctcagccccttaagtaactaggattacaggtgtgcgccaccacacccagctaatttttgtattttcagtagagatggtattttgccctgttggccaggctggtcttgaactcctggcctcgtgtcatctgcccacctcgacctcccaaagtgctgggactgcaaatgtgagctattgtgcccagccaggatctctgttttaatgttagtgctggtcactttgcatgaactccaaagggaagaaatataatgaggtgtgtctgaccccctgccttctcatcgtgacctgaattagtttttcaggtttgcaggggatacccttggacaagaaggggctctattcggttggttggggggattagaattttactttttgtttacaatatttctcctgaaagagttaggggctcacaaggaatttccgcgtgagcaacttatgaggaaagccatctgggaagatatgtgtccttgtgtcactgggatattctcgtttaccccaatgatacggcaatgacgcagggttgtgaaattacagctatgtgtttggggaaaaaagaaagcaggattgtgtgactacgtttccaaacttcacttgcccttagccatagtgagttgggggcctggagattctgttttctttcacaatgatatagatacaattaaatgtatagaaagcaaaaaaataaaaaggtgagtaatgaggaacctctgattcctgagtggccatgtagttacccatggcacagagccacagttactgaaggtaaagtttgctggggaatttagaaatgaatccagctcttggaggagtcagtttactggatgcctaagaaaatgcaaacaaaataagaaaaaagggtaatattcaatcccatagttattgttacctgtcatagctaaagtaaaattaaaacagagtgctggcttcaatcttgatgctacactaagcttagatttcagtgaatgtgagtctcagccactagctcagagccacctcccaaagaccaaatcatgtagggacaatagaaagtacttctgagaattgtggttaccaagaacctagtaactgttggggaggagcaaaacaaagtacagaaaccagagggtacaatctgagtgagactgctatcagcttctggaggagcctttactaaaatgaatgatgagagtaactggatgatgagagtaactaatggatgatgagagtaagcaatgtctttggttttcttttttttttttttttttttttagcagacgtctcactcttgtcgcccaggctggagtgtaatggcatgatctcgcctcactgcaacctccacctcctgggttcaagcaattctcctgtctcagcctcccgagtagctgggactacaggcactcatcaccacacctggctaatttttgtatttttagtattttctggtgagggtccaggtttccggaaacaactcagagacatatgttaagatgttatctttagttttcacagggaaccaaatatgttacgactccaatttccttggctattgttttaagttaccattaccttctcgttgatcaagttgctcatttacttctcaagcctagctagatgcctggaatttcccttgaaggaagtcaagattttcctttatctccatactggctgatggtgatcgagtaagcccctaagaggggtccctgctccatctcgagatgctgctagattctacagtgcctaataaacagctctcgcctggccgacaaagagctgcttgctctctggatagcaattccaaagtgaacagacaacatcctgtttggaagactgccactctgttagaagaagcatcaggaaaacctttcttttgagctatttataactaacagcaattgaccaagtatacttttgtgagtgaaactgacctttctccctgtaagaattctccaaaatttggaaactatttgtgagtatttttacttatggcaatataattattggcacaagctcaatcagattcggttttctttcgtaacaggaaccattggagatactcattactctttgaaggcttacagtggaatgaattcaaatacgacttatttgaggaattgaagttgactttatggagctgataagaatcttcttggagaaaaaaagactgggtatattttcaatatgctttccttttaaggtccctcacctgtggaaagtaaagaatgtcactttctgacaggctcaggaacctcaagttatgtagggatctcaagaagatgggggaattcacccagttcatacaggtgaaattgctgttgcaaagattatgaatatgagagaagtccagcatggctgacttcatctcgtgtctggcctcaggctggctgcccttgctcactcttgggcataggccaagctagccatgggaggaatttagtttatagtttaactttgaagcacggatgataatagtctctccctaaaatgaaccccttccttgctcagggactgaaactacctttgtatgacaaatgaaagcccacaagattaagattatgagaggggcctgaattctgctaaaatgcaggtgtagctgactgataacaagtcattgtcccacagcttgcctttctataatctcttgcttctcaggagtcacatggccagaggtcctgagatttccagtcctgtgacccccacccagagatggacttagtgcatgaggaccattttccacacccctatgatttcatcctcaaacaatcagcagcaaccattccctagccccctgccttccaaattatccataaaaatcctagcctctgagttattagggagattgattaataatcccagtcctaccccttgggttgctctgatttaattaaaccttctctactgcaataccacggactcagtaaattggttttgtctgtgcaatgggcaagaagaacatgttgcatggttatacaggtactacaagcacagtctgatggcaaattattggttttgcttcctgcccttgatgtttctaaacatctagtccaaaattacttgtgaaaggtccagcaaagccaattttaaaagaggctatatggccaatcactattctttctacacattattgcaaataatcaggccacggctgggcacggtggctcatgcctgcaatcccagcactttgggaggctgaggcaggatcacctgaaatcaggagttcaagaccagcctaggcaacatgataaaaccctgtctctactaaaaatacaaaattagccaggcatggtggcatgcacctgtaatcccagctacttgggagactgagggaggagaatcacttgaacctgggaggcagagattgcagtgagctgagatcacaccactgcactccagcctgggcaatagagtgagactttgtctcaaataataataataataatcagaccaagtataatgaaattaaaatttattttgcaaataaattggtcctactacaatttatccttcatagaaatgtggaaactgaagataaaaaaaattaggtttcagaagaaaactatactacacctgttattagattctagccctaaacattgtttttgaggtttttattatttacctgcaatttggtctaaattctgaattatttcctgactacaagtatccaaggaataaatgggttttctttttctttatgatagttttagttggcttctaatgcaacaacaatttttattgtaatcctgtgtgcattctattcctactattcaaattattaatgttatagatctttcattgtagtacttctgaattaaccaaaatcacagtattctgaagatgattctacaaagcctgctgtttctacaaaggctgctgatgatttctacaaagcctgctgtagtgttgctgtggcctctgcttaaaaaagtagaaaacacattgatgcagcatgttcaccccaacctccctgcctaaaggctcagggaccatcttggaagaggaaggcgcgtgagattgtaagagccgaattagggggatggagtgtggagaataaggacacttcatcttggatgctcacctgccaaattgacttctgatgaaagccagctccagaaatgtgcctacagttactactttcacctaaaccctgcccttagtcaaatccttctcttcttctaagcaatcaacttcaattccttgtataacccacagtataaaagggcttttataccattctatcctattgcatgtaagccttgggtctgggaggtaacagtgtgggattccaccatctcatctccctgccacccaaacatgcctgctcttctttaagcaatattaaatgtttgtacttcagaaatttgatttgtcagcctcttcttcagactctcagcttctttggcctttgggagtaaatttgcataggcctgctcaaaacaggatgttctgggggtttgggggtgttgttttgttttgttttttgttttgtttagagacagggtctcactctgtcacccaggttggagtgcagtggtgcaatcatggcacactgcagcctcaaactcctaggctcaagcaatccccccaccttggcctcccaaagttctgggattacaagcataagccaccatgcccagccctggacttttctttaaagacatttacacagtgtaggaattactgtgggtgcactgctcaggtccccttctccaggatgctcattcctacctcatagatgattttcctgcagagatttgacctcagctgaagggcagtcacctggtccaggtggttgctattcacctccttcctgagaacagccaacagccagggacacgctagcacagagatataagagcgaccaaggtgaggccccttctgtgctgcggtgcatgctccagagcctccctgggatcagacttaagagggtctccagccagatctggtcttcgctgctttcctcgagctccccagcgcactcctgcaatgcatcttttttttttttttttttttttttgagacggagtttcactcttgttgcccaggctggaatgcaatggcgcaatctcagctcaccacaacctctgcctcgcgggttcaagtgattctccttcctcagcctcccaagtacctgggattacaggcatgcaccaccacgcccagctaattttgtatttttagtagaaacgggtttctccatgttggtcaggctggtttcgaactcctgacctcagttgatcctcctgcctcagccttccaaagtgctgggattacaggtgtgagccactgtgcctggcccaatgcacctcttgaatcacctcctcatgctttgcttttagagaacatgatccccaacatgtgattccagcaaagattctagaaagccaaccgtgacaatcacttctgggtttagatgacccccccccaccacaagatggcagtgagcacctcatcacagaggtgctgatggtctgcagcaccgcgccaggccagaacgtgccttttacagaagaaaataacccagtagctgactaggatggtgaggagggctggtgagcactgcggtagtgagagggacactagcatcactgagatgcaagtgatggtcatttttcataggtcaaagctcaaagcaggggacagttacagggcagggcttcatagcaccagtgtgatgaaagtatctgggagtggctaaggccagcactatgccatgggaagcaaggtgggcctgaggaggaggcagcagcgtcagcctgcaacaagtgggggctgccctgcagagacctaagagtcatgttatagagcacagtgtctgtaaggccaagaagtgtggacagccaagtgtgtcaattactagacatactcaagaggagcaggaagggcagggcatggtggctcatgcctgtaatcccagctacttgggagactgaggaaggagaatcgcttgaacccgggaggtgaaaattgcaatgagccgagatttcgccactgcactccagcctgtgtgatgggagcgggactccatctcaaaacaaaaaaagaaaaaggaaaaagaaaaaaagaaaaacctaggtatacttctcaagcaaataaaaataatcaaaaccaatatcatgcccgggcacaaatttcatatatataacagatttaaatatatgagggtgattatcctctcatatctccatttttttttgtttttccatttttttctttactaaaaaaagttaatgccaatgacacacaatttttttttttttttttttttttgagatggagtctcacttcttcgccctggctggagtgcaatggcgtgatctcgactcactgcaaagtctgcctcctgggttcaagcaattctcctgcctcagcctcccaagtagctgggaccacaggagtgagccaccacacccagctaatttttgtatttttaatagagacggggtttcaccatattggccaggctggtctcaaactcctgatctcaaataatctgcccgcctcggcctcccaagattctgggattataggcgttgagccactgcgccccgcctatgtatgattttttttttaattttattttcataagtttttggggaacaggtggtattttgttacatgagtaatttctttagttgtgatttgtgagattttggttcacccatcaactgagaagtatacactgaacccaatttgtggtcttttatccctcacccccttcccaccctttcccccggagtccctgaagtccattgtatcattcttatgcctttgcatcttcatagcttagctcttgaacccttactttctgtttgagggagaagacatatcatctacaagtagatactgtgtaaacattccattgcatgactatcccataacttatttattatttgtgtttggttatttgctgctatgtaacaaccccactcccaactaaatggtgtgacaattccatgattctgtggatcaaaaattctgaaaagtcaaacccaaggagttttgtctctgctccatgatgctaaagcctccgcaggggtgaggcgaatggctcagggtgactgaaaagctcagggttggaacagctggggatgaggcctctatgtataagatgattcttcactcacaggtctgaaactatggtggggacagccagaaggctcggctcagctgggacagtcacctgagccctacacatgacctctccaacatggtgatcctgaagcagttgggtttcttacacagcatcacacttttcttttttttttttttttttgagatgaaatattgctctatcacccaggctggagtgcagtggcacgatctcagctcactgcagcctccgcctaccaggttcaagcgattctcctgctccagcctcccaagttgctgggattgcaggcgcctgccaccaagcccagctaatttttgtatttttagtagagacggggtttcaccttgttggccaggctagtcttgacctcttgacctcaggcgatccgcctgcctcggcctcccaaagtgctgggattacaggcatgagccaccgcgcccggccaaagctcacacttcttatgattcagccttagatgtcacatcagttcattttccccacacttattagtgttagaagtcacaagcccacccatactcaggggactggcacacagaccccactctcaatggaaggggtgggacaccaccattcctgctgatgggcatttgggtaacttcctgtttgaagctattaagattgggctgctgtggccgggcgcagtggctcacgcctctaatcccagcactttgggaggccgaggcgggcggatcacgaagtcaggagatcgagaccatcctggctaacacggtgaaaccccgtctttactaaaaataccaaaaaaaaaaaaaattagctgggcatggtagcgggcgcctgtagtcccagctactcgggaggctgaggcaggagaacggcgtgaacccgggaggcggagcttgcagtgagccgagattgtgccactgcactccagcctaggcgacagagcaagactccgtctccaaaaaaaaaaaaaaagattgggctgctgtgactattctagtaggtgtctttggtgagcgcctacacgtgtttctctttttctctttagtatatgcccaggaggggaactgctggctcccagataccgtatgttcagggtcacacacacttccacagggttttccaaagcccttgtaccagcacgcactcccagcacctgtgtgactgctccagctgtcccacagtctcatcagttctattgctgatattttcattttagcttaagttatatttaataggaaaattaccgttgcctctgccccccgttcctgcctgtaggagtttctcgtagctgttgctacaggtggccacaaatctgtcacttaaacccacacaaattgatgtccttatggctttggagtcagaagtgtcaactgaaggtactagcagggctgtactgacctggtggcctcagggagcatctgtgctgcttctccaccttctagaggctgctgcatccctcgctccagccccttcctgacaccactcaccctcctacttctgttatcacatcctcaccttctctgtgttcagggctccctctgtctctctcttgcaagcacacttgggattccattgagggccacccacataacccaggagaatttctccacctcaatatccttaacaactgcagagcccttttgccataaaagttaccattcacgggttccagggattgtgacatgggtagctttaggagtgattattcctgcctgtctcccgctcaccagaacttggactttctctctcaacaggagccccctgtgtgggaatagcctgtctcaacgacgccctctataaggacctgcttcctcaaaggacctcatagtcgggtcctgcccctcagtgtccagtctgccttggctggaggggctgcaggggtgtgttggcgccacctggtggagacagggcatcacagcaggtgggagcccagtagaagcacaaccaaaacatgggtaatgtttaaaattttctggctaagcgctgtggctcacgcctgtaattccagcactttgggaggccgaggtgggtggatcacatgaggacgggagtttgagaccagcctggccaacatggtgaaacatcccctctactaaaaaatacagaaaaattagctggacatgtggcgcgctcctgtaatcccagctactcgagaggctgagacacgagaatcgcttcaaccccggaggggttgccgagatcgcgccactgcactccaggctgggcgatagagcgagactctgtctcaaaaaaaaaaaaagaagaggggaggcgaggggaggggaggggaaaagggggaatttgtttggagctgagacatccatcttctcctgacctcagatatttgcactcctggttatgaagccttcacacttggactgaatacaccaccagctttcccgatttccagcgtgcaaatggcagatcgtgagacttctcagcttccataattacatgagccaatttatatatataaattgggtcctccagaaaaacagaataaattatatatataattatacgcataacttaattaaattatacgtataacttagctatatatataatttattctgtttttctgaagaaccctactgacacaaatgttgagcatcttttcatgtgcttattggcttaataacttgtacatcttctttggggaaatgtctattcaagttctttgcccattttgtaactgaactattaatatttgtctttacattgttgagttgtaaaagttccttatatattctagatactagagccttatcagatatatttctgcaactattttctcctaatatataggttgtgtttttattttctttttctttttttttttattgagacagtctcactctgtcacccaggctggagtgcagtggcatgatcttggctcactgcagactcgacctgccaggctcaagcaattctcccacttcagcctcctgagtagctgaggttataggcacttgccatcgcacccagctaatttttgtattttttagtagagccgaggtttcgccatgttgcctaggttggtcttgaactccctgcctcaaagcgatctgtcagcctcagtctccctaagtgctggaagtacaggtgtgagccacagtgcccggccatctattttcaatagtgttttttgatgtacacaggtttggaattttgataatgttcaattcatccatttttttttttttttttttggttctttctactggaccaccactcttgagccctctaatccaacctccacgcggcagccagagggagctctctaaatgtaattactctttccctgctccacctgctcaaaacagtgtcacatttgtgatttaaaacagtatttctcaaacctaatttgcaaacaaagcaggtggaactcttcttgtatgcacagcatctgatttggttggtctggcatgggtctgggagtgagcacacctaccaagcggctgctggggtaacttgcgttttccactgatgatttcagcaatgtttccggtcccacatgctcctccagaaccttgtactcccccatgaaaaggtggagtccatttccccttcctttatttatttttttgagacgaagtttcactcttgttgcccaggctggagcgcaatggcgtgatctcagctcaccgcaacctccgcctcctgggttcaagcaatgcttctacctcagcctcccgagtagctgggattacaggtatgtgccaccacgcccagctaattttgtatttttagtagagacggggtttctccatgtcggccaggctggtctcaaactcccgacctcaggtgatccgcccgcctcagcctcccaaagtgctgggattacaggcgggagccaccgcgcccggctatttccccttcctttgaacctgatcaggacttgacgatggcatcaacatggtgagagtgaccctgcatggcttatgaggctgggttacacaaggcgatgttgcttctgactggctccctctcaggatacatgcccttggaacccatcctctaagctccttgggagcccaacttagcccatgtggagacaagacagggagagaaacagaggcacccccagccctcagccagcatcaaccgccagacaggagagcaaatgcgccaacaatgattccagctgaagcctcagacagcgtggagcagagatgagggatccctgcagattgcagatgcgtgagcaaaatgcatgctgtcactgttttgaaacaacaatgtctgggggctgtttgttatgcagcaatagacagctgtaacaatgctgttactgctgtattccatgaatgactgcactttgagtagcagggggctagatcactagataagccccatggcttctgtgtatgctatttttctacttttatatccttttcattcactttttttttttttttttttgagacagagtctcactctgttgcccaggtgggagtgcagtggtgcaatcttggcggactgcaacctccacttcccgggttcaagcaattattgtgcctcagcctcctgagtagctgcgactatagatgcacccccatgcctggctagtttccgtatttttagtagagacggggttttgccatgttggccaggctgatctcagactcctgacctcaggtgatccacccaccttggcctcccaaagtgctgggattacaggcgtgaaccactgcacccagcctcattcactttctttacttggctcatttttccttgttgcctcaattctcctctaagatcactttcctgacatttcagcctgggcctgttgccttctctgggtcccctccgcctcctgtgcctcccccatctcagccttgatccctcagattatacttcctctgtccccaccctgaccatcttggctgtccctggatagggatgggtatcttctcccactggtctgggagatctggaaggacaggcctggaaaagacttggtcactgctggaaggagctcagttagtgtggtgctgaggacagtacgggtgaggctggccccttcacccaaactcccactctcttccatagatttcacctctgtggcccaggccataggattagggcaactccccttaaacatcgagtccatcctccaagctgtccttttttttttttttttttttttttttgagacagagtctcgctctgttgcccaggctggagtgcagtggcgcgatctcggctcactgcaagctccacctccagggttcactccattctcctgcctcagcctcccgagtagctgggactacaggagcctgccaccacacccggctaattttttgtatttttagttgagacggggtttcaccgtgttagtcaggatggtctcgatctcctgacctcgtgatccgcccgcctcggcctcccaaagtgctgggattacaggcgtgagccatcgcgcccggcctcatgctgttcttgaatagtgagcacctgttacaagtcgccccaccagcctctcacttgtacccccctcatctctttctccccaagagacagaggaccctggcacttgtgaagcatgacccagaccctggggccatggcatccaacatcctcattccccatgacccctactgtctagatgtagctgccaagagacccccagactccccgggcctctgtctagagtgccaagacagagagagaatgccctgccgcttgcatgctttgtggggtgtccttcccccttccctggctgctaggcgtgacttcaacgttctccccaacccccaaacagcagcactgacaccagctgcagacctggctcaggttagctaatgaggaccaggctggggatggagcctgaacccctaaaccccagtcctgtaccccaccctaatcctggggtctccactggacaaaacgaagcagcttggtttttcgttgttattgtttttgagatagagtatctctctgtctcccaggttggagtgcagtggcgtgatctcagctcactgcagcctccgcctcccgggttcaagtgattcttgtgccgcagcctccccagtagctgggattacaggcgcgtgccaccacacccagctaatttttgtatttttagtagagacagggtttcaccatgttggccaggctggtctgaaactcctgacctcaagtgatttcccagcctcggcctcccaaagtggaagcggcttatttttaaggagaaaactcccgtggaaaggaatcagcacctcctctgtcaacatttcacttctctgaaaagactctcacttccaacagaaagtgctttgtaacacaacaatgaggctgggcgaggtggctcatgcctgtaatcccagcactttgggaagctgaggcgagtggatcacgaggtcagaagttcgagaccagcctgaccaatatggtgaaaccccgtctctactaaaaatacaaaaattagttccgtgtggtggcgtgagcctgtaatcccagctactcaggaggctgaggcaggagaatggcttgaacccaggagatggaggttgcaatgagccgagatcacgccactgcactccagcctgggcaacagagtgagactccgtctcaaaaaaaaaaaaaaaagaatgagaacatatggacacagggaggggaacaatacacacaaacaaaatttagaaacaggtgaaaataattttagtaatatttttactaatactgatatgctcaaaatattattatttcaataagtaatctaaaaattattgagatgtcttatgttcttttcatcatactaagcctttaatatttggtgtgtattttacactcacagcacatctcaatttgcagtccccatgtttcaagcactaaataaccatgtgtgtccggtggctaccatactggacagcgttgatctgaaatcgcatctgtatgcatcaccagcatatttgcagagatccccatctcagcagcacacctgaggctcatctgcgaaagcacctgcaacttctctacaacctcccacatcacctccaaacacatcctcatgtcatctgcaaacacacccatagctcacaggccaatgcctaaatatcattgcaggcaccttcagagaaagcacttactaaaggggtatacttgattccacatctgctttgacctgcaaatctcccttctcctttacatacatttgcatctcatttgtatgtcaatctaaatccactggcagagcctcagatcatcatctcaaagtcaggtggatgtggggctgggcaggcctccaggtgttcctcctcctgcttcctctggggctcttgatcctcctcctcttccttgctgctctcctcctcctcctccaatatggtgaccagttcctcccgcagcgcccccatctccagccccaggctgcacagctgtcccagcagctggacatccactcggcgcaggttcccctgccagtaggaaggggacgtcacagggatgccaccccagagagcaaggggtctctccaggacctgggtgagagcaggtcccaactcatgtcctggccacagcgcctgggcagggtcctcactgtgcccatggaccctaactgccttcctgcttctcagagtgtctcttgatctctaactcttctctttgtctctccatttcattgtccctgacttctctctctctgtctcctccctctcttatctatatctgtccctgtttccctttgtctctgtccccatttattttttgtctttccatgcccctgtctctctgtctttatgtgttgccatttctctgcccctgcctttggctctctttctctcgcttgccctctctctgccctccccaactttctcaaattcagtctgtctctccatctctgttcctgctctccgtctctgcttcccacctctgtccctctcttttgggatctccctgtccccacctctgttcccgtccctcactctatgtctgtctctcggtgtctgtacatgcctctcatgtctctgcttctatctctcagattctgtttttcgatctctggccttctctatttttgttcatttccattcattctcatttcctctctttctctttcccttccaaacccctcactcaccagctcctccctgatccacagcagactatcgcaggcacctccagtgtctgcccctgcagtcctgagggtctgaccagggatttccactggggagacctccctcagggcctgggggggtgggcccagccccggaggcaccagtccagcctgattcagctgcctccacagttccatcgtctctgagctatggctgcaaggagcaggaagtagcaaggtccagggtggcctggtcccctggggagctgtgtgcgtggtggagagtaaagggcagagggagtgggatgggggttcctgggaaaggtatcccaaagtccactcttcagagagaatcagctggccttgtgcttttctttttccttctgaagtctaacctcaactctgctcacagggttcaaacatagcctcttgcagaggtctaactccacccttccctgcctgtctcaggcctgacccctcaggggcgctcagtgtctgtagatgcctggcaccctctgtccttccacctgccccccaccaccacttctccagcctctcctcagcctccatttgacctctggcttgcccatagcttggtccttgcttgtcctcttggcacgggtcatcctagggctttcccaccagtgtgcctttgggggcaggaatggctcccaggggcaccaagacagcaatcccttagctggagtgcctgtgtccaggctgctggcctagggccaagcagccaattctgctgaccctggacttgcctatgggtatattatccctgttgagggtgagggcttctgctgtggaaaagtctgggaagcactgcaggcctctctcggccttggacccttccttcagacccaaggtgcatatatatacatatatataatggtagatcacgaggtcaggagatcaagaccatcctggccacatggtgaaaccccgtctctagtaaaacacaaaaaattagccgggcatgctgccgcgtgcctgtagtcccagctactcgggaggctgaggcaggagaatggtgtgaacccaggaggtggaggttgcagtaagccaagatcacgccactgcattccagcctggcgacagagcaagactccatcttaaaataaacaaatgaacaatatatatatatatgtattttgttttttgagacagagtctcgctctgtcatccaggctggactgcagtggtgcaatcttggctcactgcaacctccgcctcccgggttcaagcgattcccctgcctcagcctcctgaacagctggggttacaggtgcacgccaccacacctggcgaatttttgtatgtttagtggagacggggtttcaccatgttagccaggctggtctcaaacccctgacctcaggtgatctgcccacctcggcctcccaaagtgctgggattacaggcgtgagccaacgcgcccagccccaagtcccttttaccatagaaagtaacatagtcacagtgcccagggattcacaggtatggggagagggttcgttattcagctgccacacccaccttcctaaacctgctgcccttccagtttcctcacgtgcacagccacgcccgtctgcttttagtttctcaatctgttggcttaaccttcaaaacaggcccaggatttgagcacttctcaccattccctctgccccatccccattcatctcttgcctagactgctacagcagcctcttttactggtcccctgcatccacccttgccctctaaggcaagggtccccagtccctgggccaaggaccagtaccagcccctcgcctgctaggaactgggccgcacagcaagagatgagcagcgggtaagtgagcattaccgcctgagctccgcctcctgtcacatcagcagtggcattagattctcataggaggcaaaccctattgtgaactgtgcgtgcgggggatctaggttgcctgctccttatgagaatctaatgcctgatgatctcaggtggaacagtttcatcccaaaaccatccccaccccacccccgacccccagtctatggaaaaattgtcctccacgaaaccagtccctggtaacaaaacggttagggaccgctgctctaaggtacattctccacctggcagaaataatctttacaaaatgtaaatccgattttgacactcccttcttcccactgtgaatagaataaaaccctaccaggcctgcaccgtcagcccctgcccacctctcaacccagtctcctatctctgtctgcaagctggttcccacctcaaggcctctctgctctagaggctacctctccctgcagcgcttttcccctagatctttgaatggctctttccttatcattcacttctacttcaatgtcacctcttcagagaggcctttgctgatggccctacacccagtcacttttttttatctgcttctcatcaaaattgccttgctgattcctttgtttcttattcatcctctcccacatccatcctctcccagcccagaatgttgacttcctgagagagggactgggtctgtcctgctcaccatggtaacctcggcatctagaacagtgcctgccatcacgtggtaggtgctcagtaaatattcttggaactaatgaatgaataattctatccacaagacttcacaatggctcttcatgctgcgatctagctttcaactccaaactggtcttgagatctcacctcagtctctaaccttgacatctaacctcttcacccactctcttacctgaccctaatttttaaaaatgacgtggtcagcttttcagccccctcattccctgtttttaggaggtagtgagtggaagctggaagaataagaaagcttggggagactgcaattgcagtcaggaaagaaaggtactctgccgggaagaacaccccatcttctcctagggaaagattgtggagtcctggggtttgttttgtttttcaattttttgttttaagagacagcgtctcgctctgtcacccaggctggagtgcagtggcgcaatcacagctcactgcaacttcgacctccccggctcaagtgatccccccgcctcagcctcgtgagtagctgggaccacaggcgtgcaccaccacgcccggctaacattttattttttgtggatataaggttgccctatttctttgtggagataaaggctcccctatgttgcccaggctggtctcgaactcctggcttcaagcgatgctttcgcctcggcctccacaaagtgctgggttcacaggtgcgtgagcccgacctgtgtctcgttttgaagctcagggagagggcgctgtgagcaatccctaaaccctttaagagtaaaaagtgcgtgcacctttaagaggacggttagaaaacgcggggcgtggccacaggagaataagttcgcgctgaaccaggagcgtgggataagaccggccccttccggttacgaaaccttagcaagatggcggctccctgggcgtccctgcgcctggtcgcccccatgtggaatgggcgtatcaggggcatccatcgcctgggtgcggcagtggccccagagggcaatcagaagaagaaaaggacaatactccagttcctgaccaactatttctacgatgtggaggctctgagggattacttgctccaaagggagatgtacaaggtgcatgagaaaaatcggtttcgagacaaggagtggatcaggccagataagtatggccatttctctcaggagttctggaatttctgtgaagtgcctgtcgaagctgtggatgccggtgactgtgacatcaactacgagggcctggataacctccgaacctccgcaggctggacatctcggacctccctgccgtgtccaaccctggcctcactcagatattggtggaggagatgctgcccaattgcgaggttgtgggagtcgactgggctgagggcctgaagtcagggccggaggagcagcctcgggacacagccagccctgtccctgcctagcctttagccctgtccccactcacgtggcttctcagcgggctgcatggaatgtctggtagctcaccacacttctggcttccatttgtcttcactcaacgtcagggtgggggagtggtgctggccaatcacaggagagagcgtgagttcccagtatttattcctggctgcccttggctaaaggtcacagctcctgtcaccctgtcaggcagccctttccatgcccctgttcaggcctggggaggtaaaggctcaggctgttagtagccgcagagagccacactcaccttgtcaggagactcttctcaaactgtccttatgtgagtgcactgccatttcttgcagggaccctgactgacacaggggctactactgacactttacagggatggttctcccccgtgcagggccgctgtgcccactgcaggacatgcagcatccttcgccccactccactcactaaaggccagcgcaccccaggccccatagtattgctggttatggatttattgactttatgttccaaattcagctttttcagttggctgtttgaagggtacttgcgggggccacaggttggggagggccctggttggggggctttctggcccgttgttcccccttttccagggtctggcccccctttggacctggtttttcccccgttgtcccttttcttaa

SEQ ID NO: 735342 - DNA, 187679 bp, Homo sapiens
ctccaaggctgagggatgaggagacctgctgaggacccagggccttatctttccatcccactccataggtcccagtattgactgatgctgtcttcacctcctagcctcacttttaaccttctggcacccgcccaccactgtccagttcactattgaagccctgccgtccagtgctgcagagggaaaggatgttcttctactggcctgcaatatttcagaaactattcaagcctattattggcacaaggggaaaacggcagaagggagccctctcattgctggttatataacagacattcaagcaaatatcccaggggccgcatacagtggtcgagagacagtataccccaatggatccctgctgttccaaaacatcaccctggaggacgcaggatcctacaccctacgaaccataaatgccagttacgactctgaccaagcaactggccagctccacgtacaccgtgagtgattcccccatacctctgggtgctggcggtcagttctgcttcacacacatgagattgtcaggcctgggctgtgcctgcatccccctctgcattttgtcccgtgttgagatttgggcatttagtgcaggacacacacatggtaggtaaacttcaacagatcagaattcctttcctgcatccaggccctgcagacactgatggcgggggcgggggggcctcagcagggggaggtcagtctcagccaagcaccccatgccctccccatgaacctgaccctgagaaagaccctggagaactgggtcagggcctggcctgagggcgtcctgggaacctcacaaaagcccagcctcaggactcctgactccgtgtgaccccgggaagcctgtgtcagggctggggtgtggtctcctgggcagggcttactgggagcaaggatttaccagatgtctgcgggctgtggttcctgaagcttctcatcagtgagggctcagctcccagagtctcatctagacaaggacagagcctaccactttccctgggactcagcctggagagggcagggggacaggattactagggcattggccccctgaatgaggagcttaagagatgcccttgggcagtcagtggcccaggggtaggaacagaggggagaaaatgttcctggcagcttcttgtccaccggggatcatgcccaggggtgctctcccatggaggcaaataacagatgctgttgatgtgaacacctcctctgtgccaagcttcatgtcagatcctgtgaataatttaaagttcattcacagacaaagtggcaagcctcagaccattttccatttacatattgtatggaggggaaactgaggcacagagagatacagacaccggccacggtgggcagatcgcagctggcagagtcacatgagggctgtctgcagctgctgccacgtcctctccttcatccctggtgccttactaggtgtctgtggaccttagaacagccactggttcggatgttttcttcttaggtgtctacagctcggagggggagattctggtctggagagttatgagtaaatacagaattaatcagttttttcttaactaaatcacctgcctcaacaatcagtcagtgctggggaagttcaggcctcctcgctcaggtccacaccccgcatctctggacatgaaatggcttcgtgtgttttctgatgtgtgggtatcattccaacaggaggataaaggggaggactttgctttctctccccattcacaccctgcaccagccagggcccagtgtgagacacatactccgtagttctctcatgaaggagggagggaatgaatgaaggaatgatctataacctcttcagagacagagacctggatacaagatcctaggaggttctgggcccaacgtgagacacacactctgtagttctcttatgaaggagggagggattgaatgtaggaatgatctataacctcttcagagacagagatgtggatacaagatcctaggaggttctggccacacctgttttctgtccctctagagcctaagacccatgtctcattcatctggcccgtttctcctaaatctgcccctgggagctgagtctcatctgaccctggggctgcagggctgtgggaaggttttcaggggagggatcaggcttgcgggtagtcccacacgtttgccttacaccctggagctctacctggttctcactatgaatatcccataataatcccccctatcctttctggggagtagaaaaaaagtaaatatttaaaaatatgccagagcatctgttcttcttagcaagttcagatagttattagttagcaggaataaatcgttattttaccagagcctcacctgctgggggtttatgggagcctaactgactgaggggggtgggaaatatccaactccagccccctctagccatcatgtcccacctaaaggagagaaaaaactgagaggcacttgtgacattcacagcccagggcacagactctatccaggaccacagaacccctccctccccccactcaccaccgcatcactgaacgcctgctcacccaagttcctgttgcccagtacatcatgtcctggctttcaacaaaaactacaagacagactagaggcaaaaaaaaaaaaaaaaaaaatgcagttcgaaagacagaacaagcatcagaaccagatgcagatgtggcagggatgtggcagggatgttgaaattatcagaccaggaatttaaaacaactctggggccaggagcggtggctcatgcctgtaatcccagcatttgggaggccgaggcaggcagatcacctgaggtcaggagttcgataccagcctggccaacatggcaaaaccccgtctctactaaaaatacaaaaaattaggcaggcatggtggtgggtgcctgtaatcctagatactcggaaggctgaggcaggagaattgcttgaacctgtgaagcggaggttgcggtgagcctagattgtgccactgcactccagcctgggcaacagagcgagattccatctctaaaacaaacaaacaaaaaacaatactggctaatatgctaaaggctgcaatggaaagcatagacaatgtgcagaacagacggatgctgtgagcagagagatggacaggctaagaaagaataacaacagctactatatctatctatctatctatctatctatctatctatctatctatctatctatatatatgtatatatatgctagagatcaaactcactgtaacacctggatctcagagtggttgtgaggatgtttattaggagattaaagagattaaagcagagttatacacagggcgagagctcaactgatgctatcaactagtattcttatttttttgatgttgttattggcaataaaatcaggaacaatgcagtaaaaatttggttttatcatgtacgagttctgtgaccttccttgacttactgaggtactgtaagtctcagattctaactctgcagatggcggtgatgcccctctccctcaaggtgatgtgaggatgagatgagctgtaggtaggttggtgcccactgtgcctggcacatggaaggcccctgaaaatagtcaatgaacatcatccccgctcatcagcatggagttgacagtgagggctcgctctctgtgacaatcatggaatggaaaagaagaaacaagaggaagactgggcgcagtggctcatgcctgtaatcccagcactttgggaggccgaggcgggcagatcatctgaggtcaggagttcaagaccagcctggacaacatggcgaaatttcatctctactaaaaatataaaaattagcctggcatggtggcacaaacctgtaatcccagctacttgggaggctgaggcaagagaatcgcttgaacttgggagatggaggttgcagtgagccgagattgcgtcagtgcactccagtctgggtgacagagcaagactccatccaaaaaaaaaagaaaaagaaaaaagcaacagagggaagaggtgtgacatgagaggaagaagggatttaaaggtacaggagcagggcgaggtgcaagcacctgtgggagaatgtaggagttggtacatcccagtgtgtcaagtctgagacacagaaaatggtgcaaccgtggagagcaagggagtcagctatgaggacagcccaacagaccacactcaggctctggagcatttccttcctccctgactatgcccctgccctgcaatgccccttatggtttcccttggaacaaacttgggccttgtcccctttgccttcccctttctgcagaaaacaacgtcccaggccttcctgtgggggccgtcgctggcatcgtgactggggtcctggttggggtggctctggtggccgccctggtgtgttttctgcttctctccaggactggaaggtaccgcagcttttccccagcctcctcccacccctaggctgaccccagtcagggaggagggagaccccgccctgtattcagggccaggctttccgcatcctcccaaggaatccttccctctcattccatggctcctcccttgccagctgctgatcctaggctgcctcttcctttatgaatgtggcacagttaaggttgcacccctgagtgctgtcctagttccctaacacagcaaagccacagctgcctggagggaggaagggagggagggagggagggagataagacgggagtgctcagaacctggtaccttctgctgttcattgaatttacccacccagtgaggagggatttgcaggcttgagatccatggtgggggtcctgggcatggtcacgcagtggggagtggcaaagcctggacaggctgggtagggtcagcaccccatcgtgattgatgtccctgaggtgtgagatgggagaacctggacctcaggacctgctgtcctttatgtctcttgccaaggggtggagagagagaggacaaggccattgccccatttcagcatctccaggcctgaaaggagggtctggccatggcagggatactgagttctgggagaatatgatacatgctccttgcctccccatgcccccagctcccccagtgtcctgcacacacagccggccctgctttccctctggggccttgacccttcctctcaggcaaacgcaggtggtctgattccctccctgagtcctcagtccctttcctgggtccctgggtcaatgttctcctcacccggcatctgcctgggggggtccttcctctctggccaggacagacgtgactgcttaaggcctatcctcagctccccgtcctcggccgctcctaccacgaaactgatggagacaggaggccttcactccagtccttgaaaatggagtcccttccttgtcctttattctgcccctaaacctgtgatttctccctgcaccctcatgaataatcctgacctttcctagggccagcatccagcgtgacctcagggagcagccgcccccagcctccacccctggtgagtgtcccttcagcccaggtgtgggagcccctaggcctgccctacggtgtccactcctgccagtcaccccctgggggcctctgaccctttctttggggctgcaaggaggatgtcaggaaacatgacacaggggaccccgactgtcttgttcagactgatctgtgggctctgggtcgtgggtcacctcctcgacctcagctgctcaggtctcccctgggaagaggctccctctccctgattctctgggagctgaggacccctacactctcctgcaggaggggcccaggctctcctcccaccctgctgctcactcctgtctctgtccccaggccatggtccctctcacagatccaccttctcggtaagcctgttccctccccagcccttttctactggggtcccaacagtgcaggctcagggcagggggaccatcaaccccacagcacagcactgacccacctttccccagaacagtcaggtcaaagtgagtgcctccagccaggatccgggcctctctacagggccaggaccacccacgccatgtgctgacccctccccgggaccctctacacctgaggagaaccctggagtccagcaggtgcagaatggacactgggaccatcagtcagaggcccacattaacaagggtgcggggtgggcccagccaggacaggggtcagggtgttgtgtccacactgggaggctgagctcaggggcagagctggtcaatcctgaggggaaatgagtggaagtggaggcagggaagtaagtcctggccgatcagagacaggaaccttccaggctgggcttccgtgaccctccctccctgtcccctgacatctcctctctcccctgcccaggcccctctacccagccccagaacagccactcccatctatgaggtgagtgtgggccatggatgttctggtcccgcaggctccaggggacccaggatctgcccccaccagcacctggctgagctcagattcaggaaaatgcagtgaaaatgagaacaggtggtggtgagcagaggagggaggggcctgggaacagggaccccctgagcacagccaggttcagccccagagaagccctgggtgggcccagagcctgggagatgccagacactgttctgagaaggctacaggggttgaggcctcttctctgtttttacaggaattgctatactctgatgcaaacatttactgccagatcgaccacaaagcagatgtggtctcttaggttcctctgggagctgctcttgtgggttgatggagcgtccccaaagctcccagccctggggacggggaaggacatggagcctgagccagagaaccagctctgagtcctgaggagacacaggcctggggacagggagggatgggagtccctgctgaatatctggagaccctgacaggttgccctgggctctgggtgggccgggacaaaggcctctcatcaccacaggaagcgggggcttgcaaggaaagtgaatgggcctgtggcccacccggggtcaccaggaaaggatctgaataaagaggacccttcctctcattggctctttttctgctcacgggaacttagcagaaactcacctgaaactccgtgtccattctctcccgggtcacacagggaaaatatctccaccttgtctcaaccacagtctctcttccctgggaggcagaaataggggttgggagtcaggctggggtgggccctacacaggaaagggcaagattcacatgagccctgcccagccagccgagcgctcagctgtcctcacactaccccagggaccaaggccatgcacagccccagcctgggtccctctgtgaatgcatgtggggtctcaggagcacagaagatggggccatctgatgtccacaaaaggtgagcaatgcgggagcaaccatgggtggtataggttgcggctgtggcccctacgcagcctccagtgtcctgacccctgctgccctcttcacccaggccctggaggcccagtctatcactgtcctccacaaatgaacttacctgtccccaaatccaggatcctgtgtgcttatacctggccactaggttctcctctgtcccagtggctactgctcaggacatctttatccctggtggggcacagagaggggctgtcagagcaaccaagattaatacagacgcataattcagtccttgagcactacccaggactctggcccctcattgctcatcagttcccactttaccccctggcatggatctcactgagcaagccaactctttacacaggagcatccaggtcagaggtgcaggactcccccatctaaagctcatgcaggctcccatggcgatgggacaacctgtctgctcctctccctggcccacagccctatctcgcctgcagctcctccacacacctgggacagcagttctcagcccttccctgagggcccctggaagggtgatgatctcatataggttcacttgaaccaggtgccaccttcccacaagtgagctggtgcctgcactaaagcacagagccacagttcccaagagtgttctgccactgccacaggtcccaagagtgttctgccactgccacaggttgttcgtcctgagatgagaggtaagaaaacaacccgcaatgggttgttttatatcgggatttgcatcaggatttagctctaaatgacccctgatcccacctgcacacagcgtcagatgagacaaggtgaggcctctttagttttctgttgaggctgtgacaaattaccacaagcttagtgacatagaaacctgaaccaaagtgcccacatggctgtgttctttctagaggctccagggaagagtgcatttcctctccttttccacctcctagaggcctcctgcaaccttggctgtgtcctctttctccatcttcaaagccagcagcacagcatcttgaaactattctgtgccctgcttccatccccacatctccacctcctcccacctccctctctcacttaaaaggaaggagccttgtggttattttggacgcacctgggataaaccacaacaacctccccatctcatgatccttcctttaatctgtaaagtgtcctttaccacgtgacatgtccacagatctggggatgaggatgtacacatctttgagaggcccttgttctgtccatcactcctctcaaggccatcttctcatcatcgttcactacaaactacacatgggcacctggatgggttcatcatgactgtggcgtcagttcctgcattaacatccccagcaccctccagatcctgagagagggagacggagggctctccatgcccctagtacctctccaccttcttcttggtgacatgcttagttgctaagaataacagaaagcggaggtgactgaaagatcacaactcaccggcccttcaatagttcgtggacatcagcaccacggacagtgactcagtgaggctaatttccaggtggcagcagggagcatgcagataggagggaactgcaggaaaagctgcccattctattctatatgagaaagagtgtaagaaagaggaagctattacagggataatgctattcttctctaatccataaattgcgaaacctttgcatgtctggatatcatggtttttagcacatctgctgccactccctgcagggctgattgctgcatccaggatgtggtctcttggggggctcacagcctgctttggcctcatggtgagtctccctgcccctgacactcaggccactgtctctgcctacaacatggtgggaaccttccatgattaacgtctgattctctgtgcctgacctttgaagcacatccatcactcagcctggagcatccgctgagctcagcatcctgctcctccatccccagctgagcccttgaggagatgcttgagaggatctcctgggctcctctgtgagctcctccaggctgagccttgtgcttggtgtcagaggcctttgccatctgcttgttctttccataggcaaataatcctcctcagggacaagtggggcctgaagatctgtctgaatatctatctatctatctatctatctatctatctatctatctatctatcatctatctatatgtatgtatatatgagaatgctttattaggcaaaactgcatactatgaacatgctttaaaatgcaacaggatgagatgtgaagacataaagaacaagtgtgtagtgacacatggctatcagaacacactgaagaatccacaccgcggccgagagcagtggctcacgcctgtagtcccagcacttttggaggctgaggcaggcagatcacttgaggacaggtgttcgagaccagcctgaccaacatggtgaaaccccatctctactaaaaatacaaaaaatttagccgggcctggtggctcatgcctgtagtcctggctgttcgggaggctgaggcaggagaattgcctgaacctgggagacacaagttgcagtgagctgagatcgcaccactgcactccagcctgggagatagagtgaggctccatctaaaaacaaaacaaaacaaaaagaatccacactgcttccccgcttcactttacccagaaaaggaatgttctaggccacttcctcttcagcacacatccccagggaactaaaataggttcacagtcacccccatcttcctcattcccatcacctcttacccacagaggcatctctggtcctacagatccagccctgccttcaagaggcacaggtccaacccatccagtgtccctgctagtcacacacagcactcagggtacaatggagggcttctgtgctttggatgggaacaaaccccacctcacattcccacacctgagaagccaccagggtcctctctgtcctgtcctcacactcaatgtctgtcctgggtcacccttgtcatctctcctggaaataggcatggctcctgacaggtaggattgaggctttgtcttttcaggagtccctcccactctgagcacatgaaactgctcagctccatgcaaccctctctcaccaggggccttgttctctgggtccctgaatacctgggtccatgccatgtacattttaagaaaaatgacagtgactctcaccctgacatcctcacccaaggcacgtgtctgacaagaatcaccaggtgagatacctgtggctccacacacctgaggcttcactgcgcaggggtgtcctcatccctctcctcccacccctagggacagtaagcaccacaggctgccttggaccaccagctccccctcccagacacagcctcagatctatactgacatgctacatggagaggctctgatgaacagcaggtattaggaaatcccaccgaaccaggtgccacttgcggccccactcctcctcatatctgtgactgggacagacacacataacacacctctgttcaccgcccagcccccaaggtcaatcacagtctgcttctcccctagatccactgctccccatgtcttccgtcctcagctgcatcctgggtggcctccttgctgttcttgtaccccagaggcaggttccaacctttgtgatgttgcctgcaatgcccaaactttcccttccccttccccttcccttttcccctcccccttcccctccccttcccctccccacccctatcccttcgtcttcccttgtcttcccttcccttccctataaagccaaacatacccatccacctaccttgtggtcaaagtcatcagcctcctgctccactcagtgttctctgaccctgcatatggaggtggtggcccctcctagaacacccaccactcactgtcagccttgcgtggtaatcacagattttgcaggggttacctgtgttcaggtgtgtcacctgtggaaccagaactcttggaaggactggcagagggagctgcttaggatatctcagggctcctggcatctggtctaccacagggctattaacaacagcacttagggacaaggtggaggatggacggttaagagggtaaatatggatgatgtgtgggcaaagaataggacacaggaacacatgcagtactcaaataattatgccaagaaaggtgaggacatggagatggacattcccatatacttctgatgggactgcagtttagtccctacagcaacattgacctcatcatgtttaacgcgcacacgctctgaccactatcctacttctgaaggcctccctgtgctgtgagctctgagaaggccaagcttgcctgttctgtctctgctaaagccagagaccagccaatagcccagcacagggtacttcataaatacatgttgaaggaatgagctccaggaacagtactccacatggtagagatgtgtgtatgaggatgttcactgcagaaggtcatgtcaatgtgacaagtgacgagcagcctcaaatccagcaacaggggtgtgggtaaaagatcatagtgtagccatgcaatggaaccaatgaaaaaaccacaattagagcaaatccacatgtattaataaaggaggtgccctccatacatgctgcacctaacagaatgttgccaaataagaatgaaaaatgatgatatttgggctgtaaaaactagaagtcagctaaataagaatgcatcgaaagtatttgtgaatgcttacaattttataatgccttggcatccgttttggatggaagttggactttctcataccagaagcagggctcagtcacctttgaaatagtttccagttctccacctccttccagttcctcagtgtgattgatcagatatctgatttatacaactgcctcctggtgacctcctccctatgggacttccggatacagcccgtatgactgccccactgaccccacaccctgcctgctgcagtgaccacctctaattacctggatctcatgtctgcttgcattaaatccaccaattaaaactccctgaggacaatctgtttgaataatattctgtaccctaataaaggccttgacccatgggttccccctctgtcctccccatactgcccctgacctctgtgtgtgtgtgtgggtgtgggtgtatgtgtgtgtgtgtgtgtgtgtcctccagacagggcctgtatcccccaggacctgtaagtaataaatctttattttcatcttatgtctctcgcaatcattggcaagagctctgcatcttaaagatcgcaaatttaagaaattggtgtagtcggcacaatagagtacctcttctgtttagcacaagatatctcggagctgctgaggcttttaacatcctcgccggtgtggctgcctcactggtgaggccgttctgttcagtgcaattcagttgctccactgtgtgctgctgtgttgctgctgtagagtgctgccatgttgttctccccaaattgttaccgagtaggaacctgtaatgtgctcccaaggtggtctaccccatgagaagggggattctccatctagggcaagggctaggtgtgtttctggaatcctaatagggaaggcatccacagagggtgaactccactcctccttagagtgaggagtgacatttcccatttattttccccatggaggtgccatgtattgactttttctttcactgtcccaaggttgagccaaggtgagctatggagaccagggcaagataccatttctgttagcaaagcaaatgggtgacaacgtgtggagaagctgtggttctcctgatggatatagcagagtgccatttagtaaaatcttgtcaggaggctgcccctggttagaccggcagtgtctgtagtcactaaggtggatgcgaattttaggccctgggccatggataatccctgcagacacagccgtggcttcatgtgatggggcaatcccgggctagtggctcccttgtttctgcatttcttgctgtggttgcacaatcaacacctcaggggttgattgggtcaccttggaaagagaaacagctgcctaggaggctggtgcacatggaggccaccctcaattttattctgctaacaagttgtaagattaaaacaacagggggctttgggtaccatcaggaacttgtcaagtaaacatccaaagacagaaagaagaaaaagaaaaagacattaaccgtctagaaatacaagccattttaaagattttgcttaaaagatgcgcttgggctgggagcggtggctcacacctgtaatcccagcactttgggaggccaaggtgggtggatcgactgaggtcaggagttcaagaccagcctgaccaacatggtgaaacctcgcctctactaaaaatacaaaaaattagcagggcatggtggcaggtgcctgtaatcccagctacttgggtggagaatcgcttgaacccgggaggcagagacggcagtgagccaagatcgcaccactgtactccagtctgggcgacagagtgagacttcatctcaaaaaaaaaaaaaaaaaaaaaaaaaagacgggcttgtttcgtcgttgtggagtcatcccagagagaggctactccctagagtcactgaccacctttcctcctccatcttttcctcttatcattctagagacagaaaacaagaatctcagctttaggtggctaacctcaccccccaagaaaagaaactaccactttgattgactacaaatccaagaaaaataaaagagaaactttaaaaagtactgagcaaaccacaggtctagcaaacataatgctagccctaggttacttattcatttacaacaaacccctagatataggaggaaaaaataaaaggtaattaaatatatacacatacaatattttaatataaatatataataaatagttaaattatgtatgtataatatgtaactaaatcaaagtaaaatttcatactttgattctattggaaattcaaaattcatttattaacttatatattaaggaatttatgtaaaaaaagatttttaaaagggcaccaatttgcttttgtgtctctacaacataggatctaatttaactttacatttgctaaatacactaattgacaaatattcatggatttaatcaatactggggctcaaattgtagccacacgtgggaatcccataaatttaaacactctgtccctattatcttgagaagaaaactaaatataaaattgaaaaaaacaggtatgtctcaatttacctgtaactttgcctaaatttcccggagtcatatacccattgctgtaaaacattctctattggacataggtgctctgagacaataaataaaatagaagtgtttttggtacttagacattggcttgacaaaatgggatcccatgaaacctcagttaagatagtgaatacggcccaatgtgagttgaaatggggcctttaaggattaaaacttattacatgaaacctagtaagtaatggggtgattatccatactgcttctccatttcatagcccaattttgacagttgtcaaatctggaaaaaacaaacaaacaaacaaaaaaacccctgggaatctgttgcctcacagagacacaaagtagacatcaaaattgtatatctcagttccagttccaaaatggtggcatagaagcaagctggctttactccttcacacagaaaaccaaaaacaaatatacagcaccaaaattattaccagatatattccagaactcaaatatgaaaatgaaacagttttcagagccacagagaagtgaaaaaaactcccgacagatgacaaaagaatcagatttccccatctgtaatgtccctccctgccccattctgcctggtaccaggtgtgtggaaaattttaccccaactcatggtttctacactgggaaatgtaagatcaatgcgggcaaccagtttctgcacaatcctgggttccctgtccctgccttaacccacaagaagcattgtgagtgcccgaagggagaaatttccctgaggacagtcaaagagtggggaggcaggactaccatctccttccctggaaactctgctgtgtaactcagccaagggagacatgaaatcagactggtgtttcagcagctccatgttgtagtaggtttgtttcacaggtatcctgggcatggacatctagccagctttcccacactgccaggatatcccctttgggacctccctcagttaggaagggcacactctgatcatttactagggccaaggtaaaccctaaaggtaacttagagatgaaaaggaggtagtgacctagcagtaaagaactctaagaaaatctatccaataaaaatcaaaacaagccagacaaagactaaaataaataatgaatccttcaatgtaaagacctggacttacatccacaagaaacagtaagcaggtaaccatgatctccccacatggacaaagtgaggaacaagtgactgatcctgatgagatggtgatgtgtgagctctctaatcaagaattcaaaactgcagttttaaggaaactcaatgatcttcaagaaaacatggaaaagcagttcagaaatttatcagagaaatttaacgaagggattgaaataatttaaagaaaacaaacaggaatcttggaattgagaaatatatttgctgaacaggaaaatttattagagtctctcaacagcagaatggatcagaggaaagaatcaacccaaataagactcccccaaggcataaaataatcgaattctcaaaagtcaagggcaaagagaagattttaaaacagaaagagaaaagaagcaaatggcataaagaagctccaattctgtggcaacagattttcagtggaaatcatacagaccaggagggagtgacatgacattctcaaaatgctgaaaaaatattgacatttgagaatactttatccagtgaagttatccttcaatataaaggagagagaaagtttcctagacaaacaaaagctgagataattcacaccatcagactagtcttcctgtaaatactaaagggtaaatactaaatacttcaatgtgaaagtaaaaaaaaaaacactaacatgcaaaacaaccacaacaacaataacaacatttgaaggtataaaatccactggtgaaattaagtacgtagacaaacccagaatactcaaatagtaattgtggaaagtaatccaatcataactctagcatgagtctcaaaatataaatctatcaaaaacaataatacattttaggaggccaaggttggcagattccttgaggtcaagagttcaagaccagcctggtcaaaatggtgaaaccccatctctaccaaaaaatacaaaaatttgcagggtatggtagcacatgcctgtcgtttcagctatttgggaggctgaggcaggagaattgcttgaacccaggaggtggaggttgcagtgagctgagattgcactactgcactccagcctgggtgacagagggagactctgtcttaaaaaaaaatagctacctgtttggagaaaggtaatataaaatatgtaaatagagacaaagtcaaaatttgcaaaggatgaaattaaagagtagagtttttttggggggttttctgtttctattattttatttgtgatctaagataagttgttaccttttcttctcttgaagatactttgttatatctatgtttttggaagtcttatggtaactgcaacgcaaaaaatctatgatagatccactgaaaataaaaaacaatgacttaaaacatactaccagagacaatcaaccacaaggaagacagtaaaaaatgaagaaaggaagaggggagttacaaaacaaccagaaaacaggcaacaaagtggcagtagtaagttcttacttaaaaatattgaacactgaatataaatggactctattctccaattaaaaggcatagagtggctgaatgctgcctatatgctgcctacaagaaaccacttcatgtaaaaagatacaaatagactgaaagtgaagggggtggaaaaagatatttcatgcaagtggaaaccaaaagagagcaggagtagctatactgatatgagataaactacaaatcaaagactataaaaagagacaaagaaagtcactatgtaatgataaagcgctcagttcagcaagaggagatgccaattataaatatctatgcatccaacacttgagctcccaagtctcccaagtatttaaagcaaacaatagtggatctaaaaggagagatagactgaatacaatattaattaggggactttaacaccctgctctcagcaatggccagatctttcagacagaaaatcaacaaggaaacttcaaagttaaactacacactagatcaaataggcctaactggcatttacgggacatttcactaactatctaactgttacagaattcacattattttcatcagcacatagaacattcttcagaacagaccacatcttaagtcccaaaaccagtcagaataaattcaaaaaagtttatatcacatcaagcatttgttctgaccacaatggaataaaactacaataaatgaataactttctggacacatacaacctaccaagatggaagcatgaaaaggcagaaaaacccaacaaaccaacatgaaactgtaacaaaaggaaaacccaggaccgaatgacttcactgctgaattctaccaaacatttaataagaactaaaaccaattctactcaaaatgctttaaaaaattgaagaggatggaacactttcaaactcattctacaaggtcagcattatcctgataccaaaaccagacaaggacaggacaaaaacaaacaaacaaacaaacaaacaaacaaacaaaaaaacactacaggattgcttgaggccaggagtttgagatcagcctgggcaacatagtcagaaccaatctcttaaaaaaaaaaaaaaagaaaaaaattagccaggcatggtggcatgtgcctttagtcctagctactcgggaggctgaggtgagaggaccaattgagcccaggaggttgaggccgcagtgagccatgtttgtgtcactgtactccagcctggggaacagagcaagatgctctctcaaaaacaaaaagcaagctgggtgtggtggctcctgcctgtaatcacagcactttggaaggctgaggtgggagaactgcttaagcccaggagttcaagaccagtctggacaacatagggggactccatctctcaaaaacaaccaaccaaaacaaagccaaaaaagaacataggccaacatcactaacaaacatagatgtaaaagtcctcaataaaatattaacaaaccatgtttagaaacacatcaaaagagatcattcactatgattaagtgagattcatcccagggatgccagtatggctcaacatatgcaaatcaataaatgtgatccatcacattaaagagaaccaagaacaaaaaccatataatcactccagcaagtgcagaaaaggcatttaataaaagaatgggttgagggagtggagcccatagtcagagcagcagtggtctgggattttggaagtagaaagaagggcagcaccactggccaggaccaccagggaacacccccataggccctgggtgttgtgctccagggagggttccctctggagttattaatcttggtgtccactttgcccagctgcccctcacagggtcagggaggatgaagggaaagcttccttctaatgaaagttcagggactcacagttcctagagcctgtagggagaggaagatcttcgaggaagagcacctgggcattggggcgtttgagaggaagatctatgccaggtccaagtggacaacctgtggactctctctccagggacatacgggtatctgggaatctcctgtagcttaaagaggtaaagacctctccctttagcctgaggactggaggatgctggttcaggtgaatgagtcctgcaggggctggtacaggcctggagggtggtggtgtccagggccttgggttcacccttagcatgattcaggccgggcggtgtttcacatgagcaagagggcctgggttcattgcttcaggacaatggtgaaatctcatggtggaagaaatcttgtccttgccagtgcccagctttcatttggtcttggcccagagtgtcctccctagagaagactcttgtcccttcttcacactgcccttcagggatatgccagccttatgggataagatggggtggagactgtagatgtgggtgggaatctctccacagagtgctccttctctcagcggttgcaccttgtctcagggcttcagcttgaaatctgggatctccaagcccttccctccccagtcctggccaggaccacatgggcagatgcattgtgtgaagtgcatttcatttggggtgtcctctctgcatggcaccctcccgttgattctctttgcgcatgtcagagtgcaggcaccatccacacctcctgctggaggagggacggagctgttgactcctgagagctgatcatgtgttcccaccctcacacacaatcatggtccatcctctgagggacatgtgttgccaccactgtggagatggtgcaactgacagtaacaaacagtaaaatctggtactgaatgggaccttaagccaacaatgacaatgtcattccaaggtgtttcatttttattgattcaatgcaagtcacctgatttcattgactattcacaatagctcgataaagtaaatgcatcatcaccaccactttaaagaggaaaaaggtgcttgggcagtttgtgactactgtggtggctgctgcattgctctctggtaaagccaagtaggtggtgggtgcggcctctgggctgggatgatccaccctcctggtggtggcaggggagccaagctggagccatggcctgtgcagtggtagcagctgaactgaccgctgctgcaggatttgcaagctgttacattttgcgaagccatgaagcacataaaacctcaagtagaacaagtgtttcaaagtctaccaaaatctgccttcagagattattactacagaggtggatatgaacccaaaatgacaaaacgggaagcagcattaatactagataatgaatgaacactagtaatagtagggtaagccctactgccaataaagaaaaaaataagagatgctcattaacatgttatgctcttaaatcacgcagacaaaagagggtctccttatatagtagccacaatcaatgaagctaaagatttactgcaagatcaagctaaaaacagtaggtgtataatgaatttttaacttcatattagtttatgtatatgaatatcaagtttttataataaaatgcctccaaacaaagaatatttgatttagggtttaataacttctaagaggggactcagatgtttcctgtttcacagtcagtctgagagggtcatttttcctggagctgacctgggtggaggcctcacactgatactccccagcatcctctctcctgatggggtttatgctgagcatacagtggccctgggacagctccattctctccatgagtcacagacgctggtcatggaagatccactggataaggttccagagtcatctgtggggcaggtcaggatcacaacatccttttcttctgtgactctggtgttgctgactcagatggggtcggagccactgaccctgtggacaatcagtggaggtgctcaactgaaagtgggctgagggcacgtcttctcctccatccctgggtccttaaggtaactgtggaccccagaccaactgacacaggagctagaaagaaattatttaggaagttagtgagggtaagagcgtccttggcaaggtttcccctttaacaaaaagcagcccaagataattccttttctaacaaagagcagcctgaaaaattgagctacagatgtagatgagcaagatggaagcttgcacaggtgaattccagtaggtgtgccaatagaaaagggctgcctggaagccaggtatgttcaacatggagactccatcctcccttttctccattaccacatgtacagtaaaaaaccaggcaacatggcaccggccaggtagacaatccatctgcatgacaaaagatcagagtggggcagccagcaaatggcacagctggtctaaacaatctttcaccccctgtataaatcagacactgcctcctgaagctcatctataaaaccttctgcatttcactatggaagtggcaacccattttccccaggacccctctctctgtgcagagagctcttctctttctttcccctatgaaacttccactcttaacttcactctgggtgcctgcatcctagttttccatggccatgggacaatgaacctcgagtattaccccagatgaatgatgctgtttcacaatcactggttcagctcccttcttcttagggtttcacagctcggtggggagaataccacgcctcagtggtctggggagtgaggaacaaatgaagaattaatcagattttacttagaacgctatcacctgcctcaaccatcagatccatgttgggaatgtccaggcctcctctcttagatctatacccacttcactggacctgaaatcctgtgtttcccgatgtgttggtgtcactcctatgagaggataaaggagagaactttgctttctctccccactcacaccctgcacaagacagggcccaatatgagacacacactcgctcagtagttctctcatgaaggagggagggagtgacctcgagtgattctgccatctgtagtctgtgtaccctggccagtggctgtatcttcatatgcctcagtttcccctcagtaaaataggacacacaatgagaactaaaaataaaattctaattccccagtgaactgaaaggatggcctcttggccaagcggatcccagagttcctgatcatgacaggatgggaggttacacctcattacagcccctccctttggaagtttagaggtgacaactgactagcattaacgctaaaatcgagatcatgagactgacagaacagactctctgtggccataagataccaaattataaactcaacctaaggtcatgcaggcaagggctaagccacactttcctacatttaaagaataagctatgttctaacacagaattttctttctctctagcggctaaagtaacactagccttcgagataagcaatattgaaatgatcgcggctcatccaccaacactggctaactgacccctgttccaacagccacaactacacttcaattggacaggagactgatttcagtaactttctcctaataagagaccactgagcatggcctggttctgctggtatacagacacggtgcactgagtaccataatgcttgtttcatcttttgatgtataagacctaatttaatacatttaaatctgaattctccaccccaaagtgaacatggggtgcatgtagcatgcatgtttgttgatcacgcatgtgcgtgtacttcctttgtgagtatccatagctccacctataacctgttgaatatgtatacctggccaactcattcagcataaatctatcttccacattcccctcccttgaagtgcctgctattggtctctgctggaggctgcatcttctaccctggggaatggccagcctgcaggctgtaaccctgtgtaagaaataacctggttgggtgcagtggctcacacctgtaatcccagtggtttgggaggttgaagtggtagaatagtttgagctcaggagccagagactagcctgggcagcatagcaagatcctgtctcttaaaaaaattttagggaggagagtgaggatcagaaaaaatacctattggctattatgcttagtacttggatcatgaaataatctgtataccaaacccctgattacatatataacaaacctgcatgcgtatctttgaacctaagataaaagtttgttttaaaaactatctgggtgcagtggtgcatgcctatagttccagctactcgagactgaggtgtgaggagtgcttgagctcgggggattgaggctgcagtgaattatggtcccacctgtgagtagccacttcactcaaacctgggagacagagcaagaaccggtctctaaaaaaaaataaaaatagaaaaataaaatgaaaaatatatgaaataaagtctcctttccaaacgtacagatctccgatttttctgccaacaatgataaatggtcagtggcttgccatgttgtctgtgaattacttttaaaatattcacgatcacctgacctaaaggttggtaccaaggaaccgcctgaatacaccgtctctgattatttgcctccaacagagtgttccctgggcctgatctctggtggacaatgagctgctgggaacatcctctcttctctattcctcccctggggatgctgaccttcccttggagtctcctaagttccccagggcagtcggctaatgtcctagggagcttacctgtcttctccataccaagtctcatgtgaaggacgaggctttgcccttgcccagatgaggctctgggggctgagccctggctggctaccagctgcaagagccatggcccttggacagctggtaaatccttgttcccagtcagccctgcccaagatgcctcaacccagccccggcacaggcttcccagggtcacatggagtcaggatcctgggacaggggactggacaggggtttccagggctgagtttctgaacaggggcttcccaggggtcccctcactccaggatctgacatggtcctacaaggaacgtccatggggaggggacccaggagggggaactgacactgacctccccttactgagcctccccccaaccccatcagactgtccttcctctgtagcaagtgcctgcagggtctggatgcaggaaagaaattctgatctgtggaagtttgtctcccctgtgtgtgtcttgcactaaatgtccaaacccccaaatgggatgtaatgtagagggggacacaggcacagcccaggcctgaaaatcctgtgtgtgtgaagcagaactgacccccaacacccagagctcatgagacatcactgtgtacgtgaaactggccagttacttcttcattcacaagatctgtttttatgacttgtagggtgtaggatcctgtgtcattgttggtgacattctgtatcagcagacatgtattggggtatattgtctctcagcctctgtggcaggtcctggggtaattacttgagttcctagtacatatcctgtaattcccctttgtaccagttgtagccaagcctaaggcagattgtgggtgagtggaagaatctccttgccttctgcagcttcaacagtgacttgggcagtggtaggcaagttccagaaagttaaaagtgaggctaggagtggggagagagcatcagttaatactgggccctatgcattgaggtggaaagatggggccctaggtcctggacaggtctcttcatccctcagccttggagtgtgtgtgtgtgtgtgtgtgtgtgtgtgtgtgtgtgtgtgcgcgcgcgcgcgtgcgtgcgtgtcctactgggccaaggtcagcagcatgacctcccttccttcagtgcctctgaccttggcatttccctgtttggagtccttttccccaggggtctgcctggctccctccctactgccttcaggtcctgctcacattagggcatccttgggagaccccttccctgacacctctagagaccctgggtcttccctttctgacctttcgctgctgtgttccctccagggctcttgtcaatacttgacctcacattctagatacccttgcatgtctgtcttcctccctatgagagcatgagctctgtgagaacagggacttgtgtgatcttggttgcaccccagtgcctgggacaggctgcggactcctgtggatgagctcatgagtgttcccagggcccttcacaacgtgggatttattttccaatggctgaggttgttggctaagagctctgttggagttcaatcaggctggtgggaaaaatattagagatagttatagagatagacacaaatcttcttggaagaccaaaaagtttgcataactttggtaatagatctgactgaaggtggtccctttacctttagttaaacaaattaaagtagtaacaaaggaaggcagagtagtttgtctagccagcttgtttactcatgtgatcttaagactaaccattgatgtgccacaggtgcttaattgctttctacttgggaagtccacaatgtcaattaccctctaacggtgttgactcaagcctttgttaattaatcttactgaataaatatgagtctcactagctgatcaaggccatggtcacaactgtttataggactcagcagggagtctgtaagcggccctgacagactcagctggactggcaaagcaaaatatgtgtgtgtcagtgtacactattcacccgtcccccacagctggtgcccctatatgaggagtgctgccacagagctctgtttagtgtcccttgttttttttcttgagtattaccccaacttaaattgtgattattgtcatctgttttcaacattaactgctcagtgatgattcacttggaaaacattaacaatcgagattgtttcttcactaacaacctcagattatttagattttcctgttgtaatcccttcttcctgtttagtgtccaacagaagccctctgtccctctcaggtccccgttctctccaagaaaccccagccagtctctgtgctccctcctcccatccactcccagggagccctcccctcacctgtgagcagaagcgcctgccagggatgtgcactctgtgaggaggggctgagggaggccccatgggctctgctgtctgctttgtcctcctctgtggagaggagcttgggcttcagaaaataaggaggccagaaagtaaggaacaggctgagaaataatggggatgtgtcgaaaggtcacagatgccaacatctttgtcctatgcaatattatccataaaattacaggtttgagatatgcttaaattttcttctaacatgcattaaaataaacatataacttttaatagttatattaaattgtatttaatataaattaaatgctcttgtcagagctactgtgactgtcagctctgctgtccttcctctctctgtgctaagcctcctcccagggcagaagcacttcccagggccaggggtgggggcggggaaaggtaagtggcaatgaggatctgcacaggtagcctttccgcctcctcccctctcagtcctgcctccttgtcttcttttcctctttttctccaatctacatttcagttccttagaccacgctgtgagaagcaaggcttattgggacccccatcccttaacaggatgacctgtgctccccataagtgacctctgctgtgtctagggattggctctgtcagcacctcacagagagtccctggggcccccaaactcagtgttattttctctatgacacagaaacccctctgggtatgcaaggttttcctcatgttttctaatgtctgggaaggttggatttactcccagcagggaggtcacagagatgtccagggagtggggtcctagaaatggacaaatctagagctaaagcccaggtctacgattttcagttgtttttttctgcagtgctatgtgaccctaatttcctaggagtaactaaaatgcaaacctcagacatttgtagacattttatgatttttctctacagcttgtaccactgttattattatttgctttatgctttttcctaaataaatttactttacaaaacatccttgtcctagtagggtgcaggggctcacgtctgtgatctcagctgcttgagaggttgaggtgggtggattgcttgaggacgggaatttgagacaaaacatctttgtcctatgcaatattatccataaaattacaggtttgagatatgcttaaattttcttctaacatgtattaaaataaacatataacttttaatcatcatattaaattgtatttaatataaatttatatacaatacatttttatataataaattatatatataaatgtatatataatagtttttcttttttgagatggagtctggctctgtctcccaggctggagtgcagtggcacgatctcagctcactgcagcctccgccttctgggttcaaacgattctcctacctcagcctcccgagtagctgggattacaggcgcctgccgccacgcccagctaatttttgtacttttttagtagagatggggtttcgccatgttggccaggctggtctcaaacacctgacttcaggtgatatgccgcctcggcctcccaaagtgctgggattacaggcatgagccaccatgcctggcctatatattttatataattatataaagttttctataataaattttatataataatatataaaatggatatttatttaagataaagttattagttttatatatttacatatatttaggaataaatgtgttactgtgggagcccagtgcccaggcaggtagtcagtacatgatggttgtcattagggttaatactttggaattctggattttttcccaagagagtgtctacgctggaatattgggcttgtggctttctgctgatgtgcatgtgtgaagaagctacttccacttattaggacttgtgtatctgtctcgcagtttcactacctattttctcgtgatgttggtcaagtcgcctaacttttctgtgcctcatttacctaatttgtagaatatgggtaacagtacacaagtgtgagtgtgtatttcccaggactgaccactagagggcgtgaaggcaccggcacttactattacagcaatgggtgtagtagtgctcatggtcgtaaacatcattctcccatgaaaggaaccagggcttcctgggagaaataactgattccagggctggggccggaaagcacaagcggagcctggagcatctcgtgaggccagaaagtaaggagccggctgaaaaataatggagatctgtcgaaaggtcacagatgccaaccagaaggagctttgaatgaccaattttgagacaaaatgagcactataagaaataatgatagtaataaattccaacccataaatacccatgagttcctactaatataaataaataattgaatacataaatatataaggatgaagaaacagctttttcttacagcagaattccaattaatgaatgtagaaggaatgatcaaatagaaaatcactatttggctaacagcacagtcaattgtttgtaggcaagaattatcaatggactttaaatatgaatgggtaaaagtatgatgatgctacaactagtgagtaccaagggggaaaaaaaagtacgttgagaagaaacaggctacttccatattcccaaagtatcacttcaggagctacttattgattataatgggacaaatagtaacttacagtagagaaacctggcaacagagtctctccgaggtacaaaggctctcttcaggaaggaggtaaggggaaggaagaagaaaacactgtcctgcctcaattatttgctttccccattctcaagtgtacttcatagacattcaaagatatgtgttgatagtgtccacgatccacatggctctattatagtcatttattcacacatacattcagtgaggctttgagtgcctaatgtgtgcctgatatttgctagatggtggatgctgagaagatcaggtgtgctgctgtctctagggtgactgaatccacctgccccactttacagatgtggaaattaaagtgaaaaggatttataggattagttcactgtcacaaggtcactagccttaaagttacaggagtaaagcaagtttcctgacttgctagattttctgctgcaggtgctgacaatggtgagctccaataggagagaggacactcagagtgaagtgggagccctgaacaccctggattagccaagaggacatgccgggtccagctgtgaccgcacaaaggaccattggggatatttgtattctctttttcacttagagcttgaaatgaggaaaactaagtgcagaaaaccaagagtggaagatttttcacaaagcactggtaacatgcatcagaaaaccctgtgctgatgtctgtcacggtgtttctcactgaacggtaatagtctggctttgagtgtgttccctctacagcctggagttctgcgaggcagggaccaggtgtgattcatctttgtctctccagtgacagtacacagcaggctctgataaatatttcttacaaaataaaatggaataaaaagtagacatctgcacaggtgtgggatgactgagcagcagcagaagcaggaaaagtcagcgtccccagatcagctgatgtggtgttcggattctagataggggtgaggtgccaggatggggatgggggtcctgtggctctgctgccctgggggacacccctaggtttcacagtgcctgctgtggttgctgcactttgcttccccatgggaaagtgatcagagggtgtggggcttcaggtgaccccatgtgggaaatggccaagggaaggtggggtgggcggcacatggttttttttaaccaatatttgaaggtaggttgtatgaaaaggtgttaggcttatttcagcttatggggagtaggacagggattggtgagtgtgtatcaggtatattttggctcaggatggaaaagaactgtcacagtaacataaggtcttttgggaaattacatgtttactggcagagttcaggccagggctgggtgtctgaaaatacctgtcagggtcacttttatggttacaagggcagagcttggcttggaaccaggtttcttactaataccacatattaagtattataaaaactgtcctttgcaataggacattgctctatgatgcaggttgaggtccctctgtttaagtaattgtgggtggctgtgattctctcatctagtctgcgacttggacttcacctccatctgcagtccctctcctttgctgttgacactggtcagagttaagcgcatttactgacgatggtcacagggtggcagcactgcctctctggtattttctaaaacctcttcctggaactgagccagtctaagaggatgtcatgactaagaaaagggcactaatgaggtgaacagataattttttttttcttgtttctcctgtgaagtaacagagtggaggtgagcatggaataattgccttttagaaatggaagacaatggagagaagtgtttcgcaaaccttaatgtgttcacagatcccacacagatctttttattcaatacagattctgatttttctggtgaggcctgagattgtgcatgtctaaggagcttttggatgatgccattgctgctggttggcggaccacactttgagtagcaaggctcgaagatcatttagaggttaattctcactgcatctaatttatggatgaaaacaaaccaaggtccagagagagcatatacagcttgcctaacaaagccattccctaagtgcctgacttcttgcatttaaacccagggcttcagcctttgtccagttctcactccacacatcacacggtttgttcactgttgtgaacgacagttgtggcagcatctctttagtttaggaatccagagccccaatttcactaccctctttggtcttggctcatgctgtgacttcgaatagttttgcccttacttaaaatcttcagtggctcttttgtaatcacaagatcaagttcgaatatctctgtctagtgttcatggctttataacatatggtatctctttagtaaccttacctaacttccctgttttaaaattgtctcttgctgccatagccctccttgctccttcctgctccctaacaaactgtgttcacttctctctcagtggtagtgatgatggcatggcctctgatgttagactcatgtaacttctaatcccagatccaccaccaacattggcaagttgattcatctttctgaggataagcatcctcctctgaaataaacttagatggcggttgagaggggtaaataaaataacacacaaacccactctcatccctgagaccctcttcaaaactagcatataaaaatagctatttgaagaggttcagtgaaattcaaggtaacacagagaaggaattcagaatcctatcagataaatttaatagactgaaataatttttaaaaatcaggcagaaattctgtagctgaaaaattcaattgacaaaccgaagaatgcactaaatctttcaacagcagaattgatcaagcagaagaaagaatttgtgagcttgaagagataatatatgaaaactcagagtcagagagacaaaagaaaaaagaattaaaagaataatgcatgcctacaaggtttgattattaagctactcaaagagatacaagagaagggtgaaaaccaacataaagaaatgtaaaaaacaatcagaatataaatgaaaaattttctaaaatgctagctagtttttttttgagacaggctcttactctcatcacccatgctggagtgaagtggcacagtcatggctcactgcaggctcaacttcctgggctcagatgattctcccacattagccttccaagtagctaggactaaaggcgtgtgccaccaggccaggctaattttttgtatttttagtagagatggggttttgccatcttacccagggctggtcttgaactcctgggctcaagtgatccaggagattcactgccaaaaaggatataaccaagtcatatagtcataggttatctaaagtcaatgtgaaggcaagaattctaagagcagtgagacaaaagcatcaattaacttataaaggaaaacctatcagtctaacaccagatttctcatcagaaaccttacaaaccagaaggtattggggtcctaatcttttggcttcttaaacagaatagctctcagccaagaatcttgtgtagagtgaaattatatttcaaaatgaaagagagaaatacagtctttttcaggcaagcaaatgcttcaggatttgtcacggctagaccatcctacatggaatgttaaagggacttctaaatcacaaaacaaaagatttaaatagaacagaatagaacctcttgaaaccaaaaaattcaaatggcctataaaacaataacacaataagaaaacaaagtagataacgatcaacatgatgactggaacaaatattaacattgaatgtaaatgacctaacactccacttaaaagacacagattggcaagataaataaaaaatcacaaaccaaatatcagctgtcttcaagagactcacttaacatgtaaggattcttatagactcaaggtaaagagatgataaaagatattccatgcaaatggaaaccataagtgagaaggaatagctatccttatatcatataaaacagactttaagcaacaacagtaagaaaaagacaaataaggcaactatataatgataaaaggatcaatcaaacaagaagatattacaatcctaaatatatatgcacctaactttggagctcccacattcataaaacggttatgatgagacctaagaaaaaagatcaacacaaaacagtgagggtgtcctgggttttctttttattggacagcagtgtactagcctatcactttcccagtcaggggatttttggtctccccattcccctaccatgggttcatgccaaagtccatattttttattagtgtttggaattggattttttttttttgaggtggagtctcgctctgttgcctaggctggagtgtagtggcacgatctcggctcactaacctctgcctcctgggttcaagcaattcttctgcctcagcctcctgagtacctgggactacaggtgcatgccaccacacccagctaatttttgtatttttagtagaaacgagatttcaccatattgtccaggcttgtatagaactcctgacctcatgtgacagggaaacaggcactcagtgaacttcatgcgattgaggagttaatgataatgagagaagggctgtgaggggacagcactggggacaccagagcctgtgacgggctgagttgctgtgccttgggagatgcccttttgactgagccctgggaaggagggggtgtgggggcaggagctgcctgcagagggagtggcctcaggtgggcggccacctggctgcagggaagaggtgacagagttcgtgtgcagagcttggagggtgaggaggaggtgggttgaggtgaccttggtgagggtgaaccatggggggctgtgggccctgctgagggaggccagccagccctggacctacagggtggtttggtcttttttgtcccattcccagcatccactgagtggtgaaactctgcaggccagggaccatcccactggccagaaggagcgcacagtaggtgcccactcagtgcatgttgggctggacagaacctcactctgccccctgcccccagctttgggagctgcagcaaggtccctccccctagggatctccatgcctctgtctctgaggggtgagatggggagacttcaaagggccatctcagagtgtgggggatagagacgcagaagtgtgggggatagagggaggcctgggctctagacccaaaggaccttacacacctcctgagtcttttcaaatggtttcttctgttactttaaaaatgatgtaagtcatcatatttattgtaaatcccaggaatctaatcatgcgtaaaataaggtgtcttatccttgaccccaccccttccccaattaaatttccaggatgttaccactgtttgcagttggtgtgaatctctctttaataatactctgtttatctcacttgtcgttttacgccaaaatacccattgaattatattattgctgaagaccattcttttttttttttttttttttgagatggattcttgctctgttgcccaggctggagtgcaatggtgtgatctcggctcactgcaacctctgcctcctgggttcaagtgattctcctgcctcagcctcctgagtttctgggattacaggtgcacaccaccacacctggctaatttttgtatttttagtaaagacagggtttcaccatgttggtcaggctggtctcgaactcctgacctcatgatccaccctccttggcctcccaaaatgctgggattacaggcatgagccaccacacctgcccagaccattctgttctactgaatcatgtgtggtgggcacctcttatatcaatacatatggattttatcttgtgtttgttattggctcccctttttctcattgcatggctacactcaatgctttgtccacacccctgttcctgggttggaatcttgtgacagaaaatgaagtaacaaaggctaaagctttctaaagtggagtcaggagattgcaagacaattgcactttcaccagcaagagctcaaaccacagaatgttccaatagatttggataaacagctgaagtcagtattcaccagccttcaacatctcaactaggagaaccctaaaattaactaagcacatagaatggaatggacttgtgatttaggattccttctcagccaatgagctgcttctgaaaacaactttttgtggaaattacctgtaaagaaaaccctctcctgtgcttgtcttacagaacactagtcagggctgccctgattcagtggacccgaattgctattatttgtttcctaaacatatggtattttctgtgaccttcatctcaatcttttttttaagttactgggctgtttcccagttttcataatgacgagacattctgcagtgtttcatacacatgtcttttccccatgtggagtattgatccaggagctcattcagtcaacgcatgtttatgaagcatcctgtgccaggctgtgggctggtcactgtcttcagcagagagaggacaggcacagtcttgccttcacagagctcacagctcagggaggctcttagaagtgggatactggtcggagcatgtgcacattaaacatgatgaggtcaaggttgctatagggactaaaccacagtcccaccaagatcgcattgagttcctgtggtagaccagaggtcagggcccctaagatgtcctgagcagctccctctgctcagaagttttggttccacaggtgacacacctgagcacaggtgacccctgcagaacctgtgattaccacccaaagccaagagtgagtggtgggtgttctaggaggaaccgtcacctccatgggcagggttggggaagactgaggggagcaggtggctgatgactttggccagaaggtagggggatgggcaggtgtgcgctcatagggaagggaagagaagggagggcattgcaggcaacaacacaaaggttggaacctgccttcatggactgagaaaagcagggagtccacccaggctgcagctggggagggaagacatggggagcagtgggtctaggggagaagcagactgcgattgaccttggggactgggcagtgagcagaggtgtgttatgtgtgtctgtccccatcatagatatgaggaggggtgaggccgcgggtggcacctgggtcggtgggatttcatagtgcctgctgttccctagagcctctctgtatagagggtcagaatagatctgaggctgtggtctgggggaaggggctggtggtgcttaccatctctaggggtgggaggagagggatgaggatgcccctgagcagtgaagcctcaaggtgtgtggagccacagttgtctctcattagacatgtgttttgcgtgaggatgccagggcctggtggttattactgttgtcaagtttgcatgacaaggacccaggtatccagggatccagagcacagggcccctggtgaggggatgaggctcagatggggctgaccaggttcatgtggtcagagtgggagggactgatggagagacagagcctcaacccctcctgtcaggagctgtggctatgtccaggagagatgacaaggatgacccaggacattgagtgagtcattgagacattgaaggtgaggacagggcagagaggaccctggtgactgctgaaatgtaggatgtgaggagggctctgacccatgcaagttacaggacctccccacccccgagcccacagatgacccttaaattgggcatcctgagtgctgtgtgtgcccagcagggacactggataggctggacctgagtctctgtaagggcagcgctggtctgtaggaccagagtcttctctgtgggtgtgacgtgggcaggaattagcaagatgggggtgacaaggcttggcttggaggatctggtacagaagcccatgggcttggtcagctcagcttctcaggggctcagctggggctggaggagcaggatgctgtgctcagggcatgctccaggcagcgtgatgtgtgtggttccagggtcaggcacgggggtcaaaaattaaccatgaaaagttcccaccttctgtaggcagagaaaatggcctgattgtcagggtcagggagacttaccatgtggccaaagcaggctctcagcctcccagagaccacaccctgggtgcagcactcagctctgcagggtatggcaatagatgtgccaagaaccccaacatccagatgcatgcaaaaattttgcgatatataaaatagagcagatcaagtttccctgcaataacgttgttcctggttgtgtctttttcttgtaaactagacatggacatctttccagcagtctgttctcatctgccaccttcctgctgcagcacctcagaatgaacattcctgagacactgtccgtggtgctgacgaccaagagctatggaacagagtgtgatgtagaatcttctagttacctctgctctcctttcacttttaacaacagagcatcattaacaatgagaaggtggagaggtgttcaggatcttgaagtgacttctgtcttgctctcccataaccctgaagctgctgtagacattattgcagaaactgacaccacagtcaggatggccttgtccaggagcccatgtgcagtttgtagtgagcaaggatgagaaaatggtcttgaaaggggtgatggacagaacaggggcttttcaaaaatgtcacatcatcacccccagcatccgtgaatctgtcacatggtaagagaccttacagattaaatgaaggattatgagtttggaagattattgtagtttatccagatgggtccaacataatcacagaatcccttccttacaaatgagagagggaggtgggagagtcagagaaggaggaggagatgtggggatagatgcagaagacagagcggtgtcaagatgctgcactgctggctttgaagatggagaaagaggacacagccaaggatgcaggaggcctctaggaggtggaaaaggagaggaaacgcactctgccctggagcctccagaaagaacgcagccatgtgggcaccttggttcaagtttctgtgtcacttagcttgtgggaatttgtcacagcctcaacaggaacctacagaggagtcaccttgtgtgcaggtgggatccagggtcatttacagctaaatcctgatgtaaatattgcaggttgcttttcctacttcctatctcatggccaacaaccctggacaatggcagaacacccttggaaaccacggctctgtgctttagtggagggaccagcttgtttgtgggaaggtagcacctggtccaagtgaacctacatgagatcgttactctccccagggccctcagggaagggctgagaacagctggcccaggtgtgtggaggagctgcaggtgaggcagggctggaggggcctgtgggtccaggtagaggggcagacaggttgtcccatcgccatgggagcctgcacgagctttaggttggggaaccctgctcctctgacctggacgctcctgtgtggagaggaggcttgctcagtgagatccacgccagggggtaaattgggaactgatgggaaatgaggggctagagtcctgggtagtgcctgggaggaccttgctcaaggactgaattcttggtctgttcccaccttggttactctgacaacccctctctgtgtcccacggggataaagatctcctgagcagtggccattgggacagaggagaacctggtggccagagctaagcatccaggatcctggatttggggacaggcaagctcattgctgggggacagtgatagatacggcctccagggcctgggtgaagagagcaggagggctcaggacactggaggctgtgtggaggtcacacccacgatctgtaccacccatggatgctcctgcattgctcacctttgtgtggacatcagatggccccaacttttgcactcctgagacatctcatgcattcacagagggacccaggctggggctgtgcatggccttggtctctagggtagtgtgaggacagctgagcactcagctggctgggcaggactcctgcgaatcctgccctttcctgtgtagggtccaccccagcctgactcctaaccccctactcctgtctttccagggaagagagactggggttgagataaggtggagatatttttcctgtgtgacccaggagagaatggacatggagtttcaggtgagtttctgctaagttcccatgagcagaaaaagagccaatgagaggaagtttcccctttattcagatcctttccaggtgaccccgggtgggccataggcccattcactttccctgcaagcccccgcttcctgtggtgatgggaagccttcgccttggcccacccagagcccggggcagtctgttgaggtctctatatattcagcagggacccccatcccttcctgtccccaggcctgtgtctcctcaggactcagagctggttctctggctcaggctccatgtccttccccatccccagggctgggggcttcagggacgctccatcaacccacaggagcagctcccagaggaacctaagaagccacatctgctttgtggtcgatccagcagtaaatgtttgtgtcagagtgtagcaattccagtaaaaacagagaagaggtcttgacccctgaggccttctcagaacagggtctggcatctctctctgggcccacccagggctactctgggactgaacctggctgtgctcagggggttcctgctcccaggcccctccctcctctgctcaccacctcctgttattttcactgcagtttcctgaacttcagctcagccagatgccagtggggacagatcctgggtctccctggggcccaagggaccagaatatctgtggcccccactcacctcatagatgagagcagctgccctggtgctgggtaggggaatctgggcaggggagagaggggtgtcaggggacagggaaggattcctgctgtgtaggaattccagggctctcctcaggtgatggagggtcccagggtggggttagcacagggagtggatgatcctggccctgaacagaggcccagctcatggccagggcaggtctaaccttatccaagtcattctgggtagggtgggtttgtgctggggattgacagtccccctgccctgagcctgcacagctggggccccagtggaaatgggattgggaacggacagtcttacctaggagatggagctgtcagagggtccatggcctggggacagagacaaaagtgagcacgagagtgttaggatagctgggcccctcctgcaagagtgtgtgggggtcctcagttcttagagaattggggagagggagcctttctcaggttattttaggggtcaagtaagcaagtgaggttgaggaagtgacccatgacccagagcccggaggttagggctgacccggccagttggggtttcctgtgtgatgttttatgggatcctctttgcagccccagggatagggtcagaggcccctgggtgtaactggcaggagtggacaacttggggctggcttagtagttcccagccacacccagactgaagggacactcaccgggggtggaggctgggggctgctgctccctgaagtcactctgatcgctggccctaggaaaggtcagggttatttgtgaaggtgcaaggttaaaagtcacaaattggagttaaaataggggaccaggaaaggagcctatttccaagaggggtatggagacctcctttctttatggagttctgtggtaggaggggcccaggtgaggggagttgaggaaaggccttacaaagccacatctgtcctggccagaggggaaggactctcaggcagatgctgggccaggagaacattgatccagtgacacaggaaagggactgaggacccagggaaggaatcagaccaccaggggttgcctgagaggaagggtcaaggcaccagggggaaagcagggccaggcacatgtgcaggacactgaggggactgcatgcatcttggattctcctggaactcagtgtccctgctgtgaccagacactccactcagggctggagatgctgaaatgggacaatgatcttgtcttctgtctctgccctttggcaagagacataaacgacattccaggatatgccatattggggccccggttctcccttctcacagctcagtgtctgcagttaccatgtcagtcaaaggggtgctgaccccacccagcccgtccaggctgttccagtctccactatgtgataatgcccaggatcccccctcagatgccctctcactgggtggatggattcagtgaacagggggaggtaccaggtattgagcaccgctcccccctgctccaggcagctgtggctttgctgtgctaggaaactaggaccatgctcaggggcatggccttaattggactgaattcactgaggacaaagctgttgaggaagcagcccagggtcagcagctggtgaggaaggtgccatggaatgagagggaaggatccctggggagtcgggaggctggggagagcctggcactgaatacaagacagggtctccttccttctcgcctggggtcagcgtgaaggatgggagcagaatggggaaaagctgtggtacctgccagtttttcggaggagcaggaaacacacaagtgcagccaccagaagactcccaaccaggaccccgatcaggatgcctagagtgttgtcatctgctgaaagaagaaggcaaaggggatgaggtccaaatctgttccagggggaaccatgaggggccttgcagggcaggggcatggtcagggaggaaggaaatgccatggagcctgagtgtggtctgttgtgctgtcctcatagctggctcccttgctctccgtggttgcaccattttctgtgtcttaggcttgaattactgggatgcatcaactcctacattctcccacaggaagcctgcacctcatcctgctcctgtgttttttagtccctccttcctctcacatcactcctcttccccctgtttctttttttccatcccatggcagtcgtaaagggcaggcccttgctgccaactcaatgctgatgagcagggatgatgttcattgactgttttcaggggccttccacatggaaggcacagtgggaatcaatctacctgcagcttttctcaccctcccattgccttgagggagaagggtatgtgatattgtgaaatacgtatttggtgttcatcaccattgatatggttaggctctgtatccccacccaaatctcaccttgaattgtaataatccccatgtgttatgggagggaccttgtgggaggtaattgaatcatgagggtgggttttttccatcctgttcttgtgatagtgaataagtctcaggagatcagatggtttcataaagggaagcttccctacacatgtcctcttgcctgctgccatgtaagacatgcctttcaccttccatcatgattgtgagacctctccagccatgtggaattgtgaatcaattaaacctctttcttcatacattaccaagtctcaggtatgtcttcattagcagtgtgagaatggactaatacagtaaattggtaccagctagtggagtgctgctataaagatacctgaaaatgtggaagtgactttggaactgggtaacaggcagaggttggaacagtttggagggctcagaagaagacacaggaaaaaagtttgaaacttcctagagacttgttgaatggttttgattaaaacgctgatagtgatatggacaataaagtccaagctgaggtggtctcagacagagatgaggaacttcttgggaactggaacaaaggtgactcttgttatactctagaaaagagattggtggtattttgcccctgccctagagatctgcagaactttgaacttgagggaaatgatttagggcaactggtggaaaaaaaattctaagcagcaaagtgttcaagatgtgacttgggtactgttaaaaacactcagttttatgtatttacaaaggtatggtttggaattggaacttatgtttaaaagggaagcagagcataaaagtttggaaaatttgcagcctgatgatgcaatagaaaagaaaaatccattttctgaggagaaattcaagccagctgcagaaatgtgcataaacaatgaagagcaaaatgttaatccccaagacaatggcaaaaatgtctccagggcatgtcagagaccttcctggaagccccttccatcacaggactggaggcctaggaggaaaaaatgtttcctgggccaggcccagggctcccctgctgtgtgcggcctagagacttggtgccctgcatcccagccactccagccatggctaaagagggccaaggtacagctggggccatggcttcagagggtgcaagccccaaaccttggcagcttccatgtggtgttgagcctgcaggtgcacagaagtcaaggattgaggtttgggaaccttcgcctagatttcagaggatgtatgaaaatgcttggatgtccaggtgaaagtttgctgcagaagcagagccctcatggagaacctctgctagggaagtgttgaagggaaatgtggggttggaaccccgacacagagtccctactggggcactgcctaatggagctgtgagaagaagaccacaatcctccagaccccagaatggtagatccactaacagcttgcaccatgcacctagaaaagctgcagacactcaacgccagcctatgaaagcagccaggagtggggctgtaccctgcaaagccacaggggtggagcccaaggctatgggagttcagctcttgcatcagtgtgacctggatgtgagacatggatacaaaggagatcatttcagagcattaagatttggctgccctgctggattttgggcttgcatggggcctgtagcccctttgttttggccagtttctcccatttggaatgggtgtatttacccagtgcctgtacacccattatatctaggaagtaactaagcttgcttttgattttacaggcttataggtggaagggacttgccttgtctcagatgaaactttggacttggacttttgggttaatgctggaatgagttaagactttggggaactgttggaaggcatgattagttttgaaatgtgaggacatgagatttgggaggggtcgggtggaatgacatggtttggctcttcttcacccaaatatcaccttgaattttaataatccccacgtgttgggggaaggacccagtgggaggtaactgaatcatgggggtggattcttcccatgctgttctcatgatagtgaataagtctcacaagatctgatggttttagaaaggggagttcctctacacatgccctcttgcctgccgccatgtaagacatgccttttgccttctgccatgatttcaaggcctccccagctatgtggaactgtaagtcaattaaacctcatttttaaaaaaattacccagtctcaggtatgtctttatcagcagccaagaccagctcggtcgcggagatcctaacccagcagtgctagaggaattaaagacacacatagaaatatagaggtgtgaagtgggaaatcagggttctcacaggcttcagagctgagagccccaaacagagatttacccacatatttaataacagcaaaccagtcattagcattgtttctatagatattaaattaactaaaagtatcccttatgggaaaccaagggatgggccgaattaaaggaataggttgggctagttaactgcaacaggaacacgcccttaagatgcagattgctcatgctattgtttgtggcttaagaacgcctttaagcggttttccaccctgggtgggacaggtattccttgccctcattcctgtaaacccataaccttccagcttgggcattagggccattatgaacatgttacagtgctgcagagattttgtttatgaccagttttggggccagtttatggccagattttggggggcttgctcccaacagactaatacacccattttctggtatgtgactctaaagtccttagaatcttcaaagtgatgtctttttcaagctaataattgactgatgactggcagcccctaggcaacttcagaatgaggctggtcactgacccaggtaggattagagggttgggactttcagcctcacccctaatccctggggagggacctggagtttgaattaatcaccaatgaccaatgaatcaattaatggccaatgattgaatcaattaatggccaatgattaaatcaatcatatctatgtcatgaaccccaaaaggactgggtttgaagagctgaacccatggaagtttctggagtgtggtgcatctggggagggcatggaagctccacaccccttcccacatgccatgctctgtgcatctcttcatctgcatcctttgtaaagtcctttattacaaaccggtaagcctaagtatgtgtttccctgagtcctgagagctgtttgagcaaactaatccaacccaaacagggagtcatggaaacctcaatgtgaagccagtcataagaagctctggaggcccagacttgtgactggtgggaaggtggtggcaattttgtgggactgagccctctgctgatatgtccaggtagatagtgtcaggatggaattggaggacacctagctgatgtacggtgcagaactgattggctgctgggtgtgtgggagaaacccccccgcatcacatttggtcacagaagtgtgtctgtgttgatgattgttattgtggagtgagagcagaggaaaaacacagtttgagtttttccaaacagggtggaatcccatctgccaatttagaatctgaaacttatagtttcagtacttcaattaagattgaagtacttcaattcagtacttcaattaagattcagtacttcaattaagattcagtacttcaattaagattacagaactggtaagtgaaagtgatacaacaaaaatgtaaccaaagtctgctcaacttaacagctaataacaacaaagttcataaaaataataccagtcgatattgatagcactgattgagccctggctctgtgcatgaccttgttaagggctttaatcgcattaatctctgaataaatatcctcacaaccaccctgagatccaggtgtttgtaacaattctacagatgaggaaactgaggcccaggaggttgagtgtcttgcccaaggtcaaatacctggtacctattgtaaccaggatgataactggatgagtctaatccctgagttcttacccacattgctccccaggctctgaaggaatctcatccttctcattccgtgtatcattttacaccccccctccctcctaggaaaatatacaaggaaaggagtgagaggggccgagggtcactcacattttacagtcagcttgagggggtcgctcctgttggagctgactgggttggagacctcacactgatactccccagcgtcctcctgcctgatggggtctatggtgagcatatggttaaaccaggacagcttcatcctcttcgtgacctgcagacgctggttgttgaaaatccactggaaagaggttccagtgttatttgtgtggcaggtcaggaccacggagcccttctctgtgactgtggtgctgctggcttggatggagggctgagccactgactctgtggatagagtgaccaacagaaagtgtcttggggccatgctgcatcctcagagatctcagagtcaaatttagaacattctcctgtgaataaaggagaaagatgaaggacagggaggagcagagagaaccagagacacccatagcagcgagcagtagggactacagtgacctcagagaccccagggaccaggaggacccagctgcctcagaccaggaccagggagccctgaaaaccctcccacagatgagcggccccagagtcacatgagatgcaatacctggggtggctttaggagcaggcagtcagagaaatggaacatgggtctcagcccctaagggacaaggaagaggtgtggccagctcctcctaggatcctacatccaggacccagtctgtaaagaggttatgattattcctttcttttttcattaattccctccctccttcatcagagaactactgagtgtgtgtctcagttgggccttgtgcaggtacagggtgtagtgggaagagaaagctgagtcctttccttcatcctcccatgggagtgacatcaacaaatcaagaaattcatgatttcacgtccagtgagggaagaaatgtggatctgatgggagaggcttggacaatcctggcattgagtctgatagttgagacaggtgatttcgttctaagtaaaaactgactaattctccatttgcccgtcattcctcagaccagaatctccctctctgagctgaggatgcccaagaagaaaggagctgaaccaacatctggtcctggggtccacagatgccccacggtggtggccacgaccagattctgggctgcagacacacggtggtgtgacgttgagcactgacagcctgtgtgatgctgatgcaatttctctttaataaaatggggtaaatgtcaatggtccctggcttgccatcctctctgtaaattaacattaaaatatttacaattacctgacctaaagcttggcacagaatagctccaaataaacatcatctattattattttactccaaaaaaaaaaaaaaaagagttctctgggcctgattcctggtggagaaggagcggtccagagtgtcttttctctgctttccctcctcctgaggacagtgcacttcccgggacatcttttaagtttcccatccagtttaatggcctgggaagtttgtttgtctgtcctctccactctgactctcaggtgaaagatgaggctctgcccttgcccagatggggctctgggggctgagccctgcctggtgaccagctctaggaaccacggccctgggacagctggtaaatcgttgctcacaatcagccctgcccaggaagccacaacccagccctggcacaggctccccagggtcatctggagtcaggatcttgggacaggggcctggggcaggggcttgaagggctgagcttctctcagaggatcctcaggccaggccctgactgagtcctataagatctttctcaggtcatgtctatgaggaggaggccaagcggggttggactgagactgattttcccccgctgcatctcccgcatcagactatccttcttgctgtagggaatttccacggagtccggataagggaaaggaattctgatctgttatagtttgtctcccctgggtgtgtcctgcactaaatgcccaaaccccaacatgggacgtaatgcagagggggatgcaggcacagcccaggcctgacaatcctgcgtatgtgaagcagaactgacccccaacacccagaggcacggaggaatcactcaccgtatacacggagatggtgagatgcctgttcaatctgagaatttctgtatgtgacttgtagggtgtagtatcccgtgtcctctagggtgacgttctggaaatgcagatctccactgggtgatattgtctctcgaccgctgtatgcaggccctggagtcctaacgtgagtgtctattacatatgctgcgattagctggttgggctccaccgttttccctttgtaccagccatagctgtaaagattctcgggcagataaaccacagagagatgaacattctccccttcagcaacttcaaagggcgctgatgcaataaagagccaggcagtggtgggtgcgttccagaaagttaaaagtgaggctaggaaagggagagaatatcagtcaatatttgacctatgcattggcatggaaagacggggtcctgggtgcaggtctcttcacccctcagccttagagggtgtgtgtgtgtgtgtgtgtcctactgggtcaaagtcagcagcatgaccctcattccttcagtacctctgaccttggcatttccttgtgtgaaccctctttcccaggggtctgcatggttccctccccactgccttcagttcctactcacacaagggaatccctgggagacttctttcgtgaagcctcctctagagaccctgggtcttccctttctgacctttcccagctctgttccctccagggctcttgtcagcacctgacctcacattctagatctctttgggtgtctgtcttcccccccatgagattgtgagctctgtgagggcatggacttgagtgatgttagttgcaccccagtgcctgggacaggctgcagactcctgtggatgagttcatgagcgttcccagggccttccatatcctggggtttatttgctaatgtctgaggttggcagatgaagacagagtttcatgccctggtggtgtttttatttaaattgtcactgtgatatagttttactatcattttcaaaatgtagtggccactgacaatgaacttgaaaacatggaccaactgagattgttttgccccttggcaattccagttcacttagattttttggttctccttagacgctctctcccctgagtctctaacaaaagccctctgtctcctctcagagccccatcctccccaggagaccccagccagtctctgtgctccctcctcccacccactcccagggagtcctcccctcacctgtgagcaagagcccctgccaggggatgcattctctgtggggacaagctgaggggggccccatggtctctgctgcctgctctgtcctcctctgtggagaggagcttgggctccaggaacgctctagacagggttactgtgactgttgtctctgctgtccttccttcctctatgctgagcttcctctcaggcaggagcacttcccgtttatgggcaagggcggggctctgcctacaatgtctctctgtcccctcccctctcagtcctgcctcccttgtccctcctttctccttcctttttgcctatatttggttccctaggcaaaactttgagaagcaacgctgatggggtcctcataacaggacgacccactctccccagtactgacctctgctgtgttctggccttggttctgtcacagccggtagattatttccctttgtgacacacaaaaccagctgggccctgggtctcctcatgctctccagtgctccaggaaggcagaatgatgcccagcaggaaagtgacagaggtggctctgggggctagaaaggggctcactgggtgatggctgggaaggacccacccgctatcttcagtgtcaccagcctggcctctgacccagggacagagacccaggcctggaggtctcgggaggatccccagctcctaggtgtggagggaggtgtcctgtgtgtcctgggaagagaggactttgatggaaggaggtgggaggctctgggttctgctgtccttggtgaaggtttcagggggaccctctccatgtctggggtctgtgcccccagcttaactctcattctctttgcaaatacatatattttgtggatctgcagttgcctgaactgtctcatgtccctaaatctttgtatccctttttacagaaggtcaggaagggtgtgtacatgagtatgaggactatctgatcagggcgagtgtttgtttcccaaagatctctttagatatggtataatacataagataaatgtactgaattagcaattttaagtgtagaattaaatgatactaattctattcacaatgttgtacaaccatcaccataattttttaccagaaaatcttcattataccaaatggaaacttcatacttttaatcaataactccccacttccccctgccccacccactggtagcctctgatactatcaatctctgtgaatttgcctagtttacatgtctcatataataaggaattatatacgtgtattatttttttctggattatttctcttagggtaacacttttaagattcatccacgtcgtagcatatattacagcttctttcctatttatggctgagtaatatcccaatatatgtttatacctcaattttaattcattcatctcttaatggacatgtgggtggtttccacatttttgctattgtgaaaaccgctgcaatgaacttacacttggaagtatctgtttgggtttctgtgttcatttctttgggggtacatataggagtataaatatggggtcatgtggtagttctatgtttaagtttttgagaaacagccaaactgttttccagtttgctgtgctattttatattcccatcagcaatatacgagggttccattttctctacattcttgtaaacacttactatttaatattttttaaaacttatagccattctagtaggtgtgaagtgatagctcattgcagttttgattttcatttccctggtggctgatgaagttgagcattttttcatgtatttactgacaattttaatattttttagagaactatttattcaaatcatttgctgtttaaaaaaaatgggttatctttttattattcagttgtaatagttctttatatattttagatacaagtcccttatggggtacatgatttgcaaaatttttctcatattctgtgtcttctcactttcttcatggtgttctttgaagcacaaacatttttaactttgatgaagttcacttatctatttttaattttgttacttatgctcttgatgtcatattgaagaaaccattgcccaatccaagatcattaagttttactcctatatgttcttctaatggtttgataagttttgctattccatttaggtttttgaaacattttgagttaacttttgtatgggctgtgaggtaggggtctaactacactatctcgcatgtggttatccagttgttccagcacaatatgaagaggctaccattctttccccattgaggaatcttggcacccatgtcaaaaaccaatgggctgtaatggtgagggtttatttctggactcttgattctattccattgatctctatgtgcattcttgtgccagaagcacactgttttaatgattgtagtgttttagtaagttttcaaattaggaagtgagtcctccaatttttttttccagattgttttggccattctggggtgacttttaaaaaagatgtagttcaatggttctcaaagcaggagtggttcagctctccttttttggcagtctggagacctttttaggaccttaatctaagtagataaattattcccactttcttttctgagttgctatgttacagtgtatattgacacccatgaaataattgagagaccctggaagtgcttgcctacatagtgagggacaattagttccatgatcatgggcacagaagattttgttttgggaaacaattttgttggtggagttatattcatgcttactcttttatttgtcttcatagcctgcatctccttcagacttcatatctgtttattttcttgtttgtcctctggggtttgggtgttgggtgaccagtcagctggagctggaggaggtgcttagcaaggcagtgaccctggttgggaggagcagggctcagcagggtgaaagtagctgggccttgagtcaggagtggcatctggaaggcctgactgtaagggtcagaagggccagcaggtgggtgtcctaggcacaaacggtggctgctgctgtggactggaggaaggtaagaggccccgagtattccatgttcttactggctccccaactgaggattcctctcctgggctggtgctgtcctgcagcagggaggggttagacagggacggctgcacatcaggccggagtccatgtcatcctcttaggcactgtcactacagattgaggattctgttcataagccaagcctttgcacaaggaagggacccgggctctcaaggaagagcagctcctggtcagacctccatctccttctctctcattgcctgaggcctcaagcttggtctacctggcacaggggtctggatcctcctcccagggttggggtcttactgagctgggcacctgcaggtgggagaagatctggaggggccccatctgccttcaccagattgatgttgagggtccctgagtcctgcaccactatcaggtgctgagcaacttccagtgtcagtgacaaccaccccatggtggaagcagaaccacctcgtgagaaagcacctccaagcctcagtgcttgccatgtgtgggaatttgctggtttcagttgggggcatgttggtgggtggtcatgaattcagggccggattctatgctcacagtgcacatgctggatgtggtacagaccccaggcagggctcagtggggtggttttgggtgtgcacaggtatcttttctggaggagctggtggtgatttggctcccagaagttcctgagctctgcagactcaccaagcactcaatatttgagtgaacattgggcgagagagcagaaggtaagtgtcagggcatcggggttggtgcctctgggaagaggaggaacattctgggaacaaagctctcccccggcttacagggagcttcccatcgctcctgccttgaggatcagggaaactagggcctctgctcttccaggggctgcttgcaggcagtttgctctgggagggggtgacccaggagttgcctctcattttgcatttgagatttaaaaggagaagggacagtatatcttgccaggtcacaaaaattacaggcatcatattgactgaagggcactcctgtcatcactgcaatataccagaatggtcttttaaaaaaataagtgatttaggtttaccagcaactgtaatgcttgttttattcttctagttcaccgttaatgtcacttttgtagttttagcactggcaatgttgattttatgttgactctgatgattttaagctttcatttgttcacatagagatcatcttctttctgaatattaatgcattttttctctatttctactggttattcctgtacatagagtagagaatcacttttcccaaggaggtggaaagcttctgactaccaaaaaaaaaaaaaagtgtcaaaatgctttaaagtcagtaacttaaagatcaaatccaagagtgggcaacagattctgcccagggtctgaaaggtggagaggtgactggtgaggatgtttaaaagacctctcctctctactccctaaatgggggccatccagtgttcttgaggttcagagaaggcccagggctggggcagcagggcactgtcagctcccagctcccaggggccaggagtaagaccccaacactgtccagacactgattgcattcattttgggggagagtagattcttatttaaagaataatacaaaagtctacaaatatgaacataaacagaaattcctttgctacaattttccccttaataagacattccttcctaatgacatatgtgactgcattcatggctgagatgttttctaggatggtgagagcatcagagtggactatctggtgccttggggtcatgcattttcttcttccaatgtctacaggatcccccatgtcccactttgtagtgtaactcagtgtgtgtcattctggtttttgttgtatagatccttggaaagcccatgtcattcctgctgtgaggtacaggcagccaaatggcatcatctctaaacatgccttctcctggtacatcaaattatggaataaatgaaagccattttgacagatattgaagatataagtttctactcttcccacacatgcttctcccaagtgaaggattttactggtgaattgttattagagattagtgtggatcagtgactctgccaggggaaattttgccctctaggggacatttggcaaagtctggaaacattgttggttgtcagagctgggggagggagtcctgctggcattgagtgggtggatggtgctgaacaccctgcagttcacagagccccaccagtttgaccacccaaatgtcaatgctgaggagtggagagccctgctgtgccctcccgcagcttccctgaagcttcccctcacctgctcctcccatgtctccccaccacttccccacttcacccgcctccttacacctcagtcccctccacctgaactcaccccttagtccaaggccagccctgatctccgctctcctggtctccttgctccttagcaggaggcgcccactagatggcgcccttgcccttactggagctcaccgtctccctttccaccctgagacaaatgtggctgcttttactgccacaaccccagccctccacactctagatttgctcagggagcagctcctggacagacctcagggaccccagggaggagcctcactctggagattttgatggcatggtctttgaacttcactgttacccccagtcaggatccaggatgttgggagtgcatgattctgcccggtcccacttcagcaggaccccactgctgagttgtctgtggggacccgggcctctcatctccttcttgcattgcaggagagggatcttagcactgctttcacataaagtcagataatggaggagtgcaggtgagtttgggaaggtggacatgaagagaggttgtgtccctagaggtggcagcagtgagaggatgggcaggtgggaggaacacagcccatccagggttgccagccatattaggagcgacagcctttcctctaagcctccagcctttttcctgaaacattccagaactttccacttcagcacttcccactgaggctcctcaggtctgtccctgagctcccagctgagcctacctacccatctgaaatcctgagtcctgtgtcaccctcgttccccattattctgtgcagttctgtgggacgcccagctctcctgacacccccagtcttcagaatggccatcagcgctgtcgctgtggcaccagggtgactgccgcctggaggctgagtcctggcttcctgacagctgtggggcccgctctaggctcccttgtcctgatcattcatcacctccaggatgcacagcagctgggccagggggaggagcagggacaggtgtcagccaccctgtgtgtctgcaagtcaggctgggggtgtgggaggacgccaggaatgactgaactttctgatttagagggtgagagcttgcactgatggaatttgggatttaataggaaaagcatagcgttttcctattttgtaggcagggtggctggagtttggaatcatagattcccctgggatgtcactgtggacctcagtcccacccgttaggggcacagatttcagaatccacaccctggggcaaagcaggcatgggaggctccatcagcctggccagggctctctatttgtgcagctgctgcaaggagatgtgcactctgatgggaacagtgctccctcctccttggggggcagtatctagctccctgcagcccctctccctgcaggccctgccctctctgaacctcaccttccccaacccgccccccgcaatcccatctcagctgtaatcccaacactttctcatccattatgggtggactgcttgagcccaggggttcaagactatgctggctggacaatatagcgagttgttgtctctacaaaaagacaaaaattagctgtgcatggtggcatacacctgtagtcccagtcactcaggaggctgaggtgggaggattgcttgagctggggaggctgagttggcagtgagttgagattgtgccactgtatacttcagtgtaggtaacagagcgagaccctgtctcaaaaaataaaagtaaaaaaaaaaaaagaaatatggaatacattattgttaactctaatcaaccatgctatgcaatagtccaccagtaataccagtaatagccaataatgaattatctgaaaaagaatacaatttattcttagctatctactgctaaaatttttaagctatcttttatgatagctgaaacaaaagaagtaaatttaaccaaggaagtaaaagacctttataatgaaaactgtaaaacattgatgaaataaattgaaaaagacacacgcacaaatagaagatattccatgttcatgaattggaagaactgatattgctaaaatgtccttaccacccaaagtggtctacagattcaatgcaatttctgtcaaaacaccaatgatattcttcgaagaagtagaagatcctaaaattagaaaccacaaaaattcctaaaacctgcacaaaacaccctgagttgccaaagcaatcttaaacaaatagaacaaagctagtggcattacacttcctgacaatcaaagcatactgcaaagctatagtaaccaaatcagcatggtcctggcataaaaacaagcacatagatcaatgaaacagaataaaaatcccagaaataaacccatgcatctctagctaactgattttcagccaaggagccacatgcacacaatggggaaaggacagcctcttcaataagtggtgctggggaattggatattcatatgcagaagaatgaacctagaccctatccctcaccatgcacaaaaaattaactcaaaatgtattaaataaagacttaaatgtaagaactgaaactatgaaactactagaagaaaatatagggggaaaatccatgacattggtctaggcaaagagtttttggataaaatctcaacagcataagcaacaaaaccaaatataaacaaacgggatttcatcaaactaaaaagcttttatacagcaaagaaaaaaaaggccagcagagcaaagagacaacctacaaatgggaggagaatatatttgtaaatatatacatatatatttgtaaatatatacatctgataagaagataatatccaaaatatataagaaaattatgtttctgtatagttttatctgactgggatacagaggccacatccacagtcccatcctcaaaggccacttgttcccaaaatgtcaagcacatccctcaatgatccatcatcaacacctatgtctgtaggatgaagggtgaatcatgaagcactaaaaaggaagaaggaagccaatcccaaaacaaaatgatgcagggtctggaaagtccaaagcattttttttttttttttactgcatcttcctcctttcttctccacattcccaatcctcactattgattaacaaaacaaaaaaaactgggacccaccatcttccctactgtcaggagatctagcgagattgtttgagtcttagaccaaactttgccataagccaaatttctggctgactttacaatgatatgagctagcacagtctctttttctgccagtcaacttgtgctcggttttatttgcaaccaaatagaggtggtaaccaaatataggtgaccctaaaattagtcatcaggatgaaatcctaaaatgtgcaacaaactgggttgaattcaggattagtagcaacatctctgttgtgggcttgaaaagggggcacccttttatgcagtagcaaaattgctaaattgttgtttgctgagtctttggactctcatcccggattttctatgaccattcaaacagggctgcaatgaacatctatggttgtttagcttggcacacttctacatttctatatagtaatatctagaagtgcatttgctcaatcacaagatatgcacattttataattgactgctatcgaactaccttaaatagccttaatttgttctcaacattgtttaacagggtctgtttaatgtcctacgtccagcaaggacagtatcacttttcttaatatttttcaaattattggaccttaacaaatacttaatgtgcaattaattgattcctttgtattcccatgccttcttttatatgtttccttatagtacacaaaaccacattattgtttctttacttgtgtcattccaccctggaccattcctatctaaactataacattatgagagagagagagagagaaaacaatatgaaaatataaattgattaatcaaaaaaatttaaataggacaaatcaggaagacacaagagagattttaaaattattcagagaataccacaatagctgtaccaatatattttaaaacttagatgaaacggacaactatctcgataaatgtaaattaccaaaactgactcatgaaaaaatggatattatgaatagagcaataatcagtaaagcaattaaaaagacagttgataatttttatttactgacaacaataacaaaatttcaggtcctgatatttttatggtgaattttaacaaattttcaagctcctcctcaaccaattctcagaaggtttaaaactttaacaagaaaacactttctaacacattttcagaagctgttatagcatgataccaaaaccacacaagaaaattatagaccaatctcacttacaaatatacatgcaaaatcaaacaaaatcttagtgaaccaaattcagaattaataatagcaaacaagcaaaatatgttatcatacgtatggcttatatcaggaatgcaagtatgtttcaacatcagaaaatacttctccacattaacagactaaaggagaaaaacgcttgtttaattatctcaataggtttttagagaattttgaaaattttataaagttatgcgtattctgtaaaattgatgaaatccaaccttgatttatttttaaaaattgcctttcctatagaattataggtaaaggaaacacatgcatcctcacagagctacttcaaggctaagttacttcccataagtaacgtatcctgtaatgtgtgcttggcacatattcaatactaaacaaatatttgcaaatcctcaaaccacttctcgctcaaataacccacctttgtcttttgcctttatgttagggttgattttctcaattgtatcttggagatcctttggtgggtctttcagcaattaccctgaatttgcttttctgtttacaattttaattcctgggaactctttcttgttctctgactgcacccttttcatgagagttcagccatcaatcctccagaaccccaccccccccgcccccccaaaaagcaataaagatgtctaaaagcttccttctgggctttcgaatgatgtttaccccaggcatttgttctattcgttcatcacccattttccctacaacttgcctacacttgatatcagatttttatttattagtcacctatcttcttcattggcccattttcctattttgccactggttgttctcaaatgtgttatgattcctggttgtacagtcaagtggttgataatcttggatatacgataaagatttgctctgtagctgtgtgtaagcctatataaaagcttttgtatttttcttcttaaaaaagacaaaagatggttgggaagatccctccagttcaccagttcgaggctgcagtgagctatgatagcgccgctgctctagcctgtctgtctgtgaaaaacaaggggggcggggggcgggggggaagactggagatgtaaatctcccgcagggccctacccgtatccgcaacaggtctctaacaggaacagcctcaggcctgtgttggaacaaggtaggttacagaaatctggaagccagatctgtaacttcagggtaaggactggctctcagggctgatcccccgggctgggtgtcccagaggcacccgcccccgccccttccccaaggcaggccaggacaccttcactcctctccttaggctccccacccccttctcctccccactgtgcctcctggagtagcggtggcggtgccacaggggagcggggcggggcgggctctgagggcaagggggatgggccccgccggggtcactggcggccaccctggaaactcgacgcaggccggcccttctagtgaatcgtcccagccacagctggcctcccagccgcgcttggggcgcctcggggcgcgaatggtgcaggttggggagactcaccacgcaccgtcgggggtcggtccggttattcctcaccgctcggctccagtgggcgcgcgggcctctcctcctcagttcctgcgctgcagtccctccctcacccttcgcagcttgggaatccaactgtgtcattccgacggagcgccgtgaggacctccgagggtgttagcgccaagtgatctctgtccagcgctctgaatatccaagtaaaggagttcaatgaagggcgggtcaacggaggagaaaccgtgactctctcaagggagcccaaggcctccttgtctaattagtgacgcgccaatggatggaggctcttcccaccatctcttcccagcatccagtgacaccaccgccaagggacgggctcggcggaacctgcaggaaagaagcatcggctgagcctgactgcagcgctgtgaagagacaggggaggggatcagtagttggtcccgcgcccaccccctgtttccgcgaggggcggagttgactggccatgcaggcagagggcgaaatgtgaaattccactactcctaccgtttttccctgacccgatggggcggagtgtcgtcaggctaagttccctggcggtaaggtggggagattgaggcgcacacctgccgaacggtaacgcaggattagctaaggcgagctcaggacagaagcctcccgaggagcaggagggcaaaataataaataaataaataaataataaataactcactccttggtctttatttgcggcaggaattcagaaggtgaaagcggggccttaggatctttctgaccttttgggttttaagcaggaggtgtcagaaatgttaccacagggctagctggcttgtggccagcaagcgttcacaatgccctcgatttttcatccctctctgtgggttctttttttcattgtaaggcagaatttctacgattgctcacccactcagagaacctgagctggtttagaccaggtgagacaggctaggtttaccctggtgatgatgtgttgttgccatggcgatcctgcccagtaccagaggccctgcagattcagatgcttggtgcctgtgcttggctgaggggccaatgggtgaagctgccatctgcgggatgatgactgaagcctctaagtcagaatccgcccaggctgagccttagggcagctccatggagcctcggctggcctgggatagagagtccaccactgtgccagcccccagccactgcctaggtcctgtgctgagagccccttgtccagggaaatggcgtccagtggaaaagggaccacccccttgcccttcactcaaggcaggttggtgacaaccctgaagctaatccgttcctagaggagctgcttctgggtccgagttttctctgcagcagagcagctccctggatgggatctgttcaaagtccgcctttcacgcggaattttccgtccttgcaattttccacctccaccactaggggatcctctctgaccgcctcatgccggctctggcctctgagcaggggtttctcttctgcatgtgcgaccttgcgcatgcctagtggccttttgggacctagagctgctccacaccccgatggggttacagagtgcctcgcctccactccaccccaccagggttccttccctggctgggatgggatttcagaagcgccgaggaacagcccagacaggtgtgggagagtagccaaggcccctgtcccggggtggccaggacagcggtggcctcgcataggacctggctgggctgctgcaatcagtgtcctgccccttggagagcaacagtgaaaacaacaagactatcttcacccaccttaagaaagaacagaaccagtatccccaactctgctgtgtatcccaacccaattccattccccaccccactctcagtagccaatatgcaaaatattagaatactcttactgttattattttcaaccacactctgcatcctgaaaaaccatatatttcgttatgtgcttttaaacttcttgaaaatgaaatactgaggctgggcgcagtggctgacacctgtaatcccagcacttcgggaggcggaggcaggcggatcacgaggtcaggagatcgagaccatcctggctaacacagtgaaaccccatctctactaaaaatacaaaaaattagccgggcgtggtggcgggcgcctgtagtcccagctacttgggaggctgaggcaggagaacggcgtgaacccgggaggtggagcttgcactgagccgagatcgcgccactgcactccagcctgggcgacagcgccagactctgtctccaaaaaaaaaaagaaaaaagaaatactgaattttcaaatacttgctttttttttcggtcaaaattatgttctcaaatttcactcctgtagatgtgcgtggctggctgtagtttttgcatttttattattaggtattctcctgttgcattaatatgccacattttatttctctcatgtttttggtgaccacttggggtgttttttggttttgtatttttgctgtatacatgctgccatggtggacatacctctttatacatatttcctgttgtatgcagacacaattttaggatgtgacatcttcagcttttctattgtgtcgtgtgtcttttccttcgtgctttgtgttatttacatattctggacacagattctttgtcaactgtatgtgctgcacatctctttcccagtttgtgtcttcttcttcttttttttttcttaaaaaaaactttctttatagtgttttttttttctttctttctttgttttgttttgtttttttgagatggagtcttgctctgtcacctaggctgaagtgcactggccgatctcggctcactgcaacctccgtctcctgggttcaagtgattctcctgcctcagcttcccaagtagctgggattacaggtgcctgtcaccacacccagctaatttttgtatttttagtacagatggggtttcaccatgtttgtcaggctggtctcgaactcctgacctcaggtgatccaccctctttggcctcccaaagtgttgggattacaggcgtgagccacagcacctggcctgtgttctttcttaagtagatgttacttttaatataatagaatgtatcatattttgcttttatattagtactttttctatctaattcaaacacatccccaagggtctttgtgtgtagactgaccaatttctcaagaatcatgaatgaatactgcttctctttccccaatttatctgtaatgctacctttattataaagtttctatgcatgtgtagaaatagttcctgatttttcactctgtgccaccagcataccaatagcacgctgtcttaaatattaaatagcagagctttatgagacaacttgatgtgcagtaggcaattgcccccttgttactcttcttcagggttctttgttgtaccacatgaattttagaattggcttgtccagctaaaagacaactgcaaggattttatttggaagttcataattctatacataatttggggaaagtattttcataataccaagtcttcctattaatgaacacagactctctctctctctcccccacccccacctgtttagttatttatatctttatggtctgttagttattgtttattgtctttcaaccaggtttcatgtttttctacatagaggccttgcatgtgaaagtctttcttcctagcttgctattacaaattttttttaattgcactttttgggtacagtggcttgtactgtaatccccgatacctgggaggctgaggcagatggattgcttgagtccagaagttcaagaccagcctgggcaacataatgaggtccctgtctcaaaaagtttgttttaaaaattgcatttgctgttattcaacaaatgtcattgtgtctcatatatggatttttatatctgataaccttgttcaacaatcttttgattctaacaatatatcagattcttttgagttttccatatagacaataatgtcatctgtaaattataattgtttcttctttgttatttcttggaccttttattttatatttttgtcttgctgcaaggcaatatccctctatatattgtggggtcttttttctcataaagtggggatggtgaacacccttgtcttgctctctgattgtataaagcatgctttctgtagcattttgtagacgctcttttttagattgaggtaattcacttttatttctggtttactgagtttttagcataaattcaggctgaatttgagctaaagctttttctggagacatcatttgaaaaattcatatgatttactttctttaagtcaccaaagttatgatttacattgaactgagtttctactgtttaactgtattcttgggagaaaacccacttgtcactgaacaatatctgttttatttactgctgtcttgtgtctaaattttcttttaggattttttgtatatgctcagattagcctgttattctcctttctgtatttttttctggtttgggggtcaaagttataatagcctcacaataagagctaagaaaccagccctaatggaggccggggcaggaggtttggagttcaagaccagtctgggcaaaatagtgagacccccatctctatgaaaaatagaaattagccaggcatggcagtgagtacctgtagtcctaggtacttgggagggtgaggcaggaggattgcttgagcctaggaatttgaggctgcagcgaactatgattgtgccactgtactccagcctggatgacagagcgagaccctgtctcaaaagaaaaaaaaagaagaaataaaaaggaaaagataaaagagctaagcatctgtttccttttttccattttctgggagagtatgtgtaagactgtaattaactgtttcttgaataatgggagaactctgtaaaataatctggctttggtgttacctgtattggaaggatgaaaaataccaattcagtttcattattggttgatagggctactcatgctttttgttttgttttgttttgttttgtttttgagaggaagtctctctgtattgccctgttgtccaggctgagatgcaacgttgttcacaggcctgatcctggctcactacagcttctaacttccgatctcaatagatcctcccgcctcagccttcccagtagctaggactacaagcatgcagcatcacatccagcctcttttcctgcctgacccagttctggtttcctttagttttctaggtgttcatccattttatctaatgtttaatgcatttggcataagggtgctcagtgtcctttcattgtctgttgtctgtaactgttgccattttcattcctatttatgagtactggcgtcttctctcactttttcttaataatcctgctggaactttgctttttaaagaacatcttttgacttgttgattcttttttcatacatattaactattttcttattttttgcctttatatttatttcttttcctgtttgaaacattgctcttttcttactataaaaatgggtaagtagctcatgaattaccacctcttttaaaaatcttttctactgtaagcattttagcagtttacatttgcccacaagtaccacttcagctacaccctatgtgcttttacataaagtcttcatttttggtaagacatattctcaaattttaattatcacttgtttttaaatccatgatgttttatttgaaatgttgtttctaaagatacattttctggttatacttttattcttctaatttagcacagtggccacaaaacatggtctgtgcagtgcatacaatcgatgagtaatttctgagctgtagtatttggcataatatatggcaaaatttcctaagttttccatgtgtgctttaaaaaacttccagtaaaatacataaatctgttagatcaagcttctcacattgttcaaatagtctatatgtttactgattcatttgactgcttgatttatcaattacaggtaggaatgtattcaaatctcctattaaagtgtgacactcaagtggctttttaaagacagagatgccaaaccaatgaatacatgattttccccaaagcctgcacaaattctctaatgaaattttaccatgaaagtttgtttaattaaggcttactaaagcagtatgttgtcttttactttttaaacagagaatatatattttaatacatcgtttaagtttatgattaattatctattactgaggataagaatctttgcctgtgctcattcagcatttgcacttcatttatgatctgccttctcatagcttctgttaatttttatactagagacatttatttgtttgtataaatgttgaaggtttttttttgttgttgttgtttttgagtcagagcctcgctctgtcacccaggctggagtgcagtggcatgatctcggctcactgcagcctccatctcctgggttaaagtgattctcctgcctcagcctccagagtagctgggactacaggcatgtgccaccaagcaaggctaatattttgtatttttagtagagatggggtttcgtcctgttagccagggtggtctcgatctcctgacctcatgatctacctgcctcggcctcccaaagtgctaggattacaggtgtgagccaccgtgcccagctgggttttttatattataaggagatgtaatagatagatagatgtttcaaagatagtcaaatgtttttaaaatttaaaacacttttttacaggttgactttcaccatttaatttcatctatgtgttttgccttagagaaattttaaatgctatgtagatctcatgacttataattatgaagcattttgttttctgttttccacgaaacttagcttaactttgagcatataatagttgtaaaggtaggagagtaacactgaaaaaaggaattgcataaaaatggcacattttctgtagagttgtttatcgcctgaaaataggccccatttcatggaagtaagatgatcaggctcaggtccccagacgaaactcttggcatggtttttggagatagtccagggctcagtactggctctatcatttgctacttctcccaaagtaaccaatatctcatccaccctgagcccatttccatatctctaacatgaggataatagcatctaccttacacaccaagtagagggatcaaatgtaggaactaaatcaaagtaccagcactgaataacctacatcctcccacttcccaaaaggaagagagatgtatcccctgttgacaaacgagaccattttgcaggagagaaaggaaatgccagttcacttgcaatgtaaacatgctctctctttttagggatgtccagggacctgagagagaacccatgcttaccaaagagtttctagttccagacacacaggactcgaagggtgacaagtatggttttcagggtccctgaatccacccagtcctcacagaaactcctaaaagctgtcgattgacagcgttgagttcacagctctggtcctcacatgctgatactgcttgtgatatcgaacccgacaggaccccacatcacaattgatttaccaactacaatataatacctcctgaatctccaaattggctcacccaggaacaaaggcttggggtaaaactggattaggagatataagctctgaattttctgagggtgagacacacaaggattctaagtgacacgccacagagtaacgggtctgtgactggaggacccacagatttgtcttactggagacaccacatgcacacaaactccatccttagctgtggaaacaagggtcttttgctatcttagccgaattctgggagtaatttttggaggggaggagatctttgggattgcctctttcaggccctttacaaaaatacctacttcttaaatggtaaagcttacactaaactgaaaaaattacatccttggctttttatgaagtaggtgttggattgaatcactactggaagaagtatggcatcgcaaattctaagcagtggtcaaaggatggatctgttaaattagaaaaatctctaaatttataaaaagattttagattcctttattctaaacaattgacctatttgtactcatgggacaatcaaatttcaaaggagatatgtaacgatttcatggcttgcattaaaaatccttctgataaaattaaagataaaaaatctgaccccctgccaaaaaaatcttttgaagttcatactgcctgctttcaatattctgtgggattcacaatgaaaggtgccttatattgtggcctagcttcaagtttatgccttcgccaccatggcctgggttcaattcccagtcagggccccagcgcctttggtttaatgtttgcgtggcatttgacttttttacctatttagtattggtgagattacctttggtaaaaaaaagtttaaagagtggaaatcgcaattctttgtgttggctaaaatctgattataagagatctggaaggttttatttttctttttcaaagagctctatggtcagaagtcggcttcatgaaaagctaatatttaattatatgtacatacagtctttctggattttctcttttgcctcctgttttgaaaaatatttggatttgagtgaaactccgttttagaaattaattgcttggtacaatatacccatgtaactaccctgcacatgtaccccctgaatctataataagagttgaaattttgacaaaataaaattagattttgaattaaaacaaataggtgcttggttcctctgctcacttctttttaaaaggaattcctctcccatgtacttcttcttttcccttctttaccttccttttggcatctttggtatcacatgaagggatctagagggaattttaagtgactctgaaattccttgagaaatacacaaaaagatcccactcaccccttttgggggtctcctgttctccttgtggagtccagagtcagggacaggctcctccaggtctgcagctctgctctcttttatttcatcttggctgattgctttggttttgtgagtaccaggcattactttgtactgtgagagacacgtcctttgtgagtgcaacggctgctgggtcactggtgagggctgcagtttggagatggctgagagccgttgcaataaatggttgtgattgcagggggctccttgtttctttgcaagtttagatgagaaaggtgcagtttggacacagtttaaaggctgtgaaaacaccaccaatgaatatgatttcctttggggatggtctgattaaaagtgggctgattgttgctgtgctactagccttgaagacatgtttctacagcattgtgcagtgtggaaaaattgtgtggcttggtcttgtggcatgtcccttcttttagagacctcagattcaatgtgaaattcgggatttttgattttcaaagatctagatgccctgccttccagatgtgcctactcttcacatattttaaaattagatcctataaactgcaaatactttgttggcttctgtgagatcagaggtccagttagaaaaggaagacagtttgttaaaattaaaaactatttatctaatctaactagattggcctccaaatatgactttctgacattcagctggttactctgaaaagatttctaaatctcttgaggctcatctatatgtttccttgcaaagaaaaaaaaaaaaaaaaaaaagcaagcccaagcactagtaagaaaaagatttgcaatgtttcatgaaaggagtagatgagtgaagcatttatttgtagatactgggttggatacctgtgcaaagaagaagaggtcaataataaaaattgccaggggatttcttggaacttaacaagctgaattaaatatagaaatgtcaggaaatcaaggcaggaaatactcacttgtggttaggcagacagggcagggttctgagcttgagatggagcaaacagttgtggtgggtgaagttcacatgctttagagctcagctgtcctagtaaagaagcctaagagtctctaaagctcttatgagaagatggattttttttgcctagattaaaaggttaaagaattgctttaagttggataaaataaagctaaatgtttaagcaagttgtgaaaggtttatgaaaaaattaattaaaatatttttgtgtgtaaacatattgactaaagttgaaggggtataattcagcatttctgtaaattgagcattgaaataaaaacacaatgggtttctcttagagcactaacctgctctttaacaaaaattgtaaagggttatagaaagtctataaaaatgttaccttatggtcaaacattaaaattgggtaaatatgtctatcaggttttattaagaattaggtttaacattaatagtacactaatgtaaaggtgaaatttggcttatttggtacaaaaatcatacaggaagcattgtgaaatataaaatgatttttagctttctttgggctatatttctataaatatgttattgatgagggttccaaagttatgggagactcctataattctgctatatctcagtgtacattatcagtcataattataattgtcatgttaaattattgtgggccacagaggtaacagatttccttgtcaattgtgtctttgactatgactaccctaaaacgttcagtcacccatatacacatgttaccttgttttggccctctttagaaggtaattttataatcagctataaagccctaacaggtgctcttaaatgcaaattttgataactttggagattgtgacatcagaagagaggaaaaatgttcgggacacttggagagctaaaatgttcattgatatcaagcaggacaggaattaactgcatgaagtgaactaataggaggctgaagtgatctttttgactttttgcttaaaacgttgctgatcctttgttttgcttttcagagtcaaggcaaattttcttttgagctattgacagcttttaacgattaatcaaaatatactcctatgaacaccatttggagcattatttgtttctctctacccgatttccccagaatttggaaactatttgtgggtattcttaatttatggcaatatagttatttgcataagtgcaataagaatgtgttttctttggtaacaggacacaatttgaaaaactggttattttaccaaggttttgaccagaatgctgtgctttcctttaaggaatcaaacttgacttgtggagctaataaagcctttggaaaactgaccttatatcctgtgaacacagtccctgtacagggttactgatctgtgggaagaaaagaatgtcacattctgacaggtcaggaatcccaagttatcttgaaacttcaagaggacaggaattcacccaaccatatgtatttgatggtagaaatccatggcaggggctcagctttaaaaagtcttatctcagattccttctataaaacaaagtcccattaaaaccaattttaaaagcctatgtgaaaaataattattcttgctgcacctcgtacaaataaagtggcaaagcataataaagcaaattggtcctgtcgtaatttgtctttagtaaaaacgggaaactggggtcgggtgcagtggctcactcctgtaatcccagcactttgggaggctgaggtgggcagatcatctgaggtcaggagttcaagaccagcctggccaacatggtgaaaccccatctctacaaaaatacaaaaatgagccgggcatgatggcgggtgcctgtaatcccagctactcaaggggctgaggcagggaagcggaggttacagtgagtcaagatcgtgccacttcacgacagcctgggtgacagagcaagactccatctcaacaacaacaacaaaaaagggtaactggagagagggaagttatgtttcaaaaacttttggaaactatagtacacctgtttttaaattctagtctggcattcagtttttattattttctacagtttgggttaaattcgtatttctctggctacaagtctcctaaataatcttttcatttgtttcctttttctttccctttttccccatttttcttaattggaaatcactgaaacctaagctgtgctttcttaaagccctgtgaactgaagactagacaaccgaaacttctgaaggaagtagcagcaacctatttatatgtgttgctgttgcctactattatgttttagcaggtgctgcctctacacccccgaaacagagagtgctactgggaacaaatcgactttttccactccagtgctgcattcggtgccccataacgatgaccccctctcagcaggaagtagccagaaagattacaatgctccatctccctatgattcttgtgataaataaatatacaagcatgatagaaatcatgcgcaaattgacagtggggattgtggcaggccagatttcactaatggaggtccccatcacaactacttcagtactgactgagtggttaagttcagtatcaaaagctgaaagtgccagcgcctttctacaaaggctagaatgtaacaaaagcccaccaagggttttacctaggcctttcctgggccttacagcatgacaaaacaaagaaggaattcttaaccagacctgtttaggattaaacaaatttaattgggggtctgaagaaactcgccaggcctccacaaacaagttcattgggggtctaaaggaaccccccccaaacctctgtgattgagcaggagacaaggtcagggtaattgccccagcacctggactcatttagatttaagtaaatgtactgaggctccagagaaaggtctccaagacttagactagagttacagattaaaagaagttaatcacttatatctttagataaatgcacactgacacgtagacatacatcttagaaaatatataagctctggaaaaccttgtaatttacagttggtctggagatattttctgggccttctctctgtaaccggttccagaaataaaaaactctcttcctccccagtttatctgcatctcgttattgggccgtgagaaatagcagccagaccctgagtttggtctgggaacacactggctgggcttcctgcctggcggtagagcttcactgtcctccttcccagccaaaatgtggcccttgaaggcttcctccccaactgaccggttttgggttctaggtactcagggaacaccgtcttcaaggaggccattttcatactgttcctggtttgatttttctgaaattaggaaatgccccttgaggcatccaggattgtctttatttcccctgaagcttcccctcctgaagaaaaaagttctcaaacaccctcaggactcaaaccccaagttcaccctgtgaaacattcccatttcctaaacccaggcaggctcatggccctcagcctctcagaccccatggaaacctcctcccccacttcacgggttctctccatattgagagcctcccctcctcggcacacaacccagagactcaccccaacatgtgtagcaaatcaccctggaaacaatcatggctgaacgtggtagcccatgcctgtaatcccagcactttgggaggcccaggaggtggatcacctgaggtcgggagttcgagaccagcgaggccaacatggtgaaacctcgactctactaaaaatacaaagttcactgggcattgtggtgtgtacctgtaatctcaactactcaggaggctgaggcaggagaatcacttaaacctgggagacagagattgcagagagccaagatcgcaccattacactccagcctgggcaagaagagtgaaactacatctaaaaaaaaaaaaaaaaaaaggaaaaggaaaagaaaaaaaaaatcatgaggcaacattgcatttaacaatattttatttatcaaaagacacttgtctttctcaggtaagtgaaggtctagagatgaaacgagtcccgatgtaaattgccccatgggcattgctgagatcacaagatcatcactgcagcatgcagcacaatagtaaatttctcaggatggaagttcaacaatccaaaaggtagtattttttttcatgatgctcagtccatcatacgaaataaaaataaattccttttcatgatcatccattcagtagaaaaaatgatagtaaatttgttctcatgaagatttttaccgtaacatataggatttatcgttattattattattctttgttttttgtttttttgaagcggagtctcactctgttacccagtctggagtgcagtcgtgcgatctgggcacactattaacctccacctccagggttcaagcatttctcctgcctcagcttcccgagtagctgggattacaggcatgcgccaccacacccggctaattttcgtatttttactagagatggggtttcaccgcattggtcgagctggatttgagctccggacctcgggtcatccgcccatctcagcctcccaaagtgctgggattacaggcgtgagccaccgcgcccggcctcaatttatcattattcacgcatccacaaactgggttcttatattttgtacgtgattttttccattgaggagagatatctgtgcatattcatgctgctcatatttcatccacaaactcggttcatatttcatccacaaacataattttttccgttgagaagagatacttgtacatatttatgctgttcaaattcacatttcatcattcttttacaagaaatagataatgtattttaaggttttccagtggtattacagatattttactgggtgtatagatagaaattaaaccaaacttctttgttctggccgccagtcatgcatcctgttttcaacatagttcacatacaactggttgtgtaaaaatgaaattattttgtttagtacaatcatcaacagttggttgattagatttttaattatcaagttaatcattgtcattatgcttctcatcgcactcgtcattaattgctgtgggaggaaatttgttatgttccctatgagagggtgtatcacaaattcaaataagaattcaacgacaatggactgtataaaggaaataagcaagtccatggaaaacatatttttttccggaaaggattaaaatatttttaaaaaggaattaaaaaaaaattgggcacggtggcaaatgcctagagtcccagctgctcaggagatggagacagaaggattgcttgagcccaggaataagttggaggctgtagtgaacagtgattccaccactgtactccagccagggcaatagagggaaaccctctttctaaaaagacaaaaagaaacaaaacaaaacaaaaaaacaccacatcaaaaaacccaacaacaaaatgaaaaaccaaataacagcaatacaattggagctattcgatccaaagaagtaaatgaaacataaagcaaataaaagagaaaagctaatacctgtgtcctgcaggactcagtccaagttctgctctgactccctcctggtgagccaccccttaaaaagtcacttggggcggggttactttgacagacagtcttctgtcaaagagggaggcggtaaatagcacttttttttttttaatttaacgcctttccaacaaattagcggctatgttgtctaagagtgcaaatgtcagaggtgggtacaggcagcaagaccctccccacaggggcagcagaaggaggaatgactaagggaacaagactttagtgtgctcaactacacaggacaggaaacagatgctttttacaaaagctggtggacttgaaggcagaatattttcaagttcctgtaactgcgaactatgacctgtagcctgtgagagtgactttctgtggcaaaggagcttttgtgaatgtgaggaagttaattatcttaacagtgggaggttctcccggcttatctagctagaccctcgtgaaatcccaagtgtccttaggaaggggaagcagagagagatttgagtccagaagaggaagaaggtgatgtgaggcccagtaggggaacaaagggcgatggcatgtaaacacttagcccccagaagtgggagagggctggggttcatcacaccagaatccctaacaatcagccttattttaattacccttgaaatggaaggaggccttagagagccagaggcttggaggggcaccctctgctgcatacacagatcccaactgctgtgggctccaaataattgcaccagggaaatcacaaattatcaaaaataaaggatgtaaagcttttaaaaaatattaaaagcccaacaaataaaaaaagttctaaatctataaaattgacctcagtctgtatatttagatgagtcatgtgtatatagcgtttcacttcaaaatatatgataaatctctcattcattggcttaaaaataaacacttcaatcaagtctttatcagaaaaattgaaacgttaactcaattgccttttagttcatgtgactttacaaaacttaaaacaataaagtcagttttaaaaattattagtaaagtaaaagaaaaatatcttcacaatgtagacattttgtccacatgagacatgtgaaatattgccattactaaatatttgcaggtcaaaaactgtttccaaaacattttaaataatcatctggcctgtctgttttagagcattcaattctagctgaggtctggggacatgtgaaaggagccacggcccgactccgtgctgggaagagtcagacattttccacagctctgtcctttgctgtgggctctgcaactcctaccaattaaaattgcttacgtttttgttttatttttactaaagaggggttcctaaaagctaacattatactgagtatatgtaactaaaactactaagaaaacaatttcacaattatacaaatgtgccaagtaaatgaaaaaataaactgtattttaataaaggttataaaaagaaaaacatatagtggtgtgaggactgtctcaggtcttcactgagcaagggatcatgacattctatggcggacagctgaccttggctttctgctcctcttgattatgtctactaagtgacatacttactctttttccacctgtcttgcctctaagggtaacaggttttatgagatccctcctagtgctttgcaggtcagcctccctttgctgcattccaattttactgcctataccctccagctggcttttgatgacaaaagtcctggtcccagccattctcagattctgtcatccccgtgggcactatggagctcagcactatgggaggttccccaaaaatctcgttttctatgaggaatggccaccacctgcatctcagtgatgctagtgacccctttcctactcctgtgctcactggtcctcatgaagatcctggttggtctgtagccccctatttttcctattaaagagaaattacagtaagacccatttgtgtgcaaaatcaattttaggcttattacacttggcctgataatttgcataaaatgcagcaagaattcatcggccatataggctacttttgagttaattttcctgggtttttacctaaaaatatactattttggttagagtcttgtgaaaataaccaatgtgttcaattgttttattttaaaaggctcttactgaacactataaatatgtataagttgaatatacaaactatattgtcataaaatcacaacccaaaatgtggagaacgcagagggaaaggtaaatttgctcgcaaaaacatacttcacccaaataactggaaaaaaaaaaagactttcatgacccttctttaaccagagcagcagctttcaaacaaggtgtttgccttggaaatgccattcacaagccaaacggcccttgagagctgtctgtcaggcactgtagaatctagcagctcctcacagagttagaaatagtttcaggaaagagattccctgcttttagtaactgcactttatattcccagatagcgagattgtatgtaaaccatttttatcttattctggaactcttttgggtactttttttttttttttttaaatgatggagtctggctctgttgctcaggctggggtgtagtggtgcgatttcagggtatgagaaaatgcagctggacctggctctttccaggaagaccctcacagccaaggagtccaaagcctggggttttcatctaattccagtgtgactggggtaggagcagctttggtgctgggtgtgtgtgtgtgtgtgtgtgtgtgtgtgtgtgtctatgcctgtgtctgtttagggtgttaggctcgtggttgtctagatacaaatgtcccagggctcaggagccccagggttatgtcaggggcaccagatgaaggtgtcaacagaagttagggcacaagggacaaaggtgagagcaaggttagattcatttaggtgcaagaaatcatagagggaggagggagaggaagccctcctgctaccaccgaggaagaagcgcagcttaaggcagaaagcctgtccggagaggaagtgagtttgagggcagggctctctgggtaaagtacggtctgggacaccagcctgggggaagggtacagaatgcagagtggcctggcgtggggactaagaacagaggagagcagctttcactgggagggtcagtgttttcagtgtccagcactgagcaaggtgagatttgggcagcttgctgtgaaataaggtcaggctctggcattgtccccattgcgtgtgtgtgtgaggggcactttgggagagtgaactctccacctccatcctctcatacgtccttcaaccgagcttgccagttaccctgattccaaggagatctatttattgttgacaatactggatcctagcagaggctgggtaggagcctgggcacaagcaagtggaggagggggcctgggcctgaaagacctgggaggtttgagagaggacacagcccacagaatggagcagatggggtagagtcggcaagcattcagggctcctagtaagttggacaatggagaccctgaaagatccagtaaaacggggagaacaaacaggtccccaactcacatccttgcagtgcctggagcttcagactccagacaggtggggaaggaaaattgagggatgtgaacatgttggagaatgtcgtgccctgaagaatgaagaaaaggggggtgaggaatgagagcaggaacggcttccagtgcctggtgcccaggagaactcagaaaatgggtgtggtggagaggaatcgaggaaccggaagtggtggaagtgtgcagggcccctccgagatcactgtgactgccaggcgtcctccctggctggagagcttcactgtcctccttcccagccaaaatgtgtcccttgaaagcttcctccccaatggactggttctgggtcctatatatttgaaggggtggcctgcctctccacacctgtgggtatttctagttgggtgggaggagagacagagaaaagaaataagacacagagacaaagtataaagaaacaacagtgggtccaggggaccagcactcagcacaccaagggcctgcaccggcaccggcctctgagtttcctcagtttttattgattattattttcattatttcagcaaaaaggaatgtagtaggagagcagggtgataataaggagaaggtcaatgaaaaacatgtgagcaaaagaatctatatcataattaagttcaagggaaagtactatgcctggacgtgcactcaggccagatttatgtttctctccacccaaacatctcagtggagtaaagaataacaaggcagtattactgcaaacatgtctcacctcccgccacagggcagcttttctcctatctcagagttgaacaaatgtacaattgggttttacaccgagacattcagttctgaggggcaagcaggagacagtggccttcctccatctcgactgcaagaggctttcctcttttactaatccacctcagcacagaccctttatgggtgttgggctgggggacagtcaggtccttctcatcccatgaggccatatttcagactatcacatggggagaaaccttggacaataccccgctttcaagggcagaggtccctgcggctttccacagtgtattgtgcccctggtttattgagactagagaatggcaatgacctttaccaagtatactgcttgtaaatattttgttaacaaggcacatcctgcacagccctaggtcccttaaaccttgatttcatacaacacatgtttttgtgagctccaagttgggtcaaagtggctgggtcaaagtggctggggcaaagctacaaattaacaacatctcagcaaagccattgttcaaagtacaggtctttttcaaaatggagtctcttatgtctttcctttctacatggacacagtgacagtctgatctctctttcctttccctacatatattcatggaccacagtcttcaaggagtccatttcctcactgtttttggtttgatttctctgaaattaggaaatgccccattgaggcacccaggattgtctttacttcccccagagcttccactcctgaggcaggagcttctcaaacaccccccaagactcaacacctaatttcaccctctgaaaccttcccatttcttaaatccaggcagggtcatggtccttagcccctcagatgctgtggagaccttctttccctttcatacattctctcaagattaaaagccacccctcctcagcacacaccccagagactcaccccaacatgcattgcaaatcaccctggaaacagtcataagaccacactcatttaataatattttatttatcaaaagacactctttctcaggtaagtgaagttctggagaggaaaagaggagtcctgatgtaaattgccctgcaggccttgctgagatcacaaggagattgttactgcagcttgtagcacaatagtaaatttcttctctggatggaagttcaacaatccagatcgtagtatattccttttcattatgctcagtccagcaaatgtgatgataacaaattccttttcatgatcatccattcagcagagaaaatgtttgtaaatgtgttttcatgaagatgtttaccataacatacaggatttaccattatcaatgcatccacaaactctgctgttgttttttatacataattttttccatcgagaagtgatagttgtacatattcatgctgttcatatttcaaccacaaactctgctggtttttttatacgtaattttttccattgagaagtgatacttgtacatatttgtgctgttcatatttcatgtttcatcatccttttacaataaataggttatattgtattttaagtttttctaactgtagtgcagaaattgtactgggtgtatacatagatatcaaaccaaatttacttgttctggctgataatgcatcatttatttcatagattatgtatttctttgacacatttcacgtacaactaattgcataaaaatgaattttcttttagtatagacatcagcatgtgcttaattcggaatttaattgttgagttaaacatcgtcattgccttttccgttgttattaattgctctggtgggaattttgttatctcatacataagacagtgtgccacaatatctcttaaaatttcaatggcaataaactttatatttaaaaacagggaatctatggaaaacacatttttttctaaaggattaaaatatttttttaaaataattttctaaaaagttaggcacggtagcaaacgtctagagtcccagctactcaggaggctgagacaggaggattgcttaagcctacgagttgggggctgcagtgaactgtgattgcaccactacattccagccagggcaatagaagttaaccctttttctaaaaaaaaaaaaaaaagaaagaaagaaagaaaaaaagcaacaacaccaaaacctcaccaacaaaatggtaaagaaaaaaaaaacagcaatacaatgtaagctatttgatccaaagaagtcaatgaaatttaaaacaaatgaaagggaaaaagtaatacttgagtcctgcaggactcagtccaagttctgctgtgcctccctcacggtgagccacccctttagaagtcacttgggtcataagttaacccgataggaagtgtcctggccaatgaactagggaggtggtaaatggcaccattttaaatttaaattcacggccttttcaacggatcagtagccatgttgggtaagagtgcaaatgtcagaggtgaaaagaggcagcaggaccctcccctagtgcttgggcaacagaaggtggaatcactaaggggacaagactttagcatgctcaagtacacaggacagaaaacatgctttttacaaaagctggtaaatatgaagagggaacattttcaagttcctgtaaccaagaactaccgcctgtaaccggtgaaagtgactttctatggcaaaagcgtttttgaaaaggtgaggaagttaaatatcttaatgttgggaggttcttctggtttatctggctagaccctaatggaatcccaagtgtccttatggagcggggagcagagagagagatttgagtccagacgaggaagaaggtgatgtgagtctgggtgcgggacagggggagaatgatgctatgtggggatctgggctggggaatgacttagctgcatgagcggagtgacttagactcctgaactagaagaaatctagggctcatcacctcagcagccctaaccatcaaccttatttttattacaggtcttccatcgacggactccctaaaaagccagcggcgtggaggggcgccctctattggacaaatagatcttgactactttcggccctcaaatagcctgactaggcaaataacaaataataataatttttttttaaatcatggaaaatattttaaaaaacaattaaaaagttataaatctataaaatctgcttctgtctgtgtgtctgtatatttagatgtctcatgtgtacataatgtttcactaccaaaatatatgatgaaaccctcattaatcggcttagaaaactaaacacctaaatattttctcagaaaatacaaaaactttaactcaaatcccttttaattcacctgactttaaaaatctttaaaaaataaagcatgctttaaaattattagtaaagtaaaattagaacatcttcagaatttagacatttggtttaaattatacaggtcaaatactgcccttagtaaatattttcaggtcataaacaactcctgtaatcttttaaataattgaattacatgtctgttttagagctttaagttctagctaaagcctggggacaaatgaagggcaccatgccccctctctgtgctggaaagagacattttctacagctctgacccttgcagtaggctttgcaactgctacctatcaaaattgcctacatcctaagtttattattaaaaggagttgcttggagttaacattataatgaatatatgtaactaaaactatttctcatacaaagtatatgaaaaagtagaatgtatttttaataaaaagttataaaaagacatgaacatgtagtttttataaaaaacagtaattttgtctagttttgcagttctaaaaagttatgttaaattcaaaaataaaaaataacaagacaagactcaaggtttaaataagttgtaaaagatttgtaaaaattagttctataaaaattttacaaaaaaaagcattggttaaaatttaaggaattattttgtttttacagaaattaaacattcattaaaaacactctgatacaaggccttaatttgggttcatgtatcagaatagcagggttttcttagaatattaatctattctttaaaagaactatgaatgttatgcaaactttataaaaatcttaccttagagtcaaactgattaaaattccatagattttacgtaaaattttattaaaaattaacttcaacaaaaataaaatttgattttctcctttaaacaaaagttttgcgtaatattaaataataaagcatttttgtttaccttttaaactataaacacacacacacatacacatacaccaacactaaagtcagctgacctcatactgtctttattggatattcttgtttaaaaaactatcttctttggaaaataaagttttttattttaaaccatattttaaattatcattttgactaaatccataacatacagtgatctgtaataattctattttataatatcaagtgttttgaagaactccaggaacagccatgagagaacactgtggtttagtaacactttatttcctcagtttgaaaatagttgtctttcttggggaggccggtttcagcagatgaaaacaagagtcatgatgaaaattacccagcagtggttagtgtgaccataggaacattgtcatcaggtcagcagaaaacatatcagcaaatttttctcatactggcagtgtgtaggggtggatgtttacagttcctgaagccccagtggtcgtgtggtcttttagttttgccatttataggcaacttgtggtaactagctcaattagacacattccttatcacaaggacagagggctttctgtatcctagggttcttgccttggcattccagaagaatcaggtcacacgtggacgtggagaatgagtgcaaggttttattgagtggaagtagctctcagcagatgggggagccagaaaggagattggtttctccctggattggggccgttcagcagccctggctctcctctgactgccccaggcaaaatccacatcgttctataagtcggtgccctgctggtgtgctggtgcctgttgtcatgttcctcttcatgtccagccgcctgtgtgttcctccgctgatgtgctcctctcgacgtcaagcctcctgtgtgtctgactgctagggtcttggggtttttataagcacaggatgggtcttagcaggccaggatgatcttgggaaagacaacattcggtcaggaaaacaaaaatgcctgttgtcatctaggtccgtggggacaagcccaggtgtggagcttttagccagggaccacagcctcctgtatccaacacttcccttcaccttttctatatcattcaaagggatcatgcccttcccatcccagcacttcactttcatgtcatttgccccctctgaagaggtacatctaactgccattagaatatggatgatgaccagtcttagctgcttcctgctgaaagggggcattgttttgggggaaaacggcagtcagattcctcccaggggtctctataataaaagatcgaggtggctactttcaggaggtcctctaatgtactatctggtcccaagtcccatttctgcaacctcctcctgatgtcaggagctgcctgagtaataattttatcctttaggattatctgtccctcgattgaattaggagatagagaggtgtgatttaccaaggcctctcttagcctctccaggaaggcagtgggattttcatcaaatccctggttaattatggacaacttagtataattgagaggcttggtcttagacctacgtaagccctctattatgcacacctgaaagtgtctcctcttccagtcttccatctcattattgggatcccatttagggtccttcactggtgctacttctcttccagttggataatattcgctcccttccctgatgctataggtgatgcaaagctcatccccaaatctctctgctgctggcagagcagcctgcttctcagtgtctatcaggttctgactcaaaagtaacataacgtctctccaggagagttcaaatgttagggtgaaattctggaaagcttctatatatctatcagggtcatctgaacacttgcccagatctcccttaatttgctttaagtcttgtagggaaaagaggacttggaccttactgggcccaaattcactgggcatctgtaggaggggcaagagtgagactgggcttgtttgggatgaagatttctaggaggggccaggtgagaggctgaagctggatacggaggttggggtggacccagaggagcagggcttgagggagctggcacgtcagctgggggtgcgtctgggactcgtgtctttaattccctgggcttgaccctggcagccttccccgagacagcaaacaggagggctggaacaatcctacatgtcagcaaaggtctggattgctttgcaaggtatagaaagcctgcacatttggggcctcagaccatgtgtcctcacatccagagaaaagttctaattgcaggatggtattgaaatgaatggtcccttcctgaagccaagccagtccttcctgtaaaccataatttggccaaacctatgtgcggagggctatgagatgcttttcctctggattctgagggtcaaaacagtcccaatggttcaggatacactcaaggggagtacaagctgggggtggtgaggagaactggctgcccattctgaaagacagggaatagaggtgttcctcatttcccttccttcttttggcaaaaagctcagggtgtgatggggagggaaagcaagcatcttcacttcactttccacctcttacccctgcgccctggcaaccttggcaggtgccggccacaggtacaaatgcggtatgtacccatgaagcagggagaacctggagattaggaattaactgccctcacctatgtttccttttctccctgctgttgaaaaactttgagttccctgggcctttttatcccatgaggcatggcctccttctgtgggatggggttcagtcagcaggaattggtcctgtccatttacattgtgcctgttgcctggctttgaattcctcagacctgctttctctttctagggcctcagcctgaagcttggaattgagtttgggactgaaaaagcatttcagaggctgtttatatccatttagtgcctcaaataagccctgctgaatttgcaattatcagccagcaggggtcactcctctgttaacttccctattagaaacagagcggtggggattctcacttagaaaagaaaaaaagagaaaaacagttaaagaggcaaaaagtggggaatgctgggggaagaaccccttgcttagtgcaagtgggcccctctaatccttataactttcccatccttcccccagttcagaccaggttgaattccttggccatggaaggaaaggttccattgatgcagtgggtgagaagcactctgtagggtcctggctaccatcggttttctcacacccccctcatcccaggcagtggagggagacacttctgcgacattgctccccctgccccttcatggctattgggtgtggcctttgcctgctgcaggcatgcctaggtgctggagctgggagggaaaagggtaaggagaggtgccctggaagccgctcatgcctggggctgtcaaggtggaggcatacatggcacctctaggaaaaattggtctgatttgcacctttggcggctgagccaaatgctcattttacttagtaacattgcctcagcctgtagcaaaactcttaacattataaaggaagagataagatccatttcaaataatgtgtgagagagaaaagagatgaaaggaaaacagagtcttttacctgcaggaaagggagagaagtggcagagttttggaagaaaggcaggcccaacagtttcccattcactcacactcaccttccgagatcccagacgagccaccagttgaaatgggaaaagtttccttgtccccctcacaggaggtggagtgggggtgtggcttgcttctttagtactccgctgctcaaacctctagggaagcatacagactggcaagttgtggggctacaaccccatggcagcatctaggggtagatgtttacagctgctgaagccccagtggacatgtggtaccatgtgctcttttagttttgccatctataggtggctttgtggtaaccagctcaattagacccattccttaacccaaagacagagggctttctgtatcccgcggttgttacctaggtgtaccagaaaaatcaaatcacacgtggtcttggagaatgagtgcaaggttttattgagtggaagtagctctcagcagatgggggagccaaaagggagaatagttttcccctgaagtcgggttattcagcggcccaggctctcctctggctgccccagccaaactctatgtcaatccattggtcggtggcctgccagagtgctggtgcctgttggtggattcctctcagcgtcgagagtttttccctctcaggaaagggagagaagtggcagccacccatgtgttcttgcactgatgtgctcctctcgacgtccaacctcctgtgtgtctgcctgctagggtcccagagtttttttaggcacaggatagggcatggtgggccagggtgatcttgggaaatgcaacatttggtcaggaaaacaaaaatgcctgtcctcatctaggtccaggggcacaagcccaggtttggagccctagccagggaccccggcctcctctacccatcactttccttcaccttttctgtatcattcaaagggaccatgcccttcccttcccagcacttctcttctgtatcaataggtgatgtttttaaaatttcccaactctagtgcaggcatggtactagacatatacatagaaataaaaccacacttattcttctggctggcaagacatagtatttttgccaaattatgtgttgttttgaagcattttatgtacccctggtcatataaaaataaagctattttgttcagtacaaacagcagcattttctggattagaaagttaatcatcttaaaagatcatcacggatttttccattgcactcatcactaattgctttggcaaaaaatttcttatctcacgcatgacaaaatcagccgcagtatctcctagtaatttaatggtgatgatctttataaaggaaataagcacatcaagggaaaacataattttttttaaaaaaagagtaataaaactttttaaaagtcttttttaaaagactgcttttctaaaatagtaaaataaaactccaccaataaaaccaccaacaaaacagaaaagaaaaaataatgatatgatcggagctatttgatgaaagatggtaaattaaatttaaaatgattagaagagaaaaagcaatacctgtctcccgtaggtctcagtccaggttctgctatgcctttctcctggtgagccacctatttaagagtcgcttaaagcatatgttaatccaacaacagcagattaaaaaccaatgcaatctgaactatttgatctaaaaacataaataaaatttaaaacaaataaaagagaaaaagcagtacctgtgtcctgtaggtctcagtccaagatctgctctgactcccttgtggtgagttagccctttagaagtcacttggggtggggcatatgttaattccactaacattggttctggccaatgagtcaggaaggtggtaaatggcaccttttcttcttgctgatttctttcagttcctttggagtctggacattagtcctttgtcagatgcctagtttgtgactactgtttcctatactgtgggttgtgtgtttaccctgctgatatttcttctgccttgcagaagattttcggtttcattaggtcctattgatcttattctatttttatatttttgcgtttgcttttggggcattagtcatgactacttggcctaagccaatgtctagaaaagctttttggatgctatcttgtagcatttttagactttcaggtcttagatggaagtttttatatgctttgttaaagatcaggtgactgaaagtaccgggctttgtttctcggttctctattctgttccattgctctatgtgcctatttttatacttcctgcaccatttattgaataaagtgtcctttccccaattagtgtttttgcatactttgttgaagattagttgtctgtaagcatttggctttatttctgggttctctattctgttccattgctctatgtgcctatttttatacttcctgcaccatttattgaataaagtatcctttccccaattaatgtttttgtgtactttgttgaagattagttgtctgtaagcatttggctttatttctgggttctctattctgttctattgctctatgtgcatattttataccagtatcatgctattttggtgattgtagccttgtagtataatttaaagcctgccttcagatttgttctttttgcaaagtattgctttggatatgcggtcacgtttttggttttgtataaattttaggattcttttttctagttctgggaaggagaatgatgatattttgatgagaattctactgctctgtagatggctttggagagtatggtcactttcacaatattgattctacctattcataagcttataatgtgttcccatttgtttgtgtcaactgtgatttctttcagcactattttgtagttttccttgtaggaaacttacattaacctacttggttaagtatatttctaagtattttacttattaaaaattctcagggaaatgcaaagtaaaactgaggtgggaaattaaagaaaaataaaattaaaaagaaagggaaataagctttcttgtattaagctaacttgtcccagaggcagcaacaggcacagcccagacccaggaaaagtcttgataatattatttattgtattctggagactcttccagcactccttcaatgtagggagaagaaaaacaaattttcctttgttttatggtatgagtttatagattcttgttctctttaactagtaacttcaagtattctgttttatctaagaagtatggcaaaggtcatgagaagcctgagcaggcctgaactacagctctctaggcaccatagtgaagataaaccaatgcaagcctctttagagcaaaacctagataatagacatctgggttgcatagcaacagttatgtgcaatcctgagttatgaacctgttacaatttgattaactgtctttttcctgcctctgtatccctgctttcacaccactgtaagcttgcttcaagctggcccacccccttttgtgaagtgtgtataaaagtcaagtgctgtctttgttccaggccctgtctttggacgtgagtctgctgggcctgagagcactcaataaaagattctcctgttttaacccaaagcctctctctcatcctcctaaatcccacaacaaaaccacaatgagatgctatcttaatcttgctagaagcccataatttaaaagtcagaaaacaatagatgttggcatagatgtggtcaaaagggagcactttgacactgctagtgggaatttaaactagtccgaccactatggtaaacagtatggggattccttaaagaactaaaagtagaccattcattccagcaatcccattactggctatctacccaaaggaaaagaagttattccataaaaaagacacaagaatatggatgtttatagcagccgattcgcaattgcagtgatatgggaccaacttaagtgcccatcaacgaacgagtggataaagcaaatgtggtacaccatggaataatacttgataataaaaaggaacaaaataatgtcctttgcaacaagttggatggaactggaagccattattctaagtgaagtaactgaggaatggcaaatcaaatattgaatgttttcacttttaaatgagagttaagctatgagaatgcaaaggcataagaatgatataatggacttggggactcagggggaaaggttgggagggggatgaggaataaatgatgacatattgggtatattatacactgctcaggagacagatgcctcaaaatctcagaaattaccactaaggaacttttatccacataaccaaaaaccacatatattccacacactattgaaagaaacataaacattattttaaaaaataaagccacttttaaaattagcaaaataaaataaatatgtcttcagagtttagatattggatccaaattagacagatcaaatactgcctttactaaatattttcatgtcattaacaacttctaaaacctttcaaacagttttttgacatgtcttggaaccatccatttctagctaaggcctgggcacctgtgaaatagggccatgcccccccttatactgggaagagtaagatatttcaagactaagatgttttctacagctccatctttttctttaagctctacatcaaggacataattaaaattggttgtctcctaagtggtttactaaaaatgcatacttaagagttaccattataattaatatttgtatctaaagctacttaaaaattttcacacacaaatctgactgaacaagtaaaatatattttaagtcaaagtttataaaaggacatgagaacatagcttttatgaaaaaattagttttgtcaagtttagaggttttcaaatattttaaattcaggaaataaaataacaaaaagacaaaagaaaatggttgaacaacttagaaaaggtttgttaaaattcatcttataaaacaatctacatgtaaaaagtgggctaaaatttgaaagagattatttaggttttccataaattaatccagaaggggtaggaagtcttaagaatgaggaaggacaggaggaaggggaggtcatcctgacactgcagaggcagaagtgcagctgaaggtatgaaggctaagaggggaggggagtttgagtgctgctgcctggctgtcagagcagaggagggtcctgggcaccagacttgaggaagggatgaaaatgctgggcagacctgtagtgggcccttgagatggcagatagtggtttccagagagagggccattgttttccagtgcccagcactgagcagagagagttttgggcagtgtaaaaaaaaaaagagaacttacctctttctcgttttagaaaaagaacagtctaagaatatcagcagggaaactctcagtgcttcaaggggttaaacgcccttttggctttcttgtgttggtttcatcatagaggaggagaaacttcttggaagtgttcctaaaaacacaacacgtctgcttctcctttcaaaaaaggaagtgctaaaacacgaacactctagatccaaatattaatacggatgtctaaatgcttccgttttccaaggggcagaaagctaaaggttgtaacctattcatttcagtcaaagttggtgaaagggaagcaaaggaactgggtggggcttggaaggatgacgaagctcaagctcattggccagcaacctctctcctgggggcgggaggggtgagcatacgtcattgctttggcttctataaaatgaggaggactcaccgagtgtgaagagtccttctggtgattgcagctgagagcacactcacgacgttctgcaaggattctctgattatgattctgaagggaaaagcgatggaatggacagcagagattgtaattttctttatcttgaattacggaagaaagtatctaggacagaaatccacgacaagtccttggaaccagcagatctcttcgttcacggagacgttgacgtattctctattgaagaagattcttaccttcttactggacaaggttttgtcagttctgcgtgactggattgtccgggagactctgaggaaactgatgtcacatgtttttccaaagaagatgtttctggaaccaacaactgtgattgtggtttgaggacttctgagagttccagtacaggaaataagcagaacatcagctggaggctaaacggatccagacttcactcttcacttcccttcctattcagtctattgtgcctgctgactgagaagcttggctggtatgtgagcaaataaacggaactattcagaaggagatgttgacatattctgtattgaagaagatccttatcttctcacctgacaaggttttgtcagttctgtgtgactggattgtccggaagactctgaggaaactgatgtcacatgtttttccaaagaagatgtttctggaaccaacaactgtgattgtggtttgaggacgcctgggagttccggtatgcgaaataagcagaacatcagctggcggctgaagggatgcagcctccactcttcacttcccttgccattccatctattgtgtctgcctgactgagaagcttggctggtatgtgaggaaataaacggaattataaacaaggagattgtttctcatctacttcattctgttgtggcttttctattttggggttcagggtgtgtgacaaggaccaaggagatgaaaggtttcatgatggagaaagcccaggcaatcagattgaagagctatccacagggaatcttggctgctgaggggctgcaccctgcaacggactgaccatatgacagaaaagggttttaaaggctcaacttctggactgagaacccagagtaatttgggaacctcctctgtgaggagatatgaaagctgggaatcatgacatccctaggaatggaaggcacatttcctgatggaaggggtgctttggaaaacaggagcagagtagacacagcagccttgtggatacgggtgggcagcatgcatgggtgatgtgaacgtggagtgtttgtgatcgaaactcaaaatgtctgacaaagtgaaaacctagaaaccacaatgaggaggaagagtttgtgagggcaatcactctccccatgtgtgaaaatcgggggctcttaaaatctcatctggagaggtgcagtctaccaaactctgggactttagcctccccttttaaaaaaccgtgcatcaataccaacgtccgaaaccacagaaataacacctggcttgcatggagacaaggacaaaaagccgtcatgatgagttgttctgctcacttgctgcctctgttcagtgcacaggatattgtccacccactagcaggctactgcaagagaagtgtgcaatatgttccctatgtgccatatatgtgccatatggcccatatgacaactgagtcagaaaatatctgatgccctcagagttacactccacctggagcttgcccccagccatccaggacctaggctccctaccctgtccaattttctggtgttttgggggcttcattctctaaggtgtgcccactctttactcaaaccaaaacacccacatattcctgcccatgaacaaccaatcaaccacttctcagttccacatcctgctgttgggtctctagtggtgacactgtaactcccaggtcatagtggtgacactataacacctagctaaattgatgccttgtctctaggaggccatgggctcctgcaggtctcatctgactctctgtagccttccctgacaatgctcacaatacccaagccagagccacattgacagcaagctgctctcatcttacctttgccagacctggccactggaaaaggctgaccctcatcctgcaatgcctatacctccaacctttgtctcaagctggtgtcctggagggacttctaagcagaaaacagattcagactcccatcctctcctgaatggcctcatatccaattctcagaccctcagccttcattgtaaggacacttcatccatgcccttgagtattctgtctgcactgtgtattctgcaatagattctcctccctctgcgaccctcaactccttccgcagactttttgttttcttgatcatctaccatagtcttccactgggacactgccaagcccattctggagagtgagttgtgcaagtacactgccccccatctacctttcgggaggtgtatacacccttctttctcccaggtctggaggctttctattttcatcctgaggcatctccacctgctcttggattcttcaaattgacaaccaccagttaacaagaactatgtgtcaccaaatagccaaacaatggcaattacaaaaataaaattaatagctgtaacccccattagcaaggatacacaaatcaaatcagggatagtgggtgaggaagtctgcctaacattcaaggaaggattctgaagtgatacaaaatcattgcctttgctatctttagaatggacactttcagccaggcacagttgctcagcctgtaatcccagcactctgagagccccagttgggtggatcacttgaggccagcagcttgagaccaccctgggcaatgtgcagaaaccccaactctactaaaaatacaaaaatagccagttattgtggcacatgcctgtaatcccaactccttgggaggctgaggcacaagaatcacttgaatctgggagccagagtttgtaatgagcgaagatcatgccactgcactctagcctaggcattagagtgataatctgtctgtggaaaataaaaacattcctcttcaaagttttcttctttaaatcataaatgttggaattaatatatcctctttgaaactcactttcttcaagcttctttatttgatggtagtaaatctttgttaagctttatgaggcaagagtaatggaagaagcatattatatatatttatactctaacctcagtgcttgttctagcaagctcaggcatgcgtgaatgtgcccaggcatgttccagcccataccttatatcctttccttattgggaaatgctgttactcctataagcattcttgtaagcaacttcctctttttctttgtctccactatctttacctattgaggacagttttaggttcttagccagttggatgtagcatagactgtgaggtccaaccccagccaatggagatagcacacagcagtagcgacctcatgcttaacagataaatattcctgtctccctttgtttggggtgctctcagctgatgagcaacaccctttctaaagaaattaaagttgtcttgctgagaaaacttttggtctaaatgctgattcttccttgcagcactgaagaagaagcaattatttccaacactttctcatacacaaaaaaagaagaaggtggaagaaaactttcttgtgcaccctatccctcactcagaaagacaacagaaggctcctagtggcaagccctagaggattcatttcttttgggaaccctcttggctgggatactaggactcaggtcaaactcagcattttcagtgtgtgggaagtgtgcttgggtttcactgttacttccaataatgtgatttggtccttggggttcaccaaattttggtatggagtggtgaaccctgttaagtttaagtgtctataaaattaacaaagcaaaataaccattctgccccatggttcagagaccaaatattgtgtaggaaatgctttagcgagagaaacagagaagaataaaaaatgtcctcaagcgctgcattatttcttgttatcgtccagatcttagaggaaaggctttcattttccctcattcagtatgatattagctgtgcatctgtcatttatggcttttattatgttggggtatgttccctgtgtatgtagttttttcagggtttttgttatgaagtgatgttgaactttatcaaacgtttttcagtttcagttgaaacgatcatatgctttttgtccttcattctcttgatatgatgcatcatgttgatgatttccatatggtgcactgtccttgcatcctgggcatgaattccacttgatcatgacaaatgaatttttaatgcattcttgaattccgtttgctggtattttgttgaggatttttgcatcaatattcatcagagatattggcctgcagtttctttttttttcttttttctttgttttgttgtttgtttgtttgtttgttttgatgtgtctatgtctggttttggtatctgggtagtagtgttccatccccttttattttttagaataatttgaataagactggtgttggttctttaaatatttggtagaattccgaagtgaagtcattgggccccgggcttttctttagtggaaggctgtttattatggcttcaatctcgttacttattattggtctattcatgttttgaatttgttccttatttaatcttggtaggctgtgtgtatctaggaatttgtccatttcttttagattttcaaatttattggcacataattgcccattgtagcctctaatcgtcatttgagttcctgcagtaccaattataatgtctccttcttcatttttgattgtatttatttggatcctgcccctttttttcttacttaggctgcctaataatttcttaattttgttgaactttttcttttgtttgtctcgctctgccaccaggctggagtgtagtggtgtgatcttggctcactggaacctccgtctcccaggttcaagcaattctcctgcctcaccctcccaaatagctgggactacaggcaagtgccaccactcccagctaatttttgtatttttagtagacacgggttttcaccatgttggccaggatggtctcgatctcttgacttcataatccacctgcctcagcctcccaaagtgctgggattacaggcatgagccactgcgcccagcctaattttgtttaaattttcaagaaatcaacttcttctttcattgatttctgtattttttatttccattttatttatttaaactctaagctttattctatcttcttctcattttagctttggtatgcttattgcctctctagctctttaatgtgcattgttagattgtttatttgaagttcttcctctctacaccataagacgtaagcatgtcctcattatgtcataagatgtaaccacttacagctataaacttccttcttagttctgcttttgctgtatctcataggctttgttatgttgtgtttccattatcaattgtgtcagaaatttttcaatatttttcttaatttcttcattgagcaactgatcatttgggagcatatttttaaacttccatgtacttacatagtttccaaaatacctcttgtgatcaatttctagttttattccactatggttcaagaagatgcttgatattatttcaattttttttcacattttaagatgtgttttgtgacctaacatatggtctactttttttttttattaaactttaagttgtggggtacatgtgtagaccgtgcagttttgttacataggtatacacgtgccatggtggtttgctgctcccattaacctgtcatctacattaggtacttctcataatgctatccctcccctaacctccaccctctgacaggacctggtgtgtgatgttcccctccctgtgtccatgtgatctatttttgagaatgatccatgtggattagaatgctgtggaaaagactttggattcctaatatccagggagggagacgatgatattactttcaatatcacacgggtgtacacactctctgtgacattgttcctaatatccagtggaagagaggatgatataacacccagggagggagaggatgatattactcttaatattgcagggtgtgtacccatgcctatgatattgttcctaatatcaggagggggagaggatgatattactcagaatatggcagggggtgtacacacactctgtgacatggttcttaatatacaggggagaatgggacaatattactctcaatatcgcagggggcgtacaaccctgtgatttgttcctaatatacaaaaggggacagtatgatattgttcctaaaatcgcagaaggtgtacaacgccctgtgatattgttcctaatatccagggcgggagaggatgatattacccccaatatcacagggggtgtgcactttccctgttacattgttcctatgatccgagtggggggaaatgacattagtcccaatatcgcaggatgtgtacactactcccccatgatattgttcctaatatcaagggggagagaggaggatattactcccaatatcgcaagggaggtacatcctccatgcaatattgttcgtaatattcaggaggagagaggaagatattactctcaatatcgcagaaagtggacacccaccctgtgatgttcttcataatatccagggaagcagacgattatatgactttcaatatcgctgggagtgtacatcccttttgggatattgtttctaatatccaggaagggagaggattatattacttccagtattgcagccagtgtacacatttcttgtgatattgttcctaatatccagaaagggaaaggatgatattactcccaatattgcaggtggtgtacacccccctctgatattgttccttacatcaaggaaaagaaagaagaatattactcccaatatcgaagagagtgtacacccctcctgtgatattgtatttaatatccatggggaaagaggatgttgttactcccaatatcgcagggggtttacacccacactgtgatattgttcctaaaatccagtgaaggagaaaataatattgctcccaatattgcagggtgtatacaggccctcccccgttatattgctcctaatatccagcggtggagaggatattactttcaatttttgcagggagtgtgtaccccctctctgatatttttctaatatcaaggatgggaaaggatgccattactcccaatatcgcaggaggtgtacatgccctgtgatattgttcctaatatccagggaggtagaggatgatattactttcaatattgcaggggctgtacaccctctatgatgttgttattaatatttaggttgggagaaaatgatatttttcctaatatcctgggaaggaaaggatgatattactgtaaatattccagggagtgtacaccttcctaatattctaatattgttcctaatatccaggggtgggagaggattatattactcccaatatcgcagtgggtgtacacccctcctgtgatgttgtttctaatatccaagcgaggagaaaatgatatcactctcaataccgcagggggtgtacaccttccccatcatatcgttcctaatattcagagggaaagaagatgatgttactttcaatatcgcaggggttgtacacaacccctgtgatatttctcctaatatccaggaagaaagaggatgatattgctcccattatagcagacggtatacgcctccctgtaacattgtttctaatatcaagactgggagaggatgatatcacttccagtatcgcaaggggtgtacacctcccccgtgatattgttactaatatccagggggaagaggataatattactttcaatattgcaggggctgtacacccccgtgatattgttgttaatatttaggttgggagaaaatgatattagtccaaatatcgcagagagtgtacacacttccgataatattgttcttaatatccatgggggagacgatgatattacacccaatatcgcagggggtgtagtctccccttgtgatattgtccctaatattcagggaagtaaacgatgatgttagtgtgaatattccagggagtgtacaccccctttgtgatattgtcctaatatccgcaggagagaagataatattactcccaatatcgcagggggtgaacacaccccctgtgatattgtttctaatatccaagcgaggagaaaataatattactcccaatgtctcaggggatatacaccttccctatgatattgtttctaatattcaggtggaaaacgggtgatattactcctaatatccaggaagaaaggggattatgttactccccttatagcagggggtatacacctcccctgtaatattgttcctaatatcaaggctgggatatacgtggggggaaggatgatattactcccaatatcacaggggttataaaaccttctgtgatattgctcctaataaccatggcggaagaagatgatattactcctaatattgcaggaggtgtacactcccccattatgttgttcctagtatgcagaaaaggagaggatgacattattgccaatatcgcagggtgtgtacaccacccatgatattgttcctaatatttagagggacagaggatgatattactcccaatatcgcagggggtgtacacgcatcccctgtgatattgttcttgaaatcgaggggaaagagaattatatttctctaaatattgcagagggtgtacaccgccccctgtgatattgttcctaatagccgggggcggggggagataattaaattactttcaatatctcagagagtgtacatcccccttgtgacattgttcctaatatccagagcaaaagagaatgatattcctcccagtatcgcaggaagtgtacatttaacctgtaatattgtttctaatatccagggggaagagaatagtaatactcccaatatcgtaggggttgtacaccttttctgtgatattgttgcaaatatttagaagagagagagaatattactcgcaatatcacagggaatgtatacttcccctgtgatattgttctaatatctagaaaaagagaggataatattactcctaatattgcagggggtgtacacccccacttgtgatattgttcctaatataaaggaaggtcgaaaaacaaacggggagcccagggggaaggaaggcaggcgaggaagaggcagcgccggggcgccggagggagcagccgggccgcggaagcgcgagcacgagaccggtcgcggtcgcagtcgcatttttgccgttgtcgcggccgccgccgccgaggcttacccggggatgtctgagcccgcgcctcgcggcccccaagctccacgctgcgcccgctgtcccggcctctaagggccgccacgtccctgcggcgcgcgcaggcagaaagcggcttcgtgccggcggagggggcccgggcgggccgggaaaggctgccccaggccccgcgcctaccccatcaccgcggccggcgccgggccgggaggatgagcggtgtggggctctgaagcatggagggggttttgtacaagtggaccaactatctcacaggttggcagcctcgttggtttgttttagataatggaatcttatcctattatgattcacaagatgatgtttgcaaagggagcaaaggaagcataaagatggcagtttgtgaaattaaaggtgacagctttggaggggaccacccttgattggatacataaattctgttcattcagcagacaacacaagaatggaattaatcattcctggagagcagcatttctacatgaaggcagtgaacgcagctgaaagacagaggtggctggtcgctctggggagctccaaagcatgtttgactgatacaaggactaaaaacgaaaaagaaagaagtgaaaccagtgaatcgctgaaaaccaaaatgtctgaacttcgcctctactgtgacctcttaatgcagcaagttcatacgatacaggaatttgttcaccacgatgagaatcattcatctcctagtgcagagaacatcaatgaagcctcttctctgcttagtgccacgtgtaacacgttcatcacaacgcttgaggaatgtgtgaagatagccaatgccaggtttaaacctgagatgtttcaacggcaccatccggatcccttagtttctcctgtgtcaccttctcctgttcaaatgaggaagcgttctgtcagccaccctggttcttgcaccagggaggagtagccactgtataaaagaaccagtatctgcacttcaccgactctcccagcgacgccgaagaacctactcagatacagattcttgtagtgatattcctcttgaagacccagatagacctgttcactgttcaaaaaatacacttaatggagatttggcatcagcaaccattcctgaagaaagcagacttatggccaaaaaacaatctgaatcagaagatactcttccatccttctcttcctgaagaaactgtagtgtccaactttctctaagtattgctatgcaaaagctgctgtaattgaactattgttatagggagtagttttttcccttaggactctgcactttatagaatattgtaaaacagacaaacaagaaaacaaaccacatacttttgaagcgtgttttatctttatatagtttgtttgcaagagtattttcctaataacttcacagtatgaatgtgcatcttttttttctttttttaacaaatgatggtgtaacattttgacatccataaggacaaatgtagatatttttctaaaaaaccgtgaggggactgacagcttggtcagggtgtattgtagcttataaacatgaaatcttacaaggtttcagtttgacagaagtgtgatatatgtaacttgtgccatggaccaaatggtcactttaccacagctaaaaatgagttatgatagcagcttgatggtgattgcattgtattcctttaatcaaaaaggaaacgcaatattctaagtatctttagcccaaataccatgacatattgagcatctttaaataaccagactgtattgtccttcatatgtgaagttgacactactgatttgtcaataccaaattttgggttaaagtgtttaatttttatttatttattttcttgttgcctcaaaagatgattgcattctaacttttgtgacctaccaaatttaagatgtgtatacattgttctttacgttgttctagaaaagagattttaatgctgtagtgacttagctcacttacatcagagaaataaacaactttcaatggaaaaaaatatatataaaggaaggaagaggatgatattacttctcatatagaaggggttgtacaccccccttgtgatattgttcctaatattcagggagggagaggattatattactcccaatatagcagggagtgtacacccccccccccgtgataatgttcctaatattcagggaagcagaggatgatattactttcaatatcacagggggtgtgctgtccccctgttatattgttcttaatattcaggggggagaggatattattatgcccgatatcacaggagaagtacaccccacaagtgatattgttcctaatatccaggggtaaagaggatgatatcgcaggtggtgtacacccctccccgtgatattgtttctaatataaagaaggagagagcatgatattactcccaatatcgctggaggtctacaccccccttgtgatactgttcctaatatccaggaagggaaacaatgatattgctgtgaatattccagggggtgtacacccctttgtaatattgttcctcatatccagggggtagagaggatgatattactcccaatatcgcagggggtgcacggccccactgtgatattgtttttcatatccaggaggggagaggatgacattactctcaatatggcagggggcgaacaccccctgtgatattgtgctagttaggttgggagaaaatgatattactcccaatatcgcagggggtgtacaccgctcctgtgatattgttcctaatatccatgacgggagaggatattactcccaatatcgcagggggtgtacctctcccctgtgggattgttcacagtatccaaaagggaagaggatgatgttactcccaatatcacagggagtgtacaccaccattgtgatattgttcctaatagccagggaagaaaacgatgatattattgtgaatattacagggggtgtacacaccccctgtgatatggtttttaatatacaggttggaaaaggatgatattactcccaatatcacaaaaggtgtacacacccccccatgatattgttcttaatacttcggtggggagaaaatgatattagtctccatatcacaggggtgtgaactcctccggtgatattgtttttaatatcaagaggggaggagatgatattgctttcaatatcgctgggggtgtacatccctcctgtgatattgttccttatatccaggcgaggggaaaataatattactcccaatagtacacaccccatgtggtattgttcctaatactcagggggaaagaagataatattactttcaatatcacagggtttgtacacctttcctgtggtatagttttcaatatccagggggaaggtacatgatattactcccattgcagcaaggggtgtacacacctcctgtgatattgttcctaatatccagaagtggtgaggatgatattactcccagggggtgtacaccccacctatgatattgtttctaatatccaggggaaaagagtgtgatattatgcccaatatcgcagagggtgtacacttatcctgggatattgtttctagtatttggggagggaggagaggatgctattattctcaatatcgcagaaattgtacacccccgctgtgatattcttcataataatcagggaaaaagaggatgatattactaccaatattgcagggggttacacttcccctttggtagtgttcctaatatccaggaagaaagaggatgatattaatcccattttccaggaagtgtacacccaccgtgtcatgttgttcctaatatccagcagggaagaggatgatattactcccaatatcggagagggtgtacacttcccctgttatattgtttctaatacccagggggaagaaggatgacattactgccaatatcacagggtgtgtaccccaccctgctattgttcctaatattcaaaaggaaagatgaaaatattactcccaatatctcagggtgtgtacacctctcctgtgatatcgttcctaatatccacaggaagagagaatattactctcaatattgcaggggggtgtacacccccctgtgatattgttccaaatattcgggcggggagaggatgatattagtcccaatatcgcagggggtgtgcaccaacctgtgatattgttcctaatatccatgcgggggaggacgatatcactctcaatgtcgcaggaagtgtacacctctcttgttatatttttcttaatatccaggagggaaaagatgatattactgccaatatcgcagggtgtgtccaccccccttttatattgttcctaatatccaatggaaaagaggatgacattgctctccatatcccagaaggtgtacaacgcccctgtaatattgttcctaatattttgggggaagagaggatgatataacttataatatcacaggaggtgtacaccacccctatgtattgttcctaatatcctttaagggagaggatgatattactcccaatatctcaggtggtgcctattccccctgtgatattgtttttaatatccaggggaagagagtatgatattacgcccaatatcgcagggggcatacaccctctctgagatattgttcataatatatagagggagagaggatgatattacttccaatatcagaggtggggtacaccccccggttatattattcttgatatccaggaggggagaggttgatattactggatatatagcagggagtgttcacatcttctgtgatactgttcctaatatccagaaaagtagaggatgatattactcccaatatcgcagaacgtgtacacctccctgtgatattgatcctaacattcaaaggggagaggatgatattactcaaaacatcacagggcatgtacactcccctgtgatattgttcctagtatccagaagggagcaagataatattactttcaatatcgcagggggtgtacacccctctttggtatgtttcctaatatccagaaggaaagagggtgctattactttccatattgcaaggggtgtacacccccctgtggtatggttcataatatccagggagggaaagggtgctattattccccatatcgcgaggcatgtacaccctgctgcggtacggttcctaatatccagggggaaagaggatgctattacttcccatatcgcggggtgtgtacacccccgtgtggtatgttttgtaatctccgggaacgaagagggtgttattacccctcatatcgctggaaatgtacactcccctgtggtacggttcacaatatccaggggattgagggtgctattactccccatatcgcggggggagtgcacctccctgtggtatggttcgaaatatccagggtaagagagggtgctattattccccattttgcaggaggcgtacacccctctatggtatgttttgtaatatcccaggtaaggggtgctattgagagaagagagcaaaagaccccccccatattgttctgtattattttatactcagtacctgttttaagaagaaacaaggaagcgaaaccaaaggcaggcagcccggcgccaggcaccagatccaaaaccagacccgaaaccaggcctgggccttcctgaccttagcctgaaagttaaaattcaacccatgacctagcaactgatgttatccatagattccagacattgtatggaaggacattgtgaaatttcttgttctgttctgtttcactctgagtactggtgcatgcagcccttgtcacatacccactagattgctcaatcaatcatggccctttcatgtaaaaaccttagtgttgtgagcccttaaaaaggacagaaattgtgcactcaacaagcttggattttgatactctagtctgctgatgcttccagctgattaaaagccacttccttcactacctcggtgtctgtgggattttgtccgcggctcctcctgctacactgtgactccccttatagagaggggtgtacacccccctttggttcctaatatccagcgggggagtaggtgctattactccccatattgcggggagtgtacacccccttgtagtacggatcgtaaaatcaaggagggagagaaggtgtaattatccccatatcacagggagtgtacacccctttgtggtatagtttgtaatatccacgacgggagagaatgctattactccccatatcgtggagggtgtacaccgccctgtagtatggttcgtaatatccggaaggggagaggttgctattactccccatatggtgggaagtgtacacccccatgtgatatggttcataatatccaggggggtagaggatgatattacccacaatatcatagaaggtgcacacccttttgtgatattgtccataaaatccagaaggggagaggatgatattacttccaatatcacagggggtgtgtagccccatatgatattgtttgtaatatcaaggtagggagaggatgctattccttacaatagctcaaggggtgtaaccttcttgtgatattgtttgtaatatccagaaggggagaagataatttttttattttaaaagtaaactttaatgtcaaaaatgcaaacttgagaagggcagaaagatcaaacagaaggctgccacttcacaattggagggttgcacagtggccgggcagaggcgctcctcactccccagacggtgaggcagccgggcagaggtgctcctcacttccgagatgttgcaggagccgggcagaggtgctcctcacttcccagaacagggggctgccgggcagaggtgctcctcactgcccagacggtttgcaggcctggcagaggcactcctcacttcccaaacggagcagcggcaagccagaggcgctccacacttcccagatggtggggcagccgggcagaggcgatcctcacttctcagagggtagggcggcccagcagaggcgctcctcacttcccacatggtggggcggcaggctagaggcgatcctcacttcccagacggtggtgtggccatgcagaggtgctcctcacttcccagatggtgtggccgccgagctgaggcactcctcacttccctgacagtggggcggctgggcagaggcgctcctcacttcccagacacttggactccgggcagagactctcctcatttcccagatggtggggctgccgggcagaggcgctcctcacttcccagacggttcagaggccgggcagaggcgctctggggagaggataatgttactcccaatatcgcagggggtgcacactccctgtgatattgttccgaatatccagagggggaaaggatgatatagctcccaaaatcgtggggagtgtacacccccctgtgatcttgtttgtaataccaagaagaaaagagaatgctattatttccaatatagcagggggagtacaaccccctgtgatattgttcgtaatatctagggggagagaaaattatattagtcttaatatctcaggggacgttcatccccctgtaatattgttggtaatattcagaatggagaagatgatattgttcttaaaatacaggaaaaaatatgataatattacttccaatatcgaagggggtgtacactctcctgtgatattgttcccaatatccagaatgaaagaggatgctattactcccaatatcccagggagtgtacacccctttgccatattgttcataatatccaggggaagacaggataacattactcccaatatcaccgggggtgtccacccactagtgatatttattgttcatcatatccagaaaaggagaggatgatattactcccaatattgcaggtggtgtacggtccctgtgatattctttgaaatatctagaaaaggagaggatgatatcactccgagtatcacagggggtgtacacccccctgtgatattgttcgtaatatccaggggagaaaaggatgatataattgccaatatttcaggggatgtgcacctccctgtgatattgtttgtaatatccaggggtggagaggatgatattactcaaaataacgtaaacatcctgtgtgtacatcccctgtgatattgtttataatatccaggggggtagaagatgacattacccccaatatcacagagtgtacacacccctgggatactgttcataatatccaggcgggaaagaatgaactacttccaatatcgcaggatatgtacacccccctgtgatatatttcctaatatttatgtgggtaaggatattacccccaatatcacagaaggtgtacatcctctttgtgatattattcctaacatccaggaaaggagagaatgatattactcccagtatcgcagggggtgtacaccacccctgtgatattgttgctaatatccagggggagaggataatattactcccaaaatcacaggggacgtacactcctcctgagatattgttcctaatattcatggggaaaagaatgctactactccaaatacagcagagggtgtacaccatccccgtgatattgttttttatatccaaagggtgaaaggctgatattactcccaatatcgcagggggtgtacaggccccccatgatatcattcttaatatccagggaggcaaagaatgatgttactcccaatattgcaggctgtatacaccccccgtgatattgttcctaatatccagagtaagagaggatgacattgctcccaatattgcaggggttgcacgcacgccctgtgataatattactcccaatatcaacagtgggtgtacactcctcctgtgatattgtttgttatatctaagaaagaagaggatgatattactgtcaatatcacagaaggtgtacagccccttgtgatgttgtttctaatatccagcggtgagaggatggtattactcgcaatattgtagggggtgtccaacggccctgtgatattgtttctcatattcaaaaaggaaaagaataatataactccaaatatcgcagggtgtgtacacttccctgtgatattgatcctaatatccaggaagagagaggatgatattaatcccaatatcacagggggtgtacatcgcttctgtgatattcttcctaatatccagggggggaggggatgctattactcttaaaatcgcagggaacttacactcccactatgatatttttcctaatatccaggaagggagaaaatgatattactcctaatatcacatatcacaatgggtgtacatctccccgtgatattgtttctaatatcaaggatgggagaaaattatattactctcaatatcgcagggggtgtgcacacctcctgtgatattgttcctagtatccagcggaggagatgatattactttaaatattgtagaaggtgtacaacccccctttgatattgttcctaatatccagggggaaaggagatgatattactcctaatatcgcaggggctgtacaaccctatgtgatattgtttcttctaatatccaggggtggagaagataatattactcctaaaatcgaaggggacatacactccccctgtgatatttttcctaatatccagaaggaaagaggatgatattactcctaatattacaagaaatgtatacctgtcctgtgatattgttcctaatatccagaggggtaaatgattatattactcccaatatcgcaggggtgtacaccttccctgagatattgtttctaatatgcagtggaggagaggatggtattactcccaacatcacaggagatgtaaactccccttgtgatattcttcctaatgttcaggacgaaggagggtaatattactcactgtattgcagcagggggtgtagagccccctgtgatattgtttttaatattcaaggttggagaaaataatattccttccaatatcgcatggggtgtacacccttctttttatatagtttctaatatctggggggagaggatgatattactcccaatatcgcagggggattacacccccactgtgatattgtttttaatatccagggtgggagaggataatattactccaaatatcccagggctatacaccctccgtgtgatattgtttctaatatccagaggaagagaagatgatattactcccaatgtcacagggtgtgtacaggccttctttgatattgttcttaatatccatgagggagaggatgatattactcccaatatcgcaaagactgtacaccctttctgtgatattgcttccaatatccagggagggagaggatattacactcaggatcacagggggtgtacaccccaacctgtgatattgtttctaatatctagggaaaatgagggtgatattactatcaatatcacaggaggtgtacactcccttatgatattgttcctaatatccaggagaatgacaggataatattactcccaatatcgcgggtggtgtctccccccactccgtgatattgttcctaatacccagagggggagagaatcatattactcccaatatcgcaggggatgtacacctacatccggcggagtagaagataatattactcacaatatcgcaagaagtgttcaccttccctgttatattgttgctaatatccagggagtgagaagatgatattactttcaatactgagcgtgtacactacccctgtgatattgtttctcatatccagtagaggagaaaatcatgttactcccaatattgcaggggtgaacacctcctttgtgatatttttcctaatatcaggaaagggagagtatgatattacccttaatattgacaggggtgtacacccccctttgatattgttccaatatccaggggggcagaggataatattattcccaatatcgcagagggtgtacaccccccgtgatattgttcctaatatccagagaaataaaaaatagtattatttccaatatcacagggcgtacattttccctgtaattttgttcctaatatctggggggtggggtggcaggataatattactctcaatattggagagggtgtacacccccctgtgatattgttcctaatattcagggtgggagagaatgatgttactcccaatatctcaggagtcgtatacacccccttgtgatattttttctaatatccaggaggcagaggatgatattgctcccaatatcgcagggggtatacacccgagctgtgatattgtttctaatatgcaatatgggggaaggatgattttactttcaatatcgcagggaatgtacactttccttgtgattttgttcctaatatccaggggtggagaagatgctattactatattactcctcatatcgcaggcggtgtacaactccctgtgatatggttcagaatatccagagtgaaaaaggagggtgacattactcccaatatcgggggggtgtacacccctttgtgatgtggttggtaatatccaggggggcagatgagggtgatatcactccccatatcgtggaaggcgtccacttttttgtgatgtggttctttatatcccgaggggagaaggtgatattactccccatatcgcgaagggcatacacccccctgtgatatagctcataatattccggagagtggaggaagatactatgccctatatcgcgggtggcctacaaccccctatggtttggcttataatatccaggggggagagggtaatattgctccccatattgtggagacgtacagccccctgtgatatggtttgtaatatctttggggggcgagggtgatattactccccatatcgcggggagcatacacccccgtgatctggttcatagtatctcaaaggaagaagttgatgtgtacaacttaagggaaaaagttgaagtgaagtgtacacacgccctgtgacgtggttcataatatccaggcgggggagaggagagtgatatttactccccatatcgcgggtgttgtaaactcccctgtgatatagttcataatatccaggggagagaggagggtgatattgctcctcatatcgcgaagggtgtacaaccccctgtgatatggttcataatatccagaagggtagaggacgatgatattactccacatatcttgggaggtgtgatatggttcgtaatatccagcgatgagagaatgatattactccccatatcgcaaaaggtgtgatagggtttgtaatatcctgagggggagagggtgatattaatccctatattgcagaaggactacaccctcccatgacatggtttgtaatatcccagggggtagagtgtgatattactttccatatcacagggggtgtgatatgattcgtaatattcgaagggggagagggtgacactactctccatatcacggggtgtgtgatatggttcttaatatcccaggggttagaggttgatattaccccctttttggggggtgtgtacaccccctgtgatatggttcgtaatatcccgggggagacagggtgacattattccccatatcgaggggatcgtacaccccctgtggtgtggttcataatatccctagggggagatggtgatattactccccatatcagggggcgtgcactcttctgtggtataattagtaatatccagggggcagaggtcgatattcgtttccatatcatgaagggagtacacttccctgtgatatggttcctaatatccaggggggagagggtgatattattccccatattgcggggggacatacaacccctgtgatatggttcataataaccagaaaagaagagggtgatattaatccccgtattgcagagggcatacaccccccctgtgatatggtttgtaatatctaggggaggaaaaggtgatattactttccatattgctgggtgcagacacccctttatgatatggttcataatatccaagttggagagggtgatattacttcccatatcatgggaggtatacccttccctgtgatatggttcgtaatatccagaaggggagagattgatattactccccatattgtggggggcgtacaccttcctgtgatacggtttgtaatatctaggggatatagtgggtgatattactcaccatatcacgggggttgtaacatggtttgtaatatccaggggaggagagggtaatgttactccccatatctcggggcatgtacaccctcctgtgacatggttcgtaatatccaggtcgggagagggtgatattactcctcatattgccgggggtgtgttatggttcataatatcctggggaaggaggctgctatcactctccacatcttgggggatgtacactctcctgtgatatggttcataatatccagggtgggtgagggtaatattactccccatatcgcgggaagtgtacatacccctgtaatattgtttgtaatagaagagagggtgatattactccccacatcgcgggtggtgcccacccccctgtgatatggtttggaatatccagggggatgaggagggtgatattactccccatatctcggtgggagtacatccctctttgatcaagttcataatatccaaaaggaaacaggagagtgatattactccccatatcgccgggggtgtacacgggagggggagtacacccccggcgatatggtctgtaatatccagggaaggagaggagggtgatattactcaccatatcgcaggtggtctacatttacctgtgaaacagtttgtaatatccagggggggaaatgagaatgattttttttttttgagtctcactgtgtcacccaggttggagtgcagtggcacgatcttggctcactgcaacccccgcctcctggactcaagcaattctcctctcccagcctcctgaatagctgggactacaggcgcaccccacaacgtctggctaatttttgtatttttattagagacggggtttcaccatattggccaggctgatctcgaactcctgaccctgtgatccatccgcctcggcctccaaaagtgctgagattacagatgtgagccaccacgcatggcccaaggagaacgatattactccccatatcccagggggtgtatatccccctgtgatatggttcagaatatccggaaggaaagacagggatattacttcccatatcgcaaggggtgtgacatggttcgtaatatcccatgggggagagggtaatattactcttcgtattgtgaagggcatacactcccctgtgatacagttcataatattccggggagtagaggaagatattatgctccatatcgcgggtggcataagccccctgtggtttggttcataatatccagggaggagagggtaatattactccccatattgtggggacgtacaccctcctgtgatatggtttgtaatatcccagaggggagagagtgatattactccccatattgcagggacatacacccccctgtgatatggttcaaaatgtcttttttttttgaaggactggttctttatttcaaaaagacacttgtcaatattcattatcaaaacagttgcactattgatttctctttctcccaatcggccccaagtagaccacatcaaaggagagtacatattaagccaataagctgtaggatgtacacctaacagacctcctagaaaccttaccagaaaatggggacagggtagggaaagaaactttaaaagatcaacaaactgccagcccacggactgcaggggctgtcacagccagatggggtggccagggtgccacaaacccaaagaagcaaagtttcaaaataatataaaatttaaaaagttttgtacataagctattcaagatttctccagcactgactgatacaaagcacaatgagatggcacttgtagagacagcagcttcaaactcagaaaagggtaatgagatgagtttcacatggctaaatcagtggcaaaaacacaatcttctttctttctttctttctttcaaggaggcaagaaaagcaattaagtgctcacctcaacataaggggaacatgatccattctgtaagcagttgggagggggtagagatggaacaaaattttggtctcagaggtcttgccatcttaatttggtcacttctaatgaaaaaaataaaaaatagaaataacattatccaaaggtatcttaaagctgaaaacttgaacagcacattttttgttgttgttgtttggctaactcctcctggaaccacctttctggcttagctagtactttgtacagagcaatgaggcttcccatagtggagtctccctgggctctgtttggctctcagcaaggcaggcctataccttttcctctcctccatggagagaggaatatgcattaaggtgaaaaatcaccttccaaaagtgagaaagggattcgatcgctgcttcagggctgtggtattatatggaatgttttacaaaaggttgctacaaaacaacaaaagaggtaattacaaaatgtgtacatcacaacatactttttaaagacattatgcattgtgctcacattcccttaaatgttgtttccaaaggtgctcagcctctagcccagctggaatctccgggaagaggcggacagtttggtgaaaaagacacagggaaggagcgggcggcggaaggagggggcggcgaaaggagaaagcagccttccagttaaagatcagccctcaattaaaggtcagcttcgggcaggctggcctcaggcggagtctggttcagagggaggagcagcagcagggtgagactgaggcgttctacatctcattcaggtcaagcagagtctggtccagcatcctttgtgtacagaggtgctcccctttggtgcatttcagtttatcttccaagtcatcaattgtcttttccagcttggctaccgatctctcagcaaactcagcatgggtctccgcctcctttattttatcagtaagaatcttgatctcttcctcatatttgtcttctttttgagagtacttttcttcagcagcactcagacacttcaggttctggtccatcagtctaatctgctcatccatctctcggcaaagggattctgccagctcagctcgttcctctgtgcgttccaagtctccttcaatgatcaccaacttacgagccacctcttcatacttcctatctgcctcttctgcaatgtgcttagcttctctgagttggatttcctggagttccatcttttcttcatcttttaaggcccggttttcaataaccttcttacctctctcactctcatcagcagctttttccgcttcttccagcttttgcagggcagtagccaggtgctcctgagcacggtccagctcctcttcaaccagctggatcccacgttcaaggaggccacctcagcctcagcctgttcccgggcccacctttctccctcaacttctcgctggaggcgctcagctcgctcctctgcatcatctgcctgctgctgcagaacctggatcttgcgcttcaccgcctcgatggtggtgatcccagccatggtgcccacccagctactgctagagctccggttcctgcctcctccgatcggcgttgcagcctcctctcacccttacttccgcctcggttcaaaatatcttaagggaaggagttgatattactccccacatcacgggaagtttacatcccctggtgatatggtttgtaatatcccagggtggatagggtgatattactctccatatcgcgaaggagtactcccccctgtgatatggttcataatatccttggggggagagtgtgatattactccccatatcgcgagggccatatactcctttgtgacatggttcgaaatatcccggtgggggagggggtagagggtaatattactccccatacagcgaagagcatacgcccttctgtggcaaggttagtaatacttcagggaaaagagtgcaatattacttttcatattgcagggaacatacactcccctgtgacatggttcgtaatatcccgggggctgagagggtgatatttctccccatatcaccgggggcctacacctgggtgtgatatggctcataatatacagggagggagagggtgatattactccacataccgagtgaggggttacacaccctcgtgacatgttcgaaataccccaaggaggagacaatgatattactttccctgtcgcgggggctacaccctcccagtgatatggttcacaatatcccggggtggagagggtgatattactccctatatcaccggggggtgtacacttccctgggaaatggtttacagtatccccggggggagagggtactattactccccatatcacgttacatatcagggtacacccccacgtgatatggtttgtaacatcccaggaggaagaaaatgatattactccccatatcgcggtggcatacacccctccccgttaaatggttcataatatcttggggtggagagggtgatattactccccatatcacgtggggcatacaccccactatgatatggttcataatatcccggaggggagagggagatattactctccatgtcgcggggggcatatacacccctgtgatatggtttgtgatatcccgggggcggagagggagatattactctccatatcgtggggtcgtacacttttctgtgatatgattcgtaatatccagacggggagagggtgatattacttcccatattgcgggggcgtacacccctctgtgatatggttcataatatcccgaagaaaagagggtgatattactcctcatatcgcggggaacacacaccaccctgtgatatggtttgtaatattcagcgggggagagagtaatattactccctgtatctcggatggcgtacactcccctgtgatatggttcataatatccagaagaaaagagggtgatattactccccatattccagggaatgtacaccaccctttgaatatggttcgtaatatccaggaggggagagggtaatattgctcccaatatcgaaggaggtgttatacggttagtaatatccagagaaggagagggtgacattactccccacatcgtggtgggtgtgcacccacctgtgatatggttcataatattcaggttaagagaggtgatattgctttccatatcgccaagggtgtacactcccgtgaaatacagttcgtaatatccaaaaggggagagggtgatattactcccatatcgtggggggtgtacacccctctgtgatatggttcataatatccagggtggaataaggtggtattactccctgtatctcggggcatgtacatcgcctgtgatatgattcataatatccagaagaagagagggtgatattaatctccatattgctgggggtgtacaaccccctgttgtatggtttgttacactgagttggggagagggttacattactctcaatatcgagtggggcatacacacttatgtgatatggttcataatatcccagggaggagagggtgatattactccccatatcgcgggaggcatacaccccaatgtgatatggtttgtaatatctacatttttttttttgagacgaagtctcgctcttgtcccccaggctggagtatgatggccggatctcggctcactgcaacctcagcctcccgggttcaagcgattctcctgccttggtcccccaagaagttgggattacaggcgcacaccaccacgcccggctactttttgtatttttagtagagaaggggtttcaccatgttggccaggctggtctagaactcctgacctcagatgatccacctgcctcggcctcccaaagtgctgggattacaggcgtgagccactgcacctggcctggtttgtaatatctatgaagggggaaggtgatattactttccatatcacgggaggcgtacaccacgatgtgatatggtttgtaatatccagggggtatactgggtgatattactccccatatcgcggggagtgtatacccttttgtgatatggttcctaatattaagctgaggagaaggtaatattactccccatatcgcaggggtttttatatggttcataatattcaggaagagagagggtgacattactctccatatcacggggtgtgtactcccccatgtgatatggtttgtaatatccagggaaggagaggttaatattactccccatatcgcagggggtgtacacctctctgtggtttgtaatatccaaagggaagaggatgatattatcttcaatatcttggggggatacagtccccagtgatattgttcataatatccagagggggaggggatgatattactcccaatattgcaggtggtgtacaaccccctgtgatattctttataatatagagggggatgatgatattactcccaatatagtaaacaacctgtgtgtacaccccctgtgatattgtttataatatccaagggtggaaaggatgatattactcctcatatcgcagggggtgtatacccctctgtgacattgttcctaatattcaggggaggagaagatgatactactcctcatatcacaggggatgtacacccccctgtgatacttttggtaatatccaggggaggagaaaattatattattccccatgtcacagagggtgtacaccccgctgtgatagtgttcataatatccaggtgaaaagaggatgatattactccgaatatctcaggaagtgtacacccttctgtgatattgttcataatatccaaaggtggagaggaggatactactccccatatcgcagtgggtgtacacccccctgtgatatggttcataatatccaatgtaggagaggatgatattactttccatatcgcggagagtgtacatccccctgttatattgtttgtaatattcagggagaaagaggatactactactccccatatcacacggggtgtatattcccctgtgatatggttcctgatatccaagagatattataatcctctcttggattatgctacctctcatatcgcatggggtgtacacacactttgtgatatcgtttgtcatatccaaggagggagaggattatattaatcccaagatcacggggggtgtacaccctcctgtgatattgtttgtaatattaaggggggagaggataatattactcccaatataattaacaccctgtgtgtactcctccttgtaatattgttcataatatccaatgggggagacgatgatattactttcaatatcgcagaggatgtacatccctttgtaacaatgtttgtaatataaaaggcaagagaggatgatactacttccaaaattgcaggacatgtacaccccccggtgatattgttcctaatatccagtggggaagaggatgatagtagtcccaatatcgcaaagggtgtacacaccccctgggatattgttcctaatataaaaggaggagaggatgctattattcccaatatcacagaaggtgtaaaatcccctgtgatattgttcgtaatattcaggaggggagaggattatattactcccaatatcacagggtgtgtacacagggaggggcaagggccagaagcgggcgggaatccccatgtttgggcggacccagtttctaatggccagcatttgccaatcaaagcttaccagagaactctaaaagccagggctttcctgctagacaagactcatttctggaactgctttaaaaagaaacaaaacttcccaaggaccccttttcctctctgtctgcctaaaataatgttttaaaaactcctaaagcagctgaattcagcccccttcctgggggaatgtatagacggaactcccacctttcccggcatcccaaggccagagtatgtgaaactcctgggtctctatgtgtgtctgagcggctgctctgccaacactccacacagccctgtgtcctggacccaaggcccttatgacctgagctcaagaggggatctcctgatccatgggttgcaaagatccatgggagaagcatggtttctggggcggggtcacacgctcagtcactgtttccctcggatgccggagatggttcctttggctctctgccaatacagggtgaatcatcatccatccctcttttctttgttctcccgggtcaagttgtttgcctagtcagtcccaatgtgagaacctgaatatttcagttgacgcgctgacttcaaaatccccgggcttcgggaggcggagcttgcagtgagccgagatcccgccactgcactccagcctgggcgacagagcgagactccgtctcaaaaaaaaaaaaaaaaaaaaaaaaaaaaaagtccccgggcttttcttttcactcagtggaaggcagctgcttctaattggccatcttggcccgcccccaccacgtgaccttctgtaaaatgcctccactctccaggaacgctctcattatataactttgcctgaaaccaacagcacgctcattgcacatatcatgggctcatttatttcacttataaagaacctggccaaggaagagatagtgcctaaagtggccagtattctgaccgatatgttagaaaaatggtgtgccgaccaattcatgacatgtgtcccaaaactagcaacggaaattgtattcgccgtgttgaggtctctaatccagatgatgctcatctatgtactggaaaaggcagagtcctttcctgacaagctgctgaaactcttcagaaacatctcatatttcctgaagaagatgatgtctggacaagcagcacaggtcgttcagatttaactttctattcatatatccagcacgatattcgcacaattgtcacgaaaccttaccagttgatgagtcctgcacatttcctttaatttcaggaggaagagggtaatccggatgagttttctgacctactctgctgctgtgattaaacaaccaccaggaaattttgacgacactgttctcctgagctcctccctttcctccgggaacaaaacaattgaatttacaaaaataaagtgttatttgactggagtgaggtctcatgtctgcttatgcggtggctcgctgctcagaacagggtgagtctctgggttgtgtgctgaggaggggaggctctcaatctggagaaaacccactgcaggggacacctccatggggtctgagggactgaggatgaggagccggactgggtctagggaaggaggaggtttcagagggtgaaattctggcactaaagcctgggggtgtttgggaacttcctccttccgaagaagtttcagggagggataaagacaaaccctgggctccttgaggggcccttactaatttgagaggactctatcgggaaggagagtgacaatggcctccttgaggactgaggcccctgaataaatgaggcccagatacagtccatgggggatgagaccttcaagggtcacattttggttgggacagaggaaaagtgcagctctgcagccgcagaggaaaacccggcagtgtgaaagcgaccttggaggggccctgtgcgctctgaatgcgtctgagcccccatcccctgtccccgcctctctttctggattcttccagctcggctgtctccgccatcttctgagcgctccaccctgacttattcaagtttcccttctgccttccaagtactccaaaatctttcagatctgtgtccctacccctgtttttagcatgtgttggggctccaggtccctgaaggtttctggcctgaaatccacctccccagcggagtggactgcgttctagagactccacactccgcgaggttcccaggcccctgagggacaaccgagtggcctgcgcacttcagggctccacactcggcaaggtctttcaagcccttggggtccccttcttagttttttccacctttctgggctgcagtcactccataaatgctgggatctgatccccacccccactctcgtttcctcaattctgcgggctacacgctctggcaaggtcctccgggccctggatcccctccctctccctatgcccacgctcctagtcagcccttctggggtccactattttcaggaactaaccgttctcatggagccttgctaaccggaaagctgtgtggaagaaaggctttgaggatagaggtggagatttggctcttccatagtgccactcacccaccccaccatgctgccactgccagacccggacccctgtttcagaacaagtgaccagattcgctcctggacagccctggacactggccttttctctgaaaactactcaccctttctctagtccccacttcatgccagcctcataccctcttccttcccccacgctggcttccgggatcctcctctgctcagacaacctcttctgtgtcccacccccgtttttagaatgctttggggcaccaggttgggggaaggtttctggcctgatatccatctctttccaaactcccttcttcccttgaaaggcttcttgccttcagccccacttctggctccgaggtttcaggacaccctcctcttcatcctcattcttttgaccaccagctttttaggaattcgaacgtccctctcatcttcgtgaatcctgtccaggcatttgttgaccccttcatctgatacccctgacctcacattgccaaaagtctacccctacccagtacactggaattagacaaaatcccaggagttttacctcaactctgagtgtgcccacaggagctctccctgaagccacgtccttttaagcagggtctagggttcctcccttgtcttaatgaactctttgtcacacggaggacgttatggagcccttatgatctttcactgcctttctgcccagcgttttgtctttccatggacatttataatattttccatggacattttgttctctcaatgtccacccctaatttccaacatcccaaagattctcatgtgtttcctgaaagccatttacaggaatggctgtgcccagacccccttccccaggatcctccttcacacctggtaggtgcctctcctagagagatttgcactcagttgtcgtgcagtcacatggcccagatggttgttaatcacccccttcctggcaacagctagcagccagggaatcactggcacagaaacctcagggtgaccaagatgaggccacctctgtgctgaaggctgtgctccagagcctgcttgggatcaggcttaagcaggtcttcagccagacctgatgttacctggtttccttgagctgccctgcctgagctatcgggagcactccctcaatgcacatcttgattccctatctcatgctctgcttctagaaaccatgagctatcaattgctactggcaatggtcctgggaagtcaaccctaagtatggattctggggttggatgactccccacaggacttcagtgagcaacaatcactgctggcagttggaggacagagtcgctagggcatgtgaccactgtgaaaccaccgatgtttcacctggggtaattttggatgaactacggtagaagcactgaaggtacattgcttttggtttggaagattgtaggtaaataatagcgatatgaatgtggaattggatggctgcaaacgagtgccattgatgcattgaaagaggaaaagtcaggctgtcacctgtcactcagcaatttaaagtgtgagagttgggactagatgtggtggctcacatctataatccagagattcgggggaagcttgaagaggtaggatcttttgagtccaggagttccagaccagcctggacaccagagcaagacctcatctctacaacaaaattttcttaaaaattagatgggcttggtggcacgcacctgtacttgtagatctagctaatggggagcatgagataaaaaaatcacctgagtcagggacttaggggttacaatgaggtatgattgtgccagtgcacacactcccacctggccaacagagtgagattctgcttccaaaaaaataagaaataaatcaggtttgagagttggaaagcatcatcttctcctagagccaaaggacatgtacaactgagacccaggaacaaagcttcatcacaaagagaccatcatcagtggagccgggagatgcattccccctcaccctgccttgaggaggcagtggagtcatctgtctgggatcctttctgacccagccctatttgtttgtctctttggcttctttggatttgtatattttagctgttataacactgtaaaacaaacagagtgatttttttgagttgtgtgaatgatgctagctccatagtcaccctgagagtgatgggaacttttgaatttgtggcaagttggagggtagtgtaagtgacctgagattgccaaattggggctagcactggatgtgaggttaggctagtggaaaaatatgcccagaaccagaggagtgtgggctcactgcaggtggttaggctcagatccaaattgtacagatggatagctttggggtaaagaataacatagttgagaagtgcatgtgttagtctgttcatgcactgctataaagaattacctgagactgggtaattatttataaaactcaggtttaattgggtcatggttccacaggctgtacaaaaagtatgatgctggccatcagctcaacttctggggaggccccagaatagttagagtcatggcaaaaagtacaagggaagcaggctcatcttccacggccagagctggagcaagtggtaggagaggtgatacacactttcaaacaagtaggtcttttgagaactccatcaccggacagcacctatgggatggtgctaaattattcatgaaatatccgcctccataatccactcaactgtcaccagcgcagccagccccacctccaacagtggggattacaattccatatgaggtgtgggtggggacacagctccaacctcaatcagtgggcatcctggattgggtctactatagaaggagaaccaggagctgactatgatcttgaaccctacccatgatggccgggcggggtgactcatgcctgtaaccccagcactttgggaggctgaggtgggtggatcgcctgaagtcaggagttagagaccagcctggccaacatggtgaaaacctgtctctactaaaaatacaaaaaattagaccggcgttgtgctggatgcctgtaatcacaccactacgctccagcatgggaaaaaataccaaaacttcgtctcaaaaaaaaaaaaaaaaaaaaaaaaaaaaagactgcccatgaccactgcaccagtgagagggacaccagcatcactgagatgcaagggctggacattcttcataggtcagagctcaaagcaggggacactgatacagagatgggctccatccatagcaccaaagtggtgagaggatgtgggaatggcagaggccagcactttgccatcaatgcaagggggtataaggaggtgacaccagtgccagagtacatcacggggggactgccctacaatatctaggacttacctcttagagcgtgtttcattagcgacaacagatataaatggcagacaggtgtgtccctgcattaacaggaaatagaaatcatcaagaggaacagaaggcagatgtcagcagccccttagaaagtcatcatccttcatacagttaaaatctgagacagttctcacacgagaaggcctaactcaaaaagaggctgggttctcatgaggcaggtttatgcaaaaccaaggaaggtgtacaagtttggaattctccagtttcccttggaaaagacctacagtcatttgcttaggtaactgagcactgaacaaaggtgagtattgttgtcttttagaagctcttggccaagaaggccttgttggcataaaacccatggtttggaaacatcaccatgacccctgttagagtaatggcctaagggtgggggtcaggaaattgatgtattccttgccaacttctgcctctaagtgagtgaactctgtttgtgaacctctctcctctgtggttatgttcctaggctctcatgtataatcaggagtcatagacttagaaacaggaaaaatacttacagtgtttttgtggcctgtgagctatgacttataattttaggaaaaaaacaattgcaaatggaaagcctaagtctatcaatgctcatccaagacaacataatcaataaaaaccaatatcaaatctcaaggcaaattatttcctgtatatagatggcagagatgagcaccaccatcaaaaactcaaggaccagtgctgtgggtccagtcatctgtttcatggaattcaccagtctggtatcttcaaaatccagaaggatgatggcagatggcaggaaagtaatgcaaacgtcatcaggtgtgaccccactgtagcagctgtgatggatgttttctctcaccatagcaataaataacacaacctcggtcacactgtatgcattgttggtctgcaaaatccatgttttgcaaaactcttcaggaaggtggatctgtaatattggcattgacatgagaacaacagcagtatttattcacaatctcaagctctctgtcttcccgtctctctcattagccatccaagtagtcctgaggaaccaagcccatcagaacattctgcaacataatacacagctccattctccattcaaattttgttgttgttgttgttgttgatgagacaacatcttactccatcagccaggctgacgtacagtggggctatctgggctgactgtagtcttgagcttccaggctcaaggcatcctctcacctcagcctcctaagtggcttgaactacagacacacagcgacatgctgggctagtttttgtatattttgtagagacgtgctctcaccatgttattcaggctggactcaaactcctgagcgtaagtgatccaagcaccttggcctcaaagtgctgagattacaagcctgagccactgcacccagcccaatctccattctactgataacaatgtcattaccaggtctgatggacaggaaatggtaaggtttctgaaaacctaaggatcacacagcgagttccaaaggctgaaagtgcatacctgtcgacactgataccaatgacatccaatggtgagaatgacattccttgtagtcctagctctgctcataacaaatctatactgaagtgtaagagtttgatggtcatggggattttccatgtctctgcctttcagcgatgtgccatatctgtgaagtgttcagaaatgcaacagcctgaggcatgctgggcatatcctctaataaaaaggaaaatgccattttatggtcctgtatttctacaagttggaacacatgggcctgtgatccagatgggggaaatgggaatattcccactcattcaccttcatccacgaagcccatttgaaagctttgggcttcccatccttgtagattttagtgttgtgggctgggtgcagtggctttcacctgtactgccaacactttgggaggcctagacaggtgaatccactgaggccaaaagttcgagaccagcctggccaagatggtgaaaccccgtccctactaaaaatacaaaaattagcaaggtattggggccagcacctgtaatcccagctgctcgggaggctgaggctggagaatcgcttgaacccaaaaggcagagactgcagtgacccgatcctgcctttgcactccacctgggcaagcagaacaaaacttctgtcttgaaaaaaaaaacaaaaaacgaacaaaaaagatgttagagttctgggtttagaggtctataccccagaaagagaatggtttcaacaagggacaaagaagttgctttaaacgttgacttgccatttcttttcagtgtgtttgttctcttgcgtcaagagaccaccagaaaagtggtgcaattactctcctgtcaagaatcattgactatcatctgcaagagggtcagatcctggtatataattagggcagaaatacttagtctgagaagggtatgacatccagaggccctattaatgatgtccttttctccatgcctgactctgaccccatgtgctggactgcccctgtgtggatggcctcatggcctgctcggactctgaggtcccaccccaagtggcacctccatggagggctctactcttgtatgggctctgacactcacactgagacactctcccatggacacctcttcacccacttggggtctgaaactgggctactccatccctccctaacctggaacagagagctttcactgctattacacaagtcatagaggctaactcctcatttttccaagctaattattgaaacattagtcctgggttgataagacaagataagttaacttttcataaatttgcttatcaagttttgaataaattcaaataaattcaccttccccacacaccttagttgtcgacatcacacgcgcacccatactcacagggtgagcacgaaggcttcactgtcagtggagaaagtggcaaaacccttctgtgcctcatcctggtctagacctggccctcatcctttcccactcttcccctcactcccttggattcatccacactggcctcctgcctgctgctccacctccctgcgaagctcacccctgcctcagggcctttgcacgtgcagtggcttcaagccatatcctcttcacccagatctcccagatctcctgaatgatcttcttttatcattcaggtctcagcttgcatgtaatcttctcagtgaggattacccaaaccacatagttcattcattcattcaaatattcattcaatggcatattgacaaagcagctacttcatgccaggccttgggccaggtgttatggatatggcaacaaacaaaacaagagttttctgctctcaaatttttacccacttaaaggagatatcatacatcatctgtaaataaatacatcatctgtaaataatgatgtaaataaatacatcatctgtaaatctgtaaataatgatgtaaataaatacatcatctgtaaataaataaagtataataaaagaaaatagtaggtttttttggttggaggtgaccgtgaagtttgcaaataccatcttacaacacattattttattttatttcatttcatttttaattttattattattatactttaagttttagggtacatgtgcacaacgtgcagatttgttacatatgtatacatgtgtgaagttggtgtgctgcacccattaactcgtcatttagcattaggtatatctcctaatgctatccttcccccctcccccaccccacaacagtccccggtgtgtgatgttccccttcctgtgtccatgtgttctcattgttcagttcccccctatgagtgagaacatgcggtatttggttttttgtccttgtgatagtttgctgagaatgatggtttccagcttcatccatgtccctacaaaggacacgaactcatcattttttatggctgcatagtattccatggtgtatatgtgccacattttcttcatccagtctatcattgttggatatttgggttggttccaagtctttgctattgtgaagagtgccgcaataaacatacgtgtgcgtgtgtctttatagcagcatgatttataatcctttgggtatatacccagtaatgggatggctgggtcaaatggtatttctagctctagatcactgaggaatcgccacactgacttccacagtggttgaactagtttacagtcccaccaacagtgtaaaagtgttcctatttctccacatcctctccagcacctgttgtttcctgactttttaatgatcgccattctaactggtgtgagatggtatctcactgtggctttgatttgcatttctctgatggccagtgatgatgagcatttcttcatgtgttttttggctgcataaatgtcttcttttgagaaatgtctgttcatatccttcacccactttttgatggggttgtttgtttttttcttgtaaatttgtttgagttcattgtagattctggatattagccctttgtcagatgagtaggttgtgaaaattttctcccattctgcaggttacctgttcactctgatggtagtttcttttgctgtgcagaagctctttagtttaattagatcccatttgtcaattttggcttttgttgccattgcttttggtgttttagacatgaagtccttgcccgtgcctatgacctgaatggaaatgcctgggttttcttctagggtttttatggtttgaggtctaacatgtaagtctttaatccatcttgaattaatttttgtataaggtgtaaggaagggatccagtttcacctttctacatatggctagcctgttttcccagaaccatttattaaatagggaatcctttccccacttcttgtttttgtcaggtgtgtcaaagatcagatagttgtagatatgtgacattatttctgaggactctgttctgttgcattggtctatatctctgttttggtaccagtaccatgctgttttggttactgtagccttgtagtatagtttgaagtcaggtagcatgatgcctccagctttgctcttttggcttaggattgactttgcaatgcggggtcttttttggttccatgtgaactttaaagtagttttttccaattctgtgaagaaagtcattggtagcttgatggggatggcattgaatctataaattaccttgggcagtatggccattttcacgatattgattcttcctacccatgagcatggaatgttcttccatttgtttgtatcctcttttatttcattgagcagtggttttagttctccttgaagaggtccttcacatcccttgtaagttgggttcctaggtattttattccctttgaagcaattgtgaatgggagttcactcatgatttggctctctgtttgtctgttattggtgtataagaatgcttgtgatttttgtacattgattttgtatcctgagactttgctgaagttgcttatcagcttaaggagattttgggctgagacaatgggttttctagatatacaatcatgtcgtctgcaaacagggacaatttgacttcctcttttcctaattgaataccctttatttccttctcctgcctaattgccctggccagaacttccaacactatgttgaataggagtggtgagagagggcatccctgtcttgtgccagttttcaaagggaatgcttccagtttttgcccattcagtatgatattggctgtgggtttgtcatagatagctcttattattttgagatatgtcccatcaatacctaattattgagagttttcagcatgaagggttgttgaattttgtcaaaggccttttctgcatctattgagataatcatgtggtttttgtctttgggtctgtttatatgctggattacatttattgatttgcatatattgaaccagccttgcatcccagggatgaagcccacttgatcatggtggataagctttttgatgtgctgctggattcggtttgccagtattttactgaggacttttgcatcaatgttcatcaaggatattggtctaaaattctcttttttggttgtgtctctgcctggctttggtatcaggatgatgctggcctcataaaatgagttagggaggattccctctttttctattgattggaatagtttcaggaggaatggtaccagttcctccttgtacctctggtagaattgggctgtgaatccatctggtcctggactgtttttggttggtaagctattgattattgccacaatttcagatcctgttattgctctattcagagattcaacttcttcctggtttagtcttgggaaggtgtatgtgtccaggaatttatccatttcttctagattttctagtttatttgcgtagaggtgtttgtagtattctctgatggtagtttgtatttctgtgggatcagtggtgatatcacctttatcattttttattgcatctatttgattcttctctctttttttctttattagtcttgctaccggtctatcaattttgttgatccttttaaaaaaccagctcctggattcattaattttttgaagggttttttgtgtctctatttccttcagttctgctctgattttagttatttcttgccttctgctagcttttgaatgtgtttgctcttgcttttctagttcttttaattgtgatgttagggtgtcaattttggatctttcctgctttctcttgtgggcatttagtgttataaatttccctctacacactgctttgaatgtgtcccagagattgtggtatgttgtgtcttttttctcgttggtttcaaagaacatctttatttctgccttcattttgttatgtacccagtagtcattcaggagcaggttgttcagtttccatgtagttgagcggttttgagtgagtttcttaatcctgagttctagtttgattgcactgtggtctgagagacagtttgttataatttctgttcttttacatttgctgaggagagctttacttccaagtatgtggtcaattttggaataggtgtggtgtgatgctgaaaaaaatgtatattctgttgatttggggtggagagttctgtagatgtctattaggtccgcttggtgcagagctgagttcaaatcctgggtatccttgttaactttctgtctcattgatctgtctaatgttgacagtggggtgttaaagtctcccattattattgtgtgggagtctaagtctctttgtaggtcactcaggacttgctttatgaatctgggtgctcctgtattgggtgcatatatatttaggatagttagctcttcttgttgaattgatccctttaccattatgtaatggccttttttgtctcttacgatatttgttggtttaaagcctgttttatcagagactaggattgcaacacctgcctttttttgttttccattttcttggtagatcttcctccatccctttattttgagcttatgtgtgtctctgcacgtgagatgggtttcctgaatacagcacactgatgggtcttgactctttatccaatttgccagtctgtgtcttttaattggagcatttagcccatttacatttaaggttaatattgttatgtgtgaatttgatcctgtcgttatgatgttagctggttattttgctcattggttgatgcggtttcttcctagccttgatggtctttacaatttggcatgtttttgcagtggctggtactgactgttcctttccatgtttagcgcttccttcaggagctcttttagggcaggtctggtggtgacaaaatccctcagcatttgcttgtctgtaaaggattttatttctccttcacttatgaagcttagtttggctggatatgaaattctgggttgaaaattcttttctttaagaatgttgaatattggcccccactgtcttctggcttctagagtttctgccaagagatcagccgttagtctgatgggcttccctttgtgggtaacccgacctttctctctggctgcccttaacattttttccttcatttcaactttggtgaatctgacaattatgtgtcttggagttgctcttcttgaggagtatctttgtggcattctctgtatttcctgaatttgaatgttggcctgccttgctaggttgcagaagttctcctgggtaatatcctgaagagtgttttccagcttggttccattctccccatcactttcaggtacactaatcaaacgtagatttaatcttttcacatagttccatatttcttggaggctttgtttgtttctttttactctctttcctctaaacttctcttctcacttcatttcattaatttgatcttcattcacttatatactttcttccacttcatcaaatcggctactgaaggtattgcatgcatcatgtagttctcatgccatggttttcagctctatcaggtcatttaaggtcttctgtacattgttttctctacttagccattcgtctaatcttttttcaaggtttttagcttccttgtgatgggtttgaacatcccctttagctcagagatgtttgttattactgaccttctgaagcctgcttctgtcaacttgtcaaagtcattctccatccagctttgttccattgctggtgaggagctgcgatcctttggaggagaagaggtgctctggtttatagaattttcagcttttctgctctggtttctccccatctttgtggttttatctacctttggtctttgataatggtgacctagagatggggttttggtgtggatgtcctttttgttgatgttgatgctgttcctttctgtttgttagttttccttcgaacagtcaggttcctcagctgcaggtctgttggagtttgccggaggtccactccagaccctgtttgcctgggtatcaccagcggaggctgcagaatagcaaatattgcacaacagcaaatattgctgcctgatccttcctctggaagcttcgtctcaaaggggtgcctggctgtatgaggtgtcagttggcccctactgggaggtgtctcccagttaggctagatgggggttagggacccacttgagaaggcagcctgtccattcacagagctcaaacactatgctaggagagccactgctctcttcagtgctgtcagatggggatgtttaagtctgcagaaatttctgctgccttttattcagctatgccctgcccctacagatggagtctacagaggcaggcaggcctcattgagctgcggtgggctcctcccagttcgagcttccagaccactttgtttacctactgaagcctcagaaatggtgaacacccctcccccacccagtctgccgccttgcagttccatctcagactgctgtgctagcagtgagcgaggctccatgggcgtgggacccactgagccaggcacaggatataatctcctggtgtgccatttgctaagaccattggaaaagcacagtattaaggtgggagtgtcccaattttcccagtacagtctgtcacgggttccctcatctaggaaaggtaaatcccctaaccccttgtgcttcccggtgacgcaatgccccaccctgcttcagctagccctccatgggctgcatccactgtccaaccagcccaatgagatgaacaaggtacctcagttggaaatgcagaaatcacccatcttctgtgtggatcaggctgggagctgcagaccggagttgctcctattcggccatcttggaatggcaatctatgtttgctttttacatttgaaaaaactggtgtcacgtacctaggtattaatcattgtggtatcctcttgccgatttacctctttatcattaactagtgaccctccttgtcttttgttgttacagtctgtgattttagtctattttatctaatatgagaatagctactctggcacttttttggtttccagcttcatgaaatatccttttccatttccctgttttcatttccctttcggtgtctctatagatgaagttgatttctttaaggcaccataagttgggtcttatttctttatccatttgaccatttagagaatttagaacactgtcagtgttattattcataagtaaaaacttaagagtgggtgtagtggtgtacatctgtatttcctgcactttgagagactgaggcgagctgatctcctggggtcaggagtttgagaccggcctggtcaacatgatgaaaccctgtctctactaaaaatacaaaaattagccaagcatgctggcatgtgcctgtaatccaatttacttgggaggctgaggcaggagaagcttgaacctgggagacaaatgttgcagtgagctgagatcacacagagaagtcatctccactctcctcatcagaacctcttgttcacagcatttgtgagcacaaatcaatgatggttattctttcctactaattagggatattttattacacagcaatagcctccagcaaagggaaccatcatacatgattcctacaagttgacagggctggaattatcactgaaaaactaaggtggctatacttgattcccaatgtccaatttttcatgaatagagaaatttatcctttttccccccagccagaaaccaagttttgctcttacgcccaggctggaatcaagtggcacaatctcagctcactgcaacctctgccccccagcttcaagaaattcaccttttgaacaaggagatattaaggatacactatgtgtatgctaccggtggttgcaggagactcagaaaagagagaaacagtcactggcctcgtgcaactgatattctcgggaggagagaaaggcaatcaagaaagaaacatgctgtatttcagacagctgtaagtcctccacaagaaaagaaagcaggtgaggaacataggaaatgtgtcaaccataaggttcccgctaattctataagttggtcagggatatcctccaagaataagcagcatctgagcaatcacctgaagggaggaaggaaggaagactgtgagtggtggcttacacctgtaatcccagcactttgggaggccaaggagggcagattgcctgagctcaggagttcacgaccactcagagcaacctgttgatacccaatctctactaaaaacacacaaaaaaattacccgggtgtggtggcacgcacctgtagtcccagcttccatgcccagctgatttctctctctccatatatatatatatatacacatatattgtttttgcagagatagggtctcactgtgtcacccagtcatcaagcaattctcttatactgttttggaaaagcatgggaattacaggtgtgaaataccctgctggtcctgaaaaatgtgatatttgggattctctgcctggcttgttttacccaaaataatgacctccagttccttccaggttgctgcaaaagacatgattttcactgttttataactgaatagtattcctgtatgtatacataccacattttctttatttattcttctgttgattgacatgtagggtgattccatgtctttgctactgtaaataatgctgcagcaaatatttgtgtgcattttgatctattcctttgagtaggtacccagtactgcaactgcaggactgagtagttgttatattttttgttctttcagaaatctccatagtgtttgccataaaatctgcactaatttacattcccaacaacaatgcataagatttccccttttctccacattctcactaacatttgttatgtttttgtctttttcataatacccattctgactggagtaagatatctcattgtggtggttgttgatatttttgagacggggtctcactctgttgccagactggagtgcagtggtgtgatcgtggcttgctgcaacctccacctcccgggttcaagcaattctcctgcctcagcctcccgagtagctgggactacaggcgcgtgccaacaggcctggctcattttttgtatttttagtaaagacagggtttcaccatgttggccaggatgatcacagtctcttgagctcatcatacacctgcctcagcctcccaaagtgttggaattacagtcatgaggcagcgcacccaacctcaatgtggttttaatgaccatttctctgacgattcatggtgtggagaatttctttgaaataccttttggccatttatatgtgctcttttaaaaactgactcctgtccaggtgcggttgagcatgcctgtaaccccagaacttcgggaggctgaggccaatggatcacttgaggcaaagaggcagaaatcagcctggccaacaaggcaaaaccccatctttactaaaaatacaaaaaatcagccacgggctgtgactcgtgcctgtggtgcaagttactcaggaggttaaggcacaggaattgcttgaacccggtaggcacaggtcacagtgagccaagatcatggcactgcactacagcatgggtaatagagaaagacctgtctcataaaaacaaatgaataaataaataagataaaaaataaaaaagtctctttatgtcctttgccgactttttaatgggattctttggagttttctgttgtagttgagatctttgtttactctcggtattagtcttttgtcaaaggaaaagtttacaaataatttcttccgttctgcagtttgtctgctcactctgttgagaggattatttctttggctgtgcagcagctttttgtttcagtaaagcttttgaatttatataattaaaattttcagtttggtttaaatttgcactggtcgatttttggttttgttgcctgtacttttgaagtcatactcttgaactctttactagacaataaccagaagagttttctctagttttcttctcacatttttattatttcagtacatatatttaagtctataattcatcttcaattgatttttgtagaaatagtgagaaataggagtccaggtttattcttctgcaaatgacaattcaattgttccagcaccaattattgaaaagggtgtgctttcctcaacgtatattcttatcagctttgtcaaagatcagttggctataaatgtgtggctttctttctgggctctctagtctgttacatcaatctgtgtgtctatctgtatactactaccatgctgtattggtgatgatggctttgtaatataatttgaagtcaagaaatgtgatgctcccagctttgtttatttgcttcagaaaggctgagtcaacagctgcagagatgaagctgcccctcctcgcagggctccttcccggaaaaagatcatggctcccactgaccatataaccatggctggaactcctgaaattcccaaagggaggccctacccagtgaggggggatgaatgaaggtcctacttaaggaatctgtctggccacaatcaggcacagcagctgtgctgccttgtgggggaccagaccacctggattccctggagcctgcaggctagaatgtctgagtccatggaaacacagaaatggaggccgccctcacctccccagaaaactgtagtctcaggcagtctccagccgattgccactggttggctgctattccaagccagtgggtcttaacttgagaggtgctgtggaagtggggcccacggaatgaggctgcttggctccctggattcagccccttttctaagggaatgtacagatggaactcccgccttgcccagctttccaagtatataaaactcctgagtctctgtgagtgtctgagcgagtgctctggcaacattcgacacggctctgtgtatctgacccaagacccttatggcatgagctaatgggaggatcttctgatccatgcgtggcaaagatgcatgggagaaacatggtttgtgggtaggggttgtgcattcactactgcttctcttggctgtaggtgaaggtttctttggctctgtgctgatactgggtgcaccatcacccaccccctttgtttcttctcctgggtcaagtcatttgcctaatcagtcccaatgtaggaacctggatacttcagttcaaggtgctgaattcaccgtgcttttcattcaggggaagacagctgcttctcattgggcatcttggcctgcccacttcacgtcactttttgtaaaatccacaccactccaggaatatccattacttaacttcgcctgaaataaacagaaggctcattacacttatcatgggctcacttacttcgcctataatgaaggtgccatggaaatgctagtggatgacgtggtccattttcttagggatgagatagaaaaatggtgtatggctttttaatttaattaaaatttttagtttggtttaaatttacattggtctctttttggttttgttgcctgtacttttgaagtcttactcgtgaactctttactggacaatgaccagaagagttttccctaagtttcttctgatattttgaccatttcagtacatacatttcagtctataattcactttaaattgatttttgtaaacatggtaagaaataggagttcagatttattcttccgcatatgataatgcaactgtcccagtaccaattattgaaaagggtgtgctttccctagtgtatattcttgtcagctttgtcaaagatcagttgcctatgaatgtgtggctttcattttggattctctcgtctgttacatcaatctgtgtgtccacatttatacctgtaccatgctgtattggtgactatggctgtgtaatatattttagagttaggaaatgtgatgctcccagctttgttcatttgcttcagctgaaaaggttgagtccacaattacaaagatggcagccgcccatccccggaggacctccaacccagaaagagatcaggcttcccaccaaccctataaccctggctggagttcctgaaattccaacagggaggaccttcccagtgaggagggatgaatcaaggtcaaatttaaagaaacagtctggccactatcaggcacagcagcagtgctgccttgtgggggacccctcctgctccagaccagctgccctccctggagcccgaaggctagattgtctgagtctacggaaacagagacggtggccgccccaaccacccagaactcggtagtctcaggcacttggcttgctatcttgccactgcttggctggtattccaagcccgtgggacttgagaagtgctgtgatgatggggaccacaggatgaggctgtctggctccctgtgatatggctgtgatgagtggaggaacaccagggctcatgtctcacacagaattggagaaaatgacacaaacacatgtacagtggttttatggcgtgcagtttaataggcaagaacgaaggaagagctccccatactgagacagagggaggggggctccaaagccaaaagaggaaacccggagtgctgtggataccaatgagttatatgaagaaactggagggggcggtgtctgatttgcatagggttcaggcgattggttcgaccaggcatgtcatttatgtggcccacggaaaaactggccctcccacctagcctttgaatatgcacgtgccggacaccctgatttcctacactcatggggatatatgggggtggccatatcgccaggcacaggtggggacaagggccagaagagggcgggaatcgctatgtttgggtggacccagtttctaatggccggcatctgcagatcaaggttaccggagaactctaaaagccggggctttcctgctagacaagactcatttctggagctgctttaaaaagaaacaaaacttcccaaggaccccttttcctccctgtctgcccaaaataatttcttaacaactcgtataacacctgaattcagcccccttactgggggaatgtaccaacggaactcccacctttcctggtttctcaaggctagattgtgtaaacctcctgggtctcggtctgtgtctgagcagctgctctgccaacactccacacagccctgtgtactaggcccaaggccgccgtgactcagcccatgggaggatctcctgatttcttggttgcaaagatccatgggagaaaaatggtttctggggcggggtcacacactcatggcttctcttggctgtgcaagaaggttcctttggctctgttccaatatagcgtggttcatcacccacccctgttttctttgttctcctgagtcaagttgtttgcctagtcagtcccaatgtgagaacctgaatatttcagttcacgtgcttatcgtgaaattcactgagactttaattcagtggaaggcagcctcttctaattggccatcttggcccgccccctccacgtcacctcccataaaatggccacgctctccagggacgatgccattatatatctttacgtgaaaccgacagaacacttattacactttttgtgagctcatttacttcacttataatgaacatggccatggaaatgctagtggagaaagtggtcgattttctgatggatgtgataaaaaaatggtttgccgaccaattaatgacatatgtctcaaaactagtaacgagacccttaatcgctgggttgaagtttctaatcaagaagatgctcatctatgtattcaacaaagcagcttcccttgcttctgaaatgcttccaaacaacatctcatatttcctgaagaagataatgcctggacaagcagcacaagtcattcaggtttactttcagctcataaatccagcaggatattcgcacaattgttgggaaaccttatcagttcatgagtcgtgcatgtttcctttaatttcaggaggaagagggtaatctggaagagtttcctgacctactctgctgctgtgattaaacaaccaccaggaaattttgatgacactgttctcctgagctcctccctttcctcggggaagaaaagcattgaaactacaaaaataaagtgttatttggctggagtgaggtctcatgtctgcttatgcggtggctcgctgctcagaacagggtgagtctctgagttgtacgctgaggaggggaggctgtcaatctagaaaaaacccattgcatgggacacctccatggggtctggggggctgaggatgaggagctggactggatctagggaaggaggaggtttcagagggtgaaattctggcagtaaatcctgggggtgtttgaaaacttcctccctcagaaggagaagactcagggaggaataaggacaaaccatgggtcccttgaggggcatttactaacttaagaggactttatcgggaagcagagtgacaatggcctccttgaggactgaggcccctggataaatgaggcccagatccagatccagtccatgggagatgagaccttcaagggacatatttttgttgggacagaggaaaagtgcagctctgcagctgcagaggaagccttggcagtgtgaaagcgaccttggagggggccctgtgcgttctgaatgcttctgaggtccatcccctgtccccgcctctttttctggattttttgggctccatggtctccgccatcttctgagcgctccacgctgccaccttcagttttctcttctgggctccaaatactccaaaatctttcatatctgtgcccctacccctgtttttagcatgtgttgggactccaggtccctgaaggtttctggcctgaaatccacctccccagcggtgtggattctgctctagagaccccgcacttggcaaggttcccaggcccctgggggacaaccgagtggtatgtgcacttcagggctccacactcggcaaggtctttcaagcccttggggttccctcctcagttttcttcacatgtctgggatgtagtcactctataaatgccgggatgtgatccccaccccagtgattttttttagttccatgagtgttgctatctgaatagtcatcctgagagtgatgggaccttttgaatttgcagcaagttttagattagtgtgagtggcctgagatcgcaaaactggggctagcattggatgtgaggttaggctggtggaaaaatttgcccagaacctgaggagtgtgggctcactgcaggtggttaggatcagcacagaattgcaaggatgtatagctttggggtaaagaataacatggttcagaagtacatgtattagtcttttcatgcattgctataaagaattacctgagactgggtaattaattataaaaactcaggtttaattggctcatggttccacaggctgtacaaaaaggatgatgctggccatcagctcaacttctggggaggcgtcagaaaacttagagtcatggcaaaaagcacaagggaatcaggctcatcctccatggccagagctggagctagtggtaggagaggtgctgcacacttttgaacaatcagatctttttagaactctatcaccagacagcacctagaggatggtgctaaattattcatgaaatatccacccatatgatccactcaattctcaccggcccaaccaggaccacctccaccattggggattacaattacacatgagatgtgggtggggacacagatccaaactcgatcagtgggcatcttggactgggtctactatagaagaagaaccaggagctgactatcatccttaagactgcccatgatggccaggcagggtggctcatgcctgtaatcccagcactttgggaagccaaggtgggtgaatcccctgaggtcaggagtttgagaccagcctcgccaacatggtgaaaccctgcctctactaaaaacacaaaaaattagatgggtgttgtgccagacgcctgtaatcacagctactccagaggctgaggcatgagaattgcttgaacctgggaggcggaggtggcggtgagccccaatcgcactgctacactccagcatgggcaacaataccaaaacatcgtctcaaaaaaaaaaaaaaaaaaaaaaaaggctgcccatgaccactgccccagtgagagggacaccagcatggctaagatcaagtgctggacattcttcatgggtcagacattaaagcaggccacactgttacagagatgggctccattcatagcaacaaagtggtgagaagatgtgggaatggcagaggccagcactttgccatcaatgcaaggtgggcataaggagctggcaccagtgccagagtgcatcaggggaggactgctttgcaatatctagcacttacctcttagagtatgtttcattagggacaacagatataaatggcagacaagtgagtcccttcagtaacaggaaatagaaatcatcaagaggaacagaaacagatgtcagcagccctcatataaagtcatcatccttcatccagttaaaacctgagacagttctcacataagaaggtctaattcaaaaagagactgggttctcatgaggcaggttcatgcaaaaccaagggaagtatacaactttgggattctccagcttcccttggaaaagacctacaatcatttgcttaggtaactgagcactgaacaaaggtgagtattgttatctttcagaagctgttggccatgaaggtcttgctggcataaaacccatggttggaaacatcaccatgacccctgttagagtaatggcctaagggcaagggtcaggaaattgatgtattccttgccaacttctgcgagacgagtgttggtccactcatctctttcacggaattcaccagtctggtatcttcaaaatccagaaggatgatggcagatggcaggaaactaatgcaaacaccatcagttgtacctccactgtagcagcagtaatggatgttatctcttcattgtaatatccagggagggagaagatgacattattctcaatattctaaacaccctgtgtgtacagcctctgtgatattttttgtaatatccgtgtgggagagaattatattactcctaatatctcaggggttgtgccccctctgtgacaatgttcctaacacccaggaggggataggatgatatcacttttagcatcacagggggtgtacaccccactgtaatattgttcataatatccgggggggagagaatgatattactcccaatatcgcaaagactgtacaccaacctgtgatattatttgtaatatccataagaggaagaataatattactcccaatgtcacaggaagtgtacacccttctgtgatattgttcaaaagatccagttagggaggggatgatattactctcaatatcttaaacaccctgtaggtaagccctctgtgatattcctcataatatccagagggagaggatgatattactcccaatattgcatgaagtctacaccccacctgtgatattgttcctaatatccaggatgggagaggatgatattactcccaatgtcgcaggggatgtacaccttccctgtaatattgttcgtaatatctagaaaaggagaggataatattactttcaacatcgcagggggtgtacaccttccttgttatattgttgctaatatccagggaaaaagaagatgacattaccaccactattgcagaaggtgtacacccccccttgatatagttcctaatatccagaaaaggagaggagatattactccaaatattgcaagaggtgtacattcccctgtaatatttttcctaacattcaggaagaaagagagtgatattgcccttaatattgaagggagtgtgccccccccgtgatattgtttctaatatccaagaaatgaaaggatgatattactcccaatatcacaggggctgtacagccccctcccatgatattgttcccaacatcggggggggggtgaaatagtattattcccagtatcacaataggtgtacacacctgtcgtgatattgttcctaatacccatgggggaaaggacgatattattcttaatatctcagagggatgtacaccctccctgtgatattgttcctaatatccggggtgggagaggatgatattacccccaaaatctcaaagggtgtacacccctcttgtgatattgttcctaatatccagggtggagaggataatattattcccaatatccaggaaaggaaacgatgatgttactgtgaatattccagggggtgtcctcccctctgtgatattgttcctaatatccaggttggggagattatgatatttctccaaatatcacaaggggtgtacaccaaccctgtgttattgttcctaatatcgatggggggagaggacgatattactcccaatatcacagggggtgtacaccacctttatgatattgttcctaatatccatgaagaaagaggatgatattactttcaatatcgcaggggatgtacactccccctgtgatattgttagtaatacctaggagaagaaagtgtgatattactcccaatatcgcaggggatgtacacgcttcctgtgatattgttcctaatatttagggggaaaggggatgatattactcccaatatcgaatggtgtgtacacccccccgtgattctttttttttttttttttttttttttgagatggagtcttgctctgccgcccagactggcgtgcaatggcgcaatctcggctcactgcaacatttgcctcccaggttcgcacgattctcctgcctcagccttcggagtagctgggattataggcagctgtcaccataccaggctaatttttgtatttttagtagagttggggtttcaccatgttggtcaggctggtcttgaattcctgacctcaaataatccacccaccttggcctcccaaagtcctgggattacaggcataactttccctgtgatattcttcctaatattcaggaagaaagaggatgatattgctcccaatatcgcagagagtgtgcactcctcctgtgatatggttcttaatattcagaggaggagaggatgatattactttctatattgcagaaggtgtacacctccctcgtgatgtctttcctaatatccagtgggggagaggttattagtctcaaaatcacagaaggtgtaaacccccatttgatattgttcctaatattcaggggtggggagagaaaggtattactcctagtatttcagggcatgaacacccccaccgtgatatcattcctaatatccagaaggggaggcaatgatatttctcctaatatcacaaagggtgtacaccccttctgtgatattgtaaatattctgtgtgtacacccccctgtgttatagtctgtaatatccgggtgggggagagggtgatatttctccccatattgtaggggatgtacacccttctgtgatatggttcgttatatccagggaagaaaaaggtaatattgctgcccatattgtggagagtgtacacccccatgtaatatggttcgtaatatccaggagtggagagggtgatactgctccttacatcgaggaaggtgtacaccttattgttatatgattcgcaatatccaggggaggagagagtgatattgctccccatgtcgcagggggtgtaaaccctccgtgatatgattggtaatatccaggaaaggaaagggtgatatttctccccatatcgcgggggacgtacatcctcctgtgatatggttcgtaatatccaggaggaaagaggaaaatattgctcttcataacccgaggggtgtacaacccctgtgatatggttcgtaatacccagaagtgtacacccctctgtgatatggtttgtaatatccagggggttagagggtgatattgctccccatatcgcagtgggggtacacccccctggattggttcataatattcatggggggagaaatttacatttatcctcatatcagggggggtgtacaccccccgtgatatggttcgtaatatccaggggaagaaagggtgatattgctccttatatcgcggaaggatcaccctcccctgtgatatggttcataatacccagacgggaagagggtgatattgttcttcataaagcgaagggtgtacagccccctgtgatatggttcataatatgcaaaaggggagagggtgatattgctccccatatcacggagggtgtactcccttctttgatatggttcgtaatatccaggggtgtagatggtgatatagctcgccctattggggagggtgttcacccctctgtgatattgttcgtaatgtccagggaaagagaggatgatattactcccaatatcgcagaaggtttacaccactctgtgatattgttcataatatccagggaaggagaagacgatattactcccaatatggcagggggtgtagaactcctgtgatattgtttgtaatatccaggcaaggagaggatattactctcaatatcgcagaaggtttacacccctatgtgatactgttcatgatatccagggaaaaagaggatattactccctatatcacaaagggtgtacacccctttgtgatattttttgtaatatccaggggagagaggataatattactctcaatatcagaaggggtgaaaaccctcctgtgtcattgttcataatatttagggaaggagagagtgatattactccaaatatcacagtgggtgtacacccccctatgatattgttcctaatttccagaaggggagatatgatattattgccaatatcgcagaaggtgtacaccttactctgacattgtttgtaatatccagatggggaaatgatgatattactcctaatatcacagggggtgtacacccccttgttttattgtttgtaatattcaggggaagagacgattatattactcccaatatcgcagggtgtgtacaacactctatgatattgttcataatatccaggggaggagaggaagtgtacacccccccgtgatattgttcgtaatatccagaggtagagaggatgatattactcccaatattgcaggtggtgtacacctttctgtgatattgtcatgatattaagaaggggagaggatgatattactaacaatatcacaaaaactgtacactccctgtgatattgttcataatatccagaagaagggaggatgatattattctgaatctcgcagaagatatacaccaccctgtgatatggttcataatatcctaggggaaagaggatgacataactgtcaatatcgcagggggtgtacaattccctgtgatattgttcacaatattcagagggaaaaaggataatattactttcaatatcgcaggcggtgtacacattactgtgttattgtttataatatccggaatgagagaaaattttctcccaatatcacaggaggtgtacactcccctgtgatattgttcgtaatatccagggaggggagaggatactattactcccaacatctcagggagtgtaggccccccctttgatattgttcctaatattcggaagtggagaagatgatattacttccaaaatcgcagggggtgtacactccctctgtaatattgtttctaatattcatgagtggaaagaaagatattactcccagtattgcaggggacatacaccacactgtgatcttgttcacaatattcgggggggagaggatgatattactcccaatatcaaagtaggtgtacacccccttctgatattgatcgtaatatccagaattaaagatgataacgttactcccaatattgcagggggtgtacatttttgaatactgttcataatattaagagggggaggggatgatatctgtcccaatatcgcaaagtgtgtacacctcctgtgacattgtcccaaatatccagaggaaaaaaggatgttattactcttaatatctcagagagtgtacacctccctgtgatattgtttgtaacatccagaagaaagaggctgatattactcttaatatcgcagggggtgtacacccccgccccgggatattattcgtaatatccagggggaagtggaatgttcagaatgggagaggatgatattacttgcaatatcatagtgggtgtacaccccactgtgatattgtttgtaatatccgggaaaggagaaaatgacattcctccccatatggcaggggctgtacaccacctatcatattgttcaaaatatccagaaggggagaggatatgtctccaagtatcacagggggtgtacaccccgctgtaatattcttcctaatatccagggtgtgagaggataatagtactcccaatatcccagggcatgtacaccccccttgtgatgttgttcctaaaattcatggggagaaagaatattactcccaatatcacagggggtgtacatacactctgtaatattgttgccaatatgcagcaggagagaggatgatattactcccaatatcacaggggctgtacaccccgctgggatattgtttctaatatcaagggggaaaaaggatgatattactcccaatgtcgcagggtgtgtacttcctctttgtgacattgttcctaatatccaggagagaagagggtgacattccttccaaaactgaaaggggtgtacacaccctttgagatattgtctttaatatccagaacgaaacaggatgatataactcctaatactgcaggggggtacaccctctctgtgatactgtttctaatatccaggaggggaaagaaaaatattaatcccaatatcacagggggtgtacattccccctttaatattgttcctaatatccaggaagacacaggatgatactatttccagcagcacagggcatgtacacccctttgtgatattgttcctaatatccaggaaaagagaggatgatattactgtcaatattgcagggcgtatacactggttctgtgatattgtttctaatatccgggggtggagaaaatgatattactcccaatattccagcgggtgtacacccgttctatgatattgttcctaatatctgggggagagagaatgatattattgtcaatatcacaggggatgtacagattccctgtgatattgtttctaatattcacagggggagaagggtataatactcccgatatcgcagggggtgtacactccccctgtgaagttgttcctaatatccagggattgagagaatgatattactcccaatatcacaggcggtgtaaaccccctgtgtgatattgttcctaacatccagaggaaaagatgatgatattattttcaatatcacagggggtgtacgcatccctgtgatattgtttctaatatccaggggaggagaggatgatattattgttaatatcgcagggggtgtaccccaccctgtgatactgttcctaatatccggggtggaagaggataatattgctcccaatatcgcaaagggtgtacaaccttcctgagatattggtcctaatatccagggagggagaggatgatattactttcaatatcacagggagtttacacaacccctgcgatattgttcctaatatccagcggaagaagagttaggataatactattttcaaaattgctgggtctgtaccccctccccgtgatattgtttctaatatccaggaggggagaaagtaatatgactcccaatatcttagaagatgtacaccctccccataatattatttcttacatccagggggtagaggatgattttgctttcaatatcacagagggagtaaacctttccggtgatattgtttttaatatttaaaaagagagaagataaaattactcccaatacaaaggggatgtattgtgtactcccccctctgatattcttttttaatatccagatggagagaggatgatattactttcaatattgcatgggatgtataaatcccctgtgttattgttctgaatatacaggtggggagagtatgatattactccaaatatcgcagggggttctttccccctgtgatattgttcctaacattcagggagggagaggatgatattactcttaatattgcagggggtgtacccacgcctatgatattgttcctaatatccagagggggagaggatgatctaactcagaatatgacaaggggtgtacacacagcctgtgatatggttcctaatatacaggggagaaggggataatatttctcccaatatcgcagggggtgtacaaccccctgtgatactgttcctaatatacagaaggggacagcatgatattgttcctaatatcgcaggaggtgtacaacgccctgtgatattgttcctaatatccagggcgggagaggatgatattaccctcaatatcgcagggggtgtgcactttccctgttatattgttcctatgatccgggtggggggaaatgacattagtcccaatatcgcaggatgtgtgcaccgctcccccgtgatattgttcctaatatcaagggggagagaggaggatattactcccaatatcgcaagggatgtacatcctccatgcgatattgttcgtaatattcaggaggagagaggatgatattactcttaatatcgcagaaagtggacacccaccctgtgatgttcttcataatatccagggaagcagacgattatatgactttcaatatcgctgggagtgtacatcccttttgggatattgtttctaatatccaggaagggagaggattatattactctcagtattgcaggcagtgtacaccttttttgtgatattgttcctaatattcagaaagggaaaggatgatattactcccaatattgcaggtggtgtatatccccctctgatattgttccttatatcaaggaagagaaagaataatattactcccaatatcaaagacagtgtagacccctcctgtgatattgtatttaatatccatggggaaagaggatgatgttactcccaatatcgcagggggtttacacccacactgtgatattattcctaaaatccagtggaggagaaaataatattgctcccaatattgcagggtgtatacaggccctcccccgttatattgctcctaatatccagcggtggagaggatattactttcaatttgtgtagggagtgtatacccccctgtgatatttttctaatatcaaggatgggaaaggatgacattactcccaatatcgcaggaggtgtacacgccctgtgatattgttcctaatatctagggaaggagaggatgatattactttcaatattgcaggagctgtacaccctctgtggtattgttcttaatatttaggttgggagaaaatgatatgagtccaaatatcgcagaaggcatacacacttccaataacattgttcttaatatccgggggagagggtgatattactcccaaaatctctggggggtgtacacccccttctgatatttttcctaatatccagggaaggaaacgatgatattactataaatattccaaggagtgtacaccttcctaatatcctaatattgttcctaatatccaggggtgggagaggattatattactcccgatatcgcagtgggtgtacacccctcctgtgatattgtttctaatatccaagctaggagaaaatgatatcactctcaataccacagggggtgtacaccttccgcatcatattgttcctaatattcagagggaaagaagatgaagttactttcaatatcggaggggttgtacacaacccctgtgatattgctgctagtatccaggaagaaaggggattatgttactccccttatagcagggggtatacacctcccctgtaatattgttcctaatatcaaggctgggatatacgtggggggaaggatgatattactcccaatatcgcaggggttatacaaccttctgtgatattgctcctagtaaccagggcagaagaagatgatattactcctaatatcgcaggaggtgtacactcccccattatgttgttcccaatatgcagaaaaggagaggatgacattattgccagtatcgcagggtgtgtacaccacccctgtaatattgttccaaatatttagggggagagaggatgatattactcccaacatcgcagggggtgtacacacatcccctgtaatatagttcttaaaatctaggggaaaaggggatcttatttctctaaatattgcagagggtgtacactccccggtgatattgttcctaatagccgggagggagataattaaattactttcaatatctcagagagtgtacatcgcccttgcgatattgttcctaatatccagagcaaaagagaatgatattactcccaatatcttaggagtgtacatttaacctgtaatattgttcctaatatccagggggaagagaatagtattactgccaatatcgtaggggttgtacaccttttctgtgatattgttgcaaatatttagtagagggaaagaatattactcgcaatatcacagggaatgtatacttcccctgtgatattgttctgatatccagaaaaagagagggtaatattactcccaatattgcagggggtgtacaccccccttgtgatattgatcctaatataaaggaaggaagaggatattactcctcatatagaaggggttgtccaccccccttgtgatattattcctaatattcagggaagcagaggatgatattattttcaatatcacagagggtgtgcagtccacctgtgatattgttcttaatattcggggggagaggatgttattatgcctgatatcgcagtagaggtacacccctcaagtgatactgttcctaataaccaggggtgaagaggatgatattactcccaatatcgcaggtggtgtacacccccccatgatggtttctaatatacagagggggagaggaaaatattactcccaaaatcgctggaggtctacaccccccttgtgatattgttcctaatatccaggaaaggaaacgatgatattactgtgaatattccagggggtgtacacccgctttgtaatattgttcctcatatccagggtgtggagaggattatattactcccagtatcgcagggggtgcacgacgcccctgtgatattgtttttcatatccaggaggggagattattatcaatatggcaaggggtgaacaccccctgtgatattgtacttaatagttaggttggcagaaaatgatattagtctcgatatcgcagggggtgtgcactccgcctggtgatattgcttttaatatcaagggggagaaaatggcattactcccaatatcgcagggggtgtacaccgctcatgtgatattgttcctaatatccaggtggagagaacataatattactcccaatatcgcacaaggtgtacacccctcctgtgatatggttcctaatatccatgggaggagatgatgatattactcccaatatcacaggggatgtacaccacccttgtgatattgttcctaatatccagggaagaaaacgatgatattattgtgaatattacagggagtgtacacactccctgtgatattgtttttgatatacagggtgggagaggatgatattactcccaatatcacataaggtgtacaccccccgtgatattgttctaaatatttcggtggggagaaaatgatattagtctccatatcacagggggtgtgtgctcctcaggtgatattgtttttaatatcaagagggggaggagattatattactttcattatcacagggggtgtacacccctcctgtgatattgttccttatatccaggcgaggggaaaataatattactctcaatatcgcaggaggtgtacacaccccatgtgatattgttcctaatattaagggggaaagaagataatattactttcaatatcacagggtttgtactcctttcttgtgatatagtttttagtatccagggggaaagagcatgatattactcccattgtagcaaggggtgtacacacctcctgtgatattgttcctaatatccagaagtggtgaggatgatattactcccaatatcgcagggggtatacaccccacctatgatattatttctaatatccatgggaaaagagtatgatattacacccaatgtcgcagagggtgtgtatttttcctgtgatattgtttctaatattcaggcggggagaagatgatattactctcaatatagcagaaattgtacatccccgctgtgatattcttcataataatcagggaaaaagaggatgatattactaccaatattgcaggggggttacacttcccctatggtagtgttcctaatatccaggaagaaagaggatgatattaatcccattatccaggaagtgtacacccaccctgtcatgttgttcctaatatccagcagggaagaggatgatattacaccccccccccgtgatattctccttaatatccaggaggggagaggctgatattactggatatatagcaggggtgttcataccttctgtgatattgttcctaatatccagaaaaggagaggatgatattacttccaatatcgcagaaggtgtacacctccctgtgatattgatcctgacattcagaaggggagaggatgatattactcaaaataccgcagggcatgtgcattcccttgtgatattgttcctaatacccagaagggaacaggataatattactttcaatatcgcagggagtgcacacccccctttggtatggttcttaatatccagaaggaaagagggtgctattactttccatattgcaaggggtgtacaccccactgtggtatggttcataatatccaggcagggagagggtgctattactccccacagtgcggggcatgtacaccctgctgcggtacggttcctaatatccagggggagagaggatgctatgactccctatatcgcggggtgtgtacacccctgtgtggtatgttttgtattctccaggaacggagagggtgttgttacccctcatatcgctggaaatgtacactcccctgtggtatggttcgtaatatccaggggattgagggtactgttacccccatactccccatatcgtggggggagtgcacctccctgtggtatggttcgaaatatccagggtaagagagggtgctattattccccattttgcaggaggcgtacacccccctatggtatggttcgtaatatccggggtgaggggatgctatcaaaagaagagagaaagagaccccccatattgttctatattattttatactcagtacctgttttaagaagaaacaaggaagtgaaaccaaaagcaggcagcccggcgccaggcaccagacccaaaaccagacccgaaaccaggcctgggcctgcctgaccttagcctgatagttaaaattcaacccatgacctagcaaccaatgttatccatagattccagacattgtatggaaggacattgtgaaatttcttgttctgtgctgtttcactctgattaccggtgcctgcagcccctgtcacatacccactagattgctcaatcaatcatggccctttcatgtaagatctttagtgttgtgagcccttaaaaaggacagaaattgtgcactcaacaagctcggattttgagacgctagtctttcgatgcttccagctgattaaaagccacttccttcactacctcggtgtctgtggggttttgtccgcgactcctcctgctacactatgactccccatatcaaggggggtgtacacccccctgtggttcgtaatatccagcaggggaaaaggtgctattactccccatattgcagggagtgtacacccccttgtagtatggatcgtaaaatcaaggggggagggaaggtgtaattatccccatatctcagggggtgtacacccctttgtggtaaagtttgtaatatccagggatattacagggatattatccccaaattaatacttttataatttcttatgcctgcctttactgcaatctctgaacataaattgtgaagatttcatggacatttatcacttccccaatcaatacttttataatttcctatgcctgtctttactttaatctcttaatctcatcatctttgtgagctgaggatgtatgtcgcctcaggaccctgtgatgattgcattaactccacaaattgtttataaaacatgtgtatttgaacaatatgaaatctgggcaccctgaaaaagaacaggataagagcgatgttcagcgaacaagggagataagcataaggtctgactgcctgtggggctgggcagaacagagtcacatttttcttattgcagaaaatgagtaggagaaatatcactgggaagggaacgcattcctaggggaggcctatggacggccgctctgggggtgtatcccttatgtggttgaagataagggatgaaatacaccctggtcccctgcagtgccctcaggcttgctaggattagaaattccagcctggcgaattctagtcagaccagttctctgctcttgaaccccgtttcctgttaagatgtttatcaatgacaatgcgtgcacagcaggacatggaacctcaatagtaattccattttctccctggccttgtgaccttgctaggcccttctgcccttgtgatcttttattgccatttgaagcatgtgatctctgtgacccactccctattcgtatccccctccccttttgaagtccctaataaaaacttgctggttttgcagatcaggtggtcatcacagaacctgccgatatgtgatgtcaccccggaggctcagctgtaaaatttctctttcgtactctttcactttatttctcagaccaggtgacacttaaggaaaatagaaaagaacctactttgaaatattgggggctagttcccccaatagacattgttcctaatatccagaaaaaaagaagatgatattactcccaatatcacaggggttgtgaaccccacctgtgatatggttcctaatatccaggaagggagagaatgatattactctccatattgcagggggtgtgcacatccctgtgatattgttcctaatatccaggggaggagagggtgatattactcccaatattgcaagggttgtaaactccaccctgtaatattgctcctaatatttaggatttagggggggagaggataatattactcccaatatcgcaggggatgtatatgccctctttgatattgttcctaatatccagggggggagaggataatattactttccatatcacaaagagtgttcacccccctgtgatattgttcctaatatccaaaaaggaagaggatgatatcaatcccaatatcacaggaagtgtacaccccccccttttatattgtttctaatatccaggggaaatgagggtgatatttctctcaatatagcagaatgggtacactccccctgggatattattcctaatatccaggggaaaaaaagaggttgatattcttcccagtatagcagggaatgaatacaccctttgtgatattgcttctaatatcaaggggaaaagaggatgatatgactcccaatatcacaggggatgtaaacctgtggcgttgttgctaatatcaaggagggaagagtatgatattactcctaatgtcgccgaaggtgcacactttccctgtgatattgttcctaatatccaaaagggaagagaatgatattacccccagtattgcagggtgtacaccacccctgtgatattgctcctaatacccaggaaaaaagagaatgctattacccccaatatctaaggggacgtataccttccctgtgatattgtttctaatatccaagtggggagaggatggttttactctcaatattgcagggagtgtacactccccctgtgatactgtttctaatactcgggctgggagaaatagtattactcccaatatcgcagtgatattgtttccctgtgatattgtttctaatatctagtgggggagataattatattactaccccatacacaggggagggtgtacattcccctgtgatattgtttgtaatatccagggaaggagaggatgttactcccaatatcacaggggttgtacaccccttttttgatattgttcctaatatctggggggcagagaattatattactgtcaatatcacagagtgtgtacaccccctctgttatattactctttatattcagggcggtagaggatgatattactccctatatcacagggggtgttcacccctcctgtgatattgtttataatatctaaggggaaagaggatgatatcactctcaatatcaaaggaaatgtacacctttcctgtgatattgtttttattatataggggggcagaggatgatattaagaacaataccacaggggatgtacacccacgtattgatattgtccctaatatgtatggggaaagaggacagtgtaactcccgatatcgcagagtgtgtacacccccttgtgatattgtttctgatatacacggggagaaaagataatatttcttccaaaattgcagggggtgtacaaccccctgtgatattgtttttaatatccagtgggggagagaatattactcccaatattgcagggcgtgtacacaacccctgtgatattgttcctaatatccagagtaggggaggatgacattactttcaatatcgcaaggggtgtacattcccctgtgatattgctcctaatatccatgaggggagaggatgatattattcctaatatggcaggggctgtacaccttccctgtgatattgtttctaacatccagtgggggagaaaatgatattactccctatatcacagaaggtgtacactttccctgtgatattgttcctaatatccagaaggggagaggataatattactcccaatatcgcaggaagcttacaactcccctgtgatattgtttctaatatccagggaggtagggatgatattactcccaatatcgcaggggatgtacactcccccgtgacattgtttctaataaccagggggtgagaggatgatattacgcttaataccgaagggggtgtacacacccttgtgatattgtgcctaatagccagggggaagaaaattatattaattttaatatttatggggaaaaaggatgatattactcccaatatcacaggggctgtacaccgaccttttgatattgtttttaatatccagaagagaagaggataatattgctcccaatatcagaaaaggtgtaaaccccttctgtgatattggtcctaatatccagggagggagagaataatattactaccaatatcacagaaggtgcccacccccaaggtgatattgctcctaatatccaaagataatagggtgatgttactcccaatatcacaggaggtgttcacaccccttgtgatattgtttctaacgtacagggaagggagaggatgatattattcccaatatcacaggaggtgtatactcctctgtgatattgattttaatattcggggggaaaggatgatattactccctatatcgcagagggtgtacaccctctgtaatattgatcctaatatccagggcgggataggatgatattactcccaatatcgcagaaagtctacacaacccccagtaatattgtttttactatccagggggaagaggatgacattactcccaatttcacagagtgtgtacactcaccatttgatattgtttctaatatctagggggagagaatatattactcccaatatcacaggaattgtacaccacctctgtgacattcttgtgaatatccggggaaaaagagaataatattactcccaatattgcagagcgtgtacacccctccatgatatcgatactaatatttttttaaagaggatgatattactcccattgtcacaggatgtgtacaccccccttgtgaaattgttcataatattctggggggagagcataatattactccccatatcgaaaaaggtgtccaccctccttataatatggttcctaatatccaggatattacttaatccaggatacttgtaataccctaaatatacaattgcttgaacctccacctcccaggttcaagcaattcttctgcctcagcctcccgagtagctgggactacaggggcacaccaccacacccagctaatttttttttcttgtatttttagtagagatggggttttgccatattggccaggctggtctcaaactcctgaccttgtgatctgcccacctcagcctcccaaagtgctgggattataggcgtgacccaccgtgccaagccaggaagaggatgctctatagatttccccaataagagatggctttgcagggccattccaaaatatgtcaaagaaatacatttggggataaaatactttgatttcctttagggaatgttatctattatgtgatgctataccagagtcaggttggagtcggttatcttattgcaacaaagagtctgttccgtcactgttgggatctctattttttcctcttatttcttgagacagggtctcactctgtcacccagtctggagtgcagtggtgcgatcttcattcactgaaacctctgcctcctgtgttcaggtgattctcgtgcctcagccccttaagtaactaggattacaggtgtgcgccaccacacccagctaatttttgtattttcagtagagatggtattttgccctgttggccaggctggtcttgaactcctggcctcgtgtcatctgcccacctcgacctcccaaagtgctgggactgcaaatgtgagctattgtgcccagccaggatctctgttttaatgttagtgctggtcactttgcatgaactccaaagggaagaaatataatgaggtgtgtctgaccccctgccttctcatcgtgacctgaattagtttttcaggtttgcaggggatacccttggacaagaaggggctctattcggttggttggggggattagaattttactttttgtttacaatatttctcctgaaagagttaggggctcacaaggaatttccgcgtgagcaacttatgaggaaagccatctgggaagatatgtgtccttgtgtcactgggatattctcgtttaccccaatgatacggcaatgacgcagggttgtgaaattacagctatgtgtttggggaaaaaagaaagcaggattgtgtgactacgtttccaaacttcacttgcccttagccatagtgagttgggggcctggagattctgttttctttcacaatgatatagatacaattaaatgtatagaaagcaaaaaaataaaaaggtgagtaatgaggaacctctgattcctgagtggccatgtagttacccatggcacagagccacagttactgaaggtaaagtttgctggggaatttagaaatgaatccagctcttggaggagtcagtttactggatgcctaagaaaatgcaaacaaaataagaaaaaagggtaatattcaatcccatagttattgttacctgtcatagctaaagtaaaattaaaacagagtgctggcttcaatcttgatgctacactaagcttagatttcagtgaatgtgagtctcagccactagctcagagccacctcccaaagaccaaatcatgtagggacaatagaaagtacttctgagaattgtggttaccaagaacctagtaactgttggggaggagcaaaacaaagtacagaaaccagagggtacaatctgagtgagactgctatcagcttctggaggagcctttactaaaatgaatgatgagagtaactggatgatgagagtaactaatggatgatgagagtaagcaatgtctttggttttcttttttttttttttttttttttagcagacgtctcactcttgtcgcccaggctggagtgtaatggcatgatctcgcctcactgcaacctccacctcctgggttcaagcaattctcctgtctcagcctcccgagtagctgggactacaggcactcatcaccacacctggctaatttttgtatttttagtattttctggtgagggtccaggtttccggaaacaactcagagacatatgttaagatgttatctttagttttcacagggaaccaaatatgttacgactccaatttccttggctattgttttaagttaccattaccttctcgttgatcaagttgctcatttacttctcaagcctagctagatgcctggaatttcccttgaaggaagtcaagattttcctttatctccatactggctgatggtgatcgagtaagcccctaagaggggtccctgctccatctcgagatgctgctagattctacagtgcctaataaacagctctcgcctggccgacaaagagctgcttgctctctggatagcaattccaaagtgaacagacaacatcctgtttggaagactgccactctgttagaagaagcatcaggaaaacctttcttttgagctatttataactaacagcaattgaccaagtatacttttgtgagtgaaactgacctttctccctgtaagaattctccaaaatttggaaactatttgtgagtatttttacttatggcaatataattattggcacaagctcaatcagattcggttttctttcgtaacaggaaccattggagatactcattactctttgaaggcttacagtggaatgaattcaaatacgacttatttgaggaattgaagttgactttatggagctgataagaatcttcttggagaaaaaaagactgggtatattttcaatatgctttccttttaaggtccctcacctgtggaaagtaaagaatgtcactttctgacaggctcaggaacctcaagttatgtagggatctcaagaagatgggggaattcacccagttcatacaggtgaaattgctgttgcaaagattatgaatatgagagaagtccagcatggctgacttcatctcgtgtctggcctcaggctggctgcccttgctcactcttgggcataggccaagctagccatgggaggaatttagtttatagtttaactttgaagcacggatgataatagtctctccctaaaatgaaccccttccttgctcagggactgaaactacctttgtatgacaaatgaaagcccacaagattaagattatgagaggggcctgaattctgctaaaatgcaggtgtagctgactgataacaagtcattgtcccacagcttgcctttctataatctcttgcttctcaggagtcacatggccagaggtcctgagatttccagtcctgtgacccccacccagagatggacttagtgcatgaggaccattttccacacccctatgatttcatcctcaaacaatcagcagcaaccattccctagccccctgccttccaaattatccataaaaatcctagcctctgagttattagggagattgattaataatcccagtcctaccccttgggttgctctgatttaattaaaccttctctactgcaataccacggactcagtaaattggttttgtctgtgcaatgggcaagaagaacatgttgcatggttatacaggtactacaagcacagtctgatggcaaattattggttttgcttcctgcccttgatgtttctaaacatctagtccaaaattacttgtgaaaggtccagcaaagccaattttaaaagaggctatatggccaatcactattctttctacacattattgcaaataatcaggccacggctgggcacggtggctcatgcctgcaatcccagcactttgggaggctgaggcaggatcacctgaaatcaggagttcaagaccagcctaggcaacatgataaaaccctgtctctactaaaaatacaaaattagccaggcatggtggcatgcacctgtaatcccagctacttgggagactgagggaggagaatcacttgaacctgggaggcagagattgcagtgagctgagatcacaccactgcactccagcctgggcaatagagtgagactttgtctcaaataataataataataatcagaccaagtataatgaaattaaaatttattttgcaaataaattggtcctactacaatttatccttcatagaaatgtggaaactgaagataaaaaaaattaggtttcagaagaaaactatactacacctgttattagattctagccctaaacattgtttttgaggtttttattatttacctgcaatttggtctaaattctgaattatttcctgactacaagtatccaaggaataaatgggttttctttttctttatgatagttttagttggcttctaatgcaacaacaatttttattgtaatcctgtgtgcattctattcctactattcaaattattaatgttatagatctttcattgtagtacttctgaattaaccaaaatcacagtattctgaagatgattctacaaagcctgctgtttctacaaaggctgctgatgatttctacaaagcctgctgtagtgttgctgtggcctctgcttaaaaaagtagaaaacacattgatgcagcatgttcaccccaacctccctgcctaaaggctcagggaccatcttggaagaggaaggcgcgtgagattgtaagagccgaattagggggatggagtgtggagaataaggacacttcatcttggatgctcacctgccaaattgacttctgatgaaagccagctccagaaatgtgcctacagttactactttcacctaaaccctgcccttagtcaaatccttctcttcttctaagcaatcaacttcaattccttgtataacccacagtataaaagggcttttataccattctatcctattgcatgtaagccttgggtctgggaggtaacagtgtgggattccaccatctcatctccctgccacccaaacatgcctgctcttctttaagcaatattaaatgtttgtacttcagaaatttgatttgtcagcctcttcttcagactctcagcttctttggcctttgggagtaaatttgcataggcctgctcaaaacaggatgttctgggggtttgggggtgttgttttgttttgttttttgttttgtttagagacagggtctcactctgtcacccaggttggagtgcagtggtgcaatcatggcacactgcagcctcaaactcctaggctcaagcaatccccccaccttggcctcccaaagttctgggattacaagcataagccaccatgcccagccctggacttttctttaaagacatttacacagtgtaggaattactgtgggtgcactgctcaggtccccttctccaggatgctcattcctacctcatagatgattttcctgcagagatttgacctcagctgaagggcagtcacctggtccaggtggttgctattcacctccttcctgagaacagccaacagccagggacacgctagcacagagatataagagcgaccaaggtgaggccccttctgtgctgcggtgcatgctccagagcctccctgggatcagacttaagagggtctccagccagatctggtcttcgctgctttcctcgagctccccagcgcactcctgcaatgcatcttttttttttttttttttttttttgagacggagtttcactcttgttgcccaggctggaatgcaatggcgcaatctcagctcaccacaacctctgcctcgcgggttcaagtgattctccttcctcagcctcccaagtacctgggattacaggcatgcaccaccacgcccagctaattttgtatttttagtagaaacgggtttctccatgttggtcaggctggtttcgaactcctgacctcagttgatcctcctgcctcagccttccaaagtgctgggattacaggtgtgagccactgtgcctggcccaatgcacctcttgaatcacctcctcatgctttgcttttagagaacatgatccccaacatgtgattccagcaaagattctagaaagccaaccgtgacaatcacttctgggtttagatgacccccccccaccacaagatggcagtgagcacctcatcacagaggtgctgatggtctgcagcaccgcgccaggccagaacgtgccttttacagaagaaaataacccagtagctgactaggatggtgaggagggctggtgagcactgcggtagtgagagggacactagcatcactgagatgcaagtgatggtcatttttcataggtcaaagctcaaagcaggggacagttacagggcagggcttcatagcaccagtgtgatgaaagtatctgggagtggctaaggccagcactatgccatgggaagcaaggtgggcctgaggaggaggcagcagcgtcagcctgcaacaagtgggggctgccctgcagagacctaagagtcatgttatagagcacagtgtctgtaaggccaagaagtgtggacagccaagtgtgtcaattactagacatactcaagaggagcaggaagggcagggcatggtggctcatgcctgtaatcccagctacttgggagactgaggaaggagaatcgcttgaacccgggaggtgaaaattgcaatgagccgagatttcgccactgcactccagcctgtgtgatgggagcgggactccatctcaaaacaaaaaaagaaaaaggaaaaagaaaaaaagaaaaacctaggtatacttctcaagcaaataaaaataatcaaaaccaatatcatgcccgggcacaaatttcatatatataacagatttaaatatatgagggtgattatcctctcatatctccatttttttttgtttttccatttttttctttactaaaaaaagttaatgccaatgacacacaatttttttttttttttttttttttgagatggagtctcacttcttcgccctggctggagtgcaatggcgtgatctcgactcactgcaaagtctgcctcctgggttcaagcaattctcctgcctcagcctcccaagtagctgggaccacaggagtgagccaccacacccagctaatttttgtatttttaatagagacggggtttcaccatattggccaggctggtctcaaactcctgatctcaaataatctgcccgcctcggcctcccaagattctgggattataggcgttgagccactgcgccccgcctatgtatgattttttttttaattttattttcataagtttttggggaacaggtggtattttgttacatgagtaatttctttagttgtgatttgtgagattttggttcacccatcaactgagaagtatacactgaacccaatttgtggtcttttatccctcacccccttcccaccctttcccccggagtccctgaagtccattgtatcattcttatgcctttgcatcttcatagcttagctcttgaacccttactttctgtttgagggagaagacatatcatctacaagtagatactgtgtaaacattccattgcatgactatcccataacttatttattatttgtgtttggttatttgctgctatgtaacaaccccactcccaactaaatggtgtgacaattccatgattctgtggatcaaaaattctgaaaagtcaaacccaaggagttttgtctctgctccatgatgctaaagcctccgcaggggtgaggcgaatggctcagggtgactgaaaagctcagggttggaacagctggggatgaggcctctatgtataagatgattcttcactcacaggtctgaaactatggtggggacagccagaaggctcggctcagctgggacagtcacctgagccctacacatgacctctccaacatggtgatcctgaagcagttgggtttcttacacagcatcacacttttcttttttttttttttttttgagatgaaatattgctctatcacccaggctggagtgcagtggcacgatctcagctcactgcagcctccgcctaccaggttcaagcgattctcctgctccagcctcccaagttgctgggattgcaggcgcctgccaccaagcccagctaatttttgtatttttagtagagacggggtttcaccttgttggccaggctagtcttgacctcttgacctcaggcgatccgcctgcctcggcctcccaaagtgctgggattacaggcatgagccaccgcgcccggccaaagctcacacttcttatgattcagccttagatgtcacatcagttcattttccccacacttattagtgttagaagtcacaagcccacccatactcaggggactggcacacagaccccactctcaatggaaggggtgggacaccaccattcctgctgatgggcatttgggtaacttcctgtttgaagctattaagattgggctgctgtggccgggcgcagtggctcacgcctctaatcccagcactttgggaggccgaggcgggcggatcacgaagtcaggagatcgagaccatcctggctaacacggtgaaaccccgtctttactaaaaataccaaaaaaaaaaaaaattagctgggcatggtagcgggcgcctgtagtcccagctactcgggaggctgaggcaggagaacggcgtgaacccgggaggcggagcttgcagtgagccgagattgtgccactgcactccagcctaggcgacagagcaagactccgtctccaaaaaaaaaaaaaaagattgggctgctgtgactattctagtaggtgtctttggtgagcgcctacacgtgtttctctttttctctttagtatatgcccaggaggggaactgctggctcccagataccgtatgttcagggtcacacacacttccacagggttttccaaagcccttgtaccagcacgcactcccagcacctgtgtgactgctccagctgtcccacagtctcatcagttctattgctgatattttcattttagcttaagttatatttaataggaaaattaccgttgcctctgccccccgttcctgcctgtaggagtttctcgtagctgttgctacaggtggccacaaatctgtcacttaaacccacacaaattgatgtccttatggctttggagtcagaagtgtcaactgaaggtactagcagggctgtactgacctggtggcctcagggagcatctgtgctgcttctccaccttctagaggctgctgcatccctcgctccagccccttcctgacaccactcaccctcctacttctgttatcacatcctcaccttctctgtgttcagggctccctctgtctctctcttgcaagcacacttgggattccattgagggccacccacataacccaggagaatttctccacctcaatatccttaacaactgcagagcccttttgccataaaagttaccattcacgggttccagggattgtgacatgggtagctttaggagtgattattcctgcctgtctcccgctcaccagaacttggactttctctctcaacaggagccccctgtgtgggaatagcctgtctcaacgacgccctctataaggacctgcttcctcaaaggacctcatagtcgggtcctgcccctcagtgtccagtctgccttggctggaggggctgcaggggtgtgttggcgccacctggtggagacagggcatcacagcaggtgggagcccagtagaagcacaaccaaaacatgggtaatgtttaaaattttctggctaagcgctgtggctcacgcctgtaattccagcactttgggaggccgaggtgggtggatcacatgaggacgggagtttgagaccagcctggccaacatggtgaaacatcccctctactaaaaaatacagaaaaattagctggacatgtggcgcgctcctgtaatcccagctactcgagaggctgagacacgagaatcgcttcaaccccggaggggttgccgagatcgcgccactgcactccaggctgggcgatagagcgagactctgtctcaaaaaaaaaaaaagaagaggggaggcgaggggaggggaggggaaaagggggaatttgtttggagctgagacatccatcttctcctgacctcagatatttgcactcctggttatgaagccttcacacttggactgaatacaccaccagctttcccgatttccagcgtgcaaatggcagatcgtgagacttctcagcttccataattacatgagccaatttatatatataaattgggtcctccagaaaaacagaataaattatatatataattatacgcataacttaattaaattatacgtataacttagctatatatataatttattctgtttttctgaagaaccctactgacacaaatgttgagcatcttttcatgtgcttattggcttaataacttgtacatcttctttggggaaatgtctattcaagttctttgcccattttgtaactgaactattaatatttgtctttacattgttgagttgtaaaagttccttatatattctagatactagagccttatcagatatatttctgcaactattttctcctaatatataggttgtgtttttattttctttttctttttttttttattgagacagtctcactctgtcacccaggctggagtgcagtggcatgatcttggctcactgcagactcgacctgccaggctcaagcaattctcccacttcagcctcctgagtagctgaggttataggcacttgccatcgcacccagctaatttttgtattttttagtagagccgaggtttcgccatgttgcctaggttggtcttgaactccctgcctcaaagcgatctgtcagcctcagtctccctaagtgctggaagtacaggtgtgagccacagtgcccggccatctattttcaatagtgttttttgatgtacacaggtttggaattttgataatgttcaattcatccatttttttttttttttttttggttctttctactggaccaccactcttgagccctctaatccaacctccacgcggcagccagagggagctctctaaatgtaattactctttccctgctccacctgctcaaaacagtgtcacatttgtgatttaaaacagtatttctcaaacctaatttgcaaacaaagcaggtggaactcttcttgtatgcacagcatctgatttggttggtctggcatgggtctgggagtgagcacacctaccaagcggctgctggggtaacttgcgttttccactgatgatttcagcaatgtttccggtcccacatgctcctccagaaccttgtactcccccatgaaaaggtggagtccatttccccttcctttatttatttttttgagacgaagtttcactcttgttgcccaggctggagcgcaatggcgtgatctcagctcaccgcaacctccgcctcctgggttcaagcaatgcttctacctcagcctcccgagtagctgggattacaggtatgtgccaccacgcccagctaattttgtatttttagtagagacggggtttctccatgtcggccaggctggtctcaaactcccgacctcaggtgatccgcccgcctcagcctcccaaagtgctgggattacaggcgggagccaccgcgcccggctatttccccttcctttgaacctgatcaggacttgacgatggcatcaacatggtgagagtgaccctgcatggcttatgaggctgggttacacaaggcgatgttgcttctgactggctccctctcaggatacatgcccttggaacccatcctctaagctccttgggagcccaacttagcccatgtggagacaagacagggagagaaacagaggcacccccagccctcagccagcatcaaccgccagacaggagagcaaatgcgccaacaatgattccagctgaagcctcagacagcgtggagcagagatgagggatccctgcagattgcagatgcgtgagcaaaatgcatgctgtcactgttttgaaacaacaatgtctgggggctgtttgttatgcagcaatagacagctgtaacaatgctgttactgctgtattccatgaatgactgcactttgagtagcagggggctagatcactagataagccccatggcttctgtgtatgctatttttctacttttatatccttttcattcactttttttttttttttttttgagacagagtctcactctgttgcccaggtgggagtgcagtggtgcaatcttggcggactgcaacctccacttcccgggttcaagcaattattgtgcctcagcctcctgagtagctgcgactatagatgcacccccatgcctggctagtttccgtatttttagtagagacggggttttgccatgttggccaggctgatctcagactcctgacctcaggtgatccacccaccttggcctcccaaagtgctgggattacaggcgtgaaccactgcacccagcctcattcactttctttacttggctcatttttccttgttgcctcaattctcctctaagatcactttcctgacatttcagcctgggcctgttgccttctctgggtcccctccgcctcctgtgcctcccccatctcagccttgatccctcagattatacttcctctgtccccaccctgaccatcttggctgtccctggatagggatgggtatcttctcccactggtctgggagatctggaaggacaggcctggaaaagacttggtcactgctggaaggagctcagttagtgtggtgctgaggacagtacgggtgaggctggccccttcacccaaactcccactctcttccatagatttcacctctgtggcccaggccataggattagggcaactccccttaaacatcgagtccatcctccaagctgtccttttttttttttttttttttttttttgagacagagtctcgctctgttgcccaggctggagtgcagtggcgcgatctcggctcactgcaagctccacctccagggttcactccattctcctgcctcagcctcccgagtagctgggactacaggagcctgccaccacacccggctaattttttgtatttttagttgagacggggtttcaccgtgttagtcaggatggtctcgatctcctgacctcgtgatccgcccgcctcggcctcccaaagtgctgggattacaggcgtgagccatcgcgcccggcctcatgctgttcttgaatagtgagcacctgttacaagtcgccccaccagcctctcacttgtacccccctcatctctttctccccaagagacagaggaccctggcacttgtgaagcatgacccagaccctggggccatggcatccaacatcctcattccccatgacccctactgtctagatgtagctgccaagagacccccagactccccgggcctctgtctagagtgccaagacagagagagaatgccctgccgcttgcatgctttgtggggtgtccttcccccttccctggctgctaggcgtgacttcaacgttctccccaacccccaaacagcagcactgacaccagctgcagacctggctcaggttagctaatgaggaccaggctggggatggagcctgaacccctaaaccccagtcctgtaccccaccctaatcctggggtctccactggacaaaacgaagcagcttggtttttcgttgttattgtttttgagatagagtatctctctgtctcccaggttggagtgcagtggcgtgatctcagctcactgcagcctccgcctcccgggttcaagtgattcttgtgccgcagcctccccagtagctgggattacaggcgcgtgccaccacacccagctaatttttgtatttttagtagagacagggtttcaccatgttggccaggctggtctgaaactcctgacctcaagtgatttcccagcctcggcctcccaaagtggaagcggcttatttttaaggagaaaactcccgtggaaaggaatcagcacctcctctgtcaacatttcacttctctgaaaagactctcacttccaacagaaagtgctttgtaacacaacaatgaggctgggcgaggtggctcatgcctgtaatcccagcactttgggaagctgaggcgagtggatcacgaggtcagaagttcgagaccagcctgaccaatatggtgaaaccccgtctctactaaaaatacaaaaattagttccgtgtggtggcgtgagcctgtaatcccagctactcaggaggctgaggcaggagaatggcttgaacccaggagatggaggttgcaatgagccgagatcacgccactgcactccagcctgggcaacagagtgagactccgtctcaaaaaaaaaaaaaaaagaatgagaacatatggacacagggaggggaacaatacacacaaacaaaatttagaaacaggtgaaaataattttagtaatatttttactaatactgatatgctcaaaatattattatttcaataagtaatctaaaaattattgagatgtcttatgttcttttcatcatactaagcctttaatatttggtgtgtattttacactcacagcacatctcaatttgcagtccccatgtttcaagcactaaataaccatgtgtgtccggtggctaccatactggacagcgttgatctgaaatcgcatctgtatgcatcaccagcatatttgcagagatccccatctcagcagcacacctgaggctcatctgcgaaagcacctgcaacttctctacaacctcccacatcacctccaaacacatcctcatgtcatctgcaaacacacccatagctcacaggccaatgcctaaatatcattgcaggcaccttcagagaaagcacttactaaaggggtatacttgattccacatctgctttgacctgcaaatctcccttctcctttacatacatttgcatctcatttgtatgtcaatctaaatccactggcagagcctcagatcatcatctcaaagtcaggtggatgtggggctgggcaggcctccaggtgttcctcctcctgcttcctctggggctcttgatcctcctcctcttccttgctgctctcctcctcctcctccaatatggtgaccagttcctcccgcagcgcccccatctccagccccaggctgcacagctgtcccagcagctggacatccactcggcgcaggttcccctgccagtaggaaggggacgtcacagggatgccaccccagagagcaaggggtctctccaggacctgggtgagagcaggtcccaactcatgtcctggccacagcgcctgggcagggtcctcactgtgcccatggaccctaactgccttcctgcttctcagagtgtctcttgatctctaactcttctctttgtctctccatttcattgtccctgacttctctctctctgtctcctccctctcttatctatatctgtccctgtttccctttgtctctgtccccatttattttttgtctttccatgcccctgtctctctgtctttatgtgttgccatttctctgcccctgcctttggctctctttctctcgcttgccctctctctgccctccccaactttctcaaattcagtctgtctctccatctctgttcctgctctccgtctctgcttcccacctctgtccctctcttttgggatctccctgtccccacctctgttcccgtccctcactctatgtctgtctctcggtgtctgtacatgcctctcatgtctctgcttctatctctcagattctgtttttcgatctctggccttctctatttttgttcatttccattcattctcatttcctctctttctctttcccttccaaacccctcactcaccagctcctccctgatccacagcagactatcgcaggcacctccagtgtctgcccctgcagtcctgagggtctgaccagggatttccactggggagacctccctcagggcctgggggggtgggcccagccccggaggcaccagtccagcctgattcagctgcctccacagttccatcgtctctgagctatggctgcaaggagcaggaagtagcaaggtccagggtggcctggtcccctggggagctgtgtgcgtggtggagagtaaagggcagagggagtgggatgggggttcctgggaaaggtatcccaaagtccactcttcagagagaatcagctggccttgtgcttttctttttccttctgaagtctaacctcaactctgctcacagggttcaaacatagcctcttgcagaggtctaactccacccttccctgcctgtctcaggcctgacccctcaggggcgctcagtgtctgtagatgcctggcaccctctgtccttccacctgccccccaccaccacttctccagcctctcctcagcctccatttgacctctggcttgcccatagcttggtccttgcttgtcctcttggcacgggtcatcctagggctttcccaccagtgtgcctttgggggcaggaatggctcccaggggcaccaagacagcaatcccttagctggagtgcctgtgtccaggctgctggcctagggccaagcagccaattctgctgaccctggacttgcctatgggtatattatccctgttgagggtgagggcttctgctgtggaaaagtctgggaagcactgcaggcctctctcggccttggacccttccttcagacccaaggtgcatatatatacatatatataatggtagatcacgaggtcaggagatcaagaccatcctggccacatggtgaaaccccgtctctagtaaaacacaaaaaattagccgggcatgctgccgcgtgcctgtagtcccagctactcgggaggctgaggcaggagaatggtgtgaacccaggaggtggaggttgcagtaagccaagatcacgccactgcattccagcctggcgacagagcaagactccatcttaaaataaacaaatgaacaatatatatatatatgtattttgttttttgagacagagtctcgctctgtcatccaggctggactgcagtggtgcaatcttggctcactgcaacctccgcctcccgggttcaagcgattcccctgcctcagcctcctgaacagctggggttacaggtgcacgccaccacacctggcgaatttttgtatgtttagtggagacggggtttcaccatgttagccaggctggtctcaaacccctgacctcaggtgatctgcccacctcggcctcccaaagtgctgggattacaggcgtgagccaacgcgcccagccccaagtcccttttaccatagaaagtaacatagtcacagtgcccagggattcacaggtatggggagagggttcgttattcagctgccacacccaccttcctaaacctgctgcccttccagtttcctcacgtgcacagccacgcccgtctgcttttagtttctcaatctgttggcttaaccttcaaaacaggcccaggatttgagcacttctcaccattccctctgccccatccccattcatctcttgcctagactgctacagcagcctcttttactggtcccctgcatccacccttgccctctaaggcaagggtccccagtccctgggccaaggaccagtaccagcccctcgcctgctaggaactgggccgcacagcaagagatgagcagcgggtaagtgagcattaccgcctgagctccgcctcctgtcacatcagcagtggcattagattctcataggaggcaaaccctattgtgaactgtgcgtgcgggggatctaggttgcctgctccttatgagaatctaatgcctgatgatctcaggtggaacagtttcatcccaaaaccatccccaccccacccccgacccccagtctatggaaaaattgtcctccacgaaaccagtccctggtaacaaaacggttagggaccgctgctctaaggtacattctccacctggcagaaataatctttacaaaatgtaaatccgattttgacactcccttcttcccactgtgaatagaataaaaccctaccaggcctgcaccgtcagcccctgcccacctctcaacccagtctcctatctctgtctgcaagctggttcccacctcaaggcctctctgctctagaggctacctctccctgcagcgcttttcccctagatctttgaatggctctttccttatcattcacttctacttcaatgtcacctcttcagagaggcctttgctgatggccctacacccagtcacttttttttatctgcttctcatcaaaattgccttgctgattcctttgtttcttattcatcctctcccacatccatcctctcccagcccagaatgttgacttcctgagagagggactgggtctgtcctgctcaccatggtaacctcggcatctagaacagtgcctgccatcacgtggtaggtgctcagtaaatattcttggaactaatgaatgaataattctatccacaagacttcacaatggctcttcatgctgcgatctagctttcaactccaaactggtcttgagatctcacctcagtctctaaccttgacatctaacctcttcacccactctcttacctgaccctaatttttaaaaatgacgtggtcagcttttcagccccctcattccctgtttttaggaggtagtgagtggaagctggaagaataagaaagcttggggagactgcaattgcagtcaggaaagaaaggtactctgccgggaagaacaccccatcttctcctagggaaagattgtggagtcctggggtttgttttgtttttcaattttttgttttaagagacagcgtctcgctctgtcacccaggctggagtgcagtggcgcaatcacagctcactgcaacttcgacctccccggctcaagtgatccccccgcctcagcctcgtgagtagctgggaccacaggcgtgcaccaccacgcccggctaacattttattttttgtggatataaggttgccctatttctttgtggagataaaggctcccctatgttgcccaggctggtctcgaactcctggcttcaagcgatgctttcgcctcggcctccacaaagtgctgggttcacaggtgcgtgagcccgacctgtgtctcgttttgaagctcagggagagggcgctgtgagcaatccctaaaccctttaagagtaaaaagtgcgtgcacctttaagaggacggttagaaaacgcggggcgtggccacaggagaataagttcgcgctgaaccaggagcgtgggataagaccggccccttccggttacgaaaccttagcaagatggcggctccctgggcgtccctgcgcctggtcgcccccatgtggaatgggcgtatcaggggcatccatcgcctgggtgcggcagtggccccagagggcaatcagaagaagaaaaggacaatactccagttcctgaccaactatttctacgatgtggaggctctgagggattacttgctccaaagggagatgtacaaggtgcatgagaaaaatcggtttcgagacaaggagtggatcaggccagataagtatggccatttctctcaggagttctggaatttctgtgaagtgcctgtcgaagctgtggatgccggtgactgtgacatcaactacgagggcctggataacctccgaacctccgcaggctggacatctcggacctccctgccgtgtccaaccctggcctcactcagatattggtggaggagatgctgcccaattgcgaggttgtgggagtcgactgggctgagggcctgaagtcagggccggaggagcagcctcgggacacagccagccctgtccctgcctagcctttagccctgtccccactcacgtggcttctcagcgggctgcatggaatgtctggtagctcaccacacttctggcttccatttgtcttcactcaacgtcagggtgggggagtggtgctggccaatcacaggagagagcgtgagttcccagtatttattcctggctgcccttggctaaaggtcacagctcctgtcaccctgtcaggcagccctttccatgcccctgttcaggcctggggaggtaaaggctcaggctgttagtagccgcagagagccacactcaccttgtcaggagactcttctcaaactgtccttatgtgagtgcactgccatttcttgcagggaccctgactgacacaggggctactactgacactttacagggatggttctcccccgtgcagggccgctgtgcccactgcaggacatgcagcatccttcgccccactccactcactaaatccataaccagcaatactatggggcctgctagttctagatcgcgagcggccgct

SEQ ID NO: 735343 - DNA, 187583 bp, Homo sapiens
ctccaaggctgagggatgaggagacctgctgaggacccagggccttatctttccatcccactccataggtcccagtattgactgatgctgtcttcacctcctagcctcacttttaaccttctggcacccgcccaccactgtccagttcactattgaagccctgccgtccagtgctgcagagggaaaggatgttcttctactggcctgcaatatttcagaaactattcaagcctattattggcacaaggggaaaacggcagaagggagccctctcattgctggttatataacagacattcaagcaaatatcccaggggccgcatacagtggtcgagagacagtataccccaatggatccctgctgttccaaaacatcaccctggaggacgcaggatcctacaccctacgaaccataaatgccagttacgactctgaccaagcaactggccagctccacgtacaccgtgagtgattcccccatacctctgggtgctggcggtcagttctgcttcacacacatgagattgtcaggcctgggctgtgcctgcatccccctctgcattttgtcccgtgttgagatttgggcatttagtgcaggacacacacatggtaggtaaacttcaacagatcagaattcctttcctgcatccaggccctgcagacactgatggcgggggcgggggggcctcagcagggggaggtcagtctcagccaagcaccccatgccctccccatgaacctgaccctgagaaagaccctggagaactgggtcagggcctggcctgagggcgtcctgggaacctcacaaaagcccagcctcaggactcctgactccgtgtgaccccgggaagcctgtgtcagggctggggtgtggtctcctgggcagggcttactgggagcaaggatttaccagatgtctgcgggctgtggttcctgaagcttctcatcagtgagggctcagctcccagagtctcatctagacaaggacagagcctaccactttccctgggactcagcctggagagggcagggggacaggattactagggcattggccccctgaatgaggagcttaagagatgcccttgggcagtcagtggcccaggggtaggaacagaggggagaaaatgttcctggcagcttcttgtccaccggggatcatgcccaggggtgctctcccatggaggcaaataacagatgctgttgatgtgaacacctcctctgtgccaagcttcatgtcagatcctgtgaataatttaaagttcattcacagacaaagtggcaagcctcagaccattttccatttacatattgtatggaggggaaactgaggcacagagagatacagacaccggccacggtgggcagatcgcagctggcagagtcacatgagggctgtctgcagctgctgccacgtcctctccttcatccctggtgccttactaggtgtctgtggaccttagaacagccactggttcggatgttttcttcttaggtgtctacagctcggagggggagattctggtctggagagttatgagtaaatacagaattaatcagttttttcttaactaaatcacctgcctcaacaatcagtcagtgctggggaagttcaggcctcctcgctcaggtccacaccccgcatctctggacatgaaatggcttcgtgtgttttctgatgtgtgggtatcattccaacaggaggataaaggggaggactttgctttctctccccattcacaccctgcaccagccagggcccagtgtgagacacatactccgtagttctctcatgaaggagggagggaatgaatgaaggaatgatctataacctcttcagagacagagacctggatacaagatcctaggaggttctgggcccaacgtgagacacacactctgtagttctcttatgaaggagggagggattgaatgtaggaatgatctataacctcttcagagacagagatgtggatacaagatcctaggaggttctggccacacctgttttctgtccctctagagcctaagacccatgtctcattcatctggcccgtttctcctaaatctgcccctgggagctgagtctcatctgaccctggggctgcagggctgtgggaaggttttcaggggagggatcaggcttgcgggtagtcccacacgtttgccttacaccctggagctctacctggttctcactatgaatatcccataataatcccccctatcctttctggggagtagaaaaaaagtaaatatttaaaaatatgccagagcatctgttcttcttagcaagttcagatagttattagttagcaggaataaatcgttattttaccagagcctcacctgctgggggtttatgggagcctaactgactgaggggggtgggaaatatccaactccagccccctctagccatcatgtcccacctaaaggagagaaaaaactgagaggcacttgtgacattcacagcccagggcacagactctatccaggaccacagaacccctccctccccccactcaccaccgcatcactgaacgcctgctcacccaagttcctgttgcccagtacatcatgtcctggctttcaacaaaaactacaagacagactagaggcaaaaaaaaaaaaaaaaaaaatgcagttcgaaagacagaacaagcatcagaaccagatgcagatgtggcagggatgtggcagggatgttgaaattatcagaccaggaatttaaaacaactctggggccaggagcggtggctcatgcctgtaatcccagcatttgggaggccgaggcaggcagatcacctgaggtcaggagttcgataccagcctggccaacatggcaaaaccccgtctctactaaaaatacaaaaaattaggcaggcatggtggtgggtgcctgtaatcctagatactcggaaggctgaggcaggagaattgcttgaacctgtgaagcggaggttgcggtgagcctagattgtgccactgcactccagcctgggcaacagagcgagattccatctctaaaacaaacaaacaaaaaacaatactggctaatatgctaaaggctgcaatggaaagcatagacaatgtgcagaacagacggatgctgtgagcagagagatggacaggctaagaaagaataacaacagctactatatctatctatctatctatctatctatctatctatctatctatctatctatatatatgtatatatatgctagagatcaaactcactgtaacacctggatctcagagtggttgtgaggatgtttattaggagattaaagagattaaagcagagttatacacagggcgagagctcaactgatgctatcaactagtattcttatttttttgatgttgttattggcaataaaatcaggaacaatgcagtaaaaatttggttttatcatgtacgagttctgtgaccttccttgacttactgaggtactgtaagtctcagattctaactctgcagatggcggtgatgcccctctccctcaaggtgatgtgaggatgagatgagctgtaggtaggttggtgcccactgtgcctggcacatggaaggcccctgaaaatagtcaatgaacatcatccccgctcatcagcatggagttgacagtgagggctcgctctctgtgacaatcatggaatggaaaagaagaaacaagaggaagactgggcgcagtggctcatgcctgtaatcccagcactttgggaggccgaggcgggcagatcatctgaggtcaggagttcaagaccagcctggacaacatggcgaaatttcatctctactaaaaatataaaaattagcctggcatggtggcacaaacctgtaatcccagctacttgggaggctgaggcaagagaatcgcttgaacttgggagatggaggttgcagtgagccgagattgcgtcagtgcactccagtctgggtgacagagcaagactccatccaaaaaaaaaagaaaaagaaaaaagcaacagagggaagaggtgtgacatgagaggaagaagggatttaaaggtacaggagcagggcgaggtgcaagcacctgtgggagaatgtaggagttggtacatcccagtgtgtcaagtctgagacacagaaaatggtgcaaccgtggagagcaagggagtcagctatgaggacagcccaacagaccacactcaggctctggagcatttccttcctccctgactatgcccctgccctgcaatgccccttatggtttcccttggaacaaacttgggccttgtcccctttgccttcccctttctgcagaaaacaacgtcccaggccttcctgtgggggccgtcgctggcatcgtgactggggtcctggttggggtggctctggtggccgccctggtgtgttttctgcttctctccaggactggaaggtaccgcagcttttccccagcctcctcccacccctaggctgaccccagtcagggaggagggagaccccgccctgtattcagggccaggctttccgcatcctcccaaggaatccttccctctcattccatggctcctcccttgccagctgctgatcctaggctgcctcttcctttatgaatgtggcacagttaaggttgcacccctgagtgctgtcctagttccctaacacagcaaagccacagctgcctggagggaggaagggagggagggagggagggagataagacgggagtgctcagaacctggtaccttctgctgttcattgaatttacccacccagtgaggagggatttgcaggcttgagatccatggtgggggtcctgggcatggtcacgcagtggggagtggcaaagcctggacaggctgggtagggtcagcaccccatcgtgattgatgtccctgaggtgtgagatgggagaacctggacctcaggacctgctgtcctttatgtctcttgccaaggggtggagagagagaggacaaggccattgccccatttcagcatctccaggcctgaaaggagggtctggccatggcagggatactgagttctgggagaatatgatacatgctccttgcctccccatgcccccagctcccccagtgtcctgcacacacagccggccctgctttccctctggggccttgacccttcctctcaggcaaacgcaggtggtctgattccctccctgagtcctcagtccctttcctgggtccctgggtcaatgttctcctcacccggcatctgcctgggggggtccttcctctctggccaggacagacgtgactgcttaaggcctatcctcagctccccgtcctcggccgctcctaccacgaaactgatggagacaggaggccttcactccagtccttgaaaatggagtcccttccttgtcctttattctgcccctaaacctgtgatttctccctgcaccctcatgaataatcctgacctttcctagggccagcatccagcgtgacctcagggagcagccgcccccagcctccacccctggtgagtgtcccttcagcccaggtgtgggagcccctaggcctgccctacggtgtccactcctgccagtcaccccctgggggcctctgaccctttctttggggctgcaaggaggatgtcaggaaacatgacacaggggaccccgactgtcttgttcagactgatctgtgggctctgggtcgtgggtcacctcctcgacctcagctgctcaggtctcccctgggaagaggctccctctccctgattctctgggagctgaggacccctacactctcctgcaggaggggcccaggctctcctcccaccctgctgctcactcctgtctctgtccccaggccatggtccctctcacagatccaccttctcggtaagcctgttccctccccagcccttttctactggggtcccaacagtgcaggctcagggcagggggaccatcaaccccacagcacagcactgacccacctttccccagaacagtcaggtcaaagtgagtgcctccagccaggatccgggcctctctacagggccaggaccacccacgccatgtgctgacccctccccgggaccctctacacctgaggagaaccctggagtccagcaggtgcagaatggacactgggaccatcagtcagaggcccacattaacaagggtgcggggtgggcccagccaggacaggggtcagggtgttgtgtccacactgggaggctgagctcaggggcagagctggtcaatcctgaggggaaatgagtggaagtggaggcagggaagtaagtcctggccgatcagagacaggaaccttccaggctgggcttccgtgaccctccctccctgtcccctgacatctcctctctcccctgcccaggcccctctacccagccccagaacagccactcccatctatgaggtgagtgtgggccatggatgttctggtcccgcaggctccaggggacccaggatctgcccccaccagcacctggctgagctcagattcaggaaaatgcagtgaaaatgagaacaggtggtggtgagcagaggagggaggggcctgggaacagggaccccctgagcacagccaggttcagccccagagaagccctgggtgggcccagagcctgggagatgccagacactgttctgagaaggctacaggggttgaggcctcttctctgtttttacaggaattgctatactctgatgcaaacatttactgccagatcgaccacaaagcagatgtggtctcttaggttcctctgggagctgctcttgtgggttgatggagcgtccccaaagctcccagccctggggacggggaaggacatggagcctgagccagagaaccagctctgagtcctgaggagacacaggcctggggacagggagggatgggagtccctgctgaatatctggagaccctgacaggttgccctgggctctgggtgggccgggacaaaggcctctcatcaccacaggaagcgggggcttgcaaggaaagtgaatgggcctgtggcccacccggggtcaccaggaaaggatctgaataaagaggacccttcctctcattggctctttttctgctcacgggaacttagcagaaactcacctgaaactccgtgtccattctctcccgggtcacacagggaaaatatctccaccttgtctcaaccacagtctctcttccctgggaggcagaaataggggttgggagtcaggctggggtgggccctacacaggaaagggcaagattcacatgagccctgcccagccagccgagcgctcagctgtcctcacactaccccagggaccaaggccatgcacagccccagcctgggtccctctgtgaatgcatgtggggtctcaggagcacagaagatggggccatctgatgtccacaaaaggtgagcaatgcgggagcaaccatgggtggtataggttgcggctgtggcccctacgcagcctccagtgtcctgacccctgctgccctcttcacccaggccctggaggcccagtctatcactgtcctccacaaatgaacttacctgtccccaaatccaggatcctgtgtgcttatacctggccactaggttctcctctgtcccagtggctactgctcaggacatctttatccctggtggggcacagagaggggctgtcagagcaaccaagattaatacagacgcataattcagtccttgagcactacccaggactctggcccctcattgctcatcagttcccactttaccccctggcatggatctcactgagcaagccaactctttacacaggagcatccaggtcagaggtgcaggactcccccatctaaagctcatgcaggctcccatggcgatgggacaacctgtctgctcctctccctggcccacagccctatctcgcctgcagctcctccacacacctgggacagcagttctcagcccttccctgagggcccctggaagggtgatgatctcatataggttcacttgaaccaggtgccaccttcccacaagtgagctggtgcctgcactaaagcacagagccacagttcccaagagtgttctgccactgccacaggtcccaagagtgttctgccactgccacaggttgttcgtcctgagatgagaggtaagaaaacaacccgcaatgggttgttttatatcgggatttgcatcaggatttagctctaaatgacccctgatcccacctgcacacagcgtcagatgagacaaggtgaggcctctttagttttctgttgaggctgtgacaaattaccacaagcttagtgacatagaaacctgaaccaaagtgcccacatggctgtgttctttctagaggctccagggaagagtgcatttcctctccttttccacctcctagaggcctcctgcaaccttggctgtgtcctctttctccatcttcaaagccagcagcacagcatcttgaaactattctgtgccctgcttccatccccacatctccacctcctcccacctccctctctcacttaaaaggaaggagccttgtggttattttggacgcacctgggataaaccacaacaacctccccatctcatgatccttcctttaatctgtaaagtgtcctttaccacgtgacatgtccacagatctggggatgaggatgtacacatctttgagaggcccttgttctgtccatcactcctctcaaggccatcttctcatcatcgttcactacaaactacacatgggcacctggatgggttcatcatgactgtggcgtcagttcctgcattaacatccccagcaccctccagatcctgagagagggagacggagggctctccatgcccctagtacctctccaccttcttcttggtgacatgcttagttgctaagaataacagaaagcggaggtgactgaaagatcacaactcaccggcccttcaatagttcgtggacatcagcaccacggacagtgactcagtgaggctaatttccaggtggcagcagggagcatgcagataggagggaactgcaggaaaagctgcccattctattctatatgagaaagagtgtaagaaagaggaagctattacagggataatgctattcttctctaatccataaattgcgaaacctttgcatgtctggatatcatggtttttagcacatctgctgccactccctgcagggctgattgctgcatccaggatgtggtctcttggggggctcacagcctgctttggcctcatggtgagtctccctgcccctgacactcaggccactgtctctgcctacaacatggtgggaaccttccatgattaacgtctgattctctgtgcctgacctttgaagcacatccatcactcagcctggagcatccgctgagctcagcatcctgctcctccatccccagctgagcccttgaggagatgcttgagaggatctcctgggctcctctgtgagctcctccaggctgagccttgtgcttggtgtcagaggcctttgccatctgcttgttctttccataggcaaataatcctcctcagggacaagtggggcctgaagatctgtctgaatatctatctatctatctatctatctatctatctatctatctatctatcatctatctatatgtatgtatatatgagaatgctttattaggcaaaactgcatactatgaacatgctttaaaatgcaacaggatgagatgtgaagacataaagaacaagtgtgtagtgacacatggctatcagaacacactgaagaatccacaccgcggccgagagcagtggctcacgcctgtagtcccagcacttttggaggctgaggcaggcagatcacttgaggacaggtgttcgagaccagcctgaccaacatggtgaaaccccatctctactaaaaatacaaaaaatttagccgggcctggtggctcatgcctgtagtcctggctgttcgggaggctgaggcaggagaattgcctgaacctgggagacacaagttgcagtgagctgagatcgcaccactgcactccagcctgggagatagagtgaggctccatctaaaaacaaaacaaaacaaaaagaatccacactgcttccccgcttcactttacccagaaaaggaatgttctaggccacttcctcttcagcacacatccccagggaactaaaataggttcacagtcacccccatcttcctcattcccatcacctcttacccacagaggcatctctggtcctacagatccagccctgccttcaagaggcacaggtccaacccatccagtgtccctgctagtcacacacagcactcagggtacaatggagggcttctgtgctttggatgggaacaaaccccacctcacattcccacacctgagaagccaccagggtcctctctgtcctgtcctcacactcaatgtctgtcctgggtcacccttgtcatctctcctggaaataggcatggctcctgacaggtaggattgaggctttgtcttttcaggagtccctcccactctgagcacatgaaactgctcagctccatgcaaccctctctcaccaggggccttgttctctgggtccctgaatacctgggtccatgccatgtacattttaagaaaaatgacagtgactctcaccctgacatcctcacccaaggcacgtgtctgacaagaatcaccaggtgagatacctgtggctccacacacctgaggcttcactgcgcaggggtgtcctcatccctctcctcccacccctagggacagtaagcaccacaggctgccttggaccaccagctccccctcccagacacagcctcagatctatactgacatgctacatggagaggctctgatgaacagcaggtattaggaaatcccaccgaaccaggtgccacttgcggccccactcctcctcatatctgtgactgggacagacacacataacacacctctgttcaccgcccagcccccaaggtcaatcacagtctgcttctcccctagatccactgctccccatgtcttccgtcctcagctgcatcctgggtggcctccttgctgttcttgtaccccagaggcaggttccaacctttgtgatgttgcctgcaatgcccaaactttcccttccccttccccttcccttttcccctcccccttcccctccccttcccctccccacccctatcccttcgtcttcccttgtcttcccttcccttccctataaagccaaacatacccatccacctaccttgtggtcaaagtcatcagcctcctgctccactcagtgttctctgaccctgcatatggaggtggtggcccctcctagaacacccaccactcactgtcagccttgcgtggtaatcacagattttgcaggggttacctgtgttcaggtgtgtcacctgtggaaccagaactcttggaaggactggcagagggagctgcttaggatatctcagggctcctggcatctggtctaccacagggctattaacaacagcacttagggacaaggtggaggatggacggttaagagggtaaatatggatgatgtgtgggcaaagaataggacacaggaacacatgcagtactcaaataattatgccaagaaaggtgaggacatggagatggacattcccatatacttctgatgggactgcagtttagtccctacagcaacattgacctcatcatgtttaacgcgcacacgctctgaccactatcctacttctgaaggcctccctgtgctgtgagctctgagaaggccaagcttgcctgttctgtctctgctaaagccagagaccagccaatagcccagcacagggtacttcataaatacatgttgaaggaatgagctccaggaacagtactccacatggtagagatgtgtgtatgaggatgttcactgcagaaggtcatgtcaatgtgacaagtgacgagcagcctcaaatccagcaacaggggtgtgggtaaaagatcatagtgtagccatgcaatggaaccaatgaaaaaaccacaattagagcaaatccacatgtattaataaaggaggtgccctccatacatgctgcacctaacagaatgttgccaaataagaatgaaaaatgatgatatttgggctgtaaaaactagaagtcagctaaataagaatgcatcgaaagtatttgtgaatgcttacaattttataatgccttggcatccgttttggatggaagttggactttctcataccagaagcagggctcagtcacctttgaaatagtttccagttctccacctccttccagttcctcagtgtgattgatcagatatctgatttatacaactgcctcctggtgacctcctccctatgggacttccggatacagcccgtatgactgccccactgaccccacaccctgcctgctgcagtgaccacctctaattacctggatctcatgtctgcttgcattaaatccaccaattaaaactccctgaggacaatctgtttgaataatattctgtaccctaataaaggccttgacccatgggttccccctctgtcctccccatactgcccctgacctctgtgtgtgtgtgtgggtgtgggtgtatgtgtgtgtgtgtgtgtgtgtcctccagacagggcctgtatcccccaggacctgtaagtaataaatctttattttcatcttatgtctctcgcaatcattggcaagagctctgcatcttaaagatcgcaaatttaagaaattggtgtagtcggcacaatagagtacctcttctgtttagcacaagatatctcggagctgctgaggcttttaacatcctcgccggtgtggctgcctcactggtgaggccgttctgttcagtgcaattcagttgctccactgtgtgctgctgtgttgctgctgtagagtgctgccatgttgttctccccaaattgttaccgagtaggaacctgtaatgtgctcccaaggtggtctaccccatgagaagggggattctccatctagggcaagggctaggtgtgtttctggaatcctaatagggaaggcatccacagagggtgaactccactcctccttagagtgaggagtgacatttcccatttattttccccatggaggtgccatgtattgactttttctttcactgtcccaaggttgagccaaggtgagctatggagaccagggcaagataccatttctgttagcaaagcaaatgggtgacaacgtgtggagaagctgtggttctcctgatggatatagcagagtgccatttagtaaaatcttgtcaggaggctgcccctggttagaccggcagtgtctgtagtcactaaggtggatgcgaattttaggccctgggccatggataatccctgcagacacagccgtggcttcatgtgatggggcaatcccgggctagtggctcccttgtttctgcatttcttgctgtggttgcacaatcaacacctcaggggttgattgggtcaccttggaaagagaaacagctgcctaggaggctggtgcacatggaggccaccctcaattttattctgctaacaagttgtaagattaaaacaacagggggctttgggtaccatcaggaacttgtcaagtaaacatccaaagacagaaagaagaaaaagaaaaagacattaaccgtctagaaatacaagccattttaaagattttgcttaaaagatgcgcttgggctgggagcggtggctcacacctgtaatcccagcactttgggaggccaaggtgggtggatcgactgaggtcaggagttcaagaccagcctgaccaacatggtgaaacctcgcctctactaaaaatacaaaaaattagcagggcatggtggcaggtgcctgtaatcccagctacttgggtggagaatcgcttgaacccgggaggcagagacggcagtgagccaagatcgcaccactgtactccagtctgggcgacagagtgagacttcatctcaaaaaaaaaaaaaaaaaaaaaaaaaagacgggcttgtttcgtcgttgtggagtcatcccagagagaggctactccctagagtcactgaccacctttcctcctccatcttttcctcttatcattctagagacagaaaacaagaatctcagctttaggtggctaacctcaccccccaagaaaagaaactaccactttgattgactacaaatccaagaaaaataaaagagaaactttaaaaagtactgagcaaaccacaggtctagcaaacataatgctagccctaggttacttattcatttacaacaaacccctagatataggaggaaaaaataaaaggtaattaaatatatacacatacaatattttaatataaatatataataaatagttaaattatgtatgtataatatgtaactaaatcaaagtaaaatttcatactttgattctattggaaattcaaaattcatttattaacttatatattaaggaatttatgtaaaaaaagatttttaaaagggcaccaatttgcttttgtgtctctacaacataggatctaatttaactttacatttgctaaatacactaattgacaaatattcatggatttaatcaatactggggctcaaattgtagccacacgtgggaatcccataaatttaaacactctgtccctattatcttgagaagaaaactaaatataaaattgaaaaaaacaggtatgtctcaatttacctgtaactttgcctaaatttcccggagtcatatacccattgctgtaaaacattctctattggacataggtgctctgagacaataaataaaatagaagtgtttttggtacttagacattggcttgacaaaatgggatcccatgaaacctcagttaagatagtgaatacggcccaatgtgagttgaaatggggcctttaaggattaaaacttattacatgaaacctagtaagtaatggggtgattatccatactgcttctccatttcatagcccaattttgacagttgtcaaatctggaaaaaacaaacaaacaaacaaaaaaacccctgggaatctgttgcctcacagagacacaaagtagacatcaaaattgtatatctcagttccagttccaaaatggtggcatagaagcaagctggctttactccttcacacagaaaaccaaaaacaaatatacagcaccaaaattattaccagatatattccagaactcaaatatgaaaatgaaacagttttcagagccacagagaagtgaaaaaaactcccgacagatgacaaaagaatcagatttccccatctgtaatgtccctccctgccccattctgcctggtaccaggtgtgtggaaaattttaccccaactcatggtttctacactgggaaatgtaagatcaatgcgggcaaccagtttctgcacaatcctgggttccctgtccctgccttaacccacaagaagcattgtgagtgcccgaagggagaaatttccctgaggacagtcaaagagtggggaggcaggactaccatctccttccctggaaactctgctgtgtaactcagccaagggagacatgaaatcagactggtgtttcagcagctccatgttgtagtaggtttgtttcacaggtatcctgggcatggacatctagccagctttcccacactgccaggatatcccctttgggacctccctcagttaggaagggcacactctgatcatttactagggccaaggtaaaccctaaaggtaacttagagatgaaaaggaggtagtgacctagcagtaaagaactctaagaaaatctatccaataaaaatcaaaacaagccagacaaagactaaaataaataatgaatccttcaatgtaaagacctggacttacatccacaagaaacagtaagcaggtaaccatgatctccccacatggacaaagtgaggaacaagtgactgatcctgatgagatggtgatgtgtgagctctctaatcaagaattcaaaactgcagttttaaggaaactcaatgatcttcaagaaaacatggaaaagcagttcagaaatttatcagagaaatttaacgaagggattgaaataatttaaagaaaacaaacaggaatcttggaattgagaaatatatttgctgaacaggaaaatttattagagtctctcaacagcagaatggatcagaggaaagaatcaacccaaataagactcccccaaggcataaaataatcgaattctcaaaagtcaagggcaaagagaagattttaaaacagaaagagaaaagaagcaaatggcataaagaagctccaattctgtggcaacagattttcagtggaaatcatacagaccaggagggagtgacatgacattctcaaaatgctgaaaaaatattgacatttgagaatactttatccagtgaagttatccttcaatataaaggagagagaaagtttcctagacaaacaaaagctgagataattcacaccatcagactagtcttcctgtaaatactaaagggtaaatactaaatacttcaatgtgaaagtaaaaaaaaaaacactaacatgcaaaacaaccacaacaacaataacaacatttgaaggtataaaatccactggtgaaattaagtacgtagacaaacccagaatactcaaatagtaattgtggaaagtaatccaatcataactctagcatgagtctcaaaatataaatctatcaaaaacaataatacattttaggaggccaaggttggcagattccttgaggtcaagagttcaagaccagcctggtcaaaatggtgaaaccccatctctaccaaaaaatacaaaaatttgcagggtatggtagcacatgcctgtcgtttcagctatttgggaggctgaggcaggagaattgcttgaacccaggaggtggaggttgcagtgagctgagattgcactactgcactccagcctgggtgacagagggagactctgtcttaaaaaaaaatagctacctgtttggagaaaggtaatataaaatatgtaaatagagacaaagtcaaaatttgcaaaggatgaaattaaagagtagagtttttttggggggttttctgtttctattattttatttgtgatctaagataagttgttaccttttcttctcttgaagatactttgttatatctatgtttttggaagtcttatggtaactgcaacgcaaaaaatctatgatagatccactgaaaataaaaaacaatgacttaaaacatactaccagagacaatcaaccacaaggaagacagtaaaaaatgaagaaaggaagaggggagttacaaaacaaccagaaaacaggcaacaaagtggcagtagtaagttcttacttaaaaatattgaacactgaatataaatggactctattctccaattaaaaggcatagagtggctgaatgctgcctatatgctgcctacaagaaaccacttcatgtaaaaagatacaaatagactgaaagtgaagggggtggaaaaagatatttcatgcaagtggaaaccaaaagagagcaggagtagctatactgatatgagataaactacaaatcaaagactataaaaagagacaaagaaagtcactatgtaatgataaagcgctcagttcagcaagaggagatgccaattataaatatctatgcatccaacacttgagctcccaagtctcccaagtatttaaagcaaacaatagtggatctaaaaggagagatagactgaatacaatattaattaggggactttaacaccctgctctcagcaatggccagatctttcagacagaaaatcaacaaggaaacttcaaagttaaactacacactagatcaaataggcctaactggcatttacgggacatttcactaactatctaactgttacagaattcacattattttcatcagcacatagaacattcttcagaacagaccacatcttaagtcccaaaaccagtcagaataaattcaaaaaagtttatatcacatcaagcatttgttctgaccacaatggaataaaactacaataaatgaataactttctggacacatacaacctaccaagatggaagcatgaaaaggcagaaaaacccaacaaaccaacatgaaactgtaacaaaaggaaaacccaggaccgaatgacttcactgctgaattctaccaaacatttaataagaactaaaaccaattctactcaaaatgctttaaaaaattgaagaggatggaacactttcaaactcattctacaaggtcagcattatcctgataccaaaaccagacaaggacaggacaaaaacaaacaaacaaacaaacaaacaaacaaacaaaaaaacactacaggattgcttgaggccaggagtttgagatcagcctgggcaacatagtcagaaccaatctcttaaaaaaaaaaaaaaagaaaaaaattagccaggcatggtggcatgtgcctttagtcctagctactcgggaggctgaggtgagaggaccaattgagcccaggaggttgaggccgcagtgagccatgtttgtgtcactgtactccagcctggggaacagagcaagatgctctctcaaaaacaaaaagcaagctgggtgtggtggctcctgcctgtaatcacagcactttggaaggctgaggtgggagaactgcttaagcccaggagttcaagaccagtctggacaacatagggggactccatctctcaaaaacaaccaaccaaaacaaagccaaaaaagaacataggccaacatcactaacaaacatagatgtaaaagtcctcaataaaatattaacaaaccatgtttagaaacacatcaaaagagatcattcactatgattaagtgagattcatcccagggatgccagtatggctcaacatatgcaaatcaataaatgtgatccatcacattaaagagaaccaagaacaaaaaccatataatcactccagcaagtgcagaaaaggcatttaataaaagaatgggttgagggagtggagcccatagtcagagcagcagtggtctgggattttggaagtagaaagaagggcagcaccactggccaggaccaccagggaacacccccataggccctgggtgttgtgctccagggagggttccctctggagttattaatcttggtgtccactttgcccagctgcccctcacagggtcagggaggatgaagggaaagcttccttctaatgaaagttcagggactcacagttcctagagcctgtagggagaggaagatcttcgaggaagagcacctgggcattggggcgtttgagaggaagatctatgccaggtccaagtggacaacctgtggactctctctccagggacatacgggtatctgggaatctcctgtagcttaaagaggtaaagacctctccctttagcctgaggactggaggatgctggttcaggtgaatgagtcctgcaggggctggtacaggcctggagggtggtggtgtccagggccttgggttcacccttagcatgattcaggccgggcggtgtttcacatgagcaagagggcctgggttcattgcttcaggacaatggtgaaatctcatggtggaagaaatcttgtccttgccagtgcccagctttcatttggtcttggcccagagtgtcctccctagagaagactcttgtcccttcttcacactgcccttcagggatatgccagccttatgggataagatggggtggagactgtagatgtgggtgggaatctctccacagagtgctccttctctcagcggttgcaccttgtctcagggcttcagcttgaaatctgggatctccaagcccttccctccccagtcctggccaggaccacatgggcagatgcattgtgtgaagtgcatttcatttggggtgtcctctctgcatggcaccctcccgttgattctctttgcgcatgtcagagtgcaggcaccatccacacctcctgctggaggagggacggagctgttgactcctgagagctgatcatgtgttcccaccctcacacacaatcatggtccatcctctgagggacatgtgttgccaccactgtggagatggtgcaactgacagtaacaaacagtaaaatctggtactgaatgggaccttaagccaacaatgacaatgtcattccaaggtgtttcatttttattgattcaatgcaagtcacctgatttcattgactattcacaatagctcgataaagtaaatgcatcatcaccaccactttaaagaggaaaaaggtgcttgggcagtttgtgactactgtggtggctgctgcattgctctctggtaaagccaagtaggtggtgggtgcggcctctgggctgggatgatccaccctcctggtggtggcaggggagccaagctggagccatggcctgtgcagtggtagcagctgaactgaccgctgctgcaggatttgcaagctgttacattttgcgaagccatgaagcacataaaacctcaagtagaacaagtgtttcaaagtctaccaaaatctgccttcagagattattactacagaggtggatatgaacccaaaatgacaaaacgggaagcagcattaatactagataatgaatgaacactagtaatagtagggtaagccctactgccaataaagaaaaaaataagagatgctcattaacatgttatgctcttaaatcacgcagacaaaagagggtctccttatatagtagccacaatcaatgaagctaaagatttactgcaagatcaagctaaaaacagtaggtgtataatgaatttttaacttcatattagtttatgtatatgaatatcaagtttttataataaaatgcctccaaacaaagaatatttgatttagggtttaataacttctaagaggggactcagatgtttcctgtttcacagtcagtctgagagggtcatttttcctggagctgacctgggtggaggcctcacactgatactccccagcatcctctctcctgatggggtttatgctgagcatacagtggccctgggacagctccattctctccatgagtcacagacgctggtcatggaagatccactggataaggttccagagtcatctgtggggcaggtcaggatcacaacatccttttcttctgtgactctggtgttgctgactcagatggggtcggagccactgaccctgtggacaatcagtggaggtgctcaactgaaagtgggctgagggcacgtcttctcctccatccctgggtccttaaggtaactgtggaccccagaccaactgacacaggagctagaaagaaattatttaggaagttagtgagggtaagagcgtccttggcaaggtttcccctttaacaaaaagcagcccaagataattccttttctaacaaagagcagcctgaaaaattgagctacagatgtagatgagcaagatggaagcttgcacaggtgaattccagtaggtgtgccaatagaaaagggctgcctggaagccaggtatgttcaacatggagactccatcctcccttttctccattaccacatgtacagtaaaaaaccaggcaacatggcaccggccaggtagacaatccatctgcatgacaaaagatcagagtggggcagccagcaaatggcacagctggtctaaacaatctttcaccccctgtataaatcagacactgcctcctgaagctcatctataaaaccttctgcatttcactatggaagtggcaacccattttccccaggacccctctctctgtgcagagagctcttctctttctttcccctatgaaacttccactcttaacttcactctgggtgcctgcatcctagttttccatggccatgggacaatgaacctcgagtattaccccagatgaatgatgctgtttcacaatcactggttcagctcccttcttcttagggtttcacagctcggtggggagaataccacgcctcagtggtctggggagtgaggaacaaatgaagaattaatcagattttacttagaacgctatcacctgcctcaaccatcagatccatgttgggaatgtccaggcctcctctcttagatctatacccacttcactggacctgaaatcctgtgtttcccgatgtgttggtgtcactcctatgagaggataaaggagagaactttgctttctctccccactcacaccctgcacaagacagggcccaatatgagacacacactcgctcagtagttctctcatgaaggagggagggagtgacctcgagtgattctgccatctgtagtctgtgtaccctggccagtggctgtatcttcatatgcctcagtttcccctcagtaaaataggacacacaatgagaactaaaaataaaattctaattccccagtgaactgaaaggatggcctcttggccaagcggatcccagagttcctgatcatgacaggatgggaggttacacctcattacagcccctccctttggaagtttagaggtgacaactgactagcattaacgctaaaatcgagatcatgagactgacagaacagactctctgtggccataagataccaaattataaactcaacctaaggtcatgcaggcaagggctaagccacactttcctacatttaaagaataagctatgttctaacacagaattttctttctctctagcggctaaagtaacactagccttcgagataagcaatattgaaatgatcgcggctcatccaccaacactggctaactgacccctgttccaacagccacaactacacttcaattggacaggagactgatttcagtaactttctcctaataagagaccactgagcatggcctggttctgctggtatacagacacggtgcactgagtaccataatgcttgtttcatcttttgatgtataagacctaatttaatacatttaaatctgaattctccaccccaaagtgaacatggggtgcatgtagcatgcatgtttgttgatcacgcatgtgcgtgtacttcctttgtgagtatccatagctccacctataacctgttgaatatgtatacctggccaactcattcagcataaatctatcttccacattcccctcccttgaagtgcctgctattggtctctgctggaggctgcatcttctaccctggggaatggccagcctgcaggctgtaaccctgtgtaagaaataacctggttgggtgcagtggctcacacctgtaatcccagtggtttgggaggttgaagtggtagaatagtttgagctcaggagccagagactagcctgggcagcatagcaagatcctgtctcttaaaaaaattttagggaggagagtgaggatcagaaaaaatacctattggctattatgcttagtacttggatcatgaaataatctgtataccaaacccctgattacatatataacaaacctgcatgcgtatctttgaacctaagataaaagtttgttttaaaaactatctgggtgcagtggtgcatgcctatagttccagctactcgagactgaggtgtgaggagtgcttgagctcgggggattgaggctgcagtgaattatggtcccacctgtgagtagccacttcactcaaacctgggagacagagcaagaaccggtctctaaaaaaaaataaaaatagaaaaataaaatgaaaaatatatgaaataaagtctcctttccaaacgtacagatctccgatttttctgccaacaatgataaatggtcagtggcttgccatgttgtctgtgaattacttttaaaatattcacgatcacctgacctaaaggttggtaccaaggaaccgcctgaatacaccgtctctgattatttgcctccaacagagtgttccctgggcctgatctctggtggacaatgagctgctgggaacatcctctcttctctattcctcccctggggatgctgaccttcccttggagtctcctaagttccccagggcagtcggctaatgtcctagggagcttacctgtcttctccataccaagtctcatgtgaaggacgaggctttgcccttgcccagatgaggctctgggggctgagccctggctggctaccagctgcaagagccatggcccttggacagctggtaaatccttgttcccagtcagccctgcccaagatgcctcaacccagccccggcacaggcttcccagggtcacatggagtcaggatcctgggacaggggactggacaggggtttccagggctgagtttctgaacaggggcttcccaggggtcccctcactccaggatctgacatggtcctacaaggaacgtccatggggaggggacccaggagggggaactgacactgacctccccttactgagcctccccccaaccccatcagactgtccttcctctgtagcaagtgcctgcagggtctggatgcaggaaagaaattctgatctgtggaagtttgtctcccctgtgtgtgtcttgcactaaatgtccaaacccccaaatgggatgtaatgtagagggggacacaggcacagcccaggcctgaaaatcctgtgtgtgtgaagcagaactgacccccaacacccagagctcatgagacatcactgtgtacgtgaaactggccagttacttcttcattcacaagatctgtttttatgacttgtagggtgtaggatcctgtgtcattgttggtgacattctgtatcagcagacatgtattggggtatattgtctctcagcctctgtggcaggtcctggggtaattacttgagttcctagtacatatcctgtaattcccctttgtaccagttgtagccaagcctaaggcagattgtgggtgagtggaagaatctccttgccttctgcagcttcaacagtgacttgggcagtggtaggcaagttccagaaagttaaaagtgaggctaggagtggggagagagcatcagttaatactgggccctatgcattgaggtggaaagatggggccctaggtcctggacaggtctcttcatccctcagccttggagtgtgtgtgtgtgtgtgtgtgtgtgtgtgtgtgtgtgtgtgcgcgcgcgcgcgtgcgtgcgtgtcctactgggccaaggtcagcagcatgacctcccttccttcagtgcctctgaccttggcatttccctgtttggagtccttttccccaggggtctgcctggctccctccctactgccttcaggtcctgctcacattagggcatccttgggagaccccttccctgacacctctagagaccctgggtcttccctttctgacctttcgctgctgtgttccctccagggctcttgtcaatacttgacctcacattctagatacccttgcatgtctgtcttcctccctatgagagcatgagctctgtgagaacagggacttgtgtgatcttggttgcaccccagtgcctgggacaggctgcggactcctgtggatgagctcatgagtgttcccagggcccttcacaacgtgggatttattttccaatggctgaggttgttggctaagagctctgttggagttcaatcaggctggtgggaaaaatattagagatagttatagagatagacacaaatcttcttggaagaccaaaaagtttgcataactttggtaatagatctgactgaaggtggtccctttacctttagttaaacaaattaaagtagtaacaaaggaaggcagagtagtttgtctagccagcttgtttactcatgtgatcttaagactaaccattgatgtgccacaggtgcttaattgctttctacttgggaagtccacaatgtcaattaccctctaacggtgttgactcaagcctttgttaattaatcttactgaataaatatgagtctcactagctgatcaaggccatggtcacaactgtttataggactcagcagggagtctgtaagcggccctgacagactcagctggactggcaaagcaaaatatgtgtgtgtcagtgtacactattcacccgtcccccacagctggtgcccctatatgaggagtgctgccacagagctctgtttagtgtcccttgttttttttcttgagtattaccccaacttaaattgtgattattgtcatctgttttcaacattaactgctcagtgatgattcacttggaaaacattaacaatcgagattgtttcttcactaacaacctcagattatttagattttcctgttgtaatcccttcttcctgtttagtgtccaacagaagccctctgtccctctcaggtccccgttctctccaagaaaccccagccagtctctgtgctccctcctcccatccactcccagggagccctcccctcacctgtgagcagaagcgcctgccagggatgtgcactctgtgaggaggggctgagggaggccccatgggctctgctgtctgctttgtcctcctctgtggagaggagcttgggcttcagaaaataaggaggccagaaagtaaggaacaggctgagaaataatggggatgtgtcgaaaggtcacagatgccaacatctttgtcctatgcaatattatccataaaattacaggtttgagatatgcttaaattttcttctaacatgcattaaaataaacatataacttttaatagttatattaaattgtatttaatataaattaaatgctcttgtcagagctactgtgactgtcagctctgctgtccttcctctctctgtgctaagcctcctcccagggcagaagcacttcccagggccaggggtgggggcggggaaaggtaagtggcaatgaggatctgcacaggtagcctttccgcctcctcccctctcagtcctgcctccttgtcttcttttcctctttttctccaatctacatttcagttccttagaccacgctgtgagaagcaaggcttattgggacccccatcccttaacaggatgacctgtgctccccataagtgacctctgctgtgtctagggattggctctgtcagcacctcacagagagtccctggggcccccaaactcagtgttattttctctatgacacagaaacccctctgggtatgcaaggttttcctcatgttttctaatgtctgggaaggttggatttactcccagcagggaggtcacagagatgtccagggagtggggtcctagaaatggacaaatctagagctaaagcccaggtctacgattttcagttgtttttttctgcagtgctatgtgaccctaatttcctaggagtaactaaaatgcaaacctcagacatttgtagacattttatgatttttctctacagcttgtaccactgttattattatttgctttatgctttttcctaaataaatttactttacaaaacatccttgtcctagtagggtgcaggggctcacgtctgtgatctcagctgcttgagaggttgaggtgggtggattgcttgaggacgggaatttgagacaaaacatctttgtcctatgcaatattatccataaaattacaggtttgagatatgcttaaattttcttctaacatgtattaaaataaacatataacttttaatcatcatattaaattgtatttaatataaatttatatacaatacatttttatataataaattatatatataaatgtatatataatagtttttcttttttgagatggagtctggctctgtctcccaggctggagtgcagtggcacgatctcagctcactgcagcctccgccttctgggttcaaacgattctcctacctcagcctcccgagtagctgggattacaggcgcctgccgccacgcccagctaatttttgtacttttttagtagagatggggtttcgccatgttggccaggctggtctcaaacacctgacttcaggtgatatgccgcctcggcctcccaaagtgctgggattacaggcatgagccaccatgcctggcctatatattttatataattatataaagttttctataataaattttatataataatatataaaatggatatttatttaagataaagttattagttttatatatttacatatatttaggaataaatgtgttactgtgggagcccagtgcccaggcaggtagtcagtacatgatggttgtcattagggttaatactttggaattctggattttttcccaagagagtgtctacgctggaatattgggcttgtggctttctgctgatgtgcatgtgtgaagaagctacttccacttattaggacttgtgtatctgtctcgcagtttcactacctattttctcgtgatgttggtcaagtcgcctaacttttctgtgcctcatttacctaatttgtagaatatgggtaacagtacacaagtgtgagtgtgtatttcccaggactgaccactagagggcgtgaaggcaccggcacttactattacagcaatgggtgtagtagtgctcatggtcgtaaacatcattctcccatgaaaggaaccagggcttcctgggagaaataactgattccagggctggggccggaaagcacaagcggagcctggagcatctcgtgaggccagaaagtaaggagccggctgaaaaataatggagatctgtcgaaaggtcacagatgccaaccagaaggagctttgaatgaccaattttgagacaaaatgagcactataagaaataatgatagtaataaattccaacccataaatacccatgagttcctactaatataaataaataattgaatacataaatatataaggatgaagaaacagctttttcttacagcagaattccaattaatgaatgtagaaggaatgatcaaatagaaaatcactatttggctaacagcacagtcaattgtttgtaggcaagaattatcaatggactttaaatatgaatgggtaaaagtatgatgatgctacaactagtgagtaccaagggggaaaaaaaagtacgttgagaagaaacaggctacttccatattcccaaagtatcacttcaggagctacttattgattataatgggacaaatagtaacttacagtagagaaacctggcaacagagtctctccgaggtacaaaggctctcttcaggaaggaggtaaggggaaggaagaagaaaacactgtcctgcctcaattatttgctttccccattctcaagtgtacttcatagacattcaaagatatgtgttgatagtgtccacgatccacatggctctattatagtcatttattcacacatacattcagtgaggctttgagtgcctaatgtgtgcctgatatttgctagatggtggatgctgagaagatcaggtgtgctgctgtctctagggtgactgaatccacctgccccactttacagatgtggaaattaaagtgaaaaggatttataggattagttcactgtcacaaggtcactagccttaaagttacaggagtaaagcaagtttcctgacttgctagattttctgctgcaggtgctgacaatggtgagctccaataggagagaggacactcagagtgaagtgggagccctgaacaccctggattagccaagaggacatgccgggtccagctgtgaccgcacaaaggaccattggggatatttgtattctctttttcacttagagcttgaaatgaggaaaactaagtgcagaaaaccaagagtggaagatttttcacaaagcactggtaacatgcatcagaaaaccctgtgctgatgtctgtcacggtgtttctcactgaacggtaatagtctggctttgagtgtgttccctctacagcctggagttctgcgaggcagggaccaggtgtgattcatctttgtctctccagtgacagtacacagcaggctctgataaatatttcttacaaaataaaatggaataaaaagtagacatctgcacaggtgtgggatgactgagcagcagcagaagcaggaaaagtcagcgtccccagatcagctgatgtggtgttcggattctagataggggtgaggtgccaggatggggatgggggtcctgtggctctgctgccctgggggacacccctaggtttcacagtgcctgctgtggttgctgcactttgcttccccatgggaaagtgatcagagggtgtggggcttcaggtgaccccatgtgggaaatggccaagggaaggtggggtgggcggcacatggttttttttaaccaatatttgaaggtaggttgtatgaaaaggtgttaggcttatttcagcttatggggagtaggacagggattggtgagtgtgtatcaggtatattttggctcaggatggaaaagaactgtcacagtaacataaggtcttttgggaaattacatgtttactggcagagttcaggccagggctgggtgtctgaaaatacctgtcagggtcacttttatggttacaagggcagagcttggcttggaaccaggtttcttactaataccacatattaagtattataaaaactgtcctttgcaataggacattgctctatgatgcaggttgaggtccctctgtttaagtaattgtgggtggctgtgattctctcatctagtctgcgacttggacttcacctccatctgcagtccctctcctttgctgttgacactggtcagagttaagcgcatttactgacgatggtcacagggtggcagcactgcctctctggtattttctaaaacctcttcctggaactgagccagtctaagaggatgtcatgactaagaaaagggcactaatgaggtgaacagataattttttttttcttgtttctcctgtgaagtaacagagtggaggtgagcatggaataattgccttttagaaatggaagacaatggagagaagtgtttcgcaaaccttaatgtgttcacagatcccacacagatctttttattcaatacagattctgatttttctggtgaggcctgagattgtgcatgtctaaggagcttttggatgatgccattgctgctggttggcggaccacactttgagtagcaaggctcgaagatcatttagaggttaattctcactgcatctaatttatggatgaaaacaaaccaaggtccagagagagcatatacagcttgcctaacaaagccattccctaagtgcctgacttcttgcatttaaacccagggcttcagcctttgtccagttctcactccacacatcacacggtttgttcactgttgtgaacgacagttgtggcagcatctctttagtttaggaatccagagccccaatttcactaccctctttggtcttggctcatgctgtgacttcgaatagttttgcccttacttaaaatcttcagtggctcttttgtaatcacaagatcaagttcgaatatctctgtctagtgttcatggctttataacatatggtatctctttagtaaccttacctaacttccctgttttaaaattgtctcttgctgccatagccctccttgctccttcctgctccctaacaaactgtgttcacttctctctcagtggtagtgatgatggcatggcctctgatgttagactcatgtaacttctaatcccagatccaccaccaacattggcaagttgattcatctttctgaggataagcatcctcctctgaaataaacttagatggcggttgagaggggtaaataaaataacacacaaacccactctcatccctgagaccctcttcaaaactagcatataaaaatagctatttgaagaggttcagtgaaattcaaggtaacacagagaaggaattcagaatcctatcagataaatttaatagactgaaataatttttaaaaatcaggcagaaattctgtagctgaaaaattcaattgacaaaccgaagaatgcactaaatctttcaacagcagaattgatcaagcagaagaaagaatttgtgagcttgaagagataatatatgaaaactcagagtcagagagacaaaagaaaaaagaattaaaagaataatgcatgcctacaaggtttgattattaagctactcaaagagatacaagagaagggtgaaaaccaacataaagaaatgtaaaaaacaatcagaatataaatgaaaaattttctaaaatgctagctagtttttttttgagacaggctcttactctcatcacccatgctggagtgaagtggcacagtcatggctcactgcaggctcaacttcctgggctcagatgattctcccacattagccttccaagtagctaggactaaaggcgtgtgccaccaggccaggctaattttttgtatttttagtagagatggggttttgccatcttacccagggctggtcttgaactcctgggctcaagtgatccaggagattcactgccaaaaaggatataaccaagtcatatagtcataggttatctaaagtcaatgtgaaggcaagaattctaagagcagtgagacaaaagcatcaattaacttataaaggaaaacctatcagtctaacaccagatttctcatcagaaaccttacaaaccagaaggtattggggtcctaatcttttggcttcttaaacagaatagctctcagccaagaatcttgtgtagagtgaaattatatttcaaaatgaaagagagaaatacagtctttttcaggcaagcaaatgcttcaggatttgtcacggctagaccatcctacatggaatgttaaagggacttctaaatcacaaaacaaaagatttaaatagaacagaatagaacctcttgaaaccaaaaaattcaaatggcctataaaacaataacacaataagaaaacaaagtagataacgatcaacatgatgactggaacaaatattaacattgaatgtaaatgacctaacactccacttaaaagacacagattggcaagataaataaaaaatcacaaaccaaatatcagctgtcttcaagagactcacttaacatgtaaggattcttatagactcaaggtaaagagatgataaaagatattccatgcaaatggaaaccataagtgagaaggaatagctatccttatatcatataaaacagactttaagcaacaacagtaagaaaaagacaaataaggcaactatataatgataaaaggatcaatcaaacaagaagatattacaatcctaaatatatatgcacctaactttggagctcccacattcataaaacggttatgatgagacctaagaaaaaagatcaacacaaaacagtgagggtgtcctgggttttctttttattggacagcagtgtactagcctatcactttcccagtcaggggatttttggtctccccattcccctaccatgggttcatgccaaagtccatattttttattagtgtttggaattggattttttttttttgaggtggagtctcgctctgttgcctaggctggagtgtagtggcacgatctcggctcactaacctctgcctcctgggttcaagcaattcttctgcctcagcctcctgagtacctgggactacaggtgcatgccaccacacccagctaatttttgtatttttagtagaaacgagatttcaccatattgtccaggcttgtatagaactcctgacctcatgtgacagggaaacaggcactcagtgaacttcatgcgattgaggagttaatgataatgagagaagggctgtgaggggacagcactggggacaccagagcctgtgacgggctgagttgctgtgccttgggagatgcccttttgactgagccctgggaaggagggggtgtgggggcaggagctgcctgcagagggagtggcctcaggtgggcggccacctggctgcagggaagaggtgacagagttcgtgtgcagagcttggagggtgaggaggaggtgggttgaggtgaccttggtgagggtgaaccatggggggctgtgggccctgctgagggaggccagccagccctggacctacagggtggtttggtcttttttgtcccattcccagcatccactgagtggtgaaactctgcaggccagggaccatcccactggccagaaggagcgcacagtaggtgcccactcagtgcatgttgggctggacagaacctcactctgccccctgcccccagctttgggagctgcagcaaggtccctccccctagggatctccatgcctctgtctctgaggggtgagatggggagacttcaaagggccatctcagagtgtgggggatagagacgcagaagtgtgggggatagagggaggcctgggctctagacccaaaggaccttacacacctcctgagtcttttcaaatggtttcttctgttactttaaaaatgatgtaagtcatcatatttattgtaaatcccaggaatctaatcatgcgtaaaataaggtgtcttatccttgaccccaccccttccccaattaaatttccaggatgttaccactgtttgcagttggtgtgaatctctctttaataatactctgtttatctcacttgtcgttttacgccaaaatacccattgaattatattattgctgaagaccattcttttttttttttttttttttgagatggattcttgctctgttgcccaggctggagtgcaatggtgtgatctcggctcactgcaacctctgcctcctgggttcaagtgattctcctgcctcagcctcctgagtttctgggattacaggtgcacaccaccacacctggctaatttttgtatttttagtaaagacagggtttcaccatgttggtcaggctggtctcgaactcctgacctcatgatccaccctccttggcctcccaaaatgctgggattacaggcatgagccaccacacctgcccagaccattctgttctactgaatcatgtgtggtgggcacctcttatatcaatacatatggattttatcttgtgtttgttattggctcccctttttctcattgcatggctacactcaatgctttgtccacacccctgttcctgggttggaatcttgtgacagaaaatgaagtaacaaaggctaaagctttctaaagtggagtcaggagattgcaagacaattgcactttcaccagcaagagctcaaaccacagaatgttccaatagatttggataaacagctgaagtcagtattcaccagccttcaacatctcaactaggagaaccctaaaattaactaagcacatagaatggaatggacttgtgatttaggattccttctcagccaatgagctgcttctgaaaacaactttttgtggaaattacctgtaaagaaaaccctctcctgtgcttgtcttacagaacactagtcagggctgccctgattcagtggacccgaattgctattatttgtttcctaaacatatggtattttctgtgaccttcatctcaatcttttttttaagttactgggctgtttcccagttttcataatgacgagacattctgcagtgtttcatacacatgtcttttccccatgtggagtattgatccaggagctcattcagtcaacgcatgtttatgaagcatcctgtgccaggctgtgggctggtcactgtcttcagcagagagaggacaggcacagtcttgccttcacagagctcacagctcagggaggctcttagaagtgggatactggtcggagcatgtgcacattaaacatgatgaggtcaaggttgctatagggactaaaccacagtcccaccaagatcgcattgagttcctgtggtagaccagaggtcagggcccctaagatgtcctgagcagctccctctgctcagaagttttggttccacaggtgacacacctgagcacaggtgacccctgcagaacctgtgattaccacccaaagccaagagtgagtggtgggtgttctaggaggaaccgtcacctccatgggcagggttggggaagactgaggggagcaggtggctgatgactttggccagaaggtagggggatgggcaggtgtgcgctcatagggaagggaagagaagggagggcattgcaggcaacaacacaaaggttggaacctgccttcatggactgagaaaagcagggagtccacccaggctgcagctggggagggaagacatggggagcagtgggtctaggggagaagcagactgcgattgaccttggggactgggcagtgagcagaggtgtgttatgtgtgtctgtccccatcatagatatgaggaggggtgaggccgcgggtggcacctgggtcggtgggatttcatagtgcctgctgttccctagagcctctctgtatagagggtcagaatagatctgaggctgtggtctgggggaaggggctggtggtgcttaccatctctaggggtgggaggagagggatgaggatgcccctgagcagtgaagcctcaaggtgtgtggagccacagttgtctctcattagacatgtgttttgcgtgaggatgccagggcctggtggttattactgttgtcaagtttgcatgacaaggacccaggtatccagggatccagagcacagggcccctggtgaggggatgaggctcagatggggctgaccaggttcatgtggtcagagtgggagggactgatggagagacagagcctcaacccctcctgtcaggagctgtggctatgtccaggagagatgacaaggatgacccaggacattgagtgagtcattgagacattgaaggtgaggacagggcagagaggaccctggtgactgctgaaatgtaggatgtgaggagggctctgacccatgcaagttacaggacctccccacccccgagcccacagatgacccttaaattgggcatcctgagtgctgtgtgtgcccagcagggacactggataggctggacctgagtctctgtaagggcagcgctggtctgtaggaccagagtcttctctgtgggtgtgacgtgggcaggaattagcaagatgggggtgacaaggcttggcttggaggatctggtacagaagcccatgggcttggtcagctcagcttctcaggggctcagctggggctggaggagcaggatgctgtgctcagggcatgctccaggcagcgtgatgtgtgtggttccagggtcaggcacgggggtcaaaaattaaccatgaaaagttcccaccttctgtaggcagagaaaatggcctgattgtcagggtcagggagacttaccatgtggccaaagcaggctctcagcctcccagagaccacaccctgggtgcagcactcagctctgcagggtatggcaatagatgtgccaagaaccccaacatccagatgcatgcaaaaattttgcgatatataaaatagagcagatcaagtttccctgcaataacgttgttcctggttgtgtctttttcttgtaaactagacatggacatctttccagcagtctgttctcatctgccaccttcctgctgcagcacctcagaatgaacattcctgagacactgtccgtggtgctgacgaccaagagctatggaacagagtgtgatgtagaatcttctagttacctctgctctcctttcacttttaacaacagagcatcattaacaatgagaaggtggagaggtgttcaggatcttgaagtgacttctgtcttgctctcccataaccctgaagctgctgtagacattattgcagaaactgacaccacagtcaggatggccttgtccaggagcccatgtgcagtttgtagtgagcaaggatgagaaaatggtcttgaaaggggtgatggacagaacaggggcttttcaaaaatgtcacatcatcacccccagcatccgtgaatctgtcacatggtaagagaccttacagattaaatgaaggattatgagtttggaagattattgtagtttatccagatgggtccaacataatcacagaatcccttccttacaaatgagagagggaggtgggagagtcagagaaggaggaggagatgtggggatagatgcagaagacagagcggtgtcaagatgctgcactgctggctttgaagatggagaaagaggacacagccaaggatgcaggaggcctctaggaggtggaaaaggagaggaaacgcactctgccctggagcctccagaaagaacgcagccatgtgggcaccttggttcaagtttctgtgtcacttagcttgtgggaatttgtcacagcctcaacaggaacctacagaggagtcaccttgtgtgcaggtgggatccagggtcatttacagctaaatcctgatgtaaatattgcaggttgcttttcctacttcctatctcatggccaacaaccctggacaatggcagaacacccttggaaaccacggctctgtgctttagtggagggaccagcttgtttgtgggaaggtagcacctggtccaagtgaacctacatgagatcgttactctccccagggccctcagggaagggctgagaacagctggcccaggtgtgtggaggagctgcaggtgaggcagggctggaggggcctgtgggtccaggtagaggggcagacaggttgtcccatcgccatgggagcctgcacgagctttaggttggggaaccctgctcctctgacctggacgctcctgtgtggagaggaggcttgctcagtgagatccacgccagggggtaaattgggaactgatgggaaatgaggggctagagtcctgggtagtgcctgggaggaccttgctcaaggactgaattcttggtctgttcccaccttggttactctgacaacccctctctgtgtcccacggggataaagatctcctgagcagtggccattgggacagaggagaacctggtggccagagctaagcatccaggatcctggatttggggacaggcaagctcattgctgggggacagtgatagatacggcctccagggcctgggtgaagagagcaggagggctcaggacactggaggctgtgtggaggtcacacccacgatctgtaccacccatggatgctcctgcattgctcacctttgtgtggacatcagatggccccaacttttgcactcctgagacatctcatgcattcacagagggacccaggctggggctgtgcatggccttggtctctagggtagtgtgaggacagctgagcactcagctggctgggcaggactcctgcgaatcctgccctttcctgtgtagggtccaccccagcctgactcctaaccccctactcctgtctttccagggaagagagactggggttgagataaggtggagatatttttcctgtgtgacccaggagagaatggacatggagtttcaggtgagtttctgctaagttcccatgagcagaaaaagagccaatgagaggaagtttcccctttattcagatcctttccaggtgaccccgggtgggccataggcccattcactttccctgcaagcccccgcttcctgtggtgatgggaagccttcgccttggcccacccagagcccggggcagtctgttgaggtctctatatattcagcagggacccccatcccttcctgtccccaggcctgtgtctcctcaggactcagagctggttctctggctcaggctccatgtccttccccatccccagggctgggggcttcagggacgctccatcaacccacaggagcagctcccagaggaacctaagaagccacatctgctttgtggtcgatccagcagtaaatgtttgtgtcagagtgtagcaattccagtaaaaacagagaagaggtcttgacccctgaggccttctcagaacagggtctggcatctctctctgggcccacccagggctactctgggactgaacctggctgtgctcagggggttcctgctcccaggcccctccctcctctgctcaccacctcctgttattttcactgcagtttcctgaacttcagctcagccagatgccagtggggacagatcctgggtctccctggggcccaagggaccagaatatctgtggcccccactcacctcatagatgagagcagctgccctggtgctgggtaggggaatctgggcaggggagagaggggtgtcaggggacagggaaggattcctgctgtgtaggaattccagggctctcctcaggtgatggagggtcccagggtggggttagcacagggagtggatgatcctggccctgaacagaggcccagctcatggccagggcaggtctaaccttatccaagtcattctgggtagggtgggtttgtgctggggattgacagtccccctgccctgagcctgcacagctggggccccagtggaaatgggattgggaacggacagtcttacctaggagatggagctgtcagagggtccatggcctggggacagagacaaaagtgagcacgagagtgttaggatagctgggcccctcctgcaagagtgtgtgggggtcctcagttcttagagaattggggagagggagcctttctcaggttattttaggggtcaagtaagcaagtgaggttgaggaagtgacccatgacccagagcccggaggttagggctgacccggccagttggggtttcctgtgtgatgttttatgggatcctctttgcagccccagggatagggtcagaggcccctgggtgtaactggcaggagtggacaacttggggctggcttagtagttcccagccacacccagactgaagggacactcaccgggggtggaggctgggggctgctgctccctgaagtcactctgatcgctggccctaggaaaggtcagggttatttgtgaaggtgcaaggttaaaagtcacaaattggagttaaaataggggaccaggaaaggagcctatttccaagaggggtatggagacctcctttctttatggagttctgtggtaggaggggcccaggtgaggggagttgaggaaaggccttacaaagccacatctgtcctggccagaggggaaggactctcaggcagatgctgggccaggagaacattgatccagtgacacaggaaagggactgaggacccagggaaggaatcagaccaccaggggttgcctgagaggaagggtcaaggcaccagggggaaagcagggccaggcacatgtgcaggacactgaggggactgcatgcatcttggattctcctggaactcagtgtccctgctgtgaccagacactccactcagggctggagatgctgaaatgggacaatgatcttgtcttctgtctctgccctttggcaagagacataaacgacattccaggatatgccatattggggccccggttctcccttctcacagctcagtgtctgcagttaccatgtcagtcaaaggggtgctgaccccacccagcccgtccaggctgttccagtctccactatgtgataatgcccaggatcccccctcagatgccctctcactgggtggatggattcagtgaacagggggaggtaccaggtattgagcaccgctcccccctgctccaggcagctgtggctttgctgtgctaggaaactaggaccatgctcaggggcatggccttaattggactgaattcactgaggacaaagctgttgaggaagcagcccagggtcagcagctggtgaggaaggtgccatggaatgagagggaaggatccctggggagtcgggaggctggggagagcctggcactgaatacaagacagggtctccttccttctcgcctggggtcagcgtgaaggatgggagcagaatggggaaaagctgtggtacctgccagtttttcggaggagcaggaaacacacaagtgcagccaccagaagactcccaaccaggaccccgatcaggatgcctagagtgttgtcatctgctgaaagaagaaggcaaaggggatgaggtccaaatctgttccagggggaaccatgaggggccttgcagggcaggggcatggtcagggaggaaggaaatgccatggagcctgagtgtggtctgttgtgctgtcctcatagctggctcccttgctctccgtggttgcaccattttctgtgtcttaggcttgaattactgggatgcatcaactcctacattctcccacaggaagcctgcacctcatcctgctcctgtgttttttagtccctccttcctctcacatcactcctcttccccctgtttctttttttccatcccatggcagtcgtaaagggcaggcccttgctgccaactcaatgctgatgagcagggatgatgttcattgactgttttcaggggccttccacatggaaggcacagtgggaatcaatctacctgcagcttttctcaccctcccattgccttgagggagaagggtatgtgatattgtgaaatacgtatttggtgttcatcaccattgatatggttaggctctgtatccccacccaaatctcaccttgaattgtaataatccccatgtgttatgggagggaccttgtgggaggtaattgaatcatgagggtgggttttttccatcctgttcttgtgatagtgaataagtctcaggagatcagatggtttcataaagggaagcttccctacacatgtcctcttgcctgctgccatgtaagacatgcctttcaccttccatcatgattgtgagacctctccagccatgtggaattgtgaatcaattaaacctctttcttcatacattaccaagtctcaggtatgtcttcattagcagtgtgagaatggactaatacagtaaattggtaccagctagtggagtgctgctataaagatacctgaaaatgtggaagtgactttggaactgggtaacaggcagaggttggaacagtttggagggctcagaagaagacacaggaaaaaagtttgaaacttcctagagacttgttgaatggttttgattaaaacgctgatagtgatatggacaataaagtccaagctgaggtggtctcagacagagatgaggaacttcttgggaactggaacaaaggtgactcttgttatactctagaaaagagattggtggtattttgcccctgccctagagatctgcagaactttgaacttgagggaaatgatttagggcaactggtggaaaaaaaattctaagcagcaaagtgttcaagatgtgacttgggtactgttaaaaacactcagttttatgtatttacaaaggtatggtttggaattggaacttatgtttaaaagggaagcagagcataaaagtttggaaaatttgcagcctgatgatgcaatagaaaagaaaaatccattttctgaggagaaattcaagccagctgcagaaatgtgcataaacaatgaagagcaaaatgttaatccccaagacaatggcaaaaatgtctccagggcatgtcagagaccttcctggaagccccttccatcacaggactggaggcctaggaggaaaaaatgtttcctgggccaggcccagggctcccctgctgtgtgcggcctagagacttggtgccctgcatcccagccactccagccatggctaaagagggccaaggtacagctggggccatggcttcagagggtgcaagccccaaaccttggcagcttccatgtggtgttgagcctgcaggtgcacagaagtcaaggattgaggtttgggaaccttcgcctagatttcagaggatgtatgaaaatgcttggatgtccaggtgaaagtttgctgcagaagcagagccctcatggagaacctctgctagggaagtgttgaagggaaatgtggggttggaaccccgacacagagtccctactggggcactgcctaatggagctgtgagaagaagaccacaatcctccagaccccagaatggtagatccactaacagcttgcaccatgcacctagaaaagctgcagacactcaacgccagcctatgaaagcagccaggagtggggctgtaccctgcaaagccacaggggtggagcccaaggctatgggagttcagctcttgcatcagtgtgacctggatgtgagacatggatacaaaggagatcatttcagagcattaagatttggctgccctgctggattttgggcttgcatggggcctgtagcccctttgttttggccagtttctcccatttggaatgggtgtatttacccagtgcctgtacacccattatatctaggaagtaactaagcttgcttttgattttacaggcttataggtggaagggacttgccttgtctcagatgaaactttggacttggacttttgggttaatgctggaatgagttaagactttggggaactgttggaaggcatgattagttttgaaatgtgaggacatgagatttgggaggggtcgggtggaatgacatggtttggctcttcttcacccaaatatcaccttgaattttaataatccccacgtgttgggggaaggacccagtgggaggtaactgaatcatgggggtggattcttcccatgctgttctcatgatagtgaataagtctcacaagatctgatggttttagaaaggggagttcctctacacatgccctcttgcctgccgccatgtaagacatgccttttgccttctgccatgatttcaaggcctccccagctatgtggaactgtaagtcaattaaacctcatttttaaaaaaattacccagtctcaggtatgtctttatcagcagccaagaccagctcggtcgcggagatcctaacccagcagtgctagaggaattaaagacacacatagaaatatagaggtgtgaagtgggaaatcagggttctcacaggcttcagagctgagagccccaaacagagatttacccacatatttaataacagcaaaccagtcattagcattgtttctatagatattaaattaactaaaagtatcccttatgggaaaccaagggatgggccgaattaaaggaataggttgggctagttaactgcaacaggaacacgcccttaagatgcagattgctcatgctattgtttgtggcttaagaacgcctttaagcggttttccaccctgggtgggacaggtattccttgccctcattcctgtaaacccataaccttccagcttgggcattagggccattatgaacatgttacagtgctgcagagattttgtttatgaccagttttggggccagtttatggccagattttggggggcttgctcccaacagactaatacacccattttctggtatgtgactctaaagtccttagaatcttcaaagtgatgtctttttcaagctaataattgactgatgactggcagcccctaggcaacttcagaatgaggctggtcactgacccaggtaggattagagggttgggactttcagcctcacccctaatccctggggagggacctggagtttgaattaatcaccaatgaccaatgaatcaattaatggccaatgattgaatcaattaatggccaatgattaaatcaatcatatctatgtcatgaaccccaaaaggactgggtttgaagagctgaacccatggaagtttctggagtgtggtgcatctggggagggcatggaagctccacaccccttcccacatgccatgctctgtgcatctcttcatctgcatcctttgtaaagtcctttattacaaaccggtaagcctaagtatgtgtttccctgagtcctgagagctgtttgagcaaactaatccaacccaaacagggagtcatggaaacctcaatgtgaagccagtcataagaagctctggaggcccagacttgtgactggtgggaaggtggtggcaattttgtgggactgagccctctgctgatatgtccaggtagatagtgtcaggatggaattggaggacacctagctgatgtacggtgcagaactgattggctgctgggtgtgtgggagaaacccccccgcatcacatttggtcacagaagtgtgtctgtgttgatgattgttattgtggagtgagagcagaggaaaaacacagtttgagtttttccaaacagggtggaatcccatctgccaatttagaatctgaaacttatagtttcagtacttcaattaagattgaagtacttcaattcagtacttcaattaagattcagtacttcaattaagattcagtacttcaattaagattacagaactggtaagtgaaagtgatacaacaaaaatgtaaccaaagtctgctcaacttaacagctaataacaacaaagttcataaaaataataccagtcgatattgatagcactgattgagccctggctctgtgcatgaccttgttaagggctttaatcgcattaatctctgaataaatatcctcacaaccaccctgagatccaggtgtttgtaacaattctacagatgaggaaactgaggcccaggaggttgagtgtcttgcccaaggtcaaatacctggtacctattgtaaccaggatgataactggatgagtctaatccctgagttcttacccacattgctccccaggctctgaaggaatctcatccttctcattccgtgtatcattttacaccccccctccctcctaggaaaatatacaaggaaaggagtgagaggggccgagggtcactcacattttacagtcagcttgagggggtcgctcctgttggagctgactgggttggagacctcacactgatactccccagcgtcctcctgcctgatggggtctatggtgagcatatggttaaaccaggacagcttcatcctcttcgtgacctgcagacgctggttgttgaaaatccactggaaagaggttccagtgttatttgtgtggcaggtcaggaccacggagcccttctctgtgactgtggtgctgctggcttggatggagggctgagccactgactctgtggatagagtgaccaacagaaagtgtcttggggccatgctgcatcctcagagatctcagagtcaaatttagaacattctcctgtgaataaaggagaaagatgaaggacagggaggagcagagagaaccagagacacccatagcagcgagcagtagggactacagtgacctcagagaccccagggaccaggaggacccagctgcctcagaccaggaccagggagccctgaaaaccctcccacagatgagcggccccagagtcacatgagatgcaatacctggggtggctttaggagcaggcagtcagagaaatggaacatgggtctcagcccctaagggacaaggaagaggtgtggccagctcctcctaggatcctacatccaggacccagtctgtaaagaggttatgattattcctttcttttttcattaattccctccctccttcatcagagaactactgagtgtgtgtctcagttgggccttgtgcaggtacagggtgtagtgggaagagaaagctgagtcctttccttcatcctcccatgggagtgacatcaacaaatcaagaaattcatgatttcacgtccagtgagggaagaaatgtggatctgatgggagaggcttggacaatcctggcattgagtctgatagttgagacaggtgatttcgttctaagtaaaaactgactaattctccatttgcccgtcattcctcagaccagaatctccctctctgagctgaggatgcccaagaagaaaggagctgaaccaacatctggtcctggggtccacagatgccccacggtggtggccacgaccagattctgggctgcagacacacggtggtgtgacgttgagcactgacagcctgtgtgatgctgatgcaatttctctttaataaaatggggtaaatgtcaatggtccctggcttgccatcctctctgtaaattaacattaaaatatttacaattacctgacctaaagcttggcacagaatagctccaaataaacatcatctattattattttactccaaaaaaaaaaaaaaaagagttctctgggcctgattcctggtggagaaggagcggtccagagtgtcttttctctgctttccctcctcctgaggacagtgcacttcccgggacatcttttaagtttcccatccagtttaatggcctgggaagtttgtttgtctgtcctctccactctgactctcaggtgaaagatgaggctctgcccttgcccagatggggctctgggggctgagccctgcctggtgaccagctctaggaaccacggccctgggacagctggtaaatcgttgctcacaatcagccctgcccaggaagccacaacccagccctggcacaggctccccagggtcatctggagtcaggatcttgggacaggggcctggggcaggggcttgaagggctgagcttctctcagaggatcctcaggccaggccctgactgagtcctataagatctttctcaggtcatgtctatgaggaggaggccaagcggggttggactgagactgattttcccccgctgcatctcccgcatcagactatccttcttgctgtagggaatttccacggagtccggataagggaaaggaattctgatctgttatagtttgtctcccctgggtgtgtcctgcactaaatgcccaaaccccaacatgggacgtaatgcagagggggatgcaggcacagcccaggcctgacaatcctgcgtatgtgaagcagaactgacccccaacacccagaggcacggaggaatcactcaccgtatacacggagatggtgagatgcctgttcaatctgagaatttctgtatgtgacttgtagggtgtagtatcccgtgtcctctagggtgacgttctggaaatgcagatctccactgggtgatattgtctctcgaccgctgtatgcaggccctggagtcctaacgtgagtgtctattacatatgctgcgattagctggttgggctccaccgttttccctttgtaccagccatagctgtaaagattctcgggcagataaaccacagagagatgaacattctccccttcagcaacttcaaagggcgctgatgcaataaagagccaggcagtggtgggtgcgttccagaaagttaaaagtgaggctaggaaagggagagaatatcagtcaatatttgacctatgcattggcatggaaagacggggtcctgggtgcaggtctcttcacccctcagccttagagggtgtgtgtgtgtgtgtgtgtcctactgggtcaaagtcagcagcatgaccctcattccttcagtacctctgaccttggcatttccttgtgtgaaccctctttcccaggggtctgcatggttccctccccactgccttcagttcctactcacacaagggaatccctgggagacttctttcgtgaagcctcctctagagaccctgggtcttccctttctgacctttcccagctctgttccctccagggctcttgtcagcacctgacctcacattctagatctctttgggtgtctgtcttcccccccatgagattgtgagctctgtgagggcatggacttgagtgatgttagttgcaccccagtgcctgggacaggctgcagactcctgtggatgagttcatgagcgttcccagggccttccatatcctggggtttatttgctaatgtctgaggttggcagatgaagacagagtttcatgccctggtggtgtttttatttaaattgtcactgtgatatagttttactatcattttcaaaatgtagtggccactgacaatgaacttgaaaacatggaccaactgagattgttttgccccttggcaattccagttcacttagattttttggttctccttagacgctctctcccctgagtctctaacaaaagccctctgtctcctctcagagccccatcctccccaggagaccccagccagtctctgtgctccctcctcccacccactcccagggagtcctcccctcacctgtgagcaagagcccctgccaggggatgcattctctgtggggacaagctgaggggggccccatggtctctgctgcctgctctgtcctcctctgtggagaggagcttgggctccaggaacgctctagacagggttactgtgactgttgtctctgctgtccttccttcctctatgctgagcttcctctcaggcaggagcacttcccgtttatgggcaagggcggggctctgcctacaatgtctctctgtcccctcccctctcagtcctgcctcccttgtccctcctttctccttcctttttgcctatatttggttccctaggcaaaactttgagaagcaacgctgatggggtcctcataacaggacgacccactctccccagtactgacctctgctgtgttctggccttggttctgtcacagccggtagattatttccctttgtgacacacaaaaccagctgggccctgggtctcctcatgctctccagtgctccaggaaggcagaatgatgcccagcaggaaagtgacagaggtggctctgggggctagaaaggggctcactgggtgatggctgggaaggacccacccgctatcttcagtgtcaccagcctggcctctgacccagggacagagacccaggcctggaggtctcgggaggatccccagctcctaggtgtggagggaggtgtcctgtgtgtcctgggaagagaggactttgatggaaggaggtgggaggctctgggttctgctgtccttggtgaaggtttcagggggaccctctccatgtctggggtctgtgcccccagcttaactctcattctctttgcaaatacatatattttgtggatctgcagttgcctgaactgtctcatgtccctaaatctttgtatccctttttacagaaggtcaggaagggtgtgtacatgagtatgaggactatctgatcagggcgagtgtttgtttcccaaagatctctttagatatggtataatacataagataaatgtactgaattagcaattttaagtgtagaattaaatgatactaattctattcacaatgttgtacaaccatcaccataattttttaccagaaaatcttcattataccaaatggaaacttcatacttttaatcaataactccccacttccccctgccccacccactggtagcctctgatactatcaatctctgtgaatttgcctagtttacatgtctcatataataaggaattatatacgtgtattatttttttctggattatttctcttagggtaacacttttaagattcatccacgtcgtagcatatattacagcttctttcctatttatggctgagtaatatcccaatatatgtttatacctcaattttaattcattcatctcttaatggacatgtgggtggtttccacatttttgctattgtgaaaaccgctgcaatgaacttacacttggaagtatctgtttgggtttctgtgttcatttctttgggggtacatataggagtataaatatggggtcatgtggtagttctatgtttaagtttttgagaaacagccaaactgttttccagtttgctgtgctattttatattcccatcagcaatatacgagggttccattttctctacattcttgtaaacacttactatttaatattttttaaaacttatagccattctagtaggtgtgaagtgatagctcattgcagttttgattttcatttccctggtggctgatgaagttgagcattttttcatgtatttactgacaattttaatattttttagagaactatttattcaaatcatttgctgtttaaaaaaaatgggttatctttttattattcagttgtaatagttctttatatattttagatacaagtcccttatggggtacatgatttgcaaaatttttctcatattctgtgtcttctcactttcttcatggtgttctttgaagcacaaacatttttaactttgatgaagttcacttatctatttttaattttgttacttatgctcttgatgtcatattgaagaaaccattgcccaatccaagatcattaagttttactcctatatgttcttctaatggtttgataagttttgctattccatttaggtttttgaaacattttgagttaacttttgtatgggctgtgaggtaggggtctaactacactatctcgcatgtggttatccagttgttccagcacaatatgaagaggctaccattctttccccattgaggaatcttggcacccatgtcaaaaaccaatgggctgtaatggtgagggtttatttctggactcttgattctattccattgatctctatgtgcattcttgtgccagaagcacactgttttaatgattgtagtgttttagtaagttttcaaattaggaagtgagtcctccaatttttttttccagattgttttggccattctggggtgacttttaaaaaagatgtagttcaatggttctcaaagcaggagtggttcagctctccttttttggcagtctggagacctttttaggaccttaatctaagtagataaattattcccactttcttttctgagttgctatgttacagtgtatattgacacccatgaaataattgagagaccctggaagtgcttgcctacatagtgagggacaattagttccatgatcatgggcacagaagattttgttttgggaaacaattttgttggtggagttatattcatgcttactcttttatttgtcttcatagcctgcatctccttcagacttcatatctgtttattttcttgtttgtcctctggggtttgggtgttgggtgaccagtcagctggagctggaggaggtgcttagcaaggcagtgaccctggttgggaggagcagggctcagcagggtgaaagtagctgggccttgagtcaggagtggcatctggaaggcctgactgtaagggtcagaagggccagcaggtgggtgtcctaggcacaaacggtggctgctgctgtggactggaggaaggtaagaggccccgagtattccatgttcttactggctccccaactgaggattcctctcctgggctggtgctgtcctgcagcagggaggggttagacagggacggctgcacatcaggccggagtccatgtcatcctcttaggcactgtcactacagattgaggattctgttcataagccaagcctttgcacaaggaagggacccgggctctcaaggaagagcagctcctggtcagacctccatctccttctctctcattgcctgaggcctcaagcttggtctacctggcacaggggtctggatcctcctcccagggttggggtcttactgagctgggcacctgcaggtgggagaagatctggaggggccccatctgccttcaccagattgatgttgagggtccctgagtcctgcaccactatcaggtgctgagcaacttccagtgtcagtgacaaccaccccatggtggaagcagaaccacctcgtgagaaagcacctccaagcctcagtgcttgccatgtgtgggaatttgctggtttcagttgggggcatgttggtgggtggtcatgaattcagggccggattctatgctcacagtgcacatgctggatgtggtacagaccccaggcagggctcagtggggtggttttgggtgtgcacaggtatcttttctggaggagctggtggtgatttggctcccagaagttcctgagctctgcagactcaccaagcactcaatatttgagtgaacattgggcgagagagcagaaggtaagtgtcagggcatcggggttggtgcctctgggaagaggaggaacattctgggaacaaagctctcccccggcttacagggagcttcccatcgctcctgccttgaggatcagggaaactagggcctctgctcttccaggggctgcttgcaggcagtttgctctgggagggggtgacccaggagttgcctctcattttgcatttgagatttaaaaggagaagggacagtatatcttgccaggtcacaaaaattacaggcatcatattgactgaagggcactcctgtcatcactgcaatataccagaatggtcttttaaaaaaataagtgatttaggtttaccagcaactgtaatgcttgttttattcttctagttcaccgttaatgtcacttttgtagttttagcactggcaatgttgattttatgttgactctgatgattttaagctttcatttgttcacatagagatcatcttctttctgaatattaatgcattttttctctatttctactggttattcctgtacatagagtagagaatcacttttcccaaggaggtggaaagcttctgactaccaaaaaaaaaaaaaagtgtcaaaatgctttaaagtcagtaacttaaagatcaaatccaagagtgggcaacagattctgcccagggtctgaaaggtggagaggtgactggtgaggatgtttaaaagacctctcctctctactccctaaatgggggccatccagtgttcttgaggttcagagaaggcccagggctggggcagcagggcactgtcagctcccagctcccaggggccaggagtaagaccccaacactgtccagacactgattgcattcattttgggggagagtagattcttatttaaagaataatacaaaagtctacaaatatgaacataaacagaaattcctttgctacaattttccccttaataagacattccttcctaatgacatatgtgactgcattcatggctgagatgttttctaggatggtgagagcatcagagtggactatctggtgccttggggtcatgcattttcttcttccaatgtctacaggatcccccatgtcccactttgtagtgtaactcagtgtgtgtcattctggtttttgttgtatagatccttggaaagcccatgtcattcctgctgtgaggtacaggcagccaaatggcatcatctctaaacatgccttctcctggtacatcaaattatggaataaatgaaagccattttgacagatattgaagatataagtttctactcttcccacacatgcttctcccaagtgaaggattttactggtgaattgttattagagattagtgtggatcagtgactctgccaggggaaattttgccctctaggggacatttggcaaagtctggaaacattgttggttgtcagagctgggggagggagtcctgctggcattgagtgggtggatggtgctgaacaccctgcagttcacagagccccaccagtttgaccacccaaatgtcaatgctgaggagtggagagccctgctgtgccctcccgcagcttccctgaagcttcccctcacctgctcctcccatgtctccccaccacttccccacttcacccgcctccttacacctcagtcccctccacctgaactcaccccttagtccaaggccagccctgatctccgctctcctggtctccttgctccttagcaggaggcgcccactagatggcgcccttgcccttactggagctcaccgtctccctttccaccctgagacaaatgtggctgcttttactgccacaaccccagccctccacactctagatttgctcagggagcagctcctggacagacctcagggaccccagggaggagcctcactctggagattttgatggcatggtctttgaacttcactgttacccccagtcaggatccaggatgttgggagtgcatgattctgcccggtcccacttcagcaggaccccactgctgagttgtctgtggggacccgggcctctcatctccttcttgcattgcaggagagggatcttagcactgctttcacataaagtcagataatggaggagtgcaggtgagtttgggaaggtggacatgaagagaggttgtgtccctagaggtggcagcagtgagaggatgggcaggtgggaggaacacagcccatccagggttgccagccatattaggagcgacagcctttcctctaagcctccagcctttttcctgaaacattccagaactttccacttcagcacttcccactgaggctcctcaggtctgtccctgagctcccagctgagcctacctacccatctgaaatcctgagtcctgtgtcaccctcgttccccattattctgtgcagttctgtgggacgcccagctctcctgacacccccagtcttcagaatggccatcagcgctgtcgctgtggcaccagggtgactgccgcctggaggctgagtcctggcttcctgacagctgtggggcccgctctaggctcccttgtcctgatcattcatcacctccaggatgcacagcagctgggccagggggaggagcagggacaggtgtcagccaccctgtgtgtctgcaagtcaggctgggggtgtgggaggacgccaggaatgactgaactttctgatttagagggtgagagcttgcactgatggaatttgggatttaataggaaaagcatagcgttttcctattttgtaggcagggtggctggagtttggaatcatagattcccctgggatgtcactgtggacctcagtcccacccgttaggggcacagatttcagaatccacaccctggggcaaagcaggcatgggaggctccatcagcctggccagggctctctatttgtgcagctgctgcaaggagatgtgcactctgatgggaacagtgctccctcctccttggggggcagtatctagctccctgcagcccctctccctgcaggccctgccctctctgaacctcaccttccccaacccgccccccgcaatcccatctcagctgtaatcccaacactttctcatccattatgggtggactgcttgagcccaggggttcaagactatgctggctggacaatatagcgagttgttgtctctacaaaaagacaaaaattagctgtgcatggtggcatacacctgtagtcccagtcactcaggaggctgaggtgggaggattgcttgagctggggaggctgagttggcagtgagttgagattgtgccactgtatacttcagtgtaggtaacagagcgagaccctgtctcaaaaaataaaagtaaaaaaaaaaaaagaaatatggaatacattattgttaactctaatcaaccatgctatgcaatagtccaccagtaataccagtaatagccaataatgaattatctgaaaaagaatacaatttattcttagctatctactgctaaaatttttaagctatcttttatgatagctgaaacaaaagaagtaaatttaaccaaggaagtaaaagacctttataatgaaaactgtaaaacattgatgaaataaattgaaaaagacacacgcacaaatagaagatattccatgttcatgaattggaagaactgatattgctaaaatgtccttaccacccaaagtggtctacagattcaatgcaatttctgtcaaaacaccaatgatattcttcgaagaagtagaagatcctaaaattagaaaccacaaaaattcctaaaacctgcacaaaacaccctgagttgccaaagcaatcttaaacaaatagaacaaagctagtggcattacacttcctgacaatcaaagcatactgcaaagctatagtaaccaaatcagcatggtcctggcataaaaacaagcacatagatcaatgaaacagaataaaaatcccagaaataaacccatgcatctctagctaactgattttcagccaaggagccacatgcacacaatggggaaaggacagcctcttcaataagtggtgctggggaattggatattcatatgcagaagaatgaacctagaccctatccctcaccatgcacaaaaaattaactcaaaatgtattaaataaagacttaaatgtaagaactgaaactatgaaactactagaagaaaatatagggggaaaatccatgacattggtctaggcaaagagtttttggataaaatctcaacagcataagcaacaaaaccaaatataaacaaacgggatttcatcaaactaaaaagcttttatacagcaaagaaaaaaaaggccagcagagcaaagagacaacctacaaatgggaggagaatatatttgtaaatatatacatatatatttgtaaatatatacatctgataagaagataatatccaaaatatataagaaaattatgtttctgtatagttttatctgactgggatacagaggccacatccacagtcccatcctcaaaggccacttgttcccaaaatgtcaagcacatccctcaatgatccatcatcaacacctatgtctgtaggatgaagggtgaatcatgaagcactaaaaaggaagaaggaagccaatcccaaaacaaaatgatgcagggtctggaaagtccaaagcattttttttttttttttactgcatcttcctcctttcttctccacattcccaatcctcactattgattaacaaaacaaaaaaaactgggacccaccatcttccctactgtcaggagatctagcgagattgtttgagtcttagaccaaactttgccataagccaaatttctggctgactttacaatgatatgagctagcacagtctctttttctgccagtcaacttgtgctcggttttatttgcaaccaaatagaggtggtaaccaaatataggtgaccctaaaattagtcatcaggatgaaatcctaaaatgtgcaacaaactgggttgaattcaggattagtagcaacatctctgttgtgggcttgaaaagggggcacccttttatgcagtagcaaaattgctaaattgttgtttgctgagtctttggactctcatcccggattttctatgaccattcaaacagggctgcaatgaacatctatggttgtttagcttggcacacttctacatttctatatagtaatatctagaagtgcatttgctcaatcacaagatatgcacattttataattgactgctatcgaactaccttaaatagccttaatttgttctcaacattgtttaacagggtctgtttaatgtcctacgtccagcaaggacagtatcacttttcttaatatttttcaaattattggaccttaacaaatacttaatgtgcaattaattgattcctttgtattcccatgccttcttttatatgtttccttatagtacacaaaaccacattattgtttctttacttgtgtcattccaccctggaccattcctatctaaactataacattatgagagagagagagagagaaaacaatatgaaaatataaattgattaatcaaaaaaatttaaataggacaaatcaggaagacacaagagagattttaaaattattcagagaataccacaatagctgtaccaatatattttaaaacttagatgaaacggacaactatctcgataaatgtaaattaccaaaactgactcatgaaaaaatggatattatgaatagagcaataatcagtaaagcaattaaaaagacagttgataatttttatttactgacaacaataacaaaatttcaggtcctgatatttttatggtgaattttaacaaattttcaagctcctcctcaaccaattctcagaaggtttaaaactttaacaagaaaacactttctaacacattttcagaagctgttatagcatgataccaaaaccacacaagaaaattatagaccaatctcacttacaaatatacatgcaaaatcaaacaaaatcttagtgaaccaaattcagaattaataatagcaaacaagcaaaatatgttatcatacgtatggcttatatcaggaatgcaagtatgtttcaacatcagaaaatacttctccacattaacagactaaaggagaaaaacgcttgtttaattatctcaataggtttttagagaattttgaaaattttataaagttatgcgtattctgtaaaattgatgaaatccaaccttgatttatttttaaaaattgcctttcctatagaattataggtaaaggaaacacatgcatcctcacagagctacttcaaggctaagttacttcccataagtaacgtatcctgtaatgtgtgcttggcacatattcaatactaaacaaatatttgcaaatcctcaaaccacttctcgctcaaataacccacctttgtcttttgcctttatgttagggttgattttctcaattgtatcttggagatcctttggtgggtctttcagcaattaccctgaatttgcttttctgtttacaattttaattcctgggaactctttcttgttctctgactgcacccttttcatgagagttcagccatcaatcctccagaaccccaccccccccgcccccccaaaaagcaataaagatgtctaaaagcttccttctgggctttcgaatgatgtttaccccaggcatttgttctattcgttcatcacccattttccctacaacttgcctacacttgatatcagatttttatttattagtcacctatcttcttcattggcccattttcctattttgccactggttgttctcaaatgtgttatgattcctggttgtacagtcaagtggttgataatcttggatatacgataaagatttgctctgtagctgtgtgtaagcctatataaaagcttttgtatttttcttcttaaaaaagacaaaagatggttgggaagatccctccagttcaccagttcgaggctgcagtgagctatgatagcgccgctgctctagcctgtctgtctgtgaaaaacaaggggggcggggggcgggggggaagactggagatgtaaatctcccgcagggccctacccgtatccgcaacaggtctctaacaggaacagcctcaggcctgtgttggaacaaggtaggttacagaaatctggaagccagatctgtaacttcagggtaaggactggctctcagggctgatcccccgggctgggtgtcccagaggcacccgcccccgccccttccccaaggcaggccaggacaccttcactcctctccttaggctccccacccccttctcctccccactgtgcctcctggagtagcggtggcggtgccacaggggagcggggcggggcgggctctgagggcaagggggatgggccccgccggggtcactggcggccaccctggaaactcgacgcaggccggcccttctagtgaatcgtcccagccacagctggcctcccagccgcgcttggggcgcctcggggcgcgaatggtgcaggttggggagactcaccacgcaccgtcgggggtcggtccggttattcctcaccgctcggctccagtgggcgcgcgggcctctcctcctcagttcctgcgctgcagtccctccctcacccttcgcagcttgggaatccaactgtgtcattccgacggagcgccgtgaggacctccgagggtgttagcgccaagtgatctctgtccagcgctctgaatatccaagtaaaggagttcaatgaagggcgggtcaacggaggagaaaccgtgactctctcaagggagcccaaggcctccttgtctaattagtgacgcgccaatggatggaggctcttcccaccatctcttcccagcatccagtgacaccaccgccaagggacgggctcggcggaacctgcaggaaagaagcatcggctgagcctgactgcagcgctgtgaagagacaggggaggggatcagtagttggtcccgcgcccaccccctgtttccgcgaggggcggagttgactggccatgcaggcagagggcgaaatgtgaaattccactactcctaccgtttttccctgacccgatggggcggagtgtcgtcaggctaagttccctggcggtaaggtggggagattgaggcgcacacctgccgaacggtaacgcaggattagctaaggcgagctcaggacagaagcctcccgaggagcaggagggcaaaataataaataaataaataaataataaataactcactccttggtctttatttgcggcaggaattcagaaggtgaaagcggggccttaggatctttctgaccttttgggttttaagcaggaggtgtcagaaatgttaccacagggctagctggcttgtggccagcaagcgttcacaatgccctcgatttttcatccctctctgtgggttctttttttcattgtaaggcagaatttctacgattgctcacccactcagagaacctgagctggtttagaccaggtgagacaggctaggtttaccctggtgatgatgtgttgttgccatggcgatcctgcccagtaccagaggccctgcagattcagatgcttggtgcctgtgcttggctgaggggccaatgggtgaagctgccatctgcgggatgatgactgaagcctctaagtcagaatccgcccaggctgagccttagggcagctccatggagcctcggctggcctgggatagagagtccaccactgtgccagcccccagccactgcctaggtcctgtgctgagagccccttgtccagggaaatggcgtccagtggaaaagggaccacccccttgcccttcactcaaggcaggttggtgacaaccctgaagctaatccgttcctagaggagctgcttctgggtccgagttttctctgcagcagagcagctccctggatgggatctgttcaaagtccgcctttcacgcggaattttccgtccttgcaattttccacctccaccactaggggatcctctctgaccgcctcatgccggctctggcctctgagcaggggtttctcttctgcatgtgcgaccttgcgcatgcctagtggccttttgggacctagagctgctccacaccccgatggggttacagagtgcctcgcctccactccaccccaccagggttccttccctggctgggatgggatttcagaagcgccgaggaacagcccagacaggtgtgggagagtagccaaggcccctgtcccggggtggccaggacagcggtggcctcgcataggacctggctgggctgctgcaatcagtgtcctgccccttggagagcaacagtgaaaacaacaagactatcttcacccaccttaagaaagaacagaaccagtatccccaactctgctgtgtatcccaacccaattccattccccaccccactctcagtagccaatatgcaaaatattagaatactcttactgttattattttcaaccacactctgcatcctgaaaaaccatatatttcgttatgtgcttttaaacttcttgaaaatgaaatactgaggctgggcgcagtggctgacacctgtaatcccagcacttcgggaggcggaggcaggcggatcacgaggtcaggagatcgagaccatcctggctaacacagtgaaaccccatctctactaaaaatacaaaaaattagccgggcgtggtggcgggcgcctgtagtcccagctacttgggaggctgaggcaggagaacggcgtgaacccgggaggtggagcttgcactgagccgagatcgcgccactgcactccagcctgggcgacagcgccagactctgtctccaaaaaaaaaaagaaaaaagaaatactgaattttcaaatacttgctttttttttcggtcaaaattatgttctcaaatttcactcctgtagatgtgcgtggctggctgtagtttttgcatttttattattaggtattctcctgttgcattaatatgccacattttatttctctcatgtttttggtgaccacttggggtgttttttggttttgtatttttgctgtatacatgctgccatggtggacatacctctttatacatatttcctgttgtatgcagacacaattttaggatgtgacatcttcagcttttctattgtgtcgtgtgtcttttccttcgtgctttgtgttatttacatattctggacacagattctttgtcaactgtatgtgctgcacatctctttcccagtttgtgtcttcttcttcttttttttttcttaaaaaaaactttctttatagtgttttttttttctttctttctttgttttgttttgtttttttgagatggagtcttgctctgtcacctaggctgaagtgcactggccgatctcggctcactgcaacctccgtctcctgggttcaagtgattctcctgcctcagcttcccaagtagctgggattacaggtgcctgtcaccacacccagctaatttttgtatttttagtacagatggggtttcaccatgtttgtcaggctggtctcgaactcctgacctcaggtgatccaccctctttggcctcccaaagtgttgggattacaggcgtgagccacagcacctggcctgtgttctttcttaagtagatgttacttttaatataatagaatgtatcatattttgcttttatattagtactttttctatctaattcaaacacatccccaagggtctttgtgtgtagactgaccaatttctcaagaatcatgaatgaatactgcttctctttccccaatttatctgtaatgctacctttattataaagtttctatgcatgtgtagaaatagttcctgatttttcactctgtgccaccagcataccaatagcacgctgtcttaaatattaaatagcagagctttatgagacaacttgatgtgcagtaggcaattgcccccttgttactcttcttcagggttctttgttgtaccacatgaattttagaattggcttgtccagctaaaagacaactgcaaggattttatttggaagttcataattctatacataatttggggaaagtattttcataataccaagtcttcctattaatgaacacagactctctctctctctcccccacccccacctgtttagttatttatatctttatggtctgttagttattgtttattgtctttcaaccaggtttcatgtttttctacatagaggccttgcatgtgaaagtctttcttcctagcttgctattacaaattttttttaattgcactttttgggtacagtggcttgtactgtaatccccgatacctgggaggctgaggcagatggattgcttgagtccagaagttcaagaccagcctgggcaacataatgaggtccctgtctcaaaaagtttgttttaaaaattgcatttgctgttattcaacaaatgtcattgtgtctcatatatggatttttatatctgataaccttgttcaacaatcttttgattctaacaatatatcagattcttttgagttttccatatagacaataatgtcatctgtaaattataattgtttcttctttgttatttcttggaccttttattttatatttttgtcttgctgcaaggcaatatccctctatatattgtggggtcttttttctcataaagtggggatggtgaacacccttgtcttgctctctgattgtataaagcatgctttctgtagcattttgtagacgctcttttttagattgaggtaattcacttttatttctggtttactgagtttttagcataaattcaggctgaatttgagctaaagctttttctggagacatcatttgaaaaattcatatgatttactttctttaagtcaccaaagttatgatttacattgaactgagtttctactgtttaactgtattcttgggagaaaacccacttgtcactgaacaatatctgttttatttactgctgtcttgtgtctaaattttcttttaggattttttgtatatgctcagattagcctgttattctcctttctgtatttttttctggtttgggggtcaaagttataatagcctcacaataagagctaagaaaccagccctaatggaggccggggcaggaggtttggagttcaagaccagtctgggcaaaatagtgagacccccatctctatgaaaaatagaaattagccaggcatggcagtgagtacctgtagtcctaggtacttgggagggtgaggcaggaggattgcttgagcctaggaatttgaggctgcagcgaactatgattgtgccactgtactccagcctggatgacagagcgagaccctgtctcaaaagaaaaaaaaagaagaaataaaaaggaaaagataaaagagctaagcatctgtttccttttttccattttctgggagagtatgtgtaagactgtaattaactgtttcttgaataatgggagaactctgtaaaataatctggctttggtgttacctgtattggaaggatgaaaaataccaattcagtttcattattggttgatagggctactcatgctttttgttttgttttgttttgttttgtttttgagaggaagtctctctgtattgccctgttgtccaggctgagatgcaacgttgttcacaggcctgatcctggctcactacagcttctaacttccgatctcaatagatcctcccgcctcagccttcccagtagctaggactacaagcatgcagcatcacatccagcctcttttcctgcctgacccagttctggtttcctttagttttctaggtgttcatccattttatctaatgtttaatgcatttggcataagggtgctcagtgtcctttcattgtctgttgtctgtaactgttgccattttcattcctatttatgagtactggcgtcttctctcactttttcttaataatcctgctggaactttgctttttaaagaacatcttttgacttgttgattcttttttcatacatattaactattttcttattttttgcctttatatttatttcttttcctgtttgaaacattgctcttttcttactataaaaatgggtaagtagctcatgaattaccacctcttttaaaaatcttttctactgtaagcattttagcagtttacatttgcccacaagtaccacttcagctacaccctatgtgcttttacataaagtcttcatttttggtaagacatattctcaaattttaattatcacttgtttttaaatccatgatgttttatttgaaatgttgtttctaaagatacattttctggttatacttttattcttctaatttagcacagtggccacaaaacatggtctgtgcagtgcatacaatcgatgagtaatttctgagctgtagtatttggcataatatatggcaaaatttcctaagttttccatgtgtgctttaaaaaacttccagtaaaatacataaatctgttagatcaagcttctcacattgttcaaatagtctatatgtttactgattcatttgactgcttgatttatcaattacaggtaggaatgtattcaaatctcctattaaagtgtgacactcaagtggctttttaaagacagagatgccaaaccaatgaatacatgattttccccaaagcctgcacaaattctctaatgaaattttaccatgaaagtttgtttaattaaggcttactaaagcagtatgttgtcttttactttttaaacagagaatatatattttaatacatcgtttaagtttatgattaattatctattactgaggataagaatctttgcctgtgctcattcagcatttgcacttcatttatgatctgccttctcatagcttctgttaatttttatactagagacatttatttgtttgtataaatgttgaaggtttttttttgttgttgttgtttttgagtcagagcctcgctctgtcacccaggctggagtgcagtggcatgatctcggctcactgcagcctccatctcctgggttaaagtgattctcctgcctcagcctccagagtagctgggactacaggcatgtgccaccaagcaaggctaatattttgtatttttagtagagatggggtttcgtcctgttagccagggtggtctcgatctcctgacctcatgatctacctgcctcggcctcccaaagtgctaggattacaggtgtgagccaccgtgcccagctgggttttttatattataaggagatgtaatagatagatagatgtttcaaagatagtcaaatgtttttaaaatttaaaacacttttttacaggttgactttcaccatttaatttcatctatgtgttttgccttagagaaattttaaatgctatgtagatctcatgacttataattatgaagcattttgttttctgttttccacgaaacttagcttaactttgagcatataatagttgtaaaggtaggagagtaacactgaaaaaaggaattgcataaaaatggcacattttctgtagagttgtttatcgcctgaaaataggccccatttcatggaagtaagatgatcaggctcaggtccccagacgaaactcttggcatggtttttggagatagtccagggctcagtactggctctatcatttgctacttctcccaaagtaaccaatatctcatccaccctgagcccatttccatatctctaacatgaggataatagcatctaccttacacaccaagtagagggatcaaatgtaggaactaaatcaaagtaccagcactgaataacctacatcctcccacttcccaaaaggaagagagatgtatcccctgttgacaaacgagaccattttgcaggagagaaaggaaatgccagttcacttgcaatgtaaacatgctctctctttttagggatgtccagggacctgagagagaacccatgcttaccaaagagtttctagttccagacacacaggactcgaagggtgacaagtatggttttcagggtccctgaatccacccagtcctcacagaaactcctaaaagctgtcgattgacagcgttgagttcacagctctggtcctcacatgctgatactgcttgtgatatcgaacccgacaggaccccacatcacaattgatttaccaactacaatataatacctcctgaatctccaaattggctcacccaggaacaaaggcttggggtaaaactggattaggagatataagctctgaattttctgagggtgagacacacaaggattctaagtgacacgccacagagtaacgggtctgtgactggaggacccacagatttgtcttactggagacaccacatgcacacaaactccatccttagctgtggaaacaagggtcttttgctatcttagccgaattctgggagtaatttttggaggggaggagatctttgggattgcctctttcaggccctttacaaaaatacctacttcttaaatggtaaagcttacactaaactgaaaaaattacatccttggctttttatgaagtaggtgttggattgaatcactactggaagaagtatggcatcgcaaattctaagcagtggtcaaaggatggatctgttaaattagaaaaatctctaaatttataaaaagattttagattcctttattctaaacaattgacctatttgtactcatgggacaatcaaatttcaaaggagatatgtaacgatttcatggcttgcattaaaaatccttctgataaaattaaagataaaaaatctgaccccctgccaaaaaaatcttttgaagttcatactgcctgctttcaatattctgtgggattcacaatgaaaggtgccttatattgtggcctagcttcaagtttatgccttcgccaccatggcctgggttcaattcccagtcagggccccagcgcctttggtttaatgtttgcgtggcatttgacttttttacctatttagtattggtgagattacctttggtaaaaaaaagtttaaagagtggaaatcgcaattctttgtgttggctaaaatctgattataagagatctggaaggttttatttttctttttcaaagagctctatggtcagaagtcggcttcatgaaaagctaatatttaattatatgtacatacagtctttctggattttctcttttgcctcctgttttgaaaaatatttggatttgagtgaaactccgttttagaaattaattgcttggtacaatatacccatgtaactaccctgcacatgtaccccctgaatctataataagagttgaaattttgacaaaataaaattagattttgaattaaaacaaataggtgcttggttcctctgctcacttctttttaaaaggaattcctctcccatgtacttcttcttttcccttctttaccttccttttggcatctttggtatcacatgaagggatctagagggaattttaagtgactctgaaattccttgagaaatacacaaaaagatcccactcaccccttttgggggtctcctgttctccttgtggagtccagagtcagggacaggctcctccaggtctgcagctctgctctcttttatttcatcttggctgattgctttggttttgtgagtaccaggcattactttgtactgtgagagacacgtcctttgtgagtgcaacggctgctgggtcactggtgagggctgcagtttggagatggctgagagccgttgcaataaatggttgtgattgcagggggctccttgtttctttgcaagtttagatgagaaaggtgcagtttggacacagtttaaaggctgtgaaaacaccaccaatgaatatgatttcctttggggatggtctgattaaaagtgggctgattgttgctgtgctactagccttgaagacatgtttctacagcattgtgcagtgtggaaaaattgtgtggcttggtcttgtggcatgtcccttcttttagagacctcagattcaatgtgaaattcgggatttttgattttcaaagatctagatgccctgccttccagatgtgcctactcttcacatattttaaaattagatcctataaactgcaaatactttgttggcttctgtgagatcagaggtccagttagaaaaggaagacagtttgttaaaattaaaaactatttatctaatctaactagattggcctccaaatatgactttctgacattcagctggttactctgaaaagatttctaaatctcttgaggctcatctatatgtttccttgcaaagaaaaaaaaaaaaaaaaaaaagcaagcccaagcactagtaagaaaaagatttgcaatgtttcatgaaaggagtagatgagtgaagcatttatttgtagatactgggttggatacctgtgcaaagaagaagaggtcaataataaaaattgccaggggatttcttggaacttaacaagctgaattaaatatagaaatgtcaggaaatcaaggcaggaaatactcacttgtggttaggcagacagggcagggttctgagcttgagatggagcaaacagttgtggtgggtgaagttcacatgctttagagctcagctgtcctagtaaagaagcctaagagtctctaaagctcttatgagaagatggattttttttgcctagattaaaaggttaaagaattgctttaagttggataaaataaagctaaatgtttaagcaagttgtgaaaggtttatgaaaaaattaattaaaatatttttgtgtgtaaacatattgactaaagttgaaggggtataattcagcatttctgtaaattgagcattgaaataaaaacacaatgggtttctcttagagcactaacctgctctttaacaaaaattgtaaagggttatagaaagtctataaaaatgttaccttatggtcaaacattaaaattgggtaaatatgtctatcaggttttattaagaattaggtttaacattaatagtacactaatgtaaaggtgaaatttggcttatttggtacaaaaatcatacaggaagcattgtgaaatataaaatgatttttagctttctttgggctatatttctataaatatgttattgatgagggttccaaagttatgggagactcctataattctgctatatctcagtgtacattatcagtcataattataattgtcatgttaaattattgtgggccacagaggtaacagatttccttgtcaattgtgtctttgactatgactaccctaaaacgttcagtcacccatatacacatgttaccttgttttggccctctttagaaggtaattttataatcagctataaagccctaacaggtgctcttaaatgcaaattttgataactttggagattgtgacatcagaagagaggaaaaatgttcgggacacttggagagctaaaatgttcattgatatcaagcaggacaggaattaactgcatgaagtgaactaataggaggctgaagtgatctttttgactttttgcttaaaacgttgctgatcctttgttttgcttttcagagtcaaggcaaattttcttttgagctattgacagcttttaacgattaatcaaaatatactcctatgaacaccatttggagcattatttgtttctctctacccgatttccccagaatttggaaactatttgtgggtattcttaatttatggcaatatagttatttgcataagtgcaataagaatgtgttttctttggtaacaggacacaatttgaaaaactggttattttaccaaggttttgaccagaatgctgtgctttcctttaaggaatcaaacttgacttgtggagctaataaagcctttggaaaactgaccttatatcctgtgaacacagtccctgtacagggttactgatctgtgggaagaaaagaatgtcacattctgacaggtcaggaatcccaagttatcttgaaacttcaagaggacaggaattcacccaaccatatgtatttgatggtagaaatccatggcaggggctcagctttaaaaagtcttatctcagattccttctataaaacaaagtcccattaaaaccaattttaaaagcctatgtgaaaaataattattcttgctgcacctcgtacaaataaagtggcaaagcataataaagcaaattggtcctgtcgtaatttgtctttagtaaaaacgggaaactggggtcgggtgcagtggctcactcctgtaatcccagcactttgggaggctgaggtgggcagatcatctgaggtcaggagttcaagaccagcctggccaacatggtgaaaccccatctctacaaaaatacaaaaatgagccgggcatgatggcgggtgcctgtaatcccagctactcaaggggctgaggcagggaagcggaggttacagtgagtcaagatcgtgccacttcacgacagcctgggtgacagagcaagactccatctcaacaacaacaacaaaaaagggtaactggagagagggaagttatgtttcaaaaacttttggaaactatagtacacctgtttttaaattctagtctggcattcagtttttattattttctacagtttgggttaaattcgtatttctctggctacaagtctcctaaataatcttttcatttgtttcctttttctttccctttttccccatttttcttaattggaaatcactgaaacctaagctgtgctttcttaaagccctgtgaactgaagactagacaaccgaaacttctgaaggaagtagcagcaacctatttatatgtgttgctgttgcctactattatgttttagcaggtgctgcctctacacccccgaaacagagagtgctactgggaacaaatcgactttttccactccagtgctgcattcggtgccccataacgatgaccccctctcagcaggaagtagccagaaagattacaatgctccatctccctatgattcttgtgataaataaatatacaagcatgatagaaatcatgcgcaaattgacagtggggattgtggcaggccagatttcactaatggaggtccccatcacaactacttcagtactgactgagtggttaagttcagtatcaaaagctgaaagtgccagcgcctttctacaaaggctagaatgtaacaaaagcccaccaagggttttacctaggcctttcctgggccttacagcatgacaaaacaaagaaggaattcttaaccagacctgtttaggattaaacaaatttaattgggggtctgaagaaactcgccaggcctccacaaacaagttcattgggggtctaaaggaaccccccccaaacctctgtgattgagcaggagacaaggtcagggtaattgccccagcacctggactcatttagatttaagtaaatgtactgaggctccagagaaaggtctccaagacttagactagagttacagattaaaagaagttaatcacttatatctttagataaatgcacactgacacgtagacatacatcttagaaaatatataagctctggaaaaccttgtaatttacagttggtctggagatattttctgggccttctctctgtaaccggttccagaaataaaaaactctcttcctccccagtttatctgcatctcgttattgggccgtgagaaatagcagccagaccctgagtttggtctgggaacacactggctgggcttcctgcctggcggtagagcttcactgtcctccttcccagccaaaatgtggcccttgaaggcttcctccccaactgaccggttttgggttctaggtactcagggaacaccgtcttcaaggaggccattttcatactgttcctggtttgatttttctgaaattaggaaatgccccttgaggcatccaggattgtctttatttcccctgaagcttcccctcctgaagaaaaaagttctcaaacaccctcaggactcaaaccccaagttcaccctgtgaaacattcccatttcctaaacccaggcaggctcatggccctcagcctctcagaccccatggaaacctcctcccccacttcacgggttctctccatattgagagcctcccctcctcggcacacaacccagagactcaccccaacatgtgtagcaaatcaccctggaaacaatcatggctgaacgtggtagcccatgcctgtaatcccagcactttgggaggcccaggaggtggatcacctgaggtcgggagttcgagaccagcgaggccaacatggtgaaacctcgactctactaaaaatacaaagttcactgggcattgtggtgtgtacctgtaatctcaactactcaggaggctgaggcaggagaatcacttaaacctgggagacagagattgcagagagccaagatcgcaccattacactccagcctgggcaagaagagtgaaactacatctaaaaaaaaaaaaaaaaaaaggaaaaggaaaagaaaaaaaaaatcatgaggcaacattgcatttaacaatattttatttatcaaaagacacttgtctttctcaggtaagtgaaggtctagagatgaaacgagtcccgatgtaaattgccccatgggcattgctgagatcacaagatcatcactgcagcatgcagcacaatagtaaatttctcaggatggaagttcaacaatccaaaaggtagtattttttttcatgatgctcagtccatcatacgaaataaaaataaattccttttcatgatcatccattcagtagaaaaaatgatagtaaatttgttctcatgaagatttttaccgtaacatataggatttatcgttattattattattctttgttttttgtttttttgaagcggagtctcactctgttacccagtctggagtgcagtcgtgcgatctgggcacactattaacctccacctccagggttcaagcatttctcctgcctcagcttcccgagtagctgggattacaggcatgcgccaccacacccggctaattttcgtatttttactagagatggggtttcaccgcattggtcgagctggatttgagctccggacctcgggtcatccgcccatctcagcctcccaaagtgctgggattacaggcgtgagccaccgcgcccggcctcaatttatcattattcacgcatccacaaactgggttcttatattttgtacgtgattttttccattgaggagagatatctgtgcatattcatgctgctcatatttcatccacaaactcggttcatatttcatccacaaacataattttttccgttgagaagagatacttgtacatatttatgctgttcaaattcacatttcatcattcttttacaagaaatagataatgtattttaaggttttccagtggtattacagatattttactgggtgtatagatagaaattaaaccaaacttctttgttctggccgccagtcatgcatcctgttttcaacatagttcacatacaactggttgtgtaaaaatgaaattattttgtttagtacaatcatcaacagttggttgattagatttttaattatcaagttaatcattgtcattatgcttctcatcgcactcgtcattaattgctgtgggaggaaatttgttatgttccctatgagagggtgtatcacaaattcaaataagaattcaacgacaatggactgtataaaggaaataagcaagtccatggaaaacatatttttttccggaaaggattaaaatatttttaaaaaggaattaaaaaaaaattgggcacggtggcaaatgcctagagtcccagctgctcaggagatggagacagaaggattgcttgagcccaggaataagttggaggctgtagtgaacagtgattccaccactgtactccagccagggcaatagagggaaaccctctttctaaaaagacaaaaagaaacaaaacaaaacaaaaaaacaccacatcaaaaaacccaacaacaaaatgaaaaaccaaataacagcaatacaattggagctattcgatccaaagaagtaaatgaaacataaagcaaataaaagagaaaagctaatacctgtgtcctgcaggactcagtccaagttctgctctgactccctcctggtgagccaccccttaaaaagtcacttggggcggggttactttgacagacagtcttctgtcaaagagggaggcggtaaatagcacttttttttttttaatttaacgcctttccaacaaattagcggctatgttgtctaagagtgcaaatgtcagaggtgggtacaggcagcaagaccctccccacaggggcagcagaaggaggaatgactaagggaacaagactttagtgtgctcaactacacaggacaggaaacagatgctttttacaaaagctggtggacttgaaggcagaatattttcaagttcctgtaactgcgaactatgacctgtagcctgtgagagtgactttctgtggcaaaggagcttttgtgaatgtgaggaagttaattatcttaacagtgggaggttctcccggcttatctagctagaccctcgtgaaatcccaagtgtccttaggaaggggaagcagagagagatttgagtccagaagaggaagaaggtgatgtgaggcccagtaggggaacaaagggcgatggcatgtaaacacttagcccccagaagtgggagagggctggggttcatcacaccagaatccctaacaatcagccttattttaattacccttgaaatggaaggaggccttagagagccagaggcttggaggggcaccctctgctgcatacacagatcccaactgctgtgggctccaaataattgcaccagggaaatcacaaattatcaaaaataaaggatgtaaagcttttaaaaaatattaaaagcccaacaaataaaaaaagttctaaatctataaaattgacctcagtctgtatatttagatgagtcatgtgtatatagcgtttcacttcaaaatatatgataaatctctcattcattggcttaaaaataaacacttcaatcaagtctttatcagaaaaattgaaacgttaactcaattgccttttagttcatgtgactttacaaaacttaaaacaataaagtcagttttaaaaattattagtaaagtaaaagaaaaatatcttcacaatgtagacattttgtccacatgagacatgtgaaatattgccattactaaatatttgcaggtcaaaaactgtttccaaaacattttaaataatcatctggcctgtctgttttagagcattcaattctagctgaggtctggggacatgtgaaaggagccacggcccgactccgtgctgggaagagtcagacattttccacagctctgtcctttgctgtgggctctgcaactcctaccaattaaaattgcttacgtttttgttttatttttactaaagaggggttcctaaaagctaacattatactgagtatatgtaactaaaactactaagaaaacaatttcacaattatacaaatgtgccaagtaaatgaaaaaataaactgtattttaataaaggttataaaaagaaaaacatatagtggtgtgaggactgtctcaggtcttcactgagcaagggatcatgacattctatggcggacagctgaccttggctttctgctcctcttgattatgtctactaagtgacatacttactctttttccacctgtcttgcctctaagggtaacaggttttatgagatccctcctagtgctttgcaggtcagcctccctttgctgcattccaattttactgcctataccctccagctggcttttgatgacaaaagtcctggtcccagccattctcagattctgtcatccccgtgggcactatggagctcagcactatgggaggttccccaaaaatctcgttttctatgaggaatggccaccacctgcatctcagtgatgctagtgacccctttcctactcctgtgctcactggtcctcatgaagatcctggttggtctgtagccccctatttttcctattaaagagaaattacagtaagacccatttgtgtgcaaaatcaattttaggcttattacacttggcctgataatttgcataaaatgcagcaagaattcatcggccatataggctacttttgagttaattttcctgggtttttacctaaaaatatactattttggttagagtcttgtgaaaataaccaatgtgttcaattgttttattttaaaaggctcttactgaacactataaatatgtataagttgaatatacaaactatattgtcataaaatcacaacccaaaatgtggagaacgcagagggaaaggtaaatttgctcgcaaaaacatacttcacccaaataactggaaaaaaaaaaagactttcatgacccttctttaaccagagcagcagctttcaaacaaggtgtttgccttggaaatgccattcacaagccaaacggcccttgagagctgtctgtcaggcactgtagaatctagcagctcctcacagagttagaaatagtttcaggaaagagattccctgcttttagtaactgcactttatattcccagatagcgagattgtatgtaaaccatttttatcttattctggaactcttttgggtactttttttttttttttttaaatgatggagtctggctctgttgctcaggctggggtgtagtggtgcgatttcagggtatgagaaaatgcagctggacctggctctttccaggaagaccctcacagccaaggagtccaaagcctggggttttcatctaattccagtgtgactggggtaggagcagctttggtgctgggtgtgtgtgtgtgtgtgtgtgtgtgtgtgtgtgtctatgcctgtgtctgtttagggtgttaggctcgtggttgtctagatacaaatgtcccagggctcaggagccccagggttatgtcaggggcaccagatgaaggtgtcaacagaagttagggcacaagggacaaaggtgagagcaaggttagattcatttaggtgcaagaaatcatagagggaggagggagaggaagccctcctgctaccaccgaggaagaagcgcagcttaaggcagaaagcctgtccggagaggaagtgagtttgagggcagggctctctgggtaaagtacggtctgggacaccagcctgggggaagggtacagaatgcagagtggcctggcgtggggactaagaacagaggagagcagctttcactgggagggtcagtgttttcagtgtccagcactgagcaaggtgagatttgggcagcttgctgtgaaataaggtcaggctctggcattgtccccattgcgtgtgtgtgtgaggggcactttgggagagtgaactctccacctccatcctctcatacgtccttcaaccgagcttgccagttaccctgattccaaggagatctatttattgttgacaatactggatcctagcagaggctgggtaggagcctgggcacaagcaagtggaggagggggcctgggcctgaaagacctgggaggtttgagagaggacacagcccacagaatggagcagatggggtagagtcggcaagcattcagggctcctagtaagttggacaatggagaccctgaaagatccagtaaaacggggagaacaaacaggtccccaactcacatccttgcagtgcctggagcttcagactccagacaggtggggaaggaaaattgagggatgtgaacatgttggagaatgtcgtgccctgaagaatgaagaaaaggggggtgaggaatgagagcaggaacggcttccagtgcctggtgcccaggagaactcagaaaatgggtgtggtggagaggaatcgaggaaccggaagtggtggaagtgtgcagggcccctccgagatcactgtgactgccaggcgtcctccctggctggagagcttcactgtcctccttcccagccaaaatgtgtcccttgaaagcttcctccccaatggactggttctgggtcctatatatttgaaggggtggcctgcctctccacacctgtgggtatttctagttgggtgggaggagagacagagaaaagaaataagacacagagacaaagtataaagaaacaacagtgggtccaggggaccagcactcagcacaccaagggcctgcaccggcaccggcctctgagtttcctcagtttttattgattattattttcattatttcagcaaaaaggaatgtagtaggagagcagggtgataataaggagaaggtcaatgaaaaacatgtgagcaaaagaatctatatcataattaagttcaagggaaagtactatgcctggacgtgcactcaggccagatttatgtttctctccacccaaacatctcagtggagtaaagaataacaaggcagtattactgcaaacatgtctcacctcccgccacagggcagcttttctcctatctcagagttgaacaaatgtacaattgggttttacaccgagacattcagttctgaggggcaagcaggagacagtggccttcctccatctcgactgcaagaggctttcctcttttactaatccacctcagcacagaccctttatgggtgttgggctgggggacagtcaggtccttctcatcccatgaggccatatttcagactatcacatggggagaaaccttggacaataccccgctttcaagggcagaggtccctgcggctttccacagtgtattgtgcccctggtttattgagactagagaatggcaatgacctttaccaagtatactgcttgtaaatattttgttaacaaggcacatcctgcacagccctaggtcccttaaaccttgatttcatacaacacatgtttttgtgagctccaagttgggtcaaagtggctgggtcaaagtggctggggcaaagctacaaattaacaacatctcagcaaagccattgttcaaagtacaggtctttttcaaaatggagtctcttatgtctttcctttctacatggacacagtgacagtctgatctctctttcctttccctacatatattcatggaccacagtcttcaaggagtccatttcctcactgtttttggtttgatttctctgaaattaggaaatgccccattgaggcacccaggattgtctttacttcccccagagcttccactcctgaggcaggagcttctcaaacaccccccaagactcaacacctaatttcaccctctgaaaccttcccatttcttaaatccaggcagggtcatggtccttagcccctcagatgctgtggagaccttctttccctttcatacattctctcaagattaaaagccacccctcctcagcacacaccccagagactcaccccaacatgcattgcaaatcaccctggaaacagtcataagaccacactcatttaataatattttatttatcaaaagacactctttctcaggtaagtgaagttctggagaggaaaagaggagtcctgatgtaaattgccctgcaggccttgctgagatcacaaggagattgttactgcagcttgtagcacaatagtaaatttcttctctggatggaagttcaacaatccagatcgtagtatattccttttcattatgctcagtccagcaaatgtgatgataacaaattccttttcatgatcatccattcagcagagaaaatgtttgtaaatgtgttttcatgaagatgtttaccataacatacaggatttaccattatcaatgcatccacaaactctgctgttgttttttatacataattttttccatcgagaagtgatagttgtacatattcatgctgttcatatttcaaccacaaactctgctggtttttttatacgtaattttttccattgagaagtgatacttgtacatatttgtgctgttcatatttcatgtttcatcatccttttacaataaataggttatattgtattttaagtttttctaactgtagtgcagaaattgtactgggtgtatacatagatatcaaaccaaatttacttgttctggctgataatgcatcatttatttcatagattatgtatttctttgacacatttcacgtacaactaattgcataaaaatgaattttcttttagtatagacatcagcatgtgcttaattcggaatttaattgttgagttaaacatcgtcattgccttttccgttgttattaattgctctggtgggaattttgttatctcatacataagacagtgtgccacaatatctcttaaaatttcaatggcaataaactttatatttaaaaacagggaatctatggaaaacacatttttttctaaaggattaaaatatttttttaaaataattttctaaaaagttaggcacggtagcaaacgtctagagtcccagctactcaggaggctgagacaggaggattgcttaagcctacgagttgggggctgcagtgaactgtgattgcaccactacattccagccagggcaatagaagttaaccctttttctaaaaaaaaaaaaaaaagaaagaaagaaagaaaaaaagcaacaacaccaaaacctcaccaacaaaatggtaaagaaaaaaaaaacagcaatacaatgtaagctatttgatccaaagaagtcaatgaaatttaaaacaaatgaaagggaaaaagtaatacttgagtcctgcaggactcagtccaagttctgctgtgcctccctcacggtgagccacccctttagaagtcacttgggtcataagttaacccgataggaagtgtcctggccaatgaactagggaggtggtaaatggcaccattttaaatttaaattcacggccttttcaacggatcagtagccatgttgggtaagagtgcaaatgtcagaggtgaaaagaggcagcaggaccctcccctagtgcttgggcaacagaaggtggaatcactaaggggacaagactttagcatgctcaagtacacaggacagaaaacatgctttttacaaaagctggtaaatatgaagagggaacattttcaagttcctgtaaccaagaactaccgcctgtaaccggtgaaagtgactttctatggcaaaagcgtttttgaaaaggtgaggaagttaaatatcttaatgttgggaggttcttctggtttatctggctagaccctaatggaatcccaagtgtccttatggagcggggagcagagagagagatttgagtccagacgaggaagaaggtgatgtgagtctgggtgcgggacagggggagaatgatgctatgtggggatctgggctggggaatgacttagctgcatgagcggagtgacttagactcctgaactagaagaaatctagggctcatcacctcagcagccctaaccatcaaccttatttttattacaggtcttccatcgacggactccctaaaaagccagcggcgtggaggggcgccctctattggacaaatagatcttgactactttcggccctcaaatagcctgactaggcaaataacaaataataataatttttttttaaatcatggaaaatattttaaaaaacaattaaaaagttataaatctataaaatctgcttctgtctgtgtgtctgtatatttagatgtctcatgtgtacataatgtttcactaccaaaatatatgatgaaaccctcattaatcggcttagaaaactaaacacctaaatattttctcagaaaatacaaaaactttaactcaaatcccttttaattcacctgactttaaaaatctttaaaaaataaagcatgctttaaaattattagtaaagtaaaattagaacatcttcagaatttagacatttggtttaaattatacaggtcaaatactgcccttagtaaatattttcaggtcataaacaactcctgtaatcttttaaataattgaattacatgtctgttttagagctttaagttctagctaaagcctggggacaaatgaagggcaccatgccccctctctgtgctggaaagagacattttctacagctctgacccttgcagtaggctttgcaactgctacctatcaaaattgcctacatcctaagtttattattaaaaggagttgcttggagttaacattataatgaatatatgtaactaaaactatttctcatacaaagtatatgaaaaagtagaatgtatttttaataaaaagttataaaaagacatgaacatgtagtttttataaaaaacagtaattttgtctagttttgcagttctaaaaagttatgttaaattcaaaaataaaaaataacaagacaagactcaaggtttaaataagttgtaaaagatttgtaaaaattagttctataaaaattttacaaaaaaaagcattggttaaaatttaaggaattattttgtttttacagaaattaaacattcattaaaaacactctgatacaaggccttaatttgggttcatgtatcagaatagcagggttttcttagaatattaatctattctttaaaagaactatgaatgttatgcaaactttataaaaatcttaccttagagtcaaactgattaaaattccatagattttacgtaaaattttattaaaaattaacttcaacaaaaataaaatttgattttctcctttaaacaaaagttttgcgtaatattaaataataaagcatttttgtttaccttttaaactataaacacacacacacatacacatacaccaacactaaagtcagctgacctcatactgtctttattggatattcttgtttaaaaaactatcttctttggaaaataaagttttttattttaaaccatattttaaattatcattttgactaaatccataacatacagtgatctgtaataattctattttataatatcaagtgttttgaagaactccaggaacagccatgagagaacactgtggtttagtaacactttatttcctcagtttgaaaatagttgtctttcttggggaggccggtttcagcagatgaaaacaagagtcatgatgaaaattacccagcagtggttagtgtgaccataggaacattgtcatcaggtcagcagaaaacatatcagcaaatttttctcatactggcagtgtgtaggggtggatgtttacagttcctgaagccccagtggtcgtgtggtcttttagttttgccatttataggcaacttgtggtaactagctcaattagacacattccttatcacaaggacagagggctttctgtatcctagggttcttgccttggcattccagaagaatcaggtcacacgtggacgtggagaatgagtgcaaggttttattgagtggaagtagctctcagcagatgggggagccagaaaggagattggtttctccctggattggggccgttcagcagccctggctctcctctgactgccccaggcaaaatccacatcgttctataagtcggtgccctgctggtgtgctggtgcctgttgtcatgttcctcttcatgtccagccgcctgtgtgttcctccgctgatgtgctcctctcgacgtcaagcctcctgtgtgtctgactgctagggtcttggggtttttataagcacaggatgggtcttagcaggccaggatgatcttgggaaagacaacattcggtcaggaaaacaaaaatgcctgttgtcatctaggtccgtggggacaagcccaggtgtggagcttttagccagggaccacagcctcctgtatccaacacttcccttcaccttttctatatcattcaaagggatcatgcccttcccatcccagcacttcactttcatgtcatttgccccctctgaagaggtacatctaactgccattagaatatggatgatgaccagtcttagctgcttcctgctgaaagggggcattgttttgggggaaaacggcagtcagattcctcccaggggtctctataataaaagatcgaggtggctactttcaggaggtcctctaatgtactatctggtcccaagtcccatttctgcaacctcctcctgatgtcaggagctgcctgagtaataattttatcctttaggattatctgtccctcgattgaattaggagatagagaggtgtgatttaccaaggcctctcttagcctctccaggaaggcagtgggattttcatcaaatccctggttaattatggacaacttagtataattgagaggcttggtcttagacctacgtaagccctctattatgcacacctgaaagtgtctcctcttccagtcttccatctcattattgggatcccatttagggtccttcactggtgctacttctcttccagttggataatattcgctcccttccctgatgctataggtgatgcaaagctcatccccaaatctctctgctgctggcagagcagcctgcttctcagtgtctatcaggttctgactcaaaagtaacataacgtctctccaggagagttcaaatgttagggtgaaattctggaaagcttctatatatctatcagggtcatctgaacacttgcccagatctcccttaatttgctttaagtcttgtagggaaaagaggacttggaccttactgggcccaaattcactgggcatctgtaggaggggcaagagtgagactgggcttgtttgggatgaagatttctaggaggggccaggtgagaggctgaagctggatacggaggttggggtggacccagaggagcagggcttgagggagctggcacgtcagctgggggtgcgtctgggactcgtgtctttaattccctgggcttgaccctggcagccttccccgagacagcaaacaggagggctggaacaatcctacatgtcagcaaaggtctggattgctttgcaaggtatagaaagcctgcacatttggggcctcagaccatgtgtcctcacatccagagaaaagttctaattgcaggatggtattgaaatgaatggtcccttcctgaagccaagccagtccttcctgtaaaccataatttggccaaacctatgtgcggagggctatgagatgcttttcctctggattctgagggtcaaaacagtcccaatggttcaggatacactcaaggggagtacaagctgggggtggtgaggagaactggctgcccattctgaaagacagggaatagaggtgttcctcatttcccttccttcttttggcaaaaagctcagggtgtgatggggagggaaagcaagcatcttcacttcactttccacctcttacccctgcgccctggcaaccttggcaggtgccggccacaggtacaaatgcggtatgtacccatgaagcagggagaacctggagattaggaattaactgccctcacctatgtttccttttctccctgctgttgaaaaactttgagttccctgggcctttttatcccatgaggcatggcctccttctgtgggatggggttcagtcagcaggaattggtcctgtccatttacattgtgcctgttgcctggctttgaattcctcagacctgctttctctttctagggcctcagcctgaagcttggaattgagtttgggactgaaaaagcatttcagaggctgtttatatccatttagtgcctcaaataagccctgctgaatttgcaattatcagccagcaggggtcactcctctgttaacttccctattagaaacagagcggtggggattctcacttagaaaagaaaaaaagagaaaaacagttaaagaggcaaaaagtggggaatgctgggggaagaaccccttgcttagtgcaagtgggcccctctaatccttataactttcccatccttcccccagttcagaccaggttgaattccttggccatggaaggaaaggttccattgatgcagtgggtgagaagcactctgtagggtcctggctaccatcggttttctcacacccccctcatcccaggcagtggagggagacacttctgcgacattgctccccctgccccttcatggctattgggtgtggcctttgcctgctgcaggcatgcctaggtgctggagctgggagggaaaagggtaaggagaggtgccctggaagccgctcatgcctggggctgtcaaggtggaggcatacatggcacctctaggaaaaattggtctgatttgcacctttggcggctgagccaaatgctcattttacttagtaacattgcctcagcctgtagcaaaactcttaacattataaaggaagagataagatccatttcaaataatgtgtgagagagaaaagagatgaaaggaaaacagagtcttttacctgcaggaaagggagagaagtggcagagttttggaagaaaggcaggcccaacagtttcccattcactcacactcaccttccgagatcccagacgagccaccagttgaaatgggaaaagtttccttgtccccctcacaggaggtggagtgggggtgtggcttgcttctttagtactccgctgctcaaacctctagggaagcatacagactggcaagttgtggggctacaaccccatggcagcatctaggggtagatgtttacagctgctgaagccccagtggacatgtggtaccatgtgctcttttagttttgccatctataggtggctttgtggtaaccagctcaattagacccattccttaacccaaagacagagggctttctgtatcccgcggttgttacctaggtgtaccagaaaaatcaaatcacacgtggtcttggagaatgagtgcaaggttttattgagtggaagtagctctcagcagatgggggagccaaaagggagaatagttttcccctgaagtcgggttattcagcggcccaggctctcctctggctgccccagccaaactctatgtcaatccattggtcggtggcctgccagagtgctggtgcctgttggtggattcctctcagcgtcgagagtttttccctctcaggaaagggagagaagtggcagccacccatgtgttcttgcactgatgtgctcctctcgacgtccaacctcctgtgtgtctgcctgctagggtcccagagtttttttaggcacaggatagggcatggtgggccagggtgatcttgggaaatgcaacatttggtcaggaaaacaaaaatgcctgtcctcatctaggtccaggggcacaagcccaggtttggagccctagccagggaccccggcctcctctacccatcactttccttcaccttttctgtatcattcaaagggaccatgcccttcccttcccagcacttctcttctgtatcaataggtgatgtttttaaaatttcccaactctagtgcaggcatggtactagacatatacatagaaataaaaccacacttattcttctggctggcaagacatagtatttttgccaaattatgtgttgttttgaagcattttatgtacccctggtcatataaaaataaagctattttgttcagtacaaacagcagcattttctggattagaaagttaatcatcttaaaagatcatcacggatttttccattgcactcatcactaattgctttggcaaaaaatttcttatctcacgcatgacaaaatcagccgcagtatctcctagtaatttaatggtgatgatctttataaaggaaataagcacatcaagggaaaacataattttttttaaaaaaagagtaataaaactttttaaaagtcttttttaaaagactgcttttctaaaatagtaaaataaaactccaccaataaaaccaccaacaaaacagaaaagaaaaaataatgatatgatcggagctatttgatgaaagatggtaaattaaatttaaaatgattagaagagaaaaagcaatacctgtctcccgtaggtctcagtccaggttctgctatgcctttctcctggtgagccacctatttaagagtcgcttaaagcatatgttaatccaacaacagcagattaaaaaccaatgcaatctgaactatttgatctaaaaacataaataaaatttaaaacaaataaaagagaaaaagcagtacctgtgtcctgtaggtctcagtccaagatctgctctgactcccttgtggtgagttagccctttagaagtcacttggggtggggcatatgttaattccactaacattggttctggccaatgagtcaggaaggtggtaaatggcaccttttcttcttgctgatttctttcagttcctttggagtctggacattagtcctttgtcagatgcctagtttgtgactactgtttcctatactgtgggttgtgtgtttaccctgctgatatttcttctgccttgcagaagattttcggtttcattaggtcctattgatcttattctatttttatatttttgcgtttgcttttggggcattagtcatgactacttggcctaagccaatgtctagaaaagctttttggatgctatcttgtagcatttttagactttcaggtcttagatggaagtttttatatgctttgttaaagatcaggtgactgaaagtaccgggctttgtttctcggttctctattctgttccattgctctatgtgcctatttttatacttcctgcaccatttattgaataaagtgtcctttccccaattagtgtttttgcatactttgttgaagattagttgtctgtaagcatttggctttatttctgggttctctattctgttccattgctctatgtgcctatttttatacttcctgcaccatttattgaataaagtatcctttccccaattaatgtttttgtgtactttgttgaagattagttgtctgtaagcatttggctttatttctgggttctctattctgttctattgctctatgtgcatattttataccagtatcatgctattttggtgattgtagccttgtagtataatttaaagcctgccttcagatttgttctttttgcaaagtattgctttggatatgcggtcacgtttttggttttgtataaattttaggattcttttttctagttctgggaaggagaatgatgatattttgatgagaattctactgctctgtagatggctttggagagtatggtcactttcacaatattgattctacctattcataagcttataatgtgttcccatttgtttgtgtcaactgtgatttctttcagcactattttgtagttttccttgtaggaaacttacattaacctacttggttaagtatatttctaagtattttacttattaaaaattctcagggaaatgcaaagtaaaactgaggtgggaaattaaagaaaaataaaattaaaaagaaagggaaataagctttcttgtattaagctaacttgtcccagaggcagcaacaggcacagcccagacccaggaaaagtcttgataatattatttattgtattctggagactcttccagcactccttcaatgtagggagaagaaaaacaaattttcctttgttttatggtatgagtttatagattcttgttctctttaactagtaacttcaagtattctgttttatctaagaagtatggcaaaggtcatgagaagcctgagcaggcctgaactacagctctctaggcaccatagtgaagataaaccaatgcaagcctctttagagcaaaacctagataatagacatctgggttgcatagcaacagttatgtgcaatcctgagttatgaacctgttacaatttgattaactgtctttttcctgcctctgtatccctgctttcacaccactgtaagcttgcttcaagctggcccacccccttttgtgaagtgtgtataaaagtcaagtgctgtctttgttccaggccctgtctttggacgtgagtctgctgggcctgagagcactcaataaaagattctcctgttttaacccaaagcctctctctcatcctcctaaatcccacaacaaaaccacaatgagatgctatcttaatcttgctagaagcccataatttaaaagtcagaaaacaatagatgttggcatagatgtggtcaaaagggagcactttgacactgctagtgggaatttaaactagtccgaccactatggtaaacagtatggggattccttaaagaactaaaagtagaccattcattccagcaatcccattactggctatctacccaaaggaaaagaagttattccataaaaaagacacaagaatatggatgtttatagcagccgattcgcaattgcagtgatatgggaccaacttaagtgcccatcaacgaacgagtggataaagcaaatgtggtacaccatggaataatacttgataataaaaaggaacaaaataatgtcctttgcaacaagttggatggaactggaagccattattctaagtgaagtaactgaggaatggcaaatcaaatattgaatgttttcacttttaaatgagagttaagctatgagaatgcaaaggcataagaatgatataatggacttggggactcagggggaaaggttgggagggggatgaggaataaatgatgacatattgggtatattatacactgctcaggagacagatgcctcaaaatctcagaaattaccactaaggaacttttatccacataaccaaaaaccacatatattccacacactattgaaagaaacataaacattattttaaaaaataaagccacttttaaaattagcaaaataaaataaatatgtcttcagagtttagatattggatccaaattagacagatcaaatactgcctttactaaatattttcatgtcattaacaacttctaaaacctttcaaacagttttttgacatgtcttggaaccatccatttctagctaaggcctgggcacctgtgaaatagggccatgcccccccttatactgggaagagtaagatatttcaagactaagatgttttctacagctccatctttttctttaagctctacatcaaggacataattaaaattggttgtctcctaagtggtttactaaaaatgcatacttaagagttaccattataattaatatttgtatctaaagctacttaaaaattttcacacacaaatctgactgaacaagtaaaatatattttaagtcaaagtttataaaaggacatgagaacatagcttttatgaaaaaattagttttgtcaagtttagaggttttcaaatattttaaattcaggaaataaaataacaaaaagacaaaagaaaatggttgaacaacttagaaaaggtttgttaaaattcatcttataaaacaatctacatgtaaaaagtgggctaaaatttgaaagagattatttaggttttccataaattaatccagaaggggtaggaagtcttaagaatgaggaaggacaggaggaaggggaggtcatcctgacactgcagaggcagaagtgcagctgaaggtatgaaggctaagaggggaggggagtttgagtgctgctgcctggctgtcagagcagaggagggtcctgggcaccagacttgaggaagggatgaaaatgctgggcagacctgtagtgggcccttgagatggcagatagtggtttccagagagagggccattgttttccagtgcccagcactgagcagagagagttttgggcagtgtaaaaaaaaaaagagaacttacctctttctcgttttagaaaaagaacagtctaagaatatcagcagggaaactctcagtgcttcaaggggttaaacgcccttttggctttcttgtgttggtttcatcatagaggaggagaaacttcttggaagtgttcctaaaaacacaacacgtctgcttctcctttcaaaaaaggaagtgctaaaacacgaacactctagatccaaatattaatacggatgtctaaatgcttccgttttccaaggggcagaaagctaaaggttgtaacctattcatttcagtcaaagttggtgaaagggaagcaaaggaactgggtggggcttggaaggatgacgaagctcaagctcattggccagcaacctctctcctgggggcgggaggggtgagcatacgtcattgctttggcttctataaaatgaggaggactcaccgagtgtgaagagtccttctggtgattgcagctgagagcacactcacgacgttctgcaaggattctctgattatgattctgaagggaaaagcgatggaatggacagcagagattgtaattttctttatcttgaattacggaagaaagtatctaggacagaaatccacgacaagtccttggaaccagcagatctcttcgttcacggagacgttgacgtattctctattgaagaagattcttaccttcttactggacaaggttttgtcagttctgcgtgactggattgtccgggagactctgaggaaactgatgtcacatgtttttccaaagaagatgtttctggaaccaacaactgtgattgtggtttgaggacttctgagagttccagtacaggaaataagcagaacatcagctggaggctaaacggatccagacttcactcttcacttcccttcctattcagtctattgtgcctgctgactgagaagcttggctggtatgtgagcaaataaacggaactattcagaaggagatgttgacatattctgtattgaagaagatccttatcttctcacctgacaaggttttgtcagttctgtgtgactggattgtccggaagactctgaggaaactgatgtcacatgtttttccaaagaagatgtttctggaaccaacaactgtgattgtggtttgaggacgcctgggagttccggtatgcgaaataagcagaacatcagctggcggctgaagggatgcagcctccactcttcacttcccttgccattccatctattgtgtctgcctgactgagaagcttggctggtatgtgaggaaataaacggaattataaacaaggagattgtttctcatctacttcattctgttgtggcttttctattttggggttcagggtgtgtgacaaggaccaaggagatgaaaggtttcatgatggagaaagcccaggcaatcagattgaagagctatccacagggaatcttggctgctgaggggctgcaccctgcaacggactgaccatatgacagaaaagggttttaaaggctcaacttctggactgagaacccagagtaatttgggaacctcctctgtgaggagatatgaaagctgggaatcatgacatccctaggaatggaaggcacatttcctgatggaaggggtgctttggaaaacaggagcagagtagacacagcagccttgtggatacgggtgggcagcatgcatgggtgatgtgaacgtggagtgtttgtgatcgaaactcaaaatgtctgacaaagtgaaaacctagaaaccacaatgaggaggaagagtttgtgagggcaatcactctccccatgtgtgaaaatcgggggctcttaaaatctcatctggagaggtgcagtctaccaaactctgggactttagcctccccttttaaaaaaccgtgcatcaataccaacgtccgaaaccacagaaataacacctggcttgcatggagacaaggacaaaaagccgtcatgatgagttgttctgctcacttgctgcctctgttcagtgcacaggatattgtccacccactagcaggctactgcaagagaagtgtgcaatatgttccctatgtgccatatatgtgccatatggcccatatgacaactgagtcagaaaatatctgatgccctcagagttacactccacctggagcttgcccccagccatccaggacctaggctccctaccctgtccaattttctggtgttttgggggcttcattctctaaggtgtgcccactctttactcaaaccaaaacacccacatattcctgcccatgaacaaccaatcaaccacttctcagttccacatcctgctgttgggtctctagtggtgacactgtaactcccaggtcatagtggtgacactataacacctagctaaattgatgccttgtctctaggaggccatgggctcctgcaggtctcatctgactctctgtagccttccctgacaatgctcacaatacccaagccagagccacattgacagcaagctgctctcatcttacctttgccagacctggccactggaaaaggctgaccctcatcctgcaatgcctatacctccaacctttgtctcaagctggtgtcctggagggacttctaagcagaaaacagattcagactcccatcctctcctgaatggcctcatatccaattctcagaccctcagccttcattgtaaggacacttcatccatgcccttgagtattctgtctgcactgtgtattctgcaatagattctcctccctctgcgaccctcaactccttccgcagactttttgttttcttgatcatctaccatagtcttccactgggacactgccaagcccattctggagagtgagttgtgcaagtacactgccccccatctacctttcgggaggtgtatacacccttctttctcccaggtctggaggctttctattttcatcctgaggcatctccacctgctcttggattcttcaaattgacaaccaccagttaacaagaactatgtgtcaccaaatagccaaacaatggcaattacaaaaataaaattaatagctgtaacccccattagcaaggatacacaaatcaaatcagggatagtgggtgaggaagtctgcctaacattcaaggaaggattctgaagtgatacaaaatcattgcctttgctatctttagaatggacactttcagccaggcacagttgctcagcctgtaatcccagcactctgagagccccagttgggtggatcacttgaggccagcagcttgagaccaccctgggcaatgtgcagaaaccccaactctactaaaaatacaaaaatagccagttattgtggcacatgcctgtaatcccaactccttgggaggctgaggcacaagaatcacttgaatctgggagccagagtttgtaatgagcgaagatcatgccactgcactctagcctaggcattagagtgataatctgtctgtggaaaataaaaacattcctcttcaaagttttcttctttaaatcataaatgttggaattaatatatcctctttgaaactcactttcttcaagcttctttatttgatggtagtaaatctttgttaagctttatgaggcaagagtaatggaagaagcatattatatatatttatactctaacctcagtgcttgttctagcaagctcaggcatgcgtgaatgtgcccaggcatgttccagcccataccttatatcctttccttattgggaaatgctgttactcctataagcattcttgtaagcaacttcctctttttctttgtctccactatctttacctattgaggacagttttaggttcttagccagttggatgtagcatagactgtgaggtccaaccccagccaatggagatagcacacagcagtagcgacctcatgcttaacagataaatattcctgtctccctttgtttggggtgctctcagctgatgagcaacaccctttctaaagaaattaaagttgtcttgctgagaaaacttttggtctaaatgctgattcttccttgcagcactgaagaagaagcaattatttccaacactttctcatacacaaaaaaagaagaaggtggaagaaaactttcttgtgcaccctatccctcactcagaaagacaacagaaggctcctagtggcaagccctagaggattcatttcttttgggaaccctcttggctgggatactaggactcaggtcaaactcagcattttcagtgtgtgggaagtgtgcttgggtttcactgttacttccaataatgtgatttggtccttggggttcaccaaattttggtatggagtggtgaaccctgttaagtttaagtgtctataaaattaacaaagcaaaataaccattctgccccatggttcagagaccaaatattgtgtaggaaatgctttagcgagagaaacagagaagaataaaaaatgtcctcaagcgctgcattatttcttgttatcgtccagatcttagaggaaaggctttcattttccctcattcagtatgatattagctgtgcatctgtcatttatggcttttattatgttggggtatgttccctgtgtatgtagttttttcagggtttttgttatgaagtgatgttgaactttatcaaacgtttttcagtttcagttgaaacgatcatatgctttttgtccttcattctcttgatatgatgcatcatgttgatgatttccatatggtgcactgtccttgcatcctgggcatgaattccacttgatcatgacaaatgaatttttaatgcattcttgaattccgtttgctggtattttgttgaggatttttgcatcaatattcatcagagatattggcctgcagtttctttttttttcttttttctttgttttgttgtttgtttgtttgtttgttttgatgtgtctatgtctggttttggtatctgggtagtagtgttccatccccttttattttttagaataatttgaataagactggtgttggttctttaaatatttggtagaattccgaagtgaagtcattgggccccgggcttttctttagtggaaggctgtttattatggcttcaatctcgttacttattattggtctattcatgttttgaatttgttccttatttaatcttggtaggctgtgtgtatctaggaatttgtccatttcttttagattttcaaatttattggcacataattgcccattgtagcctctaatcgtcatttgagttcctgcagtaccaattataatgtctccttcttcatttttgattgtatttatttggatcctgcccctttttttcttacttaggctgcctaataatttcttaattttgttgaactttttcttttgtttgtctcgctctgccaccaggctggagtgtagtggtgtgatcttggctcactggaacctccgtctcccaggttcaagcaattctcctgcctcaccctcccaaatagctgggactacaggcaagtgccaccactcccagctaatttttgtatttttagtagacacgggttttcaccatgttggccaggatggtctcgatctcttgacttcataatccacctgcctcagcctcccaaagtgctgggattacaggcatgagccactgcgcccagcctaattttgtttaaattttcaagaaatcaacttcttctttcattgatttctgtattttttatttccattttatttatttaaactctaagctttattctatcttcttctcattttagctttggtatgcttattgcctctctagctctttaatgtgcattgttagattgtttatttgaagttcttcctctctacaccataagacgtaagcatgtcctcattatgtcataagatgtaaccacttacagctataaacttccttcttagttctgcttttgctgtatctcataggctttgttatgttgtgtttccattatcaattgtgtcagaaatttttcaatatttttcttaatttcttcattgagcaactgatcatttgggagcatatttttaaacttccatgtacttacatagtttccaaaatacctcttgtgatcaatttctagttttattccactatggttcaagaagatgcttgatattatttcaattttttttcacattttaagatgtgttttgtgacctaacatatggtctactttttttttttattaaactttaagttgtggggtacatgtgtagaccgtgcagttttgttacataggtatacacgtgccatggtggtttgctgctcccattaacctgtcatctacattaggtacttctcataatgctatccctcccctaacctccaccctctgacaggacctggtgtgtgatgttcccctccctgtgtccatgtgatctatttttgagaatgatccatgtggattagaatgctgtggaaaagactttggattcctaatatccagggagggagacgatgatattactttcaatatcacacgggtgtacacactctctgtgacattgttcctaatatccagtggaagagaggatgatataacacccagggagggagaggatgatattactcttaatattgcagggtgtgtacccatgcctatgatattgttcctaatatcaggagggggagaggatgatattactcagaatatggcagggggtgtacacacactctgtgacatggttcttaatatacaggggagaatgggacaatattactctcaatatcgcagggggcgtacaaccctgtgatttgttcctaatatacaaaaggggacagtatgatattgttcctaaaatcgcagaaggtgtacaacgccctgtgatattgttcctaatatccagggcgggagaggatgatattacccccaatatcacagggggtgtgcactttccctgttacattgttcctatgatccgagtggggggaaatgacattagtcccaatatcgcaggatgtgtacactactcccccatgatattgttcctaatatcaagggggagagaggaggatattactcccaatatcgcaagggaggtacatcctccatgcaatattgttcgtaatattcaggaggagagaggaagatattactctcaatatcgcagaaagtggacacccaccctgtgatgttcttcataatatccagggaagcagacgattatatgactttcaatatcgctgggagtgtacatcccttttgggatattgtttctaatatccaggaagggagaggattatattacttccagtattgcagccagtgtacacatttcttgtgatattgttcctaatatccagaaagggaaaggatgatattactcccaatattgcaggtggtgtacacccccctctgatattgttccttacatcaaggaaaagaaagaagaatattactcccaatatcgaagagagtgtacacccctcctgtgatattgtatttaatatccatggggaaagaggatgttgttactcccaatatcgcagggggtttacacccacactgtgatattgttcctaaaatccagtgaaggagaaaataatattgctcccaatattgcagggtgtatacaggccctcccccgttatattgctcctaatatccagcggtggagaggatattactttcaatttttgcagggagtgtgtaccccctctctgatatttttctaatatcaaggatgggaaaggatgccattactcccaatatcgcaggaggtgtacatgccctgtgatattgttcctaatatccagggaggtagaggatgatattactttcaatattgcaggggctgtacaccctctatgatgttgttattaatatttaggttgggagaaaatgatatttttcctaatatcctgggaaggaaaggatgatattactgtaaatattccagggagtgtacaccttcctaatattctaatattgttcctaatatccaggggtgggagaggattatattactcccaatatcgcagtgggtgtacacccctcctgtgatgttgtttctaatatccaagcgaggagaaaatgatatcactctcaataccgcagggggtgtacaccttccccatcatatcgttcctaatattcagagggaaagaagatgatgttactttcaatatcgcaggggttgtacacaacccctgtgatatttctcctaatatccaggaagaaagaggatgatattgctcccattatagcagacggtatacgcctccctgtaacattgtttctaatatcaagactgggagaggatgatatcacttccagtatcgcaaggggtgtacacctcccccgtgatattgttactaatatccagggggaagaggataatattactttcaatattgcaggggctgtacacccccgtgatattgttgttaatatttaggttgggagaaaatgatattagtccaaatatcgcagagagtgtacacacttccgataatattgttcttaatatccatgggggagacgatgatattacacccaatatcgcagggggtgtagtctccccttgtgatattgtccctaatattcagggaagtaaacgatgatgttagtgtgaatattccagggagtgtacaccccctttgtgatattgtcctaatatccgcaggagagaagataatattactcccaatatcgcagggggtgaacacaccccctgtgatattgtttctaatatccaagcgaggagaaaataatattactcccaatgtctcaggggatatacaccttccctatgatattgtttctaatattcaggtggaaaacgggtgatattactcctaatatccaggaagaaaggggattatgttactccccttatagcagggggtatacacctcccctgtaatattgttcctaatatcaaggctgggatatacgtggggggaaggatgatattactcccaatatcacaggggttataaaaccttctgtgatattgctcctaataaccatggcggaagaagatgatattactcctaatattgcaggaggtgtacactcccccattatgttgttcctagtatgcagaaaaggagaggatgacattattgccaatatcgcagggtgtgtacaccacccatgatattgttcctaatatttagagggacagaggatgatattactcccaatatcgcagggggtgtacacgcatcccctgtgatattgttcttgaaatcgaggggaaagagaattatatttctctaaatattgcagagggtgtacaccgccccctgtgatattgttcctaatagccgggggcggggggagataattaaattactttcaatatctcagagagtgtacatcccccttgtgacattgttcctaatatccagagcaaaagagaatgatattcctcccagtatcgcaggaagtgtacatttaacctgtaatattgtttctaatatccagggggaagagaatagtaatactcccaatatcgtaggggttgtacaccttttctgtgatattgttgcaaatatttagaagagagagagaatattactcgcaatatcacagggaatgtatacttcccctgtgatattgttctaatatctagaaaaagagaggataatattactcctaatattgcagggggtgtacacccccacttgtgatattgttcctaatataaaggaaggtcgaaaaacaaacggggagcccagggggaaggaaggcaggcgaggaagaggcagcgccggggcgccggagggagcagccgggccgcggaagcgcgagcacgagaccggtcgcggtcgcagtcgcatttttgccgttgtcgcggccgccgccgccgaggcttacccggggatgtctgagcccgcgcctcgcggcccccaagctccacgctgcgcccgctgtcccggcctctaagggccgccacgtccctgcggcgcgcgcaggcagaaagcggcttcgtgccggcggagggggcccgggcgggccgggaaaggctgccccaggccccgcgcctaccccatcaccgcggccggcgccgggccgggaggatgagcggtgtggggctctgaagcatggagggggttttgtacaagtggaccaactatctcacaggttggcagcctcgttggtttgttttagataatggaatcttatcctattatgattcacaagatgatgtttgcaaagggagcaaaggaagcataaagatggcagtttgtgaaattaaaggtgacagctttggaggggaccacccttgattggatacataaattctgttcattcagcagacaacacaagaatggaattaatcattcctggagagcagcatttctacatgaaggcagtgaacgcagctgaaagacagaggtggctggtcgctctggggagctccaaagcatgtttgactgatacaaggactaaaaacgaaaaagaaagaagtgaaaccagtgaatcgctgaaaaccaaaatgtctgaacttcgcctctactgtgacctcttaatgcagcaagttcatacgatacaggaatttgttcaccacgatgagaatcattcatctcctagtgcagagaacatcaatgaagcctcttctctgcttagtgccacgtgtaacacgttcatcacaacgcttgaggaatgtgtgaagatagccaatgccaggtttaaacctgagatgtttcaacggcaccatccggatcccttagtttctcctgtgtcaccttctcctgttcaaatgaggaagcgttctgtcagccaccctggttcttgcaccagggaggagtagccactgtataaaagaaccagtatctgcacttcaccgactctcccagcgacgccgaagaacctactcagatacagattcttgtagtgatattcctcttgaagacccagatagacctgttcactgttcaaaaaatacacttaatggagatttggcatcagcaaccattcctgaagaaagcagacttatggccaaaaaacaatctgaatcagaagatactcttccatccttctcttcctgaagaaactgtagtgtccaactttctctaagtattgctatgcaaaagctgctgtaattgaactattgttatagggagtagttttttcccttaggactctgcactttatagaatattgtaaaacagacaaacaagaaaacaaaccacatacttttgaagcgtgttttatctttatatagtttgtttgcaagagtattttcctaataacttcacagtatgaatgtgcatcttttttttctttttttaacaaatgatggtgtaacattttgacatccataaggacaaatgtagatatttttctaaaaaaccgtgaggggactgacagcttggtcagggtgtattgtagcttataaacatgaaatcttacaaggtttcagtttgacagaagtgtgatatatgtaacttgtgccatggaccaaatggtcactttaccacagctaaaaatgagttatgatagcagcttgatggtgattgcattgtattcctttaatcaaaaaggaaacgcaatattctaagtatctttagcccaaataccatgacatattgagcatctttaaataaccagactgtattgtccttcatatgtgaagttgacactactgatttgtcaataccaaattttgggttaaagtgtttaatttttatttatttattttcttgttgcctcaaaagatgattgcattctaacttttgtgacctaccaaatttaagatgtgtatacattgttctttacgttgttctagaaaagagattttaatgctgtagtgacttagctcacttacatcagagaaataaacaactttcaatggaaaaaaatatatataaaggaaggaagaggatgatattacttctcatatagaaggggttgtacaccccccttgtgatattgttcctaatattcagggagggagaggattatattactcccaatatagcagggagtgtacacccccccccccgtgataatgttcctaatattcagggaagcagaggatgatattactttcaatatcacagggggtgtgctgtccccctgttatattgttcttaatattcaggggggagaggatattattatgcccgatatcacaggagaagtacaccccacaagtgatattgttcctaatatccaggggtaaagaggatgatatcgcaggtggtgtacacccctccccgtgatattgtttctaatataaagaaggagagagcatgatattactcccaatatcgctggaggtctacaccccccttgtgatactgttcctaatatccaggaagggaaacaatgatattgctgtgaatattccagggggtgtacacccctttgtaatattgttcctcatatccagggggtagagaggatgatattactcccaatatcgcagggggtgcacggccccactgtgatattgtttttcatatccaggaggggagaggatgacattactctcaatatggcagggggcgaacaccccctgtgatattgtgctagttaggttgggagaaaatgatattactcccaatatcgcagggggtgtacaccgctcctgtgatattgttcctaatatccatgacgggagaggatattactcccaatatcgcagggggtgtacctctcccctgtgggattgttcacagtatccaaaagggaagaggatgatgttactcccaatatcacagggagtgtacaccaccattgtgatattgttcctaatagccagggaagaaaacgatgatattattgtgaatattacagggggtgtacacaccccctgtgatatggtttttaatatacaggttggaaaaggatgatattactcccaatatcacaaaaggtgtacacacccccccatgatattgttcttaatacttcggtggggagaaaatgatattagtctccatatcacaggggtgtgaactcctccggtgatattgtttttaatatcaagaggggaggagatgatattgctttcaatatcgctgggggtgtacatccctcctgtgatattgttccttatatccaggcgaggggaaaataatattactcccaatagtacacaccccatgtggtattgttcctaatactcagggggaaagaagataatattactttcaatatcacagggtttgtacacctttcctgtggtatagttttcaatatccagggggaaggtacatgatattactcccattgcagcaaggggtgtacacacctcctgtgatattgttcctaatatccagaagtggtgaggatgatattactcccagggggtgtacaccccacctatgatattgtttctaatatccaggggaaaagagtgtgatattatgcccaatatcgcagagggtgtacacttatcctgggatattgtttctagtatttggggagggaggagaggatgctattattctcaatatcgcagaaattgtacacccccgctgtgatattcttcataataatcagggaaaaagaggatgatattactaccaatattgcagggggttacacttcccctttggtagtgttcctaatatccaggaagaaagaggatgatattaatcccattttccaggaagtgtacacccaccgtgtcatgttgttcctaatatccagcagggaagaggatgatattactcccaatatcggagagggtgtacacttcccctgttatattgtttctaatacccagggggaagaaggatgacattactgccaatatcacagggtgtgtaccccaccctgctattgttcctaatattcaaaaggaaagatgaaaatattactcccaatatctcagggtgtgtacacctctcctgtgatatcgttcctaatatccacaggaagagagaatattactctcaatattgcaggggggtgtacacccccctgtgatattgttccaaatattcgggcggggagaggatgatattagtcccaatatcgcagggggtgtgcaccaacctgtgatattgttcctaatatccatgcgggggaggacgatatcactctcaatgtcgcaggaagtgtacacctctcttgttatatttttcttaatatccaggagggaaaagatgatattactgccaatatcgcagggtgtgtccaccccccttttatattgttcctaatatccaatggaaaagaggatgacattgctctccatatcccagaaggtgtacaacgcccctgtaatattgttcctaatattttgggggaagagaggatgatataacttataatatcacaggaggtgtacaccacccctatgtattgttcctaatatcctttaagggagaggatgatattactcccaatatctcaggtggtgcctattccccctgtgatattgtttttaatatccaggggaagagagtatgatattacgcccaatatcgcagggggcatacaccctctctgagatattgttcataatatatagagggagagaggatgatattacttccaatatcagaggtggggtacaccccccggttatattattcttgatatccaggaggggagaggttgatattactggatatatagcagggagtgttcacatcttctgtgatactgttcctaatatccagaaaagtagaggatgatattactcccaatatcgcagaacgtgtacacctccctgtgatattgatcctaacattcaaaggggagaggatgatattactcaaaacatcacagggcatgtacactcccctgtgatattgttcctagtatccagaagggagcaagataatattactttcaatatcgcagggggtgtacacccctctttggtatgtttcctaatatccagaaggaaagagggtgctattactttccatattgcaaggggtgtacacccccctgtggtatggttcataatatccagggagggaaagggtgctattattccccatatcgcgaggcatgtacaccctgctgcggtacggttcctaatatccagggggaaagaggatgctattacttcccatatcgcggggtgtgtacacccccgtgtggtatgttttgtaatctccgggaacgaagagggtgttattacccctcatatcgctggaaatgtacactcccctgtggtacggttcacaatatccaggggattgagggtgctattactccccatatcgcggggggagtgcacctccctgtggtatggttcgaaatatccagggtaagagagggtgctattattccccattttgcaggaggcgtacacccctctatggtatgttttgtaatatcccaggtaaggggtgctattgagagaagagagcaaaagaccccccccatattgttctgtattattttatactcagtacctgttttaagaagaaacaaggaagcgaaaccaaaggcaggcagcccggcgccaggcaccagatccaaaaccagacccgaaaccaggcctgggccttcctgaccttagcctgaaagttaaaattcaacccatgacctagcaactgatgttatccatagattccagacattgtatggaaggacattgtgaaatttcttgttctgttctgtttcactctgagtactggtgcatgcagcccttgtcacatacccactagattgctcaatcaatcatggccctttcatgtaaaaaccttagtgttgtgagcccttaaaaaggacagaaattgtgcactcaacaagcttggattttgatactctagtctgctgatgcttccagctgattaaaagccacttccttcactacctcggtgtctgtgggattttgtccgcggctcctcctgctacactgtgactccccttatagagaggggtgtacacccccctttggttcctaatatccagcgggggagtaggtgctattactccccatattgcggggagtgtacacccccttgtagtacggatcgtaaaatcaaggagggagagaaggtgtaattatccccatatcacagggagtgtacacccctttgtggtatagtttgtaatatccacgacgggagagaatgctattactccccatatcgtggagggtgtacaccgccctgtagtatggttcgtaatatccggaaggggagaggttgctattactccccatatggtgggaagtgtacacccccatgtgatatggttcataatatccaggggggtagaggatgatattacccacaatatcatagaaggtgcacacccttttgtgatattgtccataaaatccagaaggggagaggatgatattacttccaatatcacagggggtgtgtagccccatatgatattgtttgtaatatcaaggtagggagaggatgctattccttacaatagctcaaggggtgtaaccttcttgtgatattgtttgtaatatccagaaggggagaagataatttttttattttaaaagtaaactttaatgtcaaaaatgcaaacttgagaagggcagaaagatcaaacagaaggctgccacttcacaattggagggttgcacagtggccgggcagaggcgctcctcactccccagacggtgaggcagccgggcagaggtgctcctcacttccgagatgttgcaggagccgggcagaggtgctcctcacttcccagaacagggggctgccgggcagaggtgctcctcactgcccagacggtttgcaggcctggcagaggcactcctcacttcccaaacggagcagcggcaagccagaggcgctccacacttcccagatggtggggcagccgggcagaggcgatcctcacttctcagagggtagggcggcccagcagaggcgctcctcacttcccacatggtggggcggcaggctagaggcgatcctcacttcccagacggtggtgtggccatgcagaggtgctcctcacttcccagatggtgtggccgccgagctgaggcactcctcacttccctgacagtggggcggctgggcagaggcgctcctcacttcccagacacttggactccgggcagagactctcctcatttcccagatggtggggctgccgggcagaggcgctcctcacttcccagacggttcagaggccgggcagaggcgctctggggagaggataatgttactcccaatatcgcagggggtgcacactccctgtgatattgttccgaatatccagagggggaaaggatgatatagctcccaaaatcgtggggagtgtacacccccctgtgatcttgtttgtaataccaagaagaaaagagaatgctattatttccaatatagcagggggagtacaaccccctgtgatattgttcgtaatatctagggggagagaaaattatattagtcttaatatctcaggggacgttcatccccctgtaatattgttggtaatattcagaatggagaagatgatattgttcttaaaatacaggaaaaaatatgataatattacttccaatatcgaagggggtgtacactctcctgtgatattgttcccaatatccagaatgaaagaggatgctattactcccaatatcccagggagtgtacacccctttgccatattgttcataatatccaggggaagacaggataacattactcccaatatcaccgggggtgtccacccactagtgatatttattgttcatcatatccagaaaaggagaggatgatattactcccaatattgcaggtggtgtacggtccctgtgatattctttgaaatatctagaaaaggagaggatgatatcactccgagtatcacagggggtgtacacccccctgtgatattgttcgtaatatccaggggagaaaaggatgatataattgccaatatttcaggggatgtgcacctccctgtgatattgtttgtaatatccaggggtggagaggatgatattactcaaaataacgtaaacatcctgtgtgtacatcccctgtgatattgtttataatatccaggggggtagaagatgacattacccccaatatcacagagtgtacacacccctgggatactgttcataatatccaggcgggaaagaatgaactacttccaatatcgcaggatatgtacacccccctgtgatatatttcctaatatttatgtgggtaaggatattacccccaatatcacagaaggtgtacatcctctttgtgatattattcctaacatccaggaaaggagagaatgatattactcccagtatcgcagggggtgtacaccacccctgtgatattgttgctaatatccagggggagaggataatattactcccaaaatcacaggggacgtacactcctcctgagatattgttcctaatattcatggggaaaagaatgctactactccaaatacagcagagggtgtacaccatccccgtgatattgttttttatatccaaagggtgaaaggctgatattactcccaatatcgcagggggtgtacaggccccccatgatatcattcttaatatccagggaggcaaagaatgatgttactcccaatattgcaggctgtatacaccccccgtgatattgttcctaatatccagagtaagagaggatgacattgctcccaatattgcaggggttgcacgcacgccctgtgataatattactcccaatatcaacagtgggtgtacactcctcctgtgatattgtttgttatatctaagaaagaagaggatgatattactgtcaatatcacagaaggtgtacagccccttgtgatgttgtttctaatatccagcggtgagaggatggtattactcgcaatattgtagggggtgtccaacggccctgtgatattgtttctcatattcaaaaaggaaaagaataatataactccaaatatcgcagggtgtgtacacttccctgtgatattgatcctaatatccaggaagagagaggatgatattaatcccaatatcacagggggtgtacatcgcttctgtgatattcttcctaatatccagggggggaggggatgctattactcttaaaatcgcagggaacttacactcccactatgatatttttcctaatatccaggaagggagaaaatgatattactcctaatatcacatatcacaatgggtgtacatctccccgtgatattgtttctaatatcaaggatgggagaaaattatattactctcaatatcgcagggggtgtgcacacctcctgtgatattgttcctagtatccagcggaggagatgatattactttaaatattgtagaaggtgtacaacccccctttgatattgttcctaatatccagggggaaaggagatgatattactcctaatatcgcaggggctgtacaaccctatgtgatattgtttcttctaatatccaggggtggagaagataatattactcctaaaatcgaaggggacatacactccccctgtgatatttttcctaatatccagaaggaaagaggatgatattactcctaatattacaagaaatgtatacctgtcctgtgatattgttcctaatatccagaggggtaaatgattatattactcccaatatcgcaggggtgtacaccttccctgagatattgtttctaatatgcagtggaggagaggatggtattactcccaacatcacaggagatgtaaactccccttgtgatattcttcctaatgttcaggacgaaggagggtaatattactcactgtattgcagcagggggtgtagagccccctgtgatattgtttttaatattcaaggttggagaaaataatattccttccaatatcgcatggggtgtacacccttctttttatatagtttctaatatctggggggagaggatgatattactcccaatatcgcagggggattacacccccactgtgatattgtttttaatatccagggtgggagaggataatattactccaaatatcccagggctatacaccctccgtgtgatattgtttctaatatccagaggaagagaagatgatattactcccaatgtcacagggtgtgtacaggccttctttgatattgttcttaatatccatgagggagaggatgatattactcccaatatcgcaaagactgtacaccctttctgtgatattgcttccaatatccagggagggagaggatattacactcaggatcacagggggtgtacaccccaacctgtgatattgtttctaatatctagggaaaatgagggtgatattactatcaatatcacaggaggtgtacactcccttatgatattgttcctaatatccaggagaatgacaggataatattactcccaatatcgcgggtggtgtctccccccactccgtgatattgttcctaatacccagagggggagagaatcatattactcccaatatcgcaggggatgtacacctacatccggcggagtagaagataatattactcacaatatcgcaagaagtgttcaccttccctgttatattgttgctaatatccagggagtgagaagatgatattactttcaatactgagcgtgtacactacccctgtgatattgtttctcatatccagtagaggagaaaatcatgttactcccaatattgcaggggtgaacacctcctttgtgatatttttcctaatatcaggaaagggagagtatgatattacccttaatattgacaggggtgtacacccccctttgatattgttccaatatccaggggggcagaggataatattattcccaatatcgcagagggtgtacaccccccgtgatattgttcctaatatccagagaaataaaaaatagtattatttccaatatcacagggcgtacattttccctgtaattttgttcctaatatctggggggtggggtggcaggataatattactctcaatattggagagggtgtacacccccctgtgatattgttcctaatattcagggtgggagagaatgatgttactcccaatatctcaggagtcgtatacacccccttgtgatattttttctaatatccaggaggcagaggatgatattgctcccaatatcgcagggggtatacacccgagctgtgatattgtttctaatatgcaatatgggggaaggatgattttactttcaatatcgcagggaatgtacactttccttgtgattttgttcctaatatccaggggtggagaagatgctattactatattactcctcatatcgcaggcggtgtacaactccctgtgatatggttcagaatatccagagtgaaaaaggagggtgacattactcccaatatcgggggggtgtacacccctttgtgatgtggttggtaatatccaggggggcagatgagggtgatatcactccccatatcgtggaaggcgtccacttttttgtgatgtggttctttatatcccgaggggagaaggtgatattactccccatatcgcgaagggcatacacccccctgtgatatagctcataatattccggagagtggaggaagatactatgccctatatcgcgggtggcctacaaccccctatggtttggcttataatatccaggggggagagggtaatattgctccccatattgtggagacgtacagccccctgtgatatggtttgtaatatctttggggggcgagggtgatattactccccatatcgcggggagcatacacccccgtgatctggttcatagtatctcaaaggaagaagttgatgtgtacaacttaagggaaaaagttgaagtgaagtgtacacacgccctgtgacgtggttcataatatccaggcgggggagaggagagtgatatttactccccatatcgcgggtgttgtaaactcccctgtgatatagttcataatatccaggggagagaggagggtgatattgctcctcatatcgcgaagggtgtacaaccccctgtgatatggttcataatatccagaagggtagaggacgatgatattactccacatatcttgggaggtgtgatatggttcgtaatatccagcgatgagagaatgatattactccccatatcgcaaaaggtgtgatagggtttgtaatatcctgagggggagagggtgatattaatccctatattgcagaaggactacaccctcccatgacatggtttgtaatatcccagggggtagagtgtgatattactttccatatcacagggggtgtgatatgattcgtaatattcgaagggggagagggtgacactactctccatatcacggggtgtgtgatatggttcttaatatcccaggggttagaggttgatattaccccctttttggggggtgtgtacaccccctgtgatatggttcgtaatatcccgggggagacagggtgacattattccccatatcgaggggatcgtacaccccctgtggtgtggttcataatatccctagggggagatggtgatattactccccatatcagggggcgtgcactcttctgtggtataattagtaatatccagggggcagaggtcgatattcgtttccatatcatgaagggagtacacttccctgtgatatggttcctaatatccaggggggagagggtgatattattccccatattgcggggggacatacaacccctgtgatatggttcataataaccagaaaagaagagggtgatattaatccccgtattgcagagggcatacaccccccctgtgatatggtttgtaatatctaggggaggaaaaggtgatattactttccatattgctgggtgcagacacccctttatgatatggttcataatatccaagttggagagggtgatattacttcccatatcatgggaggtatacccttccctgtgatatggttcgtaatatccagaaggggagagattgatattactccccatattgtggggggcgtacaccttcctgtgatacggtttgtaatatctaggggatatagtgggtgatattactcaccatatcacgggggttgtaacatggtttgtaatatccaggggaggagagggtaatgttactccccatatctcggggcatgtacaccctcctgtgacatggttcgtaatatccaggtcgggagagggtgatattactcctcatattgccgggggtgtgttatggttcataatatcctggggaaggaggctgctatcactctccacatcttgggggatgtacactctcctgtgatatggttcataatatccagggtgggtgagggtaatattactccccatatcgcgggaagtgtacatacccctgtaatattgtttgtaatagaagagagggtgatattactccccacatcgcgggtggtgcccacccccctgtgatatggtttggaatatccagggggatgaggagggtgatattactccccatatctcggtgggagtacatccctctttgatcaagttcataatatccaaaaggaaacaggagagtgatattactccccatatcgccgggggtgtacacgggagggggagtacacccccggcgatatggtctgtaatatccagggaaggagaggagggtgatattactcaccatatcgcaggtggtctacatttacctgtgaaacagtttgtaatatccagggggggaaatgagaatgattttttttttttgagtctcactgtgtcacccaggttggagtgcagtggcacgatcttggctcactgcaacccccgcctcctggactcaagcaattctcctctcccagcctcctgaatagctgggactacaggcgcaccccacaacgtctggctaatttttgtatttttattagagacggggtttcaccatattggccaggctgatctcgaactcctgaccctgtgatccatccgcctcggcctccaaaagtgctgagattacagatgtgagccaccacgcatggcccaaggagaacgatattactccccatatcccagggggtgtatatccccctgtgatatggttcagaatatccggaaggaaagacagggatattacttcccatatcgcaaggggtgtgacatggttcgtaatatcccatgggggagagggtaatattactcttcgtattgtgaagggcatacactcccctgtgatacagttcataatattccggggagtagaggaagatattatgctccatatcgcgggtggcataagccccctgtggtttggttcataatatccagggaggagagggtaatattactccccatattgtggggacgtacaccctcctgtgatatggtttgtaatatcccagaggggagagagtgatattactccccatattgcagggacatacacccccctgtgatatggttcaaaatgtcttttttttttgaaggactggttctttatttcaaaaagacacttgtcaatattcattatcaaaacagttgcactattgatttctctttctcccaatcggccccaagtagaccacatcaaaggagagtacatattaagccaataagctgtaggatgtacacctaacagacctcctagaaaccttaccagaaaatggggacagggtagggaaagaaactttaaaagatcaacaaactgccagcccacggactgcaggggctgtcacagccagatggggtggccagggtgccacaaacccaaagaagcaaagtttcaaaataatataaaatttaaaaagttttgtacataagctattcaagatttctccagcactgactgatacaaagcacaatgagatggcacttgtagagacagcagcttcaaactcagaaaagggtaatgagatgagtttcacatggctaaatcagtggcaaaaacacaatcttctttctttctttctttctttcaaggaggcaagaaaagcaattaagtgctcacctcaacataaggggaacatgatccattctgtaagcagttgggagggggtagagatggaacaaaattttggtctcagaggtcttgccatcttaatttggtcacttctaatgaaaaaaataaaaaatagaaataacattatccaaaggtatcttaaagctgaaaacttgaacagcacattttttgttgttgttgtttggctaactcctcctggaaccacctttctggcttagctagtactttgtacagagcaatgaggcttcccatagtggagtctccctgggctctgtttggctctcagcaaggcaggcctataccttttcctctcctccatggagagaggaatatgcattaaggtgaaaaatcaccttccaaaagtgagaaagggattcgatcgctgcttcagggctgtggtattatatggaatgttttacaaaaggttgctacaaaacaacaaaagaggtaattacaaaatgtgtacatcacaacatactttttaaagacattatgcattgtgctcacattcccttaaatgttgtttccaaaggtgctcagcctctagcccagctggaatctccgggaagaggcggacagtttggtgaaaaagacacagggaaggagcgggcggcggaaggagggggcggcgaaaggagaaagcagccttccagttaaagatcagccctcaattaaaggtcagcttcgggcaggctggcctcaggcggagtctggttcagagggaggagcagcagcagggtgagactgaggcgttctacatctcattcaggtcaagcagagtctggtccagcatcctttgtgtacagaggtgctcccctttggtgcatttcagtttatcttccaagtcatcaattgtcttttccagcttggctaccgatctctcagcaaactcagcatgggtctccgcctcctttattttatcagtaagaatcttgatctcttcctcatatttgtcttctttttgagagtacttttcttcagcagcactcagacacttcaggttctggtccatcagtctaatctgctcatccatctctcggcaaagggattctgccagctcagctcgttcctctgtgcgttccaagtctccttcaatgatcaccaacttacgagccacctcttcatacttcctatctgcctcttctgcaatgtgcttagcttctctgagttggatttcctggagttccatcttttcttcatcttttaaggcccggttttcaataaccttcttacctctctcactctcatcagcagctttttccgcttcttccagcttttgcagggcagtagccaggtgctcctgagcacggtccagctcctcttcaaccagctggatcccacgttcaaggaggccacctcagcctcagcctgttcccgggcccacctttctccctcaacttctcgctggaggcgctcagctcgctcctctgcatcatctgcctgctgctgcagaacctggatcttgcgcttcaccgcctcgatggtggtgatcccagccatggtgcccacccagctactgctagagctccggttcctgcctcctccgatcggcgttgcagcctcctctcacccttacttccgcctcggttcaaaatatcttaagggaaggagttgatattactccccacatcacgggaagtttacatcccctggtgatatggtttgtaatatcccagggtggatagggtgatattactctccatatcgcgaaggagtactcccccctgtgatatggttcataatatccttggggggagagtgtgatattactccccatatcgcgagggccatatactcctttgtgacatggttcgaaatatcccggtgggggagggggtagagggtaatattactccccatacagcgaagagcatacgcccttctgtggcaaggttagtaatacttcagggaaaagagtgcaatattacttttcatattgcagggaacatacactcccctgtgacatggttcgtaatatcccgggggctgagagggtgatatttctccccatatcaccgggggcctacacctgggtgtgatatggctcataatatacagggagggagagggtgatattactccacataccgagtgaggggttacacaccctcgtgacatgttcgaaataccccaaggaggagacaatgatattactttccctgtcgcgggggctacaccctcccagtgatatggttcacaatatcccggggtggagagggtgatattactccctatatcaccggggggtgtacacttccctgggaaatggtttacagtatccccggggggagagggtactattactccccatatcacgttacatatcagggtacacccccacgtgatatggtttgtaacatcccaggaggaagaaaatgatattactccccatatcgcggtggcatacacccctccccgttaaatggttcataatatcttggggtggagagggtgatattactccccatatcacgtggggcatacaccccactatgatatggttcataatatcccggaggggagagggagatattactctccatgtcgcggggggcatatacacccctgtgatatggtttgtgatatcccgggggcggagagggagatattactctccatatcgtggggtcgtacacttttctgtgatatgattcgtaatatccagacggggagagggtgatattacttcccatattgcgggggcgtacacccctctgtgatatggttcataatatcccgaagaaaagagggtgatattactcctcatatcgcggggaacacacaccaccctgtgatatggtttgtaatattcagcgggggagagagtaatattactccctgtatctcggatggcgtacactcccctgtgatatggttcataatatccagaagaaaagagggtgatattactccccatattccagggaatgtacaccaccctttgaatatggttcgtaatatccaggaggggagagggtaatattgctcccaatatcgaaggaggtgttatacggttagtaatatccagagaaggagagggtgacattactccccacatcgtggtgggtgtgcacccacctgtgatatggttcataatattcaggttaagagaggtgatattgctttccatatcgccaagggtgtacactcccgtgaaatacagttcgtaatatccaaaaggggagagggtgatattactcccatatcgtggggggtgtacacccctctgtgatatggttcataatatccagggtggaataaggtggtattactccctgtatctcggggcatgtacatcgcctgtgatatgattcataatatccagaagaagagagggtgatattaatctccatattgctgggggtgtacaaccccctgttgtatggtttgttacactgagttggggagagggttacattactctcaatatcgagtggggcatacacacttatgtgatatggttcataatatcccagggaggagagggtgatattactccccatatcgcgggaggcatacaccccaatgtgatatggtttgtaatatctacatttttttttttgagacgaagtctcgctcttgtcccccaggctggagtatgatggccggatctcggctcactgcaacctcagcctcccgggttcaagcgattctcctgccttggtcccccaagaagttgggattacaggcgcacaccaccacgcccggctactttttgtatttttagtagagaaggggtttcaccatgttggccaggctggtctagaactcctgacctcagatgatccacctgcctcggcctcccaaagtgctgggattacaggcgtgagccactgcacctggcctggtttgtaatatctatgaagggggaaggtgatattactttccatatcacgggaggcgtacaccacgatgtgatatggtttgtaatatccagggggtatactgggtgatattactccccatatcgcggggagtgtatacccttttgtgatatggttcctaatattaagctgaggagaaggtaatattactccccatatcgcaggggtttttatatggttcataatattcaggaagagagagggtgacattactctccatatcacggggtgtgtactcccccatgtgatatggtttgtaatatccagggaaggagaggttaatattactccccatatcgcagggggtgtacacctctctgtggtttgtaatatccaaagggaagaggatgatattatcttcaatatcttggggggatacagtccccagtgatattgttcataatatccagagggggaggggatgatattactcccaatattgcaggtggtgtacaaccccctgtgatattctttataatatagagggggatgatgatattactcccaatatagtaaacaacctgtgtgtacaccccctgtgatattgtttataatatccaagggtggaaaggatgatattactcctcatatcgcagggggtgtatacccctctgtgacattgttcctaatattcaggggaggagaagatgatactactcctcatatcacaggggatgtacacccccctgtgatacttttggtaatatccaggggaggagaaaattatattattccccatgtcacagagggtgtacaccccgctgtgatagtgttcataatatccaggtgaaaagaggatgatattactccgaatatctcaggaagtgtacacccttctgtgatattgttcataatatccaaaggtggagaggaggatactactccccatatcgcagtgggtgtacacccccctgtgatatggttcataatatccaatgtaggagaggatgatattactttccatatcgcggagagtgtacatccccctgttatattgtttgtaatattcagggagaaagaggatactactactccccatatcacacggggtgtatattcccctgtgatatggttcctgatatccaagagatattataatcctctcttggattatgctacctctcatatcgcatggggtgtacacacactttgtgatatcgtttgtcatatccaaggagggagaggattatattaatcccaagatcacggggggtgtacaccctcctgtgatattgtttgtaatattaaggggggagaggataatattactcccaatataattaacaccctgtgtgtactcctccttgtaatattgttcataatatccaatgggggagacgatgatattactttcaatatcgcagaggatgtacatccctttgtaacaatgtttgtaatataaaaggcaagagaggatgatactacttccaaaattgcaggacatgtacaccccccggtgatattgttcctaatatccagtggggaagaggatgatagtagtcccaatatcgcaaagggtgtacacaccccctgggatattgttcctaatataaaaggaggagaggatgctattattcccaatatcacagaaggtgtaaaatcccctgtgatattgttcgtaatattcaggaggggagaggattatattactcccaatatcacagggtgtgtacacagggaggggcaagggccagaagcgggcgggaatccccatgtttgggcggacccagtttctaatggccagcatttgccaatcaaagcttaccagagaactctaaaagccagggctttcctgctagacaagactcatttctggaactgctttaaaaagaaacaaaacttcccaaggaccccttttcctctctgtctgcctaaaataatgttttaaaaactcctaaagcagctgaattcagcccccttcctgggggaatgtatagacggaactcccacctttcccggcatcccaaggccagagtatgtgaaactcctgggtctctatgtgtgtctgagcggctgctctgccaacactccacacagccctgtgtcctggacccaaggcccttatgacctgagctcaagaggggatctcctgatccatgggttgcaaagatccatgggagaagcatggtttctggggcggggtcacacgctcagtcactgtttccctcggatgccggagatggttcctttggctctctgccaatacagggtgaatcatcatccatccctcttttctttgttctcccgggtcaagttgtttgcctagtcagtcccaatgtgagaacctgaatatttcagttgacgcgctgacttcaaaatccccgggcttcgggaggcggagcttgcagtgagccgagatcccgccactgcactccagcctgggcgacagagcgagactccgtctcaaaaaaaaaaaaaaaaaaaaaaaaaaaaaagtccccgggcttttcttttcactcagtggaaggcagctgcttctaattggccatcttggcccgcccccaccacgtgaccttctgtaaaatgcctccactctccaggaacgctctcattatataactttgcctgaaaccaacagcacgctcattgcacatatcatgggctcatttatttcacttataaagaacctggccaaggaagagatagtgcctaaagtggccagtattctgaccgatatgttagaaaaatggtgtgccgaccaattcatgacatgtgtcccaaaactagcaacggaaattgtattcgccgtgttgaggtctctaatccagatgatgctcatctatgtactggaaaaggcagagtcctttcctgacaagctgctgaaactcttcagaaacatctcatatttcctgaagaagatgatgtctggacaagcagcacaggtcgttcagatttaactttctattcatatatccagcacgatattcgcacaattgtcacgaaaccttaccagttgatgagtcctgcacatttcctttaatttcaggaggaagagggtaatccggatgagttttctgacctactctgctgctgtgattaaacaaccaccaggaaattttgacgacactgttctcctgagctcctccctttcctccgggaacaaaacaattgaatttacaaaaataaagtgttatttgactggagtgaggtctcatgtctgcttatgcggtggctcgctgctcagaacagggtgagtctctgggttgtgtgctgaggaggggaggctctcaatctggagaaaacccactgcaggggacacctccatggggtctgagggactgaggatgaggagccggactgggtctagggaaggaggaggtttcagagggtgaaattctggcactaaagcctgggggtgtttgggaacttcctccttccgaagaagtttcagggagggataaagacaaaccctgggctccttgaggggcccttactaatttgagaggactctatcgggaaggagagtgacaatggcctccttgaggactgaggcccctgaataaatgaggcccagatacagtccatgggggatgagaccttcaagggtcacattttggttgggacagaggaaaagtgcagctctgcagccgcagaggaaaacccggcagtgtgaaagcgaccttggaggggccctgtgcgctctgaatgcgtctgagcccccatcccctgtccccgcctctctttctggattcttccagctcggctgtctccgccatcttctgagcgctccaccctgacttattcaagtttcccttctgccttccaagtactccaaaatctttcagatctgtgtccctacccctgtttttagcatgtgttggggctccaggtccctgaaggtttctggcctgaaatccacctccccagcggagtggactgcgttctagagactccacactccgcgaggttcccaggcccctgagggacaaccgagtggcctgcgcacttcagggctccacactcggcaaggtctttcaagcccttggggtccccttcttagttttttccacctttctgggctgcagtcactccataaatgctgggatctgatccccacccccactctcgtttcctcaattctgcgggctacacgctctggcaaggtcctccgggccctggatcccctccctctccctatgcccacgctcctagtcagcccttctggggtccactattttcaggaactaaccgttctcatggagccttgctaaccggaaagctgtgtggaagaaaggctttgaggatagaggtggagatttggctcttccatagtgccactcacccaccccaccatgctgccactgccagacccggacccctgtttcagaacaagtgaccagattcgctcctggacagccctggacactggccttttctctgaaaactactcaccctttctctagtccccacttcatgccagcctcataccctcttccttcccccacgctggcttccgggatcctcctctgctcagacaacctcttctgtgtcccacccccgtttttagaatgctttggggcaccaggttgggggaaggtttctggcctgatatccatctctttccaaactcccttcttcccttgaaaggcttcttgccttcagccccacttctggctccgaggtttcaggacaccctcctcttcatcctcattcttttgaccaccagctttttaggaattcgaacgtccctctcatcttcgtgaatcctgtccaggcatttgttgaccccttcatctgatacccctgacctcacattgccaaaagtctacccctacccagtacactggaattagacaaaatcccaggagttttacctcaactctgagtgtgcccacaggagctctccctgaagccacgtccttttaagcagggtctagggttcctcccttgtcttaatgaactctttgtcacacggaggacgttatggagcccttatgatctttcactgcctttctgcccagcgttttgtctttccatggacatttataatattttccatggacattttgttctctcaatgtccacccctaatttccaacatcccaaagattctcatgtgtttcctgaaagccatttacaggaatggctgtgcccagacccccttccccaggatcctccttcacacctggtaggtgcctctcctagagagatttgcactcagttgtcgtgcagtcacatggcccagatggttgttaatcacccccttcctggcaacagctagcagccagggaatcactggcacagaaacctcagggtgaccaagatgaggccacctctgtgctgaaggctgtgctccagagcctgcttgggatcaggcttaagcaggtcttcagccagacctgatgttacctggtttccttgagctgccctgcctgagctatcgggagcactccctcaatgcacatcttgattccctatctcatgctctgcttctagaaaccatgagctatcaattgctactggcaatggtcctgggaagtcaaccctaagtatggattctggggttggatgactccccacaggacttcagtgagcaacaatcactgctggcagttggaggacagagtcgctagggcatgtgaccactgtgaaaccaccgatgtttcacctggggtaattttggatgaactacggtagaagcactgaaggtacattgcttttggtttggaagattgtaggtaaataatagcgatatgaatgtggaattggatggctgcaaacgagtgccattgatgcattgaaagaggaaaagtcaggctgtcacctgtcactcagcaatttaaagtgtgagagttgggactagatgtggtggctcacatctataatccagagattcgggggaagcttgaagaggtaggatcttttgagtccaggagttccagaccagcctggacaccagagcaagacctcatctctacaacaaaattttcttaaaaattagatgggcttggtggcacgcacctgtacttgtagatctagctaatggggagcatgagataaaaaaatcacctgagtcagggacttaggggttacaatgaggtatgattgtgccagtgcacacactcccacctggccaacagagtgagattctgcttccaaaaaaataagaaataaatcaggtttgagagttggaaagcatcatcttctcctagagccaaaggacatgtacaactgagacccaggaacaaagcttcatcacaaagagaccatcatcagtggagccgggagatgcattccccctcaccctgccttgaggaggcagtggagtcatctgtctgggatcctttctgacccagccctatttgtttgtctctttggcttctttggatttgtatattttagctgttataacactgtaaaacaaacagagtgatttttttgagttgtgtgaatgatgctagctccatagtcaccctgagagtgatgggaacttttgaatttgtggcaagttggagggtagtgtaagtgacctgagattgccaaattggggctagcactggatgtgaggttaggctagtggaaaaatatgcccagaaccagaggagtgtgggctcactgcaggtggttaggctcagatccaaattgtacagatggatagctttggggtaaagaataacatagttgagaagtgcatgtgttagtctgttcatgcactgctataaagaattacctgagactgggtaattatttataaaactcaggtttaattgggtcatggttccacaggctgtacaaaaagtatgatgctggccatcagctcaacttctggggaggccccagaatagttagagtcatggcaaaaagtacaagggaagcaggctcatcttccacggccagagctggagcaagtggtaggagaggtgatacacactttcaaacaagtaggtcttttgagaactccatcaccggacagcacctatgggatggtgctaaattattcatgaaatatccgcctccataatccactcaactgtcaccagcgcagccagccccacctccaacagtggggattacaattccatatgaggtgtgggtggggacacagctccaacctcaatcagtgggcatcctggattgggtctactatagaaggagaaccaggagctgactatgatcttgaaccctacccatgatggccgggcggggtgactcatgcctgtaaccccagcactttgggaggctgaggtgggtggatcgcctgaagtcaggagttagagaccagcctggccaacatggtgaaaacctgtctctactaaaaatacaaaaaattagaccggcgttgtgctggatgcctgtaatcacaccactacgctccagcatgggaaaaaataccaaaacttcgtctcaaaaaaaaaaaaaaaaaaaaaaaaaaaaagactgcccatgaccactgcaccagtgagagggacaccagcatcactgagatgcaagggctggacattcttcataggtcagagctcaaagcaggggacactgatacagagatgggctccatccatagcaccaaagtggtgagaggatgtgggaatggcagaggccagcactttgccatcaatgcaagggggtataaggaggtgacaccagtgccagagtacatcacggggggactgccctacaatatctaggacttacctcttagagcgtgtttcattagcgacaacagatataaatggcagacaggtgtgtccctgcattaacaggaaatagaaatcatcaagaggaacagaaggcagatgtcagcagccccttagaaagtcatcatccttcatacagttaaaatctgagacagttctcacacgagaaggcctaactcaaaaagaggctgggttctcatgaggcaggtttatgcaaaaccaaggaaggtgtacaagtttggaattctccagtttcccttggaaaagacctacagtcatttgcttaggtaactgagcactgaacaaaggtgagtattgttgtcttttagaagctcttggccaagaaggccttgttggcataaaacccatggtttggaaacatcaccatgacccctgttagagtaatggcctaagggtgggggtcaggaaattgatgtattccttgccaacttctgcctctaagtgagtgaactctgtttgtgaacctctctcctctgtggttatgttcctaggctctcatgtataatcaggagtcatagacttagaaacaggaaaaatacttacagtgtttttgtggcctgtgagctatgacttataattttaggaaaaaaacaattgcaaatggaaagcctaagtctatcaatgctcatccaagacaacataatcaataaaaaccaatatcaaatctcaaggcaaattatttcctgtatatagatggcagagatgagcaccaccatcaaaaactcaaggaccagtgctgtgggtccagtcatctgtttcatggaattcaccagtctggtatcttcaaaatccagaaggatgatggcagatggcaggaaagtaatgcaaacgtcatcaggtgtgaccccactgtagcagctgtgatggatgttttctctcaccatagcaataaataacacaacctcggtcacactgtatgcattgttggtctgcaaaatccatgttttgcaaaactcttcaggaaggtggatctgtaatattggcattgacatgagaacaacagcagtatttattcacaatctcaagctctctgtcttcccgtctctctcattagccatccaagtagtcctgaggaaccaagcccatcagaacattctgcaacataatacacagctccattctccattcaaattttgttgttgttgttgttgttgatgagacaacatcttactccatcagccaggctgacgtacagtggggctatctgggctgactgtagtcttgagcttccaggctcaaggcatcctctcacctcagcctcctaagtggcttgaactacagacacacagcgacatgctgggctagtttttgtatattttgtagagacgtgctctcaccatgttattcaggctggactcaaactcctgagcgtaagtgatccaagcaccttggcctcaaagtgctgagattacaagcctgagccactgcacccagcccaatctccattctactgataacaatgtcattaccaggtctgatggacaggaaatggtaaggtttctgaaaacctaaggatcacacagcgagttccaaaggctgaaagtgcatacctgtcgacactgataccaatgacatccaatggtgagaatgacattccttgtagtcctagctctgctcataacaaatctatactgaagtgtaagagtttgatggtcatggggattttccatgtctctgcctttcagcgatgtgccatatctgtgaagtgttcagaaatgcaacagcctgaggcatgctgggcatatcctctaataaaaaggaaaatgccattttatggtcctgtatttctacaagttggaacacatgggcctgtgatccagatgggggaaatgggaatattcccactcattcaccttcatccacgaagcccatttgaaagctttgggcttcccatccttgtagattttagtgttgtgggctgggtgcagtggctttcacctgtactgccaacactttgggaggcctagacaggtgaatccactgaggccaaaagttcgagaccagcctggccaagatggtgaaaccccgtccctactaaaaatacaaaaattagcaaggtattggggccagcacctgtaatcccagctgctcgggaggctgaggctggagaatcgcttgaacccaaaaggcagagactgcagtgacccgatcctgcctttgcactccacctgggcaagcagaacaaaacttctgtcttgaaaaaaaaaacaaaaaacgaacaaaaaagatgttagagttctgggtttagaggtctataccccagaaagagaatggtttcaacaagggacaaagaagttgctttaaacgttgacttgccatttcttttcagtgtgtttgttctcttgcgtcaagagaccaccagaaaagtggtgcaattactctcctgtcaagaatcattgactatcatctgcaagagggtcagatcctggtatataattagggcagaaatacttagtctgagaagggtatgacatccagaggccctattaatgatgtccttttctccatgcctgactctgaccccatgtgctggactgcccctgtgtggatggcctcatggcctgctcggactctgaggtcccaccccaagtggcacctccatggagggctctactcttgtatgggctctgacactcacactgagacactctcccatggacacctcttcacccacttggggtctgaaactgggctactccatccctccctaacctggaacagagagctttcactgctattacacaagtcatagaggctaactcctcatttttccaagctaattattgaaacattagtcctgggttgataagacaagataagttaacttttcataaatttgcttatcaagttttgaataaattcaaataaattcaccttccccacacaccttagttgtcgacatcacacgcgcacccatactcacagggtgagcacgaaggcttcactgtcagtggagaaagtggcaaaacccttctgtgcctcatcctggtctagacctggccctcatcctttcccactcttcccctcactcccttggattcatccacactggcctcctgcctgctgctccacctccctgcgaagctcacccctgcctcagggcctttgcacgtgcagtggcttcaagccatatcctcttcacccagatctcccagatctcctgaatgatcttcttttatcattcaggtctcagcttgcatgtaatcttctcagtgaggattacccaaaccacatagttcattcattcattcaaatattcattcaatggcatattgacaaagcagctacttcatgccaggccttgggccaggtgttatggatatggcaacaaacaaaacaagagttttctgctctcaaatttttacccacttaaaggagatatcatacatcatctgtaaataaatacatcatctgtaaataatgatgtaaataaatacatcatctgtaaatctgtaaataatgatgtaaataaatacatcatctgtaaataaataaagtataataaaagaaaatagtaggtttttttggttggaggtgaccgtgaagtttgcaaataccatcttacaacacattattttattttatttcatttcatttttaattttattattattatactttaagttttagggtacatgtgcacaacgtgcagatttgttacatatgtatacatgtgtgaagttggtgtgctgcacccattaactcgtcatttagcattaggtatatctcctaatgctatccttcccccctcccccaccccacaacagtccccggtgtgtgatgttccccttcctgtgtccatgtgttctcattgttcagttcccccctatgagtgagaacatgcggtatttggttttttgtccttgtgatagtttgctgagaatgatggtttccagcttcatccatgtccctacaaaggacacgaactcatcattttttatggctgcatagtattccatggtgtatatgtgccacattttcttcatccagtctatcattgttggatatttgggttggttccaagtctttgctattgtgaagagtgccgcaataaacatacgtgtgcgtgtgtctttatagcagcatgatttataatcctttgggtatatacccagtaatgggatggctgggtcaaatggtatttctagctctagatcactgaggaatcgccacactgacttccacagtggttgaactagtttacagtcccaccaacagtgtaaaagtgttcctatttctccacatcctctccagcacctgttgtttcctgactttttaatgatcgccattctaactggtgtgagatggtatctcactgtggctttgatttgcatttctctgatggccagtgatgatgagcatttcttcatgtgttttttggctgcataaatgtcttcttttgagaaatgtctgttcatatccttcacccactttttgatggggttgtttgtttttttcttgtaaatttgtttgagttcattgtagattctggatattagccctttgtcagatgagtaggttgtgaaaattttctcccattctgcaggttacctgttcactctgatggtagtttcttttgctgtgcagaagctctttagtttaattagatcccatttgtcaattttggcttttgttgccattgcttttggtgttttagacatgaagtccttgcccgtgcctatgacctgaatggaaatgcctgggttttcttctagggtttttatggtttgaggtctaacatgtaagtctttaatccatcttgaattaatttttgtataaggtgtaaggaagggatccagtttcacctttctacatatggctagcctgttttcccagaaccatttattaaatagggaatcctttccccacttcttgtttttgtcaggtgtgtcaaagatcagatagttgtagatatgtgacattatttctgaggactctgttctgttgcattggtctatatctctgttttggtaccagtaccatgctgttttggttactgtagccttgtagtatagtttgaagtcaggtagcatgatgcctccagctttgctcttttggcttaggattgactttgcaatgcggggtcttttttggttccatgtgaactttaaagtagttttttccaattctgtgaagaaagtcattggtagcttgatggggatggcattgaatctataaattaccttgggcagtatggccattttcacgatattgattcttcctacccatgagcatggaatgttcttccatttgtttgtatcctcttttatttcattgagcagtggttttagttctccttgaagaggtccttcacatcccttgtaagttgggttcctaggtattttattccctttgaagcaattgtgaatgggagttcactcatgatttggctctctgtttgtctgttattggtgtataagaatgcttgtgatttttgtacattgattttgtatcctgagactttgctgaagttgcttatcagcttaaggagattttgggctgagacaatgggttttctagatatacaatcatgtcgtctgcaaacagggacaatttgacttcctcttttcctaattgaataccctttatttccttctcctgcctaattgccctggccagaacttccaacactatgttgaataggagtggtgagagagggcatccctgtcttgtgccagttttcaaagggaatgcttccagtttttgcccattcagtatgatattggctgtgggtttgtcatagatagctcttattattttgagatatgtcccatcaatacctaattattgagagttttcagcatgaagggttgttgaattttgtcaaaggccttttctgcatctattgagataatcatgtggtttttgtctttgggtctgtttatatgctggattacatttattgatttgcatatattgaaccagccttgcatcccagggatgaagcccacttgatcatggtggataagctttttgatgtgctgctggattcggtttgccagtattttactgaggacttttgcatcaatgttcatcaaggatattggtctaaaattctcttttttggttgtgtctctgcctggctttggtatcaggatgatgctggcctcataaaatgagttagggaggattccctctttttctattgattggaatagtttcaggaggaatggtaccagttcctccttgtacctctggtagaattgggctgtgaatccatctggtcctggactgtttttggttggtaagctattgattattgccacaatttcagatcctgttattgctctattcagagattcaacttcttcctggtttagtcttgggaaggtgtatgtgtccaggaatttatccatttcttctagattttctagtttatttgcgtagaggtgtttgtagtattctctgatggtagtttgtatttctgtgggatcagtggtgatatcacctttatcattttttattgcatctatttgattcttctctctttttttctttattagtcttgctaccggtctatcaattttgttgatccttttaaaaaaccagctcctggattcattaattttttgaagggttttttgtgtctctatttccttcagttctgctctgattttagttatttcttgccttctgctagcttttgaatgtgtttgctcttgcttttctagttcttttaattgtgatgttagggtgtcaattttggatctttcctgctttctcttgtgggcatttagtgttataaatttccctctacacactgctttgaatgtgtcccagagattgtggtatgttgtgtcttttttctcgttggtttcaaagaacatctttatttctgccttcattttgttatgtacccagtagtcattcaggagcaggttgttcagtttccatgtagttgagcggttttgagtgagtttcttaatcctgagttctagtttgattgcactgtggtctgagagacagtttgttataatttctgttcttttacatttgctgaggagagctttacttccaagtatgtggtcaattttggaataggtgtggtgtgatgctgaaaaaaatgtatattctgttgatttggggtggagagttctgtagatgtctattaggtccgcttggtgcagagctgagttcaaatcctgggtatccttgttaactttctgtctcattgatctgtctaatgttgacagtggggtgttaaagtctcccattattattgtgtgggagtctaagtctctttgtaggtcactcaggacttgctttatgaatctgggtgctcctgtattgggtgcatatatatttaggatagttagctcttcttgttgaattgatccctttaccattatgtaatggccttttttgtctcttacgatatttgttggtttaaagcctgttttatcagagactaggattgcaacacctgcctttttttgttttccattttcttggtagatcttcctccatccctttattttgagcttatgtgtgtctctgcacgtgagatgggtttcctgaatacagcacactgatgggtcttgactctttatccaatttgccagtctgtgtcttttaattggagcatttagcccatttacatttaaggttaatattgttatgtgtgaatttgatcctgtcgttatgatgttagctggttattttgctcattggttgatgcggtttcttcctagccttgatggtctttacaatttggcatgtttttgcagtggctggtactgactgttcctttccatgtttagcgcttccttcaggagctcttttagggcaggtctggtggtgacaaaatccctcagcatttgcttgtctgtaaaggattttatttctccttcacttatgaagcttagtttggctggatatgaaattctgggttgaaaattcttttctttaagaatgttgaatattggcccccactgtcttctggcttctagagtttctgccaagagatcagccgttagtctgatgggcttccctttgtgggtaacccgacctttctctctggctgcccttaacattttttccttcatttcaactttggtgaatctgacaattatgtgtcttggagttgctcttcttgaggagtatctttgtggcattctctgtatttcctgaatttgaatgttggcctgccttgctaggttgcagaagttctcctgggtaatatcctgaagagtgttttccagcttggttccattctccccatcactttcaggtacactaatcaaacgtagatttaatcttttcacatagttccatatttcttggaggctttgtttgtttctttttactctctttcctctaaacttctcttctcacttcatttcattaatttgatcttcattcacttatatactttcttccacttcatcaaatcggctactgaaggtattgcatgcatcatgtagttctcatgccatggttttcagctctatcaggtcatttaaggtcttctgtacattgttttctctacttagccattcgtctaatcttttttcaaggtttttagcttccttgtgatgggtttgaacatcccctttagctcagagatgtttgttattactgaccttctgaagcctgcttctgtcaacttgtcaaagtcattctccatccagctttgttccattgctggtgaggagctgcgatcctttggaggagaagaggtgctctggtttatagaattttcagcttttctgctctggtttctccccatctttgtggttttatctacctttggtctttgataatggtgacctagagatggggttttggtgtggatgtcctttttgttgatgttgatgctgttcctttctgtttgttagttttccttcgaacagtcaggttcctcagctgcaggtctgttggagtttgccggaggtccactccagaccctgtttgcctgggtatcaccagcggaggctgcagaatagcaaatattgcacaacagcaaatattgctgcctgatccttcctctggaagcttcgtctcaaaggggtgcctggctgtatgaggtgtcagttggcccctactgggaggtgtctcccagttaggctagatgggggttagggacccacttgagaaggcagcctgtccattcacagagctcaaacactatgctaggagagccactgctctcttcagtgctgtcagatggggatgtttaagtctgcagaaatttctgctgccttttattcagctatgccctgcccctacagatggagtctacagaggcaggcaggcctcattgagctgcggtgggctcctcccagttcgagcttccagaccactttgtttacctactgaagcctcagaaatggtgaacacccctcccccacccagtctgccgccttgcagttccatctcagactgctgtgctagcagtgagcgaggctccatgggcgtgggacccactgagccaggcacaggatataatctcctggtgtgccatttgctaagaccattggaaaagcacagtattaaggtgggagtgtcccaattttcccagtacagtctgtcacgggttccctcatctaggaaaggtaaatcccctaaccccttgtgcttcccggtgacgcaatgccccaccctgcttcagctagccctccatgggctgcatccactgtccaaccagcccaatgagatgaacaaggtacctcagttggaaatgcagaaatcacccatcttctgtgtggatcaggctgggagctgcagaccggagttgctcctattcggccatcttggaatggcaatctatgtttgctttttacatttgaaaaaactggtgtcacgtacctaggtattaatcattgtggtatcctcttgccgatttacctctttatcattaactagtgaccctccttgtcttttgttgttacagtctgtgattttagtctattttatctaatatgagaatagctactctggcacttttttggtttccagcttcatgaaatatccttttccatttccctgttttcatttccctttcggtgtctctatagatgaagttgatttctttaaggcaccataagttgggtcttatttctttatccatttgaccatttagagaatttagaacactgtcagtgttattattcataagtaaaaacttaagagtgggtgtagtggtgtacatctgtatttcctgcactttgagagactgaggcgagctgatctcctggggtcaggagtttgagaccggcctggtcaacatgatgaaaccctgtctctactaaaaatacaaaaattagccaagcatgctggcatgtgcctgtaatccaatttacttgggaggctgaggcaggagaagcttgaacctgggagacaaatgttgcagtgagctgagatcacacagagaagtcatctccactctcctcatcagaacctcttgttcacagcatttgtgagcacaaatcaatgatggttattctttcctactaattagggatattttattacacagcaatagcctccagcaaagggaaccatcatacatgattcctacaagttgacagggctggaattatcactgaaaaactaaggtggctatacttgattcccaatgtccaatttttcatgaatagagaaatttatcctttttccccccagccagaaaccaagttttgctcttacgcccaggctggaatcaagtggcacaatctcagctcactgcaacctctgccccccagcttcaagaaattcaccttttgaacaaggagatattaaggatacactatgtgtatgctaccggtggttgcaggagactcagaaaagagagaaacagtcactggcctcgtgcaactgatattctcgggaggagagaaaggcaatcaagaaagaaacatgctgtatttcagacagctgtaagtcctccacaagaaaagaaagcaggtgaggaacataggaaatgtgtcaaccataaggttcccgctaattctataagttggtcagggatatcctccaagaataagcagcatctgagcaatcacctgaagggaggaaggaaggaagactgtgagtggtggcttacacctgtaatcccagcactttgggaggccaaggagggcagattgcctgagctcaggagttcacgaccactcagagcaacctgttgatacccaatctctactaaaaacacacaaaaaaattacccgggtgtggtggcacgcacctgtagtcccagcttccatgcccagctgatttctctctctccatatatatatatatatacacatatattgtttttgcagagatagggtctcactgtgtcacccagtcatcaagcaattctcttatactgttttggaaaagcatgggaattacaggtgtgaaataccctgctggtcctgaaaaatgtgatatttgggattctctgcctggcttgttttacccaaaataatgacctccagttccttccaggttgctgcaaaagacatgattttcactgttttataactgaatagtattcctgtatgtatacataccacattttctttatttattcttctgttgattgacatgtagggtgattccatgtctttgctactgtaaataatgctgcagcaaatatttgtgtgcattttgatctattcctttgagtaggtacccagtactgcaactgcaggactgagtagttgttatattttttgttctttcagaaatctccatagtgtttgccataaaatctgcactaatttacattcccaacaacaatgcataagatttccccttttctccacattctcactaacatttgttatgtttttgtctttttcataatacccattctgactggagtaagatatctcattgtggtggttgttgatatttttgagacggggtctcactctgttgccagactggagtgcagtggtgtgatcgtggcttgctgcaacctccacctcccgggttcaagcaattctcctgcctcagcctcccgagtagctgggactacaggcgcgtgccaacaggcctggctcattttttgtatttttagtaaagacagggtttcaccatgttggccaggatgatcacagtctcttgagctcatcatacacctgcctcagcctcccaaagtgttggaattacagtcatgaggcagcgcacccaacctcaatgtggttttaatgaccatttctctgacgattcatggtgtggagaatttctttgaaataccttttggccatttatatgtgctcttttaaaaactgactcctgtccaggtgcggttgagcatgcctgtaaccccagaacttcgggaggctgaggccaatggatcacttgaggcaaagaggcagaaatcagcctggccaacaaggcaaaaccccatctttactaaaaatacaaaaaatcagccacgggctgtgactcgtgcctgtggtgcaagttactcaggaggttaaggcacaggaattgcttgaacccggtaggcacaggtcacagtgagccaagatcatggcactgcactacagcatgggtaatagagaaagacctgtctcataaaaacaaatgaataaataaataagataaaaaataaaaaagtctctttatgtcctttgccgactttttaatgggattctttggagttttctgttgtagttgagatctttgtttactctcggtattagtcttttgtcaaaggaaaagtttacaaataatttcttccgttctgcagtttgtctgctcactctgttgagaggattatttctttggctgtgcagcagctttttgtttcagtaaagcttttgaatttatataattaaaattttcagtttggtttaaatttgcactggtcgatttttggttttgttgcctgtacttttgaagtcatactcttgaactctttactagacaataaccagaagagttttctctagttttcttctcacatttttattatttcagtacatatatttaagtctataattcatcttcaattgatttttgtagaaatagtgagaaataggagtccaggtttattcttctgcaaatgacaattcaattgttccagcaccaattattgaaaagggtgtgctttcctcaacgtatattcttatcagctttgtcaaagatcagttggctataaatgtgtggctttctttctgggctctctagtctgttacatcaatctgtgtgtctatctgtatactactaccatgctgtattggtgatgatggctttgtaatataatttgaagtcaagaaatgtgatgctcccagctttgtttatttgcttcagaaaggctgagtcaacagctgcagagatgaagctgcccctcctcgcagggctccttcccggaaaaagatcatggctcccactgaccatataaccatggctggaactcctgaaattcccaaagggaggccctacccagtgaggggggatgaatgaaggtcctacttaaggaatctgtctggccacaatcaggcacagcagctgtgctgccttgtgggggaccagaccacctggattccctggagcctgcaggctagaatgtctgagtccatggaaacacagaaatggaggccgccctcacctccccagaaaactgtagtctcaggcagtctccagccgattgccactggttggctgctattccaagccagtgggtcttaacttgagaggtgctgtggaagtggggcccacggaatgaggctgcttggctccctggattcagccccttttctaagggaatgtacagatggaactcccgccttgcccagctttccaagtatataaaactcctgagtctctgtgagtgtctgagcgagtgctctggcaacattcgacacggctctgtgtatctgacccaagacccttatggcatgagctaatgggaggatcttctgatccatgcgtggcaaagatgcatgggagaaacatggtttgtgggtaggggttgtgcattcactactgcttctcttggctgtaggtgaaggtttctttggctctgtgctgatactgggtgcaccatcacccaccccctttgtttcttctcctgggtcaagtcatttgcctaatcagtcccaatgtaggaacctggatacttcagttcaaggtgctgaattcaccgtgcttttcattcaggggaagacagctgcttctcattgggcatcttggcctgcccacttcacgtcactttttgtaaaatccacaccactccaggaatatccattacttaacttcgcctgaaataaacagaaggctcattacacttatcatgggctcacttacttcgcctataatgaaggtgccatggaaatgctagtggatgacgtggtccattttcttagggatgagatagaaaaatggtgtatggctttttaatttaattaaaatttttagtttggtttaaatttacattggtctctttttggttttgttgcctgtacttttgaagtcttactcgtgaactctttactggacaatgaccagaagagttttccctaagtttcttctgatattttgaccatttcagtacatacatttcagtctataattcactttaaattgatttttgtaaacatggtaagaaataggagttcagatttattcttccgcatatgataatgcaactgtcccagtaccaattattgaaaagggtgtgctttccctagtgtatattcttgtcagctttgtcaaagatcagttgcctatgaatgtgtggctttcattttggattctctcgtctgttacatcaatctgtgtgtccacatttatacctgtaccatgctgtattggtgactatggctgtgtaatatattttagagttaggaaatgtgatgctcccagctttgttcatttgcttcagctgaaaaggttgagtccacaattacaaagatggcagccgcccatccccggaggacctccaacccagaaagagatcaggcttcccaccaaccctataaccctggctggagttcctgaaattccaacagggaggaccttcccagtgaggagggatgaatcaaggtcaaatttaaagaaacagtctggccactatcaggcacagcagcagtgctgccttgtgggggacccctcctgctccagaccagctgccctccctggagcccgaaggctagattgtctgagtctacggaaacagagacggtggccgccccaaccacccagaactcggtagtctcaggcacttggcttgctatcttgccactgcttggctggtattccaagcccgtgggacttgagaagtgctgtgatgatggggaccacaggatgaggctgtctggctccctgtgatatggctgtgatgagtggaggaacaccagggctcatgtctcacacagaattggagaaaatgacacaaacacatgtacagtggttttatggcgtgcagtttaataggcaagaacgaaggaagagctccccatactgagacagagggaggggggctccaaagccaaaagaggaaacccggagtgctgtggataccaatgagttatatgaagaaactggagggggcggtgtctgatttgcatagggttcaggcgattggttcgaccaggcatgtcatttatgtggcccacggaaaaactggccctcccacctagcctttgaatatgcacgtgccggacaccctgatttcctacactcatggggatatatgggggtggccatatcgccaggcacaggtggggacaagggccagaagagggcgggaatcgctatgtttgggtggacccagtttctaatggccggcatctgcagatcaaggttaccggagaactctaaaagccggggctttcctgctagacaagactcatttctggagctgctttaaaaagaaacaaaacttcccaaggaccccttttcctccctgtctgcccaaaataatttcttaacaactcgtataacacctgaattcagcccccttactgggggaatgtaccaacggaactcccacctttcctggtttctcaaggctagattgtgtaaacctcctgggtctcggtctgtgtctgagcagctgctctgccaacactccacacagccctgtgtactaggcccaaggccgccgtgactcagcccatgggaggatctcctgatttcttggttgcaaagatccatgggagaaaaatggtttctggggcggggtcacacactcatggcttctcttggctgtgcaagaaggttcctttggctctgttccaatatagcgtggttcatcacccacccctgttttctttgttctcctgagtcaagttgtttgcctagtcagtcccaatgtgagaacctgaatatttcagttcacgtgcttatcgtgaaattcactgagactttaattcagtggaaggcagcctcttctaattggccatcttggcccgccccctccacgtcacctcccataaaatggccacgctctccagggacgatgccattatatatctttacgtgaaaccgacagaacacttattacactttttgtgagctcatttacttcacttataatgaacatggccatggaaatgctagtggagaaagtggtcgattttctgatggatgtgataaaaaaatggtttgccgaccaattaatgacatatgtctcaaaactagtaacgagacccttaatcgctgggttgaagtttctaatcaagaagatgctcatctatgtattcaacaaagcagcttcccttgcttctgaaatgcttccaaacaacatctcatatttcctgaagaagataatgcctggacaagcagcacaagtcattcaggtttactttcagctcataaatccagcaggatattcgcacaattgttgggaaaccttatcagttcatgagtcgtgcatgtttcctttaatttcaggaggaagagggtaatctggaagagtttcctgacctactctgctgctgtgattaaacaaccaccaggaaattttgatgacactgttctcctgagctcctccctttcctcggggaagaaaagcattgaaactacaaaaataaagtgttatttggctggagtgaggtctcatgtctgcttatgcggtggctcgctgctcagaacagggtgagtctctgagttgtacgctgaggaggggaggctgtcaatctagaaaaaacccattgcatgggacacctccatggggtctggggggctgaggatgaggagctggactggatctagggaaggaggaggtttcagagggtgaaattctggcagtaaatcctgggggtgtttgaaaacttcctccctcagaaggagaagactcagggaggaataaggacaaaccatgggtcccttgaggggcatttactaacttaagaggactttatcgggaagcagagtgacaatggcctccttgaggactgaggcccctggataaatgaggcccagatccagatccagtccatgggagatgagaccttcaagggacatatttttgttgggacagaggaaaagtgcagctctgcagctgcagaggaagccttggcagtgtgaaagcgaccttggagggggccctgtgcgttctgaatgcttctgaggtccatcccctgtccccgcctctttttctggattttttgggctccatggtctccgccatcttctgagcgctccacgctgccaccttcagttttctcttctgggctccaaatactccaaaatctttcatatctgtgcccctacccctgtttttagcatgtgttgggactccaggtccctgaaggtttctggcctgaaatccacctccccagcggtgtggattctgctctagagaccccgcacttggcaaggttcccaggcccctgggggacaaccgagtggtatgtgcacttcagggctccacactcggcaaggtctttcaagcccttggggttccctcctcagttttcttcacatgtctgggatgtagtcactctataaatgccgggatgtgatccccaccccagtgattttttttagttccatgagtgttgctatctgaatagtcatcctgagagtgatgggaccttttgaatttgcagcaagttttagattagtgtgagtggcctgagatcgcaaaactggggctagcattggatgtgaggttaggctggtggaaaaatttgcccagaacctgaggagtgtgggctcactgcaggtggttaggatcagcacagaattgcaaggatgtatagctttggggtaaagaataacatggttcagaagtacatgtattagtcttttcatgcattgctataaagaattacctgagactgggtaattaattataaaaactcaggtttaattggctcatggttccacaggctgtacaaaaaggatgatgctggccatcagctcaacttctggggaggcgtcagaaaacttagagtcatggcaaaaagcacaagggaatcaggctcatcctccatggccagagctggagctagtggtaggagaggtgctgcacacttttgaacaatcagatctttttagaactctatcaccagacagcacctagaggatggtgctaaattattcatgaaatatccacccatatgatccactcaattctcaccggcccaaccaggaccacctccaccattggggattacaattacacatgagatgtgggtggggacacagatccaaactcgatcagtgggcatcttggactgggtctactatagaagaagaaccaggagctgactatcatccttaagactgcccatgatggccaggcagggtggctcatgcctgtaatcccagcactttgggaagccaaggtgggtgaatcccctgaggtcaggagtttgagaccagcctcgccaacatggtgaaaccctgcctctactaaaaacacaaaaaattagatgggtgttgtgccagacgcctgtaatcacagctactccagaggctgaggcatgagaattgcttgaacctgggaggcggaggtggcggtgagccccaatcgcactgctacactccagcatgggcaacaataccaaaacatcgtctcaaaaaaaaaaaaaaaaaaaaaaaaggctgcccatgaccactgccccagtgagagggacaccagcatggctaagatcaagtgctggacattcttcatgggtcagacattaaagcaggccacactgttacagagatgggctccattcatagcaacaaagtggtgagaagatgtgggaatggcagaggccagcactttgccatcaatgcaaggtgggcataaggagctggcaccagtgccagagtgcatcaggggaggactgctttgcaatatctagcacttacctcttagagtatgtttcattagggacaacagatataaatggcagacaagtgagtcccttcagtaacaggaaatagaaatcatcaagaggaacagaaacagatgtcagcagccctcatataaagtcatcatccttcatccagttaaaacctgagacagttctcacataagaaggtctaattcaaaaagagactgggttctcatgaggcaggttcatgcaaaaccaagggaagtatacaactttgggattctccagcttcccttggaaaagacctacaatcatttgcttaggtaactgagcactgaacaaaggtgagtattgttatctttcagaagctgttggccatgaaggtcttgctggcataaaacccatggttggaaacatcaccatgacccctgttagagtaatggcctaagggcaagggtcaggaaattgatgtattccttgccaacttctgcgagacgagtgttggtccactcatctctttcacggaattcaccagtctggtatcttcaaaatccagaaggatgatggcagatggcaggaaactaatgcaaacaccatcagttgtacctccactgtagcagcagtaatggatgttatctcttcattgtaatatccagggagggagaagatgacattattctcaatattctaaacaccctgtgtgtacagcctctgtgatattttttgtaatatccgtgtgggagagaattatattactcctaatatctcaggggttgtgccccctctgtgacaatgttcctaacacccaggaggggataggatgatatcacttttagcatcacagggggtgtacaccccactgtaatattgttcataatatccgggggggagagaatgatattactcccaatatcgcaaagactgtacaccaacctgtgatattatttgtaatatccataagaggaagaataatattactcccaatgtcacaggaagtgtacacccttctgtgatattgttcaaaagatccagttagggaggggatgatattactctcaatatcttaaacaccctgtaggtaagccctctgtgatattcctcataatatccagagggagaggatgatattactcccaatattgcatgaagtctacaccccacctgtgatattgttcctaatatccaggatgggagaggatgatattactcccaatgtcgcaggggatgtacaccttccctgtaatattgttcgtaatatctagaaaaggagaggataatattactttcaacatcgcagggggtgtacaccttccttgttatattgttgctaatatccagggaaaaagaagatgacattaccaccactattgcagaaggtgtacacccccccttgatatagttcctaatatccagaaaaggagaggagatattactccaaatattgcaagaggtgtacattcccctgtaatatttttcctaacattcaggaagaaagagagtgatattgcccttaatattgaagggagtgtgccccccccgtgatattgtttctaatatccaagaaatgaaaggatgatattactcccaatatcacaggggctgtacagccccctcccatgatattgttcccaacatcggggggggggtgaaatagtattattcccagtatcacaataggtgtacacacctgtcgtgatattgttcctaatacccatgggggaaaggacgatattattcttaatatctcagagggatgtacaccctccctgtgatattgttcctaatatccggggtgggagaggatgatattacccccaaaatctcaaagggtgtacacccctcttgtgatattgttcctaatatccagggtggagaggataatattattcccaatatccaggaaaggaaacgatgatgttactgtgaatattccagggggtgtcctcccctctgtgatattgttcctaatatccaggttggggagattatgatatttctccaaatatcacaaggggtgtacaccaaccctgtgttattgttcctaatatcgatggggggagaggacgatattactcccaatatcacagggggtgtacaccacctttatgatattgttcctaatatccatgaagaaagaggatgatattactttcaatatcgcaggggatgtacactccccctgtgatattgttagtaatacctaggagaagaaagtgtgatattactcccaatatcgcaggggatgtacacgcttcctgtgatattgttcctaatatttagggggaaaggggatgatattactcccaatatcgaatggtgtgtacacccccccgtgattctttttttttttttttttttttttttgagatggagtcttgctctgccgcccagactggcgtgcaatggcgcaatctcggctcactgcaacatttgcctcccaggttcgcacgattctcctgcctcagccttcggagtagctgggattataggcagctgtcaccataccaggctaatttttgtatttttagtagagttggggtttcaccatgttggtcaggctggtcttgaattcctgacctcaaataatccacccaccttggcctcccaaagtcctgggattacaggcataactttccctgtgatattcttcctaatattcaggaagaaagaggatgatattgctcccaatatcgcagagagtgtgcactcctcctgtgatatggttcttaatattcagaggaggagaggatgatattactttctatattgcagaaggtgtacacctccctcgtgatgtctttcctaatatccagtgggggagaggttattagtctcaaaatcacagaaggtgtaaacccccatttgatattgttcctaatattcaggggtggggagagaaaggtattactcctagtatttcagggcatgaacacccccaccgtgatatcattcctaatatccagaaggggaggcaatgatatttctcctaatatcacaaagggtgtacaccccttctgtgatattgtaaatattctgtgtgtacacccccctgtgttatagtctgtaatatccgggtgggggagagggtgatatttctccccatattgtaggggatgtacacccttctgtgatatggttcgttatatccagggaagaaaaaggtaatattgctgcccatattgtggagagtgtacacccccatgtaatatggttcgtaatatccaggagtggagagggtgatactgctccttacatcgaggaaggtgtacaccttattgttatatgattcgcaatatccaggggaggagagagtgatattgctccccatgtcgcagggggtgtaaaccctccgtgatatgattggtaatatccaggaaaggaaagggtgatatttctccccatatcgcgggggacgtacatcctcctgtgatatggttcgtaatatccaggaggaaagaggaaaatattgctcttcataacccgaggggtgtacaacccctgtgatatggttcgtaatacccagaagtgtacacccctctgtgatatggtttgtaatatccagggggttagagggtgatattgctccccatatcgcagtgggggtacacccccctggattggttcataatattcatggggggagaaatttacatttatcctcatatcagggggggtgtacaccccccgtgatatggttcgtaatatccaggggaagaaagggtgatattgctccttatatcgcggaaggatcaccctcccctgtgatatggttcataatacccagacgggaagagggtgatattgttcttcataaagcgaagggtgtacagccccctgtgatatggttcataatatgcaaaaggggagagggtgatattgctccccatatcacggagggtgtactcccttctttgatatggttcgtaatatccaggggtgtagatggtgatatagctcgccctattggggagggtgttcacccctctgtgatattgttcgtaatgtccagggaaagagaggatgatattactcccaatatcgcagaaggtttacaccactctgtgatattgttcataatatccagggaaggagaagacgatattactcccaatatggcagggggtgtagaactcctgtgatattgtttgtaatatccaggcaaggagaggatattactctcaatatcgcagaaggtttacacccctatgtgatactgttcatgatatccagggaaaaagaggatattactccctatatcacaaagggtgtacacccctttgtgatattttttgtaatatccaggggagagaggataatattactctcaatatcagaaggggtgaaaaccctcctgtgtcattgttcataatatttagggaaggagagagtgatattactccaaatatcacagtgggtgtacacccccctatgatattgttcctaatttccagaaggggagatatgatattattgccaatatcgcagaaggtgtacaccttactctgacattgtttgtaatatccagatggggaaatgatgatattactcctaatatcacagggggtgtacacccccttgttttattgtttgtaatattcaggggaagagacgattatattactcccaatatcgcagggtgtgtacaacactctatgatattgttcataatatccaggggaggagaggaagtgtacacccccccgtgatattgttcgtaatatccagaggtagagaggatgatattactcccaatattgcaggtggtgtacacctttctgtgatattgtcatgatattaagaaggggagaggatgatattactaacaatatcacaaaaactgtacactccctgtgatattgttcataatatccagaagaagggaggatgatattattctgaatctcgcagaagatatacaccaccctgtgatatggttcataatatcctaggggaaagaggatgacataactgtcaatatcgcagggggtgtacaattccctgtgatattgttcacaatattcagagggaaaaaggataatattactttcaatatcgcaggcggtgtacacattactgtgttattgtttataatatccggaatgagagaaaattttctcccaatatcacaggaggtgtacactcccctgtgatattgttcgtaatatccagggaggggagaggatactattactcccaacatctcagggagtgtaggccccccctttgatattgttcctaatattcggaagtggagaagatgatattacttccaaaatcgcagggggtgtacactccctctgtaatattgtttctaatattcatgagtggaaagaaagatattactcccagtattgcaggggacatacaccacactgtgatcttgttcacaatattcgggggggagaggatgatattactcccaatatcaaagtaggtgtacacccccttctgatattgatcgtaatatccagaattaaagatgataacgttactcccaatattgcagggggtgtacatttttgaatactgttcataatattaagagggggaggggatgatatctgtcccaatatcgcaaagtgtgtacacctcctgtgacattgtcccaaatatccagaggaaaaaaggatgttattactcttaatatctcagagagtgtacacctccctgtgatattgtttgtaacatccagaagaaagaggctgatattactcttaatatcgcagggggtgtacacccccgccccgggatattattcgtaatatccagggggaagtggaatgttcagaatgggagaggatgatattacttgcaatatcatagtgggtgtacaccccactgtgatattgtttgtaatatccgggaaaggagaaaatgacattcctccccatatggcaggggctgtacaccacctatcatattgttcaaaatatccagaaggggagaggatatgtctccaagtatcacagggggtgtacaccccgctgtaatattcttcctaatatccagggtgtgagaggataatagtactcccaatatcccagggcatgtacaccccccttgtgatgttgttcctaaaattcatggggagaaagaatattactcccaatatcacagggggtgtacatacactctgtaatattgttgccaatatgcagcaggagagaggatgatattactcccaatatcacaggggctgtacaccccgctgggatattgtttctaatatcaagggggaaaaaggatgatattactcccaatgtcgcagggtgtgtacttcctctttgtgacattgttcctaatatccaggagagaagagggtgacattccttccaaaactgaaaggggtgtacacaccctttgagatattgtctttaatatccagaacgaaacaggatgatataactcctaatactgcaggggggtacaccctctctgtgatactgtttctaatatccaggaggggaaagaaaaatattaatcccaatatcacagggggtgtacattccccctttaatattgttcctaatatccaggaagacacaggatgatactatttccagcagcacagggcatgtacacccctttgtgatattgttcctaatatccaggaaaagagaggatgatattactgtcaatattgcagggcgtatacactggttctgtgatattgtttctaatatccgggggtggagaaaatgatattactcccaatattccagcgggtgtacacccgttctatgatattgttcctaatatctgggggagagagaatgatattattgtcaatatcacaggggatgtacagattccctgtgatattgtttctaatattcacagggggagaagggtataatactcccgatatcgcagggggtgtacactccccctgtgaagttgttcctaatatccagggattgagagaatgatattactcccaatatcacaggcggtgtaaaccccctgtgtgatattgttcctaacatccagaggaaaagatgatgatattattttcaatatcacagggggtgtacgcatccctgtgatattgtttctaatatccaggggaggagaggatgatattattgttaatatcgcagggggtgtaccccaccctgtgatactgttcctaatatccggggtggaagaggataatattgctcccaatatcgcaaagggtgtacaaccttcctgagatattggtcctaatatccagggagggagaggatgatattactttcaatatcacagggagtttacacaacccctgcgatattgttcctaatatccagcggaagaagagttaggataatactattttcaaaattgctgggtctgtaccccctccccgtgatattgtttctaatatccaggaggggagaaagtaatatgactcccaatatcttagaagatgtacaccctccccataatattatttcttacatccagggggtagaggatgattttgctttcaatatcacagagggagtaaacctttccggtgatattgtttttaatatttaaaaagagagaagataaaattactcccaatacaaaggggatgtattgtgtactcccccctctgatattcttttttaatatccagatggagagaggatgatattactttcaatattgcatgggatgtataaatcccctgtgttattgttctgaatatacaggtggggagagtatgatattactccaaatatcgcagggggttctttccccctgtgatattgttcctaacattcagggagggagaggatgatattactcttaatattgcagggggtgtacccacgcctatgatattgttcctaatatccagagggggagaggatgatctaactcagaatatgacaaggggtgtacacacagcctgtgatatggttcctaatatacaggggagaaggggataatatttctcccaatatcgcagggggtgtacaaccccctgtgatactgttcctaatatacagaaggggacagcatgatattgttcctaatatcgcaggaggtgtacaacgccctgtgatattgttcctaatatccagggcgggagaggatgatattaccctcaatatcgcagggggtgtgcactttccctgttatattgttcctatgatccgggtggggggaaatgacattagtcccaatatcgcaggatgtgtgcaccgctcccccgtgatattgttcctaatatcaagggggagagaggaggatattactcccaatatcgcaagggatgtacatcctccatgcgatattgttcgtaatattcaggaggagagaggatgatattactcttaatatcgcagaaagtggacacccaccctgtgatgttcttcataatatccagggaagcagacgattatatgactttcaatatcgctgggagtgtacatcccttttgggatattgtttctaatatccaggaagggagaggattatattactctcagtattgcaggcagtgtacaccttttttgtgatattgttcctaatattcagaaagggaaaggatgatattactcccaatattgcaggtggtgtatatccccctctgatattgttccttatatcaaggaagagaaagaataatattactcccaatatcaaagacagtgtagacccctcctgtgatattgtatttaatatccatggggaaagaggatgatgttactcccaatatcgcagggggtttacacccacactgtgatattattcctaaaatccagtggaggagaaaataatattgctcccaatattgcagggtgtatacaggccctcccccgttatattgctcctaatatccagcggtggagaggatattactttcaatttgtgtagggagtgtatacccccctgtgatatttttctaatatcaaggatgggaaaggatgacattactcccaatatcgcaggaggtgtacacgccctgtgatattgttcctaatatctagggaaggagaggatgatattactttcaatattgcaggagctgtacaccctctgtggtattgttcttaatatttaggttgggagaaaatgatatgagtccaaatatcgcagaaggcatacacacttccaataacattgttcttaatatccgggggagagggtgatattactcccaaaatctctggggggtgtacacccccttctgatatttttcctaatatccagggaaggaaacgatgatattactataaatattccaaggagtgtacaccttcctaatatcctaatattgttcctaatatccaggggtgggagaggattatattactcccgatatcgcagtgggtgtacacccctcctgtgatattgtttctaatatccaagctaggagaaaatgatatcactctcaataccacagggggtgtacaccttccgcatcatattgttcctaatattcagagggaaagaagatgaagttactttcaatatcggaggggttgtacacaacccctgtgatattgctgctagtatccaggaagaaaggggattatgttactccccttatagcagggggtatacacctcccctgtaatattgttcctaatatcaaggctgggatatacgtggggggaaggatgatattactcccaatatcgcaggggttatacaaccttctgtgatattgctcctagtaaccagggcagaagaagatgatattactcctaatatcgcaggaggtgtacactcccccattatgttgttcccaatatgcagaaaaggagaggatgacattattgccagtatcgcagggtgtgtacaccacccctgtaatattgttccaaatatttagggggagagaggatgatattactcccaacatcgcagggggtgtacacacatcccctgtaatatagttcttaaaatctaggggaaaaggggatcttatttctctaaatattgcagagggtgtacactccccggtgatattgttcctaatagccgggagggagataattaaattactttcaatatctcagagagtgtacatcgcccttgcgatattgttcctaatatccagagcaaaagagaatgatattactcccaatatcttaggagtgtacatttaacctgtaatattgttcctaatatccagggggaagagaatagtattactgccaatatcgtaggggttgtacaccttttctgtgatattgttgcaaatatttagtagagggaaagaatattactcgcaatatcacagggaatgtatacttcccctgtgatattgttctgatatccagaaaaagagagggtaatattactcccaatattgcagggggtgtacaccccccttgtgatattgatcctaatataaaggaaggaagaggatattactcctcatatagaaggggttgtccaccccccttgtgatattattcctaatattcagggaagcagaggatgatattattttcaatatcacagagggtgtgcagtccacctgtgatattgttcttaatattcggggggagaggatgttattatgcctgatatcgcagtagaggtacacccctcaagtgatactgttcctaataaccaggggtgaagaggatgatattactcccaatatcgcaggtggtgtacacccccccatgatggtttctaatatacagagggggagaggaaaatattactcccaaaatcgctggaggtctacaccccccttgtgatattgttcctaatatccaggaaaggaaacgatgatattactgtgaatattccagggggtgtacacccgctttgtaatattgttcctcatatccagggtgtggagaggattatattactcccagtatcgcagggggtgcacgacgcccctgtgatattgtttttcatatccaggaggggagattattatcaatatggcaaggggtgaacaccccctgtgatattgtacttaatagttaggttggcagaaaatgatattagtctcgatatcgcagggggtgtgcactccgcctggtgatattgcttttaatatcaagggggagaaaatggcattactcccaatatcgcagggggtgtacaccgctcatgtgatattgttcctaatatccaggtggagagaacataatattactcccaatatcgcacaaggtgtacacccctcctgtgatatggttcctaatatccatgggaggagatgatgatattactcccaatatcacaggggatgtacaccacccttgtgatattgttcctaatatccagggaagaaaacgatgatattattgtgaatattacagggagtgtacacactccctgtgatattgtttttgatatacagggtgggagaggatgatattactcccaatatcacataaggtgtacaccccccgtgatattgttctaaatatttcggtggggagaaaatgatattagtctccatatcacagggggtgtgtgctcctcaggtgatattgtttttaatatcaagagggggaggagattatattactttcattatcacagggggtgtacacccctcctgtgatattgttccttatatccaggcgaggggaaaataatattactctcaatatcgcaggaggtgtacacaccccatgtgatattgttcctaatattaagggggaaagaagataatattactttcaatatcacagggtttgtactcctttcttgtgatatagtttttagtatccagggggaaagagcatgatattactcccattgtagcaaggggtgtacacacctcctgtgatattgttcctaatatccagaagtggtgaggatgatattactcccaatatcgcagggggtatacaccccacctatgatattatttctaatatccatgggaaaagagtatgatattacacccaatgtcgcagagggtgtgtatttttcctgtgatattgtttctaatattcaggcggggagaagatgatattactctcaatatagcagaaattgtacatccccgctgtgatattcttcataataatcagggaaaaagaggatgatattactaccaatattgcaggggggttacacttcccctatggtagtgttcctaatatccaggaagaaagaggatgatattaatcccattatccaggaagtgtacacccaccctgtcatgttgttcctaatatccagcagggaagaggatgatattacaccccccccccgtgatattctccttaatatccaggaggggagaggctgatattactggatatatagcaggggtgttcataccttctgtgatattgttcctaatatccagaaaaggagaggatgatattacttccaatatcgcagaaggtgtacacctccctgtgatattgatcctgacattcagaaggggagaggatgatattactcaaaataccgcagggcatgtgcattcccttgtgatattgttcctaatacccagaagggaacaggataatattactttcaatatcgcagggagtgcacacccccctttggtatggttcttaatatccagaaggaaagagggtgctattactttccatattgcaaggggtgtacaccccactgtggtatggttcataatatccaggcagggagagggtgctattactccccacagtgcggggcatgtacaccctgctgcggtacggttcctaatatccagggggagagaggatgctatgactccctatatcgcggggtgtgtacacccctgtgtggtatgttttgtattctccaggaacggagagggtgttgttacccctcatatcgctggaaatgtacactcccctgtggtatggttcgtaatatccaggggattgagggtactgttacccccatactccccatatcgtggggggagtgcacctccctgtggtatggttcgaaatatccagggtaagagagggtgctattattccccattttgcaggaggcgtacacccccctatggtatggttcgtaatatccggggtgaggggatgctatcaaaagaagagagaaagagaccccccatattgttctatattattttatactcagtacctgttttaagaagaaacaaggaagtgaaaccaaaagcaggcagcccggcgccaggcaccagacccaaaaccagacccgaaaccaggcctgggcctgcctgaccttagcctgatagttaaaattcaacccatgacctagcaaccaatgttatccatagattccagacattgtatggaaggacattgtgaaatttcttgttctgtgctgtttcactctgattaccggtgcctgcagcccctgtcacatacccactagattgctcaatcaatcatggccctttcatgtaagatctttagtgttgtgagcccttaaaaaggacagaaattgtgcactcaacaagctcggattttgagacgctagtctttcgatgcttccagctgattaaaagccacttccttcactacctcggtgtctgtggggttttgtccgcgactcctcctgctacactatgactccccatatcaaggggggtgtacacccccctgtggttcgtaatatccagcaggggaaaaggtgctattactccccatattgcagggagtgtacacccccttgtagtatggatcgtaaaatcaaggggggagggaaggtgtaattatccccatatctcagggggtgtacacccctttgtggtaaagtttgtaatatccagggatattacagggatattatccccaaattaatacttttataatttcttatgcctgcctttactgcaatctctgaacataaattgtgaagatttcatggacatttatcacttccccaatcaatacttttataatttcctatgcctgtctttactttaatctcttaatctcatcatctttgtgagctgaggatgtatgtcgcctcaggaccctgtgatgattgcattaactccacaaattgtttataaaacatgtgtatttgaacaatatgaaatctgggcaccctgaaaaagaacaggataagagcgatgttcagcgaacaagggagataagcataaggtctgactgcctgtggggctgggcagaacagagtcacatttttcttattgcagaaaatgagtaggagaaatatcactgggaagggaacgcattcctaggggaggcctatggacggccgctctgggggtgtatcccttatgtggttgaagataagggatgaaatacaccctggtcccctgcagtgccctcaggcttgctaggattagaaattccagcctggcgaattctagtcagaccagttctctgctcttgaaccccgtttcctgttaagatgtttatcaatgacaatgcgtgcacagcaggacatggaacctcaatagtaattccattttctccctggccttgtgaccttgctaggcccttctgcccttgtgatcttttattgccatttgaagcatgtgatctctgtgacccactccctattcgtatccccctccccttttgaagtccctaataaaaacttgctggttttgcagatcaggtggtcatcacagaacctgccgatatgtgatgtcaccccggaggctcagctgtaaaatttctctttcgtactctttcactttatttctcagaccaggtgacacttaaggaaaatagaaaagaacctactttgaaatattgggggctagttcccccaatagacattgttcctaatatccagaaaaaaagaagatgatattactcccaatatcacaggggttgtgaaccccacctgtgatatggttcctaatatccaggaagggagagaatgatattactctccatattgcagggggtgtgcacatccctgtgatattgttcctaatatccaggggaggagagggtgatattactcccaatattgcaagggttgtaaactccaccctgtaatattgctcctaatatttaggatttagggggggagaggataatattactcccaatatcgcaggggatgtatatgccctctttgatattgttcctaatatccagggggggagaggataatattactttccatatcacaaagagtgttcacccccctgtgatattgttcctaatatccaaaaaggaagaggatgatatcaatcccaatatcacaggaagtgtacaccccccccttttatattgtttctaatatccaggggaaatgagggtgatatttctctcaatatagcagaatgggtacactccccctgggatattattcctaatatccaggggaaaaaaagaggttgatattcttcccagtatagcagggaatgaatacaccctttgtgatattgcttctaatatcaaggggaaaagaggatgatatgactcccaatatcacaggggatgtaaacctgtggcgttgttgctaatatcaaggagggaagagtatgatattactcctaatgtcgccgaaggtgcacactttccctgtgatattgttcctaatatccaaaagggaagagaatgatattacccccagtattgcagggtgtacaccacccctgtgatattgctcctaatacccaggaaaaaagagaatgctattacccccaatatctaaggggacgtataccttccctgtgatattgtttctaatatccaagtggggagaggatggttttactctcaatattgcagggagtgtacactccccctgtgatactgtttctaatactcgggctgggagaaatagtattactcccaatatcgcagtgatattgtttccctgtgatattgtttctaatatctagtgggggagataattatattactaccccatacacaggggagggtgtacattcccctgtgatattgtttgtaatatccagggaaggagaggatgttactcccaatatcacaggggttgtacaccccttttttgatattgttcctaatatctggggggcagagaattatattactgtcaatatcacagagtgtgtacaccccctctgttatattactctttatattcagggcggtagaggatgatattactccctatatcacagggggtgttcacccctcctgtgatattgtttataatatctaaggggaaagaggatgatatcactctcaatatcaaaggaaatgtacacctttcctgtgatattgtttttattatataggggggcagaggatgatattaagaacaataccacaggggatgtacacccacgtattgatattgtccctaatatgtatggggaaagaggacagtgtaactcccgatatcgcagagtgtgtacacccccttgtgatattgtttctgatatacacggggagaaaagataatatttcttccaaaattgcagggggtgtacaaccccctgtgatattgtttttaatatccagtgggggagagaatattactcccaatattgcagggcgtgtacacaacccctgtgatattgttcctaatatccagagtaggggaggatgacattactttcaatatcgcaaggggtgtacattcccctgtgatattgctcctaatatccatgaggggagaggatgatattattcctaatatggcaggggctgtacaccttccctgtgatattgtttctaacatccagtgggggagaaaatgatattactccctatatcacagaaggtgtacactttccctgtgatattgttcctaatatccagaaggggagaggataatattactcccaatatcgcaggaagcttacaactcccctgtgatattgtttctaatatccagggaggtagggatgatattactcccaatatcgcaggggatgtacactcccccgtgacattgtttctaataaccagggggtgagaggatgatattacgcttaataccgaagggggtgtacacacccttgtgatattgtgcctaatagccagggggaagaaaattatattaattttaatatttatggggaaaaaggatgatattactcccaatatcacaggggctgtacaccgaccttttgatattgtttttaatatccagaagagaagaggataatattgctcccaatatcagaaaaggtgtaaaccccttctgtgatattggtcctaatatccagggagggagagaataatattactaccaatatcacagaaggtgcccacccccaaggtgatattgctcctaatatccaaagataatagggtgatgttactcccaatatcacaggaggtgttcacaccccttgtgatattgtttctaacgtacagggaagggagaggatgatattattcccaatatcacaggaggtgtatactcctctgtgatattgattttaatattcggggggaaaggatgatattactccctatatcgcagagggtgtacaccctctgtaatattgatcctaatatccagggcgggataggatgatattactcccaatatcgcagaaagtctacacaacccccagtaatattgtttttactatccagggggaagaggatgacattactcccaatttcacagagtgtgtacactcaccatttgatattgtttctaatatctagggggagagaatatattactcccaatatcacaggaattgtacaccacctctgtgacattcttgtgaatatccggggaaaaagagaataatattactcccaatattgcagagcgtgtacacccctccatgatatcgatactaatatttttttaaagaggatgatattactcccattgtcacaggatgtgtacaccccccttgtgaaattgttcataatattctggggggagagcataatattactccccatatcgaaaaaggtgtccaccctccttataatatggttcctaatatccaggatattacttaatccaggatacttgtaataccctaaatatacaattgcttgaacctccacctcccaggttcaagcaattcttctgcctcagcctcccgagtagctgggactacaggggcacaccaccacacccagctaatttttttttcttgtatttttagtagagatggggttttgccatattggccaggctggtctcaaactcctgaccttgtgatctgcccacctcagcctcccaaagtgctgggattataggcgtgacccaccgtgccaagccaggaagaggatgctctatagatttccccaataagagatggctttgcagggccattccaaaatatgtcaaagaaatacatttggggataaaatactttgatttcctttagggaatgttatctattatgtgatgctataccagagtcaggttggagtcggttatcttattgcaacaaagagtctgttccgtcactgttgggatctctattttttcctcttatttcttgagacagggtctcactctgtcacccagtctggagtgcagtggtgcgatcttcattcactgaaacctctgcctcctgtgttcaggtgattctcgtgcctcagccccttaagtaactaggattacaggtgtgcgccaccacacccagctaatttttgtattttcagtagagatggtattttgccctgttggccaggctggtcttgaactcctggcctcgtgtcatctgcccacctcgacctcccaaagtgctgggactgcaaatgtgagctattgtgcccagccaggatctctgttttaatgttagtgctggtcactttgcatgaactccaaagggaagaaatataatgaggtgtgtctgaccccctgccttctcatcgtgacctgaattagtttttcaggtttgcaggggatacccttggacaagaaggggctctattcggttggttggggggattagaattttactttttgtttacaatatttctcctgaaagagttaggggctcacaaggaatttccgcgtgagcaacttatgaggaaagccatctgggaagatatgtgtccttgtgtcactgggatattctcgtttaccccaatgatacggcaatgacgcagggttgtgaaattacagctatgtgtttggggaaaaaagaaagcaggattgtgtgactacgtttccaaacttcacttgcccttagccatagtgagttgggggcctggagattctgttttctttcacaatgatatagatacaattaaatgtatagaaagcaaaaaaataaaaaggtgagtaatgaggaacctctgattcctgagtggccatgtagttacccatggcacagagccacagttactgaaggtaaagtttgctggggaatttagaaatgaatccagctcttggaggagtcagtttactggatgcctaagaaaatgcaaacaaaataagaaaaaagggtaatattcaatcccatagttattgttacctgtcatagctaaagtaaaattaaaacagagtgctggcttcaatcttgatgctacactaagcttagatttcagtgaatgtgagtctcagccactagctcagagccacctcccaaagaccaaatcatgtagggacaatagaaagtacttctgagaattgtggttaccaagaacctagtaactgttggggaggagcaaaacaaagtacagaaaccagagggtacaatctgagtgagactgctatcagcttctggaggagcctttactaaaatgaatgatgagagtaactggatgatgagagtaactaatggatgatgagagtaagcaatgtctttggttttcttttttttttttttttttttttagcagacgtctcactcttgtcgcccaggctggagtgtaatggcatgatctcgcctcactgcaacctccacctcctgggttcaagcaattctcctgtctcagcctcccgagtagctgggactacaggcactcatcaccacacctggctaatttttgtatttttagtattttctggtgagggtccaggtttccggaaacaactcagagacatatgttaagatgttatctttagttttcacagggaaccaaatatgttacgactccaatttccttggctattgttttaagttaccattaccttctcgttgatcaagttgctcatttacttctcaagcctagctagatgcctggaatttcccttgaaggaagtcaagattttcctttatctccatactggctgatggtgatcgagtaagcccctaagaggggtccctgctccatctcgagatgctgctagattctacagtgcctaataaacagctctcgcctggccgacaaagagctgcttgctctctggatagcaattccaaagtgaacagacaacatcctgtttggaagactgccactctgttagaagaagcatcaggaaaacctttcttttgagctatttataactaacagcaattgaccaagtatacttttgtgagtgaaactgacctttctccctgtaagaattctccaaaatttggaaactatttgtgagtatttttacttatggcaatataattattggcacaagctcaatcagattcggttttctttcgtaacaggaaccattggagatactcattactctttgaaggcttacagtggaatgaattcaaatacgacttatttgaggaattgaagttgactttatggagctgataagaatcttcttggagaaaaaaagactgggtatattttcaatatgctttccttttaaggtccctcacctgtggaaagtaaagaatgtcactttctgacaggctcaggaacctcaagttatgtagggatctcaagaagatgggggaattcacccagttcatacaggtgaaattgctgttgcaaagattatgaatatgagagaagtccagcatggctgacttcatctcgtgtctggcctcaggctggctgcccttgctcactcttgggcataggccaagctagccatgggaggaatttagtttatagtttaactttgaagcacggatgataatagtctctccctaaaatgaaccccttccttgctcagggactgaaactacctttgtatgacaaatgaaagcccacaagattaagattatgagaggggcctgaattctgctaaaatgcaggtgtagctgactgataacaagtcattgtcccacagcttgcctttctataatctcttgcttctcaggagtcacatggccagaggtcctgagatttccagtcctgtgacccccacccagagatggacttagtgcatgaggaccattttccacacccctatgatttcatcctcaaacaatcagcagcaaccattccctagccccctgccttccaaattatccataaaaatcctagcctctgagttattagggagattgattaataatcccagtcctaccccttgggttgctctgatttaattaaaccttctctactgcaataccacggactcagtaaattggttttgtctgtgcaatgggcaagaagaacatgttgcatggttatacaggtactacaagcacagtctgatggcaaattattggttttgcttcctgcccttgatgtttctaaacatctagtccaaaattacttgtgaaaggtccagcaaagccaattttaaaagaggctatatggccaatcactattctttctacacattattgcaaataatcaggccacggctgggcacggtggctcatgcctgcaatcccagcactttgggaggctgaggcaggatcacctgaaatcaggagttcaagaccagcctaggcaacatgataaaaccctgtctctactaaaaatacaaaattagccaggcatggtggcatgcacctgtaatcccagctacttgggagactgagggaggagaatcacttgaacctgggaggcagagattgcagtgagctgagatcacaccactgcactccagcctgggcaatagagtgagactttgtctcaaataataataataataatcagaccaagtataatgaaattaaaatttattttgcaaataaattggtcctactacaatttatccttcatagaaatgtggaaactgaagataaaaaaaattaggtttcagaagaaaactatactacacctgttattagattctagccctaaacattgtttttgaggtttttattatttacctgcaatttggtctaaattctgaattatttcctgactacaagtatccaaggaataaatgggttttctttttctttatgatagttttagttggcttctaatgcaacaacaatttttattgtaatcctgtgtgcattctattcctactattcaaattattaatgttatagatctttcattgtagtacttctgaattaaccaaaatcacagtattctgaagatgattctacaaagcctgctgtttctacaaaggctgctgatgatttctacaaagcctgctgtagtgttgctgtggcctctgcttaaaaaagtagaaaacacattgatgcagcatgttcaccccaacctccctgcctaaaggctcagggaccatcttggaagaggaaggcgcgtgagattgtaagagccgaattagggggatggagtgtggagaataaggacacttcatcttggatgctcacctgccaaattgacttctgatgaaagccagctccagaaatgtgcctacagttactactttcacctaaaccctgcccttagtcaaatccttctcttcttctaagcaatcaacttcaattccttgtataacccacagtataaaagggcttttataccattctatcctattgcatgtaagccttgggtctgggaggtaacagtgtgggattccaccatctcatctccctgccacccaaacatgcctgctcttctttaagcaatattaaatgtttgtacttcagaaatttgatttgtcagcctcttcttcagactctcagcttctttggcctttgggagtaaatttgcataggcctgctcaaaacaggatgttctgggggtttgggggtgttgttttgttttgttttttgttttgtttagagacagggtctcactctgtcacccaggttggagtgcagtggtgcaatcatggcacactgcagcctcaaactcctaggctcaagcaatccccccaccttggcctcccaaagttctgggattacaagcataagccaccatgcccagccctggacttttctttaaagacatttacacagtgtaggaattactgtgggtgcactgctcaggtccccttctccaggatgctcattcctacctcatagatgattttcctgcagagatttgacctcagctgaagggcagtcacctggtccaggtggttgctattcacctccttcctgagaacagccaacagccagggacacgctagcacagagatataagagcgaccaaggtgaggccccttctgtgctgcggtgcatgctccagagcctccctgggatcagacttaagagggtctccagccagatctggtcttcgctgctttcctcgagctccccagcgcactcctgcaatgcatcttttttttttttttttttttttttgagacggagtttcactcttgttgcccaggctggaatgcaatggcgcaatctcagctcaccacaacctctgcctcgcgggttcaagtgattctccttcctcagcctcccaagtacctgggattacaggcatgcaccaccacgcccagctaattttgtatttttagtagaaacgggtttctccatgttggtcaggctggtttcgaactcctgacctcagttgatcctcctgcctcagccttccaaagtgctgggattacaggtgtgagccactgtgcctggcccaatgcacctcttgaatcacctcctcatgctttgcttttagagaacatgatccccaacatgtgattccagcaaagattctagaaagccaaccgtgacaatcacttctgggtttagatgacccccccccaccacaagatggcagtgagcacctcatcacagaggtgctgatggtctgcagcaccgcgccaggccagaacgtgccttttacagaagaaaataacccagtagctgactaggatggtgaggagggctggtgagcactgcggtagtgagagggacactagcatcactgagatgcaagtgatggtcatttttcataggtcaaagctcaaagcaggggacagttacagggcagggcttcatagcaccagtgtgatgaaagtatctgggagtggctaaggccagcactatgccatgggaagcaaggtgggcctgaggaggaggcagcagcgtcagcctgcaacaagtgggggctgccctgcagagacctaagagtcatgttatagagcacagtgtctgtaaggccaagaagtgtggacagccaagtgtgtcaattactagacatactcaagaggagcaggaagggcagggcatggtggctcatgcctgtaatcccagctacttgggagactgaggaaggagaatcgcttgaacccgggaggtgaaaattgcaatgagccgagatttcgccactgcactccagcctgtgtgatgggagcgggactccatctcaaaacaaaaaaagaaaaaggaaaaagaaaaaaagaaaaacctaggtatacttctcaagcaaataaaaataatcaaaaccaatatcatgcccgggcacaaatttcatatatataacagatttaaatatatgagggtgattatcctctcatatctccatttttttttgtttttccatttttttctttactaaaaaaagttaatgccaatgacacacaatttttttttttttttttttttttgagatggagtctcacttcttcgccctggctggagtgcaatggcgtgatctcgactcactgcaaagtctgcctcctgggttcaagcaattctcctgcctcagcctcccaagtagctgggaccacaggagtgagccaccacacccagctaatttttgtatttttaatagagacggggtttcaccatattggccaggctggtctcaaactcctgatctcaaataatctgcccgcctcggcctcccaagattctgggattataggcgttgagccactgcgccccgcctatgtatgattttttttttaattttattttcataagtttttggggaacaggtggtattttgttacatgagtaatttctttagttgtgatttgtgagattttggttcacccatcaactgagaagtatacactgaacccaatttgtggtcttttatccctcacccccttcccaccctttcccccggagtccctgaagtccattgtatcattcttatgcctttgcatcttcatagcttagctcttgaacccttactttctgtttgagggagaagacatatcatctacaagtagatactgtgtaaacattccattgcatgactatcccataacttatttattatttgtgtttggttatttgctgctatgtaacaaccccactcccaactaaatggtgtgacaattccatgattctgtggatcaaaaattctgaaaagtcaaacccaaggagttttgtctctgctccatgatgctaaagcctccgcaggggtgaggcgaatggctcagggtgactgaaaagctcagggttggaacagctggggatgaggcctctatgtataagatgattcttcactcacaggtctgaaactatggtggggacagccagaaggctcggctcagctgggacagtcacctgagccctacacatgacctctccaacatggtgatcctgaagcagttgggtttcttacacagcatcacacttttcttttttttttttttttttgagatgaaatattgctctatcacccaggctggagtgcagtggcacgatctcagctcactgcagcctccgcctaccaggttcaagcgattctcctgctccagcctcccaagttgctgggattgcaggcgcctgccaccaagcccagctaatttttgtatttttagtagagacggggtttcaccttgttggccaggctagtcttgacctcttgacctcaggcgatccgcctgcctcggcctcccaaagtgctgggattacaggcatgagccaccgcgcccggccaaagctcacacttcttatgattcagccttagatgtcacatcagttcattttccccacacttattagtgttagaagtcacaagcccacccatactcaggggactggcacacagaccccactctcaatggaaggggtgggacaccaccattcctgctgatgggcatttgggtaacttcctgtttgaagctattaagattgggctgctgtggccgggcgcagtggctcacgcctctaatcccagcactttgggaggccgaggcgggcggatcacgaagtcaggagatcgagaccatcctggctaacacggtgaaaccccgtctttactaaaaataccaaaaaaaaaaaaaattagctgggcatggtagcgggcgcctgtagtcccagctactcgggaggctgaggcaggagaacggcgtgaacccgggaggcggagcttgcagtgagccgagattgtgccactgcactccagcctaggcgacagagcaagactccgtctccaaaaaaaaaaaaaaagattgggctgctgtgactattctagtaggtgtctttggtgagcgcctacacgtgtttctctttttctctttagtatatgcccaggaggggaactgctggctcccagataccgtatgttcagggtcacacacacttccacagggttttccaaagcccttgtaccagcacgcactcccagcacctgtgtgactgctccagctgtcccacagtctcatcagttctattgctgatattttcattttagcttaagttatatttaataggaaaattaccgttgcctctgccccccgttcctgcctgtaggagtttctcgtagctgttgctacaggtggccacaaatctgtcacttaaacccacacaaattgatgtccttatggctttggagtcagaagtgtcaactgaaggtactagcagggctgtactgacctggtggcctcagggagcatctgtgctgcttctccaccttctagaggctgctgcatccctcgctccagccccttcctgacaccactcaccctcctacttctgttatcacatcctcaccttctctgtgttcagggctccctctgtctctctcttgcaagcacacttgggattccattgagggccacccacataacccaggagaatttctccacctcaatatccttaacaactgcagagcccttttgccataaaagttaccattcacgggttccagggattgtgacatgggtagctttaggagtgattattcctgcctgtctcccgctcaccagaacttggactttctctctcaacaggagccccctgtgtgggaatagcctgtctcaacgacgccctctataaggacctgcttcctcaaaggacctcatagtcgggtcctgcccctcagtgtccagtctgccttggctggaggggctgcaggggtgtgttggcgccacctggtggagacagggcatcacagcaggtgggagcccagtagaagcacaaccaaaacatgggtaatgtttaaaattttctggctaagcgctgtggctcacgcctgtaattccagcactttgggaggccgaggtgggtggatcacatgaggacgggagtttgagaccagcctggccaacatggtgaaacatcccctctactaaaaaatacagaaaaattagctggacatgtggcgcgctcctgtaatcccagctactcgagaggctgagacacgagaatcgcttcaaccccggaggggttgccgagatcgcgccactgcactccaggctgggcgatagagcgagactctgtctcaaaaaaaaaaaaagaagaggggaggcgaggggaggggaggggaaaagggggaatttgtttggagctgagacatccatcttctcctgacctcagatatttgcactcctggttatgaagccttcacacttggactgaatacaccaccagctttcccgatttccagcgtgcaaatggcagatcgtgagacttctcagcttccataattacatgagccaatttatatatataaattgggtcctccagaaaaacagaataaattatatatataattatacgcataacttaattaaattatacgtataacttagctatatatataatttattctgtttttctgaagaaccctactgacacaaatgttgagcatcttttcatgtgcttattggcttaataacttgtacatcttctttggggaaatgtctattcaagttctttgcccattttgtaactgaactattaatatttgtctttacattgttgagttgtaaaagttccttatatattctagatactagagccttatcagatatatttctgcaactattttctcctaatatataggttgtgtttttattttctttttctttttttttttattgagacagtctcactctgtcacccaggctggagtgcagtggcatgatcttggctcactgcagactcgacctgccaggctcaagcaattctcccacttcagcctcctgagtagctgaggttataggcacttgccatcgcacccagctaatttttgtattttttagtagagccgaggtttcgccatgttgcctaggttggtcttgaactccctgcctcaaagcgatctgtcagcctcagtctccctaagtgctggaagtacaggtgtgagccacagtgcccggccatctattttcaatagtgttttttgatgtacacaggtttggaattttgataatgttcaattcatccatttttttttttttttttttggttctttctactggaccaccactcttgagccctctaatccaacctccacgcggcagccagagggagctctctaaatgtaattactctttccctgctccacctgctcaaaacagtgtcacatttgtgatttaaaacagtatttctcaaacctaatttgcaaacaaagcaggtggaactcttcttgtatgcacagcatctgatttggttggtctggcatgggtctgggagtgagcacacctaccaagcggctgctggggtaacttgcgttttccactgatgatttcagcaatgtttccggtcccacatgctcctccagaaccttgtactcccccatgaaaaggtggagtccatttccccttcctttatttatttttttgagacgaagtttcactcttgttgcccaggctggagcgcaatggcgtgatctcagctcaccgcaacctccgcctcctgggttcaagcaatgcttctacctcagcctcccgagtagctgggattacaggtatgtgccaccacgcccagctaattttgtatttttagtagagacggggtttctccatgtcggccaggctggtctcaaactcccgacctcaggtgatccgcccgcctcagcctcccaaagtgctgggattacaggcgggagccaccgcgcccggctatttccccttcctttgaacctgatcaggacttgacgatggcatcaacatggtgagagtgaccctgcatggcttatgaggctgggttacacaaggcgatgttgcttctgactggctccctctcaggatacatgcccttggaacccatcctctaagctccttgggagcccaacttagcccatgtggagacaagacagggagagaaacagaggcacccccagccctcagccagcatcaaccgccagacaggagagcaaatgcgccaacaatgattccagctgaagcctcagacagcgtggagcagagatgagggatccctgcagattgcagatgcgtgagcaaaatgcatgctgtcactgttttgaaacaacaatgtctgggggctgtttgttatgcagcaatagacagctgtaacaatgctgttactgctgtattccatgaatgactgcactttgagtagcagggggctagatcactagataagccccatggcttctgtgtatgctatttttctacttttatatccttttcattcactttttttttttttttttttgagacagagtctcactctgttgcccaggtgggagtgcagtggtgcaatcttggcggactgcaacctccacttcccgggttcaagcaattattgtgcctcagcctcctgagtagctgcgactatagatgcacccccatgcctggctagtttccgtatttttagtagagacggggttttgccatgttggccaggctgatctcagactcctgacctcaggtgatccacccaccttggcctcccaaagtgctgggattacaggcgtgaaccactgcacccagcctcattcactttctttacttggctcatttttccttgttgcctcaattctcctctaagatcactttcctgacatttcagcctgggcctgttgccttctctgggtcccctccgcctcctgtgcctcccccatctcagccttgatccctcagattatacttcctctgtccccaccctgaccatcttggctgtccctggatagggatgggtatcttctcccactggtctgggagatctggaaggacaggcctggaaaagacttggtcactgctggaaggagctcagttagtgtggtgctgaggacagtacgggtgaggctggccccttcacccaaactcccactctcttccatagatttcacctctgtggcccaggccataggattagggcaactccccttaaacatcgagtccatcctccaagctgtccttttttttttttttttttttttttttgagacagagtctcgctctgttgcccaggctggagtgcagtggcgcgatctcggctcactgcaagctccacctccagggttcactccattctcctgcctcagcctcccgagtagctgggactacaggagcctgccaccacacccggctaattttttgtatttttagttgagacggggtttcaccgtgttagtcaggatggtctcgatctcctgacctcgtgatccgcccgcctcggcctcccaaagtgctgggattacaggcgtgagccatcgcgcccggcctcatgctgttcttgaatagtgagcacctgttacaagtcgccccaccagcctctcacttgtacccccctcatctctttctccccaagagacagaggaccctggcacttgtgaagcatgacccagaccctggggccatggcatccaacatcctcattccccatgacccctactgtctagatgtagctgccaagagacccccagactccccgggcctctgtctagagtgccaagacagagagagaatgccctgccgcttgcatgctttgtggggtgtccttcccccttccctggctgctaggcgtgacttcaacgttctccccaacccccaaacagcagcactgacaccagctgcagacctggctcaggttagctaatgaggaccaggctggggatggagcctgaacccctaaaccccagtcctgtaccccaccctaatcctggggtctccactggacaaaacgaagcagcttggtttttcgttgttattgtttttgagatagagtatctctctgtctcccaggttggagtgcagtggcgtgatctcagctcactgcagcctccgcctcccgggttcaagtgattcttgtgccgcagcctccccagtagctgggattacaggcgcgtgccaccacacccagctaatttttgtatttttagtagagacagggtttcaccatgttggccaggctggtctgaaactcctgacctcaagtgatttcccagcctcggcctcccaaagtggaagcggcttatttttaaggagaaaactcccgtggaaaggaatcagcacctcctctgtcaacatttcacttctctgaaaagactctcacttccaacagaaagtgctttgtaacacaacaatgaggctgggcgaggtggctcatgcctgtaatcccagcactttgggaagctgaggcgagtggatcacgaggtcagaagttcgagaccagcctgaccaatatggtgaaaccccgtctctactaaaaatacaaaaattagttccgtgtggtggcgtgagcctgtaatcccagctactcaggaggctgaggcaggagaatggcttgaacccaggagatggaggttgcaatgagccgagatcacgccactgcactccagcctgggcaacagagtgagactccgtctcaaaaaaaaaaaaaaaagaatgagaacatatggacacagggaggggaacaatacacacaaacaaaatttagaaacaggtgaaaataattttagtaatatttttactaatactgatatgctcaaaatattattatttcaataagtaatctaaaaattattgagatgtcttatgttcttttcatcatactaagcctttaatatttggtgtgtattttacactcacagcacatctcaatttgcagtccccatgtttcaagcactaaataaccatgtgtgtccggtggctaccatactggacagcgttgatctgaaatcgcatctgtatgcatcaccagcatatttgcagagatccccatctcagcagcacacctgaggctcatctgcgaaagcacctgcaacttctctacaacctcccacatcacctccaaacacatcctcatgtcatctgcaaacacacccatagctcacaggccaatgcctaaatatcattgcaggcaccttcagagaaagcacttactaaaggggtatacttgattccacatctgctttgacctgcaaatctcccttctcctttacatacatttgcatctcatttgtatgtcaatctaaatccactggcagagcctcagatcatcatctcaaagtcaggtggatgtggggctgggcaggcctccaggtgttcctcctcctgcttcctctggggctcttgatcctcctcctcttccttgctgctctcctcctcctcctccaatatggtgaccagttcctcccgcagcgcccccatctccagccccaggctgcacagctgtcccagcagctggacatccactcggcgcaggttcccctgccagtaggaaggggacgtcacagggatgccaccccagagagcaaggggtctctccaggacctgggtgagagcaggtcccaactcatgtcctggccacagcgcctgggcagggtcctcactgtgcccatggaccctaactgccttcctgcttctcagagtgtctcttgatctctaactcttctctttgtctctccatttcattgtccctgacttctctctctctgtctcctccctctcttatctatatctgtccctgtttccctttgtctctgtccccatttattttttgtctttccatgcccctgtctctctgtctttatgtgttgccatttctctgcccctgcctttggctctctttctctcgcttgccctctctctgccctccccaactttctcaaattcagtctgtctctccatctctgttcctgctctccgtctctgcttcccacctctgtccctctcttttgggatctccctgtccccacctctgttcccgtccctcactctatgtctgtctctcggtgtctgtacatgcctctcatgtctctgcttctatctctcagattctgtttttcgatctctggccttctctatttttgttcatttccattcattctcatttcctctctttctctttcccttccaaacccctcactcaccagctcctccctgatccacagcagactatcgcaggcacctccagtgtctgcccctgcagtcctgagggtctgaccagggatttccactggggagacctccctcagggcctgggggggtgggcccagccccggaggcaccagtccagcctgattcagctgcctccacagttccatcgtctctgagctatggctgcaaggagcaggaagtagcaaggtccagggtggcctggtcccctggggagctgtgtgcgtggtggagagtaaagggcagagggagtgggatgggggttcctgggaaaggtatcccaaagtccactcttcagagagaatcagctggccttgtgcttttctttttccttctgaagtctaacctcaactctgctcacagggttcaaacatagcctcttgcagaggtctaactccacccttccctgcctgtctcaggcctgacccctcaggggcgctcagtgtctgtagatgcctggcaccctctgtccttccacctgccccccaccaccacttctccagcctctcctcagcctccatttgacctctggcttgcccatagcttggtccttgcttgtcctcttggcacgggtcatcctagggctttcccaccagtgtgcctttgggggcaggaatggctcccaggggcaccaagacagcaatcccttagctggagtgcctgtgtccaggctgctggcctagggccaagcagccaattctgctgaccctggacttgcctatgggtatattatccctgttgagggtgagggcttctgctgtggaaaagtctgggaagcactgcaggcctctctcggccttggacccttccttcagacccaaggtgcatatatatacatatatataatggtagatcacgaggtcaggagatcaagaccatcctggccacatggtgaaaccccgtctctagtaaaacacaaaaaattagccgggcatgctgccgcgtgcctgtagtcccagctactcgggaggctgaggcaggagaatggtgtgaacccaggaggtggaggttgcagtaagccaagatcacgccactgcattccagcctggcgacagagcaagactccatcttaaaataaacaaatgaacaatatatatatatatgtattttgttttttgagacagagtctcgctctgtcatccaggctggactgcagtggtgcaatcttggctcactgcaacctccgcctcccgggttcaagcgattcccctgcctcagcctcctgaacagctggggttacaggtgcacgccaccacacctggcgaatttttgtatgtttagtggagacggggtttcaccatgttagccaggctggtctcaaacccctgacctcaggtgatctgcccacctcggcctcccaaagtgctgggattacaggcgtgagccaacgcgcccagccccaagtcccttttaccatagaaagtaacatagtcacagtgcccagggattcacaggtatggggagagggttcgttattcagctgccacacccaccttcctaaacctgctgcccttccagtttcctcacgtgcacagccacgcccgtctgcttttagtttctcaatctgttggcttaaccttcaaaacaggcccaggatttgagcacttctcaccattccctctgccccatccccattcatctcttgcctagactgctacagcagcctcttttactggtcccctgcatccacccttgccctctaaggcaagggtccccagtccctgggccaaggaccagtaccagcccctcgcctgctaggaactgggccgcacagcaagagatgagcagcgggtaagtgagcattaccgcctgagctccgcctcctgtcacatcagcagtggcattagattctcataggaggcaaaccctattgtgaactgtgcgtgcgggggatctaggttgcctgctccttatgagaatctaatgcctgatgatctcaggtggaacagtttcatcccaaaaccatccccaccccacccccgacccccagtctatggaaaaattgtcctccacgaaaccagtccctggtaacaaaacggttagggaccgctgctctaaggtacattctccacctggcagaaataatctttacaaaatgtaaatccgattttgacactcccttcttcccactgtgaatagaataaaaccctaccaggcctgcaccgtcagcccctgcccacctctcaacccagtctcctatctctgtctgcaagctggttcccacctcaaggcctctctgctctagaggctacctctccctgcagcgcttttcccctagatctttgaatggctctttccttatcattcacttctacttcaatgtcacctcttcagagaggcctttgctgatggccctacacccagtcacttttttttatctgcttctcatcaaaattgccttgctgattcctttgtttcttattcatcctctcccacatccatcctctcccagcccagaatgttgacttcctgagagagggactgggtctgtcctgctcaccatggtaacctcggcatctagaacagtgcctgccatcacgtggtaggtgctcagtaaatattcttggaactaatgaatgaataattctatccacaagacttcacaatggctcttcatgctgcgatctagctttcaactccaaactggtcttgagatctcacctcagtctctaaccttgacatctaacctcttcacccactctcttacctgaccctaatttttaaaaatgacgtggtcagcttttcagccccctcattccctgtttttaggaggtagtgagtggaagctggaagaataagaaagcttggggagactgcaattgcagtcaggaaagaaaggtactctgccgggaagaacaccccatcttctcctagggaaagattgtggagtcctggggtttgttttgtttttcaattttttgttttaagagacagcgtctcgctctgtcacccaggctggagtgcagtggcgcaatcacagctcactgcaacttcgacctccccggctcaagtgatccccccgcctcagcctcgtgagtagctgggaccacaggcgtgcaccaccacgcccggctaacattttattttttgtggatataaggttgccctatttctttgtggagataaaggctcccctatgttgcccaggctggtctcgaactcctggcttcaagcgatgctttcgcctcggcctccacaaagtgctgggttcacaggtgcgtgagcccgacctgtgtctcgttttgaagctcagggagagggcgctgtgagcaatccctaaaccctttaagagtaaaaagtgcgtgcacctttaagaggacggttagaaaacgcggggcgtggccacaggagaataagttcgcgctgaaccaggagcgtgggataagaccggccccttccggttacgaaaccttagcaagatggcggctccctgggcgtccctgcgcctggtcgcccccatgtggaatgggcgtatcaggggcatccatcgcctgggtgcggcagtggccccagagggcaatcagaagaagaaaaggacaatactccagttcctgaccaactatttctacgatgtggaggctctgagggattacttgctccaaagggagatgtacaaggtgcatgagaaaaatcggtttcgagacaaggagtggatcaggccagataagtatggccatttctctcaggagttctggaatttctgtgaagtgcctgtcgaagctgtggatgccggtgactgtgacatcaactacgagggcctggataacctccgaacctccgcaggctggacatctcggacctccctgccgtgtccaaccctggcctcactcagatattggtggaggagatgctgcccaattgcgaggttgtgggagtcgactgggctgagggcctgaagtcagggccggaggagcagcctcgggacacagccagccctgtccctgcctagcctttagccctgtccccactcacgtggcttctcagcgggctgcatggaatgtctggtagctcaccacacttctggcttccatttgtcttcactcaacgtcagggtgggggagtggtgctggccaatcacaggagagagcgtgagttcccagtatttattcctggctgcccttggctaaaggtcacagctcctgtcaccctgtcaggcagccctttccatgcccctgttcaggcctggggaggtaaaggctcaggctgttagtagccgcagagagccacactcaccttgtcaggagactcttctcaaactgtccttatgtgagtgcactgccatttcttgcagggaccctgactgacacaggggctactactgacactttacagggatagtccccactacccacatgcatgcacccataa

SEQ ID NO: 735344 - DNA, 1615 bp, Homo sapiens
gtaagtgaccggagttcctagagccccaaatttgaagtccgctctacagcctccgcattcagggcctctgttggcggccacgagagcagaaagccgtgaggcagcaggctaagcctggcaagccccgtactgggagtgcaaacctgtggctagtgggggccaggaaggatctgtgagggtcgcaggcggaggagacgctttagcgagcgagaggaggcagggacttggctgagagtatccaatggggatgagggagtggctgccgaagagcgacgcgactaaccaatcagagggagggatgacacaaggagctaatggacaggcaagggtggggcctgtaggataagagagcttggaagggattgttcgaggatgtgggatttggtcttagaagaccgaagatgaattccctgcgcctggtcgcccccatgtggaatgggcgtatcaggggcatccatcgcctgggtgcggcagtggccccagagggcaatcagaagaagaaaaggacaatactccagttcctgaccaactatttctacgatgtggaggctctgagggattacttgctccaaagggagatgtacaaggtgcatgagaaaaatcgatcttacacctggctggagaagcaacatggtccatacggcgcaggtgcctttttcatcctgaagcagggaggcgcagtcaagtttcgagacaaggagtggatcaggccagataagtatggccatttctctcaggagttctggaatttctgtgaagtgcctgtcgaagctgtggatgccggtgactgtgacatcaactacgagggcctggataacctcctccgcctgaaggagctccagtccttgtcgctgcagcgctgctgccacgtggacgactggtgtctcagccgcctctacccactggccgactcgttgcaggagctctcgctggccggttgcccccgcatctccgaacggggcctcgcctgcctccaccacctccagtgagacctcagctcaggctgggccacatgcccaggcacctctcccacctaacccagatgcaggagaggaagtggggaggggcaatgttaggcagttctcatatccccctgcatccatcacaaacctagagtatttatggtagatgagcagtcacagtgagtctctggaagaattaaatgactcctggttttcttcctttttgttttagtcaaaactgtgtgatatcgacgctgttgcagaacagcaggagctggagttgcatatttgcaattaacacagtgggcttcatgtgcctggacagctataaagattttattttaggaagctaaggttgaaatttggggccagtacctccctatacacacacacatgcacgcatgcacgcacgcacacacacacacgcacgcacacacactgtcctgtaaggttgaaatttggggccagtacctccctacacacacacacacacacacacacacacacacacgcacgctgtcctgtacctccctacacacacgcacacgctgtctgtacctccctacacacacacacacacacacacacgctgtccttatactggcttatctccctatacacacacacacacacacacacacgctgtcctgtac

SEQ ID NO: 735345 - DNA, 2303 bp, Homo sapiens
gtaagtgaccggagttcctagagccccaaatttgaagtccgctctacagcctccgcattcagggcctctgttggcggccacgagagcagaaagccgtgaggcagcaggctaagcctggcaagccccgtactgggagtgcaaacctgtggctagtgggggccaggaaggatctgtgagggtcgcaggcggaggagacgctttagcgagcgagaggaggcagggacttggctgagagtatccaatggggatgagggagtggctgccgaagagcgacgcgactaaccaatcagagggagggatgacacaaggagctaatggacaggcaagggtggggcctgtaggataagagagcttggaagggattgttcgaggatgtgggatttggtcttagaagaccgaagatgaattccctgcgcctggtcgcccccatgtggaatgggcgtatcaggggcatccatcgcctgggtgcggcagtggccccagagggcaatcagaagaagaaaaggacaatactccagttcctgaccaactatttctacgatgtggaggctctgagggattacttgctccaaagggagatgtacaaggtgcatgagaaaaatcgatcttacacctggctggagaagcaacatggtccatacggcgcaggtgcctttttcatcctgaagcagggaggcgcagtcaagtttcgagacaaggagtggatcaggccagataagtatggccatttctctcaggagttctggaatttctgtgaagtgcctgtcgaagctgtggatgccggtgactgtgacatcaactacgagggcctggataacctcctccgcctgaaggagctccagtccttgtcgctgcagcgctgctgccacgtggacgactggtgtctcagccgcctctacccactggccgactcgttgcaggagctctcgctggccggttgcccccgcatctccgaacggggcctcgcctgcctccaccacctccagaacctccgcaggctggacatctcggacctccctgccgtgtccaaccctggcctcactcagatattggtggaggagatgctgcccaattgcgaggttgtgggagtcgactgggctgagggcctgaagtcagggccggaggagcagcctcgggacacagccagccctgtccctgcctagcctttagccctgtccccactcacgtggcttctcagcgggctgcatggaatgtctggtagctcaccacacttctggcttccatttgtcttcactcaacgtcagggtgggggagtggtgctggccaatcacaggagagagcgtgagttcccagtatttattcctggctgcccttggctaaaggtcacagctcctgtcaccctgtcaggcagccctttccatgcccctgttcaggcctggggaggtaaaggctcaggctgttagtagccgcagagagccacactcaccttgtcaggagactcttctcaaactgtccttatgtgagtgcactgccatttcttgcagggaccctgactgacacaggggctactactgacactttacagggatggttctcccccgtgcagggccgctgtgcccactgcaggacatgcagcatccttcgccccactccactcactaaaggccagcgcaccccaggccccatagtattgctggttatggatttattgactttatgttccaaattcagctttttcagttggctgttttttgaaaggggataagctttgtcagtagagggcaccgaacaggcattataggaggaaaggcgcctccttcgtggttcttgttggttgtgcttctgcctctggacgccgcagtgcatgtggcttccccagcacccagctcctgaagcaccaggcggtcagcagctgcccttggcaccctccagccctcagaagttgcgtaggagacacagcgcctccactgaggcacctctctgggaataacgttccccagcaccccaaatggatttccagtcaattcagaagcattttaccagtgaagccctcattattccagttcactgttaaagccagtaattctctatattaaactttccctgttcggtttatactccggagtataaaccgaacaggggtggccaagctgctgtgggccgccgccgtgcagaaccgctggaactcacgcttggggcgacggctacagttggattttgcccctgcaggcaggttcggtgtcgatactggcgttgatagcgctgctgccgtttgacgtggcgaatatgggcttgtttctcggcctgatcgccgtgttgtcgtagttcgcagccacccagga

SEQ ID NO: 735346 - DNA, 2260 bp, Homo sapiens
gtaagtgaccggagttcctagagccccaaatttgaagtccgctctacagcctccgcattcagggcctctgttggcggccacgagagcagaaagccgtgaggcagcaggctaagcctggcaagccccgtactgggagtgcaaacctgtggctagtgggggccaggaaggatctgtgagggtcgcaggcggaggagacgctttagcgagcgagaggaggcagggacttggctgagagtatccaatggggatgagggagtggctgccgaagagcgacgcgactaaccaatcagagggagggatgacacaaggagctaatggacaggcaagggtggggcctgtaggataagagagcttggaagggattgttcgaggatgtgggatttggtcttagaagaccgaagatgaattccctgcgcctggtcgcccccatgtggaatgggcgtatcaggggcatccatcgcctgggtgcggcagtggccccagagggcaatcagaagaagaaaaggacaatactccagttcctgaccaactatttctacgatgtggaggctctgagggattacttgctccaaagggagatgtacaaggtgcatgagaaaaatcgatcttacacctggctggagaagcaacatggtccatacggcgcaggtgcctttttcatcctgaagcagggaggcgcagtcaagtttcgagacaaggagtggatcaggccagataagtatggccatttctctcaggagttctggaatttctgtgaagtgcctgtcgaagctgtggatgccggtgactgtgacatcaactacgagggcctggataacctcctccgcctgaaggagctccagtccttgtcgctgcagcgctgctgccacgtggacgactggtgtctcagccgcctctacccactggccgactcgttgcaggagctctcgctggccggttgcccccgcatctccgaacggggcctcgcctgcctccaccacctccagaacctccgcaggctggacatctcggacctccctgccgtgtccaaccctggcctcactcagatattggtggaggagatgctgcccaattgcgaggttgtgggagtcgactgggctgagggcctgaagtcagggccggaggagcagcctcgggacacagccagccctgtccctgcctagcctttagccctgtccccactcacgtggcttctcagcgggctgcatggaatgtctggtagctcaccacacttctggcttccatttgtcttcactcaacgtcagggtgggggagtggtgctggccaatcacaggagagagcgtgagttcccagtatttattcctggctgcccttggctaaaggtcacagctcctgtcaccctgtcaggcagccctttccatgcccctgttcaggcctggggaggtaaaggctcaggctgttagtagccgcagagagccacactcaccttgtcaggagactcttctcaaactgtccttatgtgagtgcactgccatttcttgcagggaccctgactgacacaggggctactactgacactttacagggatggttctcccccgtgcagggccgctgtgcccactgcaggacatgcagcatccttcgccccactccactcactaaaggccagcgcaccccaggccccatagtattgctggttatggatttattgactttatgttccaaattcagctttttcagttggctgttttttgaaaggggataagctttgtcagtagagggcaccgaacaggcattataggaggaaaggcgcctccttcgtggttcttgttggttgtgcttctgcctctggacgccgcagtgcatgtggcttccccagcacccagctcctgaagcaccaggcggtcagcagctgcccttggcaccctccagccctcagaagttgcgtaggagacacagcgcctccactgaggcacctctctgggaataacgttccccagcaccccaaatggatttccagtcaattcagaagcattttaccagtgaagccctcattattccagttcactgttaaagccagtaattctctatattaaactttccctgttcggtttatactccggagtataaaccgaacaggctatcagcacccctactagttctaaccacatgactcctcccccttatactaatagctagccaatcccacctatcaaaagaaaccacaacccgaaaaaaactatatattaccatactaatcctactacaactattcctaattataaccttcaccgccacc

SEQ ID NO: 735347 - DNA, 2139 bp, Homo sapiens
gtaagtgaccggagttcctagagccccaaatttgaagtccgctctacagcctccgcattcagggcctctgttggcggccacgagagcagaaagccgtgaggcagcaggctaagcctggcaagccccgtactgggagtgcaaacctgtggctagtgggggccaggaaggatctgtgagggtcgcaggcggaggagacgctttagcgagcgagaggaggcagggacttggctgagagtatccaatggggatgagggagtggctgccgaagagcgacgcgactaaccaatcagagggagggatgacacaaggagctaatggacaggcaagggtggggcctgtaggataagagagcttggaagggattgttcgaggatgtgggatttggtcttagaagaccgaagatgaattccctgcgcctggtcgcccccatgtggaatgggcgtatcaggggcatccatcgcctgggtgcggcagtggccccagagggcaatcagaagaagaaaaggacaatactccagttcctgaccaactatttctacgatgtggaggctctgagggattacttgctccaaagggagatgtacaaggtgcatgagaaaaatcgatcttacacctggctggagaagcaacatggtccatacggcgcaggtgcctttttcatcctgaagcagggaggcgcagtcaagtttcgagacaaggagtggatcaggccagataagtatggccatttctctcaggagttctggaatttctgtgaagtgcctgtcgaagctgtggatgccggtgactgtgacatcaactacgagggcctggataacctcctccgcctgaaggagctccagtccttgtcgctgcagcgctgctgccacgtggacgactggtgtctcagccgcctctacccactggccgactcgttgcaggagctctcgctggccggttgcccccgcatctccgaacggggcctcgcctgcctccaccacctccagaacctccgcaggctggacatctcggacctccctgccgtgtccaaccctggcctcactcagatattggtggaggagatgctgcccaattgcgaggttgtgggagtcgactgggctgagggcctgaagtcagggccggaggagcagcctcgggacacagccagccctgtccctgcctagcctttagccctgtccccactcacgtggcttctcagcgggctgcatggaatgtctggtagctcaccacacttctggcttccatttgtcttcactcaacgtcagggtgggggagtggtgctggccaatcacaggagagagcgtgagttcccagtatttattcctggctgcccttggctaaaggtcacagctcctgtcaccctgtcaggcagccctttccatgcccctgttcaggcctggggaggtaaaggctcaggctgttagtagccgcagagagccacactcaccttgtcaggagactcttctcaaactgtccttatgtgagtgcactgccatttcttgcagggaccctgactgacacaggggctactactgacactttacagggatggttctcccccgtgcagggccgctgtgcccactgcaggacatgcagcatccttcgccccactccactcactaaaggccagcgcaccccaggccccatagtattgctggttatggatttattgactttatgttccaaattcagctttttcagttggctgttttttgaaaggggataagctttgtcagtagagggcaccgaacaggcattataggaggaaaggcgcctccttcgtggttcttgttggttgtgcttctgcctctggacgccgcagtgcatgtggcttccccagcacccagctcctgaagcaccaggcggtcagcagctgcccttggcaccctccagccctcagaagttgcgtaggagacacagcgcctccactgaggcacctctctgggaataacgttccccagcaccccaaatggatttccagtcaattcagaagcattttaccagtgaagccctcattattccagttcactgttaaagccagtaattctctatattaaactttccctgttcggtttatactccggagtataaaccgaacaggattatattatctgaagctccccttttgggcggaatgtg

SEQ ID NO: 735348 - DNA, 2182 bp, Homo sapiens
gtaagtgaccggagttcctagagccccaaatttgaagtccgctctacagcctccgcattcagggcctctgttggcggccacgagagcagaaagccgtgaggcagcaggctaagcctggcaagccccgtactgggagtgcaaacctgtggctagtgggggccaggaaggatctgtgagggtcgcaggcggaggagacgctttagcgagcgagaggaggcagggacttggctgagagtatccaatggggatgagggagtggctgccgaagagcgacgcgactaaccaatcagagggagggatgacacaaggagctaatggacaggcaagggtggggcctgtaggataagagagcttggaagggattgttcgaggatgtgggatttggtcttagaagaccgaagatgaattccctgcgcctggtcgcccccatgtggaatgggcgtatcaggggcatccatcgcctgggtgcggcagtggccccagagggcaatcagaagaagaaaaggacaatactccagttcctgaccaactatttctacgatgtggaggctctgagggattacttgctccaaagggagatgtacaaggtgcatgagaaaaatcgatcttacacctggctggagaagcaacatggtccatacggcgcaggtgcctttttcatcctgaagcagggaggcgcagtcaagtttcgagacaaggagtggatcaggccagataagtatggccatttctctcaggagttctggaatttctgtgaagtgcctgtcgaagctgtggatgccggtgactgtgacatcaactacgagggcctggataacctcctccgcctgaaggagctccagtccttgtcgctgcagcgctgctgccacgtggacgactggtgtctcagccgcctctacccactggccgactcgttgcaggagctctcgctggccggttgcccccgcatctccgaacggggcctcgcctgcctccaccacctccagaacctccgcaggctggacatctcggacctccctgccgtgtccaaccctggcctcactcagatattggtggaggagatgctgcccaattgcgaggttgtgggagtcgactgggctgagggcctgaagtcagggccggaggagcagcctcgggacacagccagccctgtccctgcctagcctttagccctgtccccactcacgtggcttctcagcgggctgcatggaatgtctggtagctcaccacacttctggcttccatttgtcttcactcaacgtcagggtgggggagtggtgctggccaatcacaggagagagcgtgagttcccagtatttattcctggctgcccttggctaaaggtcacagctcctgtcaccctgtcaggcagccctttccatgcccctgttcaggcctggggaggtaaaggctcaggctgttagtagccgcagagagccacactcaccttgtcaggagactcttctcaaactgtccttatgtgagtgcactgccatttcttgcagggaccctgactgacacaggggctactactgacactttacagggatggttctcccccgtgcagggccgctgtgcccactgcaggacatgcagcatccttcgccccactccactcactaaaggccagcgcaccccaggccccatagtattgctggttatggatttattgactttatgttccaaattcagctttttcagttggctgttttttgaaaggggataagctttgtcagtagagggcaccgaacaggcattataggaggaaaggcgcctccttcgtggttcttgttggttgtgcttctgcctctggacgccgcagtgcatgtggcttccccagcacccagctcctgaagcaccaggcggtcagcagctgcccttggcaccctccagccctcagaagttgcgtaggagacacagcgcctccactgaggcacctctctgggaataacgttccccagcaccccaaatggatttccagtcaattcagaagcattttaccagtgaagccctcattattccagttcactgttaaagccagtaattctctatattaaactttccctgttcggtttatactccggagtataaaccgaacaggcctgccatagaaaatgcaaccacagaaataaaatggattgctttttttccctgtagtgaaaatacatttaaatctatctca

SEQ ID NO: 735349 - DNA, 2284 bp, Homo sapiens
gtaagtgaccggagttcctagagccccaaatttgaagtccgctctacagcctccgcattcagggcctctgttggcggccacgagagcagaaagccgtgaggcagcaggctaagcctggcaagccccgtactgggagtgcaaacctgtggctagtgggggccaggaaggatctgtgagggtcgcaggcggaggagacgctttagcgagcgagaggaggcagggacttggctgagagtatccaatggggatgagggagtggctgccgaagagcgacgcgactaaccaatcagagggagggatgacacaaggagctaatggacaggcaagggtggggcctgtaggataagagagcttggaagggattgttcgaggatgtgggatttggtcttagaagaccgaagatgaattccctgcgcctggtcgcccccatgtggaatgggcgtatcaggggcatccatcgcctgggtgcggcagtggccccagagggcaatcagaagaagaaaaggacaatactccagttcctgaccaactatttctacgatgtggaggctctgagggattacttgctccaaagggagatgtacaaggtgcatgagaaaaatcgatcttacacctggctggagaagcaacatggtccatacggcgcaggtgcctttttcatcctgaagcagggaggcgcagtcaagtttcgagacaaggagtggatcaggccagataagtatggccatttctctcaggagttctggaatttctgtgaagtgcctgtcgaagctgtggatgccggtgactgtgacatcaactacgagggcctggataacctcctccgcctgaaggagctccagtccttgtcgctgcagcgctgctgccacgtggacgactggtgtctcagccgcctctacccactggccgactcgttgcaggagctctcgctggccggttgcccccgcatctccgaacggggcctcgcctgcctccaccacctccagaacctccgcaggctggacatctcggacctccctgccgtgtccaaccctggcctcactcagatattggtggaggagatgctgcccaattgcgaggttgtgggagtcgactgggctgagggcctgaagtcagggccggaggagcagcctcgggacacagccagccctgtccctgcctagcctttagccctgtccccactcacgtggcttctcagcgggctgcatggaatgtctggtagctcaccacacttctggcttccatttgtcttcactcaacgtcagggtgggggagtggtgctggccaatcacaggagagagcgtgagttcccagtatttattcctggctgcccttggctaaaggtcacagctcctgtcaccctgtcaggcagccctttccatgcccctgttcaggcctggggaggtaaaggctcaggctgttagtagccgcagagagccacactcaccttgtcaggagactcttctcaaactgtccttatgtgagtgcactgccatttcttgcagggaccctgactgacacaggggctactactgacactttacagggatggttctcccccgtgcagggccgctgtgcccactgcaggacatgcagcatccttcgccccactccactcactaaaggccagcgcaccccaggccccatagtattgctggttatggatttattgactttatgttccaaattcagctttttcagttggctgttttttgaaaggggataagctttgtcagtagagggcaccgaacaggcattataggaggaaaggcgcctccttcgtggttcttgttggttgtgcttctgcctctggacgccgcagtgcatgtggcttccccagcacccagctcctgaagcaccaggcggtcagcagctgcccttggcaccctccagccctcagaagttgcgtaggagacacagcgcctccactgaggcacctctctgggaataacgttccccagcaccccaaatggatttccagtcaattcagaagcattttaccagtgaagccctcattattccagttcactgttaaagccagtaattctctatattaaactttccctgttcggtttatggagtataaaccgaacagggtcttgggaagggacagtgtctaagtgtctgggtgccatccagagcatttggcaggggcagctgcaggatgagtgtgttcccaggggagtgagagcagcagctatatggcacttgtttgctactgccctctttttttctttttgccaaacctgaggtgactagtgtcacaggtggagcccatctcaca

SEQ ID NO: 735350 - DNA, 2176 bp, Homo sapiens
gtaagtgaccggagttcctagagccccaaatttgaagtccgctctacagcctccgcattcagggcctctgttggcggccacgagagcagaaagccgtgaggcagcaggctaagcctggcaagccccgtactgggagtgcaaacctgtggctagtgggggccaggaaggatctgtgagggtcgcaggcggaggagacgctttagcgagcgagaggaggcagggacttggctgagagtatccaatggggatgagggagtggctgccgaagagcgacgcgactaaccaatcagagggagggatgacacaaggagctaatggacaggcaagggtggggcctgtaggataagagagcttggaagggattgttcgaggatgtgggatttggtcttagaagaccgaagatgaattccctgcgcctggtcgcccccatgtggaatgggcgtatcaggggcatccatcgcctgggtgcggcagtggccccagagggcaatcagaagaagaaaaggacaatactccagttcctgaccaactatttctacgatgtggaggctctgagggattacttgctccaaagggagatgtacaaggtgcatgagaaaaatcgatcttacacctggctggagaagcaacatggtccatacggcgcaggtgcctttttcatcctgaagcagggaggcgcagtcaagtttcgagacaaggagtggatcaggccagataagtatggccatttctctcaggagttctggaatttctgtgaagtgcctgtcgaagctgtggatgccggtgactgtgacatcaactacgagggcctggataacctcctccgcctgaaggagctccagtccttgtcgctgcagcgctgctgccacgtggacgactggtgtctcagccgcctctacccactggccgactcgttgcaggagctctcgctggccggttgcccccgcatctccgaacggggcctcgcctgcctccaccacctccagaacctccgcaggctggacatctcggacctccctgccgtgtccaaccctggcctcactcagatattggtggaggagatgctgcccaattgcgaggttgtgggagtcgactgggctgagggcctgaagtcagggccggaggagcagcctcgggacacagccagccctgtccctgcctagcctttagccctgtccccactcacgtggcttctcagcgggctgcatggaatgtctggtagctcaccacacttctggcttccatttgtcttcactcaacgtcagggtgggggagtggtgctggccaatcacaggagagagcgtgagttcccagtatttattcctggctgcccttggctaaaggtcacagctcctgtcaccctgtcaggcagccctttccatgcccctgttcaggcctggggaggtaaaggctcaggctgttagtagccgcagagagccacactcaccttgtcaggagactcttctcaaactgtccttatgtgagtgcactgccatttcttgcagggaccctgactgacacaggggctactactgacactttacagggatggttctcccccgtgcagggccgctgtgcccactgcaggacatgcagcatccttcgccccactccactcactaaaggccagcgcaccccaggccccatagtattgctggttatggatttattgactttatgttccaaattcagctttttcagttggctgttttttgaaaggggataagctttgtcagtagagggcaccgaacaggcattataggaggaaaggcgcctccttcgtggttcttgttggcctccactgaggcacctctctgggaataacgttccccagcaccccaaatggatttccagtcaattcagaagcattttaccagtgaagccctcattattccagttcactgttaaagccagtaattctctatattaaactttccctgttcggtttatactccggagtataaaccgaacaggggtggccaagctgctgtgggccgccgccgtgcagaaccgctggaactcacgcttggggcgacggctacagttggattttgcccctgcaggcaggttcggtgtcgatactggcgttgatagcgctgctgccgtttgacgtggcgaatatgggcttgtttctcggcctgatcgccgtgttgtcgtagttcgcagccacccagga

SEQ ID NO: 735351 - DNA, 2133 bp, Homo sapiens
gtaagtgaccggagttcctagagccccaaatttgaagtccgctctacagcctccgcattcagggcctctgttggcggccacgagagcagaaagccgtgaggcagcaggctaagcctggcaagccccgtactgggagtgcaaacctgtggctagtgggggccaggaaggatctgtgagggtcgcaggcggaggagacgctttagcgagcgagaggaggcagggacttggctgagagtatccaatggggatgagggagtggctgccgaagagcgacgcgactaaccaatcagagggagggatgacacaaggagctaatggacaggcaagggtggggcctgtaggataagagagcttggaagggattgttcgaggatgtgggatttggtcttagaagaccgaagatgaattccctgcgcctggtcgcccccatgtggaatgggcgtatcaggggcatccatcgcctgggtgcggcagtggccccagagggcaatcagaagaagaaaaggacaatactccagttcctgaccaactatttctacgatgtggaggctctgagggattacttgctccaaagggagatgtacaaggtgcatgagaaaaatcgatcttacacctggctggagaagcaacatggtccatacggcgcaggtgcctttttcatcctgaagcagggaggcgcagtcaagtttcgagacaaggagtggatcaggccagataagtatggccatttctctcaggagttctggaatttctgtgaagtgcctgtcgaagctgtggatgccggtgactgtgacatcaactacgagggcctggataacctcctccgcctgaaggagctccagtccttgtcgctgcagcgctgctgccacgtggacgactggtgtctcagccgcctctacccactggccgactcgttgcaggagctctcgctggccggttgcccccgcatctccgaacggggcctcgcctgcctccaccacctccagaacctccgcaggctggacatctcggacctccctgccgtgtccaaccctggcctcactcagatattggtggaggagatgctgcccaattgcgaggttgtgggagtcgactgggctgagggcctgaagtcagggccggaggagcagcctcgggacacagccagccctgtccctgcctagcctttagccctgtccccactcacgtggcttctcagcgggctgcatggaatgtctggtagctcaccacacttctggcttccatttgtcttcactcaacgtcagggtgggggagtggtgctggccaatcacaggagagagcgtgagttcccagtatttattcctggctgcccttggctaaaggtcacagctcctgtcaccctgtcaggcagccctttccatgcccctgttcaggcctggggaggtaaaggctcaggctgttagtagccgcagagagccacactcaccttgtcaggagactcttctcaaactgtccttatgtgagtgcactgccatttcttgcagggaccctgactgacacaggggctactactgacactttacagggatggttctcccccgtgcagggccgctgtgcccactgcaggacatgcagcatccttcgccccactccactcactaaaggccagcgcaccccaggccccatagtattgctggttatggatttattgactttatgttccaaattcagctttttcagttggctgttttttgaaaggggataagctttgtcagtagagggcaccgaacaggcattataggaggaaaggcgcctccttcgtggttcttgttggcctccactgaggcacctctctgggaataacgttccccagcaccccaaatggatttccagtcaattcagaagcattttaccagtgaagccctcattattccagttcactgttaaagccagtaattctctatattaaactttccctgttcggtttatactccggagtataaaccgaacaggctatcagcacccctactagttctaaccacatgactcctcccccttatactaatagctagccaatcccacctatcaaaagaaaccacaacccgaaaaaaactatatattaccatactaatcctactacaactattcctaattataaccttcaccgccacc

SEQ ID NO: 735352 - DNA, 2012 bp, Homo sapiens
gtaagtgaccggagttcctagagccccaaatttgaagtccgctctacagcctccgcattcagggcctctgttggcggccacgagagcagaaagccgtgaggcagcaggctaagcctggcaagccccgtactgggagtgcaaacctgtggctagtgggggccaggaaggatctgtgagggtcgcaggcggaggagacgctttagcgagcgagaggaggcagggacttggctgagagtatccaatggggatgagggagtggctgccgaagagcgacgcgactaaccaatcagagggagggatgacacaaggagctaatggacaggcaagggtggggcctgtaggataagagagcttggaagggattgttcgaggatgtgggatttggtcttagaagaccgaagatgaattccctgcgcctggtcgcccccatgtggaatgggcgtatcaggggcatccatcgcctgggtgcggcagtggccccagagggcaatcagaagaagaaaaggacaatactccagttcctgaccaactatttctacgatgtggaggctctgagggattacttgctccaaagggagatgtacaaggtgcatgagaaaaatcgatcttacacctggctggagaagcaacatggtccatacggcgcaggtgcctttttcatcctgaagcagggaggcgcagtcaagtttcgagacaaggagtggatcaggccagataagtatggccatttctctcaggagttctggaatttctgtgaagtgcctgtcgaagctgtggatgccggtgactgtgacatcaactacgagggcctggataacctcctccgcctgaaggagctccagtccttgtcgctgcagcgctgctgccacgtggacgactggtgtctcagccgcctctacccactggccgactcgttgcaggagctctcgctggccggttgcccccgcatctccgaacggggcctcgcctgcctccaccacctccagaacctccgcaggctggacatctcggacctccctgccgtgtccaaccctggcctcactcagatattggtggaggagatgctgcccaattgcgaggttgtgggagtcgactgggctgagggcctgaagtcagggccggaggagcagcctcgggacacagccagccctgtccctgcctagcctttagccctgtccccactcacgtggcttctcagcgggctgcatggaatgtctggtagctcaccacacttctggcttccatttgtcttcactcaacgtcagggtgggggagtggtgctggccaatcacaggagagagcgtgagttcccagtatttattcctggctgcccttggctaaaggtcacagctcctgtcaccctgtcaggcagccctttccatgcccctgttcaggcctggggaggtaaaggctcaggctgttagtagccgcagagagccacactcaccttgtcaggagactcttctcaaactgtccttatgtgagtgcactgccatttcttgcagggaccctgactgacacaggggctactactgacactttacagggatggttctcccccgtgcagggccgctgtgcccactgcaggacatgcagcatccttcgccccactccactcactaaaggccagcgcaccccaggccccatagtattgctggttatggatttattgactttatgttccaaattcagctttttcagttggctgttttttgaaaggggataagctttgtcagtagagggcaccgaacaggcattataggaggaaaggcgcctccttcgtggttcttgttggcctccactgaggcacctctctgggaataacgttccccagcaccccaaatggatttccagtcaattcagaagcattttaccagtgaagccctcattattccagttcactgttaaagccagtaattctctatattaaactttccctgttcggtttatactccggagtataaaccgaacaggattatattatctgaagctccccttttgggcggaatgtg

SEQ ID NO: 735353 - DNA, 2055 bp, Homo sapiens
gtaagtgaccggagttcctagagccccaaatttgaagtccgctctacagcctccgcattcagggcctctgttggcggccacgagagcagaaagccgtgaggcagcaggctaagcctggcaagccccgtactgggagtgcaaacctgtggctagtgggggccaggaaggatctgtgagggtcgcaggcggaggagacgctttagcgagcgagaggaggcagggacttggctgagagtatccaatggggatgagggagtggctgccgaagagcgacgcgactaaccaatcagagggagggatgacacaaggagctaatggacaggcaagggtggggcctgtaggataagagagcttggaagggattgttcgaggatgtgggatttggtcttagaagaccgaagatgaattccctgcgcctggtcgcccccatgtggaatgggcgtatcaggggcatccatcgcctgggtgcggcagtggccccagagggcaatcagaagaagaaaaggacaatactccagttcctgaccaactatttctacgatgtggaggctctgagggattacttgctccaaagggagatgtacaaggtgcatgagaaaaatcgatcttacacctggctggagaagcaacatggtccatacggcgcaggtgcctttttcatcctgaagcagggaggcgcagtcaagtttcgagacaaggagtggatcaggccagataagtatggccatttctctcaggagttctggaatttctgtgaagtgcctgtcgaagctgtggatgccggtgactgtgacatcaactacgagggcctggataacctcctccgcctgaaggagctccagtccttgtcgctgcagcgctgctgccacgtggacgactggtgtctcagccgcctctacccactggccgactcgttgcaggagctctcgctggccggttgcccccgcatctccgaacggggcctcgcctgcctccaccacctccagaacctccgcaggctggacatctcggacctccctgccgtgtccaaccctggcctcactcagatattggtggaggagatgctgcccaattgcgaggttgtgggagtcgactgggctgagggcctgaagtcagggccggaggagcagcctcgggacacagccagccctgtccctgcctagcctttagccctgtccccactcacgtggcttctcagcgggctgcatggaatgtctggtagctcaccacacttctggcttccatttgtcttcactcaacgtcagggtgggggagtggtgctggccaatcacaggagagagcgtgagttcccagtatttattcctggctgcccttggctaaaggtcacagctcctgtcaccctgtcaggcagccctttccatgcccctgttcaggcctggggaggtaaaggctcaggctgttagtagccgcagagagccacactcaccttgtcaggagactcttctcaaactgtccttatgtgagtgcactgccatttcttgcagggaccctgactgacacaggggctactactgacactttacagggatggttctcccccgtgcagggccgctgtgcccactgcaggacatgcagcatccttcgccccactccactcactaaaggccagcgcaccccaggccccatagtattgctggttatggatttattgactttatgttccaaattcagctttttcagttggctgttttttgaaaggggataagctttgtcagtagagggcaccgaacaggcattataggaggaaaggcgcctccttcgtggttcttgttggcctccactgaggcacctctctgggaataacgttccccagcaccccaaatggatttccagtcaattcagaagcattttaccagtgaagccctcattattccagttcactgttaaagccagtaattctctatattaaactttccctgttcggtttatactccggagtataaaccgaacaggcctgccatagaaaatgcaaccacagaaataaaatggattgctttttttccctgtagtgaaaatacatttaaatctatctca

SEQ ID NO: 735354 - DNA, 2157 bp, Homo sapiens
gtaagtgaccggagttcctagagccccaaatttgaagtccgctctacagcctccgcattcagggcctctgttggcggccacgagagcagaaagccgtgaggcagcaggctaagcctggcaagccccgtactgggagtgcaaacctgtggctagtgggggccaggaaggatctgtgagggtcgcaggcggaggagacgctttagcgagcgagaggaggcagggacttggctgagagtatccaatggggatgagggagtggctgccgaagagcgacgcgactaaccaatcagagggagggatgacacaaggagctaatggacaggcaagggtggggcctgtaggataagagagcttggaagggattgttcgaggatgtgggatttggtcttagaagaccgaagatgaattccctgcgcctggtcgcccccatgtggaatgggcgtatcaggggcatccatcgcctgggtgcggcagtggccccagagggcaatcagaagaagaaaaggacaatactccagttcctgaccaactatttctacgatgtggaggctctgagggattacttgctccaaagggagatgtacaaggtgcatgagaaaaatcgatcttacacctggctggagaagcaacatggtccatacggcgcaggtgcctttttcatcctgaagcagggaggcgcagtcaagtttcgagacaaggagtggatcaggccagataagtatggccatttctctcaggagttctggaatttctgtgaagtgcctgtcgaagctgtggatgccggtgactgtgacatcaactacgagggcctggataacctcctccgcctgaaggagctccagtccttgtcgctgcagcgctgctgccacgtggacgactggtgtctcagccgcctctacccactggccgactcgttgcaggagctctcgctggccggttgcccccgcatctccgaacggggcctcgcctgcctccaccacctccagaacctccgcaggctggacatctcggacctccctgccgtgtccaaccctggcctcactcagatattggtggaggagatgctgcccaattgcgaggttgtgggagtcgactgggctgagggcctgaagtcagggccggaggagcagcctcgggacacagccagccctgtccctgcctagcctttagccctgtccccactcacgtggcttctcagcgggctgcatggaatgtctggtagctcaccacacttctggcttccatttgtcttcactcaacgtcagggtgggggagtggtgctggccaatcacaggagagagcgtgagttcccagtatttattcctggctgcccttggctaaaggtcacagctcctgtcaccctgtcaggcagccctttccatgcccctgttcaggcctggggaggtaaaggctcaggctgttagtagccgcagagagccacactcaccttgtcaggagactcttctcaaactgtccttatgtgagtgcactgccatttcttgcagggaccctgactgacacaggggctactactgacactttacagggatggttctcccccgtgcagggccgctgtgcccactgcaggacatgcagcatccttcgccccactccactcactaaaggccagcgcaccccaggccccatagtattgctggttatggatttattgactttatgttccaaattcagctttttcagttggctgttttttgaaaggggataagctttgtcagtagagggcaccgaacaggcattataggaggaaaggcgcctccttcgtggttcttgttggcctccactgaggcacctctctgggaataacgttccccagcaccccaaatggatttccagtcaattcagaagcattttaccagtgaagccctcattattccagttcactgttaaagccagtaattctctatattaaactttccctgttcggtttatggagtataaaccgaacagggtcttgggaagggacagtgtctaagtgtctgggtgccatccagagcatttggcaggggcagctgcaggatgagtgtgttcccaggggagtgagagcagcagctatatggcacttgtttgctactgccctctttttttctttttgccaaacctgaggtgactagtgtcacaggtggagcccatctcaca

SEQ ID NO: 735355 - DNA, 1841 bp, Homo sapiens
gtaagtgaccggagttcctagagccccaaatttgaagtccgctctacagcctccgcattcagggcctctgttggcggccacgagagcagaaagccgtgaggcagcaggctaagcctggcaagccccgtactgggagtgcaaacctgtggctagtgggggccaggaaggatctgtgagggtcgcaggcggaggagacgctttagcgagcgagaggaggcagggacttggctgagagtatccaatggggatgagggagtggctgccgaagagcgacgcgactaaccaatcagagggagggatgacacaaggagctaatggacaggcaagggtggggcctgtaggataagagagcttggaagggattgttcgaggatgtgggatttggtcttagaagaccgaagatgaattccctgcgcctggtcgcccccatgtggaatgggcgtatcaggggcatccatcgcctgggtgcggcagtggccccagagggcaatcagaagaagaaaaggacaatactccagttcctgaccaactatttctacgatgtggaggctctgagggattacttgctccaaagggagatgtacaaggtgcatgagaaaaatcgatcttacacctggctggagaagcaacatggtccatacggcgcaggtgcctttttcatcctgaagcagggaggcgcagtcaagtttcgagacaaggagtggatcaggccagataagtatggccatttctctcaggagttctggaatttctgtgaagtgcctgtcgaagctgtggatgccggtgactgtgacatcaactacgagggcctggataacctcctccgcctgaaggagctccagtccttgtcgctgcagcgctgctgccacgtggacgactggtgtctcagccgcctctacccactggccgactcgttgcaggagctctcgctggccggttgcccccgcatctccgaacggggcctcgcctgcctccaccacctccagaacctccgcaggctggacatctcggacctccctgccgtgtccaaccctggcctcactcagatattggtggaggagatgctgcccaattgcgaggttgtgggagtcgactgggctgagggcctgaagtcagggccggaggagcagcctcgggacacagccagccctgtccctgcctagcctttagccctgtccccactcacgtggcttctcagcgggctgcatggaatgtctggtagctcaccacacttctggcttccatttgtcttcactcaacgtcagggtgggggagtggtgctggccaatcacaggagagagcgtgagttcccagtatttattcctggctgcccttggctaaaggtcacagctcctgtcaccctgtcaggcagccctttccatgcccctgttcaggcctggggaggtaaaggctcaggctgttagtagccgcagagagccacactcaccttgtcaggagactcttctcaaactgtccttatgtgagtgcactgccatttcttgcagggaccctgactgacacaggggctactactgacactttacagggatggttctcccccgtgcagggccgctgtgcccactgcaggacatgcagcatccttcgccccactccactcactaaaggccagcgcaccccaggccccatagtattgctggttatggatttattgactttatgttccaaattcagctttttcagttggctgtttgaagggtacttgcgggggccacaggttggggagggccctggttggggggctttctggcccgttgttcccccttttccagggtctggcccccctttggacctggtttttcccccgttgtcccttttcttaa

SEQ ID NO: 735356 - DNA, 1678 bp, Homo sapiens
gtaagtgaccggagttcctagagccccaaatttgaagtccgctctacagcctccgcattcagggcctctgttggcggccacgagagcagaaagccgtgaggcagcaggctaagcctggcaagccccgtactgggagtgcaaacctgtggctagtgggggccaggaaggatctgtgagggtcgcaggcggaggagacgctttagcgagcgagaggaggcagggacttggctgagagtatccaatggggatgagggagtggctgccgaagagcgacgcgactaaccaatcagagggagggatgacacaaggagctaatggacaggcaagggtggggcctgtaggataagagagcttggaagggattgttcgaggatgtgggatttggtcttagaagaccgaagatgaattccctgcgcctggtcgcccccatgtggaatgggcgtatcaggggcatccatcgcctgggtgcggcagtggccccagagggcaatcagaagaagaaaaggacaatactccagttcctgaccaactatttctacgatgtggaggctctgagggattacttgctccaaagggagatgtacaaggtgcatgagaaaaatcgatcttacacctggctggagaagcaacatggtccatacggcgcaggtgcctttttcatcctgaagcagggaggcgcagtcaagtttcgagacaaggagtggatcaggccagataagtatggccatttctctcaggagttctggaatttctgtgaagtgcctgtcgaagctgtggatgccggtgactgtgacatcaactacgagggcctggataacctcctccgcctgaaggagctccagtccttgtcgctgcagcgctgctgccacgtggacgactggtgtctcagccgcctctacccactggccgactcgttgcaggagctctcgctggccggttgcccccgcatctccgaacggggcctcgcctgcctccaccacctccagaacctccgcaggctggacatctcggacctccctgccgtgtccaaccctggcctcactcagatattggtggaggagatgctgcccaattgcgaggttgtgggagtcgactgggctgagggcctgaagtcagggccggaggagcagcctcgggacacagccagccctgtccctgcctagcctttagccctgtccccactcacgtggcttctcagcgggctgcatggaatgtctggtagctcaccacacttctggcttccatttgtcttcactcaacgtcagggtgggggagtggtgctggccaatcacaggagagagcgtgagttcccagtatttattcctggctgcccttggctaaaggtcacagctcctgtcaccctgtcaggcagccctttccatgcccctgttcaggcctggggaggtaaaggctcaggctgttagtagccgcagagagccacactcaccttgtcaggagactcttctcaaactgtccttatgtgagtgcactgccatttcttgcagggaccctgactgacacaggggctactactgacactttacagggatggttctcccccgtgcagggccgctgtgcccactgcaggacatgcagcatccttcgccccactccactcactaaatccataaccagcaatactatggggcctgctagttctagatcgcgagcggccgct

SEQ ID NO: 735357 - DNA, 1582 bp, Homo sapiens
gtaagtgaccggagttcctagagccccaaatttgaagtccgctctacagcctccgcattcagggcctctgttggcggccacgagagcagaaagccgtgaggcagcaggctaagcctggcaagccccgtactgggagtgcaaacctgtggctagtgggggccaggaaggatctgtgagggtcgcaggcggaggagacgctttagcgagcgagaggaggcagggacttggctgagagtatccaatggggatgagggagtggctgccgaagagcgacgcgactaaccaatcagagggagggatgacacaaggagctaatggacaggcaagggtggggcctgtaggataagagagcttggaagggattgttcgaggatgtgggatttggtcttagaagaccgaagatgaattccctgcgcctggtcgcccccatgtggaatgggcgtatcaggggcatccatcgcctgggtgcggcagtggccccagagggcaatcagaagaagaaaaggacaatactccagttcctgaccaactatttctacgatgtggaggctctgagggattacttgctccaaagggagatgtacaaggtgcatgagaaaaatcgatcttacacctggctggagaagcaacatggtccatacggcgcaggtgcctttttcatcctgaagcagggaggcgcagtcaagtttcgagacaaggagtggatcaggccagataagtatggccatttctctcaggagttctggaatttctgtgaagtgcctgtcgaagctgtggatgccggtgactgtgacatcaactacgagggcctggataacctcctccgcctgaaggagctccagtccttgtcgctgcagcgctgctgccacgtggacgactggtgtctcagccgcctctacccactggccgactcgttgcaggagctctcgctggccggttgcccccgcatctccgaacggggcctcgcctgcctccaccacctccagaacctccgcaggctggacatctcggacctccctgccgtgtccaaccctggcctcactcagatattggtggaggagatgctgcccaattgcgaggttgtgggagtcgactgggctgagggcctgaagtcagggccggaggagcagcctcgggacacagccagccctgtccctgcctagcctttagccctgtccccactcacgtggcttctcagcgggctgcatggaatgtctggtagctcaccacacttctggcttccatttgtcttcactcaacgtcagggtgggggagtggtgctggccaatcacaggagagagcgtgagttcccagtatttattcctggctgcccttggctaaaggtcacagctcctgtcaccctgtcaggcagccctttccatgcccctgttcaggcctggggaggtaaaggctcaggctgttagtagccgcagagagccacactcaccttgtcaggagactcttctcaaactgtccttatgtgagtgcactgccatttcttgcagggaccctgactgacacaggggctactactgacactttacagggatagtccccactacccacatgcatgcacccataa

SEQ ID NO: 735358 - DNA, 2140 bp, Homo sapiens
gtaagtgaccggagttcctagagccccaaatttgaagtccgctctacagcctccgcattcagggcctctgttggcggccacgagagcagaaagccgtgaggcagcaggctaagcctggcaagccccgtactgggagtgcaaacctgtggctagtgggggccaggaaggatctgtgagggtcgcaggcggaggagacgctttagcgagcgagaggaggcagggacttggctgagagtatccaatggggatgagggagtggctgccgaagagcgacgcgactaaccaatcagagggagggatgacacaaggagctaatggacaggcaagggtggggcctgtaggataagagagcttggaagggattgttcgaggatgtgggatttggtcttagaagaccgaagatgaattccctgcgcctggtcgcccccatgtggaatgggcgtatcaggggcatccatcgcctgggtgcggcagtggccccagagggcaatcagaagaagaaaaggacaatactccagttcctgaccaactatttctacgatgtggaggctctgagggattacttgctccaaagggagatgtacaaggtgcatgagaaaaatcgatcttacacctggctggagaagcaacatggtccatacggcgcaggtgcctttttcatcctgaagcagggaggcgcagtcaagtttcgagacaaggagtggatcaggccagataagtatggccatttctctcaggagttctggaatttctgtgaagtgcctgtcgaagctgtggatgccggtgactgtgacatcaactacgagggcctggataacctccgaacctccgcaggctggacatctcggacctccctgccgtgtccaaccctggcctcactcagatattggtggaggagatgctgcccaattgcgaggttgtgggagtcgactgggctgagggcctgaagtcagggccggaggagcagcctcgggacacagccagccctgtccctgcctagcctttagccctgtccccactcacgtggcttctcagcgggctgcatggaatgtctggtagctcaccacacttctggcttccatttgtcttcactcaacgtcagggtgggggagtggtgctggccaatcacaggagagagcgtgagttcccagtatttattcctggctgcccttggctaaaggtcacagctcctgtcaccctgtcaggcagccctttccatgcccctgttcaggcctggggaggtaaaggctcaggctgttagtagccgcagagagccacactcaccttgtcaggagactcttctcaaactgtccttatgtgagtgcactgccatttcttgcagggaccctgactgacacaggggctactactgacactttacagggatggttctcccccgtgcagggccgctgtgcccactgcaggacatgcagcatccttcgccccactccactcactaaaggccagcgcaccccaggccccatagtattgctggttatggatttattgactttatgttccaaattcagctttttcagttggctgttttttgaaaggggataagctttgtcagtagagggcaccgaacaggcattataggaggaaaggcgcctccttcgtggttcttgttggttgtgcttctgcctctggacgccgcagtgcatgtggcttccccagcacccagctcctgaagcaccaggcggtcagcagctgcccttggcaccctccagccctcagaagttgcgtaggagacacagcgcctccactgaggcacctctctgggaataacgttccccagcaccccaaatggatttccagtcaattcagaagcattttaccagtgaagccctcattattccagttcactgttaaagccagtaattctctatattaaactttccctgttcggtttatactccggagtataaaccgaacaggggtggccaagctgctgtgggccgccgccgtgcagaaccgctggaactcacgcttggggcgacggctacagttggattttgcccctgcaggcaggttcggtgtcgatactggcgttgatagcgctgctgccgtttgacgtggcgaatatgggcttgtttctcggcctgatcgccgtgttgtcgtagttcgcagccacccagga

SEQ ID NO: 735359 - DNA, 2097 bp, Homo sapiens
gtaagtgaccggagttcctagagccccaaatttgaagtccgctctacagcctccgcattcagggcctctgttggcggccacgagagcagaaagccgtgaggcagcaggctaagcctggcaagccccgtactgggagtgcaaacctgtggctagtgggggccaggaaggatctgtgagggtcgcaggcggaggagacgctttagcgagcgagaggaggcagggacttggctgagagtatccaatggggatgagggagtggctgccgaagagcgacgcgactaaccaatcagagggagggatgacacaaggagctaatggacaggcaagggtggggcctgtaggataagagagcttggaagggattgttcgaggatgtgggatttggtcttagaagaccgaagatgaattccctgcgcctggtcgcccccatgtggaatgggcgtatcaggggcatccatcgcctgggtgcggcagtggccccagagggcaatcagaagaagaaaaggacaatactccagttcctgaccaactatttctacgatgtggaggctctgagggattacttgctccaaagggagatgtacaaggtgcatgagaaaaatcgatcttacacctggctggagaagcaacatggtccatacggcgcaggtgcctttttcatcctgaagcagggaggcgcagtcaagtttcgagacaaggagtggatcaggccagataagtatggccatttctctcaggagttctggaatttctgtgaagtgcctgtcgaagctgtggatgccggtgactgtgacatcaactacgagggcctggataacctccgaacctccgcaggctggacatctcggacctccctgccgtgtccaaccctggcctcactcagatattggtggaggagatgctgcccaattgcgaggttgtgggagtcgactgggctgagggcctgaagtcagggccggaggagcagcctcgggacacagccagccctgtccctgcctagcctttagccctgtccccactcacgtggcttctcagcgggctgcatggaatgtctggtagctcaccacacttctggcttccatttgtcttcactcaacgtcagggtgggggagtggtgctggccaatcacaggagagagcgtgagttcccagtatttattcctggctgcccttggctaaaggtcacagctcctgtcaccctgtcaggcagccctttccatgcccctgttcaggcctggggaggtaaaggctcaggctgttagtagccgcagagagccacactcaccttgtcaggagactcttctcaaactgtccttatgtgagtgcactgccatttcttgcagggaccctgactgacacaggggctactactgacactttacagggatggttctcccccgtgcagggccgctgtgcccactgcaggacatgcagcatccttcgccccactccactcactaaaggccagcgcaccccaggccccatagtattgctggttatggatttattgactttatgttccaaattcagctttttcagttggctgttttttgaaaggggataagctttgtcagtagagggcaccgaacaggcattataggaggaaaggcgcctccttcgtggttcttgttggttgtgcttctgcctctggacgccgcagtgcatgtggcttccccagcacccagctcctgaagcaccaggcggtcagcagctgcccttggcaccctccagccctcagaagttgcgtaggagacacagcgcctccactgaggcacctctctgggaataacgttccccagcaccccaaatggatttccagtcaattcagaagcattttaccagtgaagccctcattattccagttcactgttaaagccagtaattctctatattaaactttccctgttcggtttatactccggagtataaaccgaacaggctatcagcacccctactagttctaaccacatgactcctcccccttatactaatagctagccaatcccacctatcaaaagaaaccacaacccgaaaaaaactatatattaccatactaatcctactacaactattcctaattataaccttcaccgccacc

SEQ ID NO: 735360 - DNA, 1976 bp, Homo sapiens
gtaagtgaccggagttcctagagccccaaatttgaagtccgctctacagcctccgcattcagggcctctgttggcggccacgagagcagaaagccgtgaggcagcaggctaagcctggcaagccccgtactgggagtgcaaacctgtggctagtgggggccaggaaggatctgtgagggtcgcaggcggaggagacgctttagcgagcgagaggaggcagggacttggctgagagtatccaatggggatgagggagtggctgccgaagagcgacgcgactaaccaatcagagggagggatgacacaaggagctaatggacaggcaagggtggggcctgtaggataagagagcttggaagggattgttcgaggatgtgggatttggtcttagaagaccgaagatgaattccctgcgcctggtcgcccccatgtggaatgggcgtatcaggggcatccatcgcctgggtgcggcagtggccccagagggcaatcagaagaagaaaaggacaatactccagttcctgaccaactatttctacgatgtggaggctctgagggattacttgctccaaagggagatgtacaaggtgcatgagaaaaatcgatcttacacctggctggagaagcaacatggtccatacggcgcaggtgcctttttcatcctgaagcagggaggcgcagtcaagtttcgagacaaggagtggatcaggccagataagtatggccatttctctcaggagttctggaatttctgtgaagtgcctgtcgaagctgtggatgccggtgactgtgacatcaactacgagggcctggataacctccgaacctccgcaggctggacatctcggacctccctgccgtgtccaaccctggcctcactcagatattggtggaggagatgctgcccaattgcgaggttgtgggagtcgactgggctgagggcctgaagtcagggccggaggagcagcctcgggacacagccagccctgtccctgcctagcctttagccctgtccccactcacgtggcttctcagcgggctgcatggaatgtctggtagctcaccacacttctggcttccatttgtcttcactcaacgtcagggtgggggagtggtgctggccaatcacaggagagagcgtgagttcccagtatttattcctggctgcccttggctaaaggtcacagctcctgtcaccctgtcaggcagccctttccatgcccctgttcaggcctggggaggtaaaggctcaggctgttagtagccgcagagagccacactcaccttgtcaggagactcttctcaaactgtccttatgtgagtgcactgccatttcttgcagggaccctgactgacacaggggctactactgacactttacagggatggttctcccccgtgcagggccgctgtgcccactgcaggacatgcagcatccttcgccccactccactcactaaaggccagcgcaccccaggccccatagtattgctggttatggatttattgactttatgttccaaattcagctttttcagttggctgttttttgaaaggggataagctttgtcagtagagggcaccgaacaggcattataggaggaaaggcgcctccttcgtggttcttgttggttgtgcttctgcctctggacgccgcagtgcatgtggcttccccagcacccagctcctgaagcaccaggcggtcagcagctgcccttggcaccctccagccctcagaagttgcgtaggagacacagcgcctccactgaggcacctctctgggaataacgttccccagcaccccaaatggatttccagtcaattcagaagcattttaccagtgaagccctcattattccagttcactgttaaagccagtaattctctatattaaactttccctgttcggtttatactccggagtataaaccgaacaggattatattatctgaagctccccttttgggcggaatgtg

SEQ ID NO: 735361 - DNA, 2019 bp, Homo sapiens
gtaagtgaccggagttcctagagccccaaatttgaagtccgctctacagcctccgcattcagggcctctgttggcggccacgagagcagaaagccgtgaggcagcaggctaagcctggcaagccccgtactgggagtgcaaacctgtggctagtgggggccaggaaggatctgtgagggtcgcaggcggaggagacgctttagcgagcgagaggaggcagggacttggctgagagtatccaatggggatgagggagtggctgccgaagagcgacgcgactaaccaatcagagggagggatgacacaaggagctaatggacaggcaagggtggggcctgtaggataagagagcttggaagggattgttcgaggatgtgggatttggtcttagaagaccgaagatgaattccctgcgcctggtcgcccccatgtggaatgggcgtatcaggggcatccatcgcctgggtgcggcagtggccccagagggcaatcagaagaagaaaaggacaatactccagttcctgaccaactatttctacgatgtggaggctctgagggattacttgctccaaagggagatgtacaaggtgcatgagaaaaatcgatcttacacctggctggagaagcaacatggtccatacggcgcaggtgcctttttcatcctgaagcagggaggcgcagtcaagtttcgagacaaggagtggatcaggccagataagtatggccatttctctcaggagttctggaatttctgtgaagtgcctgtcgaagctgtggatgccggtgactgtgacatcaactacgagggcctggataacctccgaacctccgcaggctggacatctcggacctccctgccgtgtccaaccctggcctcactcagatattggtggaggagatgctgcccaattgcgaggttgtgggagtcgactgggctgagggcctgaagtcagggccggaggagcagcctcgggacacagccagccctgtccctgcctagcctttagccctgtccccactcacgtggcttctcagcgggctgcatggaatgtctggtagctcaccacacttctggcttccatttgtcttcactcaacgtcagggtgggggagtggtgctggccaatcacaggagagagcgtgagttcccagtatttattcctggctgcccttggctaaaggtcacagctcctgtcaccctgtcaggcagccctttccatgcccctgttcaggcctggggaggtaaaggctcaggctgttagtagccgcagagagccacactcaccttgtcaggagactcttctcaaactgtccttatgtgagtgcactgccatttcttgcagggaccctgactgacacaggggctactactgacactttacagggatggttctcccccgtgcagggccgctgtgcccactgcaggacatgcagcatccttcgccccactccactcactaaaggccagcgcaccccaggccccatagtattgctggttatggatttattgactttatgttccaaattcagctttttcagttggctgttttttgaaaggggataagctttgtcagtagagggcaccgaacaggcattataggaggaaaggcgcctccttcgtggttcttgttggttgtgcttctgcctctggacgccgcagtgcatgtggcttccccagcacccagctcctgaagcaccaggcggtcagcagctgcccttggcaccctccagccctcagaagttgcgtaggagacacagcgcctccactgaggcacctctctgggaataacgttccccagcaccccaaatggatttccagtcaattcagaagcattttaccagtgaagccctcattattccagttcactgttaaagccagtaattctctatattaaactttccctgttcggtttatactccggagtataaaccgaacaggcctgccatagaaaatgcaaccacagaaataaaatggattgctttttttccctgtagtgaaaatacatttaaatctatctca

SEQ ID NO: 735362 - DNA, 2121 bp, Homo sapiens
gtaagtgaccggagttcctagagccccaaatttgaagtccgctctacagcctccgcattcagggcctctgttggcggccacgagagcagaaagccgtgaggcagcaggctaagcctggcaagccccgtactgggagtgcaaacctgtggctagtgggggccaggaaggatctgtgagggtcgcaggcggaggagacgctttagcgagcgagaggaggcagggacttggctgagagtatccaatggggatgagggagtggctgccgaagagcgacgcgactaaccaatcagagggagggatgacacaaggagctaatggacaggcaagggtggggcctgtaggataagagagcttggaagggattgttcgaggatgtgggatttggtcttagaagaccgaagatgaattccctgcgcctggtcgcccccatgtggaatgggcgtatcaggggcatccatcgcctgggtgcggcagtggccccagagggcaatcagaagaagaaaaggacaatactccagttcctgaccaactatttctacgatgtggaggctctgagggattacttgctccaaagggagatgtacaaggtgcatgagaaaaatcgatcttacacctggctggagaagcaacatggtccatacggcgcaggtgcctttttcatcctgaagcagggaggcgcagtcaagtttcgagacaaggagtggatcaggccagataagtatggccatttctctcaggagttctggaatttctgtgaagtgcctgtcgaagctgtggatgccggtgactgtgacatcaactacgagggcctggataacctccgaacctccgcaggctggacatctcggacctccctgccgtgtccaaccctggcctcactcagatattggtggaggagatgctgcccaattgcgaggttgtgggagtcgactgggctgagggcctgaagtcagggccggaggagcagcctcgggacacagccagccctgtccctgcctagcctttagccctgtccccactcacgtggcttctcagcgggctgcatggaatgtctggtagctcaccacacttctggcttccatttgtcttcactcaacgtcagggtgggggagtggtgctggccaatcacaggagagagcgtgagttcccagtatttattcctggctgcccttggctaaaggtcacagctcctgtcaccctgtcaggcagccctttccatgcccctgttcaggcctggggaggtaaaggctcaggctgttagtagccgcagagagccacactcaccttgtcaggagactcttctcaaactgtccttatgtgagtgcactgccatttcttgcagggaccctgactgacacaggggctactactgacactttacagggatggttctcccccgtgcagggccgctgtgcccactgcaggacatgcagcatccttcgccccactccactcactaaaggccagcgcaccccaggccccatagtattgctggttatggatttattgactttatgttccaaattcagctttttcagttggctgttttttgaaaggggataagctttgtcagtagagggcaccgaacaggcattataggaggaaaggcgcctccttcgtggttcttgttggttgtgcttctgcctctggacgccgcagtgcatgtggcttccccagcacccagctcctgaagcaccaggcggtcagcagctgcccttggcaccctccagccctcagaagttgcgtaggagacacagcgcctccactgaggcacctctctgggaataacgttccccagcaccccaaatggatttccagtcaattcagaagcattttaccagtgaagccctcattattccagttcactgttaaagccagtaattctctatattaaactttccctgttcggtttatggagtataaaccgaacagggtcttgggaagggacagtgtctaagtgtctgggtgccatccagagcatttggcaggggcagctgcaggatgagtgtgttcccaggggagtgagagcagcagctatatggcacttgtttgctactgccctctttttttctttttgccaaacctgaggtgactagtgtcacaggtggagcccatctcaca

SEQ ID NO: 735363 - DNA, 2013 bp, Homo sapiens
gtaagtgaccggagttcctagagccccaaatttgaagtccgctctacagcctccgcattcagggcctctgttggcggccacgagagcagaaagccgtgaggcagcaggctaagcctggcaagccccgtactgggagtgcaaacctgtggctagtgggggccaggaaggatctgtgagggtcgcaggcggaggagacgctttagcgagcgagaggaggcagggacttggctgagagtatccaatggggatgagggagtggctgccgaagagcgacgcgactaaccaatcagagggagggatgacacaaggagctaatggacaggcaagggtggggcctgtaggataagagagcttggaagggattgttcgaggatgtgggatttggtcttagaagaccgaagatgaattccctgcgcctggtcgcccccatgtggaatgggcgtatcaggggcatccatcgcctgggtgcggcagtggccccagagggcaatcagaagaagaaaaggacaatactccagttcctgaccaactatttctacgatgtggaggctctgagggattacttgctccaaagggagatgtacaaggtgcatgagaaaaatcgatcttacacctggctggagaagcaacatggtccatacggcgcaggtgcctttttcatcctgaagcagggaggcgcagtcaagtttcgagacaaggagtggatcaggccagataagtatggccatttctctcaggagttctggaatttctgtgaagtgcctgtcgaagctgtggatgccggtgactgtgacatcaactacgagggcctggataacctccgaacctccgcaggctggacatctcggacctccctgccgtgtccaaccctggcctcactcagatattggtggaggagatgctgcccaattgcgaggttgtgggagtcgactgggctgagggcctgaagtcagggccggaggagcagcctcgggacacagccagccctgtccctgcctagcctttagccctgtccccactcacgtggcttctcagcgggctgcatggaatgtctggtagctcaccacacttctggcttccatttgtcttcactcaacgtcagggtgggggagtggtgctggccaatcacaggagagagcgtgagttcccagtatttattcctggctgcccttggctaaaggtcacagctcctgtcaccctgtcaggcagccctttccatgcccctgttcaggcctggggaggtaaaggctcaggctgttagtagccgcagagagccacactcaccttgtcaggagactcttctcaaactgtccttatgtgagtgcactgccatttcttgcagggaccctgactgacacaggggctactactgacactttacagggatggttctcccccgtgcagggccgctgtgcccactgcaggacatgcagcatccttcgccccactccactcactaaaggccagcgcaccccaggccccatagtattgctggttatggatttattgactttatgttccaaattcagctttttcagttggctgttttttgaaaggggataagctttgtcagtagagggcaccgaacaggcattataggaggaaaggcgcctccttcgtggttcttgttggcctccactgaggcacctctctgggaataacgttccccagcaccccaaatggatttccagtcaattcagaagcattttaccagtgaagccctcattattccagttcactgttaaagccagtaattctctatattaaactttccctgttcggtttatactccggagtataaaccgaacaggggtggccaagctgctgtgggccgccgccgtgcagaaccgctggaactcacgcttggggcgacggctacagttggattttgcccctgcaggcaggttcggtgtcgatactggcgttgatagcgctgctgccgtttgacgtggcgaatatgggcttgtttctcggcctgatcgccgtgttgtcgtagttcgcagccacccagga

SEQ ID NO: 735364 - DNA, 1970 bp, Homo sapiens
gtaagtgaccggagttcctagagccccaaatttgaagtccgctctacagcctccgcattcagggcctctgttggcggccacgagagcagaaagccgtgaggcagcaggctaagcctggcaagccccgtactgggagtgcaaacctgtggctagtgggggccaggaaggatctgtgagggtcgcaggcggaggagacgctttagcgagcgagaggaggcagggacttggctgagagtatccaatggggatgagggagtggctgccgaagagcgacgcgactaaccaatcagagggagggatgacacaaggagctaatggacaggcaagggtggggcctgtaggataagagagcttggaagggattgttcgaggatgtgggatttggtcttagaagaccgaagatgaattccctgcgcctggtcgcccccatgtggaatgggcgtatcaggggcatccatcgcctgggtgcggcagtggccccagagggcaatcagaagaagaaaaggacaatactccagttcctgaccaactatttctacgatgtggaggctctgagggattacttgctccaaagggagatgtacaaggtgcatgagaaaaatcgatcttacacctggctggagaagcaacatggtccatacggcgcaggtgcctttttcatcctgaagcagggaggcgcagtcaagtttcgagacaaggagtggatcaggccagataagtatggccatttctctcaggagttctggaatttctgtgaagtgcctgtcgaagctgtggatgccggtgactgtgacatcaactacgagggcctggataacctccgaacctccgcaggctggacatctcggacctccctgccgtgtccaaccctggcctcactcagatattggtggaggagatgctgcccaattgcgaggttgtgggagtcgactgggctgagggcctgaagtcagggccggaggagcagcctcgggacacagccagccctgtccctgcctagcctttagccctgtccccactcacgtggcttctcagcgggctgcatggaatgtctggtagctcaccacacttctggcttccatttgtcttcactcaacgtcagggtgggggagtggtgctggccaatcacaggagagagcgtgagttcccagtatttattcctggctgcccttggctaaaggtcacagctcctgtcaccctgtcaggcagccctttccatgcccctgttcaggcctggggaggtaaaggctcaggctgttagtagccgcagagagccacactcaccttgtcaggagactcttctcaaactgtccttatgtgagtgcactgccatttcttgcagggaccctgactgacacaggggctactactgacactttacagggatggttctcccccgtgcagggccgctgtgcccactgcaggacatgcagcatccttcgccccactccactcactaaaggccagcgcaccccaggccccatagtattgctggttatggatttattgactttatgttccaaattcagctttttcagttggctgttttttgaaaggggataagctttgtcagtagagggcaccgaacaggcattataggaggaaaggcgcctccttcgtggttcttgttggcctccactgaggcacctctctgggaataacgttccccagcaccccaaatggatttccagtcaattcagaagcattttaccagtgaagccctcattattccagttcactgttaaagccagtaattctctatattaaactttccctgttcggtttatactccggagtataaaccgaacaggctatcagcacccctactagttctaaccacatgactcctcccccttatactaatagctagccaatcccacctatcaaaagaaaccacaacccgaaaaaaactatatattaccatactaatcctactacaactattcctaattataaccttcaccgccacc

SEQ ID NO: 735365 - DNA, 1849 bp, Homo sapiens
gtaagtgaccggagttcctagagccccaaatttgaagtccgctctacagcctccgcattcagggcctctgttggcggccacgagagcagaaagccgtgaggcagcaggctaagcctggcaagccccgtactgggagtgcaaacctgtggctagtgggggccaggaaggatctgtgagggtcgcaggcggaggagacgctttagcgagcgagaggaggcagggacttggctgagagtatccaatggggatgagggagtggctgccgaagagcgacgcgactaaccaatcagagggagggatgacacaaggagctaatggacaggcaagggtggggcctgtaggataagagagcttggaagggattgttcgaggatgtgggatttggtcttagaagaccgaagatgaattccctgcgcctggtcgcccccatgtggaatgggcgtatcaggggcatccatcgcctgggtgcggcagtggccccagagggcaatcagaagaagaaaaggacaatactccagttcctgaccaactatttctacgatgtggaggctctgagggattacttgctccaaagggagatgtacaaggtgcatgagaaaaatcgatcttacacctggctggagaagcaacatggtccatacggcgcaggtgcctttttcatcctgaagcagggaggcgcagtcaagtttcgagacaaggagtggatcaggccagataagtatggccatttctctcaggagttctggaatttctgtgaagtgcctgtcgaagctgtggatgccggtgactgtgacatcaactacgagggcctggataacctccgaacctccgcaggctggacatctcggacctccctgccgtgtccaaccctggcctcactcagatattggtggaggagatgctgcccaattgcgaggttgtgggagtcgactgggctgagggcctgaagtcagggccggaggagcagcctcgggacacagccagccctgtccctgcctagcctttagccctgtccccactcacgtggcttctcagcgggctgcatggaatgtctggtagctcaccacacttctggcttccatttgtcttcactcaacgtcagggtgggggagtggtgctggccaatcacaggagagagcgtgagttcccagtatttattcctggctgcccttggctaaaggtcacagctcctgtcaccctgtcaggcagccctttccatgcccctgttcaggcctggggaggtaaaggctcaggctgttagtagccgcagagagccacactcaccttgtcaggagactcttctcaaactgtccttatgtgagtgcactgccatttcttgcagggaccctgactgacacaggggctactactgacactttacagggatggttctcccccgtgcagggccgctgtgcccactgcaggacatgcagcatccttcgccccactccactcactaaaggccagcgcaccccaggccccatagtattgctggttatggatttattgactttatgttccaaattcagctttttcagttggctgttttttgaaaggggataagctttgtcagtagagggcaccgaacaggcattataggaggaaaggcgcctccttcgtggttcttgttggcctccactgaggcacctctctgggaataacgttccccagcaccccaaatggatttccagtcaattcagaagcattttaccagtgaagccctcattattccagttcactgttaaagccagtaattctctatattaaactttccctgttcggtttatactccggagtataaaccgaacaggattatattatctgaagctccccttttgggcggaatgtg

SEQ ID NO: 735366 - DNA, 1892 bp, Homo sapiens
gtaagtgaccggagttcctagagccccaaatttgaagtccgctctacagcctccgcattcagggcctctgttggcggccacgagagcagaaagccgtgaggcagcaggctaagcctggcaagccccgtactgggagtgcaaacctgtggctagtgggggccaggaaggatctgtgagggtcgcaggcggaggagacgctttagcgagcgagaggaggcagggacttggctgagagtatccaatggggatgagggagtggctgccgaagagcgacgcgactaaccaatcagagggagggatgacacaaggagctaatggacaggcaagggtggggcctgtaggataagagagcttggaagggattgttcgaggatgtgggatttggtcttagaagaccgaagatgaattccctgcgcctggtcgcccccatgtggaatgggcgtatcaggggcatccatcgcctgggtgcggcagtggccccagagggcaatcagaagaagaaaaggacaatactccagttcctgaccaactatttctacgatgtggaggctctgagggattacttgctccaaagggagatgtacaaggtgcatgagaaaaatcgatcttacacctggctggagaagcaacatggtccatacggcgcaggtgcctttttcatcctgaagcagggaggcgcagtcaagtttcgagacaaggagtggatcaggccagataagtatggccatttctctcaggagttctggaatttctgtgaagtgcctgtcgaagctgtggatgccggtgactgtgacatcaactacgagggcctggataacctccgaacctccgcaggctggacatctcggacctccctgccgtgtccaaccctggcctcactcagatattggtggaggagatgctgcccaattgcgaggttgtgggagtcgactgggctgagggcctgaagtcagggccggaggagcagcctcgggacacagccagccctgtccctgcctagcctttagccctgtccccactcacgtggcttctcagcgggctgcatggaatgtctggtagctcaccacacttctggcttccatttgtcttcactcaacgtcagggtgggggagtggtgctggccaatcacaggagagagcgtgagttcccagtatttattcctggctgcccttggctaaaggtcacagctcctgtcaccctgtcaggcagccctttccatgcccctgttcaggcctggggaggtaaaggctcaggctgttagtagccgcagagagccacactcaccttgtcaggagactcttctcaaactgtccttatgtgagtgcactgccatttcttgcagggaccctgactgacacaggggctactactgacactttacagggatggttctcccccgtgcagggccgctgtgcccactgcaggacatgcagcatccttcgccccactccactcactaaaggccagcgcaccccaggccccatagtattgctggttatggatttattgactttatgttccaaattcagctttttcagttggctgttttttgaaaggggataagctttgtcagtagagggcaccgaacaggcattataggaggaaaggcgcctccttcgtggttcttgttggcctccactgaggcacctctctgggaataacgttccccagcaccccaaatggatttccagtcaattcagaagcattttaccagtgaagccctcattattccagttcactgttaaagccagtaattctctatattaaactttccctgttcggtttatactccggagtataaaccgaacaggcctgccatagaaaatgcaaccacagaaataaaatggattgctttttttccctgtagtgaaaatacatttaaatctatctca

SEQ ID NO: 735367 - DNA, 1994 bp, Homo sapiens
gtaagtgaccggagttcctagagccccaaatttgaagtccgctctacagcctccgcattcagggcctctgttggcggccacgagagcagaaagccgtgaggcagcaggctaagcctggcaagccccgtactgggagtgcaaacctgtggctagtgggggccaggaaggatctgtgagggtcgcaggcggaggagacgctttagcgagcgagaggaggcagggacttggctgagagtatccaatggggatgagggagtggctgccgaagagcgacgcgactaaccaatcagagggagggatgacacaaggagctaatggacaggcaagggtggggcctgtaggataagagagcttggaagggattgttcgaggatgtgggatttggtcttagaagaccgaagatgaattccctgcgcctggtcgcccccatgtggaatgggcgtatcaggggcatccatcgcctgggtgcggcagtggccccagagggcaatcagaagaagaaaaggacaatactccagttcctgaccaactatttctacgatgtggaggctctgagggattacttgctccaaagggagatgtacaaggtgcatgagaaaaatcgatcttacacctggctggagaagcaacatggtccatacggcgcaggtgcctttttcatcctgaagcagggaggcgcagtcaagtttcgagacaaggagtggatcaggccagataagtatggccatttctctcaggagttctggaatttctgtgaagtgcctgtcgaagctgtggatgccggtgactgtgacatcaactacgagggcctggataacctccgaacctccgcaggctggacatctcggacctccctgccgtgtccaaccctggcctcactcagatattggtggaggagatgctgcccaattgcgaggttgtgggagtcgactgggctgagggcctgaagtcagggccggaggagcagcctcgggacacagccagccctgtccctgcctagcctttagccctgtccccactcacgtggcttctcagcgggctgcatggaatgtctggtagctcaccacacttctggcttccatttgtcttcactcaacgtcagggtgggggagtggtgctggccaatcacaggagagagcgtgagttcccagtatttattcctggctgcccttggctaaaggtcacagctcctgtcaccctgtcaggcagccctttccatgcccctgttcaggcctggggaggtaaaggctcaggctgttagtagccgcagagagccacactcaccttgtcaggagactcttctcaaactgtccttatgtgagtgcactgccatttcttgcagggaccctgactgacacaggggctactactgacactttacagggatggttctcccccgtgcagggccgctgtgcccactgcaggacatgcagcatccttcgccccactccactcactaaaggccagcgcaccccaggccccatagtattgctggttatggatttattgactttatgttccaaattcagctttttcagttggctgttttttgaaaggggataagctttgtcagtagagggcaccgaacaggcattataggaggaaaggcgcctccttcgtggttcttgttggcctccactgaggcacctctctgggaataacgttccccagcaccccaaatggatttccagtcaattcagaagcattttaccagtgaagccctcattattccagttcactgttaaagccagtaattctctatattaaactttccctgttcggtttatggagtataaaccgaacagggtcttgggaagggacagtgtctaagtgtctgggtgccatccagagcatttggcaggggcagctgcaggatgagtgtgttcccaggggagtgagagcagcagctatatggcacttgtttgctactgccctctttttttctttttgccaaacctgaggtgactagtgtcacaggtggagcccatctcaca

SEQ ID NO: 735368 - DNA, 1678 bp, Homo sapiens
gtaagtgaccggagttcctagagccccaaatttgaagtccgctctacagcctccgcattcagggcctctgttggcggccacgagagcagaaagccgtgaggcagcaggctaagcctggcaagccccgtactgggagtgcaaacctgtggctagtgggggccaggaaggatctgtgagggtcgcaggcggaggagacgctttagcgagcgagaggaggcagggacttggctgagagtatccaatggggatgagggagtggctgccgaagagcgacgcgactaaccaatcagagggagggatgacacaaggagctaatggacaggcaagggtggggcctgtaggataagagagcttggaagggattgttcgaggatgtgggatttggtcttagaagaccgaagatgaattccctgcgcctggtcgcccccatgtggaatgggcgtatcaggggcatccatcgcctgggtgcggcagtggccccagagggcaatcagaagaagaaaaggacaatactccagttcctgaccaactatttctacgatgtggaggctctgagggattacttgctccaaagggagatgtacaaggtgcatgagaaaaatcgatcttacacctggctggagaagcaacatggtccatacggcgcaggtgcctttttcatcctgaagcagggaggcgcagtcaagtttcgagacaaggagtggatcaggccagataagtatggccatttctctcaggagttctggaatttctgtgaagtgcctgtcgaagctgtggatgccggtgactgtgacatcaactacgagggcctggataacctccgaacctccgcaggctggacatctcggacctccctgccgtgtccaaccctggcctcactcagatattggtggaggagatgctgcccaattgcgaggttgtgggagtcgactgggctgagggcctgaagtcagggccggaggagcagcctcgggacacagccagccctgtccctgcctagcctttagccctgtccccactcacgtggcttctcagcgggctgcatggaatgtctggtagctcaccacacttctggcttccatttgtcttcactcaacgtcagggtgggggagtggtgctggccaatcacaggagagagcgtgagttcccagtatttattcctggctgcccttggctaaaggtcacagctcctgtcaccctgtcaggcagccctttccatgcccctgttcaggcctggggaggtaaaggctcaggctgttagtagccgcagagagccacactcaccttgtcaggagactcttctcaaactgtccttatgtgagtgcactgccatttcttgcagggaccctgactgacacaggggctactactgacactttacagggatggttctcccccgtgcagggccgctgtgcccactgcaggacatgcagcatccttcgccccactccactcactaaaggccagcgcaccccaggccccatagtattgctggttatggatttattgactttatgttccaaattcagctttttcagttggctgtttgaagggtacttgcgggggccacaggttggggagggccctggttggggggctttctggcccgttgttcccccttttccagggtctggcccccctttggacctggtttttcccccgttgtcccttttcttaa

SEQ ID NO: 735369 - DNA, 1515 bp, Homo sapiens
gtaagtgaccggagttcctagagccccaaatttgaagtccgctctacagcctccgcattcagggcctctgttggcggccacgagagcagaaagccgtgaggcagcaggctaagcctggcaagccccgtactgggagtgcaaacctgtggctagtgggggccaggaaggatctgtgagggtcgcaggcggaggagacgctttagcgagcgagaggaggcagggacttggctgagagtatccaatggggatgagggagtggctgccgaagagcgacgcgactaaccaatcagagggagggatgacacaaggagctaatggacaggcaagggtggggcctgtaggataagagagcttggaagggattgttcgaggatgtgggatttggtcttagaagaccgaagatgaattccctgcgcctggtcgcccccatgtggaatgggcgtatcaggggcatccatcgcctgggtgcggcagtggccccagagggcaatcagaagaagaaaaggacaatactccagttcctgaccaactatttctacgatgtggaggctctgagggattacttgctccaaagggagatgtacaaggtgcatgagaaaaatcgatcttacacctggctggagaagcaacatggtccatacggcgcaggtgcctttttcatcctgaagcagggaggcgcagtcaagtttcgagacaaggagtggatcaggccagataagtatggccatttctctcaggagttctggaatttctgtgaagtgcctgtcgaagctgtggatgccggtgactgtgacatcaactacgagggcctggataacctccgaacctccgcaggctggacatctcggacctccctgccgtgtccaaccctggcctcactcagatattggtggaggagatgctgcccaattgcgaggttgtgggagtcgactgggctgagggcctgaagtcagggccggaggagcagcctcgggacacagccagccctgtccctgcctagcctttagccctgtccccactcacgtggcttctcagcgggctgcatggaatgtctggtagctcaccacacttctggcttccatttgtcttcactcaacgtcagggtgggggagtggtgctggccaatcacaggagagagcgtgagttcccagtatttattcctggctgcccttggctaaaggtcacagctcctgtcaccctgtcaggcagccctttccatgcccctgttcaggcctggggaggtaaaggctcaggctgttagtagccgcagagagccacactcaccttgtcaggagactcttctcaaactgtccttatgtgagtgcactgccatttcttgcagggaccctgactgacacaggggctactactgacactttacagggatggttctcccccgtgcagggccgctgtgcccactgcaggacatgcagcatccttcgccccactccactcactaaatccataaccagcaatactatggggcctgctagttctagatcgcgagcggccgct

SEQ ID NO: 735370 - DNA, 1419 bp, Homo sapiens
gtaagtgaccggagttcctagagccccaaatttgaagtccgctctacagcctccgcattcagggcctctgttggcggccacgagagcagaaagccgtgaggcagcaggctaagcctggcaagccccgtactgggagtgcaaacctgtggctagtgggggccaggaaggatctgtgagggtcgcaggcggaggagacgctttagcgagcgagaggaggcagggacttggctgagagtatccaatggggatgagggagtggctgccgaagagcgacgcgactaaccaatcagagggagggatgacacaaggagctaatggacaggcaagggtggggcctgtaggataagagagcttggaagggattgttcgaggatgtgggatttggtcttagaagaccgaagatgaattccctgcgcctggtcgcccccatgtggaatgggcgtatcaggggcatccatcgcctgggtgcggcagtggccccagagggcaatcagaagaagaaaaggacaatactccagttcctgaccaactatttctacgatgtggaggctctgagggattacttgctccaaagggagatgtacaaggtgcatgagaaaaatcgatcttacacctggctggagaagcaacatggtccatacggcgcaggtgcctttttcatcctgaagcagggaggcgcagtcaagtttcgagacaaggagtggatcaggccagataagtatggccatttctctcaggagttctggaatttctgtgaagtgcctgtcgaagctgtggatgccggtgactgtgacatcaactacgagggcctggataacctccgaacctccgcaggctggacatctcggacctccctgccgtgtccaaccctggcctcactcagatattggtggaggagatgctgcccaattgcgaggttgtgggagtcgactgggctgagggcctgaagtcagggccggaggagcagcctcgggacacagccagccctgtccctgcctagcctttagccctgtccccactcacgtggcttctcagcgggctgcatggaatgtctggtagctcaccacacttctggcttccatttgtcttcactcaacgtcagggtgggggagtggtgctggccaatcacaggagagagcgtgagttcccagtatttattcctggctgcccttggctaaaggtcacagctcctgtcaccctgtcaggcagccctttccatgcccctgttcaggcctggggaggtaaaggctcaggctgttagtagccgcagagagccacactcaccttgtcaggagactcttctcaaactgtccttatgtgagtgcactgccatttcttgcagggaccctgactgacacaggggctactactgacactttacagggatagtccccactacccacatgcatgcacccataa

SEQ ID NO: 735371 - DNA, 1534 bp, Homo sapiens
gtaagtgaccggagttcctagagccccaaatttgaagtccgctctacagcctccgcattcagggcctctgttggcggccacgagagcagaaagccgtgaggcagcaggctaagcctggcaagccccgtactgggagtgcaaacctgtggctagtgggggccaggaaggatctgtgagggtcgcaggcggaggagacgctttagcgagcgagaggaggcagggacttggctgagagtatccaatggggatgagggagtggctgccgaagagcgacgcgactaaccaatcagagggagggatgacacaaggagctaatggacaggcaagggtggggcctgtaggataagagagcttggaagggattgttcgaggatgtgggatttggtcttagaagaccgaagatgaattccctgcgcctggtcgcccccatgtggaatgggcgtatcaggggcatccatcgcctgggtgcggcagtggccccagagggcaatcagaagaagaaaaggacaatactccagttcctgaccaactatttctacgatgtggaggctctgagggattacttgctccaaagggagatgtacaaggtgcatgagaaaaatcggtttcgagacaaggagtggatcaggccagataagtatggccatttctctcaggagttctggaatttctgtgaagtgcctgtcgaagctgtggatgccggtgactgtgacatcaactacgagggcctggataacctcctccgcctgaaggagctccagtccttgtcgctgcagcgctgctgccacgtggacgactggtgtctcagccgcctctacccactggccgactcgttgcaggagctctcgctggccggttgcccccgcatctccgaacggggcctcgcctgcctccaccacctccagtgagacctcagctcaggctgggccacatgcccaggcacctctcccacctaacccagatgcaggagaggaagtggggaggggcaatgttaggcagttctcatatccccctgcatccatcacaaacctagagtatttatggtagatgagcagtcacagtgagtctctggaagaattaaatgactcctggttttcttcctttttgttttagtcaaaactgtgtgatatcgacgctgttgcagaacagcaggagctggagttgcatatttgcaattaacacagtgggcttcatgtgcctggacagctataaagattttattttaggaagctaaggttgaaatttggggccagtacctccctatacacacacacatgcacgcatgcacgcacgcacacacacacacgcacgcacacacactgtcctgtaaggttgaaatttggggccagtacctccctacacacacacacacacacacacacacacacacacgcacgctgtcctgtacctccctacacacacgcacacgctgtctgtacctccctacacacacacacacacacacacacgctgtccttatactggcttatctccctatacacacacacacacacacacacacgctgtcctgtac

SEQ ID NO: 735372 - DNA, 2222 bp, Homo sapiens
gtaagtgaccggagttcctagagccccaaatttgaagtccgctctacagcctccgcattcagggcctctgttggcggccacgagagcagaaagccgtgaggcagcaggctaagcctggcaagccccgtactgggagtgcaaacctgtggctagtgggggccaggaaggatctgtgagggtcgcaggcggaggagacgctttagcgagcgagaggaggcagggacttggctgagagtatccaatggggatgagggagtggctgccgaagagcgacgcgactaaccaatcagagggagggatgacacaaggagctaatggacaggcaagggtggggcctgtaggataagagagcttggaagggattgttcgaggatgtgggatttggtcttagaagaccgaagatgaattccctgcgcctggtcgcccccatgtggaatgggcgtatcaggggcatccatcgcctgggtgcggcagtggccccagagggcaatcagaagaagaaaaggacaatactccagttcctgaccaactatttctacgatgtggaggctctgagggattacttgctccaaagggagatgtacaaggtgcatgagaaaaatcggtttcgagacaaggagtggatcaggccagataagtatggccatttctctcaggagttctggaatttctgtgaagtgcctgtcgaagctgtggatgccggtgactgtgacatcaactacgagggcctggataacctcctccgcctgaaggagctccagtccttgtcgctgcagcgctgctgccacgtggacgactggtgtctcagccgcctctacccactggccgactcgttgcaggagctctcgctggccggttgcccccgcatctccgaacggggcctcgcctgcctccaccacctccagaacctccgcaggctggacatctcggacctccctgccgtgtccaaccctggcctcactcagatattggtggaggagatgctgcccaattgcgaggttgtgggagtcgactgggctgagggcctgaagtcagggccggaggagcagcctcgggacacagccagccctgtccctgcctagcctttagccctgtccccactcacgtggcttctcagcgggctgcatggaatgtctggtagctcaccacacttctggcttccatttgtcttcactcaacgtcagggtgggggagtggtgctggccaatcacaggagagagcgtgagttcccagtatttattcctggctgcccttggctaaaggtcacagctcctgtcaccctgtcaggcagccctttccatgcccctgttcaggcctggggaggtaaaggctcaggctgttagtagccgcagagagccacactcaccttgtcaggagactcttctcaaactgtccttatgtgagtgcactgccatttcttgcagggaccctgactgacacaggggctactactgacactttacagggatggttctcccccgtgcagggccgctgtgcccactgcaggacatgcagcatccttcgccccactccactcactaaaggccagcgcaccccaggccccatagtattgctggttatggatttattgactttatgttccaaattcagctttttcagttggctgttttttgaaaggggataagctttgtcagtagagggcaccgaacaggcattataggaggaaaggcgcctccttcgtggttcttgttggttgtgcttctgcctctggacgccgcagtgcatgtggcttccccagcacccagctcctgaagcaccaggcggtcagcagctgcccttggcaccctccagccctcagaagttgcgtaggagacacagcgcctccactgaggcacctctctgggaataacgttccccagcaccccaaatggatttccagtcaattcagaagcattttaccagtgaagccctcattattccagttcactgttaaagccagtaattctctatattaaactttccctgttcggtttatactccggagtataaaccgaacaggggtggccaagctgctgtgggccgccgccgtgcagaaccgctggaactcacgcttggggcgacggctacagttggattttgcccctgcaggcaggttcggtgtcgatactggcgttgatagcgctgctgccgtttgacgtggcgaatatgggcttgtttctcggcctgatcgccgtgttgtcgtagttcgcagccacccagga

SEQ ID NO: 735373 - DNA, 2179 bp, Homo sapiens
gtaagtgaccggagttcctagagccccaaatttgaagtccgctctacagcctccgcattcagggcctctgttggcggccacgagagcagaaagccgtgaggcagcaggctaagcctggcaagccccgtactgggagtgcaaacctgtggctagtgggggccaggaaggatctgtgagggtcgcaggcggaggagacgctttagcgagcgagaggaggcagggacttggctgagagtatccaatggggatgagggagtggctgccgaagagcgacgcgactaaccaatcagagggagggatgacacaaggagctaatggacaggcaagggtggggcctgtaggataagagagcttggaagggattgttcgaggatgtgggatttggtcttagaagaccgaagatgaattccctgcgcctggtcgcccccatgtggaatgggcgtatcaggggcatccatcgcctgggtgcggcagtggccccagagggcaatcagaagaagaaaaggacaatactccagttcctgaccaactatttctacgatgtggaggctctgagggattacttgctccaaagggagatgtacaaggtgcatgagaaaaatcggtttcgagacaaggagtggatcaggccagataagtatggccatttctctcaggagttctggaatttctgtgaagtgcctgtcgaagctgtggatgccggtgactgtgacatcaactacgagggcctggataacctcctccgcctgaaggagctccagtccttgtcgctgcagcgctgctgccacgtggacgactggtgtctcagccgcctctacccactggccgactcgttgcaggagctctcgctggccggttgcccccgcatctccgaacggggcctcgcctgcctccaccacctccagaacctccgcaggctggacatctcggacctccctgccgtgtccaaccctggcctcactcagatattggtggaggagatgctgcccaattgcgaggttgtgggagtcgactgggctgagggcctgaagtcagggccggaggagcagcctcgggacacagccagccctgtccctgcctagcctttagccctgtccccactcacgtggcttctcagcgggctgcatggaatgtctggtagctcaccacacttctggcttccatttgtcttcactcaacgtcagggtgggggagtggtgctggccaatcacaggagagagcgtgagttcccagtatttattcctggctgcccttggctaaaggtcacagctcctgtcaccctgtcaggcagccctttccatgcccctgttcaggcctggggaggtaaaggctcaggctgttagtagccgcagagagccacactcaccttgtcaggagactcttctcaaactgtccttatgtgagtgcactgccatttcttgcagggaccctgactgacacaggggctactactgacactttacagggatggttctcccccgtgcagggccgctgtgcccactgcaggacatgcagcatccttcgccccactccactcactaaaggccagcgcaccccaggccccatagtattgctggttatggatttattgactttatgttccaaattcagctttttcagttggctgttttttgaaaggggataagctttgtcagtagagggcaccgaacaggcattataggaggaaaggcgcctccttcgtggttcttgttggttgtgcttctgcctctggacgccgcagtgcatgtggcttccccagcacccagctcctgaagcaccaggcggtcagcagctgcccttggcaccctccagccctcagaagttgcgtaggagacacagcgcctccactgaggcacctctctgggaataacgttccccagcaccccaaatggatttccagtcaattcagaagcattttaccagtgaagccctcattattccagttcactgttaaagccagtaattctctatattaaactttccctgttcggtttatactccggagtataaaccgaacaggctatcagcacccctactagttctaaccacatgactcctcccccttatactaatagctagccaatcccacctatcaaaagaaaccacaacccgaaaaaaactatatattaccatactaatcctactacaactattcctaattataaccttcaccgccacc

SEQ ID NO: 735374 - DNA, 2058 bp, Homo sapiens
gtaagtgaccggagttcctagagccccaaatttgaagtccgctctacagcctccgcattcagggcctctgttggcggccacgagagcagaaagccgtgaggcagcaggctaagcctggcaagccccgtactgggagtgcaaacctgtggctagtgggggccaggaaggatctgtgagggtcgcaggcggaggagacgctttagcgagcgagaggaggcagggacttggctgagagtatccaatggggatgagggagtggctgccgaagagcgacgcgactaaccaatcagagggagggatgacacaaggagctaatggacaggcaagggtggggcctgtaggataagagagcttggaagggattgttcgaggatgtgggatttggtcttagaagaccgaagatgaattccctgcgcctggtcgcccccatgtggaatgggcgtatcaggggcatccatcgcctgggtgcggcagtggccccagagggcaatcagaagaagaaaaggacaatactccagttcctgaccaactatttctacgatgtggaggctctgagggattacttgctccaaagggagatgtacaaggtgcatgagaaaaatcggtttcgagacaaggagtggatcaggccagataagtatggccatttctctcaggagttctggaatttctgtgaagtgcctgtcgaagctgtggatgccggtgactgtgacatcaactacgagggcctggataacctcctccgcctgaaggagctccagtccttgtcgctgcagcgctgctgccacgtggacgactggtgtctcagccgcctctacccactggccgactcgttgcaggagctctcgctggccggttgcccccgcatctccgaacggggcctcgcctgcctccaccacctccagaacctccgcaggctggacatctcggacctccctgccgtgtccaaccctggcctcactcagatattggtggaggagatgctgcccaattgcgaggttgtgggagtcgactgggctgagggcctgaagtcagggccggaggagcagcctcgggacacagccagccctgtccctgcctagcctttagccctgtccccactcacgtggcttctcagcgggctgcatggaatgtctggtagctcaccacacttctggcttccatttgtcttcactcaacgtcagggtgggggagtggtgctggccaatcacaggagagagcgtgagttcccagtatttattcctggctgcccttggctaaaggtcacagctcctgtcaccctgtcaggcagccctttccatgcccctgttcaggcctggggaggtaaaggctcaggctgttagtagccgcagagagccacactcaccttgtcaggagactcttctcaaactgtccttatgtgagtgcactgccatttcttgcagggaccctgactgacacaggggctactactgacactttacagggatggttctcccccgtgcagggccgctgtgcccactgcaggacatgcagcatccttcgccccactccactcactaaaggccagcgcaccccaggccccatagtattgctggttatggatttattgactttatgttccaaattcagctttttcagttggctgttttttgaaaggggataagctttgtcagtagagggcaccgaacaggcattataggaggaaaggcgcctccttcgtggttcttgttggttgtgcttctgcctctggacgccgcagtgcatgtggcttccccagcacccagctcctgaagcaccaggcggtcagcagctgcccttggcaccctccagccctcagaagttgcgtaggagacacagcgcctccactgaggcacctctctgggaataacgttccccagcaccccaaatggatttccagtcaattcagaagcattttaccagtgaagccctcattattccagttcactgttaaagccagtaattctctatattaaactttccctgttcggtttatactccggagtataaaccgaacaggattatattatctgaagctccccttttgggcggaatgtg

SEQ ID NO: 735375 - DNA, 2101 bp, Homo sapiens
gtaagtgaccggagttcctagagccccaaatttgaagtccgctctacagcctccgcattcagggcctctgttggcggccacgagagcagaaagccgtgaggcagcaggctaagcctggcaagccccgtactgggagtgcaaacctgtggctagtgggggccaggaaggatctgtgagggtcgcaggcggaggagacgctttagcgagcgagaggaggcagggacttggctgagagtatccaatggggatgagggagtggctgccgaagagcgacgcgactaaccaatcagagggagggatgacacaaggagctaatggacaggcaagggtggggcctgtaggataagagagcttggaagggattgttcgaggatgtgggatttggtcttagaagaccgaagatgaattccctgcgcctggtcgcccccatgtggaatgggcgtatcaggggcatccatcgcctgggtgcggcagtggccccagagggcaatcagaagaagaaaaggacaatactccagttcctgaccaactatttctacgatgtggaggctctgagggattacttgctccaaagggagatgtacaaggtgcatgagaaaaatcggtttcgagacaaggagtggatcaggccagataagtatggccatttctctcaggagttctggaatttctgtgaagtgcctgtcgaagctgtggatgccggtgactgtgacatcaactacgagggcctggataacctcctccgcctgaaggagctccagtccttgtcgctgcagcgctgctgccacgtggacgactggtgtctcagccgcctctacccactggccgactcgttgcaggagctctcgctggccggttgcccccgcatctccgaacggggcctcgcctgcctccaccacctccagaacctccgcaggctggacatctcggacctccctgccgtgtccaaccctggcctcactcagatattggtggaggagatgctgcccaattgcgaggttgtgggagtcgactgggctgagggcctgaagtcagggccggaggagcagcctcgggacacagccagccctgtccctgcctagcctttagccctgtccccactcacgtggcttctcagcgggctgcatggaatgtctggtagctcaccacacttctggcttccatttgtcttcactcaacgtcagggtgggggagtggtgctggccaatcacaggagagagcgtgagttcccagtatttattcctggctgcccttggctaaaggtcacagctcctgtcaccctgtcaggcagccctttccatgcccctgttcaggcctggggaggtaaaggctcaggctgttagtagccgcagagagccacactcaccttgtcaggagactcttctcaaactgtccttatgtgagtgcactgccatttcttgcagggaccctgactgacacaggggctactactgacactttacagggatggttctcccccgtgcagggccgctgtgcccactgcaggacatgcagcatccttcgccccactccactcactaaaggccagcgcaccccaggccccatagtattgctggttatggatttattgactttatgttccaaattcagctttttcagttggctgttttttgaaaggggataagctttgtcagtagagggcaccgaacaggcattataggaggaaaggcgcctccttcgtggttcttgttggttgtgcttctgcctctggacgccgcagtgcatgtggcttccccagcacccagctcctgaagcaccaggcggtcagcagctgcccttggcaccctccagccctcagaagttgcgtaggagacacagcgcctccactgaggcacctctctgggaataacgttccccagcaccccaaatggatttccagtcaattcagaagcattttaccagtgaagccctcattattccagttcactgttaaagccagtaattctctatattaaactttccctgttcggtttatactccggagtataaaccgaacaggcctgccatagaaaatgcaaccacagaaataaaatggattgctttttttccctgtagtgaaaatacatttaaatctatctca

SEQ ID NO: 735376 - DNA, 2203 bp, Homo sapiens
gtaagtgaccggagttcctagagccccaaatttgaagtccgctctacagcctccgcattcagggcctctgttggcggccacgagagcagaaagccgtgaggcagcaggctaagcctggcaagccccgtactgggagtgcaaacctgtggctagtgggggccaggaaggatctgtgagggtcgcaggcggaggagacgctttagcgagcgagaggaggcagggacttggctgagagtatccaatggggatgagggagtggctgccgaagagcgacgcgactaaccaatcagagggagggatgacacaaggagctaatggacaggcaagggtggggcctgtaggataagagagcttggaagggattgttcgaggatgtgggatttggtcttagaagaccgaagatgaattccctgcgcctggtcgcccccatgtggaatgggcgtatcaggggcatccatcgcctgggtgcggcagtggccccagagggcaatcagaagaagaaaaggacaatactccagttcctgaccaactatttctacgatgtggaggctctgagggattacttgctccaaagggagatgtacaaggtgcatgagaaaaatcggtttcgagacaaggagtggatcaggccagataagtatggccatttctctcaggagttctggaatttctgtgaagtgcctgtcgaagctgtggatgccggtgactgtgacatcaactacgagggcctggataacctcctccgcctgaaggagctccagtccttgtcgctgcagcgctgctgccacgtggacgactggtgtctcagccgcctctacccactggccgactcgttgcaggagctctcgctggccggttgcccccgcatctccgaacggggcctcgcctgcctccaccacctccagaacctccgcaggctggacatctcggacctccctgccgtgtccaaccctggcctcactcagatattggtggaggagatgctgcccaattgcgaggttgtgggagtcgactgggctgagggcctgaagtcagggccggaggagcagcctcgggacacagccagccctgtccctgcctagcctttagccctgtccccactcacgtggcttctcagcgggctgcatggaatgtctggtagctcaccacacttctggcttccatttgtcttcactcaacgtcagggtgggggagtggtgctggccaatcacaggagagagcgtgagttcccagtatttattcctggctgcccttggctaaaggtcacagctcctgtcaccctgtcaggcagccctttccatgcccctgttcaggcctggggaggtaaaggctcaggctgttagtagccgcagagagccacactcaccttgtcaggagactcttctcaaactgtccttatgtgagtgcactgccatttcttgcagggaccctgactgacacaggggctactactgacactttacagggatggttctcccccgtgcagggccgctgtgcccactgcaggacatgcagcatccttcgccccactccactcactaaaggccagcgcaccccaggccccatagtattgctggttatggatttattgactttatgttccaaattcagctttttcagttggctgttttttgaaaggggataagctttgtcagtagagggcaccgaacaggcattataggaggaaaggcgcctccttcgtggttcttgttggttgtgcttctgcctctggacgccgcagtgcatgtggcttccccagcacccagctcctgaagcaccaggcggtcagcagctgcccttggcaccctccagccctcagaagttgcgtaggagacacagcgcctccactgaggcacctctctgggaataacgttccccagcaccccaaatggatttccagtcaattcagaagcattttaccagtgaagccctcattattccagttcactgttaaagccagtaattctctatattaaactttccctgttcggtttatggagtataaaccgaacagggtcttgggaagggacagtgtctaagtgtctgggtgccatccagagcatttggcaggggcagctgcaggatgagtgtgttcccaggggagtgagagcagcagctatatggcacttgtttgctactgccctctttttttctttttgccaaacctgaggtgactagtgtcacaggtggagcccatctcaca

SEQ ID NO: 735377 - DNA, 1178 bp, Homo sapiens; identical to SEQ ID NO: 78283
  misc_feature (1091)..(1091): n is a, c, g, or t
  misc_feature (1123)..(1123): n is a, c, g, or t
  misc_feature (1127)..(1128): n is a, c, g, or t
  misc_feature (1131)..(1131): n is a, c, g, or t

SEQ ID NO: 735378 - DNA, 232 bp, Homo sapiens
ctgtgcttctgtgcattattctgagaataaatttctgtttcaaactgtataaaaaaaaaaaaaacacaacacagaaagagcgacacaccaaaaaaacacagaggacaagacaaagcagcgaaaacacacccaaagggggcgcacaccatagacaggcgcacaaaaaaaaaataccggcggtgtggtaaaaaaacagacagagggaggaaaaacacaagggggtaacacacaa

SEQ ID NO: 735379 - DNA, 3000 bp, Homo sapiens; identical to SEQ ID NO: 447184

SEQ ID NO: 735380 - DNA, 3488 bp, Homo sapiens; identical to SEQ ID NO: 299989

SEQ ID NO: 735381 - DNA, 2987 bp, Homo sapiens; identical to SEQ ID NO: 299990

SEQ ID NO: 735382 - DNA, 2332 bp, Homo sapiens; identical to SEQ ID NO: 299994

SEQ ID NO: 735383 - DNA, 2708 bp, Homo sapiens; identical to SEQ ID NO: 367150

SEQ ID NO: 735384 - DNA, 2557 bp, Homo sapiens; identical to SEQ ID NO: 367151

SEQ ID NO: 735385 - DNA, 2502 bp, Homo sapiens; identical to SEQ ID NO: 367152

SEQ ID NO: 735386 - DNA, 2488 bp, Homo sapiens; identical to SEQ ID NO: 367142

SEQ ID NO: 735387 - DNA, 2346 bp, Homo sapiens; identical to SEQ ID NO: 367143

SEQ ID NO: 735388 - DNA, 1755 bp, Homo sapiens; identical to SEQ ID NO: 367154

SEQ ID NO: 735389 - DNA, 2402 bp, Homo sapiens; identical to SEQ ID NO: 349322

SEQ ID NO: 735390 - DNA, 3113 bp, Homo sapiens; identical to SEQ ID NO: 349344

SEQ ID NO: 735391 - DNA, 2348 bp, Homo sapiens; identical to SEQ ID NO: 349324

SEQ ID NO: 735392 - DNA, 2348 bp, Homo sapiens; identical to SEQ ID NO: 349324

SEQ ID NO: 735393 - DNA, 2316 bp, Homo sapiens; identical to SEQ ID NO: 349327

SEQ ID NO: 735394 - DNA, 2153 bp, Homo sapiens; identical to SEQ ID NO: 349350

SEQ ID NO: 735395 - DNA, 2056 bp, Homo sapiens; identical to SEQ ID NO: 349332

SEQ ID NO: 735396 - DNA, 2049 bp, Homo sapiens; identical to SEQ ID NO: 349351
  misc_feature (30)..(31): n is a, c, g, or t
  misc_feature (33)..(33): n is a, c, g, or t
  misc_feature (35)..(35): n is a, c, g, or t

SEQ ID NO: 735397 - DNA, 2349 bp, Homo sapiens; identical to SEQ ID NO: 349333

SEQ ID NO: 735398 - DNA, 2081 bp, Homo sapiens; identical to SEQ ID NO: 349334

SEQ ID NO: 735399 - DNA, 1710 bp, Homo sapiens; identical to SEQ ID NO: 349353

SEQ ID NO: 735400 - DNA, 1493 bp, Homo sapiens; identical to SEQ ID NO: 349335

SEQ ID NO: 735401 - DNA, 1358 bp, Homo sapiens; identical to SEQ ID NO: 349336
  misc_feature (30)..(31): n is a, c, g, or t
  misc_feature (33)..(33): n is a, c, g, or t
  misc_feature (35)..(35): n is a, c, g, or t

SEQ ID NO: 735402 - DNA, 1947 bp, Homo sapiens; identical to SEQ ID NO: 349354

SEQ ID NO: 735403 - DNA, 1978 bp, Homo sapiens; identical to SEQ ID NO: 349337

SEQ ID NO: 735404 - DNA, 1605 bp, Homo sapiens; identical to SEQ ID NO: 349355

SEQ ID NO: 735405 - DNA, 851 bp, Homo sapiens; identical to SEQ ID NO: 349356

SEQ ID NO: 735406 - DNA, 1152 bp, Homo sapiens; identical to SEQ ID NO: 349339

SEQ ID NO: 735407 - DNA, 1101 bp, Homo sapiens; identical to SEQ ID NO: 349340

SEQ ID NO: 735408 - DNA, 1018 bp, Homo sapiens; identical to SEQ ID NO: 349357

SEQ ID NO: 735409 - DNA, 1981 bp, Homo sapiens
tttaagagatggaggcctcactctatcatccaggctggagtgcagtgctaagatcctagctcactgtaaccttaaaatattttttttgtagagactgtgtctcgctttgttgcccaggctggtcttgggctccttgcctcaagtgattctcctgcctcactcttccccaaaatttttgaaatagatttctttgcatatgagattttagtatataatggcactattatttcaatatcgggaaaattatgttttgacaattggttatccaccctctccaagaaaaaagttagaagcacatttacaccttacagagaaatatgactatcatatttgacatatctaatcataaaataacatgttagaggcaaatgtagaaaaaaggaacgtattatcaagtaggacatggagtcctagaagccataaagaaatcgagaacaagttgggctatgcaacgatctaaaacttcagcatggtgaaaggcaccaaaaacttgtaaaagacagttgaagggaaatgtatacaacttatagaaaataacagaatgctgttacatatacagagcagtggggaacaacttgccatgcacactgataggcgaatcaccctgaagaatccaaatggataaagaaaattcgtgaaattcttaacctcattaatcagaagaatatgaatgaaaccacattttcctggctcttggtagattacaatataaaatttggataatatccagtaatggtattagtgtgggaaaacaggtacttgatcactattagcagtgtaacttcgtcccctatctcctcggatggcatgacctatcaacattataaacgtgaatttttttcaaacagtaattccagatctaggaattttatcccattggaataaataggtagatataaatattgttttcttgtagaattgtttcaattatgacaaataagaattcagcgccctgccaagtggattgactaaattgtagttattcagtactgtgttgtgcgattagtagaaagcagttaagctctacatacacttctatggagtggcgtctacaacatatttaatgaaatatgtggtttacagaaccttacaggtaaaatgacctagtcatagagtcaaaattaatactgaatatatatgtgtgtatgtacatacaaacacatgcacagcctcagtatctatgttgaaatctggttttgtctttaacacacagacttttcctagcattttgcgggcactttccctttcttcattctgtattgttctgatgaactgtcagtgacacatgctccaagtaagacaaccagattcattctctgtattttgattagagacacagggacaggaacagggccaatattcagctttatgaaccagtatggccagaatggatgttttgttttagtcaatattcattttgattggtgggacctttattatacctgctgtgaagtatgtgggatatgactcctaggctggaattcgtttgaattaagtcatcctttggcagcaacctaaggattcctccacctgtcactgagatccattgagatgattcctgctttctcacatcttggttttgagttaaattctttgagtctgtgaactacctggtattctaatatttctcattttaagtcagagtcaaatactttggttctcaagcaaagagagctagccaatgcagaaatttatactacagaatgattactagactgtagagaagcagagtattcaagatggatgtccagtgagacagatcaaagcacagatgaattcctaatcctattttgtgctgtgaaaggatattcatgatatagcaggatcctaagcccattgtgcactagggtctggatagctcctaccaaaaacaaaggtattgaggaatactacttccaaaagtatatatgatacctgtttataatgaaattgggtaattaaaatttcaaggctacttgaaattctggccttaaggaattga

SEQ ID NO: 735410 - DNA, 1725 bp, Homo sapiens
gcaactacggagccgcagcccagggagcaagtctccgcaaacttgctccgcattcacggcaggacttcccagccgctgtggatgttcaggaaaaccgagtctgttctgttagcgtggcctttgaatgcttcaaaaataaacagaggataaccaaccgcgggaggaaatttttagctggagagagttgtagttcctgtgtctgtctccaggactgtgatatgtgttgactgaagagctaactacaagttcatcgtgaagaataaatgagataagctacctcaagtgcctgtaccaaaatagactcacaatacattgaccctggaaacagacgggggattcttataagtcacaaaagaaaataaataacttcatccatggagggaaagagacagcttgagaaaagggactttggaaaaaggctgtctctagacagcagtcttgtggaatacatggactccaataaatacattgagcatctgctgactcagcttgaggagcaacacaggagtctctggagggagaagttggcagtggcccgactacagcgagaagttgcccaaagaacaagtgagggggccatgcatgagaagctgatacatgaactggaagaggagagacacttacgtcttcaaagcgagaagcggttgcaggaggtgaccctagagtctgaacgcaacagaattcagatgcgtagcttgcagcagcagttctccaggtattgttcttagctgagcagattgcttcctgaggtgcatctctctctgcaccagtaacaccttggattgaatgtccattgagtaagcttctgttgtgtttgatgagctaatttaccaaccatttagaccttctgttctgactgaagcatcctatggcattcagaccaattttctgaaactttccatttgtacctgacatgagctttattgaaactggttgtcttttctttcctgatggctttcctaagggtcttcaagtgagttgtggtggctttgcagccagtaggcttgtcctttaaaaggccagccaaaattcctcagggatctagaactagaaataccatttgacccagccatcccattactaggtgtatacccaaaggattataaatcatgctgctataaagacacatgcacacgtatgtttattgaggcactattcacaatagcaaagacttggaaccaacccaaatgtccaacaacgataaactggattaagaaaatgtggcacatatacaccattgaatactatgcagccataaaaaatgaagagttcatgtcctttgtagggacatggatgaaactggaaaccatcattctcagcaaactatcacaaggacaaaaaaccaaataccacatgttctcactcataggtgggaattgaacaatgagcacacatggacacaggaaggggaacatcacactccggggactgttgtggggtggggggagcggggagggataacattgggagatatacctaatgctaaatgacgagttaatgggtgcagcacaccagcatggcacatgtatacatatgtaacaaacctgcacattgtgcacatgtaccctaaaacttaaagtataataataaaaaaaaaaaaggccagccaaaaggatgagatttcagtggtcatcgcaatcctattttaagacaaagagagagtatgtgactctaatgattcaataaactcttcctcattgcttagaggaaacactaaggagtagt

SEQ ID NO: 735411 - DNA, 1322 bp, Homo sapiens
gcaactacggagccgcagcccagggagcaagtctccgcaaacttgctccgcattcacggcaggacttcccagccgctgtggatgttcaggaaaaccgagtctgttctgttagcgtggcctttgaatgcttcaaaaataaacagaggataaccaaccgcgggaggaaatttttagctggagagagttgtagttcctgtgtctgtctccaggactgtgatatgtgttgactgaagagctaactacaagttcatcgtgaagaataaatgagataagctacctcaagtgcctgtaccaaaatagactcacaatacattgaccctggaaacagacgggggattcttataagtcacaaaagaaaataaataacttcatccatggagggaaagagacagcttgagaaaagggactttggaaaaaggctgtctctagacagcagtcttgtggaatacatggactccaataaatacattgagcatctgctgactcagcttgaggagcaacacaggagtctctggagggagaagttggcagtggcccgactacagcgagaagttgcccaaagaacaagtgagggggccatgcatgagaagctgatacatgaactggaagaggagagacacttacgtcttcaaagcgagaagcggttgcaggaggtgaccctagagtctgaacgcaacagaattcagatgcgtagcttgcagcagcagttctccaggatggaagaaacagtacgaaatctattgcagagtcaaggatctccagagcagaaaaaagaagaaactgttaatataatggtctatcaggaaaagctgtcagaggaagagagaaaacataaggaagctttggaagatcttcacatggtggttgatgaggattcgaggagtgaaagcagcagtacagatgagggaaaagaaaagaccaaattgctattagagagattgaaagctctagagggcagcatgttgacttcagttaagttttacctggttgggtggattccattgtcatcggtgtcttctggctctcagggcctttctggaacctgaagctgttggcaacatctgtgctgtccaccctgctctgagtctgctgcagatgtgttgaaaaggtgactctctccactgggaaaatgaaaaactttatgaccggcaacatcatttttacagccaagtgaactcctttgataaaatattcctcttttctgagcttatttccttcctgtgtgtaaagaggggtttgggcagattgtaagctttctctcagctctttgcatctatgttatcacacttcctcactatacagaaataaatatccttattgcc

SEQ ID NO: 735412 - DNA, 479 bp, Homo sapiens
ctgaggaggcagaggacggcccggagtctcgtagcgcaccgccctggtcccacaccccccgcagccctaggaggatcggtgtgctgagcttgtggccaggagctccccgagccactttcgcgcgagcagcagaaaacctgagccgcggcccggcgagtgtcggcggcgctctggggaggagaggctgggaaggggctgcgagagatgctacttaagaacgtgaggctgagaggcggacttggtcagatctgcctgcgtgacaagctcaggacaggacgcttctgcccttgcattactgttgtaaaagtttccacccagtccctggtcgcactgcgttcccatcccggcagatgtgaactcaaaaacttcctccgctgtgcagtttcaattggcagacacaccctgtacctgaatgactcagaaggaggcagaatgaacaaacaacagacccctgacttctgggattttgtgagtttgcc

SEQ ID NO: 735413 - DNA, 272 bp, Homo sapiens
gcggccgcctcgggtcctgacgtcgggcgccctccggccgtcactcagcgctcggccccgccccgccgcggctgccgcagcagcgccgcggccggaggagctaccgccgccaccgccgccaccgcctcctgggactcggaacgcagcgctcggagccatggcctcggcccccgcgggtaagaggccgctggacacgagggcggcgggagggcagcgcccggcccccgcaccctctctcggctgacccgcggctctcgtttcttgtcccacag

SEQ ID NO: 735414 - DNA, 299 bp, Homo sapiens; identical to SEQ ID NO: 187317

SEQ ID NO: 735415 - DNA, 241 bp, Homo sapiens
tcaactcggttcttcttgactttgtcctgtagtcccgtcagaggtggatggtggatgagatgagagagactcaggggaggtaaaaactgctcctgacctttgcccaggactttcccagagcctcagagcaggatccctgggtctggcttggcacccctgggggatgtgcttgcaggaaggggctgtcaccgtgcctcatagtgacttccactgggtcttctctggctggtggtggcggcag

SEQ ID NO: 735416 - DNA, 319 bp, Homo sapiens; identical to SEQ ID NO: 249700

SEQ ID NO: 735417 - DNA, 481 bp, Homo sapiens
gcggccgcctcgggtcctgacgtcgggcgccctccggccgtcactcagcgctcggccccgccccgccgcggctgccgcagcagcgccgcggccggaggagctaccgccgccaccgccgccaccgcctcctgggactcggaacgcagcgctcggagccatggcctcggcccccgcggaggcggagacccgacagaggctgctacgcaccgtcaagaaggaggtctctggcaacctggcttctgggagcttttgctagtgatgagcatctgtggcagcttaggcaccctggttcgatgtggtcccttctcaaggtctcactttcctgctttctaagtggacgaggttggacagctccaggattccaagaacctcaactcatctaatttggccagtgtcactctctgagagccaagtctttgttttttccactctgaatttgccaagtatttattcaagactaattaaaactaagtagctggta

SEQ ID NO: 735418 - DNA, 2479 bp, Homo sapiens
gtccggattcctcgatgcgcaccgcctcctgggactcggaacgcagcgctcggagccatggcctcggcccccgcggaggcggagacccgacagaggctgctacgcaccgtcaagaaggaggtgaagcagatcatggaggaggctgtgacacgcaagtttgtccacgaagacagcagccacatcatctccttctgtgcggctgtggaggcctgcgttctgcacgggcttcggcggcgggcggctggcttcctacgcagcaataagattgcagccctctttatgaaagtgggcaagaacttcccgccggctgaggatctgagccgcaaggtgcaagacctggagcagctgatcgagagcgcgagaaaccagattcaaggcctccaggagaatgtgcggaagctgccgaagctgcccaacttgtccccacttgccatcaagcatctgtggattcgcacagccttgtttgagaaggtcctggacaaaattgtgcattaccttgtggaaaacagcagtaaatactatgagaaggaagctctcctgatggaccctgtggacggccccatccttgcatctttgttggtggggccctgtgccctagagtacaccaagatgaagactgcagatcacttctggaccgatccctcggctgacgaacttgtccagaggcaccgcatccacagctcccacgtgcggcaggactcgcccaccaagcgtcctgccctctgtatccagaagaggcattccagtggcagcatggatgaccggccatccctctctgcccgcgactacgtggagtccctgcatcagaactcccgtgccacccttctctatggcaaaaacaacgttcttgttcagccgagggacgacatggaggctgtgccagggtacctgtccctgcaccagacggctgacgtcatgaccttgaagtggacacccaaccagctgatgaacgggtctgtgggggacctggactatgagaagagcgtctactgggactatgccatgaccatccgcttggaggagattgtctacctgcactgccaccagcaagttgacagcggcgggacagtggtattggtcagccaggacgggatccagaggccgcccttccgcttccccaagggcgggcacctcctgcagttcctctcgtgcctggagaatgggctgctcccacatgggcagttggacccgccactgtggtcccagaggggtaagggcaaagtgtttcctaaactgcgcaagcgaagccctcagggttctgccgagtccacatcttcagacaaagatgatgatgaggccacggattatgtgttcaggatcatctaccctggcatgcagtcggaattcgggctggcctactgcagacacctgtccaccgtgagaacccacctatcagccctggtcaatcacatgatcgtgtctccagacttgccctgcgatgctggacagggactgacagccaggatctgggagcagtaccttcacgacagcacaagttacgaggagcaggagctgctgcgcctcatctactacgggggcatccagcctgagatccgcaaggccgtgtggcccttcctcctgggccactaccagttcgggatgacggaaacagaaaggaaagaggtggacgagcagattcatgcctgctatgcacagaccatggctgagtggctgggctgcgaggcgatcgtgcggcagagggagcgggagtcccatgcggccgccctggccaaatgctcatccggggccagcttggacagccacctgcaccggatgttgcacagggactcaaccatcagcaatgagccagagctgctggatctgtacacggtgaacctgcaccgcatcgagaaggatgtgcagaggtgcgaccgcaactactggtacttcacgcccgccaacttggagaagctgcgtaacatcatgtgcagctacatctggcagcacattgagatcggctatgtccagggcatgtgtgatcttctggctccactgctggtcattctggatgatgaggcccttgccttcagctgcttcacggagctcatgaagaggatgaaccagaacttcccccacggaggcgccatggacacgcactttgcaaacatgagatcgttgatccagatcctggactcagagctgtttgagctgatgcatcagaacggggactatactcacttctacttctgctaccgctggttcctgctggatttcaagcgagaactcgtctatgatgacgtcttcttggtctgggagaccatctgggcagccaaacacgtctcctctgcgcactacgtcctgttcattgcgctggctctggtggaagtctaccgtgacatcattttggagaacaacatggatttcacagacatcatcaaattctttaatgaaatggctgagcgacacaacaccaagcaagtcctgaagctggcgcgggacctcgtgtacaaggtgcagactctgattgagaacaagtgag

SEQ ID NO: 735419 - DNA, 2406 bp, Homo sapiens
gtccggattcctcgatgcgcaccgcctcctgggactcggaacgcagcgctcggagccatggcctcggcccccgcggaggcggagacccgacagaggctgctacgcaccgtcaagaaggaggtgaagcagatcatggaggaggctgtgacacgcaagtttgtccacgaagacagcagccacatcatctccttctgtgcggctgtggaggcctgcgttctgcacgggcttcggcggcgggcggctggcttcctacgcagcaataagattgcagccctctttatgaaagtgggcaagaacttcccgccggctgaggatctgagccgcaaggtgcaagacctggagcagctgatcgagagcgcgagaaaccagattcaaggcctccaggagaatgtgcggaagctgccgaagctgcccaacttgtccccacttgccatcaagcatctgtggattcgcacagccttgtttgagaaggtcctggacaaaattgtgcattaccttgtggaaaacagcagtaaatactatgagaaggaagctctcctgatggaccctgtggacggccccatccttgcatctttgttggtggggccctgtgccctagagtacaccaagatgaagactgcagatcacttctggaccgatccctcggctgacgaacttgtccagaggcaccgcatccacagctcccacgtgcggcaggactcgcccaccaagcgtcctgccctctgtatccagaagaggcattccagtggcagcatggatgaccggccatccctctctgcccgcgactacgtggagtccctgcatcagaactcccgtgccacccttctctatggcaaaaacaacgttcttgttcagccgagggacgacatggaggctgtgccagggtacctgtccctgcaccagacggctgacgtcatgaccttgaagtggacacccaaccagctgatgaacgggtctgtgggggacctggactatgagaagagcgtctactgggactatgccatgaccatccgcttggaggagattgtctacctgcactgccaccagcaagttgacagcggcgggacagtggtattggtcagccaggacgggatccagaggccgcccttccgcttccccaagggcgggcacctcctgcagttcctctcgtgcctggagaatgggctgctcccacatgggcagttggacccgccactgtggtcccagaggggtaagggcaaagtgtttcctaaactgcgcaagcgaagccctcagggttctgccgagtccacatcttcagacaaagatgatgatgaggccacggattatgtgttcaggatcatctaccctggcatgcagtcggaattcgtgccccaggatctgatggacgtctctgtaagcaacctcccatccctgtggcagcccagtccccggaagtcctcctgttcatcctgttcacagagtggctcggctgatggtagctcgaccaatggctgcaaccatgagagggctcccctgaaacttctctgtgacaatatgaagtaccagatcctctccagagccttctatggatggctggcctactgcagacacctgtccaccgtgagaacccacctatcagccctggtcaatcacatgatcgtgtctccagacttgccctgcgatgctggacagggactgacagccaggatctgggagcagtaccttcacgacagcacaagttacgaggagcaggagctgctgcgcctcatctactacgggggcatccagcctgagatccgcaaggccgtgtggcccttcctcctgggccactaccagttcgggatgacggaaacagaaaggaaagaggtggacgagcagattcatgcctgctatgcacagaccatggctgagtggctgggctgcgaggcgatcgtgcggcagagggagcgggagtcccatgcggccgccctggccaaatgctcatccggggccagcttggacagccacctgcaccggatgttgcacagggactcaaccatcagcaatgaggtgatgggcggctggcctcggggagcgcgggggctggggaaggtcagggtctgcttcattgggctgttctaagagtggtgaagactgggtgtctggggcctggtgacagtctcacccctggctttttctttaagagtgtgcggtgactttggaatcagacctgaattcaaactctagtcccaccatttagtagttctggggttccctaccagtaccttttcttctgggcctcagttttctgcatctgtaaaatgggaataatcaggtgtagaggaggttcgtgtacagtccaaacaagacaatgtatataaagtgcctggcgcactgcctgactttcattgattcaacaaatgcttattgagtatctactatgtgcaggtactatcaggaatatcc

SEQ ID NO: 735420 - DNA, 2284 bp, Homo sapiens
gtccggattcctcgatgcgcaccgcctcctgggactcggaacgcagcgctcggagccatggcctcggcccccgcggaggcggagacccgacagaggctgctacgcaccgtcaagaaggaggtgaagcagatcatggaggaggctgtgacacgcaagtttgtccacgaagacagcagccacatcatctccttctgtgcggctgtggaggcctgcgttctgcacgggcttcggcggcgggcggctggcttcctacgcagcaataagattgcagccctctttatgaaagtgggcaagaacttcccgccggctgaggatctgagccgcaaggtgcaagacctggagcagctgatcgagagcgcgagaaaccagattcaaggcctccaggagaatgtgcggaagctgccgaagctgcccaacttgtccccacttgccatcaagcatctgtggattcgcacagccttgtttgagaaggtcctggacaaaattgtgcattaccttgtggaaaacagcagtaaatactatgagaaggaagctctcctgatggaccctgtggacggccccatccttgcatctttgttggtggggccctgtgccctagagtacaccaagatgaagactgcagatcacttctggaccgatccctcggctgacgaacttgtccagaggcaccgcatccacagctcccacgtgcggcaggactcgcccaccaagcgtcctgccctctgtatccagaagaggcattccagtggcagcatggatgaccggccatccctctctgcccgcgactacgtggagtccctgcatcagaactcccgtgccacccttctctatggcaaaaacaacgttcttgttcagccgagggacgacatggaggctgtgccagggtacctgtccctgcaccagacggctgacgtcatgaccttgaagtggacacccaaccagctgatgaacgggtctgtgggggacctggactatgagaagagcgtctactgggactatgccatgaccatccgcttggaggagattgtctacctgcactgccaccagcaagttgacagcggcgggacagtggtattggtcagccaggacgggatccagaggccgcccttccgcttccccaagggcgggcacctcctgcagttcctctcgtgcctggagaatgggctgctcccacatgggcagttggacccgccactgtggtcccagaggggtaagggcaaagtgtttcctaaactgcgcaagcgaagccctcagggttctgccgagtccacatcttcagacaaagatgatgatgaggccacggattatgtgttcaggatcatctaccctggcatgcagtcggaattcgtgccccaggatctgatggacgtctctgtaagcaacctcccatccctgtggcagcccagtccccggaagtcctcctgttcatcctgttcacagagtggctcggctgatggtagctcgaccaatggctgcaaccatgagagggctcccctgaaacttctctgtgacaatatgaagtaccagatcctctccagagccttctatggatggctggcctactgcagacacctgtccaccgtgagaacccacctatcagccctggtcaatcacatgatcgtgtctccagacttgccctgcgatgctggacagggactgacagccaggatctgggagcagtaccttcacgacagcacaagttacgaggagcaggagctgctgcgcctcatctactacgggggcatccagcctgagatccgcaaggccgtgtggcccttcctcctgggccactaccagttcgggatgacggaaacagaaaggaaagaggtggacgagcagattcatgcctgctatgcacagaccatggctgagtggctgggctgcgaggcgatcgtgcggcagagggagcgggagtcccatgcggccgccctggccaaatgctcatccggggccagcttggacagccacctgcaccggatgttgcacagggactcaaccatcagcaatgagtcctcccagagctgcagttcgggccgccagaacatccgcctgcacagcgactccagcagcagcacacaggtgtttgagtctgtggatgaggtggagcaggtggaggctgaaggcagattggaggagaaacagcccaagatccccaatgggaacctagtgaacggcacttgttccccagactcgggtcatccttcctcccataacttctcctcgggcctctcagagcactcagagcccagtctgagcacagaagacagtgtcttggacgcccagc

SEQ ID NO: 735421 - DNA, 1972 bp, Homo sapiens
taggttaaaatcttcattgtagaaagtttttaggaaagcaataaaatgtaaaataagattcgatgtggaaaacagcagtaaatactatgagaaggaagctctcctgatggaccctgtggacggccccatccttgcatctttgttggtggggccctgtgccctagagtacaccaagatgaagactgcagatcacttctggaccgatccctcggctgacgaacttgtccagaggcaccgcatccacagctcccacgtgcggcaggactcgcccaccaagcgtcctgccctctgtatccagaagaggcattccagtggcagcatggatgaccggccatccctctctgcccgcgactacgtggagtccctgcatcagaactcccgtgccacccttctctatggcaaaaacaacgttcttgttcagccgagggacgacatggaggctgtgccagggtacctgtccctgcaccagacggctgacgtcatgaccttgaagtggacacccaaccagctgatgaacgggtctgtgggggacctggactatgagaagagcgtctactgggactatgccatgaccatccgcttggaggagattgtctacctgcactgccaccagcaagttgacagcggcgggacagtggtattggtcagccaggacgggatccagaggccgcccttccgcttccccaagggcgggcacctcctgcagttcctctcgtgcctggagaatgggctgctcccacatgggcagttggacccgccactgtggtcccagaggggtaagggcaaagtgtttcctaaactgcgcaagcgaagccctcagggttctgccgagtccacatcttcagacaaagatgatgatgaggccacggattatgtgttcaggatcatctaccctggcatgcagtcggaattcgtgccccaggatctgatggacgtctctgtaagcaacctcccatccctgtggcagcccagtccccggaagtcctcctgttcatcctgttcacagagtggctcggctgatggtagctcgaccaatggctgcaaccatgagagggctcccctgaaacttctctgtgacaatatgaagtaccagatcctctccagagccttctatggatggctggcctactgcagacacctgtccaccgtgagaacccacctatcagccctggtcaatcacatgatcgtgtctccagacttgccctgcgatgctggacagggactgacagccaggatctgggagcagtaccttcacgacagcacaagttacgaggagcaggagctgctgcgcctcatctactacgggggcatccagcctgagatccgcaaggccgtgtggcccttcctcctgggccactaccagttcgggatgacggaaacagaaaggaaagaggtggacgagcagattcatgcctgctatgcacagaccatggctgagtggctgggctgcgaggcgatcgtgcggcagagggagcgggagtcccatgcggccgccctggccaaatgctcatccggggccagcttggacagccacctgcaccggatgttgcacagggactcaaccatcagcaatgaggtgatgggcggctggcctcggggagcgcgggggctggggaaggtcagggtctgcttcattgggctgttctaagagtggtgaagactgggtgtctggggcctggtgacagtctcacccctggctttttctttaagagtgtgcggtgactttggaatcagacctgaattcaaactctagtcccaccatttagtagttctggggttccctaccagtaccttttcttctgggcctcagttttctgcatctgtaaaatgggaataatcaggtgtagaggaggttcgtgtacagtccaaacaagacaatgtatataaagtgcctggcgcactgcctgactttcattgattcaacaaatgcttattgagtatctactatgtgcaggtactatcaggaatatcc

SEQ ID NO: 735422 - DNA, 1724 bp, Homo sapiens
atctcagggaggaaggagctggggatttgaattcctgggcctgaggaatgagggtctgagacgaggactcctgggtctgaaggaagagggagctgggggcaatggctccgatgaggaaccctatgggcacccgctgagcaccggctacccgtagctctccggccgctggggccgggtgttcacagtgcggctgggcccgcgccctgcggtggggctgtgcggctacgcagcgctgcgggacgcgttagtgctacaggcggatgcggtctctggccgcgggtccatggcagtcttcgaacgcttcacacgcggaaacagtgaggccccggcgctggacttgccggcccggacgctccaggctgggcgggtaaatggtagaggcgggcaaatgggggcggggcctaatagagactccagctaatgaggtgcaaacggccgagagagggcggggcggcgctaaagcgtaaggttagaatggaggttcatcctgcagccaacaggagaaaagagcctaagagtcaaagcccgagagccagcctaggtcagggatggagcccagcaaaggcggggccaatgtgtggatagggcacttggaggtctggtaaagaagcaaagggaacgaagccggccgcaggagtcggaggcccctaaagggatgtagccagtgacccggcgcttcctggatagggcgtggccggctcccgggcccgcctcctttcccgtccccaccacaggaatcttgttttctaaccggccgtgctggtggacactgcgcaattttgcacttggagcgcttaagaagttcgggttgggtacgcggaccgtcgaggcgcgcgtcctggaggaggcggcttgtctgctagacgaatttcaagccaccattgcttcggcctggccgggagagcggaagggcctggtgtgggagagtcccttgcactgccaagacggggccactggaaggtatttgggtggaagaaagccagtaagcccatggggctggctgggggcaggaccacgcgttatgaccaccgtcctgttcctacccccaggagccccgtttgaccccgtgcggctactggataatgctgtatccaatgttatctgttcttgtcttcgggaaccgctatcgctatggggacccggagttcctgaggctcctgaacctcttcagtgacaacttctgcatcattagttccagatggggcgaggtgagagggccggccacaatctttccttggtgcgtccagccttatgccaaatcccgagtacacagacctacctacaatggatcattagaatgggacagattcctggaagagttctagaacatccagtatcaaagtcctagtccaatctccctgtagggaaactaaggcctagtggccttgtgcagggcccatgttgagacagaccctgtctctccagatgtacatttgcctgtccctcatggactggctcccgggcccgcaccaccgaatcttccgaaacttttcggagctgcgggtcatctctgagcaaattcaacgacactggcagatgcggcagccagcggagccccgcgatttcattgattgcttgaccagatgggtaaggcatgggtcccagctctctaaactctatccatgccgcccaccaacaggtgcctggcacgcggcagacatctccttctgcccacagtaacagcaggacccggaaagccatttccaggagtagacgtcggtaat

SEQ ID NO: 735423 - DNA, 882 bp, Homo sapiens
ttcattgacatagggcattatgtacgtgatatcagtgcttatgaagaattggtatccaagctgaatttattagtggaggatgaactgaagcaaattgctgaaaatattgaaagcattaatcagaacaaagctcctttgaaatatataggcaactatgcaattttggatcatcttggaagtggagcttttggctgtgtttacaaggttagaaagcatagtggtcaaaatcttttagcaatgaaagaggtcaatttacataacccagcatttggaaaggataagaaagatcgagacagcagcgtaaggaatattgtttctgaattaacaataattaaagagcagctttatcatcccaacattgtacgttattacaaaacatttctggaaaatgataggttgtacatagttatggagctgatagaaggagccccgcttggagagcatttcagttctttgaaggaaaaacatcaccattttactgaagaaagactatggaaaatatttatacagctgtgcttagctcttcgatacttacacaaggagaagaggattgtccatagagatctgacaccaaacaacattatgttgggggataaggacaaagtaaccgttactgactttggcctggcaaagcaaaaacaagaaaacagtaaactcacgtctgtggttggaacaatcctgtattcttgtggtttcatgagaagatgcaaagaaactgtggcaggctaacatgtaccttgtaagctgcaagcttatatgatgtctacttatcctcttaacagtaaggctgacctactcgttactttctgagagaagaataattttcttttgtttcactgtgtactgtttttataaaataaacaataaaatttgatcataaaa

SEQ ID NO: 735424 - DNA, 668 bp, Homo sapiens; identical to SEQ ID NO: 77517

SEQ ID NO: 735425 - DNA, 744 bp, Homo sapiens
ttcattgacatagggcattatgtacgtgatatcagtgcttatgaagaattggtatccaagctgaatttattagtggaggatgaactgaagcaaattgctgaaaatattgaaagcattaatcagaacaaagctcctttgaaatatataggcaactatgcaattttggatcatcttggaagtggagcttttggctgtgtttacaagctttatcatcccaacattgtacgttattacaaaacatttctggaaaatgataggttgtacatagttatggagctgatagaaggagccccgcttggagagcatttcagttctttgaaggaaaaacatcaccattttactgaagaaagactatggaaaatatttatacagctgtgcttagctcttcgatacttacacaaggagaagaggattgtccatagagatctgacaccaaacaacattatgttgggggataaggacaaagtaaccgttactgactttggcctggcaaagcaaaaacaagaaaacagtaaactcacgtctgtggttggaacaatcctgtattcttgtggtttcatgagaagatgcaaagaaactgtggcaggctaacatgtaccttgtaagctgcaagcttatatgatgtctacttatcctcttaacagtaaggctgacctactcgttactttctgagagaagaataattttcttttgtttcactgtgtactgtttttataaaataaacaataaaatttgatcataaaa

SEQ ID NO: 735426 - DNA, 1558 bp, Homo sapiens
taggagtcctgaaaagggactatatcgtctgcatcttggctctgaaccctgaggtccaaggctgaaaggaattgtgagcaggggagggtctgagttctggctctgtcttcaccctattgggctggtgaggcccagggagggtgggagcccagtcactggtccaagccaccaattggaccatgtgatcatgaggcccagagagaatgtgggtggcataaaagccacagagcaagccaggagcagagccagggctggacagcaccccaccctcccctgccactgttcctcccaccaggcgcttcccaactgcctgcgggatctggactaaacggagcccagggtttaagcaccccatattgaggaccggggcctccaggttacttgtgccagttatgagggtaggactgggatcctggttcacagtgactgctatgacccctgccctgcctcacccctgcagggagccccccagtccctgaggcccacagccctggatttgacggggccagctttatcggaggtgtcgtgctggtgttgagcctacaggcggtggctttctttgtgctgcacttcctcaaggccaaggacagcacctaccagacgctgtgagtacctggccagcagcaagtacctgagtcccagctcacctcctggttcctgccccaccgttccccttcagtacccagggtgctgtcttctccatgggcaagccctcaggacggtgacagcgtgctccatgtgagccacaccccttttgtctcctccagttggggtgtttcctttgtcagatgttggctgggaccaggactcagcctgggccagtctaggagcccagctgagccctcctgtgtcttttcccttcatgctgccagcagggaagagaaccagtaggtgccagcccaggcaagcctgtggcccgcgtttctgtggctgtgggcaggagctgggccttgtgtctagttgggttttgctctgagaaggggagctgtgcctgaggccctctgtgtgccgtgtgtgctgtggggcgggtcgccacagcctgtgttaaagtgtttgctcttcctctgctgcctcctctcgaggcagggggtccttggctggctgaggcagtgtcaccttcctgagtgtcctctttggcctctgcagaatctgacccctttgggcctggactccatcctgaggggaaaggaggatgcagagggtggcctctgggcacccttgtgggtaagcggggggcgggggcgggaaaaactctggccgccagtttttggctcctgcgggcaccaagcaggctcagtgtctgatgcctgacatctcctcctgtcctgggcctggaacctgcagctgagaaaatccctcaaccacctcgtctcctccatcgcccctgctgggccccccagcctgacagtgggttgtatgcctgcctctttccaccaactggcctgggcactgcccccaaataaaggaactctgcactgcacttcatgtcctgtgtcttgggctgtgtgtggattggatggggtgagggtacggccattgtcctcttcttaacgggaat

SEQ ID NO: 735427 - DNA, 1017 bp, Homo sapiens
taggagtcctgaaaagggactatatcgtctgcatcttggctctgaaccctgaggtccaaggctgaaaggaattgtgagcaggggagggtctgagttctggctctgtcttcaccctattgggctggtgaggcccagggagggtgggagcccagtcactggtccaagccaccaattggaccatgtgatcatgaggcccagagagaatgtgggtggcataaaagccacagagcaagccaggagcagagccagggctggacagcaccccaccctcccctgccactgttcctcccaccaggcgcttcccaactgcctgcgggatctggactaaacggagcccagggtttaagcaccccatattgaggaccggggcctccaggttacttgtgccagttatgagggtaggactgggatcctggttcacagtgactgctatgacccctgccctgcctcacccctgcagggagccccccagtccctgaggcccacagccctggatttgacggggccagctttatcggaggtgtcgtgctggtgttgagcctacaggcggtggctttctttgtgctgcacttcctcaaggccaaggacagcacctaccagacgctaatctgacccctttgggcctggactccatcctgaggggaaaggaggatgcagagggtggcctctgggcacccttgtgggtaagcggggggcgggggcgggaaaaactctggccgccagtttttggctcctgcgggcaccaagcaggctcagtgtctgatgcctgacatctcctcctgtcctgggcctggaacctgcagctgagaaaatccctcaaccacctcgtctcctccatcgcccctgctgggccccccagcctgacagtgggttgtatgcctgcctctttccaccaactggcctgggcactgcccccaaataaaggaactctgcactgcacttcatgtcctgtgtcttgggctgtgtgtggattggatggggtgagggtacggccattgtcctcttcttaacgggaat

SEQ ID NO: 735428 - DNA, 777 bp, Homo sapiens
ttaactttaacagaccgcaccaaccagcagttcctcagcgctttgccagccttcctccaaaagtccgggaagctgaaagtccccggacgggtggataccgtcaagctggccaagcacaaagagcttgctcctacggatgagaactgcttctacgacgcgagctgcttccacagcgcggcacctgtacctccggggtggcgctggagttggctccatgaccaagatctatgggggacgtcagagaaacggcgtcatgcccagccacttcagccgaggctccaagagtgtggccgccgggtcctccacagcctggaggggctgaaaatggtggaaaaggaccaatgatgcggccgccaattttttttcttcttcttttttttgtgtctgtggaggtcagcgtcagagcacgctgctgagaggtctgagtcctgctgatgcctggagtcgcggtctcggtgtttgtctttggatttctttttcttctttgattttttgtgcttctttgctttaggctcttctagaggatccttctgttcgctcctccgggctttcttttcaacatgactgtcactgttctccacactgtcgtgtctccgtttccgggactttccattttcgtgttcgtgaaaccgatcagagaggttacagttgtctccggctacaagtgcagttctgtcgtgggagaagcggtcggggtgcggggcgagggcgtggggcgcgcctgcgcgggggctgctggggcggtgccgctccctctcccgggccggctcgcagccc

SEQ ID NO: 735429 - DNA, 12372 bp, Homo sapiens
cccttgccaaagccagtcctgaaggccactgctttgccatgtggcagtgccagctacaggcaggctcagctaatgcctcagcaggaagcctggaggagtgctgcgcccggccctggggacaaagctggtgggatggcagctcccaggcctgccgcagctgctccagccgacacctgccagaggctcacagttggtgtgtctctcccaggcagtgcctcttctccagccctcctgcagcccctggcaggggctgtgggccagctctggagccagcaccagcgtccctcggccacctgtgcctcctggtcgggcttccactaccgcacctttgatggccgccactatcacttcctgggccgctgcacctacctgctggcgggtgctgcggactccacctgggctgtccacctaacacccggggaccgctgcccccagcctggacactgtcagcgggtccaggtgactatgggacccgaggaggtgctgatccaggctggaaatgtgtctgtgaaggggcagctggtacctgaagggcagtcttggctgctccacgggctgagcctgcaatggctgggggactggctggtgctgtcaggaggcctgggggtcgtggtgcggctggacaggactggctccatctccatctctgtggaccacgagctctggggacagacacaaggcctctgtgggctctacaatggctggccagaggatgacttcatggagccaggcggagggctggccatgttagcagccacctttggaaattcctggaggctccctggctcggaggtttcccctgctgagtaccacgaggcctgtctctttgcctactgcgcaggggccatggcaggcagtgggcaagaggggcggcagcaggctgtttgtgccacctttgccagctatgtccaggcctgtgccaggcggcacatccacattcgctggaggaagcctggcttctgcgagcgcctgtgccccgggggccagctctactccgactgcgtctccctctgcccacccagctgcgaggcggtgggtcagggagaggaggagtcctgcagggaagagtgtgtgagtggctgtgagtgcccgcgaggcctcttctggaatggcaccctctgtgtgcctgctgcccactgcccctgctactactgccgccagcgctatgtacccggtgacaccgtgcgccagctgtgtaacccctgcgtgtgcagggatggccgctggcactgtgcccaggcactgtgccccgccgagtgtgcagtgggtggggacgggcactacctcaccttcgatgggcggagctactccttctggggtggtcaaggttgccgctacagcctggtgcagccctatccttccacgtgccccacccccaccatcagaccccctgttccaggagctgtgctggtcaatgggcaggatgtgggcttgccctggattggcgctgagggcctcagtgtgcgccgagcttcctctgcctttctgctgctgcgctggcctggggcccaggtgctctggggactgtctgaccctgtagcctacatcaccctggacccccgccatgcccaccaggtgcagggtctgtgtggcaccttcacccagaaccagcaggacgacttcctgacaccagccggagatgtggaaactagcattgctgcctttgctagcaagttccaggtggccggcaagggaagatgcccctctgaggacagtgccctgctgtctccctgcaccacccactcccagcgccacgccttcgcagaggcggcctgtgccatcctgcacagctctgtcttccaggaatgccacaggctggtggacaaagagccattctatctgcgctgcctggcagccgtgtgtggctgtgatcccggcagtgactgcctgtgcccggtgctgtctgcctatgcgcgtcgctgtgcccaggaaggtgcctcacctccctggaggaaccagaccctctgccctgttatgtgtcctggtggccaggagtaccgagagtgtgccccagcatgcggtcaacactgcgggaaaccagaggactgtggagagctgggcagctgtgtggctggttgtaactgtcctctggggctgctgtgggaccctgagggccagtgtgtgccccccagcttgtgcccctgccagctcggagcccgtcgctatgcccctggcagtgccaccatgaaggagtgcaaccgctgggagcttgtctatgcccctggtgcctgtctcctcacctgtgacagccccagcgccaatcactcctgccctgcaggcagtactgatggctgtgtctgtccaccaggcacggtgctgctggacgagcgctgtgtgcctcctgacctctgtccctgccgtcacagtgggcagtggtacctgcccaacgccaccatccaggaagactgcaacgtttgcgtgtgccggggccggcagtggcactgcacaggccagcggcgcagtgggcggtgccaggcatcaggcgccccccactatgtgacatttgacggactggccttcacctatcctggggcctgcgagtatctgctggtgcgagaggccagtggcctattcacagtctctgcccagaacctgccctgtggggccagcggtctcacctgcaccaaagcgctggccgtgcgtctggagggcactgttgtgcacatgctcagagggactcgggtcctggtgcaactgtcccctcagttccgtggtcgcgtggctgggctgtgtggtgactttgatggagatgccagtaatgatctgcggagccgccagggcgtcctggagcccacagctgaactggctgcccactcctggcgcctcagccccctctgccctgagccaggagacctgccacacccctgcacgatgaacacacaccgggctggttgggctcgggcccgctgtggggcgctgctgcagccgctcttcacattatgccacgcggaggtccccccgcagcagcactatgagtggtgcctgtatgacgcctgcggctgcgactcggggggtgactgtgagtgcctctgctcggccattgccacctatgcagatgagtgtgcccggcatgggcaccacgtgcgctggcgtagccaggagctctgctgtctacaccagacaccctgtgccctccatggtggtcaccttggccagccagcctggtgtggttgcatccttttgcccttgtgcctcagtgatccaaggctctctcctctccacccagccctgcagtgtgaagggggacaggtatatgaggcctgtggccccacgtgtccccccacctgccatgagcagcatcctgagcccgggtggcactgccaggtggtggcctgtgtggagggctgcttctgccccgaggggactctgctgcacggacgctgtgtgctcagcacgtgccaggaaggtcaatggcattgtgggggtgacggtggccactgtgaggagcttgtgcctgcctgtgcagagggagaggccctgtgccaagagaatgggcactgtgtgccccatgggtggctttgtgacaaccaggacgactgtggcgatggctctgatgaggagggtgagtgtctttgcccatgcgtggaagcgacagggttggtcagtccttgcacatgttgtgccgccccaggctgtggggaggggcagatgacttgcagctccggccactgcctgcccctggccctgctctgtgaccgccaggatgactgtggagatggcacggatgagccgagctatccgtgcccccagggcttgctggcctgtgccgatggacgctgcctgccgccggccctgctctgcgatgggcatcctgactgtctggatgccgccgacgaggagtcctgtctggggcaggtgacctgcgtccccggggaggtgtcctgtgttgatggcacctgcctgggggccatccagctgtgtgacggagtctgggactgcccagatggagccgatgaggggccgggacactgccccctaccttctctgcccacacctcctgccagcaccttgcctggcccctccccaggctccctggacactgcgtcaagtcccctggccagcgccagccctgcgccaccctgcggccccttcgagtttcggtgcggcagcggcgagtgcaccccgcggggctggcgctgcgaccaggaggaagactgcgccgacggcagcgacgagcgcggctgcggagggccctgcgcgccgcaccacgcgccctgcgcccgcggccctcactgcgtgtcccccgagcagctgtgcgacggcgtgcggcagtgtcccgacggctcggacgagggccccgacgcctgcgttgaggctcccgcgcccccggccatgcgcggcccccctggccaagccggcgggcccacctcttcccgagcgccatccccaccttcgcctcctgaggcacagggagagggcaggaagggacaggagcggagcaggacacatctcacagtgcccgcaggctccacccagctgcctctgtgccctggcctctttccctgtggtgtggctccggggctgtgcctgacccctgagcagctctgtgatgggatcccagactgtccccagggcgaggacgagctggactgcggggggctgccagccctgggaggccccaacaggacagggcttccctgcccagaatacacctgccccaatggcacctgcataggcttccagctggtgtgtgatgggcagcctgactgtggaaggccagggcaggtgggcccctccccagaagagcagggttgtggggcctggggcccctggagcccatgggggccctgcagccggacgtgtgggccctggggccagggccggagccgccgctgctccccactcggcctcctggtgctacagaactgcccagggcctgagcaccagtctcaggcctgcttcacggcagcctgcccagtggacggtgaatggagcacctggtccccctggtctgtgtgctctgagccgtgcaggggcaccatgacgcggcaacggcagtgccactcaccccagaatgggggccgcacctgtgctgcactgcccggaggcctgcacagcacccgccagaccaagccttgccctcaggacggctgccccaatgccacttgctctggggagctgatgttccagccctgtgccccctgcccactgacctgtgatgacatctctggccaggtcacgtgcccacctgattggccctgcggcagcccgggctgctggtgcccagaagggcaggtgctgggcagcgaggggtggtgtgtgtggccccggcagtgcccctgcctggtggacggtgcccgctactggcctgggcaacgcatcaaggccgactgccagctctgcatctgccaagacggacggccccgacgctgccgactcaacccggactgcgctggtgaggcccttccctcggggtccctagtcctctccctggaccgcccagctgcacatccaccacctccttcaggctctgactgttggccctccctcagtggactgtggctggtcctcctggtcaccctgggccaagtgcctgggcccctgtggaagccagagcatccagtggtccttccggagctccaacaacccccgcccctccggccgaggtcgccagtgccgtggcatccaccgcaaggcacgcagacggagccctgtgaggggtgtgagcatcagggccaggtccaccgtgtcggggaacgctggcatgggggcccctgcagggtgtgccagtgtctgcacaacctcaccgcacactgctcaccctactgcccgctcggcagctgcccccagggctgggtcttggtggaggggacgggagaatcatgctgccactgtgccctacctggagagaaccagacggtccagcccatggccactcctgccgcagctccggctcccagtccccagatcagattccctttggccacttacattctgcctccgtcaggaggctcctgccgccctctgtcctcccctactccagcctgtctctctcttctgcacccagacccctgctattctcccctggggctggccggactggctgaggggagtctgcatgcatcgtcccagcagctggaacaccccacccaggctgccctcctgggggctcccacccaggggcccagccctcagggatggcacgctggaggggatgcttatgccaagtggcacactcggccccattacctgcagctggacctgcttcagcctcggaacctcactggcatcctagtgccggagactggctcctccaacgcatatgccagcagcttctcactccagttcagcagcaatggtctacactggcatgactatcgtgacctcctgcctggcatcttgcccctgcccaaggtatcacccgcccaaggccgatggggccagcagcccaccatgcccttttgtgggttccatagtctttgtccccaagggccttccagtgtccccgaggggcatggcctgcattcgatgcttgttgaatacctgcttttccccagaaactgggatgacctggaccctgccgtatggactttcggccgcatggtgcaggcgaggtttgtcagggtgtggccccacgatgtccaccacagcgatgtccccctgcaggtggagctgctgggctgcgagccaggggttggactccgctgtgccagtggtgagtgtgtcctgagagggggcccttgtgacggtgttctggactgcgaggatggctcggatgaggagggctgtgtgttgctgcctgagggcactggcaggtatactgtggccggccgtgcagctcacgcccttggcctggcctttgaggggacagccatgtgggaggggcccggcactgccttcacccccaaggtgcccagaccctgcatgctgaggagctgcagccggggcctggcagagactgagcactggccccctgggcaggaatcccccacgtccccgacagaagcctgggataccctctcgagggcccccaccttcctttcctgggaaggggagctgggcaagcctcacctccctctacctacacccacagagacaaggcccgtgagtcctggcccagcctccggggtgcctcaccatggggaatctgtgcagatggtgaccaccacccccataccccagatggaggccaggaccctgccaccaggtatggcagctgtgacggtggtgcccccacaccctgtgactccagcgacccctgctggtaagatgccaagcccttctacctgtgtgcaaggcctctgccagagcgtcgccccaggacccttcccacctgtgcagtgtggccccggccagacgccctgtgaggtgctgggctgcgtggaacaggcgcaggtgtgtgatggcagggaggattgcctcgacggctccgacgagaggcactgcggtgagctgctggagggcctgctgtcctgtggggccctctgttccccgagccagctgagctgtggcagcggggagtgtctgtctgctgagcggcgctgtgacctgcggcctgactgccaggatggctcggacgaggatggctgtgtggactgcgtgctggccccctggtctgtctggagcagctgcagccgcagctgtggcctgggcctcaccttccagcgccaggagctgctgcggcctcctctgccagggggcagctgcccgcgtgaccggttccgaagccagtcctgctttgtgcaggcctgcccagtggctggggcatgggccatgtgggaggcctggggaccctgcagcgtctcctgcgggggtggccatcagagtcgccagagaagctgtgtggaccccccacccaagaatggcggtgccccctgccccggggcctcccaagagagggcaccctgcggcttgcagccctgctcaggtggcacaggtaagggggtgctgggctggggacacggagggagcactgtgggcacggggcgattgggcctcccagcacctaggctcacctggtgcccatcccccaccagactgcgagctgggccgtgtgtatgtgagtgccgatctgtgccagaaggggctggtgcccccatgcccaccctcctgcctggatcccaaggccaacagaagctgcagtgggcattgtgtggaagcctcccctccctgctgtgccccttggggctgagtgccctcttccacatactcccaggatgccgctgtcccccggggctccttctgcatgacactcgctgcctgcccctctctgagtgcccctgcctggtgggcgaagagctgaagtggccaggggtgtccttcctcctgggcaactgcagccaatgcgtgtgtgagaagggggagttgctgtgccaaccagggggctgccccctgccctgcggctggtcagcctggtcctcctgggctccctgcgaccgctcctgtggctctggagtgagggccaggttcaggtctccctccaaccctccggcagcctgggggggtgccccgtgtgaaggtgaccggcaggaactgcagggctgccacacagtgtgtgggacaggtatagccgggagcctgggtgcaggagtccccccttcctcctcccaattctgtaccctgagaacacatgggatgggacccactgaccactctacgtgggggattgaggtgttcggctggacgccctggacttcctggtcctcctgctcccaaagctgccttgccccgggagggggccctggctggcgcagtcgttcccgactctgccccagccctggggattcatcctgcccaggagatgccacccaggaggagccctgcagcccccctatagagtgtacgggcttctgcgcccccggctgcacctgcccccctggtcttttcctgcacaatgctagctgcctgccccgcagccagtgcccctgccagctgcacgggcagctctatgcatcaggagcaatggctcgcctggactcctgcaacaactgcacctgtgtctctggtaagatggcatgcacctcggagcgctgcccagtggcctgtggctggagtccctggaccctgtggagtctctgtagctgcagctgcaacgtgggcattcggcgccgcttccgggcaggcactgcacccccagctgcctttgggggtgctgagtgccaaggccccaccatggaggctgaattctgcagcctgcggccatgtccagggccagtgcctggcatgtgtcccagggacaagcagtggctggactgtgcccagggccctgcctcttgtgcagagctcagcgccccaagagggactaaccagacctgccaccctggctgccactgcccctctgggatgcttctgctggtgagcccacgtggtcaccctggaccccttggagccagtgttcagcctcctgtggccctgcccggtgccatcggcaccggttctgtgccaggagctgggggatggggtccatgggggccctggtcccactgtagccggagctgtgggggaggcctgcggagccggacccgggcctgtgaccagcccccaccccagggcctgggggattactgcgaggggccacgggcacagggggaggtctgccaggctctgccctgcccagtgaccaactgcactgccattgaaggggccgagtatagcccctgtggccctccgtgccctcgctcctgtgatgacctagtgcactgcgtgtggcgctgccagcctggctgctactgcccaccaggccaggtactgagttccaacggggccatctgcgtgcagccgggtcactgcagctgcctggacctgctgaccgggcagcggcaccatccgggtgctcggctggcaaggcctgacggctgcaaccactgcacctgcctggaggggaggctgaactgcacagacctgccctgcccagactgcgggggtggccagagtctgcatccctgtgggcagccctgcccccgctcctgccaggacctgtcccctgggagtgtgtgccagccaggctctgtgggctgccagcccacttgtgggtgccccctgggccagctctcccaggacgggctgtgcgtgcccccagcccactgccgctgccagtaccagcctggagccatggccccctcctttgtccccagcacctgtgtggcaggcattctgcaatgccaggaggtgcctgactgcccggaccctggggtgtggagctcttggggcccttgggaagactgcagtgtttcgtgtgggggcggggagcagctgcgctcccggcgctgtgctcgtcctccctgcccagggcctgcccgccagagccgcacatgcagcacacaggtctgcagagaggcaggctgcccggctggccgcctgtaccgtgaatgccagcccggcgagggatgccccttctcctgcgcccacgtcacgcagcaggtgggctgcttctctgagggctgcgaggagggctgccactgccccgagggcaccttccagcaccgcctggcctgtgtgcaggagtgcccttgtgtgctgacagcctggctgctgcaggagctgggagccaccataggtgaccctggtcagcccctcgggcctggagatgagctggactcaggccagacacttcgtacaagctgtggcaactgctcgtgtgcacacgggaagctgtcttgctccctggacgactgcttcgaggccgatggtggtttcggtccctggagcccgtggggcccgtgctcccgctcctgtggagggctgggcacccgtacccgcagccgccagtgtgtgctcaccatgcccaccctcagtgagctgcccgtgtgccctggccctggctgtggggctgggaactgttcctggacctcctgggccccgtgggaaccttgctcccgcagctgcggagtgggccagcagcgccgcctgcgggcataccgtccccctgggcccggcgggcactggtgccccaacatccttactgcctaccaagagcgccgcttctgcaacctgcgagcctgcccagaggccggctgcccagcaggcatggaggtggtcacctgtgccaaccgctgcccccgccgctgctcagacctccaggagggaattgtgtgtcaggacgaccaggtctgccagaagggctgccgctgcccaaaggggtccctggagcaggatggtggctgcgtgccaattgggcactgtgactgcaccgatgcccagggccacagctgggccccggggagccagcaccaggatgcctgcaacaactgctcatgccaagctgggcagctctcctgcacggctcagccctgcccgcctcccacccactgtgcctggagccactggtcggcctggagtccctgcagccactcatgcgggcccagagggcagcagagccgcttccgctgcggcccgggcctggcctctcgctctgggtcctgcccctgcctgatggccaaggccgaccccacctgcaacagcaccttcctccacctggacacccagggctgctactcagggccctgcccagactcatgccagtggagtctgtgggggccatggagcccctgccaggtgccctgcagtggggggttcaggctacgctggagagaggcagaggccctctgtggaggaggctgccgggagccatgggctcaagacagaaagctgcaacggagggccctgcccagcacctgtgtcaacgagtccctggtgtgcccacaccaggagtgtccagtccttgggccttggtcagcctggagcagttgctcggccccctgtggtgggggcactatggagcgacatcggacttgtgaggggggtcctggggtggcaccatgccaggcccaggacacagagcaacggcaggagtgtaacctgcagccctgccctgagtgcccccctggccaggtgcttagtgcctgtgccacctcatgcccgtgcctctgctggcatctgcagcctggtgccatctgtgtgcaggagccctgccagcctggctgtggctgccctggagggcagcattctctgccctggggcctcaccctgaccctggaagagcaggcccaggagctgcccccagggactgtgctcacccggaactgcacccgctgtgtctgccacggtggagccttcagctgctccctcgttgactgtcagggtgagatagtgccccctggggaaacgtggcagcaggtggccccgggggagctggggctctgcgagcagacgtgcctggagatgaacgccacaaagacccagagtaactgcagttcagctcgagcctcgggctgcgtgtgccagcccgggcacttccgcagccaggcaggcccctgcgtccccgaagaccactgcgagtgctggcaccttgggcgtccccacctggtgagacaccgaaccccctctgctaccactcacccattcctgaccccaagcctccccatctgtctgtaa

SEQ ID NO: 735430 - DNA, 2385 bp, Homo sapiens
cccttgccaaagccagtcctgaaggccactgctttgccatgtggcagtgccagctacaggcaggctcagctaatgcctcagcaggaagcctggaggagtgctgcgcccggccctggggacaaagctggtgggatggcagctcccaggcctgccgcagctgctccagccgacacctgccagaggctcacagttggtgtgtctctcccaggcagtgcctcttctccagccctcctgcagcccctggcaggggctgtgggccagctctggagccagcaccagcgtccctcggccacctgtgcctcctggtcgggcttccactaccgcacctttgatggccgccactatcacttcctgggccgctgcacctacctgctggcgggtgctgcggactccacctgggctgtccacctaacacccggggaccgctgcccccagcctggacactgtcagcgggtccaggtgactatgggacccgaggaggtgctgatccaggctggaaatgtgtctgtgaaggggcagctggtacctgaagggcagtcttggctgctccacgggctgagcctgcaatggctgggggactggctggtgctgtcaggaggcctgggggtcgtggtgcggctggacaggactggctccatctccatctctgtggaccacgagctctggggacagacacaaggcctctgtgggctctacaatggctggccagaggatgacttcatggagccaggcggagggctggccatgttagcagccacctttggaaattcctggaggctccctggctcggaggtttcccctgctgagtaccacgaggcctgtctctttgcctactgcgcaggggccatggcaggcagtgggcaagaggggcggcagcaggctgtttgtgccacctttgccagctatgtccaggcctgtgccaggcggcacatccacattcgctggaggaagcctggcttctgcgagcgcctgtgccccgggggccagctctactccgactgcgtctccctctgcccacccagctgcgaggcggtgggtcagggagaggaggagtcctgcagggaagagtgtgtgagtggctgtgagtgcccgcgaggcctcttctggaatggcaccctctgtgtgcctgctgcccactgcccctgctactactgccgccagcgctatgtacccggtgacaccgtgcgccagctgtgtaacccctgcgtgtgcagggatggccgctggcactgtgcccaggcactgtgccccgccgagtgtgcagtgggtggggacgggcactacctcaccttcgatgggcggagctactccttctggggtggtcaaggttgccgctacagcctggtgcagccctatccttccacgtgccccacccccaccatcagaccccctgttccaggagctgtgctggtcaatgggcaggatgtgggcttgccctggattggcgctgagggcctcagtgtgcgccgagcttcctctgcctttctgctgctgcgctggcctggggcccaggtgctctggggactgtctgaccctgtagcctacatcaccctggacccccgccatgcccaccaggtgcagggtctgtgtggcaccttcacccagaaccagcaggacgacttcctgacaccagccggagatgtggaaactagcattgctgcctttgctagcaagttccaggtggccggcaagggaagatgcccctctgaggacagtgccctgctgtctccctgcaccacccactcccagcgccacgccttcgcagaggcggcctgtgccatcctgcacagctctgtcttccaggaatgccacaggctggtggacaaagagccattctatctgcgctgcctggcagccgtgtgtggctgtgatcccggcagtgactgcctgtgcccggtgctgtctgcctatgcgcgtcgctgtgcccaggaaggtgcctcacctccctggaggaaccagaccctctgccctgttatgtgtcctggtggccaggagtaccgagagtgtgccccagcatgcggtcaacactgcgggaaaccagaggactgtggagagctgggcagctgtgtggctggttgtaactgtcctctggggctgctgtgggaccctgagggccagtgtgtgccccccagcttgtgcccctgccagctcggagcccgtcgctatgcccctggcagtgccaccatgaaggagtgcaaccgctggtgagggcagcgacctttggggcaagaggaagaatgtgggggtgaagaggtagcttgggagataacgggtggggtgcagccttgttggttgcagcgtgcatgctgggggtgacagagtgctgatcacttcccctcggtcgtggggcactttagggtccataaagcactttcgtgtgcatca

SEQ ID NO: 735431 - DNA, 7651 bp, Homo sapiens
cccttgccaaagccagtcctgaaggccactgctttgccatgtggcagtgccagctacaggcaggctcagctaatgcctcagcaggaagcctggaggagtgctgcgcccggccctggggacaaagctggtgggatggcagctcccaggcctgccgcagctgctccagccgacacctgccagaggctcacagttggtgtgtctctcccaggcagtgcctcttctccagccctcctgcagcccctggcaggggctgtgggccagctctggagccagcaccagcgtccctcggccacctgtgcctcctggtcgggcttccactaccgcacctttgatggccgccactatcacttcctgggccgctgcacctacctgctggcgggtgctgcggactccacctgggctgtccacctaacacccggggaccgctgcccccagcctggacactgtcagcgggtccaggtgactatgggacccgaggaggtgctgatccaggctggaaatgtgtctgtgaaggggcagctggtacctgaagggcagtcttggctgctccacgggctgagcctgcaatggctgggggactggctggtgctgtcaggaggcctgggggtcgtggtgcggctggacaggactggctccatctccatctctgtggaccacgagctctggggacagacacaaggcctctgtgggctctacaatggctggccagaggatgacttcatggagccaggcggagggctggccatgttagcagccacctttggaaattcctggaggctccctggctcggaggtttcccctgctgagtaccacgaggcctgtctctttgcctactgcgcaggggccatggcaggcagtgggcaagaggggcggcagcaggctgtttgtgccacctttgccagctatgtccaggcctgtgccaggcggcacatccacattcgctggaggaagcctggcttctgcgagcgcctgtgccccgggggccagctctactccgactgcgtctccctctgcccacccagctgcgaggcggtgggtcagggagaggaggagtcctgcagggaagagtgtgtgagtggctgtgagtgcccgcgaggcctcttctggaatggcaccctctgtgtgcctgctgcccactgcccctgctactactgccgccagcgctatgtacccggtgacaccgtgcgccagctgtgtaacccctgcgtgtgcagggatggccgctggcactgtgcccaggcactgtgccccgccgagtgtgcagtgggtggggacgggcactacctcaccttcgatgggcggagctactccttctggggtggtcaaggttgccgctacagcctggtgcagccctatccttccacgtgccccacccccaccatcagaccccctgttccaggagctgtgctggtcaatgggcaggatgtgggcttgccctggattggcgctgagggcctcagtgtgcgccgagcttcctctgcctttctgctgctgcgctggcctggggcccaggtgctctggggactgtctgaccctgtagcctacatcaccctggacccccgccatgcccaccaggtgcagggtctgtgtggcaccttcacccagaaccagcaggacgacttcctgacaccagccggagatgtggaaactagcattgctgcctttgctagcaagttccaggtggccggcaagggaagatgcccctctgaggacagtgccctgctgtctccctgcaccacccactcccagcgccacgccttcgcagaggcggcctgtgccatcctgcacagctctgtcttccaggaatgccacaggctggtggacaaagagccattctatctgcgctgcctggcagccgtgtgtggctgtgatcccggcagtgactgcctgtgcccggtgctgtctgcctatgcgcgtcgctgtgcccaggaaggtgcctcacctccctggaggaaccagaccctctgccctgttatgtgtcctggtggccaggagtaccgagagtgtgccccagcatgcggtcaacactgcgggaaaccagaggactgtggagagctgggcagctgtgtggctggttgtaactgtcctctggggctgctgtgggaccctgagggccagtgtgtgccccccagcttgtgcccctgccagctcggagcccgtcgctatgcccctggcagtgccaccatgaaggagtgcaaccgctgggagcttgtctatgcccctggtgcctgtctcctcacctgtgacagccccagcgccaatcactcctgccctgcaggcagtactgatggctgtgtctgtccaccaggcacggtgctgctggacgagcgctgtgtgcctcctgacctctgtccctgccgtcacagtgggcagtggtacctgcccaacgccaccatccaggaagactgcaacgtttgcgtgtgccggggccggcagtggcactgcacaggccagcggcgcagtgggcggtgccaggcatcaggcgccccccactatgtgacatttgacggactggccttcacctatcctggggcctgcgagtatctgctggtgcgagaggccagtggcctattcacagtctctgcccagaacctgccctgtggggccagcggtctcacctgcaccaaagcgctggccgtgcgtctggagggcactgttgtgcacatgctcagagggactcgggtcctggtgcaactgtcccctcagttccgtggtcgcgtggctgggctgtgtggtgactttgatggagatgccagtaatgatctgcggagccgccagggcgtcctggagcccacagctgaactggctgcccactcctggcgcctcagccccctctgccctgagccaggagacctgccacacccctgcacgatgaacacacaccgggctggttgggctcgggcccgctgtggggcgctgctgcagccgctcttcacattatgccacgcggaggtccccccgcagcagcactatgagtggtgcctgtatgacgcctgcggctgcgactcggggggtgactgtgagtgcctctgctcggccattgccacctatgcagatgagtgtgcccggcatgggcaccacgtgcgctggcgtagccaggagctctgctgtctacaccagacaccctgtgccctccatggtggtcaccttggccagccagcctggtgtggttgcatccttttgcccttgtgcctcagtgatccaaggctctctcctctccacccagccctgcagtgtgaagggggacaggtatatgaggcctgtggccccacgtgtccccccacctgccatgagcagcatcctgagcccgggtggcactgccaggtggtggcctgtgtggagggctgcttctgccccgaggggactctgctgcacggacgctgtgtgctcagcacgtgccaggaaggtcaatggcattgtgggggtgacggtggccactgtgaggagcttgtgcctgcctgtgcagagggagaggccctgtgccaagagaatgggcactgtgtgccccatgggtggctttgtgacaaccaggacgactgtggcgatggctctgatgaggagggtgagtgtctttgcccatgcgtggaagcgacagggttggtcagtccttgcacatgttgtgccgccccaggctgtggggaggggcagatgacttgcagctccggccactgcctgcccctggccctgctctgtgaccgccaggatgactgtggagatggcacggatgagccgagctatccgtgcccccagggcttgctggcctgtgccgatggacgctgcctgccgccggccctgctctgcgatgggcatcctgactgtctggatgccgccgacgaggagtcctgtctggggcaggtgacctgcgtccccggggaggtgtcctgtgttgatggcacctgcctgggggccatccagctgtgtgacggagtctgggactgcccagatggagccgatgaggggccgggacactgccccctaccttctctgcccacacctcctgccagcaccttgcctggcccctccccaggctccctggacactgcgtcaagtcccctggccagcgccagccctgcgccaccctgcggccccttcgagtttcggtgcggcagcggcgagtgcaccccgcggggctggcgctgcgaccaggaggaagactgcgccgacggcagcgacgagcgcggctgcggagggccctgcgcgccgcaccacgcgccctgcgcccgcggccctcactgcgtgtcccccgagcagctgtgcgacggcgtgcggcagtgtcccgacggctcggacgagggccccgacgcctgcgttgaggctcccgcgcccccggccatgcgcggcccccctggccaagccggcgggcccacctcttcccgagcgccatccccaccttcgcctcctgaggcacagggagagggcaggaagggacaggagcggagcaggacacatctcacagtgcccgcaggctccacccagctgcctctgtgccctggcctctttccctgtggtgtggctccggggctgtgcctgacccctgagcagctctgtgatgggatcccagactgtccccagggcgaggacgagctggactgcggggggctgccagccctgggaggccccaacaggacagggcttccctgcccagaatacacctgccccaatggcacctgcataggcttccagctggtgtgtgatgggcagcctgactgtggaaggccagggcaggtgggcccctccccagaagagcagggttgtggggcctggggcccctggagcccatgggggccctgcagccggacgtgtgggccctggggccagggccggagccgccgctgctccccactcggcctcctggtgctacagaactgcccagggcctgagcaccagtctcaggcctgcttcacggcagcctgcccagtggacggtgaatggagcacctggtccccctggtctgtgtgctctgagccgtgcaggggcaccatgacgcggcaacggcagtgccactcaccccagaatgggggccgcacctgtgctgcactgcccggaggcctgcacagcacccgccagaccaagccttgccctcaggacggctgccccaatgccacttgctctggggagctgatgttccagccctgtgccccctgcccactgacctgtgatgacatctctggccaggtcacgtgcccacctgattggccctgcggcagcccgggctgctggtgcccagaagggcaggtgctgggcagcgaggggtggtgtgtgtggccccggcagtgcccctgcctggtggacggtgcccgctactggcctgggcaacgcatcaaggccgactgccagctctgcatctgccaagacggacggccccgacgctgccgactcaacccggactgcgctggtgaggcccttccctcggggtccctagtcctctccctggaccgcccagctgcacatccaccacctccttcaggctctgactgttggccctccctcagtggactgtggctggtcctcctggtcaccctgggccaagtgcctgggcccctgtggaagccagagcatccagtggtccttccggagctccaacaacccccgcccctccggccgaggtcgccagtgccgtggcatccaccgcaaggcacgcagacggagccctgtgaggggtgtgagcatcagggccaggtccaccgtgtcggggaacgctggcatgggggcccctgcagggtgtgccagtgtctgcacaacctcaccgcacactgctcaccctactgcccgctcggcagctgcccccagggctgggtcttggtggaggggacgggagaatcatgctgccactgtgccctacctggagagaaccagacggtccagcccatggccactcctgccgcagctccggctcccagtccccagatcagattccctttggccacttacattctgcctccgtcaggaggctcctgccgccctctgtcctcccctactccagcctgtctctctcttctgcacccagacccctgctattctcccctggggctggccggactggctgaggggagtctgcatgcatcgtcccagcagctggaacaccccacccaggctgccctcctgggggctcccacccaggggcccagccctcagggatggcacgctggaggggatgcttatgccaagtggcacactcggccccattacctgcagctggacctgcttcagcctcggaacctcactggcatcctagtgccggagactggctcctccaacgcatatgccagcagcttctcactccagttcagcagcaatggtctacactggcatgactatcgtgacctcctgcctggcatcttgcccctgcccaaggtatcacccgcccaaggccgatggggccagcagcccaccatgcccttttgtgggttccatagtctttgtccccaagggccttccagtgtccccgaggggcatggcctgcattcgatgcttgttgaatacctgcttttccccagaaactgggatgacctggaccctgccgtatggactttcggccgcatggtgcaggcgaggtttgtcagggtgtggccccacgatgtccaccacagcgatgtccccctgcaggtggagctgctgggctgcgagccaggggttggactccgctgtgccagtggtgagtgtgtcctgagagggggcccttgtgacggtgttctggactgcgaggatggctcggatgaggagggctgtgtgttgctgcctgagggcactggcaggtatactgtggccggccgtgcagctcacgcccttggcctggcctttgaggggacagccatgtgggaggggcccggcactgccttcacccccaaggtgcccagaccctgcatgctgaggagctgcagccggggcctggcagagactgagcactggccccctgggcaggaatcccccacgtccccgacagaagcctgggataccctctcgagggcccccaccttcctttcctgggaaggggagctgggcaagcctcacctccctctacctacacccacagagacaaggcccgtgagtcctggcccagcctccggggtgcctcaccatggggaatctgtgcagatggtgaccaccacccccataccccagatggaggccaggaccctgccaccaggtatggcagctgtgacggtggtgcccccacaccctgtgactccagcgacccctgctggtaagatgccaagcccttctacctgtgtgcaaggcctctgccagagcgtcgccccaggacccttcccacctgtgcagtgtggccccggccagacgccctgtgaggtgctgggctgcgtggaacaggcgcaggtgtgtgatggcagggaggattgcctcgacggctccgacgagaggcactgcggtgagctgctggagggcctgctgtcctgtgggtagggggtggcacttatccttcagtgtaggaaagtgtctgccctcatttgtagctcatattggaaaggatctgggggaggcttgggcagcagggaatggagaaaatgggtaaaaacaggagtgtgtgtgtctttgggggtggtcaagaccgggaataggataggccttgggtctcagcctattttataaaacctgtttgacctttgaagagactcatctactcactcaccca

SEQ ID NO: 735432 - DNA, 11813 bp, Homo sapiens
cccttgccaaagccagtcctgaaggccactgctttgccatgtggcagtgccagctacaggcaggctcagctaatgcctcagcaggaagcctggaggagtgctgcgcccggccctggggacaaagctggtgggatggcagctcccaggcctgccgcagctgctccagccgacacctgccagaggctcacagttggtgtgtctctcccaggcagtgcctcttctccagccctcctgcagcccctggcaggggctgtgggccagctctggagccagcaccagcgtccctcggccacctgtgcctcctggtcgggcttccactaccgcacctttgatggccgccactatcacttcctgggccgctgcacctacctgctggcgggtgctgcggactccacctgggctgtccacctaacacccggggaccgctgcccccagcctggacactgtcagcgggtccaggtgactatgggacccgaggaggtgctgatccaggctggaaatgtgtctgtgaaggggcagctggtacctgaagggcagtcttggctgctccacgggctgagcctgcaatggctgggggactggctggtgctgtcaggaggcctgggggtcgtggtgcggctggacaggactggctccatctccatctctgtggaccacgagctctggggacagacacaaggcctctgtgggctctacaatggctggccagaggatgacttcatggagccaggcggagggctggccatgttagcagccacctttggaaattcctggaggctccctggctcggaggtttcccctgctgagtaccacgaggcctgtctctttgcctactgcgcaggggccatggcaggcagtgggcaagaggggcggcagcaggctgtttgtgccacctttgccagctatgtccaggcctgtgccaggcggcacatccacattcgctggaggaagcctggcttctgcgagcgcctgtgccccgggggccagctctactccgactgcgtctccctctgcccacccagctgcgaggcggtgggtcagggagaggaggagtcctgcagggaagagtgtgtgagtggctgtgagtgcccgcgaggcctcttctggaatggcaccctctgtgtgcctgctgcccactgcccctgctactactgccgccagcgctatgtacccggtgacaccgtgcgccagctgtgtaacccctgcgtgtgcagggatggccgctggcactgtgcccaggcactgtgccccgccgagtgtgcagtgggtggggacgggcactacctcaccttcgatgggcggagctactccttctggggtggtcaaggttgccgctacagcctggtgcagccctatccttccacgtgccccacccccaccatcagaccccctgttccaggagctgtgctggtcaatgggcaggatgtgggcttgccctggattggcgctgagggcctcagtgtgcgccgagcttcctctgcctttctgctgctgcgctggcctggggcccaggtgctctggggactgtctgaccctgtagcctacatcaccctggacccccgccatgcccaccaggtgcagggtctgtgtggcaccttcacccagaaccagcaggacgacttcctgacaccagccggagatgtggaaactagcattgctgcctttgctagcaagttccaggtggccggcaagggaagatgcccctctgaggacagtgccctgctgtctccctgcaccacccactcccagcgccacgccttcgcagaggcggcctgtgccatcctgcacagctctgtcttccaggaatgccacaggctggtggacaaagagccattctatctgcgctgcctggcagccgtgtgtggctgtgatcccggcagtgactgcctgtgcccggtgctgtctgcctatgcgcgtcgctgtgcccaggaaggtgcctcacctccctggaggaaccagaccctctgccctgttatgtgtcctggtggccaggagtaccgagagtgtgccccagcatgcggtcaacactgcgggaaaccagaggactgtggagagctgggcagctgtgtggctggttgtaactgtcctctggggctgctgtgggaccctgagggccagtgtgtgccccccagcttgtgcccctgccagctcggagcccgtcgctatgcccctggcagtgccaccatgaaggagtgcaaccgctgggagcttgtctatgcccctggtgcctgtctcctcacctgtgacagccccagcgccaatcactcctgccctgcaggcagtactgatggctgtgtctgtccaccaggcacggtgctgctggacgagcgctgtgtgcctcctgacctctgtccctgccgtcacagtgggcagtggtacctgcccaacgccaccatccaggaagactgcaacgtttgcgtgtgccggggccggcagtggcactgcacaggccagcggcgcagtgggcggtgccaggcatcaggcgccccccactatgtgacatttgacggactggccttcacctatcctggggcctgcgagtatctgctggtgcgagaggccagtggcctattcacagtctctgcccagaacctgccctgtggggccagcggtctcacctgcaccaaagcgctggccgtgcgtctggagggcactgttgtgcacatgctcagagggactcgggtcctggtgcaactgtcccctcagttccgtggtcgcgtggctgggctgtgtggtgactttgatggagatgccagtaatgatctgcggagccgccagggcgtcctggagcccacagctgaactggctgcccactcctggcgcctcagccccctctgccctgagccaggagacctgccacacccctgcacgatgaacacacaccgggctggttgggctcgggcccgctgtggggcgctgctgcagccgctcttcacattatgccacgcggaggtccccccgcagcagcactatgagtggtgcctgtatgacgcctgcggctgcgactcggggggtgactgtgagtgcctctgctcggccattgccacctatgcagatgagtgtgcccggcatgggcaccacgtgcgctggcgtagccaggagctctgctgtctacaccagacaccctgtgccctccatggtggtcaccttggccagccagcctggtgtggttgcatccttttgcccttgtgcctcagtgatccaaggctctctcctctccacccagccctgcagtgtgaagggggacaggtatatgaggcctgtggccccacgtgtccccccacctgccatgagcagcatcctgagcccgggtggcactgccaggtggtggcctgtgtggagggctgcttctgccccgaggggactctgctgcacggacgctgtgtgctcagcacgtgccaggaaggtcaatggcattgtgggggtgacggtggccactgtgaggagcttgtgcctgcctgtgcagagggagaggccctgtgccaagagaatgggcactgtgtgccccatgggtggctttgtgacaaccaggacgactgtggcgatggctctgatgaggagggtgagtgtctttgcccatgcgtggaagcgacagggttggtcagtccttgcacatgttgtgccgccccaggctgtggggaggggcagatgacttgcagctccggccactgcctgcccctggccctgctctgtgaccgccaggatgactgtggagatggcacggatgagccgagctatccgtgcccccagggcttgctggcctgtgccgatggacgctgcctgccgccggccctgctctgcgatgggcatcctgactgtctggatgccgccgacgaggagtcctgtctggggcaggtgacctgcgtccccggggaggtgtcctgtgttgatggcacctgcctgggggccatccagctgtgtgacggagtctgggactgcccagatggagccgatgaggggccgggacactgccccctaccttctctgcccacacctcctgccagcaccttgcctggcccctccccaggctccctggacactgcgtcaagtcccctggccagcgccagccctgcgccaccctgcggccccttcgagtttcggtgcggcagcggcgagtgcaccccgcggggctggcgctgcgaccaggaggaagactgcgccgacggcagcgacgagcgcggctgcggagggccctgcgcgccgcaccacgcgccctgcgcccgcggccctcactgcgtgtcccccgagcagctgtgcgacggcgtgcggcagtgtcccgacggctcggacgagggccccgacgcctgcgttgaggctcccgcgcccccggccatgcgcggcccccctggccaagccggcgggcccacctcttcccgagcgccatccccaccttcgcctcctgaggcacagggagagggcaggaagggacaggagcggagcaggacacatctcacagtgcccgcaggctccacccagctgcctctgtgccctggcctctttccctgtggtgtggctccggggctgtgcctgacccctgagcagctctgtgatgggatcccagactgtccccagggcgaggacgagctggactgcggggggctgccagccctgggaggccccaacaggacagggcttccctgcccagaatacacctgccccaatggcacctgcataggcttccagctggtgtgtgatgggcagcctgactgtggaaggccagggcaggtgggcccctccccagaagagcagggttgtggggcctggggcccctggagcccatgggggccctgcagccggacgtgtgggccctggggccagggccggagccgccgctgctccccactcggcctcctggtgctacagaactgcccagggcctgagcaccagtctcaggcctgcttcacggcagcctgcccagtggacggtgaatggagcacctggtccccctggtctgtgtgctctgagccgtgcaggggcaccatgacgcggcaacggcagtgccactcaccccagaatgggggccgcacctgtgctgcactgcccggaggcctgcacagcacccgccagaccaagccttgccctcaggacggctgccccaatgccacttgctctggggagctgatgttccagccctgtgccccctgcccactgacctgtgatgacatctctggccaggtcacgtgcccacctgattggccctgcggcagcccgggctgctggtgcccagaagggcaggtgctgggcagcgaggggtggtgtgtgtggccccggcagtgcccctgcctggtggacggtgcccgctactggcctgggcaacgcatcaaggccgactgccagctctgcatctgccaagacggacggccccgacgctgccgactcaacccggactgcgctggtgaggcccttccctcggggtccctagtcctctccctggaccgcccagctgcacatccaccacctccttcaggctctgactgttggccctccctcagtggactgtggctggtcctcctggtcaccctgggccaagtgcctgggcccctgtggaagccagagcatccagtggtccttccggagctccaacaacccccgcccctccggccgaggtcgccagtgccgtggcatccaccgcaaggcacgcagacggagccctgtgaggggtgtgagcatcagggccaggtccaccgtgtcggggaacgctggcatgggggcccctgcagggtgtgccagtgtctgcacaacctcaccgcacactgctcaccctactgcccgctcggcagctgcccccagggctgggtcttggtggaggggacgggagaatcatgctgccactgtgccctacctggagagaaccagacggtccagcccatggccactcctgccgcagctccggctcccagtccccagatcagattccctttggccacttacattctgcctccgtcaggaggctcctgccgccctctgtcctcccctactccagcctgtctctctcttctgcacccagacccctgctattctcccctggggctggccggactggctgaggggagtctgcatgcatcgtcccagcagctggaacaccccacccaggctgccctcctgggggctcccacccaggggcccagccctcagggatggcacgctggaggggatgcttatgccaagtggcacactcggccccattacctgcagctggacctgcttcagcctcggaacctcactggcatcctagtgccggagactggctcctccaacgcatatgccagcagcttctcactccagttcagcagcaatggtctacactggcatgactatcgtgacctcctgcctggcatcttgcccctgcccaaggtatcacccgcccaaggccgatggggccagcagcccaccatgcccttttgtgggttccatagtctttgtccccaagggccttccagtgtccccgaggggcatggcctgcattcgatgcttgttgaatacctgcttttccccagaaactgggatgacctggaccctgccgtatggactttcggccgcatggtgcaggcgaggtttgtcagggtgtggccccacgatgtccaccacagcgatgtccccctgcaggtggagctgctgggctgcgagccaggggttggactccgctgtgccagtggtgagtgtgtcctgagagggggcccttgtgacggtgttctggactgcgaggatggctcggatgaggagggctgtgtgttgctgcctgagggcactggcaggtatactgtggccggccgtgcagctcacgcccttggcctggcctttgaggggacagccatgtgggaggggcccggcactgccttcacccccaaggtgcccagaccctgcatgctgaggagctgcagccggggcctggcagagactgagcactggccccctgggcaggaatcccccacgtccccgacagaagcctgggataccctctcgagggcccccaccttcctttcctgggaaggggagctgggcaagcctcacctccctctacctacacccacagagacaaggcccgtgagtcctggcccagcctccggggtgcctcaccatggggaatctgtgcagatggtgaccaccacccccataccccagatggaggccaggaccctgccaccaggtatggcagctgtgacggtggtgcccccacaccctgtgactccagcgacccctgctggtaagatgccaagcccttctacctgtgtgcaaggcctctgccagagcgtcgccccaggacccttcccacctgtgcagtgtggccccggccagacgccctgtgaggtgctgggctgcgtggaacaggcgcaggtgtgtgatggcagggaggattgcctcgacggctccgacgagaggcactgcggtgagctgctggagggcctgctgtcctgtggggccctctgttccccgagccagctgagctgtggcagcggggagtgtctgtctgctgagcggcgctgtgacctgcggcctgactgccaggatggctcggacgaggatggctgtgtggactgcgtgctggccccctggtctgtctggagcagctgcagccgcagctgtggcctgggcctcaccttccagcgccaggagctgctgcggcctcctctgccagggggcagctgcccgcgtgaccggttccgaagccagtcctgctttgtgcaggcctgcccagtggctggggcatgggccatgtgggaggcctggggaccctgcagcgtctcctgcgggggtggccatcagagtcgccagagaagctgtgtggaccccccacccaagaatggcggtgccccctgccccggggcctcccaagagagggcaccctgcggcttgcagccctgctcaggtggcacaggtaagggggtgctgggctggggacacggagggagcactgtgggcacggggcgattgggcctcccagcacctaggctcacctggtgcccatcccccaccagactgcgagctgggccgtgtgtatgtgagtgccgatctgtgccagaaggggctggtgcccccatgcccaccctcctgcctggatcccaaggccaacagaagctgcagtgggcattgtgtggaagcctcccctccctgctgtgccccttggggctgagtgccctcttccacatactcccaggatgccgctgtcccccggggctccttctgcatgacactcgctgcctgcccctctctgagtgcccctgcctggtgggcgaagagctgaagtggccaggggtgtccttcctcctgggcaactgcagccaatgcgtgtgtgagaagggggagttgctgtgccaaccagggggctgccccctgccctgcggctggtcagcctggtcctcctgggctccctgcgaccgctcctgtggctctggagtgagggccaggttcaggtctccctccaaccctccggcagcctgggggggtgccccgtgtgaaggtgaccggcaggaactgcagggctgccacacagtgtgtgggacaggtatagccgggagcctgggtgcaggagtccccccttcctcctcccaattctgtaccctgagaacacatgggatgggacccactgaccactctacgtgggggattgaggtgttcggctggacgccctggacttcctggtcctcctgctcccaaagctgccttgccccgggagggggccctggctggcgcagtcgttcccgactctgccccagccctggggattcatcctgcccaggagatgccacccaggaggagccctgcagcccccctatagagtgtacgggcttctgcgcccccggctgcacctgcccccctggtcttttcctgcacaatgctagctgcctgccccgcagccagtgcccctgccagctgcacgggcagctctatgcatcaggagcaatggctcgcctggactcctgcaacaactgcacctgtgtctctggtaagatggcatgcacctcggagcgctgcccagtggcctgtggctggagtccctggaccctgtggagtctctgtagctgcagctgcaacgtgggcattcggcgccgcttccgggcaggcactgcacccccagctgcctttgggggtgctgagtgccaaggccccaccatggaggctgaattctgcagcctgcggccatgtccagggccagtgcctggcatgtgtcccagggacaagcagtggctggactgtgcccagggccctgcctcttgtgcagagctcagcgccccaagagggactaaccagacctgccaccctggctgccactgcccctctgggatgcttctgctggtgagcccacgtggtcaccctggaccccttggagccagtgttcagcctcctgtggccctgcccggtgccatcggcaccggttctgtgccaggagctgggggatggggtccatgggggccctggtcccactgtagccggagctgtgggggaggcctgcggagccggacccgggcctgtgaccagcccccaccccagggcctgggggattactgcgaggggccacgggcacagggggaggtctgccaggctctgccctgcccagtgaccaactgcactgccattgaaggggccgagtatagcccctgtggccctccgtgccctcgctcctgtgatgacctagtgcactgcgtgtggcgctgccagcctggctgctactgcccaccaggccaggtactgagttccaacggggccatctgcgtgcagccgggtcactgcagctgcctggacctgctgaccgggcagcggcaccatccgggtgctcggctggcaaggcctgacggctgcaaccactgcacctgcctggaggggaggctgaactgcacagacctgccctgcccagactgcgggggtggccagagtctgcatccctgtgggcagccctgcccccgctcctgccaggacctgtcccctgggagtgtgtgccagccaggctctgtgggctgccagcccacttgtgggtgccccctgggccagctctcccaggacgggctgtgcgtgcccccagcccactgccgctgccagtaccagcctggagccatggccccctcctttgtccccagcacctgtgtggcaggcattctgcaatgccaggaggtgcctgactgcccggaccctggggtgtggagctcttggggcccttgggaagactgcagtgtttcgtgtgggggcggggagcagctgcgctcccggcgctgtgctcgtcctccctgcccagggcctgcccgccagagccgcacatgcagcacacaggtctgcagagaggcaggctgcccggctggccgcctgtaccgtgaatgccagcccggcgagggatgccccttctcctgcgcccacgtcacgcagcaggtgggctgcttctctgagggctgcgaggagggctgccactgccccgagggcaccttccagcaccgcctggcctgtgtgcaggagtgcccttgtgtgctgacagcctggctgctgcaggagctgggagccaccataggtgaccctggtcagcccctcgggcctggagatgagctggactcaggccagacacttcgtacaagctgtggcaactgctcgtgtgcacacgggaagctgtcttgctccctggacgactgcttcgaggccgatggtggtttcggtccctggagcccgtggggcccgtgctcccgctcctgtggagggctgggcacccgtacccgcagccgccagtgtgtgctcaccatgcccaccctcagtgagctgcccgtgtgccctggccctggctgtggggctgggaactgttcctggacctcctgggccccgtgggaaccttgctcccgcagctgcggagtgggccagcagcgccgcctgcgggcataccgtccccctgggcccggcgggcactggtgccccaacatccttactgcctaccaagagcgccgcttctgcaacctgcgagcctgcccagaggccggctgcccagcaggcatggaggtggtcacctgtgccaaccgctgcccccgccgctgctcagacctccaggagggaattgtgtgtcaggacgaccaggtctgccagaagggctgccgctgcccaaaggggtccctggagcaggatggtggctgcgtgccaattgggcactgtgactgcaccgatgcccagggccacagctgggccccggggagccagcaccaggatgcctgcaacaactgctcatgccaagctgggcagctctcctgcacggctcagccctgcccgcctcccacccactgtgcctggagccactggtcggcctggagtccctgcagccactcatgcgggcccagagggcagcagagccgcttccgctgcggcccgggcctggcctctcgctctgggtcctgcccctgcctgatggccaaggccgaccccacctgcaacagcaccttcctccacctggacacccagggctgctactcagggccctgcccagaggacagctgcacgcctccctttgagttccatgcctgcggctccccctgtgctgggctctgtgccacacacctgagccatcagctctgccaggacctgccaccctgccagccgggctgctactgccccaaggggctgctggagcaggctgggggctgcattcccccagaggagtgtaactgctggcatacctcagcagcaggagccgggatgaccctggcccctggggaccgcctgcagctgggctgtaaggagtgtgaatgccggcgtggggagctgcactgcaccagccagggctgtcaaggtcttctgcctctgagtgagtggtccgagtggtcgccctgtgggccctgcctgccgcccag

SEQ ID NO: 735433 - DNA, 12477 bp, Homo sapiens
cccttgccaaagccagtcctgaaggccactgctttgccatgtggcagtgccagctacaggcaggctcagctaatgcctcagcaggaagcctggaggagtgctgcgcccggccctggggacaaagctggtgggatggcagctcccaggcctgccgcagctgctccagccgacacctgccagaggctcacagttggtgtgtctctcccaggcagtgcctcttctccagccctcctgcagcccctggcaggggctgtgggccagctctggagccagcaccagcgtccctcggccacctgtgcctcctggtcgggcttccactaccgcacctttgatggccgccactatcacttcctgggccgctgcacctacctgctggcgggtgctgcggactccacctgggctgtccacctaacacccggggaccgctgcccccagcctggacactgtcagcgggtccaggtgactatgggacccgaggaggtgctgatccaggctggaaatgtgtctgtgaaggggcagctggtacctgaagggcagtcttggctgctccacgggctgagcctgcaatggctgggggactggctggtgctgtcaggaggcctgggggtcgtggtgcggctggacaggactggctccatctccatctctgtggaccacgagctctggggacagacacaaggcctctgtgggctctacaatggctggccagaggatgacttcatggagccaggcggagggctggccatgttagcagccacctttggaaattcctggaggctccctggctcggaggtttcccctgctgagtaccacgaggcctgtctctttgcctactgcgcaggggccatggcaggcagtgggcaagaggggcggcagcaggctgtttgtgccacctttgccagctatgtccaggcctgtgccaggcggcacatccacattcgctggaggaagcctggcttctgcgagcgcctgtgccccgggggccagctctactccgactgcgtctccctctgcccacccagctgcgaggcggtgggtcagggagaggaggagtcctgcagggaagagtgtgtgagtggctgtgagtgcccgcgaggcctcttctggaatggcaccctctgtgtgcctgctgcccactgcccctgctactactgccgccagcgctatgtacccggtgacaccgtgcgccagctgtgtaacccctgcgtgtgcagggatggccgctggcactgtgcccaggcactgtgccccgccgagtgtgcagtgggtggggacgggcactacctcaccttcgatgggcggagctactccttctggggtggtcaaggttgccgctacagcctggtgcagccctatccttccacgtgccccacccccaccatcagaccccctgttccaggagctgtgctggtcaatgggcaggatgtgggcttgccctggattggcgctgagggcctcagtgtgcgccgagcttcctctgcctttctgctgctgcgctggcctggggcccaggtgctctggggactgtctgaccctgtagcctacatcaccctggacccccgccatgcccaccaggtgcagggtctgtgtggcaccttcacccagaaccagcaggacgacttcctgacaccagccggagatgtggaaactagcattgctgcctttgctagcaagttccaggtggccggcaagggaagatgcccctctgaggacagtgccctgctgtctccctgcaccacccactcccagcgccacgccttcgcagaggcggcctgtgccatcctgcacagctctgtcttccaggaatgccacaggctggtggacaaagagccattctatctgcgctgcctggcagccgtgtgtggctgtgatcccggcagtgactgcctgtgcccggtgctgtctgcctatgcgcgtcgctgtgcccaggaaggtgcctcacctccctggaggaaccagaccctctgccctgttatgtgtcctggtggccaggagtaccgagagtgtgccccagcatgcggtcaacactgcgggaaaccagaggactgtggagagctgggcagctgtgtggctggttgtaactgtcctctggggctgctgtgggaccctgagggccagtgtgtgccccccagcttgtgcccctgccagctcggagcccgtcgctatgcccctggcagtgccaccatgaaggagtgcaaccgctgggagcttgtctatgcccctggtgcctgtctcctcacctgtgacagccccagcgccaatcactcctgccctgcaggcagtactgatggctgtgtctgtccaccaggcacggtgctgctggacgagcgctgtgtgcctcctgacctctgtccctgccgtcacagtgggcagtggtacctgcccaacgccaccatccaggaagactgcaacgtttgcgtgtgccggggccggcagtggcactgcacaggccagcggcgcagtgggcggtgccaggcatcaggcgccccccactatgtgacatttgacggactggccttcacctatcctggggcctgcgagtatctgctggtgcgagaggccagtggcctattcacagtctctgcccagaacctgccctgtggggccagcggtctcacctgcaccaaagcgctggccgtgcgtctggagggcactgttgtgcacatgctcagagggactcgggtcctggtgcaactgtcccctcagttccgtggtcgcgtggctgggctgtgtggtgactttgatggagatgccagtaatgatctgcggagccgccagggcgtcctggagcccacagctgaactggctgcccactcctggcgcctcagccccctctgccctgagccaggagacctgccacacccctgcacgatgaacacacaccgggctggttgggctcgggcccgctgtggggcgctgctgcagccgctcttcacattatgccacgcggaggtccccccgcagcagcactatgagtggtgcctgtatgacgcctgcggctgcgactcggggggtgactgtgagtgcctctgctcggccattgccacctatgcagatgagtgtgcccggcatgggcaccacgtgcgctggcgtagccaggagctctgctgtctacaccagacaccctgtgccctccatggtggtcaccttggccagccagcctggtgtggttgcatccttttgcccttgtgcctcagtgatccaaggctctctcctctccacccagccctgcagtgtgaagggggacaggtatatgaggcctgtggccccacgtgtccccccacctgccatgagcagcatcctgagcccgggtggcactgccaggtggtggcctgtgtggagggctgcttctgccccgaggggactctgctgcacggacgctgtgtgctcagcacgtgccaggaaggtcaatggcattgtgggggtgacggtggccactgtgaggagcttgtgcctgcctgtgcagagggagaggccctgtgccaagagaatgggcactgtgtgccccatgggtggctttgtgacaaccaggacgactgtggcgatggctctgatgaggagggtgagtgtctttgcccatgcgtggaagcgacagggttggtcagtccttgcacatgttgtgccgccccaggctgtggggaggggcagatgacttgcagctccggccactgcctgcccctggccctgctctgtgaccgccaggatgactgtggagatggcacggatgagccgagctatccgtgcccccagggcttgctggcctgtgccgatggacgctgcctgccgccggccctgctctgcgatgggcatcctgactgtctggatgccgccgacgaggagtcctgtctggggcaggtgacctgcgtccccggggaggtgtcctgtgttgatggcacctgcctgggggccatccagctgtgtgacggagtctgggactgcccagatggagccgatgaggggccgggacactgccccctaccttctctgcccacacctcctgccagcaccttgcctggcccctccccaggctccctggacactgcgtcaagtcccctggccagcgccagccctgcgccaccctgcggccccttcgagtttcggtgcggcagcggcgagtgcaccccgcggggctggcgctgcgaccaggaggaagactgcgccgacggcagcgacgagcgcggctgcggagggccctgcgcgccgcaccacgcgccctgcgcccgcggccctcactgcgtgtcccccgagcagctgtgcgacggcgtgcggcagtgtcccgacggctcggacgagggccccgacgcctgcgttgaggctcccgcgcccccggccatgcgcggcccccctggccaagccggcgggcccacctcttcccgagcgccatccccaccttcgcctcctgaggcacagggagagggcaggaagggacaggagcggagcaggacacatctcacagtgcccgcaggctccacccagctgcctctgtgccctggcctctttccctgtggtgtggctccggggctgtgcctgacccctgagcagctctgtgatgggatcccagactgtccccagggcgaggacgagctggactgcggggggctgccagccctgggaggccccaacaggacagggcttccctgcccagaatacacctgccccaatggcacctgcataggcttccagctggtgtgtgatgggcagcctgactgtggaaggccagggcaggtgggcccctccccagaagagcagggttgtggggcctggggcccctggagcccatgggggccctgcagccggacgtgtgggccctggggccagggccggagccgccgctgctccccactcggcctcctggtgctacagaactgcccagggcctgagcaccagtctcaggcctgcttcacggcagcctgcccagtggacggtgaatggagcacctggtccccctggtctgtgtgctctgagccgtgcaggggcaccatgacgcggcaacggcagtgccactcaccccagaatgggggccgcacctgtgctgcactgcccggaggcctgcacagcacccgccagaccaagccttgccctcaggacggctgccccaatgccacttgctctggggagctgatgttccagccctgtgccccctgcccactgacctgtgatgacatctctggccaggtcacgtgcccacctgattggccctgcggcagcccgggctgctggtgcccagaagggcaggtgctgggcagcgaggggtggtgtgtgtggccccggcagtgcccctgcctggtggacggtgcccgctactggcctgggcaacgcatcaaggccgactgccagctctgcatctgccaagacggacggccccgacgctgccgactcaacccggactgcgctggtgaggcccttccctcggggtccctagtcctctccctggaccgcccagctgcacatccaccacctccttcaggctctgactgttggccctccctcagtggactgtggctggtcctcctggtcaccctgggccaagtgcctgggcccctgtggaagccagagcatccagtggtccttccggagctccaacaacccccgcccctccggccgaggtcgccagtgccgtggcatccaccgcaaggcacgcagacggagccctgtgaggggtgtgagcatcagggccaggtccaccgtgtcggggaacgctggcatgggggcccctgcagggtgtgccagtgtctgcacaacctcaccgcacactgctcaccctactgcccgctcggcagctgcccccagggctgggtcttggtggaggggacgggagaatcatgctgccactgtgccctacctggagagaaccagacggtccagcccatggccactcctgccgcagctccggctcccagtccccagatcagattccctttggccacttacattctgcctccgtcaggaggctcctgccgccctctgtcctcccctactccagcctgtctctctcttctgcacccagacccctgctattctcccctggggctggccggactggctgaggggagtctgcatgcatcgtcccagcagctggaacaccccacccaggctgccctcctgggggctcccacccaggggcccagccctcagggatggcacgctggaggggatgcttatgccaagtggcacactcggccccattacctgcagctggacctgcttcagcctcggaacctcactggcatcctagtgccggagactggctcctccaacgcatatgccagcagcttctcactccagttcagcagcaatggtctacactggcatgactatcgtgacctcctgcctggcatcttgcccctgcccaaggtatcacccgcccaaggccgatggggccagcagcccaccatgcccttttgtgggttccatagtctttgtccccaagggccttccagtgtccccgaggggcatggcctgcattcgatgcttgttgaatacctgcttttccccagaaactgggatgacctggaccctgccgtatggactttcggccgcatggtgcaggcgaggtttgtcagggtgtggccccacgatgtccaccacagcgatgtccccctgcaggtggagctgctgggctgcgagccaggggttggactccgctgtgccagtggtgagtgtgtcctgagagggggcccttgtgacggtgttctggactgcgaggatggctcggatgaggagggctgtgtgttgctgcctgagggcactggcaggtatactgtggccggccgtgcagctcacgcccttggcctggcctttgaggggacagccatgtgggaggggcccggcactgccttcacccccaaggtgcccagaccctgcatgctgaggagctgcagccggggcctggcagagactgagcactggccccctgggcaggaatcccccacgtccccgacagaagcctgggataccctctcgagggcccccaccttcctttcctgggaaggggagctgggcaagcctcacctccctctacctacacccacagagacaaggcccgtgagtcctggcccagcctccggggtgcctcaccatggggaatctgtgcagatggtgaccaccacccccataccccagatggaggccaggaccctgccaccaggtatggcagctgtgacggtggtgcccccacaccctgtgactccagcgacccctgctggtaagatgccaagcccttctacctgtgtgcaaggcctctgccagagcgtcgccccaggacccttcccacctgtgcagtgtggccccggccagacgccctgtgaggtgctgggctgcgtggaacaggcgcaggtgtgtgatggcagggaggattgcctcgacggctccgacgagaggcactgcggtgagctgctggagggcctgctgtcctgtggggccctctgttccccgagccagctgagctgtggcagcggggagtgtctgtctgctgagcggcgctgtgacctgcggcctgactgccaggatggctcggacgaggatggctgtgtggactgcgtgctggccccctggtctgtctggagcagctgcagccgcagctgtggcctgggcctcaccttccagcgccaggagctgctgcggcctcctctgccagggggcagctgcccgcgtgaccggttccgaagccagtcctgctttgtgcaggcctgcccagtggctggggcatgggccatgtgggaggcctggggaccctgcagcgtctcctgcgggggtggccatcagagtcgccagagaagctgtgtggaccccccacccaagaatggcggtgccccctgccccggggcctcccaagagagggcaccctgcggcttgcagccctgctcaggtggcacaggtaagggggtgctgggctggggacacggagggagcactgtgggcacggggcgattgggcctcccagcacctaggctcacctggtgcccatcccccaccagactgcgagctgggccgtgtgtatgtgagtgccgatctgtgccagaaggggctggtgcccccatgcccaccctcctgcctggatcccaaggccaacagaagctgcagtgggcattgtgtggaagcctcccctccctgctgtgccccttggggctgagtgccctcttccacatactcccaggatgccgctgtcccccggggctccttctgcatgacactcgctgcctgcccctctctgagtgcccctgcctggtgggcgaagagctgaagtggccaggggtgtccttcctcctgggcaactgcagccaatgcgtgtgtgagaagggggagttgctgtgccaaccagggggctgccccctgccctgcggctggtcagcctggtcctcctgggctccctgcgaccgctcctgtggctctggagtgagggccaggttcaggtctccctccaaccctccggcagcctgggggggtgccccgtgtgaaggtgaccggcaggaactgcagggctgccacacagtgtgtgggacaggtatagccgggagcctgggtgcaggagtccccccttcctcctcccaattctgtaccctgagaacacatgggatgggacccactgaccactctacgtgggggattgaggtgttcggctggacgccctggacttcctggtcctcctgctcccaaagctgccttgccccgggagggggccctggctggcgcagtcgttcccgactctgccccagccctggggattcatcctgcccaggagatgccacccaggaggagccctgcagcccccctatagagtgtacgggcttctgcgcccccggctgcacctgcccccctggtcttttcctgcacaatgctagctgcctgccccgcagccagtgcccctgccagctgcacgggcagctctatgcatcaggagcaatggctcgcctggactcctgcaacaactgcacctgtgtctctggtaagatggcatgcacctcggagcgctgcccagtggcctgtggctggagtccctggaccctgtggagtctctgtagctgcagctgcaacgtgggcattcggcgccgcttccgggcaggcactgcacccccagctgcctttgggggtgctgagtgccaaggccccaccatggaggctgaattctgcagcctgcggccatgtccagggccagtgcctggcatgtgtcccagggacaagcagtggctggactgtgcccagggccctgcctcttgtgcagagctcagcgccccaagagggactaaccagacctgccaccctggctgccactgcccctctgggatgcttctgctggtgagcccacgtggtcaccctggaccccttggagccagtgttcagcctcctgtggccctgcccggtgccatcggcaccggttctgtgccaggagctgggggatggggtccatgggggccctggtcccactgtagccggagctgtgggggaggcctgcggagccggacccgggcctgtgaccagcccccaccccagggcctgggggattactgcgaggggccacgggcacagggggaggtctgccaggctctgccctgcccagtgaccaactgcactgccattgaaggggccgagtatagcccctgtggccctccgtgccctcgctcctgtgatgacctagtgcactgcgtgtggcgctgccagcctggctgctactgcccaccaggccaggtactgagttccaacggggccatctgcgtgcagccgggtcactgcagctgcctggacctgctgaccgggcagcggcaccatccgggtgctcggctggcaaggcctgacggctgcaaccactgcacctgcctggaggggaggctgaactgcacagacctgccctgcccagactgcgggggtggccagagtctgcatccctgtgggcagccctgcccccgctcctgccaggacctgtcccctgggagtgtgtgccagccaggctctgtgggctgccagcccacttgtgggtgccccctgggccagctctcccaggacgggctgtgcgtgcccccagcccactgccgctgccagtaccagcctggagccatggccccctcctttgtccccagcacctgtgtggcaggcattctgcaatgccaggaggtgcctgactgcccggaccctggggtgtggagctcttggggcccttgggaagactgcagtgtttcgtgtgggggcggggagcagctgcgctcccggcgctgtgctcgtcctccctgcccagggcctgcccgccagagccgcacatgcagcacacaggtctgcagagaggcaggctgcccggctggccgcctgtaccgtgaatgccagcccggcgagggatgccccttctcctgcgcccacgtcacgcagcaggtgggctgcttctctgagggctgcgaggagggctgccactgccccgagggcaccttccagcaccgcctggcctgtgtgcaggagtgcccttgtgtgctgacagcctggctgctgcaggagctgggagccaccataggtgaccctggtcagcccctcgggcctggagatgagctggactcaggccagacacttcgtacaagctgtggcaactgctcgtgtgcacacgggaagctgtcttgctccctggacgactgcttcgaggccgatggtggtttcggtccctggagcccgtggggcccgtgctcccgctcctgtggagggctgggcacccgtacccgcagccgccagtgtgtgctcaccatgcccaccctcagtgagctgcccgtgtgccctggccctggctgtggggctgggaactgttcctggacctcctgggccccgtgggaaccttgctcccgcagctgcggagtgggccagcagcgccgcctgcgggcataccgtccccctgggcccggcgggcactggtgccccaacatccttactgcctaccaagagcgccgcttctgcaacctgcgagcctgcccagaggccggctgcccagcaggcatggaggtggtcacctgtgccaaccgctgcccccgccgctgctcagacctccaggagggaattgtgtgtcaggacgaccaggtctgccagaagggctgccgctgcccaaaggggtccctggagcaggatggtggctgcgtgccaattgggcactgtgactgcaccgatgcccagggccacagctgggccccggggagccagcaccaggatgcctgcaacaactgctcatgccaagctgggcagctctcctgcacggctcagccctgcccgcctcccacccactgtgcctggagccactggtcggcctggagtccctgcagccactcatgcgggcccagagggcagcagagccgcttccgctgcggcccgggcctggcctctcgctctgggtcctgcccctgcctgatggccaaggccgaccccacctgcaacagcaccttcctccacctggacacccagggctgctactcagggccctgcccagactcatgccagtggagtctgtgggggccatggagcccctgccaggtgccctgcagtggggggttcaggctacgctggagagaggcagaggccctctgtggaggaggctgccgggagccatgggctcaagacagaaagctgcaacggagggccctgcccagcacctgtgtcaacgagtccctggtgtgcccacaccaggagtgtccagtccttgggccttggtcagcctggagcagttgctcggccccctgtggtgggggcactatggagcgacatcggacttgtgaggggggtcctggggtggcaccatgccaggcccaggacacagagcaacggcaggagtgtaacctgcagccctgccctgagtgcccccctggccaggtgcttagtgcctgtgccacctcatgcccgtgcctctgctggcatctgcagcctggtgccatctgtgtgcaggagccctgccagcctggctgtggctgccctggagggcagcattctctgccctggggcctcaccctgaccctggaagagcaggcccaggagctgcccccagggactgtgctcacccggaactgcacccgctgtgtctgccacggtggagccttcagctgctccctcgttgactgtcagggtgagatagtgccccctggggaaacgtggcagcaggtggccccgggggagctggggctctgcgagcagacgtgcctggagatgaacgccacaaagacccagagtaactgcagttcagctcgagcctcgggctgcgtgtgccagcccgggcacttccgcagccaggcaggcccctgcgtccccgaagaccactgcgagtgctggcaccttgggcgtccccacctgcctggatctgaatggcaggaggcctgtgagagctgcctctgcctcagtgggaggcctgtctgcacccagcactgctccccactcacctgtgctcagggcgaggagatggtgctggagccagggagctgctgtccctcttgccgcagggaggctccgggtatggagggaacctgg

SEQ ID NO: 735434 - DNA, 830 bp, Homo sapiens
  misc_feature (70)..(70): n is a, c, g, or t
  misc_feature (77)..(77): n is a, c, g, or t
  misc_feature (79)..(79): n is a, c, g, or t
gcctcatgtgatcctctgtgagttcatgtgactcttctgtgtcatctgtgtcaaaatactgagttgcttntgtaagncnttaaagattgttaccctagtgtttcatttcctagaccagtattttgaacaatattatattttggagactgatgggagaagactggcatcttctcccatcagacctggcgcagcctgttagcagtccatgtggcagaggcgaggagtgccactccagctgcaccgtagctgcactctgtcttggtgtggggttctggcaggtctgggagcttaccgcactggttggcagcagagcagaattggaaacagggcacgtctttctgggatgtaagtcctgatgtttccccattaagaaaaaaggccaggcatcccaacactttggaaggctgaggcggacagatcatgaggtcaggatattgagaccatcctggctaacaggtgaaacccggtctctactaaaaatacgaaaaattagctgggcatggtggccggcacctgtagtcccagctactcaggaggctgaggctggagaatcgcttgaacttgggaggcagaggctgcagtgagccgagttcacgccactgcactgcagcctgggcaacagagtgagactctgtctcaaaaaaaaaaaaaagtgtagaaaaacttgactttaacttcaaagtttaatttgaaagtttaaacaggccaggcgcggtggctcacacctgtaatcccagcactttgggaggctgaggcaggtggatcacaaggtcaggagatcgagaccatcctggctaacatggtgaaaccccgactctactaaaaataca

SEQ ID NO: 735435 - DNA, 430 bp, Homo sapiens
cagaatactgaatttgtgtgacttatttggctcttaacagagtggcacatcctactgacactgtcctatggagagttacagtgcaggaaacctgaacccagctctcaggtccctctggaactttggctcttctttgttttgtctcagtgagtgatttgggccctctggctaaatagactagtcatgtccttacaggtcttaaaagataacatgtaaatgtttttaaaatggtaaaaaaaaaacctcgtgccgaattcggcacgaggagtttagattcaagaatgttaagcaactttgtttttgcggtgctccctatttcatagtatcttcaaatcaaaaataaaaattatctccattttgttaaagaacttacagggtcagggttctccttgtcacttagaattgggacactgccaggcaatcctctccc

SEQ ID NO: 735436 - DNA, 2271 bp, Homo sapiens
atggctggtactgagactcccagcactaaccttcctgggttgtgtctgtctctgtggtcccaggaggacagtgcagacctgaagtgccagttgcactttgcaaaggaggagtcagccctcatgtgcaagaagctcactaagcttgccaaggagaatgacagcatgaaggaggagctgctgaagtaccgctcgctctatggggacctggacagcgcgctgtcagccgaggagctggccgatgccccccactcgcgggagaccgagctgaaggtgcacctgaagctggtggaggaggaagccaacctgctgagccgccgcatcgtggagctggaggtggagaaccgaggcctgcgggctgagatggacgacatgaaggatcatggaggtggctgtgggggtcctgaggcacgcctggccttctccgcgctgggtggcggagagtgcggggagagcttggcagagctgcggcgacacctgcagtttgtcgaagaggaggccgagctgctgcggcgctcctctgccgagctcgaggaccagaacaagctgctgctgaacgagctggccaagttccgctcggagcacgagctggacgtggcgctgtcggaggacagttgttctgtgctcagcgaaccttcacaggaggagctggcggccgccaagctgcagatcggcgagctcagcggcaaggtcaagaagctgcagtacgagaaccgcgtgctcctctccaacctccagcgctgtgacctcgcctcctgccagagtacgcggcccatgctggagacggacgccgaggccggggactctgcccagtgtgtgcctgctcccctgggcgagacacacgagtcccatgcggtccgactctgcagagccagggaggccgaggtgctgcctgggctgagagagcaggccgccctggtcagtaaggccatcgatgtcctggtggctgatgccaatggcttcacggctggcctccggctgtgtctggacaacgagtgtgctgacttccggctgcatgaggcccccgacaacagcgagggccccagggacaccaagctcatccatgccatcctggtgcgcctgagcgtgctgcagcaggagctgaatgccttcacgcggaaggcagatgcagtcctcgggtgctctgtcaaggaacagcaggagtccttctcatcactgccccccttgggctcccaggggctctctaaggagattcttctggcaaaagaccttggctcagactttcagccacctgacttcagggacctgccggaatgggagcccaggatccgagaggctttccgcactggtgacttggactctaagcccgaccccagccggagcttcaggccttaccgagctgaagacaatgattcctatgcctctgagatcaaggagctgcagctggtgctggctgaggcccacgacagcctccggggcttgcaagagcagctctcccaggagcggcagctacgaaaggaggaggccgacaatttcaaccagaaaatggtccagctgaaggaggaccagcagagggcgctcctgaggcgggagtttgagctgcagagtctgagcctccagcggaggctggagcagaaattctggagccaggagaagaacatgctggtgcaggagtcccagcaattcaagcacaacttcctgctgctcttcatgaagctcaggtggttcctcaagcgctggcggcagggcaaggttttgcccagcgaaggggatgacttcctcgaggtgaacagcatgaaggagctgtacttgctgatggaggaagaggagataaacgctcagcattctgataacaaggcctgcacgggggacagctggacccagaacacgcccaatgagtacatcaagacactggccgacatgaaggtgacgctgaaggagctgtgctggctgctccgggatgaacgccgtggtctgacggagcttcagcaacagtttgccaaggccaaggctacctgggagacagagcgggcagagctcaagggccatacctcccagatggagctgaagacagggaagggggccggggagcgggcagggcccgactggaaggcagccctacagcgggagcgtgaggagcagcagcacctcctagctgagtcctacagcgctgtcatggagctgactcggcagctgcagatcagtgagcgcaactggagccaggaaaagctgcagctggtggagcggctgcagggtgagaagcagcaggtggagcagcaggtgaaggagctgcagaaccgcctaagccaggtg

SEQ ID NO: 735437 - DNA, 1574 bp, Homo sapiens
atggctggtactgagactcccagcactaaccttcctgggttgtgtctgtctctgtggtcccaggaggacagtgcagacctgaagtgccagttgcactttgcaaaggaggagtcagccctcatgtgcaagaagctcactaagcttgccaaggagaatgacagcatgaaggaggagctgctgaagtaccgctcgctctatggggacctggacagcgcgctgtcagccgaggagctggccgatgccccccactcgcgggagaccgagctgaaggtgcacctgaagctggtggaggaggaagccaacctgctgagccgccgcatcgtggagctggaggtggagaaccgaggcctgcgggctgagatggacgacatgaaggatcatggaggtggctgtgggggtcctgaggcacgcctggccttctccgcgctgggtggcggagagtgcggggagagcttggcagagctgcggcgacacctgcagtttgtcgaagaggaggccgagctgctgcggcgctcctctgccgagctcgaggaccagaacaagctgctgctgaacgagctggccaagttccgctcggagcacgagctggacgtggcgctgtcggaggacagttgttctgtgctcagcgaaccttcacaggaggagctggcggccgccaagctgcagatcggcgagctcagcggcaaggtcaagaagctgcagtacgagaaccgcgtgctcctctccaacctccagcgctgtgacctcgcctcctgccagagtacgcggcccatgctggagacggacgccgaggccggggactctgcccagtgtgtgcctgctcccctgggcgagacacacgagtcccatgcggtccgactctgcagagccagggaggccgaggtgctgcctgggctgagagagcaggccgccctggtcagtaaggccatcgatgtcctggtggctgatgccaatggcttcacggctggcctccggctgtgtctggacaacgagtgtgctgacttccggctgcatgaggcccccgacaacagcgagggccccagggacaccaagctcatccatgccatcctggtgcgcctgagcgtgctgcagcaggagctgaatgccttcacgcggaaggcagatgcagtcctcgggtgctctgtcaaggaacagcaggagtccttctcatcactgccccccttgggctcccaggggctctctaaggagattcttctggcaaaagaccttggctcagactttcaggtaaggtgcctcatgcacagatcctattatttatttttttcctttgttttgttttgtttttcttgagatagggtctctccccgctggccaggctgaagtgcagtggtgcaatctcagttcactgcagcctcgatatcctgggctctagccattctccccccctcactctcctgagtacctgggactacaagtgagcaccaccacacccagctaatttttatttattttttattttttttgagacggagtctcgctctgtcacccaggctggaatgcagtggcgcaatctcggctcactgtaacctccaactcccaggttcaagcgattc

SEQ ID NO: 735438 - DNA, 1360 bp, Homo sapiens
ggggagggcgggggacgccaggcctaaagcgcctcgtgggtttagagaactcagagagggcaccgggtgggggtgggaagaagactcaacccgtagctaaatgtttggcctttggctattttttaaggaaacgaatctcagggaggtcggggcgcgggggatgggggcatcatcgcgcctcggagatgggaagcgagttcccctccgctttctgggaaaagccttgtctcccttctttcccctccccccatcctgctgagggtttgcgttgacccatctctccgctcgggaccggcaggaggacggagccgcaggggctgaccgcggcccagaggctgcccaggggtcgcgctgctgccggcctgcgcttccgcactcccgggttcggtgcgtcgcctctcgcggcagcgcctcgcttcttccagactgtaattccacactcccgcaagcgctggggctgcggaatcgtttgagggagttggaactgcatcagatgagcacgccgggagacacgaaaattggacacgtggagaattagccctgctggagaagcgctgggtgcagactcaaacaatggtttccagcgccgaagctgaggcatcaccttccccacctccaccctcaaatggcagctgcctctatatacagcgggcacaccccttcactacccaccccctcccccaaagcctggttagggacctatgtgggctgcacgctctggagccccttgcccggacacaaaccctaggtgggcctgggctgcccgctgagtagctcattgcgcctgggatcccctgggatttagaagtatagggctctctatttttccctaggaaggtcctgtctcaaagatgccacccccaaaaattaatgtgtaaaaacccaaccaagctccagtctctgtgtcctttggcaaatctatctttcctagggcatactttcctaagctgctgggaccttgccccccatctgatgagccatacgcaggtggtctggcctcttcagagcagcttcctttagttattgtcttctccagaggccccatcctccacggcagccctaatcttagccccccagcctctctgagcccccatcccacccccacactgcgctgagctggcagcagccacagctcccccaggcagttcctctctcactgcgcggcctgtgcatctcgctggggcacacactccgcacagaagctccctcgcctcctggagctggtttcctcttacaggctccccttagagctgctggtgctgtgacaacgcctgcatctctgtgtctccctgcagcgctgcgagctgtgaatctgccttctcttcccttcctgcaaaggtcaagctgcctccttctctcg

SEQ ID NO: 735439 - DNA, 1211 bp, Homo sapiens
agctgcagcagctgtgccgccgcgggtccaccgaggacgccaatcaatcaacccaacaccacaagcttggttgggtgcaagcagagggtgagcaggggctgcccctccacctggccaggacccccttcggcacccagttgcccttggccaccacctgtggcaggactcaagctcctcttctgcaaatgttcccagcctccgtgcaagtattcttaactctttacgcctaatgaacaagcacagtttttcaatggtgaagaaaaaagcaccagactttttttctttttttcctaaagaaatcccctaagccccccgcctgtaggcgggacaaacactccctgcgtggggctgtagcaacgtctgtcaggcccccttgtgtttcatctcctgcgcgcgtagagcaaatgctagagcgatttcagctgatagaaaaacaaaaatgaaaaaaaaaacacaaaaaacaaaaaacatggcacgttgctagtttacagggttttgtgagtttaaatgccttatatttaacaatcataatttatgactaacttgtagatatcgtgggttcttatttaattatttttatagttgttttgcatttttaattataatttatttatttagaaaggatactaattttttttattactcctattacctcattttggcgttgtttctgggagtggaatgctttgcatgcattggtacgatgacaaacaactacgaatacaaaaaaaaaatttaaataaaattctgcaaactttatttcgtccgaactatcagggtgtgtgattgcaagctgtcctaccgtggtgctggcctctttggatacattccatacgaaatgcaaacctttgattctgtatgctgtgatctagtgaaaaactccaatatagtgactgtatttagcacatatataaatataatttgcacttgtcagcagactggggtaatcctttcacttgctacacttggcacccccccgcccccaccacaaccctgcctctccatcatgaacctgcctttcctcctccctcgctcctcccacaacctcagcccacccagccggtatcctctgaggaaagtcttggggcactagaggccactgtctccacctggcctccaactccagaattggagccctccagacattacaagaggaacatcagagagccaaaaagcctgacttcttagaaggagccctggactggggagcc

SEQ ID NO: 735440 - DNA, 918 bp, Homo sapiens
aggatccttaattaaattaatccccccccgcgggacaaacactccctgcgtggggctgtagcaacgtctgtcaggcccccttgtgtttcatctcctgcgcgcgtagagcaaatgctagagcgatttcagctgatagaaaaacaaaaatgaaaaaaaaaacacaaaaaacaaaaaacatggcacgttgctagtttacagggttttgtgagtttaaatgccttatatttaacaatcataatttatgactaacttgtagatatcgtgggttcttatttaattatttttatagttgttttgcatttttaattataatttatttatttagaaaggatactaattttttttattactcctattacctcattttggcgttgtttctgggagtggaatgctttgcatgcattggtacgatgacaaacaactacgaatacaaaaaaaaaatttaaataaaattctgcaaactttatttcgtccgaactatcagggtgtgtgattgcaagctgtcctaccgtggtgctggcctctttggatacattccatacgaaatgcaaacctttgattctgtatgctgtgatctagtgaaaaactccaatatagtgactgtatttagcacatatataaatataatttgcacttgtcagcagactggggtaatcctttcacttgctacacttggcacccccccgcccccaccacaaccctgcctctccatcatgaacctgcctttcctcctccctcgctcctcccacaacctcagcccacccagccggtatcctctgaggaaagtcttggggcactagaggccactgtctccacctggcctccaactccagaattggagccctccagacattacaagaggaacatcagagagccaaaaagcctgacttcttagaaggagccctggactggggagcc

SEQ ID NO: 735441 - DNA, 477 bp, Homo sapiens
gattagaaagggctggaaaggtccaggaagctttcatgaaggggttggacttgacaggaagtgtcacgttaaaaagtagagggccaggaaagggacaaggtagggggatggaatgtacagggcatgctgccggaggtccatggcgggaatagtagaacttaagcttgcagaagtaaatagcaccaaagtgtagagtcttgaacacccatccggtttgaaagcggaaatcctatgatgtggatacctggagccactggaagtttctgagcagtaggtgatgtctaaaaagccagattttaggcaagttcatctggtaatggaatttaggaaggtttgtaaaaatgacaccaggggacacagggcaggaaccagaattgtcagcaaaggtcacactcaagtaagctgctgctggccatgtaatttgtcacttcttcctttgcagaactcaggagcacacgatggccatcctccaagctt

SEQ ID NO: 735442 - DNA, 540 bp, Homo sapiens
caagatgctggtggagaagcagaaggtgatcaatgaactcacctggaaactccagcaagagcagaggcaggtggaggagctgaggatgcagcttcagaagcagaaaaggaataactgttcagagaagaagccgctgcctttcctggctgcctccatcaagcaggaagaggctgtctccagctgtccttttgcatcccaagtacctgtgaaaagacaaagcagcagctcagagtgtcacccaccggcttgtgaagctgctcaactccagcctcttggaaatgctcattgtgtggagtcctcagatcaaaccaatgtactttcttccacatttctcagcccccagtgttcccctcagcattcaccgctgggggctgtgaaaagcccacagcacatcagtttgcccccatcacccaacaaccctcactttctgccctcatcctccggggcccagggagaagggcacagggtctcctcgcccatcagcagccaggtgtgcactgcacagaactcaggagcacacgatggccatcctccaagctt

SEQ ID NO: 735443 - DNA, 703 bp, Homo sapiens
cttctttagcacagtttgaacaaaaatggacaatgctcataactcaacttccagatattcaagaaaaacttcaccagcttcaaatggagaaatgccgtctcgtaaagcaatcacagaaatgattagctggatgaacaatgtggagcatcaaacttcagatgaagactccgtgcattcaccaagttctgcatctcaagttaaacatcttcttcagaagcacaaggagtttagaatggaaatggactataaacagtggatagttgacttcgttaaccagtcattacttcagctaagcacctgtgatgtagaaagcaagcgctatgaaagaacggagtttgcagagcacctgggggagatgaaccgccagtggcaccgtgtacatggaatgctgaatagaaagatacaacatttagaacaacttctagaaagtatcactgagagtgaaaataaaatacagattttgaacaactggatggaagcacaagaagagagactgaaaactttacaaaaacctgaaagtgtgatctcagtgcagaagctgctcctggactgtcaggatatagaaaaaggactagtataggaatggagcttatcactgatccttccatcttgttcttggatgagcctacaactggcttagactcaagcacagcaatgctgtccttttgctcctgaaaagatgtctaagcgggacgacatcatc

SEQ ID NO: 735444 - DNA, 1007 bp, Homo sapiens
cttctttagcacagtttgaacaaaaatggacaatgctcataactcaacttccagatattcaagaaaaacttcaccagcttcaaatggagaaatgccgtctcgtaaagcaatcacagaaatgattagctggatgaacaatgtggagcatcaaacttcagatgaagactccgtgcattcaccaagttctgcatctcaagttaaacatcttcttcagaagcacaaggagtttagaatggaaatggactataaacagtggatagttgacttcgttaaccagtcattacttcagctaagcacctgtgatgtagaaagcaagcgctatgaaagaacggagtttgcagagcacctgggggagatgaaccgccagtggcaccgtgtacatggaatgctgaatagaaagatacaacatttagaacaacttctagaaagtatcactgagagtgaaaataaaatacagattttgaacaactggatggaagcacaagaagagagactgaaaactttacaaaaacctgaaagtgtgatctcagtgcagaagctgctcctggactgtcaggatatagaaaatcaacttgcaattaaatccaaagcactagatgagttgaaacaaagttatctgactttggagagtggggcagtgccattgttagaagatacagcatcccgaattgatgagttatttcaaaagagaagcagtgttctcactcaggtcaatcagctcaaaacctccatgcagtcagttttacaggagtggaagatttatgatcaactctatgatgaagtgaatatgatgacaatccgattctggtactgcatggaacacagcaagcctgtggtgttatcattggagaccttgagatgccaggtggagaaccttcagtctctgcaagatgaagctgagagcagtgaagggagttgggagaaactccaggaggttatcggcaaactcaaaggtctctgcccctctgttgctgaaataatcgaagagaaatgccaaaatactcata

SEQ ID NO: 735445 - DNA, 348 bp, Homo sapiens
cacccctgccacatctggcatgattttaccgtccccttcctagagttctccctttctcccctgcccaggctgcacccctggagagcccagctcaggcccctggcccctatgaagcctctcctgaataatccatcagcctgccctgagctcatccagtctccagtgacgattgtgctctccaccagcaggacacaccggagcactttctctgtccctgagaattggactccattccacagaagtgcgcctgggtgcgcacccaggcgcacttctggtaggaagccaaggggccgccagaagatgtggctccactgagaagtgcgcctggtgcagaagtgcgcctgggtg

SEQ ID NO: 735446 - DNA, 565 bp, Homo sapiens
tgccggggggtctgagccccccaggcattcttcactgcatccctctccattgggggggtgtctaaggaccctttccccttgggcatggccagccaggggtctctgtcaagtccctggtgtcgtcttatgagacccgagtggtggggatggctccggggctgccccgaaaaaggggctgtgcctcttccccttgctctccccggggtgcatcccccatccgagggacatctgggcccccgccccaccggggcctgggaggccctgggcagcggccttcaacccgcagtgggatggacaaaaccctcctctccctcattctctactgtcacagtggctccggaagcctggttggcattgacaacaaaatcgagccaaccgtggactagtgttggctagtgtgataagcatcagagtctcaagagactctttggggaggggcacattattctcatttaacacagcactgtttgtggcagcatcctgaacattggcatttttatgacttaataagctatcttcttttgtaaccttatgcactgcttctacttgagccttcaaaatgtta

SEQ ID NO: 735447 - DNA, 582 bp, Homo sapiens
cccccattattcctagaaccaggcgacctgcgactccttgacgttgacaatcgagtagtactcccgattgaagcccccattcgtataataattacatcacaagacgtcttgcactcatgagctgtccccacattaggcttaaaaacagatgcaattcccggacgtctaaaccaaaccactttcaccgctacacgaccgggggtatactacggtcaatgctctgaaatctgtggagcaaaccacagtttcatgcccatcgtcctagaattaattcccctaaaaatctttgaaatagggcccgtatttaccctatagcaccccctctaccccctctagagccaaaaaaaaaaaaaaaaaactaagaggtcgacggtatcgataagcttgatatcgaattcggcacgagtcgtgggaaggtgaagagcttccctaaggatgacccgtccaagccggtccacctcacagccttcctgggatacaaggctggcatgactcacatcgtgcgggaagtcgacaggccgggatctagggtgaacaagaaggaggtggtggaggctgtgaccgttgaagagacaccaccca

SEQ ID NO: 735448 - DNA, 1057 bp, Homo sapiens
  misc_feature (66)..(66): n is a, c, g, or t
  misc_feature (71)..(71): n is a, c, g, or t
  misc_feature (74)..(75): n is a, c, g, or t
  misc_feature (89)..(89): n is a, c, g, or t
  misc_feature (91)..(91): n is a, c, g, or t
  misc_feature (105)..(105): n is a, c, g, or t
  misc_feature (107)..(107): n is a, c, g, or t
  misc_feature (115)..(116): n is a, c, g, or t
  misc_feature (119)..(119): n is a, c, g, or t
  misc_feature (123)..(123): n is a, c, g, or t
  misc_feature (125)..(125): n is a, c, g, or t
  misc_feature (129)..(130): n is a, c, g, or t
  misc_feature (133)..(133): n is a, c, g, or t
  misc_feature (135)..(135): n is a, c, g, or t
  misc_feature (138)..(139): n is a, c, g, or t
  misc_feature (145)..(146): n is a, c, g, or t
  misc_feature (151)..(151): n is a, c, g, or t
  misc_feature (156)..(156): n is a, c, g, or t
  misc_feature (161)..(161): n is a, c, g, or t
ccatccgaacactacacctttagcggcgcgggggtcacatacccccgcatttggcccccccccccnttttntgnncaaggcactttcgncncagggagggccatntngcccccgnngantgcnancctnntgngncanngtcctnngaacncgtgngcggncaccaaacgtcgttcggcacgggcagccagaacgtgtgcaatggagatgtccgattctggggtcagaacctctcgaattgggatcagcactgccctcatggcctctccttgggcctctgcccggtcactccagtggaaagcagatgtagtgaggtcaaggcgcttgaggaggaggcagcggcggcagcggtactgatctctgaggctttgggacagagactccaacgcttcccatctgggtgcatctagcgagcagctgaggaggggctgcagggaccctgggggcagagaaggctgcagctctgagatcttagcatgcaactcctgcagcagctggctggcgggggtccctggtgcaggtctgggcagccccagggcttggagggtaaggtccagttcttggaccatgccggctccctccactaccccttcaccaaggggtggcctaggactcggatccagcagagagcggaggcacaggaggcgggtggcttggagctctgagcagagaaagcgcagcaggcgcagtccggcaccgggttcccgaagcgcagccgcgccatccccgccgcagagcgcgcgatccgggcagtgcagctcccgcagcaggctgccgagctgccgcagaaagtcctcctccgcgccagggccgtcgccggcgctcagcacctccgcgcccgcctctcgctgctgctcgagggcgcccagcgtcgccagctccgccgccagccgcacgcacagccccctgaagtctgggcatgaggcgccccgcgacgccgcccccgggacacctccataccccagagccagcaggtcctgggccaccgcggccccctcccacgcttccgccttcaccgcctccatgaaagtgtgtctcggcgcgccccctggcggcc

SEQ ID NO: 735449 - DNA, 3883 bp, Homo sapiens
atccccgtgtgggggaggggggccttcggtctctccccagcctcttccttccccctggcctgagggtgggtggggaggggcagttcctctttccttcccaagcaccgaggaggccccagctccctaggggctgagaagctggagtcctgggcaaggggaggagctgagccctactcttgcaagacccccggcctcctcaccccacgcgggaagcatgaacagaaaagacagtaagaggaagtcccaccaggaatgcaccggaaaaacaggagggcgaggccggccccgccaagtgcgccgccacaagacatgccccagccctcgggaaatcagcaaggtcatggcttccatgaacctgggcctgctgagtgagggcggctgcagcgaagatgagctgctggagaaatgcatccagtccttcgattcagctggcagcctgtgccacgaggaccacatgctcaacatggtgctggccatgcacagctgggtgctgccgtccgccgacctggctgcccgcctgctgacctcataccagaaggccacaggggacacccaggagctgagacggctgcagatctgtcacctggtcaggtactggctgatgcgacaccctgaggtgatgcaccaggatccccagctagaagaagtcataggtcgtttctgggccaccgtggcccgggagggcaactcagcccagagaagactgggagactcttctgacctgtgagtcagccctgtgcccccctcttccctgccccatcgccattctgccatctccctctatatccccaagccctcaactgtgagccactccaataccctgcccctcttggcccccagcctgagccctggtggccctggccccccactcccaatgagcagcccaggcctgggcaaaaagcgcaaagtgtccttgcttttcgaccacttggagacgggggagctggctcagcacctcacctacctggagttccggtccttccaggctatcacgccccaggacctgcggagctacgttttgcagggctcagtacgaggctgcccggccctggagggctccgtaggtctcagcaacagcgtgtcccgctgggtgcaggtgatggtgctgagccgtcccgggcccctacagcgtgcacaggtgctggacaagttcattcacgtggcacagaggctccaccagctgcagaatttcaacacgctgatggcagtcacagggggcctgtgtcacagtgccatctccagactcaaggactcccatgcccacctgagccctgacagcaccaaggccctcctggagctcactgagctccttgcctcccacaacaactacgcccgctaccgccgcacctgggctggctgcgcgggcttccggctgcctgtactgggcgtgcacctcaaggacctggtgtccctgcatgaggcacagcccgacaggttgcctgacggccgcctgcacctacccaagctgaacaacctctacctgcggctgcaggagctggtggccctccaagggcagcatccaccctgcagcgccaatgaggatctgctgcacctgctcacgctctccctggacctcttctacacggaagacgagatctatgagctttcttatgcccgggagccgcgttgtcccaagagcctgccaccctcccccttcaatgcacctctggtggtggagtgggcccctggtgtgacacccaagccggacagggtcacactgggtcggcatgtggagcagctggtggagtctgtgttcaagaattatgaccctgaaggccgaggaacaatctctcaggaggactttgagcgactctcgggcaattttcccttcgcctgccatgggcttcacccacccccacgccaggggagaggatccttcagcagagaggagctgacagggtacctgctccgggccagcgccatctgctccaagttgggcctggccttcctgcacaccttccatgaggtcaccttccgaaagcctaccttctgcgacagctgcagtggcttcctctggggtgtcaccaagcaaggctaccgctgtcggggtgagtggggtgtcagtgagtgggagggaagccttggcccgcaggctggaagaatggatgacacagatcggacccctgccgctgccttcccccagagtgcgggctgtgttgccacaaacactgcagagaccaggtgaaggtagaatgtaagaagaggccaggggccaagggcgatgcaggaccccccggagctcctgtcccatccacaccagctccccatgccagctgtggctccgaggaaaatcactcctacacgctatccctggagcctgagactgggtgccagcttcgccatgcctggacccagactgaatccccacacccttcctgggaaacagatacggtcccctgcccggtgatggacccaccatcaactgcatcctccaagctggattcctagacatctcttggtctcctctcttcctcactcccttcccccagtcagtcctgagtcctgccgtcagactctggcagggctcccagaggtaggcctccagaggcatccgccttcccatccacactgcctttagtggtacgtccgtcatctttttccctggaagtgactttcctcttttgcatcctggtggatgctaatcctgctccctttccctgcacttagtatctgtgcggctgtgtgttggatacatttagactcaggcctcattctaccaactccctacatctccatttctttttttttttgagacagagtcttgctctgtcacccaggctggagtgcaatgatgcaatctcagctcactgcaacttccgcctcctgggttcaagtgattcttctgcctcagcctcccaagtagctgggattacaggcacgccccaccatgcccggctaatttttgtatttttagtagagacggggtttccccatgttggccaagatggtctcaaactcctgacctcatgatccaccagcctcagcctcccaaagtgctgggaatacaggcgtgagccaccacgcccagctcctgtttttctgcatagaatgtgctccctctgacagcctatactttttccctctttatctcgttgaacgtctgtctttcctcaacaggagcatcaactccaggagaacagggatttctatcaatgtcattcactgctgcatccccagtgcctagaacagggctggcaggtggtaggcgcctgacagatgcttgtctgatgcctgaatgtctccttacccatgcccacggcacaggatagatgtgctatagggcaaagaactttgagggtcgagcagcaggggcccattcagtcccagggagcagagacccccccaaccccttcacaaaccccaacacccctgacttggcccccacagagagaggtcctacagctgtcataaattaaatttattctctggagaacatggttcttggtattgacgtgaatgggagcagggcatttggggactcaggaataggagatggggggcttgggtgccaaataccaaggaaagccttaaacggactccccagagattaccgatagcattagcatctcatggaggaccccccgcccccgaccaccagtccccctttacttcttcttcttcttcttgcgaccccaacactgggggcctccatcctctcttcggctcctccaggtgggcatgggaggctccagctcatttgggcggcccccccggtctggaacgttgcccataagcacctgagagtttatgagatttgagttgcagagaaaaaaagtatcttggacaagggggccagagagcgaagggaacagcatgaggctgaagaagaaacagcagatgttgactatttgagtacagtggctgggggaggggggactgaact

SEQ ID NO: 735450 - DNA, 4259 bp, Homo sapiens
atccccgtgtgggggaggggggccttcggtctctccccagcctcttccttccccctggcctgagggtgggtggggaggggcagttcctctttccttcccaagcaccgaggaggccccagctccctaggggctgagaagctggagtcctgggcaaggggaggagctgagccctactcttgcaagacccccggcctcctcaccccacgcgggaagcatgaacagaaaagacagtaagaggaagtcccaccaggaatgcaccggaaaaacaggagggcgaggccggccccgccaagtgcgccgccacaagacatgccccagccctcgggaaatcagcaaggtcatggcttccatgaacctgggcctgctgagtgagggcggctgcagcgaagatgagctgctggagaaatgcatccagtccttcgattcagctggcagcctgtgccacgaggaccacatgctcaacatggtgctggccatgcacagctgggtgctgccgtccgccgacctggctgcccgcctgctgacctcataccagaaggccacaggggacacccaggagctgagacggctgcagatctgtcacctggtcaggtactggctgatgcgacaccctgaggtgatgcaccaggatccccagctagaagaagtcataggtcgtttctgggccaccgtggcccgggagggcaactcagcccagagaagactgggagactcttctgacctgtgagtcagccctgtgcccccctcttccctgccccatcgccattctgccatctccctctatatccccaagccctcaactgtgagccactccaataccctgcccctcttggcccccagcctgagccctggtggccctggccccccactcccaatgagcagcccaggcctgggcaaaaagcgcaaagtgtccttgcttttcgaccacttggagacgggggagctggctcagcacctcacctacctggagttccggtccttccaggctatcacgccccaggacctgcggagctacgttttgcagggctcagtacgaggctgcccggccctggagggctccgtaggtctcagcaacagcgtgtcccgctgggtgcaggtgatggtgctgagccgtcccgggcccctacagcgtgcacaggtgctggacaagttcattcacgtggcacagaggctccaccagctgcagaatttcaacacgctgatggcagtcacagggggcctgtgtcacagtgccatctccagactcaaggactcccatgcccacctgagccctgacagcaccaaggccctcctggagctcactgagctccttgcctcccacaacaactacgcccgctaccgccgcacctgggctggctgcgcgggcttccggctgcctgtactgggcgtgcacctcaaggacctggtgtccctgcatgaggcacagcccgacaggttgcctgacggccgcctgcacctacccaagctgaacaacctctacctgcggctgcaggagctggtggccctccaagggcagcatccaccctgcagcgccaatgaggatctgctgcacctgctcacgctctccctggacctcttctacacggaagacgagatctatgagctttcttatgcccgggagccgcgttgtcccaagagcctgccaccctcccccttcaatgcacctctggtggtggagtgggcccctggtgtgacacccaagccggacagggtcacactgggtcggcatgtggagcagctggtggagtctgtgttcaagaattatgaccctgaaggccgaggaacaatctctcaggaggactttgagcgactctcgggcaattttcccttcgcctgccatgggcttcacccacccccacgccaggggagaggatccttcagcagagaggagctgacagggtacctgctccgggccagcgccatctgctccaagttgggcctggccttcctgcacaccttccatgaggtcaccttccgaaagcctaccttctgcgacagctgcagtggcttcctctggggtgtcaccaagcaaggctaccgctgtcggggtgagtggggtgtcagtgagtgggagggaagccttggcccgcaggctggaagaatggatgacacagatcggacccctgccgctgccttcccccagagtgcgggctgtgttgccacaaacactgcagagaccaggtgaaggtagaatgtaagaagaggccaggggccaagggcgatgcaggaccccccggagctcctgtcccatccacaccagctccccatgccagctgtggctccgaggaaaatcactcctacacgctatccctggagcctgagactgggtgccagcttcgccatgcctggacccagactgaatccccacacccttcctgggaaacagatacggtcccctgcccggtgatggacccaccatcaactgcatcctccaagctggattcctagacatctcttggtctcctctcttcctcactcccttcccccagtcagtcctgagtcctgccgtcagactctggcagggctcccagaggtaggcctccagaggcatccgccttcccatccacactgcctttagtggtacgtccgtcatctttttccctggaagtgactttcctcttttgcatcctggtggatgctaatcctgctccctttccctgcacttagtatctgtgcggctgtgtgttggatacatttagactcaggcctcattctaccaactccctacatctccatttctttttttttttgagacagagtcttgctctgtcacccaggctggagtgcaatgatgcaatctcagctcactgcaacttccgcctcctgggttcaagtgattcttctgcctcagcctcccaagtagctgggattacaggcacgccccaccatgcccggctaatttttgtatttttagtagagacggggtttccccatgttggccaagatggtctcaaactcctgacctcatgatccaccagcctcagcctcccaaagtgctgggaatacaggcgtgagccaccacgcccagctcctgtttttctgcatagaatgtgctccctctgacagcctatactttttccctctttatctcgttgaacgtctgtctttcctcaacaggagcatcaactccaggagaacagggatttctatcaatgtcattcactgctgcatccccagtgcctagaacagggctggcaggtggtaggcgcctgacagatgcttgtctgatgcctgaatgtctccttacccatgcccacggcacaggatagatgtgctatagggcaaagaactttgagggtcgagcagcaggggcccattcagtcccagggagcagagacccccccaaccccttcacaaaccccaacacccctgacttggcccccacagagagaggtcctacagctgtcataaattaaatttattctctggagaacatggttcttggtattgacgtgaatgggagcagggcatttggggactcaggaataggagatggggggcttgggtgccaaataccaaggaaagccttaaacggactccccagagattaccgatagcattagcatctcatggaggaccccccgcccccgaccaccagtccccctttacttcttcttcttcttcttgcgaccccaacactgggggcctccatcctctcttcggctcctccaggtgggcatgggaggctccagctcatttgggcggcccccccggtctggaacgttgcccataagcaccttgttgatggcacagcaggtccctctgcggacagccacgctggtggctgggacgagacaagacaggtcggctcgggcagccagaacgtgtgcaatggagatgtccgattctggggtcagaacctctcgaattgggatcagcactgccctcatggcctctccttgggcctggagtggggaggaggtaagagaaggtaccctggagcccttccccacgtgggacctgtcatcttggaagcattactttaccattcaagacctcactgcccacagctcaaataaatatttattttttgagacagggtctcgctgtcacccagcctggagtgtggtggcgtgatggtggctcactgcagcctcaatctcctgggctcaagtgatcctcctaccttagcctcctgagtaactgagatggacaagcatgcgccaccatgcctgtaatcctagcactttgggaggccaagacaggcagatcacaaggtcaggagatcgagaccatcctagccaacatggtgaaaccct

SEQ ID NO: 735451 - DNA, 4781 bp, Homo sapiens
atccccgtgtgggggaggggggccttcggtctctccccagcctcttccttccccctggcctgagggtgggtggggaggggcagttcctctttccttcccaagcaccgaggaggccccagctccctaggggctgagaagctggagtcctgggcaaggggaggagctgagccctactcttgcaagacccccggcctcctcaccccacgcgggaagcatgaacagaaaagacagtaagaggaagtcccaccaggaatgcaccggaaaaacaggagggcgaggccggccccgccaagtgcgccgccacaagacatgccccagccctcgggaaatcagcaaggtcatggcttccatgaacctgggcctgctgagtgagggcggctgcagcgaagatgagctgctggagaaatgcatccagtccttcgattcagctggcagcctgtgccacgaggaccacatgctcaacatggtgctggccatgcacagctgggtgctgccgtccgccgacctggctgcccgcctgctgacctcataccagaaggccacaggggacacccaggagctgagacggctgcagatctgtcacctggtcaggtactggctgatgcgacaccctgaggtgatgcaccaggatccccagctagaagaagtcataggtcgtttctgggccaccgtggcccgggagggcaactcagcccagagaagactgggagactcttctgacctgtgagtcagccctgtgcccccctcttccctgccccatcgccattctgccatctccctctatatccccaagccctcaactgtgagccactccaataccctgcccctcttggcccccagcctgagccctggtggccctggccccccactcccaatgagcagcccaggcctgggcaaaaagcgcaaagtgtccttgcttttcgaccacttggagacgggggagctggctcagcacctcacctacctggagttccggtccttccaggctatcacgccccaggacctgcggagctacgttttgcagggctcagtacgaggctgcccggccctggagggctccgtaggtctcagcaacagcgtgtcccgctgggtgcaggtgatggtgctgagccgtcccgggcccctacagcgtgcacaggtgctggacaagttcattcacgtggcacagaggctccaccagctgcagaatttcaacacgctgatggcagtcacagggggcctgtgtcacagtgccatctccagactcaaggactcccatgcccacctgagccctgacagcaccaaggccctcctggagctcactgagctccttgcctcccacaacaactacgcccgctaccgccgcacctgggctggctgcgcgggcttccggctgcctgtactgggcgtgcacctcaaggacctggtgtccctgcatgaggcacagcccgacaggttgcctgacggccgcctgcacctacccaagctgaacaacctctacctgcggctgcaggagctggtggccctccaagggcagcatccaccctgcagcgccaatgaggatctgctgcacctgctcacgctctccctggacctcttctacacggaagacgagatctatgagctttcttatgcccgggagccgcgttgtcccaagagcctgccaccctcccccttcaatgcacctctggtggtggagtgggcccctggtgtgacacccaagccggacagggtcacactgggtcggcatgtggagcagctggtggagtctgtgttcaagaattatgaccctgaaggccgaggaacaatctctcaggaggactttgagcgactctcgggcaattttcccttcgcctgccatgggcttcacccacccccacgccaggggagaggatccttcagcagagaggagctgacagggtacctgctccgggccagcgccatctgctccaagttgggcctggccttcctgcacaccttccatgaggtcaccttccgaaagcctaccttctgcgacagctgcagtggcttcctctggggtgtcaccaagcaaggctaccgctgtcggggtgagtggggtgtcagtgagtgggagggaagccttggcccgcaggctggaagaatggatgacacagatcggacccctgccgctgccttcccccagagtgcgggctgtgttgccacaaacactgcagagaccaggtgaaggtagaatgtaagaagaggccaggggccaagggcgatgcaggaccccccggagctcctgtcccatccacaccagctccccatgccagctgtggctccgaggaaaatcactcctacacgctatccctggagcctgagactgggtgccagcttcgccatgcctggacccagactgaatccccacacccttcctgggaaacagatacggtcccctgcccggtgatggacccaccatcaactgcatcctccaagctggattcctagacatctcttggtctcctctcttcctcactcccttcccccagtcagtcctgagtcctgccgtcagactctggcagggctcccagaggtaggcctccagaggcatccgccttcccatccacactgcctttagtggtacgtccgtcatctttttccctggaagtgactttcctcttttgcatcctggtggatgctaatcctgctccctttccctgcacttagtatctgtgcggctgtgtgttggatacatttagactcaggcctcattctaccaactccctacatctccatttctttttttttttgagacagagtcttgctctgtcacccaggctggagtgcaatgatgcaatctcagctcactgcaacttccgcctcctgggttcaagtgattcttctgcctcagcctcccaagtagctgggattacaggcacgccccaccatgcccggctaatttttgtatttttagtagagacggggtttccccatgttggccaagatggtctcaaactcctgacctcatgatccaccagcctcagcctcccaaagtgctgggaatacaggcgtgagccaccacgcccagctcctgtttttctgcatagaatgtgctccctctgacagcctatactttttccctctttatctcgttgaacgtctgtctttcctcaacaggagcatcaactccaggagaacagggatttctatcaatgtcattcactgctgcatccccagtgcctagaacagggctggcaggtggtaggcgcctgacagatgcttgtctgatgcctgaatgtctccttacccatgcccacggcacaggatagatgtgctatagggcaaagaactttgagggtcgagcagcaggggcccattcagtcccagggagcagagacccccccaaccccttcacaaaccccaacacccctgacttggcccccacagagagaggtcctacagctgtcataaattaaatttattctctggagaacatggttcttggtattgacgtgaatgggagcagggcatttggggactcaggaataggagatggggggcttgggtgccaaataccaaggaaagccttaaacggactccccagagattaccgatagcattagcatctcatggaggaccccccgcccccgaccaccagtccccctttacttcttcttcttcttcttgcgaccccaacactgggggcctccatcctctcttcggctcctccaggtgggcatgggaggctccagctcatttgggcggcccccccggtctggaacgttgcccataagcaccttgttgatggcacagcaggtccctctgcggacagccacgctggtggctgggacgagacaagacaggtcggctcgggcagccagaacgtgtgcaatggagatgtccgattctggggtcagaacctctcgaattgggatcagcactgccctcatggcctctccttgggcctctgcccggtcactccagtggaaagcagatgtagtgaggtcaaggcgcttgaggaggaggcagcggcggcagcggtactgatctctgaggctttgggacagagactccaacgcttcccatctgggtgcatctagcgagcagctgaggaggggctgcagggaccctgggggcagagaaggctgcagctctgagatcttagcatgcaactcctgcagcagctggctggcgggggtccctggtgcaggtctgggcagccccagggcttggagggtaaggtccagttcttggaccatgccggctccctccactaccccttcaccaaggggtggcctaggactcggatccagcagagagcggaggcacaggaggcgggtggcttggagctctgagcagagaaagcctgtaatcccagcactttgggaggcagaggcgggcggatcacgaggtcaggagatggagaccagcctggccaacatggtgaaactgtgtctctagcagcaggcgcagtccggcaccgggttcccgaagcgcagccgcgccatccccgccgcagagcgcgcgatccgggcagtgcagctcccgcagcaggctgccgagctgccgcagaaagtcctcctccgcgccagggccgtcgccggcgctcagcacctccgcgcccgcctctcgctgctgctcgagggcgcccagcgtcgccagctccgccgccagccgcacgcacagccccctgaagtctgggcatgaggcgccccgcgacgccgcccccgggacacctccataccccagagccagcaggtcctgggccaccgcggccccctcccacgcttccgccttcaccgcctccatgaaagtgtgtctcggcgcgccccctggcggcc

SEQ ID NO: 735452 - DNA, 4760 bp, Homo sapiens
atccccgtgtgggggaggggggccttcggtctctccccagcctcttccttccccctggcctgagggtgggtggggaggggcagttcctctttccttcccaagcaccgaggaggccccagctccctaggggctgagaagctggagtcctgggcaaggggaggagctgagccctactcttgcaagacccccggcctcctcaccccacgcgggaagcatgaacagaaaagacagtaagaggaagtcccaccaggaatgcaccggaaaaacaggagggcgaggccggccccgccaagtgcgccgccacaagacatgccccagccctcgggaaatcagcaaggtcatggcttccatgaacctgggcctgctgagtgagggcggctgcagcgaagatgagctgctggagaaatgcatccagtccttcgattcagctggcagcctgtgccacgaggaccacatgctcaacatggtgctggccatgcacagctgggtgctgccgtccgccgacctggctgcccgcctgctgacctcataccagaaggccacaggggacacccaggagctgagacggctgcagatctgtcacctggtcaggtactggctgatgcgacaccctgaggtgatgcaccaggatccccagctagaagaagtcataggtcgtttctgggccaccgtggcccgggagggcaactcagcccagagaagactgggagactcttctgacctgtgagtcagccctgtgcccccctcttccctgccccatcgccattctgccatctccctctatatccccaagccctcaactgtgagccactccaataccctgcccctcttggcccccagcctgagccctggtggccctggccccccactcccaatgagcagcccaggcctgggcaaaaagcgcaaagtgtccttgcttttcgaccacttggagacgggggagctggctcagcacctcacctacctggagttccggtccttccaggctatcacgccccaggacctgcggagctacgttttgcagggctcagtacgaggctgcccggccctggagggctccgtaggtctcagcaacagcgtgtcccgctgggtgcaggtgatggtgctgagccgtcccgggcccctacagcgtgcacaggtgctggacaagttcattcacgtggcacagaggctccaccagctgcagaatttcaacacgctgatggcagtcacagggggcctgtgtcacagtgccatctccagactcaaggactcccatgcccacctgagccctgacagcaccaaggccctcctggagctcactgagctccttgcctcccacaacaactacgcccgctaccgccgcacctgggctggctgcgcgggcttccggctgcctgtactgggcgtgcacctcaaggacctggtgtccctgcatgaggcacagcccgacaggttgcctgacggccgcctgcacctacccaagctgaacaacctctacctgcggctgcaggagctggtggccctccaagggcagcatccaccctgcagcgccaatgaggatctgctgcacctgctcacgctctccctggacctcttctacacggaagacgagatctatgagctttcttatgcccgggagccgcgttgtcccaagagcctgccaccctcccccttcaatgcacctctggtggtggagtgggcccctggtgtgacacccaagccggacagggtcacactgggtcggcatgtggagcagctggtggagtctgtgttcaagaattatgaccctgaaggccgaggaacaatctctcaggaggactttgagcgactctcgggcaattttcccttcgcctgccatgggcttcacccacccccacgccaggggagaggatccttcagcagagaggagctgacagggtacctgctccgggccagcgccatctgctccaagttgggcctggccttcctgcacaccttccatgaggtcaccttccgaaagcctaccttctgcgacagctgcagtggcttcctctggggtgtcaccaagcaaggctaccgctgtcggggtgagtggggtgtcagtgagtgggagggaagccttggcccgcaggctggaagaatggatgacacagatcggacccctgccgctgccttcccccagagtgcgggctgtgttgccacaaacactgcagagaccaggtgaaggtagaatgtaagaagaggccaggggccaagggcgatgcaggaccccccggagctcctgtcccatccacaccagctccccatgccagctgtggctccgaggaaaatcactcctacacgctatccctggagcctgagactgggtgccagcttcgccatgcctggacccagactgaatccccacacccttcctgggaaacagatacggtcccctgcccggtgatggacccaccatcaactgcatcctccaagctggattcctagacatctcttggtctcctctcttcctcactcccttcccccagtcagtcctgagtcctgccgtcagactctggcagggctcccagaggtaggcctccagaggcatccgccttcccatccacactgcctttagtggtacgtccgtcatctttttccctggaagtgactttcctcttttgcatcctggtggatgctaatcctgctccctttccctgcacttagtatctgtgcggctgtgtgttggatacatttagactcaggcctcattctaccaactccctacatctccatttctttttttttttgagacagagtcttgctctgtcacccaggctggagtgcaatgatgcaatctcagctcactgcaacttccgcctcctgggttcaagtgattcttctgcctcagcctcccaagtagctgggattacaggcacgccccaccatgcccggctaatttttgtatttttagtagagacggggtttccccatgttggccaagatggtctcaaactcctgacctcatgatccaccagcctcagcctcccaaagtgctgggaatacaggcgtgagccaccacgcccagctcctgtttttctgcatagaatgtgctccctctgacagcctatactttttccctctttatctcgttgaacgtctgtctttcctcaacaggagcatcaactccaggagaacagggatttctatcaatgtcattcactgctgcatccccagtgcctagaacagggctggcaggtggtaggcgcctgacagatgcttgtctgatgcctgaatgtctccttacccatgcccacggcacaggatagatgtgctatagggcaaagaactttgagggtcgagcagcaggggcccattcagtcccagggagcagagacccccccaaccccttcacaaaccccaacacccctgacttggcccccacagagagaggtcctacagctgtcataaattaaatttattctctggagaacatggttcttggtattgacgtgaatgggagcagggcatttggggactcaggaataggagatggggggcttgggtgccaaataccaaggaaagccttaaacggactccccagagattaccgatagcattagcatctcatggaggaccccccgcccccgaccaccagtccccctttacttcttcttcttcttcttgcgaccccaacactgggggcctccatcctctcttcggctcctccaggtgggcatgggaggctccagctcatttgggcggcccccccggtctggaacgttgcccataagcaccttgttgatggcacagcaggtccctctgcggacagccacgctggtggctgggacgagacaagacaggtcggctcgggcagccagaacgtgtgcaatggagatgtccgattctggggtcagaacctctcgaattgggatcagcactgccctcatggcctctccttgggcctctgcccggtcactccagtggaaagcagatgtagtgaggtcaaggcgcttgaggaggaggcagcggcggcagcggtactgatctctgaggctttgggacagagactccaacgcttcccatctgggtgcatctagcgagcagctgaggaggggctgcagggaccctgggggcagagaaggctgcagctctgagatcttagcatgcaactcctgcagcagctggctggcgggggtccctggtgcaggtctgggcagccccagggcttggagggtaaggtccagttcttggaccatgccggctccctccactaccccttcaccaaggggtggcctaggactcggatccagcagagagcggaggcacaggaggcgggtggcttggagctctgagcagagaaagcgcagcaggcgcagtccggcaccgggttcccgaagcgcagccgcgccatccccgccgcagagcgcgcgatccgggcagtgcagctcccgcagcaggctgccgagctgccgcagaaagtcctcctccgcgccagggcctgcgaggacaggggtgtcagggctcggtggccccgtggcggcccccctgccaccctcccgctccgtgtttaccgtcgccggcgctcagcacctccgcgcccgcctctcgctgctgctcgagggcgcccagcgtcgccagctccgccgccagccgcacgcacagccccctgaagtctgggcatgaggcgccccgcgacgccgcccccgggacacctccataccccagagccagcaggtcctgggccaccgcggccccctcccacgcttccgccttcaccgcctccatgaaagtgtgtctcggcgcgccccctggcggcc

SEQ ID NO: 735453 - DNA, 4687 bp, Homo sapiens
atccccgtgtgggggaggggggccttcggtctctccccagcctcttccttccccctggcctgagggtgggtggggaggggcagttcctctttccttcccaagcaccgaggaggccccagctccctaggggctgagaagctggagtcctgggcaaggggaggagctgagccctactcttgcaagacccccggcctcctcaccccacgcgggaagcatgaacagaaaagacagtaagaggaagtcccaccaggaatgcaccggaaaaacaggagggcgaggccggccccgccaagtgcgccgccacaagacatgccccagccctcgggaaatcagcaaggtcatggcttccatgaacctgggcctgctgagtgagggcggctgcagcgaagatgagctgctggagaaatgcatccagtccttcgattcagctggcagcctgtgccacgaggaccacatgctcaacatggtgctggccatgcacagctgggtgctgccgtccgccgacctggctgcccgcctgctgacctcataccagaaggccacaggggacacccaggagctgagacggctgcagatctgtcacctggtcaggtactggctgatgcgacaccctgaggtgatgcaccaggatccccagctagaagaagtcataggtcgtttctgggccaccgtggcccgggagggcaactcagcccagagaagactgggagactcttctgacctgtgagtcagccctgtgcccccctcttccctgccccatcgccattctgccatctccctctatatccccaagccctcaactgtgagccactccaataccctgcccctcttggcccccagcctgagccctggtggccctggccccccactcccaatgagcagcccaggcctgggcaaaaagcgcaaagtgtccttgcttttcgaccacttggagacgggggagctggctcagcacctcacctacctggagttccggtccttccaggctatcacgccccaggacctgcggagctacgttttgcagggctcagtacgaggctgcccggccctggagggctccgtaggtctcagcaacagcgtgtcccgctgggtgcaggtgatggtgctgagccgtcccgggcccctacagcgtgcacaggtgctggacaagttcattcacgtggcacagaggctccaccagctgcagaatttcaacacgctgatggcagtcacagggggcctgtgtcacagtgccatctccagactcaaggactcccatgcccacctgagccctgacagcaccaaggccctcctggagctcactgagctccttgcctcccacaacaactacgcccgctaccgccgcacctgggctggctgcgcgggcttccggctgcctgtactgggcgtgcacctcaaggacctggtgtccctgcatgaggcacagcccgacaggttgcctgacggccgcctgcacctacccaagctgaacaacctctacctgcggctgcaggagctggtggccctccaagggcagcatccaccctgcagcgccaatgaggatctgctgcacctgctcacgctctccctggacctcttctacacggaagacgagatctatgagctttcttatgcccgggagccgcgttgtcccaagagcctgccaccctcccccttcaatgcacctctggtggtggagtgggcccctggtgtgacacccaagccggacagggtcacactgggtcggcatgtggagcagctggtggagtctgtgttcaagaattatgaccctgaaggccgaggaacaatctctcaggaggactttgagcgactctcgggcaattttcccttcgcctgccatgggcttcacccacccccacgccaggggagaggatccttcagcagagaggagctgacagggtacctgctccgggccagcgccatctgctccaagttgggcctggccttcctgcacaccttccatgaggtcaccttccgaaagcctaccttctgcgacagctgcagtggcttcctctggggtgtcaccaagcaaggctaccgctgtcggggtgagtggggtgtcagtgagtgggagggaagccttggcccgcaggctggaagaatggatgacacagatcggacccctgccgctgccttcccccagagtgcgggctgtgttgccacaaacactgcagagaccaggtgaaggtagaatgtaagaagaggccaggggccaagggcgatgcaggaccccccggagctcctgtcccatccacaccagctccccatgccagctgtggctccgaggaaaatcactcctacacgctatccctggagcctgagactgggtgccagcttcgccatgcctggacccagactgaatccccacacccttcctgggaaacagatacggtcccctgcccggtgatggacccaccatcaactgcatcctccaagctggattcctagacatctcttggtctcctctcttcctcactcccttcccccagtcagtcctgagtcctgccgtcagactctggcagggctcccagaggtaggcctccagaggcatccgccttcccatccacactgcctttagtggtacgtccgtcatctttttccctggaagtgactttcctcttttgcatcctggtggatgctaatcctgctccctttccctgcacttagtatctgtgcggctgtgtgttggatacatttagactcaggcctcattctaccaactccctacatctccatttctttttttttttgagacagagtcttgctctgtcacccaggctggagtgcaatgatgcaatctcagctcactgcaacttccgcctcctgggttcaagtgattcttctgcctcagcctcccaagtagctgggattacaggcacgccccaccatgcccggctaatttttgtatttttagtagagacggggtttccccatgttggccaagatggtctcaaactcctgacctcatgatccaccagcctcagcctcccaaagtgctgggaatacaggcgtgagccaccacgcccagctcctgtttttctgcatagaatgtgctccctctgacagcctatactttttccctctttatctcgttgaacgtctgtctttcctcaacaggagcatcaactccaggagaacagggatttctatcaatgtcattcactgctgcatccccagtgcctagaacagggctggcaggtggtaggcgcctgacagatgcttgtctgatgcctgaatgtctccttacccatgcccacggcacaggatagatgtgctatagggcaaagaactttgagggtcgagcagcaggggcccattcagtcccagggagcagagacccccccaaccccttcacaaaccccaacacccctgacttggcccccacagagagaggtcctacagctgtcataaattaaatttattctctggagaacatggttcttggtattgacgtgaatgggagcagggcatttggggactcaggaataggagatggggggcttgggtgccaaataccaaggaaagccttaaacggactccccagagattaccgatagcattagcatctcatggaggaccccccgcccccgaccaccagtccccctttacttcttcttcttcttcttgcgaccccaacactgggggcctccatcctctcttcggctcctccaggtgggcatgggaggctccagctcatttgggcggcccccccggtctggaacgttgcccataagcaccttgttgatggcacagcaggtccctctgcggacagccacgctggtggctgggacgagacaagacaggtcggctcgggcagccagaacgtgtgcaatggagatgtccgattctggggtcagaacctctcgaattgggatcagcactgccctcatggcctctccttgggcctctgcccggtcactccagtggaaagcagatgtagtgaggtcaaggcgcttgaggaggaggcagcggcggcagcggtactgatctctgaggctttgggacagagactccaacgcttcccatctgggtgcatctagcgagcagctgaggaggggctgcagggaccctgggggcagagaaggctgcagctctgagatcttagcatgcaactcctgcagcagctggctggcgggggtccctggtgcaggtctgggcagccccagggcttggagggtaaggtccagttcttggaccatgccggctccctccactaccccttcaccaaggggtggcctaggactcggatccagcagagagcggaggcacaggaggcgggtggcttggagctctgagcagagaaagcgcagcaggcgcagtccggcaccgggttcccgaagcgcagccgcgccatccccgccgcagagcgcgcgatccgggcagtgcagctcccgcagcaggctgccgagctgccgcagaaagtcctcctccgcgccagggccgtcgccggcgctcagcacctccgcgcccgcctctcgctgctgctcgagggcgcccagcgtcgccagctccgccgccagccgcacgcacagccccctgaagtctgggcatgaggcgccccgcgacgccgcccccgggacacctccataccccagagccagcaggtcctgggccaccgcggccccctcccacgcttccgccttcaccgcctccatgaaagtgtgtctcggcgcgccccctggcggcc

SEQ ID NO: 735454 - DNA, 4545 bp, Homo sapiens
atccccgtgtgggggaggggggccttcggtctctccccagcctcttccttccccctggcctgagggtgggtggggaggggcagttcctctttccttcccaagcaccgaggaggccccagctccctaggggctgagaagctggagtcctgggcaaggggaggagctgagccctactcttgcaagacccccggcctcctcaccccacgcgggaagcatgaacagaaaagacagtaagaggaagtcccaccaggaatgcaccggaaaaacaggagggcgaggccggccccgccaagtgcgccgccacaagacatgccccagccctcgggaaatcagcaaggtcatggcttccatgaacctgggcctgctgagtgagggcggctgcagcgaagatgagctgctggagaaatgcatccagtccttcgattcagctggcagcctgtgccacgaggaccacatgctcaacatggtgctggccatgcacagctgggtgctgccgtccgccgacctggctgcccgcctgctgacctcataccagaaggccacaggggacacccaggagctgagacggctgcagatctgtcacctggtcaggtactggctgatgcgacaccctgaggtgatgcaccaggatccccagctagaagaagtcataggtcgtttctgggccaccgtggcccgggagggcaactcagcccagagaagactgggagactcttctgacctgtgagtcagccctgtgcccccctcttccctgccccatcgccattctgccatctccctctatatccccaagccctcaactgtgagccactccaataccctgcccctcttggcccccagcctgagccctggtggccctggccccccactcccaatgagcagcccaggcctgggcaaaaagcgcaaagtgtccttgcttttcgaccacttggagacgggggagctggctcagcacctcacctacctggagttccggtccttccaggctatcacgccccaggacctgcggagctacgttttgcagggctcagtacgaggctgcccggccctggagggctccgtaggtctcagcaacagcgtgtcccgctgggtgcaggtgatggtgctgagccgtcccgggcccctacagcgtgcacaggtgctggacaagttcattcacgtggcacagaggctccaccagctgcagaatttcaacacgctgatggcagtcacagggggcctgtgtcacagtgccatctccagactcaaggactcccatgcccacctgagccctgacagcaccaaggccctcctggagctcactgagctccttgcctcccacaacaactacgcccgctaccgccgcacctgggctggctgcgcgggcttccggctgcctgtactgggcgtgcacctcaaggacctggtgtccctgcatgaggcacagcccgacaggttgcctgacggccgcctgcacctacccaagctgaacaacctctacctgcggctgcaggagctggtggccctccaagggcagcatccaccctgcagcgccaatgaggatctgctgcacctgctcacgctctccctggacctcttctacacggaagacgagatctatgagctttcttatgcccgggagccgcgttgtcccaagagcctgccaccctcccccttcaatgcacctctggtggtggagtgggcccctggtgtgacacccaagccggacagggtcacactgggtcggcatgtggagcagctggtggagtctgtgttcaagaattatgaccctgaaggccgaggaacaatctctcaggaggactttgagcgactctcgggcaattttcccttcgcctgccatgggcttcacccacccccacgccaggggagaggatccttcagcagagaggagctgacagggtacctgctccgggccagcgccatctgctccaagttgggcctggccttcctgcacaccttccatgaggtcaccttccgaaagcctaccttctgcgacagctgcagtggcttcctctggggtgtcaccaagcaaggctaccgctgtcggggtgagtggggtgtcagtgagtgggagggaagccttggcccgcaggctggaagaatggatgacacagatcggacccctgccgctgccttcccccagagtgcgggctgtgttgccacaaacactgcagagaccaggtgaaggtagaatgtaagaagaggccaggggccaagggcgatgcaggaccccccggagctcctgtcccatccacaccagctccccatgccagctgtggctccgaggaaaatcactcctacacgctatccctggagcctgagactgggtgccagcttcgccatgcctggacccagactgaatccccacacccttcctgggaaacagatacggtcccctgcccggtgatggacccaccatcaactgcatcctccaagctggattcctagacatctcttggtctcctctcttcctcactcccttcccccagtcagtcctgagtcctgccgtcagactctggcagggctcccagaggtaggcctccagaggcatccgccttcccatccacactgcctttagtggtacgtccgtcatctttttccctggaagtgactttcctcttttgcatcctggtggatgctaatcctgctccctttccctgcacttagtatctgtgcggctgtgtgttggatacatttagactcaggcctcattctaccaactccctacatctccatttctttttttttttgagacagagtcttgctctgtcacccaggctggagtgcaatgatgcaatctcagctcactgcaacttccgcctcctgggttcaagtgattcttctgcctcagcctcccaagtagctgggattacaggcacgccccaccatgcccggctaatttttgtatttttagtagagacggggtttccccatgttggccaagatggtctcaaactcctgacctcatgatccaccagcctcagcctcccaaagtgctgggaatacaggcgtgagccaccacgcccagctcctgtttttctgcatagaatgtgctccctctgacagcctatactttttccctctttatctcgttgaacgtctgtctttcctcaacaggagcatcaactccaggagaacagggatttctatcaatgtcattcactgctgcatccccagtgcctagaacagggctggcaggtggtaggcgcctgacagatgcttgtctgatgcctgaatgtctccttacccatgcccacggcacaggatagatgtgctatagggcaaagaactttgagggtcgagcagcaggggcccattcagtcccagggagcagagacccccccaaccccttcacaaaccccaacacccctgacttggcccccacagagagaggtcctacagctgtcataaattaaatttattctctggagaacatggttcttggtattgacgtgaatgggagcagggcatttggggactcaggaataggagatggggggcttgggtgccaaataccaaggaaagccttaaacggactccccagagattaccgatagcattagcatctcatggaggaccccccgcccccgaccaccagtccccctttacttcttcttcttcttcttgcgaccccaacactgggggcctccatcctctcttcggctcctccaggtgggcatgggaggctccagctcatttgggcggcccccccggtctggaacgttgcccataagcaccttgttgatggcacagcaggtccctctgcggacagccacgctggtggctgggacgagacaagacaggtcggctcgggcagccagaacgtgtgcaatggagatgtccgattctggggtcagaacctctcgaattgggatcagcactgccctcatggcctctccttgggcctctgcccggtcactccagtggaaagcagatgtagtgaggtcaaggcgcttgaggaggaggcagcggcggcagcggtactgatctctgaggctttgggacagagactccaacgcttcccatctgggtgcatctagcgagcagctgaggaggggctgcagggaccctgggggcagagaaggctgcagctctgagatcttagcatgcaactcctgcagcagctggctggcgggggtccctggtgcaggtctgggcagccccagggcttggagggtaaggtccagttcttggaccatgccggctccctccactaccccttcaccaaggggtggcctaggactcggatccagcagagagcggaggcacaggaggcgggtggcttggagctctgagcagagaaagcgcagcaggcgcagtccggcaccgggttcccgaagcgcagccgcgccatccccgccgcagagcgcgcgatccgggcagtgcagctcccgcagcaggctgccgagctgccgcagaaagtcctcctccgcgccagggccgtcgccggcgctcagcacctccgcgcccgcctctcgctgctgctcgaggagcacttggcagcattgatgagctatgcccaaaacttccagaccgtacagcctg

SEQ ID NO: 735455 - DNA, 4530 bp, Homo sapiens
atccccgtgtgggggaggggggccttcggtctctccccagcctcttccttccccctggcctgagggtgggtggggaggggcagttcctctttccttcccaagcaccgaggaggccccagctccctaggggctgagaagctggagtcctgggcaaggggaggagctgagccctactcttgcaagacccccggcctcctcaccccacgcgggaagcatgaacagaaaagacagtaagaggaagtcccaccaggaatgcaccggaaaaacaggagggcgaggccggccccgccaagtgcgccgccacaagacatgccccagccctcgggaaatcagcaaggtcatggcttccatgaacctgggcctgctgagtgagggcggctgcagcgaagatgagctgctggagaaatgcatccagtccttcgattcagctggcagcctgtgccacgaggaccacatgctcaacatggtgctggccatgcacagctgggtgctgccgtccgccgacctggctgcccgcctgctgacctcataccagaaggccacaggggacacccaggagctgagacggctgcagatctgtcacctggtcaggtactggctgatgcgacaccctgaggtgatgcaccaggatccccagctagaagaagtcataggtcgtttctgggccaccgtggcccgggagggcaactcagcccagagaagactgggagactcttctgacctgtgagtcagccctgtgcccccctcttccctgccccatcgccattctgccatctccctctatatccccaagccctcaactgtgagccactccaataccctgcccctcttggcccccagcctgagccctggtggccctggccccccactcccaatgagcagcccaggcctgggcaaaaagcgcaaagtgtccttgcttttcgaccacttggagacgggggagctggctcagcacctcacctacctggagttccggtccttccaggctatcacgccccaggacctgcggagctacgttttgcagggctcagtacgaggctgcccggccctggagggctccgtaggtctcagcaacagcgtgtcccgctgggtgcaggtgatggtgctgagccgtcccgggcccctacagcgtgcacaggtgctggacaagttcattcacgtggcacagaggctccaccagctgcagaatttcaacacgctgatggcagtcacagggggcctgtgtcacagtgccatctccagactcaaggactcccatgcccacctgagccctgacagcaccaaggccctcctggagctcactgagctccttgcctcccacaacaactacgcccgctaccgccgcacctgggctggctgcgcgggcttccggctgcctgtactgggcgtgcacctcaaggacctggtgtccctgcatgaggcacagcccgacaggttgcctgacggccgcctgcacctacccaagctgaacaacctctacctgcggctgcaggagctggtggccctccaagggcagcatccaccctgcagcgccaatgaggatctgctgcacctgctcacgctctccctggacctcttctacacggaagacgagatctatgagctttcttatgcccgggagccgcgttgtcccaagagcctgccaccctcccccttcaatgcacctctggtggtggagtgggcccctggtgtgacacccaagccggacagggtcacactgggtcggcatgtggagcagctggtggagtctgtgttcaagaattatgaccctgaaggccgaggaacaatctctcaggaggactttgagcgactctcgggcaattttcccttcgcctgccatgggcttcacccacccccacgccaggggagaggatccttcagcagagaggagctgacagggtacctgctccgggccagcgccatctgctccaagttgggcctggccttcctgcacaccttccatgaggtcaccttccgaaagcctaccttctgcgacagctgcagtggcttcctctggggtgtcaccaagcaaggctaccgctgtcggggtgagtggggtgtcagtgagtgggagggaagccttggcccgcaggctggaagaatggatgacacagatcggacccctgccgctgccttcccccagagtgcgggctgtgttgccacaaacactgcagagaccaggtgaaggtagaatgtaagaagaggccaggggccaagggcgatgcaggaccccccggagctcctgtcccatccacaccagctccccatgccagctgtggctccgaggaaaatcactcctacacgctatccctggagcctgagactgggtgccagcttcgccatgcctggacccagactgaatccccacacccttcctgggaaacagatacggtcccctgcccggtgatggacccaccatcaactgcatcctccaagctggattcctagacatctcttggtctcctctcttcctcactcccttcccccagtcagtcctgagtcctgccgtcagactctggcagggctcccagaggtaggcctccagaggcatccgccttcccatccacactgcctttagtggtacgtccgtcatctttttccctggaagtgactttcctcttttgcatcctggtggatgctaatcctgctccctttccctgcacttagtatctgtgcggctgtgtgttggatacatttagactcaggcctcattctaccaactccctacatctccatttctttttttttttgagacagagtcttgctctgtcacccaggctggagtgcaatgatgcaatctcagctcactgcaacttccgcctcctgggttcaagtgattcttctgcctcagcctcccaagtagctgggattacaggcacgccccaccatgcccggctaatttttgtatttttagtagagacggggtttccccatgttggccaagatggtctcaaactcctgacctcatgatccaccagcctcagcctcccaaagtgctgggaatacaggcgtgagccaccacgcccagctcctgtttttctgcatagaatgtgctccctctgacagcctatactttttccctctttatctcgttgaacgtctgtctttcctcaacaggagcatcaactccaggagaacagggatttctatcaatgtcattcactgctgcatccccagtgcctagaacagggctggcaggtggtaggcgcctgacagatgcttgtctgatgcctgaatgtctccttacccatgcccacggcacaggatagatgtgctatagggcaaagaactttgagggtcgagcagcaggggcccattcagtcccagggagcagagacccccccaaccccttcacaaaccccaacacccctgacttggcccccacagagagaggtcctacagctgtcataaattaaatttattctctggagaacatggttcttggtattgacgtgaatgggagcagggcatttggggactcaggaataggagatggggggcttgggtgccaaataccaaggaaagccttaaacggactccccagagattaccgatagcattagcatctcatggaggaccccccgcccccgaccaccagtccccctttacttcttcttcttcttcttgcgaccccaacactgggggcctccatcctctcttcggctcctccaggtgggcatgggaggctccagctcatttgggcggcccccccggtctggaacgttgcccataagcaccttgttgatggcacagcaggtccctctgcggacagccacgctggtggctgggacgagacaagacaggtcggctcgggcagccagaacgtgtgcaatggagatgtccgattctggggtcagaacctctcgaattgggatcagcactgccctcatggcctctccttgggcctctgcccggtcactccagtggaaagcagatgtagtgaggtcaaggcgcttgaggaggaggcagcggcggcagcggtactgatctctgaggctttgggacagagactccaacgcttcccatctgggtgcatctagcgagcagctgaggaggggctgcagggaccctgggggcagagaaggctgcagctctgagatcttagcatgcaactcctgcagcaggctgccgagctgccgcagaaagtcctcctccgcgccagggccgtcgccggcgctcagcacctccgcgcccgcctctcgctgctgctcgagggcgcccagcgtcgccagctccgccgccagccgcacgcacagccccctgaagtctgggcatgaggcgccccgcgacgccgcccccgggacacctccatacctgtggggaccgaggcagcgggagggggcggggatgtcactgggaatcccttttcgtccgcgtccagggggcagacctggccttcctgcacccaccagcctcaccgcacacccttttaccccagagccagcaggtcctgggccaccgcggccccctcccacgcttccgccttcaccgcctccatgaaagtgtgtctcggcgcgccccctggcggcc

SEQ ID NO: 735456 - DNA, 4611 bp, Homo sapiens
atccccgtgtgggggaggggggccttcggtctctccccagcctcttccttccccctggcctgagggtgggtggggaggggcagttcctctttccttcccaagcaccgaggaggccccagctccctaggggctgagaagctggagtcctgggcaaggggaggagctgagccctactcttgcaagacccccggcctcctcaccccacgcgggaagcatgaacagaaaagacagtaagaggaagtcccaccaggaatgcaccggaaaaacaggagggcgaggccggccccgccaagtgcgccgccacaagacatgccccagccctcgggaaatcagcaaggtcatggcttccatgaacctgggcctgctgagtgagggcggctgcagcgaagatgagctgctggagaaatgcatccagtccttcgattcagctggcagcctgtgccacgaggaccacatgctcaacatggtgctggccatgcacagctgggtgctgccgtccgccgacctggctgcccgcctgctgacctcataccagaaggccacaggggacacccaggagctgagacggctgcagatctgtcacctggtcaggtactggctgatgcgacaccctgaggtgatgcaccaggatccccagctagaagaagtcataggtcgtttctgggccaccgtggcccgggagggcaactcagcccagagaagactgggagactcttctgacctgtgagtcagccctgtgcccccctcttccctgccccatcgccattctgccatctccctctatatccccaagccctcaactgtgagccactccaataccctgcccctcttggcccccagcctgagccctggtggccctggccccccactcccaatgagcagcccaggcctgggcaaaaagcgcaaagtgtccttgcttttcgaccacttggagacgggggagctggctcagcacctcacctacctggagttccggtccttccaggctatcacgccccaggacctgcggagctacgttttgcagggctcagtacgaggctgcccggccctggagggctccgtaggtctcagcaacagcgtgtcccgctgggtgcaggtgatggtgctgagccgtcccgggcccctacagcgtgcacaggtgctggacaagttcattcacgtggcacagaggctccaccagctgcagaatttcaacacgctgatggcagtcacagggggcctgtgtcacagtgccatctccagactcaaggactcccatgcccacctgagccctgacagcaccaaggccctcctggagctcactgagctccttgcctcccacaacaactacgcccgctaccgccgcacctgggctggctgcgcgggcttccggctgcctgtactgggcgtgcacctcaaggacctggtgtccctgcatgaggcacagcccgacaggttgcctgacggccgcctgcacctacccaagctgaacaacctctacctgcggctgcaggagctggtggccctccaagggcagcatccaccctgcagcgccaatgaggatctgctgcacctgctcacgctctccctggacctcttctacacggaagacgagatctatgagctttcttatgcccgggagccgcgttgtcccaagagcctgccaccctcccccttcaatgcacctctggtggtggagtgggcccctggtgtgacacccaagccggacagggtcacactgggtcggcatgtggagcagctggtggagtctgtgttcaagaattatgaccctgaaggccgaggaacaatctctcaggaggactttgagcgactctcgggcaattttcccttcgcctgccatgggcttcacccacccccacgccaggggagaggatccttcagcagagaggagctgacagggtacctgctccgggccagcgccatctgctccaagttgggcctggccttcctgcacaccttccatgaggtcaccttccgaaagcctaccttctgcgacagctgcagtggcttcctctggggtgtcaccaagcaaggctaccgctgtcggggtgagtggggtgtcagtgagtgggagggaagccttggcccgcaggctggaagaatggatgacacagatcggacccctgccgctgccttcccccagagtgcgggctgtgttgccacaaacactgcagagaccaggtgaaggtagaatgtaagaagaggccaggggccaagggcgatgcaggaccccccggagctcctgtcccatccacaccagctccccatgccagctgtggctccgaggaaaatcactcctacacgctatccctggagcctgagactgggtgccagcttcgccatgcctggacccagactgaatccccacacccttcctgggaaacagatacggtcccctgcccggtgatggacccaccatcaactgcatcctccaagctggattcctagacatctcttggtctcctctcttcctcactcccttcccccagtcagtcctgagtcctgccgtcagactctggcagggctcccagaggtaggcctccagaggcatccgccttcccatccacactgcctttagtggtacgtccgtcatctttttccctggaagtgactttcctcttttgcatcctggtggatgctaatcctgctccctttccctgcacttagtatctgtgcggctgtgtgttggatacatttagactcaggcctcattctaccaactccctacatctccatttctttttttttttgagacagagtcttgctctgtcacccaggctggagtgcaatgatgcaatctcagctcactgcaacttccgcctcctgggttcaagtgattcttctgcctcagcctcccaagtagctgggattacaggcacgccccaccatgcccggctaatttttgtatttttagtagagacggggtttccccatgttggccaagatggtctcaaactcctgacctcatgatccaccagcctcagcctcccaaagtgctgggaatacaggcgtgagccaccacgcccagctcctgtttttctgcatagaatgtgctccctctgacagcctatactttttccctctttatctcgttgaacgtctgtctttcctcaacaggagcatcaactccaggagaacagggatttctatcaatgtcattcactgctgcatccccagtgcctagaacagggctggcaggtggtaggcgcctgacagatgcttgtctgatgcctgaatgtctccttacccatgcccacggcacaggatagatgtgctatagggcaaagaactttgagggtcgagcagcaggggcccattcagtcccagggagcagagacccccccaaccccttcacaaaccccaacacccctgacttggcccccacagagagaggtcctacagctgtcataaattaaatttattctctggagaacatggttcttggtattgacgtgaatgggagcagggcatttggggactcaggaataggagatggggggcttgggtgccaaataccaaggaaagccttaaacggactccccagagattaccgatagcattagcatctcatggaggaccccccgcccccgaccaccagtccccctttacttcttcttcttcttcttgcgaccccaacactgggggcctccatcctctcttcggctcctccaggtgggcatgggaggctccagctcatttgggcggcccccccggtctggaacgttgcccataagcaccttgttgatggcacagcaggtccctctgcggacagccacgctggtggctgggacgagacaagacaggtcggctcgggcagccagaacgtgtgcaatggagatgtccgattctggggtcagaacctctcgaattgggatcagcactgccctcatggcctctccttgggcctctgcccggtcactccagtggaaagcagatgtagtgaggtcaaggcgcttgaggaggaggcagcgctgaggaggggctgcagggaccctgggggcagagaaggctgcagctctgagatcttagcatgcaactcctgcagcagctggctggcgggggtccctggtgcaggtctgggcagccccagggcttggagggtaaggtccagttcttggaccatgccggctccctccactaccccttcaccaaggggtggcctaggactcggatccagcagagagcggaggcacaggaggcgggtggcttggagctctgagcagagaaagcgcagcaggcgcagtccggcaccgggttcccgaagcgcagccgcgccatccccgccgcagagcgcgcgatccgggcagtgcagctcccgcagcaggctgccgagctgccgcagaaagtcctcctccgcgccagggccgtcgccggcgctcagcacctccgcgcccgcctctcgctgctgctcgagggcgcccagcgtcgccagctccgccgccagccgcacgcacagccccctgaagtctgggcatgaggcgccccgcgacgccgcccccgggacacctccataccccagagccagcaggtcctgggccaccgcggccccctcccacgcttccgccttcaccgcctccatgaaagtgtgtctcggcgcgccccctggcggcc

SEQ ID NO: 735457 - DNA, 4649 bp, Homo sapiens
atccccgtgtgggggaggggggccttcggtctctccccagcctcttccttccccctggcctgagggtgggtggggaggggcagttcctctttccttcccaagcaccgaggaggccccagctccctaggggctgagaagctggagtcctgggcaaggggaggagctgagccctactcttgcaagacccccggcctcctcaccccacgcgggaagcatgaacagaaaagacagtaagaggaagtcccaccaggaatgcaccggaaaaacaggagggcgaggccggccccgccaagtgcgccgccacaagacatgccccagccctcgggaaatcagcaaggtcatggcttccatgaacctgggcctgctgagtgagggcggctgcagcgaagatgagctgctggagaaatgcatccagtccttcgattcagctggcagcctgtgccacgaggaccacatgctcaacatggtgctggccatgcacagctgggtgctgccgtccgccgacctggctgcccgcctgctgacctcataccagaaggccacaggggacacccaggagctgagacggctgcagatctgtcacctggtcaggtactggctgatgcgacaccctgaggtgatgcaccaggatccccagctagaagaagtcataggtcgtttctgggccaccgtggcccgggagggcaactcagcccagagaagactgggagactcttctgacctgtgagtcagccctgtgcccccctcttccctgccccatcgccattctgccatctccctctatatccccaagccctcaactgtgagccactccaataccctgcccctcttggcccccagcctgagccctggtggccctggccccccactcccaatgagcagcccaggcctgggcaaaaagcgcaaagtgtccttgcttttcgaccacttggagacgggggagctggctcagcacctcacctacctggagttccggtccttccaggctatcacgccccaggacctgcggagctacgttttgcagggctcagtacgaggctgcccggccctggagggctccgtaggtctcagcaacagcgtgtcccgctgggtgcaggtgatggtgctgagccgtcccgggcccctacagcgtgcacaggtgctggacaagttcattcacgtggcacagaggctccaccagctgcagaatttcaacacgctgatggcagtcacagggggcctgtgtcacagtgccatctccagactcaaggactcccatgcccacctgagccctgacagcaccaaggccctcctggagctcactgagctccttgcctcccacaacaactacgcccgctaccgccgcacctgggctggctgcgcgggcttccggctgcctgtactgggcgtgcacctcaaggacctggtgtccctgcatgaggcacagcccgacaggttgcctgacggccgcctgcacctacccaagctgaacaacctctacctgcggctgcaggagctggtggccctccaagggcagcatccaccctgcagcgccaatgaggatctgctgcacctgctcacgctctccctggacctcttctacacggaagacgagatctatgagctttcttatgcccgggagccgcgttgtcccaagagcctgccaccctcccccttcaatgcacctctggtggtggagtgggcccctggtgtgacacccaagccggacagggtcacactgggtcggcatgtggagcagctggtggagtctgtgttcaagaattatgaccctgaaggccgaggaacaatctctcaggaggactttgagcgactctcgggcaattttcccttcgcctgccatgggcttcacccacccccacgccaggggagaggatccttcagcagagaggagctgacagggtacctgctccgggccagcgccatctgctccaagttgggcctggccttcctgcacaccttccatgaggtcaccttccgaaagcctaccttctgcgacagctgcagtggcttcctctggggtgtcaccaagcaaggctaccgctgtcggggtgagtggggtgtcagtgagtgggagggaagccttggcccgcaggctggaagaatggatgacacagatcggacccctgccgctgccttcccccagagtgcgggctgtgttgccacaaacactgcagagaccaggtgaaggtagaatgtaagaagaggccaggggccaagggcgatgcaggaccccccggagctcctgtcccatccacaccagctccccatgccagctgtggctccgaggaaaatcactcctacacgctatccctggagcctgagactgggtgccagcttcgccatgcctggacccagactgaatccccacacccttcctgggaaacagatacggtcccctgcccggtgatggacccaccatcaactgcatcctccaagctggattcctagacatctcttggtctcctctcttcctcactcccttcccccagtcagtcctgagtcctgccgtcagactctggcagggctcccagaggtaggcctccagaggcatccgccttcccatccacactgcctttagtggtacgtccgtcatctttttccctggaagtgactttcctcttttgcatcctggtggatgctaatcctgctccctttccctgcacttagtatctgtgcggctgtgtgttggatacatttagactcaggcctcattctaccaactccctacatctccatttctttttttttttgagacagagtcttgctctgtcacccaggctggagtgcaatgatgcaatctcagctcactgcaacttccgcctcctgggttcaagtgattcttctgcctcagcctcccaagtagctgggattacaggcacgccccaccatgcccggctaatttttgtatttttagtagagacggggtttccccatgttggccaagatggtctcaaactcctgacctcatgatccaccagcctcagcctcccaaagtgctgggaatacaggcgtgagccaccacgcccagctcctgtttttctgcatagaatgtgctccctctgacagcctatactttttccctctttatctcgttgaacgtctgtctttcctcaacaggagcatcaactccaggagaacagggatttctatcaatgtcattcactgctgcatccccagtgcctagaacagggctggcaggtggtaggcgcctgacagatgcttgtctgatgcctgaatgtctccttacccatgcccacggcacaggatagatgtgctatagggcaaagaactttgagggtcgagcagcaggggcccattcagtcccagggagcagagacccccccaaccccttcacaaaccccaacacccctgacttggcccccacagagagaggtcctacagctgtcataaattaaatttattctctggagaacatggttcttggtattgacgtgaatgggagcagggcatttggggactcaggaataggagatggggggcttgggtgccaaataccaaggaaagccttaaacggactccccagagattaccgatagcattagcatctcatggaggaccccccgcccccgaccaccagtccccctttacttcttcttcttcttcttgcgaccccaacactgggggcctccatcctctcttcggctcctccaggtgggcatgggaggctccagctcatttgggcggcccccccggtctggaacgttgcccataagcaccttgttgatggcacagcaggtccctctgcggacagcgggcagccagaacgtgtgcaatggagatgtccgattctggggtcagaacctctcgaattgggatcagcactgccctcatggcctctccttgggcctctgcccggtcactccagtggaaagcagatgtagtgaggtcaaggcgcttgaggaggaggcagcggcggcagcggtactgatctctgaggctttgggacagagactccaacgcttcccatctgggtgcatctagcgagcagctgaggaggggctgcagggaccctgggggcagagaaggctgcagctctgagatcttagcatgcaactcctgcagcagctggctggcgggggtccctggtgcaggtctgggcagccccagggcttggagggtaaggtccagttcttggaccatgccggctccctccactaccccttcaccaaggggtggcctaggactcggatccagcagagagcggaggcacaggaggcgggtggcttggagctctgagcagagaaagcgcagcaggcgcagtccggcaccgggttcccgaagcgcagccgcgccatccccgccgcagagcgcgcgatccgggcagtgcagctcccgcagcaggctgccgagctgccgcagaaagtcctcctccgcgccagggccgtcgccggcgctcagcacctccgcgcccgcctctcgctgctgctcgagggcgcccagcgtcgccagctccgccgccagccgcacgcacagccccctgaagtctgggcatgaggcgccccgcgacgccgcccccgggacacctccataccccagagccagcaggtcctgggccaccgcggccccctcccacgcttccgccttcaccgcctccatgaaagtgtgtctcggcgcgccccctggcggcc

SEQ ID NO: 735458 - DNA, 959 bp, Homo sapiens
tccatgtttttgctattgtgaatagtgctgcaatgaacatacatgtgcatgtctttttataatagaatgatttatattctgttgtgtatatacccagtaatgggattgctgagttgaatgctatttctgcctttaggtctttgatgaattgccacactgtcttccacaatggttgaactaatttacactcccaccaacggtgaataagtgttcacttttctccacaaccttgtcagcatctattattttttgactttttagtaatagccattctgactgctcacatctattttgtaaataaagttttattgaaacatggccttacccatttgtttacatatattcatggctgtttttgtgccacaatgtcagagttgtcttaaagtagacagagactatctggctgtaaagcctgagatatatactaactggttctttatgtaaaaagtttgctgaccacctactctaaacgttttgcagtgatggtagtgttggcaaaaaaccaaatagcttaccctctttaaatttcccttttacttccttacaaactcctaacaccatttacgactttgtcatcaatatggtcaactaagcttggtttgcatggctcctacttcctttcaccttccacttaggcagtgtctcccaagtcccactgcagtttctatttgtctcctgactgttactgtatcagttcttacctaaataacataacaactgatctccctactttttgcctatgccctcaaatgtgctcattgttgatctatctccctgttaggtgttctttttctcctctttagaaagcagccaaggaaaccagggttctctcaaagtggaaaatactggaacttatgtactgttatcataatgatagttggtgttttgaattataagaatgattccaggtggtttctaaatcatccaataaagctgtattcactctgtaaaaaaaatta

SEQ ID NO: 735459 - DNA, 2863 bp, Homo sapiens
ggctggtacggcccgggattttgcgccggaacctgcgagctggggcgcggcctcggggaggggcgggcgggacagacccagccgccccggctcccccgccgtccgcgtctgcgccggccccggggcctggtcggcggcggcggggccggtcgatggcccgggcggcggcggcggcatgcggctcctgttcctggcggtgctgcggccacacaccggcaacgcggtcacggcccagcgcgttcgggcccatctagaggctgcagggcacgtgtgcgttttgaaggatgcctttgactttgaaagccgatctgagattgcaaacctcatcttggctgagaactgcgaggctgccctggctcttcatctctataggggaggcaggcttttgcaaggccaccgaatcccttttggagtcatctttggtggaactgatgtaaatgaagatgccaaccaggcggaaaaaaacacagtcatgggcagagttcttgaggaagccagatttgctgtcgctttcacagagtcaatgaaggaaatggcacaagcgcagtgggtcgatccagtgtttacaagggaagtgaaagccaaagtgaaaagagccgctggggtacgattgattggagagatgcctcaagaagatctgcacgcggtggtgaagaattgcttcgcggtggtgaatagctctgtctctgaaggcatgtcagctgcaattttggaggcaatggatttagaagtaccggtattggccaggaacatccccgggaatgctgccgtggtgaagcatgaagtcacagggctactgttttccaatcctcaggagtttgttcatctggcaaagagactggttagtgatcctgcattagaaaaggaaatcgtagtgaacggaagggaatacgtgagaatgtatcattcatggcaggtggaaagagacacctaccaacagctcatcaggaagctggaaggaagcactgaagattgagggccccgcctcatcagacacctgctctctgacacacagctctgggtgcacactcagagacagagttctggatcacgtgggcccagtgcagttcaaataaaaccagcctcagcggaatcctagaaaatgttagtcgtgagtccccagagccactgcattcatcccatatccttctgtgcgttcagatgctgtcccaggcgtgttcaccagccagtcctgatggaggtgcatgagtgactgggttgactgggacagggaaaggggaactggttttcagggaatttgggagagaatttgattacctgccttagggctttggtgtggacaatagaggcttattttcaagcagtcatggttcagactcctcccgcctgccttctgaccaacctctccccatcgttgccagtttgaaaggcaaaagcaaaacagacgtgtcagctgagccgagtcctcgcaggatttttgttgtgatctcaggactctgacaggcacgtgggtgacccgaggcttctctgaacactagaaagcgctgtgagtgagctcacgcccggcacagctcacttttcaatggtggaattgaaagttgtgctttttagaaaagtggccaggctgcccgcaggccccgcccacctcttggctgaatttgagtggaaaaccaggaaggaacaagcgccacgtcacgcatagcctgcaaatcgcccgcgtgaccctgagatggaggcctgaggctttgggtccagggtgggctcttccccttcccacatcagggacccggggatggatgtcggaagggtcaccagcctccagcctttggcaggatggagcttgggtctgcagggctttgcagccacacagcgaggtcagtccggggccagccgcgccatcatggtaatggtggcctcgccccatccatgtcatccatgtcacatgaggacgtgcagtcttccttgtcctctcctagtggaatttgcctgggagaacctccactgaatactgaaattgttgcatgcctgtggattccttacgacaatggggaacgcggtgtttcccacctcttgtgggtagaaagcagtctgctttgaggaggcgagaaggcaaagccagggcagggcgttgctgtgggaagcgttcggtgaaagcgggtttcgacgcttaggagggccgagggagaagattccaccagcattgtccttgcttcaagttttaggatgtctgaactttcagctttcatgttttcaaccatcatttttttaatggcacaacctacatcttgtttttaaaagaagtagcctcaaattaaactccttaaactctgatgccctggggatgagaacaactagcttggatctcgtgccgtgtaattcaatgtttcattccgctgcctccatcatgtaatagaatcgctttccagaaaggcagttaactggaagcagcagaggctcccagccgtgagaggactgctcaacaatgccccccatcgccgcccccccacccctcgcaccccttgtgttttccctctgaggggccccaagggttatggctttcatgtctaggtgtggggacagaggagggagaggcagatcctgggccgggagaggatggccctggtctgaatctggagtaattaatgccacccaaagaaaaggccctgccaggtccaatgttgtcttagatctgatgatgctgctatttacaaaacactgatcgtccgaaagcttgaatctgttcctcctcgaatgaccctgtagatgcctgacctccaccgtacctccacatcactattcatgtccttctaggaaaatgtgcacatgcctcacgcactatgtgggaagggcgtgtttttaaattaataaagtgtgtcaccattagccatacgaaaaaaaaaac

SEQ ID NO: 735460 - DNA, 2547 bp, Homo sapiens
ctacaaacttcttcttgcctcaacatcatgagtaatcattgttaaactgctaggaaatgctgtgtgacattgttagctagagtcagtatgtatgtaatcatgttttaaggaattaactcacagtatatctagctacaaataaagctagtatactgtcctataaatttttctaaaaactaatctgtagttctaaaaacttaaatgtcactcttattttcccttacttttttttaaaggtacctgaaatgctgcacaatgatgctagtgaccatggatgtagccgctggggtacgattgattggagagatgcctcaagaagatctgcacgcggtggtgaagaattgcttcgcggtggtgaatagctctgtctctgaaggcatgtcagctgcaattttggaggcaatggatttagaagtaccggtattggccaggaacatccccgggaatgctgccgtggtgaagcatgaagtcacagggctactgttttccaatcctcaggagtttgttcatctggcaaagagactggttagtgatcctgcattagaaaaggaaatcgtagtgaacggaagggaatacgtgagaatgtatcattcatggcaggtggaaagagacacctaccaacagctcatcaggaagctggaaggaagcactgaagattgagggccccgcctcatcagacacctgctctctgacacacagctctgggtgcacactcagagacagagttctggatcacgtgggcccagtgcagttcaaataaaaccagcctcagcggaatcctagaaaatgttagtcgtgagtccccagagccactgcattcatcccatatccttctgtgcgttcagatgctgtcccaggcgtgttcaccagccagtcctgatggaggtgcatgagtgactgggttgactgggacagggaaaggggaactggttttcagggaatttgggagagaatttgattacctgccttagggctttggtgtggacaatagaggcttattttcaagcagtcatggttcagactcctcccgcctgccttctgaccaacctctccccatcgttgccagtttgaaaggcaaaagcaaaacagacgtgtcagctgagccgagtcctcgcaggatttttgttgtgatctcaggactctgacaggcacgtgggtgacccgaggcttctctgaacactagaaagcgctgtgagtgagctcacgcccggcacagctcacttttcaatggtggaattgaaagttgtgctttttagaaaagtggccaggctgcccgcaggccccgcccacctcttggctgaatttgagtggaaaaccaggaaggaacaagcgccacgtcacgcatagcctgcaaatcgcccgcgtgaccctgagatggaggcctgaggctttgggtccagggtgggctcttccccttcccacatcagggacccggggatggatgtcggaagggtcaccagcctccagcctttggcaggatggagcttgggtctgcagggctttgcagccacacagcgaggtcagtccggggccagccgcgccatcatggtaatggtggcctcgccccatccatgtcatccatgtcacatgaggacgtgcagtcttccttgtcctctcctagtggaatttgcctgggagaacctccactgaatactgaaattgttgcatgcctgtggattccttacgacaatggggaacgcggtgtttcccacctcttgtgggtagaaagcagtctgctttgaggaggcgagaaggcaaagccagggcagggcgttgctgtgggaagcgttcggtgaaagcgggtttcgacgcttaggagggccgagggagaagattccaccagcattgtccttgcttcaagttttaggatgtctgaactttcagctttcatgttttcaaccatcatttttttaatggcacaacctacatcttgtttttaaaagaagtagcctcaaattaaactccttaaactctgatgccctggggatgagaacaactagcttggatctcgtgccgtgtaattcaatgtttcattccgctgcctccatcatgtaatagaatcgctttccagaaaggcagttaactggaagcagcagaggctcccagccgtgagaggactgctcaacaatgccccccatcgccgcccccccacccctcgcaccccttgtgttttccctctgaggggccccaagggttatggctttcatgtctaggtgtggggacagaggagggagaggcagatcctgggccgggagaggatggccctggtctgaatctggagtaattaatgccacccaaagaaaaggccctgccaggtccaatgttgtcttagatctgatgatgctgctatttacaaaacactgatcgtccgaaagcttgaatctgttcctcctcgaatgaccctgtagatgcctgacctccaccgtacctccacatcactattcatgtccttctaggaaaatgtgcacatgcctcacgcactatgtgggaagggcgtgtttttaaattaataaagtgtgtcaccattagccatacgaaaaaaaaaac

SEQ ID NO: 735461 - DNA, 964 bp, Homo sapiens
ggctggtacggcccgggattttgcgccggaacctgcgagctggggcgcggcctcggggaggggcgggcgggacagacccagccgccccggctcccccgccgtccgcgtctgcgccggccccggggcctggtcggcggcggcggggccggtcgatggcccgggcggcggcggcggcatgcggctcctgttcctggcggtgctgcggccacacaccggcaacgcggtcacggcccagcgcgttcgggcccatctagaggctgcagggcacgtgtgcgttttgaaggatgcctttgactttgaaagccgatctgagattgcaaacctcatcttggctgagaactgcgaggctgccctggctcttcatctctataggggaggcaggcttttgcaaggccaccgaatcccttttggagtcatctttggtggaactgatgtaaatgaagatgccaaccaggcggaaaaaaacacagtcatgggcagagttcttgaggaagccagccgcatgctaagggtaaggtctatgtccagagtcaaggaattgcaacaacaccaaacgccgcttttaactggaatacctttcttcaacgctctgagattaaccaaagtgctgataatttgcacatatttcttctgatatgtggacttcgacaagttaaggatcctctctatctggtggacgcattttcagcctggcatcaggaggagcccaatgtgcacctggtgattgtgggtcctgaaaacattgaaagaaaaacttctagtttgatgctaaaattctggctaatcaagagagaaggcctcagactgggagccatgagcaggcaacaacagtatctagaaggcatttaataatgtggttttctttttcattgttttcattctgatgatcacatctcaggtacagtgcttgataccagctttccaattatgaaaattgcctttcaaaataaattgacttcacaaa

SEQ ID NO: 735462 - DNA, 3051 bp, Homo sapiens
ggctggtacggcccgggattttgcgccggaacctgcgagctggggcgcggcctcggggaggggcgggcgggacagacccagccgccccggctcccccgccgtccgcgtctgcgccggccccggggcctggtcggcggcggcggggccggtcgatggcccgggcggcggcggcggcatgcggctcctgttcctggcggtgctgcggccacacaccggcaacgcggtcacggcccagcgcgttcgggcccatctagaggctgcagggcacgtgtgcgttttgaaggatgcctttgactttgaaagccgatctgagattgcaaacctcatcttggctgagaactgcgaggctgccctggctcttcatctctataggggaggcaggcttttgcaaggccaccgaatcccttttggagtcatctttggtggaactgatgtaaatgaagatgccaaccaggcggaaaaaaacacagtcatgggcagagttcttgaggaagccagccgcatgctaagggtaaggtctatgtccagagtcaaggaattgcaacaacaccaaacgccgcttttaactggaatacctttcttcaacgctctgagattaaccaaagtgctgataatttgcacatatttcttctgatatgtggacttcgacaagttaaggatcctctctatctggtggacgcattttcagcctggcatcaggaggagcccaatgtgcacctggtgattgtgggtcctgaagtcgatccagtgtttacaagggaagtgaaagccaaagtgaaaagagccgctggggtacgattgattggagagatgcctcaagaagatctgcacgcggtggtgaagaattgcttcgcggtggtgaatagctctgtctctgaaggcatgtcagctgcaattttggaggcaatggatttagaagtaccggtattggccaggaacatccccgggaatgctgccgtggtgaagcatgaagtcacagggctactgttttccaatcctcaggagtttgttcatctggcaaagagactggttagtgatcctgcattagaaaaggaaatcgtagtgaacggaagggaatacgtgagaatgtatcattcatggcaggtggaaagagacacctaccaacagctcatcaggaagctggaaggaagcactgaagattgagggccccgcctcatcagacacctgctctctgacacacagctctgggtgcacactcagagacagagttctggatcacgtgggcccagtgcagttcaaataaaaccagcctcagcggaatcctagaaaatgttagtcgtgagtccccagagccactgcattcatcccatatccttctgtgcgttcagatgctgtcccaggcgtgttcaccagccagtcctgatggaggtgcatgagtgactgggttgactgggacagggaaaggggaactggttttcagggaatttgggagagaatttgattacctgccttagggctttggtgtggacaatagaggcttattttcaagcagtcatggttcagactcctcccgcctgccttctgaccaacctctccccatcgttgccagtttgaaaggcaaaagcaaaacagacgtgtcagctgagccgagtcctcgcaggatttttgttgtgatctcaggactctgacaggcacgtgggtgacccgaggcttctctgaacactagaaagcgctgtgagtgagctcacgcccggcacagctcacttttcaatggtggaattgaaagttgtgctttttagaaaagtggccaggctgcccgcaggccccgcccacctcttggctgaatttgagtggaaaaccaggaaggaacaagcgccacgtcacgcatagcctgcaaatcgcccgcgtgaccctgagatggaggcctgaggctttgggtccagggtgggctcttccccttcccacatcagggacccggggatggatgtcggaagggtcaccagcctccagcctttggcaggatggagcttgggtctgcagggctttgcagccacacagcgaggtcagtccggggccagccgcgccatcatggtaatggtggcctcgccccatccatgtcatccatgtcacatgaggacgtgcagtcttccttgtcctctcctagtggaatttgcctgggagaacctccactgaatactgaaattgttgcatgcctgtggattccttacgacaatggggaacgcggtgtttcccacctcttgtgggtagaaagcagtctgctttgaggaggcgagaaggcaaagccagggcagggcgttgctgtgggaagcgttcggtgaaagcgggtttcgacgcttaggagggccgagggagaagattccaccagcattgtccttgcttcaagttttaggatgtctgaactttcagctttcatgttttcaaccatcatttttttaatggcacaacctacatcttgtttttaaaagaagtagcctcaaattaaactccttaaactctgatgccctggggatgagaacaactagcttggatctcgtgccgtgtaattcaatgtttcattccgctgcctccatcatgtaatagaatcgctttccagaaaggcagttaactggaagcagcagaggctcccagccgtgagaggactgctcaacaatgccccccatcgccgcccccccacccctcgcaccccttgtgttttccctctgaggggccccaagggttatggctttcatgtctaggtgtggggacagaggagggagaggcagatcctgggccgggagaggatggccctggtctgaatctggagtaattaatgccacccaaagaaaaggccctgccaggtccaatgttgtcttagatctgatgatgctgctatttacaaaacactgatcgtccgaaagcttgaatctgttcctcctcgaatgaccctgtagatgcctgacctccaccgtacctccacatcactattcatgtccttctaggaaaatgtgcacatgcctcacgcactatgtgggaagggcgtgtttttaaattaataaagtgtgtcaccattagccatacgaaaaaaaaaac

SEQ ID NO: 735463 - DNA, 3142 bp, Homo sapiens
ggctggtacggcccgggattttgcgccggaacctgcgagctggggcgcggcctcggggaggggcgggcgggacagacccagccgccccggctcccccgccgtccgcgtctgcgccggccccggggcctggtcggcggcggcggggccggtcgatggcccgggcggcggcggcggcatgcggctcctgttcctggcggtgctgcggccacacaccggcaacgcggtcacggcccagcgcgttcgggcccatctagaggctgcagggcacgtgtgcgttttgaaggatgcctttgactttgaaagccgatctgagattgcaaacctcatcttggctgagaactgcgaggctgccctggctcttcatctctataggggaggcaggcttttgcaaggccaccgaatcccttttggagtcatctttggtggaactgatgtaaatgaagatgccaaccaggcggaaaaaaacacagtcatgggcagagttcttgaggaagccagccgcatgctaagggtaaggtctatgtccagagtcaaggaattgcaacaacaccaaacgccgcttttaactggaatacctttcttcaacgctctgagattaaccaaagtgctgataatttgcacatatttcttctgatatgtggacttcgacaagttaaggatcctctctatctggtggacgcattttcagcctggcatcaggaggagcccaatgtgcacctggtgattgtgggtcctgaagtcgatccagtgtttacaagggaagtgaaagccaaagtgaaaagagccgctggggtacgattgattggagagatgcctcaagaagatctgcacgcggtggtgaagaattgcttcgcggtggtgaatagctctgtctctgaaggcatgtcagctgcaattttggaggggaaacagtcaaacagctggggaaggttgagatgttgacccaagatggtacaactagtatctagtggaaccaggattcacacccaggcaggcaatggatttagaagtaccggtattggccaggaacatccccgggaatgctgccgtggtgaagcatgaagtcacagggctactgttttccaatcctcaggagtttgttcatctggcaaagagactggttagtgatcctgcattagaaaaggaaatcgtagtgaacggaagggaatacgtgagaatgtatcattcatggcaggtggaaagagacacctaccaacagctcatcaggaagctggaaggaagcactgaagattgagggccccgcctcatcagacacctgctctctgacacacagctctgggtgcacactcagagacagagttctggatcacgtgggcccagtgcagttcaaataaaaccagcctcagcggaatcctagaaaatgttagtcgtgagtccccagagccactgcattcatcccatatccttctgtgcgttcagatgctgtcccaggcgtgttcaccagccagtcctgatggaggtgcatgagtgactgggttgactgggacagggaaaggggaactggttttcagggaatttgggagagaatttgattacctgccttagggctttggtgtggacaatagaggcttattttcaagcagtcatggttcagactcctcccgcctgccttctgaccaacctctccccatcgttgccagtttgaaaggcaaaagcaaaacagacgtgtcagctgagccgagtcctcgcaggatttttgttgtgatctcaggactctgacaggcacgtgggtgacccgaggcttctctgaacactagaaagcgctgtgagtgagctcacgcccggcacagctcacttttcaatggtggaattgaaagttgtgctttttagaaaagtggccaggctgcccgcaggccccgcccacctcttggctgaatttgagtggaaaaccaggaaggaacaagcgccacgtcacgcatagcctgcaaatcgcccgcgtgaccctgagatggaggcctgaggctttgggtccagggtgggctcttccccttcccacatcagggacccggggatggatgtcggaagggtcaccagcctccagcctttggcaggatggagcttgggtctgcagggctttgcagccacacagcgaggtcagtccggggccagccgcgccatcatggtaatggtggcctcgccccatccatgtcatccatgtcacatgaggacgtgcagtcttccttgtcctctcctagtggaatttgcctgggagaacctccactgaatactgaaattgttgcatgcctgtggattccttacgacaatggggaacgcggtgtttcccacctcttgtgggtagaaagcagtctgctttgaggaggcgagaaggcaaagccagggcagggcgttgctgtgggaagcgttcggtgaaagcgggtttcgacgcttaggagggccgagggagaagattccaccagcattgtccttgcttcaagttttaggatgtctgaactttcagctttcatgttttcaaccatcatttttttaatggcacaacctacatcttgtttttaaaagaagtagcctcaaattaaactccttaaactctgatgccctggggatgagaacaactagcttggatctcgtgccgtgtaattcaatgtttcattccgctgcctccatcatgtaatagaatcgctttccagaaaggcagttaactggaagcagcagaggctcccagccgtgagaggactgctcaacaatgccccccatcgccgcccccccacccctcgcaccccttgtgttttccctctgaggggccccaagggttatggctttcatgtctaggtgtggggacagaggagggagaggcagatcctgggccgggagaggatggccctggtctgaatctggagtaattaatgccacccaaagaaaaggccctgccaggtccaatgttgtcttagatctgatgatgctgctatttacaaaacactgatcgtccgaaagcttgaatctgttcctcctcgaatgaccctgtagatgcctgacctccaccgtacctccacatcactattcatgtccttctaggaaaatgtgcacatgcctcacgcactatgtgggaagggcgtgtttttaaattaataaagtgtgtcaccattagccatacgaaaaaaaaaac

SEQ ID NO: 735464 - DNA, 3103 bp, Homo sapiens
ggctggtacggcccgggattttgcgccggaacctgcgagctggggcgcggcctcggggaggggcgggcgggacagacccagccgccccggctcccccgccgtccgcgtctgcgccggccccggggcctggtcggcggcggcggggccggtcgatggcccgggcggcggcggcggcatgcggctcctgttcctggcggtgctgcggccacacaccggcaacgcggtcacggcccagcgcgttcgggcccatctagaggctgcagggcacgtgtgcgttttgaaggatgcctttgactttgaaagccgatctgagattgcaaacctcatcttggctgagaactgcgaggctgccctggctcttcatctctataggggaggcaggcttttgcaaggccaccgaatcccttttggagtcatctttggtggaactgatgtaaatgaagatgccaaccaggcggaaaaaaacacagtcatgggcagagttcttgaggaagccagatttgctgtcgctttcacagagtcaatgaaggaaatggcacaagcgcagtggccgcatgctaagggtaaggtctatgtccagagtcaaggaattgcaacaacaccaaacgccgcttttaactggaatacctttcttcaacgctctgagattaaccaaagtgctgataatttgcacatatttcttctgatatgtggacttcgacaagttaaggatcctctctatctggtggacgcattttcagcctggcatcaggaggagcccaatgtgcacctggtgattgtgggtcctgaagtcgatccagtgtttacaagggaagtgaaagccaaagtgaaaagagccgctggggtacgattgattggagagatgcctcaagaagatctgcacgcggtggtgaagaattgcttcgcggtggtgaatagctctgtctctgaaggcatgtcagctgcaattttggaggcaatggatttagaagtaccggtattggccaggaacatccccgggaatgctgccgtggtgaagcatgaagtcacagggctactgttttccaatcctcaggagtttgttcatctggcaaagagactggttagtgatcctgcattagaaaaggaaatcgtagtgaacggaagggaatacgtgagaatgtatcattcatggcaggtggaaagagacacctaccaacagctcatcaggaagctggaaggaagcactgaagattgagggccccgcctcatcagacacctgctctctgacacacagctctgggtgcacactcagagacagagttctggatcacgtgggcccagtgcagttcaaataaaaccagcctcagcggaatcctagaaaatgttagtcgtgagtccccagagccactgcattcatcccatatccttctgtgcgttcagatgctgtcccaggcgtgttcaccagccagtcctgatggaggtgcatgagtgactgggttgactgggacagggaaaggggaactggttttcagggaatttgggagagaatttgattacctgccttagggctttggtgtggacaatagaggcttattttcaagcagtcatggttcagactcctcccgcctgccttctgaccaacctctccccatcgttgccagtttgaaaggcaaaagcaaaacagacgtgtcagctgagccgagtcctcgcaggatttttgttgtgatctcaggactctgacaggcacgtgggtgacccgaggcttctctgaacactagaaagcgctgtgagtgagctcacgcccggcacagctcacttttcaatggtggaattgaaagttgtgctttttagaaaagtggccaggctgcccgcaggccccgcccacctcttggctgaatttgagtggaaaaccaggaaggaacaagcgccacgtcacgcatagcctgcaaatcgcccgcgtgaccctgagatggaggcctgaggctttgggtccagggtgggctcttccccttcccacatcagggacccggggatggatgtcggaagggtcaccagcctccagcctttggcaggatggagcttgggtctgcagggctttgcagccacacagcgaggtcagtccggggccagccgcgccatcatggtaatggtggcctcgccccatccatgtcatccatgtcacatgaggacgtgcagtcttccttgtcctctcctagtggaatttgcctgggagaacctccactgaatactgaaattgttgcatgcctgtggattccttacgacaatggggaacgcggtgtttcccacctcttgtgggtagaaagcagtctgctttgaggaggcgagaaggcaaagccagggcagggcgttgctgtgggaagcgttcggtgaaagcgggtttcgacgcttaggagggccgagggagaagattccaccagcattgtccttgcttcaagttttaggatgtctgaactttcagctttcatgttttcaaccatcatttttttaatggcacaacctacatcttgtttttaaaagaagtagcctcaaattaaactccttaaactctgatgccctggggatgagaacaactagcttggatctcgtgccgtgtaattcaatgtttcattccgctgcctccatcatgtaatagaatcgctttccagaaaggcagttaactggaagcagcagaggctcccagccgtgagaggactgctcaacaatgccccccatcgccgcccccccacccctcgcaccccttgtgttttccctctgaggggccccaagggttatggctttcatgtctaggtgtggggacagaggagggagaggcagatcctgggccgggagaggatggccctggtctgaatctggagtaattaatgccacccaaagaaaaggccctgccaggtccaatgttgtcttagatctgatgatgctgctatttacaaaacactgatcgtccgaaagcttgaatctgttcctcctcgaatgaccctgtagatgcctgacctccaccgtacctccacatcactattcatgtccttctaggaaaatgtgcacatgcctcacgcactatgtgggaagggcgtgtttttaaattaataaagtgtgtcaccattagccatacgaaaaaaaaaac

SEQ ID NO: 735465 - DNA, 1926 bp, Homo sapiens
cacagctctcactcaccctccggcttcctgtcggggctttctcagccccaccccacgtttggacatttggagcatttccttccctgacagccggacctgggactgggctggggccctggcggatggagacatgctgcccctgctgctgctgcccctgctgtggggggggtccctgcaggagaagccagtgtacgagctgcaagtgcagaagtcggtgacggtgcaggagggcctgtgcgtccttgtgccctgctccttctcttacccctggagatcctggtattcctctcccccactctacgtctactggttccgggacggggagatcccatactacgctgaggttgtggccacaaacaacccagacagaagagtgaagccagagacccagggccgattccgcctccttggggatgtccagaagaagaactgctccctgagcatcggagatgccagaatggaggacacgggaagctatttcttccgcgtggagagaggaagggatgtaaaatatagctaccaacagaataagctgaacttggaggtgacagccctgatagagaaacccgacatccactttctggagcctctggagtccggccgccccacaaggctgagctgcagccttccaggatcctgtgaagcgggaccacctctcacattctcctggacggggaatgccctcagccccctggaccccgagaccacccgctcctcggagctcaccctcacccccaggcccgaggaccatggcaccaacctcacctgtcagatgaaacgccaaggagctcaggtgaccacggagagaactgtccagctcaatgtctcctatgctccacagaccatcaccatcttcaggaacggcatagccctagagatcctgcaaaacacctcataccttccggtcctggagggccaggctctgcggctgctctgtgatgctcccagcaacccccctgcacacctgagctggttccagggctcccctgccctgaacgccacccccatctccaataccgggatcttggagcttcgtcgagtaaggtctgcagaagaaggaggcttcacctgccgcgctcagcacccgctgggcttcctgcaaatttttctgaatctctcagtttactccctcccacagttgctgggcccctcctgctcctgggaggctgagggtctgcactgcagatgctcctttcgagcccggccggccccctccctgtgctggcggcttgaggagaagccgctggaggggaacagcagccagggctcattcaaggtcaactccagctcagctgggccctgggccaacagctccctgatcctccacggggggctcagctccgacctcaaagtcagctgcaaggcctggaacatctatgggtcccagagcggctctgtcctgctgctgcaagggagatcgaacctcgggacaggagtggttcctgcagcccttggtggtgctggtgtcatggccctgctctgtatctgtctgtgcctcatcttctttttaatagtgaaagcccgcaggaagcaagcagctgggagaccagagaaaatggatgatgaagaccccattatgggtaccatcacctcgggttccaggaagaagccctggccagacagccccggagatcaagcatctcctcctggggatgcccctcccttggaagaacaaaaggagctccattatgcctcccttagtttttctgagatgaagtcgagggagcctaaggaccaggaggccccaagcaccacggagtactcggagatcaagacaagcaagtgaggatttgcccagagttcagtcctggctggaggagccacagcctgtctgggggaaaggacaagtcagggaccacttgctgaagcacgaagagcccttgtggcaatgttaacattaactgatgtttaagtgctccaagcaga

SEQ ID NO: 735466 - DNA, 1298 bp, Homo sapiens
cacagctctcactcaccctccggcttcctgtcggggctttctcagccccaccccacgtttggacatttggagcatttccttccctgacagccggacctgggactgggctggggccctggcggatggagacatgctgcccctgctgctgctgcccctgctgtggggggggtccctgcaggagaagccagtgtacgagctgcaagtgcagaagtcggtgacggtgcaggagggcctgtgcgtccttgtgccctgctccttctcttacccctggagatcctggtattcctctcccccactctacgtctactggttccgggacggggagatcccatactacgctgaggttgtggccacaaacaacccagacagaagagtgaagccagagacccagggccgattccgcctccttggggatgtccagaagaagaactgctccctgagcatcggagatgccagaatggaggacacgggaagctatttcttccgcgtggagagaggaagggatgtaaaatatagctaccaacagaataagctgaacttggaggtgacaggtatggcagggaccctaggagaggaccctgggacgtggagacccccgtatgagaacagggacaggagttgggcaggggcggctggaggaggtgtaggacttggggcaggtcggggcctgaggcctggccactctcggggtcacaccttacgtcctcaagcccctggggcccaggtatctccctgtctcctcctcagccctgatagagaaacccgacatccactttctggagcctctggagtccggccgccccacaaggctgagctgcagccttccaggatcctgtgaagcgggaccacctctcacattctcctggacggggaatgccctcagccccctggaccccgagaccacccgctcctcggagctcaccctcacccccaggcccgaggaccatggcaccaacctcacctgtcagatgaaacgccaaggagctcaggtgaccacggagagaactgtccagctcaatgtctcctgtgagtggtgctggggacacagctgagtcctcaagggcagtgggagtgaggggtgtgtgtgtgtgtgtgtgtgtgtgtgtgtgtaaggaagacagagagaaacaaaacaataacttgagaaaccttgtgtgtggatctaagccttgggatctgcggggagtgagacaggacagccttccccgcgtggtgggtttctgtggctcttctttgggtacctcctgggcccatgcccatctcactcctcactgctgaagccaagtttatatctttta

SEQ ID NO: 735467 - DNA, 431 bp, Homo sapiens
cacagctctcactcaccctccggcttcctgtcggggctttctcagccccaccccacgtttggacatttggagcatttccttccctgacagccggacctgggactgggctggggccctggcggatggagacatgctgcccctgctgctgctgcccctgctgtggggggggtccctgcaggagaagccagtgtacgagctgcaagtgcagaagtcggtgacggtgcaggagggcctgtgcgtccttgtgccctgctccttctcttacccctggagatcctggtattcctctcccccactctacgtctactggttccgggacggggagatcccatactacgctgaggttgtggccacaaacaacccagacagaagagtgaagccagagacccagggccgattccgcctccttgtcctctaagcgatcctctaga

SEQ ID NO: 735468 - DNA, 2396 bp, Homo sapiens
tccctcatgggttctgcaggatgaaggaaaggaaaggaaaagacagagaaaggaaggaaatagcttttcatgagcacctactgtgtaccaggtgcttccctggcatgagctctcgtaacccttatagcaacatgagtttagagcaagaatcacaccccgactttacagagatggaaactgaggctcagagaagtaagggacctgcccaaggccactcagcacctagaaagtgtgcctagcacataggaggcacacaaaaatatgtgttgaatgggtgaatgaatgagagaacgggtgaaaagccaggcctcaagcccacactactgacactgcactacaccacctctcaggagagaaggcaaatatttccttgactcagccaccttcctcctagcaaggcttagacccccaggctctgggggtcccttcctgctacagtatgaccctctctggtgcttgtcatcaagaagtggtatgcggtggacttgctggagagagtgtctgcagccaggcatcatggagggagggatggatcttgagggactgtaatggttgtgaatgggggagttggcccccagcactctctggtggccgtatgaccttgggcacgtctcctgaccactctaagcagcttttgattcccctgtccaagagggtaggccccctgttcctatttacaggatccataaagagactcaaagagatagggtagtgccagccccagagagagggggctgtggagggacttctacccccagggcttctcagtggcatctcctggctggcccctgacactcaatcttccttggtttccaagatgcttcatgatcttccccctccctgacatccccgacctcccttttctgtcccttttgcaactcattgtcctctacctgccatcagatgtggctgttcctcagtctcagtccagagtcctctcttctcactcagcatctctcctcctgtgacctcgtctgcacccacaactccagttacaaggcacgaggtttggttatgaaatcactcacagatttataactgcaggcttggctccttccgggagcttgagacccactgccgcctccgcaacacctccacctgggagtttcagaggcgctctccctcagcgtgtctgcagctgcgtgcctgcagctgcgtgcctgccttctccctgcacctgctctgctccccaggtccctttctcagaccaaagcctgcccgggcttcacaggctgagggtccaccttgccacctccgtttgcctcagtcctcatggagccctggctccactgtctgctggcttctccccatctactctgtgtcactccatccgaccaccattgtctccatcaggacagttggaacacctcttctcagcactctcgcccccacccagtccaccccctacctgacagccagagtgggccatgccagatgcaacccaggtcatgccacacaggtagataaaaccatcttcagcccagccctcaggccctgtgtgctgggaccctgctgggccctctccagcctccccctgcgccaggcctcctccgtcacttcactctggccctgctgttcttttccttttagtttgattaactcactctgcccattccatgctcaaagctgtttccgtgaggaaaggctcctcctgctcattttagtgccctgaaatgtcacttccttgaggaagtcttccttgaccctccacaccaaaccaggccccctgccacacccctcagagctctccttggaaggcactggcatggctgtttgcgtgattccttgaacgttgtctgtctctcctcctcaccaggctgtgggtcctgtctgtttctggtgaccgttgtctgtctaacccctagaggagagtttgtcacatgggtaggagcttaataaatatgtgttggatgaatgatcagagaaaagagagtgcagagagtggccaaaacagatgctttcagcagtgtatctgccaataaacctaaaggcatgatttgccctggtgatccccccagaggtgcttagtctcttggctgaattccttctggaatccccagaatccccctccttggaagttttcccaggagtctgaggcaggcaggtctctcagtcacggccacatgacctcaagtgaaaacaaaccagtctggctgttcacagactcagctggtcagagcttctggcccgaggggcccacgcaccacccgccactgcagaagacgcctccacgtctgtctctgggctgcctccaccttctgcaggcctcctggagcctctgctggctgcagaagtggggtgcatgctgcctggaggaggaacatctgtggtgggaccccaaatccatgtttgtgttaccatcgtgttccaataaaactatcgaaacagaaaatgcc

SEQ ID NO: 735469 - DNA, 2153 bp, Homo sapiens
cccaacttcatgctgcagtcgacctagagatccccggagtggagagaacgggtgaaaagccaggcctcaagcccacactactgacactgcactacaccacctctcaggagagaaggcaaatatttccttgactcagccaccttcctcctagcaaggcttagacccccaggctctgggggtcccttcctgctacagtatgaccctctctggtgcttgtcatcaagaagtggtatgcggtggacttgctggagagagtgtctgcagccaggcatcatggagggagggatggatcttgagggactgtaatggttgtgaatgggggagttggcccccagcactctctggtggccgtatgaccttgggcacgtctcctgaccactctaagcagcttttgattcccctgtccaagagggtaggccccctgttcctatttacaggatccataaagagactcaaagagatagggtagtgccagccccagagagagggggctgtggagggacttctacccccagggcttctcagtggcatctcctggctggcccctgacactcaatcttccttggtttccaagatgcttcatgatcttccccctccctgacatccccgacctcccttttctgtcccttttgcaactcattgtcctctacctgccatcagatgtggctgttcctcagtctcagtccagagtcctctcttctcactcagcatctctcctcctgtgacctcgtctgcacccacaactccagttacaaggcacgaggtttggttatgaaatcactcacagatttataactgcaggcttggctccttccgggagcttgagacccactgccgcctccgcaacacctccacctgggagtttcagaggcgctctccctcagcgtgtctgcagctgcgtgcctgcagctgcgtgcctgccttctccctgcacctgctctgctccccaggtccctttctcagaccaaagcctgcccgggcttcacaggctgagggtccaccttgccacctccgtttgcctcagtcctcatggagccctggctccactgtctgctggcttctccccatctactctgtgtcactccatccgaccaccattgtctccatcaggacagttggaacacctcttctcagcactctcgcccccacccagtccaccccctacctgacagccagagtgggccatgccagatgcaacccaggtcatgccacacaggtagataaaaccatcttcagcccagccctcaggccctgtgtgctgggaccctgctgggccctctccagcctccccctgcgccaggcctcctccgtcacttcactctggccctgctgttcttttccttttagtttgattaactcactctgcccattccatgctcaaagctgtttccgtgaggaaaggctcctcctgctcattttagtgccctgaaatgtcacttccttgaggaagtcttccttgaccctccacaccaaaccaggccccctgccacacccctcagagctctccttggaaggcactggcatggctgtttgcgtgattccttgaacgttgtctgtctctcctcctcaccaggctgtgggtcctgtctgtttctggtgaccgttgtctgtctaacccctagaggagagtttgtcacatgggtaggagcttaataaatatgtgttggatgaatgatcagagaaaagagagtgcagagagtggccaaaacagatgctttcagcagtgtatctgccaataaacctaaaggcatgatttgccctggtgatccccccagaggtgcttagtctcttggctgaattccttctggaatccccagaatccccctccttggaagttttcccaggagtctgaggcaggcaggtctctcagtcacggccacatgacctcaagtgaaaacaaaccagtctggctgttcacagactcagctggtcagagcttctggcccgaggggcccacgcaccacccgccactgcagaagacgcctccacgtctgtctctgggctgcctccaccttctgcaggcctcctggagcctctgctggctgcagaagtggggtgcatgctgcctggaggaggaacatctgtggtgggaccccaaatccatgtttgtgttaccatcgtgttccaataaaactatcgaaacagaaaatgcc

SEQ ID NO: 735470 - DNA, 1774 bp, Homo sapiens
gcgaattcactagtgattatccccggttccagggtaggccccctgttcctatttacaggatccataaagagactcaaagagatagggtagtgccagccccagagagagggggctgtggagggacttctacccccagggcttctcagtggcatctcctggctggcccctgacactcaatcttccttggtttccaagatgcttcatgatcttccccctccctgacatccccgacctcccttttctgtcccttttgcaactcattgtcctctacctgccatcagatgtggctgttcctcagtctcagtccagagtcctctcttctcactcagcatctctcctcctgtgacctcgtctgcacccacaactccagttacaaggcacgaggtttggttatgaaatcactcacagatttataactgcaggcttggctccttccgggagcttgagacccactgccgcctccgcaacacctccacctgggagtttcagaggcgctctccctcagcgtgtctgcagctgcgtgcctgcagctgcgtgcctgccttctccctgcacctgctctgctccccaggtccctttctcagaccaaagcctgcccgggcttcacaggctgagggtccaccttgccacctccgtttgcctcagtcctcatggagccctggctccactgtctgctggcttctccccatctactctgtgtcactccatccgaccaccattgtctccatcaggacagttggaacacctcttctcagcactctcgcccccacccagtccaccccctacctgacagccagagtgggccatgccagatgcaacccaggtcatgccacacaggtagataaaaccatcttcagcccagccctcaggccctgtgtgctgggaccctgctgggccctctccagcctccccctgcgccaggcctcctccgtcacttcactctggccctgctgttcttttccttttagtttgattaactcactctgcccattccatgctcaaagctgtttccgtgaggaaaggctcctcctgctcattttagtgccctgaaatgtcacttccttgaggaagtcttccttgaccctccacaccaaaccaggccccctgccacacccctcagagctctccttggaaggcactggcatggctgtttgcgtgattccttgaacgttgtctgtctctcctcctcaccaggctgtgggtcctgtctgtttctggtgaccgttgtctgtctaacccctagaggagagtttgtcacatgggtaggagcttaataaatatgtgttggatgaatgatcagagaaaagagagtgcagagagtggccaaaacagatgctttcagcagtgtatctgccaataaacctaaaggcatgatttgccctggtgatccccccagaggtgcttagtctcttggctgaattccttctggaatccccagaatccccctccttggaagttttcccaggagtctgaggcaggcaggtctctcagtcacggccacatgacctcaagtgaaaacaaaccagtctggctgttcacagactcagctggtcagagcttctggcccgaggggcccacgcaccacccgccactgcagaagacgcctccacgtctgtctctgggctgcctccaccttctgcaggcctcctggagcctctgctggctgcagaagtggggtgcatgctgcctggaggaggaacatctgtggtgggaccccaaatccatgtttgtgttaccatcgtgttccaataaaactatcgaaacagaaaatgcc

SEQ ID NO: 735471 - DNA, 837 bp, Homo sapiens; identical to SEQ ID NO: 423156
  misc_feature (717)..(717): n is a, c, g, or t

SEQ ID NO: 735472 - DNA, 1462 bp, Homo sapiens; identical to SEQ ID NO: 423157

SEQ ID NO: 735473 - DNA, 612 bp, Homo sapiens; identical to SEQ ID NO: 423172

SEQ ID NO: 735474 - DNA, 282 bp, Homo sapiens
gtagtagcatgatcagcactgaattcaggccatctctgagccagtggccatgctctcagccctgcctccaatgctgcctcccacatgaaaattaatgttgtgtaaaaaaaaaaaaaaaactcaaaaaaggaaagcaggacaaggatgtgtcattacaagacacagtatgctgtacaaacaaaacctaaattatatataaatacacccccaccccagaaccctgtcttccctcactacctgatcaaagcaatgccaagggtcctggggtggcatcgataaaca

SEQ ID NO: 735475 - DNA, 1275 bp, Homo sapiens; identical to SEQ ID NO: 423168

SEQ ID NO: 735476 - DNA, 2294 bp, Homo sapiens
gcggccgcgggcccggcagaaggccgagtaggagggaccacgcgccgggggccgcgatctctggcagggggcggtgtgccagcggagcaccatgcacataggcgcccagcgccccgactacccctcccgaggaaaagaggccggggccgcgctggggcggcggagagcatgagggaggccggggggcggctcggcttggagcgctgctagggagcggtgcgcgccgcacacccgcctgggcgcggcggagggcggggagccgggcaggtcgcgcctgcgggcggcagccgaccgccgggagctgttctgatttccgacgcgcacgctaggggcccggagcagcccccggccccggcgcgccgccgacatgggcaacgcagggagcatggattcgcagcagaccgatttcagggcgcacaacgtgcctttgaagctgccgatgccagagccaggtgaactggaggagcgatttgccatcgtgctgaacgctatgaacctacctcctgacaaagccaggttactgcggcagtatgataatgagaaaaaatgggaactgatttgtgatcaggaacgattccaggtgaagaatcctccccatacatacattcaaaagctcaaaggctatctggatccagctgtaaccaggaagaaattcagacggcgtgttcaagaatctacacaagtgctaagagaactggaaatttctttgagaactaaccacattggatgggtcagagaatttctgaatgaagaaaacaaaggtcttgatgttctagtggaatatctctcatttgcacagtacgcggtaacttttgactttgaaagtgtggagagtactgtggagagctcggtggacaaatcaaagccctggagtaggtccatcgaggacctgcacagagggagcaacctgccctcacctgtgggcaacagtgtctcccgctctggaagacattctgcactgcgatataatacattgccaagcagaagaactctgaaaaattcaagattagtgagtaagaaagatgatgtgcatgtctgtatcatgtgtttacgtgccatcatgaattatcagtatggtttcaacatggtcatgtctcatccacacgctgtcaatgagattgcactaagcctgaacaacaagaatcccagaacaaaagcccttgtcttagaactgttggcagccgtttgtcttgtcagaggcgggcatgaaatcattttatcagcatttgataactttaaagaggtttgtggagaaaaacagcgctttgagaagttgatggaacatttcaggaatgaagacaataacatagattttatggtggcttctatgcagtttattaatattgtagtccattcagtagaagatatgaatttcagagttcacctgcagtatgaatttaccaaattaggcctggacgaatacttggacaagctgaaacacactgagagtgacaagcttcaagtccagatccaggcttacctggacaatgtttttgatgtaggagctctactggaagatgctgaaactaagaatgctgccttggagagggtggaagaactggaagaaaacatttctcatttatctgaaaaactgcaagacacagagaatgaagccatgtccaagattgtggaactggaaaagcaactcatgcagaggaacaaggagctggatgtcgttcgggaaatctacaaagatgcaaatactcaagttcacacattaagaaaaatggtcaaagaaaaagaagaagcaattcaaagacagtctaccctggaaaaaaagattcatgagctagagaaacaagggaccattaaaattcagaagaaaggggatggggatatcgccatactgccagttgtggcttctggcacattgtccatggggtcagaagtggtagcaggtaactctgtgggacccacaatgggggccgcttcctcaggacccttgccccctcctccaccaccactgcctccctcatcagacacacctgaaacaggtaagaagccttggcaggaggactgaggaagttttggaatatttgtatttcttcttttgccaactgtccacttctgtcctttgtccgtttttgttggcatgttctttaagaattggttttcttgagtagttcttaactgtttacattttgagattaaatttataaatcctcatttcacatatgttgaaatatttttcccacatgtcaatgaggacattttttggtttttgaaaacagtcctttgtccttttaagtgtgttgttttcagatggctttatatgcacatggcttattgcagga

SEQ ID NO: 735477 - DNA, 8916 bp, Homo sapiens
  misc_feature (2077)..(2077): n is a, c, g, or t
gcggccgcgggcccggcagaaggccgagtaggagggaccacgcgccgggggccgcgatctctggcagggggcggtgtgccagcggagcaccatgcacataggcgcccagcgccccgactacccctcccgaggaaaagaggccggggccgcgctggggcggcggagagcatgagggaggccggggggcggctcggcttggagcgctgctagggagcggtgcgcgccgcacacccgcctgggcgcggcggagggcggggagccgggcaggtcgcgcctgcgggcggcagccgaccgccgggagctgttctgatttccgacgcgcacgctaggggcccggagcagcccccggccccggcgcgccgccgacatgggcaacgcagggagcatggattcgcagcagaccgatttcagggcgcacaacgtgcctttgaagctgccgatgccagagccaggtgaactggaggagcgatttgccatcgtgctgaacgctatgaacctacctcctgacaaagccaggttactgcggcagtatgataatgagaaaaaatgggaactgatttgtgatcaggaacgattccaggtgaagaatcctccccatacatacattcaaaagctcaaaggctatctggatccagctgtaaccaggaagaaattcagacggcgtgttcaagaatctacacaagtgctaagagaactggaaatttctttgagaactaaccacattggatgggtcagagaatttctgaatgaagaaaacaaaggtcttgatgttctagtggaatatctctcatttgcacagtacgcggtaacttttgactttgaaagtgtggagagtactgtggagagctcggtggacaaatcaaagccctggagtaggtccatcgaggacctgcacagagggagcaacctgccctcacctgtgggcaacagtgtctcccgctctggaagacattctgcactgcgatataatacattgccaagcagaagaactctgaaaaattcaagattagtgagtaagaaagatgatgtgcatgtctgtatcatgtgtttacgtgccatcatgaattatcagtatggtttcaacatggtcatgtctcatccacacgctgtcaatgagattgcactaagcctgaacaacaagaatcccagaacaaaagcccttgtcttagaactgttggcagccgtttgtcttgtcagaggcgggcatgaaatcattttatcagcatttgataactttaaagaggtttgtggagaaaaacagcgctttgagaagttgatggaacatttcaggaatgaagacaataacatagattttatggtggcttctatgcagtttattaatattgtagtccattcagtagaagatatgaatttcagagttcacctgcagtatgaatttaccaaattaggcctggacgaatacttggacaagctgaaacacactgagagtgacaagcttcaagtccagatccaggcttacctggacaatgtttttgatgtaggagctctactggaagatgctgaaactaagaatgctgccttggagagggtggaagaactggaagaaaacatttctcatttatctgaaaaactgcaagacacagagaatgaagccatgtccaagattgtggaactggaaaagcaactcatgcagaggaacaaggagctggatgtcgttcgggaaatctacaaagatgcaaatactcaagttcacacattaagaaaaatggtcaaagaaaaagaagaagcaattcaaagacagtctaccctggaaaaaaagattcatgagctagagaaacaagggaccattaaaattcagaagaaaggggatggggatatcgccatactgccagttgtggcttctggcacattgtccatggggtcagaagtggtagcaggtaactctgtgggacccacaatgggggccgcttcctcaggacccttgccccctcctccaccaccactgcctccctcatcagacacacctgaaacagtgcaaaatggtccagtaacaccacctatgccaccgccgccgccgccccctcctccacctcctcctcccccaccgccccctccncctcctcctctcccaggccctgcagctgagactgtaccagctcctcccttagcacctccccttccctctgcacctccgctgcctggaacatcttcacccacagtggttttcaactcaggattagcagctgtgaaaattaagaagccaatcaagacgaagttcagaatgccagtgtttaactgggttgctctgaagcccaatcagatcaatggcacagtcttcaatgaaattgatgatgagcgaattctggaggatttaaatgtggatgaatttgaggaaatattcaagacaaaagcccaaggacctgccattgatctttcttcaagcaaacagaagataccacagaagggatcaaacaaagtgacattactagaagcaaacagggccaaaaatcttgccataactttaaggaaagctggaaagactgctgatgaaatatgtaaagctattcatgtatttgacttgaagacactgcctgtggactttgtggaatgcttgatgcggttcctaccaactgagaatgaagtgaaagtgcttcggctctacgagcgggaaaggaagcctctggaaaacttgtcagatgaagatcggttcatgatgcagtttagtaaaatcgagaggctcatgcagaagatgaccatcatggccttcattgggaactttgctgaaagcattcagatgctgactcctcaactacatgcgattatagcagcatctgtctctataaagtcgtcccaaaaactcaagaaaattctggagatcatcttagcccttggaaactacatgaatagcagtaaaagaggagcagtttatggatttaaacttcagagtttagatctgctcttagatacaaagtcaacagacagaaagcaaacactgttgcactatatatccaatgtggtgaaagaaaaatatcaccaagtgtccctgttttataatgagcttcattatgtggaaaaagctgctgcagtctcccttgagaatgttttgctggatgtcaaggagctccagaggggaatggacttgaccaagagagagtacaccatgcatgaccataacacgctgctgaaggagttcatcctcaacaatgaggggaagctgaagaagctgcaggatgatgccaagatcgcacaggatgcctttgatgatgttgtgaagtattttggagaaaaccccaagacaacaccaccctctgtcttctttcctgtctttgtccggtttgtgaaagcatataagcaagcagaagaggaaaatgagctgaggaaaaagcaggaacaagctctcatggaaaaactcctagagcaagaagctctgatggagcagcaggatccaaagtctccttctcataaatcaaagaggcagcagcaagagttaattgcagaattaagaagacgacaagttaaagataacagacatgtatatgagggaaaagatggtgccattgaagatattatcacagatcttagaaaccaaccatacagacgagccgatgcggtgaggagaagcgtcaggcggcgctttgatgatcagaacttgcgttctgttaatggtgccgaaataacaatgtgaacctgagactggcctgcatgaatacagggtgtgcgtgaatgaaactgcccacatgaactttatgtgctacgatttaactgcagccttgaacacacacaaaaatattcttaagggctcagatttagcaaacacggaagaattttaaaatgagctctcctttcaacccttgttaacaagtgcctaaaaatggaagtacctgttcagattaatcaaagcaataggatttgatttgattaggtatctttttacaccagtatgttatttttaaccaaaatgtaaagttcttattaaactcattacctgccattgtgattgtcccatcatggcccacctggtttcctgatgttgtaaataacatcaatgcatctgctgtgggtcctttgctgagatgtcttcgaaggaattttgttttagccatatccatcaactttgtattttacttgcaatttggaagaaggaaagtcacatgatgaaactccttttgtctataaccaggccctggcaaagtgcaaacaggatgcaactgcagtggcacaaaggtcactcaatcctttgtttccagtttcacattctactacttctgtgctagagaacgatgctctgtgagaggcattcactagtatgaatgtggggatatagtgtataagacttatttgcagtactgtgttcttcagctagaggcagctttttaaataatgcaagtgtatttattagcattaaaattaacatctcagtaatcagcattagcatttctgaggaccattattaattctgagaacagaaattggtgccttgcaaggaagtttactagctctatcaacaagcattcaaggttacatctgctagcagagtagtgttaggaacctggccttactctcctctgacaatcgcaattttttcttattttttataaattcaagaagatacacttggcatcgtgtatcgaggctaagtttttcatgcatttcccagactacttatggagaattgcagtttaagttgctgaaaagtattaacatggtattaagcttaaataatacgtaatgggactagatggcccactaagccactgttattttccttcctctctggcagggcacttgatccattccaaagtcaaaaactggactgaagctaaatttgtacttttcataatatacattctgcttctggcttatcttcttggtacatcaatatattaattgtaaagtttattgtatagtatttaaccgctgaagttcctattttatgttgtgcttatgtgaaccccttggtgaaggtcccttttccttggatgtgtagttatatgatctttttaaatgtacagatattttgctataaaatcggtgcagttttttatggtttttacacttctctttaattcccacctaagcctctgggtaatattgtaaatattgttttaaaatgcatcagcctatgctatacaatctgaatgttattttaacttatagttttttttaatatatatatttaactataaggacagtttagggaacaagttacctaccacatttcactttagtgtacctatttacagaaagattaaactgccacctgcgggcacattcccataaatgtgtactttactttaaaaagaacatgccacgattttgtctttctgtggactcaacattcacttcgattaaaaatagcaatttgaccaagttggacttccactacaaagcagctgttttccaaagttcaatgctgacatatatgtatattaaaataattgcctatttattaatctacaaatagacaacgttggcatgttcttttctgtttgtctattaatgggcctgcttcttagcaatattagaatgttttataaaagcaattcatgttacttttctggtcttttcatggcatatgagcaaataataaactatttacactacaaaaaaaaaaaaaaaaactcgagttttttttttttttttttgtagaaaattcctttattatagtgcaaattactttcagcagtgacataatgtaacaacacatttagcaacattttacaccacacagtaaataagaaagtgtttctttgaaaatatgtcatcataggaacattatttctacattaatgccagaaaatgccaaggccgtttatctcaaggcaaacagggctccctccttccttttgggtattttctttttaacacaaatgaaatgacttgccattttaacaaatcctcaattctaaaagtgatctctcagggggctttgaactaaggtcggcaagatttgaaatggggcttcaaaattttaaataataattttaaaatacttctggaatagcccaaaaagtagaagtcacttctattaagttttaagtagatatacacactcactccaattttactgtagaaatggacagattgtctaaagcctgctttctattcccccagagcctgattgttatttatactccttggttttggttattgcagaactagggctctggtcagaaataacaccttacatacccgaatactttcctgtggaagctttacattgcattttccatcctgaaattctcaccttagaccttacaggcccaggagagggtgtgaatattgttttcagtttacagctaaagccccttactaatttgggctatacctgaatcaaatcatcacatcatttagattaatcccaataggcttatccaagaggttcccactaacctcacagagaaacaaacagttaacattgtattttcacactaagctgcctaagggcttggctgctaatgagttagctgataggtagacagaataagcgtgtcaattccaatcagtacacgccctgctcctctagtttctgctgaattatgcagtgggtgggaatggttggccactcaaaacagtcttcctatggggctcttccaccataagttggatcaaaactccacaaatgtatttcaaggtgccctttaagtctctcaaatttagggacttttaagtgacaagccatgagaagttaatcacaggcttgaaaatacctggaaccacagaacagcccccacggaacaggctgaatatggttaaataagttggctggtacataaagcttttcaatgtacagccagtcttgttggatacagtgtcttcttatataatacaatggaactgtgctaaacagtttcaaagttgagaagaatccaaatgtatcacctataaaaaattcataattttagtttattttagactttggtactgaaacactgtctacattcttgacacttgaaaatgacatggtcacttcagtgcctctgcatgttgtgtaaaaaaaaaaaaaaaactcaaaaaaggaaagcaggacaaggatgtgtcattacaagacacagtatgctgtacaaacaaaacctaaattatatataaatacacccccaccccagaaccctgtcttccctcactacctgatcaaagcaatgccaagggtccctccctccagggccaatgtagcttttaaagtccagaacccaggactttaagcatcccttgccttgcggtgacgtttacagtactgcaacctcctgttggagtcacctgtttgatcagttccgtaagtgcagggtaacacctacagcttaattggaagcattcactctactggctggattcaaagacctggagtcctgggagttaacctttcagataaactaactggatcatttcctaatctggatcctatctaatcctactatctcctcagagccaacacagtaggaagcatcttctactctgaagcttccaaaggcattacttagggatattggtgagggtcacataagaaaagttatacaatgagctaacagcttaagttgatataaattacttccaagtaagttattcagggccgtttgcttctgctttacactgcattccacagtcattttcatattattcttttaaaagtttatactatagtcactttaaaaattgtctaagcaatcacctctttgtgtttttgattaataacaacttaatgagctattatataaatcaagagagaaataattagtcttaaggaagccaataatgtgctaattcccagtaaggagaaaaagcaatgtaaatagaattttacataaccaacaataacttggaaagcagttttatcaaaatggttttgcaaaggtttcccaaaagcacttacagcagtttatatcaagagatcctaagtttaggggtatggagaatctcaattctttaaagcagaaattcacctgtttcataattgtaatatgtaattttctccccttggacctaagatatttatacattcaaaagtttacaacttgctgttcttgagacattgttcattctttaatacatacattgagtataaataaataactacaagaaagcttcaacaatctgaattaacattatgctgtgcaaaacaaaaacaaaaacaaaaacaaaaaacaaaaaaaaagtcaaaccttgaacaacctacattctatgtaaataccctgactaaaatattggttgtgctacacaattccactttagtgcagaaatgcattgatttcactgtaccgttgttgttggctttttaagtgtctttagcacttctgtttctaagcattgccttgctttgaaaagatgaataatttgctaccaaatcacaaatcatcacaaatccattttagtttggtctgaataaaatccagcataaatgtattattttattctgggtataatggctcggtgtctttgtcccaacagctttcttcttaagggcaaaccacccttaagtgaaacttgccatttgtttttgttttctttttaagtctccagatcttgctaggacacttcttccagaccaacagtcagatagttgtggcacgtgatcctatttgaaatagaggtggtttaaatcagccaagcttggtgatctggaggtctccatttatctttatggtgtcaattgcagataacgtttgaatgcgatggtaaaaatcaaaaagttggtgtccatccacaaacactcggaaacgtgggtgctcacaaagaatttccacctggaagaaacaaaataataatccacaatttcaatgaacgctactggggaaaacaaacaatacttcattttagagaaagaaaggcagtatcttcagtggttcacaaacatcagaatgcattgagacctgcagagggcttgttagaacacagattgttgggctctacctccaaaatttctgattcctgtgtagaatgtaagtgtaaaagctttttcct

SEQ ID NO: 735478 - DNA, 9123 bp, Homo sapiens
  misc_feature (2077)..(2077): n is a, c, g, or t
gcggccgcgggcccggcagaaggccgagtaggagggaccacgcgccgggggccgcgatctctggcagggggcggtgtgccagcggagcaccatgcacataggcgcccagcgccccgactacccctcccgaggaaaagaggccggggccgcgctggggcggcggagagcatgagggaggccggggggcggctcggcttggagcgctgctagggagcggtgcgcgccgcacacccgcctgggcgcggcggagggcggggagccgggcaggtcgcgcctgcgggcggcagccgaccgccgggagctgttctgatttccgacgcgcacgctaggggcccggagcagcccccggccccggcgcgccgccgacatgggcaacgcagggagcatggattcgcagcagaccgatttcagggcgcacaacgtgcctttgaagctgccgatgccagagccaggtgaactggaggagcgatttgccatcgtgctgaacgctatgaacctacctcctgacaaagccaggttactgcggcagtatgataatgagaaaaaatgggaactgatttgtgatcaggaacgattccaggtgaagaatcctccccatacatacattcaaaagctcaaaggctatctggatccagctgtaaccaggaagaaattcagacggcgtgttcaagaatctacacaagtgctaagagaactggaaatttctttgagaactaaccacattggatgggtcagagaatttctgaatgaagaaaacaaaggtcttgatgttctagtggaatatctctcatttgcacagtacgcggtaacttttgactttgaaagtgtggagagtactgtggagagctcggtggacaaatcaaagccctggagtaggtccatcgaggacctgcacagagggagcaacctgccctcacctgtgggcaacagtgtctcccgctctggaagacattctgcactgcgatataatacattgccaagcagaagaactctgaaaaattcaagattagtgagtaagaaagatgatgtgcatgtctgtatcatgtgtttacgtgccatcatgaattatcagtatggtttcaacatggtcatgtctcatccacacgctgtcaatgagattgcactaagcctgaacaacaagaatcccagaacaaaagcccttgtcttagaactgttggcagccgtttgtcttgtcagaggcgggcatgaaatcattttatcagcatttgataactttaaagaggtttgtggagaaaaacagcgctttgagaagttgatggaacatttcaggaatgaagacaataacatagattttatggtggcttctatgcagtttattaatattgtagtccattcagtagaagatatgaatttcagagttcacctgcagtatgaatttaccaaattaggcctggacgaatacttggacaagctgaaacacactgagagtgacaagcttcaagtccagatccaggcttacctggacaatgtttttgatgtaggagctctactggaagatgctgaaactaagaatgctgccttggagagggtggaagaactggaagaaaacatttctcatttatctgaaaaactgcaagacacagagaatgaagccatgtccaagattgtggaactggaaaagcaactcatgcagaggaacaaggagctggatgtcgttcgggaaatctacaaagatgcaaatactcaagttcacacattaagaaaaatggtcaaagaaaaagaagaagcaattcaaagacagtctaccctggaaaaaaagattcatgagctagagaaacaagggaccattaaaattcagaagaaaggggatggggatatcgccatactgccagttgtggcttctggcacattgtccatggggtcagaagtggtagcaggtaactctgtgggacccacaatgggggccgcttcctcaggacccttgccccctcctccaccaccactgcctccctcatcagacacacctgaaacagtgcaaaatggtccagtaacaccacctatgccaccgccgccgccgccccctcctccacctcctcctcccccaccgccccctccncctcctcctctcccaggccctgcagctgagactgtaccagctcctcccttagcacctccccttccctctgcacctccgctgcctggaacatcttcacccacagtggttttcaactcaggattagcagctgtgaaaattaagaagccaatcaagacgaagttcagaatgccagtgtttaactgggttgctctgaagcccaatcagatcaatggcacagtcttcaatgaaattgatgatgagcgaattctggaggatttaaatgtggatgaatttgaggaaatattcaagacaaaagcccaaggacctgccattgatctttcttcaagcaaacagaagataccacagaagggatcaaacaaagtgacattactagaagcaaacagggccaaaaatcttgccataactttaaggaaagctggaaagactgctgatgaaatatgtaaagctattcatgtatttgacttgaagacactgcctgtggactttgtggaatgcttgatgcggttcctaccaactgagaatgaagtgaaagtgcttcggctctacgagcgggaaaggaagcctctggaaaacttgtcagatgaagatcggttcatgatgcagtttagtaaaatcgagaggctcatgcagaagatgaccatcatggccttcattgggaactttgctgaaagcattcagatgctgactcctcaactacatgcgattatagcagcatctgtctctataaagtcgtcccaaaaactcaagaaaattctggagatcatcttagcccttggaaactacatgaatagcagtaaaagaggagcagtttatggatttaaacttcagagtttagatctgctcttagatacaaagtcaacagacagaaagcaaacactgttgcactatatatccaatgtggtgaaagaaaaatatcaccaagtgtccctgttttataatgagcttcattatgtggaaaaagctgctgcagtctcccttgagaatgttttgctggatgtcaaggagctccagaggggaatggacttgaccaagagagagtacaccatgcatgaccataacacgctgctgaaggagttcatcctcaacaatgaggggaagctgaagaagctgcaggatgatgccaagatcgcacaggatgcctttgatgatgttgtgaagtattttggagaaaaccccaagacaacaccaccctctgtcttctttcctgtctttgtccggtttgtgaaagcatataagcaagcagaagaggaaaatgagctgaggaaaaagcaggaacaagctctcatggaaaaactcctagagcaagaagctctgatggagcagcaggatccaaagtctccttctcataaatcaaagaggcagcagcaagagttaattgcagaattaagaagacgacaagttaaagataacagacatgtatatgagggaaaagatggtgccattgaagatattatcacagatcttagaaaccaaccatacagacgagccgatgcggtgaggagaagcgtcaggcggcgctttgatgatcagaacttgcgttctgttaatggtgccgaaataacaatgtgaacctgagactggcctgcatgaatacagggtgtgcgtgaatgaaactgcccacatgaactttatgtgctacgatttaactgcagccttgaacacacacaaaaatattcttaagggctcagatttagcaaacacggaagaattttaaaatgagctctcctttcaacccttgttaacaagtgcctaaaaatggaagtacctgttcagattaatcaaagcaataggatttgatttgattaggtatctttttacaccagtatgttatttttaaccaaaatgtaaagttcttattaaactcattacctgccattgtgattgtcccatcatggcccacctggtttcctgatgttgtaaataacatcaatgcatctgctgtgggtcctttgctgagatgtcttcgaaggaattttgttttagccatatccatcaactttgtattttacttgcaatttggaagaaggaaagtcacatgatgaaactccttttgtctataaccaggccctggcaaagtgcaaacaggatgcaactgcagtggcacaaaggtcactcaatcctttgtttccagtttcacattctactacttctgtgctagagaacgatgctctgtgagaggcattcactagtatgaatgtggggatatagtgtataagacttatttgcagtactgtgttcttcagctagaggcagctttttaaataatgcaagtgtatttattagcattaaaattaacatctcagtaatcagcattagcatttctgaggaccattattaattctgagaacagaaattggtgccttgcaaggaagtttactagctctatcaacaagcattcaaggttacatctgctagcagagtagtgttaggaacctggccttactctcctctgacaatcgcaattttttcttattttttataaattcaagaagatacacttggcatcgtgtatcgaggctaagtttttcatgcatttcccagactacttatggagaattgcagtttaagttgctgaaaagtattaacatggtattaagcttaaataatacgtaatgggactagatggcccactaagccactgttattttccttcctctctggcagggcacttgatccattccaaagtcaaaaactggactgaagctaaatttgtacttttcataatatacattctgcttctggcttatcttcttggtacatcaatatattaattgtaaagtttattgtatagtatttaaccgctgaagttcctattttatgttgtgcttatgtgaaccccttggtgaaggtcccttttccttggatgtgtagttatatgatctttttaaatgtacagatattttgctataaaatcggtgcagttttttatggtttttacacttctctttaattcccacctaagcctctgggtaatattgtaaatattgttttaaaatgcatcagcctatgctatacaatctgaatgttattttaacttatagttttttttaatatatatatttaactataaggacagtttagggaacaagttacctaccacatttcactttagtgtacctatttacagaaagattaaactgccacctgcgggcacattcccataaatgtgtactttactttaaaaagaacatgccacgattttgtctttctgtggactcaacattcacttcgattaaaaatagcaatttgaccaagttggacttccactacaaagcagctgttttccaaagttcaatgctgacatatatgtatattaaaataattgcctatttattaatctacaaatagacaacgttggcatgttcttttctgtttgtctattaatgggcctgcttcttagcaatattagaatgttttataaaagcaattcatgttacttttctggtcttttcatggcatatgagcaaataataaactatttacactacaaaaaaaaaaaaaaaaactcgagttttttttttttttttttgtagaaaattcctttattatagtgcaaattactttcagcagtgacataatgtaacaacacatttagcaacattttacaccacacagtaaataagaaagtgtttctttgaaaatatgtcatcataggaacattatttctacattaatgccagaaaatgccaaggccgtttatctcaaggcaaacagggctccctccttccttttgggtattttctttttaacacaaatgaaatgacttgccattttaacaaatcctcaattctaaaagtgatctctcagggggctttgaactaaggtcggcaagatttgaaatggggcttcaaaattttaaataataattttaaaatacttctggaatagcccaaaaagtagaagtcacttctattaagttttaagtagatatacacactcactccaattttactgtagaaatggacagattgtctaaagcctgctttctattcccccagagcctgattgttatttatactccttggttttggttattgcagaactagggctctggtcagaaataacaccttacatacccgaatactttcctgtggaagctttacattgcattttccatcctgaaattctcaccttagaccttacaggcccaggagagggtgtgaatattgttttcagtttacagctaaagccccttactaatttgggctatacctgaatcaaatcatcacatcatttagattaatcccaataggcttatccaagaggttcccactaacctcacagagaaacaaacagttaacattgtattttcacactaagctgcctaagggcttggctgctaatgagttagctgataggtagacagaataagcgtgtcaattccaatcagtacacgccctgctcctctagtttctgctgaattatgcagtgggtgggaatggttggccactcaaaacagtcttcctatggggctcttccaccataagttggatcaaaactccacaaatgtatttcaaggtgccctttaagtctctcaaatttagggacttttaagtgacaagccatgagaagttaatcacaggcttgaaaatacctggaaccacagaacagcccccacggaacaggctgaatatggttaaataagttggctggtacataaagcttttcaatgtacagccagtcttgttggatacagtgtcttcttatataatacaatggaactgtgctaaacagtttcaaagttgagaagaatccaaatgtatcacctataaaaaattcataattttagtttattttagactttggtactgaaacactgtctacattcttgacacttgaaaatgacatggtcacttcagtgcctctgcatgttgtgtaaaaaaaaaaaaaaaactcaaaaaaggaaagcaggacaaggatgtgtcattacaagacacagtatgctgtacaaacaaaacctaaattatatataaatacacccccaccccagaaccctgtcttccctcactacctgatcaaagcaatgccaagggtccctccctccagggccaatgtagcttttaaagtccagaacccaggactttaagcatcccttgccttgcggtgacgtttacagtactgcaacctcctgttggagtcacctgtttgatcagttccgtaagtgcagggtaacacctacagcttaattggaagcattcactctactggctggattcaaagacctggagtcctgggagttaacctttcagataaactaactggatcatttcctaatctggatcctatctaatcctactatctcctcagagccaacacagtaggaagcatcttctactctgaagcttccaaaggcattacttagggatattggtgagggtcacataagaaaagttatacaatgagctaacagcttaagttgatataaattacttccaagtaagttattcagggccgtttgcttctgctttacactgcattccacagtcattttcatattattcttttaaaagtttatactatagtcactttaaaaattgtctaagcaatcacctctttgtgtttttgattaataacaacttaatgagctattatataaatcaagagagaaataattagtcttaaggaagccaataatgtgctaattcccagtaaggagaaaaagcaatgtaaatagaattttacataaccaacaataacttggaaagcagttttatcaaaatggttttgcaaaggtttcccaaaagcacttacagcagtttatatcaagagatcctaagtttaggggtatggagaatctcaattctttaaagcagaaattcacctgtttcataattgtaatatgtaattttctccccttggacctaagatatttatacattcaaaagtttacaacttgctgttcttgagacattgttcattctttaatacatacattgagtataaataaataactacaagaaagcttcaacaatctgaattaacattatgctgtgcaaaacaaaaacaaaaacaaaaacaaaaaacaaaaaaaaagtcaaaccttgaacaacctacattctatgtaaataccctgactaaaatattggttgtgctacacaattccactttagtgcagaaatgcattgatttcactgtaccgttgttgttggctttttaagtgtctttagcacttctgtttctaagcattgccttgctttgaaaagatgaataatttgctaccaaatcacaaatcatcacaaatccattttagtttggtctgaataaaatccagcataaatgtattattttattctgggtataatggctcggtgtctttgtcccaacagctttcttcttaagggcaaaccacccttaagtgaaacttgccatttgtttttgttttctttttaagtctccagatcttgctaggacacttcttccagaccaacagtcagatagttgtggcacgtgatcctatttgaaatagaggtggtttaaatcagccaagcttggtgatctggaggtctccatttatctttatggtgtcaattgcagataacgtttgaatgcgatggtaaaaatcaaaaagttggtgtccatccacaaacactcggaaacgtgggtgctcacaaagaatttccaccctgaatggctggtctggaatgaatggaaagtaagggattgctgactgttcttcacccctctccccagatatacaagaatttctgagtagctgccgatctgtgaacacagctttgagttcgattgccacatcggcaggagggtcttctgagtccccacaggtcaagctgattgcaaagctctctgggttgaggtctacgatgcccatcactaacaccttcttgcctggtctcatgccacctttaatgtgcccacaaaatggaactatcagtcgtgggaagtacacgtccgcttgaactggagagctcaaagagttgtttaaatggccatcatctagtttctaaaaatagaagtacacagattggctttccatgggctcttttttggggggctggaggaagaacccacacagatgtggtggaatc

SEQ ID NO: 735479 - DNA, 9130 bp, Homo sapiens
  misc_feature (2077)..(2077): n is a, c, g, or t
gcggccgcgggcccggcagaaggccgagtaggagggaccacgcgccgggggccgcgatctctggcagggggcggtgtgccagcggagcaccatgcacataggcgcccagcgccccgactacccctcccgaggaaaagaggccggggccgcgctggggcggcggagagcatgagggaggccggggggcggctcggcttggagcgctgctagggagcggtgcgcgccgcacacccgcctgggcgcggcggagggcggggagccgggcaggtcgcgcctgcgggcggcagccgaccgccgggagctgttctgatttccgacgcgcacgctaggggcccggagcagcccccggccccggcgcgccgccgacatgggcaacgcagggagcatggattcgcagcagaccgatttcagggcgcacaacgtgcctttgaagctgccgatgccagagccaggtgaactggaggagcgatttgccatcgtgctgaacgctatgaacctacctcctgacaaagccaggttactgcggcagtatgataatgagaaaaaatgggaactgatttgtgatcaggaacgattccaggtgaagaatcctccccatacatacattcaaaagctcaaaggctatctggatccagctgtaaccaggaagaaattcagacggcgtgttcaagaatctacacaagtgctaagagaactggaaatttctttgagaactaaccacattggatgggtcagagaatttctgaatgaagaaaacaaaggtcttgatgttctagtggaatatctctcatttgcacagtacgcggtaacttttgactttgaaagtgtggagagtactgtggagagctcggtggacaaatcaaagccctggagtaggtccatcgaggacctgcacagagggagcaacctgccctcacctgtgggcaacagtgtctcccgctctggaagacattctgcactgcgatataatacattgccaagcagaagaactctgaaaaattcaagattagtgagtaagaaagatgatgtgcatgtctgtatcatgtgtttacgtgccatcatgaattatcagtatggtttcaacatggtcatgtctcatccacacgctgtcaatgagattgcactaagcctgaacaacaagaatcccagaacaaaagcccttgtcttagaactgttggcagccgtttgtcttgtcagaggcgggcatgaaatcattttatcagcatttgataactttaaagaggtttgtggagaaaaacagcgctttgagaagttgatggaacatttcaggaatgaagacaataacatagattttatggtggcttctatgcagtttattaatattgtagtccattcagtagaagatatgaatttcagagttcacctgcagtatgaatttaccaaattaggcctggacgaatacttggacaagctgaaacacactgagagtgacaagcttcaagtccagatccaggcttacctggacaatgtttttgatgtaggagctctactggaagatgctgaaactaagaatgctgccttggagagggtggaagaactggaagaaaacatttctcatttatctgaaaaactgcaagacacagagaatgaagccatgtccaagattgtggaactggaaaagcaactcatgcagaggaacaaggagctggatgtcgttcgggaaatctacaaagatgcaaatactcaagttcacacattaagaaaaatggtcaaagaaaaagaagaagcaattcaaagacagtctaccctggaaaaaaagattcatgagctagagaaacaagggaccattaaaattcagaagaaaggggatggggatatcgccatactgccagttgtggcttctggcacattgtccatggggtcagaagtggtagcaggtaactctgtgggacccacaatgggggccgcttcctcaggacccttgccccctcctccaccaccactgcctccctcatcagacacacctgaaacagtgcaaaatggtccagtaacaccacctatgccaccgccgccgccgccccctcctccacctcctcctcccccaccgccccctccncctcctcctctcccaggccctgcagctgagactgtaccagctcctcccttagcacctccccttccctctgcacctccgctgcctggaacatcttcacccacagtggttttcaactcaggattagcagctgtgaaaattaagaagccaatcaagacgaagttcagaatgccagtgtttaactgggttgctctgaagcccaatcagatcaatggcacagtcttcaatgaaattgatgatgagcgaattctggaggatttaaatgtggatgaatttgaggaaatattcaagacaaaagcccaaggacctgccattgatctttcttcaagcaaacagaagataccacagaagggatcaaacaaagtgacattactagaagcaaacagggccaaaaatcttgccataactttaaggaaagctggaaagactgctgatgaaatatgtaaagctattcatgtatttgacttgaagacactgcctgtggactttgtggaatgcttgatgcggttcctaccaactgagaatgaagtgaaagtgcttcggctctacgagcgggaaaggaagcctctggaaaacttgtcagatgaagatcggttcatgatgcagtttagtaaaatcgagaggctcatgcagaagatgaccatcatggccttcattgggaactttgctgaaagcattcagatgctgactcctcaactacatgcgattatagcagcatctgtctctataaagtcgtcccaaaaactcaagaaaattctggagatcatcttagcccttggaaactacatgaatagcagtaaaagaggagcagtttatggatttaaacttcagagtttagatctgctcttagatacaaagtcaacagacagaaagcaaacactgttgcactatatatccaatgtggtgaaagaaaaatatcaccaagtgtccctgttttataatgagcttcattatgtggaaaaagctgctgcagtctcccttgagaatgttttgctggatgtcaaggagctccagaggggaatggacttgaccaagagagagtacaccatgcatgaccataacacgctgctgaaggagttcatcctcaacaatgaggggaagctgaagaagctgcaggatgatgccaagatcgcacaggatgcctttgatgatgttgtgaagtattttggagaaaaccccaagacaacaccaccctctgtcttctttcctgtctttgtccggtttgtgaaagcatataagcaagcagaagaggaaaatgagctgaggaaaaagcaggaacaagctctcatggaaaaactcctagagcaagaagctctgatggagcagcaggatccaaagtctccttctcataaatcaaagaggcagcagcaagagttaattgcagaattaagaagacgacaagttaaagataacagacatgtatatgagggaaaagatggtgccattgaagatattatcacagatcttagaaaccaaccatacagacgagccgatgcggtgaggagaagcgtcaggcggcgctttgatgatcagaacttgcgttctgttaatggtgccgaaataacaatgtgaacctgagactggcctgcatgaatacagggtgtgcgtgaatgaaactgcccacatgaactttatgtgctacgatttaactgcagccttgaacacacacaaaaatattcttaagggctcagatttagcaaacacggaagaattttaaaatgagctctcctttcaacccttgttaacaagtgcctaaaaatggaagtacctgttcagattaatcaaagcaataggatttgatttgattaggtatctttttacaccagtatgttatttttaaccaaaatgtaaagttcttattaaactcattacctgccattgtgattgtcccatcatggcccacctggtttcctgatgttgtaaataacatcaatgcatctgctgtgggtcctttgctgagatgtcttcgaaggaattttgttttagccatatccatcaactttgtattttacttgcaatttggaagaaggaaagtcacatgatgaaactccttttgtctataaccaggccctggcaaagtgcaaacaggatgcaactgcagtggcacaaaggtcactcaatcctttgtttccagtttcacattctactacttctgtgctagagaacgatgctctgtgagaggcattcactagtatgaatgtggggatatagtgtataagacttatttgcagtactgtgttcttcagctagaggcagctttttaaataatgcaagtgtatttattagcattaaaattaacatctcagtaatcagcattagcatttctgaggaccattattaattctgagaacagaaattggtgccttgcaaggaagtttactagctctatcaacaagcattcaaggttacatctgctagcagagtagtgttaggaacctggccttactctcctctgacaatcgcaattttttcttattttttataaattcaagaagatacacttggcatcgtgtatcgaggctaagtttttcatgcatttcccagactacttatggagaattgcagtttaagttgctgaaaagtattaacatggtattaagcttaaataatacgtaatgggactagatggcccactaagccactgttattttccttcctctctggcagggcacttgatccattccaaagtcaaaaactggactgaagctaaatttgtacttttcataatatacattctgcttctggcttatcttcttggtacatcaatatattaattgtaaagtttattgtatagtatttaaccgctgaagttcctattttatgttgtgcttatgtgaaccccttggtgaaggtcccttttccttggatgtgtagttatatgatctttttaaatgtacagatattttgctataaaatcggtgcagttttttatggtttttacacttctctttaattcccacctaagcctctgggtaatattgtaaatattgttttaaaatgcatcagcctatgctatacaatctgaatgttattttaacttatagttttttttaatatatatatttaactataaggacagtttagggaacaagttacctaccacatttcactttagtgtacctatttacagaaagattaaactgccacctgcgggcacattcccataaatgtgtactttactttaaaaagaacatgccacgattttgtctttctgtggactcaacattcacttcgattaaaaatagcaatttgaccaagttggacttccactacaaagcagctgttttccaaagttcaatgctgacatatatgtatattaaaataattgcctatttattaatctacaaatagacaacgttggcatgttcttttctgtttgtctattaatgggcctgcttcttagcaatattagaatgttttataaaagcaattcatgttacttttctggtcttttcatggcatatgagcaaataataaactatttacactacaaaaaaaaaaaaaaaaactcgagttttttttttttttttttgtagaaaattcctttattatagtgcaaattactttcagcagtgacataatgtaacaacacatttagcaacattttacaccacacagtaaataagaaagtgtttctttgaaaatatgtcatcataggaacattatttctacattaatgccagaaaatgccaaggccgtttatctcaaggcaaacagggctccctccttccttttgggtattttctttttaacacaaatgaaatgacttgccattttaacaaatcctcaattctaaaagtgatctctcagggggctttgaactaaggtcggcaagatttgaaatggggcttcaaaattttaaataataattttaaaatacttctggaatagcccaaaaagtagaagtcacttctattaagttttaagtagatatacacactcactccaattttactgtagaaatggacagattgtctaaagcctgctttctattcccccagagcctgattgttatttatactccttggttttggttattgcagaactagggctctggtcagaaataacaccttacatacccgaatactttcctgtggaagctttacattgcattttccatcctgaaattctcaccttagaccttacaggcccaggagagggtgtgaatattgttttcagtttacagctaaagccccttactaatttgggctatacctgaatcaaatcatcacatcatttagattaatcccaataggcttatccaagaggttcccactaacctcacagagaaacaaacagttaacattgtattttcacactaagctgcctaagggcttggctgctaatgagttagctgataggtagacagaataagcgtgtcaattccaatcagtacacgccctgctcctctagtttctgctgaattatgcagtgggtgggaatggttggccactcaaaacagtcttcctatggggctcttccaccataagttggatcaaaactccacaaatgtatttcaaggtgccctttaagtctctcaaatttagggacttttaagtgacaagccatgagaagttaatcacaggcttgaaaatacctggaaccacagaacagcccccacggaacaggctgaatatggttaaataagttggctggtacataaagcttttcaatgtacagccagtcttgttggatacagtgtcttcttatataatacaatggaactgtgctaaacagtttcaaagttgagaagaatccaaatgtatcacctataaaaaattcataattttagtttattttagactttggtactgaaacactgtctacattcttgacacttgaaaatgacatggtcacttcagtgcctctgcatgttgtgtaaaaaaaaaaaaaaaactcaaaaaaggaaagcaggacaaggatgtgtcattacaagacacagtatgctgtacaaacaaaacctaaattatatataaatacacccccaccccagaaccctgtcttccctcactacctgatcaaagcaatgccaagggtccctccctccagggccaatgtagcttttaaagtccagaacccaggactttaagcatcccttgccttgcggtgacgtttacagtactgcaacctcctgttggagtcacctgtttgatcagttccgtaagtgcagggtaacacctacagcttaattggaagcattcactctactggctggattcaaagacctggagtcctgggagttaacctttcagataaactaactggatcatttcctaatctggatcctatctaatcctactatctcctcagagccaacacagtaggaagcatcttctactctgaagcttccaaaggcattacttagggatattggtgagggtcacataagaaaagttatacaatgagctaacagcttaagttgatataaattacttccaagtaagttattcagggccgtttgcttctgctttacactgcattccacagtcattttcatattattcttttaaaagtttatactatagtcactttaaaaattgtctaagcaatcacctctttgtgtttttgattaataacaacttaatgagctattatataaatcaagagagaaataattagtcttaaggaagccaataatgtgctaattcccagtaaggagaaaaagcaatgtaaatagaattttacataaccaacaataacttggaaagcagttttatcaaaatggttttgcaaaggtttcccaaaagcacttacagcagtttatatcaagagatcctaagtttaggggtatggagaatctcaattctttaaagcagaaattcacctgtttcataattgtaatatgtaattttctccccttggacctaagatatttatacattcaaaagtttacaacttgctgttcttgagacattgttcattctttaatacatacattgagtataaataaataactacaagaaagcttcaacaatctgaattaacattatgctgtgcaaaacaaaaacaaaaacaaaaacaaaaaacaaaaaaaaagtcaaaccttgaacaacctacattctatgtaaataccctgactaaaatattggttgtgctacacaattccactttagtgcagaaatgcattgatttcactgtaccgttgttgttggctttttaagtgtctttagcacttctgtttctaagcattgccttgctttgaaaagatgaataatttgctaccaaatcacaaatcatcacaaatccattttagtttggtctgaataaaatccagcataaatgtattattttattctgggtataatggctcggtgtctttgtcccaacagctttcttcttaagggcaaaccacccttaagtgaaacttgccatttgtttttgttttctttttaagtctccagatcttgctaggacacttcttccagaccaacagtcagatagttgtggcacgtgatcctatttgaaatagaggtggtttaaatcagccaagcttggtgatctggaggtctccatttatctttatggtgtcaattgcagataacgtttgaatgcgatggtaaaaatcaaaaagttggtgtccatccacaaacactcggaaacgtgggtgctcacaaagaatttccaccctgaatggctggtctggaatgaatggaaagtaagggattgctgactgttcttcacccctctccccagatatacaagaatttctgagtagctgccgatctgtgaacacagctttgagttcgattgccacatcggcaggagggtcttctgagtccccacaggtcaagctgattgcaaagctctctgggttgaggtctacgatgcccatcactaacaccttcttgcctggtctcatgccacctttaatgtgcccacaaaatggaactatcagtcgtgggaagtacacgtccgcttgaactggagagctcaaagagttgtttaaatggccatcatctagtttcaccacggcatcgctgtcggccactgatcccgccatcttcttgcccggcgcggcggggtacgtgggacgcggcgcgcgggcggggatcccgg

SEQ ID NO: 735480 - DNA, 9604 bp, Homo sapiens
  misc_feature (2077)..(2077): n is a, c, g, or t
  misc_feature (9588)..(9588): n is a, c, g, or t
gcggccgcgggcccggcagaaggccgagtaggagggaccacgcgccgggggccgcgatctctggcagggggcggtgtgccagcggagcaccatgcacataggcgcccagcgccccgactacccctcccgaggaaaagaggccggggccgcgctggggcggcggagagcatgagggaggccggggggcggctcggcttggagcgctgctagggagcggtgcgcgccgcacacccgcctgggcgcggcggagggcggggagccgggcaggtcgcgcctgcgggcggcagccgaccgccgggagctgttctgatttccgacgcgcacgctaggggcccggagcagcccccggccccggcgcgccgccgacatgggcaacgcagggagcatggattcgcagcagaccgatttcagggcgcacaacgtgcctttgaagctgccgatgccagagccaggtgaactggaggagcgatttgccatcgtgctgaacgctatgaacctacctcctgacaaagccaggttactgcggcagtatgataatgagaaaaaatgggaactgatttgtgatcaggaacgattccaggtgaagaatcctccccatacatacattcaaaagctcaaaggctatctggatccagctgtaaccaggaagaaattcagacggcgtgttcaagaatctacacaagtgctaagagaactggaaatttctttgagaactaaccacattggatgggtcagagaatttctgaatgaagaaaacaaaggtcttgatgttctagtggaatatctctcatttgcacagtacgcggtaacttttgactttgaaagtgtggagagtactgtggagagctcggtggacaaatcaaagccctggagtaggtccatcgaggacctgcacagagggagcaacctgccctcacctgtgggcaacagtgtctcccgctctggaagacattctgcactgcgatataatacattgccaagcagaagaactctgaaaaattcaagattagtgagtaagaaagatgatgtgcatgtctgtatcatgtgtttacgtgccatcatgaattatcagtatggtttcaacatggtcatgtctcatccacacgctgtcaatgagattgcactaagcctgaacaacaagaatcccagaacaaaagcccttgtcttagaactgttggcagccgtttgtcttgtcagaggcgggcatgaaatcattttatcagcatttgataactttaaagaggtttgtggagaaaaacagcgctttgagaagttgatggaacatttcaggaatgaagacaataacatagattttatggtggcttctatgcagtttattaatattgtagtccattcagtagaagatatgaatttcagagttcacctgcagtatgaatttaccaaattaggcctggacgaatacttggacaagctgaaacacactgagagtgacaagcttcaagtccagatccaggcttacctggacaatgtttttgatgtaggagctctactggaagatgctgaaactaagaatgctgccttggagagggtggaagaactggaagaaaacatttctcatttatctgaaaaactgcaagacacagagaatgaagccatgtccaagattgtggaactggaaaagcaactcatgcagaggaacaaggagctggatgtcgttcgggaaatctacaaagatgcaaatactcaagttcacacattaagaaaaatggtcaaagaaaaagaagaagcaattcaaagacagtctaccctggaaaaaaagattcatgagctagagaaacaagggaccattaaaattcagaagaaaggggatggggatatcgccatactgccagttgtggcttctggcacattgtccatggggtcagaagtggtagcaggtaactctgtgggacccacaatgggggccgcttcctcaggacccttgccccctcctccaccaccactgcctccctcatcagacacacctgaaacagtgcaaaatggtccagtaacaccacctatgccaccgccgccgccgccccctcctccacctcctcctcccccaccgccccctccncctcctcctctcccaggccctgcagctgagactgtaccagctcctcccttagcacctccccttccctctgcacctccgctgcctggaacatcttcacccacagtggttttcaactcaggattagcagctgtgaaaattaagaagccaatcaagacgaagttcagaatgccagtgtttaactgggttgctctgaagcccaatcagatcaatggcacagtcttcaatgaaattgatgatgagcgaattctggaggatttaaatgtggatgaatttgaggaaatattcaagacaaaagcccaaggacctgccattgatctttcttcaagcaaacagaagataccacagaagggatcaaacaaagtgacattactagaagcaaacagggccaaaaatcttgccataactttaaggaaagctggaaagactgctgatgaaatatgtaaagctattcatgtatttgacttgaagacactgcctgtggactttgtggaatgcttgatgcggttcctaccaactgagaatgaagtgaaagtgcttcggctctacgagcgggaaaggaagcctctggaaaacttgtcagatgaagatcggttcatgatgcagtttagtaaaatcgagaggctcatgcagaagatgaccatcatggccttcattgggaactttgctgaaagcattcagatgctgactcctcaactacatgcgattatagcagcatctgtctctataaagtcgtcccaaaaactcaagaaaattctggagatcatcttagcccttggaaactacatgaatagcagtaaaagaggagcagtttatggatttaaacttcagagtttagatctgctcttagatacaaagtcaacagacagaaagcaaacactgttgcactatatatccaatgtggtgaaagaaaaatatcaccaagtgtccctgttttataatgagcttcattatgtggaaaaagctgctgcagtctcccttgagaatgttttgctggatgtcaaggagctccagaggggaatggacttgaccaagagagagtacaccatgcatgaccataacacgctgctgaaggagttcatcctcaacaatgaggggaagctgaagaagctgcaggatgatgccaagatcgcacaggatgcctttgatgatgttgtgaagtattttggagaaaaccccaagacaacaccaccctctgtcttctttcctgtctttgtccggtttgtgaaagcatataagcaagcagaagaggaaaatgagctgaggaaaaagcaggaacaagctctcatggaaaaactcctagagcaagaagctctgatggagcagcaggatccaaagtctccttctcataaatcaaagaggcagcagcaagagttaattgcagaattaagaagacgacaagttaaagataacagacatgtatatgagggaaaagatggtgccattgaagatattatcacagatcttagaaaccaaccatacagacgagccgatgcggtgaggagaagcgtcaggcggcgctttgatgatcagaacttgcgttctgttaatggtgccgaaataacaatgtgaacctgagactggcctgcatgaatacagggtgtgcgtgaatgaaactgcccacatgaactttatgtgctacgatttaactgcagccttgaacacacacaaaaatattcttaagggctcagatttagcaaacacggaagaattttaaaatgagctctcctttcaacccttgttaacaagtgcctaaaaatggaagtacctgttcagattaatcaaagcaataggatttgatttgattaggtatctttttacaccagtatgttatttttaaccaaaatgtaaagttcttattaaactcattacctgccattgtgattgtcccatcatggcccacctggtttcctgatgttgtaaataacatcaatgcatctgctgtgggtcctttgctgagatgtcttcgaaggaattttgttttagccatatccatcaactttgtattttacttgcaatttggaagaaggaaagtcacatgatgaaactccttttgtctataaccaggccctggcaaagtgcaaacaggatgcaactgcagtggcacaaaggtcactcaatcctttgtttccagtttcacattctactacttctgtgctagagaacgatgctctgtgagaggcattcactagtatgaatgtggggatatagtgtataagacttatttgcagtactgtgttcttcagctagaggcagctttttaaataatgcaagtgtatttattagcattaaaattaacatctcagtaatcagcattagcatttctgaggaccattattaattctgagaacagaaattggtgccttgcaaggaagtttactagctctatcaacaagcattcaaggttacatctgctagcagagtagtgttaggaacctggccttactctcctctgacaatcgcaattttttcttattttttataaattcaagaagatacacttggcatcgtgtatcgaggctaagtttttcatgcatttcccagactacttatggagaattgcagtttaagttgctgaaaagtattaacatggtattaagcttaaataatacgtaatgggactagatggcccactaagccactgttattttccttcctctctggcagggcacttgatccattccaaagtcaaaaactggactgaagctaaatttgtacttttcataatatacattctgcttctggcttatcttcttggtacatcaatatattaattgtaaagtttattgtatagtatttaaccgctgaagttcctattttatgttgtgcttatgtgaaccccttggtgaaggtcccttttccttggatgtgtagttatatgatctttttaaatgtacagatattttgctataaaatcggtgcagttttttatggtttttacacttctctttaattcccacctaagcctctgggtaatattgtaaatattgttttaaaatgcatcagcctatgctatacaatctgaatgttattttaacttatagttttttttaatatatatatttaactataaggacagtttagggaacaagttacctaccacatttcactttagtgtacctatttacagaaagattaaactgccacctgcgggcacattcccataaatgtgtactttactttaaaaagaacatgccacgattttgtctttctgtggactcaacattcacttcgattaaaaatagcaatttgaccaagttggacttccactacaaagcagctgttttccaaagttcaatgctgacatatatgtatattaaaataattgcctatttattaatctacaaatagacaacgttggcatgttcttttctgtttgtctattaatgggcctgcttcttagcaatattagaatgttttataaaagcaattcatgttacttttctggtcttttcatggcatatgagcaaataataaactatttacactacaaaaaaaaaaaaaaaaactcgagttttttttttttttttttgtagaaaattcctttattatagtgcaaattactttcagcagtgacataatgtaacaacacatttagcaacattttacaccacacagtaaataagaaagtgtttctttgaaaatatgtcatcataggaacattatttctacattaatgccagaaaatgccaaggccgtttatctcaaggcaaacagggctccctccttccttttgggtattttctttttaacacaaatgaaatgacttgccattttaacaaatcctcaattctaaaagtgatctctcagggggctttgaactaaggtcggcaagatttgaaatggggcttcaaaattttaaataataattttaaaatacttctggaatagcccaaaaagtagaagtcacttctattaagttttaagtagatatacacactcactccaattttactgtagaaatggacagattgtctaaagcctgctttctattcccccagagcctgattgttatttatactccttggttttggttattgcagaactagggctctggtcagaaataacaccttacatacccgaatactttcctgtggaagctttacattgcattttccatcctgaaattctcaccttagaccttacaggcccaggagagggtgtgaatattgttttcagtttacagctaaagccccttactaatttgggctatacctgaatcaaatcatcacatcatttagattaatcccaataggcttatccaagaggttcccactaacctcacagagaaacaaacagttaacattgtattttcacactaagctgcctaagggcttggctgctaatgagttagctgataggtagacagaataagcgtgtcaattccaatcagtacacgccctgctcctctagtttctgctgaattatgcagtgggtgggaatggttggccactcaaaacagtcttcctatggggctcttccaccataagttggatcaaaactccacaaatgtatttcaaggtgccctttaagtctctcaaatttagggacttttaagtgacaagccatgagaagttaatcacaggcttgaaaatacctggaaccacagaacagcccccacggaacaggctgaatatggttaaataagttggctggtacataaagcttttcaatgtacagccagtcttgttggatacagtgtcttcttatataatacaatggaactgtgctaaacagtttcaaagttgagaagaatccaaatgtatcacctataaaaaattcataattttagtttattttagactttggtactgaaacactgtctacattcttgacacttgaaaatgacatggtcacttcagtgcctctgcatgttgtgtaaaaaaaaaaaaaaaactcaaaaaaggaaagcaggacaaggatgtgtcattacaagacacagtatgctgtacaaacaaaacctaaattatatataaatacacccccaccccagaaccctgtcttccctcactacctgatcaaagcaatgccaagggtccctccctccagggccaatgtagcttttaaagtccagaacccaggactttaagcatcccttgccttgcggtgacgtttacagtactgcaacctcctgttggagtcacctgtttgatcagttccgtaagtgcagggtaacacctacagcttaattggaagcattcactctactggctggattcaaagacctggagtcctgggagttaacctttcagataaactaactggatcatttcctaatctggatcctatctaatcctactatctcctcagagccaacacagtaggaagcatcttctactctgaagcttccaaaggcattacttagggatattggtgagggtcacataagaaaagttatacaatgagctaacagcttaagttgatataaattacttccaagtaagttattcagggccgtttgcttctgctttacactgcattccacagtcattttcatattattcttttaaaagtttatactatagtcactttaaaaattgtctaagcaatcacctctttgtgtttttgattaataacaacttaatgagctattatataaatcaagagagaaataattagtcttaaggaagccaataatgtgctaattcccagtaaggagaaaaagcaatgtaaatagaattttacataaccaacaataacttggaaagcagttttatcaaaatggttttgcaaaggtttcccaaaagcacttacagcagtttatatcaagagatcctaagtttaggggtatggagaatctcaattctttaaagcagaaattcacctgtttcataattgtaatatgtaattttctccccttggacctaagatatttatacattcaaaagtttacaacttgctgttcttgagacattgttcattctttaatacatacattgagtataaataaataactacaagaaagcttcaacaatctgaattaacattatgctgtgcaaaacaaaaacaaaaacaaaaacaaaaaacaaaaaaaaagtcaaaccttgaacaacctacattctatgtaaataccctgactaaaatattggttgtgctacacaattccactttagtgcagaaatgcattgatttcactgtaccgttgttgttggctttttaagtgtctttagcacttctgtttctaagcattgccttgctttgaaaagatgaataatttgctaccaaatcacaaatcatcacaaatccattttagtttggtctgaataaaatccagcataaatgtattattttattctgggtataatggctcggtgtctttgtcccaacagctttcttcttaagggcaaaccacccttaagtgaaacttgccatttgtttttgttttctttttaagtctccagatcttgctaggacacttcttccagaccaacagtcagatagttgtggcacgtgatcctatttgaaatagaggtggtttaaatcagccaagcttggtgatctggaggtctccatttatctttatggtgtcaattgcagataacgtttgaatgcgatggtaaaaatcaaaaagttggtgtccatccacaaacactcggaaacgtgggtgctcacaaagaatttccaccctgaatggctggtctggaatgaatggaaagtaagggattgctgactgttcttcacccctctccccagatatacaagaatttctgagtagctgccgatctgtgaacacagctttgagttcgattgccacatcggcaggagggtcttctgagtccccacaggtcaagctgattgcaaagctctctgggttgaggtctacgatgcccatcactaacaccttcttgcctggtctcatgccacctttaatgtgcccacaaaatggaactatcagtcgtgggaagtacacgtccgcttgaactggcggacgcgtgggtcgacccacgcgtccgctctttaattcccacctaagcctctgggtaatattgtaaatattgttttaaaatgcatcagcctatgctatacaatctgaatgttattttaacttatagttttttttaatatatatatttaactataaggacagtttagggaacaagttacctaccacatttcactttagtgtacctatttacagaaagattaaactgccacctgcgggcacattcccataaatgtgtactttactttaaaaagaacatgccacgattttgtctttctgtggactcaacattcacttcgattaaaaatagcaatttgaccaagttggacttccactacaaagcagctgttttccaaagttcaatgctgacatatatgtatattaaaataattgcctatttattaatctacaaatagacaacgttggcatgttcttttctgtttgtctattaatgggcctgcttcttagcaatattagaatgttttataaaagcaattcatgttacttttctggtcttttcatggcatatgagcaaataataaactatttacactactaaaaaaaacaaagncccaggagcgggtgct

SEQ ID NO: 735481 - DNA, 6978 bp, Homo sapiens
  misc_feature (2077)..(2077): n is a, c, g, or t
gcggccgcgggcccggcagaaggccgagtaggagggaccacgcgccgggggccgcgatctctggcagggggcggtgtgccagcggagcaccatgcacataggcgcccagcgccccgactacccctcccgaggaaaagaggccggggccgcgctggggcggcggagagcatgagggaggccggggggcggctcggcttggagcgctgctagggagcggtgcgcgccgcacacccgcctgggcgcggcggagggcggggagccgggcaggtcgcgcctgcgggcggcagccgaccgccgggagctgttctgatttccgacgcgcacgctaggggcccggagcagcccccggccccggcgcgccgccgacatgggcaacgcagggagcatggattcgcagcagaccgatttcagggcgcacaacgtgcctttgaagctgccgatgccagagccaggtgaactggaggagcgatttgccatcgtgctgaacgctatgaacctacctcctgacaaagccaggttactgcggcagtatgataatgagaaaaaatgggaactgatttgtgatcaggaacgattccaggtgaagaatcctccccatacatacattcaaaagctcaaaggctatctggatccagctgtaaccaggaagaaattcagacggcgtgttcaagaatctacacaagtgctaagagaactggaaatttctttgagaactaaccacattggatgggtcagagaatttctgaatgaagaaaacaaaggtcttgatgttctagtggaatatctctcatttgcacagtacgcggtaacttttgactttgaaagtgtggagagtactgtggagagctcggtggacaaatcaaagccctggagtaggtccatcgaggacctgcacagagggagcaacctgccctcacctgtgggcaacagtgtctcccgctctggaagacattctgcactgcgatataatacattgccaagcagaagaactctgaaaaattcaagattagtgagtaagaaagatgatgtgcatgtctgtatcatgtgtttacgtgccatcatgaattatcagtatggtttcaacatggtcatgtctcatccacacgctgtcaatgagattgcactaagcctgaacaacaagaatcccagaacaaaagcccttgtcttagaactgttggcagccgtttgtcttgtcagaggcgggcatgaaatcattttatcagcatttgataactttaaagaggtttgtggagaaaaacagcgctttgagaagttgatggaacatttcaggaatgaagacaataacatagattttatggtggcttctatgcagtttattaatattgtagtccattcagtagaagatatgaatttcagagttcacctgcagtatgaatttaccaaattaggcctggacgaatacttggacaagctgaaacacactgagagtgacaagcttcaagtccagatccaggcttacctggacaatgtttttgatgtaggagctctactggaagatgctgaaactaagaatgctgccttggagagggtggaagaactggaagaaaacatttctcatttatctgaaaaactgcaagacacagagaatgaagccatgtccaagattgtggaactggaaaagcaactcatgcagaggaacaaggagctggatgtcgttcgggaaatctacaaagatgcaaatactcaagttcacacattaagaaaaatggtcaaagaaaaagaagaagcaattcaaagacagtctaccctggaaaaaaagattcatgagctagagaaacaagggaccattaaaattcagaagaaaggggatggggatatcgccatactgccagttgtggcttctggcacattgtccatggggtcagaagtggtagcaggtaactctgtgggacccacaatgggggccgcttcctcaggacccttgccccctcctccaccaccactgcctccctcatcagacacacctgaaacagtgcaaaatggtccagtaacaccacctatgccaccgccgccgccgccccctcctccacctcctcctcccccaccgccccctccncctcctcctctcccaggccctgcagctgagactgtaccagctcctcccttagcacctccccttccctctgcacctccgctgcctggaacatcttcacccacagtggttttcaactcaggattagcagctgtgaaaattaagaagccaatcaagacgaagttcagaatgccagtgtttaactgggttgctctgaagcccaatcagatcaatggcacagtcttcaatgaaattgatgatgagcgaattctggaggatttaaatgtggatgaatttgaggaaatattcaagacaaaagcccaaggacctgccattgatctttcttcaagcaaacagaagataccacagaagggatcaaacaaagtgacattactagaagcaaacagggccaaaaatcttgccataactttaaggaaagctggaaagactgctgatgaaatatgtaaagctattcatgtatttgacttgaagacactgcctgtggactttgtggaatgcttgatgcggttcctaccaactgagaatgaagtgaaagtgcttcggctctacgagcgggaaaggaagcctctggaaaacttgtcagatgaagatcggttcatgatgcagtttagtaaaatcgagaggctcatgcagaagatgaccatcatggccttcattgggaactttgctgaaagcattcagatgctgactcctcaactacatgcgattatagcagcatctgtctctataaagtcgtcccaaaaactcaagaaaattctggagatcatcttagcccttggaaactacatgaatagcagtaaaagaggagcagtttatggatttaaacttcagagtttagatctgctcttagatacaaagtcaacagacagaaagcaaacactgttgcactatatatccaatgtggtgaaagaaaaatatcaccaagtgtccctgttttataatgagcttcattatgtggaaaaagctgctgcagtctcccttgagaatgttttgctggatgtcaaggagctccagaggggaatggacttgaccaagagagagtacaccatgcatgaccataacacgctgctgaaggagttcatcctcaacaatgaggggaagctgaagaagctgcaggatgatgccaagatcgcacaggatgcctttgatgatgttgtgaagtattttggagaaaaccccaagacaacaccaccctctgtcttctttcctgtctttgtccggtttgtgaaagcatataagcaagcagaagaggaaaatgagctgaggaaaaagcaggaacaagctctcatggaaaaactcctagagcaagaagctctgatggagcagcaggatccaaagtctccttctcataaatcaaagaggcagcagcaagagttaattgcagaattaagaagacgacaagttaaagataacagacatgtatatgagggaaaagatggtgccattgaagatattatcacagatcttagaaaccaaccatacagacgagccgatgcggtgaggagaagcgtcaggcggcgctttgatgatcagaacttgcgttctgttaatggtgccgaaataacaatgtgaacctgagactggcctgcatgaatacagggtgtgcgtgaatgaaactgcccacatgaactttatgtgctacgatttaactgcagccttgaacacacacaaaaatattcttaagggctcagatttagcaaacacggaagaattttaaaatgagctctcctttcaacccttgttaacaagtgcctaaaaatggaagtacctgttcagattaatcaaagcaataggatttgatttgattaggtatctttttacaccagtatgttatttttaaccaaaatgtaaagttcttattaaactcattacctgccattgtgattgtcccatcatggcccacctggtttcctgatgttgtaaataacatcaatgcatctgctgtgggtcctttgctgagatgtcttcgaaggaattttgttttagccatatccatcaactttgtattttacttgcaatttggaagaaggaaagtcacatgatgaaactccttttgtctataaccaggccctggcaaagtgcaaacaggatgcaactgcagtggcacaaaggtcactcaatcctttgtttccagtttcacattctactacttctgtgctagagaacgatgctctgtgagaggcattcactagtatgaatgtggggatatagtgtataagacttatttgcagtactgtgttcttcagctagaggcagctttttaaataatgcaagtgtatttattagcattaaaattaacatctcagtaatcagcattagcatttctgaggaccattattaattctgagaacagaaattggtgccttgcaaggaagtttactagctctatcaacaagcattcaaggttacatctgctagcagagtagtgttaggaacctggccttactctcctctgacaatcgcaattttttcttattttttataaattcaagaagatacacttggcatcgtgtatcgaggctaagtttttcatgcatttcccagactacttatggagaattgcagtttaagttgctgaaaagtattaacatggtattaagcttaaataatacgtaatgggactagatggcccactaagccactgttattttccttcctctctggcagggcacttgatccattccaaagtcaaaaactggactgaagctaaatttgtacttttcataatatacattctgcttctggcttatcttcttggtacatcaatatattaattgtaaagtttattgtatagtatttaaccgctgaagttcctattttatgttgtgcttatgtgaaccccttggtgaaggtcccttttccttggatgtgtagttatatgatctttttaaatgtacagatattttgctataaaatcggtgcagttttttatggtttttacacttctctttaattcccacctaagcctctgggtaatattgtaaatattgttttaaaatgcatcagcctatgctatacaatctgaatgttattttaacttatagttttttttaatatatatatttaactataaggacagtttagggaacaagttacctaccacatttcactttagtgtacctatttacagaaagattaaactgccacctgcgggcacattcccataaatgtgtactttactttaaaaagaacatgccacgattttgtctttctgtggactcaacattcacttcgattaaaaatagcaatttgaccaagttggacttccactacaaagcagctgttttccaaagttcaatgctgacatatatgtatattaaaataattgcctatttattaatctacaaatagacaacgttggcatgttcttttctgtttgtctattaatgggcctgcttcttagcaatattagaatgttttataaaagcaattcatgttacttttctggtcttttcatggcatatgagcaaataataaactatttacactacaaaaaaaaaaaaaaaaactcgagttttttttttttttttttgtagaaaattcctttattatagtgcaaattactttcagcagtgacataatgtaacaacacatttagcaacattttacaccacacagtaaataagaaagtgtttctttgaaaatatgtcatcataggaacattatttctacattaatgccagaaaatgccaaggccgtttatctcaaggcaaacagggctccctccttccttttgggtattttctttttaacacaaatgaaatgacttgccattttaacaaatcctcaattctaaaagtgatctctcagggggctttgaactaaggtcggcaagatttgaaatggggcttcaaaattttaaataataattttaaaatacttctggaatagcccaaaaagtagaagtcacttctattaagttttaagtagatatacacactcactccaattttactgtagaaatggacagattgtctaaagcctgctttctattcccccagagcctgattgttatttatactccttggttttggttattgcagaactagggctctggtcagaaataacaccttacatacccgaatactttcctgtggaagctttacattgcattttccatcctgaaattctcaccttagaccttacaggcccaggagagggtgtgaatattgttttcagtttacagctaaagccccttactaatttgggctatacctgaatcaaatcatcacatcatttagattaatcccaataggcttatccaagaggttcccactaacctcacagagaaacaaacagttaacattgtattttcacactaagctgcctaagggcttggctgctaatgagttagctgataggtagacagaataagcgtgtcaattccaatcagtacacgccctgctcctctagtttctgctgaattatgcagtgggtgggaatggttggccactcaaaacagtcttcctatggggctcttccaccataagttggatcaaaactccacaaatgtatttcaaggtgccctttaagtctctcaaatttagggacttttaagtgacaagccatgagaagttaatcacaggcttgaaaatacctggaaccacagaacagcccccacggaacaggctgaatatggttaaataagttggctggtacataaagcttttcaatgtacagccagtcttgttggatacagtgtcttcttatataatacaatggaactgtgctaaacagtttcaaagttgagaagaatccaaatgtatcacctataaaaaattcataattttagtttattttagactttggtactgaaacactgtctacattcttgacacttgaagtgaccatgtcattttcaagtgtcaagaatgtagactttggtactgaaacctgtctacatt

SEQ ID NO: 735482 - DNA, 5764 bp, Homo sapiens
  misc_feature (2077)..(2077): n is a, c, g, or t
gcggccgcgggcccggcagaaggccgagtaggagggaccacgcgccgggggccgcgatctctggcagggggcggtgtgccagcggagcaccatgcacataggcgcccagcgccccgactacccctcccgaggaaaagaggccggggccgcgctggggcggcggagagcatgagggaggccggggggcggctcggcttggagcgctgctagggagcggtgcgcgccgcacacccgcctgggcgcggcggagggcggggagccgggcaggtcgcgcctgcgggcggcagccgaccgccgggagctgttctgatttccgacgcgcacgctaggggcccggagcagcccccggccccggcgcgccgccgacatgggcaacgcagggagcatggattcgcagcagaccgatttcagggcgcacaacgtgcctttgaagctgccgatgccagagccaggtgaactggaggagcgatttgccatcgtgctgaacgctatgaacctacctcctgacaaagccaggttactgcggcagtatgataatgagaaaaaatgggaactgatttgtgatcaggaacgattccaggtgaagaatcctccccatacatacattcaaaagctcaaaggctatctggatccagctgtaaccaggaagaaattcagacggcgtgttcaagaatctacacaagtgctaagagaactggaaatttctttgagaactaaccacattggatgggtcagagaatttctgaatgaagaaaacaaaggtcttgatgttctagtggaatatctctcatttgcacagtacgcggtaacttttgactttgaaagtgtggagagtactgtggagagctcggtggacaaatcaaagccctggagtaggtccatcgaggacctgcacagagggagcaacctgccctcacctgtgggcaacagtgtctcccgctctggaagacattctgcactgcgatataatacattgccaagcagaagaactctgaaaaattcaagattagtgagtaagaaagatgatgtgcatgtctgtatcatgtgtttacgtgccatcatgaattatcagtatggtttcaacatggtcatgtctcatccacacgctgtcaatgagattgcactaagcctgaacaacaagaatcccagaacaaaagcccttgtcttagaactgttggcagccgtttgtcttgtcagaggcgggcatgaaatcattttatcagcatttgataactttaaagaggtttgtggagaaaaacagcgctttgagaagttgatggaacatttcaggaatgaagacaataacatagattttatggtggcttctatgcagtttattaatattgtagtccattcagtagaagatatgaatttcagagttcacctgcagtatgaatttaccaaattaggcctggacgaatacttggacaagctgaaacacactgagagtgacaagcttcaagtccagatccaggcttacctggacaatgtttttgatgtaggagctctactggaagatgctgaaactaagaatgctgccttggagagggtggaagaactggaagaaaacatttctcatttatctgaaaaactgcaagacacagagaatgaagccatgtccaagattgtggaactggaaaagcaactcatgcagaggaacaaggagctggatgtcgttcgggaaatctacaaagatgcaaatactcaagttcacacattaagaaaaatggtcaaagaaaaagaagaagcaattcaaagacagtctaccctggaaaaaaagattcatgagctagagaaacaagggaccattaaaattcagaagaaaggggatggggatatcgccatactgccagttgtggcttctggcacattgtccatggggtcagaagtggtagcaggtaactctgtgggacccacaatgggggccgcttcctcaggacccttgccccctcctccaccaccactgcctccctcatcagacacacctgaaacagtgcaaaatggtccagtaacaccacctatgccaccgccgccgccgccccctcctccacctcctcctcccccaccgccccctccncctcctcctctcccaggccctgcagctgagactgtaccagctcctcccttagcacctccccttccctctgcacctccgctgcctggaacatcttcacccacagtggttttcaactcaggattagcagctgtgaaaattaagaagccaatcaagacgaagttcagaatgccagtgtttaactgggttgctctgaagcccaatcagatcaatggcacagtcttcaatgaaattgatgatgagcgaattctggaggatttaaatgtggatgaatttgaggaaatattcaagacaaaagcccaaggacctgccattgatctttcttcaagcaaacagaagataccacagaagggatcaaacaaagtgacattactagaagcaaacagggccaaaaatcttgccataactttaaggaaagctggaaagactgctgatgaaatatgtaaagctattcatgtatttgacttgaagacactgcctgtggactttgtggaatgcttgatgcggttcctaccaactgagaatgaagtgaaagtgcttcggctctacgagcgggaaaggaagcctctggaaaacttgtcagatgaagatcggttcatgatgcagtttagtaaaatcgagaggctcatgcagaagatgaccatcatggccttcattgggaactttgctgaaagcattcagatgctgactcctcaactacatgcgattatagcagcatctgtctctataaagtcgtcccaaaaactcaagaaaattctggagatcatcttagcccttggaaactacatgaatagcagtaaaagaggagcagtttatggatttaaacttcagagtttagatctgctcttagatacaaagtcaacagacagaaagcaaacactgttgcactatatatccaatgtggtgaaagaaaaatatcaccaagtgtccctgttttataatgagcttcattatgtggaaaaagctgctgcagtctcccttgagaatgttttgctggatgtcaaggagctccagaggggaatggacttgaccaagagagagtacaccatgcatgaccataacacgctgctgaaggagttcatcctcaacaatgaggggaagctgaagaagctgcaggatgatgccaagatcgcacaggatgcctttgatgatgttgtgaagtattttggagaaaaccccaagacaacaccaccctctgtcttctttcctgtctttgtccggtttgtgaaagcatataagcaagcagaagaggaaaatgagctgaggaaaaagcaggaacaagctctcatggaaaaactcctagagcaagaagctctgatggagcagcaggatccaaagtctccttctcataaatcaaagaggcagcagcaagagttaattgcagaattaagaagacgacaagttaaagataacagacatgtatatgagggaaaagatggtgccattgaagatattatcacagatcttagaaaccaaccatacagacgagccgatgcggtgaggagaagcgtcaggcggcgctttgatgatcagaacttgcgttctgttaatggtgccgaaataacaatgtgaacctgagactggcctgcatgaatacagggtgtgcgtgaatgaaactgcccacatgaactttatgtgctacgatttaactgcagccttgaacacacacaaaaatattcttaagggctcagatttagcaaacacggaagaattttaaaatgagctctcctttcaacccttgttaacaagtgcctaaaaatggaagtacctgttcagattaatcaaagcaataggatttgatttgattaggtatctttttacaccagtatgttatttttaaccaaaatgtaaagttcttattaaactcattacctgccattgtgattgtcccatcatggcccacctggtttcctgatgttgtaaataacatcaatgcatctgctgtgggtcctttgctgagatgtcttcgaaggaattttgttttagccatatccatcaactttgtattttacttgcaatttggaagaaggaaagtcacatgatgaaactccttttgtctataaccaggccctggcaaagtgcaaacaggatgcaactgcagtggcacaaaggtcactcaatcctttgtttccagtttcacattctactacttctgtgctagagaacgatgctctgtgagaggcattcactagtatgaatgtggggatatagtgtataagacttatttgcagtactgtgttcttcagctagaggcagctttttaaataatgcaagtgtatttattagcattaaaattaacatctcagtaatcagcattagcatttctgaggaccattattaattctgagaacagaaattggtgccttgcaaggaagtttactagctctatcaacaagcattcaaggttacatctgctagcagagtagtgttaggaacctggccttactctcctctgacaatcgcaattttttcttattttttataaattcaagaagatacacttggcatcgtgtatcgaggctaagtttttcatgcatttcccagactacttatggagaattgcagtttaagttgctgaaaagtattaacatggtattaagcttaaataatacgtaatgggactagatggcccactaagccactgttattttccttcctctctggcagggcacttgatccattccaaagtcaaaaactggactgaagctaaatttgtacttttcataatatacattctgcttctggcttatcttcttggtacatcaatatattaattgtaaagtttattgtatagtatttaaccgctgaagttcctattttatgttgtgcttatgtgaaccccttggtgaaggtcccttttccttggatgtgtagttatatgatctttttaaatgtacagatattttgctataaaatcggtgcagttttttatggtttttacacttctctttaattcccacctaagcctctgggtaatattgtaaatattgttttaaaatgcatcagcctatgctatacaatctgaatgttattttaacttatagttttttttaatatatatatttaactataaggacagtttagggaacaagttacctaccacatttcactttagtgtacctatttacagaaagattaaactgccacctgcgggcacattcccataaatgtgtactttactttaaaaagaacatgccacgattttgtctttctgtggactcaacattcacttcgattaaaaatagcaatttgaccaagttggacttccactacaaagcagctgttttccaaagttcaatgctgacatatatgtatattaaaataattgcctatttattaatctacaaatagacaacgttggcatgttcttttctgtttgtctattaatgggcctgcttcttagcaatattagaatgttttataaaagcaattcatgttacttttctggtcttttcatggcatatgagcaaataataaactatttacactacgtaaaaaaaaaaagaaaaaaaaaaaagaaaaacacaaaatgaatgaaaacacaggcgacaaccaaaagctcgaatagagagggagaagagacaacacaaaaaaaaccgcactagacaacacgcgaggaatacaacagacacaaaaacacggggaacagaacacgtagagaacagaaaggcaaacaaggacaaagagaca

SEQ ID NO: 735483 - DNA, 9440 bp, Homo sapiens
  misc_feature (2077)..(2077): n is a, c, g, or t
gcggccgcgggcccggcagaaggccgagtaggagggaccacgcgccgggggccgcgatctctggcagggggcggtgtgccagcggagcaccatgcacataggcgcccagcgccccgactacccctcccgaggaaaagaggccggggccgcgctggggcggcggagagcatgagggaggccggggggcggctcggcttggagcgctgctagggagcggtgcgcgccgcacacccgcctgggcgcggcggagggcggggagccgggcaggtcgcgcctgcgggcggcagccgaccgccgggagctgttctgatttccgacgcgcacgctaggggcccggagcagcccccggccccggcgcgccgccgacatgggcaacgcagggagcatggattcgcagcagaccgatttcagggcgcacaacgtgcctttgaagctgccgatgccagagccaggtgaactggaggagcgatttgccatcgtgctgaacgctatgaacctacctcctgacaaagccaggttactgcggcagtatgataatgagaaaaaatgggaactgatttgtgatcaggaacgattccaggtgaagaatcctccccatacatacattcaaaagctcaaaggctatctggatccagctgtaaccaggaagaaattcagacggcgtgttcaagaatctacacaagtgctaagagaactggaaatttctttgagaactaaccacattggatgggtcagagaatttctgaatgaagaaaacaaaggtcttgatgttctagtggaatatctctcatttgcacagtacgcggtaacttttgactttgaaagtgtggagagtactgtggagagctcggtggacaaatcaaagccctggagtaggtccatcgaggacctgcacagagggagcaacctgccctcacctgtgggcaacagtgtctcccgctctggaagacattctgcactgcgatataatacattgccaagcagaagaactctgaaaaattcaagattagtgagtaagaaagatgatgtgcatgtctgtatcatgtgtttacgtgccatcatgaattatcagtatggtttcaacatggtcatgtctcatccacacgctgtcaatgagattgcactaagcctgaacaacaagaatcccagaacaaaagcccttgtcttagaactgttggcagccgtttgtcttgtcagaggcgggcatgaaatcattttatcagcatttgataactttaaagaggtttgtggagaaaaacagcgctttgagaagttgatggaacatttcaggaatgaagacaataacatagattttatggtggcttctatgcagtttattaatattgtagtccattcagtagaagatatgaatttcagagttcacctgcagtatgaatttaccaaattaggcctggacgaatacttggacaagctgaaacacactgagagtgacaagcttcaagtccagatccaggcttacctggacaatgtttttgatgtaggagctctactggaagatgctgaaactaagaatgctgccttggagagggtggaagaactggaagaaaacatttctcatttatctgaaaaactgcaagacacagagaatgaagccatgtccaagattgtggaactggaaaagcaactcatgcagaggaacaaggagctggatgtcgttcgggaaatctacaaagatgcaaatactcaagttcacacattaagaaaaatggtcaaagaaaaagaagaagcaattcaaagacagtctaccctggaaaaaaagattcatgagctagagaaacaagggaccattaaaattcagaagaaaggggatggggatatcgccatactgccagttgtggcttctggcacattgtccatggggtcagaagtggtagcaggtaactctgtgggacccacaatgggggccgcttcctcaggacccttgccccctcctccaccaccactgcctccctcatcagacacacctgaaacagtgcaaaatggtccagtaacaccacctatgccaccgccgccgccgccccctcctccacctcctcctcccccaccgccccctccncctcctcctctcccaggccctgcagctgagactgtaccagctcctcccttagcacctccccttccctctgcacctccgctgcctggaacatcttcacccacagtggttttcaactcaggattagcagctgtgaaaattaagaagccaatcaagacgaagttcagaatgccagtgtttaactgggttgctctgaagcccaatcagatcaatggcacagtcttcaatgaaattgatgatgagcgaattctggaggatttaaatgtggatgaatttgaggaaatattcaagacaaaagcccaaggacctgccattgatctttcttcaagcaaacagaagataccacagaagggatcaaacaaagtgacattactagaagcaaacagggccaaaaatcttgccataactttaaggaaagctggaaagactgctgatgaaatatgtaaagctattcatgtatttgacttgaagacactgcctgtggactttgtggaatgcttgatgcggttcctaccaactgagaatgaagtgaaagtgcttcggctctacgagcgggaaaggaagcctctggaaaacttgtcagatgaagatcggttcatgatgcagtttagtaaaatcgagaggctcatgcagaagatgaccatcatggccttcattgggaactttgctgaaagcattcagatgctgactcctcaactacatgcgattatagcagcatctgtctctataaagtcgtcccaaaaactcaagaaaattctggagatcatcttagcccttggaaactacatgaatagcagtaaaagaggagcagtttatggatttaaacttcagagtttagatctgctcttagatacaaagtcaacagacagaaagcaaacactgttgcactatatatccaatgtggtgaaagaaaaatatcaccaagtgtccctgttttataatgagcttcattatgtggaaaaagctgctgcagtctcccttgagaatgttttgctggatgtcaaggagctccagaggggaatggacttgaccaagagagagtacaccatgcatgaccataacacgctgctgaaggagttcatcctcaacaatgaggggaagctgaagaagctgcaggatgatgccaagatcgcacaggatgcctttgatgatgttgtgaagtattttggagaaaaccccaagacaacaccaccctctgtcttctttcctgtctttgtccggtttgtgaaagcatataagcaagcagaagaggaaaatgagctgaggaaaaagcaggaacaagctctcatggaaaaactcctagagcaagaagctctgatggagcagcaggatccaaagtctccttctcataaatcaaagaggcagcagcaagagttaattgcagaattaagaagacgacaagttaaagataacagacatgtatatgagggaaaagatggtgccattgaagatattatcacagccttaaagaagaataatatcactaaatttccaaatgttcactcgagggtaaggatttcttctagcacaccggtggtggaggatacacagagctggcaagcatcactttttacttagcttcctcctctctctgtatgcagatcaatggttttcaatctatggctgagggtaatactggtgagaatctgaccagggagtttttgtacctcacattccaatgatgcagggattgagcctctctgttggactctttctcggcctgcttttaagttctaagtgtgatggcttgggcaagggtatttgctgatgattgtatttgctttgagtgttgggctgtccttcccttacccctgtcttggcctttgagttactcagttaaacccattttgatctgaagcgactgaaagcaggtcctggccaggtaacattacagcctttgaaggattaagatctttagaactaattgctcagaggatgaagaaccacaaagctgcatatgaggcaaaagtgtaattctggcctttcattaccagtgtgggctaggaagcagaggcttgagaggattggggtatgcaaaactattttttccttaaatttaagagtagaggctgggcatagtggctcacacctgtaatctgtaatcccagcactctgggaggccgaggtgggcaaatctgttgagttcaagatcaccctgggcaatgaagcaaaatccccatctctgccattgtgattgtcccatcatggcccacctggtttcctgatgttgtaaataacatcaatgcatctgctgtgggtcctttgctgagatgtcttcgaaggaattttgttttagccatatccatcaactttgtattttacttgcaatttggaagaaggaaagtcacatgatgaaactccttttgtctataaccaggccctggcaaagtgcaaacaggatgcaactgcagtggcacaaaggtcactcaatcctttgtttccagtttcacattctactacttctgtgctagagaacgatgctctgtgagaggcattcactagtatgaatgtggggatatagtgtataagacttatttgcagtactgtgttcttcagctagaggcagctttttaaataatgcaagtgtatttattagcattaaaattaacatctcagtaatcagcattagcatttctgaggaccattattaattctgagaacagaaattggtgccttgcaaggaagtttactagctctatcaacaagcattcaaggttacatctgctagcagagtagtgttaggaacctggccttactctcctctgacaatcgcaattttttcttattttttataaattcaagaagatacacttggcatcgtgtatcgaggctaagtttttcatgcatttcccagactacttatggagaattgcagtttaagttgctgaaaagtattaacatggtattaagcttaaataatacgtaatgggactagatggcccactaagccactgttattttccttcctctctggcagggcacttgatccattccaaagtcaaaaactggactgaagctaaatttgtacttttcataatatacattctgcttctggcttatcttcttggtacatcaatatattaattgtaaagtttattgtatagtatttaaccgctgaagttcctattttatgttgtgcttatgtgaaccccttggtgaaggtcccttttccttggatgtgtagttatatgatctttttaaatgtacagatattttgctataaaatcggtgcagttttttatggtttttacacttctctttaattcccacctaagcctctgggtaatattgtaaatattgttttaaaatgcatcagcctatgctatacaatctgaatgttattttaacttatagttttttttaatatatatatttaactataaggacagtttagggaacaagttacctaccacatttcactttagtgtacctatttacagaaagattaaactgccacctgcgggcacattcccataaatgtgtactttactttaaaaagaacatgccacgattttgtctttctgtggactcaacattcacttcgattaaaaatagcaatttgaccaagttggacttccactacaaagcagctgttttccaaagttcaatgctgacatatatgtatattaaaataattgcctatttattaatctacaaatagacaacgttggcatgttcttttctgtttgtctattaatgggcctgcttcttagcaatattagaatgttttataaaagcaattcatgttacttttctggtcttttcatggcatatgagcaaataataaactatttacactacaaaaaaaaaaaaaaaaactcgagttttttttttttttttttgtagaaaattcctttattatagtgcaaattactttcagcagtgacataatgtaacaacacatttagcaacattttacaccacacagtaaataagaaagtgtttctttgaaaatatgtcatcataggaacattatttctacattaatgccagaaaatgccaaggccgtttatctcaaggcaaacagggctccctccttccttttgggtattttctttttaacacaaatgaaatgacttgccattttaacaaatcctcaattctaaaagtgatctctcagggggctttgaactaaggtcggcaagatttgaaatggggcttcaaaattttaaataataattttaaaatacttctggaatagcccaaaaagtagaagtcacttctattaagttttaagtagatatacacactcactccaattttactgtagaaatggacagattgtctaaagcctgctttctattcccccagagcctgattgttatttatactccttggttttggttattgcagaactagggctctggtcagaaataacaccttacatacccgaatactttcctgtggaagctttacattgcattttccatcctgaaattctcaccttagaccttacaggcccaggagagggtgtgaatattgttttcagtttacagctaaagccccttactaatttgggctatacctgaatcaaatcatcacatcatttagattaatcccaataggcttatccaagaggttcccactaacctcacagagaaacaaacagttaacattgtattttcacactaagctgcctaagggcttggctgctaatgagttagctgataggtagacagaataagcgtgtcaattccaatcagtacacgccctgctcctctagtttctgctgaattatgcagtgggtgggaatggttggccactcaaaacagtcttcctatggggctcttccaccataagttggatcaaaactccacaaatgtatttcaaggtgccctttaagtctctcaaatttagggacttttaagtgacaagccatgagaagttaatcacaggcttgaaaatacctggaaccacagaacagcccccacggaacaggctgaatatggttaaataagttggctggtacataaagcttttcaatgtacagccagtcttgttggatacagtgtcttcttatataatacaatggaactgtgctaaacagtttcaaagttgagaagaatccaaatgtatcacctataaaaaattcataattttagtttattttagactttggtactgaaacactgtctacattcttgacacttgaaaatgacatggtcacttcagtgcctctgcatgttgtgtaaaaaaaaaaaaaaaactcaaaaaaggaaagcaggacaaggatgtgtcattacaagacacagtatgctgtacaaacaaaacctaaattatatataaatacacccccaccccagaaccctgtcttccctcactacctgatcaaagcaatgccaagggtccctccctccagggccaatgtagcttttaaagtccagaacccaggactttaagcatcccttgccttgcggtgacgtttacagtactgcaacctcctgttggagtcacctgtttgatcagttccgtaagtgcagggtaacacctacagcttaattggaagcattcactctactggctggattcaaagacctggagtcctgggagttaacctttcagataaactaactggatcatttcctaatctggatcctatctaatcctactatctcctcagagccaacacagtaggaagcatcttctactctgaagcttccaaaggcattacttagggatattggtgagggtcacataagaaaagttatacaatgagctaacagcttaagttgatataaattacttccaagtaagttattcagggccgtttgcttctgctttacactgcattccacagtcattttcatattattcttttaaaagtttatactatagtcactttaaaaattgtctaagcaatcacctctttgtgtttttgattaataacaacttaatgagctattatataaatcaagagagaaataattagtcttaaggaagccaataatgtgctaattcccagtaaggagaaaaagcaatgtaaatagaattttacataaccaacaataacttggaaagcagttttatcaaaatggttttgcaaaggtttcccaaaagcacttacagcagtttatatcaagagatcctaagtttaggggtatggagaatctcaattctttaaagcagaaattcacctgtttcataattgtaatatgtaattttctccccttggacctaagatatttatacattcaaaagtttacaacttgctgttcttgagacattgttcattctttaatacatacattgagtataaataaataactacaagaaagcttcaacaatctgaattaacattatgctgtgcaaaacaaaaacaaaaacaaaaacaaaaaacaaaaaaaaagtcaaaccttgaacaacctacattctatgtaaataccctgactaaaatattggttgtgctacacaattccactttagtgcagaaatgcattgatttcactgtaccgttgttgttggctttttaagtgtctttagcacttctgtttctaagcattgccttgctttgaaaagatgaataatttgctaccaaatcacaaatcatcacaaatccattttagtttggtctgaataaaatccagcataaatgtattattttattctgggtataatggctcggtgtctttgtcccaacagctttcttcttaagggcaaaccacccttaagtgaaacttgccatttgtttttgttttctttttaagtctccagatcttgctaggacacttcttccagaccaacagtcagatagttgtggcacgtgatcctatttgaaatagaggtggtttaaatcagccaagcttggtgatctggaggtctccatttatctttatggtgtcaattgcagataacgtttgaatgcgatggtaaaaatcaaaaagttggtgtccatccacaaacactcggaaacgtgggtgctcacaaagaatttccaccctgaatggctggtctggaatgaatggaaagtaagggattgctgactgttcttcacccctctccccagatatacaagaatttctgagtagctgccgatctgtgaacacagctttgagttcgattgccacatcggcaggagggtcttctgagtccccacaggtcaagctgattgcaaagctctctgggttgaggtctacgatgcccatcactaacaccttcttgcctggtctcatgccacctttaatgtgcccacaaaatggaactatcagtcgtgggaagtacacgtccgcttgaactggagagctcaaagagttgtttaaatggccatcatctagtttcaccacggcatcgctgtcggccactgatcccgccatcttcttgcccggcgcggcggggtacgtgggacgcggcgcgcgggcggggatcccgg

SEQ ID NO: 735484 - DNA, 9224 bp, Homo sapiens
  misc_feature (2077)..(2077): n is a, c, g, or t
gcggccgcgggcccggcagaaggccgagtaggagggaccacgcgccgggggccgcgatctctggcagggggcggtgtgccagcggagcaccatgcacataggcgcccagcgccccgactacccctcccgaggaaaagaggccggggccgcgctggggcggcggagagcatgagggaggccggggggcggctcggcttggagcgctgctagggagcggtgcgcgccgcacacccgcctgggcgcggcggagggcggggagccgggcaggtcgcgcctgcgggcggcagccgaccgccgggagctgttctgatttccgacgcgcacgctaggggcccggagcagcccccggccccggcgcgccgccgacatgggcaacgcagggagcatggattcgcagcagaccgatttcagggcgcacaacgtgcctttgaagctgccgatgccagagccaggtgaactggaggagcgatttgccatcgtgctgaacgctatgaacctacctcctgacaaagccaggttactgcggcagtatgataatgagaaaaaatgggaactgatttgtgatcaggaacgattccaggtgaagaatcctccccatacatacattcaaaagctcaaaggctatctggatccagctgtaaccaggaagaaattcagacggcgtgttcaagaatctacacaagtgctaagagaactggaaatttctttgagaactaaccacattggatgggtcagagaatttctgaatgaagaaaacaaaggtcttgatgttctagtggaatatctctcatttgcacagtacgcggtaacttttgactttgaaagtgtggagagtactgtggagagctcggtggacaaatcaaagccctggagtaggtccatcgaggacctgcacagagggagcaacctgccctcacctgtgggcaacagtgtctcccgctctggaagacattctgcactgcgatataatacattgccaagcagaagaactctgaaaaattcaagattagtgagtaagaaagatgatgtgcatgtctgtatcatgtgtttacgtgccatcatgaattatcagtatggtttcaacatggtcatgtctcatccacacgctgtcaatgagattgcactaagcctgaacaacaagaatcccagaacaaaagcccttgtcttagaactgttggcagccgtttgtcttgtcagaggcgggcatgaaatcattttatcagcatttgataactttaaagaggtttgtggagaaaaacagcgctttgagaagttgatggaacatttcaggaatgaagacaataacatagattttatggtggcttctatgcagtttattaatattgtagtccattcagtagaagatatgaatttcagagttcacctgcagtatgaatttaccaaattaggcctggacgaatacttggacaagctgaaacacactgagagtgacaagcttcaagtccagatccaggcttacctggacaatgtttttgatgtaggagctctactggaagatgctgaaactaagaatgctgccttggagagggtggaagaactggaagaaaacatttctcatttatctgaaaaactgcaagacacagagaatgaagccatgtccaagattgtggaactggaaaagcaactcatgcagaggaacaaggagctggatgtcgttcgggaaatctacaaagatgcaaatactcaagttcacacattaagaaaaatggtcaaagaaaaagaagaagcaattcaaagacagtctaccctggaaaaaaagattcatgagctagagaaacaagggaccattaaaattcagaagaaaggggatggggatatcgccatactgccagttgtggcttctggcacattgtccatggggtcagaagtggtagcaggtaactctgtgggacccacaatgggggccgcttcctcaggacccttgccccctcctccaccaccactgcctccctcatcagacacacctgaaacagtgcaaaatggtccagtaacaccacctatgccaccgccgccgccgccccctcctccacctcctcctcccccaccgccccctccncctcctcctctcccaggccctgcagctgagactgtaccagctcctcccttagcacctccccttccctctgcacctccgctgcctggaacatcttcacccacagtggttttcaactcaggattagcagctgtgaaaattaagaagccaatcaagacgaagttcagaatgccagtgtttaactgggttgctctgaagcccaatcagatcaatggcacagtcttcaatgaaattgatgatgagcgaattctggaggatttaaatgtggatgaatttgaggaaatattcaagacaaaagcccaaggacctgccattgatctttcttcaagcaaacagaagataccacagaagggatcaaacaaagtgacattactagaagcaaacagggccaaaaatcttgccataactttaaggaaagctggaaagactgctgatgaaatatgtaaagctattcatgtatttgacttgaagacactgcctgtggactttgtggaatgcttgatgcggttcctaccaactgagaatgaagtgaaagtgcttcggctctacgagcgggaaaggaagcctctggaaaacttgtcagatgaagatcggttcatgatgcagtttagtaaaatcgagaggctcatgcagaagatgaccatcatggccttcattgggaactttgctgaaagcattcagatgctgactcctcaactacatgcgattatagcagcatctgtctctataaagtcgtcccaaaaactcaagaaaattctggagatcatcttagcccttggaaactacatgaatagcagtaaaagaggagcagtttatggatttaaacttcagagtttagatctgctcttagatacaaagtcaacagacagaaagcaaacactgttgcactatatatccaatgtggtgaaagaaaaatatcaccaagtgtccctgttttataatgagcttcattatgtggaaaaagctgctgcagtctcccttgagaatgttttgctggatgtcaaggagctccagaggggaatggacttgaccaagagagagtacaccatgcatgaccataacacgctgctgaaggagttcatcctcaacaatgaggggaagctgaagaagctgcaggatgatgccaagatcgcacaggatgcctttgatgatgttgtgaagtattttggagaaaaccccaagacaacaccaccctctgtcttctttcctgtctttgtccggtttgtgaaagcatataagcaagcagaagaggaaaatgagctgaggaaaaagcaggaacaagctctcatggaaaaactcctagagcaagaagctctgatggagcagcaggatccaaagtctccttctcataaatcaaagaggcagcagcaagagttaattgcagaattaagaagacgacaagttaaagataacagacatgtatatgagggaaaagatggtgccattgaagatattatcacagccttaaagaagaataatatcactaaatttccaaatgttcactcgagggtaaggatttcttctagcacaccggtggtggaggatacacagagctgatcttagaaaccaaccatacagacgagccgatgcggtgaggagaagcgtcaggcggcgctttgatgatcagaacttgcgttctgttaatggtgccgaaataacaatgtgaacctgagactggcctgcatgaatacagggtgtgcgtgaatgaaactgcccacatgaactttatgtgctacgatttaactgcagccttgaacacacacaaaaatattcttaagggctcagatttagcaaacacggaagaattttaaaatgagctctcctttcaacccttgttaacaagtgcctaaaaatggaagtacctgttcagattaatcaaagcaataggatttgatttgattaggtatctttttacaccagtatgttatttttaaccaaaatgtaaagttcttattaaactcattacctgccattgtgattgtcccatcatggcccacctggtttcctgatgttgtaaataacatcaatgcatctgctgtgggtcctttgctgagatgtcttcgaaggaattttgttttagccatatccatcaactttgtattttacttgcaatttggaagaaggaaagtcacatgatgaaactccttttgtctataaccaggccctggcaaagtgcaaacaggatgcaactgcagtggcacaaaggtcactcaatcctttgtttccagtttcacattctactacttctgtgctagagaacgatgctctgtgagaggcattcactagtatgaatgtggggatatagtgtataagacttatttgcagtactgtgttcttcagctagaggcagctttttaaataatgcaagtgtatttattagcattaaaattaacatctcagtaatcagcattagcatttctgaggaccattattaattctgagaacagaaattggtgccttgcaaggaagtttactagctctatcaacaagcattcaaggttacatctgctagcagagtagtgttaggaacctggccttactctcctctgacaatcgcaattttttcttattttttataaattcaagaagatacacttggcatcgtgtatcgaggctaagtttttcatgcatttcccagactacttatggagaattgcagtttaagttgctgaaaagtattaacatggtattaagcttaaataatacgtaatgggactagatggcccactaagccactgttattttccttcctctctggcagggcacttgatccattccaaagtcaaaaactggactgaagctaaatttgtacttttcataatatacattctgcttctggcttatcttcttggtacatcaatatattaattgtaaagtttattgtatagtatttaaccgctgaagttcctattttatgttgtgcttatgtgaaccccttggtgaaggtcccttttccttggatgtgtagttatatgatctttttaaatgtacagatattttgctataaaatcggtgcagttttttatggtttttacacttctctttaattcccacctaagcctctgggtaatattgtaaatattgttttaaaatgcatcagcctatgctatacaatctgaatgttattttaacttatagttttttttaatatatatatttaactataaggacagtttagggaacaagttacctaccacatttcactttagtgtacctatttacagaaagattaaactgccacctgcgggcacattcccataaatgtgtactttactttaaaaagaacatgccacgattttgtctttctgtggactcaacattcacttcgattaaaaatagcaatttgaccaagttggacttccactacaaagcagctgttttccaaagttcaatgctgacatatatgtatattaaaataattgcctatttattaatctacaaatagacaacgttggcatgttcttttctgtttgtctattaatgggcctgcttcttagcaatattagaatgttttataaaagcaattcatgttacttttctggtcttttcatggcatatgagcaaataataaactatttacactacaaaaaaaaaaaaaaaaactcgagttttttttttttttttttgtagaaaattcctttattatagtgcaaattactttcagcagtgacataatgtaacaacacatttagcaacattttacaccacacagtaaataagaaagtgtttctttgaaaatatgtcatcataggaacattatttctacattaatgccagaaaatgccaaggccgtttatctcaaggcaaacagggctccctccttccttttgggtattttctttttaacacaaatgaaatgacttgccattttaacaaatcctcaattctaaaagtgatctctcagggggctttgaactaaggtcggcaagatttgaaatggggcttcaaaattttaaataataattttaaaatacttctggaatagcccaaaaagtagaagtcacttctattaagttttaagtagatatacacactcactccaattttactgtagaaatggacagattgtctaaagcctgctttctattcccccagagcctgattgttatttatactccttggttttggttattgcagaactagggctctggtcagaaataacaccttacatacccgaatactttcctgtggaagctttacattgcattttccatcctgaaattctcaccttagaccttacaggcccaggagagggtgtgaatattgttttcagtttacagctaaagccccttactaatttgggctatacctgaatcaaatcatcacatcatttagattaatcccaataggcttatccaagaggttcccactaacctcacagagaaacaaacagttaacattgtattttcacactaagctgcctaagggcttggctgctaatgagttagctgataggtagacagaataagcgtgtcaattccaatcagtacacgccctgctcctctagtttctgctgaattatgcagtgggtgggaatggttggccactcaaaacagtcttcctatggggctcttccaccataagttggatcaaaactccacaaatgtatttcaaggtgccctttaagtctctcaaatttagggacttttaagtgacaagccatgagaagttaatcacaggcttgaaaatacctggaaccacagaacagcccccacggaacaggctgaatatggttaaataagttggctggtacataaagcttttcaatgtacagccagtcttgttggatacagtgtcttcttatataatacaatggaactgtgctaaacagtttcaaagttgagaagaatccaaatgtatcacctataaaaaattcataattttagtttattttagactttggtactgaaacactgtctacattcttgacacttgaaaatgacatggtcacttcagtgcctctgcatgttgtgtaaaaaaaaaaaaaaaactcaaaaaaggaaagcaggacaaggatgtgtcattacaagacacagtatgctgtacaaacaaaacctaaattatatataaatacacccccaccccagaaccctgtcttccctcactacctgatcaaagcaatgccaagggtccctccctccagggccaatgtagcttttaaagtccagaacccaggactttaagcatcccttgccttgcggtgacgtttacagtactgcaacctcctgttggagtcacctgtttgatcagttccgtaagtgcagggtaacacctacagcttaattggaagcattcactctactggctggattcaaagacctggagtcctgggagttaacctttcagataaactaactggatcatttcctaatctggatcctatctaatcctactatctcctcagagccaacacagtaggaagcatcttctactctgaagcttccaaaggcattacttagggatattggtgagggtcacataagaaaagttatacaatgagctaacagcttaagttgatataaattacttccaagtaagttattcagggccgtttgcttctgctttacactgcattccacagtcattttcatattattcttttaaaagtttatactatagtcactttaaaaattgtctaagcaatcacctctttgtgtttttgattaataacaacttaatgagctattatataaatcaagagagaaataattagtcttaaggaagccaataatgtgctaattcccagtaaggagaaaaagcaatgtaaatagaattttacataaccaacaataacttggaaagcagttttatcaaaatggttttgcaaaggtttcccaaaagcacttacagcagtttatatcaagagatcctaagtttaggggtatggagaatctcaattctttaaagcagaaattcacctgtttcataattgtaatatgtaattttctccccttggacctaagatatttatacattcaaaagtttacaacttgctgttcttgagacattgttcattctttaatacatacattgagtataaataaataactacaagaaagcttcaacaatctgaattaacattatgctgtgcaaaacaaaaacaaaaacaaaaacaaaaaacaaaaaaaaagtcaaaccttgaacaacctacattctatgtaaataccctgactaaaatattggttgtgctacacaattccactttagtgcagaaatgcattgatttcactgtaccgttgttgttggctttttaagtgtctttagcacttctgtttctaagcattgccttgctttgaaaagatgaataatttgctaccaaatcacaaatcatcacaaatccattttagtttggtctgaataaaatccagcataaatgtattattttattctgggtataatggctcggtgtctttgtcccaacagctttcttcttaagggcaaaccacccttaagtgaaacttgccatttgtttttgttttctttttaagtctccagatcttgctaggacacttcttccagaccaacagtcagatagttgtggcacgtgatcctatttgaaatagaggtggtttaaatcagccaagcttggtgatctggaggtctccatttatctttatggtgtcaattgcagataacgtttgaatgcgatggtaaaaatcaaaaagttggtgtccatccacaaacactcggaaacgtgggtgctcacaaagaatttccaccctgaatggctggtctggaatgaatggaaagtaagggattgctgactgttcttcacccctctccccagatatacaagaatttctgagtagctgccgatctgtgaacacagctttgagttcgattgccacatcggcaggagggtcttctgagtccccacaggtcaagctgattgcaaagctctctgggttgaggtctacgatgcccatcactaacaccttcttgcctggtctcatgccacctttaatgtgcccacaaaatggaactatcagtcgtgggaagtacacgtccgcttgaactggagagctcaaagagttgtttaaatggccatcatctagtttcaccacggcatcgctgtcggccactgatcccgccatcttcttgcccggcgcggcggggtacgtgggacgcggcgcgcgggcggggatcccgg

SEQ ID NO: 735485 - DNA, 9169 bp, Homo sapiens
  misc_feature (2077)..(2077): n is a, c, g, or t
gcggccgcgggcccggcagaaggccgagtaggagggaccacgcgccgggggccgcgatctctggcagggggcggtgtgccagcggagcaccatgcacataggcgcccagcgccccgactacccctcccgaggaaaagaggccggggccgcgctggggcggcggagagcatgagggaggccggggggcggctcggcttggagcgctgctagggagcggtgcgcgccgcacacccgcctgggcgcggcggagggcggggagccgggcaggtcgcgcctgcgggcggcagccgaccgccgggagctgttctgatttccgacgcgcacgctaggggcccggagcagcccccggccccggcgcgccgccgacatgggcaacgcagggagcatggattcgcagcagaccgatttcagggcgcacaacgtgcctttgaagctgccgatgccagagccaggtgaactggaggagcgatttgccatcgtgctgaacgctatgaacctacctcctgacaaagccaggttactgcggcagtatgataatgagaaaaaatgggaactgatttgtgatcaggaacgattccaggtgaagaatcctccccatacatacattcaaaagctcaaaggctatctggatccagctgtaaccaggaagaaattcagacggcgtgttcaagaatctacacaagtgctaagagaactggaaatttctttgagaactaaccacattggatgggtcagagaatttctgaatgaagaaaacaaaggtcttgatgttctagtggaatatctctcatttgcacagtacgcggtaacttttgactttgaaagtgtggagagtactgtggagagctcggtggacaaatcaaagccctggagtaggtccatcgaggacctgcacagagggagcaacctgccctcacctgtgggcaacagtgtctcccgctctggaagacattctgcactgcgatataatacattgccaagcagaagaactctgaaaaattcaagattagtgagtaagaaagatgatgtgcatgtctgtatcatgtgtttacgtgccatcatgaattatcagtatggtttcaacatggtcatgtctcatccacacgctgtcaatgagattgcactaagcctgaacaacaagaatcccagaacaaaagcccttgtcttagaactgttggcagccgtttgtcttgtcagaggcgggcatgaaatcattttatcagcatttgataactttaaagaggtttgtggagaaaaacagcgctttgagaagttgatggaacatttcaggaatgaagacaataacatagattttatggtggcttctatgcagtttattaatattgtagtccattcagtagaagatatgaatttcagagttcacctgcagtatgaatttaccaaattaggcctggacgaatacttggacaagctgaaacacactgagagtgacaagcttcaagtccagatccaggcttacctggacaatgtttttgatgtaggagctctactggaagatgctgaaactaagaatgctgccttggagagggtggaagaactggaagaaaacatttctcatttatctgaaaaactgcaagacacagagaatgaagccatgtccaagattgtggaactggaaaagcaactcatgcagaggaacaaggagctggatgtcgttcgggaaatctacaaagatgcaaatactcaagttcacacattaagaaaaatggtcaaagaaaaagaagaagcaattcaaagacagtctaccctggaaaaaaagattcatgagctagagaaacaagggaccattaaaattcagaagaaaggggatggggatatcgccatactgccagttgtggcttctggcacattgtccatggggtcagaagtggtagcaggtaactctgtgggacccacaatgggggccgcttcctcaggacccttgccccctcctccaccaccactgcctccctcatcagacacacctgaaacagtgcaaaatggtccagtaacaccacctatgccaccgccgccgccgccccctcctccacctcctcctcccccaccgccccctccncctcctcctctcccaggccctgcagctgagactgtaccagctcctcccttagcacctccccttccctctgcacctccgctgcctggaacatcttcacccacagtggttttcaactcaggattagcagctgtgaaaattaagaagccaatcaagacgaagttcagaatgccagtgtttaactgggttgctctgaagcccaatcagatcaatggcacagtcttcaatgaaattgatgatgagcgaattctggaggatttaaatgtggatgaatttgaggaaatattcaagacaaaagcccaaggacctgccattgatctttcttcaagcaaacagaagataccacagaagggatcaaacaaagtgacattactagaagcaaacagggccaaaaatcttgccataactttaaggaaagctggaaagactgctgatgaaatatgtaaagctattcatgtatttgacttgaagacactgcctgtggactttgtggaatgcttgatgcggttcctaccaactgagaatgaagtgaaagtgcttcggctctacgagcgggaaaggaagcctctggaaaacttgtcagatgaagatcggttcatgatgcagtttagtaaaatcgagaggctcatgcagaagatgaccatcatggccttcattgggaactttgctgaaagcattcagatgctgactcctcaactacatgcgattatagcagcatctgtctctataaagtcgtcccaaaaactcaagaaaattctggagatcatcttagcccttggaaactacatgaatagcagtaaaagaggagcagtttatggatttaaacttcagagtttagatctgctcttagatacaaagtcaacagacagaaagcaaacactgttgcactatatatccaatgtggtgaaagaaaaatatcaccaagtgtccctgttttataatgagcttcattatgtggaaaaagctgctgcagtctcccttgagaatgttttgctggatgtcaaggagctccagaggggaatggacttgaccaagagagagtacaccatgcatgaccataacacgctgctgaaggagttcatcctcaacaatgaggggaagctgaagaagctgcaggatgatgccaagatcgcacaggatgcctttgatgatgttgtgaagtattttggagaaaaccccaagacaacaccaccctctgtcttctttcctgtctttgtccggtttgtgaaagcatataagcaagcagaagaggaaaatgagctgaggaaaaagcaggaacaagctctcatggaaaaactcctagagcaagaagctctgatggagcagcaggatccaaagtctccttctcataaatcaaagaggcagcagcaagagttaattgcagaattaagaagacgacaagttaaagataacagacatgtatatgagggaaaagatggtgccattgaagatattatcacagccttaaagaagaataatatcactaaatttccaaatgttcactcgagggtaaggatttcttctagcacaccggtggtggaggatacacagagctgatcttagaaaccaaccatacagacgagccgatgcggtgaggagaagcgtcaggcggcgctttgatgatcagaacttgcgttctgttaatggtgccgaaataacaatgtgaacctgagactggcctgcatgaatacagggtgtgcgtgaatgaaactgcccacatgaactttatgtgctacgatttaactgcagccttgaacacacacaaaaatattcttaagggctcagatttagcaaacacggaagaattttaaaatgagctctcctttcaacccttgttaacaagtgcctaaaaatggaagtacctgttcagattaatcaaagcaataggatttgatttgattaggtatctttttacaccagtatgttatttttaaccaaaatgtaaagttcttattaaactcattacctgccattgtgattgtcccatcatggcccacctggtttcctgatgttgtaaataacatcaatgcatctgctgtgggtcctttgctgagatgtcttcgaaggaattttgttttagccatatccatcaactttgtattttacttgcaatttggaagaaggaaagtcacatgatgaaactccttttgtctataaccaggccctggcaaagtgcaaacaggatgcaactgcagtggcacaaaggtcactcaatcctttgtttccagtttcacattctactacttctgtgctagagaacgatgctctgtgagaggcattcactagtatgaatgtggggatatagtgtataagacttatttgcagtactgtgttcttcagctagaggcagctttttaaataatgcaagtgtatttattagcattaaaattaacatctcagtaatcagcattagcatttctgaggaccattattaattctgagaacagaaattggtgccttgcaaggaagtttactagctctatcaacaagcattcaaggttacatctgctagcagagtagtgttaggaacctggccttactctcctctgacaatcgcaattttttcttattttttataaattcaagaagatacacttggcatcgtgtatcgaggctaagtttttcatgcatttcccagactacttatggagaattgcagtttaagttgctgaaaagtattaacatggtattaagcttaaataatacgtaatgggactagatggcccactaagccactgttattttccttcctctctggcagggcacttgatccattccaaagtcaaaaactggactgaagctaaatttgtacttttcataatatacattctgcttctggcttatcttcttggtacatcaatatattaattgtaaagtttattgtatagtatttaaccgctgaagttcctattttatgttgtgcttatgtgaaccccttggtgaaggtcccttttccttggatgtgtagttatatgatctttttaaatgtacagatattttgctataaaatcggtgcagttttttatggtttttacacttctctttaattcccacctaagcctctgggtaatattgtaaatattttttttttaatatatatatttaactataaggacagtttagggaacaagttacctaccacatttcactttagtgtacctatttacagaaagattaaactgccacctgcgggcacattcccataaatgtgtactttactttaaaaagaacatgccacgattttgtctttctgtggactcaacattcacttcgattaaaaatagcaatttgaccaagttggacttccactacaaagcagctgttttccaaagttcaatgctgacatatatgtatattaaaataattgcctatttattaatctacaaatagacaacgttggcatgttcttttctgtttgtctattaatgggcctgcttcttagcaatattagaatgttttataaaagcaattcatgttacttttctggtcttttcatggcatatgagcaaataataaactatttacactacaaaaaaaaaaaaaaaaactcgagttttttttttttttttttgtagaaaattcctttattatagtgcaaattactttcagcagtgacataatgtaacaacacatttagcaacattttacaccacacagtaaataagaaagtgtttctttgaaaatatgtcatcataggaacattatttctacattaatgccagaaaatgccaaggccgtttatctcaaggcaaacagggctccctccttccttttgggtattttctttttaacacaaatgaaatgacttgccattttaacaaatcctcaattctaaaagtgatctctcagggggctttgaactaaggtcggcaagatttgaaatggggcttcaaaattttaaataataattttaaaatacttctggaatagcccaaaaagtagaagtcacttctattaagttttaagtagatatacacactcactccaattttactgtagaaatggacagattgtctaaagcctgctttctattcccccagagcctgattgttatttatactccttggttttggttattgcagaactagggctctggtcagaaataacaccttacatacccgaatactttcctgtggaagctttacattgcattttccatcctgaaattctcaccttagaccttacaggcccaggagagggtgtgaatattgttttcagtttacagctaaagccccttactaatttgggctatacctgaatcaaatcatcacatcatttagattaatcccaataggcttatccaagaggttcccactaacctcacagagaaacaaacagttaacattgtattttcacactaagctgcctaagggcttggctgctaatgagttagctgataggtagacagaataagcgtgtcaattccaatcagtacacgccctgctcctctagtttctgctgaattatgcagtgggtgggaatggttggccactcaaaacagtcttcctatggggctcttccaccataagttggatcaaaactccacaaatgtatttcaaggtgccctttaagtctctcaaatttagggacttttaagtgacaagccatgagaagttaatcacaggcttgaaaatacctggaaccacagaacagcccccacggaacaggctgaatatggttaaataagttggctggtacataaagcttttcaatgtacagccagtcttgttggatacagtgtcttcttatataatacaatggaactgtgctaaacagtttcaaagttgagaagaatccaaatgtatcacctataaaaaattcataattttagtttattttagactttggtactgaaacactgtctacattcttgacacttgaaaatgacatggtcacttcagtgcctctgcatgttgtgtaaaaaaaaaaaaaaaactcaaaaaaggaaagcaggacaaggatgtgtcattacaagacacagtatgctgtacaaacaaaacctaaattatatataaatacacccccaccccagaaccctgtcttccctcactacctgatcaaagcaatgccaagggtccctccctccagggccaatgtagcttttaaagtccagaacccaggactttaagcatcccttgccttgcggtgacgtttacagtactgcaacctcctgttggagtcacctgtttgatcagttccgtaagtgcagggtaacacctacagcttaattggaagcattcactctactggctggattcaaagacctggagtcctgggagttaacctttcagataaactaactggatcatttcctaatctggatcctatctaatcctactatctcctcagagccaacacagtaggaagcatcttctactctgaagcttccaaaggcattacttagggatattggtgagggtcacataagaaaagttatacaatgagctaacagcttaagttgatataaattacttccaagtaagttattcagggccgtttgcttctgctttacactgcattccacagtcattttcatattattcttttaaaagtttatactatagtcactttaaaaattgtctaagcaatcacctctttgtgtttttgattaataacaacttaatgagctattatataaatcaagagagaaataattagtcttaaggaagccaataatgtgctaattcccagtaaggagaaaaagcaatgtaaatagaattttacataaccaacaataacttggaaagcagttttatcaaaatggttttgcaaaggtttcccaaaagcacttacagcagtttatatcaagagatcctaagtttaggggtatggagaatctcaattctttaaagcagaaattcacctgtttcataattgtaatatgtaattttctccccttggacctaagatatttatacattcaaaagtttacaacttgctgttcttgagacattgttcattctttaatacatacattgagtataaataaataactacaagaaagcttcaacaatctgaattaacattatgctgtgcaaaacaaaaacaaaaacaaaaacaaaaaacaaaaaaaaagtcaaaccttgaacaacctacattctatgtaaataccctgactaaaatattggttgtgctacacaattccactttagtgcagaaatgcattgatttcactgtaccgttgttgttggctttttaagtgtctttagcacttctgtttctaagcattgccttgctttgaaaagatgaataatttgctaccaaatcacaaatcatcacaaatccattttagtttggtctgaataaaatccagcataaatgtattattttattctgggtataatggctcggtgtctttgtcccaacagctttcttcttaagggcaaaccacccttaagtgaaacttgccatttgtttttgttttctttttaagtctccagatcttgctaggacacttcttccagaccaacagtcagatagttgtggcacgtgatcctatttgaaatagaggtggtttaaatcagccaagcttggtgatctggaggtctccatttatctttatggtgtcaattgcagataacgtttgaatgcgatggtaaaaatcaaaaagttggtgtccatccacaaacactcggaaacgtgggtgctcacaaagaatttccaccctgaatggctggtctggaatgaatggaaagtaagggattgctgactgttcttcacccctctccccagatatacaagaatttctgagtagctgccgatctgtgaacacagctttgagttcgattgccacatcggcaggagggtcttctgagtccccacaggtcaagctgattgcaaagctctctgggttgaggtctacgatgcccatcactaacaccttcttgcctggtctcatgccacctttaatgtgcccacaaaatggaactatcagtcgtgggaagtacacgtccgcttgaactggagagctcaaagagttgtttaaatggccatcatctagtttcaccacggcatcgctgtcggccactgatcccgccatcttcttgcccggcgcggcggggtacgtgggacgcggcgcgcgggcggggatcccgg

SEQ ID NO: 735486 - DNA, 4913 bp, Homo sapiens
  misc_feature (2077)..(2077): n is a, c, g, or t
  misc_feature (4887)..(4887): n is a, c, g, or t
  misc_feature (4913)..(4913): n is a, c, g, or t
gcggccgcgggcccggcagaaggccgagtaggagggaccacgcgccgggggccgcgatctctggcagggggcggtgtgccagcggagcaccatgcacataggcgcccagcgccccgactacccctcccgaggaaaagaggccggggccgcgctggggcggcggagagcatgagggaggccggggggcggctcggcttggagcgctgctagggagcggtgcgcgccgcacacccgcctgggcgcggcggagggcggggagccgggcaggtcgcgcctgcgggcggcagccgaccgccgggagctgttctgatttccgacgcgcacgctaggggcccggagcagcccccggccccggcgcgccgccgacatgggcaacgcagggagcatggattcgcagcagaccgatttcagggcgcacaacgtgcctttgaagctgccgatgccagagccaggtgaactggaggagcgatttgccatcgtgctgaacgctatgaacctacctcctgacaaagccaggttactgcggcagtatgataatgagaaaaaatgggaactgatttgtgatcaggaacgattccaggtgaagaatcctccccatacatacattcaaaagctcaaaggctatctggatccagctgtaaccaggaagaaattcagacggcgtgttcaagaatctacacaagtgctaagagaactggaaatttctttgagaactaaccacattggatgggtcagagaatttctgaatgaagaaaacaaaggtcttgatgttctagtggaatatctctcatttgcacagtacgcggtaacttttgactttgaaagtgtggagagtactgtggagagctcggtggacaaatcaaagccctggagtaggtccatcgaggacctgcacagagggagcaacctgccctcacctgtgggcaacagtgtctcccgctctggaagacattctgcactgcgatataatacattgccaagcagaagaactctgaaaaattcaagattagtgagtaagaaagatgatgtgcatgtctgtatcatgtgtttacgtgccatcatgaattatcagtatggtttcaacatggtcatgtctcatccacacgctgtcaatgagattgcactaagcctgaacaacaagaatcccagaacaaaagcccttgtcttagaactgttggcagccgtttgtcttgtcagaggcgggcatgaaatcattttatcagcatttgataactttaaagaggtttgtggagaaaaacagcgctttgagaagttgatggaacatttcaggaatgaagacaataacatagattttatggtggcttctatgcagtttattaatattgtagtccattcagtagaagatatgaatttcagagttcacctgcagtatgaatttaccaaattaggcctggacgaatacttggacaagctgaaacacactgagagtgacaagcttcaagtccagatccaggcttacctggacaatgtttttgatgtaggagctctactggaagatgctgaaactaagaatgctgccttggagagggtggaagaactggaagaaaacatttctcatttatctgaaaaactgcaagacacagagaatgaagccatgtccaagattgtggaactggaaaagcaactcatgcagaggaacaaggagctggatgtcgttcgggaaatctacaaagatgcaaatactcaagttcacacattaagaaaaatggtcaaagaaaaagaagaagcaattcaaagacagtctaccctggaaaaaaagattcatgagctagagaaacaagggaccattaaaattcagaagaaaggggatggggatatcgccatactgccagttgtggcttctggcacattgtccatggggtcagaagtggtagcaggtaactctgtgggacccacaatgggggccgcttcctcaggacccttgccccctcctccaccaccactgcctccctcatcagacacacctgaaacagtgcaaaatggtccagtaacaccacctatgccaccgccgccgccgccccctcctccacctcctcctcccccaccgccccctccncctcctcctctcccaggccctgcagctgagactgtaccagctcctcccttagcacctccccttccctctgcacctccgctgcctggaacatcttcacccacagtggttttcaactcaggattagcagctgtgaaaattaagaagccaatcaagacgaagttcagaatgccagtgtttaactgggttgctctgaagcccaatcagatcaatggcacagtcttcaatgaaattgatgatgagcgaattctggaggatttaaatgtggatgaatttgaggaaatattcaagacaaaagcccaaggacctgccattgatctttcttcaagcaaacagaagataccacagaagggatcaaacaaagtgacattactagaagcaaacagggccaaaaatcttgccataactttaaggaaagctggaaagactgctgatgaaatatgtaaagctattcatgtatttgacttgaagacactgcctgtggactttgtggaatgcttgatgcggttcctaccaactgagaatgaagtgaaagtgcttcggctctacgagcgggaaaggaagcctctggaaaacttgtcagatgaagatcggttcatgatgcagtttagtaaaatcgagaggctcatgcagaagatgaccatcatggccttcattgggaactttgctgaaagcattcagatgctgactcctcaactacatgcgattatagcagcatctgtctctataaagtcgtcccaaaaactcaagaaaattctggagatcatcttagcccttggaaactacatgaatagcagtaaaagaggagcagtttatggatttaaacttcagagtttagatctgctcttagatacaaagtcaacagacagaaagcaaacactgttgcactatatatccaatgtggtgaaagaaaaatatcaccaagtgtccctgttttataatgagcttcattatgtggaaaaagctgctgcagtctcccttgagaatgttttgctggatgtcaaggagctccagaggggaatggacttgaccaagagagagtacaccatgcatgaccataacacgctgctgaaggagttcatcctcaacaatgaggggaagctgaagaagctgcaggatgatgccaagatcgcacaggatgcctttgatgatgttgtgaagtattttggagaaaaccccaagacaacaccaccctctgtcttctttcctgtctttgtccggtttgtgaaagcatataagcaagcagaagaggaaaatgagctgaggaaaaagcaggaacaagctctcatggaaaaactcctagagcaagaagctctgatggagcagcaggatccaaagtctccttctcataaatcaaagaggcagcagcaagagttaattgcagaattaagaagacgacaagttaaagataacagacatgtatatgagggaaaagatggtgccattgaagatattatcacagccttaaagaagaataatatcactaaatttccaaatgttcactcgagggtaaggatttcttctagcacaccggtggtggaggatacacagagctgatcttagaaaccaaccatacagacgagccgatgcggtgaggagaagcgtcaggcggcgctttgatgatcagaacttgcgttctgttaatggtgccgaaataacaatgtgaacctgagactggcctgcatgaatacagggtgtgcgtgaatgaaactgcccacatgaactttatgtgctacgatttaactgcagccttgaacacacacaaaaatattcttaagggctcagatttagcaaacacggaagaattttaaaatgagctctcctttcaacccttgttaacaagtgcctaaaaatggaagtacctgttcagattaatcaaagcaataggatttgatttgattaggtatctttttacaccagtatgttatttttaaccaaaatgtaaagttcttattaaactcattacctgccattgtgattgtcccatcatggcccacctggtttcctgatgttgtaaataacatcaatgcatctgctgtgggtcctttgctgagatgtcttcgaaggaattttgttttagccatatccatcaactttgtattttacttgcaatttggaagaaggaaagtcacatgatgaaactccttttgtctataaccaggccctggcaaagtgcaaacaggatgcaactgcagtggcacaaaggtcactcaatcctttgtttccagtttcacattctactacttctgtgctagagaacgatgctctgtgagaggcattcactagtatgaatgtggggatatagtgtataagacttatttgcagtactgtgttcttcagctagaggcagctttttaaataatgcaagtgtatttattagcattaaaattaacatctcagtaatcagcattagcatttctgaggaccattattaattctgagaacagaaattggtgccttgcaaggaagtttactagctctatcaacaagcattcaaggttacatctgctagcagagtagtgttaggaacctggccttactctcctctgacaatcgcaattttttcttattttttataaattcaagaagatacacttggcatcgtgtatcgaggctaagtttttcatgcatttcccagactacttatggagaattgcagtttaagttgctgaaaagtattaacatggtattaagcttaaataatacgtaatgggactagatggcccactaagccactgttattttccttcctctctggcagggcacttgatccattccaaagtcattatctttcttgtacatcattatataantgtaaagctcattgatagcatttacn

SEQ ID NO: 735487 - DNA, 9177 bp, Homo sapiens
  misc_feature (2077)..(2077): n is a, c, g, or t
gcggccgcgggcccggcagaaggccgagtaggagggaccacgcgccgggggccgcgatctctggcagggggcggtgtgccagcggagcaccatgcacataggcgcccagcgccccgactacccctcccgaggaaaagaggccggggccgcgctggggcggcggagagcatgagggaggccggggggcggctcggcttggagcgctgctagggagcggtgcgcgccgcacacccgcctgggcgcggcggagggcggggagccgggcaggtcgcgcctgcgggcggcagccgaccgccgggagctgttctgatttccgacgcgcacgctaggggcccggagcagcccccggccccggcgcgccgccgacatgggcaacgcagggagcatggattcgcagcagaccgatttcagggcgcacaacgtgcctttgaagctgccgatgccagagccaggtgaactggaggagcgatttgccatcgtgctgaacgctatgaacctacctcctgacaaagccaggttactgcggcagtatgataatgagaaaaaatgggaactgatttgtgatcaggaacgattccaggtgaagaatcctccccatacatacattcaaaagctcaaaggctatctggatccagctgtaaccaggaagaaattcagacggcgtgttcaagaatctacacaagtgctaagagaactggaaatttctttgagaactaaccacattggatgggtcagagaatttctgaatgaagaaaacaaaggtcttgatgttctagtggaatatctctcatttgcacagtacgcggtaacttttgactttgaaagtgtggagagtactgtggagagctcggtggacaaatcaaagccctggagtaggtccatcgaggacctgcacagagggagcaacctgccctcacctgtgggcaacagtgtctcccgctctggaagacattctgcactgcgatataatacattgccaagcagaagaactctgaaaaattcaagattagtgagtaagaaagatgatgtgcatgtctgtatcatgtgtttacgtgccatcatgaattatcagtatggtttcaacatggtcatgtctcatccacacgctgtcaatgagattgcactaagcctgaacaacaagaatcccagaacaaaagcccttgtcttagaactgttggcagccgtttgtcttgtcagaggcgggcatgaaatcattttatcagcatttgataactttaaagaggtttgtggagaaaaacagcgctttgagaagttgatggaacatttcaggaatgaagacaataacatagattttatggtggcttctatgcagtttattaatattgtagtccattcagtagaagatatgaatttcagagttcacctgcagtatgaatttaccaaattaggcctggacgaatacttggacaagctgaaacacactgagagtgacaagcttcaagtccagatccaggcttacctggacaatgtttttgatgtaggagctctactggaagatgctgaaactaagaatgctgccttggagagggtggaagaactggaagaaaacatttctcatttatctgaaaaactgcaagacacagagaatgaagccatgtccaagattgtggaactggaaaagcaactcatgcagaggaacaaggagctggatgtcgttcgggaaatctacaaagatgcaaatactcaagttcacacattaagaaaaatggtcaaagaaaaagaagaagcaattcaaagacagtctaccctggaaaaaaagattcatgagctagagaaacaagggaccattaaaattcagaagaaaggggatggggatatcgccatactgccagttgtggcttctggcacattgtccatggggtcagaagtggtagcaggtaactctgtgggacccacaatgggggccgcttcctcaggacccttgccccctcctccaccaccactgcctccctcatcagacacacctgaaacagtgcaaaatggtccagtaacaccacctatgccaccgccgccgccgccccctcctccacctcctcctcccccaccgccccctccncctcctcctctcccaggccctgcagctgagactgtaccagctcctcccttagcacctccccttccctctgcacctccgctgcctggaacatcttcacccacagtggttttcaactcaggattagcagctgtgaaaattaagaagccaatcaagacgaagttcagaatgccagtgtttaactgggttgctctgaagcccaatcagatcaatggcacagtcttcaatgaaattgatgatgagcgaattctggaggatttaaatgtggatgaatttgaggaaatattcaagacaaaagcccaaggacctgccattgatctttcttcaagcaaacagaagataccacagaagggatcaaacaaagtgacattactagaagcaaacagggccaaaaatcttgccataactttaaggaaagctggaaagactgctgatgaaatatgtaaagctattcatgtatttgacttgaagacactgcctgtggactttgtggaatgcttgatgcggttcctaccaactgagaatgaagtgaaagtgcttcggctctacgagcgggaaaggaagcctctggaaaacttgtcagatgaagatcggttcatgatgcagtttagtaaaatcgagaggctcatgcagaagatgaccatcatggccttcattgggaactttgctgaaagcattcagatgctgactcctcaactacatgcgattatagcagcatctgtctctataaagtcgtcccaaaaactcaagaaaattctggagatcatcttagcccttggaaactacatgaatagcagtaaaagaggagcagtttatggatttaaacttcagagtttagatctgctcttagatacaaagtcaacagacagaaagcaaacactgttgcactatatatccaatgtggtgaaagaaaaatatcaccaagtgtccctgttttataatgagcttcattatgtggaaaaagctgctgcagtctcccttgagaatgttttgctggatgtcaaggagctccagaggggaatggacttgaccaagagagagtacaccatgcatgaccataacacgctgctgaaggagttcatcctcaacaatgaggggaagctgaagaagctgcaggatgatgccaagatcgcacaggatgcctttgatgatgttgtgaagtattttggagaaaaccccaagacaacaccaccctctgtcttctttcctgtctttgtccggtttgtgaaagcatataagcaagcagaagaggaaaatgagctgaggaaaaagcaggaacaagctctcatggaaaaactcctagagcaagaagctctgatggagcagcaggatccaaagtctccttctcataaatcaaagaggcagcagcaagagttaattgcagaattaagaagacgacaagttaaagataacagacatgtatatgagggaaaagatggtgccattgaagatattatcacagccttaaagaagaataatatcactaaatttccaaatgttcactcgaggatcttagaaaccaaccatacagacgagccgatgcggtgaggagaagcgtcaggcggcgctttgatgatcagaacttgcgttctgttaatggtgccgaaataacaatgtgaacctgagactggcctgcatgaatacagggtgtgcgtgaatgaaactgcccacatgaactttatgtgctacgatttaactgcagccttgaacacacacaaaaatattcttaagggctcagatttagcaaacacggaagaattttaaaatgagctctcctttcaacccttgttaacaagtgcctaaaaatggaagtacctgttcagattaatcaaagcaataggatttgatttgattaggtatctttttacaccagtatgttatttttaaccaaaatgtaaagttcttattaaactcattacctgccattgtgattgtcccatcatggcccacctggtttcctgatgttgtaaataacatcaatgcatctgctgtgggtcctttgctgagatgtcttcgaaggaattttgttttagccatatccatcaactttgtattttacttgcaatttggaagaaggaaagtcacatgatgaaactccttttgtctataaccaggccctggcaaagtgcaaacaggatgcaactgcagtggcacaaaggtcactcaatcctttgtttccagtttcacattctactacttctgtgctagagaacgatgctctgtgagaggcattcactagtatgaatgtggggatatagtgtataagacttatttgcagtactgtgttcttcagctagaggcagctttttaaataatgcaagtgtatttattagcattaaaattaacatctcagtaatcagcattagcatttctgaggaccattattaattctgagaacagaaattggtgccttgcaaggaagtttactagctctatcaacaagcattcaaggttacatctgctagcagagtagtgttaggaacctggccttactctcctctgacaatcgcaattttttcttattttttataaattcaagaagatacacttggcatcgtgtatcgaggctaagtttttcatgcatttcccagactacttatggagaattgcagtttaagttgctgaaaagtattaacatggtattaagcttaaataatacgtaatgggactagatggcccactaagccactgttattttccttcctctctggcagggcacttgatccattccaaagtcaaaaactggactgaagctaaatttgtacttttcataatatacattctgcttctggcttatcttcttggtacatcaatatattaattgtaaagtttattgtatagtatttaaccgctgaagttcctattttatgttgtgcttatgtgaaccccttggtgaaggtcccttttccttggatgtgtagttatatgatctttttaaatgtacagatattttgctataaaatcggtgcagttttttatggtttttacacttctctttaattcccacctaagcctctgggtaatattgtaaatattgttttaaaatgcatcagcctatgctatacaatctgaatgttattttaacttatagttttttttaatatatatatttaactataaggacagtttagggaacaagttacctaccacatttcactttagtgtacctatttacagaaagattaaactgccacctgcgggcacattcccataaatgtgtactttactttaaaaagaacatgccacgattttgtctttctgtggactcaacattcacttcgattaaaaatagcaatttgaccaagttggacttccactacaaagcagctgttttccaaagttcaatgctgacatatatgtatattaaaataattgcctatttattaatctacaaatagacaacgttggcatgttcttttctgtttgtctattaatgggcctgcttcttagcaatattagaatgttttataaaagcaattcatgttacttttctggtcttttcatggcatatgagcaaataataaactatttacactacaaaaaaaaaaaaaaaaactcgagttttttttttttttttttgtagaaaattcctttattatagtgcaaattactttcagcagtgacataatgtaacaacacatttagcaacattttacaccacacagtaaataagaaagtgtttctttgaaaatatgtcatcataggaacattatttctacattaatgccagaaaatgccaaggccgtttatctcaaggcaaacagggctccctccttccttttgggtattttctttttaacacaaatgaaatgacttgccattttaacaaatcctcaattctaaaagtgatctctcagggggctttgaactaaggtcggcaagatttgaaatggggcttcaaaattttaaataataattttaaaatacttctggaatagcccaaaaagtagaagtcacttctattaagttttaagtagatatacacactcactccaattttactgtagaaatggacagattgtctaaagcctgctttctattcccccagagcctgattgttatttatactccttggttttggttattgcagaactagggctctggtcagaaataacaccttacatacccgaatactttcctgtggaagctttacattgcattttccatcctgaaattctcaccttagaccttacaggcccaggagagggtgtgaatattgttttcagtttacagctaaagccccttactaatttgggctatacctgaatcaaatcatcacatcatttagattaatcccaataggcttatccaagaggttcccactaacctcacagagaaacaaacagttaacattgtattttcacactaagctgcctaagggcttggctgctaatgagttagctgataggtagacagaataagcgtgtcaattccaatcagtacacgccctgctcctctagtttctgctgaattatgcagtgggtgggaatggttggccactcaaaacagtcttcctatggggctcttccaccataagttggatcaaaactccacaaatgtatttcaaggtgccctttaagtctctcaaatttagggacttttaagtgacaagccatgagaagttaatcacaggcttgaaaatacctggaaccacagaacagcccccacggaacaggctgaatatggttaaataagttggctggtacataaagcttttcaatgtacagccagtcttgttggatacagtgtcttcttatataatacaatggaactgtgctaaacagtttcaaagttgagaagaatccaaatgtatcacctataaaaaattcataattttagtttattttagactttggtactgaaacactgtctacattcttgacacttgaaaatgacatggtcacttcagtgcctctgcatgttgtgtaaaaaaaaaaaaaaaactcaaaaaaggaaagcaggacaaggatgtgtcattacaagacacagtatgctgtacaaacaaaacctaaattatatataaatacacccccaccccagaaccctgtcttccctcactacctgatcaaagcaatgccaagggtccctccctccagggccaatgtagcttttaaagtccagaacccaggactttaagcatcccttgccttgcggtgacgtttacagtactgcaacctcctgttggagtcacctgtttgatcagttccgtaagtgcagggtaacacctacagcttaattggaagcattcactctactggctggattcaaagacctggagtcctgggagttaacctttcagataaactaactggatcatttcctaatctggatcctatctaatcctactatctcctcagagccaacacagtaggaagcatcttctactctgaagcttccaaaggcattacttagggatattggtgagggtcacataagaaaagttatacaatgagctaacagcttaagttgatataaattacttccaagtaagttattcagggccgtttgcttctgctttacactgcattccacagtcattttcatattattcttttaaaagtttatactatagtcactttaaaaattgtctaagcaatcacctctttgtgtttttgattaataacaacttaatgagctattatataaatcaagagagaaataattagtcttaaggaagccaataatgtgctaattcccagtaaggagaaaaagcaatgtaaatagaattttacataaccaacaataacttggaaagcagttttatcaaaatggttttgcaaaggtttcccaaaagcacttacagcagtttatatcaagagatcctaagtttaggggtatggagaatctcaattctttaaagcagaaattcacctgtttcataattgtaatatgtaattttctccccttggacctaagatatttatacattcaaaagtttacaacttgctgttcttgagacattgttcattctttaatacatacattgagtataaataaataactacaagaaagcttcaacaatctgaattaacattatgctgtgcaaaacaaaaacaaaaacaaaaacaaaaaacaaaaaaaaagtcaaaccttgaacaacctacattctatgtaaataccctgactaaaatattggttgtgctacacaattccactttagtgcagaaatgcattgatttcactgtaccgttgttgttggctttttaagtgtctttagcacttctgtttctaagcattgccttgctttgaaaagatgaataatttgctaccaaatcacaaatcatcacaaatccattttagtttggtctgaataaaatccagcataaatgtattattttattctgggtataatggctcggtgtctttgtcccaacagctttcttcttaagggcaaaccacccttaagtgaaacttgccatttgtttttgttttctttttaagtctccagatcttgctaggacacttcttccagaccaacagtcagatagttgtggcacgtgatcctatttgaaatagaggtggtttaaatcagccaagcttggtgatctggaggtctccatttatctttatggtgtcaattgcagataacgtttgaatgcgatggtaaaaatcaaaaagttggtgtccatccacaaacactcggaaacgtgggtgctcacaaagaatttccaccctgaatggctggtctggaatgaatggaaagtaagggattgctgactgttcttcacccctctccccagatatacaagaatttctgagtagctgccgatctgtgaacacagctttgagttcgattgccacatcggcaggagggtcttctgagtccccacaggtcaagctgattgcaaagctctctgggttgaggtctacgatgcccatcactaacaccttcttgcctggtctcatgccacctttaatgtgcccacaaaatggaactatcagtcgtgggaagtacacgtccgcttgaactggagagctcaaagagttgtttaaatggccatcatctagtttcaccacggcatcgctgtcggccactgatcccgccatcttcttgcccggcgcggcggggtacgtgggacgcggcgcgcgggcggggatcccgg

SEQ ID NO: 735488 - DNA, 9256 bp, Homo sapiens
  misc_feature (2077)..(2077): n is a, c, g, or t
gcggccgcgggcccggcagaaggccgagtaggagggaccacgcgccgggggccgcgatctctggcagggggcggtgtgccagcggagcaccatgcacataggcgcccagcgccccgactacccctcccgaggaaaagaggccggggccgcgctggggcggcggagagcatgagggaggccggggggcggctcggcttggagcgctgctagggagcggtgcgcgccgcacacccgcctgggcgcggcggagggcggggagccgggcaggtcgcgcctgcgggcggcagccgaccgccgggagctgttctgatttccgacgcgcacgctaggggcccggagcagcccccggccccggcgcgccgccgacatgggcaacgcagggagcatggattcgcagcagaccgatttcagggcgcacaacgtgcctttgaagctgccgatgccagagccaggtgaactggaggagcgatttgccatcgtgctgaacgctatgaacctacctcctgacaaagccaggttactgcggcagtatgataatgagaaaaaatgggaactgatttgtgatcaggaacgattccaggtgaagaatcctccccatacatacattcaaaagctcaaaggctatctggatccagctgtaaccaggaagaaattcagacggcgtgttcaagaatctacacaagtgctaagagaactggaaatttctttgagaactaaccacattggatgggtcagagaatttctgaatgaagaaaacaaaggtcttgatgttctagtggaatatctctcatttgcacagtacgcggtaacttttgactttgaaagtgtggagagtactgtggagagctcggtggacaaatcaaagccctggagtaggtccatcgaggacctgcacagagggagcaacctgccctcacctgtgggcaacagtgtctcccgctctggaagacattctgcactgcgatataatacattgccaagcagaagaactctgaaaaattcaagattagtgagtaagaaagatgatgtgcatgtctgtatcatgtgtttacgtgccatcatgaattatcagtatggtttcaacatggtcatgtctcatccacacgctgtcaatgagattgcactaagcctgaacaacaagaatcccagaacaaaagcccttgtcttagaactgttggcagccgtttgtcttgtcagaggcgggcatgaaatcattttatcagcatttgataactttaaagaggtttgtggagaaaaacagcgctttgagaagttgatggaacatttcaggaatgaagacaataacatagattttatggtggcttctatgcagtttattaatattgtagtccattcagtagaagatatgaatttcagagttcacctgcagtatgaatttaccaaattaggcctggacgaatacttggacaagctgaaacacactgagagtgacaagcttcaagtccagatccaggcttacctggacaatgtttttgatgtaggagctctactggaagatgctgaaactaagaatgctgccttggagagggtggaagaactggaagaaaacatttctcatttatctgaaaaactgcaagacacagagaatgaagccatgtccaagattgtggaactggaaaagcaactcatgcagaggaacaaggagctggatgtcgttcgggaaatctacaaagatgcaaatactcaagttcacacattaagaaaaatggtcaaagaaaaagaagaagcaattcaaagacagtctaccctggaaaaaaagattcatgagctagagaaacaagggaccattaaaattcagaagaaaggggatggggatatcgccatactgccagttgtggcttctggcacattgtccatggggtcagaagtggtagcaggtaactctgtgggacccacaatgggggccgcttcctcaggacccttgccccctcctccaccaccactgcctccctcatcagacacacctgaaacagtgcaaaatggtccagtaacaccacctatgccaccgccgccgccgccccctcctccacctcctcctcccccaccgccccctccncctcctcctctcccaggccctgcagctgagactgtaccagctcctcccttagcacctccccttccctctgcacctccgctgcctggaacatcttcacccacagtggttttcaactcaggattagcagctgtgaaaattaagaagccaatcaagacgaagttcagaatgccagtgtttaactgggttgctctgaagcccaatcagatcaatggcacagtcttcaatgaaattgatgatgagcgaattctggaggatttaaatgtggatgaatttgaggaaatattcaagacaaaagcccaaggacctgccattgatctttcttcaagcaaacagaagataccacagaagggatcaaacaaagtgacattactagaagcaaacagggccaaaaatcttgccataactttaaggaaagctggaaagactgctgatgaaatatgtaaagctattcatgtatttgacttgaagacactgcctgtggactttgtggaatgcttgatgcggttcctaccaactgagaatgaagtgaaagtgcttcggctctacgagcgggaaaggaagcctctggaaaacttgtcagatgaagatcggttcatgatgcagtttagtaaaatcgagaggctcatgcagaagatgaccatcatggccttcattgggaactttgctgaaagcattcagatgctgactcctcaactacatgcgattatagcagcatctgtctctataaagtcgtcccaaaaactcaagaaaattctggagatcatcttagcccttggaaactacatgaatagcagtaaaagaggagcagtttatggatttaaacttcagagtttagatctgctcttagatacaaagtcaacagacagaaagcaaacactgttgcactatatatccaatgtggtgaaagaaaaatatcaccaagtgtccctgttttataatgagcttcattatgtggaaaaagctgctgcagtctcccttgagaatgttttgctggatgtcaaggagctccagaggggaatggacttgaccaagagagagtacaccatgcatgaccataacacgctgctgaaggagttcatcctcaacaatgaggggaagctgaagaagctgcaggatgatgccaagatcgcacaggatgcctttgatgatgttgtgaagtattttggagaaaaccccaagacaacaccaccctctgtcttctttcctgtctttgtccggtttgtgaaagcatataagcaagcagaagaggaaaatgagctgaggaaaaagcaggaacaagctctcatggaaaaactcctagagcaagaagctctgatggagcagcaggatccaaagtctccttctcataaatcaaagaggcagcagcaagagttaattgcagaattaagaagacgacaagttaaagataacagacatgtatatgagggaaaagatggtgccattgaagatattatcacagtgctgaagactgtgccctttactgctcgcaccgccaagcgtggctctcggtttttctgcgaacctgttctcactgaggaataccattactaaactattactctttctcacctgatgctcttaaaagatcttagaaaccaaccatacagacgagccgatgcggtgaggagaagcgtcaggcggcgctttgatgatcagaacttgcgttctgttaatggtgccgaaataacaatgtgaacctgagactggcctgcatgaatacagggtgtgcgtgaatgaaactgcccacatgaactttatgtgctacgatttaactgcagccttgaacacacacaaaaatattcttaagggctcagatttagcaaacacggaagaattttaaaatgagctctcctttcaacccttgttaacaagtgcctaaaaatggaagtacctgttcagattaatcaaagcaataggatttgatttgattaggtatctttttacaccagtatgttatttttaaccaaaatgtaaagttcttattaaactcattacctgccattgtgattgtcccatcatggcccacctggtttcctgatgttgtaaataacatcaatgcatctgctgtgggtcctttgctgagatgtcttcgaaggaattttgttttagccatatccatcaactttgtattttacttgcaatttggaagaaggaaagtcacatgatgaaactccttttgtctataaccaggccctggcaaagtgcaaacaggatgcaactgcagtggcacaaaggtcactcaatcctttgtttccagtttcacattctactacttctgtgctagagaacgatgctctgtgagaggcattcactagtatgaatgtggggatatagtgtataagacttatttgcagtactgtgttcttcagctagaggcagctttttaaataatgcaagtgtatttattagcattaaaattaacatctcagtaatcagcattagcatttctgaggaccattattaattctgagaacagaaattggtgccttgcaaggaagtttactagctctatcaacaagcattcaaggttacatctgctagcagagtagtgttaggaacctggccttactctcctctgacaatcgcaattttttcttattttttataaattcaagaagatacacttggcatcgtgtatcgaggctaagtttttcatgcatttcccagactacttatggagaattgcagtttaagttgctgaaaagtattaacatggtattaagcttaaataatacgtaatgggactagatggcccactaagccactgttattttccttcctctctggcagggcacttgatccattccaaagtcaaaaactggactgaagctaaatttgtacttttcataatatacattctgcttctggcttatcttcttggtacatcaatatattaattgtaaagtttattgtatagtatttaaccgctgaagttcctattttatgttgtgcttatgtgaaccccttggtgaaggtcccttttccttggatgtgtagttatatgatctttttaaatgtacagatattttgctataaaatcggtgcagttttttatggtttttacacttctctttaattcccacctaagcctctgggtaatattgtaaatattgttttaaaatgcatcagcctatgctatacaatctgaatgttattttaacttatagttttttttaatatatatatttaactataaggacagtttagggaacaagttacctaccacatttcactttagtgtacctatttacagaaagattaaactgccacctgcgggcacattcccataaatgtgtactttactttaaaaagaacatgccacgattttgtctttctgtggactcaacattcacttcgattaaaaatagcaatttgaccaagttggacttccactacaaagcagctgttttccaaagttcaatgctgacatatatgtatattaaaataattgcctatttattaatctacaaatagacaacgttggcatgttcttttctgtttgtctattaatgggcctgcttcttagcaatattagaatgttttataaaagcaattcatgttacttttctggtcttttcatggcatatgagcaaataataaactatttacactacaaaaaaaaaaaaaaaaactcgagttttttttttttttttttgtagaaaattcctttattatagtgcaaattactttcagcagtgacataatgtaacaacacatttagcaacattttacaccacacagtaaataagaaagtgtttctttgaaaatatgtcatcataggaacattatttctacattaatgccagaaaatgccaaggccgtttatctcaaggcaaacagggctccctccttccttttgggtattttctttttaacacaaatgaaatgacttgccattttaacaaatcctcaattctaaaagtgatctctcagggggctttgaactaaggtcggcaagatttgaaatggggcttcaaaattttaaataataattttaaaatacttctggaatagcccaaaaagtagaagtcacttctattaagttttaagtagatatacacactcactccaattttactgtagaaatggacagattgtctaaagcctgctttctattcccccagagcctgattgttatttatactccttggttttggttattgcagaactagggctctggtcagaaataacaccttacatacccgaatactttcctgtggaagctttacattgcattttccatcctgaaattctcaccttagaccttacaggcccaggagagggtgtgaatattgttttcagtttacagctaaagccccttactaatttgggctatacctgaatcaaatcatcacatcatttagattaatcccaataggcttatccaagaggttcccactaacctcacagagaaacaaacagttaacattgtattttcacactaagctgcctaagggcttggctgctaatgagttagctgataggtagacagaataagcgtgtcaattccaatcagtacacgccctgctcctctagtttctgctgaattatgcagtgggtgggaatggttggccactcaaaacagtcttcctatggggctcttccaccataagttggatcaaaactccacaaatgtatttcaaggtgccctttaagtctctcaaatttagggacttttaagtgacaagccatgagaagttaatcacaggcttgaaaatacctggaaccacagaacagcccccacggaacaggctgaatatggttaaataagttggctggtacataaagcttttcaatgtacagccagtcttgttggatacagtgtcttcttatataatacaatggaactgtgctaaacagtttcaaagttgagaagaatccaaatgtatcacctataaaaaattcataattttagtttattttagactttggtactgaaacactgtctacattcttgacacttgaaaatgacatggtcacttcagtgcctctgcatgttgtgtaaaaaaaaaaaaaaaactcaaaaaaggaaagcaggacaaggatgtgtcattacaagacacagtatgctgtacaaacaaaacctaaattatatataaatacacccccaccccagaaccctgtcttccctcactacctgatcaaagcaatgccaagggtccctccctccagggccaatgtagcttttaaagtccagaacccaggactttaagcatcccttgccttgcggtgacgtttacagtactgcaacctcctgttggagtcacctgtttgatcagttccgtaagtgcagggtaacacctacagcttaattggaagcattcactctactggctggattcaaagacctggagtcctgggagttaacctttcagataaactaactggatcatttcctaatctggatcctatctaatcctactatctcctcagagccaacacagtaggaagcatcttctactctgaagcttccaaaggcattacttagggatattggtgagggtcacataagaaaagttatacaatgagctaacagcttaagttgatataaattacttccaagtaagttattcagggccgtttgcttctgctttacactgcattccacagtcattttcatattattcttttaaaagtttatactatagtcactttaaaaattgtctaagcaatcacctctttgtgtttttgattaataacaacttaatgagctattatataaatcaagagagaaataattagtcttaaggaagccaataatgtgctaattcccagtaaggagaaaaagcaatgtaaatagaattttacataaccaacaataacttggaaagcagttttatcaaaatggttttgcaaaggtttcccaaaagcacttacagcagtttatatcaagagatcctaagtttaggggtatggagaatctcaattctttaaagcagaaattcacctgtttcataattgtaatatgtaattttctccccttggacctaagatatttatacattcaaaagtttacaacttgctgttcttgagacattgttcattctttaatacatacattgagtataaataaataactacaagaaagcttcaacaatctgaattaacattatgctgtgcaaaacaaaaacaaaaacaaaaacaaaaaacaaaaaaaaagtcaaaccttgaacaacctacattctatgtaaataccctgactaaaatattggttgtgctacacaattccactttagtgcagaaatgcattgatttcactgtaccgttgttgttggctttttaagtgtctttagcacttctgtttctaagcattgccttgctttgaaaagatgaataatttgctaccaaatcacaaatcatcacaaatccattttagtttggtctgaataaaatccagcataaatgtattattttattctgggtataatggctcggtgtctttgtcccaacagctttcttcttaagggcaaaccacccttaagtgaaacttgccatttgtttttgttttctttttaagtctccagatcttgctaggacacttcttccagaccaacagtcagatagttgtggcacgtgatcctatttgaaatagaggtggtttaaatcagccaagcttggtgatctggaggtctccatttatctttatggtgtcaattgcagataacgtttgaatgcgatggtaaaaatcaaaaagttggtgtccatccacaaacactcggaaacgtgggtgctcacaaagaatttccaccctgaatggctggtctggaatgaatggaaagtaagggattgctgactgttcttcacccctctccccagatatacaagaatttctgagtagctgccgatctgtgaacacagctttgagttcgattgccacatcggcaggagggtcttctgagtccccacaggtcaagctgattgcaaagctctctgggttgaggtctacgatgcccatcactaacaccttcttgcctggtctcatgccacctttaatgtgcccacaaaatggaactatcagtcgtgggaagtacacgtccgcttgaactggagagctcaaagagttgtttaaatggccatcatctagtttcaccacggcatcgctgtcggccactgatcccgccatcttcttgcccggcgcggcggggtacgtgggacgcggcgcgcgggcggggatcccgg

SEQ ID NO: 735489 - DNA, 3877 bp, Homo sapiens
  misc_feature (2077)..(2077): n is a, c, g, or t
  misc_feature (3852)..(3852): n is a, c, g, or t
gcggccgcgggcccggcagaaggccgagtaggagggaccacgcgccgggggccgcgatctctggcagggggcggtgtgccagcggagcaccatgcacataggcgcccagcgccccgactacccctcccgaggaaaagaggccggggccgcgctggggcggcggagagcatgagggaggccggggggcggctcggcttggagcgctgctagggagcggtgcgcgccgcacacccgcctgggcgcggcggagggcggggagccgggcaggtcgcgcctgcgggcggcagccgaccgccgggagctgttctgatttccgacgcgcacgctaggggcccggagcagcccccggccccggcgcgccgccgacatgggcaacgcagggagcatggattcgcagcagaccgatttcagggcgcacaacgtgcctttgaagctgccgatgccagagccaggtgaactggaggagcgatttgccatcgtgctgaacgctatgaacctacctcctgacaaagccaggttactgcggcagtatgataatgagaaaaaatgggaactgatttgtgatcaggaacgattccaggtgaagaatcctccccatacatacattcaaaagctcaaaggctatctggatccagctgtaaccaggaagaaattcagacggcgtgttcaagaatctacacaagtgctaagagaactggaaatttctttgagaactaaccacattggatgggtcagagaatttctgaatgaagaaaacaaaggtcttgatgttctagtggaatatctctcatttgcacagtacgcggtaacttttgactttgaaagtgtggagagtactgtggagagctcggtggacaaatcaaagccctggagtaggtccatcgaggacctgcacagagggagcaacctgccctcacctgtgggcaacagtgtctcccgctctggaagacattctgcactgcgatataatacattgccaagcagaagaactctgaaaaattcaagattagtgagtaagaaagatgatgtgcatgtctgtatcatgtgtttacgtgccatcatgaattatcagtatggtttcaacatggtcatgtctcatccacacgctgtcaatgagattgcactaagcctgaacaacaagaatcccagaacaaaagcccttgtcttagaactgttggcagccgtttgtcttgtcagaggcgggcatgaaatcattttatcagcatttgataactttaaagaggtttgtggagaaaaacagcgctttgagaagttgatggaacatttcaggaatgaagacaataacatagattttatggtggcttctatgcagtttattaatattgtagtccattcagtagaagatatgaatttcagagttcacctgcagtatgaatttaccaaattaggcctggacgaatacttggacaagctgaaacacactgagagtgacaagcttcaagtccagatccaggcttacctggacaatgtttttgatgtaggagctctactggaagatgctgaaactaagaatgctgccttggagagggtggaagaactggaagaaaacatttctcatttatctgaaaaactgcaagacacagagaatgaagccatgtccaagattgtggaactggaaaagcaactcatgcagaggaacaaggagctggatgtcgttcgggaaatctacaaagatgcaaatactcaagttcacacattaagaaaaatggtcaaagaaaaagaagaagcaattcaaagacagtctaccctggaaaaaaagattcatgagctagagaaacaagggaccattaaaattcagaagaaaggggatggggatatcgccatactgccagttgtggcttctggcacattgtccatggggtcagaagtggtagcaggtaactctgtgggacccacaatgggggccgcttcctcaggacccttgccccctcctccaccaccactgcctccctcatcagacacacctgaaacagtgcaaaatggtccagtaacaccacctatgccaccgccgccgccgccccctcctccacctcctcctcccccaccgccccctccncctcctcctctcccaggccctgcagctgagactgtaccagctcctcccttagcacctccccttccctctgcacctccgctgcctggaacatcttcacccacagtggttttcaactcaggattagcagctgtgaaaattaagaagccaatcaagacgaagttcagaatgccagtgtttaactgggttgctctgaagcccaatcagatcaatggcacagtcttcaatgaaattgatgatgagcgaattctggaggatttaaatgtggatgaatttgaggaaatattcaagacaaaagcccaaggacctgccattgatctttcttcaagcaaacagaagataccacagaagggatcaaacaaagtgacattactagaagcaaacagggccaaaaatcttgccataactttaaggaaagctggaaagactgctgatgaaatatgtaaagctattcatgtatttgacttgaagacactgcctgtggactttgtggaatgcttgatgcggttcctaccaactgagaatgaagtgaaagtgcttcggctctacgagcgggaaaggaagcctctggaaaacttgtcagatgaagatcggttcatgatgcagtttagtaaaatcgagaggctcatgcagaagatgaccatcatggccttcattgggaactttgctgaaagcattcagatgctgactcctcaactacatgcgattatagcagcatctgtctctataaagtcgtcccaaaaactcaagaaaattctggagatcatcttagcccttggaaactacatgaatagcagtaaaagaggagcagtttatggatttaaacttcagagtttagatctgctcttagatacaaagtcaacagacagaaagcaaacactgttgcactatatatccaatgtggtgaaagaaaaatatcaccaagtgtccctgttttataatgagcttcattatgtggaaaaagctgctgcagtctcccttgagaatgttttgctggatgtcaaggagctccagaggggaatggacttgaccaagagagagtacaccatgcatgaccataacacgctgctgaaggagttcatcctcaacaatgaggggaagctgaagaagctgcaggatgatgccaagatcgcacaggatgcctttgatgatgttgtgaagtattttggagaaaaccccaagacaacaccaccctctgtcttctttcctgtctttgtccggtttgtgaaagcatataagcaagcagaagaggaaaatgagctgaggaaaaagcaggaacaagctctcatggaaaaactcctagagcaagaagctctgatggagcagcaggatccaaagtctccttctcataaatcaaagaggcagcagcaagagttaattgcagaattaagaagacgacaagttaaagataacagacatgtatatgagggaaaagatggtgccattgaagatattatcacagtgctgaagactgtgccctttactgctcgcaccgccaagcgtggctctcggtttttctgcgaacctgttctcactgaggaataccattactaaactattactctttctcacctgatgctcttaaaagatcttagaaaccaaccatacagacgagccgatgcggtgaggagaagcgtcaggcggcgctttgatgatcagaacttgcgttctgttaatggtgccgaaataacaatgtgaacctgagactggcctgcatgaatacagggtgtgcgtgttcaggaggttttctgttgcggtcacccatgatggcgggcctncccatttgggccaacttttcctggg

SEQ ID NO: 735490 - DNA, 3876 bp, Homo sapiens; identical to SEQ ID NO: 423177
  misc_feature (2077)..(2077): n is a, c, g, or t

SEQ ID NO: 735491 - DNA, 9151 bp, Homo sapiens
  misc_feature (2077)..(2077): n is a, c, g, or t
gcggccgcgggcccggcagaaggccgagtaggagggaccacgcgccgggggccgcgatctctggcagggggcggtgtgccagcggagcaccatgcacataggcgcccagcgccccgactacccctcccgaggaaaagaggccggggccgcgctggggcggcggagagcatgagggaggccggggggcggctcggcttggagcgctgctagggagcggtgcgcgccgcacacccgcctgggcgcggcggagggcggggagccgggcaggtcgcgcctgcgggcggcagccgaccgccgggagctgttctgatttccgacgcgcacgctaggggcccggagcagcccccggccccggcgcgccgccgacatgggcaacgcagggagcatggattcgcagcagaccgatttcagggcgcacaacgtgcctttgaagctgccgatgccagagccaggtgaactggaggagcgatttgccatcgtgctgaacgctatgaacctacctcctgacaaagccaggttactgcggcagtatgataatgagaaaaaatgggaactgatttgtgatcaggaacgattccaggtgaagaatcctccccatacatacattcaaaagctcaaaggctatctggatccagctgtaaccaggaagaaattcagacggcgtgttcaagaatctacacaagtgctaagagaactggaaatttctttgagaactaaccacattggatgggtcagagaatttctgaatgaagaaaacaaaggtcttgatgttctagtggaatatctctcatttgcacagtacgcggtaacttttgactttgaaagtgtggagagtactgtggagagctcggtggacaaatcaaagccctggagtaggtccatcgaggacctgcacagagggagcaacctgccctcacctgtgggcaacagtgtctcccgctctggaagacattctgcactgcgatataatacattgccaagcagaagaactctgaaaaattcaagattagtgagtaagaaagatgatgtgcatgtctgtatcatgtgtttacgtgccatcatgaattatcagtatggtttcaacatggtcatgtctcatccacacgctgtcaatgagattgcactaagcctgaacaacaagaatcccagaacaaaagcccttgtcttagaactgttggcagccgtttgtcttgtcagaggcgggcatgaaatcattttatcagcatttgataactttaaagaggtttgtggagaaaaacagcgctttgagaagttgatggaacatttcaggaatgaagacaataacatagattttatggtggcttctatgcagtttattaatattgtagtccattcagtagaagatatgaatttcagagttcacctgcagtatgaatttaccaaattaggcctggacgaatacttggacaagctgaaacacactgagagtgacaagcttcaagtccagatccaggcttacctggacaatgtttttgatgtaggagctctactggaagatgctgaaactaagaatgctgccttggagagggtggaagaactggaagaaaacatttctcatttatctgaaaaactgcaagacacagagaatgaagccatgtccaagattgtggaactggaaaagcaactcatgcagaggaacaaggagctggatgtcgttcgggaaatctacaaagatgcaaatactcaagttcacacattaagaaaaatggtcaaagaaaaagaagaagcaattcaaagacagtctaccctggaaaaaaagattcatgagctagagaaacaagggaccattaaaattcagaagaaaggggatggggatatcgccatactgccagttgtggcttctggcacattgtccatggggtcagaagtggtagcaggtaactctgtgggacccacaatgggggccgcttcctcaggacccttgccccctcctccaccaccactgcctccctcatcagacacacctgaaacagtgcaaaatggtccagtaacaccacctatgccaccgccgccgccgccccctcctccacctcctcctcccccaccgccccctccncctcctcctctcccaggccctgcagctgagactgtaccagctcctcccttagcacctccccttccctctgcacctccgctgcctggaacatcttcacccacagtggttttcaactcaggattagcagatgggccaatcaagcttttctctgtgaaaattaagaagccaatcaagacgaagttcagaatgccagtgtttaactgggttgctctgaagcccaatcagatcaatggcacagtcttcaatgaaattgatgatgagcgaattctggaggatttaaatgtggatgaatttgaggaaatattcaagacaaaagcccaaggacctgccattgatctttcttcaagcaaacagaagataccacagaagggatcaaacaaagtgacattactagaagcaaacagggccaaaaatcttgccataactttaaggaaagctggaaagactgctgatgaaatatgtaaagctattcatgtatttgacttgaagacactgcctgtggactttgtggaatgcttgatgcggttcctaccaactgagaatgaagtgaaagtgcttcggctctacgagcgggaaaggaagcctctggaaaacttgtcagatgaagatcggttcatgatgcagtttagtaaaatcgagaggctcatgcagaagatgaccatcatggccttcattgggaactttgctgaaagcattcagatgctgactcctcaactacatgcgattatagcagcatctgtctctataaagtcgtcccaaaaactcaagaaaattctggagatcatcttagcccttggaaactacatgaatagcagtaaaagaggagcagtttatggatttaaacttcagagtttagatctgctcttagatacaaagtcaacagacagaaagcaaacactgttgcactatatatccaatgtggtgaaagaaaaatatcaccaagtgtccctgttttataatgagcttcattatgtggaaaaagctgctgcagtctcccttgagaatgttttgctggatgtcaaggagctccagaggggaatggacttgaccaagagagagtacaccatgcatgaccataacacgctgctgaaggagttcatcctcaacaatgaggggaagctgaagaagctgcaggatgatgccaagatcgcacaggatgcctttgatgatgttgtgaagtattttggagaaaaccccaagacaacaccaccctctgtcttctttcctgtctttgtccggtttgtgaaagcatataagcaagcagaagaggaaaatgagctgaggaaaaagcaggaacaagctctcatggaaaaactcctagagcaagaagctctgatggagcagcaggatccaaagtctccttctcataaatcaaagaggcagcagcaagagttaattgcagaattaagaagacgacaagttaaagataacagacatgtatatgagggaaaagatggtgccattgaagatattatcacagatcttagaaaccaaccatacagacgagccgatgcggtgaggagaagcgtcaggcggcgctttgatgatcagaacttgcgttctgttaatggtgccgaaataacaatgtgaacctgagactggcctgcatgaatacagggtgtgcgtgaatgaaactgcccacatgaactttatgtgctacgatttaactgcagccttgaacacacacaaaaatattcttaagggctcagatttagcaaacacggaagaattttaaaatgagctctcctttcaacccttgttaacaagtgcctaaaaatggaagtacctgttcagattaatcaaagcaataggatttgatttgattaggtatctttttacaccagtatgttatttttaaccaaaatgtaaagttcttattaaactcattacctgccattgtgattgtcccatcatggcccacctggtttcctgatgttgtaaataacatcaatgcatctgctgtgggtcctttgctgagatgtcttcgaaggaattttgttttagccatatccatcaactttgtattttacttgcaatttggaagaaggaaagtcacatgatgaaactccttttgtctataaccaggccctggcaaagtgcaaacaggatgcaactgcagtggcacaaaggtcactcaatcctttgtttccagtttcacattctactacttctgtgctagagaacgatgctctgtgagaggcattcactagtatgaatgtggggatatagtgtataagacttatttgcagtactgtgttcttcagctagaggcagctttttaaataatgcaagtgtatttattagcattaaaattaacatctcagtaatcagcattagcatttctgaggaccattattaattctgagaacagaaattggtgccttgcaaggaagtttactagctctatcaacaagcattcaaggttacatctgctagcagagtagtgttaggaacctggccttactctcctctgacaatcgcaattttttcttattttttataaattcaagaagatacacttggcatcgtgtatcgaggctaagtttttcatgcatttcccagactacttatggagaattgcagtttaagttgctgaaaagtattaacatggtattaagcttaaataatacgtaatgggactagatggcccactaagccactgttattttccttcctctctggcagggcacttgatccattccaaagtcaaaaactggactgaagctaaatttgtacttttcataatatacattctgcttctggcttatcttcttggtacatcaatatattaattgtaaagtttattgtatagtatttaaccgctgaagttcctattttatgttgtgcttatgtgaaccccttggtgaaggtcccttttccttggatgtgtagttatatgatctttttaaatgtacagatattttgctataaaatcggtgcagttttttatggtttttacacttctctttaattcccacctaagcctctgggtaatattgtaaatattgttttaaaatgcatcagcctatgctatacaatctgaatgttattttaacttatagttttttttaatatatatatttaactataaggacagtttagggaacaagttacctaccacatttcactttagtgtacctatttacagaaagattaaactgccacctgcgggcacattcccataaatgtgtactttactttaaaaagaacatgccacgattttgtctttctgtggactcaacattcacttcgattaaaaatagcaatttgaccaagttggacttccactacaaagcagctgttttccaaagttcaatgctgacatatatgtatattaaaataattgcctatttattaatctacaaatagacaacgttggcatgttcttttctgtttgtctattaatgggcctgcttcttagcaatattagaatgttttataaaagcaattcatgttacttttctggtcttttcatggcatatgagcaaataataaactatttacactacaaaaaaaaaaaaaaaaactcgagttttttttttttttttttgtagaaaattcctttattatagtgcaaattactttcagcagtgacataatgtaacaacacatttagcaacattttacaccacacagtaaataagaaagtgtttctttgaaaatatgtcatcataggaacattatttctacattaatgccagaaaatgccaaggccgtttatctcaaggcaaacagggctccctccttccttttgggtattttctttttaacacaaatgaaatgacttgccattttaacaaatcctcaattctaaaagtgatctctcagggggctttgaactaaggtcggcaagatttgaaatggggcttcaaaattttaaataataattttaaaatacttctggaatagcccaaaaagtagaagtcacttctattaagttttaagtagatatacacactcactccaattttactgtagaaatggacagattgtctaaagcctgctttctattcccccagagcctgattgttatttatactccttggttttggttattgcagaactagggctctggtcagaaataacaccttacatacccgaatactttcctgtggaagctttacattgcattttccatcctgaaattctcaccttagaccttacaggcccaggagagggtgtgaatattgttttcagtttacagctaaagccccttactaatttgggctatacctgaatcaaatcatcacatcatttagattaatcccaataggcttatccaagaggttcccactaacctcacagagaaacaaacagttaacattgtattttcacactaagctgcctaagggcttggctgctaatgagttagctgataggtagacagaataagcgtgtcaattccaatcagtacacgccctgctcctctagtttctgctgaattatgcagtgggtgggaatggttggccactcaaaacagtcttcctatggggctcttccaccataagttggatcaaaactccacaaatgtatttcaaggtgccctttaagtctctcaaatttagggacttttaagtgacaagccatgagaagttaatcacaggcttgaaaatacctggaaccacagaacagcccccacggaacaggctgaatatggttaaataagttggctggtacataaagcttttcaatgtacagccagtcttgttggatacagtgtcttcttatataatacaatggaactgtgctaaacagtttcaaagttgagaagaatccaaatgtatcacctataaaaaattcataattttagtttattttagactttggtactgaaacactgtctacattcttgacacttgaaaatgacatggtcacttcagtgcctctgcatgttgtgtaaaaaaaaaaaaaaaactcaaaaaaggaaagcaggacaaggatgtgtcattacaagacacagtatgctgtacaaacaaaacctaaattatatataaatacacccccaccccagaaccctgtcttccctcactacctgatcaaagcaatgccaagggtccctccctccagggccaatgtagcttttaaagtccagaacccaggactttaagcatcccttgccttgcggtgacgtttacagtactgcaacctcctgttggagtcacctgtttgatcagttccgtaagtgcagggtaacacctacagcttaattggaagcattcactctactggctggattcaaagacctggagtcctgggagttaacctttcagataaactaactggatcatttcctaatctggatcctatctaatcctactatctcctcagagccaacacagtaggaagcatcttctactctgaagcttccaaaggcattacttagggatattggtgagggtcacataagaaaagttatacaatgagctaacagcttaagttgatataaattacttccaagtaagttattcagggccgtttgcttctgctttacactgcattccacagtcattttcatattattcttttaaaagtttatactatagtcactttaaaaattgtctaagcaatcacctctttgtgtttttgattaataacaacttaatgagctattatataaatcaagagagaaataattagtcttaaggaagccaataatgtgctaattcccagtaaggagaaaaagcaatgtaaatagaattttacataaccaacaataacttggaaagcagttttatcaaaatggttttgcaaaggtttcccaaaagcacttacagcagtttatatcaagagatcctaagtttaggggtatggagaatctcaattctttaaagcagaaattcacctgtttcataattgtaatatgtaattttctccccttggacctaagatatttatacattcaaaagtttacaacttgctgttcttgagacattgttcattctttaatacatacattgagtataaataaataactacaagaaagcttcaacaatctgaattaacattatgctgtgcaaaacaaaaacaaaaacaaaaacaaaaaacaaaaaaaaagtcaaaccttgaacaacctacattctatgtaaataccctgactaaaatattggttgtgctacacaattccactttagtgcagaaatgcattgatttcactgtaccgttgttgttggctttttaagtgtctttagcacttctgtttctaagcattgccttgctttgaaaagatgaataatttgctaccaaatcacaaatcatcacaaatccattttagtttggtctgaataaaatccagcataaatgtattattttattctgggtataatggctcggtgtctttgtcccaacagctttcttcttaagggcaaaccacccttaagtgaaacttgccatttgtttttgttttctttttaagtctccagatcttgctaggacacttcttccagaccaacagtcagatagttgtggcacgtgatcctatttgaaatagaggtggtttaaatcagccaagcttggtgatctggaggtctccatttatctttatggtgtcaattgcagataacgtttgaatgcgatggtaaaaatcaaaaagttggtgtccatccacaaacactcggaaacgtgggtgctcacaaagaatttccaccctgaatggctggtctggaatgaatggaaagtaagggattgctgactgttcttcacccctctccccagatatacaagaatttctgagtagctgccgatctgtgaacacagctttgagttcgattgccacatcggcaggagggtcttctgagtccccacaggtcaagctgattgcaaagctctctgggttgaggtctacgatgcccatcactaacaccttcttgcctggtctcatgccacctttaatgtgcccacaaaatggaactatcagtcgtgggaagtacacgtccgcttgaactggagagctcaaagagttgtttaaatggccatcatctagtttcaccacggcatcgctgtcggccactgatcccgccatcttcttgcccggcgcggcggggtacgtgggacgcggcgcgcgggcggggatcccgg

SEQ ID NO: 735492 - DNA, 1419 bp, Homo sapiens
cgatgtcaactataagcactccctgcagtctccaaccggggtcctagttctagtcttccggacagctctaggactcagttcatttaaagatcattggtgttggacacaactctcacccaataaacaactcagcaccagctcctcctggcttaggggagcagctcctctgcttccccacatgctctccagaagggtcaagagcgcccctcccagaagagttctaaatgtcccagctgatggcctcccatagacattccatgctggccacagttgcaggcctcagatgggcagccaagcccagtgctgacccatgagcttctccacctctctgcgtcaggagtcaggtgggggtgctgaacagaccctgtagcatggctcctctagcagtctgggccccagggacatcccttttagccccagtggatccctgggacagaggcaagggcggggggaaggggagggaagacccaagagcaatacaagtgatagtctctcctgtcccatgccttcacacatgcagggaccttgccacaagtccccttcctcacctgcatatctggggaattcctttccatctctgaagtcatagtttatgctgcacccctatgtggtctttcctgacgaccaggctctaccaccaactcaaaataatcagtcccttgctccttcctccaccctcaaggatccacatccacaaagaaaatgtgctacatatacactgatatggtttggctgtgtccccacccaaatcgcctcttgaattgtactcccataattcccgcgtgttgtgggagggagataatttgaatcatgggggcagtttcccccatactattgttgtggtagtgaataagtctcacaagatctgatggttttatcagggatttctgcttttgcatcttcctcattttctcttgccgccaccatgtaagaagtgcctttcacctcctgccatgattctgaggcctccccagccatgtggaactataagtccaattaaacctctttttcttcccggtctcagatatgtctttatcagcagtgtgaaaacagactaatacatgcaccatggaatactacacaggcatcaaaagaacatggcctttgcagcagtgtaggtggagctggaggccatcgtcctaagcaaattcacgtaggaacagaaaaccaaataccacatcttctcatttataagtgggagttaagtattgagcacacatggacataaatataggaccagcagacactgtggactactagagggtgtgtgggggggttaaaaacctatatatcaggtatatgctcactaccagggtgacaggagccgtactccaaaccccagcatcatgcaattttcctcagtaacaaatctgcacatggaccccctatacataaaataaaaattgaaataaaaatcca

SEQ ID NO: 735493 - DNA, 1142 bp, Homo sapiens
gtttgttttctatttttctcatatattgcttgttcctcagtccttcttttcctgatttcttttacgttaaatgtttattttaccattttaattctgttgtctttttaaagctacatttctttgcattcttcttataatgattactatagggactataatatgtgtatttaatttatcacaatgaaaactatttgcgaattaaccttggttttacatatataaatcttgcaacactaaagttctgcttacctcccgtctatcctttggtgctatagttgccatatacattacatctatattttttaaaacacaaaatgcagtgctacaagtttgtctttaagaaactaagaacagtatgaaaaggatgttaaaatatctgggtagttattaaaataaattatctctaaaatgaattttgtaatctattattataattttactagttagaattttcaattgttattttttatatctttaagaggtgaaccgagtatagagtatagaacaagaaaaatgtcaggcagtcagctggactcacttgttccctggacgaatctgtttcagttaaatgacagatcaccataatcatatggaccttcaggttttcccaccaaaaggccaaactgaaaatacgaaattcctgacccataaatatcttactgcattgtaaatcatttagcattcattaatcactatttacaattttttaaaaaaaataaggcttgtgccttttctcatctgtttagaatattcagtttagtaactgtatggcaacgtaagttactgacagggaaagccttgtaagacagtactcatttacttaaaatgtggagtttttgcatttctttacaattgaatggaaaaattaccagcagtgctttgggttatagtgacacctggtggtacggtttgaggttttaaaaaaattctttttaaatttgttactcttttttttttctagaccattttttgtaaggaatcattttatcaactaggatgacaagaggcctctcccatcctggttgcacatcactttctataacagagagacatgggccagaagccctgatggagaaagcagccaatgtcccttacatttccacctttggcttgaaaaaaagatctgtgcactaaatacaggg

SEQ ID NO: 735494 - DNA, 1957 bp, Homo sapiens; identical to SEQ ID NO: 114732

SEQ ID NO: 735495 - DNA, 191 bp, Homo sapiens; identical to SEQ ID NO: 114733

SEQ ID NO: 735496 - DNA, 2169 bp, Homo sapiens
ccaaatgagggaccacacagcagaaagatgaagcccaggctcctgacacactggagttcacgcttcagcttgtgacctctgtgggccagttcacctcagggccaggcgtcactgagactgtgggttctgggagccctctttgcttttactgtcctctgccgggctgcactcggaccccgtgatggaggacttgcacccgcgaagcacgtgggcattcagcatctccagcagcaggtcatacactgggaccacatttttgcacttcatgttgagcagatgttccatgcccttgttactcgcatgcctgacgtgggacaggagcatcaggaggttagccaggcgcatggattgctgctgggaggagatgccgctcttggcaatcacccaaaccaaagcatcggtcacggcgttcagcaagtgagccagcttccggctgctgtcagcatcctgggtcgctgtgaccagagggtacatactggaattgagcaggatcatggccttgacacagagatattctttgtgttggagttttaactctcgaaaccttgaagtagttgccaggagcatgtcaaagatttccagaattccttctacgcatttcccctcatccctgtccagaacaagatctggagcaaagatgagcttgccggggtggtcaattgagcgccacatcagccccatcattaacacctccatccaacagctctccaagagccgcacttggtcgaacaggctgagctccacaaagccgggaatcttcttggcccagctgatcatgtgtaccaactccttgtcggccaacttggtcagggacatcatcatggaggcctcggtgaagggcgcactggggcggctgatcagcacatggggcggctcagcctccaggagggtgagcactagctgctcggggctcagggcgtccagcagcagctcccgcactcggggcgcgtggccgccacttctcttggccttgccggcacagtgcagctgctcgtcggcacttctctgtctccgcacaaggcggtacccacatctctctctccgggagccacacttcaccattcccacttcgtaacacttccgaagtcggcaggcctggcagctcttgcgccggtttttatcgattgtacactgatttgtagctggacaaatataatcattatgtccttgaatgcttcttttaaaaaaggccttacatccttcacacgaccagactccatagtgatatcccgatgcgtaatcgctgcagacagcgcagaagtgagcatccctctttgaacctggaccagtaacagggctggcgcaacggttcccactaaccttccttttcagtgtctctctgtttacaggtaaggtgtgttctagcgatcttgcttcacaccagggactcttttgaggttccgcatacagatgtgataactggcgatggaccactaaaggagaaaggtgcccaggtgttggccacaacacatttgggcttgtggtctgccgaccaggcccaccttccaagttagtgacattgctgggaatgctgtaattcatcacagcagggctatagaatgtcatggctggatattcatggtggctgtctacataggaggaaggtatgtatatggagccgtgctccaggggtaagatggattgactgcagttgtaggaggaaggagaattaaggctagatggtgagttttttatatccatgtcttgagataacagctgagaaaacaccttgcaagaagaggcacaaaggtcattataatgttctcaaagattcgtgggcaagtataatggcttgcagataaacacaccggccttgccttctctaaaatgcggacacgtgcttttcccgcattagggggggtctcccggcgcgcgccccgccgccacctgttgaggaaagcgagcgcacctcctgcagctcaggctccgggcgccagccctgccccgcagccccagagcccgtcgcagctcgggtggtccctccccggcccagcgctcgccgcctgctcttcgccctgcaagtttcaagaggcagttatttctcgcagcctccgcgcttgcaactgcctcctggcgggggagtgggtgtccaaaaagccagcagctggagaaactgaaaagatcacaagcgacttaacgataagccccttcttccttttaaagaccgag

SEQ ID NO: 735497 - DNA, 1992 bp, Homo sapiens
ccaaatgagggaccacacagcagaaagatgaagcccaggctcctgacacactggagttcacgcttcagcttgtgacctctgtgggccagttcacctcagggccaggcgtcactgagactgtgggttctgggagccctctttgcttttactgtcctctgccgggctgcactcggaccccgtgatggaggacttgcacccgcgaagcacgtgggcattcagcatctccagcagcaggtcatacactgggaccacatttttgcacttcatgttgagcagatgttccatgcccttgttactcgcatgcctgacgtgggacaggagcatcaggaggttagccaggcgcatggattgctgctgggaggagatgccgctcttggcaatcacccaaaccaaagcatcggtcacggcgttcagcaagtgagccagcttccggctgctgtcagcatcctgggtcgctgtgaccagagggtacatactggaattgagcaggatcatggccttgacacagagatattctttgtgttggagttttaactctcgaaaccttgaagtagttgccaggagcatgtcaaagatttccagaattccttctacgcatttcccctcatccctgtccagaacaagatctggagcaaagatgagcttgccggggtggtcaattgagcgccacatcagccccatcattaacacctccatccaacagctctccaagagccgcacttggtcgaacaggctgagctccacaaagccgggaatcttcttggcccagctgatcatgtgtaccaactccttgtcggccaacttggtcagggacatcatcatggaggcctcggtgaagggcgcactggggcggctgatcagcacatggggcggctcagcctccaggagggtgagcactagctgctcggggctcagggcgtccagcagcagctcccgcactcggggcgcgtggccgccacttctcttggccttgccggcacagtgcagctgctcgtcggcacttctctgtctccgcacaaggcggtacccacatctctctctccgggagccacacttcaccattcccacttcgtaacacttccgaagtcggcaggcctggcagctcttgcgccggtttttatcgattgtacactgatttgtagctggacaaatataatcattatgtccttgaatgcttcttttaaaaaaggccttacatccttcacacgaccagactccatagtgatatcccgatgcgtaatcgctgcagacagcgcagaagtgagcatccctctttgaacctggaccagtaacagggctggcgcaacggttcccactaaccttccttttcagtgtctctctgtttacaggtaaggtgtgttctagcgatcttgcttcacaccagggactcttttgaggttccgcatacagatgtgataactggcgatggaccactaaaggagaaaggtgcccaggtgttggccacaacacatttgggcttgtggtctgccgaccaggcccaccttccaagttagtgacattgctgggaatgctgtaattcatcacagcagggctatagaatgtcatggctggatattcatggtggctgtctacataggaggaaggtatgtatatggagccgtgctccaggggtaagatggattgactgcagttgtaggaggaaggagaattaaggctagatggtgagttttttatatccatgtcttgagataacagctgagaaaacaccttgcaagaagaggcacaaaggtcattataatgttctcaaagattcgtgggcaagtataatggcttcagaaccatattgggatgactgtaacctgagcgcggttcctccagcagagcaagcacattcatcggactcagtaactcaaggggccagtcctctccagcatcccagctgccgccgccctgtcaggcttcccaggcaatcgcccatcttattccttctccagtgtggacgcctacgaggagggagcgtcccctctcgct

SEQ ID NO: 735498 - DNA, 1605 bp, Homo sapiens
taaagccaaaataatgaaacactttatttatatcatgttaaactctctacgacagtgccatagacattaaagggacacagtaaggaaaacactccctggaggaagggaaagcaggtctcaaaatctgctttcacagagcagcaaacattcatttctacaaggcccaaatgtaaagcctgcaaatgaagtcaacaaattagtgtaatgatacaaagcattcgtctgagaaaatggcaaattatagccaaccaacaggctctgaagtacacattgaatgacaaaaggtataggaccaacagttaaggcatttagacacccaacagaggaaacaaatgcaaaaacatccattgtacagttaacaggaactgttcgcggctggtatcaccactccttatgtgcttcccatagaggaaacccaccaccagtttaccagtggctggccctacaagtgaataggatcctcggaattaaaaaacaaacaaacaaacaaacaaaaaacctccctgactccaaagcaacaaaaatggcactacgatcatacatcacagacaatgcacatcttaagagctgccactggagccaaaattccagcaagtttgagagctataaagaataagtggcacgtgttttcacactgtagtatatcacactccacagggaagcagcagtgcctaaaagatgtgaattttacatgagtacacttccaaggaacatattccacgtgtttggggaaagcagtcacagacaggaggtgatcacagtacccactagagctcatgaacctgagatgggacatgggaataacagattatgcatcttattttccatctgtcattgctgctgttgtgtaaaggctcatgcagacccatctaagctgaggagatgggatctaaaggtacagcagaagacaaccctaacttcaccgcccctccattctgctgcgactcagctcacaaagcagattctcacagaagcaagtcctggggcaggagcaatactggcccgctaggcaagcagaagacttgcgtgccagtccaagctttgccatgagtagttttatgaccttgaataggtgaatttgcccccgtgggctttaatttacacagatatgaaaggtggagttgaactttgatgtgagaggtttacaaacttactgtgtctgtaggggtgttctggacattgtggtgggaggtaagggggtatcacaagggggccccatttaaatcacagcagccgtgcatgtcaggttgcacctgatagattctgcagttttaaaatatttttctttaaatttttaaactgtttgaagtgcatggtcactgtcagcactggacttggactgcctgtgttcagctcaatcacctactccccacgtgaccttcagcaagtttgcttagaccgtgtctagttccacaaccagaaaataaggaaatagcagttattataataaggattaaatgtgaatgtctgaggcactgagaactgtgtctggcacagatattatctttagatactaaataatgtgtttttatctttttaaaagattttcagcaacttaaaaaaaaatgtgccctcggccgattcaccccgcctcgactagcgtta

SEQ ID NO: 735499 - DNA, 1455 bp, Homo sapiens
tttttgacaagtctcactctgtcagtcacccaggctggagtgcggtggcccaatctcggctcactgcaacctttgccttccaggttcaagccattctcatgcctcagcctcctgagtagctgggattacaagcacacaccaccatgcctggctaattattatatttttaatagagacggggtttcgccatgttggccaggctggtttcaaactcctgacctcaactgatctgcccacctcggcctcccaaagtgttgggattacaggtgtgagccaccgcacctggattcccagccctctccatggcaaatgaacaggcaaagccccttgttgcccatttaagtccagtagcattttactttctacctaaacaaagaggataggcatcggcatttcccctttcttattggaagatactgaacacagttcctaacctgcatctgttggcaggcacagctgaccacacaatcccagtcccctcctccccttctctgccaaagcacaaacctcaggggaaaccagtgaagctcatcagtagatgaagcctcagctttctacattggtgcccctcatgggtgagacatctgcaagccctgggcagttaaggagaccatctgaagagaatccgtcttcactttagcgtttacagttatcaaattgttggattgataatagaaaggaaggtggtttttaaccacataactaacttcaaagtattttaactctttctttaaaattatttttttcatggattacaatgatcccagagggaaattgaagtgaaaatgttacccaagatttttctttaggccaccgagttgattagagggtcactgctccatcgttgcttcaggcaaaagagtctccatcttcattccaaatgaggtgagtgtttgagaggccttttctgccctcgcatgcctgacgtgggacaggagcatcaggagctgtttacaggtaaggtgtgttctagcgatcttgcttcacaccagggactcttttgaggttccgcatacagatgtgataactggcgatggaccactgtcttgtaaggcagcatgctcttggggttttcctcataacacactggactcttcttttcaatcttccctcctgtttccttctcatctccttgaattctaaacactgcagtgtcctaggcatcggtatttggttgtctccacctaaacctgttcctttggtgggatctcatccaatctcatgaatttaaatgccatatctccacttggatgtcttcagaaccatattgggatgactgtaacctgagcgcggttcctccagcagagcaagcacattcatcggactcagtaactcaaggggccagtcctctccagcatcccagctgccgccgccctgtcaggcttcccaggcaatcgcccatcttattccttctccagtgtggacgcctacgaggagggagcgtcccctctcgct

SEQ ID NO: 735500 - DNA, 2786 bp, Homo sapiens
tttttgacaagtctcactctgtcagtcacccaggctggagtgcggtggcccaatctcggctcactgcaacctttgccttccaggttcaagccattctcatgcctcagcctcctgagtagctgggattacaagcacacaccaccatgcctggctaattattatatttttaatagagacggggtttcgccatgttggccaggctggtttcaaactcctgacctcaactgatctgcccacctcggcctcccaaagtgttgggattacaggtgtgagccaccgcacctggattcccagccctctccatggcaaatgaacaggcaaagccccttgttgcccatttaagtccagtagcattttactttctacctaaacaaagaggataggcatcggcatttcccctttcttattggaagatactgaacacagttcctaacctgcatctgttggcaggcacagctgaccacacaatcccagtcccctcctccccttctctgccaaagcacaaacctcaggggaaaccagtgaagctcatcagtagatgaagcctcagctttctacattggtgcccctcatgggtgagacatctgcaagccctgggcagttaaggagaccatctgaagagaatccgtcttcactttagcgtttacagttatcaaattgttggattgataatagaaaggaaggtggtttttaaccacataactaacttcaaagtattttaactctttctttaaaattatttttttcatggattacaatgatcccagagggaaattgaagtgaaaatgttacccaagatttttctttaggccaccgagttgattagagggtcactgctccatcgttgcttcaggcaaaagagtctccatcttcattccaaatgaggtgagtgtttgagaggccttttctgccctcgcatgcctgacgtgggacaggagcatcaggaggttagccaggcgcatggattgctgctgggaggagatgccgctcttggcaatcacccaaaccaaagcatcggtcacggcgttcagcaagtgagccagcttccggctgctgtcagcatcctgggtcgctgtgaccagagggtacatactggaattgagcaggatcatggccttgacacagagatattctttgtgttggagttttaactctcgaaaccttgaagtagttgccaggagcatgtcaaagatttccagaattccttctacgcatttcccctcatccctgtccagaacaagatctggagcaaagatgagcttgccggggtggtcaattgagcgccacatcagccccatcattaacacctccatccaacagctctccaagagccgcacttggtcgaacaggctgagctccacaaagccgggaatcttcttggcccagctgatcatgtgtaccaactccttgtcggccaacttggtcagggacatcatcatggaggcctcggtgaagggcgcactggggcggctgatcagcacatggggcggctcagcctccaggagggtgagcactagctgctcggggctcagggcgtccagcagcagctcccgcactcggggcgcgtggccgccacttctcttggccttgccggcacagtgcagctgctcgtcggcacttctctgtctccgcacaaggcggtacccacatctctctctccgggagccacacttcaccattcccacttcgtaacacttccgaagtcggcaggcctggcagctcttgcgccggtttttatcgattgtacactgatttgtagctggacaaatataatcattatgtccttgaatgcttcttttaaaaaaggccttacatccttcacacgaccagactccatagtgatatcccgatgcgtaatcgctgcagacagcgcagaagtgagcatccctctttgaacctggaccagtaacagggctggcgcaacggttcccactaaccttccttttcagtgtctctctgtttacaggtaaggtgtgttctagcgatcttgcttcacaccagggactcttttgaggttccgcatacagatgtgataactggcgatggaccactaaaggagaaaggtgcccaggtgttggccacaacacatttgggcttgtggtctgccgaccaggcccaccttccaagttagtgacattgctgggaatgctgtaattcatcacagcagggctatagaatgtcatggctggatattcatggtggctgtctacataggaggaaggtatgtatatggagccgtgctccaggggtaagatggattgactgcagttgtaggaggaaggagaattaaggctagatggtgagttttttatatccatgtcttgagataacagctgagaaaacaccttgcaagaagaggcacaaaggtcattataatgttctcaaagattcgtgggcaagtataatggcttgcagataaacacaccggccttgccttctctaaaatgcggacacgtgcttttcccgcattagggggggtctcccggcgcgcgccccgccgccacctgttgaggaaagcgagcgcacctcctgcagctcaggctccgggcgccagccctgccccgcagccccagagcccgtcgcagctcgggtggtccctccccggcccagcgctcgccgcctgctcttcgccctgcaagtttcaagaggcagttatttctcgcagcctccgcgcttgcaactgcctcctggcgggggagtgggtgtccaaaaagccagcagctggagaaactgaaaagatcacaagcgacttaacgataagccccttcttccttttaaagaccgag

SEQ ID NO: 735501 - DNA, 2470 bp, Homo sapiens
tttttgacaagtctcactctgtcagtcacccaggctggagtgcggtggcccaatctcggctcactgcaacctttgccttccaggttcaagccattctcatgcctcagcctcctgagtagctgggattacaagcacacaccaccatgcctggctaattattatatttttaatagagacggggtttcgccatgttggccaggctggtttcaaactcctgacctcaactgatctgcccacctcggcctcccaaagtgttgggattacaggtgtgagccaccgcacctggattcccagccctctccatggcaaatgaacaggcaaagccccttgttgcccatttaagtccagtagcattttactttctacctaaacaaagaggataggcatcggcatttcccctttcttattggaagatactgaacacagttcctaacctgcatctgttggcaggcacagctgaccacacaatcccagtcccctcctccccttctctgccaaagcacaaacctcaggggaaaccagtgaagctcatcagtagatgaagcctcagctttctacattggtgcccctcatgggtgagacatctgcaagccctgggcagttaaggagaccatctgaagagaatccgtcttcactttagcgtttacagttatcaaattgttggattgataatagaaaggaaggtggtttttaaccacataactaacttcaaagtattttaactctttctttaaaattatttttttcatggattacaatgatcccagagggaaattgaagtgaaaatgttacccaagatttttctttaggccaccgagttgattagagggtcactgctccatcgttgcttcaggcaaaagagtctccatcttcattccaaatgaggtgagtgtttgagaggccttttctgccctcgcatgcctgacgtgggacaggagcatcaggaggttagccaggcgcatggattgctgctgggaggagatgccgctcttggcaatcacccaaaccaaagcatcggtcacggcgttcagcaagtgagccagcttccggctgctgtcagcatcctgggtcgctgtgaccagagggtacatactggaattgagcaggatcatggccttgacacagagatattctttgtgttggagttttaactctcgaaaccttgaagtagttgccaggagcatgtcaaagatttccagaattccttctacgcatttcccctcatcccgggaatcttcttggcccagctgatcatgtgtaccaactccttgtcggccaacttggtcagggacatcatcatggaggcctcggtgaagggcgcactggggcggctgatcagcacatggggcggctcagcctccaggagggtgagcactagctgctcggggctcagggcgtccagcagcagctcccgcactcggggcgcgtggccgccacttctcttggccttgccggcacagtgcagctgctcgtcggcacttctctgtctccgcacaaggcggtacccacatctctctctccgggagccacacttcaccattcccacttcgtaacacttccgaagtcggcaggcctggcagctcttgcgccggtttttatcgattgtacactgatttgtagctggacaaatataatcattatgtccttgaatgcttcttttaaaaaaggccttacatccttcacacgaccagactccatagtgatatcccgatgcgtaatcgctgcagacagcgcagaagtgagcatccctctttgaacctggaccagtaacagggctggcgcaacggttcccactaaccttccttttcagtgtctctctgtttacaggtaaggtgtgttctagcgatcttgcttcacaccagggactcttttgaggttccgcatacagatgtgataactggcgatggaccactaaaggagaaaggtgcccaggtgttggccacaacacatttgggcttgtggtctgccgaccaggcccaccttccaagttagtgacattgctgggaatgctgtaattcatcacagcagggctatagaatgtcatggctggatattcatggtggctgtctacataggaggaaggtatgtatatggagccgtgctccaggggtaagatggattgactgcagttgtaggaggaaggagaattaaggctagatggtgagttttttatatccatgtcttgagataacagctgagaaaacaccttgcaagaagaggcacaaaggtcattataatgttctcaaagattcgtgggcaagtataatggcttcagaaccatattgggatgactgtaacctgagcgcggttcctccagcagagcaagcacattcatcggactcagtaactcaaggggccagtcctctccagcatcccagctgccgccgccctgtcaggcttcccaggcaatcgcccatcttattccttctccagtgtggacgcctacgaggagggagcgtcccctctcgct

SEQ ID NO: 735502 - DNA, 3593 bp, Homo sapiens
tttttgacaagtctcactctgtcagtcacccaggctggagtgcggtggcccaatctcggctcactgcaacctttgccttccaggttcaagccattctcatgcctcagcctcctgagtagctgggattacaagcacacaccaccatgcctggctaattattatatttttaatagagacggggtttcgccatgttggccaggctggtttcaaactcctgacctcaactgatctgcccacctcggcctcccaaagtgttgggattacaggtgtgagccaccgcacctggattcccagccctctccatggcaaatgaacaggcaaagccccttgttgcccatttaagtccagtagcattttactttctacctaaacaaagaggataggcatcggcatttcccctttcttattggaagatactgaacacagttcctaacctgcatctgttggcaggcacagctgaccacacaatcccagtcccctcctccccttctctgccaaagcacaaacctcaggggaaaccagtgaagctcatcagtagatgaagcctcagctttctacattggtgcccctcatgggtgagacatctgcaagccctgggcagttaaggagaccatctgaagagaatccgtcttcactttagcgtttacagttatcaaattgttggattgataatagaaaggaaggtggtttttaaccacataactaacttcaaagtattttaactctttctttaaaattatttttttcatggattacaatgatcccagagggaaattgaagtgaaaatgttacccaagatttttctttaggccaccgagttgattagagggtcactgctccatcgttgcttcaggcaaaagagtctccatcttcattccaaatgaggtgagtgtttgagaggccttttctgccctcgcatgcctgacgtgggacaggagcatcaggaggttagccaggcgcatggattgctgctgggaggagatgccgctcttggcaatcacccaaaccaaagcatcggtcacggcgttcagcaagtgagccagcttccggctgctgtcagcatcctgggtcgctgtgaccagagggtacatactggaattgagcaggatcatggccttgacacagagatattctttgtgttggagttttaactctcgaaaccttgaagtagttgccaggagcatgtcaaagatttccagaattccttctacgcatttcccctcatccctgtccagaacaagatctggagcaaagatgagcttgccggggtggtcaattgagcgccacatcagccccatcattaacacctccatccaacagctctccaagagccgcacttggtcgaacaggctgagctccacaaagccgggaatcttcttggcccagctgatcatgtgtaccaactccttgtcggccaacttggtcagggacatcatcatggaggcctcggtgaagggcgcactggggcggctgatcagcacatggggcggctcagcctccaggagggtgagcactagctgctcggggctcagggcgtccagcagcagctcccgcactcggggcgcgtggccgccacttctcttggccttgccggcacagtgcagctgctcgtcggcacttctctgtctccgcacaaggcggtacccacatctctctctccgggagccacacttcaccattcccacttcgtaacacttccgaagtcggcaggcctggcagctcttgcgccggtttttatcgattgtacactgatttgtagctggacaaatataatcattatgtccttgaatgcttcttttaaaaaaggccttacatccttcacacgaccagactccatagtgatatcccgatgcgtaatcgctgcagacagcgcagaagtgagcatccctctttgaacctggaccagtaacagggctggcgcaacggttcccactaaccttccttttcagtgtctctctgtttacaggtaaggtgtgttctagcgatcttgcttcacaccagggactcttttgaggttccgcatacagatgtgataactggcgatggaccactaaaggagaaaggtgcccaggtgttggccacaacacatttgggcttgtggtctgccgaccaggcccaccttccaagttagtgacattgctgggaatgctgtaattcatcacagcagggctatagaatgtcatggctggatattcatggtggctgtctacataggaggaaggtatgtatatggagccgtgctccaggggtaagatggattgactgcagttgtaggaggaaggagaattaaggctagatggtgagttttttatatccatgtcttgagataacagctgagaaaacaccttgcaagaagaggcacaaaggtcattataatgttctcaaagattcgtgggcaagtataatggctgtcaacacaacctgcgctgcgattggacagcgcatgtcttacatctctagcattctccatggtccataacacccacctagcacaatccacgcgttcaacaaatgtttgctgaagcctttgacttggaaagatcagagggagaattttccgtaggaaagaaactaccaagaggcaaaacaaaaccctacctgcacatcccatgttttctccactgtcatgagatgctgttcttatttgttgcataaatggaggcatgtctgtcctgtagagcccagatacagggctaattagagggcgctgatctcctctggggtctcttctgaattacacagtgcatgggcccagccttgaatccttcccttggagtccctcgttcttccactttagcactgtggaagcttcattcagggcacctgtaggctacaaactacctccatctgctctgtttttcaacctaaccttgtggctgggagaagagagcccaggatttctgtgttctcgctccttaatccatgtgcattctcctcctgctccctctatcgtcccttcaacctccagtcctggatagcgttaagggctcaaattctaacaaggatcacctgctagagagttggttcagaatttctaaagactttaagtgatcattcttttccacaacaggttgatgtctccctcttacaaacaggccattctcagtcttcattttatttgatcagtctgtaacatttaacagttaattactctttctttcacagaacacatttttcacctgtcttgtaaggcagcatgctcttggggttttcctcataacacactggactcttcttttcaatcttccctcctgtttccttctcatctccttgaattctaaacactgcagtgtcctaggcatcggtatttggttgtctccacctaaacctgttcctttggtgggatctcatccaatctcatgaatttaaatgccatatctccacttggatgtcttcagaaccatattgggatgactgtaacctgagcgcggttcctccagcagagcaagcacattcatcggactcagtaactcaaggggccagtcctctccagcatcccagctgccgccgccctgtcaggcttcccaggcaatcgcccatcttattccttctccagtgtggacgcctacgaggagggagcgtcccctctcgct

SEQ ID NO: 735503 - DNA, 434 bp, Homo sapiens
cttcatagtggcacttttattcgcggcctcctggcactgtgctgagtgtcttccttctttcctcttcctcattttggggccctggcatttagtttaaagctggtcctcgtattcagtgggtaaggccagaaaagcaaatgactgtgatggattggaagcagtaagccatgttcctggcacaccctcttccagggctctaagacacggccgcgctctgatgtgttgttttttaagggacttccaccagttgagtcaaaatctgctgctgtggttagcgagtgccaagaaccggaggcagaaggctcatgtcaccgatccaaaggcagacccccgggctctcctagagtgtcggagggaactaatggtaagtttcctcccaagggctctgtactgccaccagcctctgtcagccccagagaggcagcacactcagg

SEQ ID NO: 735504 - DNA, 423 bp, Homo sapiens; identical to SEQ ID NO: 373618

SEQ ID NO: 735505 - DNA, 1552 bp, Homo sapiens; identical to SEQ ID NO: 373620
  misc_feature (497)..(497): n is a, c, g, or t

SEQ ID NO: 735506 - DNA, 684 bp, Homo sapiens
  misc_feature (543)..(543): n is a, c, g, or t
tcgtctagaggatctctcataggttcgcaggacccagagaaatccagactgattcttggcgtaaacggggagagagcgaggaaccgtcatctcctcagtccctgtgtcatctagtggccccagggcacgagcggtctggctgcgagacccctgtcagcgtggactccatccccctggagtgggaccacacaggcgacgtggggggctcctcctctcacgaagaggacgaggagggcccatactacagcgcactgtcagatgtagaaatccctgaaaatcctgaggcatatcttaaaatgaccacaaaaactttgaaagcgtcttctggtaaatccatttcggatggccactcgtggcatgttcccgacagcccttcctgtcccgagcatcactacaagcaaatggaaggtgacaggaatgttccacctgttccccctgcgaacctatgatcataggttcgcagggggagtggtaaggagaggatggtttgggctccttcctctttttagaaatatacaagcagaaatctcattctctcaagtngttataaaatgtgcaaaatacaagcctcctttgcccagaggcaccatttacatctggtattcacctttgctaagagatagagatctatatatactccacgtgctcacgcacgcgtgcactcgcagccaagctcacacaatt

SEQ ID NO: 735507 - DNA, 315 bp, Homo sapiens
catagttttagaagtttcatagcaatgcgattgaaacttctaaaactcccaggcagcaatgatagactggattaagaaaatgtggcacatatacaccatggaatactatgcagccataaaaaatgatgagttcatgtcctttgtagggacatggatgaaattgaaaatcatcattctctgataattccatggcacaaatcctcacaccagactcactaaacactgagcaaggcccagaatgttccctaaggcccaaccaaacagaagagggcaccacacctgctattgaaacttctaaaactagggggtaccgag

SEQ ID NO: 735508 - DNA, 344 bp, Homo sapiens; identical to SEQ ID NO: 203625

SEQ ID NO: 735509 - DNA, 2695 bp, Homo sapiens
  misc_feature (606)..(606): n is a, c, g, or t
  misc_feature (739)..(739): n is a, c, g, or t
aaatcaaatttattgaggtataatttacatacagtaaaaatattaatacacctattttaagtagcagttaggtaagttttgataaaagtgcagttgtgtaaccaccaccgccatcaatataaggaacatctccatctcccaagacgtttcctcctgcctctttgcagtcaatcccctttcacctgtcttcaaccctaggtgatcactcactgtttcctattactatagttttgccttttctagaatatcatatagagggaatcaaacagtatgtagtcttacgtggctcacttgtttcacttaacataatgcctttgagattcatccaggttgttacacttaatgcatagttaattatttgattgccaagtagtgttccagttttggaaataagtttggaaatgagtagtttgtttatctaccagttaatagatatttgggttgcttccagttttgagctatatattagctatttttgtgtaacatattactccataagttagcagcttgaaacaacaaacttattatcacagtttctgtgggtcaggagtccatgggcatggcttagctaagtatctctggctcaaggtctctcatgagaatgcngtcaaggtgtcgacaaaggctgcaggctcatctgaaggctcgacttgtgtgagggaggaggtgggatctgcttccaagctcattcccgtggctgttgacaggcctcaaaagatctgcttctacttacagacangtgggctcctccaggagtctgcctcacaccatggcagctggcttccctcagcataaacaatctccaagagagtgagagagagctcgcatgcctgacgtgggacaggagcatcaggaggttagccaggcgcatggattgctgctgggaggagatgccgctcttggcaatcacccaaaccaaagcatcggtcacggcgttcagcaagtgagccagcttccggctgctgtcagcatcctgggtcgctgtgaccagagggtacatactggaattgagcaggatcatggccttgacacagagatattctttgtgttggagttttaactctcgaaaccttgaagtagttgccaggagcatgtcaaagatttccagaattccttctacgcatttcccctcatccctgtccagaacaagatctggagcaaagatgagcttgccggggtggtcaattgagcgccacatcagccccatcattaacacctccatccaacagctctccaagagccgcacttggtcgaacaggctgagctccacaaagccgggaatcttcttggcccagctgatcatgtgtaccaactccttgtcggccaacttggtcagggacatcatcatggaggcctcggtgaagggcgcactggggcggctgatcagcacatggggcggctcagcctccaggagggtgagcactagctgctcggggctcagggcgtccagcagcagctcccgcactcggggcgcgtggccgccacttctcttggccttgccggcacagtgcagctgctcgtcggcacttctctgtctccgcacaaggcggtacccacatctctctctccgggagccacacttcaccattcccacttcgtaacacttccgaagtcggcaggcctggcagctcttgcgccggtttttatcgattgtacactgatttgtagctggacaaatataatcattatgtccttgaatgcttcttttaaaaaaggccttacatccttcacacgaccagactccatagtgatatcccgatgcgtaatcgctgcagacagcgcagaagtgagcatccctctttgaacctggaccagtaacagggctggcgcaacggttcccactaaccttccttttcagtgtctctctgtttacaggtaaggtgtgttctagcgatcttgcttcacaccagggactcttttgaggttccgcatacagatgtgataactggcgatggaccactaaaggagaaaggtgcccaggtgttggccacaacacatttgggcttgtggtctgccgaccaggcccaccttccaagttagtgacattgctgggaatgctgtaattcatcacagcagggctatagaatgtcatggctggatattcatggtggctgtctacataggaggaaggtatgtatatggagccgtgctccaggggtaagatggattgactgcagttgtaggaggaaggagaattaaggctagatggtgagttttttatatccatgtcttgagataacagctgagaaaacaccttgcaagaagaggcacaaaggtcattataatgttctcaaagattcgtgggcaagtataatggcttgcagataaacacaccggccttgccttctctaaaatgcggacacgtgcttttcccgcattagggggggtctcccggcgcgcgccccgccgccacctgttgaggaaagcgagcgcacctcctgcagctcaggctccgggcgccagccctgccccgcagccccagagcccgtcgcagctcgggtggtccctccccggcccagcgctcgccgcctgctcttcgccctgcaagtttcaagaggcagttatttctcgcagcctccgcgcttgcaactgcctcctggcgggggagtgggtgtccaaaaagccagcagctggagaaactgaaaagatcacaagcgacttaacgataagccccttcttccttttaaagaccgag

SEQ ID NO: 735510 - DNA, 648 bp, Homo sapiens; identical to SEQ ID NO: 109639

SEQ ID NO: 735511 - DNA, 1010 bp, Homo sapiens
aatgttgaagttcaagtccaatggctgtctgttggcagaatttttctttgcttgcagaaggtcagtcttttggtctcttcagatgttcaactgattggatgagccccacccaaattatgaaaggtaatctgctttactcaaagtccaccgatctaaatgttaacctcatccaaaaacatcttcacagaaacatccagaataatgtttaaccaactatctgggcaacacagcccagctaagttaacacataaaattaatcatcatggcagcaggcacctgtaatcccagctactcgggaggctgaggcagaagaattgcttgaacctggcaggctgaggttgcagttagccgagatcataccactgcgttccagcctgggtgacagaggaggactccatcttgatctcttgttgctggctactgagtttagtctcttagtttgagtaaatatttgtttcccacttctgtttcaggctcctatgttttccttttaaaagtgatcttacaaacaggccattctcagtcttcattttatttgatcagtctgtaacatttaacagttaattactctttctttcacagaacacatttttcacctgtcttgtaaggcagcatgctcttggggttttcctcataacacactggactcttcttttcaatcttccctcctgtttccttctcatctccttgaattctaaacactgcagtgtcctaggcatcggtatttggttgtctccacctaaacctgttcctttggtgggatctcatccaatctcatgaatttaaatgccatatctccacttggatgtcttcagaaccatattgggatgactgtaacctgagcgcggttcctccagcagagcaagcacattcatcggactcagtaactcaaggggccagtcctctccagcatcccagctgccgccgccctgtcaggcttcccaggcaatcgcccatcttattccttctccagtgtggacgcctacgaggagggagcgtcccctctcgct

SEQ ID NO: 735512 - DNA, 2315 bp, Homo sapiens
agcccgcggggtgaaatgacttgctcatggtctggtagctaatcgcagatctgctctctaactcctacttccaagacccaggaatctacgggtgttggagaagacccctcctgaaatcctccagaagagctttttgagggagcttgtggctcctgttcacccagccccggttcacttcttcaactgagatggacatgatataatctccattgagtcaaagaatggcatctagtcctgagcttcccaccgaagatgaacagggttcctggggcatcgacgatctccatatttcattgcaagctgaacaggaagacacccagaagaaagccttcacgtgctggataaactcacagttggccaggcacacttctccctcagttatatccgacctattcacagacattaaaaaggggcatgtcctcctggatctgctagaagtactttctgggcaacagttgcctcgggataaaggatctaataccttccagtgtagaatcaatatagaacatgccttgacattcctaagaaaccgatcaattaagctaataaatattcatgttactgatatcattgatggaaacccatccattatccttggcctaatttggacaattatcctgcactttcatattgagaagcttgcccagactctttcttgcaattacaatcagccttccctggatgatgtgagtgtggttgactcatctcctgcctcaagtcctccagctaagaaatgctctaaagtgcaagcaagatggcaaatgtctgcaagaaaggcccttcttttgtgggctcaggaacaatgcgccacctatgagtctgtcaatgtgaccgattttaagtcaagttggagaaatgggatggcttttttggccatcattcatgccttgcgaccagacctaattgacatgaagagtgtgaagcatagatccaacaaagacaatctgagagaggccttcagaattgcagaacaagaattaaaaatccccagattgctggaaccagaagatgtggatgttgttgatcctgatgaaaagtccatcatgacctatgtggcacagtttctgcagtattccaaagatgcccctgggactggagaggaggctcagggaaaggtgaaagatgctatgggctggttaactctgcaaaaggaaaaactacagaagttgctaaaggattcagagaatgatacctactttaaaaagtataatagcctgctgtcctttatggagtcattcaatgaagaaaaaaagtcctttttggatgtcctgtcaataaaacgggatctggatgagctggacaaggatcatttacagttgagagaagcctgggatggcctcgatcaccagattaatgcatggaaaataaagctaaattatgccttgcccccacccctccatcaaactgaagcttggctccaggaggtagaagagcttatggatgaagatttgtcagcctcccaggatcactctcaagccgtgactctgatacaagagaaaatgactttattcaagagcctgatggatagatttgagcatcattcgaacattctccttacctttgaaaataaggatgaaaatcacttgccattggtaccacctaacaaattggaggaaatgaaaagacgaatcaacaacattttggagaaaaaatttattctacttctagaatttcattactacaagtgcttagttcttggtttggtagatgaagtgaaatcaaaattggatatttggaacattaaatatgggagcagagaatctgtggaattattgctggaagactggcataaatttattgaagaaaaagaattcctagctcgacttgatacttcttttcaaaaatgtggagaaatttataagaatttggctggagaatgtcagaatattaataaacagtatatgatggtgaaatctgatgtttgtatgtatagaaaaaatatatataatgtgaagtccactctacaaaaagtgctggcatgttgggctacttatgtggaaaaccttcgcttactaagggcttgctttgaggagacaaagaaggaagaaattaaagaggtaccctttgagacactagcccagtggaatctagaacacgctactttaaatgaagcaggaaatttcttagtcgaagtcagcaatgatgtggttggatcatctatttctaaagaactgagaaggctgaataaaagatggagaaagttggtttcaaaaactcaacttgtaagttcttttgattggttgcagctttatttagatatgattcatgtaccacacaatttactcattgtaagttcataaccaattgatttctgg

SEQ ID NO: 735513 - DNA, 13601 bp, Homo sapiens
  misc_feature (6127)..(6127): n is a, c, g, or t
  misc_feature (6702)..(6702): n is a, c, g, or t
  misc_feature (7072)..(7072): n is a, c, g, or t
  misc_feature (7297)..(7297): n is a, c, g, or t
  misc_feature (7404)..(7404): n is a, c, g, or t
  misc_feature (9565)..(9565): n is a, c, g, or t
agcccgcggggtgaaatgacttgctcatggtctggtagctaatcgcagatctgctctctaactcctacttccaagacccaggaatctacgggtgttggagaagacccctcctgaaatcctccagaagagctttttgagggagcttgtggctcctgttcacccagccccggttcacttcttcaactgagatggacatgatataatctccattgagtcaaagaatggcatctagtcctgagcttcccaccgaagatgaacagggttcctggggcatcgacgatctccatatttcattgcaagctgaacaggaagacacccagaagaaagccttcacgtgctggataaactcacagttggccaggcacacttctccctcagttatatccgacctattcacagacattaaaaaggggcatgtcctcctggatctgctagaagtactttctgggcaacagttgcctcgggataaaggatctaataccttccagtgtagaatcaatatagaacatgccttgacattcctaagaaaccgatcaattaagctaataaatattcatgttactgatatcattgatggaaacccatccattatccttggcctaatttggacaattatcctgcactttcatattgagaagcttgcccagactctttcttgcaattacaatcagccttccctggatgatgtgagtgtggttgactcatctcctgcctcaagtcctccagctaagaaatgctctaaagtgcaagcaagatggcaaatgtctgcaagaaaggcccttcttttgtgggctcaggaacaatgcgccacctatgagtctgtcaatgtgaccgattttaagtcaagttggagaaatgggatggcttttttggccatcattcatgccttgcgaccagacctaattgacatgaagagtgtgaagcatagatccaacaaagacaatctgagagaggccttcagaattgcagaacaagaattaaaaatccccagattgctggaaccagaagatgtggatgttgttgatcctgatgaaaagtccatcatgacctatgtggcacagtttctgcagtattccaaagatgcccctgggactggagaggaggctcagggaaaggtgaaagatgctatgggctggttaactctgcaaaaggaaaaactacagaagttgctaaaggattcagagaatgatacctactttaaaaagtataatagcctgctgtcctttatggagtcattcaatgaagaaaaaaagtcctttttggatgtcctgtcaataaaacgggatctggatgagctggacaaggatcatttacagttgagagaagcctgggatggcctcgatcaccagattaatgcatggaaaataaagctaaattatgccttgcccccacccctccatcaaactgaagcttggctccaggaggtagaagagcttatggatgaagatttgtcagcctcccaggatcactctcaagccgtgactctgatacaagagaaaatgactttattcaagagcctgatggatagatttgagcatcattcgaacattctccttacctttgaaaataaggatgaaaatcacttgccattggtaccacctaacaaattggaggaaatgaaaagacgaatcaacaacattttggagaaaaaatttattctacttctagaatttcattactacaagtgcttagttcttggtttggtagatgaagtgaaatcaaaattggatatttggaacattaaatatgggagcagagaatctgtggaattattgctggaagactggcataaatttattgaagaaaaagaattcctagctcgacttgatacttcttttcaaaaatgtggagaaatttataagaatttggctggagaatgtcagaatattaataaacagtatatgatggtgaaatctgatgtttgtatgtatagaaaaaatatatataatgtgaagtccactctacaaaaagtgctggcatgttgggctacttatgtggaaaaccttcgcttactaagggcttgctttgaggagacaaagaaggaagaaattaaagaggtaccctttgagacactagcccagtggaatctagaacacgctactttaaatgaagcaggaaatttcttagtcgaagtcagcaatgatgtggttggatcatctatttctaaagaactgagaaggctgaataaaagatggagaaagttggtttcaaaaactcaacttgaaatgaacctgccactgatgataaaaaaacaggatcagcccacttttgacaattctggaaatattctatctaaagaagagaaagcaactgttgagttttcaacagatatgtcagtagaacttcctgaaaattataatcaaaatataaaggctggagagaaacatgaaaaagaaaatgaagaattcacagggcaactaaaagtggctaaagatgttgaaaaactcattggacaagtggaaatctgggaggcagaagccaaatctgttttggatcaagatgatgtggacacctcaatggaagaatctttgaagcatcttattgccaaaggctctatgtttgatgagcttatggcaagaagtgaagatatgttacaaatggatatacaaaatatttcaagccaggagtcctttcaacatgttctcacaactgggcttcaggcaaagattcaagaagctaaagagaaagtccagatcaatgtggtaaaactcattgcagcgttgaagaacttaactgacgtttcaccagatttggacatcaggctgaagatggaagaatcccagaaggaacttgaatcatatatgatgagggctcagcagttactggggcaaagagagagccccggtgaactcatttcaaaacacaaggaagcactaataatttctaatacaaaaagtctggccaagtatttgaaagctgttgaagaactaaaaaataatgtaactgaggacataaagatgtctttagaagaaaagagtagagatgtctgtgccaaatgggagtctcttcatcatgaactgtctttatatgttcaacaactaaaaatagatattgaaaaaggaaagcttagtgacaatattttaaaacttgaaaagcaaataaataaagaaaagaaacttatccgtagaggaaggaccaagggtctcatcaaagaacatgaggcctgcttttctgaggaaggctgcctgtaccagcttaatcaccacatggaagtcctgagggagctgtgtgaagagctgccttcacagaagagtcaacaagaagtgaagagactactcaaagattatgaacaaaagatagaaagacttctgaaatgtgcttccgagattcatatgacactgcagcccacagcgggaggcacgtcgaaaaacgaggggaccatcaccacatctgagaatagaggaggggatccccacagtgaggcaccatttgcaaaatcagataatcagccatcaactgaaaaggcaatggaacccactatgaagtttagcctggcatcagtgttaaggcctctgcaagaagaaagcattatggaaaaggattacagtgcatctataaatagtttactagagaggtatgatacatacagagatattcttgaacaccacctgcaaaacaacaaattcaggattacttctgatttctctagtgaagaggacaggagtagttcttgtctgcaggctaaactgacagatctacaggtcataaaaaatgaaactgatgctcgctggaaagagtttgaaattatttcattgaagttagaaaatcatgtgaatgacataaaaaagccttttgtaattaaggaaagagacacactaaaggaaagagaaagagagcttcagatgactcttaataccagaatggaatctttagagacagcactgcggcttgtgttacctgtagagaaggcatcacttcttctctgtggctcggacctgcctctccataaaatggccatccagggatttcatctcattgatgctgatcgcatctatcaacacctaaggaatatccaagattccatagcaaaacagattgaaatatgtaaccgcttagaagagccaggcaactttgtattaaaggagttacacccatttgatctacacgcaatgcagaatattatactgaaatacaaaacacaatttgaaggaatgaaccacagggtgcagaggagtgaagatactctcaaagctctggaagactttttggcgtctctcagaacagctaaactctctgctgagcccgttacagacctttcagcctcagatacacaggtggcacaagaaaatacgttgacagtaaaaaataaagagggagaaattcatctgatgaaagacaaggccaaacatttggataaatgtttgaagatgctcgatatgagctttaaagatgctgaacggggtgatgacacctcctgtgaaaacctgcttgatgctttttcaataaagttatctgagacacatggctatggggtacaggaggaattcactgaggaaaacaaattactagaggcttgtattttcaaaaataatgaactccttaaaaatattcaagatgtgcagagtcaaatcagtaaaattggtcttaaggatcctactgttccagctgtgaaacatcggaaaaaatcattaatcagactggataaggttctagatgaatatgaagaagagaagagacatttacaagaaatggctaattctcttccacacttcaaagatggcagagaaaaaaccgtgaatcaacagtgccaaaatacagtagtcttgtgggagaataccaaagccttggtcaccgaatgtcttgaacaatgtgggagagttttggagctcttaaaacaatatcagaattttaaaagcatcttgacaactttgattcaaaaagaagagagtgtcatctccctgcaggcttcgtacatgggaaaggagaacctgaagaaaaggatagcagagattgaaattgtcaaagaagaatttaatgagcatttagaagttgtagacaagataaaccaggtctgcaaaaatctacaattttatctaaataaaatgaaaacttttgaagagcccccttttgaaaaagaggctaatattattgtggatagatggcttgatataaatgagaagacagaagattactatgaaaatcttggtcgagctctagctttgtgggacaaactttttaacttaaaaaatgtcattgatgagtggacagaaaaggcccttcaaaaaatggaattacatcaattgactgaagaggacagagaaaggctgaaggaagaattacaagtccatgaacaaaaaacttcagaattttctagaagagtggctgaaatacagtttttgctccaaagcagtgaaatacctcttgaattgcaggtcatggagtcctctattttgaacaagatggaacatgtacagaagtgcttaacaggagaatccaactgccatgcactcagtggcagcactgctgagctaagggaggatctcgaccaagccaagacccagatcgggatgactgaatccctcttaaaagccctgtctccttctgacagcttggagatcttcactaaactagaggagatacaacagcagattctacagcaaaaacacagtatgatattacttgagaatcaaataggttgtctgactcctgaactctctgaattgaaaaagcaatatgaaagtgtcagtgatttatttaataccaaaaaaagtgttttgcaagatcacttttctaagttattgaatgatcaatgcaagaactttaatgactggttcagcaacattaaagtgaaccttaaggagtgttttgaatcatcagaaacaaaaaagagtgtggaacaaaagctacaaaaactttctgatttcttgactcttgaaggaagaaacagtaaaataaagcaggtggacagcgtactgaagcatgtgaagaagcatctgcccaaagcacatgtgaaggagcttatcagttggctcgtgggtcaggaattcgaattagaaaaaatggagtccatatgccaggctcgagcaaaggagcttgaagactccttgcagcagctactgagactccaggatgaccatagaaacctgaggaagtggttgactaatcaagaagagaaatggaaaggaanggaagaaccaggggagaaaactgagctgttctgccaagctttagctagaaagagggaacagtttgaatctgtggcccaattgaacaactctttgaaggaatatgggtttactgaagaagaagaaataataatggaagcaacatgtttgatggatagataccagacattactgagacaactaagtgaaatcgaggaagaggataagttactacccacagaggaccagagctttaatgatcttgcacatgatgtaattcattggataaaagagattaaagagtcccttatggttttgaattcatccgaaggcaaaatgccacttgaggaaagaatccaaaaaatcaaggaaatcattttgctgaagcctgaaggggatgccagaatagagaccatcatgaagcaggctgagagcagcgaggccccgctggttcagaagaccctcactgacatcagcaaccagtgggacaacacactccatttagctagcacctacctaagccatcaagaaaagcttctactagaaggagagaaatatttacaaagtaaggaggatctgagattaatgctcatagaantaaagaagaaacaggaagcaggctttgctctacaacatggtctgcaggagaagaaagctcagttaaagatttataagaaattcctcaagaaagcccaagatttgacatccttgctaaaggagttaaaatctcagggaaactacctcttggagtgcactaaaaatcccagcttcagtgaagagccttggctggaaataaagcatctacacgaaagtcttcttcaacaactgcaggattctgtgcaaaacttggacggtcacgttcgagaacatgattcataccaggtttgcgtcacagacctgaatactacattggacaatttctccaaggaatttgtcagtttttctgataagcctgtggatcaaatagnggttgaggaaaaattgcagaaactgcaggaactagagaatagactcagtttacaagatggcacattaaagaagattttagctttagcaaaatccgtcaagcaaaatacatcttcagtggggcagaagattattaaagatgatataaaatcacttcagtgtaaacaaaaagatttggaaaacaggcttgcatctgctaagcaggagatggaatgttgtctcaacancattctcaaatcaaaacgctcaacagaaaagaaaggaaagtttactctgccaggcagagagaagcaggccacttctgatgtgcaggagtctactcaggaatcagctncagtggaaaagttggaggaagactgggaaataaacaaggattcagctgtggaaatggctatgtcaaaacaactttctcttaatgctcaagaaagcatgaaaaacactgaagatgagcggaaagtcaatgagctgcaaaatcaacctttagaattagatactatgttaagaaatgaacaattagaagagatagagaaattatatacccagttggaagcaaagaaagcagccattaagccactggaacaaacagaatgtcttaacaaaacagaaactggggccttggttctccacaatataggatattcggcacagcatttggacaatttgcttcaggcacttattactttgaagaaaaacaaagaaagccaatattgtgtcctcagagattttcaggaataccttgctgcagttgaatcttcaatgaaagccttgttgacagacaaggaaagtcttaaagtaggaccactggacagtgtaacgtatctggacaaaattaaaaaattcatagcatccatagaaaaagagaaagattctttaggcaacttgaaaatcaaatgggagaatttatcaaaccacgtgactgacatggataagaaattgttggaaagccagattaagcaacttgaacatggttgggaacaagtggaacagcagattcaaaagaagtattctcagcaggtagtggaatatgatgaatttacaaccctcatgaataaggtacaggacactgagatttctctgcaacagcagcagcaacatctacagttaaggctgaagtctccagaagaacgggcagggaaccaaagcatgattgccttgaccactgacctccaggctaccaagcatggattttctgttttaaaggggcaagctgaacttcagatgaagaggatttggggagaaaaagaaaagaagaatttggaggatggaataaataacttgaagaaacaatgggaaacattggagccattacacttagaagcagaaaatcagattaagaagtgtgacataaggaacaagatgaaagagactatcttatgggccaagaatttgttgggtgaacttaatccctccattccccttctcccagatgacattctttcacagatcagaaagtgcaaagtgacacatgatggcattctagctaggcagcagtctgtggaatcgttggctgaagaggtcaaagataaggttcctagccttacaacctatgagggcggtgatttaaataataccctagaggacttacggaatcaataccaaatgctggttttaaaatcaactcaaagatcacagcaattagaatttaagttggaagaaagaagcaatttttttgctataataaggaagtttcaacttatggttcaagaaagtgaaacactgataattcccagggtggagacagctgccacggaagctgaactaaaacatcaccatgttactttggaggcatctcagaaggaattgcaagaaattgacagtggaatctcaacacatcttcaggagctaacaaacatctatgaggagctgaatgtgtttgaaagattatttctggaagatcagttgaaaaatcttaagattaggaccaacagaatacaaagattcattcagaatacatgtaatgaagtggaacacaaggtaaagttttgcagacaattccatgaaaaaacatcagcgcttcaggaggaggctgacagtatacagcgcaatgaactattacttaatcaagaagtaaataaaggtgttaaagaggagatctataatcttaaagacagactcaccgctattaagtgttgcatcttacaggtattgaaacttaaaaaagtgtttgactatattggactaaactgggatttttcacaacttgaccaattacaaacccaagtatttgaaaaagaaaaggaacttgaagaaaaaattaagcagttggacacatttgaggaagaacatggcaaatatcaggcattattaagtaaaatgagagctattgatttgcaaattaagaaaatgactgaagtagtactaaaagctcctgatagctctccggaaagcagacggctcaatgcccaaattttaagtcagagaattgagaaagccaagtgtttatgtgatgagataataaagaaattaaatgaaaataagacctttgatgactcatncaaggagaaagaaatactacaaataaagctgaatgcagaagaaaatgataagttatacaaagttctccaaaacatggtattagaactctcaccaaaagaattggatgaaaagaattgtcaggacaaactagaaacttccttacatgttttaaatcagataaaatctcaattacagcagccattacttataaatttggaaattaaacatattcaaaatgaaaaggacaattgtgaagcatttcaggagcaagtttgggcagaaatgtgtagtattaaagctgtgactgctattgagaaacaaagagaagaaaactcttctgaagcgagtgatgtggagacaaaactacgtgagtttgaagatcttcagatgcagcttaacacaagcattgatttgcgcacaaatgtcttgaatcatgcttatgaaaatctaacacgctataaagaagcagtcaccagggcagtggagagcatcacttccctcgaagccatcattataccctacagagtagatgttggtaatccagaagaatctttagagatgcctcttcgaaaacaagaggaattggaatccacagtagcacgcatccaggacctcactgagaaactgggaatgatatccagccccgaagccaaactacaacttcagtatactttacaggaactagtttctaagaactcagcaatgaaggaagctttcaaagcacaggaaactgaggcagaaaggtatcttgagaattacaaatgctatagaaaaatggaagaggatatttacactaacctcagcaaaatggagacagttcttggacagtccatgtcctcgttgccactgtcttacagagaagctttagagcgcttggaacagagcaaggccttggtgtcaaatcttatatcaaccaaagaagagttaatgaaactacgacagatccttagactcttgagactcaggtgcacagaaaatgatggcatatgtttgctcaagattgtgtcggctctgtgggagaaatggctgagtttgctggaagctgctaaagagtgggagatgtggtgcgaagaactgaagcaggaatggaaatttgtcagtgaagaaattgaacgagaggcaattattttagataatcttcaggaagaactccctgaaatttccaaaacaaaagaggcagccaccacagaggaactctctgagctgctagactgtttatgccaatatggagagaacgtggagaagcaacagctgttactgactctacttcttcagcgcatcagaagtatccagaatgttcctgaaagctcaggggctgtggaaactgttccagcatttcaagaaattacttctatgaaagaacgatgcaacaagcttcttcagaaagttcagaaaaataaagaattggtgcagactgaaatccaagaaagacattccttcacaaaagagataattgctttgaagaatttctttcaacagaccacaacttcattccaaaatatggcattccaggatcacccagaaaagtcagaacaatttgaggagcttcaaagcatccttaagaaagggaaactaacttttgagaatattatggaaaaactgcgaatcaagtattccgaaatgtacaccatagtccctgcagagattgaatcccaggtggaagaatgcagaaaagctttagaagacatagatgagaagattagcaatgaagtcttaaaaagctcaccatcatatgcaatgaggagaaaaatagaagaaattaacaatgggcttcataatgttgaaaagatgttgcagcagaaaagcaaaaatattgagaaagctcaagaaattcaaaagaaaatgtgggacgagttagatctatggcattccaaactaaatgagctggattctgaagttcaggacattgttgaacaggacccaggacaggctcaagaatggatggataacttgatgattcctttccagcagtatcagcaagtatcacagagagcagagtgtagaacctcacagttgaataaggccacagttaagatggaggaatatagtgaccttctgaagagcactgaggcttggatagaaaataccagtcatttgctggccaatcctgctgactatgactctttgaggacactgagtcaccatgctagcactgtgcagatggctttggaagattcagaacagaagcacaatcttttacattcaatctttatggatctagaagacctgtcaataatttttgaaacagatgaattaacccaatccatacaagagttaagtaatcaagtaacagctttacaacaaaaaataatggaaagccttccacagattcagcgaatggctgatgatgtggttgctattgaatctgaagtaaaatcaatggaaaaaagagtttcaaaaatcaaaactatcctattatcaaaagaaatatttgatttttcacctgaagaacatctcaaacatggggaggtcatacttgaaaatatacgtcccatgaagaaaaccattgctgagatagtgtcttaccaagtggaactgaggttgccccaaacaggaatgaaacctctgcctgtgtttcagcggacaaatcagcttttacaagatataaaactattggaaaatgtgactcaagaacaaaatgagttattaaaggtagtcataaaacagaccaatgaatgggatgaagaaatagaaaatttgaaacagatcttaaataattattcagctcagttctcccttgaacatatgtcaccagaccaagctgacaagctgccacaactacagggagaaatcgaacgtatggagaaacagattctgagtttgaaccagagaaaagaagacctgttggtggacttgaaggccaccgtactaaaccttcaccagcatttgaagcaagaacaagaaggagtagaaagagataggctgccagctgtaacatcagaggaaggtggagtggcagagagggatgcttctgagcggaagttgaacagaagaggctccatgtcttacctggcagcagtcgaggaagaggtggaagaaagttccgtgaagagcgataatggagatgagaaggcagagccatcgcctcagtcttggtcttcactttggaagcatgacaaggacatggaagaagacagagcttcctcatcctctggaacaattgttcaggaagcatatgggaaaataagcacctctgataattccatggcacaaatcctcacaccagactcactaaacactgagcaaggcccagaatgttccctaaggcccaaccaaacagaagagggcaccacacctcctattgaggctgacactctggactcttctgacgcgcaaggaggtttggagcccagggtggagaaaactaggccggagcccacagaagtcctgcatgcctgcaagacccaggtggccgagctggagctgtggctgcaacaagccaacgtggcagttgagccggaaacattaaacgcagacatgcagcaggtgctggaacagcagctggtagggtgccaggctatgctaacagagattgagcacaaggttgcctttctgttagagacttgcaaagatcagggcctgggagataatggagccactcaacatgaggctgaagcgctttccctgaaactgaaaacagtgaagtgcaatttagaaaaagtccagatgatgcttcaggagaagcacagtgaagatcagcatcctaccattctaaagaaatcctcagagccagagcatcaagaagctctccaaccagttaacctttctgaattggaatccattgtaactgaaaggccacaattcagcagacaaaaagatttccagcagcaacaggttctggagttaaaaccaatggaacagaaagatttcatcaaattcatagaatttaatgctaagaaaatgtggccccagtattgccaacatgataacgatacaactcaggaatcatctgcaaggtaaaacatttaaaaatagagttggtcattcagtggttttatgactgggagaattaagagtgtttcttttaaaaattgctcatagaactgtgaatgtaat

SEQ ID NO: 735514 - DNA, 13730 bp, Homo sapiens
  misc_feature (6127)..(6127): n is a, c, g, or t
  misc_feature (6702)..(6702): n is a, c, g, or t
  misc_feature (7072)..(7072): n is a, c, g, or t
  misc_feature (7297)..(7297): n is a, c, g, or t
  misc_feature (7404)..(7404): n is a, c, g, or t
  misc_feature (9565)..(9565): n is a, c, g, or t
agcccgcggggtgaaatgacttgctcatggtctggtagctaatcgcagatctgctctctaactcctacttccaagacccaggaatctacgggtgttggagaagacccctcctgaaatcctccagaagagctttttgagggagcttgtggctcctgttcacccagccccggttcacttcttcaactgagatggacatgatataatctccattgagtcaaagaatggcatctagtcctgagcttcccaccgaagatgaacagggttcctggggcatcgacgatctccatatttcattgcaagctgaacaggaagacacccagaagaaagccttcacgtgctggataaactcacagttggccaggcacacttctccctcagttatatccgacctattcacagacattaaaaaggggcatgtcctcctggatctgctagaagtactttctgggcaacagttgcctcgggataaaggatctaataccttccagtgtagaatcaatatagaacatgccttgacattcctaagaaaccgatcaattaagctaataaatattcatgttactgatatcattgatggaaacccatccattatccttggcctaatttggacaattatcctgcactttcatattgagaagcttgcccagactctttcttgcaattacaatcagccttccctggatgatgtgagtgtggttgactcatctcctgcctcaagtcctccagctaagaaatgctctaaagtgcaagcaagatggcaaatgtctgcaagaaaggcccttcttttgtgggctcaggaacaatgcgccacctatgagtctgtcaatgtgaccgattttaagtcaagttggagaaatgggatggcttttttggccatcattcatgccttgcgaccagacctaattgacatgaagagtgtgaagcatagatccaacaaagacaatctgagagaggccttcagaattgcagaacaagaattaaaaatccccagattgctggaaccagaagatgtggatgttgttgatcctgatgaaaagtccatcatgacctatgtggcacagtttctgcagtattccaaagatgcccctgggactggagaggaggctcagggaaaggtgaaagatgctatgggctggttaactctgcaaaaggaaaaactacagaagttgctaaaggattcagagaatgatacctactttaaaaagtataatagcctgctgtcctttatggagtcattcaatgaagaaaaaaagtcctttttggatgtcctgtcaataaaacgggatctggatgagctggacaaggatcatttacagttgagagaagcctgggatggcctcgatcaccagattaatgcatggaaaataaagctaaattatgccttgcccccacccctccatcaaactgaagcttggctccaggaggtagaagagcttatggatgaagatttgtcagcctcccaggatcactctcaagccgtgactctgatacaagagaaaatgactttattcaagagcctgatggatagatttgagcatcattcgaacattctccttacctttgaaaataaggatgaaaatcacttgccattggtaccacctaacaaattggaggaaatgaaaagacgaatcaacaacattttggagaaaaaatttattctacttctagaatttcattactacaagtgcttagttcttggtttggtagatgaagtgaaatcaaaattggatatttggaacattaaatatgggagcagagaatctgtggaattattgctggaagactggcataaatttattgaagaaaaagaattcctagctcgacttgatacttcttttcaaaaatgtggagaaatttataagaatttggctggagaatgtcagaatattaataaacagtatatgatggtgaaatctgatgtttgtatgtatagaaaaaatatatataatgtgaagtccactctacaaaaagtgctggcatgttgggctacttatgtggaaaaccttcgcttactaagggcttgctttgaggagacaaagaaggaagaaattaaagaggtaccctttgagacactagcccagtggaatctagaacacgctactttaaatgaagcaggaaatttcttagtcgaagtcagcaatgatgtggttggatcatctatttctaaagaactgagaaggctgaataaaagatggagaaagttggtttcaaaaactcaacttgaaatgaacctgccactgatgataaaaaaacaggatcagcccacttttgacaattctggaaatattctatctaaagaagagaaagcaactgttgagttttcaacagatatgtcagtagaacttcctgaaaattataatcaaaatataaaggctggagagaaacatgaaaaagaaaatgaagaattcacagggcaactaaaagtggctaaagatgttgaaaaactcattggacaagtggaaatctgggaggcagaagccaaatctgttttggatcaagatgatgtggacacctcaatggaagaatctttgaagcatcttattgccaaaggctctatgtttgatgagcttatggcaagaagtgaagatatgttacaaatggatatacaaaatatttcaagccaggagtcctttcaacatgttctcacaactgggcttcaggcaaagattcaagaagctaaagagaaagtccagatcaatgtggtaaaactcattgcagcgttgaagaacttaactgacgtttcaccagatttggacatcaggctgaagatggaagaatcccagaaggaacttgaatcatatatgatgagggctcagcagttactggggcaaagagagagccccggtgaactcatttcaaaacacaaggaagcactaataatttctaatacaaaaagtctggccaagtatttgaaagctgttgaagaactaaaaaataatgtaactgaggacataaagatgtctttagaagaaaagagtagagatgtctgtgccaaatgggagtctcttcatcatgaactgtctttatatgttcaacaactaaaaatagatattgaaaaaggaaagcttagtgacaatattttaaaacttgaaaagcaaataaataaagaaaagaaacttatccgtagaggaaggaccaagggtctcatcaaagaacatgaggcctgcttttctgaggaaggctgcctgtaccagcttaatcaccacatggaagtcctgagggagctgtgtgaagagctgccttcacagaagagtcaacaagaagtgaagagactactcaaagattatgaacaaaagatagaaagacttctgaaatgtgcttccgagattcatatgacactgcagcccacagcgggaggcacgtcgaaaaacgaggggaccatcaccacatctgagaatagaggaggggatccccacagtgaggcaccatttgcaaaatcagataatcagccatcaactgaaaaggcaatggaacccactatgaagtttagcctggcatcagtgttaaggcctctgcaagaagaaagcattatggaaaaggattacagtgcatctataaatagtttactagagaggtatgatacatacagagatattcttgaacaccacctgcaaaacaacaaattcaggattacttctgatttctctagtgaagaggacaggagtagttcttgtctgcaggctaaactgacagatctacaggtcataaaaaatgaaactgatgctcgctggaaagagtttgaaattatttcattgaagttagaaaatcatgtgaatgacataaaaaagccttttgtaattaaggaaagagacacactaaaggaaagagaaagagagcttcagatgactcttaataccagaatggaatctttagagacagcactgcggcttgtgttacctgtagagaaggcatcacttcttctctgtggctcggacctgcctctccataaaatggccatccagggatttcatctcattgatgctgatcgcatctatcaacacctaaggaatatccaagattccatagcaaaacagattgaaatatgtaaccgcttagaagagccaggcaactttgtattaaaggagttacacccatttgatctacacgcaatgcagaatattatactgaaatacaaaacacaatttgaaggaatgaaccacagggtgcagaggagtgaagatactctcaaagctctggaagactttttggcgtctctcagaacagctaaactctctgctgagcccgttacagacctttcagcctcagatacacaggtggcacaagaaaatacgttgacagtaaaaaataaagagggagaaattcatctgatgaaagacaaggccaaacatttggataaatgtttgaagatgctcgatatgagctttaaagatgctgaacggggtgatgacacctcctgtgaaaacctgcttgatgctttttcaataaagttatctgagacacatggctatggggtacaggaggaattcactgaggaaaacaaattactagaggcttgtattttcaaaaataatgaactccttaaaaatattcaagatgtgcagagtcaaatcagtaaaattggtcttaaggatcctactgttccagctgtgaaacatcggaaaaaatcattaatcagactggataaggttctagatgaatatgaagaagagaagagacatttacaagaaatggctaattctcttccacacttcaaagatggcagagaaaaaaccgtgaatcaacagtgccaaaatacagtagtcttgtgggagaataccaaagccttggtcaccgaatgtcttgaacaatgtgggagagttttggagctcttaaaacaatatcagaattttaaaagcatcttgacaactttgattcaaaaagaagagagtgtcatctccctgcaggcttcgtacatgggaaaggagaacctgaagaaaaggatagcagagattgaaattgtcaaagaagaatttaatgagcatttagaagttgtagacaagataaaccaggtctgcaaaaatctacaattttatctaaataaaatgaaaacttttgaagagcccccttttgaaaaagaggctaatattattgtggatagatggcttgatataaatgagaagacagaagattactatgaaaatcttggtcgagctctagctttgtgggacaaactttttaacttaaaaaatgtcattgatgagtggacagaaaaggcccttcaaaaaatggaattacatcaattgactgaagaggacagagaaaggctgaaggaagaattacaagtccatgaacaaaaaacttcagaattttctagaagagtggctgaaatacagtttttgctccaaagcagtgaaatacctcttgaattgcaggtcatggagtcctctattttgaacaagatggaacatgtacagaagtgcttaacaggagaatccaactgccatgcactcagtggcagcactgctgagctaagggaggatctcgaccaagccaagacccagatcgggatgactgaatccctcttaaaagccctgtctccttctgacagcttggagatcttcactaaactagaggagatacaacagcagattctacagcaaaaacacagtatgatattacttgagaatcaaataggttgtctgactcctgaactctctgaattgaaaaagcaatatgaaagtgtcagtgatttatttaataccaaaaaaagtgttttgcaagatcacttttctaagttattgaatgatcaatgcaagaactttaatgactggttcagcaacattaaagtgaaccttaaggagtgttttgaatcatcagaaacaaaaaagagtgtggaacaaaagctacaaaaactttctgatttcttgactcttgaaggaagaaacagtaaaataaagcaggtggacagcgtactgaagcatgtgaagaagcatctgcccaaagcacatgtgaaggagcttatcagttggctcgtgggtcaggaattcgaattagaaaaaatggagtccatatgccaggctcgagcaaaggagcttgaagactccttgcagcagctactgagactccaggatgaccatagaaacctgaggaagtggttgactaatcaagaagagaaatggaaaggaanggaagaaccaggggagaaaactgagctgttctgccaagctttagctagaaagagggaacagtttgaatctgtggcccaattgaacaactctttgaaggaatatgggtttactgaagaagaagaaataataatggaagcaacatgtttgatggatagataccagacattactgagacaactaagtgaaatcgaggaagaggataagttactacccacagaggaccagagctttaatgatcttgcacatgatgtaattcattggataaaagagattaaagagtcccttatggttttgaattcatccgaaggcaaaatgccacttgaggaaagaatccaaaaaatcaaggaaatcattttgctgaagcctgaaggggatgccagaatagagaccatcatgaagcaggctgagagcagcgaggccccgctggttcagaagaccctcactgacatcagcaaccagtgggacaacacactccatttagctagcacctacctaagccatcaagaaaagcttctactagaaggagagaaatatttacaaagtaaggaggatctgagattaatgctcatagaantaaagaagaaacaggaagcaggctttgctctacaacatggtctgcaggagaagaaagctcagttaaagatttataagaaattcctcaagaaagcccaagatttgacatccttgctaaaggagttaaaatctcagggaaactacctcttggagtgcactaaaaatcccagcttcagtgaagagccttggctggaaataaagcatctacacgaaagtcttcttcaacaactgcaggattctgtgcaaaacttggacggtcacgttcgagaacatgattcataccaggtttgcgtcacagacctgaatactacattggacaatttctccaaggaatttgtcagtttttctgataagcctgtggatcaaatagnggttgaggaaaaattgcagaaactgcaggaactagagaatagactcagtttacaagatggcacattaaagaagattttagctttagcaaaatccgtcaagcaaaatacatcttcagtggggcagaagattattaaagatgatataaaatcacttcagtgtaaacaaaaagatttggaaaacaggcttgcatctgctaagcaggagatggaatgttgtctcaacancattctcaaatcaaaacgctcaacagaaaagaaaggaaagtttactctgccaggcagagagaagcaggccacttctgatgtgcaggagtctactcaggaatcagctncagtggaaaagttggaggaagactgggaaataaacaaggattcagctgtggaaatggctatgtcaaaacaactttctcttaatgctcaagaaagcatgaaaaacactgaagatgagcggaaagtcaatgagctgcaaaatcaacctttagaattagatactatgttaagaaatgaacaattagaagagatagagaaattatatacccagttggaagcaaagaaagcagccattaagccactggaacaaacagaatgtcttaacaaaacagaaactggggccttggttctccacaatataggatattcggcacagcatttggacaatttgcttcaggcacttattactttgaagaaaaacaaagaaagccaatattgtgtcctcagagattttcaggaataccttgctgcagttgaatcttcaatgaaagccttgttgacagacaaggaaagtcttaaagtaggaccactggacagtgtaacgtatctggacaaaattaaaaaattcatagcatccatagaaaaagagaaagattctttaggcaacttgaaaatcaaatgggagaatttatcaaaccacgtgactgacatggataagaaattgttggaaagccagattaagcaacttgaacatggttgggaacaagtggaacagcagattcaaaagaagtattctcagcaggtagtggaatatgatgaatttacaaccctcatgaataaggtacaggacactgagatttctctgcaacagcagcagcaacatctacagttaaggctgaagtctccagaagaacgggcagggaaccaaagcatgattgccttgaccactgacctccaggctaccaagcatggattttctgttttaaaggggcaagctgaacttcagatgaagaggatttggggagaaaaagaaaagaagaatttggaggatggaataaataacttgaagaaacaatgggaaacattggagccattacacttagaagcagaaaatcagattaagaagtgtgacataaggaacaagatgaaagagactatcttatgggccaagaatttgttgggtgaacttaatccctccattccccttctcccagatgacattctttcacagatcagaaagtgcaaagtgacacatgatggcattctagctaggcagcagtctgtggaatcgttggctgaagaggtcaaagataaggttcctagccttacaacctatgagggcggtgatttaaataataccctagaggacttacggaatcaataccaaatgctggttttaaaatcaactcaaagatcacagcaattagaatttaagttggaagaaagaagcaatttttttgctataataaggaagtttcaacttatggttcaagaaagtgaaacactgataattcccagggtggagacagctgccacggaagctgaactaaaacatcaccatgttactttggaggcatctcagaaggaattgcaagaaattgacagtggaatctcaacacatcttcaggagctaacaaacatctatgaggagctgaatgtgtttgaaagattatttctggaagatcagttgaaaaatcttaagattaggaccaacagaatacaaagattcattcagaatacatgtaatgaagtggaacacaaggtaaagttttgcagacaattccatgaaaaaacatcagcgcttcaggaggaggctgacagtatacagcgcaatgaactattacttaatcaagaagtaaataaaggtgttaaagaggagatctataatcttaaagacagactcaccgctattaagtgttgcatcttacaggtattgaaacttaaaaaagtgtttgactatattggactaaactgggatttttcacaacttgaccaattacaaacccaagtatttgaaaaagaaaaggaacttgaagaaaaaattaagcagttggacacatttgaggaagaacatggcaaatatcaggcattattaagtaaaatgagagctattgatttgcaaattaagaaaatgactgaagtagtactaaaagctcctgatagctctccggaaagcagacggctcaatgcccaaattttaagtcagagaattgagaaagccaagtgtttatgtgatgagataataaagaaattaaatgaaaataagacctttgatgactcatncaaggagaaagaaatactacaaataaagctgaatgcagaagaaaatgataagttatacaaagttctccaaaacatggtattagaactctcaccaaaagaattggatgaaaagaattgtcaggacaaactagaaacttccttacatgttttaaatcagataaaatctcaattacagcagccattacttataaatttggaaattaaacatattcaaaatgaaaaggacaattgtgaagcatttcaggagcaagtttgggcagaaatgtgtagtattaaagctgtgactgctattgagaaacaaagagaagaaaactcttctgaagcgagtgatgtggagacaaaactacgtgagtttgaagatcttcagatgcagcttaacacaagcattgatttgcgcacaaatgtcttgaatcatgcttatgaaaatctaacacgctataaagaagcagtcaccagggcagtggagagcatcacttccctcgaagccatcattataccctacagagtagatgttggtaatccagaagaatctttagagatgcctcttcgaaaacaagaggaattggaatccacagtagcacgcatccaggacctcactgagaaactgggaatgatatccagccccgaagccaaactacaacttcagtatactttacaggaactagtttctaagaactcagcaatgaaggaagctttcaaagcacaggaaactgaggcagaaaggtatcttgagaattacaaatgctatagaaaaatggaagaggatatttacactaacctcagcaaaatggagacagttcttggacagtccatgtcctcgttgccactgtcttacagagaagctttagagcgcttggaacagagcaaggccttggtgtcaaatcttatatcaaccaaagaagagttaatgaaactacgacagatccttagactcttgagactcaggtgcacagaaaatgatggcatatgtttgctcaagattgtgtcggctctgtgggagaaatggctgagtttgctggaagctgctaaagagtgggagatgtggtgcgaagaactgaagcaggaatggaaatttgtcagtgaagaaattgaacgagaggcaattattttagataatcttcaggaagaactccctgaaatttccaaaacaaaagaggcagccaccacagaggaactctctgagctgctagactgtttatgccaatatggagagaacgtggagaagcaacagctgttactgactctacttcttcagcgcatcagaagtatccagaatgttcctgaaagctcaggggctgtggaaactgttccagcatttcaagaaattacttctatgaaagaacgatgcaacaagcttcttcagaaagttcagaaaaataaagaattggtgcagactgaaatccaagaaagacattccttcacaaaagagataattgctttgaagaatttctttcaacagaccacaacttcattccaaaatatggcattccaggatcacccagaaaagtcagaacaatttgaggagcttcaaagcatccttaagaaagggaaactaacttttgagaatattatggaaaaactgcgaatcaagtattccgaaatgtacaccatagtccctgcagagattgaatcccaggtggaagaatgcagaaaagctttagaagacatagatgagaagattagcaatgaagtcttaaaaagctcaccatcatatgcaatgaggagaaaaatagaagaaattaacaatgggcttcataatgttgaaaagatgttgcagcagaaaagcaaaaatattgagaaagctcaagaaattcaaaagaaaatgtgggacgagttagatctatggcattccaaactaaatgagctggattctgaagttcaggacattgttgaacaggacccaggacaggctcaagaatggatggataacttgatgattcctttccagcagtatcagcaagtatcacagagagcagagtgtagaacctcacagttgaataaggccacagttaagatggaggaatatagtgaccttctgaagagcactgaggcttggatagaaaataccagtcatttgctggccaatcctgctgactatgactctttgaggacactgagtcaccatgctagcactgtgcagatggctttggaagattcagaacagaagcacaatcttttacattcaatctttatggatctagaagacctgtcaataatttttgaaacagatgaattaacccaatccatacaagagttaagtaatcaagtaacagctttacaacaaaaaataatggaaagccttccacagattcagcgaatggctgatgatgtggttgctattgaatctgaagtaaaatcaatggaaaaaagagtttcaaaaatcaaaactatcctattatcaaaagaaatatttgatttttcacctgaagaacatctcaaacatggggaggtcatacttgaaaatatacgtcccatgaagaaaaccattgctgagatagtgtcttaccaagtggaactgaggttgccccaaacaggaatgaaacctctgcctgtgtttcagcggacaaatcagcttttacaagatataaaactattggaaaatgtgactcaagaacaaaatgagttattaaaggtagtcataaaacagaccaatgaatgggatgaagaaatagaaaatttgaaacagatcttaaataattattcagctcagttctcccttgaacatatgtcaccagaccaagctgacaagctgccacaactacagggagaaatcgaacgtatggagaaacagattctgagtttgaaccagagaaaagaagacctgttggtggacttgaaggccaccgtactaaaccttcaccagcatttgaagcaagaacaagaaggagtagaaagagataggctgccagctgtaacatcagaggaaggtggagtggcagagagggatgcttctgagcggaagttgaacagaagaggctccatgtcttacctggcagcagtcgaggaagaggtggaagaaagttccgtgaagagcgataatggagatgagaaggcagagccatcgcctcagtcttggtcttcactttggaagcatgacaaggacatggaagaagacagagcttcctcatcctctggaacaattgttcaggaagcatatgggaaaataagcacctctgataattccatggcacaaatcctcacaccagactcactaaacactgagcaaggcccagaatgttccctaaggcccaaccaaacagaagagggcaccacacctcctattgaggctgacactctggactcttctgacgcgcaaggaggtttggagcccagggtggagaaaactaggccggagcccacagaagtcctgcatgcctgcaagacccaggtggccgagctggagctgtggctgcaacaagccaacgtggcagttgagccggaaacattaaacgcagacatgcagcaggtgctggaacagcagctggtagggtgccaggctatgctaacagagattgagcacaaggttgcctttctgttagagacttgcaaagatcagggcctgggagataatggagccactcaacatgaggctgaagcgctttccctgaaactgaaaacagtgaagtgcaatttagaaaaagtccagatgatgcttcaggagaagcacagtgaagatcagcatcctaccattctaaagaaatcctcagagccagagcatcaagaagctctccaaccagttaacctttctgaattggaatccattgtaactgaaaggccacaattcagcagacaaaaagatttccagcagcaacaggttctggagttaaaaccaatggaacagaaagatttcatcaaattcatagaatttaatgctaagaaaatgtggccccagtattgccaacatgataacgatacaactcaggaatcatctgcaagcaaccaggcatccagccctgaaaatgacgttccagactcgatcttgtcaccccagggccaaaatggagataagtggcaatatctgcatcatgaactctcatcaaaaataaagctcccactccctcagcttgtggagcctcaggtcagtctgtatctacatggtgcaaatagcctgtttatctttgaaaatccaacaagcattcattaaataaacatgtatattctccag

SEQ ID NO: 735515 - DNA, 18070 bp, Homo sapiens
  misc_feature (6127)..(6127): n is a, c, g, or t
  misc_feature (6702)..(6702): n is a, c, g, or t
  misc_feature (7072)..(7072): n is a, c, g, or t
  misc_feature (7297)..(7297): n is a, c, g, or t
  misc_feature (7404)..(7404): n is a, c, g, or t
  misc_feature (9565)..(9565): n is a, c, g, or t
agcccgcggggtgaaatgacttgctcatggtctggtagctaatcgcagatctgctctctaactcctacttccaagacccaggaatctacgggtgttggagaagacccctcctgaaatcctccagaagagctttttgagggagcttgtggctcctgttcacccagccccggttcacttcttcaactgagatggacatgatataatctccattgagtcaaagaatggcatctagtcctgagcttcccaccgaagatgaacagggttcctggggcatcgacgatctccatatttcattgcaagctgaacaggaagacacccagaagaaagccttcacgtgctggataaactcacagttggccaggcacacttctccctcagttatatccgacctattcacagacattaaaaaggggcatgtcctcctggatctgctagaagtactttctgggcaacagttgcctcgggataaaggatctaataccttccagtgtagaatcaatatagaacatgccttgacattcctaagaaaccgatcaattaagctaataaatattcatgttactgatatcattgatggaaacccatccattatccttggcctaatttggacaattatcctgcactttcatattgagaagcttgcccagactctttcttgcaattacaatcagccttccctggatgatgtgagtgtggttgactcatctcctgcctcaagtcctccagctaagaaatgctctaaagtgcaagcaagatggcaaatgtctgcaagaaaggcccttcttttgtgggctcaggaacaatgcgccacctatgagtctgtcaatgtgaccgattttaagtcaagttggagaaatgggatggcttttttggccatcattcatgccttgcgaccagacctaattgacatgaagagtgtgaagcatagatccaacaaagacaatctgagagaggccttcagaattgcagaacaagaattaaaaatccccagattgctggaaccagaagatgtggatgttgttgatcctgatgaaaagtccatcatgacctatgtggcacagtttctgcagtattccaaagatgcccctgggactggagaggaggctcagggaaaggtgaaagatgctatgggctggttaactctgcaaaaggaaaaactacagaagttgctaaaggattcagagaatgatacctactttaaaaagtataatagcctgctgtcctttatggagtcattcaatgaagaaaaaaagtcctttttggatgtcctgtcaataaaacgggatctggatgagctggacaaggatcatttacagttgagagaagcctgggatggcctcgatcaccagattaatgcatggaaaataaagctaaattatgccttgcccccacccctccatcaaactgaagcttggctccaggaggtagaagagcttatggatgaagatttgtcagcctcccaggatcactctcaagccgtgactctgatacaagagaaaatgactttattcaagagcctgatggatagatttgagcatcattcgaacattctccttacctttgaaaataaggatgaaaatcacttgccattggtaccacctaacaaattggaggaaatgaaaagacgaatcaacaacattttggagaaaaaatttattctacttctagaatttcattactacaagtgcttagttcttggtttggtagatgaagtgaaatcaaaattggatatttggaacattaaatatgggagcagagaatctgtggaattattgctggaagactggcataaatttattgaagaaaaagaattcctagctcgacttgatacttcttttcaaaaatgtggagaaatttataagaatttggctggagaatgtcagaatattaataaacagtatatgatggtgaaatctgatgtttgtatgtatagaaaaaatatatataatgtgaagtccactctacaaaaagtgctggcatgttgggctacttatgtggaaaaccttcgcttactaagggcttgctttgaggagacaaagaaggaagaaattaaagaggtaccctttgagacactagcccagtggaatctagaacacgctactttaaatgaagcaggaaatttcttagtcgaagtcagcaatgatgtggttggatcatctatttctaaagaactgagaaggctgaataaaagatggagaaagttggtttcaaaaactcaacttgaaatgaacctgccactgatgataaaaaaacaggatcagcccacttttgacaattctggaaatattctatctaaagaagagaaagcaactgttgagttttcaacagatatgtcagtagaacttcctgaaaattataatcaaaatataaaggctggagagaaacatgaaaaagaaaatgaagaattcacagggcaactaaaagtggctaaagatgttgaaaaactcattggacaagtggaaatctgggaggcagaagccaaatctgttttggatcaagatgatgtggacacctcaatggaagaatctttgaagcatcttattgccaaaggctctatgtttgatgagcttatggcaagaagtgaagatatgttacaaatggatatacaaaatatttcaagccaggagtcctttcaacatgttctcacaactgggcttcaggcaaagattcaagaagctaaagagaaagtccagatcaatgtggtaaaactcattgcagcgttgaagaacttaactgacgtttcaccagatttggacatcaggctgaagatggaagaatcccagaaggaacttgaatcatatatgatgagggctcagcagttactggggcaaagagagagccccggtgaactcatttcaaaacacaaggaagcactaataatttctaatacaaaaagtctggccaagtatttgaaagctgttgaagaactaaaaaataatgtaactgaggacataaagatgtctttagaagaaaagagtagagatgtctgtgccaaatgggagtctcttcatcatgaactgtctttatatgttcaacaactaaaaatagatattgaaaaaggaaagcttagtgacaatattttaaaacttgaaaagcaaataaataaagaaaagaaacttatccgtagaggaaggaccaagggtctcatcaaagaacatgaggcctgcttttctgaggaaggctgcctgtaccagcttaatcaccacatggaagtcctgagggagctgtgtgaagagctgccttcacagaagagtcaacaagaagtgaagagactactcaaagattatgaacaaaagatagaaagacttctgaaatgtgcttccgagattcatatgacactgcagcccacagcgggaggcacgtcgaaaaacgaggggaccatcaccacatctgagaatagaggaggggatccccacagtgaggcaccatttgcaaaatcagataatcagccatcaactgaaaaggcaatggaacccactatgaagtttagcctggcatcagtgttaaggcctctgcaagaagaaagcattatggaaaaggattacagtgcatctataaatagtttactagagaggtatgatacatacagagatattcttgaacaccacctgcaaaacaacaaattcaggattacttctgatttctctagtgaagaggacaggagtagttcttgtctgcaggctaaactgacagatctacaggtcataaaaaatgaaactgatgctcgctggaaagagtttgaaattatttcattgaagttagaaaatcatgtgaatgacataaaaaagccttttgtaattaaggaaagagacacactaaaggaaagagaaagagagcttcagatgactcttaataccagaatggaatctttagagacagcactgcggcttgtgttacctgtagagaaggcatcacttcttctctgtggctcggacctgcctctccataaaatggccatccagggatttcatctcattgatgctgatcgcatctatcaacacctaaggaatatccaagattccatagcaaaacagattgaaatatgtaaccgcttagaagagccaggcaactttgtattaaaggagttacacccatttgatctacacgcaatgcagaatattatactgaaatacaaaacacaatttgaaggaatgaaccacagggtgcagaggagtgaagatactctcaaagctctggaagactttttggcgtctctcagaacagctaaactctctgctgagcccgttacagacctttcagcctcagatacacaggtggcacaagaaaatacgttgacagtaaaaaataaagagggagaaattcatctgatgaaagacaaggccaaacatttggataaatgtttgaagatgctcgatatgagctttaaagatgctgaacggggtgatgacacctcctgtgaaaacctgcttgatgctttttcaataaagttatctgagacacatggctatggggtacaggaggaattcactgaggaaaacaaattactagaggcttgtattttcaaaaataatgaactccttaaaaatattcaagatgtgcagagtcaaatcagtaaaattggtcttaaggatcctactgttccagctgtgaaacatcggaaaaaatcattaatcagactggataaggttctagatgaatatgaagaagagaagagacatttacaagaaatggctaattctcttccacacttcaaagatggcagagaaaaaaccgtgaatcaacagtgccaaaatacagtagtcttgtgggagaataccaaagccttggtcaccgaatgtcttgaacaatgtgggagagttttggagctcttaaaacaatatcagaattttaaaagcatcttgacaactttgattcaaaaagaagagagtgtcatctccctgcaggcttcgtacatgggaaaggagaacctgaagaaaaggatagcagagattgaaattgtcaaagaagaatttaatgagcatttagaagttgtagacaagataaaccaggtctgcaaaaatctacaattttatctaaataaaatgaaaacttttgaagagcccccttttgaaaaagaggctaatattattgtggatagatggcttgatataaatgagaagacagaagattactatgaaaatcttggtcgagctctagctttgtgggacaaactttttaacttaaaaaatgtcattgatgagtggacagaaaaggcccttcaaaaaatggaattacatcaattgactgaagaggacagagaaaggctgaaggaagaattacaagtccatgaacaaaaaacttcagaattttctagaagagtggctgaaatacagtttttgctccaaagcagtgaaatacctcttgaattgcaggtcatggagtcctctattttgaacaagatggaacatgtacagaagtgcttaacaggagaatccaactgccatgcactcagtggcagcactgctgagctaagggaggatctcgaccaagccaagacccagatcgggatgactgaatccctcttaaaagccctgtctccttctgacagcttggagatcttcactaaactagaggagatacaacagcagattctacagcaaaaacacagtatgatattacttgagaatcaaataggttgtctgactcctgaactctctgaattgaaaaagcaatatgaaagtgtcagtgatttatttaataccaaaaaaagtgttttgcaagatcacttttctaagttattgaatgatcaatgcaagaactttaatgactggttcagcaacattaaagtgaaccttaaggagtgttttgaatcatcagaaacaaaaaagagtgtggaacaaaagctacaaaaactttctgatttcttgactcttgaaggaagaaacagtaaaataaagcaggtggacagcgtactgaagcatgtgaagaagcatctgcccaaagcacatgtgaaggagcttatcagttggctcgtgggtcaggaattcgaattagaaaaaatggagtccatatgccaggctcgagcaaaggagcttgaagactccttgcagcagctactgagactccaggatgaccatagaaacctgaggaagtggttgactaatcaagaagagaaatggaaaggaanggaagaaccaggggagaaaactgagctgttctgccaagctttagctagaaagagggaacagtttgaatctgtggcccaattgaacaactctttgaaggaatatgggtttactgaagaagaagaaataataatggaagcaacatgtttgatggatagataccagacattactgagacaactaagtgaaatcgaggaagaggataagttactacccacagaggaccagagctttaatgatcttgcacatgatgtaattcattggataaaagagattaaagagtcccttatggttttgaattcatccgaaggcaaaatgccacttgaggaaagaatccaaaaaatcaaggaaatcattttgctgaagcctgaaggggatgccagaatagagaccatcatgaagcaggctgagagcagcgaggccccgctggttcagaagaccctcactgacatcagcaaccagtgggacaacacactccatttagctagcacctacctaagccatcaagaaaagcttctactagaaggagagaaatatttacaaagtaaggaggatctgagattaatgctcatagaantaaagaagaaacaggaagcaggctttgctctacaacatggtctgcaggagaagaaagctcagttaaagatttataagaaattcctcaagaaagcccaagatttgacatccttgctaaaggagttaaaatctcagggaaactacctcttggagtgcactaaaaatcccagcttcagtgaagagccttggctggaaataaagcatctacacgaaagtcttcttcaacaactgcaggattctgtgcaaaacttggacggtcacgttcgagaacatgattcataccaggtttgcgtcacagacctgaatactacattggacaatttctccaaggaatttgtcagtttttctgataagcctgtggatcaaatagnggttgaggaaaaattgcagaaactgcaggaactagagaatagactcagtttacaagatggcacattaaagaagattttagctttagcaaaatccgtcaagcaaaatacatcttcagtggggcagaagattattaaagatgatataaaatcacttcagtgtaaacaaaaagatttggaaaacaggcttgcatctgctaagcaggagatggaatgttgtctcaacancattctcaaatcaaaacgctcaacagaaaagaaaggaaagtttactctgccaggcagagagaagcaggccacttctgatgtgcaggagtctactcaggaatcagctncagtggaaaagttggaggaagactgggaaataaacaaggattcagctgtggaaatggctatgtcaaaacaactttctcttaatgctcaagaaagcatgaaaaacactgaagatgagcggaaagtcaatgagctgcaaaatcaacctttagaattagatactatgttaagaaatgaacaattagaagagatagagaaattatatacccagttggaagcaaagaaagcagccattaagccactggaacaaacagaatgtcttaacaaaacagaaactggggccttggttctccacaatataggatattcggcacagcatttggacaatttgcttcaggcacttattactttgaagaaaaacaaagaaagccaatattgtgtcctcagagattttcaggaataccttgctgcagttgaatcttcaatgaaagccttgttgacagacaaggaaagtcttaaagtaggaccactggacagtgtaacgtatctggacaaaattaaaaaattcatagcatccatagaaaaagagaaagattctttaggcaacttgaaaatcaaatgggagaatttatcaaaccacgtgactgacatggataagaaattgttggaaagccagattaagcaacttgaacatggttgggaacaagtggaacagcagattcaaaagaagtattctcagcaggtagtggaatatgatgaatttacaaccctcatgaataaggtacaggacactgagatttctctgcaacagcagcagcaacatctacagttaaggctgaagtctccagaagaacgggcagggaaccaaagcatgattgccttgaccactgacctccaggctaccaagcatggattttctgttttaaaggggcaagctgaacttcagatgaagaggatttggggagaaaaagaaaagaagaatttggaggatggaataaataacttgaagaaacaatgggaaacattggagccattacacttagaagcagaaaatcagattaagaagtgtgacataaggaacaagatgaaagagactatcttatgggccaagaatttgttgggtgaacttaatccctccattccccttctcccagatgacattctttcacagatcagaaagtgcaaagtgacacatgatggcattctagctaggcagcagtctgtggaatcgttggctgaagaggtcaaagataaggttcctagccttacaacctatgagggcggtgatttaaataataccctagaggacttacggaatcaataccaaatgctggttttaaaatcaactcaaagatcacagcaattagaatttaagttggaagaaagaagcaatttttttgctataataaggaagtttcaacttatggttcaagaaagtgaaacactgataattcccagggtggagacagctgccacggaagctgaactaaaacatcaccatgttactttggaggcatctcagaaggaattgcaagaaattgacagtggaatctcaacacatcttcaggagctaacaaacatctatgaggagctgaatgtgtttgaaagattatttctggaagatcagttgaaaaatcttaagattaggaccaacagaatacaaagattcattcagaatacatgtaatgaagtggaacacaaggtaaagttttgcagacaattccatgaaaaaacatcagcgcttcaggaggaggctgacagtatacagcgcaatgaactattacttaatcaagaagtaaataaaggtgttaaagaggagatctataatcttaaagacagactcaccgctattaagtgttgcatcttacaggtattgaaacttaaaaaagtgtttgactatattggactaaactgggatttttcacaacttgaccaattacaaacccaagtatttgaaaaagaaaaggaacttgaagaaaaaattaagcagttggacacatttgaggaagaacatggcaaatatcaggcattattaagtaaaatgagagctattgatttgcaaattaagaaaatgactgaagtagtactaaaagctcctgatagctctccggaaagcagacggctcaatgcccaaattttaagtcagagaattgagaaagccaagtgtttatgtgatgagataataaagaaattaaatgaaaataagacctttgatgactcatncaaggagaaagaaatactacaaataaagctgaatgcagaagaaaatgataagttatacaaagttctccaaaacatggtattagaactctcaccaaaagaattggatgaaaagaattgtcaggacaaactagaaacttccttacatgttttaaatcagataaaatctcaattacagcagccattacttataaatttggaaattaaacatattcaaaatgaaaaggacaattgtgaagcatttcaggagcaagtttgggcagaaatgtgtagtattaaagctgtgactgctattgagaaacaaagagaagaaaactcttctgaagcgagtgatgtggagacaaaactacgtgagtttgaagatcttcagatgcagcttaacacaagcattgatttgcgcacaaatgtcttgaatcatgcttatgaaaatctaacacgctataaagaagcagtcaccagggcagtggagagcatcacttccctcgaagccatcattataccctacagagtagatgttggtaatccagaagaatctttagagatgcctcttcgaaaacaagaggaattggaatccacagtagcacgcatccaggacctcactgagaaactgggaatgatatccagccccgaagccaaactacaacttcagtatactttacaggaactagtttctaagaactcagcaatgaaggaagctttcaaagcacaggaaactgaggcagaaaggtatcttgagaattacaaatgctatagaaaaatggaagaggatatttacactaacctcagcaaaatggagacagttcttggacagtccatgtcctcgttgccactgtcttacagagaagctttagagcgcttggaacagagcaaggccttggtgtcaaatcttatatcaaccaaagaagagttaatgaaactacgacagatccttagactcttgagactcaggtgcacagaaaatgatggcatatgtttgctcaagattgtgtcggctctgtgggagaaatggctgagtttgctggaagctgctaaagagtgggagatgtggtgcgaagaactgaagcaggaatggaaatttgtcagtgaagaaattgaacgagaggcaattattttagataatcttcaggaagaactccctgaaatttccaaaacaaaagaggcagccaccacagaggaactctctgagctgctagactgtttatgccaatatggagagaacgtggagaagcaacagctgttactgactctacttcttcagcgcatcagaagtatccagaatgttcctgaaagctcaggggctgtggaaactgttccagcatttcaagaaattacttctatgaaagaacgatgcaacaagcttcttcagaaagttcagaaaaataaagaattggtgcagactgaaatccaagaaagacattccttcacaaaagagataattgctttgaagaatttctttcaacagaccacaacttcattccaaaatatggcattccaggatcacccagaaaagtcagaacaatttgaggagcttcaaagcatccttaagaaagggaaactaacttttgagaatattatggaaaaactgcgaatcaagtattccgaaatgtacaccatagtccctgcagagattgaatcccaggtggaagaatgcagaaaagctttagaagacatagatgagaagattagcaatgaagtcttaaaaagctcaccatcatatgcaatgaggagaaaaatagaagaaattaacaatgggcttcataatgttgaaaagatgttgcagcagaaaagcaaaaatattgagaaagctcaagaaattcaaaagaaaatgtgggacgagttagatctatggcattccaaactaaatgagctggattctgaagttcaggacattgttgaacaggacccaggacaggctcaagaatggatggataacttgatgattcctttccagcagtatcagcaagtatcacagagagcagagtgtagaacctcacagttgaataaggccacagttaagatggaggaatatagtgaccttctgaagagcactgaggcttggatagaaaataccagtcatttgctggccaatcctgctgactatgactctttgaggacactgagtcaccatgctagcactgtgcagatggctttggaagattcagaacagaagcacaatcttttacattcaatctttatggatctagaagacctgtcaataatttttgaaacagatgaattaacccaatccatacaagagttaagtaatcaagtaacagctttacaacaaaaaataatggaaagccttccacagattcagcgaatggctgatgatgtggttgctattgaatctgaagtaaaatcaatggaaaaaagagtttcaaaaatcaaaactatcctattatcaaaagaaatatttgatttttcacctgaagaacatctcaaacatggggaggtcatacttgaaaatatacgtcccatgaagaaaaccattgctgagatagtgtcttaccaagtggaactgaggttgccccaaacaggaatgaaacctctgcctgtgtttcagcggacaaatcagcttttacaagatataaaactattggaaaatgtgactcaagaacaaaatgagttattaaaggtagtcataaaacagaccaatgaatgggatgaagaaatagaaaatttgaaacagatcttaaataattattcagctcagttctcccttgaacatatgtcaccagaccaagctgacaagctgccacaactacagggagaaatcgaacgtatggagaaacagattctgagtttgaaccagagaaaagaagacctgttggtggacttgaaggccaccgtactaaaccttcaccagcatttgaagcaagaacaagaaggagtagaaagagataggctgccagctgtaacatcagaggaaggtggagtggcagagagggatgcttctgagcggaagttgaacagaagaggctccatgtcttacctggcagcagtcgaggaagaggtggaagaaagttccgtgaagagcgataatggagatgagaaggcagagccatcgcctcagtcttggtcttcactttggaagcatgacaaggacatggaagaagacagagcttcctcatcctctggaacaattgttcaggaagcatatgggaaaataagcacctctgataattccatggcacaaatcctcacaccagactcactaaacactgagcaaggcccagaatgttccctaaggcccaaccaaacagaagagggcaccacacctcctattgaggctgacactctggactcttctgacgcgcaaggaggtttggagcccagggtggagaaaactaggccggagcccacagaagtcctgcatgcctgcaagacccaggtggccgagctggagctgtggctgcaacaagccaacgtggcagttgagccggaaacattaaacgcagacatgcagcaggtgctggaacagcagctggtagggtgccaggctatgctaacagagattgagcacaaggttgcctttctgttagagacttgcaaagatcagggcctgggagataatggagccactcaacatgaggctgaagcgctttccctgaaactgaaaacagtgaagtgcaatttagaaaaagtccagatgatgcttcaggagaagcacagtgaagatcagcatcctaccattctaaagaaatcctcagagccagagcatcaagaagctctccaaccagttaacctttctgaattggaatccattgtaactgaaaggccacaattcagcagacaaaaagatttccagcagcaacaggttctggagttaaaaccaatggaacagaaagatttcatcaaattcatagaatttaatgctaagaaaatgtggccccagtattgccaacatgataacgatacaactcaggaatcatctgcaagcaaccaggcatccagccctgaaaatgacgttccagactcgatcttgtcaccccagggccaaaatggagataagtggcaatatctgcatcatgaactctcatcaaaaataaagctcccactccctcagcttgtggagcctcaggtttccacaaatatgggtattctacccagcgtgactatgtataactttagatacccaacaactgaagaactgaaaacctataccacccaacttgaagacctgcgccaagaagcaagtaaccttcagacacaggaaaatatgacagaagaagcatatatcaatttggataaaaaattgtttgaactattcctgaccctcagtcagtgcctcagcagtgtggaggagatgctggagatgcccagactttacagggaggatggttctggccagcaggtgcactacgagacgctggctcttgagttgaagaaactttatttagcgctaagtgacaagaagggtgatcttttgaaagccatgacttggcctggcgagaacaccaacttgctccttgaatgttttgacaaccttcaagtctgcctggagcacactcaggctgcagctgtctgtagaagcaagtccctgaaagctggcctcgattacaaccgcagttaccagaatgaaataaagagattatatcatcagctcattaagagtaagacatctttacaacagtctttgaatgaaatcagtgggcagagtgttgctgaacagcttcagaaagcagatgcatatacagtggagctggagaacgccgagagccgagtggccaaactaagagatgaaggggagaggcttcatttaccttatgctttactccaggaggtttacaaattagaggatgtacttgacagtatgtggggaatgctaagagccaggtacacagaactcagcagccctttcgtcactgagagccagcaagatgctttgttgcaaggcatggtggaactggtgaagattgggaaggaaaagcttgctcatggccacttaaaacaaaccaaaagtaaagtggcgttacaggctcaaatagaaaatcacaaggtttttttccagaagcttgttgctgacatgttgttgatccaagcatactctgccaaaatacttccttctttattgcaaaacagagagacattttgggcagaacaagtaacagaagttaaaatactagaagaaaagtcacgccaatgtggtatgaagctgcagagtttgttgcagaaatgggaagaatttgatgaaaactatgcatctcttgaaaaggacctggaaattcttatatctacattgccctctgtgagtttggtggaagaaacagaggaaagattagtggaaaggatttcattttaccagcaaataaaaagaaacattggtggaaaacacgcccggctttaccaaactctgaacgaaggcaaacagttggtggcgtctgtgagctgtcctgaattagagggccagatcgcaaaactggaagagcagtggttgtccctgaacaagaaaattgaccatgagctccacaggctgcaagctcttctcaagcatctgctcagttataacagagattcggatcagttaaccaagtggttggaatcttcccagcatactctgaattactggaaagaacagtccctcaatgtgtctcaggacttggatacaatcagaagcaacatcaacaatttttttgagttttcaaaagaagttgatgaaaaatcctccttgaagactgccgttatcagtatcgggaaccagcttcttcacctgaaagaaactgatacagctacactgagagcttctttagcacagtttgaacaaaaatggacaatgctcataactcaacttccagatattcaagaaaaacttcaccagcttcaaatggagaaattgccgtctcgtaaagcaatcacagaaatgattagctggatgaacaatgtggagcatcaaacttcagatgaagactccgtgcattcaccaagttctgcatctcaagttaaacatcttcttcagaagcacaaggagtttagaatggaaatggactataaacagtggatagttgacttcgttaaccagtcattacttcagctaagcacctgtgatgtagaaagcaagcgctatgaaagaacggagtttgcagagcacctgggggagatgaaccgccagtggcaccgtgtacatggaatgctgaatagaaagatacaacatttagaacaacttctagaaagtatcactgagagtgaaaataaaatacagatcttgaacaactggctggaagcacaagaagagagactgaaaactttacaaaaacctgaaagtgtgatctcagtgcagaagctgctcctggactgtcaggatatagaaaatcaacttgcaattaaatccaaagcactagatgagttgaaacaaagttatctgactttggagagtggggcagtgccattgttagaagatacagcatcccgaattgatgagttatttcaaaagagaagcagtgttctcactcaggtcaatcagctcaaaacctccatgcagtcagttttacaggagtggaagatttatgatcaactctatgatgaagtgaatatgatgacaatccgattctggtactgcatggaacacagcaagcctgtggtgttatcattggagaccttgagatgccaggtggagaaccttcagtctctgcaagatgaagctgagagcagtgaagggagttgggagaaactccaggaggttatcggcaaactcaaaggtctctgcccctctgttgctgaaataatcgaagagaaatgccaaaatactcataaaaggtggactcaggtgaaccaagccattgcagaccagttgcagaaggcccagagtctgctccagctctggaaggcctatagcaatgctcatggtgaagctgccgcaaggctgaagcagcaggaagcaaagtttcaacagctcgcaaacatcagcatgtctggaaacaacctggcagagatcctgcccccagccctgcaggacataaaggagctgcagcatgatgtgcagaaaacaaaagaagcctttctccaaaattccagtgtcctggatcgactcccacaacccgcagagtccagcacccacatgctcctcccgggccccctgcactctctccagagggctgcttatttggaaaagatgctgcttgtgaaagcaaatgaatttgagtttgttctctcacagtttaaggattttggagtccggctggaatctttaaaaggtcttattatgcatgaagaagagaatttggatagacttcaccaacaggaaaaagaaaatcctgactcattcctgaatcatgtgctggcactgacagcccaatcacctgatattgaacatttgaatgaagtgagcctcaagctcccacttagtgacgtagctgtgaagacgttacaaaatatgaaccggcaatggattcgggccacggccacggcactggagcgctgcagtgagcttcagggaattggattgaatgaaaagtttctttattgctgtgaaaagtggatccaacttttggagaagatagaagaagcactcaaagtggatgtggctaacagccttcctgagctcctggagcagcagaaaacctataagatgttagaagctgaagtttctataaaccagacaattgctgattcctatgtcacccagtccttacaactcctggacacaacagaaatagagaacagaccagaatttattacagaattctcaaagctgacggatcggtggcagaatgctgtccagggtgttcggcagaggaagggtgacgttgatgggctggtgaggcagtggcaagatttcactacttctgtggagaacttgtttcgcttcctcactgacaccagccacctgctatctgcagtgaagggccaggagcgcttcagcctctaccaaaccagaagtctgatccatgagctgaagaataaagaaattcattttcaaaggaggcgaactacctgtgccctaaccttggaagctggagaaaagttactgctcacaactgacctgaaaactaaagagtctgtgggtaggagaatcagtcaacttcaggacagctggaaagacatggagccccagctggcagagatgattaagcagttccagagcactgtagagacctgggaccagtgtgaaaagaaaatcaaggagttgaaaagcaggctgcaagttttaaaggcacaaagtgaagatcctcttccagagcttcacgaggacctccataacgaaaaagagctgattaaggaactagaacagtctttggctagctggactcagaacttgaaagaacttcaaactatgaaggcggacttaacccggcacgttctcgtggaagatgtgatggttttgaaggagcaaatagagcatttgcacagacaatgggaggacctctgcttaagggtaagtcagctcactgcagggcacggctgtttgggagtggattgaaatgtctctgaaggccagacaaagtagaaaggagcttaatttcattgaaccggaggcccttttcagtgggacccctggcccggccgctgctc

SEQ ID NO: 735516 - DNA, 22081 bp, Homo sapiens
  misc_feature (6127)..(6127): n is a, c, g, or t
  misc_feature (6702)..(6702): n is a, c, g, or t
  misc_feature (7072)..(7072): n is a, c, g, or t
  misc_feature (7297)..(7297): n is a, c, g, or t
  misc_feature (7404)..(7404): n is a, c, g, or t
  misc_feature (9565)..(9565): n is a, c, g, or t
agcccgcggggtgaaatgacttgctcatggtctggtagctaatcgcagatctgctctctaactcctacttccaagacccaggaatctacgggtgttggagaagacccctcctgaaatcctccagaagagctttttgagggagcttgtggctcctgttcacccagccccggttcacttcttcaactgagatggacatgatataatctccattgagtcaaagaatggcatctagtcctgagcttcccaccgaagatgaacagggttcctggggcatcgacgatctccatatttcattgcaagctgaacaggaagacacccagaagaaagccttcacgtgctggataaactcacagttggccaggcacacttctccctcagttatatccgacctattcacagacattaaaaaggggcatgtcctcctggatctgctagaagtactttctgggcaacagttgcctcgggataaaggatctaataccttccagtgtagaatcaatatagaacatgccttgacattcctaagaaaccgatcaattaagctaataaatattcatgttactgatatcattgatggaaacccatccattatccttggcctaatttggacaattatcctgcactttcatattgagaagcttgcccagactctttcttgcaattacaatcagccttccctggatgatgtgagtgtggttgactcatctcctgcctcaagtcctccagctaagaaatgctctaaagtgcaagcaagatggcaaatgtctgcaagaaaggcccttcttttgtgggctcaggaacaatgcgccacctatgagtctgtcaatgtgaccgattttaagtcaagttggagaaatgggatggcttttttggccatcattcatgccttgcgaccagacctaattgacatgaagagtgtgaagcatagatccaacaaagacaatctgagagaggccttcagaattgcagaacaagaattaaaaatccccagattgctggaaccagaagatgtggatgttgttgatcctgatgaaaagtccatcatgacctatgtggcacagtttctgcagtattccaaagatgcccctgggactggagaggaggctcagggaaaggtgaaagatgctatgggctggttaactctgcaaaaggaaaaactacagaagttgctaaaggattcagagaatgatacctactttaaaaagtataatagcctgctgtcctttatggagtcattcaatgaagaaaaaaagtcctttttggatgtcctgtcaataaaacgggatctggatgagctggacaaggatcatttacagttgagagaagcctgggatggcctcgatcaccagattaatgcatggaaaataaagctaaattatgccttgcccccacccctccatcaaactgaagcttggctccaggaggtagaagagcttatggatgaagatttgtcagcctcccaggatcactctcaagccgtgactctgatacaagagaaaatgactttattcaagagcctgatggatagatttgagcatcattcgaacattctccttacctttgaaaataaggatgaaaatcacttgccattggtaccacctaacaaattggaggaaatgaaaagacgaatcaacaacattttggagaaaaaatttattctacttctagaatttcattactacaagtgcttagttcttggtttggtagatgaagtgaaatcaaaattggatatttggaacattaaatatgggagcagagaatctgtggaattattgctggaagactggcataaatttattgaagaaaaagaattcctagctcgacttgatacttcttttcaaaaatgtggagaaatttataagaatttggctggagaatgtcagaatattaataaacagtatatgatggtgaaatctgatgtttgtatgtatagaaaaaatatatataatgtgaagtccactctacaaaaagtgctggcatgttgggctacttatgtggaaaaccttcgcttactaagggcttgctttgaggagacaaagaaggaagaaattaaagaggtaccctttgagacactagcccagtggaatctagaacacgctactttaaatgaagcaggaaatttcttagtcgaagtcagcaatgatgtggttggatcatctatttctaaagaactgagaaggctgaataaaagatggagaaagttggtttcaaaaactcaacttgaaatgaacctgccactgatgataaaaaaacaggatcagcccacttttgacaattctggaaatattctatctaaagaagagaaagcaactgttgagttttcaacagatatgtcagtagaacttcctgaaaattataatcaaaatataaaggctggagagaaacatgaaaaagaaaatgaagaattcacagggcaactaaaagtggctaaagatgttgaaaaactcattggacaagtggaaatctgggaggcagaagccaaatctgttttggatcaagatgatgtggacacctcaatggaagaatctttgaagcatcttattgccaaaggctctatgtttgatgagcttatggcaagaagtgaagatatgttacaaatggatatacaaaatatttcaagccaggagtcctttcaacatgttctcacaactgggcttcaggcaaagattcaagaagctaaagagaaagtccagatcaatgtggtaaaactcattgcagcgttgaagaacttaactgacgtttcaccagatttggacatcaggctgaagatggaagaatcccagaaggaacttgaatcatatatgatgagggctcagcagttactggggcaaagagagagccccggtgaactcatttcaaaacacaaggaagcactaataatttctaatacaaaaagtctggccaagtatttgaaagctgttgaagaactaaaaaataatgtaactgaggacataaagatgtctttagaagaaaagagtagagatgtctgtgccaaatgggagtctcttcatcatgaactgtctttatatgttcaacaactaaaaatagatattgaaaaaggaaagcttagtgacaatattttaaaacttgaaaagcaaataaataaagaaaagaaacttatccgtagaggaaggaccaagggtctcatcaaagaacatgaggcctgcttttctgaggaaggctgcctgtaccagcttaatcaccacatggaagtcctgagggagctgtgtgaagagctgccttcacagaagagtcaacaagaagtgaagagactactcaaagattatgaacaaaagatagaaagacttctgaaatgtgcttccgagattcatatgacactgcagcccacagcgggaggcacgtcgaaaaacgaggggaccatcaccacatctgagaatagaggaggggatccccacagtgaggcaccatttgcaaaatcagataatcagccatcaactgaaaaggcaatggaacccactatgaagtttagcctggcatcagtgttaaggcctctgcaagaagaaagcattatggaaaaggattacagtgcatctataaatagtttactagagaggtatgatacatacagagatattcttgaacaccacctgcaaaacaacaaattcaggattacttctgatttctctagtgaagaggacaggagtagttcttgtctgcaggctaaactgacagatctacaggtcataaaaaatgaaactgatgctcgctggaaagagtttgaaattatttcattgaagttagaaaatcatgtgaatgacataaaaaagccttttgtaattaaggaaagagacacactaaaggaaagagaaagagagcttcagatgactcttaataccagaatggaatctttagagacagcactgcggcttgtgttacctgtagagaaggcatcacttcttctctgtggctcggacctgcctctccataaaatggccatccagggatttcatctcattgatgctgatcgcatctatcaacacctaaggaatatccaagattccatagcaaaacagattgaaatatgtaaccgcttagaagagccaggcaactttgtattaaaggagttacacccatttgatctacacgcaatgcagaatattatactgaaatacaaaacacaatttgaaggaatgaaccacagggtgcagaggagtgaagatactctcaaagctctggaagactttttggcgtctctcagaacagctaaactctctgctgagcccgttacagacctttcagcctcagatacacaggtggcacaagaaaatacgttgacagtaaaaaataaagagggagaaattcatctgatgaaagacaaggccaaacatttggataaatgtttgaagatgctcgatatgagctttaaagatgctgaacggggtgatgacacctcctgtgaaaacctgcttgatgctttttcaataaagttatctgagacacatggctatggggtacaggaggaattcactgaggaaaacaaattactagaggcttgtattttcaaaaataatgaactccttaaaaatattcaagatgtgcagagtcaaatcagtaaaattggtcttaaggatcctactgttccagctgtgaaacatcggaaaaaatcattaatcagactggataaggttctagatgaatatgaagaagagaagagacatttacaagaaatggctaattctcttccacacttcaaagatggcagagaaaaaaccgtgaatcaacagtgccaaaatacagtagtcttgtgggagaataccaaagccttggtcaccgaatgtcttgaacaatgtgggagagttttggagctcttaaaacaatatcagaattttaaaagcatcttgacaactttgattcaaaaagaagagagtgtcatctccctgcaggcttcgtacatgggaaaggagaacctgaagaaaaggatagcagagattgaaattgtcaaagaagaatttaatgagcatttagaagttgtagacaagataaaccaggtctgcaaaaatctacaattttatctaaataaaatgaaaacttttgaagagcccccttttgaaaaagaggctaatattattgtggatagatggcttgatataaatgagaagacagaagattactatgaaaatcttggtcgagctctagctttgtgggacaaactttttaacttaaaaaatgtcattgatgagtggacagaaaaggcccttcaaaaaatggaattacatcaattgactgaagaggacagagaaaggctgaaggaagaattacaagtccatgaacaaaaaacttcagaattttctagaagagtggctgaaatacagtttttgctccaaagcagtgaaatacctcttgaattgcaggtcatggagtcctctattttgaacaagatggaacatgtacagaagtgcttaacaggagaatccaactgccatgcactcagtggcagcactgctgagctaagggaggatctcgaccaagccaagacccagatcgggatgactgaatccctcttaaaagccctgtctccttctgacagcttggagatcttcactaaactagaggagatacaacagcagattctacagcaaaaacacagtatgatattacttgagaatcaaataggttgtctgactcctgaactctctgaattgaaaaagcaatatgaaagtgtcagtgatttatttaataccaaaaaaagtgttttgcaagatcacttttctaagttattgaatgatcaatgcaagaactttaatgactggttcagcaacattaaagtgaaccttaaggagtgttttgaatcatcagaaacaaaaaagagtgtggaacaaaagctacaaaaactttctgatttcttgactcttgaaggaagaaacagtaaaataaagcaggtggacagcgtactgaagcatgtgaagaagcatctgcccaaagcacatgtgaaggagcttatcagttggctcgtgggtcaggaattcgaattagaaaaaatggagtccatatgccaggctcgagcaaaggagcttgaagactccttgcagcagctactgagactccaggatgaccatagaaacctgaggaagtggttgactaatcaagaagagaaatggaaaggaanggaagaaccaggggagaaaactgagctgttctgccaagctttagctagaaagagggaacagtttgaatctgtggcccaattgaacaactctttgaaggaatatgggtttactgaagaagaagaaataataatggaagcaacatgtttgatggatagataccagacattactgagacaactaagtgaaatcgaggaagaggataagttactacccacagaggaccagagctttaatgatcttgcacatgatgtaattcattggataaaagagattaaagagtcccttatggttttgaattcatccgaaggcaaaatgccacttgaggaaagaatccaaaaaatcaaggaaatcattttgctgaagcctgaaggggatgccagaatagagaccatcatgaagcaggctgagagcagcgaggccccgctggttcagaagaccctcactgacatcagcaaccagtgggacaacacactccatttagctagcacctacctaagccatcaagaaaagcttctactagaaggagagaaatatttacaaagtaaggaggatctgagattaatgctcatagaantaaagaagaaacaggaagcaggctttgctctacaacatggtctgcaggagaagaaagctcagttaaagatttataagaaattcctcaagaaagcccaagatttgacatccttgctaaaggagttaaaatctcagggaaactacctcttggagtgcactaaaaatcccagcttcagtgaagagccttggctggaaataaagcatctacacgaaagtcttcttcaacaactgcaggattctgtgcaaaacttggacggtcacgttcgagaacatgattcataccaggtttgcgtcacagacctgaatactacattggacaatttctccaaggaatttgtcagtttttctgataagcctgtggatcaaatagnggttgaggaaaaattgcagaaactgcaggaactagagaatagactcagtttacaagatggcacattaaagaagattttagctttagcaaaatccgtcaagcaaaatacatcttcagtggggcagaagattattaaagatgatataaaatcacttcagtgtaaacaaaaagatttggaaaacaggcttgcatctgctaagcaggagatggaatgttgtctcaacancattctcaaatcaaaacgctcaacagaaaagaaaggaaagtttactctgccaggcagagagaagcaggccacttctgatgtgcaggagtctactcaggaatcagctncagtggaaaagttggaggaagactgggaaataaacaaggattcagctgtggaaatggctatgtcaaaacaactttctcttaatgctcaagaaagcatgaaaaacactgaagatgagcggaaagtcaatgagctgcaaaatcaacctttagaattagatactatgttaagaaatgaacaattagaagagatagagaaattatatacccagttggaagcaaagaaagcagccattaagccactggaacaaacagaatgtcttaacaaaacagaaactggggccttggttctccacaatataggatattcggcacagcatttggacaatttgcttcaggcacttattactttgaagaaaaacaaagaaagccaatattgtgtcctcagagattttcaggaataccttgctgcagttgaatcttcaatgaaagccttgttgacagacaaggaaagtcttaaagtaggaccactggacagtgtaacgtatctggacaaaattaaaaaattcatagcatccatagaaaaagagaaagattctttaggcaacttgaaaatcaaatgggagaatttatcaaaccacgtgactgacatggataagaaattgttggaaagccagattaagcaacttgaacatggttgggaacaagtggaacagcagattcaaaagaagtattctcagcaggtagtggaatatgatgaatttacaaccctcatgaataaggtacaggacactgagatttctctgcaacagcagcagcaacatctacagttaaggctgaagtctccagaagaacgggcagggaaccaaagcatgattgccttgaccactgacctccaggctaccaagcatggattttctgttttaaaggggcaagctgaacttcagatgaagaggatttggggagaaaaagaaaagaagaatttggaggatggaataaataacttgaagaaacaatgggaaacattggagccattacacttagaagcagaaaatcagattaagaagtgtgacataaggaacaagatgaaagagactatcttatgggccaagaatttgttgggtgaacttaatccctccattccccttctcccagatgacattctttcacagatcagaaagtgcaaagtgacacatgatggcattctagctaggcagcagtctgtggaatcgttggctgaagaggtcaaagataaggttcctagccttacaacctatgagggcggtgatttaaataataccctagaggacttacggaatcaataccaaatgctggttttaaaatcaactcaaagatcacagcaattagaatttaagttggaagaaagaagcaatttttttgctataataaggaagtttcaacttatggttcaagaaagtgaaacactgataattcccagggtggagacagctgccacggaagctgaactaaaacatcaccatgttactttggaggcatctcagaaggaattgcaagaaattgacagtggaatctcaacacatcttcaggagctaacaaacatctatgaggagctgaatgtgtttgaaagattatttctggaagatcagttgaaaaatcttaagattaggaccaacagaatacaaagattcattcagaatacatgtaatgaagtggaacacaaggtaaagttttgcagacaattccatgaaaaaacatcagcgcttcaggaggaggctgacagtatacagcgcaatgaactattacttaatcaagaagtaaataaaggtgttaaagaggagatctataatcttaaagacagactcaccgctattaagtgttgcatcttacaggtattgaaacttaaaaaagtgtttgactatattggactaaactgggatttttcacaacttgaccaattacaaacccaagtatttgaaaaagaaaaggaacttgaagaaaaaattaagcagttggacacatttgaggaagaacatggcaaatatcaggcattattaagtaaaatgagagctattgatttgcaaattaagaaaatgactgaagtagtactaaaagctcctgatagctctccggaaagcagacggctcaatgcccaaattttaagtcagagaattgagaaagccaagtgtttatgtgatgagataataaagaaattaaatgaaaataagacctttgatgactcatncaaggagaaagaaatactacaaataaagctgaatgcagaagaaaatgataagttatacaaagttctccaaaacatggtattagaactctcaccaaaagaattggatgaaaagaattgtcaggacaaactagaaacttccttacatgttttaaatcagataaaatctcaattacagcagccattacttataaatttggaaattaaacatattcaaaatgaaaaggacaattgtgaagcatttcaggagcaagtttgggcagaaatgtgtagtattaaagctgtgactgctattgagaaacaaagagaagaaaactcttctgaagcgagtgatgtggagacaaaactacgtgagtttgaagatcttcagatgcagcttaacacaagcattgatttgcgcacaaatgtcttgaatcatgcttatgaaaatctaacacgctataaagaagcagtcaccagggcagtggagagcatcacttccctcgaagccatcattataccctacagagtagatgttggtaatccagaagaatctttagagatgcctcttcgaaaacaagaggaattggaatccacagtagcacgcatccaggacctcactgagaaactgggaatgatatccagccccgaagccaaactacaacttcagtatactttacaggaactagtttctaagaactcagcaatgaaggaagctttcaaagcacaggaaactgaggcagaaaggtatcttgagaattacaaatgctatagaaaaatggaagaggatatttacactaacctcagcaaaatggagacagttcttggacagtccatgtcctcgttgccactgtcttacagagaagctttagagcgcttggaacagagcaaggccttggtgtcaaatcttatatcaaccaaagaagagttaatgaaactacgacagatccttagactcttgagactcaggtgcacagaaaatgatggcatatgtttgctcaagattgtgtcggctctgtgggagaaatggctgagtttgctggaagctgctaaagagtgggagatgtggtgcgaagaactgaagcaggaatggaaatttgtcagtgaagaaattgaacgagaggcaattattttagataatcttcaggaagaactccctgaaatttccaaaacaaaagaggcagccaccacagaggaactctctgagctgctagactgtttatgccaatatggagagaacgtggagaagcaacagctgttactgactctacttcttcagcgcatcagaagtatccagaatgttcctgaaagctcaggggctgtggaaactgttccagcatttcaagaaattacttctatgaaagaacgatgcaacaagcttcttcagaaagttcagaaaaataaagaattggtgcagactgaaatccaagaaagacattccttcacaaaagagataattgctttgaagaatttctttcaacagaccacaacttcattccaaaatatggcattccaggatcacccagaaaagtcagaacaatttgaggagcttcaaagcatccttaagaaagggaaactaacttttgagaatattatggaaaaactgcgaatcaagtattccgaaatgtacaccatagtccctgcagagattgaatcccaggtggaagaatgcagaaaagctttagaagacatagatgagaagattagcaatgaagtcttaaaaagctcaccatcatatgcaatgaggagaaaaatagaagaaattaacaatgggcttcataatgttgaaaagatgttgcagcagaaaagcaaaaatattgagaaagctcaagaaattcaaaagaaaatgtgggacgagttagatctatggcattccaaactaaatgagctggattctgaagttcaggacattgttgaacaggacccaggacaggctcaagaatggatggataacttgatgattcctttccagcagtatcagcaagtatcacagagagcagagtgtagaacctcacagttgaataaggccacagttaagatggaggaatatagtgaccttctgaagagcactgaggcttggatagaaaataccagtcatttgctggccaatcctgctgactatgactctttgaggacactgagtcaccatgctagcactgtgcagatggctttggaagattcagaacagaagcacaatcttttacattcaatctttatggatctagaagacctgtcaataatttttgaaacagatgaattaacccaatccatacaagagttaagtaatcaagtaacagctttacaacaaaaaataatggaaagccttccacagattcagcgaatggctgatgatgtggttgctattgaatctgaagtaaaatcaatggaaaaaagagtttcaaaaatcaaaactatcctattatcaaaagaaatatttgatttttcacctgaagaacatctcaaacatggggaggtcatacttgaaaatatacgtcccatgaagaaaaccattgctgagatagtgtcttaccaagtggaactgaggttgccccaaacaggaatgaaacctctgcctgtgtttcagcggacaaatcagcttttacaagatataaaactattggaaaatgtgactcaagaacaaaatgagttattaaaggtagtcataaaacagaccaatgaatgggatgaagaaatagaaaatttgaaacagatcttaaataattattcagctcagttctcccttgaacatatgtcaccagaccaagctgacaagctgccacaactacagggagaaatcgaacgtatggagaaacagattctgagtttgaaccagagaaaagaagacctgttggtggacttgaaggccaccgtactaaaccttcaccagcatttgaagcaagaacaagaaggagtagaaagagataggctgccagctgtaacatcagaggaaggtggagtggcagagagggatgcttctgagcggaagttgaacagaagaggctccatgtcttacctggcagcagtcgaggaagaggtggaagaaagttccgtgaagagcgataatggagatgagaaggcagagccatcgcctcagtcttggtcttcactttggaagcatgacaaggacatggaagaagacagagcttcctcatcctctggaacaattgttcaggaagcatatgggaaaataagcacctctgataattccatggcacaaatcctcacaccagactcactaaacactgagcaaggcccagaatgttccctaaggcccaaccaaacagaagagggcaccacacctcctattgaggctgacactctggactcttctgacgcgcaaggaggtttggagcccagggtggagaaaactaggccggagcccacagaagtcctgcatgcctgcaagacccaggtggccgagctggagctgtggctgcaacaagccaacgtggcagttgagccggaaacattaaacgcagacatgcagcaggtgctggaacagcagctggtagggtgccaggctatgctaacagagattgagcacaaggttgcctttctgttagagacttgcaaagatcagggcctgggagataatggagccactcaacatgaggctgaagcgctttccctgaaactgaaaacagtgaagtgcaatttagaaaaagtccagatgatgcttcaggagaagcacagtgaagatcagcatcctaccattctaaagaaatcctcagagccagagcatcaagaagctctccaaccagttaacctttctgaattggaatccattgtaactgaaaggccacaattcagcagacaaaaagatttccagcagcaacaggttctggagttaaaaccaatggaacagaaagatttcatcaaattcatagaatttaatgctaagaaaatgtggccccagtattgccaacatgataacgatacaactcaggaatcatctgcaagcaaccaggcatccagccctgaaaatgacgttccagactcgatcttgtcaccccagggccaaaatggagataagtggcaatatctgcatcatgaactctcatcaaaaataaagctcccactccctcagcttgtggagcctcaggtttccacaaatatgggtattctacccagcgtgactatgtataactttagatacccaacaactgaagaactgaaaacctataccacccaacttgaagacctgcgccaagaagcaagtaaccttcagacacaggaaaatatgacagaagaagcatatatcaatttggataaaaaattgtttgaactattcctgaccctcagtcagtgcctcagcagtgtggaggagatgctggagatgcccagactttacagggaggatggttctggccagcaggtgcactacgagacgctggctcttgagttgaagaaactttatttagcgctaagtgacaagaagggtgatcttttgaaagccatgacttggcctggcgagaacaccaacttgctccttgaatgttttgacaaccttcaagtctgcctggagcacactcaggctgcagctgtctgtagaagcaagtccctgaaagctggcctcgattacaaccgcagttaccagaatgaaataaagagattatatcatcagctcattaagagtaagacatctttacaacagtctttgaatgaaatcagtgggcagagtgttgctgaacagcttcagaaagcagatgcatatacagtggagctggagaacgccgagagccgagtggccaaactaagagatgaaggggagaggcttcatttaccttatgctttactccaggaggtttacaaattagaggatgtacttgacagtatgtggggaatgctaagagccaggtacacagaactcagcagccctttcgtcactgagagccagcaagatgctttgttgcaaggcatggtggaactggtgaagattgggaaggaaaagcttgctcatggccacttaaaacaaaccaaaagtaaagtggcgttacaggctcaaatagaaaatcacaaggtttttttccagaagcttgttgctgacatgttgttgatccaagcatactctgccaaaatacttccttctttattgcaaaacagagagacattttgggcagaacaagtaacagaagttaaaatactagaagaaaagtcacgccaatgtggtatgaagctgcagagtttgttgcagaaatgggaagaatttgatgaaaactatgcatctcttgaaaaggacctggaaattcttatatctacattgccctctgtgagtttggtggaagaaacagaggaaagattagtggaaaggatttcattttaccagcaaataaaaagaaacattggtggaaaacacgcccggctttaccaaactctgaacgaaggcaaacagttggtggcgtctgtgagctgtcctgaattagagggccagatcgcaaaactggaagagcagtggttgtccctgaacaagaaaattgaccatgagctccacaggctgcaagctcttctcaagcatctgctcagttataacagagattcggatcagttaaccaagtggttggaatcttcccagcatactctgaattactggaaagaacagtccctcaatgtgtctcaggacttggatacaatcagaagcaacatcaacaatttttttgagttttcaaaagaagttgatgaaaaatcctccttgaagactgccgttatcagtatcgggaaccagcttcttcacctgaaagaaactgatacagctacactgagagcttctttagcacagtttgaacaaaaatggacaatgctcataactcaacttccagatattcaagaaaaacttcaccagcttcaaatggagaaattgccgtctcgtaaagcaatcacagaaatgattagctggatgaacaatgtggagcatcaaacttcagatgaagactccgtgcattcaccaagttctgcatctcaagttaaacatcttcttcagaagcacaaggagtttagaatggaaatggactataaacagtggatagttgacttcgttaaccagtcattacttcagctaagcacctgtgatgtagaaagcaagcgctatgaaagaacggagtttgcagagcacctgggggagatgaaccgccagtggcaccgtgtacatggaatgctgaatagaaagatacaacatttagaacaacttctagaaagtatcactgagagtgaaaataaaatacagatcttgaacaactggctggaagcacaagaagagagactgaaaactttacaaaaacctgaaagtgtgatctcagtgcagaagctgctcctggactgtcaggatatagaaaatcaacttgcaattaaatccaaagcactagatgagttgaaacaaagttatctgactttggagagtggggcagtgccattgttagaagatacagcatcccgaattgatgagttatttcaaaagagaagcagtgttctcactcaggtcaatcagctcaaaacctccatgcagtcagttttacaggagtggaagatttatgatcaactctatgatgaagtgaatatgatgacaatccgattctggtactgcatggaacacagcaagcctgtggtgttatcattggagaccttgagatgccaggtggagaaccttcagtctctgcaagatgaagctgagagcagtgaagggagttgggagaaactccaggaggttatcggcaaactcaaaggtctctgcccctctgttgctgaaataatcgaagagaaatgccaaaatactcataaaaggtggactcaggtgaaccaagccattgcagaccagttgcagaaggcccagagtctgctccagctctggaaggcctatagcaatgctcatggtgaagctgccgcaaggctgaagcagcaggaagcaaagtttcaacagctcgcaaacatcagcatgtctggaaacaacctggcagagatcctgcccccagccctgcaggacataaaggagctgcagcatgatgtgcagaaaacaaaagaagcctttctccaaaattccagtgtcctggatcgactcccacaacccgcagagtccagcacccacatgctcctcccgggccccctgcactctctccagagggctgcttatttggaaaagatgctgcttgtgaaagcaaatgaatttgagtttgttctctcacagtttaaggattttggagtccggctggaatctttaaaaggtcttattatgcatgaagaagagaatttggatagacttcaccaacaggaaaaagaaaatcctgactcattcctgaatcatgtgctggcactgacagcccaatcacctgatattgaacatttgaatgaagtgagcctcaagctcccacttagtgacgtagctgtgaagacgttacaaaatatgaaccggcaatggattcgggccacggccacggcactggagcgctgcagtgagcttcagggaattggattgaatgaaaagtttctttattgctgtgaaaagtggatccaacttttggagaagatagaagaagcactcaaagtggatgtggctaacagccttcctgagctcctggagcagcagaaaacctataagatgttagaagctgaagtttctataaaccagacaattgctgattcctatgtcacccagtccttacaactcctggacacaacagaaatagagaacagaccagaatttattacagaattctcaaagctgacggatcggtggcagaatgctgtccagggtgttcggcagaggaagggtgacgttgatgggctggtgaggcagtggcaagatttcactacttctgtggagaacttgtttcgcttcctcactgacaccagccacctgctatctgcagtgaagggccaggagcgcttcagcctctaccaaaccagaagtctgatccatgagctgaagaataaagaaattcattttcaaaggaggcgaactacctgtgccctaaccttggaagctggagaaaagttactgctcacaactgacctgaaaactaaagagtctgtgggtaggagaatcagtcaacttcaggacagctggaaagacatggagccccagctggcagagatgattaagcagttccagagcactgtagagacctgggaccagtgtgaaaagaaaatcaaggagttgaaaagcaggctgcaagttttaaaggcacaaagtgaagatcctcttccagagcttcacgaggacctccataacgaaaaagagctgattaaggaactagaacagtctttggctagctggactcagaacttgaaagaacttcaaactatgaaggcggacttaacccggcacgttctcgtggaagatgtgatggttttgaaggagcaaatagagcatttgcacagacaatgggaggacctctgcttaagggtggccatacgtaaacaggagattgaagacagactcaatacatgggttgtattcaatgaaaaaaataaagagttgtgtgcctggctggtgcagatggaaaacaaagttctacagacagcggacattagtattgaagaaatgattgaaaagttacagaaggactgcatggaagaaataaacttgtttagtgaaaacaagttacagttaaagcagatgggtgaccagttgatcaaggccagcaacaaatcaagagcagctgagatcgatgacaagctcaacaaaattaacgatcgttggcaacatctttttgatgtcatcggatcaagggtgaagaagctgaaggagacctttgcttttattcagcagttggacaaaaacatgagcaaccttcgcacctggttggctcgaattgagtctgagctttccaagcctgttgtttatgatgtctgcgatgatcaagagatccagaagaggctcgctgagcagcaggatctacagcgagatattgaacaacacagcgcaggggtggagtccgtgtttaacatctgtgacgtcctactgcacgactccgatgcctgtgcaaatgagaccgagtgtgactcgatccagcagaccaccaggagcctggacagacgctggaggaacatttgtgccatgtccatggagcggcgcatgaaaatcgaggagacgtggcgcctgtggcagaagtttttagacgactattctcgctttgaggactggctcaagtcagctgagaggacggcagcctgcccaaattcctcagaggtgttgtacacgagtgccaaagaggaactgaagaggtttgaggcctttcagcggcagattcatgagcggctcactcagctggagctcatcaacaagcagtaccggcggctggcccgggagaaccgcacagacacggccagcaggctgaagcagatggtccacgagggcaaccagcgctgggacaaccttcagaggcgggtcacagccgtcctgcggagactcaggcatttcaccaaccagagggaagaatttgagggcaccagggagagcattctggtgtggctcacagagatggacctgcagctgaccaacgtggagcacttctcagagagtgacgccgatgacaagatgcgccaactgaatggcttccaacaggaaattacattaaataccaacaagattgatcagctcattgtgtttggggagcagctgattcagaagagcgagcccctggatgctgtgctgattgaggatgagctggaggaactccaccgctactgccaggaggtgtttggaagggtctcccggttccaccggcggctcacctcctgcactccgggcttggaagatgaaaaggaggcctctgagaatgaaacagacatggaagaccccagagaaatccagactgattcttggcgtaaacggggagagagcgaggaaccgtcatctcctcagtccctgtgtcatctagtggccccagggcacgagcggtctggctgcgagacccctgtcagcgtggactccatccccctggagtgggaccacacaggcgacgtggggggctcctcctctcacgaagaggacgaggagggcccatactacagcgcactgtcaggtaaatccatttcggatggccactcgtggcatgttcccgacagcccttcctgtcccgagcatcactacaagcaaatggaaggtgacaggaatgttccacctgttccccctgcgtccagcaccccttataaaccaccctatggaaagctactattacctccaggcacggatggtggcaaagaaggcccgcgagtcctgaatggcaacccacagcaggaagacgggggactggccggtatcacagagcagcagtcaggtgccttcgacagatgggagatgattcaagcacaggagcttcacaataagctcaaaataaaacaaaatttgcaacagctgaactctgatatcagcgccatcactacttggctgaaaaaaactgaagcagagctggaaatgttaaagatggcaaagcctccctctgatatccaggaaatagaactgagagtgaagagactgcaggagatactgaaagcctttgacacttacaaggcattagtggtctctgtcaacgtgagcagcaaggaatttctgcaaaccgagagccccgaatccacagagctccaaagtagactccgccagctgagcctgctctgggaagcagcacagggcgcagtggacagctggagagggggcttacgacagtcgctcatgcagtgccaggacttccaccagttgagtcaaaatctgctgctgtggttagcgagtgccaagaaccggaggcagaaggctcatgtcaccgatccaaaggcagacccccgggctctcctagagtgtcggagggaactaatgcaactggaaaaggagctggtagaacgtcaacctcaagtggacatgttacaggagatttcaaacagccttctcattaagggacatggagaagactgtattgaagctgaagaaaaggtgcatgttattgagaagaaactcaaacagttacgggagcaagtgtcccaagatttaatggccttgcagggaacccagaacccagcctcacccctgcccagcttcgacgaggtagactcgggggaccagcctcctgcaacatccgtgccagctccccgagcaaagagttcagagcagtgagaactacagaaggcgaggaggagacagagagcaggtaacggggctttaccgtgacagcagtgcgttcccctgctccacactcccactgactcagtcttgccaatgccactatcaaggtccttgcaaaaatctggttttcttttgtctggaaagggctggttttctcctctgaaactgaaccccaactgttggccctatttaaatctcaggtcttggatttcttacttacataagcaggggcttaggtaatagagtgggttgtgcctgtggagcctcccaatcagctctcaacctcctctgttggcagggtccccggcagcacacggccacagcgctccttcctctcaagggtggtccgggcagccctacccctgcagctgctcctcctgctgctgctgctcctggcctgcctgctgccctcctccgaagaagactacagctgcactcaggccaacaactttgcccggtccttttaccccatgctgaggtacaccaatgggccaccccccacatagagggcatagctggccacagtgctacaccacctgcctgattgccaagggtgcccagcacgtggccccagaccaatctgagtgacttagtgttggcaaggtcccgggacctgtgcagacttcttctgggcttacccagcacgggctccctggagcccagggcagctttcagattgtgttcctccccaggagcagggaacctgtgtggcaggtgccccgggtattttggcagaactagttgattagtttagggatctctggaaatgtcagtttcctgaagagccaagcactttgtgaattctggtttgtttgtaaaacagcattattataatgtaggtatggtcaatgagcagtggtgtccatcacatatattatagaagcaagcgagcacattccaccctagaaatggttcagaaactcataggcacccttagctgatggaaacaatcaatcatatttaatacgcttagaatcagttttactccaatcagctggcaattttgagctgccggttatacaccaaaatgttctgttcagtacctagctctgctcttttatattgctttaaatttttaaagaaattatattgcatggatgtggttatttgtgcatattttttaacaatgcccaatctgtatgaataatgtaaacttcgatttttttttaaaaaaattagattttagctggagcttttgactaatgtaaagtaaatgccaaactaccgacttgatagggatgtttttgtaagttaattttctaagactttttcacatccaaagtgatgctttgctttgggttttaactgtttggccacggcgggggtgggggcggggggttggtacagaaacttgaagctgtttgtgatatgtacaactcagatgtttctcattaaaaaacaaaattagccagagacttctgttgtactgaattctg

SEQ ID NO: 735517 - DNA, 22100 bp, Homo sapiens
  misc_feature (6127)..(6127): n is a, c, g, or t
  misc_feature (6702)..(6702): n is a, c, g, or t
  misc_feature (7072)..(7072): n is a, c, g, or t
  misc_feature (7297)..(7297): n is a, c, g, or t
  misc_feature (7404)..(7404): n is a, c, g, or t
  misc_feature (9565)..(9565): n is a, c, g, or t
agcccgcggggtgaaatgacttgctcatggtctggtagctaatcgcagatctgctctctaactcctacttccaagacccaggaatctacgggtgttggagaagacccctcctgaaatcctccagaagagctttttgagggagcttgtggctcctgttcacccagccccggttcacttcttcaactgagatggacatgatataatctccattgagtcaaagaatggcatctagtcctgagcttcccaccgaagatgaacagggttcctggggcatcgacgatctccatatttcattgcaagctgaacaggaagacacccagaagaaagccttcacgtgctggataaactcacagttggccaggcacacttctccctcagttatatccgacctattcacagacattaaaaaggggcatgtcctcctggatctgctagaagtactttctgggcaacagttgcctcgggataaaggatctaataccttccagtgtagaatcaatatagaacatgccttgacattcctaagaaaccgatcaattaagctaataaatattcatgttactgatatcattgatggaaacccatccattatccttggcctaatttggacaattatcctgcactttcatattgagaagcttgcccagactctttcttgcaattacaatcagccttccctggatgatgtgagtgtggttgactcatctcctgcctcaagtcctccagctaagaaatgctctaaagtgcaagcaagatggcaaatgtctgcaagaaaggcccttcttttgtgggctcaggaacaatgcgccacctatgagtctgtcaatgtgaccgattttaagtcaagttggagaaatgggatggcttttttggccatcattcatgccttgcgaccagacctaattgacatgaagagtgtgaagcatagatccaacaaagacaatctgagagaggccttcagaattgcagaacaagaattaaaaatccccagattgctggaaccagaagatgtggatgttgttgatcctgatgaaaagtccatcatgacctatgtggcacagtttctgcagtattccaaagatgcccctgggactggagaggaggctcagggaaaggtgaaagatgctatgggctggttaactctgcaaaaggaaaaactacagaagttgctaaaggattcagagaatgatacctactttaaaaagtataatagcctgctgtcctttatggagtcattcaatgaagaaaaaaagtcctttttggatgtcctgtcaataaaacgggatctggatgagctggacaaggatcatttacagttgagagaagcctgggatggcctcgatcaccagattaatgcatggaaaataaagctaaattatgccttgcccccacccctccatcaaactgaagcttggctccaggaggtagaagagcttatggatgaagatttgtcagcctcccaggatcactctcaagccgtgactctgatacaagagaaaatgactttattcaagagcctgatggatagatttgagcatcattcgaacattctccttacctttgaaaataaggatgaaaatcacttgccattggtaccacctaacaaattggaggaaatgaaaagacgaatcaacaacattttggagaaaaaatttattctacttctagaatttcattactacaagtgcttagttcttggtttggtagatgaagtgaaatcaaaattggatatttggaacattaaatatgggagcagagaatctgtggaattattgctggaagactggcataaatttattgaagaaaaagaattcctagctcgacttgatacttcttttcaaaaatgtggagaaatttataagaatttggctggagaatgtcagaatattaataaacagtatatgatggtgaaatctgatgtttgtatgtatagaaaaaatatatataatgtgaagtccactctacaaaaagtgctggcatgttgggctacttatgtggaaaaccttcgcttactaagggcttgctttgaggagacaaagaaggaagaaattaaagaggtaccctttgagacactagcccagtggaatctagaacacgctactttaaatgaagcaggaaatttcttagtcgaagtcagcaatgatgtggttggatcatctatttctaaagaactgagaaggctgaataaaagatggagaaagttggtttcaaaaactcaacttgaaatgaacctgccactgatgataaaaaaacaggatcagcccacttttgacaattctggaaatattctatctaaagaagagaaagcaactgttgagttttcaacagatatgtcagtagaacttcctgaaaattataatcaaaatataaaggctggagagaaacatgaaaaagaaaatgaagaattcacagggcaactaaaagtggctaaagatgttgaaaaactcattggacaagtggaaatctgggaggcagaagccaaatctgttttggatcaagatgatgtggacacctcaatggaagaatctttgaagcatcttattgccaaaggctctatgtttgatgagcttatggcaagaagtgaagatatgttacaaatggatatacaaaatatttcaagccaggagtcctttcaacatgttctcacaactgggcttcaggcaaagattcaagaagctaaagagaaagtccagatcaatgtggtaaaactcattgcagcgttgaagaacttaactgacgtttcaccagatttggacatcaggctgaagatggaagaatcccagaaggaacttgaatcatatatgatgagggctcagcagttactggggcaaagagagagccccggtgaactcatttcaaaacacaaggaagcactaataatttctaatacaaaaagtctggccaagtatttgaaagctgttgaagaactaaaaaataatgtaactgaggacataaagatgtctttagaagaaaagagtagagatgtctgtgccaaatgggagtctcttcatcatgaactgtctttatatgttcaacaactaaaaatagatattgaaaaaggaaagcttagtgacaatattttaaaacttgaaaagcaaataaataaagaaaagaaacttatccgtagaggaaggaccaagggtctcatcaaagaacatgaggcctgcttttctgaggaaggctgcctgtaccagcttaatcaccacatggaagtcctgagggagctgtgtgaagagctgccttcacagaagagtcaacaagaagtgaagagactactcaaagattatgaacaaaagatagaaagacttctgaaatgtgcttccgagattcatatgacactgcagcccacagcgggaggcacgtcgaaaaacgaggggaccatcaccacatctgagaatagaggaggggatccccacagtgaggcaccatttgcaaaatcagataatcagccatcaactgaaaaggcaatggaacccactatgaagtttagcctggcatcagtgttaaggcctctgcaagaagaaagcattatggaaaaggattacagtgcatctataaatagtttactagagaggtatgatacatacagagatattcttgaacaccacctgcaaaacaacaaattcaggattacttctgatttctctagtgaagaggacaggagtagttcttgtctgcaggctaaactgacagatctacaggtcataaaaaatgaaactgatgctcgctggaaagagtttgaaattatttcattgaagttagaaaatcatgtgaatgacataaaaaagccttttgtaattaaggaaagagacacactaaaggaaagagaaagagagcttcagatgactcttaataccagaatggaatctttagagacagcactgcggcttgtgttacctgtagagaaggcatcacttcttctctgtggctcggacctgcctctccataaaatggccatccagggatttcatctcattgatgctgatcgcatctatcaacacctaaggaatatccaagattccatagcaaaacagattgaaatatgtaaccgcttagaagagccaggcaactttgtattaaaggagttacacccatttgatctacacgcaatgcagaatattatactgaaatacaaaacacaatttgaaggaatgaaccacagggtgcagaggagtgaagatactctcaaagctctggaagactttttggcgtctctcagaacagctaaactctctgctgagcccgttacagacctttcagcctcagatacacaggtggcacaagaaaatacgttgacagtaaaaaataaagagggagaaattcatctgatgaaagacaaggccaaacatttggataaatgtttgaagatgctcgatatgagctttaaagatgctgaacggggtgatgacacctcctgtgaaaacctgcttgatgctttttcaataaagttatctgagacacatggctatggggtacaggaggaattcactgaggaaaacaaattactagaggcttgtattttcaaaaataatgaactccttaaaaatattcaagatgtgcagagtcaaatcagtaaaattggtcttaaggatcctactgttccagctgtgaaacatcggaaaaaatcattaatcagactggataaggttctagatgaatatgaagaagagaagagacatttacaagaaatggctaattctcttccacacttcaaagatggcagagaaaaaaccgtgaatcaacagtgccaaaatacagtagtcttgtgggagaataccaaagccttggtcaccgaatgtcttgaacaatgtgggagagttttggagctcttaaaacaatatcagaattttaaaagcatcttgacaactttgattcaaaaagaagagagtgtcatctccctgcaggcttcgtacatgggaaaggagaacctgaagaaaaggatagcagagattgaaattgtcaaagaagaatttaatgagcatttagaagttgtagacaagataaaccaggtctgcaaaaatctacaattttatctaaataaaatgaaaacttttgaagagcccccttttgaaaaagaggctaatattattgtggatagatggcttgatataaatgagaagacagaagattactatgaaaatcttggtcgagctctagctttgtgggacaaactttttaacttaaaaaatgtcattgatgagtggacagaaaaggcccttcaaaaaatggaattacatcaattgactgaagaggacagagaaaggctgaaggaagaattacaagtccatgaacaaaaaacttcagaattttctagaagagtggctgaaatacagtttttgctccaaagcagtgaaatacctcttgaattgcaggtcatggagtcctctattttgaacaagatggaacatgtacagaagtgcttaacaggagaatccaactgccatgcactcagtggcagcactgctgagctaagggaggatctcgaccaagccaagacccagatcgggatgactgaatccctcttaaaagccctgtctccttctgacagcttggagatcttcactaaactagaggagatacaacagcagattctacagcaaaaacacagtatgatattacttgagaatcaaataggttgtctgactcctgaactctctgaattgaaaaagcaatatgaaagtgtcagtgatttatttaataccaaaaaaagtgttttgcaagatcacttttctaagttattgaatgatcaatgcaagaactttaatgactggttcagcaacattaaagtgaaccttaaggagtgttttgaatcatcagaaacaaaaaagagtgtggaacaaaagctacaaaaactttctgatttcttgactcttgaaggaagaaacagtaaaataaagcaggtggacagcgtactgaagcatgtgaagaagcatctgcccaaagcacatgtgaaggagcttatcagttggctcgtgggtcaggaattcgaattagaaaaaatggagtccatatgccaggctcgagcaaaggagcttgaagactccttgcagcagctactgagactccaggatgaccatagaaacctgaggaagtggttgactaatcaagaagagaaatggaaaggaanggaagaaccaggggagaaaactgagctgttctgccaagctttagctagaaagagggaacagtttgaatctgtggcccaattgaacaactctttgaaggaatatgggtttactgaagaagaagaaataataatggaagcaacatgtttgatggatagataccagacattactgagacaactaagtgaaatcgaggaagaggataagttactacccacagaggaccagagctttaatgatcttgcacatgatgtaattcattggataaaagagattaaagagtcccttatggttttgaattcatccgaaggcaaaatgccacttgaggaaagaatccaaaaaatcaaggaaatcattttgctgaagcctgaaggggatgccagaatagagaccatcatgaagcaggctgagagcagcgaggccccgctggttcagaagaccctcactgacatcagcaaccagtgggacaacacactccatttagctagcacctacctaagccatcaagaaaagcttctactagaaggagagaaatatttacaaagtaaggaggatctgagattaatgctcatagaantaaagaagaaacaggaagcaggctttgctctacaacatggtctgcaggagaagaaagctcagttaaagatttataagaaattcctcaagaaagcccaagatttgacatccttgctaaaggagttaaaatctcagggaaactacctcttggagtgcactaaaaatcccagcttcagtgaagagccttggctggaaataaagcatctacacgaaagtcttcttcaacaactgcaggattctgtgcaaaacttggacggtcacgttcgagaacatgattcataccaggtttgcgtcacagacctgaatactacattggacaatttctccaaggaatttgtcagtttttctgataagcctgtggatcaaatagnggttgaggaaaaattgcagaaactgcaggaactagagaatagactcagtttacaagatggcacattaaagaagattttagctttagcaaaatccgtcaagcaaaatacatcttcagtggggcagaagattattaaagatgatataaaatcacttcagtgtaaacaaaaagatttggaaaacaggcttgcatctgctaagcaggagatggaatgttgtctcaacancattctcaaatcaaaacgctcaacagaaaagaaaggaaagtttactctgccaggcagagagaagcaggccacttctgatgtgcaggagtctactcaggaatcagctncagtggaaaagttggaggaagactgggaaataaacaaggattcagctgtggaaatggctatgtcaaaacaactttctcttaatgctcaagaaagcatgaaaaacactgaagatgagcggaaagtcaatgagctgcaaaatcaacctttagaattagatactatgttaagaaatgaacaattagaagagatagagaaattatatacccagttggaagcaaagaaagcagccattaagccactggaacaaacagaatgtcttaacaaaacagaaactggggccttggttctccacaatataggatattcggcacagcatttggacaatttgcttcaggcacttattactttgaagaaaaacaaagaaagccaatattgtgtcctcagagattttcaggaataccttgctgcagttgaatcttcaatgaaagccttgttgacagacaaggaaagtcttaaagtaggaccactggacagtgtaacgtatctggacaaaattaaaaaattcatagcatccatagaaaaagagaaagattctttaggcaacttgaaaatcaaatgggagaatttatcaaaccacgtgactgacatggataagaaattgttggaaagccagattaagcaacttgaacatggttgggaacaagtggaacagcagattcaaaagaagtattctcagcaggtagtggaatatgatgaatttacaaccctcatgaataaggtacaggacactgagatttctctgcaacagcagcagcaacatctacagttaaggctgaagtctccagaagaacgggcagggaaccaaagcatgattgccttgaccactgacctccaggctaccaagcatggattttctgttttaaaggggcaagctgaacttcagatgaagaggatttggggagaaaaagaaaagaagaatttggaggatggaataaataacttgaagaaacaatgggaaacattggagccattacacttagaagcagaaaatcagattaagaagtgtgacataaggaacaagatgaaagagactatcttatgggccaagaatttgttgggtgaacttaatccctccattccccttctcccagatgacattctttcacagatcagaaagtgcaaagtgacacatgatggcattctagctaggcagcagtctgtggaatcgttggctgaagaggtcaaagataaggttcctagccttacaacctatgagggcggtgatttaaataataccctagaggacttacggaatcaataccaaatgctggttttaaaatcaactcaaagatcacagcaattagaatttaagttggaagaaagaagcaatttttttgctataataaggaagtttcaacttatggttcaagaaagtgaaacactgataattcccagggtggagacagctgccacggaagctgaactaaaacatcaccatgttactttggaggcatctcagaaggaattgcaagaaattgacagtggaatctcaacacatcttcaggagctaacaaacatctatgaggagctgaatgtgtttgaaagattatttctggaagatcagttgaaaaatcttaagattaggaccaacagaatacaaagattcattcagaatacatgtaatgaagtggaacacaaggtaaagttttgcagacaattccatgaaaaaacatcagcgcttcaggaggaggctgacagtatacagcgcaatgaactattacttaatcaagaagtaaataaaggtgttaaagaggagatctataatcttaaagacagactcaccgctattaagtgttgcatcttacaggtattgaaacttaaaaaagtgtttgactatattggactaaactgggatttttcacaacttgaccaattacaaacccaagtatttgaaaaagaaaaggaacttgaagaaaaaattaagcagttggacacatttgaggaagaacatggcaaatatcaggcattattaagtaaaatgagagctattgatttgcaaattaagaaaatgactgaagtagtactaaaagctcctgatagctctccggaaagcagacggctcaatgcccaaattttaagtcagagaattgagaaagccaagtgtttatgtgatgagataataaagaaattaaatgaaaataagacctttgatgactcatncaaggagaaagaaatactacaaataaagctgaatgcagaagaaaatgataagttatacaaagttctccaaaacatggtattagaactctcaccaaaagaattggatgaaaagaattgtcaggacaaactagaaacttccttacatgttttaaatcagataaaatctcaattacagcagccattacttataaatttggaaattaaacatattcaaaatgaaaaggacaattgtgaagcatttcaggagcaagtttgggcagaaatgtgtagtattaaagctgtgactgctattgagaaacaaagagaagaaaactcttctgaagcgagtgatgtggagacaaaactacgtgagtttgaagatcttcagatgcagcttaacacaagcattgatttgcgcacaaatgtcttgaatcatgcttatgaaaatctaacacgctataaagaagcagtcaccagggcagtggagagcatcacttccctcgaagccatcattataccctacagagtagatgttggtaatccagaagaatctttagagatgcctcttcgaaaacaagaggaattggaatccacagtagcacgcatccaggacctcactgagaaactgggaatgatatccagccccgaagccaaactacaacttcagtatactttacaggaactagtttctaagaactcagcaatgaaggaagctttcaaagcacaggaaactgaggcagaaaggtatcttgagaattacaaatgctatagaaaaatggaagaggatatttacactaacctcagcaaaatggagacagttcttggacagtccatgtcctcgttgccactgtcttacagagaagctttagagcgcttggaacagagcaaggccttggtgtcaaatcttatatcaaccaaagaagagttaatgaaactacgacagatccttagactcttgagactcaggtgcacagaaaatgatggcatatgtttgctcaagattgtgtcggctctgtgggagaaatggctgagtttgctggaagctgctaaagagtgggagatgtggtgcgaagaactgaagcaggaatggaaatttgtcagtgaagaaattgaacgagaggcaattattttagataatcttcaggaagaactccctgaaatttccaaaacaaaagaggcagccaccacagaggaactctctgagctgctagactgtttatgccaatatggagagaacgtggagaagcaacagctgttactgactctacttcttcagcgcatcagaagtatccagaatgttcctgaaagctcaggggctgtggaaactgttccagcatttcaagaaattacttctatgaaagaacgatgcaacaagcttcttcagaaagttcagaaaaataaagaattggtgcagactgaaatccaagaaagacattccttcacaaaagagataattgctttgaagaatttctttcaacagaccacaacttcattccaaaatatggcattccaggatcacccagaaaagtcagaacaatttgaggagcttcaaagcatccttaagaaagggaaactaacttttgagaatattatggaaaaactgcgaatcaagtattccgaaatgtacaccatagtccctgcagagattgaatcccaggtggaagaatgcagaaaagctttagaagacatagatgagaagattagcaatgaagtcttaaaaagctcaccatcatatgcaatgaggagaaaaatagaagaaattaacaatgggcttcataatgttgaaaagatgttgcagcagaaaagcaaaaatattgagaaagctcaagaaattcaaaagaaaatgtgggacgagttagatctatggcattccaaactaaatgagctggattctgaagttcaggacattgttgaacaggacccaggacaggctcaagaatggatggataacttgatgattcctttccagcagtatcagcaagtatcacagagagcagagtgtagaacctcacagttgaataaggccacagttaagatggaggaatatagtgaccttctgaagagcactgaggcttggatagaaaataccagtcatttgctggccaatcctgctgactatgactctttgaggacactgagtcaccatgctagcactgtgcagatggctttggaagattcagaacagaagcacaatcttttacattcaatctttatggatctagaagacctgtcaataatttttgaaacagatgaattaacccaatccatacaagagttaagtaatcaagtaacagctttacaacaaaaaataatggaaagccttccacagattcagcgaatggctgatgatgtggttgctattgaatctgaagtaaaatcaatggaaaaaagagtttcaaaaatcaaaactatcctattatcaaaagaaatatttgatttttcacctgaagaacatctcaaacatggggaggtcatacttgaaaatatacgtcccatgaagaaaaccattgctgagatagtgtcttaccaagtggaactgaggttgccccaaacaggaatgaaacctctgcctgtgtttcagcggacaaatcagcttttacaagatataaaactattggaaaatgtgactcaagaacaaaatgagttattaaaggtagtcataaaacagaccaatgaatgggatgaagaaatagaaaatttgaaacagatcttaaataattattcagctcagttctcccttgaacatatgtcaccagaccaagctgacaagctgccacaactacagggagaaatcgaacgtatggagaaacagattctgagtttgaaccagagaaaagaagacctgttggtggacttgaaggccaccgtactaaaccttcaccagcatttgaagcaagaacaagaaggagtagaaagagataggctgccagctgtaacatcagaggaaggtggagtggcagagagggatgcttctgagcggaagttgaacagaagaggctccatgtcttacctggcagcagtcgaggaagaggtggaagaaagttccgtgaagagcgataatggagatgagaaggcagagccatcgcctcagtcttggtcttcactttggaagcatgacaaggacatggaagaagacagagcttcctcatcctctggaacaattgttcaggaagcatatgggaaaataagcacctctgataattccatggcacaaatcctcacaccagactcactaaacactgagcaaggcccagaatgttccctaaggcccaaccaaacagaagagggcaccacacctcctattgaggctgacactctggactcttctgacgcgcaaggaggtttggagcccagggtggagaaaactaggccggagcccacagaagtcctgcatgcctgcaagacccaggtggccgagctggagctgtggctgcaacaagccaacgtggcagttgagccggaaacattaaacgcagacatgcagcaggtgctggaacagcagctggtagggtgccaggctatgctaacagagattgagcacaaggttgcctttctgttagagacttgcaaagatcagggcctgggagataatggagccactcaacatgaggctgaagcgctttccctgaaactgaaaacagtgaagtgcaatttagaaaaagtccagatgatgcttcaggagaagcacagtgaagatcagcatcctaccattctaaagaaatcctcagagccagagcatcaagaagctctccaaccagttaacctttctgaattggaatccattgtaactgaaaggccacaattcagcagacaaaaagatttccagcagcaacaggttctggagttaaaaccaatggaacagaaagatttcatcaaattcatagaatttaatgctaagaaaatgtggccccagtattgccaacatgataacgatacaactcaggaatcatctgcaagcaaccaggcatccagccctgaaaatgacgttccagactcgatcttgtcaccccagggccaaaatggagataagtggcaatatctgcatcatgaactctcatcaaaaataaagctcccactccctcagcttgtggagcctcaggtttccacaaatatgggtattctacccagcgtgactatgtataactttagatacccaacaactgaagaactgaaaacctataccacccaacttgaagacctgcgccaagaagcaagtaaccttcagacacaggaaaatatgacagaagaagcatatatcaatttggataaaaaattgtttgaactattcctgaccctcagtcagtgcctcagcagtgtggaggagatgctggagatgcccagactttacagggaggatggttctggccagcaggtgcactacgagacgctggctcttgagttgaagaaactttatttagcgctaagtgacaagaagggtgatcttttgaaagccatgacttggcctggcgagaacaccaacttgctccttgaatgttttgacaaccttcaagtctgcctggagcacactcaggctgcagctgtctgtagaagcaagtccctgaaagctggcctcgattacaaccgcagttaccagaatgaaataaagagattatatcatcagctcattaagagtaagacatctttacaacagtctttgaatgaaatcagtgggcagagtgttgctgaacagcttcagaaagcagatgcatatacagtggagctggagaacgccgagagccgagtggccaaactaagagatgaaggggagaggcttcatttaccttatgctttactccaggaggtttacaaattagaggatgtacttgacagtatgtggggaatgctaagagccaggtacacagaactcagcagccctttcgtcactgagagccagcaagatgctttgttgcaaggcatggtggaactggtgaagattgggaaggaaaagcttgctcatggccacttaaaacaaaccaaaagtaaagtggcgttacaggctcaaatagaaaatcacaaggtttttttccagaagcttgttgctgacatgttgttgatccaagcatactctgccaaaatacttccttctttattgcaaaacagagagacattttgggcagaacaagtaacagaagttaaaatactagaagaaaagtcacgccaatgtggtatgaagctgcagagtttgttgcagaaatgggaagaatttgatgaaaactatgcatctcttgaaaaggacctggaaattcttatatctacattgccctctgtgagtttggtggaagaaacagaggaaagattagtggaaaggatttcattttaccagcaaataaaaagaaacattggtggaaaacacgcccggctttaccaaactctgaacgaaggcaaacagttggtggcgtctgtgagctgtcctgaattagagggccagatcgcaaaactggaagagcagtggttgtccctgaacaagaaaattgaccatgagctccacaggctgcaagctcttctcaagcatctgctcagttataacagagattcggatcagttaaccaagtggttggaatcttcccagcatactctgaattactggaaagaacagtccctcaatgtgtctcaggacttggatacaatcagaagcaacatcaacaatttttttgagttttcaaaagaagttgatgaaaaatcctccttgaagactgccgttatcagtatcgggaaccagcttcttcacctgaaagaaactgatacagctacactgagagcttctttagcacagtttgaacaaaaatggacaatgctcataactcaacttccagatattcaagaaaaacttcaccagcttcaaatggagaaattgccgtctcgtaaagcaatcacagaaatgattagctggatgaacaatgtggagcatcaaacttcagatgaagactccgtgcattcaccaagttctgcatctcaagttaaacatcttcttcagaagcacaaggagtttagaatggaaatggactataaacagtggatagttgacttcgttaaccagtcattacttcagctaagcacctgtgatgtagaaagcaagcgctatgaaagaacggagtttgcagagcacctgggggagatgaaccgccagtggcaccgtgtacatggaatgctgaatagaaagatacaacatttagaacaacttctagaaagtatcactgagagtgaaaataaaatacagatcttgaacaactggctggaagcacaagaagagagactgaaaactttacaaaaacctgaaagtgtgatctcagtgcagaagctgctcctggactgtcaggatatagaaaatcaacttgcaattaaatccaaagcactagatgagttgaaacaaagttatctgactttggagagtggggcagtgccattgttagaagatacagcatcccgaattgatgagttatttcaaaagagaagcagtgttctcactcaggtcaatcagctcaaaacctccatgcagtcagttttacaggagtggaagatttatgatcaactctatgatgaagtgaatatgatgacaatccgattctggtactgcatggaacacagcaagcctgtggtgttatcattggagaccttgagatgccaggtggagaaccttcagtctctgcaagatgaagctgagagcagtgaagggagttgggagaaactccaggaggttatcggcaaactcaaaggtctctgcccctctgttgctgaaataatcgaagagaaatgccaaaatactcataaaaggtggactcaggtgaaccaagccattgcagaccagttgcagaaggcccagagtctgctccagctctggaaggcctatagcaatgctcatggtgaagctgccgcaaggctgaagcagcaggaagcaaagtttcaacagctcgcaaacatcagcatgtctggaaacaacctggcagagatcctgcccccagccctgcaggacataaaggagctgcagcatgatgtgcagaaaacaaaagaagcctttctccaaaattccagtgtcctggatcgactcccacaacccgcagagtccagcacccacatgctcctcccgggccccctgcactctctccagagggctgcttatttggaaaagatgctgcttgtgaaagcaaatgaatttgagtttgttctctcacagtttaaggattttggagtccggctggaatctttaaaaggtcttattatgcatgaagaagagaatttggatagacttcaccaacaggaaaaagaaaatcctgactcattcctgaatcatgtgctggcactgacagcccaatcacctgatattgaacatttgaatgaagtgagcctcaagctcccacttagtgacgtagctgtgaagacgttacaaaatatgaaccggcaatggattcgggccacggccacggcactggagcgctgcagtgagcttcagggaattggattgaatgaaaagtttctttattgctgtgaaaagtggatccaacttttggagaagatagaagaagcactcaaagtggatgtggctaacagccttcctgagctcctggagcagcagaaaacctataagatgttagaagctgaagtttctataaaccagacaattgctgattcctatgtcacccagtccttacaactcctggacacaacagaaatagagaacagaccagaatttattacagaattctcaaagctgacggatcggtggcagaatgctgtccagggtgttcggcagaggaagggtgacgttgatgggctggtgaggcagtggcaagatttcactacttctgtggagaacttgtttcgcttcctcactgacaccagccacctgctatctgcagtgaagggccaggagcgcttcagcctctaccaaaccagaagtctgatccatgagctgaagaataaagaaattcattttcaaaggaggcgaactacctgtgccctaaccttggaagctggagaaaagttactgctcacaactgacctgaaaactaaagagtctgtgggtaggagaatcagtcaacttcaggacagctggaaagacatggagccccagctggcagagatgattaagcagttccagagcactgtagagacctgggaccagtgtgaaaagaaaatcaaggagttgaaaagcaggctgcaagttttaaaggcacaaagtgaagatcctcttccagagcttcacgaggacctccataacgaaaaagagctgattaaggaactagaacagtctttggctagctggactcagaacttgaaagaacttcaaactatgaaggcggacttaacccggcacgttctcgtggaagatgtgatggttttgaaggagcaaatagagcatttgcacagacaatgggaggacctctgcttaagggtggccatacgtaaacaggagattgaagacagactcaatacatgggttgtattcaatgaaaaaaataaagagttgtgtgcctggctggtgcagatggaaaacaaagttctacagacagcggacattagtattgaagaaatgattgaaaagttacagaaggactgcatggaagaaataaacttgtttagtgaaaacaagttacagttaaagcagatgggtgaccagttgatcaaggccagcaacaaatcaagagcagctgagatcgatgacaagctcaacaaaattaacgatcgttggcaacatctttttgatgtcatcggatcaagggtgaagaagctgaaggagacctttgcttttattcagcagttggacaaaaacatgagcaaccttcgcacctggttggctcgaattgagtctgagctttccaagcctgttgtttatgatgtctgcgatgatcaagagatccagaagaggctcgctgagcagcaggatctacagcgagatattgaacaacacagcgcaggggtggagtccgtgtttaacatctgtgacgtcctactgcacgactccgatgcctgtgcaaatgagaccgagtgtgactcgatccagcagaccaccaggagcctggacagacgctggaggaacatttgtgccatgtccatggagcggcgcatgaaaatcgaggagacgtggcgcctgtggcagaagtttttagacgactattctcgctttgaggactggctcaagtcagctgagaggacggcagcctgcccaaattcctcagaggtgttgtacacgagtgccaaagaggaactgaagaggtttgaggcctttcagcggcagattcatgagcggctcactcagctggagctcatcaacaagcagtaccggcggctggcccgggagaaccgcacagacacggccagcaggctgaagcagatggtccacgagggcaaccagcgctgggacaaccttcagaggcgggtcacagccgtcctgcggagactcaggcatttcaccaaccagagggaagaatttgagggcaccagggagagcattctggtgtggctcacagagatggacctgcagctgaccaacgtggagcacttctcagagagtgacgccgatgacaagatgcgccaactgaatggcttccaacaggaaattacattaaataccaacaagattgatcagctcattgtgtttggggagcagctgattcagaagagcgagcccctggatgctgtgctgattgaggatgagctggaggaactccaccgctactgccaggaggtgtttggaagggtctcccggttccaccggcggctcacctcctgcactccgggcttggaagatgaaaaggaggcctctgagaatgaaacagacatggaagaccccagagaaatccagactgattcttggcgtaaacggggagagagcgaggaaccgtcatctcctcagtccctgtgtcatctagtggccccagggcacgagcggtctggctgcgagacccctgtcagcgtggactccatccccctggagtgggaccacacaggcgacgtggggggctcctcctctcacgaagaggacgaggagggcccatactacagcgcactgtcaggtaaatccatttcggatggccactcgtggcatgttcccgacagcccttcctgtcccgagcatcactacaagcaaatggaaggtgacaggaatgttccacctgttccccctgcgtccagcaccccttataaaccaccctatggaaagctactattacctccaggcacggatggtggcaaagaaggcccgcgagtcctgaatggcaacccacagcaggaagacgggggactggccggtatcacagagcagcagtcaggtgccttcgacagatgggagatgattcaagcacaggagcttcacaataagctcaaaataaaacaaaatttgcaacagctgaactctgatatcagcgccatcactacttggctgaaaaaaactgaagcagagctggaaatgttaaagatggcaaagcctccctctgatatccaggaaatagaactgagagtgaagagactgcaggagatactgaaagcctttgacacttacaaggcattagtggtctctgtcaacgtgagcagcaaggaatttctgcaaaccgagagccccgaatccacagagctccaaagtagactccgccagctgagcctgctctgggaagcagcacagggcgcagtggacagctggagagggggcttacgacagtcgctcatgcagtgccaggacttccaccagttgagtcaaaatctgctgctgtggttagcgagtgccaagaaccggaggcagaaggctcatgtcaccgatccaaaggcagacccccgggctctcctagagtgtcggagggaactaatgcaactggaaaaggagctggtagaacgtcaacctcaagtggacatgttacaggagatttcaaacagccttctcattaagggacatggagaagactgtattgaagctgaagaaaaggtgcatgttattgagaagaaactcaaacagttacgggagcaagtgtcccaagatttaatggccttgcagggaacccagaacccagcctcacccctgcccagcttcgacgaggtagactcgggggaccagcctcctgcaacatccgtgccagctccccgagcaaagagttcagagcagtgagaactacagaaggcgaggaggagacagagagcaggtaacggggctttaccgtgacagcagtgcgttcccctgctccacactcccactgactcagtcttgccaatgccactatcaaggtccttgcaaaaatctggttttcttttgtctggaaagggctggttttctcctctgaaactgaaccccaactgttggccctatttaaatctcaggtcttggatttcttacttacataagcaggggcttaggtaatagagtgggttgtgcctgtggagcctcccaatcagctctcaacctcctctgttggcagggtccccggcagcacacggccacagcgctccttcctctcaagggtggtccgggcagccctacccctgcagctgctcctcctgctgctgctgctcctggcctgcctgctgccctcctccgaagaagactacagctgcactcaggccaacaactttgcccggtccttttaccccatgctgaggtacaccaatgggccaccccccacatagagggcatagctggccacagtgctacaccacctgcctgattgccaagggtgcccagcacgtggccccagaccaatctgagtgacttagtgttggcaaggtcccgggacctgtgcagacttcttctgggcttacccagcacgggctccctggagcccagggcagctttcagattgtgttcctccccaggagcagggaacctgtgtggcaggtgccccgggtattttggcagaactagttgattagtttagggatctctggaaatgtcagtttcctgaagagccaagcactttgtgaattctggtttgtttgtaaaacagcattattataatgtaggtatggtcaatgagcagtggtgtccatcacatatattatagaagcaagcgagcacattccaccctagaaatggttcagaaactcataggcacccttagctgatggaaacaatcaatcatatttaatacgcttagaatcagttttactccaatcagctggcaattttgagctgccggttatacaccaaaatgttctgttcagtacctagctctgctcttttatattgctttaaatttttaaagaaattatattgcatggatgtggttatttgtgcatattttttaacaatgcccaatctgtatgaataatgtaaacttcgatttttttttaaaaaaattagattttagctggagcttttgactaatgtaaagtaaatgccaaactaccgacttgatagggatgtttttgtaagttaattttctaagactttttcacatccaaagtgatgctttgctttgggttttaactgtttggccacggcgggggtgggggcggggggttggtacagaaacttgaagctgtttgtgatatgtacaactcagatgtttctcattaaaaaacaaaattagccagaaaaaaacaacccccccaacccccacaccaacacacacagggc

SEQ ID NO: 735518 - DNA, 21940 bp, Homo sapiens
  misc_feature (6127)..(6127): n is a, c, g, or t
  misc_feature (6702)..(6702): n is a, c, g, or t
  misc_feature (7072)..(7072): n is a, c, g, or t
  misc_feature (7297)..(7297): n is a, c, g, or t
  misc_feature (7404)..(7404): n is a, c, g, or t
  misc_feature (9565)..(9565): n is a, c, g, or t
agcccgcggggtgaaatgacttgctcatggtctggtagctaatcgcagatctgctctctaactcctacttccaagacccaggaatctacgggtgttggagaagacccctcctgaaatcctccagaagagctttttgagggagcttgtggctcctgttcacccagccccggttcacttcttcaactgagatggacatgatataatctccattgagtcaaagaatggcatctagtcctgagcttcccaccgaagatgaacagggttcctggggcatcgacgatctccatatttcattgcaagctgaacaggaagacacccagaagaaagccttcacgtgctggataaactcacagttggccaggcacacttctccctcagttatatccgacctattcacagacattaaaaaggggcatgtcctcctggatctgctagaagtactttctgggcaacagttgcctcgggataaaggatctaataccttccagtgtagaatcaatatagaacatgccttgacattcctaagaaaccgatcaattaagctaataaatattcatgttactgatatcattgatggaaacccatccattatccttggcctaatttggacaattatcctgcactttcatattgagaagcttgcccagactctttcttgcaattacaatcagccttccctggatgatgtgagtgtggttgactcatctcctgcctcaagtcctccagctaagaaatgctctaaagtgcaagcaagatggcaaatgtctgcaagaaaggcccttcttttgtgggctcaggaacaatgcgccacctatgagtctgtcaatgtgaccgattttaagtcaagttggagaaatgggatggcttttttggccatcattcatgccttgcgaccagacctaattgacatgaagagtgtgaagcatagatccaacaaagacaatctgagagaggccttcagaattgcagaacaagaattaaaaatccccagattgctggaaccagaagatgtggatgttgttgatcctgatgaaaagtccatcatgacctatgtggcacagtttctgcagtattccaaagatgcccctgggactggagaggaggctcagggaaaggtgaaagatgctatgggctggttaactctgcaaaaggaaaaactacagaagttgctaaaggattcagagaatgatacctactttaaaaagtataatagcctgctgtcctttatggagtcattcaatgaagaaaaaaagtcctttttggatgtcctgtcaataaaacgggatctggatgagctggacaaggatcatttacagttgagagaagcctgggatggcctcgatcaccagattaatgcatggaaaataaagctaaattatgccttgcccccacccctccatcaaactgaagcttggctccaggaggtagaagagcttatggatgaagatttgtcagcctcccaggatcactctcaagccgtgactctgatacaagagaaaatgactttattcaagagcctgatggatagatttgagcatcattcgaacattctccttacctttgaaaataaggatgaaaatcacttgccattggtaccacctaacaaattggaggaaatgaaaagacgaatcaacaacattttggagaaaaaatttattctacttctagaatttcattactacaagtgcttagttcttggtttggtagatgaagtgaaatcaaaattggatatttggaacattaaatatgggagcagagaatctgtggaattattgctggaagactggcataaatttattgaagaaaaagaattcctagctcgacttgatacttcttttcaaaaatgtggagaaatttataagaatttggctggagaatgtcagaatattaataaacagtatatgatggtgaaatctgatgtttgtatgtatagaaaaaatatatataatgtgaagtccactctacaaaaagtgctggcatgttgggctacttatgtggaaaaccttcgcttactaagggcttgctttgaggagacaaagaaggaagaaattaaagaggtaccctttgagacactagcccagtggaatctagaacacgctactttaaatgaagcaggaaatttcttagtcgaagtcagcaatgatgtggttggatcatctatttctaaagaactgagaaggctgaataaaagatggagaaagttggtttcaaaaactcaacttgaaatgaacctgccactgatgataaaaaaacaggatcagcccacttttgacaattctggaaatattctatctaaagaagagaaagcaactgttgagttttcaacagatatgtcagtagaacttcctgaaaattataatcaaaatataaaggctggagagaaacatgaaaaagaaaatgaagaattcacagggcaactaaaagtggctaaagatgttgaaaaactcattggacaagtggaaatctgggaggcagaagccaaatctgttttggatcaagatgatgtggacacctcaatggaagaatctttgaagcatcttattgccaaaggctctatgtttgatgagcttatggcaagaagtgaagatatgttacaaatggatatacaaaatatttcaagccaggagtcctttcaacatgttctcacaactgggcttcaggcaaagattcaagaagctaaagagaaagtccagatcaatgtggtaaaactcattgcagcgttgaagaacttaactgacgtttcaccagatttggacatcaggctgaagatggaagaatcccagaaggaacttgaatcatatatgatgagggctcagcagttactggggcaaagagagagccccggtgaactcatttcaaaacacaaggaagcactaataatttctaatacaaaaagtctggccaagtatttgaaagctgttgaagaactaaaaaataatgtaactgaggacataaagatgtctttagaagaaaagagtagagatgtctgtgccaaatgggagtctcttcatcatgaactgtctttatatgttcaacaactaaaaatagatattgaaaaaggaaagcttagtgacaatattttaaaacttgaaaagcaaataaataaagaaaagaaacttatccgtagaggaaggaccaagggtctcatcaaagaacatgaggcctgcttttctgaggaaggctgcctgtaccagcttaatcaccacatggaagtcctgagggagctgtgtgaagagctgccttcacagaagagtcaacaagaagtgaagagactactcaaagattatgaacaaaagatagaaagacttctgaaatgtgcttccgagattcatatgacactgcagcccacagcgggaggcacgtcgaaaaacgaggggaccatcaccacatctgagaatagaggaggggatccccacagtgaggcaccatttgcaaaatcagataatcagccatcaactgaaaaggcaatggaacccactatgaagtttagcctggcatcagtgttaaggcctctgcaagaagaaagcattatggaaaaggattacagtgcatctataaatagtttactagagaggtatgatacatacagagatattcttgaacaccacctgcaaaacaacaaattcaggattacttctgatttctctagtgaagaggacaggagtagttcttgtctgcaggctaaactgacagatctacaggtcataaaaaatgaaactgatgctcgctggaaagagtttgaaattatttcattgaagttagaaaatcatgtgaatgacataaaaaagccttttgtaattaaggaaagagacacactaaaggaaagagaaagagagcttcagatgactcttaataccagaatggaatctttagagacagcactgcggcttgtgttacctgtagagaaggcatcacttcttctctgtggctcggacctgcctctccataaaatggccatccagggatttcatctcattgatgctgatcgcatctatcaacacctaaggaatatccaagattccatagcaaaacagattgaaatatgtaaccgcttagaagagccaggcaactttgtattaaaggagttacacccatttgatctacacgcaatgcagaatattatactgaaatacaaaacacaatttgaaggaatgaaccacagggtgcagaggagtgaagatactctcaaagctctggaagactttttggcgtctctcagaacagctaaactctctgctgagcccgttacagacctttcagcctcagatacacaggtggcacaagaaaatacgttgacagtaaaaaataaagagggagaaattcatctgatgaaagacaaggccaaacatttggataaatgtttgaagatgctcgatatgagctttaaagatgctgaacggggtgatgacacctcctgtgaaaacctgcttgatgctttttcaataaagttatctgagacacatggctatggggtacaggaggaattcactgaggaaaacaaattactagaggcttgtattttcaaaaataatgaactccttaaaaatattcaagatgtgcagagtcaaatcagtaaaattggtcttaaggatcctactgttccagctgtgaaacatcggaaaaaatcattaatcagactggataaggttctagatgaatatgaagaagagaagagacatttacaagaaatggctaattctcttccacacttcaaagatggcagagaaaaaaccgtgaatcaacagtgccaaaatacagtagtcttgtgggagaataccaaagccttggtcaccgaatgtcttgaacaatgtgggagagttttggagctcttaaaacaatatcagaattttaaaagcatcttgacaactttgattcaaaaagaagagagtgtcatctccctgcaggcttcgtacatgggaaaggagaacctgaagaaaaggatagcagagattgaaattgtcaaagaagaatttaatgagcatttagaagttgtagacaagataaaccaggtctgcaaaaatctacaattttatctaaataaaatgaaaacttttgaagagcccccttttgaaaaagaggctaatattattgtggatagatggcttgatataaatgagaagacagaagattactatgaaaatcttggtcgagctctagctttgtgggacaaactttttaacttaaaaaatgtcattgatgagtggacagaaaaggcccttcaaaaaatggaattacatcaattgactgaagaggacagagaaaggctgaaggaagaattacaagtccatgaacaaaaaacttcagaattttctagaagagtggctgaaatacagtttttgctccaaagcagtgaaatacctcttgaattgcaggtcatggagtcctctattttgaacaagatggaacatgtacagaagtgcttaacaggagaatccaactgccatgcactcagtggcagcactgctgagctaagggaggatctcgaccaagccaagacccagatcgggatgactgaatccctcttaaaagccctgtctccttctgacagcttggagatcttcactaaactagaggagatacaacagcagattctacagcaaaaacacagtatgatattacttgagaatcaaataggttgtctgactcctgaactctctgaattgaaaaagcaatatgaaagtgtcagtgatttatttaataccaaaaaaagtgttttgcaagatcacttttctaagttattgaatgatcaatgcaagaactttaatgactggttcagcaacattaaagtgaaccttaaggagtgttttgaatcatcagaaacaaaaaagagtgtggaacaaaagctacaaaaactttctgatttcttgactcttgaaggaagaaacagtaaaataaagcaggtggacagcgtactgaagcatgtgaagaagcatctgcccaaagcacatgtgaaggagcttatcagttggctcgtgggtcaggaattcgaattagaaaaaatggagtccatatgccaggctcgagcaaaggagcttgaagactccttgcagcagctactgagactccaggatgaccatagaaacctgaggaagtggttgactaatcaagaagagaaatggaaaggaanggaagaaccaggggagaaaactgagctgttctgccaagctttagctagaaagagggaacagtttgaatctgtggcccaattgaacaactctttgaaggaatatgggtttactgaagaagaagaaataataatggaagcaacatgtttgatggatagataccagacattactgagacaactaagtgaaatcgaggaagaggataagttactacccacagaggaccagagctttaatgatcttgcacatgatgtaattcattggataaaagagattaaagagtcccttatggttttgaattcatccgaaggcaaaatgccacttgaggaaagaatccaaaaaatcaaggaaatcattttgctgaagcctgaaggggatgccagaatagagaccatcatgaagcaggctgagagcagcgaggccccgctggttcagaagaccctcactgacatcagcaaccagtgggacaacacactccatttagctagcacctacctaagccatcaagaaaagcttctactagaaggagagaaatatttacaaagtaaggaggatctgagattaatgctcatagaantaaagaagaaacaggaagcaggctttgctctacaacatggtctgcaggagaagaaagctcagttaaagatttataagaaattcctcaagaaagcccaagatttgacatccttgctaaaggagttaaaatctcagggaaactacctcttggagtgcactaaaaatcccagcttcagtgaagagccttggctggaaataaagcatctacacgaaagtcttcttcaacaactgcaggattctgtgcaaaacttggacggtcacgttcgagaacatgattcataccaggtttgcgtcacagacctgaatactacattggacaatttctccaaggaatttgtcagtttttctgataagcctgtggatcaaatagnggttgaggaaaaattgcagaaactgcaggaactagagaatagactcagtttacaagatggcacattaaagaagattttagctttagcaaaatccgtcaagcaaaatacatcttcagtggggcagaagattattaaagatgatataaaatcacttcagtgtaaacaaaaagatttggaaaacaggcttgcatctgctaagcaggagatggaatgttgtctcaacancattctcaaatcaaaacgctcaacagaaaagaaaggaaagtttactctgccaggcagagagaagcaggccacttctgatgtgcaggagtctactcaggaatcagctncagtggaaaagttggaggaagactgggaaataaacaaggattcagctgtggaaatggctatgtcaaaacaactttctcttaatgctcaagaaagcatgaaaaacactgaagatgagcggaaagtcaatgagctgcaaaatcaacctttagaattagatactatgttaagaaatgaacaattagaagagatagagaaattatatacccagttggaagcaaagaaagcagccattaagccactggaacaaacagaatgtcttaacaaaacagaaactggggccttggttctccacaatataggatattcggcacagcatttggacaatttgcttcaggcacttattactttgaagaaaaacaaagaaagccaatattgtgtcctcagagattttcaggaataccttgctgcagttgaatcttcaatgaaagccttgttgacagacaaggaaagtcttaaagtaggaccactggacagtgtaacgtatctggacaaaattaaaaaattcatagcatccatagaaaaagagaaagattctttaggcaacttgaaaatcaaatgggagaatttatcaaaccacgtgactgacatggataagaaattgttggaaagccagattaagcaacttgaacatggttgggaacaagtggaacagcagattcaaaagaagtattctcagcaggtagtggaatatgatgaatttacaaccctcatgaataaggtacaggacactgagatttctctgcaacagcagcagcaacatctacagttaaggctgaagtctccagaagaacgggcagggaaccaaagcatgattgccttgaccactgacctccaggctaccaagcatggattttctgttttaaaggggcaagctgaacttcagatgaagaggatttggggagaaaaagaaaagaagaatttggaggatggaataaataacttgaagaaacaatgggaaacattggagccattacacttagaagcagaaaatcagattaagaagtgtgacataaggaacaagatgaaagagactatcttatgggccaagaatttgttgggtgaacttaatccctccattccccttctcccagatgacattctttcacagatcagaaagtgcaaagtgacacatgatggcattctagctaggcagcagtctgtggaatcgttggctgaagaggtcaaagataaggttcctagccttacaacctatgagggcggtgatttaaataataccctagaggacttacggaatcaataccaaatgctggttttaaaatcaactcaaagatcacagcaattagaatttaagttggaagaaagaagcaatttttttgctataataaggaagtttcaacttatggttcaagaaagtgaaacactgataattcccagggtggagacagctgccacggaagctgaactaaaacatcaccatgttactttggaggcatctcagaaggaattgcaagaaattgacagtggaatctcaacacatcttcaggagctaacaaacatctatgaggagctgaatgtgtttgaaagattatttctggaagatcagttgaaaaatcttaagattaggaccaacagaatacaaagattcattcagaatacatgtaatgaagtggaacacaaggtaaagttttgcagacaattccatgaaaaaacatcagcgcttcaggaggaggctgacagtatacagcgcaatgaactattacttaatcaagaagtaaataaaggtgttaaagaggagatctataatcttaaagacagactcaccgctattaagtgttgcatcttacaggtattgaaacttaaaaaagtgtttgactatattggactaaactgggatttttcacaacttgaccaattacaaacccaagtatttgaaaaagaaaaggaacttgaagaaaaaattaagcagttggacacatttgaggaagaacatggcaaatatcaggcattattaagtaaaatgagagctattgatttgcaaattaagaaaatgactgaagtagtactaaaagctcctgatagctctccggaaagcagacggctcaatgcccaaattttaagtcagagaattgagaaagccaagtgtttatgtgatgagataataaagaaattaaatgaaaataagacctttgatgactcatncaaggagaaagaaatactacaaataaagctgaatgcagaagaaaatgataagttatacaaagttctccaaaacatggtattagaactctcaccaaaagaattggatgaaaagaattgtcaggacaaactagaaacttccttacatgttttaaatcagataaaatctcaattacagcagccattacttataaatttggaaattaaacatattcaaaatgaaaaggacaattgtgaagcatttcaggagcaagtttgggcagaaatgtgtagtattaaagctgtgactgctattgagaaacaaagagaagaaaactcttctgaagcgagtgatgtggagacaaaactacgtgagtttgaagatcttcagatgcagcttaacacaagcattgatttgcgcacaaatgtcttgaatcatgcttatgaaaatctaacacgctataaagaagcagtcaccagggcagtggagagcatcacttccctcgaagccatcattataccctacagagtagatgttggtaatccagaagaatctttagagatgcctcttcgaaaacaagaggaattggaatccacagtagcacgcatccaggacctcactgagaaactgggaatgatatccagccccgaagccaaactacaacttcagtatactttacaggaactagtttctaagaactcagcaatgaaggaagctttcaaagcacaggaaactgaggcagaaaggtatcttgagaattacaaatgctatagaaaaatggaagaggatatttacactaacctcagcaaaatggagacagttcttggacagtccatgtcctcgttgccactgtcttacagagaagctttagagcgcttggaacagagcaaggccttggtgtcaaatcttatatcaaccaaagaagagttaatgaaactacgacagatccttagactcttgagactcaggtgcacagaaaatgatggcatatgtttgctcaagattgtgtcggctctgtgggagaaatggctgagtttgctggaagctgctaaagagtgggagatgtggtgcgaagaactgaagcaggaatggaaatttgtcagtgaagaaattgaacgagaggcaattattttagataatcttcaggaagaactccctgaaatttccaaaacaaaagaggcagccaccacagaggaactctctgagctgctagactgtttatgccaatatggagagaacgtggagaagcaacagctgttactgactctacttcttcagcgcatcagaagtatccagaatgttcctgaaagctcaggggctgtggaaactgttccagcatttcaagaaattacttctatgaaagaacgatgcaacaagcttcttcagaaagttcagaaaaataaagaattggtgcagactgaaatccaagaaagacattccttcacaaaagagataattgctttgaagaatttctttcaacagaccacaacttcattccaaaatatggcattccaggatcacccagaaaagtcagaacaatttgaggagcttcaaagcatccttaagaaagggaaactaacttttgagaatattatggaaaaactgcgaatcaagtattccgaaatgtacaccatagtccctgcagagattgaatcccaggtggaagaatgcagaaaagctttagaagacatagatgagaagattagcaatgaagtcttaaaaagctcaccatcatatgcaatgaggagaaaaatagaagaaattaacaatgggcttcataatgttgaaaagatgttgcagcagaaaagcaaaaatattgagaaagctcaagaaattcaaaagaaaatgtgggacgagttagatctatggcattccaaactaaatgagctggattctgaagttcaggacattgttgaacaggacccaggacaggctcaagaatggatggataacttgatgattcctttccagcagtatcagcaagtatcacagagagcagagtgtagaacctcacagttgaataaggccacagttaagatggaggaatatagtgaccttctgaagagcactgaggcttggatagaaaataccagtcatttgctggccaatcctgctgactatgactctttgaggacactgagtcaccatgctagcactgtgcagatggctttggaagattcagaacagaagcacaatcttttacattcaatctttatggatctagaagacctgtcaataatttttgaaacagatgaattaacccaatccatacaagagttaagtaatcaagtaacagctttacaacaaaaaataatggaaagccttccacagattcagcgaatggctgatgatgtggttgctattgaatctgaagtaaaatcaatggaaaaaagagtttcaaaaatcaaaactatcctattatcaaaagaaatatttgatttttcacctgaagaacatctcaaacatggggaggtcatacttgaaaatatacgtcccatgaagaaaaccattgctgagatagtgtcttaccaagtggaactgaggttgccccaaacaggaatgaaacctctgcctgtgtttcagcggacaaatcagcttttacaagatataaaactattggaaaatgtgactcaagaacaaaatgagttattaaaggtagtcataaaacagaccaatgaatgggatgaagaaatagaaaatttgaaacagatcttaaataattattcagctcagttctcccttgaacatatgtcaccagaccaagctgacaagctgccacaactacagggagaaatcgaacgtatggagaaacagattctgagtttgaaccagagaaaagaagacctgttggtggacttgaaggccaccgtactaaaccttcaccagcatttgaagcaagaacaagaaggagtagaaagagataggctgccagctgtaacatcagaggaaggtggagtggcagagagggatgcttctgagcggaagttgaacagaagaggctccatgtcttacctggcagcagtcgaggaagaggtggaagaaagttccgtgaagagcgataatggagatgagaaggcagagccatcgcctcagtcttggtcttcactttggaagcatgacaaggacatggaagaagacagagcttcctcatcctctggaacaattgttcaggaagcatatgggaaaataagcacctctgataattccatggcacaaatcctcacaccagactcactaaacactgagcaaggcccagaatgttccctaaggcccaaccaaacagaagagggcaccacacctcctattgaggctgacactctggactcttctgacgcgcaaggaggtttggagcccagggtggagaaaactaggccggagcccacagaagtcctgcatgcctgcaagacccaggtggccgagctggagctgtggctgcaacaagccaacgtggcagttgagccggaaacattaaacgcagacatgcagcaggtgctggaacagcagctggtagggtgccaggctatgctaacagagattgagcacaaggttgcctttctgttagagacttgcaaagatcagggcctgggagataatggagccactcaacatgaggctgaagcgctttccctgaaactgaaaacagtgaagtgcaatttagaaaaagtccagatgatgcttcaggagaagcacagtgaagatcagcatcctaccattctaaagaaatcctcagagccagagcatcaagaagctctccaaccagttaacctttctgaattggaatccattgtaactgaaaggccacaattcagcagacaaaaagatttccagcagcaacaggttctggagttaaaaccaatggaacagaaagatttcatcaaattcatagaatttaatgctaagaaaatgtggccccagtattgccaacatgataacgatacaactcaggaatcatctgcaagcaaccaggcatccagccctgaaaatgacgttccagactcgatcttgtcaccccagggccaaaatggagataagtggcaatatctgcatcatgaactctcatcaaaaataaagctcccactccctcagcttgtggagcctcaggtttccacaaatatgggtattctacccagcgtgactatgtataactttagatacccaacaactgaagaactgaaaacctataccacccaacttgaagacctgcgccaagaagcaagtaaccttcagacacaggaaaatatgacagaagaagcatatatcaatttggataaaaaattgtttgaactattcctgaccctcagtcagtgcctcagcagtgtggaggagatgctggagatgcccagactttacagggaggatggttctggccagcaggtgcactacgagacgctggctcttgagttgaagaaactttatttagcgctaagtgacaagaagggtgatcttttgaaagccatgacttggcctggcgagaacaccaacttgctccttgaatgttttgacaaccttcaagtctgcctggagcacactcaggctgcagctgtctgtagaagcaagtccctgaaagctggcctcgattacaaccgcagttaccagaatgaaataaagagattatatcatcagctcattaagagtaagacatctttacaacagtctttgaatgaaatcagtgggcagagtgttgctgaacagcttcagaaagcagatgcatatacagtggagctggagaacgccgagagccgagtggccaaactaagagatgaaggggagaggcttcatttaccttatgctttactccaggaggtttacaaattagaggatgtacttgacagtatgtggggaatgctaagagccaggtacacagaactcagcagccctttcgtcactgagagccagcaagatgctttgttgcaaggcatggtggaactggtgaagattgggaaggaaaagcttgctcatggccacttaaaacaaaccaaaagtaaagtggcgttacaggctcaaatagaaaatcacaaggtttttttccagaagcttgttgctgacatgttgttgatccaagcatactctgccaaaatacttccttctttattgcaaaacagagagacattttgggcagaacaagtaacagaagttaaaatactagaagaaaagtcacgccaatgtggtatgaagctgcagagtttgttgcagaaatgggaagaatttgatgaaaactatgcatctcttgaaaaggacctggaaattcttatatctacattgccctctgtgagtttggtggaagaaacagaggaaagattagtggaaaggatttcattttaccagcaaataaaaagaaacattggtggaaaacacgcccggctttaccaaactctgaacgaaggcaaacagttggtggcgtctgtgagctgtcctgaattagagggccagatcgcaaaactggaagagcagtggttgtccctgaacaagaaaattgaccatgagctccacaggctgcaagctcttctcaagcatctgctcagttataacagagattcggatcagttaaccaagtggttggaatcttcccagcatactctgaattactggaaagaacagtccctcaatgtgtctcaggacttggatacaatcagaagcaacatcaacaatttttttgagttttcaaaagaagttgatgaaaaatcctccttgaagactgccgttatcagtatcgggaaccagcttcttcacctgaaagaaactgatacagctacactgagagcttctttagcacagtttgaacaaaaatggacaatgctcataactcaacttccagatattcaagaaaaacttcaccagcttcaaatggagaaattgccgtctcgtaaagcaatcacagaaatgattagctggatgaacaatgtggagcatcaaacttcagatgaagactccgtgcattcaccaagttctgcatctcaagttaaacatcttcttcagaagcacaaggagtttagaatggaaatggactataaacagtggatagttgacttcgttaaccagtcattacttcagctaagcacctgtgatgtagaaagcaagcgctatgaaagaacggagtttgcagagcacctgggggagatgaaccgccagtggcaccgtgtacatggaatgctgaatagaaagatacaacatttagaacaacttctagaaagtatcactgagagtgaaaataaaatacagatcttgaacaactggctggaagcacaagaagagagactgaaaactttacaaaaacctgaaagtgtgatctcagtgcagaagctgctcctggactgtcaggatatagaaaatcaacttgcaattaaatccaaagcactagatgagttgaaacaaagttatctgactttggagagtggggcagtgccattgttagaagatacagcatcccgaattgatgagttatttcaaaagagaagcagtgttctcactcaggtcaatcagctcaaaacctccatgcagtcagttttacaggagtggaagatttatgatcaactctatgatgaagtgaatatgatgacaatccgattctggtactgcatggaacacagcaagcctgtggtgttatcattggagaccttgagatgccaggtggagaaccttcagtctctgcaagatgaagctgagagcagtgaagggagttgggagaaactccaggaggttatcggcaaactcaaaggtctctgcccctctgttgctgaaataatcgaagagaaatgccaaaatactcataaaaggtggactcaggtgaaccaagccattgcagaccagttgcagaaggcccagagtctgctccagctctggaaggcctatagcaatgctcatggtgaagctgccgcaaggctgaagcagcaggaagcaaagtttcaacagctcgcaaacatcagcatgtctggaaacaacctggcagagatcctgcccccagccctgcaggacataaaggagctgcagcatgatgtgcagaaaacaaaagaagcctttctccaaaattccagtgtcctggatcgactcccacaacccgcagagtccagcacccacatgctcctcccgggccccctgcactctctccagagggctgcttatttggaaaagatgctgcttgtgaaagcaaatgaatttgagtttgttctctcacagtttaaggattttggagtccggctggaatctttaaaaggtcttattatgcatgaagaagagaatttggatagacttcaccaacaggaaaaagaaaatcctgactcattcctgaatcatgtgctggcactgacagcccaatcacctgatattgaacatttgaatgaagtgagcctcaagctcccacttagtgacgtagctgtgaagacgttacaaaatatgaaccggcaatggattcgggccacggccacggcactggagcgctgcagtgagcttcagggaattggattgaatgaaaagtttctttattgctgtgaaaagtggatccaacttttggagaagatagaagaagcactcaaagtggatgtggctaacagccttcctgagctcctggagcagcagaaaacctataagatgttagaagctgaagtttctataaaccagacaattgctgattcctatgtcacccagtccttacaactcctggacacaacagaaatagagaacagaccagaatttattacagaattctcaaagctgacggatcggtggcagaatgctgtccagggtgttcggcagaggaagggtgacgttgatgggctggtgaggcagtggcaagatttcactacttctgtggagaacttgtttcgcttcctcactgacaccagccacctgctatctgcagtgaagggccaggagcgcttcagcctctaccaaaccagaagtctgatccatgagctgaagaataaagaaattcattttcaaaggaggcgaactacctgtgccctaaccttggaagctggagaaaagttactgctcacaactgacctgaaaactaaagagtctgtgggtaggagaatcagtcaacttcaggacagctggaaagacatggagccccagctggcagagatgattaagcagttccagagcactgtagagacctgggaccagtgtgaaaagaaaatcaaggagttgaaaagcaggctgcaagttttaaaggcacaaagtgaagatcctcttccagagcttcacgaggacctccataacgaaaaagagctgattaaggaactagaacagtctttggctagctggactcagaacttgaaagaacttcaaactatgaaggcggacttaacccggcacgttctcgtggaagatgtgatggttttgaaggagcaaatagagcatttgcacagacaatgggaggacctctgcttaagggtggccatacgtaaacaggagattgaagacagactcaatacatgggttgtattcaatgaaaaaaataaagagttgtgtgcctggctggtgcagatggaaaacaaagttctacagacagcggacattagtattgaagaaatgattgaaaagttacagaaggactgcatggaagaaataaacttgtttagtgaaaacaagttacagttaaagcagatgggtgaccagttgatcaaggccagcaacaaatcaagagcagctgagatcgatgacaagctcaacaaaattaacgatcgttggcaacatctttttgatgtcatcggatcaagggtgaagaagctgaaggagacctttgcttttattcagcagttggacaaaaacatgagcaaccttcgcacctggttggctcgaattgagtctgagctttccaagcctgttgtttatgatgtctgcgatgatcaagagatccagaagaggctcgctgagcagcaggatctacagcgagatattgaacaacacagcgcaggggtggagtccgtgtttaacatctgtgacgtcctactgcacgactccgatgcctgtgcaaatgagaccgagtgtgactcgatccagcagaccaccaggagcctggacagacgctggaggaacatttgtgccatgtccatggagcggcgcatgaaaatcgaggagacgtggcgcctgtggcagaagtttttagacgactattctcgctttgaggactggctcaagtcagctgagaggacggcagcctgcccaaattcctcagaggtgttgtacacgagtgccaaagaggaactgaagaggtttgaggcctttcagcggcagattcatgagcggctcactcagctggagctcatcaacaagcagtaccggcggctggcccgggagaaccgcacagacacggccagcaggctgaagcagatggtccacgagggcaaccagcgctgggacaaccttcagaggcgggtcacagccgtcctgcggagactcaggcatttcaccaaccagagggaagaatttgagggcaccagggagagcattctggtgtggctcacagagatggacctgcagctgaccaacgtggagcacttctcagagagtgacgccgatgacaagatgcgccaactgaatggcttccaacaggaaattacattaaataccaacaagattgatcagctcattgtgtttggggagcagctgattcagaagagcgagcccctggatgctgtgctgattgaggatgagctggaggaactccaccgctactgccaggaggtgtttggaagggtctcccggttccaccggcggctcacctcctgcactccgggcttggaagatgaaaaggaggcctctgagaatgaaacagacatggaagaccccagagaaatccagactgattcttggcgtaaacggggagagagcgaggaaccgtcatctcctcagtccctgtgtcatctagtggccccagggcacgagcggtctggctgcgagacccctgtcagcgtggactccatccccctggagtgggaccacacaggcgacgtggggggctcctcctctcacgaagaggacgaggagggcccatactacagcgcactgtcaggtaaatccatttcggatggccactcgtggcatgttcccgacagcccttcctgtcccgagcatcactacaagcaaatggaaggtgacaggaatgttccacctgttccccctgcgtccagcaccccttataaaccaccctatggaaagctactattacctccaggcacggatggtggcaaagaaggcccgcgagtcctgaatggcaacccacagcaggaagacgggggactggccggtatcacagagcagcagtcaggtgccttcgacagatgggagatgattcaagcacaggagcttcacaataagctcaaaataaaacaaaatttgcaacagctgaactctgatatcagcgccatcactacttggctgaaaaaaactgaagcagagctggaaatgttaaagatggcaaagcctccctctgatatccaggaaatagaactgagagtgaagagactgcaggagatactgaaagcctttgacacttacaaggcattagtggtctctgtcaacgtgagcagcaaggaatttctgcaaaccgagagccccgaatccacagagctccaaagtagactccgccagctgagcctgctctgggaagcagcacagggcgcagtggacagctggagagggggcttacgacagtcgctcatgcagtgccaggacttccaccagttgagtcaaaatctgctgctgtggttagcgagtgccaagaaccggaggcagaaggctcatgtcaccgatccaaaggcagacccccgggctctcctagagtgtcggagggaactaatgcaactggaaaaggagctggtagaacgtcaacctcaagtggacatgttacaggagatttcaaacagccttctcattaagggacatggagaagactgtattgaagctgaagaaaaggtgcatgttattgagaagaaactcaaacagttacgggagcaagtgtcccaagatttaatggccttgcagggaacccagaacccagcctcacccctgcccagcttcgacgaggtagactcgggggaccagcctcctgcaacatccgtgccagctccccgagcaaagagttcagagcagtgagaactacagaaggcgaggaggagacagagagcaggtaacggggctttaccgtgacagcagtgcgttcccctgctccacactcccactgactcagtcttgccaatgccactatcaaggtccttgcaaaaatctggttttcttttgtctggaaagggctggttttctcctctgaaactgaaccccaactgttggccctatttaaatctcaggtcttggatttcttacttacataagcaggggcttaggtaatagagtgggttgtgcctgtggagcctcccaatcagctctcaacctcctctgttggcagggtccccggcagcacacggccacagcgctccttcctctcaagggtggtccgggcagccctacccctgcagctgctcctcctgctgctgctgctcctggcctgcctgctgccctcctccgaagaagactacagctgcactcaggccaacaactttgcccggtccttttaccccatgctgaggtacaccaatgggccaccccccacatagagggcatagctggccacagtgctacaccacctgcctgattgccaagggtgcccagcacgtggccccagaccaatctgagtgacttagtgttggcaaggtcccgggacctgtgcagacttcttctgggcttacccagcacgggctccctggagcccagggcagctttcagattgtgttcctccccaggagcagggaacctgtgtggcaggtgccccgggtattttggcagaactagttgattagtttagggatctctggaaatgtcagtttcctgaagagccaagcactttgtgaattctggtttgtttgtaaaacagcattattataatgtaggtatggtcaatgagcagtggtgtccatcacatatattatagaagcaagcgagcacattccaccctagaaatggttcagaaactcataggcacccttagctgatggaaacaatcaatcatatttaatacgcttagaatcagttttactccaatcagctggcaattttgagctgccggttatacaccaaaatgttctgttcagtacctagctctgctcttttatattgctttaaatttttaaagaaattatattgcatggatgtttttgtaagttaattttctaagactttttcacatccaaagtgatgctttgctttgggttttaactgtttggccacggcgggggtgggggcggggggttggtacagaaacttgaagctgtttgtgatatgtacaactcagatgtttctcattaaaaaacaaaattagccagagacttctgttgtactgaattctg

SEQ ID NO: 735519 - DNA, 21899 bp, Homo sapiens
  misc_feature (6127)..(6127): n is a, c, g, or t
  misc_feature (6702)..(6702): n is a, c, g, or t
  misc_feature (7072)..(7072): n is a, c, g, or t
  misc_feature (7297)..(7297): n is a, c, g, or t
  misc_feature (7404)..(7404): n is a, c, g, or t
  misc_feature (9565)..(9565): n is a, c, g, or t
agcccgcggggtgaaatgacttgctcatggtctggtagctaatcgcagatctgctctctaactcctacttccaagacccaggaatctacgggtgttggagaagacccctcctgaaatcctccagaagagctttttgagggagcttgtggctcctgttcacccagccccggttcacttcttcaactgagatggacatgatataatctccattgagtcaaagaatggcatctagtcctgagcttcccaccgaagatgaacagggttcctggggcatcgacgatctccatatttcattgcaagctgaacaggaagacacccagaagaaagccttcacgtgctggataaactcacagttggccaggcacacttctccctcagttatatccgacctattcacagacattaaaaaggggcatgtcctcctggatctgctagaagtactttctgggcaacagttgcctcgggataaaggatctaataccttccagtgtagaatcaatatagaacatgccttgacattcctaagaaaccgatcaattaagctaataaatattcatgttactgatatcattgatggaaacccatccattatccttggcctaatttggacaattatcctgcactttcatattgagaagcttgcccagactctttcttgcaattacaatcagccttccctggatgatgtgagtgtggttgactcatctcctgcctcaagtcctccagctaagaaatgctctaaagtgcaagcaagatggcaaatgtctgcaagaaaggcccttcttttgtgggctcaggaacaatgcgccacctatgagtctgtcaatgtgaccgattttaagtcaagttggagaaatgggatggcttttttggccatcattcatgccttgcgaccagacctaattgacatgaagagtgtgaagcatagatccaacaaagacaatctgagagaggccttcagaattgcagaacaagaattaaaaatccccagattgctggaaccagaagatgtggatgttgttgatcctgatgaaaagtccatcatgacctatgtggcacagtttctgcagtattccaaagatgcccctgggactggagaggaggctcagggaaaggtgaaagatgctatgggctggttaactctgcaaaaggaaaaactacagaagttgctaaaggattcagagaatgatacctactttaaaaagtataatagcctgctgtcctttatggagtcattcaatgaagaaaaaaagtcctttttggatgtcctgtcaataaaacgggatctggatgagctggacaaggatcatttacagttgagagaagcctgggatggcctcgatcaccagattaatgcatggaaaataaagctaaattatgccttgcccccacccctccatcaaactgaagcttggctccaggaggtagaagagcttatggatgaagatttgtcagcctcccaggatcactctcaagccgtgactctgatacaagagaaaatgactttattcaagagcctgatggatagatttgagcatcattcgaacattctccttacctttgaaaataaggatgaaaatcacttgccattggtaccacctaacaaattggaggaaatgaaaagacgaatcaacaacattttggagaaaaaatttattctacttctagaatttcattactacaagtgcttagttcttggtttggtagatgaagtgaaatcaaaattggatatttggaacattaaatatgggagcagagaatctgtggaattattgctggaagactggcataaatttattgaagaaaaagaattcctagctcgacttgatacttcttttcaaaaatgtggagaaatttataagaatttggctggagaatgtcagaatattaataaacagtatatgatggtgaaatctgatgtttgtatgtatagaaaaaatatatataatgtgaagtccactctacaaaaagtgctggcatgttgggctacttatgtggaaaaccttcgcttactaagggcttgctttgaggagacaaagaaggaagaaattaaagaggtaccctttgagacactagcccagtggaatctagaacacgctactttaaatgaagcaggaaatttcttagtcgaagtcagcaatgatgtggttggatcatctatttctaaagaactgagaaggctgaataaaagatggagaaagttggtttcaaaaactcaacttgaaatgaacctgccactgatgataaaaaaacaggatcagcccacttttgacaattctggaaatattctatctaaagaagagaaagcaactgttgagttttcaacagatatgtcagtagaacttcctgaaaattataatcaaaatataaaggctggagagaaacatgaaaaagaaaatgaagaattcacagggcaactaaaagtggctaaagatgttgaaaaactcattggacaagtggaaatctgggaggcagaagccaaatctgttttggatcaagatgatgtggacacctcaatggaagaatctttgaagcatcttattgccaaaggctctatgtttgatgagcttatggcaagaagtgaagatatgttacaaatggatatacaaaatatttcaagccaggagtcctttcaacatgttctcacaactgggcttcaggcaaagattcaagaagctaaagagaaagtccagatcaatgtggtaaaactcattgcagcgttgaagaacttaactgacgtttcaccagatttggacatcaggctgaagatggaagaatcccagaaggaacttgaatcatatatgatgagggctcagcagttactggggcaaagagagagccccggtgaactcatttcaaaacacaaggaagcactaataatttctaatacaaaaagtctggccaagtatttgaaagctgttgaagaactaaaaaataatgtaactgaggacataaagatgtctttagaagaaaagagtagagatgtctgtgccaaatgggagtctcttcatcatgaactgtctttatatgttcaacaactaaaaatagatattgaaaaaggaaagcttagtgacaatattttaaaacttgaaaagcaaataaataaagaaaagaaacttatccgtagaggaaggaccaagggtctcatcaaagaacatgaggcctgcttttctgaggaaggctgcctgtaccagcttaatcaccacatggaagtcctgagggagctgtgtgaagagctgccttcacagaagagtcaacaagaagtgaagagactactcaaagattatgaacaaaagatagaaagacttctgaaatgtgcttccgagattcatatgacactgcagcccacagcgggaggcacgtcgaaaaacgaggggaccatcaccacatctgagaatagaggaggggatccccacagtgaggcaccatttgcaaaatcagataatcagccatcaactgaaaaggcaatggaacccactatgaagtttagcctggcatcagtgttaaggcctctgcaagaagaaagcattatggaaaaggattacagtgcatctataaatagtttactagagaggtatgatacatacagagatattcttgaacaccacctgcaaaacaacaaattcaggattacttctgatttctctagtgaagaggacaggagtagttcttgtctgcaggctaaactgacagatctacaggtcataaaaaatgaaactgatgctcgctggaaagagtttgaaattatttcattgaagttagaaaatcatgtgaatgacataaaaaagccttttgtaattaaggaaagagacacactaaaggaaagagaaagagagcttcagatgactcttaataccagaatggaatctttagagacagcactgcggcttgtgttacctgtagagaaggcatcacttcttctctgtggctcggacctgcctctccataaaatggccatccagggatttcatctcattgatgctgatcgcatctatcaacacctaaggaatatccaagattccatagcaaaacagattgaaatatgtaaccgcttagaagagccaggcaactttgtattaaaggagttacacccatttgatctacacgcaatgcagaatattatactgaaatacaaaacacaatttgaaggaatgaaccacagggtgcagaggagtgaagatactctcaaagctctggaagactttttggcgtctctcagaacagctaaactctctgctgagcccgttacagacctttcagcctcagatacacaggtggcacaagaaaatacgttgacagtaaaaaataaagagggagaaattcatctgatgaaagacaaggccaaacatttggataaatgtttgaagatgctcgatatgagctttaaagatgctgaacggggtgatgacacctcctgtgaaaacctgcttgatgctttttcaataaagttatctgagacacatggctatggggtacaggaggaattcactgaggaaaacaaattactagaggcttgtattttcaaaaataatgaactccttaaaaatattcaagatgtgcagagtcaaatcagtaaaattggtcttaaggatcctactgttccagctgtgaaacatcggaaaaaatcattaatcagactggataaggttctagatgaatatgaagaagagaagagacatttacaagaaatggctaattctcttccacacttcaaagatggcagagaaaaaaccgtgaatcaacagtgccaaaatacagtagtcttgtgggagaataccaaagccttggtcaccgaatgtcttgaacaatgtgggagagttttggagctcttaaaacaatatcagaattttaaaagcatcttgacaactttgattcaaaaagaagagagtgtcatctccctgcaggcttcgtacatgggaaaggagaacctgaagaaaaggatagcagagattgaaattgtcaaagaagaatttaatgagcatttagaagttgtagacaagataaaccaggtctgcaaaaatctacaattttatctaaataaaatgaaaacttttgaagagcccccttttgaaaaagaggctaatattattgtggatagatggcttgatataaatgagaagacagaagattactatgaaaatcttggtcgagctctagctttgtgggacaaactttttaacttaaaaaatgtcattgatgagtggacagaaaaggcccttcaaaaaatggaattacatcaattgactgaagaggacagagaaaggctgaaggaagaattacaagtccatgaacaaaaaacttcagaattttctagaagagtggctgaaatacagtttttgctccaaagcagtgaaatacctcttgaattgcaggtcatggagtcctctattttgaacaagatggaacatgtacagaagtgcttaacaggagaatccaactgccatgcactcagtggcagcactgctgagctaagggaggatctcgaccaagccaagacccagatcgggatgactgaatccctcttaaaagccctgtctccttctgacagcttggagatcttcactaaactagaggagatacaacagcagattctacagcaaaaacacagtatgatattacttgagaatcaaataggttgtctgactcctgaactctctgaattgaaaaagcaatatgaaagtgtcagtgatttatttaataccaaaaaaagtgttttgcaagatcacttttctaagttattgaatgatcaatgcaagaactttaatgactggttcagcaacattaaagtgaaccttaaggagtgttttgaatcatcagaaacaaaaaagagtgtggaacaaaagctacaaaaactttctgatttcttgactcttgaaggaagaaacagtaaaataaagcaggtggacagcgtactgaagcatgtgaagaagcatctgcccaaagcacatgtgaaggagcttatcagttggctcgtgggtcaggaattcgaattagaaaaaatggagtccatatgccaggctcgagcaaaggagcttgaagactccttgcagcagctactgagactccaggatgaccatagaaacctgaggaagtggttgactaatcaagaagagaaatggaaaggaanggaagaaccaggggagaaaactgagctgttctgccaagctttagctagaaagagggaacagtttgaatctgtggcccaattgaacaactctttgaaggaatatgggtttactgaagaagaagaaataataatggaagcaacatgtttgatggatagataccagacattactgagacaactaagtgaaatcgaggaagaggataagttactacccacagaggaccagagctttaatgatcttgcacatgatgtaattcattggataaaagagattaaagagtcccttatggttttgaattcatccgaaggcaaaatgccacttgaggaaagaatccaaaaaatcaaggaaatcattttgctgaagcctgaaggggatgccagaatagagaccatcatgaagcaggctgagagcagcgaggccccgctggttcagaagaccctcactgacatcagcaaccagtgggacaacacactccatttagctagcacctacctaagccatcaagaaaagcttctactagaaggagagaaatatttacaaagtaaggaggatctgagattaatgctcatagaantaaagaagaaacaggaagcaggctttgctctacaacatggtctgcaggagaagaaagctcagttaaagatttataagaaattcctcaagaaagcccaagatttgacatccttgctaaaggagttaaaatctcagggaaactacctcttggagtgcactaaaaatcccagcttcagtgaagagccttggctggaaataaagcatctacacgaaagtcttcttcaacaactgcaggattctgtgcaaaacttggacggtcacgttcgagaacatgattcataccaggtttgcgtcacagacctgaatactacattggacaatttctccaaggaatttgtcagtttttctgataagcctgtggatcaaatagnggttgaggaaaaattgcagaaactgcaggaactagagaatagactcagtttacaagatggcacattaaagaagattttagctttagcaaaatccgtcaagcaaaatacatcttcagtggggcagaagattattaaagatgatataaaatcacttcagtgtaaacaaaaagatttggaaaacaggcttgcatctgctaagcaggagatggaatgttgtctcaacancattctcaaatcaaaacgctcaacagaaaagaaaggaaagtttactctgccaggcagagagaagcaggccacttctgatgtgcaggagtctactcaggaatcagctncagtggaaaagttggaggaagactgggaaataaacaaggattcagctgtggaaatggctatgtcaaaacaactttctcttaatgctcaagaaagcatgaaaaacactgaagatgagcggaaagtcaatgagctgcaaaatcaacctttagaattagatactatgttaagaaatgaacaattagaagagatagagaaattatatacccagttggaagcaaagaaagcagccattaagccactggaacaaacagaatgtcttaacaaaacagaaactggggccttggttctccacaatataggatattcggcacagcatttggacaatttgcttcaggcacttattactttgaagaaaaacaaagaaagccaatattgtgtcctcagagattttcaggaataccttgctgcagttgaatcttcaatgaaagccttgttgacagacaaggaaagtcttaaagtaggaccactggacagtgtaacgtatctggacaaaattaaaaaattcatagcatccatagaaaaagagaaagattctttaggcaacttgaaaatcaaatgggagaatttatcaaaccacgtgactgacatggataagaaattgttggaaagccagattaagcaacttgaacatggttgggaacaagtggaacagcagattcaaaagaagtattctcagcaggtagtggaatatgatgaatttacaaccctcatgaataaggtacaggacactgagatttctctgcaacagcagcagcaacatctacagttaaggctgaagtctccagaagaacgggcagggaaccaaagcatgattgccttgaccactgacctccaggctaccaagcatggattttctgttttaaaggggcaagctgaacttcagatgaagaggatttggggagaaaaagaaaagaagaatttggaggatggaataaataacttgaagaaacaatgggaaacattggagccattacacttagaagcagaaaatcagattaagaagtgtgacataaggaacaagatgaaagagactatcttatgggccaagaatttgttgggtgaacttaatccctccattccccttctcccagatgacattctttcacagatcagaaagtgcaaagtgacacatgatggcattctagctaggcagcagtctgtggaatcgttggctgaagaggtcaaagataaggttcctagccttacaacctatgagggcggtgatttaaataataccctagaggacttacggaatcaataccaaatgctggttttaaaatcaactcaaagatcacagcaattagaatttaagttggaagaaagaagcaatttttttgctataataaggaagtttcaacttatggttcaagaaagtgaaacactgataattcccagggtggagacagctgccacggaagctgaactaaaacatcaccatgttactttggaggcatctcagaaggaattgcaagaaattgacagtggaatctcaacacatcttcaggagctaacaaacatctatgaggagctgaatgtgtttgaaagattatttctggaagatcagttgaaaaatcttaagattaggaccaacagaatacaaagattcattcagaatacatgtaatgaagtggaacacaaggtaaagttttgcagacaattccatgaaaaaacatcagcgcttcaggaggaggctgacagtatacagcgcaatgaactattacttaatcaagaagtaaataaaggtgttaaagaggagatctataatcttaaagacagactcaccgctattaagtgttgcatcttacaggtattgaaacttaaaaaagtgtttgactatattggactaaactgggatttttcacaacttgaccaattacaaacccaagtatttgaaaaagaaaaggaacttgaagaaaaaattaagcagttggacacatttgaggaagaacatggcaaatatcaggcattattaagtaaaatgagagctattgatttgcaaattaagaaaatgactgaagtagtactaaaagctcctgatagctctccggaaagcagacggctcaatgcccaaattttaagtcagagaattgagaaagccaagtgtttatgtgatgagataataaagaaattaaatgaaaataagacctttgatgactcatncaaggagaaagaaatactacaaataaagctgaatgcagaagaaaatgataagttatacaaagttctccaaaacatggtattagaactctcaccaaaagaattggatgaaaagaattgtcaggacaaactagaaacttccttacatgttttaaatcagataaaatctcaattacagcagccattacttataaatttggaaattaaacatattcaaaatgaaaaggacaattgtgaagcatttcaggagcaagtttgggcagaaatgtgtagtattaaagctgtgactgctattgagaaacaaagagaagaaaactcttctgaagcgagtgatgtggagacaaaactacgtgagtttgaagatcttcagatgcagcttaacacaagcattgatttgcgcacaaatgtcttgaatcatgcttatgaaaatctaacacgctataaagaagcagtcaccagggcagtggagagcatcacttccctcgaagccatcattataccctacagagtagatgttggtaatccagaagaatctttagagatgcctcttcgaaaacaagaggaattggaatccacagtagcacgcatccaggacctcactgagaaactgggaatgatatccagccccgaagccaaactacaacttcagtatactttacaggaactagtttctaagaactcagcaatgaaggaagctttcaaagcacaggaaactgaggcagaaaggtatcttgagaattacaaatgctatagaaaaatggaagaggatatttacactaacctcagcaaaatggagacagttcttggacagtccatgtcctcgttgccactgtcttacagagaagctttagagcgcttggaacagagcaaggccttggtgtcaaatcttatatcaaccaaagaagagttaatgaaactacgacagatccttagactcttgagactcaggtgcacagaaaatgatggcatatgtttgctcaagattgtgtcggctctgtgggagaaatggctgagtttgctggaagctgctaaagagtgggagatgtggtgcgaagaactgaagcaggaatggaaatttgtcagtgaagaaattgaacgagaggcaattattttagataatcttcaggaagaactccctgaaatttccaaaacaaaagaggcagccaccacagaggaactctctgagctgctagactgtttatgccaatatggagagaacgtggagaagcaacagctgttactgactctacttcttcagcgcatcagaagtatccagaatgttcctgaaagctcaggggctgtggaaactgttccagcatttcaagaaattacttctatgaaagaacgatgcaacaagcttcttcagaaagttcagaaaaataaagaattggtgcagactgaaatccaagaaagacattccttcacaaaagagataattgctttgaagaatttctttcaacagaccacaacttcattccaaaatatggcattccaggatcacccagaaaagtcagaacaatttgaggagcttcaaagcatccttaagaaagggaaactaacttttgagaatattatggaaaaactgcgaatcaagtattccgaaatgtacaccatagtccctgcagagattgaatcccaggtggaagaatgcagaaaagctttagaagacatagatgagaagattagcaatgaagtcttaaaaagctcaccatcatatgcaatgaggagaaaaatagaagaaattaacaatgggcttcataatgttgaaaagatgttgcagcagaaaagcaaaaatattgagaaagctcaagaaattcaaaagaaaatgtgggacgagttagatctatggcattccaaactaaatgagctggattctgaagttcaggacattgttgaacaggacccaggacaggctcaagaatggatggataacttgatgattcctttccagcagtatcagcaagtatcacagagagcagagtgtagaacctcacagttgaataaggccacagttaagatggaggaatatagtgaccttctgaagagcactgaggcttggatagaaaataccagtcatttgctggccaatcctgctgactatgactctttgaggacactgagtcaccatgctagcactgtgcagatggctttggaagattcagaacagaagcacaatcttttacattcaatctttatggatctagaagacctgtcaataatttttgaaacagatgaattaacccaatccatacaagagttaagtaatcaagtaacagctttacaacaaaaaataatggaaagccttccacagattcagcgaatggctgatgatgtggttgctattgaatctgaagtaaaatcaatggaaaaaagagtttcaaaaatcaaaactatcctattatcaaaagaaatatttgatttttcacctgaagaacatctcaaacatggggaggtcatacttgaaaatatacgtcccatgaagaaaaccattgctgagatagtgtcttaccaagtggaactgaggttgccccaaacaggaatgaaacctctgcctgtgtttcagcggacaaatcagcttttacaagatataaaactattggaaaatgtgactcaagaacaaaatgagttattaaaggtagtcataaaacagaccaatgaatgggatgaagaaatagaaaatttgaaacagatcttaaataattattcagctcagttctcccttgaacatatgtcaccagaccaagctgacaagctgccacaactacagggagaaatcgaacgtatggagaaacagattctgagtttgaaccagagaaaagaagacctgttggtggacttgaaggccaccgtactaaaccttcaccagcatttgaagcaagaacaagaaggagtagaaagagataggctgccagctgtaacatcagaggaaggtggagtggcagagagggatgcttctgagcggaagttgaacagaagaggctccatgtcttacctggcagcagtcgaggaagaggtggaagaaagttccgtgaagagcgataatggagatgagaaggcagagccatcgcctcagtcttggtcttcactttggaagcatgacaaggacatggaagaagacagagcttcctcatcctctggaacaattgttcaggaagcatatgggaaaataagcacctctgataattccatggcacaaatcctcacaccagactcactaaacactgagcaaggcccagaatgttccctaaggcccaaccaaacagaagagggcaccacacctcctattgaggctgacactctggactcttctgacgcgcaaggaggtttggagcccagggtggagaaaactaggccggagcccacagaagtcctgcatgcctgcaagacccaggtggccgagctggagctgtggctgcaacaagccaacgtggcagttgagccggaaacattaaacgcagacatgcagcaggtgctggaacagcagctggtagggtgccaggctatgctaacagagattgagcacaaggttgcctttctgttagagacttgcaaagatcagggcctgggagataatggagccactcaacatgaggctgaagcgctttccctgaaactgaaaacagtgaagtgcaatttagaaaaagtccagatgatgcttcaggagaagcacagtgaagatcagcatcctaccattctaaagaaatcctcagagccagagcatcaagaagctctccaaccagttaacctttctgaattggaatccattgtaactgaaaggccacaattcagcagacaaaaagatttccagcagcaacaggttctggagttaaaaccaatggaacagaaagatttcatcaaattcatagaatttaatgctaagaaaatgtggccccagtattgccaacatgataacgatacaactcaggaatcatctgcaagcaaccaggcatccagccctgaaaatgacgttccagactcgatcttgtcaccccagggccaaaatggagataagtggcaatatctgcatcatgaactctcatcaaaaataaagctcccactccctcagcttgtggagcctcaggtttccacaaatatgggtattctacccagcgtgactatgtataactttagatacccaacaactgaagaactgaaaacctataccacccaacttgaagacctgcgccaagaagcaagtaaccttcagacacaggaaaatatgacagaagaagcatatatcaatttggataaaaaattgtttgaactattcctgaccctcagtcagtgcctcagcagtgtggaggagatgctggagatgcccagactttacagggaggatggttctggccagcaggtgcactacgagacgctggctcttgagttgaagaaactttatttagcgctaagtgacaagaagggtgatcttttgaaagccatgacttggcctggcgagaacaccaacttgctccttgaatgttttgacaaccttcaagtctgcctggagcacactcaggctgcagctgtctgtagaagcaagtccctgaaagctggcctcgattacaaccgcagttaccagaatgaaataaagagattatatcatcagctcattaagagtaagacatctttacaacagtctttgaatgaaatcagtgggcagagtgttgctgaacagcttcagaaagcagatgcatatacagtggagctggagaacgccgagagccgagtggccaaactaagagatgaaggggagaggcttcatttaccttatgctttactccaggaggtttacaaattagaggatgtacttgacagtatgtggggaatgctaagagccaggtacacagaactcagcagccctttcgtcactgagagccagcaagatgctttgttgcaaggcatggtggaactggtgaagattgggaaggaaaagcttgctcatggccacttaaaacaaaccaaaagtaaagtggcgttacaggctcaaatagaaaatcacaaggtttttttccagaagcttgttgctgacatgttgttgatccaagcatactctgccaaaatacttccttctttattgcaaaacagagagacattttgggcagaacaagtaacagaagttaaaatactagaagaaaagtcacgccaatgtggtatgaagctgcagagtttgttgcagaaatgggaagaatttgatgaaaactatgcatctcttgaaaaggacctggaaattcttatatctacattgccctctgtgagtttggtggaagaaacagaggaaagattagtggaaaggatttcattttaccagcaaataaaaagaaacattggtggaaaacacgcccggctttaccaaactctgaacgaaggcaaacagttggtggcgtctgtgagctgtcctgaattagagggccagatcgcaaaactggaagagcagtggttgtccctgaacaagaaaattgaccatgagctccacaggctgcaagctcttctcaagcatctgctcagttataacagagattcggatcagttaaccaagtggttggaatcttcccagcatactctgaattactggaaagaacagtccctcaatgtgtctcaggacttggatacaatcagaagcaacatcaacaatttttttgagttttcaaaagaagttgatgaaaaatcctccttgaagactgccgttatcagtatcgggaaccagcttcttcacctgaaagaaactgatacagctacactgagagcttctttagcacagtttgaacaaaaatggacaatgctcataactcaacttccagatattcaagaaaaacttcaccagcttcaaatggagaaattgccgtctcgtaaagcaatcacagaaatgattagctggatgaacaatgtggagcatcaaacttcagatgaagactccgtgcattcaccaagttctgcatctcaagttaaacatcttcttcagaagcacaaggagtttagaatggaaatggactataaacagtggatagttgacttcgttaaccagtcattacttcagctaagcacctgtgatgtagaaagcaagcgctatgaaagaacggagtttgcagagcacctgggggagatgaaccgccagtggcaccgtgtacatggaatgctgaatagaaagatacaacatttagaacaacttctagaaagtatcactgagagtgaaaataaaatacagatcttgaacaactggctggaagcacaagaagagagactgaaaactttacaaaaacctgaaagtgtgatctcagtgcagaagctgctcctggactgtcaggatatagaaaatcaacttgcaattaaatccaaagcactagatgagttgaaacaaagttatctgactttggagagtggggcagtgccattgttagaagatacagcatcccgaattgatgagttatttcaaaagagaagcagtgttctcactcaggtcaatcagctcaaaacctccatgcagtcagttttacaggagtggaagatttatgatcaactctatgatgaagtgaatatgatgacaatccgattctggtactgcatggaacacagcaagcctgtggtgttatcattggagaccttgagatgccaggtggagaaccttcagtctctgcaagatgaagctgagagcagtgaagggagttgggagaaactccaggaggttatcggcaaactcaaaggtctctgcccctctgttgctgaaataatcgaagagaaatgccaaaatactcataaaaggtggactcaggtgaaccaagccattgcagaccagttgcagaaggcccagagtctgctccagctctggaaggcctatagcaatgctcatggtgaagctgccgcaaggctgaagcagcaggaagcaaagtttcaacagctcgcaaacatcagcatgtctggaaacaacctggcagagatcctgcccccagccctgcaggacataaaggagctgcagcatgatgtgcagaaaacaaaagaagcctttctccaaaattccagtgtcctggatcgactcccacaacccgcagagtccagcacccacatgctcctcccgggccccctgcactctctccagagggctgcttatttggaaaagatgctgcttgtgaaagcaaatgaatttgagtttgttctctcacagtttaaggattttggagtccggctggaatctttaaaaggtcttattatgcatgaagaagagaatttggatagacttcaccaacaggaaaaagaaaatcctgactcattcctgaatcatgtgctggcactgacagcccaatcacctgatattgaacatttgaatgaagtgagcctcaagctcccacttagtgacgtagctgtgaagacgttacaaaatatgaaccggcaatggattcgggccacggccacggcactggagcgctgcagtgagcttcagggaattggattgaatgaaaagtttctttattgctgtgaaaagtggatccaacttttggagaagatagaagaagcactcaaagtggatgtggctaacagccttcctgagctcctggagcagcagaaaacctataagatgttagaagctgaagtttctataaaccagacaattgctgattcctatgtcacccagtccttacaactcctggacacaacagaaatagagaacagaccagaatttattacagaattctcaaagctgacggatcggtggcagaatgctgtccagggtgttcggcagaggaagggtgacgttgatgggctggtgaggcagtggcaagatttcactacttctgtggagaacttgtttcgcttcctcactgacaccagccacctgctatctgcagtgaagggccaggagcgcttcagcctctaccaaaccagaagtctgatccatgagctgaagaataaagaaattcattttcaaaggaggcgaactacctgtgccctaaccttggaagctggagaaaagttactgctcacaactgacctgaaaactaaagagtctgtgggtaggagaatcagtcaacttcaggacagctggaaagacatggagccccagctggcagagatgattaagcagttccagagcactgtagagacctgggaccagtgtgaaaagaaaatcaaggagttgaaaagcaggctgcaagttttaaaggcacaaagtgaagatcctcttccagagcttcacgaggacctccataacgaaaaagagctgattaaggaactagaacagtctttggctagctggactcagaacttgaaagaacttcaaactatgaaggcggacttaacccggcacgttctcgtggaagatgtgatggttttgaaggagcaaatagagcatttgcacagacaatgggaggacctctgcttaagggtggccatacgtaaacaggagattgaagacagactcaatacatgggttgtattcaatgaaaaaaataaagagttgtgtgcctggctggtgcagatggaaaacaaagttctacagacagcggacattagtattgaagaaatgattgaaaagttacagaaggactgcatggaagaaataaacttgtttagtgaaaacaagttacagttaaagcagatgggtgaccagttgatcaaggccagcaacaaatcaagagcagctgagatcgatgacaagctcaacaaaattaacgatcgttggcaacatctttttgatgtcatcggatcaagggtgaagaagctgaaggagacctttgcttttattcagcagttggacaaaaacatgagcaaccttcgcacctggttggctcgaattgagtctgagctttccaagcctgttgtttatgatgtctgcgatgatcaagagatccagaagaggctcgctgagcagcaggatctacagcgagatattgaacaacacagcgcaggggtggagtccgtgtttaacatctgtgacgtcctactgcacgactccgatgcctgtgcaaatgagaccgagtgtgactcgatccagcagaccaccaggagcctggacagacgctggaggaacatttgtgccatgtccatggagcggcgcatgaaaatcgaggagacgtggcgcctgtggcagaagtttttagacgactattctcgctttgaggactggctcaagtcagctgagaggacggcagcctgcccaaattcctcagaggtgttgtacacgagtgccaaagaggaactgaagaggtttgaggcctttcagcggcagattcatgagcggctcactcagctggagctcatcaacaagcagtaccggcggctggcccgggagaaccgcacagacacggccagcaggctgaagcagatggtccacgagggcaaccagcgctgggacaaccttcagaggcgggtcacagccgtcctgcggagactcaggcatttcaccaaccagagggaagaatttgagggcaccagggagagcattctggtgtggctcacagagatggacctgcagctgaccaacgtggagcacttctcagagagtgacgccgatgacaagatgcgccaactgaatggcttccaacaggaaattacattaaataccaacaagattgatcagctcattgtgtttggggagcagctgattcagaagagcgagcccctggatgctgtgctgattgaggatgagctggaggaactccaccgctactgccaggaggtgtttggaagggtctcccggttccaccggcggctcacctcctgcactccgggcttggaagatgaaaaggaggcctctgagaatgaaacagacatggaagaccccagagaaatccagactgattcttggcgtaaacggggagagagcgaggaaccgtcatctcctcagtccctgtgtcatctagtggccccagggcacgagcggtctggctgcgagacccctgtcagcgtggactccatccccctggagtgggaccacacaggcgacgtggggggctcctcctctcacgaagaggacgaggagggcccatactacagcgcactgtcaggtaaatccatttcggatggccactcgtggcatgttcccgacagcccttcctgtcccgagcatcactacaagcaaatggaaggtgacaggaatgttccacctgttccccctgcgtccagcaccccttataaaccaccctatggaaagctactattacctccaggcacggatggtggcaaagaaggcccgcgagtcctgaatggcaacccacagcaggaagacgggggactggccggtatcacagagcagcagtcaggtgccttcgacagatgggagatgattcaagcacaggagcttcacaataagctcaaaataaaacaaaatttgcaacagctgaactctgatatcagcgccatcactacttggctgaaaaaaactgaagcagagctggaaatgttaaagatggcaaagcctccctctgatatccaggaaatagaactgagagtgaagagactgcaggagatactgaaagcctttgacacttacaaggcattagtggtctctgtcaacgtgagcagcaaggaatttctgcaaaccgagagccccgaatccacagagctccaaagtagactccgccagctgagcctgctctgggaagcagcacagggcgcagtggacagctggagagggggcttacgacagtcgctcatgcagtgccaggacttccaccagttgagtcaaaatctgctgctgtggttagcgagtgccaagaaccggaggcagaaggctcatgtcaccgatccaaaggcagacccccgggctctcctagagtgtcggagggaactaatgcaactggaaaaggagctggtagaacgtcaacctcaagtggacatgttacaggagatttcaaacagccttctcattaagggacatggagaagactgtattgaagctgaagaaaaggtgcatgttattgagaagaaactcaaacagttacgggagcaagtgtcccaagatttaatggccttgcagggaacccagaacccagcctcacccctgcccagcttcgacgaggtagactcgggggaccagcctcctgcaacatccgtgccagctccccgagcaaagagttcagagcagtgagaactacagaaggcgaggaggagacagagagcaggtaacggggctttaccgtgacagcagtgcgttcccctgctccacactcccactgactcagtcttgccaatgccactatcaaggtccttgcaaaaatctggttttcttttgtctggaaagggctggttttctcctctgaaactgaaccccaactgttggccctatttaaatctcaggtcttggatttcttacttacataagcaggggcttaggtaatagagtgggttgtgcctgtggagcctcccaatcagctctcaacctcctctgttggcagggtccccggcagcacacggccacagcgctccttcctctcaagggtggtccgggcagccctacccctgcagctgctcctcctgctgctgctgctcctggcctgcctgctgccctcctccgaagaagactacagctgcactcaggccaacaactttgcccggtccttttaccccatgctgaggccaccgagttgattagagggtcactgctccatcgttgcttcaggcaaaagagtctccatcttcattccaaatgaggtgagtgtttgagaggccttttctgcccttaagtagagatgcgggacaagtcaaagttgcagtgaaaggaagtgtggtctgcatttcaaagcttaatattgtgcatgtcaatttttgtctcttcctcaggataagggcctttaagctggtttgctccccatctccagggaggccactgcagcttctttcactcaaagctcagtgtattcccaaaactcttttatgaggtagtctgggttttatatcgtctgcaaatctttcattgcccacatgcaagggacattttcacatgactcttggcactaagataacttcaaatgaatgaattgcttttctccccatctgtaaaggatataattctaatcaaactcagaatgattacagaaaatctatccaaataatcgatgcactggataccaggacttttgtgagctgcattttacttgtatacacaggacctgtggtcataaatcaatcacaagtgtgagattagctgactaaagatgaaattgttctttttaagaagatacattaaagcagagcttcttaactcttctgaaattgtactcaagcatttgtgttcaggtgccctttcccaggaagactagccctggttttcatcaaattctcaaaggactctctaaccccacaataagaattcagaatagaatgtagacactacttagcctaattactgtaa

SEQ ID NO: 735520 - DNA, 22162 bp, Homo sapiens
  misc_feature (6127)..(6127): n is a, c, g, or t
  misc_feature (6702)..(6702): n is a, c, g, or t
  misc_feature (7072)..(7072): n is a, c, g, or t
  misc_feature (7297)..(7297): n is a, c, g, or t
  misc_feature (7404)..(7404): n is a, c, g, or t
  misc_feature (9565)..(9565): n is a, c, g, or t
agcccgcggggtgaaatgacttgctcatggtctggtagctaatcgcagatctgctctctaactcctacttccaagacccaggaatctacgggtgttggagaagacccctcctgaaatcctccagaagagctttttgagggagcttgtggctcctgttcacccagccccggttcacttcttcaactgagatggacatgatataatctccattgagtcaaagaatggcatctagtcctgagcttcccaccgaagatgaacagggttcctggggcatcgacgatctccatatttcattgcaagctgaacaggaagacacccagaagaaagccttcacgtgctggataaactcacagttggccaggcacacttctccctcagttatatccgacctattcacagacattaaaaaggggcatgtcctcctggatctgctagaagtactttctgggcaacagttgcctcgggataaaggatctaataccttccagtgtagaatcaatatagaacatgccttgacattcctaagaaaccgatcaattaagctaataaatattcatgttactgatatcattgatggaaacccatccattatccttggcctaatttggacaattatcctgcactttcatattgagaagcttgcccagactctttcttgcaattacaatcagccttccctggatgatgtgagtgtggttgactcatctcctgcctcaagtcctccagctaagaaatgctctaaagtgcaagcaagatggcaaatgtctgcaagaaaggcccttcttttgtgggctcaggaacaatgcgccacctatgagtctgtcaatgtgaccgattttaagtcaagttggagaaatgggatggcttttttggccatcattcatgccttgcgaccagacctaattgacatgaagagtgtgaagcatagatccaacaaagacaatctgagagaggccttcagaattgcagaacaagaattaaaaatccccagattgctggaaccagaagatgtggatgttgttgatcctgatgaaaagtccatcatgacctatgtggcacagtttctgcagtattccaaagatgcccctgggactggagaggaggctcagggaaaggtgaaagatgctatgggctggttaactctgcaaaaggaaaaactacagaagttgctaaaggattcagagaatgatacctactttaaaaagtataatagcctgctgtcctttatggagtcattcaatgaagaaaaaaagtcctttttggatgtcctgtcaataaaacgggatctggatgagctggacaaggatcatttacagttgagagaagcctgggatggcctcgatcaccagattaatgcatggaaaataaagctaaattatgccttgcccccacccctccatcaaactgaagcttggctccaggaggtagaagagcttatggatgaagatttgtcagcctcccaggatcactctcaagccgtgactctgatacaagagaaaatgactttattcaagagcctgatggatagatttgagcatcattcgaacattctccttacctttgaaaataaggatgaaaatcacttgccattggtaccacctaacaaattggaggaaatgaaaagacgaatcaacaacattttggagaaaaaatttattctacttctagaatttcattactacaagtgcttagttcttggtttggtagatgaagtgaaatcaaaattggatatttggaacattaaatatgggagcagagaatctgtggaattattgctggaagactggcataaatttattgaagaaaaagaattcctagctcgacttgatacttcttttcaaaaatgtggagaaatttataagaatttggctggagaatgtcagaatattaataaacagtatatgatggtgaaatctgatgtttgtatgtatagaaaaaatatatataatgtgaagtccactctacaaaaagtgctggcatgttgggctacttatgtggaaaaccttcgcttactaagggcttgctttgaggagacaaagaaggaagaaattaaagaggtaccctttgagacactagcccagtggaatctagaacacgctactttaaatgaagcaggaaatttcttagtcgaagtcagcaatgatgtggttggatcatctatttctaaagaactgagaaggctgaataaaagatggagaaagttggtttcaaaaactcaacttgaaatgaacctgccactgatgataaaaaaacaggatcagcccacttttgacaattctggaaatattctatctaaagaagagaaagcaactgttgagttttcaacagatatgtcagtagaacttcctgaaaattataatcaaaatataaaggctggagagaaacatgaaaaagaaaatgaagaattcacagggcaactaaaagtggctaaagatgttgaaaaactcattggacaagtggaaatctgggaggcagaagccaaatctgttttggatcaagatgatgtggacacctcaatggaagaatctttgaagcatcttattgccaaaggctctatgtttgatgagcttatggcaagaagtgaagatatgttacaaatggatatacaaaatatttcaagccaggagtcctttcaacatgttctcacaactgggcttcaggcaaagattcaagaagctaaagagaaagtccagatcaatgtggtaaaactcattgcagcgttgaagaacttaactgacgtttcaccagatttggacatcaggctgaagatggaagaatcccagaaggaacttgaatcatatatgatgagggctcagcagttactggggcaaagagagagccccggtgaactcatttcaaaacacaaggaagcactaataatttctaatacaaaaagtctggccaagtatttgaaagctgttgaagaactaaaaaataatgtaactgaggacataaagatgtctttagaagaaaagagtagagatgtctgtgccaaatgggagtctcttcatcatgaactgtctttatatgttcaacaactaaaaatagatattgaaaaaggaaagcttagtgacaatattttaaaacttgaaaagcaaataaataaagaaaagaaacttatccgtagaggaaggaccaagggtctcatcaaagaacatgaggcctgcttttctgaggaaggctgcctgtaccagcttaatcaccacatggaagtcctgagggagctgtgtgaagagctgccttcacagaagagtcaacaagaagtgaagagactactcaaagattatgaacaaaagatagaaagacttctgaaatgtgcttccgagattcatatgacactgcagcccacagcgggaggcacgtcgaaaaacgaggggaccatcaccacatctgagaatagaggaggggatccccacagtgaggcaccatttgcaaaatcagataatcagccatcaactgaaaaggcaatggaacccactatgaagtttagcctggcatcagtgttaaggcctctgcaagaagaaagcattatggaaaaggattacagtgcatctataaatagtttactagagaggtatgatacatacagagatattcttgaacaccacctgcaaaacaacaaattcaggattacttctgatttctctagtgaagaggacaggagtagttcttgtctgcaggctaaactgacagatctacaggtcataaaaaatgaaactgatgctcgctggaaagagtttgaaattatttcattgaagttagaaaatcatgtgaatgacataaaaaagccttttgtaattaaggaaagagacacactaaaggaaagagaaagagagcttcagatgactcttaataccagaatggaatctttagagacagcactgcggcttgtgttacctgtagagaaggcatcacttcttctctgtggctcggacctgcctctccataaaatggccatccagggatttcatctcattgatgctgatcgcatctatcaacacctaaggaatatccaagattccatagcaaaacagattgaaatatgtaaccgcttagaagagccaggcaactttgtattaaaggagttacacccatttgatctacacgcaatgcagaatattatactgaaatacaaaacacaatttgaaggaatgaaccacagggtgcagaggagtgaagatactctcaaagctctggaagactttttggcgtctctcagaacagctaaactctctgctgagcccgttacagacctttcagcctcagatacacaggtggcacaagaaaatacgttgacagtaaaaaataaagagggagaaattcatctgatgaaagacaaggccaaacatttggataaatgtttgaagatgctcgatatgagctttaaagatgctgaacggggtgatgacacctcctgtgaaaacctgcttgatgctttttcaataaagttatctgagacacatggctatggggtacaggaggaattcactgaggaaaacaaattactagaggcttgtattttcaaaaataatgaactccttaaaaatattcaagatgtgcagagtcaaatcagtaaaattggtcttaaggatcctactgttccagctgtgaaacatcggaaaaaatcattaatcagactggataaggttctagatgaatatgaagaagagaagagacatttacaagaaatggctaattctcttccacacttcaaagatggcagagaaaaaaccgtgaatcaacagtgccaaaatacagtagtcttgtgggagaataccaaagccttggtcaccgaatgtcttgaacaatgtgggagagttttggagctcttaaaacaatatcagaattttaaaagcatcttgacaactttgattcaaaaagaagagagtgtcatctccctgcaggcttcgtacatgggaaaggagaacctgaagaaaaggatagcagagattgaaattgtcaaagaagaatttaatgagcatttagaagttgtagacaagataaaccaggtctgcaaaaatctacaattttatctaaataaaatgaaaacttttgaagagcccccttttgaaaaagaggctaatattattgtggatagatggcttgatataaatgagaagacagaagattactatgaaaatcttggtcgagctctagctttgtgggacaaactttttaacttaaaaaatgtcattgatgagtggacagaaaaggcccttcaaaaaatggaattacatcaattgactgaagaggacagagaaaggctgaaggaagaattacaagtccatgaacaaaaaacttcagaattttctagaagagtggctgaaatacagtttttgctccaaagcagtgaaatacctcttgaattgcaggtcatggagtcctctattttgaacaagatggaacatgtacagaagtgcttaacaggagaatccaactgccatgcactcagtggcagcactgctgagctaagggaggatctcgaccaagccaagacccagatcgggatgactgaatccctcttaaaagccctgtctccttctgacagcttggagatcttcactaaactagaggagatacaacagcagattctacagcaaaaacacagtatgatattacttgagaatcaaataggttgtctgactcctgaactctctgaattgaaaaagcaatatgaaagtgtcagtgatttatttaataccaaaaaaagtgttttgcaagatcacttttctaagttattgaatgatcaatgcaagaactttaatgactggttcagcaacattaaagtgaaccttaaggagtgttttgaatcatcagaaacaaaaaagagtgtggaacaaaagctacaaaaactttctgatttcttgactcttgaaggaagaaacagtaaaataaagcaggtggacagcgtactgaagcatgtgaagaagcatctgcccaaagcacatgtgaaggagcttatcagttggctcgtgggtcaggaattcgaattagaaaaaatggagtccatatgccaggctcgagcaaaggagcttgaagactccttgcagcagctactgagactccaggatgaccatagaaacctgaggaagtggttgactaatcaagaagagaaatggaaaggaanggaagaaccaggggagaaaactgagctgttctgccaagctttagctagaaagagggaacagtttgaatctgtggcccaattgaacaactctttgaaggaatatgggtttactgaagaagaagaaataataatggaagcaacatgtttgatggatagataccagacattactgagacaactaagtgaaatcgaggaagaggataagttactacccacagaggaccagagctttaatgatcttgcacatgatgtaattcattggataaaagagattaaagagtcccttatggttttgaattcatccgaaggcaaaatgccacttgaggaaagaatccaaaaaatcaaggaaatcattttgctgaagcctgaaggggatgccagaatagagaccatcatgaagcaggctgagagcagcgaggccccgctggttcagaagaccctcactgacatcagcaaccagtgggacaacacactccatttagctagcacctacctaagccatcaagaaaagcttctactagaaggagagaaatatttacaaagtaaggaggatctgagattaatgctcatagaantaaagaagaaacaggaagcaggctttgctctacaacatggtctgcaggagaagaaagctcagttaaagatttataagaaattcctcaagaaagcccaagatttgacatccttgctaaaggagttaaaatctcagggaaactacctcttggagtgcactaaaaatcccagcttcagtgaagagccttggctggaaataaagcatctacacgaaagtcttcttcaacaactgcaggattctgtgcaaaacttggacggtcacgttcgagaacatgattcataccaggtttgcgtcacagacctgaatactacattggacaatttctccaaggaatttgtcagtttttctgataagcctgtggatcaaatagnggttgaggaaaaattgcagaaactgcaggaactagagaatagactcagtttacaagatggcacattaaagaagattttagctttagcaaaatccgtcaagcaaaatacatcttcagtggggcagaagattattaaagatgatataaaatcacttcagtgtaaacaaaaagatttggaaaacaggcttgcatctgctaagcaggagatggaatgttgtctcaacancattctcaaatcaaaacgctcaacagaaaagaaaggaaagtttactctgccaggcagagagaagcaggccacttctgatgtgcaggagtctactcaggaatcagctncagtggaaaagttggaggaagactgggaaataaacaaggattcagctgtggaaatggctatgtcaaaacaactttctcttaatgctcaagaaagcatgaaaaacactgaagatgagcggaaagtcaatgagctgcaaaatcaacctttagaattagatactatgttaagaaatgaacaattagaagagatagagaaattatatacccagttggaagcaaagaaagcagccattaagccactggaacaaacagaatgtcttaacaaaacagaaactggggccttggttctccacaatataggatattcggcacagcatttggacaatttgcttcaggcacttattactttgaagaaaaacaaagaaagccaatattgtgtcctcagagattttcaggaataccttgctgcagttgaatcttcaatgaaagccttgttgacagacaaggaaagtcttaaagtaggaccactggacagtgtaacgtatctggacaaaattaaaaaattcatagcatccatagaaaaagagaaagattctttaggcaacttgaaaatcaaatgggagaatttatcaaaccacgtgactgacatggataagaaattgttggaaagccagattaagcaacttgaacatggttgggaacaagtggaacagcagattcaaaagaagtattctcagcaggtagtggaatatgatgaatttacaaccctcatgaataaggtacaggacactgagatttctctgcaacagcagcagcaacatctacagttaaggctgaagtctccagaagaacgggcagggaaccaaagcatgattgccttgaccactgacctccaggctaccaagcatggattttctgttttaaaggggcaagctgaacttcagatgaagaggatttggggagaaaaagaaaagaagaatttggaggatggaataaataacttgaagaaacaatgggaaacattggagccattacacttagaagcagaaaatcagattaagaagtgtgacataaggaacaagatgaaagagactatcttatgggccaagaatttgttgggtgaacttaatccctccattccccttctcccagatgacattctttcacagatcagaaagtgcaaagtgacacatgatggcattctagctaggcagcagtctgtggaatcgttggctgaagaggtcaaagataaggttcctagccttacaacctatgagggcggtgatttaaataataccctagaggacttacggaatcaataccaaatgctggttttaaaatcaactcaaagatcacagcaattagaatttaagttggaagaaagaagcaatttttttgctataataaggaagtttcaacttatggttcaagaaagtgaaacactgataattcccagggtggagacagctgccacggaagctgaactaaaacatcaccatgttactttggaggcatctcagaaggaattgcaagaaattgacagtggaatctcaacacatcttcaggagctaacaaacatctatgaggagctgaatgtgtttgaaagattatttctggaagatcagttgaaaaatcttaagattaggaccaacagaatacaaagattcattcagaatacatgtaatgaagtggaacacaaggtaaagttttgcagacaattccatgaaaaaacatcagcgcttcaggaggaggctgacagtatacagcgcaatgaactattacttaatcaagaagtaaataaaggtgttaaagaggagatctataatcttaaagacagactcaccgctattaagtgttgcatcttacaggtattgaaacttaaaaaagtgtttgactatattggactaaactgggatttttcacaacttgaccaattacaaacccaagtatttgaaaaagaaaaggaacttgaagaaaaaattaagcagttggacacatttgaggaagaacatggcaaatatcaggcattattaagtaaaatgagagctattgatttgcaaattaagaaaatgactgaagtagtactaaaagctcctgatagctctccggaaagcagacggctcaatgcccaaattttaagtcagagaattgagaaagccaagtgtttatgtgatgagataataaagaaattaaatgaaaataagacctttgatgactcatncaaggagaaagaaatactacaaataaagctgaatgcagaagaaaatgataagttatacaaagttctccaaaacatggtattagaactctcaccaaaagaattggatgaaaagaattgtcaggacaaactagaaacttccttacatgttttaaatcagataaaatctcaattacagcagccattacttataaatttggaaattaaacatattcaaaatgaaaaggacaattgtgaagcatttcaggagcaagtttgggcagaaatgtgtagtattaaagctgtgactgctattgagaaacaaagagaagaaaactcttctgaagcgagtgatgtggagacaaaactacgtgagtttgaagatcttcagatgcagcttaacacaagcattgatttgcgcacaaatgtcttgaatcatgcttatgaaaatctaacacgctataaagaagcagtcaccagggcagtggagagcatcacttccctcgaagccatcattataccctacagagtagatgttggtaatccagaagaatctttagagatgcctcttcgaaaacaagaggaattggaatccacagtagcacgcatccaggacctcactgagaaactgggaatgatatccagccccgaagccaaactacaacttcagtatactttacaggaactagtttctaagaactcagcaatgaaggaagctttcaaagcacaggaaactgaggcagaaaggtatcttgagaattacaaatgctatagaaaaatggaagaggatatttacactaacctcagcaaaatggagacagttcttggacagtccatgtcctcgttgccactgtcttacagagaagctttagagcgcttggaacagagcaaggccttggtgtcaaatcttatatcaaccaaagaagagttaatgaaactacgacagatccttagactcttgagactcaggtgcacagaaaatgatggcatatgtttgctcaagattgtgtcggctctgtgggagaaatggctgagtttgctggaagctgctaaagagtgggagatgtggtgcgaagaactgaagcaggaatggaaatttgtcagtgaagaaattgaacgagaggcaattattttagataatcttcaggaagaactccctgaaatttccaaaacaaaagaggcagccaccacagaggaactctctgagctgctagactgtttatgccaatatggagagaacgtggagaagcaacagctgttactgactctacttcttcagcgcatcagaagtatccagaatgttcctgaaagctcaggggctgtggaaactgttccagcatttcaagaaattacttctatgaaagaacgatgcaacaagcttcttcagaaagttcagaaaaataaagaattggtgcagactgaaatccaagaaagacattccttcacaaaagagataattgctttgaagaatttctttcaacagaccacaacttcattccaaaatatggcattccaggatcacccagaaaagtcagaacaatttgaggagcttcaaagcatccttaagaaagggaaactaacttttgagaatattatggaaaaactgcgaatcaagtattccgaaatgtacaccatagtccctgcagagattgaatcccaggtggaagaatgcagaaaagctttagaagacatagatgagaagattagcaatgaagtcttaaaaagctcaccatcatatgcaatgaggagaaaaatagaagaaattaacaatgggcttcataatgttgaaaagatgttgcagcagaaaagcaaaaatattgagaaagctcaagaaattcaaaagaaaatgtgggacgagttagatctatggcattccaaactaaatgagctggattctgaagttcaggacattgttgaacaggacccaggacaggctcaagaatggatggataacttgatgattcctttccagcagtatcagcaagtatcacagagagcagagtgtagaacctcacagttgaataaggccacagttaagatggaggaatatagtgaccttctgaagagcactgaggcttggatagaaaataccagtcatttgctggccaatcctgctgactatgactctttgaggacactgagtcaccatgctagcactgtgcagatggctttggaagattcagaacagaagcacaatcttttacattcaatctttatggatctagaagacctgtcaataatttttgaaacagatgaattaacccaatccatacaagagttaagtaatcaagtaacagctttacaacaaaaaataatggaaagccttccacagattcagcgaatggctgatgatgtggttgctattgaatctgaagtaaaatcaatggaaaaaagagtttcaaaaatcaaaactatcctattatcaaaagaaatatttgatttttcacctgaagaacatctcaaacatggggaggtcatacttgaaaatatacgtcccatgaagaaaaccattgctgagatagtgtcttaccaagtggaactgaggttgccccaaacaggaatgaaacctctgcctgtgtttcagcggacaaatcagcttttacaagatataaaactattggaaaatgtgactcaagaacaaaatgagttattaaaggtagtcataaaacagaccaatgaatgggatgaagaaatagaaaatttgaaacagatcttaaataattattcagctcagttctcccttgaacatatgtcaccagaccaagctgacaagctgccacaactacagggagaaatcgaacgtatggagaaacagattctgagtttgaaccagagaaaagaagacctgttggtggacttgaaggccaccgtactaaaccttcaccagcatttgaagcaagaacaagaaggagtagaaagagataggctgccagctgtaacatcagaggaaggtggagtggcagagagggatgcttctgagcggaagttgaacagaagaggctccatgtcttacctggcagcagtcgaggaagaggtggaagaaagttccgtgaagagcgataatggagatgagaaggcagagccatcgcctcagtcttggtcttcactttggaagcatgacaaggacatggaagaagacagagcttcctcatcctctggaacaattgttcaggaagcatatgggaaaataagcacctctgataattccatggcacaaatcctcacaccagactcactaaacactgagcaaggcccagaatgttccctaaggcccaaccaaacagaagagggcaccacacctcctattgaggctgacactctggactcttctgacgcgcaaggaggtttggagcccagggtggagaaaactaggccggagcccacagaagtcctgcatgcctgcaagacccaggtggccgagctggagctgtggctgcaacaagccaacgtggcagttgagccggaaacattaaacgcagacatgcagcaggtgctggaacagcagctggtagggtgccaggctatgctaacagagattgagcacaaggttgcctttctgttagagacttgcaaagatcagggcctgggagataatggagccactcaacatgaggctgaagcgctttccctgaaactgaaaacagtgaagtgcaatttagaaaaagtccagatgatgcttcaggagaagcacagtgaagatcagcatcctaccattctaaagaaatcctcagagccagagcatcaagaagctctccaaccagttaacctttctgaattggaatccattgtaactgaaaggccacaattcagcagacaaaaagatttccagcagcaacaggttctggagttaaaaccaatggaacagaaagatttcatcaaattcatagaatttaatgctaagaaaatgtggccccagtattgccaacatgataacgatacaactcaggaatcatctgcaagcaaccaggcatccagccctgaaaatgacgttccagactcgatcttgtcaccccagggccaaaatggagataagtggcaatatctgcatcatgaactctcatcaaaaataaagctcccactccctcagcttgtggagcctcaggtttccacaaatatgggtattctacccagcgtgactatgtataactttagatacccaacaactgaagaactgaaaacctataccacccaacttgaagacctgcgccaagaagcaagtaaccttcagacacaggaaaatatgacagaagaagcatatatcaatttggataaaaaattgtttgaactattcctgaccctcagtcagtgcctcagcagtgtggaggagatgctggagatgcccagactttacagggaggatggttctggccagcaggtgcactacgagacgctggctcttgagttgaagaaactttatttagcgctaagtgacaagaagggtgatcttttgaaagccatgacttggcctggcgagaacaccaacttgctccttgaatgttttgacaaccttcaagtctgcctggagcacactcaggctgcagctgtctgtagaagcaagtccctgaaagctggcctcgattacaaccgcagttaccagaatgaaataaagagattatatcatcagctcattaagagtaagacatctttacaacagtctttgaatgaaatcagtgggcagagtgttgctgaacagcttcagaaagcagatgcatatacagtggagctggagaacgccgagagccgagtggccaaactaagagatgaaggggagaggcttcatttaccttatgctttactccaggaggtttacaaattagaggatgtacttgacagtatgtggggaatgctaagagccaggtacacagaactcagcagccctttcgtcactgagagccagcaagatgctttgttgcaaggcatggtggaactggtgaagattgggaaggaaaagcttgctcatggccacttaaaacaaaccaaaagtaaagtggcgttacaggctcaaatagaaaatcacaaggtttttttccagaagcttgttgctgacatgttgttgatccaagcatactctgccaaaatacttccttctttattgcaaaacagagagacattttgggcagaacaagtaacagaagttaaaatactagaagaaaagtcacgccaatgtggtatgaagctgcagagtttgttgcagaaatgggaagaatttgatgaaaactatgcatctcttgaaaaggacctggaaattcttatatctacattgccctctgtgagtttggtggaagaaacagaggaaagattagtggaaaggatttcattttaccagcaaataaaaagaaacattggtggaaaacacgcccggctttaccaaactctgaacgaaggcaaacagttggtggcgtctgtgagctgtcctgaattagagggccagatcgcaaaactggaagagcagtggttgtccctgaacaagaaaattgaccatgagctccacaggctgcaagctcttctcaagcatctgctcagttataacagagattcggatcagttaaccaagtggttggaatcttcccagcatactctgaattactggaaagaacagtccctcaatgtgtctcaggacttggatacaatcagaagcaacatcaacaatttttttgagttttcaaaagaagttgatgaaaaatcctccttgaagactgccgttatcagtatcgggaaccagcttcttcacctgaaagaaactgatacagctacactgagagcttctttagcacagtttgaacaaaaatggacaatgctcataactcaacttccagatattcaagaaaaacttcaccagcttcaaatggagaaattgccgtctcgtaaagcaatcacagaaatgattagctggatgaacaatgtggagcatcaaacttcagatgaagactccgtgcattcaccaagttctgcatctcaagttaaacatcttcttcagaagcacaaggagtttagaatggaaatggactataaacagtggatagttgacttcgttaaccagtcattacttcagctaagcacctgtgatgtagaaagcaagcgctatgaaagaacggagtttgcagagcacctgggggagatgaaccgccagtggcaccgtgtacatggaatgctgaatagaaagatacaacatttagaacaacttctagaaagtatcactgagagtgaaaataaaatacagatcttgaacaactggctggaagcacaagaagagagactgaaaactttacaaaaacctgaaagtgtgatctcagtgcagaagctgctcctggactgtcaggatatagaaaatcaacttgcaattaaatccaaagcactagatgagttgaaacaaagttatctgactttggagagtggggcagtgccattgttagaagatacagcatcccgaattgatgagttatttcaaaagagaagcagtgttctcactcaggtcaatcagctcaaaacctccatgcagtcagttttacaggagtggaagatttatgatcaactctatgatgaagtgaatatgatgacaatccgattctggtactgcatggaacacagcaagcctgtggtgttatcattggagaccttgagatgccaggtggagaaccttcagtctctgcaagatgaagctgagagcagtgaagggagttgggagaaactccaggaggttatcggcaaactcaaaggtctctgcccctctgttgctgaaataatcgaagagaaatgccaaaatactcataaaaggtggactcaggtgaaccaagccattgcagaccagttgcagaaggcccagagtctgctccagctctggaaggcctatagcaatgctcatggtgaagctgccgcaaggctgaagcagcaggaagcaaagtttcaacagctcgcaaacatcagcatgtctggaaacaacctggcagagatcctgcccccagccctgcaggacataaaggagctgcagcatgatgtgcagaaaacaaaagaagcctttctccaaaattccagtgtcctggatcgactcccacaacccgcagagtccagcacccacatgctcctcccgggccccctgcactctctccagagggctgcttatttggaaaagatgctgcttgtgaaagcaaatgaatttgagtttgttctctcacagtttaaggattttggagtccggctggaatctttaaaaggtcttattatgcatgaagaagagaatttggatagacttcaccaacaggaaaaagaaaatcctgactcattcctgaatcatgtgctggcactgacagcccaatcacctgatattgaacatttgaatgaagtgagcctcaagctcccacttagtgacgtagctgtgaagacgttacaaaatatgaaccggcaatggattcgggccacggccacggcactggagcgctgcagtgagcttcagggaattggattgaatgaaaagtttctttattgctgtgaaaagtggatccaacttttggagaagatagaagaagcactcaaagtggatgtggctaacagccttcctgagctcctggagcagcagaaaacctataagatgttagaagctgaagtttctataaaccagacaattgctgattcctatgtcacccagtccttacaactcctggacacaacagaaatagagaacagaccagaatttattacagaattctcaaagctgacggatcggtggcagaatgctgtccagggtgttcggcagaggaagggtgacgttgatgggctggtgaggcagtggcaagatttcactacttctgtggagaacttgtttcgcttcctcactgacaccagccacctgctatctgcagtgaagggccaggagcgcttcagcctctaccaaaccagaagtctgatccatgagctgaagaataaagaaattcattttcaaaggaggcgaactacctgtgccctaaccttggaagctggagaaaagttactgctcacaactgacctgaaaactaaagagtctgtgggtaggagaatcagtcaacttcaggacagctggaaagacatggagccccagctggcagagatgattaagcagttccagagcactgtagagacctgggaccagtgtgaaaagaaaatcaaggagttgaaaagcaggctgcaagttttaaaggcacaaagtgaagatcctcttccagagcttcacgaggacctccataacgaaaaagagctgattaaggaactagaacagtctttggctagctggactcagaacttgaaagaacttcaaactatgaaggcggacttaacccggcacgttctcgtggaagatgtgatggttttgaaggagcaaatagagcatttgcacagacaatgggaggacctctgcttaagggtggccatacgtaaacaggagattgaagacagactcaatacatgggttgtattcaatgaaaaaaataaagagttgtgtgcctggctggtgcagatggaaaacaaagttctacagacagcggacattagtattgaagaaatgattgaaaagttacagaaggactgcatggaagaaataaacttgtttagtgaaaacaagttacagttaaagcagatgggtgaccagttgatcaaggccagcaacaaatcaagagcagctgagatcgatgacaagctcaacaaaattaacgatcgttggcaacatctttttgatgtcatcggatcaagggtgaagaagctgaaggagacctttgcttttattcagcagttggacaaaaacatgagcaaccttcgcacctggttggctcgaattgagtctgagctttccaagcctgttgtttatgatgtctgcgatgatcaagagatccagaagaggctcgctgagcagcaggatctacagcgagatattgaacaacacagcgcaggggtggagtccgtgtttaacatctgtgacgtcctactgcacgactccgatgcctgtgcaaatgagaccgagtgtgactcgatccagcagaccaccaggagcctggacagacgctggaggaacatttgtgccatgtccatggagcggcgcatgaaaatcgaggagacgtggcgcctgtggcagaagtttttagacgactattctcgctttgaggactggctcaagtcagctgagaggacggcagcctgcccaaattcctcagaggtgttgtacacgagtgccaaagaggaactgaagaggtttgaggcctttcagcggcagattcatgagcggctcactcagctggagctcatcaacaagcagtaccggcggctggcccgggagaaccgcacagacacggccagcaggctgaagcagatggtccacgagggcaaccagcgctgggacaaccttcagaggcgggtcacagccgtcctgcggagactcaggcatttcaccaaccagagggaagaatttgagggcaccagggagagcattctggtgtggctcacagagatggacctgcagctgaccaacgtggagcacttctcagagagtgacgccgatgacaagatgcgccaactgaatggcttccaacaggaaattacattaaataccaacaagattgatcagctcattgtgtttggggagcagctgattcagaagagcgagcccctggatgctgtgctgattgaggatgagctggaggaactccaccgctactgccaggaggtgtttggaagggtctcccggttccaccggcggctcacctcctgcactccgggcttggaagatgaaaaggaggcctctgagaatgaaacagacatggaagaccccagagaaatccagactgattcttggcgtaaacggggagagagcgaggaaccgtcatctcctcagtccctgtgtcatctagtggccccagggcacgagcggtctggctgcgagacccctgtcagcgtggactccatccccctggagtgggaccacacaggcgacgtggggggctcctcctctcacgaagaggacgaggagggcccatactacagcgcactgtcaggtaaatccatttcggatggccactcgtggcatgttcccgacagcccttcctgtcccgagcatcactacaagcaaatggaaggtgacaggaatgttccacctgttccccctgcgtccagcaccccttataaaccaccctatggaaagctactattacctccaggcacggatggtggcaaagaaggcccgcgagtcctgaatggcaacccacagcaggaagacgggggactggccggtatcacagagcagcagtcaggtgccttcgacagatgggagatgattcaagcacaggagcttcacaataagctcaaaataaaacaaaatttgcaacagctgaactctgatatcagcgccatcactacttggctgaaaaaaactgaagcagagctggaaatgttaaagatggcaaagcctccctctgatatccaggaaatagaactgagagtgaagagactgcaggagatactgaaagcctttgacacttacaaggcattagtggtctctgtcaacgtgagcagcaaggaatttctgcaaaccgagagccccgaatccacagagctccaaagtagactccgccagctgagcctgctctgggaagcagcacagggcgcagtggacagctggagagggggcttacgacagtcgctcatgcagtgccaggacttccaccagttgagtcaaaatctgctgctgtggttagcgagtgccaagaaccggaggcagaaggctcatgtcaccgatccaaaggcagacccccgggctctcctagagtgtcggagggaactaatgcaactggaaaaggagctggtagaacgtcaacctcaagtggacatgttacaggagatttcaaacagccttctcattaagggacatggagaagactgtattgaagctgaagaaaaggtgcatgttattgagaagaaactcaaacagttacgggagcaagtgtcccaagatttaatggccttgcagggaacccagaacccagcctcacccctgcccagcttcgacgaggtagactcgggggaccagcctcctgcaacatccgtgccagctccccgagcaaagagttcagagcagtgagaactacagaaggcgaggaggagacagagagcaggtaacggggctttaccgtgacagcagtgcgttcccctgctccacactcccactgactcagtcttgccaatgccactatcaaggtccttgcaaaaatctggttttcttttgtctggaaagggctggttttctcctctgaaactgaaccccaactgttggccctatttaaatctcaggtcttggatttcttacttacataagcaggggcttaggtaatagagtgggttgtgcctgtggagcctcccaatcagctctcaacctcctctgttggcagggtccccggcagcacacggccacagcgctccttcctctcaagggtggtccgggcagccctacccctgcagctgctcctcctgctgctgctgctcctggcctgcctgctgccctcctccgaagaagactacagctgcactcaggccaacaactttgcccggtccttttaccccatgctgaggccaccgagttgattagagggtcactgctccatcgttgcttcaggcaaaagagtctccatcttcattccaaatgaggtgagtgtttgagaggccttttctgcccttaagtagagatgcgggacaagtcaaagttgcagtgaaaggaagtgtggtctgcatttcaaagcttaatattgtgcatgtcaatttttgtctcttcctcaggataagggcctttaagctggtttgctccccatctccagggaggccactgcagcttctttcactcaaagctcagtgtattcccaaaactcttttatgaggtagtctgggttttatatcgtctgcaaatctttcattgcccacatgcaagggacattttcacatgactcttggcactaagataacttcaaatgaatgaattgcttttctccccatctcgcatgcctgacgtgggacaggagcatcaggaggttagccaggcgcatggattgctgctgggaggagatgccgctcttggcaatcacccaaaccaaagcatcggtcacggcgttcagcaagtgagccagcttccggctgctgtcagcatcctgggtcgctgtgaccagagggtacatacctggacaaagaataaaagccagaagtcattgctctgagcaaaggagcagaagtcgtgtgctcagctgttccgtgcgcctgctccgaggtgatctgggttgctttgacagctgcatgtgtggcaggagcttataagcatggtcttacctcccccaggggatcttccctgagagccagccccgtcacagagctagaagagaagcctggcctaatgcagacagactaaattgccacctgaagtgtccaccaggcccataattgtggccttgccgtggcgagtatatctagtctcccgaaatcattacgtggtgtttctcatctgcagcaacagatacagagatggtcagaaggtgagattaattctacttttagccccacggagggctccccatctaaagggagtttaataaacaaaggaatggccaatgtgatgaagcctcc

SEQ ID NO: 735521 - DNA, 23230 bp, Homo sapiens
  misc_feature (6127)..(6127): n is a, c, g, or t
  misc_feature (6702)..(6702): n is a, c, g, or t
  misc_feature (7072)..(7072): n is a, c, g, or t
  misc_feature (7297)..(7297): n is a, c, g, or t
  misc_feature (7404)..(7404): n is a, c, g, or t
  misc_feature (9565)..(9565): n is a, c, g, or t
agcccgcggggtgaaatgacttgctcatggtctggtagctaatcgcagatctgctctctaactcctacttccaagacccaggaatctacgggtgttggagaagacccctcctgaaatcctccagaagagctttttgagggagcttgtggctcctgttcacccagccccggttcacttcttcaactgagatggacatgatataatctccattgagtcaaagaatggcatctagtcctgagcttcccaccgaagatgaacagggttcctggggcatcgacgatctccatatttcattgcaagctgaacaggaagacacccagaagaaagccttcacgtgctggataaactcacagttggccaggcacacttctccctcagttatatccgacctattcacagacattaaaaaggggcatgtcctcctggatctgctagaagtactttctgggcaacagttgcctcgggataaaggatctaataccttccagtgtagaatcaatatagaacatgccttgacattcctaagaaaccgatcaattaagctaataaatattcatgttactgatatcattgatggaaacccatccattatccttggcctaatttggacaattatcctgcactttcatattgagaagcttgcccagactctttcttgcaattacaatcagccttccctggatgatgtgagtgtggttgactcatctcctgcctcaagtcctccagctaagaaatgctctaaagtgcaagcaagatggcaaatgtctgcaagaaaggcccttcttttgtgggctcaggaacaatgcgccacctatgagtctgtcaatgtgaccgattttaagtcaagttggagaaatgggatggcttttttggccatcattcatgccttgcgaccagacctaattgacatgaagagtgtgaagcatagatccaacaaagacaatctgagagaggccttcagaattgcagaacaagaattaaaaatccccagattgctggaaccagaagatgtggatgttgttgatcctgatgaaaagtccatcatgacctatgtggcacagtttctgcagtattccaaagatgcccctgggactggagaggaggctcagggaaaggtgaaagatgctatgggctggttaactctgcaaaaggaaaaactacagaagttgctaaaggattcagagaatgatacctactttaaaaagtataatagcctgctgtcctttatggagtcattcaatgaagaaaaaaagtcctttttggatgtcctgtcaataaaacgggatctggatgagctggacaaggatcatttacagttgagagaagcctgggatggcctcgatcaccagattaatgcatggaaaataaagctaaattatgccttgcccccacccctccatcaaactgaagcttggctccaggaggtagaagagcttatggatgaagatttgtcagcctcccaggatcactctcaagccgtgactctgatacaagagaaaatgactttattcaagagcctgatggatagatttgagcatcattcgaacattctccttacctttgaaaataaggatgaaaatcacttgccattggtaccacctaacaaattggaggaaatgaaaagacgaatcaacaacattttggagaaaaaatttattctacttctagaatttcattactacaagtgcttagttcttggtttggtagatgaagtgaaatcaaaattggatatttggaacattaaatatgggagcagagaatctgtggaattattgctggaagactggcataaatttattgaagaaaaagaattcctagctcgacttgatacttcttttcaaaaatgtggagaaatttataagaatttggctggagaatgtcagaatattaataaacagtatatgatggtgaaatctgatgtttgtatgtatagaaaaaatatatataatgtgaagtccactctacaaaaagtgctggcatgttgggctacttatgtggaaaaccttcgcttactaagggcttgctttgaggagacaaagaaggaagaaattaaagaggtaccctttgagacactagcccagtggaatctagaacacgctactttaaatgaagcaggaaatttcttagtcgaagtcagcaatgatgtggttggatcatctatttctaaagaactgagaaggctgaataaaagatggagaaagttggtttcaaaaactcaacttgaaatgaacctgccactgatgataaaaaaacaggatcagcccacttttgacaattctggaaatattctatctaaagaagagaaagcaactgttgagttttcaacagatatgtcagtagaacttcctgaaaattataatcaaaatataaaggctggagagaaacatgaaaaagaaaatgaagaattcacagggcaactaaaagtggctaaagatgttgaaaaactcattggacaagtggaaatctgggaggcagaagccaaatctgttttggatcaagatgatgtggacacctcaatggaagaatctttgaagcatcttattgccaaaggctctatgtttgatgagcttatggcaagaagtgaagatatgttacaaatggatatacaaaatatttcaagccaggagtcctttcaacatgttctcacaactgggcttcaggcaaagattcaagaagctaaagagaaagtccagatcaatgtggtaaaactcattgcagcgttgaagaacttaactgacgtttcaccagatttggacatcaggctgaagatggaagaatcccagaaggaacttgaatcatatatgatgagggctcagcagttactggggcaaagagagagccccggtgaactcatttcaaaacacaaggaagcactaataatttctaatacaaaaagtctggccaagtatttgaaagctgttgaagaactaaaaaataatgtaactgaggacataaagatgtctttagaagaaaagagtagagatgtctgtgccaaatgggagtctcttcatcatgaactgtctttatatgttcaacaactaaaaatagatattgaaaaaggaaagcttagtgacaatattttaaaacttgaaaagcaaataaataaagaaaagaaacttatccgtagaggaaggaccaagggtctcatcaaagaacatgaggcctgcttttctgaggaaggctgcctgtaccagcttaatcaccacatggaagtcctgagggagctgtgtgaagagctgccttcacagaagagtcaacaagaagtgaagagactactcaaagattatgaacaaaagatagaaagacttctgaaatgtgcttccgagattcatatgacactgcagcccacagcgggaggcacgtcgaaaaacgaggggaccatcaccacatctgagaatagaggaggggatccccacagtgaggcaccatttgcaaaatcagataatcagccatcaactgaaaaggcaatggaacccactatgaagtttagcctggcatcagtgttaaggcctctgcaagaagaaagcattatggaaaaggattacagtgcatctataaatagtttactagagaggtatgatacatacagagatattcttgaacaccacctgcaaaacaacaaattcaggattacttctgatttctctagtgaagaggacaggagtagttcttgtctgcaggctaaactgacagatctacaggtcataaaaaatgaaactgatgctcgctggaaagagtttgaaattatttcattgaagttagaaaatcatgtgaatgacataaaaaagccttttgtaattaaggaaagagacacactaaaggaaagagaaagagagcttcagatgactcttaataccagaatggaatctttagagacagcactgcggcttgtgttacctgtagagaaggcatcacttcttctctgtggctcggacctgcctctccataaaatggccatccagggatttcatctcattgatgctgatcgcatctatcaacacctaaggaatatccaagattccatagcaaaacagattgaaatatgtaaccgcttagaagagccaggcaactttgtattaaaggagttacacccatttgatctacacgcaatgcagaatattatactgaaatacaaaacacaatttgaaggaatgaaccacagggtgcagaggagtgaagatactctcaaagctctggaagactttttggcgtctctcagaacagctaaactctctgctgagcccgttacagacctttcagcctcagatacacaggtggcacaagaaaatacgttgacagtaaaaaataaagagggagaaattcatctgatgaaagacaaggccaaacatttggataaatgtttgaagatgctcgatatgagctttaaagatgctgaacggggtgatgacacctcctgtgaaaacctgcttgatgctttttcaataaagttatctgagacacatggctatggggtacaggaggaattcactgaggaaaacaaattactagaggcttgtattttcaaaaataatgaactccttaaaaatattcaagatgtgcagagtcaaatcagtaaaattggtcttaaggatcctactgttccagctgtgaaacatcggaaaaaatcattaatcagactggataaggttctagatgaatatgaagaagagaagagacatttacaagaaatggctaattctcttccacacttcaaagatggcagagaaaaaaccgtgaatcaacagtgccaaaatacagtagtcttgtgggagaataccaaagccttggtcaccgaatgtcttgaacaatgtgggagagttttggagctcttaaaacaatatcagaattttaaaagcatcttgacaactttgattcaaaaagaagagagtgtcatctccctgcaggcttcgtacatgggaaaggagaacctgaagaaaaggatagcagagattgaaattgtcaaagaagaatttaatgagcatttagaagttgtagacaagataaaccaggtctgcaaaaatctacaattttatctaaataaaatgaaaacttttgaagagcccccttttgaaaaagaggctaatattattgtggatagatggcttgatataaatgagaagacagaagattactatgaaaatcttggtcgagctctagctttgtgggacaaactttttaacttaaaaaatgtcattgatgagtggacagaaaaggcccttcaaaaaatggaattacatcaattgactgaagaggacagagaaaggctgaaggaagaattacaagtccatgaacaaaaaacttcagaattttctagaagagtggctgaaatacagtttttgctccaaagcagtgaaatacctcttgaattgcaggtcatggagtcctctattttgaacaagatggaacatgtacagaagtgcttaacaggagaatccaactgccatgcactcagtggcagcactgctgagctaagggaggatctcgaccaagccaagacccagatcgggatgactgaatccctcttaaaagccctgtctccttctgacagcttggagatcttcactaaactagaggagatacaacagcagattctacagcaaaaacacagtatgatattacttgagaatcaaataggttgtctgactcctgaactctctgaattgaaaaagcaatatgaaagtgtcagtgatttatttaataccaaaaaaagtgttttgcaagatcacttttctaagttattgaatgatcaatgcaagaactttaatgactggttcagcaacattaaagtgaaccttaaggagtgttttgaatcatcagaaacaaaaaagagtgtggaacaaaagctacaaaaactttctgatttcttgactcttgaaggaagaaacagtaaaataaagcaggtggacagcgtactgaagcatgtgaagaagcatctgcccaaagcacatgtgaaggagcttatcagttggctcgtgggtcaggaattcgaattagaaaaaatggagtccatatgccaggctcgagcaaaggagcttgaagactccttgcagcagctactgagactccaggatgaccatagaaacctgaggaagtggttgactaatcaagaagagaaatggaaaggaanggaagaaccaggggagaaaactgagctgttctgccaagctttagctagaaagagggaacagtttgaatctgtggcccaattgaacaactctttgaaggaatatgggtttactgaagaagaagaaataataatggaagcaacatgtttgatggatagataccagacattactgagacaactaagtgaaatcgaggaagaggataagttactacccacagaggaccagagctttaatgatcttgcacatgatgtaattcattggataaaagagattaaagagtcccttatggttttgaattcatccgaaggcaaaatgccacttgaggaaagaatccaaaaaatcaaggaaatcattttgctgaagcctgaaggggatgccagaatagagaccatcatgaagcaggctgagagcagcgaggccccgctggttcagaagaccctcactgacatcagcaaccagtgggacaacacactccatttagctagcacctacctaagccatcaagaaaagcttctactagaaggagagaaatatttacaaagtaaggaggatctgagattaatgctcatagaantaaagaagaaacaggaagcaggctttgctctacaacatggtctgcaggagaagaaagctcagttaaagatttataagaaattcctcaagaaagcccaagatttgacatccttgctaaaggagttaaaatctcagggaaactacctcttggagtgcactaaaaatcccagcttcagtgaagagccttggctggaaataaagcatctacacgaaagtcttcttcaacaactgcaggattctgtgcaaaacttggacggtcacgttcgagaacatgattcataccaggtttgcgtcacagacctgaatactacattggacaatttctccaaggaatttgtcagtttttctgataagcctgtggatcaaatagnggttgaggaaaaattgcagaaactgcaggaactagagaatagactcagtttacaagatggcacattaaagaagattttagctttagcaaaatccgtcaagcaaaatacatcttcagtggggcagaagattattaaagatgatataaaatcacttcagtgtaaacaaaaagatttggaaaacaggcttgcatctgctaagcaggagatggaatgttgtctcaacancattctcaaatcaaaacgctcaacagaaaagaaaggaaagtttactctgccaggcagagagaagcaggccacttctgatgtgcaggagtctactcaggaatcagctncagtggaaaagttggaggaagactgggaaataaacaaggattcagctgtggaaatggctatgtcaaaacaactttctcttaatgctcaagaaagcatgaaaaacactgaagatgagcggaaagtcaatgagctgcaaaatcaacctttagaattagatactatgttaagaaatgaacaattagaagagatagagaaattatatacccagttggaagcaaagaaagcagccattaagccactggaacaaacagaatgtcttaacaaaacagaaactggggccttggttctccacaatataggatattcggcacagcatttggacaatttgcttcaggcacttattactttgaagaaaaacaaagaaagccaatattgtgtcctcagagattttcaggaataccttgctgcagttgaatcttcaatgaaagccttgttgacagacaaggaaagtcttaaagtaggaccactggacagtgtaacgtatctggacaaaattaaaaaattcatagcatccatagaaaaagagaaagattctttaggcaacttgaaaatcaaatgggagaatttatcaaaccacgtgactgacatggataagaaattgttggaaagccagattaagcaacttgaacatggttgggaacaagtggaacagcagattcaaaagaagtattctcagcaggtagtggaatatgatgaatttacaaccctcatgaataaggtacaggacactgagatttctctgcaacagcagcagcaacatctacagttaaggctgaagtctccagaagaacgggcagggaaccaaagcatgattgccttgaccactgacctccaggctaccaagcatggattttctgttttaaaggggcaagctgaacttcagatgaagaggatttggggagaaaaagaaaagaagaatttggaggatggaataaataacttgaagaaacaatgggaaacattggagccattacacttagaagcagaaaatcagattaagaagtgtgacataaggaacaagatgaaagagactatcttatgggccaagaatttgttgggtgaacttaatccctccattccccttctcccagatgacattctttcacagatcagaaagtgcaaagtgacacatgatggcattctagctaggcagcagtctgtggaatcgttggctgaagaggtcaaagataaggttcctagccttacaacctatgagggcggtgatttaaataataccctagaggacttacggaatcaataccaaatgctggttttaaaatcaactcaaagatcacagcaattagaatttaagttggaagaaagaagcaatttttttgctataataaggaagtttcaacttatggttcaagaaagtgaaacactgataattcccagggtggagacagctgccacggaagctgaactaaaacatcaccatgttactttggaggcatctcagaaggaattgcaagaaattgacagtggaatctcaacacatcttcaggagctaacaaacatctatgaggagctgaatgtgtttgaaagattatttctggaagatcagttgaaaaatcttaagattaggaccaacagaatacaaagattcattcagaatacatgtaatgaagtggaacacaaggtaaagttttgcagacaattccatgaaaaaacatcagcgcttcaggaggaggctgacagtatacagcgcaatgaactattacttaatcaagaagtaaataaaggtgttaaagaggagatctataatcttaaagacagactcaccgctattaagtgttgcatcttacaggtattgaaacttaaaaaagtgtttgactatattggactaaactgggatttttcacaacttgaccaattacaaacccaagtatttgaaaaagaaaaggaacttgaagaaaaaattaagcagttggacacatttgaggaagaacatggcaaatatcaggcattattaagtaaaatgagagctattgatttgcaaattaagaaaatgactgaagtagtactaaaagctcctgatagctctccggaaagcagacggctcaatgcccaaattttaagtcagagaattgagaaagccaagtgtttatgtgatgagataataaagaaattaaatgaaaataagacctttgatgactcatncaaggagaaagaaatactacaaataaagctgaatgcagaagaaaatgataagttatacaaagttctccaaaacatggtattagaactctcaccaaaagaattggatgaaaagaattgtcaggacaaactagaaacttccttacatgttttaaatcagataaaatctcaattacagcagccattacttataaatttggaaattaaacatattcaaaatgaaaaggacaattgtgaagcatttcaggagcaagtttgggcagaaatgtgtagtattaaagctgtgactgctattgagaaacaaagagaagaaaactcttctgaagcgagtgatgtggagacaaaactacgtgagtttgaagatcttcagatgcagcttaacacaagcattgatttgcgcacaaatgtcttgaatcatgcttatgaaaatctaacacgctataaagaagcagtcaccagggcagtggagagcatcacttccctcgaagccatcattataccctacagagtagatgttggtaatccagaagaatctttagagatgcctcttcgaaaacaagaggaattggaatccacagtagcacgcatccaggacctcactgagaaactgggaatgatatccagccccgaagccaaactacaacttcagtatactttacaggaactagtttctaagaactcagcaatgaaggaagctttcaaagcacaggaaactgaggcagaaaggtatcttgagaattacaaatgctatagaaaaatggaagaggatatttacactaacctcagcaaaatggagacagttcttggacagtccatgtcctcgttgccactgtcttacagagaagctttagagcgcttggaacagagcaaggccttggtgtcaaatcttatatcaaccaaagaagagttaatgaaactacgacagatccttagactcttgagactcaggtgcacagaaaatgatggcatatgtttgctcaagattgtgtcggctctgtgggagaaatggctgagtttgctggaagctgctaaagagtgggagatgtggtgcgaagaactgaagcaggaatggaaatttgtcagtgaagaaattgaacgagaggcaattattttagataatcttcaggaagaactccctgaaatttccaaaacaaaagaggcagccaccacagaggaactctctgagctgctagactgtttatgccaatatggagagaacgtggagaagcaacagctgttactgactctacttcttcagcgcatcagaagtatccagaatgttcctgaaagctcaggggctgtggaaactgttccagcatttcaagaaattacttctatgaaagaacgatgcaacaagcttcttcagaaagttcagaaaaataaagaattggtgcagactgaaatccaagaaagacattccttcacaaaagagataattgctttgaagaatttctttcaacagaccacaacttcattccaaaatatggcattccaggatcacccagaaaagtcagaacaatttgaggagcttcaaagcatccttaagaaagggaaactaacttttgagaatattatggaaaaactgcgaatcaagtattccgaaatgtacaccatagtccctgcagagattgaatcccaggtggaagaatgcagaaaagctttagaagacatagatgagaagattagcaatgaagtcttaaaaagctcaccatcatatgcaatgaggagaaaaatagaagaaattaacaatgggcttcataatgttgaaaagatgttgcagcagaaaagcaaaaatattgagaaagctcaagaaattcaaaagaaaatgtgggacgagttagatctatggcattccaaactaaatgagctggattctgaagttcaggacattgttgaacaggacccaggacaggctcaagaatggatggataacttgatgattcctttccagcagtatcagcaagtatcacagagagcagagtgtagaacctcacagttgaataaggccacagttaagatggaggaatatagtgaccttctgaagagcactgaggcttggatagaaaataccagtcatttgctggccaatcctgctgactatgactctttgaggacactgagtcaccatgctagcactgtgcagatggctttggaagattcagaacagaagcacaatcttttacattcaatctttatggatctagaagacctgtcaataatttttgaaacagatgaattaacccaatccatacaagagttaagtaatcaagtaacagctttacaacaaaaaataatggaaagccttccacagattcagcgaatggctgatgatgtggttgctattgaatctgaagtaaaatcaatggaaaaaagagtttcaaaaatcaaaactatcctattatcaaaagaaatatttgatttttcacctgaagaacatctcaaacatggggaggtcatacttgaaaatatacgtcccatgaagaaaaccattgctgagatagtgtcttaccaagtggaactgaggttgccccaaacaggaatgaaacctctgcctgtgtttcagcggacaaatcagcttttacaagatataaaactattggaaaatgtgactcaagaacaaaatgagttattaaaggtagtcataaaacagaccaatgaatgggatgaagaaatagaaaatttgaaacagatcttaaataattattcagctcagttctcccttgaacatatgtcaccagaccaagctgacaagctgccacaactacagggagaaatcgaacgtatggagaaacagattctgagtttgaaccagagaaaagaagacctgttggtggacttgaaggccaccgtactaaaccttcaccagcatttgaagcaagaacaagaaggagtagaaagagataggctgccagctgtaacatcagaggaaggtggagtggcagagagggatgcttctgagcggaagttgaacagaagaggctccatgtcttacctggcagcagtcgaggaagaggtggaagaaagttccgtgaagagcgataatggagatgagaaggcagagccatcgcctcagtcttggtcttcactttggaagcatgacaaggacatggaagaagacagagcttcctcatcctctggaacaattgttcaggaagcatatgggaaaataagcacctctgataattccatggcacaaatcctcacaccagactcactaaacactgagcaaggcccagaatgttccctaaggcccaaccaaacagaagagggcaccacacctcctattgaggctgacactctggactcttctgacgcgcaaggaggtttggagcccagggtggagaaaactaggccggagcccacagaagtcctgcatgcctgcaagacccaggtggccgagctggagctgtggctgcaacaagccaacgtggcagttgagccggaaacattaaacgcagacatgcagcaggtgctggaacagcagctggtagggtgccaggctatgctaacagagattgagcacaaggttgcctttctgttagagacttgcaaagatcagggcctgggagataatggagccactcaacatgaggctgaagcgctttccctgaaactgaaaacagtgaagtgcaatttagaaaaagtccagatgatgcttcaggagaagcacagtgaagatcagcatcctaccattctaaagaaatcctcagagccagagcatcaagaagctctccaaccagttaacctttctgaattggaatccattgtaactgaaaggccacaattcagcagacaaaaagatttccagcagcaacaggttctggagttaaaaccaatggaacagaaagatttcatcaaattcatagaatttaatgctaagaaaatgtggccccagtattgccaacatgataacgatacaactcaggaatcatctgcaagcaaccaggcatccagccctgaaaatgacgttccagactcgatcttgtcaccccagggccaaaatggagataagtggcaatatctgcatcatgaactctcatcaaaaataaagctcccactccctcagcttgtggagcctcaggtttccacaaatatgggtattctacccagcgtgactatgtataactttagatacccaacaactgaagaactgaaaacctataccacccaacttgaagacctgcgccaagaagcaagtaaccttcagacacaggaaaatatgacagaagaagcatatatcaatttggataaaaaattgtttgaactattcctgaccctcagtcagtgcctcagcagtgtggaggagatgctggagatgcccagactttacagggaggatggttctggccagcaggtgcactacgagacgctggctcttgagttgaagaaactttatttagcgctaagtgacaagaagggtgatcttttgaaagccatgacttggcctggcgagaacaccaacttgctccttgaatgttttgacaaccttcaagtctgcctggagcacactcaggctgcagctgtctgtagaagcaagtccctgaaagctggcctcgattacaaccgcagttaccagaatgaaataaagagattatatcatcagctcattaagagtaagacatctttacaacagtctttgaatgaaatcagtgggcagagtgttgctgaacagcttcagaaagcagatgcatatacagtggagctggagaacgccgagagccgagtggccaaactaagagatgaaggggagaggcttcatttaccttatgctttactccaggaggtttacaaattagaggatgtacttgacagtatgtggggaatgctaagagccaggtacacagaactcagcagccctttcgtcactgagagccagcaagatgctttgttgcaaggcatggtggaactggtgaagattgggaaggaaaagcttgctcatggccacttaaaacaaaccaaaagtaaagtggcgttacaggctcaaatagaaaatcacaaggtttttttccagaagcttgttgctgacatgttgttgatccaagcatactctgccaaaatacttccttctttattgcaaaacagagagacattttgggcagaacaagtaacagaagttaaaatactagaagaaaagtcacgccaatgtggtatgaagctgcagagtttgttgcagaaatgggaagaatttgatgaaaactatgcatctcttgaaaaggacctggaaattcttatatctacattgccctctgtgagtttggtggaagaaacagaggaaagattagtggaaaggatttcattttaccagcaaataaaaagaaacattggtggaaaacacgcccggctttaccaaactctgaacgaaggcaaacagttggtggcgtctgtgagctgtcctgaattagagggccagatcgcaaaactggaagagcagtggttgtccctgaacaagaaaattgaccatgagctccacaggctgcaagctcttctcaagcatctgctcagttataacagagattcggatcagttaaccaagtggttggaatcttcccagcatactctgaattactggaaagaacagtccctcaatgtgtctcaggacttggatacaatcagaagcaacatcaacaatttttttgagttttcaaaagaagttgatgaaaaatcctccttgaagactgccgttatcagtatcgggaaccagcttcttcacctgaaagaaactgatacagctacactgagagcttctttagcacagtttgaacaaaaatggacaatgctcataactcaacttccagatattcaagaaaaacttcaccagcttcaaatggagaaattgccgtctcgtaaagcaatcacagaaatgattagctggatgaacaatgtggagcatcaaacttcagatgaagactccgtgcattcaccaagttctgcatctcaagttaaacatcttcttcagaagcacaaggagtttagaatggaaatggactataaacagtggatagttgacttcgttaaccagtcattacttcagctaagcacctgtgatgtagaaagcaagcgctatgaaagaacggagtttgcagagcacctgggggagatgaaccgccagtggcaccgtgtacatggaatgctgaatagaaagatacaacatttagaacaacttctagaaagtatcactgagagtgaaaataaaatacagatcttgaacaactggctggaagcacaagaagagagactgaaaactttacaaaaacctgaaagtgtgatctcagtgcagaagctgctcctggactgtcaggatatagaaaatcaacttgcaattaaatccaaagcactagatgagttgaaacaaagttatctgactttggagagtggggcagtgccattgttagaagatacagcatcccgaattgatgagttatttcaaaagagaagcagtgttctcactcaggtcaatcagctcaaaacctccatgcagtcagttttacaggagtggaagatttatgatcaactctatgatgaagtgaatatgatgacaatccgattctggtactgcatggaacacagcaagcctgtggtgttatcattggagaccttgagatgccaggtggagaaccttcagtctctgcaagatgaagctgagagcagtgaagggagttgggagaaactccaggaggttatcggcaaactcaaaggtctctgcccctctgttgctgaaataatcgaagagaaatgccaaaatactcataaaaggtggactcaggtgaaccaagccattgcagaccagttgcagaaggcccagagtctgctccagctctggaaggcctatagcaatgctcatggtgaagctgccgcaaggctgaagcagcaggaagcaaagtttcaacagctcgcaaacatcagcatgtctggaaacaacctggcagagatcctgcccccagccctgcaggacataaaggagctgcagcatgatgtgcagaaaacaaaagaagcctttctccaaaattccagtgtcctggatcgactcccacaacccgcagagtccagcacccacatgctcctcccgggccccctgcactctctccagagggctgcttatttggaaaagatgctgcttgtgaaagcaaatgaatttgagtttgttctctcacagtttaaggattttggagtccggctggaatctttaaaaggtcttattatgcatgaagaagagaatttggatagacttcaccaacaggaaaaagaaaatcctgactcattcctgaatcatgtgctggcactgacagcccaatcacctgatattgaacatttgaatgaagtgagcctcaagctcccacttagtgacgtagctgtgaagacgttacaaaatatgaaccggcaatggattcgggccacggccacggcactggagcgctgcagtgagcttcagggaattggattgaatgaaaagtttctttattgctgtgaaaagtggatccaacttttggagaagatagaagaagcactcaaagtggatgtggctaacagccttcctgagctcctggagcagcagaaaacctataagatgttagaagctgaagtttctataaaccagacaattgctgattcctatgtcacccagtccttacaactcctggacacaacagaaatagagaacagaccagaatttattacagaattctcaaagctgacggatcggtggcagaatgctgtccagggtgttcggcagaggaagggtgacgttgatgggctggtgaggcagtggcaagatttcactacttctgtggagaacttgtttcgcttcctcactgacaccagccacctgctatctgcagtgaagggccaggagcgcttcagcctctaccaaaccagaagtctgatccatgagctgaagaataaagaaattcattttcaaaggaggcgaactacctgtgccctaaccttggaagctggagaaaagttactgctcacaactgacctgaaaactaaagagtctgtgggtaggagaatcagtcaacttcaggacagctggaaagacatggagccccagctggcagagatgattaagcagttccagagcactgtagagacctgggaccagtgtgaaaagaaaatcaaggagttgaaaagcaggctgcaagttttaaaggcacaaagtgaagatcctcttccagagcttcacgaggacctccataacgaaaaagagctgattaaggaactagaacagtctttggctagctggactcagaacttgaaagaacttcaaactatgaaggcggacttaacccggcacgttctcgtggaagatgtgatggttttgaaggagcaaatagagcatttgcacagacaatgggaggacctctgcttaagggtggccatacgtaaacaggagattgaagacagactcaatacatgggttgtattcaatgaaaaaaataaagagttgtgtgcctggctggtgcagatggaaaacaaagttctacagacagcggacattagtattgaagaaatgattgaaaagttacagaaggactgcatggaagaaataaacttgtttagtgaaaacaagttacagttaaagcagatgggtgaccagttgatcaaggccagcaacaaatcaagagcagctgagatcgatgacaagctcaacaaaattaacgatcgttggcaacatctttttgatgtcatcggatcaagggtgaagaagctgaaggagacctttgcttttattcagcagttggacaaaaacatgagcaaccttcgcacctggttggctcgaattgagtctgagctttccaagcctgttgtttatgatgtctgcgatgatcaagagatccagaagaggctcgctgagcagcaggatctacagcgagatattgaacaacacagcgcaggggtggagtccgtgtttaacatctgtgacgtcctactgcacgactccgatgcctgtgcaaatgagaccgagtgtgactcgatccagcagaccaccaggagcctggacagacgctggaggaacatttgtgccatgtccatggagcggcgcatgaaaatcgaggagacgtggcgcctgtggcagaagtttttagacgactattctcgctttgaggactggctcaagtcagctgagaggacggcagcctgcccaaattcctcagaggtgttgtacacgagtgccaaagaggaactgaagaggtttgaggcctttcagcggcagattcatgagcggctcactcagctggagctcatcaacaagcagtaccggcggctggcccgggagaaccgcacagacacggccagcaggctgaagcagatggtccacgagggcaaccagcgctgggacaaccttcagaggcgggtcacagccgtcctgcggagactcaggcatttcaccaaccagagggaagaatttgagggcaccagggagagcattctggtgtggctcacagagatggacctgcagctgaccaacgtggagcacttctcagagagtgacgccgatgacaagatgcgccaactgaatggcttccaacaggaaattacattaaataccaacaagattgatcagctcattgtgtttggggagcagctgattcagaagagcgagcccctggatgctgtgctgattgaggatgagctggaggaactccaccgctactgccaggaggtgtttggaagggtctcccggttccaccggcggctcacctcctgcactccgggcttggaagatgaaaaggaggcctctgagaatgaaacagacatggaagaccccagagaaatccagactgattcttggcgtaaacggggagagagcgaggaaccgtcatctcctcagtccctgtgtcatctagtggccccagggcacgagcggtctggctgcgagacccctgtcagcgtggactccatccccctggagtgggaccacacaggcgacgtggggggctcctcctctcacgaagaggacgaggagggcccatactacagcgcactgtcaggtaaatccatttcggatggccactcgtggcatgttcccgacagcccttcctgtcccgagcatcactacaagcaaatggaaggtgacaggaatgttccacctgttccccctgcgtccagcaccccttataaaccaccctatggaaagctactattacctccaggcacggatggtggcaaagaaggcccgcgagtcctgaatggcaacccacagcaggaagacgggggactggccggtatcacagagcagcagtcaggtgccttcgacagatgggagatgattcaagcacaggagcttcacaataagctcaaaataaaacaaaatttgcaacagctgaactctgatatcagcgccatcactacttggctgaaaaaaactgaagcagagctggaaatgttaaagatggcaaagcctccctctgatatccaggaaatagaactgagagtgaagagactgcaggagatactgaaagcctttgacacttacaaggcattagtggtctctgtcaacgtgagcagcaaggaatttctgcaaaccgagagccccgaatccacagagctccaaagtagactccgccagctgagcctgctctgggaagcagcacagggcgcagtggacagctggagagggggcttacgacagtcgctcatgcagtgccaggacttccaccagttgagtcaaaatctgctgctgtggttagcgagtgccaagaaccggaggcagaaggctcatgtcaccgatccaaaggcagacccccgggctctcctagagtgtcggagggaactaatgcaactggaaaaggagctggtagaacgtcaacctcaagtggacatgttacaggagatttcaaacagccttctcattaagggacatggagaagactgtattgaagctgaagaaaaggtgcatgttattgagaagaaactcaaacagttacgggagcaagtgtcccaagatttaatggccttgcagggaacccagaacccagcctcacccctgcccagcttcgacgaggtagactcgggggaccagcctcctgcaacatccgtgccagctccccgagcaaagagttcagagcagtgagaactacagaaggcgaggaggagacagagagcaggtaacggggctttaccgtgacagcagtgcgttcccctgctccacactcccactgactcagtcttgccaatgccactatcaaggtccttgcaaaaatctggttttcttttgtctggaaagggctggttttctcctctgaaactgaaccccaactgttggccctatttaaatctcaggtcttggatttcttacttacataagcaggggcttaggtaatagagtgggttgtgcctgtggagcctcccaatcagctctcaacctcctctgttggcagggtccccggcagcacacggccacagcgctccttcctctcaagggtggtccgggcagccctacccctgcagctgctcctcctgctgctgctgctcctggcctgcctgctgccctcctccgaagaagactacagctgcactcaggccaacaactttgcccggtccttttaccccatgctgaggccaccgagttgattagagggtcactgctccatcgttgcttcaggcaaaagagtctccatcttcattccaaatgaggtgagtgtttgagaggccttttctgcccttaagtagagatgcgggacaagtcaaagttgcagtgaaaggaagtgtggtctgcatttcaaagcttaatattgtgcatgtcaatttttgtctcttcctcaggataagggcctttaagctggtttgctccccatctccagggaggccactgcagcttctttcactcaaagctcagtgtattcccaaaactcttttatgaggtagtctgggttttatatcgtctgcaaatctttcattgcccacatgcaagggacattttcacatgactcttggcactaagataacttcaaatgaatgaattgcttttctccccatctcgcatgcctgacgtgggacaggagcatcaggaggttagccaggcgcatggattgctgctgggaggagatgccgctcttggcaatcacccaaaccaaagcatcggtcacggcgttcagcaagtgagccagcttccggctgctgtcagcatcctgggtcgctgtgaccagagggtacatacctgtccagaacaagatctggagcaaagatgagcttgccggggtggtcaattgagcgccacatcagccccatcattaacacctccatccaacagctctccaagagccgcacttggtcgaacaggctgagctccacaaagccgggaatcttcttggcccagctgatcatgtgtaccaactccttgtcggccaacttggtcagggacatcatcatggaggcctcggtgaagggcgcactggggcggctgatcagcacatggggcggctcagcctccaggagggtgagcactagctgctcggggctcagggcgtccagcagcagctcccgcactcggggcgcgtggccgccacttctcttggccttgccggcacagtgcagctgctcgtcggcacttctctgtctccgcacaaggcggtacccacatctctctctccgggagccacacttcaccattcccacttcgtaacacttccgaagtcggcaggcctggcagctcttgcgccggtttttatcgattgtacactgatttgtagctggacaaatataatcattatgtccttgaatgcttcttttaaaaaaggccttacatccttcacacgaccagactccatagtgatatcccgatgcgtaatcgctgcagacagcgcagaagtgagcatccctctttgaacctggaccagtaacagggctggcgcaacggttcccactaaccttccttttcagtgtctctctgtttacaggtaaggtgtgttctagcgatcttgcttcacaccagggactcttttgaggttccgcatacagatgtgataactggcgatggaccactaaaggagaaaggtgcccaggtgttggccacaacacatttgggcttgtggtctgccgaccaggcccaccttccaagttagtgacattgctgggaatgctgtaattcatcacagcagggctatagaatgtcatggctggatattcatggtggctgtctacataggaggaaggtatgtatatggagccgtgctccaggggtaagatggattgactgcagttgtaggaggaaggagaattaaggctagatggtgagttttttatatccatgtcttgagataacagctgagaaaacaccttgcaagaagaggcacaaaggtcattataatgttctcaaagattcgtgggcaagtataatggctgtaaagaaacacagaagatattgccaagttagagctacagctgttaactatgaaaatttaaatattttcattaaaaaaatacatacgtttgtatgagattacaaatacatcctgaaaaatatacatgaaaatattaacctcagaggagtgggaatgtgaggcatgaaactcacattttctgcttcattcatctcttcattgcttgtttgtttaatcaagagtttaagcacaagagtttaatcacgaaaatttattataaaatagtctttaaaaccaaaaaacacaggattaaataaaaatgaaagttcttatggaaaaataagca

SEQ ID NO: 735522 - DNA, 23104 bp, Homo sapiens
  misc_feature (6127)..(6127): n is a, c, g, or t
  misc_feature (6702)..(6702): n is a, c, g, or t
  misc_feature (7072)..(7072): n is a, c, g, or t
  misc_feature (7297)..(7297): n is a, c, g, or t
  misc_feature (7404)..(7404): n is a, c, g, or t
  misc_feature (9565)..(9565): n is a, c, g, or t
agcccgcggggtgaaatgacttgctcatggtctggtagctaatcgcagatctgctctctaactcctacttccaagacccaggaatctacgggtgttggagaagacccctcctgaaatcctccagaagagctttttgagggagcttgtggctcctgttcacccagccccggttcacttcttcaactgagatggacatgatataatctccattgagtcaaagaatggcatctagtcctgagcttcccaccgaagatgaacagggttcctggggcatcgacgatctccatatttcattgcaagctgaacaggaagacacccagaagaaagccttcacgtgctggataaactcacagttggccaggcacacttctccctcagttatatccgacctattcacagacattaaaaaggggcatgtcctcctggatctgctagaagtactttctgggcaacagttgcctcgggataaaggatctaataccttccagtgtagaatcaatatagaacatgccttgacattcctaagaaaccgatcaattaagctaataaatattcatgttactgatatcattgatggaaacccatccattatccttggcctaatttggacaattatcctgcactttcatattgagaagcttgcccagactctttcttgcaattacaatcagccttccctggatgatgtgagtgtggttgactcatctcctgcctcaagtcctccagctaagaaatgctctaaagtgcaagcaagatggcaaatgtctgcaagaaaggcccttcttttgtgggctcaggaacaatgcgccacctatgagtctgtcaatgtgaccgattttaagtcaagttggagaaatgggatggcttttttggccatcattcatgccttgcgaccagacctaattgacatgaagagtgtgaagcatagatccaacaaagacaatctgagagaggccttcagaattgcagaacaagaattaaaaatccccagattgctggaaccagaagatgtggatgttgttgatcctgatgaaaagtccatcatgacctatgtggcacagtttctgcagtattccaaagatgcccctgggactggagaggaggctcagggaaaggtgaaagatgctatgggctggttaactctgcaaaaggaaaaactacagaagttgctaaaggattcagagaatgatacctactttaaaaagtataatagcctgctgtcctttatggagtcattcaatgaagaaaaaaagtcctttttggatgtcctgtcaataaaacgggatctggatgagctggacaaggatcatttacagttgagagaagcctgggatggcctcgatcaccagattaatgcatggaaaataaagctaaattatgccttgcccccacccctccatcaaactgaagcttggctccaggaggtagaagagcttatggatgaagatttgtcagcctcccaggatcactctcaagccgtgactctgatacaagagaaaatgactttattcaagagcctgatggatagatttgagcatcattcgaacattctccttacctttgaaaataaggatgaaaatcacttgccattggtaccacctaacaaattggaggaaatgaaaagacgaatcaacaacattttggagaaaaaatttattctacttctagaatttcattactacaagtgcttagttcttggtttggtagatgaagtgaaatcaaaattggatatttggaacattaaatatgggagcagagaatctgtggaattattgctggaagactggcataaatttattgaagaaaaagaattcctagctcgacttgatacttcttttcaaaaatgtggagaaatttataagaatttggctggagaatgtcagaatattaataaacagtatatgatggtgaaatctgatgtttgtatgtatagaaaaaatatatataatgtgaagtccactctacaaaaagtgctggcatgttgggctacttatgtggaaaaccttcgcttactaagggcttgctttgaggagacaaagaaggaagaaattaaagaggtaccctttgagacactagcccagtggaatctagaacacgctactttaaatgaagcaggaaatttcttagtcgaagtcagcaatgatgtggttggatcatctatttctaaagaactgagaaggctgaataaaagatggagaaagttggtttcaaaaactcaacttgaaatgaacctgccactgatgataaaaaaacaggatcagcccacttttgacaattctggaaatattctatctaaagaagagaaagcaactgttgagttttcaacagatatgtcagtagaacttcctgaaaattataatcaaaatataaaggctggagagaaacatgaaaaagaaaatgaagaattcacagggcaactaaaagtggctaaagatgttgaaaaactcattggacaagtggaaatctgggaggcagaagccaaatctgttttggatcaagatgatgtggacacctcaatggaagaatctttgaagcatcttattgccaaaggctctatgtttgatgagcttatggcaagaagtgaagatatgttacaaatggatatacaaaatatttcaagccaggagtcctttcaacatgttctcacaactgggcttcaggcaaagattcaagaagctaaagagaaagtccagatcaatgtggtaaaactcattgcagcgttgaagaacttaactgacgtttcaccagatttggacatcaggctgaagatggaagaatcccagaaggaacttgaatcatatatgatgagggctcagcagttactggggcaaagagagagccccggtgaactcatttcaaaacacaaggaagcactaataatttctaatacaaaaagtctggccaagtatttgaaagctgttgaagaactaaaaaataatgtaactgaggacataaagatgtctttagaagaaaagagtagagatgtctgtgccaaatgggagtctcttcatcatgaactgtctttatatgttcaacaactaaaaatagatattgaaaaaggaaagcttagtgacaatattttaaaacttgaaaagcaaataaataaagaaaagaaacttatccgtagaggaaggaccaagggtctcatcaaagaacatgaggcctgcttttctgaggaaggctgcctgtaccagcttaatcaccacatggaagtcctgagggagctgtgtgaagagctgccttcacagaagagtcaacaagaagtgaagagactactcaaagattatgaacaaaagatagaaagacttctgaaatgtgcttccgagattcatatgacactgcagcccacagcgggaggcacgtcgaaaaacgaggggaccatcaccacatctgagaatagaggaggggatccccacagtgaggcaccatttgcaaaatcagataatcagccatcaactgaaaaggcaatggaacccactatgaagtttagcctggcatcagtgttaaggcctctgcaagaagaaagcattatggaaaaggattacagtgcatctataaatagtttactagagaggtatgatacatacagagatattcttgaacaccacctgcaaaacaacaaattcaggattacttctgatttctctagtgaagaggacaggagtagttcttgtctgcaggctaaactgacagatctacaggtcataaaaaatgaaactgatgctcgctggaaagagtttgaaattatttcattgaagttagaaaatcatgtgaatgacataaaaaagccttttgtaattaaggaaagagacacactaaaggaaagagaaagagagcttcagatgactcttaataccagaatggaatctttagagacagcactgcggcttgtgttacctgtagagaaggcatcacttcttctctgtggctcggacctgcctctccataaaatggccatccagggatttcatctcattgatgctgatcgcatctatcaacacctaaggaatatccaagattccatagcaaaacagattgaaatatgtaaccgcttagaagagccaggcaactttgtattaaaggagttacacccatttgatctacacgcaatgcagaatattatactgaaatacaaaacacaatttgaaggaatgaaccacagggtgcagaggagtgaagatactctcaaagctctggaagactttttggcgtctctcagaacagctaaactctctgctgagcccgttacagacctttcagcctcagatacacaggtggcacaagaaaatacgttgacagtaaaaaataaagagggagaaattcatctgatgaaagacaaggccaaacatttggataaatgtttgaagatgctcgatatgagctttaaagatgctgaacggggtgatgacacctcctgtgaaaacctgcttgatgctttttcaataaagttatctgagacacatggctatggggtacaggaggaattcactgaggaaaacaaattactagaggcttgtattttcaaaaataatgaactccttaaaaatattcaagatgtgcagagtcaaatcagtaaaattggtcttaaggatcctactgttccagctgtgaaacatcggaaaaaatcattaatcagactggataaggttctagatgaatatgaagaagagaagagacatttacaagaaatggctaattctcttccacacttcaaagatggcagagaaaaaaccgtgaatcaacagtgccaaaatacagtagtcttgtgggagaataccaaagccttggtcaccgaatgtcttgaacaatgtgggagagttttggagctcttaaaacaatatcagaattttaaaagcatcttgacaactttgattcaaaaagaagagagtgtcatctccctgcaggcttcgtacatgggaaaggagaacctgaagaaaaggatagcagagattgaaattgtcaaagaagaatttaatgagcatttagaagttgtagacaagataaaccaggtctgcaaaaatctacaattttatctaaataaaatgaaaacttttgaagagcccccttttgaaaaagaggctaatattattgtggatagatggcttgatataaatgagaagacagaagattactatgaaaatcttggtcgagctctagctttgtgggacaaactttttaacttaaaaaatgtcattgatgagtggacagaaaaggcccttcaaaaaatggaattacatcaattgactgaagaggacagagaaaggctgaaggaagaattacaagtccatgaacaaaaaacttcagaattttctagaagagtggctgaaatacagtttttgctccaaagcagtgaaatacctcttgaattgcaggtcatggagtcctctattttgaacaagatggaacatgtacagaagtgcttaacaggagaatccaactgccatgcactcagtggcagcactgctgagctaagggaggatctcgaccaagccaagacccagatcgggatgactgaatccctcttaaaagccctgtctccttctgacagcttggagatcttcactaaactagaggagatacaacagcagattctacagcaaaaacacagtatgatattacttgagaatcaaataggttgtctgactcctgaactctctgaattgaaaaagcaatatgaaagtgtcagtgatttatttaataccaaaaaaagtgttttgcaagatcacttttctaagttattgaatgatcaatgcaagaactttaatgactggttcagcaacattaaagtgaaccttaaggagtgttttgaatcatcagaaacaaaaaagagtgtggaacaaaagctacaaaaactttctgatttcttgactcttgaaggaagaaacagtaaaataaagcaggtggacagcgtactgaagcatgtgaagaagcatctgcccaaagcacatgtgaaggagcttatcagttggctcgtgggtcaggaattcgaattagaaaaaatggagtccatatgccaggctcgagcaaaggagcttgaagactccttgcagcagctactgagactccaggatgaccatagaaacctgaggaagtggttgactaatcaagaagagaaatggaaaggaanggaagaaccaggggagaaaactgagctgttctgccaagctttagctagaaagagggaacagtttgaatctgtggcccaattgaacaactctttgaaggaatatgggtttactgaagaagaagaaataataatggaagcaacatgtttgatggatagataccagacattactgagacaactaagtgaaatcgaggaagaggataagttactacccacagaggaccagagctttaatgatcttgcacatgatgtaattcattggataaaagagattaaagagtcccttatggttttgaattcatccgaaggcaaaatgccacttgaggaaagaatccaaaaaatcaaggaaatcattttgctgaagcctgaaggggatgccagaatagagaccatcatgaagcaggctgagagcagcgaggccccgctggttcagaagaccctcactgacatcagcaaccagtgggacaacacactccatttagctagcacctacctaagccatcaagaaaagcttctactagaaggagagaaatatttacaaagtaaggaggatctgagattaatgctcatagaantaaagaagaaacaggaagcaggctttgctctacaacatggtctgcaggagaagaaagctcagttaaagatttataagaaattcctcaagaaagcccaagatttgacatccttgctaaaggagttaaaatctcagggaaactacctcttggagtgcactaaaaatcccagcttcagtgaagagccttggctggaaataaagcatctacacgaaagtcttcttcaacaactgcaggattctgtgcaaaacttggacggtcacgttcgagaacatgattcataccaggtttgcgtcacagacctgaatactacattggacaatttctccaaggaatttgtcagtttttctgataagcctgtggatcaaatagnggttgaggaaaaattgcagaaactgcaggaactagagaatagactcagtttacaagatggcacattaaagaagattttagctttagcaaaatccgtcaagcaaaatacatcttcagtggggcagaagattattaaagatgatataaaatcacttcagtgtaaacaaaaagatttggaaaacaggcttgcatctgctaagcaggagatggaatgttgtctcaacancattctcaaatcaaaacgctcaacagaaaagaaaggaaagtttactctgccaggcagagagaagcaggccacttctgatgtgcaggagtctactcaggaatcagctncagtggaaaagttggaggaagactgggaaataaacaaggattcagctgtggaaatggctatgtcaaaacaactttctcttaatgctcaagaaagcatgaaaaacactgaagatgagcggaaagtcaatgagctgcaaaatcaacctttagaattagatactatgttaagaaatgaacaattagaagagatagagaaattatatacccagttggaagcaaagaaagcagccattaagccactggaacaaacagaatgtcttaacaaaacagaaactggggccttggttctccacaatataggatattcggcacagcatttggacaatttgcttcaggcacttattactttgaagaaaaacaaagaaagccaatattgtgtcctcagagattttcaggaataccttgctgcagttgaatcttcaatgaaagccttgttgacagacaaggaaagtcttaaagtaggaccactggacagtgtaacgtatctggacaaaattaaaaaattcatagcatccatagaaaaagagaaagattctttaggcaacttgaaaatcaaatgggagaatttatcaaaccacgtgactgacatggataagaaattgttggaaagccagattaagcaacttgaacatggttgggaacaagtggaacagcagattcaaaagaagtattctcagcaggtagtggaatatgatgaatttacaaccctcatgaataaggtacaggacactgagatttctctgcaacagcagcagcaacatctacagttaaggctgaagtctccagaagaacgggcagggaaccaaagcatgattgccttgaccactgacctccaggctaccaagcatggattttctgttttaaaggggcaagctgaacttcagatgaagaggatttggggagaaaaagaaaagaagaatttggaggatggaataaataacttgaagaaacaatgggaaacattggagccattacacttagaagcagaaaatcagattaagaagtgtgacataaggaacaagatgaaagagactatcttatgggccaagaatttgttgggtgaacttaatccctccattccccttctcccagatgacattctttcacagatcagaaagtgcaaagtgacacatgatggcattctagctaggcagcagtctgtggaatcgttggctgaagaggtcaaagataaggttcctagccttacaacctatgagggcggtgatttaaataataccctagaggacttacggaatcaataccaaatgctggttttaaaatcaactcaaagatcacagcaattagaatttaagttggaagaaagaagcaatttttttgctataataaggaagtttcaacttatggttcaagaaagtgaaacactgataattcccagggtggagacagctgccacggaagctgaactaaaacatcaccatgttactttggaggcatctcagaaggaattgcaagaaattgacagtggaatctcaacacatcttcaggagctaacaaacatctatgaggagctgaatgtgtttgaaagattatttctggaagatcagttgaaaaatcttaagattaggaccaacagaatacaaagattcattcagaatacatgtaatgaagtggaacacaaggtaaagttttgcagacaattccatgaaaaaacatcagcgcttcaggaggaggctgacagtatacagcgcaatgaactattacttaatcaagaagtaaataaaggtgttaaagaggagatctataatcttaaagacagactcaccgctattaagtgttgcatcttacaggtattgaaacttaaaaaagtgtttgactatattggactaaactgggatttttcacaacttgaccaattacaaacccaagtatttgaaaaagaaaaggaacttgaagaaaaaattaagcagttggacacatttgaggaagaacatggcaaatatcaggcattattaagtaaaatgagagctattgatttgcaaattaagaaaatgactgaagtagtactaaaagctcctgatagctctccggaaagcagacggctcaatgcccaaattttaagtcagagaattgagaaagccaagtgtttatgtgatgagataataaagaaattaaatgaaaataagacctttgatgactcatncaaggagaaagaaatactacaaataaagctgaatgcagaagaaaatgataagttatacaaagttctccaaaacatggtattagaactctcaccaaaagaattggatgaaaagaattgtcaggacaaactagaaacttccttacatgttttaaatcagataaaatctcaattacagcagccattacttataaatttggaaattaaacatattcaaaatgaaaaggacaattgtgaagcatttcaggagcaagtttgggcagaaatgtgtagtattaaagctgtgactgctattgagaaacaaagagaagaaaactcttctgaagcgagtgatgtggagacaaaactacgtgagtttgaagatcttcagatgcagcttaacacaagcattgatttgcgcacaaatgtcttgaatcatgcttatgaaaatctaacacgctataaagaagcagtcaccagggcagtggagagcatcacttccctcgaagccatcattataccctacagagtagatgttggtaatccagaagaatctttagagatgcctcttcgaaaacaagaggaattggaatccacagtagcacgcatccaggacctcactgagaaactgggaatgatatccagccccgaagccaaactacaacttcagtatactttacaggaactagtttctaagaactcagcaatgaaggaagctttcaaagcacaggaaactgaggcagaaaggtatcttgagaattacaaatgctatagaaaaatggaagaggatatttacactaacctcagcaaaatggagacagttcttggacagtccatgtcctcgttgccactgtcttacagagaagctttagagcgcttggaacagagcaaggccttggtgtcaaatcttatatcaaccaaagaagagttaatgaaactacgacagatccttagactcttgagactcaggtgcacagaaaatgatggcatatgtttgctcaagattgtgtcggctctgtgggagaaatggctgagtttgctggaagctgctaaagagtgggagatgtggtgcgaagaactgaagcaggaatggaaatttgtcagtgaagaaattgaacgagaggcaattattttagataatcttcaggaagaactccctgaaatttccaaaacaaaagaggcagccaccacagaggaactctctgagctgctagactgtttatgccaatatggagagaacgtggagaagcaacagctgttactgactctacttcttcagcgcatcagaagtatccagaatgttcctgaaagctcaggggctgtggaaactgttccagcatttcaagaaattacttctatgaaagaacgatgcaacaagcttcttcagaaagttcagaaaaataaagaattggtgcagactgaaatccaagaaagacattccttcacaaaagagataattgctttgaagaatttctttcaacagaccacaacttcattccaaaatatggcattccaggatcacccagaaaagtcagaacaatttgaggagcttcaaagcatccttaagaaagggaaactaacttttgagaatattatggaaaaactgcgaatcaagtattccgaaatgtacaccatagtccctgcagagattgaatcccaggtggaagaatgcagaaaagctttagaagacatagatgagaagattagcaatgaagtcttaaaaagctcaccatcatatgcaatgaggagaaaaatagaagaaattaacaatgggcttcataatgttgaaaagatgttgcagcagaaaagcaaaaatattgagaaagctcaagaaattcaaaagaaaatgtgggacgagttagatctatggcattccaaactaaatgagctggattctgaagttcaggacattgttgaacaggacccaggacaggctcaagaatggatggataacttgatgattcctttccagcagtatcagcaagtatcacagagagcagagtgtagaacctcacagttgaataaggccacagttaagatggaggaatatagtgaccttctgaagagcactgaggcttggatagaaaataccagtcatttgctggccaatcctgctgactatgactctttgaggacactgagtcaccatgctagcactgtgcagatggctttggaagattcagaacagaagcacaatcttttacattcaatctttatggatctagaagacctgtcaataatttttgaaacagatgaattaacccaatccatacaagagttaagtaatcaagtaacagctttacaacaaaaaataatggaaagccttccacagattcagcgaatggctgatgatgtggttgctattgaatctgaagtaaaatcaatggaaaaaagagtttcaaaaatcaaaactatcctattatcaaaagaaatatttgatttttcacctgaagaacatctcaaacatggggaggtcatacttgaaaatatacgtcccatgaagaaaaccattgctgagatagtgtcttaccaagtggaactgaggttgccccaaacaggaatgaaacctctgcctgtgtttcagcggacaaatcagcttttacaagatataaaactattggaaaatgtgactcaagaacaaaatgagttattaaaggtagtcataaaacagaccaatgaatgggatgaagaaatagaaaatttgaaacagatcttaaataattattcagctcagttctcccttgaacatatgtcaccagaccaagctgacaagctgccacaactacagggagaaatcgaacgtatggagaaacagattctgagtttgaaccagagaaaagaagacctgttggtggacttgaaggccaccgtactaaaccttcaccagcatttgaagcaagaacaagaaggagtagaaagagataggctgccagctgtaacatcagaggaaggtggagtggcagagagggatgcttctgagcggaagttgaacagaagaggctccatgtcttacctggcagcagtcgaggaagaggtggaagaaagttccgtgaagagcgataatggagatgagaaggcagagccatcgcctcagtcttggtcttcactttggaagcatgacaaggacatggaagaagacagagcttcctcatcctctggaacaattgttcaggaagcatatgggaaaataagcacctctgataattccatggcacaaatcctcacaccagactcactaaacactgagcaaggcccagaatgttccctaaggcccaaccaaacagaagagggcaccacacctcctattgaggctgacactctggactcttctgacgcgcaaggaggtttggagcccagggtggagaaaactaggccggagcccacagaagtcctgcatgcctgcaagacccaggtggccgagctggagctgtggctgcaacaagccaacgtggcagttgagccggaaacattaaacgcagacatgcagcaggtgctggaacagcagctggtagggtgccaggctatgctaacagagattgagcacaaggttgcctttctgttagagacttgcaaagatcagggcctgggagataatggagccactcaacatgaggctgaagcgctttccctgaaactgaaaacagtgaagtgcaatttagaaaaagtccagatgatgcttcaggagaagcacagtgaagatcagcatcctaccattctaaagaaatcctcagagccagagcatcaagaagctctccaaccagttaacctttctgaattggaatccattgtaactgaaaggccacaattcagcagacaaaaagatttccagcagcaacaggttctggagttaaaaccaatggaacagaaagatttcatcaaattcatagaatttaatgctaagaaaatgtggccccagtattgccaacatgataacgatacaactcaggaatcatctgcaagcaaccaggcatccagccctgaaaatgacgttccagactcgatcttgtcaccccagggccaaaatggagataagtggcaatatctgcatcatgaactctcatcaaaaataaagctcccactccctcagcttgtggagcctcaggtttccacaaatatgggtattctacccagcgtgactatgtataactttagatacccaacaactgaagaactgaaaacctataccacccaacttgaagacctgcgccaagaagcaagtaaccttcagacacaggaaaatatgacagaagaagcatatatcaatttggataaaaaattgtttgaactattcctgaccctcagtcagtgcctcagcagtgtggaggagatgctggagatgcccagactttacagggaggatggttctggccagcaggtgcactacgagacgctggctcttgagttgaagaaactttatttagcgctaagtgacaagaagggtgatcttttgaaagccatgacttggcctggcgagaacaccaacttgctccttgaatgttttgacaaccttcaagtctgcctggagcacactcaggctgcagctgtctgtagaagcaagtccctgaaagctggcctcgattacaaccgcagttaccagaatgaaataaagagattatatcatcagctcattaagagtaagacatctttacaacagtctttgaatgaaatcagtgggcagagtgttgctgaacagcttcagaaagcagatgcatatacagtggagctggagaacgccgagagccgagtggccaaactaagagatgaaggggagaggcttcatttaccttatgctttactccaggaggtttacaaattagaggatgtacttgacagtatgtggggaatgctaagagccaggtacacagaactcagcagccctttcgtcactgagagccagcaagatgctttgttgcaaggcatggtggaactggtgaagattgggaaggaaaagcttgctcatggccacttaaaacaaaccaaaagtaaagtggcgttacaggctcaaatagaaaatcacaaggtttttttccagaagcttgttgctgacatgttgttgatccaagcatactctgccaaaatacttccttctttattgcaaaacagagagacattttgggcagaacaagtaacagaagttaaaatactagaagaaaagtcacgccaatgtggtatgaagctgcagagtttgttgcagaaatgggaagaatttgatgaaaactatgcatctcttgaaaaggacctggaaattcttatatctacattgccctctgtgagtttggtggaagaaacagaggaaagattagtggaaaggatttcattttaccagcaaataaaaagaaacattggtggaaaacacgcccggctttaccaaactctgaacgaaggcaaacagttggtggcgtctgtgagctgtcctgaattagagggccagatcgcaaaactggaagagcagtggttgtccctgaacaagaaaattgaccatgagctccacaggctgcaagctcttctcaagcatctgctcagttataacagagattcggatcagttaaccaagtggttggaatcttcccagcatactctgaattactggaaagaacagtccctcaatgtgtctcaggacttggatacaatcagaagcaacatcaacaatttttttgagttttcaaaagaagttgatgaaaaatcctccttgaagactgccgttatcagtatcgggaaccagcttcttcacctgaaagaaactgatacagctacactgagagcttctttagcacagtttgaacaaaaatggacaatgctcataactcaacttccagatattcaagaaaaacttcaccagcttcaaatggagaaattgccgtctcgtaaagcaatcacagaaatgattagctggatgaacaatgtggagcatcaaacttcagatgaagactccgtgcattcaccaagttctgcatctcaagttaaacatcttcttcagaagcacaaggagtttagaatggaaatggactataaacagtggatagttgacttcgttaaccagtcattacttcagctaagcacctgtgatgtagaaagcaagcgctatgaaagaacggagtttgcagagcacctgggggagatgaaccgccagtggcaccgtgtacatggaatgctgaatagaaagatacaacatttagaacaacttctagaaagtatcactgagagtgaaaataaaatacagatcttgaacaactggctggaagcacaagaagagagactgaaaactttacaaaaacctgaaagtgtgatctcagtgcagaagctgctcctggactgtcaggatatagaaaatcaacttgcaattaaatccaaagcactagatgagttgaaacaaagttatctgactttggagagtggggcagtgccattgttagaagatacagcatcccgaattgatgagttatttcaaaagagaagcagtgttctcactcaggtcaatcagctcaaaacctccatgcagtcagttttacaggagtggaagatttatgatcaactctatgatgaagtgaatatgatgacaatccgattctggtactgcatggaacacagcaagcctgtggtgttatcattggagaccttgagatgccaggtggagaaccttcagtctctgcaagatgaagctgagagcagtgaagggagttgggagaaactccaggaggttatcggcaaactcaaaggtctctgcccctctgttgctgaaataatcgaagagaaatgccaaaatactcataaaaggtggactcaggtgaaccaagccattgcagaccagttgcagaaggcccagagtctgctccagctctggaaggcctatagcaatgctcatggtgaagctgccgcaaggctgaagcagcaggaagcaaagtttcaacagctcgcaaacatcagcatgtctggaaacaacctggcagagatcctgcccccagccctgcaggacataaaggagctgcagcatgatgtgcagaaaacaaaagaagcctttctccaaaattccagtgtcctggatcgactcccacaacccgcagagtccagcacccacatgctcctcccgggccccctgcactctctccagagggctgcttatttggaaaagatgctgcttgtgaaagcaaatgaatttgagtttgttctctcacagtttaaggattttggagtccggctggaatctttaaaaggtcttattatgcatgaagaagagaatttggatagacttcaccaacaggaaaaagaaaatcctgactcattcctgaatcatgtgctggcactgacagcccaatcacctgatattgaacatttgaatgaagtgagcctcaagctcccacttagtgacgtagctgtgaagacgttacaaaatatgaaccggcaatggattcgggccacggccacggcactggagcgctgcagtgagcttcagggaattggattgaatgaaaagtttctttattgctgtgaaaagtggatccaacttttggagaagatagaagaagcactcaaagtggatgtggctaacagccttcctgagctcctggagcagcagaaaacctataagatgttagaagctgaagtttctataaaccagacaattgctgattcctatgtcacccagtccttacaactcctggacacaacagaaatagagaacagaccagaatttattacagaattctcaaagctgacggatcggtggcagaatgctgtccagggtgttcggcagaggaagggtgacgttgatgggctggtgaggcagtggcaagatttcactacttctgtggagaacttgtttcgcttcctcactgacaccagccacctgctatctgcagtgaagggccaggagcgcttcagcctctaccaaaccagaagtctgatccatgagctgaagaataaagaaattcattttcaaaggaggcgaactacctgtgccctaaccttggaagctggagaaaagttactgctcacaactgacctgaaaactaaagagtctgtgggtaggagaatcagtcaacttcaggacagctggaaagacatggagccccagctggcagagatgattaagcagttccagagcactgtagagacctgggaccagtgtgaaaagaaaatcaaggagttgaaaagcaggctgcaagttttaaaggcacaaagtgaagatcctcttccagagcttcacgaggacctccataacgaaaaagagctgattaaggaactagaacagtctttggctagctggactcagaacttgaaagaacttcaaactatgaaggcggacttaacccggcacgttctcgtggaagatgtgatggttttgaaggagcaaatagagcatttgcacagacaatgggaggacctctgcttaagggtggccatacgtaaacaggagattgaagacagactcaatacatgggttgtattcaatgaaaaaaataaagagttgtgtgcctggctggtgcagatggaaaacaaagttctacagacagcggacattagtattgaagaaatgattgaaaagttacagaaggactgcatggaagaaataaacttgtttagtgaaaacaagttacagttaaagcagatgggtgaccagttgatcaaggccagcaacaaatcaagagcagctgagatcgatgacaagctcaacaaaattaacgatcgttggcaacatctttttgatgtcatcggatcaagggtgaagaagctgaaggagacctttgcttttattcagcagttggacaaaaacatgagcaaccttcgcacctggttggctcgaattgagtctgagctttccaagcctgttgtttatgatgtctgcgatgatcaagagatccagaagaggctcgctgagcagcaggatctacagcgagatattgaacaacacagcgcaggggtggagtccgtgtttaacatctgtgacgtcctactgcacgactccgatgcctgtgcaaatgagaccgagtgtgactcgatccagcagaccaccaggagcctggacagacgctggaggaacatttgtgccatgtccatggagcggcgcatgaaaatcgaggagacgtggcgcctgtggcagaagtttttagacgactattctcgctttgaggactggctcaagtcagctgagaggacggcagcctgcccaaattcctcagaggtgttgtacacgagtgccaaagaggaactgaagaggtttgaggcctttcagcggcagattcatgagcggctcactcagctggagctcatcaacaagcagtaccggcggctggcccgggagaaccgcacagacacggccagcaggctgaagcagatggtccacgagggcaaccagcgctgggacaaccttcagaggcgggtcacagccgtcctgcggagactcaggcatttcaccaaccagagggaagaatttgagggcaccagggagagcattctggtgtggctcacagagatggacctgcagctgaccaacgtggagcacttctcagagagtgacgccgatgacaagatgcgccaactgaatggcttccaacaggaaattacattaaataccaacaagattgatcagctcattgtgtttggggagcagctgattcagaagagcgagcccctggatgctgtgctgattgaggatgagctggaggaactccaccgctactgccaggaggtgtttggaagggtctcccggttccaccggcggctcacctcctgcactccgggcttggaagatgaaaaggaggcctctgagaatgaaacagacatggaagaccccagagaaatccagactgattcttggcgtaaacggggagagagcgaggaaccgtcatctcctcagtccctgtgtcatctagtggccccagggcacgagcggtctggctgcgagacccctgtcagcgtggactccatccccctggagtgggaccacacaggcgacgtggggggctcctcctctcacgaagaggacgaggagggcccatactacagcgcactgtcaggtaaatccatttcggatggccactcgtggcatgttcccgacagcccttcctgtcccgagcatcactacaagcaaatggaaggtgacaggaatgttccacctgttccccctgcgtccagcaccccttataaaccaccctatggaaagctactattacctccaggcacggatggtggcaaagaaggcccgcgagtcctgaatggcaacccacagcaggaagacgggggactggccggtatcacagagcagcagtcaggtgccttcgacagatgggagatgattcaagcacaggagcttcacaataagctcaaaataaaacaaaatttgcaacagctgaactctgatatcagcgccatcactacttggctgaaaaaaactgaagcagagctggaaatgttaaagatggcaaagcctccctctgatatccaggaaatagaactgagagtgaagagactgcaggagatactgaaagcctttgacacttacaaggcattagtggtctctgtcaacgtgagcagcaaggaatttctgcaaaccgagagccccgaatccacagagctccaaagtagactccgccagctgagcctgctctgggaagcagcacagggcgcagtggacagctggagagggggcttacgacagtcgctcatgcagtgccaggacttccaccagttgagtcaaaatctgctgctgtggttagcgagtgccaagaaccggaggcagaaggctcatgtcaccgatccaaaggcagacccccgggctctcctagagtgtcggagggaactaatgcaactggaaaaggagctggtagaacgtcaacctcaagtggacatgttacaggagatttcaaacagccttctcattaagggacatggagaagactgtattgaagctgaagaaaaggtgcatgttattgagaagaaactcaaacagttacgggagcaagtgtcccaagatttaatggccttgcagggaacccagaacccagcctcacccctgcccagcttcgacgaggtagactcgggggaccagcctcctgcaacatccgtgccagctccccgagcaaagagttcagagcagtgagaactacagaaggcgaggaggagacagagagcaggtaacggggctttaccgtgacagcagtgcgttcccctgctccacactcccactgactcagtcttgccaatgccactatcaaggtccttgcaaaaatctggttttcttttgtctggaaagggctggttttctcctctgaaactgaaccccaactgttggccctatttaaatctcaggtcttggatttcttacttacataagcaggggcttaggtaatagagtgggttgtgcctgtggagcctcccaatcagctctcaacctcctctgttggcagggtccccggcagcacacggccacagcgctccttcctctcaagggtggtccgggcagccctacccctgcagctgctcctcctgctgctgctgctcctggcctgcctgctgccctcctccgaagaagactacagctgcactcaggccaacaactttgcccggtccttttaccccatgctgaggccaccgagttgattagagggtcactgctccatcgttgcttcaggcaaaagagtctccatcttcattccaaatgaggtgagtgtttgagaggccttttctgcccttaagtagagatgcgggacaagtcaaagttgcagtgaaaggaagtgtggtctgcatttcaaagcttaatattgtgcatgtcaatttttgtctcttcctcaggataagggcctttaagctggtttgctccccatctccagggaggccactgcagcttctttcactcaaagctcagtgtattcccaaaactcttttatgaggtagtctgggttttatatcgtctgcaaatctttcattgcccacatgcaagggacattttcacatgactcttggcactaagataacttcaaatgaatgaattgcttttctccccatctcgcatgcctgacgtgggacaggagcatcaggaggttagccaggcgcatggattgctgctgggaggagatgccgctcttggcaatcacccaaaccaaagcatcggtcacggcgttcagcaagtgagccagcttccggctgctgtcagcatcctgggtcgctgtgaccagagggtacatacctgtccagaacaagatctggagcaaagatgagcttgccggggtggtcaattgagcgccacatcagccccatcattaacacctccatccaacagctctccaagagccgcacttggtcgaacaggctgagctccacaaagccgggaatcttcttggcccagctgatcatgtgtaccaactccttgtcggccaacttggtcagggacatcatcatggaggcctcggtgaagggcgcactggggcggctgatcagcacatggggcggctcagcctccaggagggtgagcactagctgctcggggctcagggcgtccagcagcagctcccgcactcggggcgcgtggccgccacttctcttggccttgccggcacagtgcagctgctcgtcggcacttctctgtctccgcacaaggcggtacccacatctctctctccgggagccacacttcaccattcccacttcgtaacacttccgaagtcggcaggcctggcagctcttgcgccggtttttatcgattgtacactgatttgtagctggacaaatataatcattatgtccttgaatgcttcttttaaaaaaggccttacatccttcacacgaccagactccatagtgatatcccgatgcgtaatcgctgcagacagcgcagaagtgagcatccctctttgaacctggaccagtaacagggctggcgcaacggttcccactaaccttccttttcagtgtctctctgtttacaggtaaggtgtgttctagcgatcttgcttcacaccagggactcttttgaggttccgcatacagatgtgataactggcgatggaccactaaaggagaaaggtgcccaggtgttggccacaacacatttgggcttgtggtctgccgaccaggcccaccttccaagttagtgacattgctgggaatgctgtaattcatcacagcagggctatagaatgtcatggctggatattcatggtggctgtctacataggaggaaggtatgtatatggagccgtgctccaggggtaagatggattgactgcagttgtaggaggaaggagaattaaggctagatggtgagttttttatatccatgtcttgagataacagctgagaaaacaccttgcaagaagaggcacaaaggtcattataatgttctcaaagattcgtgggcaagtataatggcttcagaaccatattgggatgactgtaacctgagcgcggttcctccagcagagcaagcacattcatcggactcagtaactcaaggggccagtcctctccagcatcccagctgccgccgccctgtcaggcttcccaggcaatcgcccatcttattccttctccagtgtggacgcctacgaggagggagcgtcccctctcgct

SEQ ID NO: 735523 - DNA, 22814 bp, Homo sapiens
  misc_feature (6127)..(6127): n is a, c, g, or t
  misc_feature (6702)..(6702): n is a, c, g, or t
  misc_feature (7072)..(7072): n is a, c, g, or t
  misc_feature (7297)..(7297): n is a, c, g, or t
  misc_feature (7404)..(7404): n is a, c, g, or t
  misc_feature (9565)..(9565): n is a, c, g, or t
agcccgcggggtgaaatgacttgctcatggtctggtagctaatcgcagatctgctctctaactcctacttccaagacccaggaatctacgggtgttggagaagacccctcctgaaatcctccagaagagctttttgagggagcttgtggctcctgttcacccagccccggttcacttcttcaactgagatggacatgatataatctccattgagtcaaagaatggcatctagtcctgagcttcccaccgaagatgaacagggttcctggggcatcgacgatctccatatttcattgcaagctgaacaggaagacacccagaagaaagccttcacgtgctggataaactcacagttggccaggcacacttctccctcagttatatccgacctattcacagacattaaaaaggggcatgtcctcctggatctgctagaagtactttctgggcaacagttgcctcgggataaaggatctaataccttccagtgtagaatcaatatagaacatgccttgacattcctaagaaaccgatcaattaagctaataaatattcatgttactgatatcattgatggaaacccatccattatccttggcctaatttggacaattatcctgcactttcatattgagaagcttgcccagactctttcttgcaattacaatcagccttccctggatgatgtgagtgtggttgactcatctcctgcctcaagtcctccagctaagaaatgctctaaagtgcaagcaagatggcaaatgtctgcaagaaaggcccttcttttgtgggctcaggaacaatgcgccacctatgagtctgtcaatgtgaccgattttaagtcaagttggagaaatgggatggcttttttggccatcattcatgccttgcgaccagacctaattgacatgaagagtgtgaagcatagatccaacaaagacaatctgagagaggccttcagaattgcagaacaagaattaaaaatccccagattgctggaaccagaagatgtggatgttgttgatcctgatgaaaagtccatcatgacctatgtggcacagtttctgcagtattccaaagatgcccctgggactggagaggaggctcagggaaaggtgaaagatgctatgggctggttaactctgcaaaaggaaaaactacagaagttgctaaaggattcagagaatgatacctactttaaaaagtataatagcctgctgtcctttatggagtcattcaatgaagaaaaaaagtcctttttggatgtcctgtcaataaaacgggatctggatgagctggacaaggatcatttacagttgagagaagcctgggatggcctcgatcaccagattaatgcatggaaaataaagctaaattatgccttgcccccacccctccatcaaactgaagcttggctccaggaggtagaagagcttatggatgaagatttgtcagcctcccaggatcactctcaagccgtgactctgatacaagagaaaatgactttattcaagagcctgatggatagatttgagcatcattcgaacattctccttacctttgaaaataaggatgaaaatcacttgccattggtaccacctaacaaattggaggaaatgaaaagacgaatcaacaacattttggagaaaaaatttattctacttctagaatttcattactacaagtgcttagttcttggtttggtagatgaagtgaaatcaaaattggatatttggaacattaaatatgggagcagagaatctgtggaattattgctggaagactggcataaatttattgaagaaaaagaattcctagctcgacttgatacttcttttcaaaaatgtggagaaatttataagaatttggctggagaatgtcagaatattaataaacagtatatgatggtgaaatctgatgtttgtatgtatagaaaaaatatatataatgtgaagtccactctacaaaaagtgctggcatgttgggctacttatgtggaaaaccttcgcttactaagggcttgctttgaggagacaaagaaggaagaaattaaagaggtaccctttgagacactagcccagtggaatctagaacacgctactttaaatgaagcaggaaatttcttagtcgaagtcagcaatgatgtggttggatcatctatttctaaagaactgagaaggctgaataaaagatggagaaagttggtttcaaaaactcaacttgaaatgaacctgccactgatgataaaaaaacaggatcagcccacttttgacaattctggaaatattctatctaaagaagagaaagcaactgttgagttttcaacagatatgtcagtagaacttcctgaaaattataatcaaaatataaaggctggagagaaacatgaaaaagaaaatgaagaattcacagggcaactaaaagtggctaaagatgttgaaaaactcattggacaagtggaaatctgggaggcagaagccaaatctgttttggatcaagatgatgtggacacctcaatggaagaatctttgaagcatcttattgccaaaggctctatgtttgatgagcttatggcaagaagtgaagatatgttacaaatggatatacaaaatatttcaagccaggagtcctttcaacatgttctcacaactgggcttcaggcaaagattcaagaagctaaagagaaagtccagatcaatgtggtaaaactcattgcagcgttgaagaacttaactgacgtttcaccagatttggacatcaggctgaagatggaagaatcccagaaggaacttgaatcatatatgatgagggctcagcagttactggggcaaagagagagccccggtgaactcatttcaaaacacaaggaagcactaataatttctaatacaaaaagtctggccaagtatttgaaagctgttgaagaactaaaaaataatgtaactgaggacataaagatgtctttagaagaaaagagtagagatgtctgtgccaaatgggagtctcttcatcatgaactgtctttatatgttcaacaactaaaaatagatattgaaaaaggaaagcttagtgacaatattttaaaacttgaaaagcaaataaataaagaaaagaaacttatccgtagaggaaggaccaagggtctcatcaaagaacatgaggcctgcttttctgaggaaggctgcctgtaccagcttaatcaccacatggaagtcctgagggagctgtgtgaagagctgccttcacagaagagtcaacaagaagtgaagagactactcaaagattatgaacaaaagatagaaagacttctgaaatgtgcttccgagattcatatgacactgcagcccacagcgggaggcacgtcgaaaaacgaggggaccatcaccacatctgagaatagaggaggggatccccacagtgaggcaccatttgcaaaatcagataatcagccatcaactgaaaaggcaatggaacccactatgaagtttagcctggcatcagtgttaaggcctctgcaagaagaaagcattatggaaaaggattacagtgcatctataaatagtttactagagaggtatgatacatacagagatattcttgaacaccacctgcaaaacaacaaattcaggattacttctgatttctctagtgaagaggacaggagtagttcttgtctgcaggctaaactgacagatctacaggtcataaaaaatgaaactgatgctcgctggaaagagtttgaaattatttcattgaagttagaaaatcatgtgaatgacataaaaaagccttttgtaattaaggaaagagacacactaaaggaaagagaaagagagcttcagatgactcttaataccagaatggaatctttagagacagcactgcggcttgtgttacctgtagagaaggcatcacttcttctctgtggctcggacctgcctctccataaaatggccatccagggatttcatctcattgatgctgatcgcatctatcaacacctaaggaatatccaagattccatagcaaaacagattgaaatatgtaaccgcttagaagagccaggcaactttgtattaaaggagttacacccatttgatctacacgcaatgcagaatattatactgaaatacaaaacacaatttgaaggaatgaaccacagggtgcagaggagtgaagatactctcaaagctctggaagactttttggcgtctctcagaacagctaaactctctgctgagcccgttacagacctttcagcctcagatacacaggtggcacaagaaaatacgttgacagtaaaaaataaagagggagaaattcatctgatgaaagacaaggccaaacatttggataaatgtttgaagatgctcgatatgagctttaaagatgctgaacggggtgatgacacctcctgtgaaaacctgcttgatgctttttcaataaagttatctgagacacatggctatggggtacaggaggaattcactgaggaaaacaaattactagaggcttgtattttcaaaaataatgaactccttaaaaatattcaagatgtgcagagtcaaatcagtaaaattggtcttaaggatcctactgttccagctgtgaaacatcggaaaaaatcattaatcagactggataaggttctagatgaatatgaagaagagaagagacatttacaagaaatggctaattctcttccacacttcaaagatggcagagaaaaaaccgtgaatcaacagtgccaaaatacagtagtcttgtgggagaataccaaagccttggtcaccgaatgtcttgaacaatgtgggagagttttggagctcttaaaacaatatcagaattttaaaagcatcttgacaactttgattcaaaaagaagagagtgtcatctccctgcaggcttcgtacatgggaaaggagaacctgaagaaaaggatagcagagattgaaattgtcaaagaagaatttaatgagcatttagaagttgtagacaagataaaccaggtctgcaaaaatctacaattttatctaaataaaatgaaaacttttgaagagcccccttttgaaaaagaggctaatattattgtggatagatggcttgatataaatgagaagacagaagattactatgaaaatcttggtcgagctctagctttgtgggacaaactttttaacttaaaaaatgtcattgatgagtggacagaaaaggcccttcaaaaaatggaattacatcaattgactgaagaggacagagaaaggctgaaggaagaattacaagtccatgaacaaaaaacttcagaattttctagaagagtggctgaaatacagtttttgctccaaagcagtgaaatacctcttgaattgcaggtcatggagtcctctattttgaacaagatggaacatgtacagaagtgcttaacaggagaatccaactgccatgcactcagtggcagcactgctgagctaagggaggatctcgaccaagccaagacccagatcgggatgactgaatccctcttaaaagccctgtctccttctgacagcttggagatcttcactaaactagaggagatacaacagcagattctacagcaaaaacacagtatgatattacttgagaatcaaataggttgtctgactcctgaactctctgaattgaaaaagcaatatgaaagtgtcagtgatttatttaataccaaaaaaagtgttttgcaagatcacttttctaagttattgaatgatcaatgcaagaactttaatgactggttcagcaacattaaagtgaaccttaaggagtgttttgaatcatcagaaacaaaaaagagtgtggaacaaaagctacaaaaactttctgatttcttgactcttgaaggaagaaacagtaaaataaagcaggtggacagcgtactgaagcatgtgaagaagcatctgcccaaagcacatgtgaaggagcttatcagttggctcgtgggtcaggaattcgaattagaaaaaatggagtccatatgccaggctcgagcaaaggagcttgaagactccttgcagcagctactgagactccaggatgaccatagaaacctgaggaagtggttgactaatcaagaagagaaatggaaaggaanggaagaaccaggggagaaaactgagctgttctgccaagctttagctagaaagagggaacagtttgaatctgtggcccaattgaacaactctttgaaggaatatgggtttactgaagaagaagaaataataatggaagcaacatgtttgatggatagataccagacattactgagacaactaagtgaaatcgaggaagaggataagttactacccacagaggaccagagctttaatgatcttgcacatgatgtaattcattggataaaagagattaaagagtcccttatggttttgaattcatccgaaggcaaaatgccacttgaggaaagaatccaaaaaatcaaggaaatcattttgctgaagcctgaaggggatgccagaatagagaccatcatgaagcaggctgagagcagcgaggccccgctggttcagaagaccctcactgacatcagcaaccagtgggacaacacactccatttagctagcacctacctaagccatcaagaaaagcttctactagaaggagagaaatatttacaaagtaaggaggatctgagattaatgctcatagaantaaagaagaaacaggaagcaggctttgctctacaacatggtctgcaggagaagaaagctcagttaaagatttataagaaattcctcaagaaagcccaagatttgacatccttgctaaaggagttaaaatctcagggaaactacctcttggagtgcactaaaaatcccagcttcagtgaagagccttggctggaaataaagcatctacacgaaagtcttcttcaacaactgcaggattctgtgcaaaacttggacggtcacgttcgagaacatgattcataccaggtttgcgtcacagacctgaatactacattggacaatttctccaaggaatttgtcagtttttctgataagcctgtggatcaaatagnggttgaggaaaaattgcagaaactgcaggaactagagaatagactcagtttacaagatggcacattaaagaagattttagctttagcaaaatccgtcaagcaaaatacatcttcagtggggcagaagattattaaagatgatataaaatcacttcagtgtaaacaaaaagatttggaaaacaggcttgcatctgctaagcaggagatggaatgttgtctcaacancattctcaaatcaaaacgctcaacagaaaagaaaggaaagtttactctgccaggcagagagaagcaggccacttctgatgtgcaggagtctactcaggaatcagctncagtggaaaagttggaggaagactgggaaataaacaaggattcagctgtggaaatggctatgtcaaaacaactttctcttaatgctcaagaaagcatgaaaaacactgaagatgagcggaaagtcaatgagctgcaaaatcaacctttagaattagatactatgttaagaaatgaacaattagaagagatagagaaattatatacccagttggaagcaaagaaagcagccattaagccactggaacaaacagaatgtcttaacaaaacagaaactggggccttggttctccacaatataggatattcggcacagcatttggacaatttgcttcaggcacttattactttgaagaaaaacaaagaaagccaatattgtgtcctcagagattttcaggaataccttgctgcagttgaatcttcaatgaaagccttgttgacagacaaggaaagtcttaaagtaggaccactggacagtgtaacgtatctggacaaaattaaaaaattcatagcatccatagaaaaagagaaagattctttaggcaacttgaaaatcaaatgggagaatttatcaaaccacgtgactgacatggataagaaattgttggaaagccagattaagcaacttgaacatggttgggaacaagtggaacagcagattcaaaagaagtattctcagcaggtagtggaatatgatgaatttacaaccctcatgaataaggtacaggacactgagatttctctgcaacagcagcagcaacatctacagttaaggctgaagtctccagaagaacgggcagggaaccaaagcatgattgccttgaccactgacctccaggctaccaagcatggattttctgttttaaaggggcaagctgaacttcagatgaagaggatttggggagaaaaagaaaagaagaatttggaggatggaataaataacttgaagaaacaatgggaaacattggagccattacacttagaagcagaaaatcagattaagaagtgtgacataaggaacaagatgaaagagactatcttatgggccaagaatttgttgggtgaacttaatccctccattccccttctcccagatgacattctttcacagatcagaaagtgcaaagtgacacatgatggcattctagctaggcagcagtctgtggaatcgttggctgaagaggtcaaagataaggttcctagccttacaacctatgagggcggtgatttaaataataccctagaggacttacggaatcaataccaaatgctggttttaaaatcaactcaaagatcacagcaattagaatttaagttggaagaaagaagcaatttttttgctataataaggaagtttcaacttatggttcaagaaagtgaaacactgataattcccagggtggagacagctgccacggaagctgaactaaaacatcaccatgttactttggaggcatctcagaaggaattgcaagaaattgacagtggaatctcaacacatcttcaggagctaacaaacatctatgaggagctgaatgtgtttgaaagattatttctggaagatcagttgaaaaatcttaagattaggaccaacagaatacaaagattcattcagaatacatgtaatgaagtggaacacaaggtaaagttttgcagacaattccatgaaaaaacatcagcgcttcaggaggaggctgacagtatacagcgcaatgaactattacttaatcaagaagtaaataaaggtgttaaagaggagatctataatcttaaagacagactcaccgctattaagtgttgcatcttacaggtattgaaacttaaaaaagtgtttgactatattggactaaactgggatttttcacaacttgaccaattacaaacccaagtatttgaaaaagaaaaggaacttgaagaaaaaattaagcagttggacacatttgaggaagaacatggcaaatatcaggcattattaagtaaaatgagagctattgatttgcaaattaagaaaatgactgaagtagtactaaaagctcctgatagctctccggaaagcagacggctcaatgcccaaattttaagtcagagaattgagaaagccaagtgtttatgtgatgagataataaagaaattaaatgaaaataagacctttgatgactcatncaaggagaaagaaatactacaaataaagctgaatgcagaagaaaatgataagttatacaaagttctccaaaacatggtattagaactctcaccaaaagaattggatgaaaagaattgtcaggacaaactagaaacttccttacatgttttaaatcagataaaatctcaattacagcagccattacttataaatttggaaattaaacatattcaaaatgaaaaggacaattgtgaagcatttcaggagcaagtttgggcagaaatgtgtagtattaaagctgtgactgctattgagaaacaaagagaagaaaactcttctgaagcgagtgatgtggagacaaaactacgtgagtttgaagatcttcagatgcagcttaacacaagcattgatttgcgcacaaatgtcttgaatcatgcttatgaaaatctaacacgctataaagaagcagtcaccagggcagtggagagcatcacttccctcgaagccatcattataccctacagagtagatgttggtaatccagaagaatctttagagatgcctcttcgaaaacaagaggaattggaatccacagtagcacgcatccaggacctcactgagaaactgggaatgatatccagccccgaagccaaactacaacttcagtatactttacaggaactagtttctaagaactcagcaatgaaggaagctttcaaagcacaggaaactgaggcagaaaggtatcttgagaattacaaatgctatagaaaaatggaagaggatatttacactaacctcagcaaaatggagacagttcttggacagtccatgtcctcgttgccactgtcttacagagaagctttagagcgcttggaacagagcaaggccttggtgtcaaatcttatatcaaccaaagaagagttaatgaaactacgacagatccttagactcttgagactcaggtgcacagaaaatgatggcatatgtttgctcaagattgtgtcggctctgtgggagaaatggctgagtttgctggaagctgctaaagagtgggagatgtggtgcgaagaactgaagcaggaatggaaatttgtcagtgaagaaattgaacgagaggcaattattttagataatcttcaggaagaactccctgaaatttccaaaacaaaagaggcagccaccacagaggaactctctgagctgctagactgtttatgccaatatggagagaacgtggagaagcaacagctgttactgactctacttcttcagcgcatcagaagtatccagaatgttcctgaaagctcaggggctgtggaaactgttccagcatttcaagaaattacttctatgaaagaacgatgcaacaagcttcttcagaaagttcagaaaaataaagaattggtgcagactgaaatccaagaaagacattccttcacaaaagagataattgctttgaagaatttctttcaacagaccacaacttcattccaaaatatggcattccaggatcacccagaaaagtcagaacaatttgaggagcttcaaagcatccttaagaaagggaaactaacttttgagaatattatggaaaaactgcgaatcaagtattccgaaatgtacaccatagtccctgcagagattgaatcccaggtggaagaatgcagaaaagctttagaagacatagatgagaagattagcaatgaagtcttaaaaagctcaccatcatatgcaatgaggagaaaaatagaagaaattaacaatgggcttcataatgttgaaaagatgttgcagcagaaaagcaaaaatattgagaaagctcaagaaattcaaaagaaaatgtgggacgagttagatctatggcattccaaactaaatgagctggattctgaagttcaggacattgttgaacaggacccaggacaggctcaagaatggatggataacttgatgattcctttccagcagtatcagcaagtatcacagagagcagagtgtagaacctcacagttgaataaggccacagttaagatggaggaatatagtgaccttctgaagagcactgaggcttggatagaaaataccagtcatttgctggccaatcctgctgactatgactctttgaggacactgagtcaccatgctagcactgtgcagatggctttggaagattcagaacagaagcacaatcttttacattcaatctttatggatctagaagacctgtcaataatttttgaaacagatgaattaacccaatccatacaagagttaagtaatcaagtaacagctttacaacaaaaaataatggaaagccttccacagattcagcgaatggctgatgatgtggttgctattgaatctgaagtaaaatcaatggaaaaaagagtttcaaaaatcaaaactatcctattatcaaaagaaatatttgatttttcacctgaagaacatctcaaacatggggaggtcatacttgaaaatatacgtcccatgaagaaaaccattgctgagatagtgtcttaccaagtggaactgaggttgccccaaacaggaatgaaacctctgcctgtgtttcagcggacaaatcagcttttacaagatataaaactattggaaaatgtgactcaagaacaaaatgagttattaaaggtagtcataaaacagaccaatgaatgggatgaagaaatagaaaatttgaaacagatcttaaataattattcagctcagttctcccttgaacatatgtcaccagaccaagctgacaagctgccacaactacagggagaaatcgaacgtatggagaaacagattctgagtttgaaccagagaaaagaagacctgttggtggacttgaaggccaccgtactaaaccttcaccagcatttgaagcaagaacaagaaggagtagaaagagataggctgccagctgtaacatcagaggaaggtggagtggcagagagggatgcttctgagcggaagttgaacagaagaggctccatgtcttacctggcagcagtcgaggaagaggtggaagaaagttccgtgaagagcgataatggagatgagaaggcagagccatcgcctcagtcttggtcttcactttggaagcatgacaaggacatggaagaagacagagcttcctcatcctctggaacaattgttcaggaagcatatgggaaaataagcacctctgataattccatggcacaaatcctcacaccagactcactaaacactgagcaaggcccagaatgttccctaaggcccaaccaaacagaagagggcaccacacctcctattgaggctgacactctggactcttctgacgcgcaaggaggtttggagcccagggtggagaaaactaggccggagcccacagaagtcctgcatgcctgcaagacccaggtggccgagctggagctgtggctgcaacaagccaacgtggcagttgagccggaaacattaaacgcagacatgcagcaggtgctggaacagcagctggtagggtgccaggctatgctaacagagattgagcacaaggttgcctttctgttagagacttgcaaagatcagggcctgggagataatggagccactcaacatgaggctgaagcgctttccctgaaactgaaaacagtgaagtgcaatttagaaaaagtccagatgatgcttcaggagaagcacagtgaagatcagcatcctaccattctaaagaaatcctcagagccagagcatcaagaagctctccaaccagttaacctttctgaattggaatccattgtaactgaaaggccacaattcagcagacaaaaagatttccagcagcaacaggttctggagttaaaaccaatggaacagaaagatttcatcaaattcatagaatttaatgctaagaaaatgtggccccagtattgccaacatgataacgatacaactcaggaatcatctgcaagcaaccaggcatccagccctgaaaatgacgttccagactcgatcttgtcaccccagggccaaaatggagataagtggcaatatctgcatcatgaactctcatcaaaaataaagctcccactccctcagcttgtggagcctcaggtttccacaaatatgggtattctacccagcgtgactatgtataactttagatacccaacaactgaagaactgaaaacctataccacccaacttgaagacctgcgccaagaagcaagtaaccttcagacacaggaaaatatgacagaagaagcatatatcaatttggataaaaaattgtttgaactattcctgaccctcagtcagtgcctcagcagtgtggaggagatgctggagatgcccagactttacagggaggatggttctggccagcaggtgcactacgagacgctggctcttgagttgaagaaactttatttagcgctaagtgacaagaagggtgatcttttgaaagccatgacttggcctggcgagaacaccaacttgctccttgaatgttttgacaaccttcaagtctgcctggagcacactcaggctgcagctgtctgtagaagcaagtccctgaaagctggcctcgattacaaccgcagttaccagaatgaaataaagagattatatcatcagctcattaagagtaagacatctttacaacagtctttgaatgaaatcagtgggcagagtgttgctgaacagcttcagaaagcagatgcatatacagtggagctggagaacgccgagagccgagtggccaaactaagagatgaaggggagaggcttcatttaccttatgctttactccaggaggtttacaaattagaggatgtacttgacagtatgtggggaatgctaagagccaggtacacagaactcagcagccctttcgtcactgagagccagcaagatgctttgttgcaaggcatggtggaactggtgaagattgggaaggaaaagcttgctcatggccacttaaaacaaaccaaaagtaaagtggcgttacaggctcaaatagaaaatcacaaggtttttttccagaagcttgttgctgacatgttgttgatccaagcatactctgccaaaatacttccttctttattgcaaaacagagagacattttgggcagaacaagtaacagaagttaaaatactagaagaaaagtcacgccaatgtggtatgaagctgcagagtttgttgcagaaatgggaagaatttgatgaaaactatgcatctcttgaaaaggacctggaaattcttatatctacattgccctctgtgagtttggtggaagaaacagaggaaagattagtggaaaggatttcattttaccagcaaataaaaagaaacattggtggaaaacacgcccggctttaccaaactctgaacgaaggcaaacagttggtggcgtctgtgagctgtcctgaattagagggccagatcgcaaaactggaagagcagtggttgtccctgaacaagaaaattgaccatgagctccacaggctgcaagctcttctcaagcatctgctcagttataacagagattcggatcagttaaccaagtggttggaatcttcccagcatactctgaattactggaaagaacagtccctcaatgtgtctcaggacttggatacaatcagaagcaacatcaacaatttttttgagttttcaaaagaagttgatgaaaaatcctccttgaagactgccgttatcagtatcgggaaccagcttcttcacctgaaagaaactgatacagctacactgagagcttctttagcacagtttgaacaaaaatggacaatgctcataactcaacttccagatattcaagaaaaacttcaccagcttcaaatggagaaattgccgtctcgtaaagcaatcacagaaatgattagctggatgaacaatgtggagcatcaaacttcagatgaagactccgtgcattcaccaagttctgcatctcaagttaaacatcttcttcagaagcacaaggagtttagaatggaaatggactataaacagtggatagttgacttcgttaaccagtcattacttcagctaagcacctgtgatgtagaaagcaagcgctatgaaagaacggagtttgcagagcacctgggggagatgaaccgccagtggcaccgtgtacatggaatgctgaatagaaagatacaacatttagaacaacttctagaaagtatcactgagagtgaaaataaaatacagatcttgaacaactggctggaagcacaagaagagagactgaaaactttacaaaaacctgaaagtgtgatctcagtgcagaagctgctcctggactgtcaggatatagaaaatcaacttgcaattaaatccaaagcactagatgagttgaaacaaagttatctgactttggagagtggggcagtgccattgttagaagatacagcatcccgaattgatgagttatttcaaaagagaagcagtgttctcactcaggtcaatcagctcaaaacctccatgcagtcagttttacaggagtggaagatttatgatcaactctatgatgaagtgaatatgatgacaatccgattctggtactgcatggaacacagcaagcctgtggtgttatcattggagaccttgagatgccaggtggagaaccttcagtctctgcaagatgaagctgagagcagtgaagggagttgggagaaactccaggaggttatcggcaaactcaaaggtctctgcccctctgttgctgaaataatcgaagagaaatgccaaaatactcataaaaggtggactcaggtgaaccaagccattgcagaccagttgcagaaggcccagagtctgctccagctctggaaggcctatagcaatgctcatggtgaagctgccgcaaggctgaagcagcaggaagcaaagtttcaacagctcgcaaacatcagcatgtctggaaacaacctggcagagatcctgcccccagccctgcaggacataaaggagctgcagcatgatgtgcagaaaacaaaagaagcctttctccaaaattccagtgtcctggatcgactcccacaacccgcagagtccagcacccacatgctcctcccgggccccctgcactctctccagagggctgcttatttggaaaagatgctgcttgtgaaagcaaatgaatttgagtttgttctctcacagtttaaggattttggagtccggctggaatctttaaaaggtcttattatgcatgaagaagagaatttggatagacttcaccaacaggaaaaagaaaatcctgactcattcctgaatcatgtgctggcactgacagcccaatcacctgatattgaacatttgaatgaagtgagcctcaagctcccacttagtgacgtagctgtgaagacgttacaaaatatgaaccggcaatggattcgggccacggccacggcactggagcgctgcagtgagcttcagggaattggattgaatgaaaagtttctttattgctgtgaaaagtggatccaacttttggagaagatagaagaagcactcaaagtggatgtggctaacagccttcctgagctcctggagcagcagaaaacctataagatgttagaagctgaagtttctataaaccagacaattgctgattcctatgtcacccagtccttacaactcctggacacaacagaaatagagaacagaccagaatttattacagaattctcaaagctgacggatcggtggcagaatgctgtccagggtgttcggcagaggaagggtgacgttgatgggctggtgaggcagtggcaagatttcactacttctgtggagaacttgtttcgcttcctcactgacaccagccacctgctatctgcagtgaagggccaggagcgcttcagcctctaccaaaccagaagtctgatccatgagctgaagaataaagaaattcattttcaaaggaggcgaactacctgtgccctaaccttggaagctggagaaaagttactgctcacaactgacctgaaaactaaagagtctgtgggtaggagaatcagtcaacttcaggacagctggaaagacatggagccccagctggcagagatgattaagcagttccagagcactgtagagacctgggaccagtgtgaaaagaaaatcaaggagttgaaaagcaggctgcaagttttaaaggcacaaagtgaagatcctcttccagagcttcacgaggacctccataacgaaaaagagctgattaaggaactagaacagtctttggctagctggactcagaacttgaaagaacttcaaactatgaaggcggacttaacccggcacgttctcgtggaagatgtgatggttttgaaggagcaaatagagcatttgcacagacaatgggaggacctctgcttaagggtggccatacgtaaacaggagattgaagacagactcaatacatgggttgtattcaatgaaaaaaataaagagttgtgtgcctggctggtgcagatggaaaacaaagttctacagacagcggacattagtattgaagaaatgattgaaaagttacagaaggactgcatggaagaaataaacttgtttagtgaaaacaagttacagttaaagcagatgggtgaccagttgatcaaggccagcaacaaatcaagagcagctgagatcgatgacaagctcaacaaaattaacgatcgttggcaacatctttttgatgtcatcggatcaagggtgaagaagctgaaggagacctttgcttttattcagcagttggacaaaaacatgagcaaccttcgcacctggttggctcgaattgagtctgagctttccaagcctgttgtttatgatgtctgcgatgatcaagagatccagaagaggctcgctgagcagcaggatctacagcgagatattgaacaacacagcgcaggggtggagtccgtgtttaacatctgtgacgtcctactgcacgactccgatgcctgtgcaaatgagaccgagtgtgactcgatccagcagaccaccaggagcctggacagacgctggaggaacatttgtgccatgtccatggagcggcgcatgaaaatcgaggagacgtggcgcctgtggcagaagtttttagacgactattctcgctttgaggactggctcaagtcagctgagaggacggcagcctgcccaaattcctcagaggtgttgtacacgagtgccaaagaggaactgaagaggtttgaggcctttcagcggcagattcatgagcggctcactcagctggagctcatcaacaagcagtaccggcggctggcccgggagaaccgcacagacacggccagcaggctgaagcagatggtccacgagggcaaccagcgctgggacaaccttcagaggcgggtcacagccgtcctgcggagactcaggcatttcaccaaccagagggaagaatttgagggcaccagggagagcattctggtgtggctcacagagatggacctgcagctgaccaacgtggagcacttctcagagagtgacgccgatgacaagatgcgccaactgaatggcttccaacaggaaattacattaaataccaacaagattgatcagctcattgtgtttggggagcagctgattcagaagagcgagcccctggatgctgtgctgattgaggatgagctggaggaactccaccgctactgccaggaggtgtttggaagggtctcccggttccaccggcggctcacctcctgcactccgggcttggaagatgaaaaggaggcctctgagaatgaaacagacatggaagaccccagagaaatccagactgattcttggcgtaaacggggagagagcgaggaaccgtcatctcctcagtccctgtgtcatctagtggccccagggcacgagcggtctggctgcgagacccctgtcagcgtggactccatccccctggagtgggaccacacaggcgacgtggggggctcctcctctcacgaagaggacgaggagggcccatactacagcgcactgtcaggtaaatccatttcggatggccactcgtggcatgttcccgacagcccttcctgtcccgagcatcactacaagcaaatggaaggtgacaggaatgttccacctgttccccctgcgtccagcaccccttataaaccaccctatggaaagctactattacctccaggcacggatggtggcaaagaaggcccgcgagtcctgaatggcaacccacagcaggaagacgggggactggccggtatcacagagcagcagtcaggtgccttcgacagatgggagatgattcaagcacaggagcttcacaataagctcaaaataaaacaaaatttgcaacagctgaactctgatatcagcgccatcactacttggctgaaaaaaactgaagcagagctggaaatgttaaagatggcaaagcctccctctgatatccaggaaatagaactgagagtgaagagactgcaggagatactgaaagcctttgacacttacaaggcattagtggtctctgtcaacgtgagcagcaaggaatttctgcaaaccgagagccccgaatccacagagctccaaagtagactccgccagctgagcctgctctgggaagcagcacagggcgcagtggacagctggagagggggcttacgacagtcgctcatgcagtgccaggacttccaccagttgagtcaaaatctgctgctgtggttagcgagtgccaagaaccggaggcagaaggctcatgtcaccgatccaaaggcagacccccgggctctcctagagtgtcggagggaactaatgcaactggaaaaggagctggtagaacgtcaacctcaagtggacatgttacaggagatttcaaacagccttctcattaagggacatggagaagactgtattgaagctgaagaaaaggtgcatgttattgagaagaaactcaaacagttacgggagcaagtgtcccaagatttaatggccttgcagggaacccagaacccagcctcacccctgcccagcttcgacgaggtagactcgggggaccagcctcctgcaacatccgtgccagctccccgagcaaagagttcagagcagtgagaactacagaaggcgaggaggagacagagagcaggtaacggggctttaccgtgacagcagtgcgttcccctgctccacactcccactgactcagtcttgccaatgccactatcaaggtccttgcaaaaatctggttttcttttgtctggaaagggctggttttctcctctgaaactgaaccccaactgttggccctatttaaatctcaggtcttggatttcttacttacataagcaggggcttaggtaatagagtgggttgtgcctgtggagcctcccaatcagctctcaacctcctctgttggcagggtccccggcagcacacggccacagcgctccttcctctcaagggtggtccgggcagccctacccctgcagctgctcctcctgctgctgctgctcctggcctgcctgctgccctcctccgaagaagactacagctgcactcaggccaacaactttgcccggtccttttaccccatgctgaggccaccgagttgattagagggtcactgctccatcgttgcttcaggcaaaagagtctccatcttcattccaaatgaggtgagtgtttgagaggccttttctgcccttaagtagagatgcgggacaagtcaaagttgcagtgaaaggaagtgtggtctgcatttcaaagcttaatattgtgcatgtcaatttttgtctcttcctcaggataagggcctttaagctggtttgctccccatctccagggaggccactgcagcttctttcactcaaagctcagtgtattcccaaaactcttttatgaggtagtctgggttttatatcgtctgcaaatctttcattgcccacatgcaagggacattttcacatgactcttggcactaagataacttcaaatgaatgaattgcttttctccccatctcgcatgcctgacgtgggacaggagcatcaggaggttagccaggcgcatggattgctgctgggaggagatgccgctcttggcaatcacccaaaccaaagcatcggtcacggcgttcagcaagtgagccagcttccggctgctgtcagcatcctgggtcgctgtgaccagagggtacatacctgtccagaacaagatctggagcaaagatgagcttgccggggtggtcaattgagcgccacatcagccccatcattaacacctccatccaacagctctccaagagccgcacttggtcgaacaggctgagctccacaaagccgggaatcttcttggcccagctgatcatgtgtaccaactccttgtcggccaacttggtcagggacatcatcatggaggcctcggtgaagggcgcactggggcggctgatcagcacatggggcggctcagcctccaggagggtgagcactagctgctcggggctcagggcgtccagcagcagctcccgcactcggggcgcgtggccgccacttctcttggccttgccggcacagtgcagctgctcgtcggcacttctctgtctccgcacaaggcggtacccacatctctctctccgggagccacacttcaccattcccacttcgtaacacttccgaagtcggcaggcctggcagctcttgcgccggtttttatcgattgtacactgatttgtagctggacaaatataatcattatgtccttgaatgcttcttttaaaaaaggccttacatccttcacacgaccagactccatagtgatatcccgatgcgtaatcgctgcagacagcgcagaagtgagcatccctctttgaacctggaccagtaacagggctggcgcaacggttcccactaaccttccttttcagtgtctctctgtttacaggtaaggtgtgttctagcgatcttgcttcacaccagggactcttttgaggttccgcatacagatgtgataactggcgatggaccactaaaggagaaaggtgcccaggtgttggccacaacacatttgggcttgtggtctgccgaccaggcccaccttccaagttagtgacattgctgggaatgctgtaattcatcacagcagggctatagaatgtcatggctggatattcatggtggctgtctacataggaggaaggtatgaaaaaaaaaaaaggaaaaagcagaacagaaaaaagatgaagaagaaagaacacccagcaaaagaaaagagaaaaatgcaatcggaagggaagg

SEQ ID NO: 735524 - DNA, 1440 bp, Homo sapiens
gttcaactactgctcccagctggaggacgagaatagctcagctgggctggatattcctgggccaccctgcaccaaggccagtccagagcctgctaagcccaagcccggggctgagccggagccggagcccagcacagcctgcccacagaagcagaggcaccggccggcgagcgtgaggcgagccatgggcacggtgatcattgcaggggtcgtgtgcggcgtcgtctgcatcatgatggtggtggccgctgcctatggctgcatctacgcctccctcatggccaagtaccaccgggagctcaaaaagcgccagcccctgatgggggaccccgagggcgagcacgaggaccagaagcagatctcttctgtggcctgagcgcccatccccacccggccaggtaggaagggcggggagagcacacggcattgctcagccacagctcccaccttgacccggcgctggccactgcctccccgagtccaccctcctccccgccctccagcagacaagccacaccgggttctctccctgcactttcgaggctccctgaaagccaccgtgctgggggctcctgctgatgctcctgtctgggccagtaaatctttggaacatgtgggggggatctccctaagctctggccacagcaaagcaaggaggtgtgtgcaagaggaggcttccggactgggcattcccctgtcgcccttcctgccctggggtggccatagctggtgactcttcctaccttgctggtcccacctcacctgcattgaggggacggggagggagggatctgagggatgaaggtagatttctgagactctctcctaagccagaaagacgttcttaacacccctgcagtgtgaaagctggtccagctctacaactgttggtaccaatgtgcaaacacaccagccctgccatctggacccagcactcagaaacaccatacacccctggccgacgccatcatgcccctggatctgctataggccacactgaccacatgctcctggattcgctaattcactcacacacccattgcatcaccagtgcggtcacatggattgaaagaattaatacacacacacacacacacacactcacacggtcacacggagaccgaggctatgagcgctcgaacagcagagacatgctcttccccaggggtctccctgagaccacagagcctctcgcgtgctcactgcaatcttctcaagtcaacagcaggaaggaactcaaccagtaacaccaggatcctttgagatcctctaaagtgggccaaagtggtgcccctggaggagccctcctgtcaccatggtaaccctctcacacctctcctgctgggctttcccgggataccacccaggggcctggagcggctgcatgtgtgcatggcggcctcctgaggacccagccacacaccactggtgttgcctcgg

SEQ ID NO: 735525 - DNA, 1225 bp, Homo sapiens
gcgcgcgcgcgggcgggagcggagggcaacggggcggcgcgggcggccgggcgcagggtcgcgggaggtgacgcgcggcgaggatggcggcgcggggccgggggctgctgctgctgacgctgtcggtgctgttggcggcgggcccctccgccgctgcggccaagctcaacatccccaaagtgctgctgcccttcacgcgggccacgcgcgttaacttcacgctggaggcctcggagggctgctaccgctggttgtccacccggccggaggtggccagcatcgagccgctgggcctggacgagcagcagtgctcccagaaggcagtggtgcaggcccgcctgacccagcctgcccgcctcaccagcatcatcttcgcagaggacatcaccacaggccaggtcctgcgctgtgatgccattgtggacctcatccatgacatccagatcgtctccaccacccgcgagctctacctggaggactcccccctggagctgaagatccaggccctggactccgaagggaacaccttcagcactctggctggactggtcttcgagtggacgattgtgaaggactccgaggcggacaggttctcagactcccacaatgcgctgcgaatcctcactttcttggagtctacgtacatccctccttcttacatctcagagatggagaaggctgccaagcaaggggacaccatcctggtgtctgggatgaagacgggagctccaagctcaaggctcgcatccaggaggctgtctacaagaatgtacgccctgcagaagtcaggctgctgattttggaaaacatccttctgaacccggcctatgacgtctacctgatggtgggaacctccattcactacaaggtgcagaagatcaggcaagggaaaattacagaactctccatgccttccgatcagtacgagttgcagcttcagaacagcatcccgggccccgaaggagacccaacccggccggtggctgtcttggcccaggacacgtcgatggtcactgcactgcagctgggacagagcagcctcgtccttggccacaggagtattcgcatgcaaggtgcttctaggttacccaacagcactatctacgtggtcgaacctggatacctagggttcactgttcaccctggtgacaggtgggtgctggagaccggccgcctgtatgaaatcaccatcgaagtttttgacaagttcagcaacaaggtctat

SEQ ID NO: 735526 - DNA, 746 bp, Homo sapiens; identical to SEQ ID NO: 73606

SEQ ID NO: 735527 - DNA, 542 bp, Homo sapiens; identical to SEQ ID NO: 73607

SEQ ID NO: 735528 - DNA, 3504 bp, Homo sapiens
gcggccgccggagccggcgccgcggtcacctccgccgctgcctcggcggggccgggagaggattcgtctgacagcgaagcggagcaagagggaccccagaaactgatccgcaaagtgtctacctcggggcagatccggaccaagaccagtattaaagagggacagctattgaagcaaaccagttctttccaaaggtggaaaaagcgatacttcaaacttcgaggccgcaccctttactatgcaaaggactcaaagtctctgatatttgatgaagttgacctctcagatgctagtgtagctgaagcaagcacgaaaaatgctaacaacagcttcacgatcatcactccattcagaaggctaatgctgtgtgctgagaacagaaaggagatggaggattggatcagctcactgaagtctgtacagaccagagaaccctacgaggtggcccagtttaatgtggaacatttctcagggatgcacaactggtacgcctgctcccacgcccgacccaccttctgtaacgtgtgcagagagagtctttctggagtcacctcccatggcctgtcctgcgaagtgtgtaaattcaaggctcacaaaagatgtgcagtgagagcaacaaataactgtaaatggactaccctggcctccatcgggaaggacattatagaagatgaagatggcgtcgcgatgcctcaccagtggcttgagggcaacctgcctgtaagtgccaagtgtgctgtctgcgacaaaacatgtggcagtgttctccgtctacaggattggaaatgcctttggtgtaagacaatggtacacactgcctgcaaagatttataccatccaatatgtccacttggtcaatgtaaagtatctatcatacctccaattgcactaaacagcaccgattccgatggtttctgtagagcaacattttcgttctgtgttagtcctctattggtttttgtcaattctaagagtggagataatcagggagtaaagttcctccgtcgctttaaacagttgctaaatccggctcaggtgtttgatttaatgaatggaggtcctcatttaggtttaagattatttcagaagtttgacaatttccggattcttgtttgtggaggcgatggaagtgtaggttgggttttgtcagaaatcgataagctcaacttgaataaacagtgtcagctgggagtgttgcctttgggtacaggaaatgaccttgcccgagttcttggctggggaggttcatatgacgatgacacccaacttcctcagatcctagagaaactggaacgagccagtaccaaaatgttggacaggtggagtataatgacatatgaactcaaattgccaccaaaagcttccctacttccaggacctccagaagcatctgaagaattttatatgacgatttatgaagactcagttgcaacgcatcttacaaaaatcctcaattctgatgaacatgcagtggtcatatcttctgccaagacgctatgtgaaactgtaaaggacttcgttgccaaagtagaaaagacgtatgacaaaaccttggaaaatgccgttgtagctgatgccgtggccagtaaatgttcagtcctaaacgagaagctcgaacaactgctgcaggctttgcacacagattcccaggctgcgcctgttctccctggcctcagccctctcattgtggaagaagatgctgtggaatcgtccagtgaagagtccctgggtgaaagcaaagagcagcttggggatgacgttacaaaaccttcctcccagaaagccgtcaaaccaagggaaatcatgttgcgggcaaatagtttaaagaaagcagtgaggcaagtcattgaggaagccggaaaagttatggatgacccgacagttcacccctgtgaaccagctaatcagtcctctgattatgacagcacagaaacagatgaatctaaggaggaagctaaagatgatgttaaaactgcacctcggtctccagatgcccgggcaagttatggccattcccaaactgattctgtccctggtccagctgtggcagccagcaaagaaaacctccctgtgctcaataccagaataatctgcccaggtttaagagcaggactggctgcctcaattgctgggagttcgattatcaacaaaatgttactggcaaacattgatccttttggtgccacgccgtttattgacccggatctagattccgtagatggatattcagaaaaatgtgtcatgaacaattactttgggattggattagatgcaaaaatttcattagaatttaataataaaagagaggagcaccctgaaaaatgcaggagccgaactaaaaacttgatgtggtatggagtccttggaacccgggagttattacagagatcgtacaagaatttagaacaaagggttcaacttgagtgtgatgggcagtatattcctcttcccagcttgcaaggcatagccgtgttgaacattcccagctatgctggaggcactaacttttggggtggaactaaagaggatgatatatttgctgcaccatcctttgatgacaagatcctggaagttgtagcaatatttgatagcatgcaaatggcagtttcaagggtcattaaactgcagcatcatcgaatagcccagtgccgtacagtgaaaatcactatatttggtgacgaaggagtcccagtgcaagtggatggtgaagcgtgggttcagcctccagggattatcaaaattgtgcacaaaaacagagcacaaatgctaacaagggacagagcctttgagagcactctgaaatcttgggaagataagcagaagtgtgattctggtaaaccagttctccgaacccatttgtacatccatcacgccattgacttggcaacagaagaggtgtcgcagatgcagctatgctcccaggctgcagaggagctcattactaggatatgtgacgcagccacaattcactgtcttttggagcaagaactggcccatgctgtgaatgcctgctcccatgccctgaataaagccaacccaaggtgcccggagagtcttacaagagacactgccactgaaatagccatcaatgtgaaggcgctgtataatgaaacagaatctttgctagttggcagggttcctttgcagctggaatcgccacatgaagagcgagtatccaatgccttacactctgtggaggtggaattacagaaactgacagagattccttggctttattatatcttacacccaaatgaggatgaggaacctcctatggattgcaccaaaaggaacaacagaagcaccgtatttcgaatagtgccaaagtttaaaaaggaaaaggttcagaagcagaagacaagttcacagcctgttcagaaatggggcacagaggaagttgctgcttggctggatctgctcaatttgggagagtacaaagatatcttcatccgtcatgacatcagaggggctgaacttttgcatctggaaaggcgagatcttaag

SEQ ID NO: 735529 - DNA, 355 bp, Homo sapiens; identical to SEQ ID NO: 73612

SEQ ID NO: 735530 - DNA, 438 bp, Homo sapiens; identical to SEQ ID NO: 30973

SEQ ID NO: 735531 - DNA, 942 bp, Homo sapiens
gcggccgccggagccggcgccgcggtcacctccgccgctgcctcggcggggccgggagaggattcgtctgacagcgaagcggagcaagagggaccccagaaactgatccgcaaagtgtctacctcggggcagatccggaccaagaccagtattaaagagggacagctattgaagcaaaccagttctttccaaaggtggaaaaagcgatacttcaaacttcgaggccgcaccctttactatgcaaaggactcaaagtctctgatatttgatgaagttgacctctcagatgctagtgtagctgaagcaagcacgaaaaatgctaacaacagcttcacgatcatcactccattcagaaggctaatgctgtgtgctgagaacagaaaggagatggaggattggatcagctcactgaagtctgtacagaccagagaaccctacgaggtggcccagtttaatgtggaacatttctcagggatgcacaactggtacgcctgctcccacgcccgacccaccttctgtaacgtgtgcagagagagtctttctggagtcacctcccatggcctgtcctgcgaagtgtgtaaattcaaggctcacaaaagatgtgcagtgagagcaacaaataactgtaaatggactaccctggcctccatcgggaaggacattatagaagatgaagatggcgtaagctgctgctctgtctctgctctcttcccactaactcctcttttatgttctgctcttgtggaagctgagaaagataagtaggaatgcttattattaggatttaatagaaggtttggttgattctgagtttttatttttaattcaatccttcatagcttctttagctcttagattttgaaggaaatctgttgtgaatagggcttagaagtggccgttgtgctgggctgttgttgtcgacctctgatgaactctgagatg

SEQ ID NO: 735532 - DNA, 4032 bp, Homo sapiens
gcggccgccggagccggcgccgcggtcacctccgccgctgcctcggcggggccgggagaggattcgtctgacagcgaagcggagcaagagggaccccagaaactgatccgcaaagtgtctacctcggggcagatccggaccaagaccagtattaaagagggacagctattgaagcaaaccagttctttccaaaggtggaaaaagcgatacttcaaacttcgaggccgcaccctttactatgcaaaggactcaaagtctctgatatttgatgaagttgacctctcagatgctagtgtagctgaagcaagcacgaaaaatgctaacaacagcttcacgatcatcactccattcagaaggctaatgctgtgtgctgagaacagaaaggagatggaggattggatcagctcactgaagtctgtacagaccagagaaccctacgaggtggcccagtttaatgtggaacatttctcagggatgcacaactggtacgcctgctcccacgcccgacccaccttctgtaacgtgtgcagagagagtctttctggagtcacctcccatggcctgtcctgcgaagtgtgtaaattcaaggctcacaaaagatgtgcagtgagagcaacaaataactgtaaatggactaccctggcctccatcgggaaggacattatagaagatgaagatggcgtcgcgatgcctcaccagtggcttgagggcaacctgcctgtaagtgccaagtgtgctgtctgcgacaaaacatgtggcagtgttctccgtctacaggattggaaatgcctttggtgtaagacaatggtacacactgcctgcaaagatttataccatccaatatgtccacttggtcaatgtaaagtatctatcatacctccaattgcactaaacagcaccgattccgatggtttctgtagagcaacattttcgttctgtgttagtcctctattggtttttgtcaattctaagagtggagataatcagggagtaaagttcctccgtcgctttaaacagttgctaaatccggctcaggtgtttgatttaatgaatggaggtcctcatttaggtttaagattatttcagaagtttgacaatttccggattcttgtttgtggaggcgatggaagtgtaggttgggttttgtcagaaatcgataagctcaacttgaataaacagtgtcagctgggagtgttgcctttgggtacaggaaatgaccttgcccgagttcttggctggggaggttcatatgacgatgacacccaacttcctcagatcctagagaaactggaacgagccagtaccaaaatgttggacaggtggagtataatgacatatgaactcaaattgccaccaaaagcttccctacttccaggacctccagaagcatctgaagaattttatatgacgatttatgaagactcagttgcaacgcatcttacaaaaatcctcaattctgatgaacatgcagtggtcatatcttctgccaagacgctatgtgaaactgtaaaggacttcgttgccaaagtagaaaagacgtatgacaaaaccttggaaaatgccgttgtagctgatgccgtggccagtaaatgttcagtcctaaacgagaagctcgaacaactgctgcaggctttgcacacagattcccaggctgcgcctgttctccctggcctcagccctctcattgtggaagaagatgctgtggaatcgtccagtgaagagtccctgggtgaaagcaaagagcagcttggggatgacgttacaaaaccttcctcccagaaagccgtcaaaccaagggaaatcatgttgcgggcaaatagtttaaagaaagcagtgaggcaagtcattgaggaagccggaaaagttatggatgacccgacagttcacccctgtgaaccagctaatcagtcctctgattatgacagcacagaaacagatgaatctaaggaggaagctaaagatgatgttaaaactgcacctcggtctccagatgcccgggcaagttatggccattcccaaactgattctgtccctggtccagctgtggcagccagcaaagaaaacctccctgtgctcaataccagaataatctgcccaggtttaagagcaggactggctgcctcaattgctgggagttcgattatcaacaaaatgttactggcaaacattgatccttttggtgccacgccgtttattgacccggatctagattccgtagatggatattcagaaaaatgtgtcatgaacaattactttgggattggattagatgcaaaaatttcattagaatttaataataaaagagaggagcaccctgaaaaatgcaggagccgaactaaaaacttgatgtggtatggagtccttggaacccgggagttattacagagatcgtacaagaatttagaacaaagggttcaacttgagtgtgatgggcagtatattcctcttcccagcttgcaaggcatagccgtgttgaacattcccagctatgctggaggcactaacttttggggtggaactaaagaggatgatatatttgctgcaccatcctttgatgacaagatcctggaagttgtagcaatatttgatagcatgcaaatggcagtttcaagggtcattaaactgcagcatcatcgaatagcccagtgccgtacagtgaaaatcactatatttggtgacgaaggagtcccagtgcaagtggatggtgaagcgtgggttcagcctccagggattatcaaaattgtgcacaaaaacagagcacaaatgctaacaagggacagagcctttgagagcactctgaaatcttgggaagataagcagaagtgtgattctggtaaaccagttctccgaacccatttgtacatccatcacgccattgacttggcaacagaagaggtgtcgcagatgcagctatgctcccaggctgcagaggagctcattactaggatatgtgacgcagccacaattcactgtcttttggagcaagaactggcccatgctgtgaatgcctgctcccatgccctgaataaagccaacccaaggtgcccggagagtcttacaagagacactgccactgaaatagccatcaatgtgaaggcgctgtataatgaaacagaatctttgctagttggcagggttcctttgcagctggaatcgccacatgaagagcgagtatccaatgccttacactctgtggaggtggaattacagaaactgacagagattccttggctttattatatcttacacccaaatgaggatgaggaacctcctatggattgcaccaaaaggaacaacagaagcaccgtatttcgaatagtgccaaagtttaaaaaggaaaaggttcagaagcagaagacaagttcacagcctggatctggggataccgaaagtgggtcatgtgaagcgaattctccagggaattaaagagcttggaaggagcactccacagtcggaggtgtaatcatattggtgctatttcttggaagagaagttattgccacttaatacaaagtccttggaagcaagtggctgttcttgtagttttctgcatagataagtaagcaccactgaagcacctctgtggcttgatattttgctgtgggtgaaattttgatttgaggtattagaaaatatttttgtgccgaacaatacattccacaaagccattttctttttgtgcaaacctgacatgttcaaatatattcacaatggtaataaggtaggaggaatctgagacgattgcattgtctaaacagtggaattgcaaaatgtttactttccatagatctggtctgatggaatgttcctactgtgcaactgcataacaatatgtggttaaaacttcctaggtttcattacgggggggcattggccattttcttaaaatcataggttaggagactaaaatataaattaagttgtgatttgaatgtagattggtatcacctccaactcctagtgcttagtggtcaaatatgttgaaaacctttccaatactatgaatgaatgcaaatcttaatgcacgatgtt

SEQ ID NO: 735533 - DNA, 4308 bp, Homo sapiens
gcggccgccggagccggcgccgcggtcacctccgccgctgcctcggcggggccgggagaggattcgtctgacagcgaagcggagcaagagggaccccagaaactgatccgcaaagtgtctacctcggggcagatccggaccaagaccagtattaaagagggacagctattgaagcaaaccagttctttccaaaggtggaaaaagcgatacttcaaacttcgaggccgcaccctttactatgcaaaggactcaaagtctctgatatttgatgaagttgacctctcagatgctagtgtagctgaagcaagcacgaaaaatgctaacaacagcttcacgatcatcactccattcagaaggctaatgctgtgtgctgagaacagaaaggagatggaggattggatcagctcactgaagtctgtacagaccagagaaccctacgaggtggcccagtttaatgtggaacatttctcagggatgcacaactggtacgcctgctcccacgcccgacccaccttctgtaacgtgtgcagagagagtctttctggagtcacctcccatggcctgtcctgcgaagtgtgtaaattcaaggctcacaaaagatgtgcagtgagagcaacaaataactgtaaatggactaccctggcctccatcgggaaggacattatagaagatgaagatggcgtcgcgatgcctcaccagtggcttgagggcaacctgcctgtaagtgccaagtgtgctgtctgcgacaaaacatgtggcagtgttctccgtctacaggattggaaatgcctttggtgtaagacaatggtacacactgcctgcaaagatttataccatccaatatgtccacttggtcaatgtaaagtatctatcatacctccaattgcactaaacagcaccgattccgatggtttctgtagagcaacattttcgttctgtgttagtcctctattggtttttgtcaattctaagagtggagataatcagggagtaaagttcctccgtcgctttaaacagttgctaaatccggctcaggtgtttgatttaatgaatggaggtcctcatttaggtttaagattatttcagaagtttgacaatttccggattcttgtttgtggaggcgatggaagtgtaggttgggttttgtcagaaatcgataagctcaacttgaataaacagtgtcagctgggagtgttgcctttgggtacaggaaatgaccttgcccgagttcttggctggggaggttcatatgacgatgacacccaacttcctcagatcctagagaaactggaacgagccagtaccaaaatgttggacaggtggagtataatgacatatgaactcaaattgccaccaaaagcttccctacttccaggacctccagaagcatctgaagaattttatatgacgatttatgaagactcagttgcaacgcatcttacaaaaatcctcaattctgatgaacatgcagtggtcatatcttctgccaagacgctatgtgaaactgtaaaggacttcgttgccaaagtagaaaagacgtatgacaaaaccttggaaaatgccgttgtagctgatgccgtggccagtaaatgttcagtcctaaacgagaagctcgaacaactgctgcaggctttgcacacagattcccaggctgcgcctgttctccctggcctcagccctctcattgtggaagaagatgctgtggaatcgtccagtgaagagtccctgggtgaaagcaaagagcagcttggggatgacgttacaaaaccttcctcccagaaagccgtcaaaccaagggaaatcatgttgcgggcaaatagtttaaagaaagcagtgaggcaagtcattgaggaagccggaaaagttatggatgacccgacagttcacccctgtgaaccagctaatcagtcctctgattatgacagcacagaaacagatgaatctaaggaggaagctaaagatgatgttaaaactgcacctcggtctccagatgcccgggcaagttatggccattcccaaactgattctgtccctggtccagctgtggcagccagcaaagaaaacctccctgtgctcaataccagaataatctgcccaggtttaagagcaggactggctgcctcaattgctgggagttcgattatcaacaaaatgttactggcaaacattgatccttttggtgccacgccgtttattgacccggatctagattccgtagatggatattcagaaaaatgtgtcatgaacaattactttgggattggattagatgcaaaaatttcattagaatttaataataaaagagaggagcaccctgaaaaatgcaggagccgaactaaaaacttgatgtggtatggagtccttggaacccgggagttattacagagatcgtacaagaatttagaacaaagggttcaacttgagtgtgatgggcagtatattcctcttcccagcttgcaaggcatagccgtgttgaacattcccagctatgctggaggcactaacttttggggtggaactaaagaggatgatatatttgctgcaccatcctttgatgacaagatcctggaagttgtagcaatatttgatagcatgcaaatggcagtttcaagggtcattaaactgcagcatcatcgaatagcccagtgccgtacagtgaaaatcactatatttggtgacgaaggagtcccagtgcaagtggatggtgaagcgtgggttcagcctccagggattatcaaaattgtgcacaaaaacagagcacaaatgctaacaagggacagagcctttgagagcactctgaaatcttgggaagataagcagaagtgtgattctggtaaaccagttctccgaacccatttgtacatccatcacgccattgacttggcaacagaagaggtgtcgcagatgcagctatgctcccaggctgcagaggagctcattactaggatatgtgacgcagccacaattcactgtcttttggagcaagaactggcccatgctgtgaatgcctgctcccatgccctgaataaagccaacccaaggtgcccggagagtcttacaagagacactgccactgaaatagccatcaatgtgaaggcgctgtataatgaaacagaatctttgctagttggcagggttcctttgaaaagtgccacctttggggcatcctttgctctgagaagagaagctgaaaggctgcatgaaagccatcgctcttacctacctccgccaagaaaagcttttagaagttgatttcagaattgaccagcagctaaacacgcgctggccttgagataagcaatattaaacaattgcagctcatccaccagcagagctgactaactgaggccccctgctccacaagccagaactacagctttgattgaataaaagactggtttcagtatttttctcctgctaagagaccacccacagatcgactagttccagccgagttacagatgctgtgcatttgagtgccttcctttccctgcttcaccttttgacatatagggcttacttgtaatatatttcaatgttaagtctccacctaagggaagcatgagatgcatgtaacatgcatgtttattcagtatgcatgccatgttcccccttcatgaatatctggacgaaagactgcatagctcctcccgtaacctgttgaatatatacatatatttggccaacctgttcaacaaaacgtatgtctcatccttccctccctcgaagtacccgctgacagaggcttctcacagaagctacacttctcagcctgtcagaatggccacattgtaggctgcgagtctttatagcaaacaaagtctcctttctaaatttgtgatttttaagctgataccatagaattcatctttcaaatcaggacacttttaagagtgaaatgaagtgctaaaaatcctggtatcttttttcaaaaatttactaactgacaaatacatttttattttttgatggatctgccaaataattattttgaaacactatttcaaaaatattttttctagaaagtagaataacatatatctgtgtacaccaaagaaaacttttaaaacttctttacatatataaaaagtagaaattttataataatataatcagaataattacccctttagtcattttttgaaaacacatttgtctcaaataccatgtcattctatttttctaaagaatgttttcttttccttatatggtcttgctatgttaaaattttgaataaaattgtcccaatattttcttcaaaaaaaaaaaaggcctcgttggcatcatgcggtggagctctgcgccaag

SEQ ID NO: 735534 - DNA, 4045 bp, Homo sapiens
agctgaaaggggccttcaagaagagagttctcagagcagactcagctttaggtgctgaaatgaatttctcaagatcatcactccattcagaaggctaatgctgtgtgctgagaacagaaaggagatggaggattggatcagctcactgaagtctgtacagaccagagaaccctacgaggtggcccagtttaatgtggaacatttctcagggatgcacaactggtacgcctgctcccacgcccgacccaccttctgtaacgtgtgcagagagagtctttctggagtcacctcccatggcctgtcctgcgaagtgtgtaaattcaaggctcacaaaagatgtgcagtgagagcaacaaataactgtaaatggactaccctggcctccatcgggaaggacattatagaagatgaagatggcgtcgcgatgcctcaccagtggcttgagggcaacctgcctgtaagtgccaagtgtgctgtctgcgacaaaacatgtggcagtgttctccgtctacaggattggaaatgcctttggtgtaagacaatggtacacactgcctgcaaagatttataccatccaatatgtccacttggtcaatgtaaagtatctatcatacctccaattgcactaaacagcaccgattccgatggtttctgtagagcaacattttcgttctgtgttagtcctctattggtttttgtcaattctaagagtggagataatcagggagtaaagttcctccgtcgctttaaacagttgctaaatccggctcaggtgtttgatttaatgaatggaggtcctcatttaggtttaagattatttcagaagtttgacaatttccggattcttgtttgtggaggcgatggaagtgtaggttgggttttgtcagaaatcgataagctcaacttgaataaacagtgtcagctgggagtgttgcctttgggtacaggaaatgaccttgcccgagttcttggctggggaggttcatatgacgatgacacccaacttcctcagatcctagagaaactggaacgagccagtaccaaaatgttggacaggtggagtataatgacatatgaactcaaattgccaccaaaagcttccctacttccaggacctccagaagcatctgaagaattttatatgacgatttatgaagactcagttgcaacgcatcttacaaaaatcctcaattctgatgaacatgcagtggtcatatcttctgccaagacgctatgtgaaactgtaaaggacttcgttgccaaagtagaaaagacgtatgacaaaaccttggaaaatgccgttgtagctgatgccgtggccagtaaatgttcagtcctaaacgagaagctcgaacaactgctgcaggctttgcacacagattcccaggctgcgcctgttctccctggcctcagccctctcattgtggaagaagatgctgtggaatcgtccagtgaagagtccctgggtgaaagcaaagagcagcttggggatgacgttacaaaaccttcctcccagaaagccgtcaaaccaagggaaatcatgttgcgggcaaatagtttaaagaaagcagtgaggcaagtcattgaggaagccggaaaagttatggatgacccgacagttcacccctgtgaaccagctaatcagtcctctgattatgacagcacagaaacagatgaatctaaggaggaagctaaagatgatgttaaaactgcacctcggtctccagatgcccgggcaagttatggccattcccaaactgattctgtccctggtccagctgtggcagccagcaaagaaaacctccctgtgctcaataccagaataatctgcccaggtttaagagcaggactggctgcctcaattgctgggagttcgattatcaacaaaatgttactggcaaacattgatccttttggtgccacgccgtttattgacccggatctagattccgtagatggatattcagaaaaatgtgtcatgaacaattactttgggattggattagatgcaaaaatttcattagaatttaataataaaagagaggagcaccctgaaaaatgcaggagccgaactaaaaacttgatgtggtatggagtccttggaacccgggagttattacagagatcgtacaagaatttagaacaaagggttcaacttgagtgtgatgggcagtatattcctcttcccagcttgcaaggcatagccgtgttgaacattcccagctatgctggaggcactaacttttggggtggaactaaagaggatgatatatttgctgcaccatcctttgatgacaagatcctggaagttgtagcaatatttgatagcatgcaaatggcagtttcaagggtcattaaactgcagcatcatcgaatagcccagtgccgtacagtgaaaatcactatatttggtgacgaaggagtcccagtgcaagtggatggtgaagcgtgggttcagcctccagggattatcaaaattgtgcacaaaaacagagcacaaatgctaacaagggacagagcctttgagagcactctgaaatcttgggaagataagcagaagtgtgattctggtaaaccagttctccgaacccatttgtacatccatcacgccattgacttggcaacagaagaggtgtcgcagatgcagctatgctcccaggctgcagaggagctcattactaggatatgtgacgcagccacaattcactgtcttttggagcaagaactggcccatgctgtgaatgcctgctcccatgccctgaataaagccaacccaaggtgcccggagagtcttacaagagacactgccactgaaatagccatcaatgtgaaggcgctgtataatgaaacagaatctttgctagttggcagggttcctttgaaaagtgccacctttggggcatcctttgctctgagaagagaagctgaaaggctgcatgaaagccatcgctcttacctacctccgccaagaaaagcttttagaagttgatttcagaattgaccagcagctaaacacgcgctggccttgagataagcaatattaaacaattgcagctcatccaccagcagagctgactaactgaggccccctgctccacaagccagaactacagctttgattgaataaaagactggtttcagtatttttctcctgctaagagaccacccacagatcgactagttccagccgagttacagatgctgtgcatttgagtgccttcctttccctgcttcaccttttgacatatagggcttacttgtaatatatttcaatgttaagtctccacctaagggaagcatgagatgcatgtaacatgcatgtttattcagtatgcatgccatgttcccccttcatgaatatctggacgaaagactgcatagctcctcccgtaacctgttgaatatatacatatatttggccaacctgttcaacaaaacgtatgtctcatccttccctccctcgaagtacccgctgacagaggcttctcacagaagctacacttctcagcctgtcagaatggccacattgtaggctgcgagtctttatagcaaacaaagtctcctttctaaatttgtgatttttaagctgataccatagaattcatctttcaaatcaggacacttttaagagtgaaatgaagtgctaaaaatcctggtatcttttttcaaaaatttactaactgacaaatacatttttattttttgatggatctgccaaataattattttgaaacactatttcaaaaatattttttctagaaagtagaataacatatatctgtgtacaccaaagaaaacttttaaaacttctttacatatataaaaagtagaaattttataataatataatcagaataattacccctttagtcattttttgaaaacacatttgtctcaaataccatgtcattctatttttctaaagaatgttttcttttccttatatggtcttgctatgttaaaattttgaataaaattgtcccaatattttcttcaaaaaaaaaaaaggcctcgttggcatcatgcggtggagctctgcgccaag

SEQ ID NO: 735535 - DNA, 4658 bp, Homo sapiens
agctgaaaggggccttcaagaagagagttctcagagcagactcagctttaggtgctgaaatgaatttctcaaggccttttacagactccaaatagatggtcctgagctgatactgtcattgtcaccatgatcctggagacacagcctgtagctgtgtggaagtaaacttctaaaacctgtctcttctgagagttactgcatgaaaacaggcaaggatgggtcaagttttggaccagcagcccaagttccaccaaccactctgttatacagaggcttctaagctatgcagagtgctatgaagggtttattcttcttttgcccacctgactgatatactgatgtactttttgaagaagggcaatggaatttacctagacgtcactgtggtcttgatgtggctgaagtgttttgttgaaggctctttagtcctgtactcatttagattgactctcacttctggtccctttttgtggtgcagactaaagcctcaaactctgtaaaagacaatggcttgtctcatgaagagaagtgaccaactgttaataagctttatccaaagagggtcgtggaaaacaagaaaatgcaaaagtgaggttctcttcaatttcatatgcaattaacaaatatccagagctgactgattggtgctcctcttccatgtgacttttggctggctgtatttaaggatcatcactccattcagaaggctaatgctgtgtgctgagaacagaaaggagatggaggattggatcagctcactgaagtctgtacagaccagagaaccctacgaggtggcccagtttaatgtggaacatttctcagggatgcacaactggtacgcctgctcccacgcccgacccaccttctgtaacgtgtgcagagagagtctttctggagtcacctcccatggcctgtcctgcgaagtgtgtaaattcaaggctcacaaaagatgtgcagtgagagcaacaaataactgtaaatggactaccctggcctccatcgggaaggacattatagaagatgaagatggcgtcgcgatgcctcaccagtggcttgagggcaacctgcctgtaagtgccaagtgtgctgtctgcgacaaaacatgtggcagtgttctccgtctacaggattggaaatgcctttggtgtaagacaatggtacacactgcctgcaaagatttataccatccaatatgtccacttggtcaatgtaaagtatctatcatacctccaattgcactaaacagcaccgattccgatggtttctgtagagcaacattttcgttctgtgttagtcctctattggtttttgtcaattctaagagtggagataatcagggagtaaagttcctccgtcgctttaaacagttgctaaatccggctcaggtgtttgatttaatgaatggaggtcctcatttaggtttaagattatttcagaagtttgacaatttccggattcttgtttgtggaggcgatggaagtgtaggttgggttttgtcagaaatcgataagctcaacttgaataaacagtgtcagctgggagtgttgcctttgggtacaggaaatgaccttgcccgagttcttggctggggaggttcatatgacgatgacacccaacttcctcagatcctagagaaactggaacgagccagtaccaaaatgttggacaggtggagtataatgacatatgaactcaaattgccaccaaaagcttccctacttccaggacctccagaagcatctgaagaattttatatgacgatttatgaagactcagttgcaacgcatcttacaaaaatcctcaattctgatgaacatgcagtggtcatatcttctgccaagacgctatgtgaaactgtaaaggacttcgttgccaaagtagaaaagacgtatgacaaaaccttggaaaatgccgttgtagctgatgccgtggccagtaaatgttcagtcctaaacgagaagctcgaacaactgctgcaggctttgcacacagattcccaggctgcgcctgttctccctggcctcagccctctcattgtggaagaagatgctgtggaatcgtccagtgaagagtccctgggtgaaagcaaagagcagcttggggatgacgttacaaaaccttcctcccagaaagccgtcaaaccaagggaaatcatgttgcgggcaaatagtttaaagaaagcagtgaggcaagtcattgaggaagccggaaaagttatggatgacccgacagttcacccctgtgaaccagctaatcagtcctctgattatgacagcacagaaacagatgaatctaaggaggaagctaaagatgatgttaaaactgcacctcggtctccagatgcccgggcaagttatggccattcccaaactgattctgtccctggtccagctgtggcagccagcaaagaaaacctccctgtgctcaataccagaataatctgcccaggtttaagagcaggactggctgcctcaattgctgggagttcgattatcaacaaaatgttactggcaaacattgatccttttggtgccacgccgtttattgacccggatctagattccgtagatggatattcagaaaaatgtgtcatgaacaattactttgggattggattagatgcaaaaatttcattagaatttaataataaaagagaggagcaccctgaaaaatgcaggagccgaactaaaaacttgatgtggtatggagtccttggaacccgggagttattacagagatcgtacaagaatttagaacaaagggttcaacttgagtgtgatgggcagtatattcctcttcccagcttgcaaggcatagccgtgttgaacattcccagctatgctggaggcactaacttttggggtggaactaaagaggatgatatatttgctgcaccatcctttgatgacaagatcctggaagttgtagcaatatttgatagcatgcaaatggcagtttcaagggtcattaaactgcagcatcatcgaatagcccagtgccgtacagtgaaaatcactatatttggtgacgaaggagtcccagtgcaagtggatggtgaagcgtgggttcagcctccagggattatcaaaattgtgcacaaaaacagagcacaaatgctaacaagggacagagcctttgagagcactctgaaatcttgggaagataagcagaagtgtgattctggtaaaccagttctccgaacccatttgtacatccatcacgccattgacttggcaacagaagaggtgtcgcagatgcagctatgctcccaggctgcagaggagctcattactaggatatgtgacgcagccacaattcactgtcttttggagcaagaactggcccatgctgtgaatgcctgctcccatgccctgaataaagccaacccaaggtgcccggagagtcttacaagagacactgccactgaaatagccatcaatgtgaaggcgctgtataatgaaacagaatctttgctagttggcagggttcctttgaaaagtgccacctttggggcatcctttgctctgagaagagaagctgaaaggctgcatgaaagccatcgctcttacctacctccgccaagaaaagcttttagaagttgatttcagaattgaccagcagctaaacacgcgctggccttgagataagcaatattaaacaattgcagctcatccaccagcagagctgactaactgaggccccctgctccacaagccagaactacagctttgattgaataaaagactggtttcagtatttttctcctgctaagagaccacccacagatcgactagttccagccgagttacagatgctgtgcatttgagtgccttcctttccctgcttcaccttttgacatatagggcttacttgtaatatatttcaatgttaagtctccacctaagggaagcatgagatgcatgtaacatgcatgtttattcagtatgcatgccatgttcccccttcatgaatatctggacgaaagactgcatagctcctcccgtaacctgttgaatatatacatatatttggccaacctgttcaacaaaacgtatgtctcatccttccctccctcgaagtacccgctgacagaggcttctcacagaagctacacttctcagcctgtcagaatggccacattgtaggctgcgagtctttatagcaaacaaagtctcctttctaaatttgtgatttttaagctgataccatagaattcatctttcaaatcaggacacttttaagagtgaaatgaagtgctaaaaatcctggtatcttttttcaaaaatttactaactgacaaatacatttttattttttgatggatctgccaaataattattttgaaacactatttcaaaaatattttttctagaaagtagaataacatatatctgtgtacaccaaagaaaacttttaaaacttctttacatatataaaaagtagaaattttataataatataatcagaataattacccctttagtcattttttgaaaacacatttgtctcaaataccatgtcattctatttttctaaagaatgttttcttttccttatatggtcttgctatgttaaaattttgaataaaattgtcccaatattttcttcaaaaaaaaaaaaggcctcgttggcatcatgcggtggagctctgcgccaag

SEQ ID NO: 735536 - DNA, 1471 bp, Homo sapiens
gggagagggccatctgggaatctgggaattaaggaagtaaggaggtagaattggaatgtttaagccaccaagtaactattagattggtgcctgggttttgggtcatgctctcatgtgcttctgcctgcagcttacttgcctccctcttgggctggttggaaagccgtgggctggttactatgggaattgatgggtgctgctggcagtgagagaaggaaagtacttggaattgatacagaaatactaggagagcaggttttttttttgccctctgctttcctgcttactgttttttgatttgatttaactaatgtggttttagctgaagagagcctttccaagagctcacctgtggtaccctgaggaggagttgagctgtcatcactctaacccaggaagacctcatggagaggagggcaacacaaaggatggctagtttctcagatgaatttctgtttcagcaactggcttctcaggcttcattgaactcaaaattaaacccaagcctctttttatactgttaagaaatgtgctgcagacaggagggggaaagtcagtatttaattctctcttcttcactaccgtcttcttcactaccactcctctccctcttcttcactgccaccaccccttgcaaggaaaaggtaggtggagcattctgtgtttgtcataaatttaatgattctgaaatgttggaaatagaaaacagatgttttaatggggtgatacccacattggaaagcatcaaggtcaaaatatattttatgagtcaactttaatttgattaataacttaaaaccctctaccatagtatatgctactttattttcataactactcatgagtatggaatggaaaacattaatttatctttctaagaaaagtatttggctggaggagaaaagaatattaaagtgtcatggacattataaaatttggtagcacagtcttttttcccctacatttttagtttcagttcactgtttctgttgtttctaaatattttaccactaatgaaaaccttatttaggtaaaacgttttcttttgatttaaaagatttttgttgaattccttgcccagatgtgagagaagtgtctacatctattcaaactttaactttgggtcttagaggtgatgaatcacttggcagaacaaccatgagatgttgaataatctcatgatttggttgacttatttttagaagccactccctattaactcatttaattcctgttatacgggaagagggacagggaaaggattggaagaagaggtcagtcatatacaggccttgccctcctaaagcttctgaacttattttttgtttgttttttgagacagagtcttactgtgttgcctaagctggagtggcgccatctcagcttactgcaacctctgcctcccagctactcaggaggctgagcggggaggatagcttgagcctgggaggtcgaggctgcagtgagctga

SEQ ID NO: 735537 - DNA, 1474 bp, Homo sapiens
atccaggccccacctatgctgcatcctccctcatctttgctccctgtctccctcagaggccaccttcatgtgacctgcctcacagcagatgttcccaaaaggacacgatgccataggcccaatggtttaaaatgtccctggtcctccgtggaacttgctgggtaacgggggaaacgccaaggccccctctcaggagtccattacttgcctgagccccagacttgagtcctattatggttttgaatttgcctccatgcagttcagcatgaccttagaggccctctggttcaacgagtgaggcctgcagcctggacagagagaagagacttccccagggcctcaggatttgaggaaatcacacctgcgtgttggactctaaagctccccatctttccagatacagcataaatcctgacctctgtcttttatcagacatccgaagttcacagcctaagactctagctgggttggaccacacacaagagggcaagacaccaggactgctggctgaggtgcacttcgagggtggtccagagattcctctcaacccccttcacagcccgtcctgaggggtaaattggagtgcagaggtgtgacctgcagccaggcctccagcagccccagctggatcctctgaagtgggtctgggcaaactggccacagcagtttgctccctggggccactatgacacatacacagtacctggctcagcagatgctcagcagatatcactgatggtgaccaggacacaggttcccaccctaattctcatcactgcacccaaactgcaggtctggctgctcttcttgctggctgagcccctgacaggcccagatgctgacctagcagcaagtaggcctggagctcggtgccaatgtccccagcagcctccaatgacaccccaggggaagggaggcggtacatgtgggagggaagggtttggggtctgtttaccttggagctcaatcctctccctccccatggcaggaaaccccaattccccaccctctctgccatgtgccccagggactcattagaaatttggttaacttttttttttttcagcttgcgggaagggttgggaggcagcaggctgtaagcagcctggagcaccagcctagaccaggacgcctccacctcagcaacaccgcagccaggtcattctgtgtcatggagccatctcgtacgctgcaggatttgggcagcacccttggcctccacccactagatgctagtggcacccccgagttgtgacaaccctttctggtctcctgacaatgcataataccccttggggggcaaaatcacctctggctgagaaacactggtttatgaaccctatcgctattaaaaaaccactgaactgtatactttggaactgagttttacggcatgtaagctcagctttagcaaaaaagcctctaatgagaccccatctctgcaaaccataaaaatataaaaactaaaaaaaaa

SEQ ID NO: 735538 - DNA, 1379 bp, Homo sapiens
aaaattacgctagtacgaggctggtgttgaatcggccgaggggtggaggaaccaggagagggctggagggagggagatggtctcagccccacagagtttggagtcctcagtgtgctgagcaaacgtggagacaccatttccctcctctagacctcatcttggagagagagatgttggatggggccatctattccagctttattcacacaaatcatgtctgttggcctggaaattggaaaaccagttaaaccaaaaacatgatattaagaaaacaggcaggctcaccatagtaaaaatgctgaaagccaaagacaaaattgggagaacaaaagaaaagcgtcttgtcacatacagaaggtccctgataaagttagtagctgccctcatcagaaaccaggcccaggcagtggggacacatccagagtgctgaaagaacctcccccaggtcatcctatccccaagagtgatgcccggcagcattcccagctcagggctaatggttcacggaagccaggaatcaaactgcctgggttccagtcccagctctgccagttatgcccagctgtggggacttgggcagctcgtttagtagcaccgtgcctcagtttcccatatgtaaaaggccattttgagtgcctttcacagccctgcataaggcaggtgtctcagtgttcactgctgtctctccagctcttagtccagtagctgcatggtgagtgagcgtagggcgcaccctggaaggctgccaagcccaaagttgtgcagagcgctggggactccagactccccacagcagcagagactcgggactgaggcatcctctgttcacaggacatgctggcatctactgggtcagggctctgctgctcggtggctgtgcaaccttgggcaagttcctcaacctctctgtgtcttcgtaccctcatctgtaacatgcgtgtcgatagaccctactactcagggttgatgagaagattaaatgtgcaaaacctgcttgactgtgcccacaaatcctgattgtaggaataaattaatgactttttataaatattttgatcagatggactcagatgatcacagatgtcttcacatgcctatgactaatttgtacacaaactaatgctcgtgtttcccaagcacctggaagacatgccagatccatgtgcagtaatgcctggtggctccaggtctgccccgccgtcctgtggggctgtgagctttcccagcctcctgcccgtgtttgtgaatatcattctgtcctcagctgcatttccagcccaggctgtttggcgctgcccaggaatggtatcaattcccctgtttctcttgtagccagttactagaataaaatcatctactttaaaatctttcaaaaaaaa

SEQ ID NO: 735539 - DNA, 476 bp, Homo sapiens
cgtgtggcgacctataggattccaactgccacgacaaggagcggcaaaggtgtcgtggtggtcattaagcggagatccggccagcggaagcctgccacctcctatgtgcggaccaccatcaacaagaatgctcgcgccacgctcagcagcatcagacacatgatccgcaagaacaagtaccgccccgacctgcgcatggcagccatccgcagggccagcgccatcctgcgcagccagaagcctgtgatggtgaagaggaagcggacccgccccaccaagagctcctgagccccctgcccccagagcaataaagtcagctggctttctcaaaaaaaaaaaaaaaaaaaaaaaaaaaaaaacccgggtccggggggggggggggggaaaaatccggggaaatcggggggggaccaccgggtttttgggcaacggttcttgggccccaaaaagggcaaggggaaaacgggccgggggaa

SEQ ID NO: 735540 - DNA, 607 bp, Homo sapiens
tgccacctcctatgtgcggaccaccatcaacaagaatgctcgcgccacgctgagcccaataacttgaaggcccgcaattccttccgctacaacggactgattcaccgcaagactgtgggcgtggagccggcagccgacggcaaaggtgtcgtggtggtcattaagcggagatccggccagcggaagcctgccacctcctatgtgcggaccaccatcaacaagaatgctcgcgccacgctcagcagcatcagacacatgatccgcaagaacaagtaccgccccgacctgcgcatggcagccatccgcagggccagcgccatcctgcgcagccagaagcctgtgatggtgaagaggaagcggacccgccccaccaagagctcctgagccccctgcccccagagcaataaagtcagctggctttctcacaaaaaaaaaaaagaaaaaaaaaaaaaaaaaaaaaaaaaaaaaaaaaaaaaaaaaaaaaaaaaaacccgggtccggggggggggggggggaaaaatccggggaaatcggggggggaccaccgggtttttgggcaacggttcttgggccccaaaaagggcaaggggaaaacgggccgggggaa

SEQ ID NO: 735541 - DNA, 592 bp, Homo sapiens
  misc_feature (21)..(21): n is a, c, g, or t
  misc_feature (467)..(467): n is a, c, g, or t
  misc_feature (532)..(532): n is a, c, g, or t
  misc_feature (538)..(538): n is a, c, g, or t
  misc_feature (540)..(540): n is a, c, g, or t
  misc_feature (552)..(552): n is a, c, g, or t
  misc_feature (577)..(577): n is a, c, g, or t
  misc_feature (579)..(579): n is a, c, g, or t
tgagccgctctagaggatccncaggactctgaagcactgagcccaataacttgaaggcccgcaattccttccgctacaacggactgattcaccgcaagactgtgggcgtggagccggcagccgacggcaaaggtgtcgtggtggtcattaagcggagatccggccagcggaagcctgccacctcctatgtgcggaccaccatcaacaagaatgctcgcgccacgctcagcagcatcagacacatgatccgcaagaacaagtaccgccccgacctgcgcatggcagccatccgcagggccagcgccatcctgcgcagccagaagcctgtgatggtgaagaggaagcggacccgccccaccaagagctcctgagccccctgcccccagagcaataaagtcagctggctttctcaaaaaacaaaaaaaactcgtgccgaattcgggagcgttcggagttttttttttttntgttttttacttcaggtttctcttttaataaacaaaaccatccaaggtacagttccaaagttcanaaatcnanccaggtctgganctgattggtggtaagagcacacagntnagtcctttccttt

SEQ ID NO: 735542 - DNA, 908 bp, Homo sapiens
  misc_feature (24)..(24): n is a, c, g, or t
ccacgagctcgtgccgaattcggnacgaccgccgccatgtctgcgcatctgcaatggatggtcgtgcggaactgctccagtttcctgatcaagaggaataagcagacctacagcactgagcccaataacttgaaggcccgcaattccttccgctacaacggactgattcaccgcaagactgtgggcgtggagccggcagccgacggcaaaggtgtcgtggtggtcattaagcggagatccggccagcggaagcctgccacctcctatgtgcggaccaccatcaacaagaatgctcgcgccacgctcagcagcatcagacacatgatccgcaagaacaagtaccgccccgacctgcgcatggacatgctggcatctactgggtcagggctctgctgctcggtggctgtgcaaccttgggcaagttcctcaacctctctgtgtcttcgtaccctcatctgtaacatgcgtgtcgatagaccctactactcagggttgatgagaagattaaatgtgcaaaacctgcttgactgtgcccacaaatcctgattgtaggaataaattaatgactttttataaatattttgatcagatggactcagatgatcacagatgtcttcacatgcctatgactaatttgtacacaaactaatgctcgtgtttcccaagcacctggaagacatgccagatccatgtgcagtaatgcctggtggctccaggtctgccccgccgtcctgtggggctgtgagctttcccagcctcctgcccgtgtttgtgaatatcattctgtcctcagctgcatttccagcccaggctgtttggcgctgcccaggaatggtatcaattcccctgtttctcttgtagccagttactagaataaaatcatctactttaaaatctttcaaaaaaaa

SEQ ID NO: 735543 - DNA, 668 bp, Homo sapiens
  misc_feature (19)..(19): n is a, c, g, or t
  misc_feature (32)..(32): n is a, c, g, or t
  misc_feature (57)..(57): n is a, c, g, or t
ccccggcatgtgctgtagnccagcgagaagtnccacagcgacgatgcggtgcgccgnctgtgggtgtccgtccatgccacggcacacagcgcgatggggtggtcggggatgacatggatgtcggtgatgcgctgttccagcagcaggtcttcggcttcgaagcgtcgggtcatgtagggcgccgtcagggcaaaagaaaaggggcggacccgcacctggcgagccgcccccacgacctgcggcttaacgctgctggcggttgccgccctgctcgcggttcgagccttcgttgccgcggttggcctcttcacgctggcctacagcacatgcctggcgatgccgccgccatgtctgcgcatctgcaatggatggtcgtgcggaactgctccagtttcctgatcaagaggaataagcagacctacagcactgagcccaataacttgaaggcccgcaattccttccgctacaacggactgattcaccgcaagactgtgggcgtggagccggcagccgacggcaaaggtgtcgtggtggtcattaagcggagatccggccagcggaagcctgccacctcctatgtgcggaccaccatcaacaagaatgctcgcgccacgctcagcagcatgcacgcgacatcgccaggtaccgagctcgattcgtatatgtac

SEQ ID NO: 735544 - DNA, 373 bp, Homo sapiens
  misc_feature (25)..(27): n is a, c, g, or t
gcggccgctactactactaaattcnnnacgtcgacgtcgccgctgcgagggagccgccgccatgtctgcgcatctgcaatggatggtcgtgcggaactgctccagtttcctgatcaagaggaataagcagacctacagcactgagcccaataacttgaaggcccgcaattccttccgctacaacggactgattcaccgcaagactgtgggcgtggagccggcagccgaatcttgaggtgatcttctgcacgataaggtgatcttctgcacgacgaggtgatcttctgcacgataaggtgatcttctgcacgatgaggtgatcttctgcacgataaggtgatcttctgcacgataaggtgatcttctgcacgat

SEQ ID NO: 735545 - DNA, 749 bp, Homo sapiens
  misc_feature (68)..(68): n is a, c, g, or t
accaccaccacacaacaccgcccccccccccccacgacgaacataggtcagtacaggccttgggtggngcaggtcgccgctgcgaagggagccgccgccatgtctgcgcatctgcaatggatggtcgtgcggaactgctccagtttcctgatcaagaggaataagcagacctacagcactgagcccaataacttgaaggcccgcaattccttccgctacaacggactgattcaccgcaagactgtgggcgtggagccggcagccgacggcaaaggtgtcgtggtggtcattaagcggagatccggccagcggaagcctgccacctcctatgtgcggaccaccatcaacaagaatgctcgcgccacgctcagcagcatcagacacatgatccgcaagaacaagtaccgccccgacctgcgcatggcagccatccgcagggccagcgccatcctgcgcagccagaagcctgtgatggtgaagaggaagcggacccgccccaccaagagctcctgagccccctgcccccagagcaataaagtcagctggctttctcaaaaaaaaaaaaaaaaaaaaaaaaaaaaaaaacaaaaaaaaaaaaaaaacaaaaaaaaaaaagaaaaaaaaaaaaaaaaaaaaaggggggaaaattatggggggggggggagaaaagagaagaaagagggaggaggggggaaaaaggtttggcgacccacattttgaggcaaaggggggaagagaggggggccata

SEQ ID NO: 735546 - DNA, 784 bp, Homo sapiens
aagacgccccaacagccccacccacaggttcacccaattacggtctaggtacgaggctgggtgttaggcgccgctgcgaagggagccgccgccatgtctgcgcatctgcaatggatggtcgtgcggaactgctccagtttcctgatcaagaggaataagcagacctacagcactgagcccaataacttgaaggcccgcaattccttccgctacaacggactgattcaccgcaagactgtgggcgtggagccggcagccgacggcaaaggtgtcgtggtggtcattaagcggagatccggccagcggaagcctgccacctcctatgtgcggaccaccatcaacaagaatgctcgcgccacgctcagcagcatcagacacatgatccgcaagaacaagtaccgccccgacctgcgcatggcagccatccgcagggccagcgccatcctgcgcagccagaagcctgtgatggtgaagaggaagcggacccgccccaccaagagctcctgagccccctgcccccagagcaataaagtcagctggctttctcaaaaaaaaaaaaaaaaaaaaaaaaaaaaaaaacaaaaaaaaaaaaaaaaaaacaaaaaaaagaaagacacggcggaggagcaacacatgtgggcggggcgcgagagaaagagaggtacaatgaaggggcacgagggggaacagagggacaccgcaccccacttcttgtcacacagggggacactacgggggccccccatagggggcagataatcagacaacacgtgtgccgcaatag

SEQ ID NO: 735547 - DNA, 784 bp, Homo sapiens
  misc_feature (9)..(9): n is a, c, g, or t
cggtgacanaactaggctaggtacgaggctgggtggttgcgcgctgcgaagggagccgccgccatgtctgcgcatctgcaatggatggtcgtgcggaactgctccagtttcctgatcaagaggaataagcagacctacagcactgagcccaataacttgaaggcccgcaattccttccgctacaacggactgattcaccgcaagactgtgggcgtggagccggcagccgacggcaaaggtgtcgtggtggtcattaagcggagatccggccagcggaagcctgccacctcctatgtgcggaccaccatcaacaagaatgctcgcgccacgctcagcagcatcagacacatgatccgcaagaacaagtaccgccccgacctgcgcatggcagccatccgcagggccagcgccatcctgcgcagccagaagcctgtgatggtgaagaggaagcggacccgccccaccaagagctcctgagccccctgcccccagagcaataaagtcagctggctttctcaaaaaaaaaaaaaaagaccggggcgcttcgagagatgcgcgttactcagaagtcgaccgagcgtgctcatccggaagctgccctcccagaggtgggcgagggagatcgcgcggatttccaaaaccgacctgaggttcagagcgcagccatcggtgcgctgcagaggctaacgaagcgacccgggggcctgcccaagatccacccgggtgcaccacgcagagagccccatggccaaaaccagggccccgacagggaaaccaagagggt

SEQ ID NO: 735548 - DNA, 1531 bp, Homo sapiens
ggcggggtaggattacgggtctcggtggtagtcgtgtgcgggggtgaactaagggaagacgtgcgtcgaaggcgggggattggaaacgggcctggtgtatcattggggggcggcgaggttctacatatgaaagtggcagggagttagcgaggggggggggtggttgtaggtgtgtgagcgagataagtggtgatagtaggccccggcgcagagtgagcggggtgatatggtagtggtatatgagaaaaaagaggggggggggggggagaacggaggggtgagaaagaggtaataaaagtggcgcgcggggggggcgcgagaaaaggcggggtgggatgtcgaccagcgtatggtagggattatatggagggggggaggtgggggctattgtgttagtggggggggggggggataagggaggtggaggaggcgatgatgggcgggtaattggggggttgggaggggttttgggcgggggctgacggaacataacgaggggcgacatcgcggcggtggccgtgggatgagtagaggttggagggtgcggttacgagggaatgggcgcgggatgctgcaaacccagggagaaaattttccgtttgaggtgtgacagcaatgtttgaagcgaaaaaaagaaaaggactgtataaatgatgtgcattcaaattatgtgcaccctcaggtcgccgcttgcggagggagccgccgccatgtctgcgcatctgcaatggatggtcgtgcggaactgctccagtttcctgatcaagaggaataagcagacctacagcactgagcccaataacttgaaggcccgcaattccttccgctacaacggactgattcaccgcaagactgtgggcgtggagccggcagccgacggcaaaggtgtcgtggtggtcattaagcggagatccggccagcggaagcctgccacctcctatgtgcggaccaccatcaacaagaatgctcgcgccacgctcagcagcatcagacacatgatccgcaagaacaagtaccgccccgacctgcgcatggcagccatccgcagggccagcgccatcctgcgcagccagaagcctgtgatggtgaagaggaagcggacccgccccaccaagagctcctgagccccctgcccccagagcaataaagtcagctggctttctcaatagaataaaagatcatatggatcatttaacttagcataactctatgaccacagaacaatgtaaagcgcccgggctgcaaaagagggcggagaccagatgaggaagtataaatgccatccaggcactatggctggttcatagcaactgcagactgtttttctggaacgggagtggcaatgatccgccggggggccctcccattaaagagggcagtggagataataatttggacagcccggcggttactgtgttattttttgctcgtctaagcaactgccctacgttaaaacgggtcaagcaaggccagaacctacttagtgtagtcggggcagcgtggactcatggagacccaacccccatccccg

SEQ ID NO: 735549 - DNA, 570 bp, Homo sapiens
  misc_feature (40)..(40): n is a, c, g, or t
gtggatcccccgggctgcaggcggcacgaggccgctgcgnagggagccgccgccatgtctgcgcatctgcaatggatggtcgtgcggaactgctccagtttcctgatcaagaggaataagcagacctacagcactgagcccaataacttgaaggcccgcaattccttccgctacaacggactgattcaccgcaagactgtgggcgtggagccggcagccgacggcaaaggtgtcgtggtggtcattaagcggagatccggccagcggaagcctgccacctcctatgtgcggaccaccatcaacaagaatgctcgcgccacgctcagcagcatcagacacatgatccgcaagaacaagtaccgccccgacctgcgcatggcagccatccgcagggccagcgccatcctgcgcagccagaagcctgtgatggtgaagaggaagcggacccgccccaccaagagctcctgagccccctgcccccagagcaataaagtcagctggctttctcaaatagagaagaatcaacaaaatgggttccctaagaaaatccaaaggaagaaatcctcggaa

SEQ ID NO: 735550 - DNA, 885 bp, Homo sapiens
  misc_feature (571)..(571): n is a, c, g, or t
  misc_feature (595)..(595): n is a, c, g, or t
  misc_feature (597)..(597): n is a, c, g, or t
  misc_feature (609)..(609): n is a, c, g, or t
  misc_feature (611)..(611): n is a, c, g, or t
  misc_feature (618)..(618): n is a, c, g, or t
tcgcatctagaactagtcgggtcgccgctgcgaagggagccgccgccatgtctgcgcatctgcaatggatggtcgtgcggaactgctccagtttcctgatcaagaggaataagcagacctacagcactgagcccaataacttgaaggcccgcaattccttccgctacaacggactgattcaccgcaagactgtgggcgtggagccggcagccgacggcaaaggtgtcgtggtggtcattaagcggagatccggccagcggaagcctgccacctcctatgtgcggaccaccatcaacaagaatgctcgcgccacgctcagcagcatcagacacatgatccgcaagaacaagtaccgccccgacctgcgcatggcagccatccgcagggccagcgccatcctgcgcagccagaagcctgtgatggtgaagaggaagcggacccgccccaccaagagctcctgagccccctgcccccagagcaataaagtcagctggctttctcaaaaaaaaaaaaaaaaaaaaaaaaaaaagggggggggggcaaaaaaaaacccccgggggggccccaagantatagcgcgagtacaccagatttntnggcacaaagggngncccaaangaggaggcggatataagagaccgcacaggggaaggcagataaaacagagcgcgggcggggaacaaggcgcaaacgaggggaactcattggggacaggggaacacataaaagtgcgagggggcgcaccatacgtggggcacaaataacccgagaagaaattaaaggaccctaggggagaatataaaactttcagggttctctatgggtgttaacagagggcaaatattgagtgtgagaagatgtgcacggcgaagatgtgaaaattat

SEQ ID NO: 735551 - DNA, 193 bp, Homo sapiens
  misc_feature (13)..(13): n is a, c, g, or t
  misc_feature (178)..(178): n is a, c, g, or t
ttcgagctcggtnccccattggataagcggatgagggagccgccgccatgtctgcgcatctgcaatggatggtcgtgcggaactgctccagtttcctgatcaagaggaataagcagacctacagcactgagcccaataacttgaaggcccgcaattcctgctggaaatgctgacgggnaccgagctcgaattc

SEQ ID NO: 735552 - DNA, 4233 bp, Homo sapiens
gctgataccgcccccggaatttagggatcgctgcgaagggagccgccgccatgtctgcgcatctgcaatggatggtcgtgcggaactgctccagtttcctgatcaagaggaataagcagacctacagcactgagcccaataacttgaaggcccgcaattccttccgctacaacggactgattcaccgcaagactgtgggcgtggagccggcagccgacggcaaaggtgtcgtggtggtcattaagcggagatccggccagcggaagcctgccacctcctatgtgcggaccaccatcaacaagaatgctcgcgccacgctcagcagcatcagacacatgatccgcaagaacaagtaccgccccgacctgcgcatggcagccatccgcagggccagcgccatcctgcgcagccagaagcctgtgatggtgaagaggaagcggacccgccccaccaagagctcctgagccccctgcccccagagcaataaagtcagctggctttctcacctgcctcgactgggcctccctttttgaaacgctctggggagctctggccctgtgtgttgtcattcaggccatgtcatcaaaactctgcatgtcaccttgtccatctggaggtgatgtcaatggctggccatgcaggaggggtggggtagctgccttgtccctggtgagggcaagggtcactgtcttcacagaaaaagtttgctgacttgtgattgagacctactgtcccattgtgaggtggcctgaagaatcccagctggggcagtggcttccattcagaagaagaaaggccttttctagcccagaagggtgcaggctgagggctgggccctgggccctggtgctgtagcacggtttggggacttggggtgttcccaagacctgggggacgacagacatcacgggaggaagatgagatgacttttgcatccagggagtgggtgcagccacatttggaggggatgggctttacttgatgcaacctcatctctgagatgggcaacttggtgggtggtggcttataactgtaagggagatggcagccccagggtacagccagcaggcattgagcagccttagcattgtccccctactcccgtcctccaggtgtccccatccctcccctgtctctttgagctggctcttgtcacttaggtctcatctcagtggccgctcctgggccaccctgtcacccaagctttcctgattgcccagccctcttgtttcctttggcctgtttgctccctagtgtttattacagcttgtgaggccaggagtttgagaccatcctaggcaacataatgagacaccgtctctaaaataaaattagctgggtgtggtggtgcaccgcctgtggtcccagctcctcagaggttgagtagaggctgaggtgagcggagcacttgagccaagagtatgaggctgcagtgagcccatgagccccaccactacactccagcctggaagacaccatgacacacagtgaggcctggatggggaaagagtcctgctgttgatcctcacatgtttcctgggcacctaactctgtcagccactgccagggaccaaggatccagcatccatggcacccctggttcctgccatcctggggtacccgattcaaagagggactctgctccctgtctgagaccacccccggctctgactgagagtaaggggactgtcagggcctcgacttgccattggttggggtcgtacggggctgggagccctgcgttttgaggcagaccactgcccttccgacctcagtcctgtctgctccagtcttgcccagctcgaaggagagcagatctgaccacttgccagcccctgtctgctgtgaattaccatttcctttgtccttcccttagttgggtctattagctcagattgagaggtgttgccttaaaactgagttgggtgacttggtacctgctcaggaccccccgcactgtcccaatcccactcaggcccacctccagctggcctcactccgctggtgacttcgtacctgctcaggagcccccactgtcccagtcccactcaggcccatctctggctggcctcactgcgctgggactccgccttcataaggagagctcactgctcacgttagtagatggccccttctcgtgaggcctctcccctggcacctgcttcagttgtcctccacagcactgatttgcagcccacaagctggcaggtttatctgtctcatgtttgtcttgtgctggtgggcaaggggtttgtctagcacaccagcatataatgagatgcttgatgaatggtgcatattgaatgtataaagcccaccggtcctgagagtttgctcactggagactttctggagatggagtctcgctctgttgcccaggctggcgagtgcaatggcgcgatcttggctcactgcaacctccacctcctgggttcaagcgattctcctgcctcagcctcccgagtagctgggattacaggtgggtgtcaccacacccagctcagtattgtatttttagcagagatggggtttcaccattttgcccaggctggtttggaactcctgacttcaaattacccacctgcctcagcctcccaaagtgctggcattacaggcgctcgaggctttctgatgtggctgctgctgctcagaaggccttgtccttaaccacctccttgcctgccctggaggcttgtgcctctaggccccaccccctgtggagtcctgctggctttctccatccctatctgaatcctccctgctgtgtggcctcccctggtctcatccgtaacacagcccagcttagtgggcctctgttcctgcgggtggccagcctgtctgtgtggctgggctggggaggccacgtctggtatctgaatgctatcggtgggttggggtggaggaaccaggagagggctggagggagggagatggtctcagccccacagagtttggagtcctcagtgtgctgagcaaacgtggagacaccatttccctcctctagacctcatcttggagagagagatgttggatggggccatctattccagctttattcacacaaatcatgtctgttggcctggaaattggaaaaccagttaaaccaaaaacatgatattaagaaaacaggcaggctcaccatagtaaaaatgctgaaagccaaagacaaaattgggagaacaaaagaaaagcgtcttgtcacatacagaaggtccctgataaagttagtagctgccctcatcagaaaccaggcccaggcagtggggacacatccagagtgctgaaagaacctcccccaggtcatcctatccccaagagtgatgcccggcagcattcccagctcagggctaatggttcacggaagccaggaatcaaactgcctgggttccagtcccagctctgccagttatgcccagctgtggggacttgggcagctcgtttagtagcaccgtgcctcagtttcccatatgtaaaaggccattttgagtgcctttcacagccctgcataaggcaggtgtctcagtgttcactgctgtctctccagctcttagtccagtagctgcatggtgagtgagcgtagggcgcaccctggaaggctgccaagcccaaagttgtgcagagcgctggggactccagactccccacagcagcagagactcgggactgaggcatcctctgttcacaggacatgctggcatctactgggtcagggctctgctgctcggtggctgtgcaaccttgggcaagttcctcaacctctctgtgtcttcgtaccctcatctgtaacatgcgtgtcgatagaccctactactcagggttgatgagaagattaaatgtgcaaaacctgcttgactgtgcccacaaatcctgattgtaggaataaattaatgactttttataaatattttgatcagatggactcagatgatcacagatgtcttcacatgcctatgactaatttgtacacaaactaatgctcgtgtttcccaagcacctggaagacatgccagatccatgtgcagtaatgcctggtggctccaggtctgccccgccgtcctgtggggctgtgagctttcccagcctcctgcccgtgtttgtgaatatcattctgtcctcagctgcatttccagcccaggctgtttggcgctgcccaggaatggtatcaattcccctgtttctcttgtagccagttactagaataaaatcatctactttaaaatctttcaaaaaaaa

SEQ ID NO: 735553 - DNA, 578 bp, Homo sapiens
  misc_feature (525)..(525): n is a, c, g, or t
caattagctagtcgaggccgggtgttctgcgaagggagccgccgccatgtctgcgcatctgcaatggatggtcgtgcggaactgctccagtttcctgatcaagaggaataagcagacctacagcactgagcccaataacttgaaggcccgcaattccttccgctacaacggactgattcaccgcaagactgtgggcgtggagccggcagccgacggcaaaggtgtcgtggtggtcattaagcggagatccggccagcggaagcctgccacctcctatgtgcggaccaccatcaacaagaatgctcgcgccacgctcagcagcatcagacacatgatccgcaagaacaagtaccgccccgacctgcgcatggcagccatccgcagggccagcgccatcctgcgcagccagaagcctgtgatggtgaagaggaagcggacccgccccaccaagagctcctgagccccctgcccccagagcaataaagtcagctggctttctcaaaaaaaaaaaatccaaaagcaaangaggggggcccggtacccaattcgcctattaggggcggtttacacattactgg

SEQ ID NO: 735554 - DNA, 630 bp, Homo sapiens
  misc_feature (528)..(528): n is a, c, g, or t
aagggaattcgtgctggtgctagggaattcgtgctggtgcgaagggagccgccgccatgtctgcgcatctgcaatggatggtcgtgcggaactgctccagtttcctgatcaagaggaataagcagacctacagcactgagcccaataacttgaaggcccgcaattccttccgctacaacggactgattcaccgcaagactgtgggcgtggagccggcagccgacggcaaaggtgtcgtggtggtcattaagcggagatccggccagcggaagcctgccacctcctatgtgcggaccaccatcaacaagaatgctcgcgccacgctcagcagcatcagacacatgatccgcaagaacaagtaccgccccgacctgcgcatggcagccatccgcagggccagcgccatcctgcgcagccagaagcctgtgatggtgaagaggaagcggacccgccccaccaagagctcctgagccccctgcccccagagcaataaagtcagctggctttctcaaaaaaaaatactaaagnaaacaatttaaatcttgaggcggtgcccagaaccaaataggacctaaggtgagcccgtttacattctccgtagaggggtagatttctatccttggctctttc

SEQ ID NO: 735555 - DNA, 882 bp, Homo sapiens
  misc_feature (9)..(9): n is a, c, g, or t
  misc_feature (629)..(629): n is a, c, g, or t
  misc_feature (632)..(632): n is a, c, g, or t
cggtgacanaactaggctaggtacgaggctgggtggttgcgcgctgcgaagggagccgccgccatgtctgcgcatctgcaatggatggtcgtgcggaactgctccagtttcctgatcaagaggaataagcagacctacagcactgagcccaataacttgaaggcccgcaattccttccgctacaacggactgattcaccgcaagactgtgggcgtggagccggcagccgacggcaaaggtgtcgtggtggtcattaagcggagatccggccagcggaagcctgccacctcctatgtgcggaccaccatcaacaagaatgctcgcgccacgctcagcagcatcagacacatgatccgcaagaacaagtaccgccccgacctgcgcatggcagccatccgcagggccagcgccatcctgcgcagccagaagcctgtgatggtgaagaggaagcggacccgccccaccaagagctcctgagccccctgcccccagagcaataaagtcagctggctttctcaaaaaaaaaaaaaaaaaaaaaaaaaaaaaaaacaaaaaaaaaaaaaaaaaaaaaaaaaaaaaaaaaaaaaaaaaaagggggggggggcaaaaaaaaacccccgggggggggnccnacatatagcgaccacacaccttcgtgggagagaagaggccgccacacagcgagggtcatacaacaaaacagcgggcggcgcgccgcaaaaaaacacggcgcggggggcacaaacgtcagcgtggctatctgggagaagacccctgccggcggggagcgacacagcgagacccccccgagcaagagacgcggggcgaaaaactggtccgttggcgcacacccgcagtcggcgcgaacgcgccggttacaaa

SEQ ID NO: 735556 - DNA, 722 bp, Homo sapiens
  misc_feature (501)..(501): n is a, c, g, or t
  misc_feature (505)..(505): n is a, c, g, or t
ggcctgagtggcgatctcagcacgaggccgccgccatgtctgcgcatctgcaatggatggtcgtgcggaactgctccagtttcctgatcaagaggaataagcagacctacagcactgagcccaataacttgaaggcccgcaattccttccgctacaacggactgattcaccgcaagactgtgggcgtggagccggcagccgacggcaaaggtgtcgtggtggtcattaagcggagatccggccagcggaagcctgccacctcctatgtgcggaccaccatcaacaagaatgctcgcgccacgctcagcagcatcagacacatgatccgcaagaacaagtaccgccccgacctgcgcatggcagccatccgcagggccagcgccatcctgcgcagccagaagcctgtgatggtgaagaggaagcggacccgccccaccaagagctcctgagccccctgcccccagagcaataaagtcagctggctttctcaaaaaaaaaaanaagnggccgggccgatcagataacgctcctcatattaggcctattaaccaacaattaaccatttaccaatgatgggcgcgatgtaccacgagacagcacataccagggcaccaaacaacaccttgtccaaaagggctcagaacgggataatcctattatacctcaaaaagtttttcctcgcaggatttctgggcctttaaccatccaggctagcctatccc

SEQ ID NO: 735557 - DNA, 847 bp, Homo sapiens
cggacgcgtgggtcgacccacgcgtctcaggtcgccgctgcgaagggagccgccgccatgtctgcgcatctgcaatggatggtcgtgcggaactgctccagtttcctgatcaagaggaataagcagacctacagcactgagcccaataacttgaaggcccgcaattccttccgctacaacggactgattcaccgcaagactgtgggcgtggagccggcagccgacggcaaaggtgtcgtggtggtcattaagcggagatccggccagcggaagcctgccacctcctatgtgcggaccaccatcaacaagaatgctcgcgccacgctcagcagcatcagacacatgatccgcaagaacaagtaccgccccgacctgcgcatggcagccatccgcagggccagcgccatcctgcgcagccagaagcctgtgatggtgaagaggaagcggacccgccccaccaagagctcctgagccccctgcccccagagcaataaagtcagctggctttctcacaaaaaaaaaaaagaaaaaaaaaaaaaaaaaaaaacccgggggcttttttggggggggggcaaaacagggttaataaaaagcgaccagttggtccctaatgtgtttttcgcgacccgcgtttttcttgtcaacaggcgtgaaatcacaggggccccccaaaaggagagcgcatataaatttcgaaaccgcgcgttacctgtttattgttttcacgcacaacacaaagatggaaagagcacaaacgacactgagaacgggacgataacatgtgtacacaccatggaacacaaccacaccacagaacaatgactcatactcaaccgcacagtaatac

SEQ ID NO: 735558 - DNA, 728 bp, Homo sapiens
  misc_feature (43)..(43): n is a, c, g, or t
gcctactactactactactactactaaattcgcggccgcgtcncaggtcgccgctgcgaagggagccgccgccatgtctgcgcatctgcaatggatggtcgtgcggaactgctccagtttcctgatcaagaggaataagcagacctacagcactgagcccaataacttgaaggcccgcaattccttccgctacaacggactgattcaccgcaagactgtgggcgtggagccggcagccgacggcaaaggtgtcgtggtggtcattaagcggagatccggccagcggaagcctgccacctcctatgtgcggaccaccatcaacaagaatgctcgcgccacgctcagcagcatcagacacatgatccgcaagaacaagtaccgccccgacctgcgcatgcttgcgggaagggttgggaggcagcaggctgtaagcagcctggagcaccagcctagaccaggacgcctccacctcagcaacaccgcagccaggtcattctgtgtcatggagccatctcgtacgctgcaggatttgggcagcacccttggcctccacccactagatgctagtggcacccccgagttgtgacaaccctttctggtctcctgacaatgcataataccccttggggggcaaaatcacctctggctgagaaacactggtttatgaaccctatcgctattaaaaaaccactgaactgcacaataaaaaaaaaaattctccaagggcg

SEQ ID NO: 735559 - DNA, 936 bp, Homo sapiens
aggatccttaattaaattaatcttccccccccccccggtcgccgctgcgaagggagccgccgccatgtctgcgcatctgcaatggatggtcgtgcggaactgctccagtttcctgatcaagaggaataagcagacctacagcactgagcccaataacttgaaggcccgcaattccttccgctacaacggactgattcaccgcaagactgtgggcgtggagccggcagccgacggcaaaggtgtcgtggtggtcattaagcggagatccggccagcggaagcctgccacctcctatgtgcggaccaccatcaacaagaatgctcgcgccacgctcagcagcatcagacacatgatccgcaagaacaagtaccgccccgacctgcgcatggacatgctggcatctactgggtcagggctctgctgctcggtggctgtgcaaccttgggcaagttcctcaacctctctgtgtcttcgtaccctcatctgtaacatgcgtgtcgatagaccctactactcagggttgatgagaagattaaatgtgcaaaacctgcttgactgtgcccacaaatcctgattgtaggaataaattaatgactttttataaatattttgatcagatggactcagatgatcacagatgtcttcacatgcctatgactaatttgtacacaaactaatgctcgtgtttcccaagcacctggaagacatgccagatccatgtgcagtaatgcctggtggctccaggtctgccccgccgtcctgtggggctgtgagctttcccagcctcctgcccgtgtttgtgaatatcattctgtcctcagctgcatttccagcccaggctgtttggcgctgcccaggaatggtatcaattcccctgtttctcttgtagccagttactagaataaaatcatctactttaaaatctttcaaaaaaaa

SEQ ID NO: 735560 - DNA, 557 bp, Homo sapiens
aggatccttaattaaattaatcttccccccccccccggtcgccgctgcgaagggagccgccgccatgtctgcgcatctgcaatggatggtcgtgcggaactgctccagtttcctgatcaagaggaataagcagacctacagcactgagcccaataacttgaaggcccgcaattccttccgctacaacggactgattcaccgcaagactgtgggcgtggagccggcagccgacggcaaaggtgtcgtggtggtcattaagcggagatccggccagcggaagcctgccacctcctatgtgcggaccaccatcaacaagaatgctcgcgccacgctcagcagcatcagacacatgatccgcaagaacaagtaccgccccgacctgcgcatggcagccatccgcagggccagcgccatcctgcgcagccagaagcctgtgatggtgaagaggaagcggacccgccccaccaagagctcctgagccccctgcccccagagcaataaagtcagctggctttctcaaaaaaaaaaacaaaaactttctcacaaggaggtcggga

SEQ ID NO: 735561 - DNA, 699 bp, Homo sapiens
cggacgcgtgggtcgacccacgcgtctcagggtattaaaggcgtcgcctcgcccctcgccttcctctttcgtcgccgctgcgaagggagccgccgccatgtctgcgcatctgcaatggatggtcgtgcggaactgctccagtttcctgatcaagaggaataagcagacctacagcactgagcccaataacttgaaggcccgcaattccttccgctacaacggactgattcaccgcaagactgtgggcgtggagccggcagccgacggcaaaggtgtcgtggtggtcattaagcggagatccggccagcggaagcctgccacctcctatgtgcggaccaccatcaacaagaatgctcgcgccacgctcagcagcatcagacacatgatccgcaagaacaagtaccgccccgacctgcgcatggcagccatccgcagggccagcgccatcctgcgcagccagaagcctgtgatggtgaagaggaagcggacccgccccaccaagagctcctgagccccctgcccccagagcaataaagtcagctggctttctcaaaaaaaaaaaaaaaaaaaaaaaaaaaaaaacccgggtccggggggggggggggggaaaaatccggggaaatcggggggggaccaccgggtttttgggcaacggttcttgggccccaaaaagggcaaggggaaaacgggccgggggaa

SEQ ID NO: 735562 - DNA, 935 bp, Homo sapiens
tctagaggatcccttcggctctaccttgtttcaaggtcgccgctgcagaagggagccgccgccatgtctgcgcatctgcaatggatggtcgtgcggaactgctccagtttcctgatcaagaggaataagcagacctacagcactgagcccaataacttgaaggcccgcaattccttccgctacaacggactgattcaccgcaagactgtgggcgtggagccggcagccgacggcaaaggtgtcgtggtggtcattaagcggagatccggccagcggaagcctgccacctcctatgtgcggaccaccatcaacaagaatgctcgcgccacgctcagcagcatcagacacatgatccgcaagaacaagtaccgccccgacctgcgcatggacatgctggcatctactgggtcagggctctgctgctcggtggctgtgcaaccttgggcaagttcctcaacctctctgtgtcttcgtaccctcatctgtaacatgcgtgtcgatagaccctactactcagggttgatgagaagattaaatgtgcaaaacctgcttgactgtgcccacaaatcctgattgtaggaataaattaatgactttttataaatattttgatcagatggactcagatgatcacagatgtcttcacatgcctatgactaatttgtacacaaactaatgctcgtgtttcccaagcacctggaagacatgccagatccatgtgcagtaatgcctggtggctccaggtctgccccgccgtcctgtggggctgtgagctttcccagcctcctgcccgtgtttgtgaatatcattctgtcctcagctgcatttccagcccaggctgtttggcgctgcccaggaatggtatcaattcccctgtttctcttgtagccagttactagaataaaatcatctactttaaaatctttcaaaaaaaa

SEQ ID NO: 735563 - DNA, 770 bp, Homo sapiens
  misc_feature (14)..(15): n is a, c, g, or t
  misc_feature (19)..(19): n is a, c, g, or t
actccagcctgggnnatangaggtcgccgctgcgaagggagccgccgccatgtctgcgcatctgcaatggatggtcgtgcggaactgctccagtttcctgatcaagaggaataagcagacctacagcactgagcccaataacttgaaggcccgcaattccttccgctacaacggactgattcaccgcaagactgtgggcgtggagccggcagccgacggcaaaggtgtcgtggtggtcattaagcggagatccggccagcggaagcctgccacctcctatgtgcggaccaccatcaacaagaatgctcgcgccacgctcagcagcatcagacacatgatccgcaagaacaagtaccgccccgacctgcgcatggcagccatccgcagggccagcgccatcctgcgcagccagaagcctgtgatggtgaagaggaagcggacccgccccaccaagagctcctgagccccctgcccccagagcaataaagtcagctggctttctcaaaaaaaaaaaaaaagaccggggcgcttcgagagatgcgcgttactcagaagtcgaccgagcgtgctcatccggaagctgccctcccagaggtgggcgagggagatcgcgcggatttccaaaaccgacctgaggttcagagcgcagccatcggtgcgctgcagaggctaacgaagcgacccgggggcctgcccaagatccacccgggtgcaccacgcagagagccccatggccaaaaccagggccccgacagggaaaccaagagggt

SEQ ID NO: 735564 - DNA, 6484 bp, Homo sapiens
cagggagctgatggggtgtgacaggcacaccataggctggaggcacaggtggagggcagggaagaggaccggcaaatctatagaatcctaaagggagccaagagaagccacatgcaaatctccctccctccaaacaattctcccttagagggcatccgcgctcccctggggtggcagtcagcgagaagtttccgtgtaggttctccccaggcttaaacagtttaagagttttatttcaagaaaactctggggagggcgaactgcaagagggctgccaggattagccgagggattccgaatgaagacggagtatttccgaacatacacacctctcccaagagcgtttccggagggttccgaaaatacccgagcgggcctcggcgccctcattggccatcaccgcgagggcttacgaagaccggaaatatccaaaggtgccggggctaggcttatatagttcacgcattcaccagttcattcataaaacaaatgtttgttgagcgcccatcatatgccaatcacagtgacaagtgctgggtgagcaatactggagagataacgctgaggtatgggtcccaggacctctcgaattggagccactcggaaatccagcggtagagtttcgaaaacttccgaacggttcccggaatacgctctcggccctctaaccgaagagttccgaatattcccgagcgttgagcgaattgtcggcggaagcagccgaacatcatcgagccgcctcggaggtggggaccgacaactcctgtcgtgcccgccggagaggaagcggaaatgcgtgtacggtattaaaggcgtcgcctcgcccctcgccttcctctttcgtcgccgctgcgaagggagccgccgccatgtctgcgcatctgcaatggatggtcgtgcggaactgctccagtttcctgatcaagaggaataagcagacctacagcactgagcccaataacttgaaggcccgcaattccttccgctacaacggactgattcaccgcaagactgtgggcgtggagccggcagccgacggcaaaggtgtcgtggtggtcattaagcggagatccgggtgagttttgtctggtttgggccagagagcggcccctttcccgggtctgggagctgtgattttttactgtcaggcaggaagagcggtaactgccatcgcggcgggcatccctggcgccagggtgttggtctgggtaccggcttccctctcggccgacttgtcagctctgtgagccgcgcgcgtctgagcccgtgtcctcacctgtaaagtggagaaatgaaaaaggacctgaacttcctcggtggttgttgagagttaaggcacggggttgatgttttcagatgaaattctcaaagcaagtcagggtggggatggatggtttcatcccacaggtgggaagattgaggcacaacaggggaggggccctcgctaccacacttaggaggggacaggctgggttggttgcagccatttgattcccattttgcctgtgtaggttagagaagaggtcttggggaccccactccatacattgtgctgtcaggtgcaggcctttttggggattccctgaatgttcgtgtgagtcgggggtctctaatggaggagtccagcttcacatgtgttcttgacagggctgtattttctttttagagtgagtttttctcaggtccttgattggaactgcctcagagccaagggtccttttactcagtggcagcaacaaacgcagtctgttggctagtgatcctcctgtctcagggacacgtagtccagggagcagccaattgcttggcacttggggaccccgttctggggagtcctgaaagctttcacctcttggattgccgaatacatgggtggcccttcctagactaagggactggcctgagtgaggctgggcctctcagccaagctgatgttgaaccactgctgtggggatgggcctggggttcctgggaagctgttcatacccattgccaggagcgtgggctctggctggacctggatcagatcctaactgaagcggcagctttctggcatgagaaaggagtgttttcatggtggacagaattgggctatgagtgtggcagaagctgtgtcctcagtactccgtgatgacgagtgagcctctgtgaaatggacaggtgggaaaacagctacctgctggcctgcccaggcacccgccacgggcccacgctgctcagcttctcaatgtgagactgtccacacctgcgaggtgtgctaaaggtgcaggttaggtggactgaccccaggacctccctgacccccaaccaggccagcggaagcctgccacctcctatgtgcggaccaccatcaacaagaatgctcgcgccacgctcagcagcatcagacacatgatccgcaagaacaagtaccgccccgacctgcgcatgggtgagctggggtttggggatcaggcttggggagactggccagtgctgtggggaagggcctcccactactggttgcaatatgggctggagagggatggattcttgctttcagcctactccccacacccagcattggcctagggggcggcttgtggagtgtatgggctgagccttgctctgctcccccgcccccaggcagccatccgcagggccagcgccatcctgcgcagccagaagcctgtgatggtgaagaggaagcggacccgccccaccaagagctcctgagccccctgcccccagagcaataaagtcagctggctttctcacctgcctcgactgggcctccctttttgaaacgctctggggagctctggccctgtgtgttgtcattcaggccatgtcatcaaaactctgcatgtcaccttgtccatctggaggtgatgtcaatggctggccatgcaggaggggtggggtagctgccttgtccctggtgagggcaagggtcactgtcttcacagaaaaagtttgctgacttgtgattgagacctactgtcccattgtgaggtggcctgaagaatcccagctggggcagtggcttccattcagaagaagaaaggccttttctagcccagaagggtgcaggctgagggctgggccctgggccctggtgctgtagcacggtttggggacttggggtgttcccaagacctgggggacgacagacatcacgggaggaagatgagatgacttttgcatccagggagtgggtgcagccacatttggaggggatgggctttacttgatgcaacctcatctctgagatgggcaacttggtgggtggtggcttataactgtaagggagatggcagccccagggtacagccagcaggcattgagcagccttagcattgtccccctactcccgtcctccaggtgtccccatccctcccctgtctctttgagctggctcttgtcacttaggtctcatctcagtggccgctcctgggccaccctgtcacccaagctttcctgattgcccagccctcttgtttcctttggcctgtttgctccctagtgtttattacagcttgtgaggccaggagtttgagaccatcctaggcaacataatgagacaccgtctctaaaataaaattagctgggtgtggtggtgcaccgcctgtggtcccagctcctcagaggttgagtagaggctgaggtgagcggagcacttgagccaagagtatgaggctgcagtgagcccatgagccccaccactacactccagcctggaagacaccatgacacacagtgaggcctggatggggaaagagtcctgctgttgatcctcacatgtttcctgggcacctaactctgtcagccactgccagggaccaaggatccagcatccatggcacccctggttcctgccatcctggggtacccgattcaaagagggactctgctccctgtctgagaccacccccggctctgactgagagtaaggggactgtcagggcctcgacttgccattggttggggtcgtacggggctgggagccctgcgttttgaggcagaccactgcccttccgacctcagtcctgtctgctccagtcttgcccagctcgaaggagagcagatctgaccacttgccagcccctgtctgctgtgaattaccatttcctttgtccttcccttagttgggtctattagctcagattgagaggtgttgccttaaaactgagttgggtgacttggtacctgctcaggaccccccgcactgtcccaatcccactcaggcccacctccagctggcctcactccgctggtgacttcgtacctgctcaggagcccccactgtcccagtcccactcaggcccatctctggctggcctcactgcgctgggactccgccttcataaggagagctcactgctcacgttagtagatggccccttctcgtgaggcctctcccctggcacctgcttcagttgtcctccacagcactgatttgcagcccacaagctggcaggtttatctgtctcatgtttgtcttgtgctggtgggcaaggggtttgtctagcacaccagcatataatgagatgcttgatgaatggtgcatattgaatgtataaagcccaccggtcctgagagtttgctcactggagactttctggagatggagtctcgctctgttgcccaggctggcgagtgcaatggcgcgatcttggctcactgcaacctccacctcctgggttcaagcgattctcctgcctcagcctcccgagtagctgggattacaggtgggtgtcaccacacccagctcagtattgtatttttagcagagatggggtttcaccattttgcccaggctggtttggaactcctgacttcaaattacccacctgcctcagcctcccaaagtgctggcattacaggcgctcgaggctttctgatgtggctgctgctgctcagaaggccttgtccttaaccacctccttgcctgccctggaggcttgtgcctctaggccccaccccctgtggagtcctgctggctttctccatccctatctgaatcctccctgctgtgtggcctcccctggtctcatccgtaacacagcccagcttagtgggcctctgttcctgcgggtggccagcctgtctgtgtggctgggctggggaggccacgtctggtatctgaatgctatcggtgggttggggtggaggaaccaggagagggctggagggagggagatggtctcagccccacagagtttggagtcctcagtgtgctgagcaaacgtggagacaccatttccctcctctagacctcatcttggagagagagatgttggatggggccatctattccagctttattcacacaaatcatgtctgttggcctggaaattggaaaaccagttaaaccaaaaacatgatattaagaaaacaggcaggctcaccatagtaaaaatgctgaaagccaaagacaaaattgggagaacaaaagaaaagcgtcttgtcacatacagaaggtccctgataaagttagtagctgccctcatcagaaaccaggcccaggcagtggggacacatccagagtgctgaaagaacctcccccaggtcatcctatccccaagagtgatgcccggcagcattcccagctcagggctaatggttcacggaagccaggaatcaaactgcctgggttccagtcccagctctgccagttatgcccagctgtggggacttgggcagctcgtttagtagcaccgtgcctcagtttcccatatgtaaaaggccattttgagtgcctttcacagccctgcataaggcaggtgtctcagtgttcactgctgtctctccagctcttagtccagtagctgcatggtgagtgagcgtagggcgcaccctggaaggctgccaagcccaaagttgtgcagagcgctggggactccagactccccacagcagcagagactcgggactgaggcatcctctgttcacaggacatgctggcatctactgggtcagggctctgctgctcggtggctgtgcaaccttgggcaagttcctcaacctctctgtgtcttcgtaccctcatctgtaacatgcgtgtcgatagaccctactactcagggttgatgagaagattaaatgtgcaaaacctgcttgactgtgcccacaaatcctgattgtaggaataaattaatgactttttataaatattttgatcagatggactcagatgatcacagatgtcttcacatgcctatgactaatttgtacacaaactaatgctcgtgtttcccaagcacctggaagacatgccagatccatgtgcagtaatgcctggtggctccaggtctgccccgccgtcctgtggggctgtgagctttcccagcctcctgcccgtgtttgtgaatatcattctgtcctcagctgcatttccagcccaggctgtttggcgctgcccaggaatggtatcaattcccctgtttctcttgtagccagttactagaataaaatcatctactttaaaatctttcaaaaaaaa

SEQ ID NO: 735565 - DNA, 6289 bp, Homo sapiens
cagggagctgatggggtgtgacaggcacaccataggctggaggcacaggtggagggcagggaagaggaccggcaaatctatagaatcctaaagggagccaagagaagccacatgcaaatctccctccctccaaacaattctcccttagagggcatccgcgctcccctggggtggcagtcagcgagaagtttccgtgtaggttctccccaggcttaaacagtttaagagttttatttcaagaaaactctggggagggcgaactgcaagagggctgccaggattagccgagggattccgaatgaagacggagtatttccgaacatacacacctctcccaagagcgtttccggagggttccgaaaatacccgagcgggcctcggcgccctcattggccatcaccgcgagggcttacgaagaccggaaatatccaaaggtgccggggctaggcttatatagttcacgcattcaccagttcattcataaaacaaatgtttgttgagcgcccatcatatgccaatcacagtgacaagtgctgggtgagcaatactggagagataacgctgaggtatgggtcccaggacctctcgaattggagccactcggaaatccagcggtagagtttcgaaaacttccgaacggttcccggaatacgctctcggccctctaaccgaagagttccgaatattcccgagcgttgagcgaattgtcggcggaagcagccgaacatcatcgagccgcctcggaggtggggaccgacaactcctgtcgtgcccgccggagaggaagcggaaatgcgtgtacggtattaaaggcgtcgcctcgcccctcgccttcctctttcgtcgccgctgcgaagggagccgccgccatgtctgcgcatctgcaatggatggtcgtgcggaactgctccagtttcctgatcaagaggaataagcagacctacagcactgagcccaataacttgaaggcccgcaattccttccgctacaacggactgattcaccgcaagactgtgggcgtggagccggcagccgacggcaaaggtgtcgtggtggtcattaagcggagatccgggtgagttttgtctggtttgggccagagagcggcccctttcccgggtctgggagctgtgattttttactgtcaggcaggaagagcggtaactgccatcgcggcgggcatccctggcgccagggtgttggtctgggtaccggcttccctctcggccgacttgtcagctctgtgagccgcgcgcgtctgagcccgtgtcctcacctgtaaagtggagaaatgaaaaaggacctgaacttcctcggtggttgttgagagttaaggcacggggttgatgttttcagatgaaattctcaaagcaagtcagggtggggatggatggtttcatcccacaggtgggaagattgaggcacaacaggggaggggccctcgctaccacacttaggaggggacaggctgggttggttgcagccatttgattcccattttgcctgtgtaggttagagaagaggtcttggggaccccactccatacattgtgctgtcaggtgcaggcctttttggggattccctgaatgttcgtgtgagtcgggggtctctaatggaggagtccagcttcacatgtgttcttgacagggctgtattttctttttagagtgagtttttctcaggtccttgattggaactgcctcagagccaagggtccttttactcagtggcagcaacaaacgcagtctgttggctagtgatcctcctgtctcagggacacgtagtccagggagcagccaattgcttggcacttggggaccccgttctggggagtcctgaaagctttcacctcttggattgccgaatacatgggtggcccttcctagactaagggactggcctgagtgaggctgggcctctcagccaagctgatgttgaaccactgctgtggggatgggcctggggttcctgggaagctgttcatacccattgccaggagcgtgggctctggctggacctggatcagatcctaactgaagcggcagctttctggcatgagaaaggagtgttttcatggtggacagaattgggctatgagtgtggcagaagctgtgtcctcagtactccgtgatgacgagtgagcctctgtgaaatggacaggtgggaaaacagctacctgctggcctgcccaggcacccgccacgggcccacgctgctcagcttctcaatgtgagactgtccacacctgcgaggtgtgctaaaggtgcaggttaggtggactgaccccaggacctccctgacccccaaccaggccagcggaagcctgccacctcctatgtgcggaccaccatcaacaagaatgctcgcgccacgctcagcagcatcagacacatgatccgcaagaacaagtaccgccccgacctgcgcatggcagccatccgcagggccagcgccatcctgcgcagccagaagcctgtgatggtgaagaggaagcggacccgccccaccaagagctcctgagccccctgcccccagagcaataaagtcagctggctttctcacctgcctcgactgggcctccctttttgaaacgctctggggagctctggccctgtgtgttgtcattcaggccatgtcatcaaaactctgcatgtcaccttgtccatctggaggtgatgtcaatggctggccatgcaggaggggtggggtagctgccttgtccctggtgagggcaagggtcactgtcttcacagaaaaagtttgctgacttgtgattgagacctactgtcccattgtgaggtggcctgaagaatcccagctggggcagtggcttccattcagaagaagaaaggccttttctagcccagaagggtgcaggctgagggctgggccctgggccctggtgctgtagcacggtttggggacttggggtgttcccaagacctgggggacgacagacatcacgggaggaagatgagatgacttttgcatccagggagtgggtgcagccacatttggaggggatgggctttacttgatgcaacctcatctctgagatgggcaacttggtgggtggtggcttataactgtaagggagatggcagccccagggtacagccagcaggcattgagcagccttagcattgtccccctactcccgtcctccaggtgtccccatccctcccctgtctctttgagctggctcttgtcacttaggtctcatctcagtggccgctcctgggccaccctgtcacccaagctttcctgattgcccagccctcttgtttcctttggcctgtttgctccctagtgtttattacagcttgtgaggccaggagtttgagaccatcctaggcaacataatgagacaccgtctctaaaataaaattagctgggtgtggtggtgcaccgcctgtggtcccagctcctcagaggttgagtagaggctgaggtgagcggagcacttgagccaagagtatgaggctgcagtgagcccatgagccccaccactacactccagcctggaagacaccatgacacacagtgaggcctggatggggaaagagtcctgctgttgatcctcacatgtttcctgggcacctaactctgtcagccactgccagggaccaaggatccagcatccatggcacccctggttcctgccatcctggggtacccgattcaaagagggactctgctccctgtctgagaccacccccggctctgactgagagtaaggggactgtcagggcctcgacttgccattggttggggtcgtacggggctgggagccctgcgttttgaggcagaccactgcccttccgacctcagtcctgtctgctccagtcttgcccagctcgaaggagagcagatctgaccacttgccagcccctgtctgctgtgaattaccatttcctttgtccttcccttagttgggtctattagctcagattgagaggtgttgccttaaaactgagttgggtgacttggtacctgctcaggaccccccgcactgtcccaatcccactcaggcccacctccagctggcctcactccgctggtgacttcgtacctgctcaggagcccccactgtcccagtcccactcaggcccatctctggctggcctcactgcgctgggactccgccttcataaggagagctcactgctcacgttagtagatggccccttctcgtgaggcctctcccctggcacctgcttcagttgtcctccacagcactgatttgcagcccacaagctggcaggtttatctgtctcatgtttgtcttgtgctggtgggcaaggggtttgtctagcacaccagcatataatgagatgcttgatgaatggtgcatattgaatgtataaagcccaccggtcctgagagtttgctcactggagactttctggagatggagtctcgctctgttgcccaggctggcgagtgcaatggcgcgatcttggctcactgcaacctccacctcctgggttcaagcgattctcctgcctcagcctcccgagtagctgggattacaggtgggtgtcaccacacccagctcagtattgtatttttagcagagatggggtttcaccattttgcccaggctggtttggaactcctgacttcaaattacccacctgcctcagcctcccaaagtgctggcattacaggcgctcgaggctttctgatgtggctgctgctgctcagaaggccttgtccttaaccacctccttgcctgccctggaggcttgtgcctctaggccccaccccctgtggagtcctgctggctttctccatccctatctgaatcctccctgctgtgtggcctcccctggtctcatccgtaacacagcccagcttagtgggcctctgttcctgcgggtggccagcctgtctgtgtggctgggctggggaggccacgtctggtatctgaatgctatcggtgggttggggtggaggaaccaggagagggctggagggagggagatggtctcagccccacagagtttggagtcctcagtgtgctgagcaaacgtggagacaccatttccctcctctagacctcatcttggagagagagatgttggatggggccatctattccagctttattcacacaaatcatgtctgttggcctggaaattggaaaaccagttaaaccaaaaacatgatattaagaaaacaggcaggctcaccatagtaaaaatgctgaaagccaaagacaaaattgggagaacaaaagaaaagcgtcttgtcacatacagaaggtccctgataaagttagtagctgccctcatcagaaaccaggcccaggcagtggggacacatccagagtgctgaaagaacctcccccaggtcatcctatccccaagagtgatgcccggcagcattcccagctcagggctaatggttcacggaagccaggaatcaaactgcctgggttccagtcccagctctgccagttatgcccagctgtggggacttgggcagctcgtttagtagcaccgtgcctcagtttcccatatgtaaaaggccattttgagtgcctttcacagccctgcataaggcaggtgtctcagtgttcactgctgtctctccagctcttagtccagtagctgcatggtgagtgagcgtagggcgcaccctggaaggctgccaagcccaaagttgtgcagagcgctggggactccagactccccacagcagcagagactcgggactgaggcatcctctgttcacaggacatgctggcatctactgggtcagggctctgctgctcggtggctgtgcaaccttgggcaagttcctcaacctctctgtgtcttcgtaccctcatctgtaacatgcgtgtcgatagaccctactactcagggttgatgagaagattaaatgtgcaaaacctgcttgactgtgcccacaaatcctgattgtaggaataaattaatgactttttataaatattttgatcagatggactcagatgatcacagatgtcttcacatgcctatgactaatttgtacacaaactaatgctcgtgtttcccaagcacctggaagacatgccagatccatgtgcagtaatgcctggtggctccaggtctgccccgccgtcctgtggggctgtgagctttcccagcctcctgcccgtgtttgtgaatatcattctgtcctcagctgcatttccagcccaggctgtttggcgctgcccaggaatggtatcaattcccctgtttctcttgtagccagttactagaataaaatcatctactttaaaatctttcaaaaaaaa

SEQ ID NO: 735566 - DNA, 5606 bp, Homo sapiens
cagggagctgatggggtgtgacaggcacaccataggctggaggcacaggtggagggcagggaagaggaccggcaaatctatagaatcctaaagggagccaagagaagccacatgcaaatctccctccctccaaacaattctcccttagagggcatccgcgctcccctggggtggcagtcagcgagaagtttccgtgtaggttctccccaggcttaaacagtttaagagttttatttcaagaaaactctggggagggcgaactgcaagagggctgccaggattagccgagggattccgaatgaagacggagtatttccgaacatacacacctctcccaagagcgtttccggagggttccgaaaatacccgagcgggcctcggcgccctcattggccatcaccgcgagggcttacgaagaccggaaatatccaaaggtgccggggctaggcttatatagttcacgcattcaccagttcattcataaaacaaatgtttgttgagcgcccatcatatgccaatcacagtgacaagtgctgggtgagcaatactggagagataacgctgaggtatgggtcccaggacctctcgaattggagccactcggaaatccagcggtagagtttcgaaaacttccgaacggttcccggaatacgctctcggccctctaaccgaagagttccgaatattcccgagcgttgagcgaattgtcggcggaagcagccgaacatcatcgagccgcctcggaggtggggaccgacaactcctgtcgtgcccgccggagaggaagcggaaatgcgtgtacggtattaaaggcgtcgcctcgcccctcgccttcctctttcgtcgccgctgcgaagggagccgccgccatgtctgcgcatctgcaatggatggtcgtgcggaactgctccagtttcctgatcaagaggaataagcagacctacagcactgagcccaataacttgaaggcccgcaattccttccgctacaacggactgattcaccgcaagactgtgggcgtggagccggcagccgacggcaaaggtgtcgtggtggtcattaagcggagatccgggtgagttttgtctggtttgggccagagagcggcccctttcccgggtctgggagctgtgattttttactgtcaggcaggaagagcggtaactgccatcgcggcgggcatccctggcgccagggtgttggtctgggtaccggcttccctctcggccgacttgtcagctctgtgagccgcgcgcgtctgagcccgtgtcctcacctgtaaagtggagaaatgaaaaaggacctgaacttcctcggtggttgttgagagttaaggcacggggttgatgttttcagatgaaattctcaaagcaagtcagggtggggatggatggtttcatcccacaggtgggaagattgaggcacaacaggggaggggccctcgctaccacacttaggaggggacaggctgggttggttgcagccatttgattcccattttgcctgtgtaggttagagaagaggtcttggggaccccactccatacattgtgctgtcaggtgcaggcctttttggggattccctgaatgttcgtgtgagtcgggggtctctaatggaggagtccagcttcacatgtgttcttgacagggctgtattttctttttagagtgagtttttctcaggtccttgattggaactgcctcagagccaagggtccttttactcagtggcagcaacaaacgcagtctgttggctagtgatcctcctgtctcagggacacgtagtccagggagcagccaattgcttggcacttggggaccccgttctggggagtcctgaaagctttcacctcttggattgccgaatacatgggtggcccttcctagactaagggactggcctgagtgaggctgggcctctcagccaagctgatgttgaaccactgctgtggggatgggcctggggttcctgggaagctgttcatacccattgccaggagcgtgggctctggctggacctggatcagatcctaactgaagcggcagctttctggcatgagaaaggagtgttttcatggtggacagaattgggctatgagtgtggcagaagctgtgtcctcagtactccgtgatgacgagtgagcctctgtgaaatggacaggtgggaaaacagctacctgctggcctgcccaggcacccgccacgggcccacgctgctcagcttctcaatgtgagactgtccacacctgcgaggtgtgctaaaggtgcaggttaggtggactgaccccaggacctccctgacccccaaccaggccagcggaagcctgccacctcctatgtgcggaccaccatcaacaagaatgctcgcgccacgctcagcagcatcagacacatgatccgcaagaacaagtaccgccccgacctgcgcatggcagccatccgcagggccagcgccatcctgcgcagccagaagcctgtgatggtgaagaggaagcggacccgccccaccaagagctcctgagccccctgcccccagagcaataaagtcagctggctttctcacctgcctcgactgggcctccctttttgaaacgctctggggagctctggccctgtgtgttgtcattcaggccatgtcatcaaaactctgcatgtcaccttgtccatctggaggtgatgtcaatggctggccatgcaggaggggtggggtagctgccttgtccctggtgagggcaagggtcactgtcttcacagaaaaagtttgctgacttgtgattgagacctactgtcccattgtgaggtggcctgaagaatcccagctggggcagtggcttccattcagaagaagaaaggccttttctagcccagaagggtgcaggctgagggctgggccctgggccctggtgctgtagcacggtttggggacttggggtgttcccaagacctgggggacgacagacatcacgggaggaagatgagatgacttttgcatccagggagtgggtgcagccacatttggaggggatgggctttacttgatgcaacctcatctctgagatgggcaacttggtgggtggtggcttataactgtaagggagatggcagccccagggtacagccagcaggcattgagcagccttagcattgtccccctactcccgtcctccaggtgtccccatccctcccctgtctctttgagctggctcttgtcacttaggtctcatctcagtggccgctcctgggccaccctgtcacccaagctttcctgattgcccagccctcttgtttcctttggcctgtttgctccctagtgtttattacagcttgtgaggccaggagtttgagaccatcctaggcaacataatgagacaccgtctctaaaataaaattagctgggtgtggtggtgcaccgcctgtggtcccagctcctcagaggttgagtagaggctgaggtgagcggagcacttgagccaagagtatgaggctgcagtgagcccatgagccccaccactacactccagcctggaagacaccatgacacacagtgaggcctggatggggaaagagtcctgctgttgatcctcacatgtttcctgggcacctaactctgtcagccactgccagggaccaaggatccagcatccatggcacccctggttcctgccatcctggggtacccgattcaaagagggactctgctccctgtctgagaccacccccggctctgactgagagtaaggggactgtcagggcctcgacttgccattggttggggtcgtacggggctgggagccctgcgttttgaggcagaccactgcccttccgacctcagtcctgtctgctccagtcttgcccagctcgaaggagagcagatctgaccacttgccagcccctgtctgctgtgaattaccatttcctttgtccttcccttagttgggtctattagctcagattgagaggtgttgccttaaaactgagttgggtgacttggtacctgctcaggaccccccgcactgtcccaatcccactcaggcccacctccagctggcctcactccgctggtgacttcgtacctgctcaggagcccccactgtcccagtcccactcaggcccatctctggctggcctcactgcgctgggactccgccttcataaggagagctcactgctcacgttagtagatggccccttctcgtgaggcctctcccctggcacctgcttcagttgtcctccacagcactgatttgcagcccacaagctggcaggtttatctgtctcatgtttgtcttgtgctggtgggcaaggggtttgtctagcacaccagcatataatgagatgcttgatgaatggtgcatattgaatgtataaagcccaccggtcctgagagtttgctcactggagactttctggagatggagtctcgctctgttgcccaggctggcgagtgcaatggcgcgatcttggctcactgcaacctccacctcctgggttcaagcgattctcctgcctcagcctcccgagtagctgggattacaggtgggtgtcaccacacccagctcagtattgtatttttagcagagatggggtttcaccattttgcccaggctggtttggaactcctgacttcaaattacccacctgcctcagcctcccaaagtgctggcattacaggcgctcgaggctttctgatgtggctgctgctgctcagaaggccttgtccttaaccacctccttgcctgccctggaggcttgtgcctctaggccccaccccctgtggagtcctgctggctttctccatccctatctgaatcctccctgctgtgtggcctcccctggtctcatccgtaacacagcccagcttagtgggcctctgttcctgcgggtggccagcctgtctgtgtggctgggctggggaggccacgtctggtatctgaatgctatcggtgggttggggtggaggaaccaggagagggctggagggagggagatggtctcagccccacagtccagactccccacagcagcagagactcgggactgaggcatcctctgttcacaggacatgctggcatctactgggtcagggctctgctgctcggtggctgtgcaaccttgggcaagttcctcaacctctctgtgtcttcgtaccctcatctgtaacatgcgtgtcgatagaccctactactcagggttgatgagaagattaaatgtgcaaaacctgcttgactgtgcccacaaatcctgattgtaggaataaattaatgactttttataaatattttgatcagatggactcagatgatcacagatgtcttcacatgcctatgactaatttgtacacaaactaatgctcgtgtttcccaagcacctggaagacatgccagatccatgtgcagtaatgcctggtggctccaggtctgccccgccgtcctgtggggctgtgagctttcccagcctcctgcccgtgtttgtgaatatcattctgtcctcagctgcatttccagcccaggctgtttggcgctgcccaggaatggtatcaattcccctgtttctcttgtagccagttactagaataaaatcatctactttaaaatctttcaaaaaaaa

SEQ ID NO: 735567 - DNA, 3193 bp, Homo sapiens
cagggagctgatggggtgtgacaggcacaccataggctggaggcacaggtggagggcagggaagaggaccggcaaatctatagaatcctaaagggagccaagagaagccacatgcaaatctccctccctccaaacaattctcccttagagggcatccgcgctcccctggggtggcagtcagcgagaagtttccgtgtaggttctccccaggcttaaacagtttaagagttttatttcaagaaaactctggggagggcgaactgcaagagggctgccaggattagccgagggattccgaatgaagacggagtatttccgaacatacacacctctcccaagagcgtttccggagggttccgaaaatacccgagcgggcctcggcgccctcattggccatcaccgcgagggcttacgaagaccggaaatatccaaaggtgccggggctaggcttatatagttcacgcattcaccagttcattcataaaacaaatgtttgttgagcgcccatcatatgccaatcacagtgacaagtgctgggtgagcaatactggagagataacgctgaggtatgggtcccaggacctctcgaattggagccactcggaaatccagcggtagagtttcgaaaacttccgaacggttcccggaatacgctctcggccctctaaccgaagagttccgaatattcccgagcgttgagcgaattgtcggcggaagcagccgaacatcatcgagccgcctcggaggtggggaccgacaactcctgtcgtgcccgccggagaggaagcggaaatgcgtgtacggtattaaaggcgtcgcctcgcccctcgccttcctctttcgtcgccgctgcgaagggagccgccgccatgtctgcgcatctgcaatggatggtcgtgcggaactgctccagtttcctgatcaagaggaataagcagacctacagcactgagcccaataacttgaaggcccgcaattccttccgctacaacggactgattcaccgcaagactgtgggcgtggagccggcagccgacggcaaaggtgtcgtggtggtcattaagcggagatccgggtgagttttgtctggtttgggccagagagcggcccctttcccgggtctgggagctgtgattttttactgtcaggcaggaagagcggtaactgccatcgcggcgggcatccctggcgccagggtgttggtctgggtaccggcttccctctcggccgacttgtcagctctgtgagccgcgcgcgtctgagcccgtgtcctcacctgtaaagtggagaaatgaaaaaggacctgaacttcctcggtggttgttgagagttaaggcacggggttgatgttttcagatgaaattctcaaagcaagtcagggtggggatggatggtttcatcccacaggtgggaagattgaggcacaacaggggaggggccctcgctaccacacttaggaggggacaggctgggttggttgcagccatttgattcccattttgcctgtgtaggttagagaagaggtcttggggaccccactccatacattgtgctgtcaggtgcaggcctttttggggattccctgaatgttcgtgtgagtcgggggtctctaatggaggagtccagcttcacatgtgttcttgacagggctgtattttctttttagagtgagtttttctcaggtccttgattggaactgcctcagagccaagggtccttttactcagtggcagcaacaaacgcagtctgttggctagtgatcctcctgtctcagggacacgtagtccagggagcagccaattgcttggcacttggggaccccgttctggggagtcctgaaagctttcacctcttggattgccgaatacatgggtggcccttcctagactaagggactggcctgagtgaggctgggcctctcagccaagctgatgttgaaccactgctgtggggatgggcctggggttcctgggaagctgttcatacccattgccaggagcgtgggctctggctggacctggatcagatcctaactgaagcggcagctttctggcatgagaaaggagtgttttcatggtggacagaattgggctatgagtgtggcagaagctgtgtcctcagtactccgtgatgacgagtgagcctctgtgaaatggacaggtgggaaaacagctacctgctggcctgcccaggcacccgccacgggcccacgctgctcagcttctcaatgtgagactgtccacacctgcgaggtgtgctaaaggtgcaggttaggtggactgaccccaggacctccctgacccccaaccaggccagcggaagcctgccacctcctatgtgcggaccaccatcaacaagaatgctcgcgccacgctcagcagcatcagacacatgatccgcaagaacaagtaccgccccgacctgcgcatggcagccatccgcagggccagcgccatcctgcgcagccagaagcctgtgatggtgaagaggaagcggacccgccccaccaagagctcctgagccccctgcccccagagcaataaagtcagctggctttctcacctgcctcgactgggcctccctttttgaaacgctctggggagctctggccctgtgtgttgtcattcaggccatgtcatcaaaactctgcatgtcaccttgtccatctggaggtgatgtcaatggctggccatgcaggaggggtggggtagctgccttgtccctggtgagggcaagggtcactgtcttcacagaaaaagtttgctgacttgtgattgagacctactgtcccattgtgaggtggcctgaagaatcccagctggggcagtggcttccattcagaagaagaaaggccttttctagcccagaagggtgcaggctgagggctgggccctgggccctggtgctgtagcacggtttggggacttggggtgttcccaagacctgggggacgacagacatcacgggaggaagatgagatgacttttgcatccagggagtgggtgcagccacatttggaggggatgggctttacttgatgcaacctcatctctgagatgggcaacttggtgggtggtggcttataactgtaagggagatggcagccccagggtacagccagcaggcattgagcagccttagcattgtcccagtcttccccagctcaggggatccgtgtagagtaaccgcgagc

SEQ ID NO: 735568 - DNA, 2696 bp, Homo sapiens
cagggagctgatggggtgtgacaggcacaccataggctggaggcacaggtggagggcagggaagaggaccggcaaatctatagaatcctaaagggagccaagagaagccacatgcaaatctccctccctccaaacaattctcccttagagggcatccgcgctcccctggggtggcagtcagcgagaagtttccgtgtaggttctccccaggcttaaacagtttaagagttttatttcaagaaaactctggggagggcgaactgcaagagggctgccaggattagccgagggattccgaatgaagacggagtatttccgaacatacacacctctcccaagagcgtttccggagggttccgaaaatacccgagcgggcctcggcgccctcattggccatcaccgcgagggcttacgaagaccggaaatatccaaaggtgccggggctaggcttatatagttcacgcattcaccagttcattcataaaacaaatgtttgttgagcgcccatcatatgccaatcacagtgacaagtgctgggtgagcaatactggagagataacgctgaggtatgggtcccaggacctctcgaattggagccactcggaaatccagcggtagagtttcgaaaacttccgaacggttcccggaatacgctctcggccctctaaccgaagagttccgaatattcccgagcgttgagcgaattgtcggcggaagcagccgaacatcatcgagccgcctcggaggtggggaccgacaactcctgtcgtgcccgccggagaggaagcggaaatgcgtgtacggtattaaaggcgtcgcctcgcccctcgccttcctctttcgtcgccgctgcgaagggagccgccgccatgtctgcgcatctgcaatggatggtcgtgcggaactgctccagtttcctgatcaagaggaataagcagacctacagcactgagcccaataacttgaaggcccgcaattccttccgctacaacggactgattcaccgcaagactgtgggcgtggagccggcagccgacggcaaaggtgtcgtggtggtcattaagcggagatccgggtgagttttgtctggtttgggccagagagcggcccctttcccgggtctgggagctgtgattttttactgtcaggcaggaagagcggtaactgccatcgcggcgggcatccctggcgccagggtgttggtctgggtaccggcttccctctcggccgacttgtcagctctgtgagccgcgcgcgtctgagcccgtgtcctcacctgtaaagtggagaaatgaaaaaggacctgaacttcctcggtggttgttgagagttaaggcacggggttgatgttttcagatgaaattctcaaagcaagtcagggtggggatggatggtttcatcccacaggtgggaagattgaggcacaacaggggaggggccctcgctaccacacttaggaggggacaggctgggttggttgcagccatttgattcccattttgcctgtgtaggttagagaagaggtcttggggaccccactccatacattgtgctgtcaggtgcaggcctttttggggattccctgaatgttcgtgtgagtcgggggtctctaatggaggagtccagcttcacatgtgttcttgacagggctgtattttctttttagagtgagtttttctcaggtccttgattggaactgcctcagagccaagggtccttttactcagtggcagcaacaaacgcagtctgttggctagtgatcctcctgtctcagggacacgtagtccagggagcagccaattgcttggcacttggggaccccgttctggggagtcctgaaagctttcacctcttggattgccgaatacatgggtggcccttcctagactaagggactggcctgagtgaggctgggcctctcagccaagctgatgttgaaccactgctgtggggatgggcctggggttcctgggaagctgttcatacccattgccaggagcgtgggctctggctggacctggatcagatcctaactgaagcggcagctttctggcatgagaaaggagtgttttcatggtggacagaattgggctatgagtgtggcagaagctgtgtcctcagtactccgtgatgacgagtgagcctctgtgaaatggacaggtgggaaaacagctacctgctggcctgcccaggcacccgccacgggcccacgctgctcagcttctcaatgtgagactgtccacacctgcgaggtgtgctaaaggtgcaggttaggtggactgaccccaggacctccctgacccccaaccaggccagcggaagcctgccacctcctatgtgcggaccaccatcaacaagaatgctcgcgccacgctcagcagcatcagacacatgatccgcaagaacaagtaccgccccgacctgcgcatggcagccatccgcagggccagcgccatcctgcgcagccagaagcctgtgatggtgaagaggaagcggacccgccccaccaagagctcctgagccccctgcccccagagcaataaagtcagctggctttctcaaaaaaaaaaaaaaaaaaaaaaaaaaaaggggggggggttccttttaaagcccccctgagggattcaaattttgaaattggccgtttttttaccccgggaaaaatttttgcccttttttgcttttcccttgggggg

SEQ ID NO: 735569 - DNA, 2668 bp, Homo sapiens
cagggagctgatggggtgtgacaggcacaccataggctggaggcacaggtggagggcagggaagaggaccggcaaatctatagaatcctaaagggagccaagagaagccacatgcaaatctccctccctccaaacaattctcccttagagggcatccgcgctcccctggggtggcagtcagcgagaagtttccgtgtaggttctccccaggcttaaacagtttaagagttttatttcaagaaaactctggggagggcgaactgcaagagggctgccaggattagccgagggattccgaatgaagacggagtatttccgaacatacacacctctcccaagagcgtttccggagggttccgaaaatacccgagcgggcctcggcgccctcattggccatcaccgcgagggcttacgaagaccggaaatatccaaaggtgccggggctaggcttatatagttcacgcattcaccagttcattcataaaacaaatgtttgttgagcgcccatcatatgccaatcacagtgacaagtgctgggtgagcaatactggagagataacgctgaggtatgggtcccaggacctctcgaattggagccactcggaaatccagcggtagagtttcgaaaacttccgaacggttcccggaatacgctctcggccctctaaccgaagagttccgaatattcccgagcgttgagcgaattgtcggcggaagcagccgaacatcatcgagccgcctcggaggtggggaccgacaactcctgtcgtgcccgccggagaggaagcggaaatgcgtgtacggtattaaaggcgtcgcctcgcccctcgccttcctctttcgtcgccgctgcgaagggagccgccgccatgtctgcgcatctgcaatggatggtcgtgcggaactgctccagtttcctgatcaagaggaataagcagacctacagcactgagcccaataacttgaaggcccgcaattccttccgctacaacggactgattcaccgcaagactgtgggcgtggagccggcagccgacggcaaaggtgtcgtggtggtcattaagcggagatccgggtgagttttgtctggtttgggccagagagcggcccctttcccgggtctgggagctgtgattttttactgtcaggcaggaagagcggtaactgccatcgcggcgggcatccctggcgccagggtgttggtctgggtaccggcttccctctcggccgacttgtcagctctgtgagccgcgcgcgtctgagcccgtgtcctcacctgtaaagtggagaaatgaaaaaggacctgaacttcctcggtggttgttgagagttaaggcacggggttgatgttttcagatgaaattctcaaagcaagtcagggtggggatggatggtttcatcccacaggtgggaagattgaggcacaacaggggaggggccctcgctaccacacttaggaggggacaggctgggttggttgcagccatttgattcccattttgcctgtgtaggttagagaagaggtcttggggaccccactccatacattgtgctgtcaggtgcaggcctttttggggattccctgaatgttcgtgtgagtcgggggtctctaatggaggagtccagcttcacatgtgttcttgacagggctgtattttctttttagagtgagtttttctcaggtccttgattggaactgcctcagagccaagggtccttttactcagtggcagcaacaaacgcagtctgttggctagtgatcctcctgtctcagggacacgtagtccagggagcagccaattgcttggcacttggggaccccgttctggggagtcctgaaagctttcacctcttggattgccgaatacatgggtggcccttcctagactaagggactggcctgagtgaggctgggcctctcagccaagctgatgttgaaccactgctgtggggatgggcctggggttcctgggaagctgttcatacccattgccaggagcgtgggctctggctggacctggatcagatcctaactgaagcggcagctttctggcatgagaaaggagtgttttcatggtggacagaattgggctatgagtgtggcagaagctgtgtcctcagtactccgtgatgacgagtgagcctctgtgaaatggacaggtgggaaaacagctacctgctggcctgcccaggcacccgccacgggcccacgctgctcagcttctcaatgtgagactgtccacacctgcgaggtgtgctaaaggtgcaggttaggtggactgaccccaggacctccctgacccccaaccaggccagcggaagcctgccacctcctatgtgcggaccaccatcaacaagaatgctcgcgccacgctcagcagcatcagacacatgatccgcaagaacaagtaccgccccgacctgcgcatggcagccatccgcagggccagcgccatcctgcgcagccagaagcctgtgatggtgaagaggaagcggacccgccccaccaagagctcctgagccccctgcccccagagcaataaagtcagctggctttctcagcgcaggatggcgctggccctgcgatgctgccatgcgcaggtcgggcggataattgttcttgcggatcatgtgtctgatgctgctgagcgtggcgcgagcattcttg

SEQ ID NO: 735570 - DNA, 4152 bp, Homo sapiens
gccccgcaagcttccttgggcgcccggcgcgagggactctgagagcccagccgctgcctcggagcccccattcacgtcccctcctcccgctcccccgccaccgcgcctccgactcttctcccccgcgccgcggcgcccaccgcgtctcaggtttaatcccgggttggacctgctggtttgctctccccgctctgagcctcacagccagcccagagaagtggaatctgcactgaaactctgggtggctggagccggcggactgggcatgctcagaagccagggctggctttggtctcaagtaggaagctttggcactcgggaggcagcggcgactttggggaaagttgatcggagaggggaggaagcctcaagacgcggagcagcggcaggaaggagcccccggcagcccggaggagcatgggcaccttgcgggatttacagtacgcgctccaggagaagatcgaggagctgaggcagcgggatgctctcatcgacgagctggagctggagttggatcagaaggacgaactgatccagaagctgcagaacgagctggacaagtaccgctcggtgatccgaccagccacccagcaggcgcagaagcagagcgcgagcaccttgcagggcgagccgcgcaccaagcggcaggcgatctccgccgagcccaccgccttcgacatccaggatctcagccatgtgaccctgcccttctaccccaagagcccacagtccaaggatcttataaaggaagctatccttgacaatgactttatgaagaacttggagctgtcgcagatccaggagattgtggattgtatgtacccggtggagtatggcaaggacagttgcatcatcaaagaaggagacgtggggtcactggtgtatgtcatggaagatggtaaggttgaagttacaaaagaaggtgtgaagttgtgtaccatgggtccaggaaaagtgtttggggaattggctattctttacaactgtacccggacagcgaccgtcaagactcttgtaaatgtaaaactctgggccattgatcgacaatgttttcaaacaataatgatgaggacaggactcatcaagcataccgagtatatggaatttttaaaaagcgttccaacattccagagccttcctgaagagatcctcagcaagcttgctgatgtccttgaagagacccactatgaaaatggagaatatattatcaggcaaggtgcaagaggggacaccttctttatcatcagcaaaggaacggtaaatgtcactcgtgaagactcaccgagtgaagacccagtctttcttagaactttaggaaaaggagactggtttggagagaaagccttgcagggggaagatgtgagaacagcaaacgtaattgctgcagaagctgtaacctgccttgtgattgacagagactcttttaaacatttgattggagggctggatgatgtttctaataaagcatatgaagatgcagaagctaaagcaaaatatgaagctgaagcggctttcttcgccaacctgaagctgtctgatttcaacatcattgatacccttggagttggaggtttcggacgagtagaactggtccagttgaaaagtgaagaatccaaaacgtttgcaatgaagattctcaagaaacgtcacattgtggacacaagacagcaggagcacatccgctcagagaagcagatcatgcagggggctcattccgatttcatagtgagactgtacagaacatttaaggacagcaaatatttgtatatgttgatggaagcttgtctaggtggagagctctggaccattctcagggatagaggttcgtttgaagattctacaaccagattttacacagcatgtgtggtagaagcttttgcctatctgcattccaaaggaatcatttacagggacctcaagccagaaaatctcatcctagatcaccgaggttatgccaaactggttgattttggctttgcaaagaaaataggatttggaaagaaaacatggactttttgtgggactccagagtatgtagccccagagatcatcctgaacaaaggccatgacatttcagccgactactggtcactgggaatcctaatgtatgaactcctgactggcagcccacctttctcaggcccagatcctatgaaaacctataacatcatattgagggggattgacatgatagaatttccaaagaagattgccaaaaatgctgctaatttaattaaaaaactatgcagggacaatccatcagaaagattagggaatttgaaaaatggagtaaaagacattcaaaagcacaaatggtttgagggctttaactgggaaggcttaagaaaaggtaccttgacacctcctataataccaagtgttgcatcacccacagacacaagtaattttgacagtttccctgaggacaacgatgaaccaccacctgatgacaactcaggatgggatatagacttctaatgtatttctcttacctgcttctgccttgctgaagacagctttttctgagacacagctgccagcaaacctgagggaaagagagaagattagtgctcggggtcaccatgatgcctttgatcgatgctgctccagtaactacagtggcattaggacttatcgcttagatgacaatagtgctctttacatgttttctgtttgaacctaaaatagcagttgacatggtggtcctgaagcaaagcctttcaccagtaaagagatgttttctattgttgcaatgaccttgctttgctctgattataatttgaaagactgtaggaaacacttcaatgtagtataagagtctgtaccttgctggaatattcaagaagatgaaagaataatatattgggtacaatagattactatggtacagaaactgggctattccctttcttcaagtgaaggctgtgggatctattacagctgcaggccggtgtatataccatacaaaagaggaccacacatctgttggtcacagagttcatgtcacaccagtgctagaagtttcatgattttatttcccagcagtgctgatgacaagactgaatgttaccttttctttctgacagattttaaaaattgatatgataaaagcacaactgctatagattctgctgagacctctcatagtaggtatatatgagttttcacagaagactgaaaaataatgcatgatatttgtttgttttttttgataaattggcatgacagagtggggaaaaaaagcaattcacaaaaccatttcatattttttaaaatattgtgcttaaagatggtcctggaagtaaatgactagcagccaattggttttacttaacataccctcaaactgaggcttaaagtattcccttttataaaaataaatgcttggggtagggtggagtggggagggattaaaacccatccaaaaaataaataaaaactatataggtgctatgtatatctttcatctgtaaatgtcagtgtctgaacagacaacacaaattcaaatcattatacgtgtagccagaaactcaagcattttcactaaagttattaaaccaaactcctgtccaatttcacttatacaacatagtcagtctagagttgagagacaaaggtaattataaacctatttgaactagcttcttgtcttaggcctgaaccaaaaaacaacaaacaaacaaaaaacaagaatgaaaaacagaaataaaagaagtagaaaagacaaagaaagaaagcccaaagtcaaagttgttaatatttacaggtttaccagatctggaacattacttatttgaggtcagagaacaaaacaagaacctggccaggtgttgattaccttttagtgaataagctgagtccatatacttgtctaactaagaaagcagtacagaggaaaacaggaacctgatttttttaaaataaattttaaataaaatagaattactacaattctgcaatttcatactacctaaaaaagactagatttgaaaatgtcaagctgatttactttattcacatggagaaaagaatccacaaattaaactgagtccttcactggcatgccagttgactattattagctgtcataagtaactcagccatttggaagcatttcctggacaaaattacattatacctgtgaagaaaaat

SEQ ID NO: 735571 - DNA, 3711 bp, Homo sapiens
gcggaggggctcagtgaaaaaatgagcgagctagaggaagactttgccaagattctcatgctcaaggaggagaggatcaaagagctggagaagcggctgtcagagaaggaggaagaaattcaggagctgaagaggaaactccacaaatgccagtcggtgctcccagtgccctcgacccacatcggcccccggaccacccgggcgcagggcatctcggccgagccgcagacgtacaggtccttccacgacctccgacaggcattccggaagttcaccaagtccgaaaggtccaaggatcttataaaggaagctatccttgacaatgactttatgaagaacttggagctgtcgcagatccaggagattgtggattgtatgtacccggtggagtatggcaaggacagttgcatcatcaaagaaggagacgtggggtcactggtgtatgtcatggaagatggtaaggttgaagttacaaaagaaggtgtgaagttgtgtaccatgggtccaggaaaagtgtttggggaattggctattctttacaactgtacccggacagcgaccgtcaagactcttgtaaatgtaaaactctgggccattgatcgacaatgttttcaaacaataatgatgaggacaggactcatcaagcataccgagtatatggaatttttaaaaagcgttccaacattccagagccttcctgaagagatcctcagcaagcttgctgatgtccttgaagagacccactatgaaaatggagaatatattatcaggcaaggtgcaagaggggacaccttctttatcatcagcaaaggaacggtaaatgtcactcgtgaagactcaccgagtgaagacccagtctttcttagaactttaggaaaaggagactggtttggagagaaagccttgcagggggaagatgtgagaacagcaaacgtaattgctgcagaagctgtaacctgccttgtgattgacagagactcttttaaacatttgattggagggctggatgatgtttctaataaagcatatgaagatgcagaagctaaagcaaaatatgaagctgaagcggctttcttcgccaacctgaagctgtctgatttcaacatcattgatacccttggagttggaggtttcggacgagtagaactggtccagttgaaaagtgaagaatccaaaacgtttgcaatgaagattctcaagaaacgtcacattgtggacacaagacagcaggagcacatccgctcagagaagcagatcatgcagggggctcattccgatttcatagtgagactgtacagaacatttaaggacagcaaatatttgtatatgttgatggaagcttgtctaggtggagagctctggaccattctcagggatagaggttcgtttgaagattctacaaccagattttacacagcatgtgtggtagaagcttttgcctatctgcattccaaaggaatcatttacagggacctcaagccagaaaatctcatcctagatcaccgaggttatgccaaactggttgattttggctttgcaaagaaaataggatttggaaagaaaacatggactttttgtgggactccagagtatgtagccccagagatcatcctgaacaaaggccatgacatttcagccgactactggtcactgggaatcctaatgtatgaactcctgactggcagcccacctttctcaggcccagatcctatgaaaacctataacatcatattgagggggattgacatgatagaatttccaaagaagattgccaaaaatgctgctaatttaattaaaaaactatgcagggacaatccatcagaaagattagggaatttgaaaaatggagtaaaagacattcaaaagcacaaatggtttgagggctttaactgggaaggcttaagaaaaggtaccttgacacctcctataataccaagtgttgcatcacccacagacacaagtaattttgacagtttccctgaggacaacgatgaaccaccacctgatgacaactcaggatgggatatagacttctaatgtatttctcttacctgcttctgccttgctgaagacagctttttctgagacacagctgccagcaaacctgagggaaagagagaagattagtgctcggggtcaccatgatgcctttgatcgatgctgctccagtaactacagtggcattaggacttatcgcttagatgacaatagtgctctttacatgttttctgtttgaacctaaaatagcagttgacatggtggtcctgaagcaaagcctttcaccagtaaagagatgttttctattgttgcaatgaccttgctttgctctgattataatttgaaagactgtaggaaacacttcaatgtagtataagagtctgtaccttgctggaatattcaagaagatgaaagaataatatattgggtacaatagattactatggtacagaaactgggctattccctttcttcaagtgaaggctgtgggatctattacagctgcaggccggtgtatataccatacaaaagaggaccacacatctgttggtcacagagttcatgtcacaccagtgctagaagtttcatgattttatttcccagcagtgctgatgacaagactgaatgttaccttttctttctgacagattttaaaaattgatatgataaaagcacaactgctatagattctgctgagacctctcatagtaggtatatatgagttttcacagaagactgaaaaataatgcatgatatttgtttgttttttttgataaattggcatgacagagtggggaaaaaaagcaattcacaaaaccatttcatattttttaaaatattgtgcttaaagatggtcctggaagtaaatgactagcagccaattggttttacttaacataccctcaaactgaggcttaaagtattcccttttataaaaataaatgcttggggtagggtggagtggggagggattaaaacccatccaaaaaataaataaaaactatataggtgctatgtatatctttcatctgtaaatgtcagtgtctgaacagacaacacaaattcaaatcattatacgtgtagccagaaactcaagcattttcactaaagttattaaaccaaactcctgtccaatttcacttatacaacatagtcagtctagagttgagagacaaaggtaattataaacctatttgaactagcttcttgtcttaggcctgaaccaaaaaacaacaaacaaacaaaaaacaagaatgaaaaacagaaataaaagaagtagaaaagacaaagaaagaaagcccaaagtcaaagttgttaatatttacaggtttaccagatctggaacattacttatttgaggtcagagaacaaaacaagaacctggccaggtgttgattaccttttagtgaataagctgagtccatatacttgtctaactaagaaagcagtacagaggaaaacaggaacctgatttttttaaaataaattttaaataaaatagaattactacaattctgcaatttcatactacctaaaaaagactagatttgaaaatgtcaagctgatttactttattcacatggagaaaagaatccacaaattaaactgagtccttcactggcatgccagttgactattattagctgtcataagtaactcagccatttggaagcatttcctggacaaaattacattatacctgtgaagaaaaat

SEQ ID NO: 735572 - DNA, 1423 bp, Homo sapiens
taaatggtgttgtagtagcaattctgtgattctgtagttgcaagtacctatttctagtcctaacagtttgaatattttatatagtttatttcacacacactgtctgtatacatatgtatacacatatacatacatctatatattcatgaagatgatgatgacactttgtacaagttcatacattaaatacattgcatgaatgtggtgtaaacaatatgaaaacgtactctactttgcatttatttgaaatataaattttaaaactgacatagtgtcacaagaattagaaaaaaatgtactcttatgactaactgcatttcaagacggtgtggctataaaccctaattgagaatgcagattgatttccacctctctgctgaacatagaggagttcctgatatcagacaccagtacagtatgtgaggaactccctgagactgtgtacagtgcagtaaacagttaccgttgccatcaggggtcaggagaaatccccttccttaaaagtacattgacccagtactatttttatatttgtctatttgtattgcagttggaatttctgacttgaacaggtagaaagatgttatttacttaaatattagatgagaaggttttagagccatatgcctcactgaattggtattatgcttcccttaacactggttggagatactgtagtaatatcacctgtgacttgaaagtccatagtgtgcctttgacaatatgagtattttcagttaggcactgaaatcatttcaagctagagaactgaataccaagctgatagtgcaaatcttctagaagatcctctgcttctgccttgctgaagacagctttttctgagacacagctgccagcaaacctcgttatgaaaccaatgatgaaaaagtcacttggtgcacctctcaacaaaacaggatgctttttccgagttcttgtatatgcaaatcatttacgaggcaagttttcaacagacctagaaagcaaaacattgaaagtgtgttgttagccctcctctctgcccctgaatcaacagacagagctctgggaccttggcaatgactcagaggttggggctttctgagtaaagggacatttctttaagcatcatctatcaaatttatttcaatgtatgatgtttttacaactggtcagttcttttgtattcttacagctatggttatttgattgtcctcttacaatttgttctacatgaaagagttctttgttagtcagaatgcaacaaactgtcatcaaatggtcattgaccacttgcactcttttgatgtagattaaaaactttttcataaatttacctgctttgatttgctctgtatttttcctgcagctgtaattgctgagtgcctgttgtatactttatagagttgaaataaaaaaataattacttttgaaaaaaaaaaat

SEQ ID NO: 735573 - DNA, 2194 bp, Homo sapiens
agagaatctgctcctataacgttttaaaaatccccaaagtcccagagattagcacttgctatggattttggaactatggttcaagtctaagacaaccaatatgaataagttcaatggagaaggaagaagtagcattcagcacaagaaactgtagattgtttctcccacttgttactgcatctttgttcatttcacccatagcattgcatttgatgtctgaagtaattaccacaaaataaaggtaaactacatcttccaagatgtaccaacagaaaacattcgtctaattttgtcaacattgaatttttaggatttaaatcttgtcttaatgaagactctagggctaaaattcatggtcagttccataaaatgcatctcactttatttctgaatttttcacaacccctctattttcttacattaaagaacatctggataagttagaatagtgccaacttgtttgatttgttatatgattttcttgttaatgtgttgagtatgggaaataagggctttctgtgtgtcttgactcacaggaaaactgaaactgccaagggaagcaacattaaaacaactgggatagattgaatacatttgaaaaaataatttctggaaaaacgctatacatgctttttatgtttatatcttctttcttattaagacatgaatcagatccatgtgggcattcaaaacaaatttattttgggttatattctttacaagtcataatttttacctaaaattgtggaatatgcatgtgaattacacatgtgtagtaataaactcaactattgaatttttcctgtttcatttctaaatgactgaactgatggtaaacaaatttaatgaagtcagctaccatgttgaaaataaggatattagaactgatttcatacaatagaggtgatctgtgcattatccataacaacgttttctttcactataggaccacagacaaatatttatgtaaataggtatttttgtgtgatattttgtggtacatataactttttttagtgtttcacagcattattatttcattttatttgtattgaataatgtttttaggtccaagtagacttgaattaatgtcataattgtcagtattattgaaaattatgtcaactgtactgttattcatctgtcccatagtttagaacatgacctggctatctggcattgttgcaagtgccttaaattcatggcatcctattaaaaaaacaaatttggtgttatgctgcatgacaaagacaaacacacctcaaaatgttgtcctttcttagcttgctgcgttttacagttctttctgctaacaatttataagcctttattatataatattgatgaattacagaaatgatgaagttgttctcttatttctgttaaatgtaccagagctgtgtatctgttaatgagatacagcgtcatttctgtgaaatgtataaatgtatgtgcaggtcaaattaatatatgacattctatcagtctgtatacaggtattcctgttttgctaagctgtgcagattctgtaaaaataaattagtgcagtcaagttctaacatatctcattttatagactccattgacaatggtccaaccgaaaagaaaaattggaaatgactgctaaccagacctcgttatgaaaccaatgatgaaaaagtcacttggtgcacctctcaacaaaacaggatgctttttccgagttcttgtatatgcaaatcatttacgaggcaagttttcaacagacctagaaagcaaaacattgaaagtgtgttgttagccctcctctctgcccctgaatcaacagacagagctctgggaccttggcaatgactcagaggttggggctttctgagtaaagggacatttctttaagcatcatctatcaaatttatttcaatgtatgatgtttttacaactggtcagttcttttgtattcttacagctatggttatttgattgtcctcttacaatttgttctacatgaaagagttctttgttagtcagaatgcaacaaactgtcatcaaatggtcattgaccacttgcactcttttgatgtagattaaaaactttttcataaatttacctgctttgatttgctctgtatttttcctgcagctgtaattgctgagtgcctgttgtatactttatagagttgaaataaaaaaataattacttttgaaaaaaaaaaat

SEQ ID NO: 735574 - DNA, 675 bp, Homo sapiens
tagaataatatatactttaatgttcaagaagaaactagatgagtagtctatttaatgactccattgacaatggtccaaccgaaaagaaaaattggaaatgactgctaaccagacctcgttatgaaaccaatgatgaaaaagtcacttggtgcacctctcaacaaaacaggatgctttttccgagttcttgtatatgcaaatcatttacgaggcaagttttcaacagacctagaaagcaaaacattgaaagtgtgttgttagccctcctctctgcccctgaatcaacagacagagctctgggaccttggcaatgactcagaggttggggctttctgagtaaagggacatttctttaagcatcatctatcaaatttatttcaatgtatgatgtttttacaactggtcagttcttttgtattcttacagctatggttatttgattgtcctcttacaatttgttctacatgaaagagttctttgttagtcagaatgcaacaaactgtcatcaaatggtcattgaccacttgcactcttttgatgtagattaaaaactttttcataaatttacctgctttgatttgctctgtatttttcctgcagctgtaattgctgagtgcctgttgtatactttatagagttgaaataaaaaaataattacttttgaaaaaaaaaaat

SEQ ID NO: 735575 - DNA, 1430 bp, Homo sapiens
gccccgcaagcttccttgggcgcccggcgcgagggactctgagagcccagccgctgcctcggagcccccattcacgtcccctcctcccgctcccccgccaccgcgcctccgactcttctcccccgcgccgcggcgcccaccgcgtctcaggtttaatcccgggttggacctgctggtttgctctccccgctctgagcctcacagccagcccagagaagtggaatctgcactgaaactctgggtggctggagccggcggactgggcatgctcagaagccagggctggctttggtctcaagtaggaagctttggcactcgggaggcagcggcgactttggggaaagttgatcggagaggggaggaagcctcaagacgcggagcagcggcaggaaggagcccccggcagcccggaggagcatgggcaccttgcgggatttacagtacgcgctccaggagaagatcgaggagctgaggcagcgggatgctctcatcgacgagctggagctggagttggatcagaaggacgaactgatccagaagctgcagaacgagctggacaagtaccgctcggtgatccgaccagccacccagcaggcgcagaagcagagcgcgagcaccttgcagggcgagccgcgcaccaagcggcaggcgatctccgccgagcccaccgccttcgacatccaggatctcagccatgtgaccctgcccttctaccccaagagcccacagtccaaggatcttataaaggaagctatccttgacaatgactttatgaagaacttggagctgtcgcagatccaggagattgtggattgtatgtacccggtggagtatggcaaggacagttgcatcatcaaagaaggagacgtggggtcactggtgtatgtcatggaagatggtaaggttgaagttacaaaagaaggtgtgaagttgtgtaccatgggtccaggaaaagtgtttggggaattggctattctttacaactgtacccggacagcgaccgtcaagactcttgtaaatgtaaaactctgggccattgatcgacaatgttttcaaacaataatgatgaggacaggactcatcaagcataccgagtatatggaatttttaaaaagcgttccaacattccagagccttcctgaagagatcctcagcaagcttgctgatgtccttgaagagacccactatgaaaatggagaatatattatcaggcaaggtgcaagaggggacaccttctttatcatcagcaaaggaacggtaaatgtcactcgtgaagactcaccgagtgaagacccagtctttcttagaactttaggaaaaggagactggtttggagagaaagccttgcagggctggacttggaatctgtttgaatacgttgtggaataaattccttaatttctaataaatcagtgttatattaattggaa

SEQ ID NO: 735576 - DNA, 1373 bp, Homo sapiens
gccccgcaagcttccttgggcgcccggcgcgagggactctgagagcccagccgctgcctcggagcccccattcacgtcccctcctcccgctcccccgccaccgcgcctccgactcttctcccccgcgccgcggcgcccaccgcgtctcaggtttaatcccgggttggacctgctggtttgctctccccgctctgagcctcacagccagcccagagaagtggaatctgcactgaaactctgggtggctggagccggcggactgggcatgctcagaagccagggctggctttggtctcaagtaggaagctttggcactcgggaggcagcggcgactttggggaaagttgatcggagaggggaggaagcctcaagacgcggagcagcggcaggaaggagcccccggcagcccggaggagcatgggcaccttgcgggatttacagtacgcgctccaggagaagatcgaggagctgaggcagcgggatgctctcatcgacgagctggagctggagttggatcagaaggacgaactgatccagaagctgcagaacgagctggacaagtaccgctcggtgatccgaccagccacccagcaggcgcagaagcagagcgcgagcaccttgcagggcgagccgcgcaccaagcggcaggcgatctccgccgagcccaccgccttcgacatccaggatctcagccatgtgaccctgcccttctaccccaagagcccacagtccaaggatcttataaaggaagctatccttgacaatgactttatgaagaacttggagctgtcgcagatccaggagattgtggattgtatgtacccggtggagtatggcaaggacagttgcatcatcaaagaaggagacgtggggtcactggtgtatgtcatggaagatggtaaggttgaagttacaaaagaaggtgtgaagttgtgtaccatgggtccaggaaaagtgtttggggaattggctattctttacaactgtacccggacagcgaccgtcaagaagatggagtcttgctatgttgcccagctgttcttgaactcctgggctcaagaagtcctcctgccttgacctctcaaagtgctggaattactggaatgaaccactgggcttagccccatttttcacctgtaaccttagtttgtacaattgttgacttttctgttagaaaatagggaaccttcgtatttaaataactttatagcaagtattgaatgtcaaaggttaacttcaaatagcaaatgctttttagtgttcctctacccaatgtaaaacaacaaaattaaccaacttccagagcagtataagaattctaaaagcatcattacaccccctggctttacattttacactccatatactgcaaa

SEQ ID NO: 735577 - DNA, 1141 bp, Homo sapiens
gagacctgtaggaggaacagtgtgtagagtgtggttcaaagagcactgggctgggtggaagagggtgagtttaagtcaggtggccaaacttctgtagcctgaaagcctctctggtctgcgaacttctccgaacctcgtcttctttcttatttcacattttcaagatgaaaatattagaatacattagatcttgttctggtctgaaaaatgcctctatgggtagccaaataactcagttgtcaagaagaaaaacggatatataaattagtctaataagacatgtatttctccaagaattcaagaaatgcaatttgctgccctgctgggctccgccagactccggagaatcattggcgtacaagacaggccttgccttcatggagcttatagccccttgaagtgggccttagataatgtccactgctttttatcatgaagagagaatatagaaatgttttgcaaaaaatttttttaacttcacaaagcttcaaagccacagagtattttcagtatctctagattgtttgtgaagacttatatgaaaaatcagctgttactatgtaaatatgtcagtttctgttaaccagatattgcagtgatgccttaaaggggctggtgcttaagcaaaaatgctttgtagagcagggaagaaggcagcactgtgaataaaagtgtctggtttttgtgtttctagaactgcctgatgctccatggggattcttcatgatgatttttttttgccttagagattatatatgcttatgttaatttatattagatggtatataaggggcttgataataacatgtctggtgcctcaggggctcataaataagaaagtacttaaacacacacaccaaaatttttgagagtgataattttaaaaataaataggaaaaaaagaaaggcttggtaaacactggctacttcggactggtgtcttcattgttgttactcagcagaggtagctgttaaacactgagtgggcatgagcccacaagggctgcggttggagcacatgacagtggttactatacatacgtggatcacttgttatgtaagtgattcatgcactcccagtgcccttggttgggcttattctcaataaaaccagtatcattgttctcctcaaattaaaaaa

SEQ ID NO: 735578 - DNA, 1195 bp, Homo sapiens
gaaccattatgttgagcccaaaatggaagtaataataaatgcctcctggaggctgtgggtgtgggggattctgtatctggattccgtatcactccaagtggaggctgtgggtgtgggggattctgtatctggattcccgtatccactccaggtggagtctctgaaatgttagaagaagcgctgaagccttgattgatagttctgccccttgttgccctggggcttatctgattatgggacgagggtagaaagtaagaagcacttttgaatttgtggggtagaacttcaacaataagtcagttctagtggctgtcgcctggggactagtgagaaagctactcttctccctcttccctctttctccccatggccccactgcagaattaaagaaggaagaagggaaggcggaggagtctataagaaggaatcatgatttctatttagcagattggatgggcaggtggagaatgcctgggggtagaaatgttagatcttgcaacatcagatccttggaataaagaagcctctctgtgctgcctgctgtgtcctgggttcttgccttgggggactcggggagcgaggaagagagctcttcctcctggataacatcttggattctgtaccattccactgtcccttcccaccagacattttaaatggtcctcgttgtccccttccctgcccttgccttcctgctcattgtgtaggaaccagtgacttcatgaagtttctccggagccacctgcatcctgctgctctgaagtcacttcctgcctgaggtgtggaggcggcagggagaaaccaggaagccactaataatatcaagaggccggggcgtgcatctgtgctggagatcttaatgctggcgacatgcctccatcaccaaggaagatggataagagttgggtcccgtaaagacccacaggggctggaggtggcactgagaagactgagttagaactaacgggccagcccaccctcccccagcaagggtatcttgaatctatccagggtccagtgcatgcatctctcccaccctttcccctgtcctgtgtgtgtgctgggtgcggaggtcactaattctgatattaccttcctctgggccttaaattcctcatctgtgaaaaagtcagttaccatgatctctgcagctacctccaacattgaaagtttgtagttgtcttaaaatgtcttc

SEQ ID NO: 735579 - DNA, 1894 bp, Homo sapiens
ctgtatctggattccgtatcactccaactggaggctgtgggtgtgggggattctgtatctggattccgtatcactccaagtggaggctggcaggtttttctgcaagatggtccagaatctaaaatgtcccattaatctggtcacttgggtttggctctgctgtatccatctatagtggtagagacccaccagggctcaagtggagtccatcatcctcccacgggggcctgttcttagcactgagttgatcgctccatgggggagagatcagacattccttatcagagatgatgtgaccttttctgactctgcccagtctctatgaatgttatggcctagggaagaatcatgaaactctttagcttgattagatggtaaacagtgttaacccatcctttactacagaggcatatgggtttgaatgttacctggggttctctctattgagttgagccccttcttcctttagtgggttttggacatcttctggcaagtgtccagatgccagaaccttcttttcctctagaagggatggtgcttggtaaccttaccttttaaaagctgggtctgtgacctggtcttcccatccctgcattcctgtctggaaccagtgaatgcattagaaccttccataggaaaagaaaaggggctgagttccattctgggtttgctgtagtttggttgggattattgttggcattacagatgtaaaagattgactagcccataggccaaaggcctgttctagttgaccaagtttcaagtaggattaagaggttggttgaggggtgcagtttctggtgtaggccaggtaggtagaaagtgaggaacagggttgcctcttggctgggtggagtctctgaaatgttagaagaagcgctgaagccttgattgatagttctgccccttgttgccctggggcttatctgattatgggacgagggtagaaagtaagaagcacttttgaatttgtggggtagaacttcaacaataagtcagttctagtggctgtcgcctggggactagtgagaaagctactcttctccctcttccctctttctccccatggccccactgcagaattaaagaaggaagaagggaaggcggaggagtctataagaaggaatcatgatttctatttagcagattggatgggcaggtggagaatgcctgggggtagaaatgttagatcttgcaacatcagatccttggaataaagaagcctctctgtgctgcctgctgtgtcctgggttcttgccttgggggactcggggagcgaggaagagagctcttcctcctggataacatcttggattctgtaccattccactgtcccttcccaccagacattttaaatggtcctcgttgtccccttccctgcccttgccttcctgctcattgtgtaggaaccagtgacttcatgaagtttctccggagccacctgcatcctgctgctctgaagtcacttcctgcctgaggtgtggaggcggcagggagaaaccaggaagccactaataatatcaagaggccggggcgtgcatctgtgctggagatcttaatgctggcgacatgcctccatcaccaaggaagatggataagagttgggtcccgtaaagacccacaggggctggaggtggcactgagaagactgagttagaactaacgggccagcccaccctcccccagcaagggtatcttgaatctatccagggtccagtgcatgcatctctcccaccctttcccctgtcctgtgtgtgtgctgggtgcggaggtcactaattctgatattaccttcctctgggccttaaattcctcatctgtgaaaaagtcagttaccatgatctctgcagctacctccaacattgaaagtttgtagttgtcttaaaatgtcttc

SEQ ID NO: 735580 - DNA, 785 bp, Homo sapiens
gagaagccgtataagtgtgagacgtgcggctcgcgctttgtacaggtacggagccagcctccaagtggcttccaaggcaaacctgcaagaggtggggtgggccaatagggagggttctgttcctcccagaggcaggacttgaagtctcctccctcccaggtggcacatctgcgggcgcacgtgctgatccacaccggggagaagccctacccttgccctacctgcggaacccgcttccgccacctgcagaccctcaagagccacgttcgcatccacaccggagagaagccttaccacgaaccagtgacttcatgaagtttctccggagccacctgcatcctgctgctctgaagtcacttcctgcctgaggtgtggaggcggcagggagaaaccaggaagccactaataatatcaagaggccggggcgtgcatctgtgctggagatcttaatgctggcgacatgcctccatcaccaaggaagatggataagagttgggtcccgtaaagacccacaggggctggaggtggcactgagaagactgagttagaactaacgggccagcccaccctcccccagcaagggtatcttgaatctatccagggtccagtgcatgcatctctcccaccctttcccctgtcctgtgtgtgtgctgggtgcggaggtcactaattctgatattaccttcctctgggccttaaattcctcatctgtgaaaaagtcagttaccatgatctctgcagctacctccaacattgaaagtttgtagttgtcttaaaatgtcttc

SEQ ID NO: 735581 - DNA, 786 bp, Homo sapiens
cagatggagcacgtggtccaggcatgccaccgcttcatccaggccagctatgaacctctgggcatctccctgcgccccctggaagcagaacccccaacacccccaacggcccctccaccaggtagtcccaggcgctccgaaggacacccagacccacctactgaatctcgaagctgcagtcaaggcccccccagtccagccagccctgaccccaaggcctgcaactggaaaaagtacaagtacatcgtgctaaactctcaggcctcccaagcagggagcctggtcggggagagaagttctggtcaaccttgcccccaagccaggctccccagtggagacgaggcctccagcagcagcagcagcagcagcagcagcagcagtgaagaaggacccattcctggtccccagagcaggctctctccaactgctgccactgtgcagttcaaatgtggggctccagccagtaccccctacctcctcacatcccaggctcaagacacctctggatcaccctctgaacgggctcgtccactaccgggaagtgaatttttcagctgccagaactgtgaggctgtggcagggtgctcatcggggctggactccttggttcctggggacgaagacaaaccctataagtgtcagctgtgccggtcttcgttccgctacaagggcaaccttgccagtcatcgtacagtgcacacaggggaaaagccttaccactgctcaatctgcggagcccgttttaaccggccagcaaacctgaaaacgcacagccgcatccattcg

SEQ ID NO: 735582 - DNA, 200 bp, Homo sapiens
cagatggagcacgtggtccaggcatgccaccgcttcatccaggccagctatgaacctctgggcatctccctgcgccccctgcagaccctcaagagccacgttcgcatccacaccggagagaagccttaccactgcgacccctgtggcctgcatttccggcacaagagtcaactgcggctgcatctgcgccagaaacacgg

SEQ ID NO: 735583 - DNA, 2549 bp, Homo sapiens; identical to SEQ ID NO: 290695

SEQ ID NO: 735584 - DNA, 1853 bp, Homo sapiens
ggcggtaccggccggaggtgtagggatctttgtaaggaaacacaacaacacgttttcttaccttctgtaaattttgtgatagacacatgttatttgtatatatgattgattgtttgcctgttgcaccctaaagttattttcaaaccatgtttattgcaaagagagcctttgggcaagtggaaaatgccctgatgctagaatgaggtagttccataagctagttaggagcttgctacctcttcttggtacctgaaatattctgaaaggatatcggagaggtcctatgcacccctgtctttcaaaacccacctccagcacttcaaagtagtgtctctggagagtttaaaataaaagaatgaatgctattcagtggattccctcattgaggctcccatctttcctgccaggtgcagctttttctggttggaatcatctcttctttacggattgccgcattgtctctttgtgaatgaggcaggctgaactgtagagcatgaaactcattagaagtttataaagtaaagacctgtaaagcatgtgggtggaatgtttccatgctcttgaggtgaatattaaatttaaattctggcctttgggaactctttgcttgtgagctgaagaaggaaagaaggagttgggggtgtatatctaactgtgtttttctatatggaaatatatgagcatcaagtgataacttcaataaggcctcaggattgtatttaaaatacctgttttgtgggacagcatgcctttgttttctttgcctgttggctttggtggctccaaacattttcattttaggctagctttcctgtcacccaggttgtgtgcattttttttttcatttgaactattgtttatcattattaatgatgttatctccaaatcccaaagccaaggaaatagccagtatgcaggacttgcagtagatataagcattggtgttaacataggttaagttttgttagtgttcccagaaatatactgaattgagggataatgtagctttaaagaaattatgtttctttttaacatttggagaagccacctgtcctgggtccctattcttgagaaattcatcttttcatgcaaataacattgatgggggacaagactggatgattgacttctatcagtcagtagacaaggaagtataataattgccaaaggtgagggtaattttgccttacaagtatgtaggtcattctgtggtgggatttcccatcacatctagtaaaaaacaaccttttcatttccctcctttctaatccaagatcatatttttaaaaagtaggtttctgatgtgccatgaaatatttctgtgaatctgtgtttttgaccaaggaaacagctgagatattaaaccatgtggttgttccacggttcatctggctaccgttctgggtcccctctgaccacctcaaaaagaaaatgaaattgggagattaaatcaagcttgacctcctcttttaatgaggaactttcacgttgacttcctatctcaggatattcttcagtttcatactgctgaggagaaaggaacaagctgcagacactgtaactggtctccagatgtgtgtatatgcgtgtaaaacttcacaccgtgtgtgttgtgttcaatgttgtgtcaatctacaaactgactcaaacaacagtttaacgatagagaagacagtgataatggcaaaaaaaacacccaaccacctttttccgtcaaagtgcttgctatggctttcatagctgggacaagtaacattaagtattcaggagcaaagtgttcttgaaagaaaatggtgtgttgatctcataagaaaatgtacaaccaataaaagacattttaaaaagaaaaatga

SEQ ID NO: 735585 - DNA, 580 bp, Homo sapiens
tgaatgtcaaaggtctatgctgaaatttttcagaaaaaacaacattgcatatgggatgtgactcaaaataattgggtaggggaagagcaggtggggttataaatagatttacattcaaaactgtaaattgggtcatgggtatttcagggtcatggccgttctccttctaagtgtgtttgaaaatttccatgaaaaaatggtctttaggtgggtgtgattccctaacatttgtcctacgaggaccaaagacattagaggaaaacaaagacttcttaccagttacagtcaaaaatgtcagcgagatgaggagattgatgccccagttcatgctagaagttaaagccatggctcgtcctctgatcccaccaggaaagatctcgctgagcaccagccagggcactagaagaaaggcaagagtgggtggcggacagcacatttagcaaaaacccattgaatctgagtgccagcaccctgatctctccctgccctcatcctgccgggatttgtggttgggaagcaccatttcctacctcagcagaacaggacagtaaagggacgtgctgcctcctcacctccagcc

SEQ ID NO: 735586 - DNA, 552 bp, Homo sapiens
ttttttttttcattgcggaattattttaatattcacaatatgaggatcaagactaagcttccgagtccaagcaggcaggatgacaagatgattgctgtccttcttccatatctgtctatcaggacccctccggtgagtgaggcaaggagggctccaatgacgagggagctcacaaccatttcctgctcatggcagctcagggctaataaggttttgatctgaagaagagccccagagatgatcccaagttcataacccaccaggaggccactgacagcagcagtgacagatgacaggaaggtaaacatgccgcagcctctcgcccagggaggatgccggctgccgctgccctccgtctccacggctgtccccttctggttcagcagactggggccctcggtgttttcaacaggtaccatggtcacgtagaagttacagccgcttccccgccaccaaaccgccccgaccacccccgctcccaggagtggtcactttccccataatagcatgctaaagaagagtgtggggaaaaacttcgggcaaagctaatgt

SEQ ID NO: 735587 - DNA, 7271 bp, Homo sapiens
ggccgttacgcgattttcgctcccgcgggcagcgcctctcaggccactcccgagggaccccgaggacgcactcgggccccagggcgacggttcaaacgggccattgtgcgcccccggggtcccccggcccctgcaggctacttgggcgcagagccgcggagggtctccgttcctagaggtcctcctatcccgggctgcctgagtcctcgccagcatccgccctctcccactcccatccttcctggatccgcctctcggttcccgagggacagtcccgaccgcaaacccacgtagagtaaggaatgtgggacaggcgacagaagtggcatacggtcctgcgttatccctccgtctcgccacaccttgtgtctccatctctccccacttccttccctccgtctgtcatctgtcatccccggtcgctctaagaccaggattccaattcgcctagtgaggaatctcactaggggaatttatcgcgacatcataaattaacgggttcattttgactgaaaaagcgaaggacttttttcaggcagaaaacaagtctcgtctggacggatgtgatcttcgtggtggaaagctaaattttaaaaccaccccaatggatgcagacagtgatgttgcattggacattctaattacaaatgtagtctgtgtttttagaacaagatgtcatttaaacttaaggaagattgctttggaaggagcaaatgtaatttataaacgtgatgttggaaaagtattaatgaagcttagaaaacctagaattacagctacaatttggtcctcaggaaaaattatttgcactggagcaacaagtgaagaagaagctaaatttggtgccagacgcttagcccgtagtctgcagaaactaggttttcaggtaatatttacagattttaaggttgttaacgttctggcagtgtgtaacatgccatttgaaatccgtttgccagaattcacaaagaacaatagacctcatgccagttacgaacctgaacttcatcctgctgtgtgctatcggataaaatctctaagagctacattacagattttttcaacaggaagtatcacagtaacagggcccaatgtaaaggctgttgctactgctgtggaacagatttacccatttgtgtttgaaagcaggaaagaaattttataattcaccacttaattggttagaatctctaactgagcaccttttaaacctgctgcacattggactcaaaaggaaaactggaccaacaataattgaggaaatagactcttttattcattcacggctacagtgtaagctccagtccctttggattttattccaaaccttgctgtaatataaaaggaagtttacaagacatgatattgctgcttttacaaaaggacattctatttattttcgcagtaattctcatgtccccataagcagagctgtcacagtgtgcactaccttagattgttttattgtcgtcattgttatttttttccattttgagctaatgtgttttatttgtgaatagtcttttacatttttgtatgctgaatatgggcaccaaagaacctgtaaaagttatctttttcaattgaatgtgcacaaataaaagtttggaaaagagaaaagatctctcttcattctataacttttattccccattttctattttaacaaaaattgtattcatacttcttttttttaaaatctatgcaagcttaagactttggctaaagtgtgttggcttctttttgaagtgtattttgtgtgtgtgtgtgtgtgtgtgtatatatatatatatatatgcaccacatgtgtatagtatcttttaatgctctgttaccaaataacaaataggaattttttttcttgcagattagaaataaaaacgtgtatataaactctagggaaccagactagaagtttatagataaaggataatgttttatgttgctaatttaatatgatagaaaatgttaaataacttgtaaaggttaagaaattgtagttttaagaagagaaacctcttacccactagatggaaatgagaaagaagctgtgatgaatggtgcctcatttggacctttgtttttctggaaagactcaacacctgtagttgtagagaagtgattgaggttcttgactttaatcttgggttgatgcccaagcctatactaagagtcttgtcagaagttggtaacatggagatgttttaacaagaagtgcccataagctgcctctgtgccacagtgtaattatcaaatagccccacttgaatttgaaagccattttgtgtgatactgtccttccccttgctgtatcttatttaatggagttaaagagtgactattcagtatatgagattgctactcttaaagttataataaatatgcatttatgaaacagtgtctctggctcacccaggagccctgatgtggtaatacaggatcaagctgtagttgtgccctgtcatttaggtttaggagtttagtgtaaccaacagtgattatacctagaaataaagctgagtggagagtccaattagcttctcaggagaaacttaatggggacaatattccaacacaatgttccacaaaaacttgtatttccaaaatgtttttaaacctttgtggaaaaattgcaacatcctaatctccatatatagtacattttccttactgtattataaaatcttgaaaacctagcttaggcactgcactgaacaacacatattatttttatcttttttcttctcaatgccttccctaacctcctgcttattccaaagtggaaagcaaaggctaacttacatttttccttcttgtgaaatatttcattgagatttttagacttgtatttttcctttttttttaaaaaaaagtgtttatttcctttattttaagattcagtaggatagccaaattcatagagaataaaattacatgaaagagttacaagctcactgttttaaagacttgacatttttcatttagttttaattaacagtaataagtcacctcctgtttttcaatgttcaccaaaaaaagaaacatagaatagggggaaaacatgcttatatagccaaggtacagatccagatgatgtaacctttttagtattcgcatgacttgaaaactgggcagatcaatagataatcgaagtgctttatctgaagggagagggtaaagacagtgtgaccaggtttgttttcagggctgccgaatgagcctcacctaacagtgtccatgggtaattcgctaaccttaacaaagatgggaagaagtgagtgctctgatgtcttctgctggctctccataagtactgtaaattttttttataaataaaaactgtgaatatatatgtacaagttgtaagtatttccccctttttatttttgaaaatcaagaagcttgatttggtgtggtgcaatggatattggataaaaatttgaagacaaaattgtttagttacagactcaggataataaaagaaaaatataaaagaatgctcaagatactgaagtcaaggtcactagtaataaactggctaggttgataaacaatttcctgcccatttataatgaagggctaaacaaaaaatacctgaagtatatatagagtttgaactataaacacggaaggaaacatggggcagaacacacttcccttctctttccaaaaacaaaaaacaatgcatgctctgatttgcgtatgaaatacaccatgatagaattgagatctccaatctcctttccttttagcttccccctgccaatttttatacagataatacactgcagatccaggccttttagtcagtctcctgagtctctgatatagttttactacttacataggtttatagtctctccacgttgttataaaggaatgtaatagatcatgtttccttatatgacattgggacagtttgttaggaaccaataggaaaattccaagctaaataaaaaggagctttggctcttaggattctcttttcttcaggttaatcatattttaaaattctttttcaagttaggttgttcgtgcttttaagttttttgtgtgtcttccatcacttaaatattagtaatttaatatgttatttggttcaagatttgattgtggattttctatcatacccaaattttattagtaagacctcttaacaagtctttaaaatcaactggagaagtaagagaacagttcatcgttgtgtgggtgaaacccacgttgctggtacaggtggccatcatagaaaagaacatgagggaattgtcctgatgtctgaatgtcatttattgtgtcttcagttatctgaacatcatcatcaattatagcctgtgtaccgtaacctgaggtagtgatattcctgaggagtgtgaagaattggacactgtggattactatacattgtcatgaaagccttacaaggaggcagcttttctaggcttgacttaataacttcaacctaattgcttagagatttggataaataacctaatggcctgactccttttctaatgttttactaacagctacttctaaataaatatggtcccaggattttaaaattgtcttttctatgcattttttaaaaatggaaaaaaatgctcatttttctcaactattgcggaattattttaatatttcacaatattaacatgaaattcataaaaggatattttgcattaaattatagtttatagttcataaaataagctctataatctttatacttgttgaatgtaactaggaattaccactaaaatcctagccaggaccctctcctaatctagatagaatatatgggcagttgtccacactgtgtgttctggttcttttttgcgtaagatccagtgcaagtagtgtcttggtaggcagaaactgtaccctcatgtccagaccacttgtgtgtctgcataataaagctgcgactggcctccatacatacatagcttaaggcggaggttgatgtcttcactaggacatagtctattcaaaggctgctctgtgaagaaggtagaaagtattaaaccagccagtaactttttttttttaacctgatatcctgctcagaaaaagagatcacttaggaccttgtacctcatctaccttttgaggttccttctggggaggagggggattaaaggctgtctttatcatttcagagtgtctcttcaaaaccagttccatgacactgaaaagagagcacaggagtcgcaactatgcattggtccaaagacaccctcctaagtgttctggcactatccacgttcagaaggtgttgaggccattaggtctctggagaaagctgcctggattggcccctaccacacagcttgttacactccaagagctgctcctggggttttcttttttgaggctgttttggcactaattcttcttggtgatgactcataaaacaaatgttgtttttcacatagttcacttttgctagctccattgatatttgttccaaagagcatccctttgtctcaggtataaacataacaacaaaaagcagggatgctagactcatgattgtatatataaagcacacccatggcaggccaataagatcagttacagtcaaaaatgtcagcgagatgaggagattgatgccccagttcatgctagaagttaaagccatggctcgtcctctgatcccaccaggaaagatctcgctgagcaccagccagggcattggtcctagaccaattgaaaaagcagcaacataaacaagcaagctggctaaggacagccatttcaaaaaagctgggacgtccccagggtctgtgactatctggtattcagtgtggcttaatccagcatttagcaaggatgctgaggtcgtctcccctctcttatccacatcatttctcaggggcatgagtgagcttctgctatgggaagaaatccctttgaagtggtctctgagagtattgttgttggttgacaggtttcctggtccataaatcacagactcatccaaggactggttgatagaattgtggcttctgcagatatgggtgaagttcatgtggatgttgagatttacgatgcccatggtcaccaacgaagctgccatcacagaggagccaatgcagaggaatgttttgctgccgacatggtctacaagaagagtggcagggatggtgctaatgaccttgacgactccaaccccagtggaggcgaggctagctgcctcattgctttgaaatccaactgacttcaaaacagttgatgcatagaacaatatgtttggttggccagtgatttgtacaaaaaatactagtgttagtcctatcattattcgggtccgcatgttgtcttttgaacgaaacagatcccaaaaactgtactgatattcatctttcagggaggatttgatcacagtgagttcctcagttgtatctgagagtgctcttaaccttccaagaaccttgctagcagctccctcttgtcctttcatcaccagaaaccgagggcttggaggaagaaaatacattgcaattgcttgcaaaactcccaagggaatcacaagaccaaacatgtacttccagccatggaaaacattggcaaatgcgtaatttgaaatataggcagaaagaatgccgatgacaatcatcagctcattcagtgacacaagaaggcctcttctgtgttgaggagcaatctctgcgatgtaaacacaagtggcaatggaagagagggagatggagacccctatggcaatgcgtcccactataagaaccgtgtaggataaactgaggatcaagactaagcttccgagtccaagcaggcaggatgacaagatgattgctgtccttcttccatatctgtctatcaggacccctccggtgagtgaggcaaggagggctccaatgacgagggagctcacaaccatttcctgctcatggcagctcagggctaataaggttttgatctgaagaagagccccagagatgatcccaagttcataacccaccaggaggccactgacagcagcagtgacagatgacaggaaggtaaacatgccgcagcctctcgcccagggaggatgccggctgccgctgccctccgtctccacggctgtccccttctggttcagcagactggggccctcggtgttttcaacaggtaccatggtcacgtagaagttacagccgcttccccgccaccaaaccgccccgaccacccccgctcccaggagtggtcactttccccataatagcatgctaaagaagagtgtggggaaaaacttcgggcaaagctaatgt

SEQ ID NO: 735588 - DNA, 1378 bp, Homo sapiens
ggccgttacgcgattttcgctcccgcgggcagcgcctctcaggccactcccgagggaccccgaggacgcactcgggccccagggcgacggttcaaacgggccattgtgcgcccccggggtcccccggcccctgcaggctacttgggcgcagagccgcggagggtctccgttcctagaggtcctcctatcccgggctgcctgagtcctcgccagcatccgccctctcccactcccatccttcctggatccgcctctcggttcccgagggacagtcccgaccgcaaacccacgtagagtaaggaatgtgggacaggcgacagaagtggcatacggtcctgcgttatccctccgtctcgccacaccttgtgtctccatctctccccacttccttccctccgtctgtcatctgtcatccccggtcgctctaagaccaggattccaattcgcctagtgaggaatctcactaggggaatttatcgcgacatcataaattaacgggttcattttgactgaaaaagcgaaggacttttttcaggcagaaaacaagtctcgtctggacgcgtctagtctatttattgtcgcggggaagctgcggccgcctcgcacccggaacaacaaagcaaggaagacggagtccgagcctcgggggctcctagcaacgggccggggcgggagttccatggagactggggagcgcgcccgtctcatcctcatccttgtcctccagcttctccttcgcatccgacgcaaccggcagcagcgctgccgccgcgtcctcagccaccgctccctcttcccacggatgtgatcttcgtggtggaaagctaaattttaaaaccaccccaatggatgcagacagtgatgttgcattggacattctaattacaaatgtagtctgtgtttttagaacaagatgtcatttaaacttaaggaagattgctttggaaggagcaaatgtaatttataaacgtgatgttggaaaagtattaatgaagcttagaaaacctagaattacagctacaatttggtcctcaggaaaaattatttgcactggagcaacaagtgaagaagaagctaaatttggtgccagacgcttagcccgtagtctgcagaaactaggttttcaggtaatatttacagattttaaggttgttaacgttctggcagtgtgtaacatgccatttgaaatccgtttgccagaattcacaaagaacaatagacctcatgccagttacgaacctgaacttcatcctgctgtgtgctatcggataaaatctctaagagctacattacagattttttcaacaggaagtatcacagtaacaggtattctatgatattgaaaccacacttatcaattatggattgaatgatacaa

SEQ ID NO: 735589 - DNA, 7512 bp, Homo sapiens
ggccgttacgcgattttcgctcccgcgggcagcgcctctcaggccactcccgagggaccccgaggacgcactcgggccccagggcgacggttcaaacgggccattgtgcgcccccggggtcccccggcccctgcaggctacttgggcgcagagccgcggagggtctccgttcctagaggtcctcctatcccgggctgcctgagtcctcgccagcatccgccctctcccactcccatccttcctggatccgcctctcggttcccgagggacagtcccgaccgcaaacccacgtagagtaaggaatgtgggacaggcgacagaagtggcatacggtcctgcgttatccctccgtctcgccacaccttgtgtctccatctctccccacttccttccctccgtctgtcatctgtcatccccggtcgctctaagaccaggattccaattcgcctagtgaggaatctcactaggggaatttatcgcgacatcataaattaacgggttcattttgactgaaaaagcgaaggacttttttcaggcagaaaacaagtctcgtctggacgcgtctagtctatttattgtcgcggggaagctgcggccgcctcgcacccggaacaacaaagcaaggaagacggagtccgagcctcgggggctcctagcaacgggccggggcgggagttccatggagactggggagcgcgcccgtctcatcctcatccttgtcctccagcttctccttcgcatccgacgcaaccggcagcagcgctgccgccgcgtcctcagccaccgctccctcttcccacggatgtgatcttcgtggtggaaagctaaattttaaaaccaccccaatggatgcagacagtgatgttgcattggacattctaattacaaatgtagtctgtgtttttagaacaagatgtcatttaaacttaaggaagattgctttggaaggagcaaatgtaatttataaacgtgatgttggaaaagtattaatgaagcttagaaaacctagaattacagctacaatttggtcctcaggaaaaattatttgcactggagcaacaagtgaagaagaagctaaatttggtgccagacgcttagcccgtagtctgcagaaactaggttttcaggtaatatttacagattttaaggttgttaacgttctggcagtgtgtaacatgccatttgaaatccgtttgccagaattcacaaagaacaatagacctcatgccagttacgaacctgaacttcatcctgctgtgtgctatcggataaaatctctaagagctacattacagattttttcaacaggaagtatcacagtaacagggcccaatgtaaaggctgttgctactgctgtggaacagatttacccatttgtgtttgaaagcaggaaagaaattttataattcaccacttaattggttagaatctctaactgagcaccttttaaacctgctgcacattggactcaaaaggaaaactggaccaacaataattgaggaaatagactcttttattcattcacggctacagtgtaagctccagtccctttggattttattccaaaccttgctgtaatataaaaggaagtttacaagacatgatattgctgcttttacaaaaggacattctatttattttcgcagtaattctcatgtccccataagcagagctgtcacagtgtgcactaccttagattgttttattgtcgtcattgttatttttttccattttgagctaatgtgttttatttgtgaatagtcttttacatttttgtatgctgaatatgggcaccaaagaacctgtaaaagttatctttttcaattgaatgtgcacaaataaaagtttggaaaagagaaaagatctctcttcattctataacttttattccccattttctattttaacaaaaattgtattcatacttcttttttttaaaatctatgcaagcttaagactttggctaaagtgtgttggcttctttttgaagtgtattttgtgtgtgtgtgtgtgtgtgtgtatatatatatatatatatgcaccacatgtgtatagtatcttttaatgctctgttaccaaataacaaataggaattttttttcttgcagattagaaataaaaacgtgtatataaactctagggaaccagactagaagtttatagataaaggataatgttttatgttgctaatttaatatgatagaaaatgttaaataacttgtaaaggttaagaaattgtagttttaagaagagaaacctcttacccactagatggaaatgagaaagaagctgtgatgaatggtgcctcatttggacctttgtttttctggaaagactcaacacctgtagttgtagagaagtgattgaggttcttgactttaatcttgggttgatgcccaagcctatactaagagtcttgtcagaagttggtaacatggagatgttttaacaagaagtgcccataagctgcctctgtgccacagtgtaattatcaaatagccccacttgaatttgaaagccattttgtgtgatactgtccttccccttgctgtatcttatttaatggagttaaagagtgactattcagtatatgagattgctactcttaaagttataataaatatgcatttatgaaacagtgtctctggctcacccaggagccctgatgtggtaatacaggatcaagctgtagttgtgccctgtcatttaggtttaggagtttagtgtaaccaacagtgattatacctagaaataaagctgagtggagagtccaattagcttctcaggagaaacttaatggggacaatattccaacacaatgttccacaaaaacttgtatttccaaaatgtttttaaacctttgtggaaaaattgcaacatcctaatctccatatatagtacattttccttactgtattataaaatcttgaaaacctagcttaggcactgcactgaacaacacatattatttttatcttttttcttctcaatgccttccctaacctcctgcttattccaaagtggaaagcaaaggctaacttacatttttccttcttgtgaaatatttcattgagatttttagacttgtatttttcctttttttttaaaaaaaagtgtttatttcctttattttaagattcagtaggatagccaaattcatagagaataaaattacatgaaagagttacaagctcactgttttaaagacttgacatttttcatttagttttaattaacagtaataagtcacctcctgtttttcaatgttcaccaaaaaaagaaacatagaatagggggaaaacatgcttatatagccaaggtacagatccagatgatgtaacctttttagtattcgcatgacttgaaaactgggcagatcaatagataatcgaagtgctttatctgaagggagagggtaaagacagtgtgaccaggtttgttttcagggctgccgaatgagcctcacctaacagtgtccatgggtaattcgctaaccttaacaaagatgggaagaagtgagtgctctgatgtcttctgctggctctccataagtactgtaaattttttttataaataaaaactgtgaatatatatgtacaagttgtaagtatttccccctttttatttttgaaaatcaagaagcttgatttggtgtggtgcaatggatattggataaaaatttgaagacaaaattgtttagttacagactcaggataataaaagaaaaatataaaagaatgctcaagatactgaagtcaaggtcactagtaataaactggctaggttgataaacaatttcctgcccatttataatgaagggctaaacaaaaaatacctgaagtatatatagagtttgaactataaacacggaaggaaacatggggcagaacacacttcccttctctttccaaaaacaaaaaacaatgcatgctctgatttgcgtatgaaatacaccatgatagaattgagatctccaatctcctttccttttagcttccccctgccaatttttatacagataatacactgcagatccaggccttttagtcagtctcctgagtctctgatatagttttactacttacataggtttatagtctctccacgttgttataaaggaatgtaatagatcatgtttccttatatgacattgggacagtttgttaggaaccaataggaaaattccaagctaaataaaaaggagctttggctcttaggattctcttttcttcaggttaatcatattttaaaattctttttcaagttaggttgttcgtgcttttaagttttttgtgtgtcttccatcacttaaatattagtaatttaatatgttatttggttcaagatttgattgtggattttctatcatacccaaattttattagtaagacctcttaacaagtctttaaaatcaactggagaagtaagagaacagttcatcgttgtgtgggtgaaacccacgttgctggtacaggtggccatcatagaaaagaacatgagggaattgtcctgatgtctgaatgtcatttattgtgtcttcagttatctgaacatcatcatcaattatagcctgtgtaccgtaacctgaggtagtgatattcctgaggagtgtgaagaattggacactgtggattactatacattgtcatgaaagccttacaaggaggcagcttttctaggcttgacttaataacttcaacctaattgcttagagatttggataaataacctaatggcctgactccttttctaatgttttactaacagctacttctaaataaatatggtcccaggattttaaaattgtcttttctatgcattttttaaaaatggaaaaaaatgctcatttttctcaactattgcggaattattttaatatttcacaatattaacatgaaattcataaaaggatattttgcattaaattatagtttatagttcataaaataagctctataatctttatacttgttgaatgtaactaggaattaccactaaaatcctagccaggaccctctcctaatctagatagaatatatgggcagttgtccacactgtgtgttctggttcttttttgcgtaagatccagtgcaagtagtgtcttggtaggcagaaactgtaccctcatgtccagaccacttgtgtgtctgcataataaagctgcgactggcctccatacatacatagcttaaggcggaggttgatgtcttcactaggacatagtctattcaaaggctgctctgtgaagaaggtagaaagtattaaaccagccagtaactttttttttttaacctgatatcctgctcagaaaaagagatcacttaggaccttgtacctcatctaccttttgaggttccttctggggaggagggggattaaaggctgtctttatcatttcagagtgtctcttcaaaaccagttccatgacactgaaaagagagcacaggagtcgcaactatgcattggtccaaagacaccctcctaagtgttctggcactatccacgttcagaaggtgttgaggccattaggtctctggagaaagctgcctggattggcccctaccacacagcttgttacactccaagagctgctcctggggttttcttttttgaggctgttttggcactaattcttcttggtgatgactcataaaacaaatgttgtttttcacatagttcacttttgctagctccattgatatttgttccaaagagcatccctttgtctcaggtataaacataacaacaaaaagcagggatgctagactcatgattgtatatataaagcacacccatggcaggccaataagatcagttacagtcaaaaatgtcagcgagatgaggagattgatgccccagttcatgctagaagttaaagccatggctcgtcctctgatcccaccaggaaagatctcgctgagcaccagccagggcattggtcctagaccaattgaaaaagcagcaacataaacaagcaagctggctaaggacagccatttcaaaaaagctgggacgtccccagggtctgtgactatctggtattcagtgtggcttaatccagcatttagcaaggatgctgaggtcgtctcccctctcttatccacatcatttctcaggggcatgagtgagcttctgctatgggaagaaatccctttgaagtggtctctgagagtattgttgttggttgacaggtttcctggtccataaatcacagactcatccaaggactggttgatagaattgtggcttctgcagatatgggtgaagttcatgtggatgttgagatttacgatgcccatggtcaccaacgaagctgccatcacagaggagccaatgcagaggaatgttttgctgccgacatggtctacaagaagagtggcagggatggtgctaatgaccttgacgactccaaccccagtggaggcgaggctagctgcctcattgctttgaaatccaactgacttcaaaacagttgatgcatagaacaatatgtttggttggccagtgatttgtacaaaaaatactagtgttagtcctatcattattcgggtccgcatgttgtcttttgaacgaaacagatcccaaaaactgtactgatattcatctttcagggaggatttgatcacagtgagttcctcagttgtatctgagagtgctcttaaccttccaagaaccttgctagcagctccctcttgtcctttcatcaccagaaaccgagggcttggaggaagaaaatacattgcaattgcttgcaaaactcccaagggaatcacaagaccaaacatgtacttccagccatggaaaacattggcaaatgcgtaatttgaaatataggcagaaagaatgccgatgacaatcatcagctcattcagtgacacaagaaggcctcttctgtgttgaggagcaatctctgcgatgtaaacacaagtggcaatggaagagagggagatggagacccctatggcaatgcgtcccactataagaaccgtgtaggataaactgaggatcaagactaagcttccgagtccaagcaggcaggatgacaagatgattgctgtccttcttccatatctgtctatcaggacccctccggtgagtgaggcaaggagggctccaatgacgagggagctcacaaccatttcctgctcatggcagctcagggctaataaggttttgatctgaagaagagccccagagatgatcccaagttcataacccaccaggaggccactgacagcagcagtgacagatgacaggaaggtaaacatgccgcagcctctcgcccagggaggatgccggctgccgctgccctccgtctccacggctgtccccttctggttcagcagactggggccctcggtgttttcaacaggtaccatggtcacgtagaagttacagccgcttccccgccaccaaaccgccccgaccacccccgctcccaggagtggtcactttccccataatagcatgctaaagaagagtgtggggaaaaacttcgggcaaagctaatgt

SEQ ID NO: 735590 - DNA, 1928 bp, Homo sapiens
ggccgttacgcgattttcgctcccgcgggcagcgcctctcaggccactcccgagggaccccgaggacgcactcgggccccagggcgacggttcaaacgggccattgtgcgcccccggggtcccccggcccctgcaggctacttgggcgcagagccgcggagggtctccgttcctagaggtcctcctatcccgggctgcctgagtcctcgccagcatccgccctctcccactcccatccttcctggatccgcctctcggttcccgagggacagtcccgaccgcaaacccacgtagagtaaggaatgtgggacaggcgacagaagtggcatacggtcctgcgttatccctccgtctcgccacaccttgtgtctccatctctccccacttccttccctccgtctgtcatctgtcatccccggtcgctctaagaccaggattccaattcgcctagtgaggaatctcactaggggaatttatcgcgacatcataaattaacgggttcattttgactgaaaaagcgaaggacttttttcaggcagaaaacaagtctcgtctggacgcgtctagtctatttattgtcgcggggaagctgcggccgcctcgcacccggaacaacaaagcaaggaagacggagtccgagcctcgggggctcctagcaacgggccggggcgggagttccatggagactggggagcgcgcccgtctcatcctcatccttgtcctccagcttctccttcgcatccgacgcaaccggcagcagcgctgccgccgcgtcctcagccaccgctccctcttcccacggatgtgatcttcgtggtggaaagctaaattttaaaaccaccccaatggatgcagacagtgatgttgcattggacattctaattacaaatgtagtctgtgtttttagaacaagatgtcatttaaacttaaggaagattgctttggaaggagcaaatgtaatttataaacgtgatgttggaaaagtattaatgaagcttagaaaacctagaattacagctacaatttggtcctcaggaaaaattatttgcactggagcaacaagtgaagaagaagctaaatttggtgccagacgcttagcccgtagtctgcagaaactaggttttcaggtaatatttacagattttaaggttgttaacgttctggcagtgtgtaacatgccatttgaaatccgtttgccagaattcacaaagaacaatagacctcatgccagttacgaacctgaacttcatcctgctgtgtgctatcggataaaatctctaagagctacattacagattttttcaacaggaagtatcacagtaacagggcccaatgtaaaggctgttgctactgctgtggaacagatttacccatttgtgtttgaaagcaggaaagaaattttataattcaccacttaattggttagaatctctaactgagcaccttttaaacctgctgcacattggactcaaaaggaaaactggaccaacaataattgaggaaatagactcttttattcattcacggctacagtgtaagctccagtccctttggattttattccaaaccttgctgtaatataaaaggaagtttacaagacatgatattgctgcttttacaaaaggacattctatttattttcgcagtaattctcatgtccccataagcagagctgtcacagtgtgcactaccttagattgttttattgtcgtcattgttatttttttccattttgagctaatgtgttttatttgtgaatagtcttttacatttttgtatgctgaatatgggcaccaaagaacctgtaaaagttatctttttcaattgaatgtgcacaaataaaagtttggaaaagaaggttccggcccgtcgcctttaaggaggggtaattgtgagtccctggtcactggcacgcgcgaggccggccg

SEQ ID NO: 735591 - DNA, 1862 bp, Homo sapiens
ggccgttacgcgattttcgctcccgcgggcagcgcctctcaggccactcccgagggaccccgaggacgcactcgggccccagggcgacggttcaaacgggccattgtgcgcccccggggtcccccggcccctgcaggctacttgggcgcagagccgcggagggtctccgttcctagaggtcctcctatcccgggctgcctgagtcctcgccagcatccgccctctcccactcccatccttcctggatccgcctctcggttcccgagggacagtcccgaccgcaaacccacgtagagtaaggaatgtgggacaggcgacagaagtggcatacggtcctgcgttatccctccgtctcgccacaccttgtgtctccatctctccccacttccttccctccgtctgtcatctgtcatccccggtcgctctaagaccaggattccaattcgcctagtgaggaatctcactaggggaatttatcgcgacatcataaattaacgggttcattttgactgaaaaagcgaaggacttttttcaggcagaaaacaagtctcgtctggacgcgtctagtctatttattgtcgcggggaagctgcggccgcctcgcacccggaacaacaaagcaaggaagacggagtccgagcctcgggggctcctagcaacgggccggggcgggagttccatggagactggggagcgcgcccgtctcatcctcatccttgtcctccagcttctccttcgcatccgacgcaaccggcagcagcgctgccgccgcgtcctcagccaccgctccctcttcccacggatgtgatcttcgtggtggaaagctaaattttaaaaccaccccaatggatgcagacagtgatgttgcattggacattctaattacaaatgtagtctgtgtttttagaacaagatgtcatttaaacttaaggaagattgctttggaaggagcaaatgtaatttataaacgtgatgttggaaaagtattaatgaagcttagaaaacctagaattacagctacaatttggtcctcaggaaaaattatttgcactggagcaacaagtgaagaagaagctaaatttggtgccagacgcttagcccgtagtctgcagaaactaggttttcaggtaatatttacagattttaaggttgttaacgttctggcagtgtgtaacatgccatttgaaatccgtttgccagaattcacaaagaacaatagacctcatgccagttacgaacctgaacttcatcctgctgtgtgctatcggataaaatctctaagagctacattacagattttttcaacaggaagtatcacagtaacagggcccaatgtaaaggctgttgctactgctgtggaacagatttacccatttgtgtttgaaagcaggaaagaaattttataattcaccacttaattggttagaatctctaactgagcaccttttaaacctgctgcacaataattgaggaaatagactcttttattcattcacggctacagtgtaagctccagtccctttggattttattccaaaccttgctgtaatataaaaggaagtttacaagacatgatattgctgcttttacaaaaggacattctatttattttcgcagtaattctcatgtccccataagcagagctgtcacagtgtgcactaccttagattgttttattgtcgtcattgttatttttttccattttgagctaatgtgttttatttgtgaatagtcttttacatttttgtatgctgaatatgggcaccaaagaacctgtaaaagttatctttttcaattgaatgtgcacaaataaaagtttggaaaagattggactcaaaaggaaaactggaccaacaaaagat

SEQ ID NO: 735592 - DNA, 1424 bp, Homo sapiens
ggccgttacgcgattttcgctcccgcgggcagcgcctctcaggccactcccgagggaccccgaggacgcactcgggccccagggcgacggttcaaacgggccattgtgcgcccccggggtcccccggcccctgcaggctacttgggcgcagagccgcggagggtctccgttcctagaggtcctcctatcccgggctgcctgagtcctcgccagcatccgccctctcccactcccatccttcctggatccgcctctcggttcccgagggacagtcccgaccgcaaacccacgtagagtaaggaatgtgggacaggcgacagaagtggcatacggtcctgcgttatccctccgtctcgccacaccttgtgtctccatctctccccacttccttccctccgtctgtcatctgtcatccccggtcgctctaagaccaggattccaattcgcctagtgaggaatctcactaggggaatttatcgcgacatcataaattaacgggttcattttgactgaaaaagcgaaggacttttttcaggcagaaaacaagtctcgtctggacgcgtctagtctatttattgtcgcggggaagctgcggccgcctcgcacccggaacaacaaagcaaggaagacggagtccgagcctcgggggctcctagcaacgggccggggcgggagttccatggagactggggagcgcgcccgtctcatcctcatccttgtcctccagcttctccttcgcatccgacgcaaccggcagcagcgctgccgccgcgtcctcagccaccgctccctcttcccacggatgtgatcttcgtggtggaaagctaaattttaaaaccaccccaatggatgcagacagtgatgttgcattggacattctaattacaaatgtagtctgtgtttttagaacaagatgtcatttaaacttaaggaagattgctttggaaggagcaaatgtaatttataaacgtgatgttggaaaagtattaatgaagcttagaaaacctagaattacagctacaatttggtcctcaggaaaaattatttgcactggagcaacaagtgaagaagaagctaaatttggtgccagacgcttagcccgtagtctgcagaaactaggttttcaggtaatatttacagattttaaggttgttaacgttctggcagtgtgtaacatgccatttgaaatccgtttgccagaattcacaaagaacaatagacctcatgccagttacgaacctgaacttcatcctgctgtgtgctatcggataaaatctctaagagctacattacagattttttcaacaggaagtatcacagtaacagctctctgtttctacactttggagcatggatgtctgagaagccacaaagcctattgaacaatctctactaagtatataataaaacatgaatatgtaaaa

SEQ ID NO: 735593 - DNA, 1068 bp, Homo sapiens
ggccgttacgcgattttcgctcccgcgggcagcgcctctcaggccactcccgagggaccccgaggacgcactcgggccccagggcgacggttcaaacgggccattgtgcgcccccggggtcccccggcccctgcaggctacttgggcgcagagccgcggagggtctccgttcctagaggtcctcctatcccgggctgcctgagtcctcgccagcatccgccctctcccactcccatccttcctggatccgcctctcggttcccgagggacagtcccgaccgcaaacccacgtagagtaaggaatgtgggacaggcgacagaagtggcatacggtcctgcgttatccctccgtctcgccacaccttgtgtctccatctctccccacttccttccctccgtctgtcatctgtcatccccggtcgctctaagaccaggattccaattcgcctagtgaggaatctcactaggggaatttatcgcgacatcataaattaacgggttcattttgactgaaaaagcgaaggacttttttcaggcagaaaacaagtctcgtctggacgcgtctagtctatttattgtcgcggggaagctgcggccgcctcgcacccggaacaacaaagcaaggaagacggagtccgagcctcgggggctcctagcaacgggccggggcgggagttccatggagactggggagcgcgcccgtctcatcctcatccttgtcctccagcttctccttcgcatccgacgcaaccggcagcagcgctgccgccgcgtcctcagccaccgctccctcttcccacggatgtgatcttcgtggtggaaagctaaattttaaaaccaccccaatggatgcagacagtgatgttgcattggacattctaattacaaatgtagtctgtgtttttagaacaagatgtcatttaaacttaaggaagattgctttggaaggagcaaatgtaatttataaacgtgatgttggaaaagttttaattaaccttaaaaaaccttaaattacagctccaatttgctccttaggatttattccctctggacacccagggaaagatg

SEQ ID NO: 735594 - DNA, 7615 bp, Homo sapiens
ggccgttacgcgattttcgctcccgcgggcagcgcctctcaggccactcccgagggaccccgaggacgcactcgggccccagggcgacggttcaaacgggccattgtgcgcccccggggtcccccggcccctgcaggctacttgggcgcagagccgcggagggtctccgttcctagaggtcctcctatcccgggctgcctgagtcctcgccagcatccgccctctcccactcccatccttcctggatccgcctctcggttcccgagggacagtcccgaccgcaaacccacgtagagtaaggaatgtgggacaggcgacagaagtggcatacggtcctgcgttatccctccgtctcgccacaccttgtgtctccatctctccccacttccttccctccgtctgtcatctgtcatccccggtcgctctaagaccaggattccaattcgcctagtgaggaatctcactaggggaatttatcgcgacatcataaattaacgggttcattttgactgaaaaagcgaaggacttttttcaggcagaaaacaagtctcgtctggacgcgtctagtctatttattgtcgcggggaagctgcggccgcctcgcacccggaacaacaaagcaaggaagacggagtccgagcctcgggggctcctagcaacgggccggggcgggagttccatggagactggggagcgcgcccgtctcatcctcatccttgtcctccagcttctccttcgcatccgacgcaaccggcagcagcgctgccgccgcgtcctcagccaccgctccctcttcccacggagcgaggtttcaccaggctggtctccaactcctgacctcaaatgatccacccatcttggcctcccagagtgctgagattacaggcgtgaggcaccactcctggatgtgatcttcgtggtggaaagctaaattttaaaaccaccccaatggatgcagacagtgatgttgcattggacattctaattacaaatgtagtctgtgtttttagaacaagatgtcatttaaacttaaggaagattgctttggaaggagcaaatgtaatttataaacgtgatgttggaaaagtattaatgaagcttagaaaacctagaattacagctacaatttggtcctcaggaaaaattatttgcactggagcaacaagtgaagaagaagctaaatttggtgccagacgcttagcccgtagtctgcagaaactaggttttcaggtaatatttacagattttaaggttgttaacgttctggcagtgtgtaacatgccatttgaaatccgtttgccagaattcacaaagaacaatagacctcatgccagttacgaacctgaacttcatcctgctgtgtgctatcggataaaatctctaagagctacattacagattttttcaacaggaagtatcacagtaacagggcccaatgtaaaggctgttgctactgctgtggaacagatttacccatttgtgtttgaaagcaggaaagaaattttataattcaccacttaattggttagaatctctaactgagcaccttttaaacctgctgcacattggactcaaaaggaaaactggaccaacaataattgaggaaatagactcttttattcattcacggctacagtgtaagctccagtccctttggattttattccaaaccttgctgtaatataaaaggaagtttacaagacatgatattgctgcttttacaaaaggacattctatttattttcgcagtaattctcatgtccccataagcagagctgtcacagtgtgcactaccttagattgttttattgtcgtcattgttatttttttccattttgagctaatgtgttttatttgtgaatagtcttttacatttttgtatgctgaatatgggcaccaaagaacctgtaaaagttatctttttcaattgaatgtgcacaaataaaagtttggaaaagagaaaagatctctcttcattctataacttttattccccattttctattttaacaaaaattgtattcatacttcttttttttaaaatctatgcaagcttaagactttggctaaagtgtgttggcttctttttgaagtgtattttgtgtgtgtgtgtgtgtgtgtgtatatatatatatatatatgcaccacatgtgtatagtatcttttaatgctctgttaccaaataacaaataggaattttttttcttgcagattagaaataaaaacgtgtatataaactctagggaaccagactagaagtttatagataaaggataatgttttatgttgctaatttaatatgatagaaaatgttaaataacttgtaaaggttaagaaattgtagttttaagaagagaaacctcttacccactagatggaaatgagaaagaagctgtgatgaatggtgcctcatttggacctttgtttttctggaaagactcaacacctgtagttgtagagaagtgattgaggttcttgactttaatcttgggttgatgcccaagcctatactaagagtcttgtcagaagttggtaacatggagatgttttaacaagaagtgcccataagctgcctctgtgccacagtgtaattatcaaatagccccacttgaatttgaaagccattttgtgtgatactgtccttccccttgctgtatcttatttaatggagttaaagagtgactattcagtatatgagattgctactcttaaagttataataaatatgcatttatgaaacagtgtctctggctcacccaggagccctgatgtggtaatacaggatcaagctgtagttgtgccctgtcatttaggtttaggagtttagtgtaaccaacagtgattatacctagaaataaagctgagtggagagtccaattagcttctcaggagaaacttaatggggacaatattccaacacaatgttccacaaaaacttgtatttccaaaatgtttttaaacctttgtggaaaaattgcaacatcctaatctccatatatagtacattttccttactgtattataaaatcttgaaaacctagcttaggcactgcactgaacaacacatattatttttatcttttttcttctcaatgccttccctaacctcctgcttattccaaagtggaaagcaaaggctaacttacatttttccttcttgtgaaatatttcattgagatttttagacttgtatttttcctttttttttaaaaaaaagtgtttatttcctttattttaagattcagtaggatagccaaattcatagagaataaaattacatgaaagagttacaagctcactgttttaaagacttgacatttttcatttagttttaattaacagtaataagtcacctcctgtttttcaatgttcaccaaaaaaagaaacatagaatagggggaaaacatgcttatatagccaaggtacagatccagatgatgtaacctttttagtattcgcatgacttgaaaactgggcagatcaatagataatcgaagtgctttatctgaagggagagggtaaagacagtgtgaccaggtttgttttcagggctgccgaatgagcctcacctaacagtgtccatgggtaattcgctaaccttaacaaagatgggaagaagtgagtgctctgatgtcttctgctggctctccataagtactgtaaattttttttataaataaaaactgtgaatatatatgtacaagttgtaagtatttccccctttttatttttgaaaatcaagaagcttgatttggtgtggtgcaatggatattggataaaaatttgaagacaaaattgtttagttacagactcaggataataaaagaaaaatataaaagaatgctcaagatactgaagtcaaggtcactagtaataaactggctaggttgataaacaatttcctgcccatttataatgaagggctaaacaaaaaatacctgaagtatatatagagtttgaactataaacacggaaggaaacatggggcagaacacacttcccttctctttccaaaaacaaaaaacaatgcatgctctgatttgcgtatgaaatacaccatgatagaattgagatctccaatctcctttccttttagcttccccctgccaatttttatacagataatacactgcagatccaggccttttagtcagtctcctgagtctctgatatagttttactacttacataggtttatagtctctccacgttgttataaaggaatgtaatagatcatgtttccttatatgacattgggacagtttgttaggaaccaataggaaaattccaagctaaataaaaaggagctttggctcttaggattctcttttcttcaggttaatcatattttaaaattctttttcaagttaggttgttcgtgcttttaagttttttgtgtgtcttccatcacttaaatattagtaatttaatatgttatttggttcaagatttgattgtggattttctatcatacccaaattttattagtaagacctcttaacaagtctttaaaatcaactggagaagtaagagaacagttcatcgttgtgtgggtgaaacccacgttgctggtacaggtggccatcatagaaaagaacatgagggaattgtcctgatgtctgaatgtcatttattgtgtcttcagttatctgaacatcatcatcaattatagcctgtgtaccgtaacctgaggtagtgatattcctgaggagtgtgaagaattggacactgtggattactatacattgtcatgaaagccttacaaggaggcagcttttctaggcttgacttaataacttcaacctaattgcttagagatttggataaataacctaatggcctgactccttttctaatgttttactaacagctacttctaaataaatatggtcccaggattttaaaattgtcttttctatgcattttttaaaaatggaaaaaaatgctcatttttctcaactattgcggaattattttaatatttcacaatattaacatgaaattcataaaaggatattttgcattaaattatagtttatagttcataaaataagctctataatctttatacttgttgaatgtaactaggaattaccactaaaatcctagccaggaccctctcctaatctagatagaatatatgggcagttgtccacactgtgtgttctggttcttttttgcgtaagatccagtgcaagtagtgtcttggtaggcagaaactgtaccctcatgtccagaccacttgtgtgtctgcataataaagctgcgactggcctccatacatacatagcttaaggcggaggttgatgtcttcactaggacatagtctattcaaaggctgctctgtgaagaaggtagaaagtattaaaccagccagtaactttttttttttaacctgatatcctgctcagaaaaagagatcacttaggaccttgtacctcatctaccttttgaggttccttctggggaggagggggattaaaggctgtctttatcatttcagagtgtctcttcaaaaccagttccatgacactgaaaagagagcacaggagtcgcaactatgcattggtccaaagacaccctcctaagtgttctggcactatccacgttcagaaggtgttgaggccattaggtctctggagaaagctgcctggattggcccctaccacacagcttgttacactccaagagctgctcctggggttttcttttttgaggctgttttggcactaattcttcttggtgatgactcataaaacaaatgttgtttttcacatagttcacttttgctagctccattgatatttgttccaaagagcatccctttgtctcaggtataaacataacaacaaaaagcagggatgctagactcatgattgtatatataaagcacacccatggcaggccaataagatcagttacagtcaaaaatgtcagcgagatgaggagattgatgccccagttcatgctagaagttaaagccatggctcgtcctctgatcccaccaggaaagatctcgctgagcaccagccagggcattggtcctagaccaattgaaaaagcagcaacataaacaagcaagctggctaaggacagccatttcaaaaaagctgggacgtccccagggtctgtgactatctggtattcagtgtggcttaatccagcatttagcaaggatgctgaggtcgtctcccctctcttatccacatcatttctcaggggcatgagtgagcttctgctatgggaagaaatccctttgaagtggtctctgagagtattgttgttggttgacaggtttcctggtccataaatcacagactcatccaaggactggttgatagaattgtggcttctgcagatatgggtgaagttcatgtggatgttgagatttacgatgcccatggtcaccaacgaagctgccatcacagaggagccaatgcagaggaatgttttgctgccgacatggtctacaagaagagtggcagggatggtgctaatgaccttgacgactccaaccccagtggaggcgaggctagctgcctcattgctttgaaatccaactgacttcaaaacagttgatgcatagaacaatatgtttggttggccagtgatttgtacaaaaaatactagtgttagtcctatcattattcgggtccgcatgttgtcttttgaacgaaacagatcccaaaaactgtactgatattcatctttcagggaggatttgatcacagtgagttcctcagttgtatctgagagtgctcttaaccttccaagaaccttgctagcagctccctcttgtcctttcatcaccagaaaccgagggcttggaggaagaaaatacattgcaattgcttgcaaaactcccaagggaatcacaagaccaaacatgtacttccagccatggaaaacattggcaaatgcgtaatttgaaatataggcagaaagaatgccgatgacaatcatcagctcattcagtgacacaagaaggcctcttctgtgttgaggagcaatctctgcgatgtaaacacaagtggcaatggaagagagggagatggagacccctatggcaatgcgtcccactataagaaccgtgtaggataaactgaggatcaagactaagcttccgagtccaagcaggcaggatgacaagatgattgctgtccttcttccatatctgtctatcaggacccctccggtgagtgaggcaaggagggctccaatgacgagggagctcacaaccatttcctgctcatggcagctcagggctaataaggttttgatctgaagaagagccccagagatgatcccaagttcataacccaccaggaggccactgacagcagcagtgacagatgacaggaaggtaaacatgccgcagcctctcgcccagggaggatgccggctgccgctgccctccgtctccacggctgtccccttctggttcagcagactggggccctcggtgttttcaacaggtaccatggtcacgtagaagttacagccgcttccccgccaccaaaccgccccgaccacccccgctcccaggagtggtcactttccccataatagcatgctaaagaagagtgtggggaaaaacttcgggcaaagctaatgt

SEQ ID NO: 735595 - DNA, 6979 bp, Homo sapiens
ctcgcgcactgtctctatgctccccagcgtctagtctatttattgtcgcggggaagctgcggccgcctcgcacccggaacaacaaagcaaggaagacggagtccgagcctcgggggctcctagcaacgggccggggcgggagttccatggagactggggagcgcgcccgtctcatcctcatccttgtcctccagcttctccttcgcatccgacgcaaccggcagcagcgctgccgccgcgtcctcagccaccgctccctcttcccacggatgtgatcttcgtggtggaaagctaaattttaaaaccaccccaatggatgcagacagtgatgttgcattggacattctaattacaaatgtagtctgtgtttttagaacaagatgtcatttaaacttaaggaagattgctttggaaggagcaaatgtaatttataaacgtgatgttggaaaagtattaatgaagcttagaaaacctagaattacagctacaatttggtcctcaggaaaaattatttgcactggagcaacaagtgaagaagaagctaaatttggtgccagacgcttagcccgtagtctgcagaaactaggttttcaggtaatatttacagattttaaggttgttaacgttctggcagtgtgtaacatgccatttgaaatccgtttgccagaattcacaaagaacaatagacctcatgccagttacgaacctgaacttcatcctgctgtgtgctatcggataaaatctctaagagctacattacagattttttcaacaggaagtatcacagtaacagggcccaatgtaaaggctgttgctactgctgtggaacagatttacccatttgtgtttgaaagcaggaaagaaattttataattcaccacttaattggttagaatctctaactgagcaccttttaaacctgctgcacattggactcaaaaggaaaactggaccaacaataattgaggaaatagactcttttattcattcacggctacagtgtaagctccagtccctttggattttattccaaaccttgctgtaatataaaaggaagtttacaagacatgatattgctgcttttacaaaaggacattctatttattttcgcagtaattctcatgtccccataagcagagctgtcacagtgtgcactaccttagattgttttattgtcgtcattgttatttttttccattttgagctaatgtgttttatttgtgaatagtcttttacatttttgtatgctgaatatgggcaccaaagaacctgtaaaagttatctttttcaattgaatgtgcacaaataaaagtttggaaaagagaaaagatctctcttcattctataacttttattccccattttctattttaacaaaaattgtattcatacttcttttttttaaaatctatgcaagcttaagactttggctaaagtgtgttggcttctttttgaagtgtattttgtgtgtgtgtgtgtgtgtgtgtatatatatatatatatatgcaccacatgtgtatagtatcttttaatgctctgttaccaaataacaaataggaattttttttcttgcagattagaaataaaaacgtgtatataaactctagggaaccagactagaagtttatagataaaggataatgttttatgttgctaatttaatatgatagaaaatgttaaataacttgtaaaggttaagaaattgtagttttaagaagagaaacctcttacccactagatggaaatgagaaagaagctgtgatgaatggtgcctcatttggacctttgtttttctggaaagactcaacacctgtagttgtagagaagtgattgaggttcttgactttaatcttgggttgatgcccaagcctatactaagagtcttgtcagaagttggtaacatggagatgttttaacaagaagtgcccataagctgcctctgtgccacagtgtaattatcaaatagccccacttgaatttgaaagccattttgtgtgatactgtccttccccttgctgtatcttatttaatggagttaaagagtgactattcagtatatgagattgctactcttaaagttataataaatatgcatttatgaaacagtgtctctggctcacccaggagccctgatgtggtaatacaggatcaagctgtagttgtgccctgtcatttaggtttaggagtttagtgtaaccaacagtgattatacctagaaataaagctgagtggagagtccaattagcttctcaggagaaacttaatggggacaatattccaacacaatgttccacaaaaacttgtatttccaaaatgtttttaaacctttgtggaaaaattgcaacatcctaatctccatatatagtacattttccttactgtattataaaatcttgaaaacctagcttaggcactgcactgaacaacacatattatttttatcttttttcttctcaatgccttccctaacctcctgcttattccaaagtggaaagcaaaggctaacttacatttttccttcttgtgaaatatttcattgagatttttagacttgtatttttcctttttttttaaaaaaaagtgtttatttcctttattttaagattcagtaggatagccaaattcatagagaataaaattacatgaaagagttacaagctcactgttttaaagacttgacatttttcatttagttttaattaacagtaataagtcacctcctgtttttcaatgttcaccaaaaaaagaaacatagaatagggggaaaacatgcttatatagccaaggtacagatccagatgatgtaacctttttagtattcgcatgacttgaaaactgggcagatcaatagataatcgaagtgctttatctgaagggagagggtaaagacagtgtgaccaggtttgttttcagggctgccgaatgagcctcacctaacagtgtccatgggtaattcgctaaccttaacaaagatgggaagaagtgagtgctctgatgtcttctgctggctctccataagtactgtaaattttttttataaataaaaactgtgaatatatatgtacaagttgtaagtatttccccctttttatttttgaaaatcaagaagcttgatttggtgtggtgcaatggatattggataaaaatttgaagacaaaattgtttagttacagactcaggataataaaagaaaaatataaaagaatgctcaagatactgaagtcaaggtcactagtaataaactggctaggttgataaacaatttcctgcccatttataatgaagggctaaacaaaaaatacctgaagtatatatagagtttgaactataaacacggaaggaaacatggggcagaacacacttcccttctctttccaaaaacaaaaaacaatgcatgctctgatttgcgtatgaaatacaccatgatagaattgagatctccaatctcctttccttttagcttccccctgccaatttttatacagataatacactgcagatccaggccttttagtcagtctcctgagtctctgatatagttttactacttacataggtttatagtctctccacgttgttataaaggaatgtaatagatcatgtttccttatatgacattgggacagtttgttaggaaccaataggaaaattccaagctaaataaaaaggagctttggctcttaggattctcttttcttcaggttaatcatattttaaaattctttttcaagttaggttgttcgtgcttttaagttttttgtgtgtcttccatcacttaaatattagtaatttaatatgttatttggttcaagatttgattgtggattttctatcatacccaaattttattagtaagacctcttaacaagtctttaaaatcaactggagaagtaagagaacagttcatcgttgtgtgggtgaaacccacgttgctggtacaggtggccatcatagaaaagaacatgagggaattgtcctgatgtctgaatgtcatttattgtgtcttcagttatctgaacatcatcatcaattatagcctgtgtaccgtaacctgaggtagtgatattcctgaggagtgtgaagaattggacactgtggattactatacattgtcatgaaagccttacaaggaggcagcttttctaggcttgacttaataacttcaacctaattgcttagagatttggataaataacctaatggcctgactccttttctaatgttttactaacagctacttctaaataaatatggtcccaggattttaaaattgtcttttctatgcattttttaaaaatggaaaaaaatgctcatttttctcaactattgcggaattattttaatatttcacaatattaacatgaaattcataaaaggatattttgcattaaattatagtttatagttcataaaataagctctataatctttatacttgttgaatgtaactaggaattaccactaaaatcctagccaggaccctctcctaatctagatagaatatatgggcagttgtccacactgtgtgttctggttcttttttgcgtaagatccagtgcaagtagtgtcttggtaggcagaaactgtaccctcatgtccagaccacttgtgtgtctgcataataaagctgcgactggcctccatacatacatagcttaaggcggaggttgatgtcttcactaggacatagtctattcaaaggctgctctgtgaagaaggtagaaagtattaaaccagccagtaactttttttttttaacctgatatcctgctcagaaaaagagatcacttaggaccttgtacctcatctaccttttgaggttccttctggggaggagggggattaaaggctgtctttatcatttcagagtgtctcttcaaaaccagttccatgacactgaaaagagagcacaggagtcgcaactatgcattggtccaaagacaccctcctaagtgttctggcactatccacgttcagaaggtgttgaggccattaggtctctggagaaagctgcctggattggcccctaccacacagcttgttacactccaagagctgctcctggggttttcttttttgaggctgttttggcactaattcttcttggtgatgactcataaaacaaatgttgtttttcacatagttcacttttgctagctccattgatatttgttccaaagagcatccctttgtctcaggtataaacataacaacaaaaagcagggatgctagactcatgattgtatatataaagcacacccatggcaggccaataagatcagttacagtcaaaaatgtcagcgagatgaggagattgatgccccagttcatgctagaagttaaagccatggctcgtcctctgatcccaccaggaaagatctcgctgagcaccagccagggcattggtcctagaccaattgaaaaagcagcaacataaacaagcaagctggctaaggacagccatttcaaaaaagctgggacgtccccagggtctgtgactatctggtattcagtgtggcttaatccagcatttagcaaggatgctgaggtcgtctcccctctcttatccacatcatttctcaggggcatgagtgagcttctgctatgggaagaaatccctttgaagtggtctctgagagtattgttgttggttgacaggtttcctggtccataaatcacagactcatccaaggactggttgatagaattgtggcttctgcagatatgggtgaagttcatgtggatgttgagatttacgatgcccatggtcaccaacgaagctgccatcacagaggagccaatgcagaggaatgttttgctgccgacatggtctacaagaagagtggcagggatggtgctaatgaccttgacgactccaaccccagtggaggcgaggctagctgcctcattgctttgaaatccaactgacttcaaaacagttgatgcatagaacaatatgtttggttggccagtgatttgtacaaaaaatactagtgttagtcctatcattattcgggtccgcatgttgtcttttgaacgaaacagatcccaaaaactgtactgatattcatctttcagggaggatttgatcacagtgagttcctcagttgtatctgagagtgctcttaaccttccaagaaccttgctagcagctccctcttgtcctttcatcaccagaaaccgagggcttggaggaagaaaatacattgcaattgcttgcaaaactcccaagggaatcacaagaccaaacatgtacttccagccatggaaaacattggcaaatgcgtaatttgaaatataggcagaaagaatgccgatgacaatcatcagctcattcagtgacacaagaaggcctcttctgtgttgaggagcaatctctgcgatgtaaacacaagtggcaatggaagagagggagatggagacccctatggcaatgcgtcccactataagaaccgtgtaggataaactgaggatcaagactaagcttccgagtccaagcaggcaggatgacaagatgattgctgtccttcttccatatctgtctatcaggacccctccggtgagtgaggcaaggagggctccaatgacgagggagctcacaaccatttcctgctcatggcagctcagggctaataaggttttgatctgaagaagagccccagagatgatcccaagttcataacccaccaggaggccactgacagcagcagtgacagatgacaggaaggtaaacatgccgcagcctctcgcccagggaggatgccggctgccgctgccctccgtctccacggctgtccccttctggttcagcagactggggccctcggtgttttcaacaggtaccatggtcacgtagaagttacagccgcttccccgccaccaaaccgccccgaccacccccgctcccaggagtggtcactttccccataatagcatgctaaagaagagtgtggggaaaaacttcgggcaaagctaatgt

SEQ ID NO: 735596 - DNA, 6210 bp, Homo sapiens
aacagaaagccccccccgagccagggcccaatgtaaaggctgttgctactgctgtggaacagatttacccatttgtgtttgaaagcaggaaagaaattttataattcaccacttaattggttagaatctctaactgagcaccttttaaacctgctgcacattggactcaaaaggaaaactggaccaacaataattgaggaaatagactcttttattcattcacggctacagtgtaagctccagtccctttggattttattccaaaccttgctgtaatataaaaggaagtttacaagacatgatattgctgcttttacaaaaggacattctatttattttcgcagtaattctcatgtccccataagcagagctgtcacagtgtgcactaccttagattgttttattgtcgtcattgttatttttttccattttgagctaatgtgttttatttgtgaatagtcttttacatttttgtatgctgaatatgggcaccaaagaacctgtaaaagttatctttttcaattgaatgtgcacaaataaaagtttggaaaagagaaaagatctctcttcattctataacttttattccccattttctattttaacaaaaattgtattcatacttcttttttttaaaatctatgcaagcttaagactttggctaaagtgtgttggcttctttttgaagtgtattttgtgtgtgtgtgtgtgtgtgtgtatatatatatatatatatgcaccacatgtgtatagtatcttttaatgctctgttaccaaataacaaataggaattttttttcttgcagattagaaataaaaacgtgtatataaactctagggaaccagactagaagtttatagataaaggataatgttttatgttgctaatttaatatgatagaaaatgttaaataacttgtaaaggttaagaaattgtagttttaagaagagaaacctcttacccactagatggaaatgagaaagaagctgtgatgaatggtgcctcatttggacctttgtttttctggaaagactcaacacctgtagttgtagagaagtgattgaggttcttgactttaatcttgggttgatgcccaagcctatactaagagtcttgtcagaagttggtaacatggagatgttttaacaagaagtgcccataagctgcctctgtgccacagtgtaattatcaaatagccccacttgaatttgaaagccattttgtgtgatactgtccttccccttgctgtatcttatttaatggagttaaagagtgactattcagtatatgagattgctactcttaaagttataataaatatgcatttatgaaacagtgtctctggctcacccaggagccctgatgtggtaatacaggatcaagctgtagttgtgccctgtcatttaggtttaggagtttagtgtaaccaacagtgattatacctagaaataaagctgagtggagagtccaattagcttctcaggagaaacttaatggggacaatattccaacacaatgttccacaaaaacttgtatttccaaaatgtttttaaacctttgtggaaaaattgcaacatcctaatctccatatatagtacattttccttactgtattataaaatcttgaaaacctagcttaggcactgcactgaacaacacatattatttttatcttttttcttctcaatgccttccctaacctcctgcttattccaaagtggaaagcaaaggctaacttacatttttccttcttgtgaaatatttcattgagatttttagacttgtatttttcctttttttttaaaaaaaagtgtttatttcctttattttaagattcagtaggatagccaaattcatagagaataaaattacatgaaagagttacaagctcactgttttaaagacttgacatttttcatttagttttaattaacagtaataagtcacctcctgtttttcaatgttcaccaaaaaaagaaacatagaatagggggaaaacatgcttatatagccaaggtacagatccagatgatgtaacctttttagtattcgcatgacttgaaaactgggcagatcaatagataatcgaagtgctttatctgaagggagagggtaaagacagtgtgaccaggtttgttttcagggctgccgaatgagcctcacctaacagtgtccatgggtaattcgctaaccttaacaaagatgggaagaagtgagtgctctgatgtcttctgctggctctccataagtactgtaaattttttttataaataaaaactgtgaatatatatgtacaagttgtaagtatttccccctttttatttttgaaaatcaagaagcttgatttggtgtggtgcaatggatattggataaaaatttgaagacaaaattgtttagttacagactcaggataataaaagaaaaatataaaagaatgctcaagatactgaagtcaaggtcactagtaataaactggctaggttgataaacaatttcctgcccatttataatgaagggctaaacaaaaaatacctgaagtatatatagagtttgaactataaacacggaaggaaacatggggcagaacacacttcccttctctttccaaaaacaaaaaacaatgcatgctctgatttgcgtatgaaatacaccatgatagaattgagatctccaatctcctttccttttagcttccccctgccaatttttatacagataatacactgcagatccaggccttttagtcagtctcctgagtctctgatatagttttactacttacataggtttatagtctctccacgttgttataaaggaatgtaatagatcatgtttccttatatgacattgggacagtttgttaggaaccaataggaaaattccaagctaaataaaaaggagctttggctcttaggattctcttttcttcaggttaatcatattttaaaattctttttcaagttaggttgttcgtgcttttaagttttttgtgtgtcttccatcacttaaatattagtaatttaatatgttatttggttcaagatttgattgtggattttctatcatacccaaattttattagtaagacctcttaacaagtctttaaaatcaactggagaagtaagagaacagttcatcgttgtgtgggtgaaacccacgttgctggtacaggtggccatcatagaaaagaacatgagggaattgtcctgatgtctgaatgtcatttattgtgtcttcagttatctgaacatcatcatcaattatagcctgtgtaccgtaacctgaggtagtgatattcctgaggagtgtgaagaattggacactgtggattactatacattgtcatgaaagccttacaaggaggcagcttttctaggcttgacttaataacttcaacctaattgcttagagatttggataaataacctaatggcctgactccttttctaatgttttactaacagctacttctaaataaatatggtcccaggattttaaaattgtcttttctatgcattttttaaaaatggaaaaaaatgctcatttttctcaactattgcggaattattttaatatttcacaatattaacatgaaattcataaaaggatattttgcattaaattatagtttatagttcataaaataagctctataatctttatacttgttgaatgtaactaggaattaccactaaaatcctagccaggaccctctcctaatctagatagaatatatgggcagttgtccacactgtgtgttctggttcttttttgcgtaagatccagtgcaagtagtgtcttggtaggcagaaactgtaccctcatgtccagaccacttgtgtgtctgcataataaagctgcgactggcctccatacatacatagcttaaggcggaggttgatgtcttcactaggacatagtctattcaaaggctgctctgtgaagaaggtagaaagtattaaaccagccagtaactttttttttttaacctgatatcctgctcagaaaaagagatcacttaggaccttgtacctcatctaccttttgaggttccttctggggaggagggggattaaaggctgtctttatcatttcagagtgtctcttcaaaaccagttccatgacactgaaaagagagcacaggagtcgcaactatgcattggtccaaagacaccctcctaagtgttctggcactatccacgttcagaaggtgttgaggccattaggtctctggagaaagctgcctggattggcccctaccacacagcttgttacactccaagagctgctcctggggttttcttttttgaggctgttttggcactaattcttcttggtgatgactcataaaacaaatgttgtttttcacatagttcacttttgctagctccattgatatttgttccaaagagcatccctttgtctcaggtataaacataacaacaaaaagcagggatgctagactcatgattgtatatataaagcacacccatggcaggccaataagatcagttacagtcaaaaatgtcagcgagatgaggagattgatgccccagttcatgctagaagttaaagccatggctcgtcctctgatcccaccaggaaagatctcgctgagcaccagccagggcattggtcctagaccaattgaaaaagcagcaacataaacaagcaagctggctaaggacagccatttcaaaaaagctgggacgtccccagggtctgtgactatctggtattcagtgtggcttaatccagcatttagcaaggatgctgaggtcgtctcccctctcttatccacatcatttctcaggggcatgagtgagcttctgctatgggaagaaatccctttgaagtggtctctgagagtattgttgttggttgacaggtttcctggtccataaatcacagactcatccaaggactggttgatagaattgtggcttctgcagatatgggtgaagttcatgtggatgttgagatttacgatgcccatggtcaccaacgaagctgccatcacagaggagccaatgcagaggaatgttttgctgccgacatggtctacaagaagagtggcagggatggtgctaatgaccttgacgactccaaccccagtggaggcgaggctagctgcctcattgctttgaaatccaactgacttcaaaacagttgatgcatagaacaatatgtttggttggccagtgatttgtacaaaaaatactagtgttagtcctatcattattcgggtccgcatgttgtcttttgaacgaaacagatcccaaaaactgtactgatattcatctttcagggaggatttgatcacagtgagttcctcagttgtatctgagagtgctcttaaccttccaagaaccttgctagcagctccctcttgtcctttcatcaccagaaaccgagggcttggaggaagaaaatacattgcaattgcttgcaaaactcccaagggaatcacaagaccaaacatgtacttccagccatggaaaacattggcaaatgcgtaatttgaaatataggcagaaagaatgccgatgacaatcatcagctcattcagtgacacaagaaggcctcttctgtgttgaggagcaatctctgcgatgtaaacacaagtggcaatggaagagagggagatggagacccctatggcaatgcgtcccactataagaaccgtgtaggataaactgaggatcaagactaagcttccgagtccaagcaggcaggatgacaagatgattgctgtccttcttccatatctgtctatcaggacccctccggtgagtgaggcaaggagggctccaatgacgagggagctcacaaccatttcctgctcatggcagctcagggctaataaggttttgatctgaagaagagccccagagatgatcccaagttcataacccaccaggaggccactgacagcagcagtgacagatgacaggaaggtaaacatgccgcagcctctcgcccagggaggatgccggctgccgctgccctccgtctccacggctgtccccttctggttcagcagactggggccctcggtgttttcaacaggtaccatggtcacgtagaagttacagccgcttccccgccaccaaaccgccccgaccacccccgctcccaggagtggtcactttccccataatagcatgctaaagaagagtgtggggaaaaacttcgggcaaagctaatgt

SEQ ID NO: 735597 - DNA, 6419 bp, Homo sapiens
ccagctgaacgatctctaattctcaccgctacaagtaatatttacagattttaaggttgttaacgttctggcagtgtgtaacatgccatttgaaatccgtttgccagaattcacaaagaacaatagacctcatgccagttacgaacctgaacttcatcctgctgtgtgctatcggataaaatctctaagagctacattacagattttttcaacaggaagtatcacagtaacagggcccaatgtaaaggctgttgctactgctgtggaacagatttacccatttgtgtttgaaagcaggaaagaaattttataattcaccacttaattggttagaatctctaactgagcaccttttaaacctgctgcacattggactcaaaaggaaaactggaccaacaataattgaggaaatagactcttttattcattcacggctacagtgtaagctccagtccctttggattttattccaaaccttgctgtaatataaaaggaagtttacaagacatgatattgctgcttttacaaaaggacattctatttattttcgcagtaattctcatgtccccataagcagagctgtcacagtgtgcactaccttagattgttttattgtcgtcattgttatttttttccattttgagctaatgtgttttatttgtgaatagtcttttacatttttgtatgctgaatatgggcaccaaagaacctgtaaaagttatctttttcaattgaatgtgcacaaataaaagtttggaaaagagaaaagatctctcttcattctataacttttattccccattttctattttaacaaaaattgtattcatacttcttttttttaaaatctatgcaagcttaagactttggctaaagtgtgttggcttctttttgaagtgtattttgtgtgtgtgtgtgtgtgtgtgtatatatatatatatatatgcaccacatgtgtatagtatcttttaatgctctgttaccaaataacaaataggaattttttttcttgcagattagaaataaaaacgtgtatataaactctagggaaccagactagaagtttatagataaaggataatgttttatgttgctaatttaatatgatagaaaatgttaaataacttgtaaaggttaagaaattgtagttttaagaagagaaacctcttacccactagatggaaatgagaaagaagctgtgatgaatggtgcctcatttggacctttgtttttctggaaagactcaacacctgtagttgtagagaagtgattgaggttcttgactttaatcttgggttgatgcccaagcctatactaagagtcttgtcagaagttggtaacatggagatgttttaacaagaagtgcccataagctgcctctgtgccacagtgtaattatcaaatagccccacttgaatttgaaagccattttgtgtgatactgtccttccccttgctgtatcttatttaatggagttaaagagtgactattcagtatatgagattgctactcttaaagttataataaatatgcatttatgaaacagtgtctctggctcacccaggagccctgatgtggtaatacaggatcaagctgtagttgtgccctgtcatttaggtttaggagtttagtgtaaccaacagtgattatacctagaaataaagctgagtggagagtccaattagcttctcaggagaaacttaatggggacaatattccaacacaatgttccacaaaaacttgtatttccaaaatgtttttaaacctttgtggaaaaattgcaacatcctaatctccatatatagtacattttccttactgtattataaaatcttgaaaacctagcttaggcactgcactgaacaacacatattatttttatcttttttcttctcaatgccttccctaacctcctgcttattccaaagtggaaagcaaaggctaacttacatttttccttcttgtgaaatatttcattgagatttttagacttgtatttttcctttttttttaaaaaaaagtgtttatttcctttattttaagattcagtaggatagccaaattcatagagaataaaattacatgaaagagttacaagctcactgttttaaagacttgacatttttcatttagttttaattaacagtaataagtcacctcctgtttttcaatgttcaccaaaaaaagaaacatagaatagggggaaaacatgcttatatagccaaggtacagatccagatgatgtaacctttttagtattcgcatgacttgaaaactgggcagatcaatagataatcgaagtgctttatctgaagggagagggtaaagacagtgtgaccaggtttgttttcagggctgccgaatgagcctcacctaacagtgtccatgggtaattcgctaaccttaacaaagatgggaagaagtgagtgctctgatgtcttctgctggctctccataagtactgtaaattttttttataaataaaaactgtgaatatatatgtacaagttgtaagtatttccccctttttatttttgaaaatcaagaagcttgatttggtgtggtgcaatggatattggataaaaatttgaagacaaaattgtttagttacagactcaggataataaaagaaaaatataaaagaatgctcaagatactgaagtcaaggtcactagtaataaactggctaggttgataaacaatttcctgcccatttataatgaagggctaaacaaaaaatacctgaagtatatatagagtttgaactataaacacggaaggaaacatggggcagaacacacttcccttctctttccaaaaacaaaaaacaatgcatgctctgatttgcgtatgaaatacaccatgatagaattgagatctccaatctcctttccttttagcttccccctgccaatttttatacagataatacactgcagatccaggccttttagtcagtctcctgagtctctgatatagttttactacttacataggtttatagtctctccacgttgttataaaggaatgtaatagatcatgtttccttatatgacattgggacagtttgttaggaaccaataggaaaattccaagctaaataaaaaggagctttggctcttaggattctcttttcttcaggttaatcatattttaaaattctttttcaagttaggttgttcgtgcttttaagttttttgtgtgtcttccatcacttaaatattagtaatttaatatgttatttggttcaagatttgattgtggattttctatcatacccaaattttattagtaagacctcttaacaagtctttaaaatcaactggagaagtaagagaacagttcatcgttgtgtgggtgaaacccacgttgctggtacaggtggccatcatagaaaagaacatgagggaattgtcctgatgtctgaatgtcatttattgtgtcttcagttatctgaacatcatcatcaattatagcctgtgtaccgtaacctgaggtagtgatattcctgaggagtgtgaagaattggacactgtggattactatacattgtcatgaaagccttacaaggaggcagcttttctaggcttgacttaataacttcaacctaattgcttagagatttggataaataacctaatggcctgactccttttctaatgttttactaacagctacttctaaataaatatggtcccaggattttaaaattgtcttttctatgcattttttaaaaatggaaaaaaatgctcatttttctcaactattgcggaattattttaatatttcacaatattaacatgaaattcataaaaggatattttgcattaaattatagtttatagttcataaaataagctctataatctttatacttgttgaatgtaactaggaattaccactaaaatcctagccaggaccctctcctaatctagatagaatatatgggcagttgtccacactgtgtgttctggttcttttttgcgtaagatccagtgcaagtagtgtcttggtaggcagaaactgtaccctcatgtccagaccacttgtgtgtctgcataataaagctgcgactggcctccatacatacatagcttaaggcggaggttgatgtcttcactaggacatagtctattcaaaggctgctctgtgaagaaggtagaaagtattaaaccagccagtaactttttttttttaacctgatatcctgctcagaaaaagagatcacttaggaccttgtacctcatctaccttttgaggttccttctggggaggagggggattaaaggctgtctttatcatttcagagtgtctcttcaaaaccagttccatgacactgaaaagagagcacaggagtcgcaactatgcattggtccaaagacaccctcctaagtgttctggcactatccacgttcagaaggtgttgaggccattaggtctctggagaaagctgcctggattggcccctaccacacagcttgttacactccaagagctgctcctggggttttcttttttgaggctgttttggcactaattcttcttggtgatgactcataaaacaaatgttgtttttcacatagttcacttttgctagctccattgatatttgttccaaagagcatccctttgtctcaggtataaacataacaacaaaaagcagggatgctagactcatgattgtatatataaagcacacccatggcaggccaataagatcagttacagtcaaaaatgtcagcgagatgaggagattgatgccccagttcatgctagaagttaaagccatggctcgtcctctgatcccaccaggaaagatctcgctgagcaccagccagggcattggtcctagaccaattgaaaaagcagcaacataaacaagcaagctggctaaggacagccatttcaaaaaagctgggacgtccccagggtctgtgactatctggtattcagtgtggcttaatccagcatttagcaaggatgctgaggtcgtctcccctctcttatccacatcatttctcaggggcatgagtgagcttctgctatgggaagaaatccctttgaagtggtctctgagagtattgttgttggttgacaggtttcctggtccataaatcacagactcatccaaggactggttgatagaattgtggcttctgcagatatgggtgaagttcatgtggatgttgagatttacgatgcccatggtcaccaacgaagctgccatcacagaggagccaatgcagaggaatgttttgctgccgacatggtctacaagaagagtggcagggatggtgctaatgaccttgacgactccaaccccagtggaggcgaggctagctgcctcattgctttgaaatccaactgacttcaaaacagttgatgcatagaacaatatgtttggttggccagtgatttgtacaaaaaatactagtgttagtcctatcattattcgggtccgcatgttgtcttttgaacgaaacagatcccaaaaactgtactgatattcatctttcagggaggatttgatcacagtgagttcctcagttgtatctgagagtgctcttaaccttccaagaaccttgctagcagctccctcttgtcctttcatcaccagaaaccgagggcttggaggaagaaaatacattgcaattgcttgcaaaactcccaagggaatcacaagaccaaacatgtacttccagccatggaaaacattggcaaatgcgtaatttgaaatataggcagaaagaatgccgatgacaatcatcagctcattcagtgacacaagaaggcctcttctgtgttgaggagcaatctctgcgatgtaaacacaagtggcaatggaagagagggagatggagacccctatggcaatgcgtcccactataagaaccgtgtaggataaactgaggatcaagactaagcttccgagtccaagcaggcaggatgacaagatgattgctgtccttcttccatatctgtctatcaggacccctccggtgagtgaggcaaggagggctccaatgacgagggagctcacaaccatttcctgctcatggcagctcagggctaataaggttttgatctgaagaagagccccagagatgatcccaagttcataacccaccaggaggccactgacagcagcagtgacagatgacaggaaggtaaacatgccgcagcctctcgcccagggaggatgccggctgccgctgccctccgtctccacggctgtccccttctggttcagcagactggggccctcggtgttttcaacaggtaccatggtcacgtagaagttacagccgcttccccgccaccaaaccgccccgaccacccccgctcccaggagtggtcactttccccataatagcatgctaaagaagagtgtggggaaaaacttcgggcaaagctaatgt

SEQ ID NO: 735598 - DNA, 2086 bp, Homo sapiens
tttaatccccctcctccccagaaggaacctcaaaaggtagatgaagtacaacctcctaagtgttctggcactatccacgttcagaaggtgttgaggccattaggtctctggagaaagctgcctggattggcccctaccacacagcttgttacactccaagagctgctcctggggttttcttttttgaggctgttttggcactaattcttcttggtgatgactcataaaacaaatgttgtttttcacatagttcacttttgctagctccattgatatttgttccaaagagcatccctttgtctcaggtataaacataacaacaaaaagcagggatgctagactcatgattgtatatataaagcacacccatggcaggccaataagatcagttacagtcaaaaatgtcagcgagatgaggagattgatgccccagttcatgctagaagttaaagccatggctcgtcctctgatcccaccaggaaagatctcgctgagcaccagccagggcattggtcctagaccaattgaaaaagcagcaacataaacaagcaagctggctaaggacagccatttcaaaaaagctgggacgtccccagggtctgtgactatctggtattcagtgtggcttaatccagcatttagcaaggatgctgaggtcgtctcccctctcttatccacatcatttctcaggggcatgagtgagcttctgctatgggaagaaatccctttgaagtggtctctgagagtattgttgttggttgacaggtttcctggtccataaatcacagactcatccaaggactggttgatagaattgtggcttctgcagatatgggtgaagttcatgtggatgttgagatttacgatgcccatggtcaccaacgaagctgccatcacagaggagccaatgcagaggaatgttttgctgccgacatggtctacaagaagagtggcagggatggtgctaatgaccttgacgactccaaccccagtggaggcgaggctagctgcctcattgctttgaaatccaactgacttcaaaacagttgatgcatagaacaatatgtttggttggccagtgatttgtacaaaaaatactagtgttagtcctatcattattcgggtccgcatgttgtcttttgaacgaaacagatcccaaaaactgtactgatattcatctttcagggaggatttgatcacagtgagttcctcagttgtatctgagagtgctcttaaccttccaagaaccttgctagcagctccctcttgtcctttcatcaccagaaaccgagggcttggaggaagaaaatacattgcaattgcttgcaaaactcccaagggaatcacaagaccaaacatgtacttccagccatggaaaacattggcaaatgcgtaatttgaaatataggcagaaagaatgccgatgacaatcatcagctcattcagtgacacaagaaggcctcttctgtgttgaggagcaatctctgcgatgtaaacacaagtggcaatggaagagagggagatggagacccctatggcaatgcgtcccactataagaaccgtgtaggataaactgaggatcaagactaagcttccgagtccaagcaggcaggatgacaagatgattgctgtccttcttccatatctgtctatcaggacccctccggtgagtgaggcaaggagggctccaatgacgagggagctcacaaccatttcctgctcatggcagctcagggctaataaggttttgatctgaagaagagccccagagatgatcccaagttcataacccaccaggaggccactgacagcagcagtgacagatgacaggaaggtaaacatgccgcagcctctcgcccagggaggatgccggctgccgctgccctccgtctccacggctgtccccttctggttcagcagactggggccctcggtgttttcaacaggtaccatggtcacgtagaagttacagccgcttccccgccaccaaaccgccccgaccacccccgctcccaggagtggtcactttccccataatagcatgctaaagaagagtgtggggaaaaacttcgggcaaagctaatgt

SEQ ID NO: 735599 - DNA, 1056 bp, Homo sapiens
caatgagcatgtgctttcagctgggtttgacatcaatacacctgacaaccttggccgtacctgtcttcatgctgctgcttccggagggaatgttgaatgtcttaatttgctgttgagcagtggagctgacttgaggaggagggacaaatttggcaggaccccactgcactatgcagctgctaacggtagctaccagtgtgcagtaacattggtgactgctggggcaggtgtcaacgaggccgactgtaaaggctgctctcccctccactacgctgccgcttctgacacttacaggagagcggaaccccatacaccttccagccatgatgccgaagaggacgagccactgaaggagtcccgcaggaaggaggccttcttctgtctggagttcttactggataacggtgcagacccctccctgcgggacaggcagggctacacagctgtgcactatgcagccgcctatggcaacagacagaacctcgaactgctcttagaaatgtcctttaactgcctggaggatgtggagagcaccattccagtcagccctttgcacttagctgcctacaacggtcactgtgaagccttgaagacgctggcggagacgctggtgaatctggacgtaagggaccacaagggccggaccgcactcttcctggccacggagcgcggctctactgagtgtgtggaggtgcttacagcccacggcgcctctgccctcatcaaggagcgcaagcgcaagtggacacccctgcacgctgctgctgcctctggccacactgactccctgcacttgctgatcgacagtggggaacgagctgacatcacagatgtcatggatgcctatggacagaccccactgatgctggccatcatgaatggccatgtggactgtgtacatctgctgctagagaaaggatccacagctgatgctgctgacctccggggccgcactgccctccaccgcggggcagtgactggctgtgaggactgcctggctgccctgctggaccacgacgcatttgtgctgtgccgagactttaagggccgcacgcc

SEQ ID NO: 735600 - DNA, 958 bp, Homo sapiens
ctgttttacagcaaacttaaaaaaaaaaaaagtagaggtacactctaaaataacaataaaaaatatagtaaatgcataaaccagtaacagagttgtttattatcgttatattgtacataattatacgtgtgatacttttacatgactgacagcataggtttgttcacaccagcaacaccacaaacatgtgagtaatgccttgtgctacaatgttaccatggctataattgatgtagggatttttcagctccattataatcttatggaatgcatatatggcctgtcattgaccaaaatgtcattatgtggcgcatgactgtatttttaatgtacaattaaaataatagtaaatttttcataacatacctgattgtctcctgataagaaaggaaagaaatctaatcctgtggaagaaaaaattatttcagtttaaaaaaaaaagaaggaaaaactcttccaaatgccccaatacttcaaaaacaaatacaagtcttatatgctatgtcactcagaattttatttaaacatgaagagttgagctaaacgttttacgtctctcctttctttagattactaaggctgaaaactaagctttggcaatgatttgtcttctccgtgaccccatttgggggactggggccattactactctgtcagatctaacactgatccttaaacgggcatagtacttttaacaaatgctctggactcctcttaaggaaactttcaatctgctctaagttactcctcacaagcacttcatgaggtatgtaattagttttgccctcattttgcaggtgagaaagtttgaagttgaaagagttaggttaagtaagttgtagtactgatttttctttcttaaatttgctcatttgctatcagattcaactgacagactgcagtggcatgaggggagaagaggtttgagtgcctgcaaactggctactattacataaga

SEQ ID NO: 735601 - DNA, 658 bp, Homo sapiens
gatccacctccgcccacgctggctcctctctcaaccactcccgacacctcgcctttctgctctctctcttctctctgtctttgcctggtcctttgcgtgggtggtgggggtggggctagggtgggtgggtgtggtgggggggtgggtggtgtggggtttttcataggtcggctaagcctactccttacccagacagctttattccaatatctctaaaacatattctcagggggtacagagcaaataagagaatatgtgatggagaacatgcaattgggatagttgataaagatgctcacacgtgagttcaagaccttcaaagcactttgaaagaagcaagcaactgattatattaactgaatgcacactcgggaggagagggaacagtgatgacagaaaaatacatacagacgcacacaatgaacacacacacccacgagccatgtcctgaaaatacacagggaatgcagcgggacagatgagctttataacttaaggctggataaaatatgcacacacaaacagaatccaagtctgtcgttttcagaaaatggaaatcaaactatcccccgaccccctccccacaacaaagaaaagcccacgattgaaaacttcatacatgcaattccttttccccacgcgtccgcggacgcgtggg

SEQ ID NO: 735602 - DNA, 2095 bp, Homo sapiens
acagaggcggtcaggaaaggagcggggaggggagagtggggcacaggcagcgcctcccgtctatgcgcctgtgtgcaaagtggcacaatgccccccttcctattggcagtgcagcccctggccagcaaccactcgcacctgggctgggggcctttgtgtagggcacacctgtgcagccacacctacttgtagagcctcatagactcagctgtggacaaaagcctcacgccccaaacagggaaatgggatctcaaggggaagaagctggggaggcctcacaccctgcccccatttcctcctatgtgggggaggggagcagcacgaactcctgaagacttgggagcgtcagcagcttctgcggaaggggtggggctgagggtggagagaggacagggaaggaagaaaaggggagccttcctggccagggtaaccggcactaagaggcctcactccaagcccccgaggagcctgtggtggggctggagacccggctcaggcccctccaccacccttaaagtcctcagaaggtgggaactgaactggcacaggctgggaaccggctgtgcgctggccacttgattttgccagctgccctgtaattcagctggtgaggaaactgaggcacagactgaggtagaatgattcgccagtcactcagcaagtcagcagacggggaggactgaatcccagcctgagagcaccgaagcttgtatccctgcaataccgagccccaagcctgcgagccccggtgcccatctctgagttaggccgtcttggaagggttcccttcctcctacaagatggtgtgtgaggagccttcaatacgacccggggtgtaaagtgtccaactctagtaggggcctgatggcatccccgccgagtcccaggagagagagagaagaccccttcctggagtccagggctcccgggaagaaacactggcatttgtccctttgcttcggcttctggaggcagagactctgagcccagggagagccttctgcagccccatttcctcaaaaatccaacctgcccaggtggcgggtcatgagctgtgctcaggaagctggaatctgaccctggtggcgtcgggcccagtctccatggcagccgagcatttattacccgggcctccacccagcttggcagactttagacttgaggctggaggaaagggaactgaacgcggttctgggagcagcaagcccacgggtagcagccgaggccccagaatgagtacaaggaatgcttctccctgtatgacaagcagcagagggggaagataaaagccaccgacctcatggtggccatgaggtgcctgggggccagcccgacgccaggggaggtgcagcggcacctgcagacccacgggatagacggaaatggagagctggatttctccacttttctgaccattatgcacatgcaaataaaacaagaagacccaaagaaagaaattcttctagccatgttgatggtggacaaggagaagaaaggttacgtcatggcgtccgacctgcggtcaaaactcacgagtctgggggagaagctcacccacaaggaagtggatgatctcttcagggaagcagatatcgaacccaatggcaaagtgaagtatgatgaatttatccacaagatcacccttcctggacgggactattgaaggaggagaatgggagagcctcccctgggcctgaaaacttggagcaattaattttttttaaaaagtgttcttttcacttgggagagatggcaaacacagtggcaagacaacattacccaactatagaagagaggctaactagcaacaataatagatgatttcagccatggtatgagtagatctttaataaaagatttgtattgattttattaaaaaaaaaaaagaaaacatcgaaggcaccaactacaagaaagcggagagacaagaagggcactcgacagtgtgccacatgggcaaaaagaaggatacacatgaacacaaatatctgtggtcccagggggagtaaatcttgcagaaacccccaaatagaagagagcagaaataaaatcgagatacccaaggttaccctgtagagacacatacaaaagaaat

SEQ ID NO: 735603 - DNA, 696 bp, Homo sapiens
gaatttcagacaaacaacaaatacttttccaatagaagtatatgtcctatgcaaaatttggggcatacaataaaagtatattcagtgtttatctgaattcggtttaacttggcagtcctgtattttcatttgctgtatctagcacccttgggaggggagagagggatggagggagtaggcaaaaggaaggggaaaagagggagaagagactaaggatggggagggcggcatgggcggagagtgaccagacgctgctgaccctccctctgggctgtgtgcagagtacaaggaatgcttctccctgtatgacaagcagcagagggggaagataaaagccaccgacctcatggtggccatgaggtgcctgggggccagcccgacgccaggggaggtgcagcggcacctgcagacccacgggataggtgagtggtggtgggaacaacggggagaggggaggggcccagcaggtgggtgcagacagtagaggtgtgaaaagctcagcagtttgaggggcaggtggcagggaggcctcctggggatccagctgtggcagccccagaccaggagtgccgtacctcacttgggcttcctggaatcctcatagcaaccagtgataccccatctcacagacctcgggatctaggcgttccaacagacttaccaaacccagagaaaaatcgcgctgacagcgatccc

SEQ ID NO: 735604 - DNA, 2447 bp, Homo sapiens
tagtccgcagccccgcctgttcctcccgagggccgcgcgctctcgccggcccgccccgaaccgccccgcgctgggaatttgcggcggcctccgccggggcagccgagctgaaccggtctcttcctcggaaaggcagggccgaggggcctgcggggcagccatggaggcgacgcggaggcggcagcacctgggagcgacgggcggcccaggcgcgcagctgggcgcctccttcctgcaggccaggcatggctctgtgagcgctgatgaggctgcccgcacggctcccttccacctcgacctctggttctacttcacactgcagaactgggttctggactttgggcgtcccattgccatgctggtattccctctcgagtggtttccactcaacaagcccagtgttggggactacttccacatggcctacaacgtcatcacgccctttctcttgctcaagctcatcgagcggtccccccgcaccctgccacgctccatcacgtacgtgagcatcatcatcttcatcatgggtgccagcatccacctggtgggtgactctgtcaaccaccgcctgctcttcagtggctaccagcaccacctgtctgtccgtgagaaccccatcatcaagaatctcaagccggagacgctgatcgactcctttgagctgctctactattatgatgagtacctgggtcactgcatgtggtacatccccttcttcctcatcctcttcatgtacttcagcggctgctttactgcctctaaagctgagagcttgattccagggcctgccctgctcctggtggcacccagtggcctgtactactggtacctggtcaccgagggccagatcttcatcctcttcatcttcaccttcttcgccatgctggccctcgtcctgcaccagaagcgcaagcgcctcttcctggacagcaacggcctcttcctcttctcctccttcgcactgaccctcttgcttgtggcgctctgggtcgcctggctgtggaatgaccctgttctcaggaagaagtacccgggtgtcatctacgtccctgagccctgggctttctacacccttcacgtcagcagtcggcactgagtccctggcaccaggctctggcgctctgctgggtgggagggtgggccatggagggcatctgaatacaggagtagggggggtgtgggtgtgtaaccagagaccgagagcatgagtggggtgtgcctcgtgtgcgtggattcgtgtgtgtgtgtgtgtcttgtatatgtgtgcgcagagtgcatcattttcagactctactatttccgtcaagtttctgtttgatttggatcatctcaggatcggattctgttttagagtgtttctgggccaggatccgggcccctgccctcctctgcacctgaccacactccctactcagggctagtctgttcttcccggacatcttctggtagccgtgcaggagagggctgggtggggcagaggccaggaggggacctggtgtgtcacctgcccaccacctggctcatccctcaggcccaccctgaccctacattacataggttacgtcagcctactgtggctgttgagcaaagcatttctcctttctgggcctcatttgcactagatgggcctgtggtcccaaagtaggtcagtaggttggggttgctgacaccccttgggtgcagctttgggacagatgagtggctctgtcctgtcactgccctctccctgcctgggggctatgtgcactccagacccctgcccaggctcaggcccatgaggtatggagacaccctggcccccaggagctggaggcaccgcccactcccctggcattccagctttgcaggtgaccctcctctacccaaagctctgtccccctgctcccactccagaagaactgcggcacgtgcttcgggcagcctagccacaggctttgagcgcctgcattcctgggggctggagggtggggtgccaaaggccctgagcaaaagccagagctcctctcatcaaagcctttacaaggtgctgggcccagaggctttgccttgacagagtggcccagggtttcaagggaggaggaacctccccctacctaggacccttcctgtggggggtctacagagtcagggacagaagggaagggacccacaggaagtcacagtggtgcccagggatgtgtcagcccccagccacggggacgcgggattcaagaatgaagtaaatacagtcacagccccaaaaaaaaaagaagaaaaggaacacaaacaacgcacggcaaaccagaaaggagacacacgcgggggcaataataggggggggggagaaaaaaaaggaggaaacaggcgcgcgacggacaaagagtgtcgcgcccccgaacttggagcaacaggggggtaagcgcgggggccccaaaggggaggggaaactagagagcggcggacccgaa

SEQ ID NO: 735605 - DNA, 348 bp, Homo sapiens
gcctactctactattcgggtgcgagaagaggacagaagggaagggacccacaggaagtcacagtggtgcccagggatgtgtcagcccccagccacggggacgcgggattcaagaatgaagtaaatacagtcacagccccaaaaaaaaaagaagaaaaggaacacaaacaacgcacggcaaaccagaaaggagacacacgcgggggcaataataggggggggggagaaaaaaaaggaggaaacaggcgcgcgacggacaaagagtgtcgcgcccccgaacttggagcaacaggggggtaagcgcgggggccccaaaggggaggggaaactagagagcggcggacccgaa

SEQ ID NO: 735606 - DNA, 1153 bp, Homo sapiens
ggacgcgtgggtcgacccacgcgtccgggatcatctcaggatcggattctgttttagagtgtttctgggccaggatccgggcccctgccctcctctgcacctgaccacactccctactcagggctagtctgttcttcccggacatcttctggtagccgtgcaggagagggctgggtggggcagaggccaggaggggacctggtgtgtcacctgcccaccacctggctcatccctcaggcccaccctgaccctacattacataggttacgtcagcctactgtggctgttgagcaaagcatttctcctttctgggcctcatttgcactagatgggcctgtggtcccaaagtaggtcagtaggttggggttgctgacaccccttgggtgcagctttgggacagatgagtggctctgtcctgtcactgccctctccctgcctgggggctatgtgcactccagacccctgcccaggctcaggcccatgaggtatggagacaccctggcccccaggagctggaggcaccgcccactcccctggcattccagctttgcaggtgaccctcctctacccaaagctctgtccccctgctcccactccagaagaactgcggcacgtgcttcgggcagcctagccacaggctttgagcgcctgcattcctgggggctggagggtggggtgccaaaggccctgagcaaaagccagagctcctctcatcaaagcctttacaaggtgctgggcccagaggctttgccttgacagagtggcccagggtttcaagggaggaggaacctccccctacctaggacccttcctgtggggggtctacagagtcagggacagaagggaagggacccacaggaagtcacagtggtgcccagggatgtgtcagcccccagccacggggacgcgggattcaagaatgaagtaaatacagtcacagccccaaaaaaaaaagaagaaaaggaacacaaacaacgcacggcaaaccagaaaggagacacacgcgggggcaataataggggggggggagaaaaaaaaggaggaaacaggcgcgcgacggacaaagagtgtcgcgcccccgaacttggagcaacaggggggtaagcgcgggggccccaaaggggaggggaaactagagagcggcggacccgaa

SEQ ID NO: 735607 - DNA, 404 bp, Homo sapiens
tagtccgcagccccgcctgttcctcccgagggccgcgcgctctcgccggcccgccccgaaccgccccgcgctgggaatttgcggcggcctccgccggggcagccgagctgaaccggtctcttcctcggaaaggcagggccgaggggcctgcggggcagccatggaggcgacgcggaggcggcagcacctgggagcgacgggcggcccaggcgcgcagctgggcgcctccttcctgcaggccaggcatggctctgtgagcgctgatgaggctgcccgcacggctcccttccacctcgacctctggttctacttcacactgcagaactgggttctggactttgggcgtcccattgccatgctgggattgcctctggaggggggggcactgagcagggggagggggg

SEQ ID NO: 735608 - DNA, 220 bp, Homo sapiens
tgctagacagcggtgtaataggacaggctctcggaaggtaaggggcctgcggggcagccatggaggcgacgcggaggcggcagcacctgggagcgacgggcggcccaggcgcgcagctgggcgcctccttcctgcaggccagaacggaaatgggggggggtggtgggagggggttggtgtgtgaatggtgaggggagggagggtggtgtgggtggagggg

SEQ ID NO: 735609 - DNA, 708 bp, Homo sapiens
ctgttactatcaaatgaaaatttcattatgaataataaactgggtcaaagtaaaagcctaaaacgaaaattcatcctgcaaaagtaaccaaatactatcatacaataatcttacctagactggtgggttttatcagttcatccagtaaatcataaaatggtaatttttgaagttttatatccggatggactgggtgaagagctgatgtaagatgtgggagttccagttcatgtttaggtcccagaagagaaacagggagtaatggcgatgatgcagggtgaccatcgtaagtgagttgtggaatggtagatggagacaaagttgctggcataggacttgaatgtacgttggggatggacaagtctgcaggcgtcatgattttctgtgggaaccgccgcctatagagttccttaattttcatttgcacagcaggactacagccagcctttagcaaatgcagggcttttgtgagaagttcgtgtttgcgtccgtgcttgtttctcccggcgtagcccaacagtacttggagttcagaaactctaaggctcataaccatttgctttagttccgcactgtccgccatcttgcgtctgtcagcgcaagcgcagtgaacttcgccgggggccgccgctagacccgcccctctagccggcctggccccgccccggcccgcccctccaccttcccagcccgcctctggcctccgcc

SEQ ID NO: 735610 - DNA, 644 bp, Homo sapiens
taccataggcttatagactcacatgaacacagctgagattttgttgaaaaaacttcgccccaaaatccagtacaacactaaagctaccatacccaactccaaatcctatgtccccaaagctaatgtcactgctgctaactgtacatagttggtacaagtgtttcacccagtcaatgaatatatatccaaaataaaaatgttttcttaaggaaaaactatgatttaacaacagttgtgatgacttatttgatagttatgttggcaatgaattttaaaaaacagctcttaggacttactggaaggctgcaaggttttgtattcactttcacacaaagattgggtgggaagtgatcttcttgtggacaactggtttctgataaacaaaacctaaacaataaaggacaagttaaatttcctttattaaaggatgacttcattagtattattgttaaatagataaatttaaaagatggtaaatttaaaaacaaccaaaagggaaaactataaaaactggacctttcaccctattaataagtatatgtaaataggtttaaaataaataattctgtcaatgtagagttggtaatcatgactatcaccctgtagttgtcttcgtgatactgccaattatttggttaagcatg

SEQ ID NO: 735611 - DNA, 1763 bp, Homo sapiens
tagtccgcagccccgcctgttcctcccgagggccgcgcgctctcgccggcccgccccgaaccgccccgcgctgggaatttgcggcggcctccgccggggcagccgagctgaaccggtctcttcctcggaaaggcagggccgaggggcctgcggggcagccatggaggcgacgcggaggcggcagcacctgggagcgacgggcggcccaggcgcgcagctgggcgcctccttcctgcaggccaggcatggctctgtgagcgctgatgaggctgcccgcacggctcccttccacctcgacctctggttctacttcacactgcagaactgggttctggactttgggcgtcccattgccatgctggtattccctctcgagtggtttccactcaacaagcccagtgttggggactacttccacatggcctacaacgtcatcacgccctttctcttgctcaagctcatcgagcggtccccccgcaccctgccacgctccatcacgtacgtgagcatcatcatcttcatcatgggtgccagcatccacctggtgggtgactctgtcaaccaccgcctgctcttcagtggctaccagcaccacctgtctgtccgtgagaaccccatcatcaagaatctcaagccggagacgctggtgaggccacctcctgctccctgcctatcgactcctttgagctgctctactattatgatgagtacctgggtcactgcatgtggtacatccccttcttcctcatcctcttcatgtacttcagcggctgctttactgcctctaaagctgagagcttgattccagggcctgccctgctcctggtggcacccagtggcctgtactactggtacctggtcaccgagggccagatcttcatcctcttcatcttcaccttcttcgccatgctggccctcgtcctgcaccagaagcgcaagcgcctcttcctggacagcaacggcctcttcctcttctcctccttcgcactgaccctcttgcttgtggcgctctgggtcgcctggctgtggaatgaccctgttctcaggaagaagtacccgggtgtcatctacgtccctgagccctgggctttctacacccttcacgtcagcagtcggcactgagtccctggcaccaggctctggcgctctgctgggtgggagggtgggccatggagggcatctgaatacaggagtagggggggtgtgggtgtgtaaccagagaccgagagcatgagtggggtgtgcctcgtgtgcgtggattcgtgtgtgtgtgtgtgtcttgtatatgtgtgcgcagagtgcatcattttcagactctactatttccgtcaagtttctgtttgatttggatcatctcaggatcggattctgttttagagtgtttctgggccaggatccgggcccctgccctcctctgcacctgaccacactccctactcagggctagtctgttcttcccggacatcttctggtagccgtgcaggagagggctgggtggggcagaggccaggaggggacctggtgtgtcacctgcccaccacctggctcatccctcaggcccaccctgaccctacattacataggttacgtcagcctactgtggctgttgagcaaagcatttctcctttctgggcctcatttgcactagatgggcctgtggtcccaaagtaggtcagtaggttggggttgctgatcctctttgtaattactatttgtacttgttaattactataacttttcaattcttttaatattcatgattt

SEQ ID NO: 735612 - DNA, 1916 bp, Homo sapiens
tagtccgcagccccgcctgttcctcccgagggccgcgcgctctcgccggcccgccccgaaccgccccgcgctgggaatttgcggcggcctccgccggggcagccgagctgaaccggtctcttcctcggaaaggcagggccgaggggcctgcggggcagccatggaggcgacgcggaggcggcagcacctgggagcgacgggcggcccaggcgcgcagctgggcgcctccttcctgcaggccaggcatggctctgtgagcgctgatgaggctgcccgcacggctcccttccacctcgacctctggttctacttcacactgcagaactgggttctggactttgggcgtcccattgccatgctggtattccctctcgagtggtttccactcaacaagcccagtgttggggactacttccacatggcctacaacgtcatcacgccctttctcttgctcaagctcatcgagcggtccccccgcaccctgccacgctccatcacgtacgtgagcatcatcatcttcatcatgggtgccagcatccacctggtgggtgactctgtcaaccaccgcctgctcttcagtggctaccagcaccacctgtctgtccgtgagaaccccatcatcaagaatctcaagccggagacgctggtgaggccacctcctgctccctgcctatcgactcctttgagctgctctactattatgatgagtacctgggtcactgcatgtggtacatccccttcttcctcatcctcttcatgtacttcagcggctgctttactgcctctaaagctgagagcttgattccagggcctgccctgctcctggtggcacccagtggcctgtactactggtacctggtcaccgagggccagatcttcatcctcttcatcttcaccttcttcgccatgctggccctcgtcctgcaccagaagcgcaagcgcctcttcctggacagcaacggcctcttcctcttctcctccttcgcactgaccctcttgcttgtggcgctctgggtcgcctggctgtggaatgaccctgttctcaggaagaagtacccgggtgtcatctacgtccctgagccctgggctttctacacccttcacgtcagcagtcggcactgagtccctggcaccaggctctggcgctctgctgggtgggagggtgggccatggagggcatctgaatacaggagtagggggggtgtgggtgtgtaaccagagaccgagagcatgagtggggtgtgcctcgtgtgcgtggattcgtgtgtgtgtgtgtgtcttgtatatgtgtgcgcagagtgcatcattttcagactctactatttccgtcaagtttctgtttgatttggatcatctcaggatcggattctgttttagagtgtttctgggccaggatccgggcccctgccctcctctgcacctgaccacactccctactcagggctagtctgttcttcccggacatcttctggtagccgtgcaggagagggctgggtggggcagaggccaggaggggacctggtgtgtcacctgcccaccacctggctcatccctcaggcccaccctgaccctacattacataggttacgtcagcctactgtggctgttgagcaaagcatttctcctttctgggcctcatttgcactagatgggcctgtgccacggggacgcgggattcaagaatgaagtaaatacagtcacagccccaaaaaaaaaagaagaaaaggaacacaaacaacgcacggcaaaccagaaaggagacacacgcgggggcaataataggggggggggagaaaaaaaaggaggaaacaggcgcgcgacggacaaagagtgtcgcgcccccgaacttggagcaacaggggggtaagcgcgggggccccaaaggggaggggaaactagagagcggcggacccgaa

SEQ ID NO: 735613 - DNA, 2513 bp, Homo sapiens
tagtccgcagccccgcctgttcctcccgagggccgcgcgctctcgccggcccgccccgaaccgccccgcgctgggaatttgcggcggcctccgccggggcagccgagctgaaccggtctcttcctcggaaaggcagggccgaggggcctgcggggcagccatggaggcgacgcggaggcggcagcacctgggagcgacgggcggcccaggcgcgcagctgggcgcctccttcctgcaggccaggcatggctctgtgagcgctgatgaggctgcccgcacggctcccttccacctcgacctctggttctacttcacactgcagaactgggttctggactttgggcgtcccattgccatgctggtattccctctcgagtggtttccactcaacaagcccagtgttggggactacttccacatggcctacaacgtcatcacgccctttctcttgctcaagctcatcgagcggtccccccgcaccctgccacgctccatcacgtacgtgagcatcatcatcttcatcatgggtgccagcatccacctggtgggtgactctgtcaaccaccgcctgctcttcagtggctaccagcaccacctgtctgtccgtgagaaccccatcatcaagaatctcaagccggagacgctggtgaggccacctcctgctccctgcctatcgactcctttgagctgctctactattatgatgagtacctgggtcactgcatgtggtacatccccttcttcctcatcctcttcatgtacttcagcggctgctttactgcctctaaagctgagagcttgattccagggcctgccctgctcctggtggcacccagtggcctgtactactggtacctggtcaccgagggccagatcttcatcctcttcatcttcaccttcttcgccatgctggccctcgtcctgcaccagaagcgcaagcgcctcttcctggacagcaacggcctcttcctcttctcctccttcgcactgaccctcttgcttgtggcgctctgggtcgcctggctgtggaatgaccctgttctcaggaagaagtacccgggtgtcatctacgtccctgagccctgggctttctacacccttcacgtcagcagtcggcactgagtccctggcaccaggctctggcgctctgctgggtgggagggtgggccatggagggcatctgaatacaggagtagggggggtgtgggtgtgtaaccagagaccgagagcatgagtggggtgtgcctcgtgtgcgtggattcgtgtgtgtgtgtgtgtcttgtatatgtgtgcgcagagtgcatcattttcagactctactatttccgtcaagtttctgtttgatttggatcatctcaggatcggattctgttttagagtgtttctgggccaggatccgggcccctgccctcctctgcacctgaccacactccctactcagggctagtctgttcttcccggacatcttctggtagccgtgcaggagagggctgggtggggcagaggccaggaggggacctggtgtgtcacctgcccaccacctggctcatccctcaggcccaccctgaccctacattacataggttacgtcagcctactgtggctgttgagcaaagcatttctcctttctgggcctcatttgcactagatgggcctgtgtactgacctactttgggaccacaggcccatctagtgcaaagtcccaaagtaggtcagtaggttggggttgctgacaccccttgggtgcagctttgggacagatgagtggctctgtcctgtcactgccctctccctgcctgggggctatgtgcactccagacccctgcccaggctcaggcccatgaggtatggagacaccctggcccccaggagctggaggcaccgcccactcccctggcattccagctttgcaggtgaccctcctctacccaaagctctgtccccctgctcccactccagaagaactgcggcacgtgcttcgggcagcctagccacaggctttgagcgcctgcattcctgggggctggagggtggggtgccaaaggccctgagcaaaagccagagctcctctcatcaaagcctttacaaggtgctgggcccagaggctttgccttgacagagtggcccagggtttcaagggaggaggaacctccccctacctaggacccttcctgtggggggtctacagagtcagggacagaagggaagggacccacaggaagtcacagtggtgcccagggatgtgtcagcccccagccacggggacgcgggattcaagaatgaagtaaatacagtcacagccccaaaaaaaaaagaagaaaaggaacacaaacaacgcacggcaaaccagaaaggagacacacgcgggggcaataataggggggggggagaaaaaaaaggaggaaacaggcgcgcgacggacaaagagtgtcgcgcccccgaacttggagcaacaggggggtaagcgcgggggccccaaaggggaggggaaactagagagcggcggacccgaa

SEQ ID NO: 735614 - DNA, 2419 bp, Homo sapiens
tagtccgcagccccgcctgttcctcccgagggccgcgcgctctcgccggcccgccccgaaccgccccgcgctgggaatttgcggcggcctccgccggggcagccgagctgaaccggtctcttcctcggaaaggcagggccgaggggcctgcggggcagccatggaggcgacgcggaggcggcagcacctgggagcgacgggcggcccaggcgcgcagctgggcgcctccttcctgcaggccaggcatggctctgtgagcgctgatgaggctgcccgcacggctcccttccacctcgacctctggttctacttcacactgcagaactgggttctggactttgggcgtcccattgccatgctggtattccctctcgagtggtttccactcaacaagcccagtgttggggactacttccacatggcctacaacgtcatcacgccctttctcttgctcaagctcatcgagcggtccccccgcaccctgccacgctccatcacgtacgtgagcatcatcatcttcatcatgggtgccagcatccacctggtgggtgactctgtcaaccaccgcctgctcttcagtggctaccagcaccacctgtctgtccgtgagaaccccatcatcaagaatctcaagccggagacgctggtgaggccacctcctgctccctgcctatcgactcctttgagctgctctactattatgatgagtacctgggtcactgcatgtggtacatccccttcttcctcatcctcttcatgtacttcagcggctgctttactgcctctaaagctgagagcttgattccagggcctgccctgctcctggtggcacccagtggcctgtactactggtacctggtcaccgagggccagatcttcatcctcttcatcttcaccttcttcgccatgctggccctcgtcctgcaccagaagcgcaagcgcctcttcctggacagcaacggcctcttcctcttctcctccttcgcactgaccctcttgcttgtggcgctctgggtcgcctggctgtggaatgaccctgttctcaggaagaagtacccgggtgtcatctacgtccctgagccctgggctttctacacccttcacgtcagcagtcggcactgagtccctggcaccaggctctggcgctctgctgggtgggagggtgggccatggagggcatctgaatacaggagtagggggggtgtgggtgtgtaaccagagaccgagagcatgagtggggtgtgcctcgtgtgcgtggattcgtgtgtgtgtgtgtgtcttgtatatgtgtgcgcagagtgcatcattttcagactgttttagagtgtttctgggccaggatccgggcccctgccctcctctgcacctgaccacactccctactcagggctagtctgttcttcccggacatcttctggtagccgtgcaggagagggctgggtggggcagaggccaggaggggacctggtgtgtcacctgcccaccacctggctcatccctcaggcccaccctgaccctacattacataggttacgtcagcctactgtggctgttgagcaaagcatttctcctttctgggcctcatttgcactagatgggcctgtggtcccaaagtaggtcagtaggttggggttgctgacaccccttgggtgcagctttgggacagatgagtggctctgtcctgtcactgccctctccctgcctgggggctatgtgcactccagacccctgcccaggctcaggcccatgaggtatggagacaccctggcccccaggagctggaggcaccgcccactcccctggcattccagctttgcaggtgaccctcctctacccaaagctctgtccccctgctcccactccagaagaactgcggcacgtgcttcgggcagcctagccacaggctttgagcgcctgcattcctgggggctggagggtggggtgccaaaggccctgagcaaaagccagagctcctctcatcaaagcctttacaaggtgctgggcccagaggctttgccttgacagagtggcccagggtttcaagggaggaggaacctccccctacctaggacccttcctgtggggggtctacagagtcagggacagaagggaagggacccacaggaagtcacagtggtgcccagggatgtgtcagcccccagccacggggacgcgggattcaagaatgaagtaaatacagtcacagccccaaaaaaaaaagaagaaaaggaacacaaacaacgcacggcaaaccagaaaggagacacacgcgggggcaataataggggggggggagaaaaaaaaggaggaaacaggcgcgcgacggacaaagagtgtcgcgcccccgaacttggagcaacaggggggtaagcgcgggggccccaaaggggaggggaaactagagagcggcggacccgaa

SEQ ID NO: 735615 - DNA, 3933 bp, Homo sapiens
tagtccgcagccccgcctgttcctcccgagggccgcgcgctctcgccggcccgccccgaaccgccccgcgctgggaatttgcggcggcctccgccggggcagccgagctgaaccggtctcttcctcggaaaggcagggccgaggggcctgcggggcagccatggaggcgacgcggaggcggcagcacctgggagcgacgggcggcccaggcgcgcagctgggcgcctccttcctgcaggccaggcatggctctgtgagcgctgatgaggctgcccgcacggctcccttccacctcgacctctggttctacttcacactgcagaactgggttctggactttgggcgtcccattgccatgctggtattccctctcgagtggtttccactcaacaagcccagtgttggggactacttccacatggcctacaacgtcatcacgccctttctcttgctcaagctcatcgagcggtccccccgcaccctgccacgctccatcacgtacgtgagcatcatcatcttcatcatgggtgccagcatccacctggtgggtgactctgtcaaccaccgcctgctcttcagtggctaccagcaccacctgtctgtccgtgagaaccccatcatcaagaatctcaagccggagacgctggtgaggccacctcctgctccctgcctatcgactcctttgagctgctctactattatgatgagtacctgggtcactgcatgtggtacatccccttcttcctcatcctcttcatgtacttcagcggctgctttactgcctctaaagctgagagcttgattccagggcctgccctgctcctggtggcacccagtggcctgtactactggtacctggtcaccgagggccagatcttcatcctcttcatcttcaccttcttcgccatgctggccctcgtcctgcaccagaagcgcaagcgcctcttcctggacagcaacggcctcttcctcttctcctccttcgcactgaccctcttgcttgtggcgctctgggtcgcctggctgtggaatgaccctgttctcaggaagaagtacccgggtgtcatctacgtccctgagccctgggctttctacacccttcacgtcagcagtcggcactgagtccctggcaccaggctctggcgctctgctgggtgggagggtgggccatggagggcatctgaatacaggagtagggggggtgtgggtgtgtaaccagagaccgagagcatgagtggggtgtgcctcgtgtgcgtggattcgtgtgtgtgtgtgtgtcttgtatatgtgtgcgcagaggaatgcagcgggacagatgagctttataacttaaggctggataaaatatgcacacacaaacagaatccaagtctgtcgttttcagaaaatggaaatcaaactatcccccgaccccctccccacaacaaagaaaagcccacgattgaaaacttcatacatgcaattccttttctgttattgcaaataaaataatgccatcgaagtcaaataaaaccaaaaccataggacaaataatgaaaaatcttcagaatccagaaaaaaatgaactgaaggtggtttgtgggtgcttgtttttcttttttcttttctttcctttttttttttaaacaagtgttttatcacacaggcagtcttagatttatatacaaaagtaaaactgaaaatatagttttgttctctgtacatttcttttaattttttccctaaaaaaaggaaaaaaaacacgcttgtatacttttctaaacagagtaaggtaaaacagagcacaaagttctcttctttctgccaagttcattcgatctggggtggggatgggagcagcagggcctgggaatcagtccaatgaaataatgtctggtatgatgccaaagatggatgccgtgtccgtgctgctcctgtttgtgacggtgtggctatggctttcccttaggctgttggaagaaaccaggctgctgttactgccactactgcttccattggtggttggcagagaagtactgcctcctgcacttaactgatcaagaaacatctgtgaggaggtatacgggaaaaaccgagacgagtgtaggaggtcttgatcatctgaaactgctgctgctgcagcggcaagcaaggaggtgttgtaatgctgattgtctcctgataagaaaggaaagaaatctaatccttgtaagtcgtaaggcatgggtgtcatgtggaaaggatgcctatagtcttggatgagggaggtattaatgtagcttgtgtctacagcaggaaggcttggggtgcgggatactggagatgcttgatgtggaagacttaaaatgcctttattatttagtggtgatgtgggagatagggaaggacaggtcctcttggcagatggctcttcttcctcttcatcagatgaactgtctatggttaggtcaatcacttctactttcttgtttttatttgaggactggtggtgagacgctacctgatgctccaatgtggagctcaagcatccatcgactccattgtaagaggcagaaacttcctgtacttccttttttgatctcatcggtgcccaagtgccatcctccttaaattgtatttcatcacagtctgtacagtactttaggatttccataaacaagccatcaataataaggtgttcatatggagccttcttatcacagacaggacaaacccaggttggttttttctcattcatctgaatgtaaagagttgcgtcaaaacattgtagatgagaacatgtaagggcccgacacggaattgtcagccgcattttaccaagtggacatagtagagaaacccttaggctggttgtagctatttcactgtctggatccgcagtcaacttctctttaattaaagctctagaatgatccggattccttattccctttgctcgtaacctctgaagaagaactgttgaggacaactgttttacaagatatactgccatggaatagtttcttccaatttctgcagtccaagaaacaacaatcgtgtttggtactgttgtggacagtcggacaagtgaggtgatattaattggtcggctgggtcgctttggttccacgccattttttgtaggtggaaggtaacctggaaggctgcaaggttttgtattcactttcacacaaagattgggtgggaagtgatcttcttgtggacaactggtttctgataaacaaaaccttaactggacctgtactgtgaagtcacatttggtcccagaaatatccatggaactactgatttgctgcacttgttgtggtgtcaaggcaaatgcaaaacaggtttctcgaaagcgctgactgttgtctgatgctagactggtgggttttatcagttcatccagtaaatcataaaatggtaatttttgaagttttatatccggatggactgggtgaagagctgatgtaagatgtgggagttccagttcatgtttaggtcccagaagagaaacagggagtaatggcgatgatgcagggtgaccatcgtaagtgagttgtggaatggtagatggagacaaagttgctggcataggacttgaatgtacgttggggatggacaagtctgcaggcgtcatgattttctgtgggaaccgccgcctatagagttccttaattttcatttgcacagcaggactacagccagcctttagcaaatgcagggcttttgtgagaagttcgtgtttgcgtccgtgcttgtttctcccggcgtagcccaacagtacttggagttcagaaactctaaggctcataaccatttgctttagttccgcactgtccgccatcttgcgtctgtcagcgcaagcgcagtgaacttcgccgggggccgccgctagacccgcccctctagccggcctggccccgccccggcccgcccctccaccttcccagcccgcctctggcctccgcc

SEQ ID NO: 735616 - DNA, 4136 bp, Homo sapiens
tagtccgcagccccgcctgttcctcccgagggccgcgcgctctcgccggcccgccccgaaccgccccgcgctgggaatttgcggcggcctccgccggggcagccgagctgaaccggtctcttcctcggaaaggcagggccgaggggcctgcggggcagccatggaggcgacgcggaggcggcagcacctgggagcgacgggcggcccaggcgcgcagctgggcgcctccttcctgcaggccaggcatggctctgtgagcgctgatgaggctgcccgcacggctcccttccacctcgacctctggttctacttcacactgcagaactgggttctggactttgggcgtcccattgccatgctggtattccctctcgagtggtttccactcaacaagcccagtgttggggactacttccacatggcctacaacgtcatcacgccctttctcttgctcaagctcatcgagcggtccccccgcaccctgccacgctccatcacgtacgtgagcatcatcatcttcatcatgggtgccagcatccacctggtgggtgactctgtcaaccaccgcctgctcttcagtggctaccagcaccacctgtctgtccgtgagaaccccatcatcaagaatctcaagccggagacgctggtgaggccacctcctgctccctgcctatcgactcctttgagctgctctactattatgatgagtacctgggtcactgcatgtggtacatccccttcttcctcatcctcttcatgtacttcagcggctgctttactgcctctaaagctgagagcttgattccagggcctgccctgctcctggtggcacccagtggcctgtactactggtacctggtcaccgagggccagatcttcatcctcttcatcttcaccttcttcgccatgctggccctcgtcctgcaccagaagcgcaagcgcctcttcctggacagcaacggcctcttcctcttctcctccttcgcactgaccctcttgcttgtggcgctctgggtcgcctggctgtggaatgaccctgttctcaggaagaagtacccgggtgtcatctacgtccctgagccctgggctttctacacccttcacgtcagcagtcggcactgagtccctggcaccaggctctggcgctctgctgggtgggagggtgggccatggagggcatctgaatacaggagtagggggggtgtgggtgtgtaaccagagaccgagagcatgagtggggtgtgcctcgtgtgcgtggattcgtgtgtgtgtgtgtgtcttgtatatgtgtgcgcagaggaatgcagcgggacagatgagctttataacttaaggctggataaaatatgcacacacaaacagaatccaagtctgtcgttttcagaaaatggaaatcaaactatcccccgaccccctccccacaacaaagaaaagcccacgattgaaaacttcatacatgcaattccttttctgttattgcaaataaaataatgccatcgaagtcaaataaaaccaaaaccataggacaaataatgaaaaatcttcagaatccagaaaaaaatgaactgaaggtggtttgtgggtgcttgtttttcttttttcttttctttcctttttttttttaaacaagtgttttatcacacaggcagtcttagatttatatacaaaagtaaaactgaaaatatagttttgttctctgtacatttcttttaattttttccctaaaaaaaggaaaaaaaacacgcttgtatacttttctaaacagagtaaggtaaaacagagcacaaagttctcttctttctgccaagttcattcgatctggggtggggatgggagcagcagggcctgggaatcagtccaatgaaataatgtctggtatgatgccaaagatggatgccgtgtccgtgctgctcctgtttgtgacggtgtggctatggctttcccttaggctgttggaagaaaccaggctgctgttactgccactactgcttccattggtggttggcagagaagtactgcctcctgcacttaactgatcaagaaacatctgtgaggaggtatacgggaaaaaccgagacgagtgtaggaggtcttgatcatctgaaactgctgctgctgcagcggcaagcaaggaggtgttgtaatgctgattgtctcctgataagaaaggaaagaaatctaatccttgtaagtcgtaaggcatgggtgtcatgtggaaaggatgcctatagtcttggatgagggaggtattaatgtagcttgtgtctacagcaggaaggcttggggtgcgggatactggagatgcttgatgtggaagacttaaaatgcctttattatttagtggtgatgtgggagatagggaaggacaggtcctcttggcagatggctcttcttcctcttcatcagatgaactgtctatggttaggtcaatcacttctactttcttgtttttatttgaggactggtggtgagacgctacctgatgctccaatgtggagctcaagcatccatcgactccattgtaagaggcagaaacttcctgtacttccttttttgatctcatcggtgcccaagtgccatcctccttaaattgtatttcatcacagtctgtacagtactttaggatttccataaacaagccatcaataataaggtgttcatatggagccttcttatcacagacaggacaaacccaggttggttttttctcattcatctgaatgtaaagagttgcgtcaaaacattgtagatgagaacatgtaagggcccgacacggaattgtcagccgcattttaccaagtggacatagtagagaaacccttaggctggttgtagctatttcactgtctggatccgcagtcaacttctctttaattaaagctctagaatgatccggattccttattccctttgctcgtaacctctgaagaagaactgttgaggacaactgttttacaagatatactgccatggaatagtttcttccaatttctgcagtccaagaaacaacaatcgtgtttggtactgttgtggacagtcggacaagtgaggtgatattaattggtcggctgggtcgctttggttccacgccattttttgtaggtggaaggtaacctggaaggctgcaaggttttgtattcactttcacacaaagattgggtgggaagtgatcttcttgtggacaactggtttctgataaacaaaaccttaactggacctgtactgtgaagtcacatttggtcccagaaatatccatggaactactgatttgctgcacttgttgtggtgtcaaggcaaatgcaaaacaggtttctcgaaagcgctgactgttgtctgatgctagactggtgggttttatcagttcatccagtaaatcataaaatggtaatttttgaagttttatatccggatggactgggtgaagagctgatgtaagatgtgggagttccagttcatgtttaggtcccagaagagaaacagggagtaatggcgatgatgcagggtgaccatcgtaagtgagttgtggaatggtagatggagacaaagttgctggcataggacttgaatgtacgttggggatggacaagtctgcaggcgtcatgattttctgtgggaaccgccgcctatagagttccttaattttcatttgcacagcaggactacagccagcctttagcaaatgcagggcttttgtgagaagttcgtgtttgcgtccgtgcttgtttctcccggcgtagcccaacagtacttggagttcagaaactctaaggctcataaccatttgcttgaaacttgctgcaaattcttcaggtgatggggtgctgggggaagccgttcatggtcaggtgccttgccagtggcacaccacttagagaagatgctgagggaagcttctgtcagctgggcactgaaggttaccatgcactgccagaactgggagctggagaagctgccctttcaatttctgctggatggcatagcgcgccttccgctcctggtcgagttcgttacacagggtatctggaagacaaggggaggggccagtgaggaaacgcagaccaccctccgaaaggccggggtcacagcccgggcttcctcctctccccagggctaagctccgcgcagaaacaactcca

SEQ ID NO: 735617 - DNA, 3982 bp, Homo sapiens
tagtccgcagccccgcctgttcctcccgagggccgcgcgctctcgccggcccgccccgaaccgccccgcgctgggaatttgcggcggcctccgccggggcagccgagctgaaccggtctcttcctcggaaaggcagggccgaggggcctgcggggcagccatggaggcgacgcggaggcggcagcacctgggagcgacgggcggcccaggcgcgcagctgggcgcctccttcctgcaggccaggcatggctctgtgagcgctgatgaggctgcccgcacggctcccttccacctcgacctctggttctacttcacactgcagaactgggttctggactttgggcgtcccattgccatgctggtattccctctcgagtggtttccactcaacaagcccagtgttggggactacttccacatggcctacaacgtcatcacgccctttctcttgctcaagctcatcgagcggtccccccgcaccctgccacgctccatcacgtacgtgagcatcatcatcttcatcatgggtgccagcatccacctggtgggtgactctgtcaaccaccgcctgctcttcagtggctaccagcaccacctgtctgtccgtgagaaccccatcatcaagaatctcaagccggagacgctggtgaggccacctcctgctccctgcctatcgactcctttgagctgctctactattatgatgagtacctgggtcactgcatgtggtacatccccttcttcctcatcctcttcatgtacttcagcggctgctttactgcctctaaagctgagagcttgattccagggcctgccctgctcctggtggcacccagtggcctgtactactggtacctggtcaccgagggccagatcttcatcctcttcatcttcaccttcttcgccatgctggccctcgtcctgcaccagaagcgcaagcgcctcttcctggacagcaacggcctcttcctcttctcctccttcgcactgaccctcttgcttgtggcgctctgggtcgcctggctgtggaatgaccctgttctcaggaagaagtacccgggtgtcatctacgtccctgagccctgggctttctacacccttcacgtcagcagtcggcactgagtccctggcaccaggctctggcgctctgctgggtgggagggtgggccatggagggcatctgaatacaggagtagggggggtgtgggtgtgtaaccagagaccgagagcatgagtggggtgtgcctcgtgtgcgtggattcgtgtgtgtgtgtgtgtcttgtatatgtgtgcgcagaggaatgcagcgggacagatgagctttataacttaaggctggataaaatatgcacacacaaacagaatccaagtctgtcgttttcagaaaatggaaatcaaactatcccccgaccccctccccacaacaaagaaaagcccacgattgaaaacttcatacatgcaattccttttctgttattgcaaataaaataatgccatcgaagtcaaataaaaccaaaaccataggacaaataatgaaaaatcttcagaatccagaaaaaaatgaactgaaggtggtttgtgggtgcttgtttttcttttttcttttctttcctttttttttttaaacaagtgttttatcacacaggcagtcttagatttatatacaaaagtaaaactgaaaatatagttttgttctctgtacatttcttttaattttttccctaaaaaaaggaaaaaaaacacgcttgtatacttttctaaacagagtaaggtaaaacagagcacaaagttctcttctttctgccaagttcattcgatctggggtggggatgggagcagcagggcctgggaatcagtccaatgaaataatgtctggtatgatgccaaagatggatgccgtgtccgtgctgctcctgtttgtgacggtgtggctatggctttcccttaggctgttggaagaaaccaggctgctgttactgccactactgcttccattggtggttggcagagaagtactgcctcctgcacttaactgatcaagaaacatctgtgaggaggtatacgggaaaaaccgagacgagtgtaggaggtcttgatcatctgaaactgctgctgctgcagcggcaagcaaggaggtgttgtaatgctgattgtctcctgataagaaaggaaagaaatctaatccttgtaagtcgtaaggcatgggtgtcatgtggaaaggatgcctatagtcttggatgagggaggtattaatgtagcttgtgtctacagcaggaaggcttggggtgcgggatactggagatgcttgatgtggaagacttaaaatgcctttattatttagtggtgatgtgggagatagggaaggacaggtcctcttggcagatggctcttcttcctcttcatcagatgaactgtctatggttaggtcaatcacttctactttcttgtttttatttgaggactggtggtgagacgctacctgatgctccaatgtggagctcaagcatccatcgactccattgtaagaggcagaaacttcctgtacttccttttttgatctcatcggtgcccaagtgccatcctccttaaattgtatttcatcacagtctgtacagtactttaggatttccataaacaagccatcaataataaggtgttcatatggagccttcttatcacagacaggacaaacccaggttggttttttctcattcatctgaatgtaaagagttgcgtcaaaacattgtagatgagaacatgtaagggcccgacacggaattgtcagccgcattttaccaagtggacatagtagagaaacccttaggctggttgtagctatttcactgtctggatccgcagtcaacttctctttaattaaagctctagaatgatccggattccttattccctttgctcgtaacctctgaagaagaactgttgaggacaactgttttacaagatatactgccatggaatagtttcttccaatttctgcagtccaagaaacaacaatcgtgtttggtactgttgtggacagtcggacaagtgaggtgatattaattggtcggctgggtcgctttggttccacgccattttttgtaggtggaaggtaacctggaaggctgcaaggttttgtattcactttcacacaaagattgggtgggaagtgatcttcttgtggacaactggtttctgataaacaaaaccttaactggacctgtactgtgaagtcacatttggtcccagaaatatccatggaactactgatttgctgcacttgttgtggtgtcaaggcaaatgcaaaacaggtttctcgaaagcgctgactgttgtctgatggttgtttgaaaatgactcctataatcttcgtgtattcagataatttctgctagactggtgggttttatcagttcatccagtaaatcataaaatggtaatttttgaagttttatatccggatggactgggtgaagagctgatgtaagatgtgggagttccagttcatgtttaggtcccagaagagaaacagggagtaatggcgatgatgcagggtgaccatcgtaagtgagttgtggaatggtagatggagacaaagttgctggcataggacttgaatgtacgttggggatggacaagtctgcaggcgtcatgattttctgtgggaaccgccgcctatagagttccttaattttcatttgcacagcaggactacagccagcctttagcaaatgcagggcttttgtgagaagttcgtgtttgcgtccgtgcttgtttctcccggcgtagcccaacagtacttggagttcagaaactctaaggctcataaccatttgctttagttccgcactgtccgccatcttgcgtctgtcagcgcaagcgcagtgaacttcgccgggggccgccgctagacccgcccctctagccggcctggccccgccccggcccgcccctccaccttcccagcccgcctctggcctccgcc

SEQ ID NO: 735618 - DNA, 3826 bp, Homo sapiens
tagtccgcagccccgcctgttcctcccgagggccgcgcgctctcgccggcccgccccgaaccgccccgcgctgggaatttgcggcggcctccgccggggcagccgagctgaaccggtctcttcctcggaaaggcagggccgaggggcctgcggggcagccatggaggcgacgcggaggcggcagcacctgggagcgacgggcggcccaggcgcgcagctgggcgcctccttcctgcaggccaggcatggctctgtgagcgctgatgaggctgcccgcacggctcccttccacctcgacctctggttctacttcacactgcagaactgggttctggactttgggcgtcccattgccatgctggtattccctctcgagtggtttccactcaacaagcccagtgttggggactacttccacatggcctacaacgtcatcacgccctttctcttgctcaagctcatcgagcggtccccccgcaccctgccacgctccatcacgtacgtgagcatcatcatcttcatcatgggtgccagcatccacctggtgggtgactctgtcaaccaccgcctgctcttcagtggctaccagcaccacctgtctgtccgtgagaaccccatcatcaagaatctcaagccggagacgctggtgaggccacctcctgctccctgcctatcgactcctttgagctgctctactattatgatgagtacctgggtcactgcatgtggtacatccccttcttcctcatcctcttcatgtacttcagcggctgctttactgcctctaaagctgagagcttgattccagggcctgccctgctcctggtggcacccagtggcctgtactactggtacctggtcaccgagggccagatcttcatcctcttcatcttcaccttcttcgccatgctggccctcgtcctgcaccagaagcgcaagcgcctcttcctggacagcaacggcctcttcctcttctcctccttcgcactgaccctcttgcttgtggcgctctgggtcgcctggctgtggaatgaccctgttctcaggaagaagtacccgggtgtcatctacgtccctgagccctgggctttctacacccttcacgtcagcagtcggcactgagtccctggcaccaggctctggcgctctgctgggtgggagggtgggccatggagggcatctgaatacaggagtagggggggtgtgggtgtgtaaccagagaccgagagcatgagtggggtgtgcctcgtgtgcgtggattcgtgtgtgtgtgtgtgtcttgtatatgtgtgcgcagaggaatgcagcgggacagatgagctttataacttaaggctggataaaatatgcacacacaaacagaatccaagtctgtcgttttcagaaaatggaaatcaaactatcccccgaccccctccccacaacaaagaaaagcccacgattgaaaacttcatacatgcaattccttttctgttattgcaaataaaataatgccatcgaagtcaaataaaaccaaaaccataggacaaataatgaaaaatcttcagaatccagaaaaaaatgaactgaaggtggtttgtgggtgcttgtttttcttttttcttttctttcctttttttttttaaacaagtgttttatcacacaggcagtcttagatttatatacaaaagtaaaactgaaaatatagttttgttctctgtacatttcttttaattttttccctaaaaaaaggaaaaaaaacacgcttgtatacttttctaaacagagtaaggtaaaacagagcacaaagttctcttctttctgccaagttcattcgatctggggtggggatgggagcagcagggcctgggaatcagtccaatgaaataatgtctggtatgatgccaaagatggatgccgtgtccgtgctgctcctgtttgtgacggtgtggctatggctttcccttaggctgttggaagaaaccaggctgctgttactgccactactgcttccattggtggttggcagagaagtactgcctcctgcacttaactgatcaagaaacatctgtgaggaggtatacgggaaaaaccgagacgagtgtaggaggtcttgatcatctgaaactgctgctgctgcagcggcaagcaaggaggtgttgtaatgctgattgtctcctgataagaaaggaaagaaatctaatccttgtaagtcgtaaggcatgggtgtcatgtggaaaggatgcctatagtcttggatgagggaggtattaatgtagcttgtgtctacagcaggaaggcttggggtgcgggatactggagatgcttgatgtggaagacttaaaatgcctttattatttagtggtgatgtgggagatagggaaggacaggtcctcttggcagatggctcttcttcctcttcatcagatgaactgtctatggttaggtcaatcacttctactttcttgtttttatttgaggactggtggtgagacgctacctgatgctccaatgtggagctcaagcatccatcgactccattgtaagaggcagaaacttcctgtacttccttttttgatctcatcggtgcccaagtgccatcctccttaaattgtatttcatcacagtctgtacagtactttaggatttccataaacaagccatcaataataaggtgttcatatggagccttcttatcacagacaggacaaacccaggttggttttttctcattcatctgaatgtaaagagttgcgtcaaaacattgtagatgagaacatgtaagggcccgacacggaattgtcagccgcattttaccaagtggacatagtagagaaacccttaggctggttgtagctatttcactgtctggatccgcagtcaacttctctttaattaaagctctagaatgatccggattccttattccctttgctcgtaacctctgaagaagaactgttgaggacaactgttttacaagatatactgccatggaatagtttcttccaatttctgcagtccaagaaacaacaatcgtgtttggtactgttgtggacagtcggacaagtgaggtgatattaattggtcggctgggtcgctttggtttctgataaacaaaaccttaactggacctgtactgtgaagtcacatttggtcccagaaatatccatggaactactgatttgctgcacttgttgtggtgtcaaggcaaatgcaaaacaggtttctcgaaagcgctgactgttgtctgatgctagactggtgggttttatcagttcatccagtaaatcataaaatggtaatttttgaagttttatatccggatggactgggtgaagagctgatgtaagatgtgggagttccagttcatgtttaggtcccagaagagaaacagggagtaatggcgatgatgcagggtgaccatcgtaagtgagttgtggaatggtagatggagacaaagttgctggcataggacttgaatgtacgttggggatggacaagtctgcaggcgtcatgattttctgtgggaaccgccgcctatagagttccttaattttcatttgcacagcaggactacagccagcctttagcaaatgcagggcttttgtgagaagttcgtgtttgcgtccgtgcttgtttctcccggcgtagcccaacagtacttggagttcagaaactctaaggctcataaccatttgctttagttccgcactgtccgccatcttgcgtctgtcagcgcaagcgcagtgaacttcgccgggggccgccgctagacccgcccctctagccggcctggccccgccccggcccgcccctccaccttcccagcccgcctctggcctccgcc

SEQ ID NO: 735619 - DNA, 2850 bp, Homo sapiens
tagtccgcagccccgcctgttcctcccgagggccgcgcgctctcgccggcccgccccgaaccgccccgcgctgggaatttgcggcggcctccgccggggcagccgagctgaaccggtctcttcctcggaaaggcagggccgaggggcctgcggggcagccatggaggcgacgcggaggcggcagcacctgggagcgacgggcggcccaggcgcgcagctgggcgcctccttcctgcaggccaggcatggctctgtgagcgctgatgaggctgcccgcacggctcccttccacctcgacctctggttctacttcacactgcagaactgggttctggactttgggcgtcccattgccatgctggtattccctctcgagtggtttccactcaacaagcccagtgttggggactacttccacatggcctacaacgtcatcacgccctttctcttgctcaagctcatcgagcggtccccccgcaccctgccacgctccatcacgtacgtgagcatcatcatcttcatcatgggtgccagcatccacctggtgggtgactctgtcaaccaccgcctgctcttcagtggctaccagcaccacctgtctgtccgtgagaaccccatcatcaagaatctcaagccggagacgctggtgaggccacctcctgctccctgcctatcgactcctttgagctgctctactattatgatgagtacctgggtcactgcatgtggtacatccccttcttcctcatcctcttcatgtacttcagcggctgctttactgcctctaaagctgagagcttgattccagggcctgccctgctcctggtggcacccagtggcctgtactactggtacctggtcaccgagggccagatcttcatcctcttcatcttcaccttcttcgccatgctggccctcgtcctgcaccagaagcgcaagcgcctcttcctggacagcaacggcctcttcctcttctcctccttcgcactgaccctcttgcttgtggcgctctgggtcgcctggctgtggaatgaccctgttctcaggaagaagtacccgggtgtcatctacgtccctgagccctgggctttctacacccttcacgtcagcagtcggcactgagtccctggcaccaggctctggcgctctgctgggtgggagggtgggccatggagggcatctgaatacaggagtagggggggtgtgggtgtgtaaccagagaccgagagcatgagtggggtgtgcctcgtgtgcgtggattcgtgtgtgtgtgtgtgtcttgtatatgtgtgcgcagaggaatgcagcgggacagatgagctttataacttaaggctggataaaatatgcacacacaaacagaatccaagtctgtcgttttcagaaaatggaaatcaaactatcccccgaccccctccccacaacaaagaaaagcccacgattgaaaacttcatacatgcaattccttttctgttattgcaaataaaataatgccatcgaagtcaaataaaaccaaaaccataggacaaataatgaaaaatcttcagaatccagaaaaaaatgaactgaaggtggtttgtgggtgcttgtttttcttttttcttttctttcctttttttttttaaacaagtgttttatcacacaggcagtcttagatttatatacaaaagtaaaactgaaaatatagttttgttctctgtacatttcttttaattttttccctaaaaaaaggaaaaaaaacacgcttgtatacttttctaaacagagtaaggtaaaacagagcacaaagttctcttctttctgccaagttcattcgatctggggtggggatgggagcagcagggcctgggaatcagtccaatgaaataatgtctggtatgatgccaaagatggatgccgtgtccgtgctgctcctgtttgtgacggtgtggctatggctttcccttaggctgttggaagaaaccaggctgctgttactgccactactgcttccattggtggttggcagagaagtactgcctcctgcacttaactgatcaagaaacatctgtgaggaggtatacgggaaaaaccgagacgagtgtaggaggtcttgatcatctgaaactgctgctgctgcagcggcaagcaaggaggtgttgtaatgctgattgtctcctgataagaaaggaaagaaatctaatccttgtaagtcgtaaggcatgggtgtcatgtggaaaggatgcctatagtcttggatgagggaggtattaatgtagcttgtgtctacagcaggaaggcttggggtgcgggatactggagatgcttgatgtggaagacttaaaatgcctttattatttagtggtgatgtgggagatagggaaggacaggtcctcttggcagatggctcttcttcctcttcatcagatgaactgtctatggttaggtcaatcacttctactttcttgtttttatttgaggactggtggtgagacgctacctgatgctccaatgtggagctcaagcatccatcgactccattgtaagaggcagaaacttcctgtacttccttttttgatctcatcggtgcccaagtgccatcctccttaaattgtatttcatcacagtctgtacagtactttaggatttccataaacaagccatcaataataaggtgttcatatggagccttcttatcacagacaggacaaacccaggttggttttttctcattcatctgaatgtaaagagttgcgtcaaaacattgtagatgagaacatgtaagggcccgacacggaattgtcagccgcattttaccaagtggacatagtagagatagcgtagctgtagtagctacttctctgctgattg

SEQ ID NO: 735620 - DNA, 2323 bp, Homo sapiens
  misc_feature (2292)..(2292): n is a, c, g, or t
tagtccgcagccccgcctgttcctcccgagggccgcgcgctctcgccggcccgccccgaaccgccccgcgctgggaatttgcggcggcctccgccggggcagccgagctgaaccggtctcttcctcggaaaggcagggccgaggggcctgcggggcagccatggaggcgacgcggaggcggcagcacctgggagcgacgggcggcccaggcgcgcagctgggcgcctccttcctgcaggccaggcatggctctgtgagcgctgatgaggctgcccgcacggctcccttccacctcgacctctggttctacttcacactgcagaactgggttctggactttgggcgtcccattgccatgctggtattccctctcgagtggtttccactcaacaagcccagtgttggggactacttccacatggcctacaacgtcatcacgccctttctcttgctcaagctcatcgagcggtccccccgcaccctgccacgctccatcacgtacgtgagcatcatcatcttcatcatgggtgccagcatccacctggtgggtgactctgtcaaccaccgcctgctcttcagtggctaccagcaccacctgtctgtccgtgagaaccccatcatcaagaatctcaagccggagacgctggtgaggccacctcctgctccctgcctatcgactcctttgagctgctctactattatgatgagtacctgggtcactgcatgtggtacatccccttcttcctcatcctcttcatgtacttcagcggctgctttactgcctctaaagctgagagcttgattccagggcctgccctgctcctggtggcacccagtggcctgtactactggtacctggtcaccgagggccagatcttcatcctcttcatcttcaccttcttcgccatgctggccctcgtcctgcaccagaagcgcaagcgcctcttcctggacagcaacggcctcttcctcttctcctccttcgcactgaccctcttgcttgtggcgctctgggtcgcctggctgtggaatgaccctgttctcaggaagaagtacccgggtgtcatctacgtccctgagccctgggctttctacacccttcacgtcagcagtcggcactgagtccctggcaccaggctctggcgctctgctgggtgggagggtgggccatggagggcatctgaatacaggagtagggggggtgtgggtgtgtaaccagagaccgagagcatgagtggggtgtgcctcgtgtgcgtggattcgtgtgtgtgtgtgtgtcttgtatatgtgtgcgcagaggaatgcagcgggacagatgagctttataacttaaggctggataaaatatgcacacacaaacagaatccaagtctgtcgttttcagaaaatggaaatcaaactatcccccgaccccctccccacaacaaagaaaagcccacgattgaaaacttcatacatgcaattccttttctgttattgcaaataaaataatgccatcgaagtcaaataaaaccaaaaccataggacaaataatgaaaaatcttcagaatccagaaaaaaatgaactgaaggtggtttgtgggtgcttgtttttcttttttcttttctttcctttttttttttaaacaagtgttttatcacacaggcagtcttagatttatatacaaaagtaaaactgaaaatatagttttgttctctgtacatttcttttaattttttccctaaaaaaaggaaaaaaaacacgcttgtatacttttctaaacagagtaaggtaaaacagagcacaaagttctcttctttctgccaagttcattcgatctggggtggggatgggagcagcagggcctgggaatcagtccaatgaaataatgtctggtatgatgccaaagatggatgccgtgtccgtgctgctcctgtttgtgacggtgtggctatggctttcccttaggctgttggaagaaaccaggctgctgttactgccactactgcttccattggtggttggcagagaagtactgcctcctgcacttaactgatcaagaaacatctgtgaggaggtatacgggaaaaaccgagacgagtgtaggaggtcttgatcatctgaaactgctgctgctgcagcggcaagcaaggaggtgttgtaatgctgattgtctcctgataagaaaggaaagaaatctaatccttgtaagtcgtaaggcatgggtgtcatgtggaaaggatgcctatagtcttggatgagggaggtattaatgtagcttgtgtctacagcaggaaggcttggggtgcgcnacacccaggcctcgctacctagccgtaaggt

SEQ ID NO: 735621 - DNA, 3869 bp, Homo sapiens
tagtccgcagccccgcctgttcctcccgagggccgcgcgctctcgccggcccgccccgaaccgccccgcgctgggaatttgcggcggcctccgccggggcagccgagctgaaccggtctcttcctcggaaaggcagggccgaggggcctgcggggcagccatggaggcgacgcggaggcggcagcacctgggagcgacgggcggcccaggcgcgcagctgggcgcctccttcctgcaggccaggcatggctctgtgagcgctgatgaggctgcccgcacggctcccttccacctcgacctctggttctacttcacactgcagaactgggttctggactttgggcgtcccattgccatgctggtattccctctcgagtggtttccactcaacaagcccagtgttggggactacttccacatggcctacaacgtcatcacgccctttctcttgctcaagctcatcgagcggtccccccgcaccctgccacgctccatcacgtacgtgagcatcatcatcttcatcatgggtgccagcatccacctggtgggtgactctgtcaaccaccgcctgctcttcagtggctaccagcaccacctgtctgtccgtgagaaccccatcatcaagaatctcaagccggagacgctggtgaggccacctcctgctccctgcctatcgactcctttgagctgctctactattatgatgagtacctgggtcactgcatgtggtacatccccttcttcctcatcctcttcatgtacttcagcggctgctttactgcctctaaagctgagagcttgattccagggcctgccctgctcctggtggcacccagtggcctgtactactggtacctggtcaccgagggccagatcttcatcctcttcatcttcaccttcttcgccatgctggccctcgtcctgcaccagaagcgcaagcgcctcttcctggacagcaacggcctcttcctcttctcctccttcgcactgaccctcttgcttgtggcgctctgggtcgcctggctgtggaatgaccctgttctcaggaagaagtacccgggtgtcatctacgtccctgagccctgggctttctacacccttcacgtcagcagtcggcactgagtccctggcaccaggctctggcgctctgctgggtgggagggtgggccatggagggcatctgaatacaggagtagggggggtgtgggtgtgtaaccagagaccgagagcatgagtggggtgtgcctcgtgtgcgtggattcgtgtgtgtgtgtgtgtcttgtatatgtgtgcgcagaggaatgcagcgggacagatgagctttataacttaaggctggataaaatatgcacacacaaacagaatccaagtctgtcgttttcagaaaatggaaatcaaactatcccccgaccccctccccacaacaaagaaaagcccacgattgaaaacttcatacatgcaattccttttctgttattgcaaataaaataatgccatcgaagtcaaataaaaccaaaaccataggacaaataatgaaaaatcttcagaatccagaaaaaaatgaactgaaggtggtttgtgggtgcttgtttttcttttttcttttctttcctttttttttttaaacaagtgttttatcacacaggcagtcttagatttatatacaaaagtaaaactgaaaatatagttttgttctctgtacatttcttttaattttttccctaaaaaaaggaaaaaaaacacgcttgtatacttttctaaacagagtaaggtaaaacagagcacaaagttctcttctttctgccaagttcattcgatctggggtggggatgggagcagcagggcctgggaatcagtccaatgaaataatgtctggtatgatgccaaagatggatgccgtgtccgtgctgctcctgtttgtgacggtgtggctatggctttcccttaggctgttggaagaaaccaggctgctgttactgccactactgcttccattggtggttggcagagaagtactgcctcctgcacttaactgactgaaactgctgctgctgcagcggcaagcaaggaggtgttgtaatgctgattgtctcctgataagaaaggaaagaaatctaatccttgtaagtcgtaaggcatgggtgtcatgtggaaaggatgcctatagtcttggatgagggaggtattaatgtagcttgtgtctacagcaggaaggcttggggtgcgggatactggagatgcttgatgtggaagacttaaaatgcctttattatttagtggtgatgtgggagatagggaaggacaggtcctcttggcagatggctcttcttcctcttcatcagatgaactgtctatggttaggtcaatcacttctactttcttgtttttatttgaggactggtggtgagacgctacctgatgctccaatgtggagctcaagcatccatcgactccattgtaagaggcagaaacttcctgtacttccttttttgatctcatcggtgcccaagtgccatcctccttaaattgtatttcatcacagtctgtacagtactttaggatttccataaacaagccatcaataataaggtgttcatatggagccttcttatcacagacaggacaaacccaggttggttttttctcattcatctgaatgtaaagagttgcgtcaaaacattgtagatgagaacatgtaagggcccgacacggaattgtcagccgcattttaccaagtggacatagtagagaaacccttaggctggttgtagctatttcactgtctggatccgcagtcaacttctctttaattaaagctctagaatgatccggattccttattccctttgctcgtaacctctgaagaagaactgttgaggacaactgttttacaagatatactgccatggaatagtttcttccaatttctgcagtccaagaaacaacaatcgtgtttggtactgttgtggacagtcggacaagtgaggtgatattaattggtcggctgggtcgctttggttccacgccattttttgtaggtggaaggtaacctggaaggctgcaaggttttgtattcactttcacacaaagattgggtgggaagtgatcttcttgtggacaactggtttctgataaacaaaaccttaactggacctgtactgtgaagtcacatttggtcccagaaatatccatggaactactgatttgctgcacttgttgtggtgtcaaggcaaatgcaaaacaggtttctcgaaagcgctgactgttgtctgatgctagactggtgggttttatcagttcatccagtaaatcataaaatggtaatttttgaagttttatatccggatggactgggtgaagagctgatgtaagatgtgggagttccagttcatgtttaggtcccagaagagaaacagggagtaatggcgatgatgcagggtgaccatcgtaagtgagttgtggaatggtagatggagacaaagttgctggcataggacttgaatgtacgttggggatggacaagtctgcaggcgtcatgattttctgtgggaaccgccgcctatagagttccttaattttcatttgcacagcaggactacagccagcctttagcaaatgcagggcttttgtgagaagttcgtgtttgcgtccgtgcttgtttctcccggcgtagcccaacagtacttggagttcagaaactctaaggctcataaccatttgctttagttccgcactgtccgccatcttgcgtctgtcagcgcaagcgcagtgaacttcgccgggggccgccgctagacccgcccctctagccggcctggccccgccccggcccgcccctccaccttcccagcccgcctctggcctccgcc

SEQ ID NO: 735622 - DNA, 4012 bp, Homo sapiens
  misc_feature (2014)..(2014): n is a, c, g, or t
  misc_feature (2022)..(2022): n is a, c, g, or t
  misc_feature (2025)..(2025): n is a, c, g, or t
  misc_feature (2032)..(2032): n is a, c, g, or t
  misc_feature (2039)..(2039): n is a, c, g, or t
  misc_feature (2054)..(2054): n is a, c, g, or t
tagtccgcagccccgcctgttcctcccgagggccgcgcgctctcgccggcccgccccgaaccgccccgcgctgggaatttgcggcggcctccgccggggcagccgagctgaaccggtctcttcctcggaaaggcagggccgaggggcctgcggggcagccatggaggcgacgcggaggcggcagcacctgggagcgacgggcggcccaggcgcgcagctgggcgcctccttcctgcaggccaggcatggctctgtgagcgctgatgaggctgcccgcacggctcccttccacctcgacctctggttctacttcacactgcagaactgggttctggactttgggcgtcccattgccatgctggtattccctctcgagtggtttccactcaacaagcccagtgttggggactacttccacatggcctacaacgtcatcacgccctttctcttgctcaagctcatcgagcggtccccccgcaccctgccacgctccatcacgtacgtgagcatcatcatcttcatcatgggtgccagcatccacctggtgggtgactctgtcaaccaccgcctgctcttcagtggctaccagcaccacctgtctgtccgtgagaaccccatcatcaagaatctcaagccggagacgctggtgaggccacctcctgctccctgcctatcgactcctttgagctgctctactattatgatgagtacctgggtcactgcatgtggtacatccccttcttcctcatcctcttcatgtacttcagcggctgctttactgcctctaaagctgagagcttgattccagggcctgccctgctcctggtggcacccagtggcctgtactactggtacctggtcaccgagggccagatcttcatcctcttcatcttcaccttcttcgccatgctggccctcgtcctgcaccagaagcgcaagcgcctcttcctggacagcaacggcctcttcctcttctcctccttcgcactgaccctcttgcttgtggcgctctgggtcgcctggctgtggaatgaccctgttctcaggaagaagtacccgggtgtcatctacgtccctgagccctgggctttctacacccttcacgtcagcagtcggcactgagtccctggcaccaggctctggcgctctgctgggtgggagggtgggccatggagggcatctgaatacaggagtagggggggtgtgggtgtgtaaccagagaccgagagcatgagtggggtgtgcctcgtgtgcgtggattcgtgtgtgtgtgtgtgtcttgtatatgtgtgcgcagaggaatgcagcgggacagatgagctttataacttaaggctggataaaatatgcacacacaaacagaatccaagtctgtcgttttcagaaaatggaaatcaaactatcccccgaccccctccccacaacaaagaaaagcccacgattgaaaacttcatacatgcaattccttttctgttattgcaaataaaataatgccatcgaagtcaaataaaaccaaaaccataggacaaataatgaaaaatcttcagaatccagaaaaaaatgaactgaaggtggtttgtgggtgcttgtttttcttttttcttttctttcctttttttttttaaacaagtgttttatcacacaggcagtcttagatttatatacaaaagtaaaactgaaaatatagttttgttctctgtacatttcttttaattttttccctaaaaaaaggaaaaaaaacacgcttgtatacttttctaaacagagtaaggtaaaacagagcacaaagttctcttctttctgccaagttcattcgatctggggtggggatgggagcagcagggcctgggaatcagtccaatgaaataatgtctggtatgatgccaaagatggatgccgtgtccgtgctgctcctgtttgtgacggtgtggctatggctttcccttaggctgttggaagaaaccaggctgctgttactgccactactgcttccattggtggttgggggggtttnttgggggnccnaaaaganaaagganaaaaaaggggttttnaaaacccccctttttggggggggcccccccccccccccccccctttttttcgactactgactcaagaaacatctgtgaggaggtatacgggaaaaaccgagacgagtgtaggaggtcttgatcatctgaaactgctgctgctgcagcggcaagcaaggaggtgttgtaatgctgattgtctcctgataagaaaggaaagaaatctaatccttgtaagtcgtaaggcatgggtgtcatgtggaaaggatgcctatagtcttggatgagggaggtattaatgtagcttgtgtctacagcaggaaggcttggggtgcgggatactggagatgcttgatgtggaagacttaaaatgcctttattatttagtggtgatgtgggagatagggaaggacaggtcctcttggcagatggctcttcttcctcttcatcagatgaactgtctatggttaggtcaatcacttctactttcttgtttttatttgaggactggtggtgagacgctacctgatgctccaatgtggagctcaagcatccatcgactccattgtaagaggcagaaacttcctgtacttccttttttgatctcatcggtgcccaagtgccatcctccttaaattgtatttcatcacagtctgtacagtactttaggatttccataaacaagccatcaataataaggtgttcatatggagccttcttatcacagacaggacaaacccaggttggttttttctcattcatctgaatgtaaagagttgcgtcaaaacattgtagatgagaacatgtaagggcccgacacggaattgtcagccgcattttaccaagtggacatagtagagaaacccttaggctggttgtagctatttcactgtctggatccgcagtcaacttctctttaattaaagctctagaatgatccggattccttattccctttgctcgtaacctctgaagaagaactgttgaggacaactgttttacaagatatactgccatggaatagtttcttccaatttctgcagtccaagaaacaacaatcgtgtttggtactgttgtggacagtcggacaagtgaggtgatattaattggtcggctgggtcgctttggttccacgccattttttgtaggtggaaggtaacctggaaggctgcaaggttttgtattcactttcacacaaagattgggtgggaagtgatcttcttgtggacaactggtttctgataaacaaaaccttaactggacctgtactgtgaagtcacatttggtcccagaaatatccatggaactactgatttgctgcacttgttgtggtgtcaaggcaaatgcaaaacaggtttctcgaaagcgctgactgttgtctgatgctagactggtgggttttatcagttcatccagtaaatcataaaatggtaatttttgaagttttatatccggatggactgggtgaagagctgatgtaagatgtgggagttccagttcatgtttaggtcccagaagagaaacagggagtaatggcgatgatgcagggtgaccatcgtaagtgagttgtggaatggtagatggagacaaagttgctggcataggacttgaatgtacgttggggatggacaagtctgcaggcgtcatgattttctgtgggaaccgccgcctatagagttccttaattttcatttgcacagcaggactacagccagcctttagcaaatgcagggcttttgtgagaagttcgtgtttgcgtccgtgcttgtttctcccggcgtagcccaacagtacttggagttcagaaactctaaggctcataaccatttgctttagttccgcactgtccgccatcttgcgtctgtcagcgcaagcgcagtgaacttcgccgggggccgccgctagacccgcccctctagccggcctggccccgccccggcccgcccctccaccttcccagcccgcctctggcctccgcc

SEQ ID NO: 735623 - DNA, 1720 bp, Homo sapiens
tagtccgcagccccgcctgttcctcccgagggccgcgcgctctcgccggcccgccccgaaccgccccgcgctgggaatttgcggcggcctccgccggggcagccgagctgaaccggtctcttcctcggaaaggcagggccgaggggcctgcggggcagccatggaggcgacgcggaggcggcagcacctgggagcgacgggcggcccaggcgcgcagctgggcgcctccttcctgcaggccaggcatggctctgtgagcgctgatgaggctgcccgcacggctcccttccacctcgacctctggttctacttcacactgcagaactgggttctggactttgggcgtcccattgccatgctggtattccctctcgagtggtttccactcaacaagcccagtgttggggactacttccacatggcctacaacgtcatcacgccctttctcttgctcaagctcatcgagcggtccccccgcaccctgccacgctccatcacgtacgtgagcatcatcatcttcatcatgggtgccagcatccacctggtgggtgactctgtcaaccaccgcctgctcttcagtggctaccagcaccacctgtctgtccgtgagaaccccatcatcaagaatctcaagccggagacgctggtgaggccacctcctgctccctgcctatcgactcctttgagctgctctactattatgatgagtacctgggtcactgcatgtggtacatccccttcttcctcatcctcttcatgtacttcagcggctgctttactgcctctaaagctgagagcttgattccagggcctgccctgctcctggtggcacccagtggcctgtactactggtacctggtcaccgagggccagatcttcatcctcttcatcttcaccttcttcgccatgctggccctcgtcctgcaccagaagcgcaagcgcctcttcctggacagcaacggcctcttcctcttctcctccttcgcactgaccctcttgcttgtggcgctctgggtcgcctggctgtggaatgaccctgttctcaggaagaagtacccgggtgtcatctacgtccctgagccctgggctttctacacccttcacgtcagcagtcggcactgagtccctggcaccaggctctggcgctctgctgggtgggagggtgggccatggagggcatctgaatacaggagtagggggggtgtgggtgtgtaaccagagaccgagagcatgagtggggtgtgcctcgtgtgcgtggattcgtgtgtgtgtgtgtgtcttgtatatgtgtgcgcagaggaatgcagcgggacagatgagctttataacttaaggctggataaaatatgcacacacaaacagaatccaagtctgtcgttttcagaaaatggaaatcaaactatcccccgaccccctccccacaacaaagaaaagcccacgattgaaaacttcatacatgcaattccttttctgttattgcaaataaaataatgccatcgaagtcaaataaaaccaaaaccataggacaaataatgaaaaatcttcagaatccagaaaaaaatgaactgaaggtggtttgtgggtgcttgtttttcttttttcttttctttcctttttttagggaaaaaattaaaagaaatgtacagagaacaaaactatattttcagttttacttttgtatataaatctaagactgcctgtgtgataaaacacttgttta

SEQ ID NO: 735624 - DNA, 4022 bp, Homo sapiens
  misc_feature (1229)..(1230): n is a, c, g, or t
tagtccgcagccccgcctgttcctcccgagggccgcgcgctctcgccggcccgccccgaaccgccccgcgctgggaatttgcggcggcctccgccggggcagccgagctgaaccggtctcttcctcggaaaggcagggccgaggggcctgcggggcagccatggaggcgacgcggaggcggcagcacctgggagcgacgggcggcccaggcgcgcagctgggcgcctccttcctgcaggccaggcatggctctgtgagcgctgatgaggctgcccgcacggctcccttccacctcgacctctggttctacttcacactgcagaactgggttctggactttgggcgtcccattgccatgctggtattccctctcgagtggtttccactcaacaagcccagtgttggggactacttccacatggcctacaacgtcatcacgccctttctcttgctcaagctcatcgagcggtccccccgcaccctgccacgctccatcacgtacgtgagcatcatcatcttcatcatgggtgccagcatccacctggtgggtgactctgtcaaccaccgcctgctcttcagtggctaccagcaccacctgtctgtccgtgagaaccccatcatcaagaatctcaagccggagacgctggtgaggccacctcctgctccctgcctatcgactcctttgagctgctctactattatgatgagtacctgggtcactgcatgtggtacatccccttcttcctcatcctcttcatgtacttcagcggctgctttactgcctctaaagctgagagcttgattccagggcctgccctgctcctggtggcacccagtggcctgtactactggtacctggtcaccgagggccagatcttcatcctcttcatcttcaccttcttcgccatgctggccctcgtcctgcaccagaagcgcaagcgcctcttcctggacagcaacggcctcttcctcttctcctccttcgcactgaccctcttgcttgtggcgctctgggtcgcctggctgtggaatgaccctgttctcaggaagaagtacccgggtgtcatctacgtccctgagccctgggctttctacacccttcacgtcagcagtcggcactgagtccctggcaccaggctctggcgctctgctgggtgggagggtgggccatggagggcatctgaatacaggagtagggggggtgtgggtgtgtaaccagagaatccacnnttttttttttttttttttttttttttttttttttttttttttttttttttttttttttttttttaggatgggttgtttataaatacatatatacacacacacatatacatatcaacaccaacttttttttttcccaaaattcaagtcaacaatttagtggcagagagatgctataaaaacattatttttagatgccacacaagtcatgagaaccattaattttatcatacaactgaagtacagccatcttgaattctacctggattaaagttgatcattttgttaccaatgcaaggtttaaaactacaagtgtatacacaaaggtggtcctcatcaactctgagaacattaatagttgcggtaggaaaatccagtctggaaaaccagcagtcattatgccccttatctcttctgttaaacctgcattctcaatcaactaaaaaatattttccacacctgagaacatcataccttctctgatgaggattttggaacattagtagaaccacttttccttccctccaactcatatttctctcctgaaaaacagttttcagtatatttacatgttccattatgaataagagtagatcagactgatccatgaattctaaaaaaaaatgactttcctatgtcatacttgttaaaaggtgaagaaaaagataaacaaggcagatacgctaagaaaataggtatactcagaaccaaagagtaaaaatgactaagggtcaaacacatcttgaatttcaactgtttatcaaatagtagacttctacaaaaatgtggtgcattgtactttccaaacaatttatttttaggataactgaccgtgtatctttcttttttaggtgatgtaacattacctctgtcagctgcacaaaacacctgacagagctttctaagctatttttacttcctactttggtatgaagatcttacatgaaaacttgttactctgtggccaaaaaaagcaggtattcacagacttggtttaaatacacaatactggcaatccagatttagaataaagaactagactaaagtgtattattcataggtcggctaagcctactccttacccagacagctttattccaatatctctaaaacatattctcagggggtacagagcaaataagagaatatgtgatggagaacatgcaattgggatagttgataaagatgctcacacgtgagttcaagaccttcaaagcactttgaaagaagcaagcaactgattatattaactgaatgcacactcgggaggagagggaacagtgatgacagaaaaatacatacagacgcacacaatgaacacacacacccacgagccatgtcctgaaaatacacagggaatgcagcgggacagatgagctttataacttaaggctggataaaatatgcacacacaaacagaatccaagtctgtcgttttcagaaaatggaaatcaaactatcccccgaccccctccccacaacaaagaaaagcccacgattgaaaacttcatacatgcaattccttttctgttattgcaaataaaataatgccatcgaagtcaaataaaaccaaaaccataggacaaataatgaaaaatcttcagaatccagaaaaaaatgaactgaaggtggtttgtgggtgcttgtttttcttttttcttttctttcctttttttttttaaacaagtgttttatcacacaggcagtcttagatttatatacaaaagtaaaactgaaaatatagttttgttctctgtacatttcttttaattttttccctaaaaaaaggaaaaaaaacacgcttgtatacttttctaaacagagtaaggtaaaacagagcacaaagttctcttctttctgccaagttcattcgatctggggtggggatgggagcagcagggcctgggaatcagtccaatgaaataatgtctggtatgatgccaaagatggatgccgtgtccgtgctgctcctgtttgtgacggtgtggctatggctttcccttaggctgttggaagaaaccaggctgctgttactgccactactgcttccattggtggttggcagagaagtactgcctcctgcacttaactgatcaagaaacatctgtgaggaggtatacgggaaaaaccgagacgagtgtaggaggtcttgatcatctgaaactgctgctgctgcagcggcaagcaaggaggtgttgtaatgctgattgtctcctgataagaaaggaaagaaatctaatcctgtggaagaaaaaattatttcagtttaaaaaaaaaagaaggaaaaactcttccaaatgccccaatacttcaaaaacaaatacaagtcttatatgctatgtcactcagaattttatttaaacatgaagagttgagctaaacgttttacgtctctcctttctttagattactaaggctgaaaactaagctttggcaatgatttgtcttctccgtgaccccatttgggggactggggccattactactctgtcagatctaacactgatccttaaacgggcatagtacttttaacaaatgctctggactcctcttaaggaaactttcaatctgctctaagttactcctcacaagcacttcatgaggtatgtaattagttttgccctcattttgcaggtgagaaagtttgaagttgaaagagttaggttaagtaagttgtagtactgatttttctttcttaaatttgctcatttgctatcagattcaactgacagactgcagtggcatgaggggagaagaggtttgagtgcctgcaaactggctactattacataaga

SEQ ID NO: 735625 - DNA, 3927 bp, Homo sapiens
  misc_feature (1229)..(1230): n is a, c, g, or t
tagtccgcagccccgcctgttcctcccgagggccgcgcgctctcgccggcccgccccgaaccgccccgcgctgggaatttgcggcggcctccgccggggcagccgagctgaaccggtctcttcctcggaaaggcagggccgaggggcctgcggggcagccatggaggcgacgcggaggcggcagcacctgggagcgacgggcggcccaggcgcgcagctgggcgcctccttcctgcaggccaggcatggctctgtgagcgctgatgaggctgcccgcacggctcccttccacctcgacctctggttctacttcacactgcagaactgggttctggactttgggcgtcccattgccatgctggtattccctctcgagtggtttccactcaacaagcccagtgttggggactacttccacatggcctacaacgtcatcacgccctttctcttgctcaagctcatcgagcggtccccccgcaccctgccacgctccatcacgtacgtgagcatcatcatcttcatcatgggtgccagcatccacctggtgggtgactctgtcaaccaccgcctgctcttcagtggctaccagcaccacctgtctgtccgtgagaaccccatcatcaagaatctcaagccggagacgctggtgaggccacctcctgctccctgcctatcgactcctttgagctgctctactattatgatgagtacctgggtcactgcatgtggtacatccccttcttcctcatcctcttcatgtacttcagcggctgctttactgcctctaaagctgagagcttgattccagggcctgccctgctcctggtggcacccagtggcctgtactactggtacctggtcaccgagggccagatcttcatcctcttcatcttcaccttcttcgccatgctggccctcgtcctgcaccagaagcgcaagcgcctcttcctggacagcaacggcctcttcctcttctcctccttcgcactgaccctcttgcttgtggcgctctgggtcgcctggctgtggaatgaccctgttctcaggaagaagtacccgggtgtcatctacgtccctgagccctgggctttctacacccttcacgtcagcagtcggcactgagtccctggcaccaggctctggcgctctgctgggtgggagggtgggccatggagggcatctgaatacaggagtagggggggtgtgggtgtgtaaccagagaatccacnnttttttttttttttttttttttttttttttttttttttttttttttttttttttttttttttttaggatgggttgtttataaatacatatatacacacacacatatacatatcaacaccaacttttttttttcccaaaattcaagtcaacaatttagtggcagagagatgctataaaaacattatttttagatgccacacaagtcatgagaaccattaattttatcatacaactgaagtacagccatcttgaattctacctggattaaagttgatcattttgttaccaatgcaaggtttaaaactacaagtgtatacacaaaggtggtcctcatcaactctgagaacattaatagttgcggtaggaaaatccagtctggaaaaccagcagtcattatgccccttatctcttctgttaaacctgcattctcaatcaactaaaaaatattttccacacctgagaacatcataccttctctgatgaggattttggaacattagtagaaccacttttccttccctccaactcatatttctctcctgaaaaacagttttcagtatatttacatgttccattatgaataagagtagatcagactgatccatgaattctaaaaaaaaatgactttcctatgtcatacttgttaaaaggtgaagaaaaagataaacaaggcagatacgctaagaaaataggtatactcagaaccaaagagtaaaaatgactaagggtcaaacacatcttgaatttcaactgtttatcaaatagtagacttctacaaaaatgtggtgcattgtactttccaaacaatttatttttaggataactgaccgtgtatctttcttttttaggtgatgtaacattacctctgtcagctgcacaaaacacctgacagagctttctaagctatttttacttcctactttggtatgaagatcttacatgaaaacttgttactctgtggccaaaaaaagcaggtattcacagacttggtttaaatacacaatactggcaatccagatttagaataaagaactagactaaagtgtattattcataggtcggctaagcctactccttacccagacagctttattccaatatctctaaaacatattctcagggggtacagagcaaataagagaatatgtgatggagaacatgcaattgggatagttgataaagatgctcacacgtgagttcaagaccttcaaagcactttgaaagaagcaagcaactgattatattaactgaatgcacactcgggaggagagggaacagtgatgacagaaaaatacatacagacgcacacaatgaacacacacacccacgagccatgtcctgaaaatacacagggaatgcagcgggacagatgagctttataacttaaggctggataaaatatgcacacacaaacagaatccaagtctgtcgttttcagaaaatggaaatcaaactatcccccgaccccctccccacaacaaagaaaagcccacgattgaaaacttcatacatgcaattccttttctgttattgcaaataaaataatgccatcgaagtcaaataaaaccaaaaccataggacaaataatgaaaaatcttcagaatccagaaaaaaatgaactgaaggtggtttgtgggtgcttgtttttcttttttcttttctttcctttttttttttaaacaagtgttttatcacacaggcagtcttagatttatatacaaaagtaaaactgaaaatatagttttgttctctgtacatttcttttaattttttccctaaaaaaaggaaaaaaaacacgcttgtatacttttctaaacagagtaaggtaaaacagagcacaaagttctcttctttctgccaagttcattcgatctggggtggggatgggagcagcagggcctgggaatcagtccaatgaaataatgtctggtatgatgccaaagatggatgccgtgtccgtgctgctcctgtttgtgacggtgtggctatggctttcccttaggctgttggaagaaaccaggctgctgttactgccactactgcttccattggtggttggcagagaagtactgcctcctgcacttaactgatcaagaaacatctgtgaggaggtatacgggaaaaaccgagacgagtgtaggaggtcttgatcatctgaaactgctgctgctgcagcggcaagcaaggaggtgttgtaatgctgattgtctcctgataagaaaggaaagaaatctaatccttgtaagtcgtaaggcatgggtgtcatgtggaaaggatgcctatagtcttggatgagggaggtattaatgtagcttgtgtctacagcaggaaggcttggggtgcgggatactggagatgcttgatgtggaagacttaaaatgcctttattatttagtggtgatgtgggagatagggaaggacaggtcctcttggcagatggctcttcttcctcttcatcagatgaactgtctatggttaggtcaatcacttctactttcttgtttttatttgaggactggtggtgagacgctacctgatgctccaatgtggagctcaagcatcctatatgggaatgattaaaatacaaggcaagggaagagctatgacatctctcttttctcagtgtcactacagtttatcagttacagtttagattcacaatattgttggagccagagagtagaaaaccaacagtgg

SEQ ID NO: 735626 - DNA, 4354 bp, Homo sapiens
  misc_feature (1229)..(1230): n is a, c, g, or t
tagtccgcagccccgcctgttcctcccgagggccgcgcgctctcgccggcccgccccgaaccgccccgcgctgggaatttgcggcggcctccgccggggcagccgagctgaaccggtctcttcctcggaaaggcagggccgaggggcctgcggggcagccatggaggcgacgcggaggcggcagcacctgggagcgacgggcggcccaggcgcgcagctgggcgcctccttcctgcaggccaggcatggctctgtgagcgctgatgaggctgcccgcacggctcccttccacctcgacctctggttctacttcacactgcagaactgggttctggactttgggcgtcccattgccatgctggtattccctctcgagtggtttccactcaacaagcccagtgttggggactacttccacatggcctacaacgtcatcacgccctttctcttgctcaagctcatcgagcggtccccccgcaccctgccacgctccatcacgtacgtgagcatcatcatcttcatcatgggtgccagcatccacctggtgggtgactctgtcaaccaccgcctgctcttcagtggctaccagcaccacctgtctgtccgtgagaaccccatcatcaagaatctcaagccggagacgctggtgaggccacctcctgctccctgcctatcgactcctttgagctgctctactattatgatgagtacctgggtcactgcatgtggtacatccccttcttcctcatcctcttcatgtacttcagcggctgctttactgcctctaaagctgagagcttgattccagggcctgccctgctcctggtggcacccagtggcctgtactactggtacctggtcaccgagggccagatcttcatcctcttcatcttcaccttcttcgccatgctggccctcgtcctgcaccagaagcgcaagcgcctcttcctggacagcaacggcctcttcctcttctcctccttcgcactgaccctcttgcttgtggcgctctgggtcgcctggctgtggaatgaccctgttctcaggaagaagtacccgggtgtcatctacgtccctgagccctgggctttctacacccttcacgtcagcagtcggcactgagtccctggcaccaggctctggcgctctgctgggtgggagggtgggccatggagggcatctgaatacaggagtagggggggtgtgggtgtgtaaccagagaatccacnnttttttttttttttttttttttttttttttttttttttttttttttttttttttttttttttttaggatgggttgtttataaatacatatatacacacacacatatacatatcaacaccaacttttttttttcccaaaattcaagtcaacaatttagtggcagagagatgctataaaaacattatttttagatgccacacaagtcatgagaaccattaattttatcatacaactgaagtacagccatcttgaattctacctggattaaagttgatcattttgttaccaatgcaaggtttaaaactacaagtgtatacacaaaggtggtcctcatcaactctgagaacattaatagttgcggtaggaaaatccagtctggaaaaccagcagtcattatgccccttatctcttctgttaaacctgcattctcaatcaactaaaaaatattttccacacctgagaacatcataccttctctgatgaggattttggaacattagtagaaccacttttccttccctccaactcatatttctctcctgaaaaacagttttcagtatatttacatgttccattatgaataagagtagatcagactgatccatgaattctaaaaaaaaatgactttcctatgtcatacttgttaaaaggtgaagaaaaagataaacaaggcagatacgctaagaaaataggtatactcagaaccaaagagtaaaaatgactaagggtcaaacacatcttgaatttcaactgtttatcaaatagtagacttctacaaaaatgtggtgcattgtactttccaaacaatttatttttaggataactgaccgtgtatctttcttttttaggtgatgtaacattacctctgtcagctgcacaaaacacctgacagagctttctaagctatttttacttcctactttggtatgaagatcttacatgaaaacttgttactctgtggccaaaaaaagcaggtattcacagacttggtttaaatacacaatactggcaatccagatttagaataaagaactagactaaagtgtattattcataggtcggctaagcctactccttacccagacagctttattccaatatctctaaaacatattctcagggggtacagagcaaataagagaatatgtgatggagaacatgcaattgggatagttgataaagatgctcacacgtgagttcaagaccttcaaagcactttgaaagaagcaagcaactgattatattaactgaatgcacactcgggaggagagggaacagtgatgacagaaaaatacatacagacgcacacaatgaacacacacacccacgagccatgtcctgaaaatacacagggaatgcagcgggacagatgagctttataacttaaggctggataaaatatgcacacacaaacagaatccaagtctgtcgttttcagaaaatggaaatcaaactatcccccgaccccctccccacaacaaagaaaagcccacgattgaaaacttcatacatgcaattccttttctgttattgcaaataaaataatgccatcgaagtcaaataaaaccaaaaccataggacaaataatgaaaaatcttcagaatccagaaaaaaatgaactgaaggtggtttgtgggtgcttgtttttcttttttcttttctttcctttttttttttaaacaagtgttttatcacacaggcagtcttagatttatatacaaaagtaaaactgaaaatatagttttgttctctgtacatttcttttaattttttccctaaaaaaaggaaaaaaaacacgcttgtatacttttctaaacagagtaaggtaaaacagagcacaaagttctcttctttctgccaagttcattcgatctggggtggggatgggagcagcagggcctgggaatcagtccaatgaaataatgtctggtatgatgccaaagatggatgccgtgtccgtgctgctcctgtttgtgacggtgtggctatggctttcccttaggctgttggaagaaaccaggctgctgttactgccactactgcttccattggtggttggcagagaagtactgcctcctgcacttaactgatcaagaaacatctgtgaggaggtatacgggaaaaaccgagacgagtgtaggaggtcttgatcatctgaaactgctgctgctgcagcggcaagcaaggaggtgttgtaatgctgattgtctcctgataagaaaggaaagaaatctaatccttgtaagtcgtaaggcatgggtgtcatgtggaaaggatgcctatagtcttggatgagggaggtattaatgtagcttgtgtctacagcaggaaggcttggggtgcgggatactggagatgcttgatgtggaagacttaaaatgcctttattatttagtggtgatgtgggagatagggaaggacaggtcctcttggcagatggctcttcttcctcttcatcagatgaactgtctatggttaggtcaatcacttctactttcttgtttttatttgaggactggtggtgagacgctacctgatgctccaatgtggagctcaagcatccatcgactccattgtaagaggcagaaacttcctgtacttccttttttgatctcatcggtgcccaagtgccatcctccttaaattgtatttcatcacagtctgtacagtactttaggatttccataaacaagccatcaataataaggtgttcatatggagccttcttatcacagacaggacaaacccaggttggttttttctcattcatctgaatgtaaagagttgcgtcaaaacattgtagatgagaacatgtaagggcccgacacggaattgtcagccgcattttaccaagctttaaaaagggagaaaaagtaaatattagataattgctattcaacatttaagctttgacaaaaatttcctagaacacaacaggtaggcatgctgatttaaagcatacagtgttgacttttcatcaatgtagaagaacattaaacacatttcctgtgaaatatccataggttaaaaaatgacagtatttctttggctatcaaacaaaatgactatggaaagtctacaacaagggttatttactaaaatccacagctcacagatcagcttt

SEQ ID NO: 735627 - DNA, 5517 bp, Homo sapiens
  misc_feature (1229)..(1230): n is a, c, g, or t
tagtccgcagccccgcctgttcctcccgagggccgcgcgctctcgccggcccgccccgaaccgccccgcgctgggaatttgcggcggcctccgccggggcagccgagctgaaccggtctcttcctcggaaaggcagggccgaggggcctgcggggcagccatggaggcgacgcggaggcggcagcacctgggagcgacgggcggcccaggcgcgcagctgggcgcctccttcctgcaggccaggcatggctctgtgagcgctgatgaggctgcccgcacggctcccttccacctcgacctctggttctacttcacactgcagaactgggttctggactttgggcgtcccattgccatgctggtattccctctcgagtggtttccactcaacaagcccagtgttggggactacttccacatggcctacaacgtcatcacgccctttctcttgctcaagctcatcgagcggtccccccgcaccctgccacgctccatcacgtacgtgagcatcatcatcttcatcatgggtgccagcatccacctggtgggtgactctgtcaaccaccgcctgctcttcagtggctaccagcaccacctgtctgtccgtgagaaccccatcatcaagaatctcaagccggagacgctggtgaggccacctcctgctccctgcctatcgactcctttgagctgctctactattatgatgagtacctgggtcactgcatgtggtacatccccttcttcctcatcctcttcatgtacttcagcggctgctttactgcctctaaagctgagagcttgattccagggcctgccctgctcctggtggcacccagtggcctgtactactggtacctggtcaccgagggccagatcttcatcctcttcatcttcaccttcttcgccatgctggccctcgtcctgcaccagaagcgcaagcgcctcttcctggacagcaacggcctcttcctcttctcctccttcgcactgaccctcttgcttgtggcgctctgggtcgcctggctgtggaatgaccctgttctcaggaagaagtacccgggtgtcatctacgtccctgagccctgggctttctacacccttcacgtcagcagtcggcactgagtccctggcaccaggctctggcgctctgctgggtgggagggtgggccatggagggcatctgaatacaggagtagggggggtgtgggtgtgtaaccagagaatccacnnttttttttttttttttttttttttttttttttttttttttttttttttttttttttttttttttaggatgggttgtttataaatacatatatacacacacacatatacatatcaacaccaacttttttttttcccaaaattcaagtcaacaatttagtggcagagagatgctataaaaacattatttttagatgccacacaagtcatgagaaccattaattttatcatacaactgaagtacagccatcttgaattctacctggattaaagttgatcattttgttaccaatgcaaggtttaaaactacaagtgtatacacaaaggtggtcctcatcaactctgagaacattaatagttgcggtaggaaaatccagtctggaaaaccagcagtcattatgccccttatctcttctgttaaacctgcattctcaatcaactaaaaaatattttccacacctgagaacatcataccttctctgatgaggattttggaacattagtagaaccacttttccttccctccaactcatatttctctcctgaaaaacagttttcagtatatttacatgttccattatgaataagagtagatcagactgatccatgaattctaaaaaaaaatgactttcctatgtcatacttgttaaaaggtgaagaaaaagataaacaaggcagatacgctaagaaaataggtatactcagaaccaaagagtaaaaatgactaagggtcaaacacatcttgaatttcaactgtttatcaaatagtagacttctacaaaaatgtggtgcattgtactttccaaacaatttatttttaggataactgaccgtgtatctttcttttttaggtgatgtaacattacctctgtcagctgcacaaaacacctgacagagctttctaagctatttttacttcctactttggtatgaagatcttacatgaaaacttgttactctgtggccaaaaaaagcaggtattcacagacttggtttaaatacacaatactggcaatccagatttagaataaagaactagactaaagtgtattattcataggtcggctaagcctactccttacccagacagctttattccaatatctctaaaacatattctcagggggtacagagcaaataagagaatatgtgatggagaacatgcaattgggatagttgataaagatgctcacacgtgagttcaagaccttcaaagcactttgaaagaagcaagcaactgattatattaactgaatgcacactcgggaggagagggaacagtgatgacagaaaaatacatacagacgcacacaatgaacacacacacccacgagccatgtcctgaaaatacacagggaatgcagcgggacagatgagctttataacttaaggctggataaaatatgcacacacaaacagaatccaagtctgtcgttttcagaaaatggaaatcaaactatcccccgaccccctccccacaacaaagaaaagcccacgattgaaaacttcatacatgcaattccttttctgttattgcaaataaaataatgccatcgaagtcaaataaaaccaaaaccataggacaaataatgaaaaatcttcagaatccagaaaaaaatgaactgaaggtggtttgtgggtgcttgtttttcttttttcttttctttcctttttttttttaaacaagtgttttatcacacaggcagtcttagatttatatacaaaagtaaaactgaaaatatagttttgttctctgtacatttcttttaattttttccctaaaaaaaggaaaaaaaacacgcttgtatacttttctaaacagagtaaggtaaaacagagcacaaagttctcttctttctgccaagttcattcgatctggggtggggatgggagcagcagggcctgggaatcagtccaatgaaataatgtctggtatgatgccaaagatggatgccgtgtccgtgctgctcctgtttgtgacggtgtggctatggctttcccttaggctgttggaagaaaccaggctgctgttactgccactactgcttccattggtggttggcagagaagtactgcctcctgcacttaactgatcaagaaacatctgtgaggaggtatacgggaaaaaccgagacgagtgtaggaggtcttgatcatctgaaactgctgctgctgcagcggcaagcaaggaggtgttgtaatgctgattgtctcctgataagaaaggaaagaaatctaatccttgtaagtcgtaaggcatgggtgtcatgtggaaaggatgcctatagtcttggatgagggaggtattaatgtagcttgtgtctacagcaggaaggcttggggtgcgggatactggagatgcttgatgtggaagacttaaaatgcctttattatttagtggtgatgtgggagatagggaaggacaggtcctcttggcagatggctcttcttcctcttcatcagatgaactgtctatggttaggtcaatcacttctactttcttgtttttatttgaggactggtggtgagacgctacctgatgctccaatgtggagctcaagcatccatcgactccattgtaagaggcagaaacttcctgtacttccttttttgatctcatcggtgcccaagtgccatcctccttaaattgtatttcatcacagtctgtacagtactttaggatttccataaacaagccatcaataataaggtgttcatatggagccttcttatcacagacaggacaaacccaggttggttttttctcattcatctgaatgtaaagagttgcgtcaaaacattgtagatgagaacatgtaagggcccgacacggaattgtcagccgcattttaccaagtggacatagtagagaaacccttaggctggttgtagctatttcactgtctggatccgcagtcaacttctctttaattaaagctctagaatgatccggattccttattccctttgctcgtaacctctgaagaagaactgttgaggacaactgttttacaagatatactgccatggaatagtttcttccaatttctgcagtccaagaaacaacaatcgtgtttggtactgttgtggacagtcggacaagtgaggtgatattaattggtcggctgggtcgctttggttccacgccattttttgtaggtggaaggtaacctggaaggctgcaaggttttgtattcactttcacacaaagattgggtgggaagtgatcttcttgtggacaactggtttctgataaacaaaaccttaactggacctgtactgtgaagtcacatttggtcccagaaatatccatggaactactgatttgctgcacttgttgtggtgtcaaggcaaatgcaaaacaggtttctcgaaagcgctgactgttgtctgatgctagactggtgggttttatcagttcatccagtaaatcataaaatggtaatttttgaagttttatatccggatggactgggtgaagagctgatgtaagatgtgggagttccagttcatgtttaggtcccagaagagaaacagggagtaatggcgatgatgcagggtgaccatcgtaagtgagttgtggaatggtagatggagacaaagttgctggcataggacttgaatgtacgttggggatggacaagtctgcaggcgtcatgattttctgtgggaaccgccgcctatagagttccttaattttcatttgcacagcaggactacagccagcctttagcaaatgcagggcttttgtgagaagttcgtgtttgcgtccgtgcttgtttctcccggcgtagcccaacagtacttggagttcagaaactctaaggctcataaccatttgcttagagaaaaaacaaaatgtaaaacattagtattccaataatataatttacactattaaatgacactttattataacccccttcttatggtttacttaagcaaataaaggccagctcacttataatcctattatttcaaacttcaaatttaatcatttaacgttaagtaaccaaagaaatttaaaattaatattcataaattcattgacttctacccttggttataagaaatataggataaagtatacaccagggaaaaccacacctcactttattccactgttttgatgaaactgtcaggtatttatcaagcacttactgagtctccaggagaatgtcgagtgctatgtagatggcaaaacgtaatgatgtgctctcaagaatattttgttttcttggggaagaattataagtatatatgaaacaacaaacagtccatctcaaacac

SEQ ID NO: 735628 - DNA, 5217 bp, Homo sapiens
  misc_feature (1229)..(1230): n is a, c, g, or t
tagtccgcagccccgcctgttcctcccgagggccgcgcgctctcgccggcccgccccgaaccgccccgcgctgggaatttgcggcggcctccgccggggcagccgagctgaaccggtctcttcctcggaaaggcagggccgaggggcctgcggggcagccatggaggcgacgcggaggcggcagcacctgggagcgacgggcggcccaggcgcgcagctgggcgcctccttcctgcaggccaggcatggctctgtgagcgctgatgaggctgcccgcacggctcccttccacctcgacctctggttctacttcacactgcagaactgggttctggactttgggcgtcccattgccatgctggtattccctctcgagtggtttccactcaacaagcccagtgttggggactacttccacatggcctacaacgtcatcacgccctttctcttgctcaagctcatcgagcggtccccccgcaccctgccacgctccatcacgtacgtgagcatcatcatcttcatcatgggtgccagcatccacctggtgggtgactctgtcaaccaccgcctgctcttcagtggctaccagcaccacctgtctgtccgtgagaaccccatcatcaagaatctcaagccggagacgctggtgaggccacctcctgctccctgcctatcgactcctttgagctgctctactattatgatgagtacctgggtcactgcatgtggtacatccccttcttcctcatcctcttcatgtacttcagcggctgctttactgcctctaaagctgagagcttgattccagggcctgccctgctcctggtggcacccagtggcctgtactactggtacctggtcaccgagggccagatcttcatcctcttcatcttcaccttcttcgccatgctggccctcgtcctgcaccagaagcgcaagcgcctcttcctggacagcaacggcctcttcctcttctcctccttcgcactgaccctcttgcttgtggcgctctgggtcgcctggctgtggaatgaccctgttctcaggaagaagtacccgggtgtcatctacgtccctgagccctgggctttctacacccttcacgtcagcagtcggcactgagtccctggcaccaggctctggcgctctgctgggtgggagggtgggccatggagggcatctgaatacaggagtagggggggtgtgggtgtgtaaccagagaatccacnnttttttttttttttttttttttttttttttttttttttttttttttttttttttttttttttttaggatgggttgtttataaatacatatatacacacacacatatacatatcaacaccaacttttttttttcccaaaattcaagtcaacaatttagtggcagagagatgctataaaaacattatttttagatgccacacaagtcatgagaaccattaattttatcatacaactgaagtacagccatcttgaattctacctggattaaagttgatcattttgttaccaatgcaaggtttaaaactacaagtgtatacacaaaggtggtcctcatcaactctgagaacattaatagttgcggtaggaaaatccagtctggaaaaccagcagtcattatgccccttatctcttctgttaaacctgcattctcaatcaactaaaaaatattttccacacctgagaacatcataccttctctgatgaggattttggaacattagtagaaccacttttccttccctccaactcatatttctctcctgaaaaacagttttcagtatatttacatgttccattatgaataagagtagatcagactgatccatgaattctaaaaaaaaatgactttcctatgtcatacttgttaaaaggtgaagaaaaagataaacaaggcagatacgctaagaaaataggtatactcagaaccaaagagtaaaaatgactaagggtcaaacacatcttgaatttcaactgtttatcaaatagtagacttctacaaaaatgtggtgcattgtactttccaaacaatttatttttaggataactgaccgtgtatctttcttttttaggtgatgtaacattacctctgtcagctgcacaaaacacctgacagagctttctaagctatttttacttcctactttggtatgaagatcttacatgaaaacttgttactctgtggccaaaaaaagcaggtattcacagacttggtttaaatacacaatactggcaatccagatttagaataaagaactagactaaagtgtattattcataggtcggctaagcctactccttacccagacagctttattccaatatctctaaaacatattctcagggggtacagagcaaataagagaatatgtgatggagaacatgcaattgggatagttgataaagatgctcacacgtgagttcaagaccttcaaagcactttgaaagaagcaagcaactgattatattaactgaatgcacactcgggaggagagggaacagtgatgacagaaaaatacatacagacgcacacaatgaacacacacacccacgagccatgtcctgaaaatacacagggaatgcagcgggacagatgagctttataacttaaggctggataaaatatgcacacacaaacagaatccaagtctgtcgttttcagaaaatggaaatcaaactatcccccgaccccctccccacaacaaagaaaagcccacgattgaaaacttcatacatgcaattccttttctgttattgcaaataaaataatgccatcgaagtcaaataaaaccaaaaccataggacaaataatgaaaaatcttcagaatccagaaaaaaatgaactgaaggtggtttgtgggtgcttgtttttcttttttcttttctttcctttttttttttaaacaagtgttttatcacacaggcagtcttagatttatatacaaaagtaaaactgaaaatatagttttgttctctgtacatttcttttaattttttccctaaaaaaaggaaaaaaaacacgcttgtatacttttctaaacagagtaaggtaaaacagagcacaaagttctcttctttctgccaagttcattcgatctggggtggggatgggagcagcagggcctgggaatcagtccaatgaaataatgtctggtatgatgccaaagatggatgccgtgtccgtgctgctcctgtttgtgacggtgtggctatggctttcccttaggctgttggaagaaaccaggctgctgttactgccactactgcttccattggtggttggcagagaagtactgcctcctgcacttaactgatcaagaaacatctgtgaggaggtatacgggaaaaaccgagacgagtgtaggaggtcttgatcatctgaaactgctgctgctgcagcggcaagcaaggaggtgttgtaatgctgattgtctcctgataagaaaggaaagaaatctaatccttgtaagtcgtaaggcatgggtgtcatgtggaaaggatgcctatagtcttggatgagggaggtattaatgtagcttgtgtctacagcaggaaggcttggggtgcgggatactggagatgcttgatgtggaagacttaaaatgcctttattatttagtggtgatgtgggagatagggaaggacaggtcctcttggcagatggctcttcttcctcttcatcagatgaactgtctatggttaggtcaatcacttctactttcttgtttttatttgaggactggtggtgagacgctacctgatgctccaatgtggagctcaagcatccatcgactccattgtaagaggcagaaacttcctgtacttccttttttgatctcatcggtgcccaagtgccatcctccttaaattgtatttcatcacagtctgtacagtactttaggatttccataaacaagccatcaataataaggtgttcatatggagccttcttatcacagacaggacaaacccaggttggttttttctcattcatctgaatgtaaagagttgcgtcaaaacattgtagatgagaacatgtaagggcccgacacggaattgtcagccgcattttaccaagtggacatagtagagaaacccttaggctggttgtagctatttcactgtctggatccgcagtcaacttctctttaattaaagctctagaatgatccggattccttattccctttgctcgtaacctctgaagaagaactgttgaggacaactgttttacaagatatactgccatggaatagtttcttccaatttctgcagtccaagaaacaacaatcgtgtttggtactgttgtggacagtcggacaagtgaggtgatattaattggtcggctgggtcgctttggttccacgccattttttgtaggtggaaggtaacctggaaggctgcaaggttttgtattcactttcacacaaagattgggtgggaagtgatcttcttgtggacaactggtttctgataaacaaaaccttaactggacctgtactgtgaagtcacatttggtcccagaaatatccatggaactactgatttgctgcacttgttgtggtgtcaaggcaaatgcaaaacaggtttctcgaaagcgctgactgttgtctgatgctagactggtgggttttatcagttcatccagtaaatcataaaatggtaatttttgaagttttatatccggatggactgggtgaagagctgatgtaagatgtgggagttccagttcatgtttaggtcccagaagagaaacagggagtaatggcgatgatgcagggtgaccatcgtaagtgagttgtggaatggtagatggagacaaagttgctggcataggacttgaatgtacgttggggatggacaagtctgcaggcgtcatgattttctgtgggaaccgccgcctatagagttccttaattttcatttgcacagcaggactacagccagcctttagcaaatgcagggcttttgtgagaagttcgtgtttgcgtccgtgcttgtttctcccggcgtagcccaacagtacttggagttcagaaactctaaggctcataaccatttgctttagttccgcactgtccgccatcttgcgtctgtcagcgcaagcgcagtgaacttcgccgggggccgccgctagacccgcccctctagccggcctggccccgccccggcccgcccctccaccttcccagcccgcctctggcctccgcc

SEQ ID NO: 735629 - DNA, 5375 bp, Homo sapiens
  misc_feature (1229)..(1230): n is a, c, g, or t
tagtccgcagccccgcctgttcctcccgagggccgcgcgctctcgccggcccgccccgaaccgccccgcgctgggaatttgcggcggcctccgccggggcagccgagctgaaccggtctcttcctcggaaaggcagggccgaggggcctgcggggcagccatggaggcgacgcggaggcggcagcacctgggagcgacgggcggcccaggcgcgcagctgggcgcctccttcctgcaggccaggcatggctctgtgagcgctgatgaggctgcccgcacggctcccttccacctcgacctctggttctacttcacactgcagaactgggttctggactttgggcgtcccattgccatgctggtattccctctcgagtggtttccactcaacaagcccagtgttggggactacttccacatggcctacaacgtcatcacgccctttctcttgctcaagctcatcgagcggtccccccgcaccctgccacgctccatcacgtacgtgagcatcatcatcttcatcatgggtgccagcatccacctggtgggtgactctgtcaaccaccgcctgctcttcagtggctaccagcaccacctgtctgtccgtgagaaccccatcatcaagaatctcaagccggagacgctggtgaggccacctcctgctccctgcctatcgactcctttgagctgctctactattatgatgagtacctgggtcactgcatgtggtacatccccttcttcctcatcctcttcatgtacttcagcggctgctttactgcctctaaagctgagagcttgattccagggcctgccctgctcctggtggcacccagtggcctgtactactggtacctggtcaccgagggccagatcttcatcctcttcatcttcaccttcttcgccatgctggccctcgtcctgcaccagaagcgcaagcgcctcttcctggacagcaacggcctcttcctcttctcctccttcgcactgaccctcttgcttgtggcgctctgggtcgcctggctgtggaatgaccctgttctcaggaagaagtacccgggtgtcatctacgtccctgagccctgggctttctacacccttcacgtcagcagtcggcactgagtccctggcaccaggctctggcgctctgctgggtgggagggtgggccatggagggcatctgaatacaggagtagggggggtgtgggtgtgtaaccagagaatccacnnttttttttttttttttttttttttttttttttttttttttttttttttttttttttttttttttaggatgggttgtttataaatacatatatacacacacacatatacatatcaacaccaacttttttttttcccaaaattcaagtcaacaatttagtggcagagagatgctataaaaacattatttttagatgccacacaagtcatgagaaccattaattttatcatacaactgaagtacagccatcttgaattctacctggattaaagttgatcattttgttaccaatgcaaggtttaaaactacaagtgtatacacaaaggtggtcctcatcaactctgagaacattaatagttgcggtaggaaaatccagtctggaaaaccagcagtcattatgccccttatctcttctgttaaacctgcattctcaatcaactaaaaaatattttccacacctgagaacatcataccttctctgatgaggattttggaacattagtagaaccacttttccttccctccaactcatatttctctcctgaaaaacagttttcagtatatttacatgttccattatgaataagagtagatcagactgatccatgaattctaaaaaaaaatgactttcctatgtcatacttgttaaaaggtgaagaaaaagataaacaaggcagatacgctaagaaaataggtatactcagaaccaaagagtaaaaatgactaagggtcaaacacatcttgaatttcaactgtttatcaaatagtagacttctacaaaaatgtggtgcattgtactttccaaacaatttatttttaggataactgaccgtgtatctttcttttttaggtgatgtaacattacctctgtcagctgcacaaaacacctgacagagctttctaagctatttttacttcctactttggtatgaagatcttacatgaaaacttgttactctgtggccaaaaaaagcaggtattcacagacttggtttaaatacacaatactggcaatccagatttagaataaagaactagactaaagtgtattattcataggtcggctaagcctactccttacccagacagctttattccaatatctctaaaacatattctcagggggtacagagcaaataagagaatatgtgatggagaacatgcaattgggatagttgataaagatgctcacacgtgagttcaagaccttcaaagcactttgaaagaagcaagcaactgattatattaactgaatgcacactcgggaggagagggaacagtgatgacagaaaaatacatacagacgcacacaatgaacacacacacccacgagccatgtcctgaaaatacacagggaatgcagcgggacagatgagctttataacttaaggctggataaaatatgcacacacaaacagaatccaagtctgtcgttttcagaaaatggaaatcaaactatcccccgaccccctccccacaacaaagaaaagcccacgattgaaaacttcatacatgcaattccttttctgttattgcaaataaaataatgccatcgaagtcaaataaaaccaaaaccataggacaaataatgaaaaatcttcagaatccagaaaaaaatgaactgaaggtggtttgtgggtgcttgtttttcttttttcttttctttcctttttttttttaaacaagtgttttatcacacaggcagtcttagatttatatacaaaagtaaaactgaaaatatagttttgttctctgtacatttcttttaattttttccctaaaaaaaggaaaaaaaacacgcttgtatacttttctaaacagagtaaggtaaaacagagcacaaagttctcttctttctgccaagttcattcgatctggggtggggatgggagcagcagggcctgggaatcagtccaatgaaataatgtctggtatgatgccaaagatggatgccgtgtccgtgctgctcctgtttgtgacggtgtggctatggctttcccttaggctgttggaagaaaccaggctgctgttactgccactactgcttccattggtggttggcagagaagtactgcctcctgcacttaactgatcaagaaacatctgtgaggaggtatacgggaaaaaccgagacgagtgtaggaggtcttgatcatctgaaactgctgctgctgcagcggcaagcaaggaggtgttgtaatgctgattgtctcctgataagaaaggaaagaaatctaatccttgtaagtcgtaaggcatgggtgtcatgtggaaaggatgcctatagtcttggatgagggaggtattaatgtagcttgtgtctacagcaggaaggcttggggtgcgggatactggagatgcttgatgtggaagacttaaaatgcctttattatttagtggtgatgtgggagatagggaaggacaggtcctcttggcagatggctcttcttcctcttcatcagatgaactgtctatggttaggtcaatcacttctactttcttgtttttatttgaggactggtggtgagacgctacctgatgctccaatgtggagctcaagcatccatcgactccattgtaagaggcagaaacttcctgtacttccttttttgatctcatcggtgcccaagtgccatcctccttaaattgtatttcatcacagtctgtacagtactttaggatttccataaacaagccatcaataataaggtgttcatatggagccttcttatcacagacaggacaaacccaggttggttttttctcattcatctgaatgtaaagagttgcgtcaaaacattgtagatgagaacatgtaagggcccgacacggaattgtcagccgcattttaccaagtggacatagtagagaaacccttaggctggttgtagctatttcactgtctggatccgcagtcaacttctctttaattaaagctctagaatgatccggattccttattccctttgctcgtaacctctgaagaagaactgttgaggacaactgttttacaagatatactgccatggaatagtttcttccaatttctgcagtccaagaaacaacaatcgtgtttggtactgttgtggacagtcggacaagtgaggtgatattaattggtcggctgggtcgctttggttccacgccattttttgtaggtggaaggtaacctggaaggctgcaaggttttgtattcactttcacacaaagattgggtgggaagtgatcttcttgtggacaactggtttctgataaacaaaaccttaactggacctgtactgtgaagtcacatttggtcccagaaatatccatggaactactgatttgctgcacttgttgtggtgtcaaggcaaatgcaaaacaggtttctcgaaagcgctgactgttgtctgatgctagactggtgggttttatcagttcatccagtaaatcataaaatggtaatttttgaagttttatatccggatggactgggtgaagagctgatgtaagatgtgggagttccagttcatgtttaggtcccagaagagaaacagggagtaatggcgatgatgcagggtgaccatcgtaagtgagttgtggaatggtagatggagacaaagttgctggcataggacttgaatgtacgttggggatggacaagtctgcaggcgtcatgattttctgtgggaaccgccgcctatagagttccttaattttcatttgcacagcaggactacagccagcctttagcaaatgcagggcttttgtgagaagttcgtgtttgcgtccgtgcttgtttctcccggcgtagcccaacagtacttggagttcagaaactctaaggctcataaccatttgctgggagagagacgagaaggagctggatgttggagagtatggttggatgtcggagagagagactcatcctaaatgtaggcatatagtttttatcatcctctgaagagaggagtctggcagggatggctggagaatctcaggtgaagattaccttcttgttccgtcccctttccagctccctttctcactgagagccactttcattggcaatgaaatcccccacatttaccaccttcaattcgtttgtgagaccttattcctcctggactccagacaaaaactagtgtgcctcaagtgtgggcacaaa

SEQ ID NO: 735630 - DNA, 988 bp, Homo sapiens
  misc_feature (477)..(477): n is a, c, g, or t
ctatcatagtgacactattgattaaatacaccttcagtttcttaaatgttaaggagactgcaaaatatgaaaaaaaacaatagaatagcctttaatgggaccatgtgagtacaagcatcttccatttaacctaactaccaccattttcttttgatataattatcaaacttttcacgcaatcattttctgcactgccagaggaagctccctttcaataaaaaagatatgaggagatgcttttccaactcgtacaacccctgatatgaatcttacaggcagaccaggctggccaacaaagtcaactcccatcctgacagaccaagagttcaaatactttaatactgtggtaaccccgaccttttacattattctaagatgccttctgttaaagcttagaacaactccctagggagcagtgccacaggaatttctgtagttcatggaaaaatctgaaaagcacagatacaatttctttgnaacccaatctccaaaaatgggagatttgaagtgaagggaagatttgtgttagaaatgaaggcagctttcccatcacataaatgaaagcaaagaacaaaggtcaagggtcaccaccccatttcactgaatctaaagtcctcaataccaaacatatgaccaaattcagtcttccaaattgttacaatttagctggctatctttactgcgtaaatttgaatatactgtttaaatcatagatttcatttacaaaatcaaactaccaagacacaggatacactaaggtgtatatattgcataattaagtagtaaaacatcccaagggctccaaccacaattagatttttaccgtaaggattgaatgcatggtaatcagagagatcatctgtgactctgcaatgagaaggatttacacaatttccaaattctgaaaaccaggttattgcaatgcctctgaaatacagttctaggaaaagctgtcgttaagtaagattaaaaataaatgttaaaaaaa

SEQ ID NO: 735631 - DNA, 2189 bp, Homo sapiens
ttcgggaatcgtcgaccacgcgtctgaggacccttcccacctgtgcccgtcccttcctgaagtcctagccacagcccatcctccatgagtcccggcagctctgggtcatgcccttccctggtcacccatctgcccctcacctcgtcatccagggacccagaccctgcaccttccatgtgggcccacagatccttggcaggtacctgaggtgcaccattgagtgtcggatttggggttagcatccagaaagaagaatgcgcatgacgctctgtgaaggctggaactcaggtcttcaggggagagaaaggaagactggattgcaccttgatgcctcctgaggaggcggcccccctcttgaggtgggcgtgggcccggcccagccttatccaagtcgctctgtccacctcccccttcctggcccccaccccactcctgtgcctcccaggagccctccctgtgctccacctgcctccgcagaaggaagcctctttctctgtttccctgggtgagggggctggcaggtggctaaccccatttagcatctccaggccctgccatggtgtctcatcttgctgttatctctagctctttccctcctcccatttcctttagtagttgaattttgcaaagcttgtagcagtagctcagttgcctgcagcatccttgtgtgtagataaattagtcgacagaaactcagcactggggacaggattgcaaagtcggggacatagatgcagacagttgttgagatttggggatagccgggcttgtgagcggtgcccatttccagatgaagcctttcagcccttctgagtccccggcccttggtgcgatgtctgtgagtttgacctgcccagcgtgtgggctggctcaatgctgaataaagtgggtttgtgtcagctcgtttgcttcgtctccgtgtgtccacctggcctcttccccctgccctggccaccctccagtgtcaaaggaaacttcctcgtgacacgtgctaaagcatggtgaggaggactttgattgggaccattgagatgggtgtgggaccctttccttggggcctggggggagatggggctccaccccgacgtagcagggcaggggttggaggagcgaggagcagtatagggtccatgggtgggaatgactgtgaggagacatcagggctgagggggctctggctaaacccacctcacagagtccttgctgcaggcaggcagggcgatcagacattggctgcaaacggtcagagaggaacccagtcaggtaccattgagggtggtcagatattatggttaaccaaattagggttcttgctaaaactggatttcataagaaagggcaaagagggccctaggagaagattccagagcctggccagagtttggccaagtagagaatctttgtcagcacgccaacaacatcccgaccctgagacctccagtttgtctttctcactgtctccgcctgctgcagtctgctgtcatccctgagcatccctgcccctgccctgcacacctgtgatgcttgcccggacaggtcctgatggcagagtctcccacaacatcagtgtctccacatcaccaggtccgacagtggcttcaccatcctcacctaacctagctgaccagcaacatcccaccctgtcaatcacaacctctttctatttaagaaaattatatatttatggggcacagtgtgatgttttgatatctatgtacattgtggagtgacagattaatgtatccatctcatgttttttttggtggtgagaatatttgaaatctacactcagcaatttcaaatacagtcatccctctgtgcctaagggggattggttccaggaccccctcatggataccaaaatctgcagatactcaagtaccctgcagtcagccctccctctgcacatatgtgggacagtcagatacagagggccaactgcgtacagtacacggttatcagctgaagtcaccatgctgtgcaatagaccttgagtttattcttgtatagcagggactctgtaccctctgactagaatttccccaaatcctcttgtctcagcccctgctaaccaccgttctactctctaattctataaatcaacattttgattccacatataagtgagatcatgtgatatttgtcctgttcctggcttatttcacttaatataaatgtcctgtaaattc

SEQ ID NO: 735632 - DNA, 1646 bp, Homo sapiens
aattcaagcttctaacgatgtacggggagctgttatctctagctctttccctcctcccatttcctttagtagttgaattttgcaaagcttgtagcagtagctcagttgcctgcagcatccttgtgtgtagataaattagtcgacagaaactcagcactggggacaggattgcaaagtcggggacatagatgcagacagttgttgagatttggggatagccgggcttgtgagcggtgcccatttccagatgaagcctttcagcccttctgagtccccggcccttggtgcgatgtctgtgagtttgacctgcccagcgtgtgggctggctcaatgctgaataaagtgggtttgtgtcagctcgtttgcttcgtctccgtgtgtccacctggcctcttccccctgccctggccaccctccagtgtcaaaggaaacttcctcgtgacacgtgctaaagcatggtgaggaggactttgattgggaccattgagatgggtgtgggaccctttccttggggcctggggggagatggggctccaccccgacgtagcagggcaggggttggaggagcgaggagcagtatagggtccatgggtgggaatgactgtgaggagacatcagggctgagggggctctggctaaacccacctcacagagtccttgctgcaggcaggcagggcgatcagacattggctgcaaacggtcagagaggaacccagtcaggtaccattgagggtggtcagatattatggttaaccaaattagggttcttgctaaaactggatttcataagaaagggcaaagagggccctaggagaagattccagagcctggccagagtttggccaagtagagaatctttgtcagcacgccaacaacatcccgaccctgagacctccagtttgtctttctcactgtctccgcctgctgcagtctgctgtcatccctgagcatccctgcccctgccctgcacacctgtgatgcttgcccggacaggtcctgatggcagagtctcccacaacatcagtgtctccacatcaccaggtccgacagtggcttcaccatcctcacctaacctagctgaccagcaacatcccaccctgtcaatcacaacctctttctatttaagaaaattatatatttatggggcacagtgtgatgttttgatatctatgtacattgtggagtgacagattaatgtatccatctcatgttttttttggtggtgagaatatttgaaatctacactcagcaatttcaaatacagtcatccctctgtgcctaagggggattggttccaggaccccctcatggataccaaaatctgcagatactcaagtaccctgcagtcagccctccctctgcacatatgtgggacagtcagatacagagggccaactgcgtacagtacacggttatcagctgaagtcaccatgctgtgcaatagaccttgagtttattcttgtatagcagggactctgtaccctctgactagaatttccccaaatcctcttgtctcagcccctgctaaccaccgttctactctctaattctataaatcaacattttgattccacatataagtgagatcatgtgatatttgtcctgttcctggcttatttcacttaatataaatgtcctgtaaattc

SEQ ID NO: 735633 - DNA, 1684 bp, Homo sapiens
  misc_feature (4)..(4): n is a, c, g, or t
  misc_feature (46)..(46): n is a, c, g, or t
atancctaggagttagaatgtgaccagacaatagatggtcttaaanataccaataagattaggcctgctgttatctctagctctttccctcctcccatttcctttagtagttgaattttgcaaagcttgtagcagtagctcagttgcctgcagcatccttgtgtgtagataaattagtcgacagaaactcagcactggggacaggattgcaaagtcggggacatagatgcagacagttgttgagatttggggatagccgggcttgtgagcggtgcccatttccagatgaagcctttcagcccttctgagtccccggcccttggtgcgatgtctgtgagtttgacctgcccagcgtgtgggctggctcaatgctgaataaagtgggtttgtgtcagctcgtttgcttcgtctccgtgtgtccacctggcctcttccccctgccctggccaccctccagtgtcaaaggaaacttcctcgtgacacgtgctaaagcatggtgaggaggactttgattgggaccattgagatgggtgtgggaccctttccttggggcctggggggagatggggctccaccccgacgtagcagggcaggggttggaggagcgaggagcagtatagggtccatgggtgggaatgactgtgaggagacatcagggctgagggggctctggctaaacccacctcacagagtccttgctgcaggcaggcagggcgatcagacattggctgcaaacggtcagagaggaacccagtcaggtaccattgagggtggtcagatattatggttaaccaaattagggttcttgctaaaactggatttcataagaaagggcaaagagggccctaggagaagattccagagcctggccagagtttggccaagtagagaatctttgtcagcacgccaacaacatcccgaccctgagacctccagtttgtctttctcactgtctccgcctgctgcagtctgctgtcatccctgagcatccctgcccctgccctgcacacctgtgatgcttgcccggacaggtcctgatggcagagtctcccacaacatcagtgtctccacatcaccaggtccgacagtggcttcaccatcctcacctaacctagctgaccagcaacatcccaccctgtcaatcacaacctctttctatttaagaaaattatatatttatggggcacagtgtgatgttttgatatctatgtacattgtggagtgacagattaatgtatccatctcatgttttttttggtggtgagaatatttgaaatctacactcagcaatttcaaatacagtcatccctctgtgcctaagggggattggttccaggaccccctcatggataccaaaatctgcagatactcaagtaccctgcagtcagccctccctctgcacatatgtgggacagtcagatacagagggccaactgcgtacagtacacggttatcagctgaagtcaccatgctgtgcaatagaccttgagtttattcttgtatagcagggactctgtaccctctgactagaatttccccaaatcctcttgtctcagcccctgctaaccaccgttctactctctaattctataaatcaacattttgattccacatataagtgagatcatgtgatatttgtcctgttcctggcttatttcacttaatataaatgtcctgtaaattc

SEQ ID NO: 735634 - DNA, 1663 bp, Homo sapiens
atccccacctgtgtgctcctgtgtgctctcccccctgtgtgctctgctgttatctctagctctttccctcctcccatttcctttagtagttgaattttgcaaagcttgtagcagtagctcagttgcctgcagcatccttgtgtgtagataaattagtcgacagaaactcagcactggggacaggattgcaaagtcggggacatagatgcagacagttgttgagatttggggatagccgggcttgtgagcggtgcccatttccagatgaagcctttcagcccttctgagtccccggcccttggtgcgatgtctgtgagtttgacctgcccagcgtgtgggctggctcaatgctgaataaagtgggtttgtgtcagctcgtttgcttcgtctccgtgtgtccacctggcctcttccccctgccctggccaccctccagtgtcaaaggaaacttcctcgtgacacgtgctaaagcatggtgaggaggactttgattgggaccattgagatgggtgtgggaccctttccttggggcctggggggagatggggctccaccccgacgtagcagggcaggggttggaggagcgaggagcagtatagggtccatgggtgggaatgactgtgaggagacatcagggctgagggggctctggctaaacccacctcacagagtccttgctgcaggcaggcagggcgatcagacattggctgcaaacggtcagagaggaacccagtcaggtaccattgagggtggtcagatattatggttaaccaaattagggttcttgctaaaactggatttcataagaaagggcaaagagggccctaggagaagattccagagcctggccagagtttggccaagtagagaatctttgtcagcacgccaacaacatcccgaccctgagacctccagtttgtctttctcactgtctccgcctgctgcagtctgctgtcatccctgagcatccctgcccctgccctgcacacctgtgatgcttgcccggacaggtcctgatggcagagtctcccacaacatcagtgtctccacatcaccaggtccgacagtggcttcaccatcctcacctaacctagctgaccagcaacatcccaccctgtcaatcacaacctctttctatttaagaaaattatatatttatggggcacagtgtgatgttttgatatctatgtacattgtggagtgacagattaatgtatccatctcatgttttttttggtggtgagaatatttgaaatctacactcagcaatttcaaatacagtcatccctctgtgcctaagggggattggttccaggaccccctcatggataccaaaatctgcagatactcaagtaccctgcagtcagccctccctctgcacatatgtgggacagtcagatacagagggccaactgcgtacagtacacggttatcagctgaagtcaccatgctgtgcaatagaccttgagtttattcttgtatagcagggactctgtaccctctgactagaatttccccaaatcctcttgtctcagcccctgctaaccaccgttctactctctaattctataaatcaacattttgattccacatataagtgagatcatgtgatatttgtcctgttcctggcttatttcacttaatataaatgtcctgtaaattc

SEQ ID NO: 735635 - DNA, 962 bp, Homo sapiens
gcctggctaatttctttatttttatttttttgtagagatggggtcttgctatattgcccagggtgtcctcaaactcctggcctcaagcaattttcccgcctcagcctcccaaaatgctggatgacagctgcaagccaccacaagcaactctgtcataatgcagtctttataaccagctgagcacaatctctactctcaaaatagggctctgaagtctaggaacaagtcctcagctcctgaaatgacagaggaggaagtgagtgaagtgaatgaatgaaggacacagtcaatattgagaataatcacagtgattgcaactgtaaaccctccctgacgcggccttgctctgaatgctactctgttggtctttcaggatggtatcagcactcccagcagacagagtggctcagggctcacaccaggtccctcagcccacacccatcagacttggggttcaaactcagatctgtctgttttcaagacagagcccaaccagcctgcctgaaatcagccagtgaagacttaattgagggattgctaggagacagatggtctcactgggtagatcataatcaggcaatgccagagggaggatccccactggccaccccattcctactgtgtctgaggacacatggacgaagcctcagctcagggcttcgtgttagggtcctggatttggggtgggggggcaggatgtgccttgtcggggctccctgctcaccacgccatggctcagccttgtcgctgctggtgggccgcctctgctccttttctcttcactccctctcttcttccagtgatgctttgttcttttccctttgacgtttccagaagatgcagatgcctccagctattacgagtcccatggcaacaaggatcagaggcagagctgctttccatgccgtgaactgggagcttctggagaaggtagctggagaagattcccagaagccaggaat

SEQ ID NO: 735636 - DNA, 4944 bp, Homo sapiens
ggccgggtgtagtggctcacgcctgtaatcccagcactttgggaggcagaggcgggtggattacgagtcaggagttcgagccacctgccaacatggtgaaaccccgtctgtactaaaataccaaaattagccggcgtcgtggcaggcgcctgcaataccggctactcggggggctgaggcaggagaatcgcttgaacccgggacgcggaggttgcagtgagccgagatcgcgccactgcactcaagcctgcctggcaacagagcgaggctgtctcaaaaaagaaagaaaagcaaagcaaagctaacaaatgctcttctgtcatgcatcatcacagaatcaatgagagctccccccagccaggagacagcggacaaccagggtagcttcccagggggccagagggaggctgcgcgagaagaggctcagcgggatgggtccacgcagggagatcccacgcagggtgggcgtatacgagtgtccacgtccggagggccgttcaagggcgggtccctgaaggaagggtgcacgcagggcacgtccacgcgggcaggcccgtgcacgcagggcgtgcccatgcagggcgggtccgtgcaggatgagagcagcggaggaggcccacgcaggccatttcccgccccgtccccagcccacgcgggcgagctaccgcgggggtacgcgcagctcagatcctagcagcttacaaaaacaaccttttaaaaatggaaccttcaagtaaaaataaaactttgtttccctctttcgcaggagttactgaagtaggaagggacagcccagtaagatttcaggatacgacttgggccggtccgcaggcagtagagtgaagcgcgcagctgccaggacttgcgcggtgacgtgcgccgctgccaggaccttgcaggtggagagcatagttgccaaaatcaaggcggaggagcgcaccgccgctaggatccaggcggagaagcccaccgcggccaggacctaaggatgcagtacactgctgccaggatcttgtctgtggagcgcagcgcggccaggacctccggctgcagcacaccgctgccaggatcttatcggcagagcgctccgcggtccggaccccgccccgtgcgcgtccccgaccccgccccgtgcgcgtccccggcgttggcgtcttcgtcctgttgctggtctccgtccggtcgccggccgtctaggtctccggccctccccagccgctcctgcgcccttgccggccccgccgcccgcagccctggcgctccctgcgggccccgccgaggccgcctgcgccctgtgccagcgcgcgccccgggaaccggtgcgcgccgactgcggccaccgcttctgtcgggcgtgcgtggtgcgcttctgggccgaggaggacgggcccttcccgtgccccgagtgcgccgacgactgctggcagcgcgccgtggagcccggcaggcccccgctcagccgccgccttctggcgctcgaggaggcggccgcggcgcccgcgcgcgacggcccggccagcgaggccgcgctgcagctgctgtgccgcgccgacgccggcccgctctgcgccgcctgccgtatggctgcgggccccgagccgcccgagtgggaaccgcgctggaggaaggcgctgcgcggcaaggagaacaaggggtctgtggaaatcatgagaaaggacttgaatgacgcccgggacctgcatggccaggcagagtcagcagctgcagtgtggaagggacacgtgatggaccgtaggaagaaggcactgaccgactacaagaagctgcgggccttctttgtggaggaggaggagcatttcctgcaggaggctgagaaggaggaggggctccctgaggacgagctggctgaccccactgagcggttcaggtcactgctgcaggcggtctcggagctggagaagaagcatcgcaacctgggcctcagcatgctgctgcaggtgcgggagccccgctgggtctgcccaccatcgggccagggtggacgcaggcagcagcgagccattgggggaccattgcccgaagtcaaggcttaaaagcccagcctgactcccactgccgtggccttgcagggctgaatttcgggaatgggtgggtggtcagggaaggtgatgggaaggggttttaagttgaggagggtctgaggtgtccctgaccttcacaaaggagggcacttggcatcccgagtgcccgagcatggaaggctcctgcctcgccctggggtcctgaaggcagaagcagccaagaaacccaacctcagggcttttcttctgcctctgcccagggcctggcctgaaccccagaccctgcagcaacccagatggccctgaacggttcagttgcccgtgccagccataggtgacaaggctttggccctggggagacggaagtctgggccaggccctgggtttgttgtgctcaggacagtacctcatgcgctgtctcatgtgcgctctctctttcgctctctccttttgcctctgtctctgactctgtgtgtctctttctctttttgtctctctgtctttccctctcccctcccatgcagtgatggcgccaacccgtggcagtcccagagctggaggcaggaggatggatcctcatctccatgggaagtgtcagcgtgtggctgccagggaagcgtggcaggcgcctggccttgggtccatctacatagttgcgtgtttcaacaatgtccatttatccttcaccccgaggcgtgttttgggggctgcaaacacctcccggtagaggctggacctgaggacccttcccacctgtgcccgtcccttcctgaagtcctagccacagcccatcctccatgagtcccggcagctctgggtcatgcccttccctggtcacccatctgcccctcacctcgtcatccagggacccagaccctgcaccttccatgtgggcccacagatccttggcaggtacctgaggtgcaccattgagtgtcggatttggggttagcatccagaaagaagaatgcgcatgacgctctgtgaaggctggaactcaggtcttcaggggagagaaaggaagactggattgcaccttgatgcctcctgaggaggcggcccccctcttgaggtgggcgtgggcccggcccagccttatccaagtcgctctgtccacctcccccttcctggcccccaccccactcctgtgcctcccaggagccctccctgtgctccacctgcctccgcagaaggaagcctctttctctgtttccctgggtgagggggctggcaggtggctaaccccatttagcatctccaggccctgccatggtgtctcatcttgctgttatctctagctctttccctcctcccatttcctttagtagttgaattttgcaaagcttgtagcagtagctcagttgcctgcagcatccttgtgtgtagataaattagtcgacagaaactcagcactggggacaggattgcaaagtcggggacatagatgcagacagttgttgagatttggggatagccgggcttgtgagcggtgcccatttccagatgaagcctttcagcccttctgagtccccggcccttggtgcgatgtctgtgagtttgacctgcccagcgtgtgggctggctcaatgctgaataaagtgggtttgtgtcagctcgtttgcttcgtctccgtgtgtccacctggcctcttccccctgccctggccaccctccagtgtcaaaggaaacttcctcgtgacacgtgctaaagcatggtgaggaggactttgattgggaccattgagatgggtgtgggaccctttccttggggcctggggggagatggggctccaccccgacgtagcagggcaggggttggaggagcgaggagcagtatagggtccatgggtgggaatgactgtgaggagacatcagggctgagggggctctggctaaacccacctcacagagtccttgctgcaggcaggcagggcgatcagacattggctgcaaacggtcagagaggaacccagtcaggtaccattgagggtggtcagatattatggttaaccaaattagggttcttgctaaaactggatttcataagaaagggcaaagagggccctaggagaagattccagagcctggccagagtttggccaagtagagaatctttgtcagcacgccaacaacatcccgaccctgagacctccagtttgtctttctcactgtctccgcctgctgcagtctgctgtcatccctgagcatccctgcccctgccctgcacacctgtgatgcttgcccggacaggtcctgatggcagagtctcccacaacatcagtgtctccacatcaccaggtccgacagtggcttcaccatcctcacctaacctagctgaccagcaacatcccaccctgtcaatcacaacctctttctatttaagaaaattatatatttatggggcacagtgtgatgttttgatatctatgtacattgtggagtgacagattaatgtatccatctcatgttttttttggtggtgagaatatttgaaatctacactcagcaatttcaaatacagtcatccctctgtgcctaagggggattggttccaggaccccctcatggataccaaaatctgcagatactcaagtaccctgcagtcagccctccctctgcacatatgtgggacagtcagatacagagggccaactgcgtacagtacacggttatcagctgaagtcaccatgctgtgcaatagaccttgagtttattcttgtatagcagggactctgtaccctctgactagaatttccccaaatcctcttgtctcagcccctgctaaccaccgttctactctctaattctataaatcaacattttgattccacatataagtgagatcatgtgatatttgtcctgttcctggcttatttcacttaatataaatgtcctgtaaattc

SEQ ID NO: 735637 - DNA, 4336 bp, Homo sapiens
ggccgggtgtagtggctcacgcctgtaatcccagcactttgggaggcagaggcgggtggattacgagtcaggagttcgagccacctgccaacatggtgaaaccccgtctgtactaaaataccaaaattagccggcgtcgtggcaggcgcctgcaataccggctactcggggggctgaggcaggagaatcgcttgaacccgggacgcggaggttgcagtgagccgagatcgcgccactgcactcaagcctgcctggcaacagagcgaggctgtctcaaaaaagaaagaaaagcaaagcaaagctaacaaatgctcttctgtcatgcatcatcacagaatcaatgagagctccccccagccaggagacagcggacaaccagggtagcttcccagggggccagagggaggctgcgcgagaagaggctcagcgggatgggtccacgcagggagatcccacgcagggtgggcgtatacgagtgtccacgtccggagggccgttcaagggcgggtccctgaaggaagggtgcacgcagggcacgtccacgcgggcaggcccgtgcacgcagggcgtgcccatgcagggcgggtccgtgcaggatgagagcagcggaggaggcccacgcaggccatttcccgccccgtccccagcccacgcgggcgagctaccgcgggggtacgcgcagctcagatcctagcagcttacaaaaacaaccttttaaaaatggaaccttcaagtaaaaataaaactttgtttccctctttcgcaggagttactgaagtaggaagggacagcccagtaagatttcaggatacgacttgggccggtccgcaggcagtagagtgaagcgcgcagctgccaggacttgcgcggtgacgtgcgccgctgccaggaccttgcaggtggagagcatagttgccaaaatcaaggcggaggagcgcaccgccgctaggatccaggcggagaagcccaccgcggccaggacctaaggatgcagtacactgctgccaggatcttgtctgtggagcgcagcgcggccaggacctccggctgcagcacaccgctgccaggatcttatcggcagagcgctccgcggtccggaccccgccccgtgcgcgtccccgaccccgccccgtgcgcgtccccggcgttggcgtcttcgtcctgttgctggtctccgtccggtcgccggccgtctaggtctccggccctccccagccgctcctgcgcccttgccggccccgccgcccgcagccctggcgctccctgcgggccccgccgaggccgcctgcgccctgtgccagcgcgcgccccgggaaccggtgcgcgccgactgcggccaccgcttctgtcgggcgtgcgtggtgcgcttctgggccgaggaggacgggcccttcccgtgccccgagtgcgccgacgactgctggcagcgcgccgtggagcccggcaggcccccgctcagccgccgccttctggcgctcgaggaggcggccgcggcgcccgcgcgcgacggcccggccagcgaggccgcgctgcagctgctgtgccgcgccgacgccggcccgctctgcgccgcctgccgtatggctgcgggccccgagccgcccgagtgggaaccgcgctggaggaaggcgctgcgcggcaaggagaacaaggggtctgtggaaatcatgagaaaggacttgaatgacgcccgggacctgcatggccaggcagagtcagcagctgcagtgtggaagggacacgtgatggaccgtaggaagaaggcactgaccgactacaagaagctgcgggccttctttgtggaggaggaggagcatttcctgcaggaggctgagaaggaggaggggctccctgaggacgagctggctgaccccactgagcggttcaggtcactgctgcaggcggtctcggagctggagaagaagcatcgcaacctgggcctcagcatgctgctgcagtgatggcgccaacccgtggcagtcccagagctggaggcaggaggatggatcctcatctccatgggaagtgtcagcgtgtggctgccagggaagcgtggcaggcgcctggccttgggtccatctacatagttgcgtgtttcaacaatgtccatttatccttcaccccgaggcgtgttttgggggctgcaaacacctcccggtagaggctggacctgaggacccttcccacctgtgcccgtcccttcctgaagtcctagccacagcccatcctccatgagtcccggcagctctgggtcatgcccttccctggtcacccatctgcccctcacctcgtcatccagggacccagaccctgcaccttccatgtgggcccacagatccttggcaggtacctgaggtgcaccattgagtgtcggatttggggttagcatccagaaagaagaatgcgcatgacgctctgtgaaggctggaactcaggtcttcaggggagagaaaggaagactggattgcaccttgatgcctcctgaggaggcggcccccctcttgaggtgggcgtgggcccggcccagccttatccaagtcgctctgtccacctcccccttcctggcccccaccccactcctgtgcctcccaggagccctccctgtgctccacctgcctccgcagaaggaagcctctttctctgtttccctgggtgagggggctggcaggtggctaaccccatttagcatctccaggccctgccatggtgtctcatcttgctgttatctctagctctttccctcctcccatttcctttagtagttgaattttgcaaagcttgtagcagtagctcagttgcctgcagcatccttgtgtgtagataaattagtcgacagaaactcagcactggggacaggattgcaaagtcggggacatagatgcagacagttgttgagatttggggatagccgggcttgtgagcggtgcccatttccagatgaagcctttcagcccttctgagtccccggcccttggtgcgatgtctgtgagtttgacctgcccagcgtgtgggctggctcaatgctgaataaagtgggtttgtgtcagctcgtttgcttcgtctccgtgtgtccacctggcctcttccccctgccctggccaccctccagtgtcaaaggaaacttcctcgtgacacgtgctaaagcatggtgaggaggactttgattgggaccattgagatgggtgtgggaccctttccttggggcctggggggagatggggctccaccccgacgtagcagggcaggggttggaggagcgaggagcagtatagggtccatgggtgggaatgactgtgaggagacatcagggctgagggggctctggctaaacccacctcacagagtccttgctgcaggcaggcagggcgatcagacattggctgcaaacggtcagagaggaacccagtcaggtaccattgagggtggtcagatattatggttaaccaaattagggttcttgctaaaactggatttcataagaaagggcaaagagggccctaggagaagattccagagcctggccagagtttggccaagtagagaatctttgtcagcacgccaacaacatcccgaccctgagacctccagtttgtctttctcactgtctccgcctgctgcagtctgctgtcatccctgagcatccctgcccctgccctgcacacctgtgatgcttgcccggacaggtcctgatggcagagtctcccacaacatcagtgtctccacatcaccaggtccgacagtggcttcaccatcctcacctaacctagctgaccagcaacatcccaccctgtcaatcacaacctctttctatttaagaaaattatatatttatggggcacagtgtgatgttttgatatctatgtacattgtggagtgacagattaatgtatccatctcatgttttttttggtggtgagaatatttgaaatctacactcagcaatttcaaatacagtcatccctctgtgcctaagggggattggttccaggaccccctcatggataccaaaatctgcagatactcaagtaccctgcagtcagccctccctctgcacatatgtgggacagtcagatacagagggccaactgcgtacagtacacggttatcagctgaagtcaccatgctgtgcaatagaccttgagtttattcttgtatagcagggactctgtaccctctgactagaatttccccaaatcctcttgtctcagcccctgctaaccaccgttctactctctaattctataaatcaacattttgattccacatataagtgagatcatgtgatatttgtcctgttcctggcttatttcacttaatataaatgtcctgtaaattc

SEQ ID NO: 735638 - DNA, 2897 bp, Homo sapiens
ggccgggtgtagtggctcacgcctgtaatcccagcactttgggaggcagaggcgggtggattacgagtcaggagttcgagccacctgccaacatggtgaaaccccgtctgtactaaaataccaaaattagccggcgtcgtggcaggcgcctgcaataccggctactcggggggctgaggcaggagaatcgcttgaacccgggacgcggaggttgcagtgagccgagatcgcgccactgcactcaagcctgcctggcaacagagcgaggctgtctcaaaaaagaaagaaaagcaaagcaaagctaacaaatgctcttctgtcatgcatcatcacagaatcaatgagagctccccccagccaggagacagcggacaaccagggtagcttcccagggggccagagggaggctgcgcgagaagaggctcagcgggatgggtccacgcagggagatcccacgcagggtgggcgtatacgagtgtccacgtccggagggccgttcaagggcgggtccctgaaggaagggtgcacgcagggcacgtccacgcgggcaggcccgtgcacgcagggcgtgcccatgcagggcgggtccgtgcaggatgagagcagcggaggaggcccacgcaggccatttcccgccccgtccccagcccacgcgggcgagctaccgcgggggtacgcgcagctcagatcctagcagcttacaaaaacaaccttttaaaaatggaaccttcaagtaaaaataaaactttgtttccctctttcgcaggagttactgaagtaggaagggacagcccagtaagatttcaggatacgacttgggccggtccgcaggcagtagagtgaagcgcgcagctgccaggacttgcgcggtgacgtgcgccgctgccaggaccttgcaggtggagagcatagttgccaaaatcaaggcggaggagcgcaccgccgctaggatccaggcggagaagcccaccgcggccaggacctaaggatgcagtacactgctgccaggatcttgtctgtggagcgcagcgcggccaggacctccggctgcagcacaccgctgccaggatcttatcggcagagcgctccgcggtccggaccccgccccgtgcgcgtccccgaccccgccccgtgcgcgtccccggcgttggcgtcttcgtcctgttgctggtctccgtccggtcgccggccgtctaggtctccggccctccccagccgctcctgcgcccttgccggccccgccgcccgcagccctggcgctccctgcgggccccgccgaggccgcctgcgccctgtgccagcgcgcgccccgggaaccggtgcgcgccgactgcggccaccgcttctgtcgggcgtgcgtggtgcgcttctgggccgaggaggacgggcccttcccgtgccccgagtgcgccgacgactgctggcagcgcgccgtggagcccggcaggcccccgctcagccgccgccttctggcgctcgaggaggcggccgcggcgcccgcgcgcgacggcccggccagcgaggccgcgctgcagctgctgtgccgcgccgacgccggcccgctctgcgccgcctgccgtatggctgcgggccccgagccgcccgagtgggaaccgcgctggaggaaggcgctgcgcggcaaggagaacaaggggtctgtggaaatcatgagaaaggacttgaatgacgcccgggacctgcatggccaggcagagtcagcagctgcagtgtggaagggacacgtgatggaccgtaggaagaaggcactgaccgactacaagaagctgcgggccttctttgtggaggaggaggagcatttcctgcaggaggctgagaaggaggaggggctccctgaggacgagctggctgaccccactgagcggttcaggtcactgctgcaggcggtctcggagctggagaagaagcatcgcaacctgggcctcagcatgctgctgcagtgatggcgccaacccgtggcagtcccagagctggaggcaggaggatggatcctcatctccatgggaagtgtcagcgtgtggctgccagggaagcgtggcaggcgcctggccttgggtccatctacatagttgcgtgtttcaacaatgtccatttatccttcaccccgaggcgtgttttgggggctgcaaacacctcccggtagaggctggacctgaggacccttcccacctgtgcccgtcccttcctgaagtcctagccacagcccatcctccatgagtcccggcagctctgggtcatgcccttccctggtcacccatctgcccctcacctcgtcatccagggacccagaccctgcaccttccatgtgggcccacagatccttggcaggtacctgaggtgcaccattgagtgtcggatttggggttagcatccagaaagaagaatgcgcatgacgctctgtgaaggctggaactcaggtcttcaggggagagaaaggaagactggattgcaccttgatgcctcctgaggaggcggcccccctcttgaggtgggcgtgggcccggcccagccttatccaagtcgctctgtccacctcccccttcctggcccccaccccactcctgtgcctcccaggagccctccctgtgctccacctgcctccgcagaaggaagcctctttctctgtttccctgggtgagggggctggcaggtggctaaccccatttagcatctccaggccctgccatggtgtctcatcttgctgttatctctagctctttccctcctcccatttcctttagtagttgaattttgcaaagcttgtagcagtagctcagttgcctgcagcatccttgtgtgtagataaattagtcgacagaaactcagcactgggggaccagaactgggatcctctagaacgcgcagacagactgcgtatt

SEQ ID NO: 735639 - DNA, 3130 bp, Homo sapiens
ggccgggtgtagtggctcacgcctgtaatcccagcactttgggaggcagaggcgggtggattacgagtcaggagttcgagccacctgccaacatggtgaaaccccgtctgtactaaaataccaaaattagccggcgtcgtggcaggcgcctgcaataccggctactcggggggctgaggcaggagaatcgcttgaacccgggacgcggaggttgcagtgagccgagatcgcgccactgcactcaagcctgcctggcaacagagcgaggctgtctcaaaaaagaaagaaaagcaaagcaaagctaacaaatgctcttctgtcatgcatcatcacagaatcaatgagagctccccccagccaggagacagcggacaaccagggtagcttcccagggggccagagggaggctgcgcgagaagaggctcagcgggatgggtccacgcagggagatcccacgcagggtgggcgtatacgagtgtccacgtccggagggccgttcaagggcgggtccctgaaggaagggtgcacgcagggcacgtccacgcgggcaggcccgtgcacgcagggcgtgcccatgcagggcgggtccgtgcaggatgagagcagcggaggaggcccacgcaggccatttcccgccccgtccccagcccacgcgggcgagctaccgcgggggtacgcgcagctcagatcctagcagcttacaaaaacaaccttttaaaaatggaaccttcaagtaaaaataaaactttgtttccctctttcgcaggagttactgaagtaggaagggacagcccagtaagatttcaggatacgacttgggccggtccgcaggcagtagagtgaagcgcgcagctgccaggacttgcgcggtgacgtgcgccgctgccaggaccttgcaggtggagagcatagttgccaaaatcaaggcggaggagcgcaccgccgctaggatccaggcggagaagcccaccgcggccaggacctaaggatgcagtacactgctgccaggatcttgtctgtggagcgcagcgcggccaggacctccggctgcagcacaccgctgccaggatcttatcggcagagcgctccgcggtccggaccccgccccgtgcgcgtccccgaccccgccccgtgcgcgtccccggcgttggcgtcttcgtcctgttgctggtctccgtccggtcgccggccgtctaggtctccggccctccccagccgctcctgcgcccttgccggccccgccgcccgcagccctggcgctccctgcgggccccgccgaggccgcctgcgccctgtgccagcgcgcgccccgggaaccggtgcgcgccgactgcggccaccgcttctgtcgggcgtgcgtggtgcgcttctgggccgaggaggacgggcccttcccgtgccccgagtgcgccgacgactgctggcagcgcgccgtggagcccggcaggcccccgctcagccgccgccttctggcgctcgaggaggcggccgcggcgcccgcgcgcgacggcccggccagcgaggccgcgctgcagctgctgtgccgcgccgacgccggcccgctctgcgccgcctgccgtatggctgcgggccccgagccgcccgagtgggaaccgcgctggaggaaggcgctgcgcggcaaggagaacaaggggtctgtggaaatcatgagaaaggacttgaatgacgcccgggacctgcatggccaggcagagtcagcagctgcagtgtggaagggacacgtgatggaccgtaggaagaaggcactgaccgactacaagaagctgcgggccttctttgtggaggaggaggagcatttcctgcaggaggctgagaaggaggaggggctccctgaggacgagctggctgaccccactgagcggttcaggtcactgctgcaggcggtctcggagctggagaagaagcatcgcaacctgggcctcagcatgctgctgcagtgatggcgccaacccgtggcagtcccagagctggaggcaggaggatggatcctcatctccatgggaagtgtcagcgtgtggctgccagggaagcgtggcaggcgcctggccttgggtccatctacatagttgcgtgtttcaacaatgtccatttatccttcaccccgaggcgtgttttgggggctgcaaacacctcccggtagaggctggacctgaggacccttcccacctgtgcccgtcccttcctgaagtcctagccacagcccatcctccatgagtcccggcagctctgggtcatgcccttccctggtcacccatctgcccctcacctcgtcatccagggacccagaccctgcaccttccatgtgggcccacagatccttggcaggtacctgaggtgcaccattgagtgtcggatttggggttagcatccagaaagaagaatgcgcatgacgctctgtgaaggctggaactcaggtcttcaggggagagaaaggaagactggattgcaccttgatgcctcctgaggaggcggcccccctcttgaggtgggcgtgggcccggcccagccttatccaagtcgctctgtccacctcccccttcctggcccccaccccactcctgtgcctcccaggagccctccctgtgctccacctgcctccgcagaaggaagcctctttctctgtttccctgggtgagggggctggcaggtggctaaccccatttagcatctccaggccctgccatggtgtctcatcttgctgttatctctagctctttccctcctcccatttcctttagtagttgaattttgcaaagcttgtagcagtagctcagttgcctgcagcatccttgtgtgtagaaatacaccaaaatgccagtatgcaaaggacacttggggcagcctctcaacattttctgcctgactgatatgcagctgatttgtgggatctgtgctactcgtggggagcacaccaaacatgtcttctgttctattgaagatgcctatgctcaggaaagggatgcctttgagtccctcttccagagctttgagacctggcgtcggggagatgctctttctcgcttggataccttggaaactagtaagaggaaatccctacagttactgataaagacttcagatagtgtagcggatgaccaggttactctag

SEQ ID NO: 735640 - DNA, 2836 bp, Homo sapiens
ggccgggtgtagtggctcacgcctgtaatcccagcactttgggaggcagaggcgggtggattacgagtcaggagttcgagccacctgccaacatggtgaaaccccgtctgtactaaaataccaaaattagccggcgtcgtggcaggcgcctgcaataccggctactcggggggctgaggcaggagaatcgcttgaacccgggacgcggaggttgcagtgagccgagatcgcgccactgcactcaagcctgcctggcaacagagcgaggctgtctcaaaaaagaaagaaaagcaaagcaaagctaacaaatgctcttctgtcatgcatcatcacagaatcaatgagagctccccccagccaggagacagcggacaaccagggtagcttcccagggggccagagggaggctgcgcgagaagaggctcagcgggatgggtccacgcagggagatcccacgcagggtgggcgtatacgagtgtccacgtccggagggccgttcaagggcgggtccctgaaggaagggtgcacgcagggcacgtccacgcgggcaggcccgtgcacgcagggcgtgcccatgcagggcgggtccgtgcaggatgagagcagcggaggaggcccacgcaggccatttcccgccccgtccccagcccacgcgggcgagctaccgcgggggtacgcgcagctcagatcctagcagcttacaaaaacaaccttttaaaaatggaaccttcaagtaaaaataaaactttgtttccctctttcgcaggagttactgaagtaggaagggacagcccagtaagatttcaggatacgacttgggccggtccgcaggcagtagagtgaagcgcgcagctgccaggacttgcgcggtgacgtgcgccgctgccaggaccttgcaggtggagagcatagttgccaaaatcaaggcggaggagcgcaccgccgctaggatccaggcggagaagcccaccgcggccaggacctaaggatgcagtacactgctgccaggatcttgtctgtggagcgcagcgcggccaggacctccggctgcagcacaccgctgccaggatcttatcggcagagcgctccgcggtccggaccccgccccgtgcgcgtccccgaccccgccccgtgcgcgtccccggcgttggcgtcttcgtcctgttgctggtctccgtccggtcgccggccgtctaggtctccggccctccccagccgctcctgcgcccttgccggccccgccgcccgcagccctggcgctccctgcgggccccgccgaggccgcctgcgccctgtgccagcgcgcgccccgggaaccggtgcgcgccgactgcggccaccgcttctgtcgggcgtgcgtggtgcgcttctgggccgaggaggacgggcccttcccgtgccccgagtgcgccgacgactgctggcagcgcgccgtggagcccggcaggcccccgctcagccgccgccttctggcgctcgaggaggcggccgcggcgcccgcgcgcgacggcccggccagcgaggccgcgctgcagctgctgtgccgcgccgacgccggcccgctctgcgccgcctgccgtatggctgcgggccccgagccgcccgagtgggaaccgcgctggaggaaggcgctgcgcggcaaggagaacaaggggtctgtggaaatcatgagaaaggacttgaatgacgcccgggacctgcatggccaggcagagtcagcagctgcagtgtggaagggacacgtgatggaccgtaggaagaaggcactgaccgactacaagaagctgcgggccttctttgtggaggaggaggagcatttcctgcaggaggctgagaaggaggaggggctccctgaggacgagctggctgaccccactgagcggttcaggtcactgctgcaggcggtctcggagctggagaagaagcatcgcaacctgggcctcagcatgctgctgcagtgatggcgccaacccgtggcagtcccagagctggaggcaggaggatggatcctcatctccatgggaagtgtcagcgtgtggctgccagggaagcgtggcaggcgcctggccttgggtccatctacatagttgcgtgtttcaacaatgtccatttatccttcaccccgaggcgtgttttgggggctgcaaacacctcccggtagaggctggacctgaggacccttcccacctgtgcccgtcccttcctgaagtcctagccacagcccatcctccatgagtcccggcagctctgggtcatgcccttccctggtcacccatctgcccctcacctcgtcatccagggacccagaccctgcaccttccatgtgggcccacagatccttggcaggtacctgaggtgcaccattgagtgtcggatttggggttagcatccagaaagaagaatgcgcatgacgctctgtgaaggctggaactcaggtcttcaggggagagaaaggaagactggattgcaccttgatgcctcctgaggaggcggcccccctcttgaggtgggcgtgggcccggcccagccttatccaagtcgctctgtccacctcccccttcctggcccccaccccagcatccaatccacacccagcagacccttcggcatgccgccctctaccaggaagccagaggcctaggagctcgccatccatatttatttgaaaaggtcaaaaggagcatctatgagacaagggaggggtgcaggctgaagcagcgcctcaacagccagggacatgtaggcaacacgagcaggcacagcgcggccaccactgtccacacgctcacacaagccaggcccgcagggccttcggagagctagcaggttacattca

SEQ ID NO: 735641 - DNA, 3115 bp, Homo sapiens
ggccgggtgtagtggctcacgcctgtaatcccagcactttgggaggcagaggcgggtggattacgagtcaggagttcgagccacctgccaacatggtgaaaccccgtctgtactaaaataccaaaattagccggcgtcgtggcaggcgcctgcaataccggctactcggggggctgaggcaggagaatcgcttgaacccgggacgcggaggttgcagtgagccgagatcgcgccactgcactcaagcctgcctggcaacagagcgaggctgtctcaaaaaagaaagaaaagcaaagcaaagctaacaaatgctcttctgtcatgcatcatcacagaatcaatgagagctccccccagccaggagacagcggacaaccagggtagcttcccagggggccagagggaggctgcgcgagaagaggctcagcgggatgggtccacgcagggagatcccacgcagggtgggcgtatacgagtgtccacgtccggagggccgttcaagggcgggtccctgaaggaagggtgcacgcagggcacgtccacgcgggcaggcccgtgcacgcagggcgtgcccatgcagggcgggtccgtgcaggatgagagcagcggaggaggcccacgcaggccatttcccgccccgtccccagcccacgcgggcgagctaccgcgggggtacgcgcagctcagatcctagcagcttacaaaaacaaccttttaaaaatggaaccttcaagtaaaaataaaactttgtttccctctttcgcaggagttactgaagtaggaagggacagcccagtaagatttcaggatacgacttgggccggtccgcaggcagtagagtgaagcgcgcagctgccaggacttgcgcggtgacgtgcgccgctgccaggaccttgcaggtggagagcatagttgccaaaatcaaggcggaggagcgcaccgccgctaggatccaggcggagaagcccaccgcggccaggacctaaggatgcagtacactgctgccaggatcttgtctgtggagcgcagcgcggccaggacctccggctgcagcacaccgctgccaggatcttatcggcagagcgctccgcggtccggaccccgccccgtgcgcgtccccgaccccgccccgtgcgcgtccccggcgttggcgtcttcgtcctgttgctggtctccgtccggtcgccggccgtctaggtctccggccctccccagccgctcctgcgcccttgccggccccgccgcccgcagccctggcgctccctgcgggccccgccgaggccgcctgcgccctgtgccagcgcgcgccccgggaaccggtgcgcgccgactgcggccaccgcttctgtcgggcgtgcgtggtgcgcttctgggccgaggaggacgggcccttcccgtgccccgagtgcgccgacgactgctggcagcgcgccgtggagcccggcaggcccccgctcagccgccgccttctggcgctcgaggaggcggccgcggcgcccgcgcgcgacggcccggccagcgaggccgcgctgcagctgctgtgccgcgccgacgccggcccgctctgcgccgcctgccgtatggctgcgggccccgagccgcccgagtgggaaccgcgctggaggaaggcgctgcgcggcaaggagaacaaggggtctgtggaaatcatgagaaaggacttgaatgacgcccgggacctgcatggccaggcagagtcagcagctgcagtgtggaagggacacgtgatggaccgtaggaagaaggcactgaccgactacaagaagctgcgggccttctttgtggaggaggaggagcatttcctgcaggaggctgagaaggaggaggggctccctgaggacgagctggctgaccccactgagcggttcaggtcactgctgcaggcggtctcggagctggagaagaagcatcgcaacctgggcctcagcatgctgctgcagtgatggcgccaacccgtggcagtcccagagctggaggcaggaggatggatcctcatctccatgggaagtgtcagcgtgtggctgccagggaagcgtggcaggcgcctggccttgggtccatctacatagttgcgtgtttcaacaatgtccatttatccttcaccccgaggcgtgttttgggggctgcaaacacctcccggtagaggctggacctgaggacccttcccacctgtgcccgtcccttcctgaagtcctagccacagcccatcctccatgagtcccggcagctctgggtcatgcccttccctggtcacccatctgcccctcacctcgtcatccagggacccagaccctgcaccttccatgtgggcccacagatccttggcaggtacctgaggtgcaccattgagtgtcggatttggggttagcatccagaaagaagaatgcgcatgacgctctgtgaaggctggaactcaggtcttcaggggagagaaaggaagactggattgcaccttgatgcctcctgaggaggcggcccccctcttgaggtgggcgtgggcccggcccagccttatccaagtcgctctgtccacctcacgagggcgtgggcacacaccaaggtagcgtgtgaccggcgaggagcagtcactgtgctccacctggcagagacagagggaagccatttaacacatgagtccccggggcatgaggcggctgggagggggctaaacacacatgaggatatacaggagctgaacagggtggcagataagggctgggagtcactagaatagagaacgtgcaagcacaaagagcaccatcagggacgtgaaatctggccaagctggtagccaggagactccgctgctgagcatcgtggctgtagcatcgagtcgtggaaggaactcagacagggacagactgcaaggttggggacaatatcgcgaaagacgtgaactgggggtagggcatggcgcgtgcaattccacggaccatcaggcataagaccgggcatggcgacgcacagggccaactagcggacgcgacagggtggcaaacaacagaacaaacaacaacagaaaagaacaaggagacaagaacgaacacaaagcgaccagagaaagaggagcaagccaccggccgcccctttcccccca

SEQ ID NO: 735642 - DNA, 2577 bp, Homo sapiens
ggccgggtgtagtggctcacgcctgtaatcccagcactttgggaggcagaggcgggtggattacgagtcaggagttcgagccacctgccaacatggtgaaaccccgtctgtactaaaataccaaaattagccggcgtcgtggcaggcgcctgcaataccggctactcggggggctgaggcaggagaatcgcttgaacccgggacgcggaggttgcagtgagccgagatcgcgccactgcactcaagcctgcctggcaacagagcgaggctgtctcaaaaaagaaagaaaagcaaagcaaagctaacaaatgctcttctgtcatgcatcatcacagaatcaatgagagctccccccagccaggagacagcggacaaccagggtagcttcccagggggccagagggaggctgcgcgagaagaggctcagcgggatgggtccacgcagggagatcccacgcagggtgggcgtatacgagtgtccacgtccggagggccgttcaagggcgggtccctgaaggaagggtgcacgcagggcacgtccacgcgggcaggcccgtgcacgcagggcgtgcccatgcagggcgggtccgtgcaggatgagagcagcggaggaggcccacgcaggccatttcccgccccgtccccagcccacgcgggcgagctaccgcgggggtacgcgcagctcagatcctagcagcttacaaaaacaaccttttaaaaatggaaccttcaagtaaaaataaaactttgtttccctctttcgcaggagttactgaagtaggaagggacagcccagtaagatttcaggatacgacttgggccggtccgcaggcagtagagtgaagcgcgcagctgccaggacttgcgcggtgacgtgcgccgctgccaggaccttgcaggtggagagcatagttgccaaaatcaaggcggaggagcgcaccgccgctaggatccaggcggagaagcccaccgcggccaggacctaaggatgcagtacactgctgccaggatcttgtctgtggagcgcagcgcggccaggacctccggctgcagcacaccgctgccaggatcttatcggcagagcgctccgcggtccggaccccgccccgtgcgcgtccccgaccccgccccgtgcgcgtccccggcgttggcgtcttcgtcctgttgctggtctccgtccggtcgccggccgtctaggtctccggccctccccagccgctcctgcgcccttgccggccccgccgcccgcagccctggcgctccctgcgggccccgccgaggccgcctgcgccctgtgccagcgcgcgccccgggaaccggtgcgcgccgactgcggccaccgcttctgtcgggcgtgcgtggtgcgcttctgggccgaggaggacgggcccttcccgtgccccgagtgcgccgacgactgctggcagcgcgccgtggagcccggcaggcccccgctcagccgccgccttctggcgctcgaggaggcggccgcggcgcccgcgcgcgacggcccggccagcgaggccgcgctgcagctgctgtgccgcgccgacgccggcccgctctgcgccgcctgccgtatggctgcgggccccgagccgcccgagtgggaaccgcgctggaggaaggcgctgcgcggcaaggagaacaaggggtctgtggaaatcatgagaaaggacttgaatgacgcccgggacctgcatggccaggcagagtcagcagctgcagtgtggaagggacacgtgatggaccgtaggaagaaggcactgaccgactacaagaagctgcgggccttctttgtggaggaggaggagcatttcctgcaggaggctgagaaggaggaggggctccctgaggacgagctggctgaccccactgagcggttcaggtcactgctgcaggcggtctcggagctggagaagaagcatcgcaacctgggcctcagcatgctgctgcagtgatggcgccaacccgtggcagtcccagagctggaggcaggaggatggatcctcatctccatgggaagtgtcagcgtgtggctgccagggaagcgtggcaggcgcctggccttgggtccatctacatagttgcgtgtttcaacaatgtccatttatccttcaccccgaggcgtgttttgggggctgcaaacacctcccggtagaggctggacctgaggacccttcccacctgtgcccgtcccttcctgaagtcctagccacagcccatcctccatgagtcccggcagctctgggtcatgcccttccctggtcacccatctgcccctcacctcgtcatccagggacccagaccctgcaccttccatgtgggcccacagatccttggcaggtacctgaggtgcaccattgagtgtcggatttggggttagcatccagaaagaagaatgcgcatgacgctctgtgaaggctggaactcaggtcttcaggggagagaaaggaagactggattgcaccttgatgcctcctgaggaggcggcccccctcttgaggtgtgtaccccgccaccgtttcaatctcgcgtcgttttacaatccgcaaccgtatcactcccgctcgtaca

SEQ ID NO: 735643 - DNA, 4085 bp, Homo sapiens
ggccgggtgtagtggctcacgcctgtaatcccagcactttgggaggcagaggcgggtggattacgagtcaggagttcgagccacctgccaacatggtgaaaccccgtctgtactaaaataccaaaattagccggcgtcgtggcaggcgcctgcaataccggctactcggggggctgaggcaggagaatcgcttgaacccgggacgcggaggttgcagtgagccgagatcgcgccactgcactcaagcctgcctggcaacagagcgaggctgtctcaaaaaagaaagaaaagcaaagcaaagctaacaaatgctcttctgtcatgcatcatcacagaatcaatgagagctccccccagccaggagacagcggacaaccagggtagcttcccagggggccagagggaggctgcgcgagaagaggctcagcgggatgggtccacgcagggagatcccacgcagggtgggcgtatacgagtgtccacgtccggagggccgttcaagggcgggtccctgaaggaagggtgcacgcagggcacgtccacgcgggcaggcccgtgcacgcagggcgtgcccatgcagggcgggtccgtgcaggatgagagcagcggaggaggcccacgcaggccatttcccgccccgtccccagcccacgcgggcgagctaccgcgggggtacgcgcagctcagatcctagcagcttacaaaaacaaccttttaaaaatggaaccttcaagtaaaaataaaactttgtttccctctttcgcaggagttactgaagtaggaagggacagcccagtaagatttcaggatacgacttgggccggtccgcaggcagtagagtgaagcgcgcagctgccaggacttgcgcggtgacgtgcgccgctgccaggaccttgcaggtggagagcatagttgccaaaatcaaggcggaggagcgcaccgccgctaggatccaggcggagaagcccaccgcggccaggacctaaggatgcagtacactgctgccaggatcttgtctgtggagcgcagcgcggccaggacctccggctgcagcacaccgctgccaggatcttatcggcagagcgctccgcggtccggaccccgccccgtgcgcgtccccgaccccgccccgtgcgcgtccccggcgttggcgtcttcgtcctgttgctggtctccgtccggtcgccggccgtctaggtctccggccctccccagccgctcctgcgcccttgccggccccgccgcccgcagccctggcgctccctgcgggccccgccgaggccgcctgcgccctgtgccagcgcgcgccccgggaaccggtgcgcgccgactgcggccaccgcttctgtcgggcgtgcgtggtgcgcttctgggccgaggaggacgggcccttcccgtgccccgagtgcgccgacgactgctggcagcgcgccgtggagcccggcaggcccccgctcagccgccgccttctggcgctcgaggaggcggccgcggcgcccgcgcgcgacggcccggccagcgaggccgcgctgcagctgctgtgccgcgccgacgccggcccgctctgcgccgcctgccgtatggctgcgggccccgagccgcccgagtgggaaccgcgctggaggaaggcgctgcgcggcaaggagaacaaggggtctgtggaaatcatgagaaaggacttgaatgacgcccgggacctgcatggccaggcagagtcagcagctgcagtgtggaagggacacgtgatggaccgtaggaagaaggcactgaccgactacaagaagctgcgggccttctttgtggaggaggaggagcatttcctgcaggaggctgagaaggaggaggggctccctgaggacgagctggctgaccccactgagcggttcaggtcactgctgcaggcggtctcggagctggagaagaagcatcgcaacctgggcctcagcatgctgctgcagtgatggcgccaacccgtggcagtcccagagctggaggcaggaggatggatcctcatctccatgggaagtgtcagcgtgtggctgccagggaagcgtggcaggcgcctggccttgggtccatctacatagttgcgtgtttcaacaatgtccatttatccttcaccccgaggcgtgttttgggggctgcaaacacctcccggtagaggctggacctgaggacccttcccacctgtgcccgtcccttcctgaagtcctagccacagcccatcctcctgaggaggcggcccccctcttgaggtgggcgtgggcccggcccagccttatccaagtcgctctgtccacctcccccttcctggcccccaccccactcctgtgcctcccaggagccctccctgtgctccacctgcctccgcagaaggaagcctctttctctgtttccctgggtgagggggctggcaggtggctaaccccatttagcatctccaggccctgccatggtgtctcatcttgctgttatctctagctctttccctcctcccatttcctttagtagttgaattttgcaaagcttgtagcagtagctcagttgcctgcagcatccttgtgtgtagataaattagtcgacagaaactcagcactggggacaggattgcaaagtcggggacatagatgcagacagttgttgagatttggggatagccgggcttgtgagcggtgcccatttccagatgaagcctttcagcccttctgagtccccggcccttggtgcgatgtctgtgagtttgacctgcccagcgtgtgggctggctcaatgctgaataaagtgggtttgtgtcagctcgtttgcttcgtctccgtgtgtccacctggcctcttccccctgccctggccaccctccagtgtcaaaggaaacttcctcgtgacacgtgctaaagcatggtgaggaggactttgattgggaccattgagatgggtgtgggaccctttccttggggcctggggggagatggggctccaccccgacgtagcagggcaggggttggaggagcgaggagcagtatagggtccatgggtgggaatgactgtgaggagacatcagggctgagggggctctggctaaacccacctcacagagtccttgctgcaggcaggcagggcgatcagacattggctgcaaacggtcagagaggaacccagtcaggtaccattgagggtggtcagatattatggttaaccaaattagggttcttgctaaaactggatttcataagaaagggcaaagagggccctaggagaagattccagagcctggccagagtttggccaagtagagaatctttgtcagcacgccaacaacatcccgaccctgagacctccagtttgtctttctcactgtctccgcctgctgcagtctgctgtcatccctgagcatccctgcccctgccctgcacacctgtgatgcttgcccggacaggtcctgatggcagagtctcccacaacatcagtgtctccacatcaccaggtccgacagtggcttcaccatcctcacctaacctagctgaccagcaacatcccaccctgtcaatcacaacctctttctatttaagaaaattatatatttatggggcacagtgtgatgttttgatatctatgtacattgtggagtgacagattaatgtatccatctcatgttttttttggtggtgagaatatttgaaatctacactcagcaatttcaaatacagtcatccctctgtgcctaagggggattggttccaggaccccctcatggataccaaaatctgcagatactcaagtaccctgcagtcagccctccctctgcacatatgtgggacagtcagatacagagggccaactgcgtacagtacacggttatcagctgaagtcaccatgctgtgcaatagaccttgagtttattcttgtatagcagggactctgtaccctctgactagaatttccccaaatcctcttgtctcagcccctgctaaccaccgttctactctctaattctataaatcaacattttgattccacatataagtgagatcatgtgatatttgtcctgttcctggcttatttcacttaatataaatgtcctgtaaattc

SEQ ID NO: 735644 - DNA, 3904 bp, Homo sapiens
ggccgggtgtagtggctcacgcctgtaatcccagcactttgggaggcagaggcgggtggattacgagtcaggagttcgagccacctgccaacatggtgaaaccccgtctgtactaaaataccaaaattagccggcgtcgtggcaggcgcctgcaataccggctactcggggggctgaggcaggagaatcgcttgaacccgggacgcggaggttgcagtgagccgagatcgcgccactgcactcaagcctgcctggcaacagagcgaggctgtctcaaaaaagaaagaaaagcaaagcaaagctaacaaatgctcttctgtcatgcatcatcacagaatcaatgagagctccccccagccaggagacagcggacaaccagggtagcttcccagggggccagagggaggctgcgcgagaagaggctcagcgggatgggtccacgcagggagatcccacgcagggtgggcgtatacgagtgtccacgtccggagggccgttcaagggcgggtccctgaaggaagggtgcacgcagggcacgtccacgcgggcaggcccgtgcacgcagggcgtgcccatgcagggcgggtccgtgcaggatgagagcagcggaggaggcccacgcaggccatttcccgccccgtccccagcccacgcgggcgagctaccgcgggggtacgcgcagctcagatcctagcagcttacaaaaacaaccttttaaaaatggaaccttcaagtaaaaataaaactttgtttccctctttcgcaggagttactgaagtaggaagggacagcccagtaagatttcaggatacgacttgggccggtccgcaggcagtagagtgaagcgcgcagctgccaggacttgcgcggtgacgtgcgccgctgccaggaccttgcaggtggagagcatagttgccaaaatcaaggcggaggagcgcaccgccgctaggatccaggcggagaagcccaccgcggccaggacctaaggatgcagtacactgctgccaggatcttgtctgtggagcgcagcgcggccaggacctccggctgcagcacaccgctgccaggatcttatcggcagagcgctccgcggtccggaccccgccccgtgcgcgtccccgaccccgccccgtgcgcgtccccggcgttggcgtcttcgtcctgttgctggtctccgtccggtcgccggccgtctaggtctccggccctccccagccgctcctgcgcccttgccggccccgccgcccgcagccctggcgctccctgcgggccccgccgaggccgcctgcgccctgtgccagcgcgcgccccgggaaccggtgcgcgccgactgcggccaccgcttctgtcgggcgtgcgtggtgcgcttctgggccgaggaggacgggcccttcccgtgccccgagtgcgccgacgactgctggcagcgcgccgtggagcccggcaggcccccgctcagccgccgccttctggcgctcgaggaggcggccgcggcgcccgcgcgcgacggcccggccagcgaggccgcgctgcagctgctgtgccgcgccgacgccggcccgctctgcgccgcctgccgtatggctgcgggccccgagccgcccgagtgggaaccgcgctggaggaaggcgctgcgcggcaaggagaacaaggggtctgtggaaatcatgagaaaggacttgaatgacgcccgggacctgcatggccaggcagagtcagcagctgcagtgtggaagggacacgtgatggaccgtaggaagaaggcactgaccgactacaagaagctgcgggccttctttgtggaggaggaggagcatttcctgcaggaggctgagaaggaggaggggctccctgaggacgagctggctgaccccactgagcggttcaggtcactgctgcaggcggtctcggagctggagaagaagcatcgcaacctgggcctcagcatgctgctgcagtgatggcgccaacccgtggcagtcccagagctggaggcaggaggatggatcctcatctccatgggaagtgtcagcgtgtggctgccagggaagcgtggcaggcgcctggccttgggtccatctacatagttgcgtgtttcaacaatgtccatttatccttcaccccgaggcgtgttttgggggctgcaaacacctcccggtagaggctggactgtgctccacctgcctccgcagaaggaagcctctttctctgtttccctgggtgagggggctggcaggtggctaaccccatttagcatctccaggccctgccatggtgtctcatcttgctgttatctctagctctttccctcctcccatttcctttagtagttgaattttgcaaagcttgtagcagtagctcagttgcctgcagcatccttgtgtgtagataaattagtcgacagaaactcagcactggggacaggattgcaaagtcggggacatagatgcagacagttgttgagatttggggatagccgggcttgtgagcggtgcccatttccagatgaagcctttcagcccttctgagtccccggcccttggtgcgatgtctgtgagtttgacctgcccagcgtgtgggctggctcaatgctgaataaagtgggtttgtgtcagctcgtttgcttcgtctccgtgtgtccacctggcctcttccccctgccctggccaccctccagtgtcaaaggaaacttcctcgtgacacgtgctaaagcatggtgaggaggactttgattgggaccattgagatgggtgtgggaccctttccttggggcctggggggagatggggctccaccccgacgtagcagggcaggggttggaggagcgaggagcagtatagggtccatgggtgggaatgactgtgaggagacatcagggctgagggggctctggctaaacccacctcacagagtccttgctgcaggcaggcagggcgatcagacattggctgcaaacggtcagagaggaacccagtcaggtaccattgagggtggtcagatattatggttaaccaaattagggttcttgctaaaactggatttcataagaaagggcaaagagggccctaggagaagattccagagcctggccagagtttggccaagtagagaatctttgtcagcacgccaacaacatcccgaccctgagacctccagtttgtctttctcactgtctccgcctgctgcagtctgctgtcatccctgagcatccctgcccctgccctgcacacctgtgatgcttgcccggacaggtcctgatggcagagtctcccacaacatcagtgtctccacatcaccaggtccgacagtggcttcaccatcctcacctaacctagctgaccagcaacatcccaccctgtcaatcacaacctctttctatttaagaaaattatatatttatggggcacagtgtgatgttttgatatctatgtacattgtggagtgacagattaatgtatccatctcatgttttttttggtggtgagaatatttgaaatctacactcagcaatttcaaatacagtcatccctctgtgcctaagggggattggttccaggaccccctcatggataccaaaatctgcagatactcaagtaccctgcagtcagccctccctctgcacatatgtgggacagtcagatacagagggccaactgcgtacagtacacggttatcagctgaagtcaccatgctgtgcaatagaccttgagtttattcttgtatagcagggactctgtaccctctgactagaatttccccaaatcctcttgtctcagcccctgctaaccaccgttctactctctaattctataaatcaacattttgattccacatataagtgagatcatgtgatatttgtcctgttcctggcttatttcacttaatataaatgtcctgtaaattc

SEQ ID NO: 735645 - DNA, 2086 bp, Homo sapiens
ggccgggtgtagtggctcacgcctgtaatcccagcactttgggaggcagaggcgggtggattacgagtcaggagttcgagccacctgccaacatggtgaaaccccgtctgtactaaaataccaaaattagccggcgtcgtggcaggcgcctgcaataccggctactcggggggctgaggcaggagaatcgcttgaacccgggacgcggaggttgcagtgagccgagatcgcgccactgcactcaagcctgcctggcaacagagcgaggctgtctcaaaaaagaaagaaaagcaaagcaaagctaacaaatgctcttctgtcatgcatcatcacagaatcaatgagagctccccccagccaggagacagcggacaaccagggtagcttcccagggggccagagggaggctgcgcgagaagaggctcagcgggatgggtccacgcagggagatcccacgcagggtgggcgtatacgagtgtccacgtccggagggccgttcaagggcgggtccctgaaggaagggtgcacgcagggcacgtccacgcgggcaggcccgtgcacgcagggcgtgcccatgcagggcgggtccgtgcaggatgagagcagcggaggaggcccacgcaggccatttcccgccccgtccccagcccacgcgggcgagctaccgcgggggtacgcgcagctcagatcctagcagcttacaaaaacaaccttttaaaaatggaaccttcaagtaaaaataaaactttgtttccctctttcgcaggagttactgaagtaggaagggacagcccagtaagatttcaggatacgacttgggccggtccgcaggcagtagagtgaagcgcgcagctgccaggacttgcgcggtgacgtgcgccgctgccaggaccttgcaggtggagagcatagttgccaaaatcaaggcggaggagcgcaccgccgctaggatccaggcggagaagcccaccgcggccaggacctaaggatgcagtacactgctgccaggatcttgtctgtggagcgcagcgcggccaggacctccggctgcagcacaccgctgccaggatcttatcggcagagcgctccgcggtccggaccccgccccgtgcgcgtccccgaccccgccccgtgcgcgtccccggcgttggcgtcttcgtcctgttgctggtctccgtccggtcgccggccgtctaggtctccggccctccccagccgctcctgcgcccttgccggccccgccgcccgcagccctggcgctccctgcgggccccgccgaggccgcctgcgccctgtgccagcgcgcgccccgggaaccggtgcgcgccgactgcggccaccgcttctgtcgggcgtgcgtggtgcgcttctgggccgaggaggacgggcccttcccgtgccccgagtgcgccgacgactgctggcagcgcgccgtggagcccggcaggcccccgctcagccgccgccttctggcgctcgaggaggcggccgcggcgcccgcgcgcgacggcccggccagcgaggccgcgctgcagctgctgtgccgcgccgacgccggcccgctctgcgccgcctgccgtatggctgcgggccccgagccgcccgagtgggaaccgcgctggaggaaggcgctgcgcggcaaggagaacaaggggtctgtggaaatcatgagaaaggacttgaatgacgcccgggacctgcatggccaggcagagtcagcagctgcagtgtggaagggacacgtgatggaccgtaggaagaaggcactgaccgactacaagaagctgcgggccttctttgtggaggaggaggagcatttcctgcaggaggctgagaaggaggaggggctccctgaggacgagctggctgaccccactgagcggttcaggtcactgctgcaggcggtctcggagctggagaagaagcatcgcaacctgggcctcagcatgctgctgcagaagatgcagatgcctccagctattacgagtcccatggcaacaaggatcagaggcagagctgctttccatgccgtgaactgggagcttctggagaaggtagctggagaagattcccagaagccaggaat

SEQ ID NO: 735646 - DNA, 1462 bp, Homo sapiens
ggccgggtgtagtggctcacgcctgtaatcccagcactttgggaggcagaggcgggtggattacgagtcaggagttcgagccacctgccaacatggtgaaaccccgtctgtactaaaataccaaaattagccggcgtcgtggcaggcgcctgcaataccggctactcggggggctgaggcaggagaatcgcttgaacccgggacgcggaggttgcagtgagccgagatcgcgccactgcactcaagcctgcctggcaacagagcgaggctgtctcaaaaaagaaagaaaagcaaagcaaagctaacaaatgctcttctgtcatgcatcatcacagaatcaatgagagctccccccagccaggagacagcggacaaccagggtagcttcccagggggccagagggaggctgcgcgagaagaggctcagcgggatgggtccacgcagggagatcccacgcagggtgggcgtatacgagtgtccacgtccggagggccgttcaagggcgggtccctgaaggaagggtgcacgcagggcacgtccacgcgggcaggcccgtgcacgcagggcgtgcccatgcagggcgggtccgtgcaggatgagagcagcggaggaggcccacgcaggccatttcccgccccgtccccagcccacgcgggcgagctaccgcgggggtacgcgcagctcagatcctagcagcttacaaaaacaaccttttaaaaatggaaccttcaagtaaaaataaaactttgtttccctctttcgcaggagttactgaagtaggaagggacagcccagtaagatttcaggatacgacttgggccggtccgcaggcagtagagtgaagcgcgcagctgccaggacttgcgcggtgacgtgcgccgctgccaggaccttgcaggtggagagcatagttgccaaaatcaaggcggaggagcgcaccgccgctaggatccaggcggagaagcccaccgcggccaggacctaaggatgcagtacactgctgccaggatcttgtctgtggagcgcagcgcggccaggacctccggctgcagcacaccgctgccaggatcttatcggcagagcgctccgcggtccggaccccgccccgtgcgcgtccccgaccccgccccgtgcgcgtccccggcgttggcgtcttcgtcctgttgctggtctccgtccggtcgccggccgtctaggtctccggccctccccagccgctcctgcgcccttgccggccccgccgcccgcagccctggcgctccctgcgggccccgccgaggccgcctgcgccctgtgccagcgcgcgccccgggaaccggtgcgcgccgactcccctcccccgctatgtgaggatgtgccctgtgcgcttcagccctgaggagatggtgcctgtcctgtgcccatatagcatgaactgtggctgagtgtgcaatgtgtatgccggttatgaggccaagtgac

SEQ ID NO: 735647 - DNA, 4059 bp, Homo sapiens
ggccgggtgtagtggctcacgcctgtaatcccagcactttgggaggcagaggcgggtggattacgagtcaggagttcgagccacctgccaacatggtgaaaccccgtctgtactaaaataccaaaattagccggcgtcgtggcaggcgcctgcaataccggctactcggggggctgaggcaggagaatcgcttgaacccgggacgcggaggttgcagtgagccgagatcgcgccactgcactcaagcctgcctggcaacagagcgaggctgtctcaaaaaagaaagaaaagcaaagcaaagctaacaaatgctcttctgtcatgcatcatcacagaatcaatgagagctccccccagccaggagacagcggacaaccagggtagcttcccagggggccagagggaggctgcgcgagaagaggctcagcgggatgggtccacgcagggagatcccacgcagggtgggcgtatacgagtgtccacgtccggagggccgttcaagggcgggtccctgaaggaagggtgcacgcagggcacgtccacgcgggcaggcccgtgcacgcagggcgtgcccatgcagggcgggtccgtgcaggatgagagcagcggaggaggcccacgcaggccatttcccgccccgtccccagcccacgcgggcgagctaccgcgggggtacgcgcagctcagatcctagcagcttacaaaaacaaccttttaaaaatggaaccttcaagtaaaaataaaactttgtttccctctttcgcaggagttactgaagtaggaagggacagcccagtaagatttcaggatacgacttgggccggtccgcaggcagtagagtgaagcgcgcagctgccaggacttgcgcggtgacgtgcgccgctgccaggaccttgcaggtggagagcatagttgccaaaatcaaggcggaggagcgcaccgccgctaggatccaggcggagaagcccaccgcggccaggacctaaggatgcagtacactgctgccaggatcttgtctgtggagcgcagcgcggccaggacctccggctgcagcacaccgctgccaggatcttatcggcagagcgctccgcggtccggaccccgccccgtgcgcgtccccgaccccgccccgtgcgcgtccccggcgttggcgtcttcgtcctgttgctggtctccgtccggtcgccggccgtctaggtctccggccctccccgcggcgcccgcgcgcgacggcccggccagcgaggccgcgctgcagctgctgtgccgcgccgacgccggcccgctctgcgccgcctgccgtatggctgcgggccccgagccgcccgagtgggaaccgcgctggaggaaggcgctgcgcggcaaggagaacaaggggtctgtggaaatcatgagaaaggacttgaatgacgcccgggacctgcatggccaggcagagtcagcagctgcagtgtggaagggacacgtgatggaccgtaggaagaaggcactgaccgactacaagaagctgcgggccttctttgtggaggaggaggagcatttcctgcaggaggctgagaaggaggaggggctccctgaggacgagctggctgaccccactgagcggttcaggtcactgctgcaggcggtctcggagctggagaagaagcatcgcaacctgggcctcagcatgctgctgcagtgatggcgccaacccgtggcagtcccagagctggaggcaggaggatggatcctcatctccatgggaagtgtcagcgtgtggctgccagggaagcgtggcaggcgcctggccttgggtccatctacatagttgcgtgtttcaacaatgtccatttatccttcaccccgaggcgtgttttgggggctgcaaacacctcccggtagaggctggacctgaggacccttcccacctgtgcccgtcccttcctgaagtcctagccacagcccatcctccatgagtcccggcagctctgggtcatgcccttccctggtcacccatctgcccctcacctcgtcatccagggacccagaccctgcaccttccatgtgggcccacagatccttggcaggtacctgaggtgcaccattgagtgtcggatttggggttagcatccagaaagaagaatgcgcatgacgctctgtgaaggctggaactcaggtcttcaggggagagaaaggaagactggattgcaccttgatgcctcctgaggaggcggcccccctcttgaggtgggcgtgggcccggcccagccttatccaagtcgctctgtccacctcccccttcctggcccccaccccactcctgtgcctcccaggagccctccctgtgctccacctgcctccgcagaaggaagcctctttctctgtttccctgggtgagggggctggcaggtggctaaccccatttagcatctccaggccctgccatggtgtctcatcttgctgttatctctagctctttccctcctcccatttcctttagtagttgaattttgcaaagcttgtagcagtagctcagttgcctgcagcatccttgtgtgtagataaattagtcgacagaaactcagcactggggacaggattgcaaagtcggggacatagatgcagacagttgttgagatttggggatagccgggcttgtgagcggtgcccatttccagatgaagcctttcagcccttctgagtccccggcccttggtgcgatgtctgtgagtttgacctgcccagcgtgtgggctggctcaatgctgaataaagtgggtttgtgtcagctcgtttgcttcgtctccgtgtgtccacctggcctcttccccctgccctggccaccctccagtgtcaaaggaaacttcctcgtgacacgtgctaaagcatggtgaggaggactttgattgggaccattgagatgggtgtgggaccctttccttggggcctggggggagatggggctccaccccgacgtagcagggcaggggttggaggagcgaggagcagtatagggtccatgggtgggaatgactgtgaggagacatcagggctgagggggctctggctaaacccacctcacagagtccttgctgcaggcaggcagggcgatcagacattggctgcaaacggtcagagaggaacccagtcaggtaccattgagggtggtcagatattatggttaaccaaattagggttcttgctaaaactggatttcataagaaagggcaaagagggccctaggagaagattccagagcctggccagagtttggccaagtagagaatctttgtcagcacgccaacaacatcccgaccctgagacctccagtttgtctttctcactgtctccgcctgctgcagtctgctgtcatccctgagcatccctgcccctgccctgcacacctgtgatgcttgcccggacaggtcctgatggcagagtctcccacaacatcagtgtctccacatcaccaggtccgacagtggcttcaccatcctcacctaacctagctgaccagcaacatcccaccctgtcaatcacaacctctttctatttaagaaaattatatatttatggggcacagtgtgatgttttgatatctatgtacattgtggagtgacagattaatgtatccatctcatgttttttttggtggtgagaatatttgaaatctacactcagcaatttcaaatacagtcatccctctgtgcctaagggggattggttccaggaccccctcatggataccaaaatctgcagatactcaagtaccctgcagtcagccctccctctgcacatatgtgggacagtcagatacagagggccaactgcgtacagtacacggttatcagctgaagtcaccatgctgtgcaatagaccttgagtttattcttgtatagcagggactctgtaccctctgactagaatttccccaaatcctcttgtctcagcccctgctaaccaccgttctactctctaattctataaatcaacattttgattccacatataagtgagatcatgtgatatttgtcctgttcctggcttatttcacttaatataaatgtcctgtaaattc

SEQ ID NO: 735648 - DNA, 4313 bp, Homo sapiens
ggccgggtgtagtggctcacgcctgtaatcccagcactttgggaggcagaggcgggtggattacgagtcaggagttcgagccacctgccaacatggtgaaaccccgtctgtactaaaataccaaaattagccggcgtcgtggcaggcgcctgcaataccggctactcggggggctgaggcaggagaatcgcttgaacccgggacgcggaggttgcagtgagccgagatcgcgccactgcactcaagcctgcctggcaacagagcgaggctgtctcaaaaaagaaagaaaagcaaagcaaagctaacaaatgctcttctgtcatgcatcatcacagaatcaatgagagctccccccagccaggagacagcggacaaccagggtagcttcccagggggccagagggaggctgcgcgagaagaggctcagcgggatgggtccacgcagggagatcccacgcagggtgggcgtatacgagtgtccacgtccggagggccgttcaagggcgggtccctgaaggaagggtgcacgcagggcacgtccacgcgggcaggcccgtgcacgcagggcgtgcccatgcagggcgggtccgtgcaggatgagagcagcggaggaggcccacgcaggccatttcccgccccgtccccagcccacgcgggcgagctaccgcgggggtacgcgcagctcagatcctagcagcttacaaaaacaaccttttaaaaatggaaccttcaagtaaaaataaaactttgtttccctctttcgcaggagttactgaagtaggaagggacagcccagtaagatttcaggatacgacttgggccggtccgcaggcagtagagtgaagcgcgcagctgccaggacttgcgcggtgacgtgcgccgctgccaggaccttgcaggtggagagcatagttgccaaaatcaaggcggaggagcgcaccgccgctaggatccaggcggagaagcccaccgcggccaggacctaaggatgcagtacactgctgccaggatcttgtctgtggagcgcagcgcggccaggacctccggctgcagcacaccgctgccaggatcttatcggcagagcgctccgcggtccggaccccgccccgtgcgcgtccccggcgttggcgtcttcgtcctgttgctggtctccgtccggtcgccggccgtctaggtctccggccctccccagccgctcctgcgcccttgccggccccgccgcccgcagccctggcgctccctgcgggccccgccgaggccgcctgcgccctgtgccagcgcgcgccccgggaaccggtgcgcgccgactgcggccaccgcttctgtcgggcgtgcgtggtgcgcttctgggccgaggaggacgggcccttcccgtgccccgagtgcgccgacgactgctggcagcgcgccgtggagcccggcaggcccccgctcagccgccgccttctggcgctcgaggaggcggccgcggcgcccgcgcgcgacggcccggccagcgaggccgcgctgcagctgctgtgccgcgccgacgccggcccgctctgcgccgcctgccgtatggctgcgggccccgagccgcccgagtgggaaccgcgctggaggaaggcgctgcgcggcaaggagaacaaggggtctgtggaaatcatgagaaaggacttgaatgacgcccgggacctgcatggccaggcagagtcagcagctgcagtgtggaagggacacgtgatggaccgtaggaagaaggcactgaccgactacaagaagctgcgggccttctttgtggaggaggaggagcatttcctgcaggaggctgagaaggaggaggggctccctgaggacgagctggctgaccccactgagcggttcaggtcactgctgcaggcggtctcggagctggagaagaagcatcgcaacctgggcctcagcatgctgctgcagtgatggcgccaacccgtggcagtcccagagctggaggcaggaggatggatcctcatctccatgggaagtgtcagcgtgtggctgccagggaagcgtggcaggcgcctggccttgggtccatctacatagttgcgtgtttcaacaatgtccatttatccttcaccccgaggcgtgttttgggggctgcaaacacctcccggtagaggctggacctgaggacccttcccacctgtgcccgtcccttcctgaagtcctagccacagcccatcctccatgagtcccggcagctctgggtcatgcccttccctggtcacccatctgcccctcacctcgtcatccagggacccagaccctgcaccttccatgtgggcccacagatccttggcaggtacctgaggtgcaccattgagtgtcggatttggggttagcatccagaaagaagaatgcgcatgacgctctgtgaaggctggaactcaggtcttcaggggagagaaaggaagactggattgcaccttgatgcctcctgaggaggcggcccccctcttgaggtgggcgtgggcccggcccagccttatccaagtcgctctgtccacctcccccttcctggcccccaccccactcctgtgcctcccaggagccctccctgtgctccacctgcctccgcagaaggaagcctctttctctgtttccctgggtgagggggctggcaggtggctaaccccatttagcatctccaggccctgccatggtgtctcatcttgctgttatctctagctctttccctcctcccatttcctttagtagttgaattttgcaaagcttgtagcagtagctcagttgcctgcagcatccttgtgtgtagataaattagtcgacagaaactcagcactggggacaggattgcaaagtcggggacatagatgcagacagttgttgagatttggggatagccgggcttgtgagcggtgcccatttccagatgaagcctttcagcccttctgagtccccggcccttggtgcgatgtctgtgagtttgacctgcccagcgtgtgggctggctcaatgctgaataaagtgggtttgtgtcagctcgtttgcttcgtctccgtgtgtccacctggcctcttccccctgccctggccaccctccagtgtcaaaggaaacttcctcgtgacacgtgctaaagcatggtgaggaggactttgattgggaccattgagatgggtgtgggaccctttccttggggcctggggggagatggggctccaccccgacgtagcagggcaggggttggaggagcgaggagcagtatagggtccatgggtgggaatgactgtgaggagacatcagggctgagggggctctggctaaacccacctcacagagtccttgctgcaggcaggcagggcgatcagacattggctgcaaacggtcagagaggaacccagtcaggtaccattgagggtggtcagatattatggttaaccaaattagggttcttgctaaaactggatttcataagaaagggcaaagagggccctaggagaagattccagagcctggccagagtttggccaagtagagaatctttgtcagcacgccaacaacatcccgaccctgagacctccagtttgtctttctcactgtctccgcctgctgcagtctgctgtcatccctgagcatccctgcccctgccctgcacacctgtgatgcttgcccggacaggtcctgatggcagagtctcccacaacatcagtgtctccacatcaccaggtccgacagtggcttcaccatcctcacctaacctagctgaccagcaacatcccaccctgtcaatcacaacctctttctatttaagaaaattatatatttatggggcacagtgtgatgttttgatatctatgtacattgtggagtgacagattaatgtatccatctcatgttttttttggtggtgagaatatttgaaatctacactcagcaatttcaaatacagtcatccctctgtgcctaagggggattggttccaggaccccctcatggataccaaaatctgcagatactcaagtaccctgcagtcagccctccctctgcacatatgtgggacagtcagatacagagggccaactgcgtacagtacacggttatcagctgaagtcaccatgctgtgcaatagaccttgagtttattcttgtatagcagggactctgtaccctctgactagaatttccccaaatcctcttgtctcagcccctgctaaccaccgttctactctctaattctataaatcaacattttgattccacatataagtgagatcatgtgatatttgtcctgttcctggcttatttcacttaatataaatgtcctgtaaattc

SEQ ID NO: 735649 - DNA, 2409 bp, Homo sapiens
ttattcaataaaattaatccccccatataatgcacagtattgccacaaatgcccacttcatttgtctgcatagacatattaagaatttttcaatgatgtaatttaattatcctaaaagaaatgacagattcttctgtaggaaaaaataaaaacatgaatatctcaaattataatggttaatctctaaaatatgcttaaagtaagatgtttctatgttatgtggttatgttatcaataatatttggttgatcttcacatattttatatgcatatatatatcaagaagttatatatatataactcaagaaactcaagttatatatatatgtcaagaaatgtatgattattttggagagaatgggcccaaatgtgaaaaagatataaaaaaaacaaaaaaaacaaaaaaaaaacactattttcccctacgaaatatactgtatatttcaaaagaagaaaagttaaaagatatttgaagattgcaggggcaaaacaaaaacctaccagggctcagcacttaagcacttttcccacatccagggtcaaagcagcagtaactacatggacttttaagtgcggtatgaaatgcaacattacgcttacaaacagtactgtcaaacctcaaatgctttctttcttcagatgctttttcgtgtacatgatactagtagacacttttctctttatatttactgatagtgaaaatcatacgcaataaaatattgatgtttgaaggcagtggtcaccaattggttaaaaaactatgaaatgtaaactgaattgttatatctctatcctttttgcttttctctgtgtttttaatgtatggaataaatctcataaatagaaagaaaaataatctagaaatttttcaaagctagtactctttctccttataaatgtacacaattttaatctttttacaaatttatttaactgtacctactgtacttattgtagattcaatgacgcagttaagtcatcacccaaggatttatgaatttgagattactgacctgttttcttcatattgcattcacatcaatatttgtgaatttgttgttcagcttttcattcaaacaaaaaatattccctcaagaaagctccatttttatcataaacatttcaacataaccaacattagaacaagtctgccatgttaaaaataatttaaagacttatctctgaaaacggtatccagaaacgcaggtgttcccagtaatgtagcttcaaaaataaaatgtgctatttatatgacatgaaattcataacttttggaagggtatatttatgacagcataaaaaataaattctgtgctataaagaagatccaacaaattaaccatataagcacagaaaatagagaaacacagttattgaatctactcttgtcattaacattttcaaaaaacaaaatgcatattgtaatatttggtacatgacacttgcatgttgatatgcctatatacttacaaagtattcaatgtgtacttagcggcgcttaaaatatgtcatgtacaactcttataaacatttttacagggttcccatttgcacttcatctttcagtaaagtcttgtcagaaaaaaattgtctgataaatatggaaaaataaaatttgaattttagttatctgttggacattactgaattgtctattcatttagtacaatttcttaaccttgaaaacagacattgaaagatggaactttcttttttccagtgacaggtccattaaatcgatggtacaaaacatacttctttatgccaaacacattatttttgaatacctttttttcaacttcatacattatccatccattttagttttcctcgatgatgcccattttctttgtaaatttctaagtggaagttttaaaaattaagcatcagtaaaataaatgttatcttatttgtacaacatttaatcgttattccttggaatatatgaaccttgtaaagtgatgactaagggtcaaaaaaaatgttgctgacttagggaaatttgcttgagaatgccaaaattttaaaactctgtaaaggtaattttacattcacttatgtgtgtttactaatgttgagtaggaacagaagcaaaaatacctaaacctattttttttaaccttcacactctaaccagtattatatatttcagctacctaagataatgcaattaatcatatatccaacctaagcttctgccaataaggatttcagataagcttttaaatttatggaggattttctttgtgtctttggaagttcacttaccataaagtattttatagtctactttaaataacagattttgttacacagggtaagccaaaggctgtacaagatttagtgtcattgggtctcatatttgtgttagaccatgaaatattccattaaaatttatctgtaaataca

SEQ ID NO: 735650 - DNA, 1626 bp, Homo sapiens
  misc_feature (671)..(671): n is a, c, g, or t
ttttgctctcatccctggaggtgtaacagccttttcccattcagtactttatttttccagatagttcatatggagtagaaggaacatactatatctgtttctgtactgatggatcgtgttcagttgtgtacatttatctctgaggcctgctaatgccatctgagtttctaaaatccttatttttgcaaatccatttgtgtcctggggtttagctcctgattttaggattagcacagattacagggtctgtctgatgccttctccaagctttgtatcagatttatgggctatggaattgaggaagcttgcacataggataggcgtggaaactagaggcagatacgagctgatgggagaaaaaagcaaaaggagctcttgtaaagaattggagtagttatcaggccagatatttggatcagaaccagttaagaacctgaaaacgccaactttctgtttcttgacttcacaactgtgctgggctgcctgttccctcttttccagaacagttttccatggaccctggctgtgcctcctccccaccccacccagtggctgcccccagaatagagttctaagccatgctccagccctctgggtggcatcctttgctaagagggctctctcctgtcatcagcagtccctatggcctccatcctgtcagttcttattanacagctcttctgctctacatcaaggagcctgagagactggaataaaggacagagatgggtttggggcacagagcaacccatgccactcctaccctgtgatgcagaaatattagggggattcagccacctaatattttctggaagtggaaaaagacatatgtaactgtggtaaagactcatgggtcactttaggctatatgtgttttatgctgcagcactagaacataggagcagcttaaataatcagatttatcatctcacataaaatgtcagtccctaagtaggacagctccaggggaggggtggttggtttaactaagatatgtccccaggtcagaatcaggcaccttggttttttccctctttctatgctgccattctctccccatgaccacaagtacctttcttggctgcaagatgattgccatagctctaggcattgcatgctcatacaccaatcgacaaaggcaggagaagcatagtttcttgttttgtgcctttttaaaagtttaaaaagaaaaaaatccttccccacaagcatctcagctgacttccttttacaactgattatccagatctggatgacacatccactcctaaaccactatgtgaaaccaggaaagggaactcttttcctccaccccaatgattggctgagactagggatttggaggagccatgaatttggatacagaaaatttttctccctgaagccagggtcttgctctatcaaacaggctgaagtgcagtggcacaatcatggctcactggagcctcaaactcctgagctaaagcaatcctcccaacctcagcctcctgcctagctgggactatagatgggtgccactatgccaggctaattgtttttattttttgtagagatgggatcctgctatgttgcccatgctgggttttttggggttttttgtttttttgggttttttttttggttgtt

SEQ ID NO: 735651 - DNA, 1815 bp, Homo sapiens
gcggccgcgaggggagggggagtcccgtctgactgagacggcaggcctgggcgggcgggcgggggtgccgcgaagggcggagcgccgggctggggatgagctaagcgggctcagagcgccgcggcattcagcccctcgtgttccgctaccgcgcgtgcgggattccggcgccgctctccgagctcgatccgctgctcgcacgggagccagctgggtgttatttctcaaactctgaggctgcggagttcacacattgaaatctgtcatctttttcagagagaaactttcggtaatgtatgtaaccttctgtaatggaagatgattgaagacaaggggcctcgtgttgctgactactttgttgtagcaggattaactgatgtttcaaagcctctagaagaagaaattcacttcaatgatgcttgtcataaagtagctaaaccaaaagaacctattacagatgtttcagttattatcaaatctcttggggaggaagtcccacaggattatatctgtattgatgttaccccaactggattgtcagctgatcttaataatggaagtcttgtggggccacagatttacctttgctatagaagaggaagagataagcctccacttacagatctgggggttttatatgactggaaagaaagattgaaacagggttgtgaaattattcagagtactccctatgggcgccccgcaaatattagtgggagtacctcatcacaaagaatttatatcacttaccgaagagcctctgaaaacatgactcagaatacgttggctgtcactgacatatgtattattatacccagtaaaggagaaagcccaccacacacgttctgcaaagtcgacaagaatctcaataacagtatgtggggatcagcagtatacttgtgttataaaaaatcggtggcaaagacgaacactgtatcttacaaagctggcctaatttgtagatatcctcaagaagattatgagtcattctcactaccggaatctgttcctctattttgtttaccaatgggtgcaaccattgaatgttggccatcaaatagcaaataccctctgcctgtattttctacttttgttttaactggagcctcagctgaaaaggtttatggtgctgctattcagttttatgaaccatactctgaggagaatctcacagaaaagcagagacttcttttgggtttaacatcagcagatgggaagtctgatagttccaaaacaattcatactaacaaatgcatctgtcttctttctcactggcctttttttgatgcattcaggaagtttctgacttttctgtatcgttattccatctctgggcctcatgtccttccaattgagaagcatatttctcattttatgcataaagttccttttccatctcctcagagaccacggattttagttcagttatcaccacatgataatctgattctcagtcagcctgtgtcttcacctcttccactaagtggtggcaagttttcaacactactgcagaatttaggccctgaaaatgctgtgacactactggtgtttgcagtaacagaacataaaattcttatccattccctacggccatccgtgcttactagtgtgacagaagcattagtgtctatgattttccctttccactggccatgcccgtatgttcctctctgcccactggctttagcagatgtcttgagtgcaccatgtccattcatagtagggattgattcaagatactttgatctctatgatcctccaccagatgtcagttgtgttgatgtagataccaacactatttctcagattggtaca

SEQ ID NO: 735652 - DNA, 629 bp, Homo sapiens
ctcctttaaggatctttccaaaggtcttcaattttgatataagcaacaaagaataagagggctattagaccagaaatattccatgaagaagggagcaaagattcatgtcactgacaactggagaagaaacagagaaagggtactcatgatgtgtgacaaatggcatgcctcctgcaagagttatgagttatgtgcctaaacaggaaggatcatctcattgcagaattagggcatcatccagtgggaagggagtttcaaggtcatttagtccagcctccgagtgatacagaaattctctttgcagcatccctatcacgtggccatcaaacttctactagtgtattcatccacacctggtctgtctaaaaccttgagaacagccccttgtatagttcaatagccccagctgaaggaaaagtttttgttattttcagtaaacatattctgttgtgtaactttggttgatcggttcccctttagcgacccagaaaacactgagctccctctgacacccatgccctttgactgaaagtcagccataaaatagagcaccagagtaactttccagagtcccagatttgccccttcgctccactgcaaatcaaatgtgtgacctgtgtttcaattca

SEQ ID NO: 735653 - DNA, 569 bp, Homo sapiens
ggctcactcagaggctattgccaggagcccttgttccttaccacaggaacctccccagagggtttactgtcctcaagacatggcaaccagcttcttctggagcaaatgatctattcctacctgccctctggcttcattcatggtcatagggcctcagtttttggacagagagcaccaccatttttggccatgcattctctttttccacagcccgtttatatccatctggtcaccaccatttcaataatgttccagacctgattcagtcagtctcaaataccctttggaataatagtcttctgttctctagcagtgacatttctccagcaacagtggcatattcagaagaaccagaaaagttcatttggcaccaacatttcacatgaggtacttcgagtagtcaaattcatagagacggaaagtagaatggtgtttgccaggggaatccaggattcaaccccctaaaacttgctgttttctttgtcctctttgctgtgaaccaagacacttgttctgtagcagagtgtttctgctgcaaatccagtggctactgcattatgcaatgaagt

SEQ ID NO: 735654 - DNA, 649 bp, Homo sapiens
cattagttcatgtcacatgacttcacctccagatagaccttgttctagcttggaatccatctgaagtgcattctaaactaggggaagcgtccatactttcttagctggagtatcctttggggtttttccatcctccaagctattttttcttgctaactctgccatctattcatggatgttgtgttgttgtctgtctgggtgatttacacagtgctggtcatgctgccagctctagcgtcatcttccctttgaagcacagccagaaggatgtcactggaaatgctgaattactcagtatctcttcttttgtgggtctcatttcaataatgttccagacctgattcagtcagtctcaaataccctttggaataatagtcttctgttctctagcagtgacatttctccagcaacagtggcatattcagaagaaccagaaaagttcatttggcaccaacatttcacatgaggtacttcgagtagtcaaattcatagagacggaaagtagaatggtgtttgccaggggaatccaggattcaaccccctaaaacttgctgttttctttgtcctctttgctgtgaaccaagacacttgttctgtagcagagtgtttctgctgcaaatccagtggctactgcattatgcaatgaagt

SEQ ID NO: 735655 - DNA, 268 bp, Homo sapiens
tgccgccaccgccgcggcccgcgctgtaaccgcggctgccgctgctgctccgggcgggcgttggtgccgtgtgccgaggcgccctgtcaggcgatggggagcggctgggcggggagagccgacggccgcggcggcgcctgaggaacgcagccgggctcgggagcggcgagggcgggccggtccagcggcggaggagcgaggcggggcgaggcaggcggcgcggggacccacaccaggcgccttgtgtgcgaggccgagcggcggccgc

SEQ ID NO: 735656 - DNA, 1268 bp, Homo sapiens; identical to SEQ ID NO: 277175

SEQ ID NO: 735657 - DNA, 792 bp, Homo sapiens
tgccgccaccgccgcggcccgcgctgtaaccgcggctgccgctgctgctccgggcgggcgttggtgccgtgtgccgaggcgccctgtcaggcgatggggagcggctgggcggggagagccgacggccgcggcggcgcctgaggaacgcagccgggctcgggagcggcgagggcgggccggtccagcggcggaggagcgaggcggggcgaggcaggcggcgcggggaccccgcgccaagcagcggcggcctcggaggaagaggggtcgccgcccaggtttcttgcggccgccgctcttgtcgtcgcagtatttcctgttcggattatcttttgcttccccccagctgcctccttaccctcacactcccactcctccgtttccgcggtcgaagctgccttcggccccgggtggtctcccccgcccggggaccccctgtgcctcccctcccgggctgcgggggagcccctccgagaccatgaggaaattcaacatcaggaaggtgctggacggcctgaccgccggctcgtcctcggcgtcgcagcagcaacagcagcagcatccgcctgggaaccgggagccggagatccaggaaacgctccagtccgagcactttcagctctgcaagactgttcgccatggatttccctatcaaccctcagccctggcctttgatcctgtacagaagatcctggcagtgggaactcagactggtgctttaaggctgtatcctttctttaattttattttttaacttctactttgttctccccagtccttctgtgttgctgatta

SEQ ID NO: 735658 - DNA, 795 bp, Homo sapiens
agtctcaccatgcgctgcagatgttcacacactttggacaaggcgcgttcccagtgctctgcagccacatgtggccccacactgactgctccaggtgctatccacttgctctcctgctgactggtagtgcacttactgggtataagagaaaacagttccagatactccagcatgtcgtttgtttattcatttaaagatcagatatgtgtttgcaaaatttatcatatgtaattaaattgtgagtgatcattagtggcatttatctatttggagcatgtaagttgacatctttttccagactcataaataccatgcttaaagtccgaatcctgtcaatgagccagtgttcagttcaatatgcgttcagcatatatttaagtatctactgtatgtcaaagttagaataaacgtgtttactctgttgattaaaatatttcagttatttactagacttctatattttaggtactatattgaggttaaaaggtgcaatcttgagaatggcatttctggataccacaggctgcttaataccacctgcgtatgaaccctggagagagcacaatgttccttacaattccataggttagaaatcaacacaggtcttatgggtgttcccatggctgtgtttcttgttggaagtttcaggagagaatccatttccttgccttttttagcttctagaggccatccgcattccttggtttctggtcccattgtcagtattcaaggccaacaaccttgcatatctctatttttctgaagccacatctgtctgcccacagctggaaaaaa

SEQ ID NO: 735659 - DNA, 439 bp, Homo sapiens
catatttagaagaaccaaaagaatctatagctaaattgttagaaataacaggttaccaaactcactagatgtaatcatatacaaaaataaaatttaatttatattaacagtaataaaaaatgaaaaactttaaattactatttgtgtagttttctgttgctgctataacaaattaccacaaaattactagcttaaaagaacccaaatttattaccttacaattccataggttagaaatcaacacaggtcttatgggtgttcccatggctgtgtttcttgttggaagtttcaggagagaatccatttccttgccttttttagcttctagaggccatccgcattccttggtttctggtcccattgtcagtattcaaggccaacaaccttgcatatctctatttttctgaagccacatctgtctgcccacagctggaaaaaa

SEQ ID NO: 735660 - DNA, 468 bp, Homo sapiens
tctagagcatccccacgttgacacttcaggggcaagcatgcttggtatagagctctagcttgtgtataccttaaactgtaacttgcaggtgtttttcagttgctgcactttttatttaatcttgctcagtcccagtaactatctcaaaggtaattgctggaatatgcattttgaaatacggtttaaaaaaaatctgtgtattgtttcatctaaaaagaaaagcactattggaaacactaaaaacgtgttaaactttgtagttattttgcattcctgtactttacaaactgtcatcacagcaaaaagtttaaaattaggtaatgaaatatttttgtaaataaataccgttaagctggtattttaaaaaatgtattataaattaattaatgtttctggaaaatgttcatatatatgtatatgaatgtctctttatgctgaagtgtcaacgtggggatactctagagcgag

SEQ ID NO: 735661 - DNA, 8522 bp, Homo sapiens
ggctcactcagaggctattgccaggagcccttgttccttaccacaggaacctccccagagggtttactgtcctcaagacatggcaaccagcttcttctggagcaaatgatctattcctacctgccctctggcttcattcatggtcatagggcctcagtttttggacagagagcaccaccatttttggccatgcattctctttttccacagcccgtttatatccatctggtcaccacctcagtatctcttcttttgtgggtctcatttcaataatgttccagacctgattcagtcagtctcaaataccctttggaataatagtcttctgttctctagcagtgacatttctccagcaacagtggcatattcagaagaaccagaaaagttcatttggcaccaacatttcacatgaggtacttcgagtagtcaaattcatagagacggaaagtagaatggtgtttgccaggggcagctatgtaaccttgggcaagtgatttaatttctttgagtccaaagttttgcatcatataaggcctcagataactttctccttcagacagaacatgtgggagaataagatccctgtggcaaaatcccattctttgtccttagcgccagatgccatcacttcttggaaatgtcatcattgcatatttctcctcacactcccactcctccgtttccgcggtcgaagctgccttcggccccgggtggtctcccccgcccggggaccccctgtgcctcccctcccgggctgcgggggagcccctccgagaccatgaggaaattcaacatcaggaaggtgctggacggcctgaccgccggctcgtcctcggcgtcgcagcagcaacagcagcagcatccgcctgggaaccgggagccggagatccaggaaacgctccagtccgagcactttcagctctgcaagactgttcgccatggatttccctatcaaccctcagccctggcctttgatcctgtacagaagatcctggcagtgggaactcagactggtgctttaaggctctttggtcgtccaggagtagaatgttattgccagcatgacagtggagctgcagtaatccagctccagttcctgattaatgagggagcgcttgtgagtgccttggctgatgacaccttacacttatggaatttacgtcagaagaggcctgccatactacattcgcttaaattttgcagagaaagggttacattttgccatctgcctttccagagtaagtggctctatgtgggcactgaacgaggtaatatacatattgtcaatgtggagtccttcacactctcaggctacgtcattatgtggaataaagccattgaactgtcatctaaatctcacccaggacctgtggtccatataagtgataatccaatggacgagggaaagcttttgattggctttgaatctggaacagtagttttatgggacctcaaatcaaagaaagccgactacagatacacatatgatgaggctatccactctgttgcttggcatcatgaaggaaaacaatttatttgcagtcattcagatggcaccttgactatatggaatgtaaggtcccctgctaaaccagtacagacaatcactccacatggaaaacagttaaaggatgggaagaagccagaaccatgcaaacctatcctcaaggtggaattcaaaacgactagatctggggagccttttattattttatcaggaggtttgtcatatgatactgtaggaagaagaccttgcttaacagtgatgcatgggaaaagcactgctgtgctagaaatggactattcaattgttgattttctaacgctgtgtgaaacaccatacccaaatgattttcaagaaccatatgctgtggttgttcttctagaaaaggatttagtacttatagaccttgcacaaaatggatatcctatatttgaaaatccctaccctttgagtatacatgagtcccctgttacatgttgcgaatattttgcggattgtcctgtggaccttattcctgcactttattctgttggagctagacagaaacgtcaaggttacagcaaaaaggaatggcccatcagcggaggtaattggggcttgggtgctcaaagttacccagaaataattattacagggcatgctgatgggtcagttaagttctgggatgcttctgcaataactctacaagtattatataagctaaagacatctaaagtatttgaaaagtcaagaaataaagatgacaggccaaacacagacattgtagatgaagatccatatgccattcagatcatctcctggtgtccagaaagtagaatgctgtgcatcgctggagtttcagctcatgtcattatttatagattcagcaagcaggaagtaatcacagaagtcattccgatgcttgaagttcgattattatatgagataaatgatgtggaaactccggagggtgagcagccaccacctttgccaacacccgtgggagggtccaaccctcagcccatccctcctcagtctcatccatctaccagtagcagttcatctgatgggcttcgtgataatgtaccttgtttaaaagttaaaaactcaccacttaaacagtctccaggttatcaaacagaactagttattcagttggtttgggtgggtggagaaccaccacaacaaataaccagcctggcagtcaattcttcctatggactggtggtttttggcaattgcaatggcattgctatggttgactacctccagaaagcagtgctgctcaacctgggcactattgaattatatggctctaatgatccttatcggagagaaccccgatctcctcgtaaatctcgacagccttcaggagccggtctgtgtgatattagtgaagggactgttgttccagaggatcgctgcaaatctccaacctctgcaaagatgtcaaggaagttaagcttacctactgacctaaagcctgatttagatgtaaaggataactcctttagccgatcacggagttcaagtgtaacaagcattgacaaagaatcccgagaagcgatctccgctcttcatttctgtgaaacgtttactcgaaagacggactcgtccccttccccttgtctgtgggttggaacaacgctaggaacagtgcttgtcattgcactgaaccttcccccagggggagagcaaagacttcttcagccagtaattgtgtctccaagtggtactatattgaggttaaaaggtgcaatcttgagaatggcatttctggataccacaggctgcttaataccacctgcgtatgaaccctggagagagcacaatgttcctgaagaaaaagacgaaaaggagaaattgaaaaaacggcggcctgtctcagtatccccctcctcttctcaggaaattagtgaaaaccagtatgcagtgatatgttctgaaaagcaagcaaaagtaatctcactgccaacccagaactgtgcttataagcaaaatattacagagacctcgtttgtgcttcgtggagatattgtagcattgagtaacagtatctgccttgcctgtttctgtgccaatggacatataatgacttttagtttgccaagtttaagacctctgttggatgtgtattacttgccccttaccaatatgcggatagccagaacgttctgctttaccaacaatggacaagcattataccttgtttcacctacagaaatccagagacttacttatagtcaagagacctgtgaaaatcttcaggaaatgttgggtgaactcttcactcctgtagaaacacctgaagcaccaaacaggggattctttaaaggcttatttggaggtggtgcacaatctcttgacagagaagaactatttggagaatcgtcctcaggaaaggcttcaaggagccttgcacagcatattcctggccctggtggcattgaaggcgtaaaaggggcagcatctggagttgttggtgaattagcacgagccaggctggcactagatgaaagagggcagaaacttggcgatctggaagaaagaactgcggccatgttatcaagtgcagagtcattttctaaacatgctcatgagattatgttgaaatacaaagataagaagtggtaccagttctgacaaccagaatccaataagtccaacttcagccagaaggaaaaaagttttccatttttattacattctttaggaaagttaacgttaaagggatgttcgtcactgaatactgttctttcctagcacagtcatgcactgttttacctcagtcatgtggctttaactgaggagtgttcacacgcactcgaaatggagtatatggtgtgtgccagttatgagttgaccatttgggaattaaacaggtcacacgtgacagatgaagaaaccaagggggctgctgaggagacctggtgcagggactaatcctggatcattcctgtattaaactttcatatgccaaaagggtttgtgccgttttatctgccatcagtgtttgacctgtttagggcagaggcaataagtcagaagtcttgaagttgaaatagttatatgtgtgtcattggactggattataaacagctgtcttggactttccctctcttaacactgactggtcatcagtatcattagtgaaaaagaaacaaattgtttgttatcatctctttagacagataagctgaatggtgggctttaaataataaaaacatacacatagttgacttgtgtatgagctactcttggattcttgttattatagacttgtatttagttcatattttgtcaaaagcaaaacaagaagatacatcacttttcattgaaaagaaaagtgtagagcatgactgaattgctcatcattctgggagtttccatgtagtggctatgcagtgtggaaagtgagaaaaacctccattgtggtgaggagaatacttcaatgtcccttgtccttgttctcattaattcagctaaaggtggatttgaccaaaataatgctggttaaatttgtagaaatgttgaaattggctgtgttttaaattttgcttgaatttttataaaatgtttaaccaaatgtacctttgcattctttaattaaaattgcttaaaaaaaaactttcattatttcagtaaaatgctcagctcccttttcaaaatgccctttatttgctaactgttccaatacactcaggtgatgagccaattaaatgttagtgcacatgctatcgcatggaaaattacaagcatctgttgtcaataattatataagagtttagtctgatgacctacaaaatattttgtgtagaaatatactataaatctgtacatatcctttcaaggttttaaaaaaccaaaaagaaaggaaaatatgtacactgtgataactaaattatttctgtattggaatataatacaatttgagaccagcaatggacaatgaatgattgtttcatagaatagcattacgggcaggaaagaaaccacctagtagatctagaagtaagcaatctcagaatacagactaatctgagattattattgattgttgttaaagcaacccagcaaaagcaaaatggaagcattaaaattaatgttaatgaaatttaaatattgtcttctataaaaaattcctttaaatgattttgttttttcattaagagataatcagagcacaaattgatagtaaacaggatggttgtttttctattctatatgatcattaaaggaatatgtaggacatcttaactttttcatacagtctgttatgcatattttcctctacttttcattaataaagcttttatgtttacattttataacatgcactactagatgcaaaagtttacatcaaagtttactttaaatatcatttggtagggactaaatgtgtgtgatagagataattgatcaagccaaaagaaatattttttaaataagcccttttcaaaagtttttgaatttatagaaagcaccaatgaataacatatttctgtttcgttaatgtcagctgcctgaacattcagcagtttataaattgcttaatttgtgttatctattatccagtaaacccatagttccatgatatgtcacaggaattgttaggtcctattttaaaggtacagttttgtgaatgtcatcaataaaatcaacagttatggatttgaagaagttgggaaagcattatgtagattaatatactggttggttccctatctatgtggaaggtcatattagctgcaattatttaatttgctgtgttattttgtgttatataacacaaatatatttgtatattaacttcatttttactgtcatttttcctgttgtatacaaaatgaactaatcttgtaattattttcaaatatagaagtatatacattagatggatttccaagattttgtaagaaaatcttaaatcagtgttttgagttatttaatttttaaattaatctacaaattatgcacaacaaactagagactcagttaggattagaaagcttaaagtatgtttgagtgtaggaaataagcttctcagagttatacttgattctgtctgtagataagagacagtctacagtaataactaacccagggaatttactgtaatttgagaggtaacatctctatttttttctttttaaatacagaaagtaatagtcaccagcaagccacgatttcaggaaaactgactaaaaaaaaaagtcaaaatagaaaatatcagaaaaatgaaagatttttgtgtgccctctccatatcctcattgtttttgttgcatttgtccttgactctaaaatcactgaagtattcatgattagtagtttgtaagtaggaagtggtttttctgtatgtaccatatatccagttcatttcagttttcaaactaaaatccatatgtatttgctgagaaagttatttgaaatcttatattctgacaaattctgtacattacatccatttgaagttttgcatcatcttaacacttttgctttgcatttcaattgtacaaagtgtttccaaaaaaatggttatagattcgactgagctattactaacttctccatttgattttttatggatgtgaaaaatgctgctacttgtctatgttattatgtggtatttgttctcttggattgaaatttatgcccacagatttttcttttcatttgaaaatgaatgtgaagatactgtttacagcttttgttaattgcacttttcatcactctgatcaatttcttgtaaagtgctatgggaattatttttcctgtgaatattaatgattttactactgcctccgaagttttaaaaaaggttctgtagacagaaaacagttgttgcaaccaaaaacaaccaaaaaaagaaaaaaagggaaaactggcttacctttctcagatgaattaaatgattttaataacttcccaattaccagggttataacattgctttcttcagttattaatacagtcaaattaattttaacaatataggcacaattcatttacaaattcagtacagtagtccagggctacatgtaagtggtctctttattttattctttacatcagaaaaatcatgaatgtcagttttgccagtattttacaatgaggcttatcgtttaaaattttatagtgtatgacatgtaaataaaccagtatttattgtaggttgtttgattcaggcatttcaaatggatataggttaatggcaatggaatcctatttatttggtagttggttttgtttgtttttgtttatttacttttgctatttgttttgtattgtctaaactttgcttcaactgaagacagtgtaaggagttgaaaatacaatcaacatagcaatggaaagcaatgcaaagagggtaaatcttgttttaatttttttaactttttttttttgtaaataaatagtactgtgatactttaggtgtgacctctattccacatgatagttagaaccagaaaaacacttttgctttctagttatactattggttcattgtaaatgcattaccaaaagacaatatgaaaaagagcaagattaagtttttctaacattgtccacttcaggggcaagcatgcttggtatagagctctagcttgtgtataccttaaactgtaacttgcaggtgtttttcagttgctgcactttttatttaatcttgctcagtcccagtaactatctcaaaggtaattgctggaatatgcattttgaaatacggtttaaaaaaaatctgtgtattgtttcatctaaaaagaaaagcactattggaaacactaaaaacgtgttaaactttgtagttattttgcattcctgtactttacaaactgtcatcacagcaaaaagtttaaaattaggtaatgaaatatttttgtaaataaataccgttaagctggtattttaaaaaatgtattataaattaattaatgtttctggaaaatgttcatatatatgtatatgaatgtctctttatgctgaagggctctgattgggcaaaataaaatactctaatctctcctgaaactaaacaa

SEQ ID NO: 735662 - DNA, 623 bp, Homo sapiens
ctcctttaaggatctttccaaaggtcttcaattttgatataagcaacaaagaataagagggctattagaccagaaatattccatgaagaagggagcaaagattcatgtcactgacaacttctgaaagggcagtctaatgacaaagtcagtcgataattgctcagaagatctgtattcaccagaaagagtctttctgctgatattcagaagatcaaattttaagctcagcatgaaccaagatccagttacacatataaaaggccgtagtaggcctttattagtaattattttccccatctttataagattttagagtttgaaagcattttccccaaatcgatgccaaaacttggacccatgctggctccttgttagctatgggaaagtcattgtatctttttaaacttttatatctttctctttgtacagtgacttaagacttctatcttctttgcaaatcaaatgtaatgataaaggtgcaggaaagctgaatatttaatgcaggtattttatttgaaaccaagtgctcctgttctccagggtctactttctgccaccagcctacatcccattgaatatgtttcaatcaatcttgatgttgggaattctttcatgtttggacc

SEQ ID NO: 735663 - DNA, 1605 bp, Homo sapiens
tttgatctatgaaccattttatttcaaatacatcttactgttacaatttggcctactgcttggtggggaaaggcctttccacgtttcactcactgcagagcaatccagctttcctgtgatattcatctgatgtttatatccatcttttgaaatataggggctattagaccagaaatattccatgaagaagggagcaaagattcatgtcactgacaacttctgaaagggcagtctaatgacaaagtcagtcgataattgctcagaagatctgtattcaccagaaagagtctttctgctgatattcagaagatcaaattttaagctcagcatgaaccaagatccagttacactcagtatctcttcttttgtgggtctcatttcaataatgttccagacctgattcagtcagtctcaaataccctttggaataatagtcttctgttctctagcagtgacatttctccagcaacagtggcatattcagaagaaccagaaaagttcatttggcaccaacatttcacatgaggtacttcgagtagtcaaattcatagagacggaaagtagaatggtgtttgccaggggcagctatgtaaccttgggcaagtgatttaatttctttgagtccaaagttttgcatcatataaggcctcagataactttctccttcagacagaacatgtgggagaataagatccctgtggcaaaatcccattctttgtccttagcgccagatgccatcacttcttggaaatgtcatcattgcatatttctcctcacactcccactcctccgtttccgcggtcgaagctgccttcggccccgggtggtctcccccgcccggggaccccctgtgcctcccctcccgggctgcgggggagcccctccgagaccatgaggaaattcaacatcaggaaggtgctggacggcctgaccgccggctcgtcctcggcgtcgcagcagcaacagcagcagcatccgcctgggaaccgggagccggagatccaggaaacgctccagtccgagcactttcagctctgcaagactgttcgccatggatttccctatcaaccctcagccctggcctttgatcctgtacagaagatcctggcagtgggaactcagactggtgctttaaggctctttggtcgtccaggagtagaatgttattgccagcatgacagtggagctgcagtaatccagctccagttcctgattaatgagggagcgcttgtgagtgccttggctgatgacaccttacacttatggaatttacgtcagaagaggcctgccatactacattcgcttaaattttgcagagaaagggttacattttgccatctgcctttccagagtaagtggctctatgtgggcactgaacgaggtaatatacatattgtcaatgtggagtccttcacactctcaggctacgtcattatgtggaataaagccattgaactgtcatctaaatctcacccaggacctgtggtccatataagtgataatccaatggacgagggaaaggtagaattttttgtaaaaaattatatattaaatgcacaaattttagtatttttcaataaacatgctatttcaggatcacactta

SEQ ID NO: 735664 - DNA, 7604 bp, Homo sapiens
tttgatctatgaaccattttatttcaaatacatcttactgttacaatttggcctactgcttggtggggaaaggcctttccacgtttcactcactgcagagcaatccagctttcctgtgatattcatctgatgtttatatccatcttttgaaatataggggctattagaccagaaatattccatgaagaagggagcaaagattcatgtcactgacaacttctgaaagggcagtctaatgacaaagtcagtcgataattgctcagaagatctgtattcaccagaaagagtctttctgctgatattcagaagatcaaattttaagctcagcatgaaccaagatccagttacactcagtatctcttcttttgtgggtctcatttcaataatgttccagacctgattcagtcagtctcaaataccctttggaataatagtcttctgttctctagcagtgacatttctccagcaacagtggcatattcagaagaaccagaaaagttcatttggcaccaacatttcacatgaggtacttcgagtagtcaaattcatagagacggaaagtagaatggtgtttgccaggggcagctatgtaaccttgggcaagtgatttaatttctttgagtccaaagttttgcatcatataaggcctcagataactttctccttcagacagaacatgtgggagaataagatccctgtggcaaaatcccattctttgtccttagcgccagatgccatcacttcttggaaatgtcatcattgcatatttctcctcacactcccactcctccgtttccgcggtcgaagctgccttcggccccgggtggtctcccccgcccggggaccccctgtgcctcccctcccgggctgcgggggagcccctccgagaccatgaggaaattcaacatcaggaaggtgctggacggcctgaccgccggctcgtcctcggcgtcgcagcagcaacagcagcagcatccgcctgggaaccgggagccggagatccaggaaacgctccagtccgagcactttcagctctgcaagactgttcgccatggatttccctatcaaccctcagccctggcctttgatcctgtacagaagatcctggcagtgggaactcagactggtgctttaaggctctttggtcgtccaggagtagaatgttattgccagcatgacagtggagctgcagtaatccagctccagttcctgattaatgagggagcgcttgtgagtgccttggctgatgacaccttacacttatggaatttacgtcagaagaggcctgccatactacattcgcttaaattttgcagagaaagggttacattttgccatctgcctttccagagtaagtggctctatgtgggcactgaacgaggtaatatacatattgtcaatgtggagtccttcacactctcaggctacgtcattatgtggaataaagccattgaactgtcatctaaatctcacccaggacctgtggtccatataagtgataatccaatggacgagggaaagcttttgattggctttgaatctggaacagtagttttatgggacctcaaatcaaagaaagccgactacagatacacatatgatgaggctatccactctgttgcttggcatcatgaaggaaaacaatttatttgcagtcattcagatggcaccttgactatatggaatgtaaggtcccctgctaaaccagtacagacaatcactccacatggaaaacagttaaaggatgggaagaagccagaaccatgcaaacctatcctcaaggtggaattcaaaacgactagatctggggagccttttattattttatcaggaggtttgtcatatgatactgtaggaagaagaccttgcttaacagtgatgcatgggaaaagcactgctgtgctagaaatggactattcaattgttgattttctaacgctgtgtgaaacaccatacccaaatgattttcaagaaccatatgctgtggttgttcttctagaaaaggatttagtacttatagaccttgcacaaaatggatatcctatatttgaaaatccctaccctttgagtatacatgagtcccctgttacatgttgcgaatattttgcggattgtcctgtggaccttattcctgcactttattctgttggagctagacagaaacgtcaaggttacagcaaaaaggaatggcccatcagcggaggtaattggggcttgggtgctcaaagttacccagaaataattattacagggcatgctgatgggtcagttaagttctgggatgcttctgcaataactctacaagtattatataagctaaagacatctaaagtatttgaaaagtcaagaaataaagatgacaggccaaacacagacattgtagatgaagatccatatgccattcagatcatctcctggtgtccagaaagtagaatgctgtgcatcgctggagtttcagctcatgtcattatttatagattcagcaagcaggaagtaatcacagaagtcattccgatgcttgaagttcgattattatatgagataaatgatgtggaaactccggagggtgagcagccaccacctttgccaacacccgtgggagggtccaaccctcagcccatccctcctcagtctcatccatctaccagtagcagttcatctgatgggcttcgtgataatgtaccttgtttaaaagttaaaaactcaccacttaaacagtctccaggttatcaaacagaactagttattcagttggtttgggtgggtggagaaccaccacaacaaataaccagcctggcagtcaattcttcctatggactggtggtttttggcaattgcaatggcattgctatggttgactacctccagaaagcagtgctgctcaacctgggcactattgaattatatggctctaatgatccttatcggagagaaccccgatctcctcgtaaatctcgacagccttcaggagccggtctgtgtgatattagtgaagggactgttgttccagaggatcgctgcaaatctccaacctctgcaaagatgtcaaggaagttaagcttacctactgacctaaagcctgatttagatgtaaaggataactcctttagccgatcacggagttcaagtgtaacaagcattgacaaagaatcccgagaagcgatctccgctcttcatttctgtgaaacgtttactcgaaagacggactcgtccccttccccttgtctgtgggttggaacaacgctaggaacagtgcttgtcattgcactgaaccttcccccagggggagagcaaagacttcttcagccagtaattgtgtctccaagtggtactatattgaggttaaaaggtgcaatcttgagaatggcatttctggataccacaggctgcttaataccacctgcgtatgaaccctggagagagcacaatgttcctgaagaaaaagacgaaaaggagaaattgaaaaaacggcggcctgtctcagtatccccctcctcttctcaggaaattagtgaaaaccagtatgcagtgatatgttctgaaaagcaagcaaaagtaatctcactgccaacccagaactgtgcttataagcaaaatattacagagacctcgtttgtgcttcgtggagatattgtagcattgagtaacagtatctgccttgcctgtttctgtgccaatggacatataatgacttttagtttgccaagtttaagacctctgttggatgtgtattacttgccccttaccaatatgcggatagccagaacgttctgctttaccaacaatggacaagcattataccttgtttcacctacagaaatccagagacttacttatagtcaagagacctgtgaaaatcttcaggaaatgttgggtgaactcttcactcctgtagaaacacctgaagcaccaaacaggggattctttaaaggcttatttggaggtggtgcacaatctcttgacagagaagaactatttggagaatcgtcctcaggaaaggcttcaaggagccttgcacagcatattcctggccctggtggcattgaaggcgtaaaaggggcagcatctggagttgttggtgaattagcacgagccaggctggcactagatgaaagagggcagaaacttggcgatctggaagaaagaactgcggccatgttatcaagtgcagagtcattttctaaacatgctcatgagattatgttgaaatacaaagataagaagtggtaccagttctgacaaccagaatccaataagtccaacttcagccagaaggaaaaaagttttccatttttattacattctttaggaaagttaacgttaaagggatgttcgtcactgaatactgttctttcctagcacagtcatgcactgttttacctcagtcatgtggctttaactgaggagtgttcacacgcactcgaaatggagtatatggtgtgtgccagttatgagttgaccatttgggaattaaacaggtcacacgtgacagatgaagaaaccaagggggctgctgaggagacctggtgcagggactaatcctggatcattcctgtattaaactttcatatgccaaaagggtttgtgccgttttatctgccatcagtgtttgacctgtttagggcagaggcaataagtcagaagtcttgaagttgaaatagttatatgtgtgtcattggactggattataaacagctgtcttggactttccctctcttaacactgactggtcatcagtatcattagtgaaaaagaaacaaattgtttgttatcatctctttagacagataagctgaatggtgggctttaaataataaaaacatacacatagttgacttgtgtatgagctactcttggattcttgttattatagacttgtatttagttcatattttgtcaaaagcaaaacaagaagatacatcacttttcattgaaaagaaaagtgtagagcatgactgaattgctcatcattctgggagtttccatgtagtggctatgcagtgtggaaagtgagaaaaacctccattgtggtgaggagaatacttcaatgtcccttgtccttgttctcattaattcagctaaaggtggatttgaccaaaataatgctggttaaatttgtagaaatgttgaaattggctgtgttttaaattttgcttgaatttttataaaatgtttaaccaaatgtacctttgcattctttaattaaaattgcttaaaaaaaaactttcattatttcagtaaaatgctcagctcccttttcaaaatgccctttatttgctaactgttccaatacactcaggtgatgagccaattaaatgttagtgcacatgctatcgcatggaaaattacaagcatctgttgtcaataattatataagagtttagtctgatgacctacaaaatattttgtgtagaaatatactataaatctgtacatatcctttcaaggttttaaaaaaccaaaaagaaaggaaaatatgtacactgtgataactaaattatttctgtattggaatataatacaatttgagaccagcaatggacaatgaatgattgtttcatagaatagcattacgggcaggaaagaaaccacctagtagatctagaagtaagcaatctcagaatacagactaatctgagattattattgattgttgttaaagcaacccagcaaaagcaaaatggaagcattaaaattaatgttaatgaaatttaaatattgtcttctataaaaaattcctttaaatgattttgttttttcattaagagataatcagagcacaaattgatagtaaacaggatggttgtttttctattctatatgatcattaaaggaatatgtaggacatcttaactttttcatacagtctgttatgcatattttcctctacttttcattaataaagcttttatgtttacattttataacatgcactactagatgcaaaagtttacatcaaagtttactttaaatatcatttggtagggactaaatgtgtgtgatagagataattgatcaagccaaaagaaatattttttaaataagcccttttcaaaagtttttgaatttatagaaagcaccaatgaataacatatttctgtttcgttaatgtcagctgcctgaacattcagcagtttataaattgcttaatttgtgttatctattatccagtaaacccatagttccatgatatgtcacaggaattgttaggtcctattttaaaggtacagttttgtgaatgtcatcaataaaatcaacagttatggatttgaagaagttgggaaagcattatgtagattaatatactggttggttccctatctatgtggaaggtcatattagctgcaattatttaatttgctgtgttattttgtgttatataacacaaatatatttgtatattaacttcatttttactgtcatttttcctgttgtatacaaaatgaactaatcttgtaattattttcaaatatagaagtatatacattagatggatttccaagattttgtaagaaaatcttaaatcagtgttttgagttatttaatttttaaattaatctacaaattatgcacaacaaactagagactcagttaggattagaaagcttaaagtatgtttgagtgtaggaaataagcttctcagagttatacttgattctgtctgtagataagagacagtctacagtaataactaacccagggaatttactgtaatttgagaggtaacatctctatttttttctttttaaatacagaaagtaatagtcaccagcaagccacgatttcaggaaaactgactaaaaaaaaaagtcaaaatagaaaatatcagaaaaatgaaagatttttgtgtgccctctccatatcctcattgtttttgttgcatttgtccttgactctaaaatcactgaagtattcatgattagtagtttgtaagtaggaagtggtttttctgtatgtaccatatatccagttcatttcagttttcaaactaaaatccatatgtatttgctgagaaagttatttgaaatcttatattctgacaaattctgtacattacatccatttgaagttttgcatcatcttaacacttttgctttgcatttcaattgtacaaagtgtttccaaaaaaatggttatagattcgactgagctattactaacttctccatttgattttttatggatgtgaaaaatgctgctacttgtctatgttattatgtgtaagtatattacaatttaattaagtacaatagtttaaagaacgaagcaattttttttttttgggcttagaacttcttaattgtaggttcctctgaagcgatttcatgtagatatgtgagtgttttaaacaagtctgaaagtgttacatacttttaggttacaggggtgctggggagacagctgaggaaaggaagaatatgtggaagacaccacggagttcaaagttttaccctgagttctatcttccatgtatgttttgcttaaggcatttctcatgtgacattagaaaagctatatccaaaggtaaattttttgtggcaaagatttattttacactttaacttttgggattttatttgtttcagcaaaataaagagcactga

SEQ ID NO: 735665 - DNA, 8635 bp, Homo sapiens
tttgatctatgaaccattttatttcaaatacatcttactgttacaatttggcctactgcttggtggggaaaggcctttccacgtttcactcactgcagagcaatccagctttcctgtgatattcatctgatgtttatatccatcttttgaaatataggggctattagaccagaaatattccatgaagaagggagcaaagattcatgtcactgacaacttctgaaagggcagtctaatgacaaagtcagtcgataattgctcagaagatctgtattcaccagaaagagtctttctgctgatattcagaagatcaaattttaagctcagcatgaaccaagatccagttacactcagtatctcttcttttgtgggtctcatttcaataatgttccagacctgattcagtcagtctcaaataccctttggaataatagtcttctgttctctagcagtgacatttctccagcaacagtggcatattcagaagaaccagaaaagttcatttggcaccaacatttcacatgaggtacttcgagtagtcaaattcatagagacggaaagtagaatggtgtttgccaggggcagctatgtaaccttgggcaagtgatttaatttctttgagtccaaagttttgcatcatataaggcctcagataactttctccttcagacagaacatgtgggagaataagatccctgtggcaaaatcccattctttgtccttagcgccagatgccatcacttcttggaaatgtcatcattgcatatttctcctcacactcccactcctccgtttccgcggtcgaagctgccttcggccccgggtggtctcccccgcccggggaccccctgtgcctcccctcccgggctgcgggggagcccctccgagaccatgaggaaattcaacatcaggaaggtgctggacggcctgaccgccggctcgtcctcggcgtcgcagcagcaacagcagcagcatccgcctgggaaccgggagccggagatccaggaaacgctccagtccgagcactttcagctctgcaagactgttcgccatggatttccctatcaaccctcagccctggcctttgatcctgtacagaagatcctggcagtgggaactcagactggtgctttaaggctctttggtcgtccaggagtagaatgttattgccagcatgacagtggagctgcagtaatccagctccagttcctgattaatgagggagcgcttgtgagtgccttggctgatgacaccttacacttatggaatttacgtcagaagaggcctgccatactacattcgcttaaattttgcagagaaagggttacattttgccatctgcctttccagagtaagtggctctatgtgggcactgaacgaggtaatatacatattgtcaatgtggagtccttcacactctcaggctacgtcattatgtggaataaagccattgaactgtcatctaaatctcacccaggacctgtggtccatataagtgataatccaatggacgagggaaagcttttgattggctttgaatctggaacagtagttttatgggacctcaaatcaaagaaagccgactacagatacacatatgatgaggctatccactctgttgcttggcatcatgaaggaaaacaatttatttgcagtcattcagatggcaccttgactatatggaatgtaaggtcccctgctaaaccagtacagacaatcactccacatggaaaacagttaaaggatgggaagaagccagaaccatgcaaacctatcctcaaggtggaattcaaaacgactagatctggggagccttttattattttatcaggaggtttgtcatatgatactgtaggaagaagaccttgcttaacagtgatgcatgggaaaagcactgctgtgctagaaatggactattcaattgttgattttctaacgctgtgtgaaacaccatacccaaatgattttcaagaaccatatgctgtggttgttcttctagaaaaggatttagtacttatagaccttgcacaaaatggatatcctatatttgaaaatccctaccctttgagtatacatgagtcccctgttacatgttgcgaatattttgcggattgtcctgtggaccttattcctgcactttattctgttggagctagacagaaacgtcaaggttacagcaaaaaggaatggcccatcagcggaggtaattggggcttgggtgctcaaagttacccagaaataattattacagggcatgctgatgggtcagttaagttctgggatgcttctgcaataactctacaagtattatataagctaaagacatctaaagtatttgaaaagtcaagaaataaagatgacaggccaaacacagacattgtagatgaagatccatatgccattcagatcatctcctggtgtccagaaagtagaatgctgtgcatcgctggagtttcagctcatgtcattatttatagattcagcaagcaggaagtaatcacagaagtcattccgatgcttgaagttcgattattatatgagataaatgatgtggaaactccggagggtgagcagccaccacctttgccaacacccgtgggagggtccaaccctcagcccatccctcctcagtctcatccatctaccagtagcagttcatctgatgggcttcgtgataatgtaccttgtttaaaagttaaaaactcaccacttaaacagtctccaggttatcaaacagaactagttattcagttggtttgggtgggtggagaaccaccacaacaaataaccagcctggcagtcaattcttcctatggactggtggtttttggcaattgcaatggcattgctatggttgactacctccagaaagcagtgctgctcaacctgggcactattgaattatatggctctaatgatccttatcggagagaaccccgatctcctcgtaaatctcgacagccttcaggagccggtctgtgtgatattagtgaagggactgttgttccagaggatcgctgcaaatctccaacctctgcaaagatgtcaaggaagttaagcttacctactgacctaaagcctgatttagatgtaaaggataactcctttagccgatcacggagttcaagtgtaacaagcattgacaaagaatcccgagaagcgatctccgctcttcatttctgtgaaacgtttactcgaaagacggactcgtccccttccccttgtctgtgggttggaacaacgctaggaacagtgcttgtcattgcactgaaccttcccccagggggagagcaaagacttcttcagccagtaattgtgtctccaagtggtactatattgaggttaaaaggtgcaatcttgagaatggcatttctggataccacaggctgcttaataccacctgcgtatgaaccctggagagagcacaatgttcctgaagaaaaagacgaaaaggagaaattgaaaaaacggcggcctgtctcagtatccccctcctcttctcaggaaattagtgaaaaccagtatgcagtgatatgttctgaaaagcaagcaaaagtaatctcactgccaacccagaactgtgcttataagcaaaatattacagagacctcgtttgtgcttcgtggagatattgtagcattgagtaacagtatctgccttgcctgtttctgtgccaatggacatataatgacttttagtttgccaagtttaagacctctgttggatgtgtattacttgccccttaccaatatgcggatagccagaacgttctgctttaccaacaatggacaagcattataccttgtttcacctacagaaatccagagacttacttatagtcaagagacctgtgaaaatcttcaggaaatgttgggtgaactcttcactcctgtagaaacacctgaagcaccaaacaggggattctttaaaggcttatttggaggtggtgcacaatctcttgacagagaagaactatttggagaatcgtcctcaggaaaggcttcaaggagccttgcacagcatattcctggccctggtggcattgaaggcgtaaaaggggcagcatctggagttgttggtgaattagcacgagccaggctggcactagatgaaagagggcagaaacttggcgatctggaagaaagaactgcggccatgttatcaagtgcagagtcattttctaaacatgctcatgagattatgttgaaatacaaagataagaagtggtaccagttctgacaaccagaatccaataagtccaacttcagccagaaggaaaaaagttttccatttttattacattctttaggaaagttaacgttaaagggatgttcgtcactgaatactgttctttcctagcacagtcatgcactgttttacctcagtcatgtggctttaactgaggagtgttcacacgcactcgaaatggagtatatggtgtgtgccagttatgagttgaccatttgggaattaaacaggtcacacgtgacagatgaagaaaccaagggggctgctgaggagacctggtgcagggactaatcctggatcattcctgtattaaactttcatatgccaaaagggtttgtgccgttttatctgccatcagtgtttgacctgtttagggcagaggcaataagtcagaagtcttgaagttgaaatagttatatgtgtgtcattggactggattataaacagctgtcttggactttccctctcttaacactgactggtcatcagtatcattagtgaaaaagaaacaaattgtttgttatcatctctttagacagataagctgaatggtgggctttaaataataaaaacatacacatagttgacttgtgtatgagctactcttggattcttgttattatagacttgtatttagttcatattttgtcaaaagcaaaacaagaagatacatcacttttcattgaaaagaaaagtgtagagcatgactgaattgctcatcattctgggagtttccatgtagtggctatgcagtgtggaaagtgagaaaaacctccattgtggtgaggagaatacttcaatgtcccttgtccttgttctcattaattcagctaaaggtggatttgaccaaaataatgctggttaaatttgtagaaatgttgaaattggctgtgttttaaattttgcttgaatttttataaaatgtttaaccaaatgtacctttgcattctttaattaaaattgcttaaaaaaaaactttcattatttcagtaaaatgctcagctcccttttcaaaatgccctttatttgctaactgttccaatacactcaggtgatgagccaattaaatgttagtgcacatgctatcgcatggaaaattacaagcatctgttgtcaataattatataagagtttagtctgatgacctacaaaatattttgtgtagaaatatactataaatctgtacatatcctttcaaggttttaaaaaaccaaaaagaaaggaaaatatgtacactgtgataactaaattatttctgtattggaatataatacaatttgagaccagcaatggacaatgaatgattgtttcatagaatagcattacgggcaggaaagaaaccacctagtagatctagaagtaagcaatctcagaatacagactaatctgagattattattgattgttgttaaagcaacccagcaaaagcaaaatggaagcattaaaattaatgttaatgaaatttaaatattgtcttctataaaaaattcctttaaatgattttgttttttcattaagagataatcagagcacaaattgatagtaaacaggatggttgtttttctattctatatgatcattaaaggaatatgtaggacatcttaactttttcatacagtctgttatgcatattttcctctacttttcattaataaagcttttatgtttacattttataacatgcactactagatgcaaaagtttacatcaaagtttactttaaatatcatttggtagggactaaatgtgtgtgatagagataattgatcaagccaaaagaaatattttttaaataagcccttttcaaaagtttttgaatttatagaaagcaccaatgaataacatatttctgtttcgttaatgtcagctgcctgaacattcagcagtttataaattgcttaatttgtgttatctattatccagtaaacccatagttccatgatatgtcacaggaattgttaggtcctattttaaaggtacagttttgtgaatgtcatcaataaaatcaacagttatggatttgaagaagttgggaaagcattatgtagattaatatactggttggttccctatctatgtggaaggtcatattagctgcaattatttaatttgctgtgttattttgtgttatataacacaaatatatttgtatattaacttcatttttactgtcatttttcctgttgtatacaaaatgaactaatcttgtaattattttcaaatatagaagtatatacattagatggatttccaagattttgtaagaaaatcttaaatcagtgttttgagttatttaatttttaaattaatctacaaattatgcacaacaaactagagactcagttaggattagaaagcttaaagtatgtttgagtgtaggaaataagcttctcagagttatacttgattctgtctgtagataagagacagtctacagtaataactaacccagggaatttactgtaatttgagaggtaacatctctatttttttctttttaaatacagaaagtaatagtcaccagcaagccacgatttcaggaaaactgactaaaaaaaaaagtcaaaatagaaaatatcagaaaaatgaaagatttttgtgtgccctctccatatcctcattgtttttgttgcatttgtccttgactctaaaatcactgaagtattcatgattagtagtttgtaagtaggaagtggtttttctgtatgtaccatatatccagttcatttcagttttcaaactaaaatccatatgtatttgctgagaaagttatttgaaatcttatattctgacaaattctgtacattacatccatttgaagttttgcatcatcttaacacttttgctttgcatttcaattgtacaaagtgtttccaaaaaaatggttatagattcgactgagctattactaacttctccatttgattttttatggatgtgaaaaatgctgctacttgtctatgttattatgtggtatttgttctcttggattgaaatttatgcccacagatttttcttttcatttgaaaatgaatgtgaagatactgtttacagcttttgttaattgcacttttcatcactctgatcaatttcttgtaaagtgctatgggaattatttttcctgtgaatattaatgattttactactgcctccgaagttttaaaaaaggttctgtagacagaaaacagttgttgcaaccaaaaacaaccaaaaaaagaaaaaaagggaaaactggcttacctttctcagatgaattaaatgattttaataacttcccaattaccagggttataacattgctttcttcagttattaatacagtcaaattaattttaacaatataggcacaattcatttacaaattcagtacagtagtccagggctacatgtaagtggtctctttattttattctttacatcagaaaaatcatgaatgtcagttttgccagtattttacaatgaggcttatcgtttaaaattttatagtgtatgacatgtaaataaaccagtatttattgtaggttgtttgattcaggcatttcaaatggatataggttaatggcaatggaatcctatttatttggtagttggttttgtttgtttttgtttatttacttttgctatttgttttgtattgtctaaactttgcttcaactgaagacagtgtaaggagttgaaaatacaatcaacatagcaatggaaagcaatgcaaagagggtaaatcttgttttaatttttttaactttttttttttgtaaataaatagtactgtgatactttaggtgtgacctctattccacatgatagttagaaccagaaaaacacttttgctttctagttatactattggttcattgtaaatgcattaccaaaagacaatatgaaaaagagcaagattaagtttttctaacattgtccacttcaggggcaagcatgcttggtatagagctctagcttgtgtataccttaaactgtaacttgcaggtgtttttcagttgctgcactttttatttaatcttgctcagtcccagtaactatctcaaaggtaattgctggaatatgcattttgaaatacggtttaaaaaaaatctgtgtattgtttcatctaaaaagaaaagcactattggaaacactaaaaacgtgttaaactttgtagttattttgcattcctgtactttacaaactgtcatcacagcaaaaagtttaaaattaggtaatgaaatatttttgtaaataaataccgttaagctggtattttaaaaaatgtattataaattaattaatgtttctggaaaatgttcatatatatgtatatgaatgtctctttatgctgaagggctctgattgggcaaaataaaatactctaatctctcctgaaactaaacaa

SEQ ID NO: 735666 - DNA, 3403 bp, Homo sapiens
tttgatctatgaaccattttatttcaaatacatcttactgttacaatttggcctactgcttggtggggaaaggcctttccacgtttcactcactgcagagcaatccagctttcctgtgatattcatctgatgtttatatccatcttttgaaatataggggctattagaccagaaatattccatgaagaagggagcaaagattcatgtcactgacaacttctgaaagggcagtctaatgacaaagtcagtcgataattgctcagaagatctgtattcaccagaaagagtctttctgctgatattcagaagatcaaattttaagctcagcatgaaccaagatccagttacactcagtatctcttcttttgtgggtctcatttcaataatgttccagacctgattcagtcagtctcaaataccctttggaataatagtcttctgttctctagcagtgacatttctccagcaacagtggcatattcagaagaaccagaaaagttcatttggcaccaacatttcacatgaggtacttcgagtagtcaaattcatagagacggaaagtagaatggtgtttgccaggggcagctatgtaaccttgggcaagtgatttaatttctttgagtccaaagttttgcatcatataaggcctcagataactttctccttcagacagaacatgtgggagaataagatccctgtggcaaaatcccattctttgtccttagcgccagatgccatcacttcttggaaatgtcatcattgcatatttctcctcacactcccactcctccgtttccgcggtcgaagctgccttcggccccgggtggtctcccccgcccggggaccccctgtgcctcccctcccgggctgcgggggagcccctccgagaccatgaggaaattcaacatcaggaaggtgctggacggcctgaccgccggctcgtcctcggcgtcgcagcagcaacagcagcagcatccgcctgggaaccgggagccggagatccaggaaacgctccagtccgagcactttcagctctgcaagactgttcgccatggatttccctatcaaccctcagccctggcctttgatcctgtacagaagatcctggcagtgggaactcagactggtgctttaaggctctttggtcgtccaggagtagaatgttattgccagcatgacagtggagctgcagtaatccagctccagttcctgattaatgagggagcgcttgtgagtgccttggctgatgacaccttacacttatggaatttacgtcagaagaggcctgccatactacattcgcttaaattttgcagagaaagggttacattttgccatctgcctttccagagtaagtggctctatgtgggcactgaacgaggtaatatacatattgtcaatgtggagtccttcacactctcaggctacgtcattatgtggaataaagccattgaactgtcatctaaatctcacccaggacctgtggtccatataagtgataatccaatggacgagggaaagcttttgattggctttgaatctggaacagtagttttatgggacctcaaatcaaagaaagccgactacagatacacatatgatgaggctatccactctgttgcttggcatcatgaaggaaaacaatttatttgcagtcattcagatggcaccttgactatatggaatgtaaggtcccctgctaaaccagtacagacaatcactccacatggaaaacagttaaaggatgggaagaagccagaaccatgcaaacctatcctcaaggtggaattcaaaacgactagatctggggagccttttattattttatcaggaggtttgtcatatgatactgtaggaagaagaccttgcttaacagtgatgcatgggaaaagcactgctgtgctagaaatggactattcaattgttgattttctaacgctgtgtgaaacaccatacccaaatgattttcaagaaccatatgctgtggttgttcttctagaaaaggatttagtacttatagaccttgcacaaaatggatatcctatatttgaaaatccctaccctttgagtatacatgagtcccctgttacatgttgcgaatattttgcggattgtcctgtggaccttattcctgcactttattctgttggagctagacagaaacgtcaaggttacagcaaaaaggaatggcccatcagcggaggtaattggggcttgggtgctcaaagttacccagaaataattattacagggcatgctgatgggtcagttaagttctgggatgcttctgcaataactctacaagtattatataagctaaagacatctaaagtatttgaaaagtcaagaaataaagatgacaggccaaacacagacattgtagatgaagatccatatgccattcagatcatctcctggtgtccagaaagtagaatgctgtgcatcgctggagtttcagctcatgtcattatttatagattcagcaagcaggaagtaatcacagaagtcattccgatgcttgaagttcgattattatatgagataaatgatgtggaaactccggagggtgagcagccaccacctttgccaacacccgtgggagggtccaaccctcagcccatccctcctcagtctcatccatctaccagtagcagttcatctgatgggcttcgtgataatgtaccttgtttaaaagttaaaaactcaccacttaaacagtctccaggttatcaaacagaactagttattcagttggtttgggtgggtggagaaccaccacaacaaataaccagcctggcagtcaattcttcctatggactggtggtttttggcaattgcaatggcattgctatggttgactacctccagaaagcagtgctgctcaacctgggcactattgaattatatggctctaatgatccttatcggagagaaccccgatctcctcgtaaatctcgacagccttcaggagccggtctgtgtgatattagtgaagggactgttgttccagaggatcgctgcaaatctccaacctctggttcttcatcaccacacaattcagatgatgaacaaaaaatgaataattttatagaaaagggtatagtatcttgattttaaagtattttcttttatgtttaatttatttagtttactttgactagattttgacattttatatcaaaatattgttttcagtgaagaccaaaagcagaaagttttccaagatggtagccaatgatataggtaggaaatagaaatttctattttgtttctaatccttgctatatgcagtgctaacccaacaccagaattatccagtgcattgcatttttgtgtaaatttgttgttcctatgctaaaaaaataatctcttgggctgtgtctcttctaaactcattggggca

SEQ ID NO: 735667 - DNA, 2097 bp, Homo sapiens
tttgatctatgaaccattttatttcaaatacatcttactgttacaatttggcctactgcttggtggggaaaggcctttccacgtttcactcactgcagagcaatccagctttcctgtgatattcatctgatgtttatatccatcttttgaaatataggggctattagaccagaaatattccatgaagaagggagcaaagattcatgtcactgacaacttctgaaagggcagtctaatgacaaagtcagtcgataattgctcagaagatctgtattcaccagaaagagtctttctgctgatattcagaagatcaaattttaagctcagcatgaaccaagatccagttacactcagtatctcttcttttgtgggtctcatttcaataatgttccagacctgattcagtcagtctcaaataccctttggaataatagtcttctgttctctagcagtgacatttctccagcaacagtggcatattcagaagaaccagaaaagttcatttggcaccaacatttcacatgaggtacttcgagtagtcaaattcatagagacggaaagtagaatggtgtttgccaggggcagctatgtaaccttgggcaagtgatttaatttctttgagtccaaagttttgcatcatataaggcctcagataactttctccttcagacagaacatgtgggagaataagatccctgtggcaaaatcccattctttgtccttagcgccagatgccatcacttcttggaaatgtcatcattgcatatttctcctcacactcccactcctccgtttccgcggtcgaagctgccttcggccccgggtggtctcccccgcccggggaccccctgtgcctcccctcccgggctgcgggggagcccctccgagaccatgaggaaattcaacatcaggaaggtgctggacggcctgaccgccggctcgtcctcggcgtcgcagcagcaacagcagcagcatccgcctgggaaccgggagccggagatccaggaaacgctccagtccgagcactttcagctctgcaagactgttcgccatggatttccctatcaaccctcagccctggcctttgatcctgtacagaagatcctggcagtgggaactcagactggtgctttaaggctctttggtcgtccaggagtagaatgttattgccagcatgacagtggagctgcagtaatccagctccagttcctgattaatgagggagcgcttgtgagtgccttggctgatgacaccttacacttatggaatttacgtcagaagaggcctgccatactacattcgcttaaattttgcagagaaagggttacattttgccatctgcctttccagagtaagtggctctatgtgggcactgaacgaggtaatatacatattgtcaatgtggagtccttcacactctcaggctacgtcattatgtggaataaagccattgaactgtcatctaaatctcacccaggacctgtggtccatataagtgataatccaatggacgagggaaagcttttgattggctttgaatctggaacagtagttttatgggacctcaaatcaaagaaagccgactacagatacacatatgatgaggctatccactctgttgcttggcatcatgaaggaaaacaatttatttgcagtcattcagatggcaccttgactatatggaatgtaaggtcccctgctaaaccagtacagacaatcactccacatggaaaacagttaaaggatgggaagaagccagaaccatgcaaacctatcctcaaggtggaattcaaaacgactagatctggggtttgttgagatccaacagatatattccaacaatagctatattccaacaatagattaaatgaactctaagaggtgtatcatctgtttgactcttgcatccttcattgtgtgacctgtagcatagttatctgacttctttgtggttcattttcctcacttatgacatagatggataaaatgtcagacattagttgtttaattgagatgataatgtatgtaaaacatttcaagcagtttctggtatataataaactctataaatgattgagaagccatttttttaaggaa

SEQ ID NO: 735668 - DNA, 942 bp, Homo sapiens
tttgatctatgaaccattttatttcaaatacatcttactgttacaatttggcctactgcttggtggggaaaggcctttccacgtttcactcactgcagagcaatccagctttcctgtgatattcatctgatgtttatatccatcttttgaaatataggggctattagaccagaaatattccatgaagaagggagcaaagattcatgtcactgacaacttctgaaagggcagtctaatgacaaagtcagtcgataattgctcagaagatctgtattcaccagaaagagtctttctgctgatattcagaagatcaaattttaagctcagcatgaaccaagatccagttacactcagtatctcttcttttgtgggtctcatttcaataatgttccagacctgattcagtcagtctcaaataccctttggaataatagtcttctgttctctagcagtgacatttctccagcaacagtggcatattcagaagaaccagaaaagttcatttggcaccaacatttcacatgaggtacttcgagtagtcaaattcatagagacggaaagtagaatggtgtttgccaggggcatatatatttttaattatctgtatatgtatacaatctgtttcctcacataaattgtaagctcctgggtggcagctatgtaaccttgggcaagtgatttaatttctttgagtccaaagttttgcatcatataaggcctcagataactttctccttcagacagaacatgtgggagaataagatccctgtggcaaaatcccattctttgtccttagcgccagatgccatcacttcttggaaatgtcatcattgcatatttctatttgttttcttggtcgttgcacccagcgaatcaactaattcaataaatattaaacgacaaatcaaaattttgtaggttccaaatgcaagacatcgtcct

SEQ ID NO: 735669 - DNA, 7863 bp, Homo sapiens
agaaccaccactacacataaccagcctggcagtcaattcttcctatggactggtggtttttggcaattgcaatggcattgctatggttgactacctccagaaagcagtgctgctcaacctgggcactattgaattatatggctctaatgatccttatcggagagaaccccgatctcctcgtaaatctcgacagccttcaggagccggtctgtgtgatattagtgaagggactgttgttccagaggatcgctgcaaatctccaacctctgactgttcgccatggatttccctatcaaccctcagccctggcctttgatcctgtacagaagatcctggcagtgggaactcagactggtgctttaaggctctttggtcgtccaggagtagaatgttattgccagcatgacagtggagctgcagtaatccagctccagttcctgattaatgagggagcgcttgtgagtgccttggctgatgacaccttacacttatggaatttacgtcagaagaggcctgccatactacattcgcttaaattttgcagagaaagggttacattttgccatctgcctttccagagtaagtggctctatgtgggcactgaacgaggtaatatacatattgtcaatgtggagtccttcacactctcaggctacgtcattatgtggaataaagccattgaactgtcatctaaatctcacccaggacctgtggtccatataagtgataatccaatggacgagggaaagcttttgattggctttgaatctggaacagtagttttatgggacctcaaatcaaagaaagccgactacagatacacatatgatgaggctatccactctgttgcttggcatcatgaaggaaaacaatttatttgcagtcattcagatggcaccttgactatatggaatgtaaggtcccctgctaaaccagtacagacaatcactccacatggaaaacagttaaaggatgggaagaagccagaaccatgcaaacctatcctcaaggtggaattcaaaacgactagatctggggagccttttattattttatcaggaggtttgtcatatgatactgtaggaagaagaccttgcttaacagtgatgcatgggaaaagcactgctgtgctagaaatggactattcaattgttgattttctaacgctgtgtgaaacaccatacccaaatgattttcaagaaccatatgctgtggttgttcttctagaaaaggatttagtacttatagaccttgcacaaaatggatatcctatatttgaaaatccctaccctttgagtatacatgagtcccctgttacatgttgcgaatattttgcggattgtcctgtggaccttattcctgcactttattctgttggagctagacagaaacgtcaaggttacagcaaaaaggaatggcccatcagcggaggtaattggggcttgggtgctcaaagttacccagaaataattattacagggcatgctgatgggtcagttaagttctgggatgcttctgcaataactctacaagtattatataagctaaagacatctaaagtatttgaaaagtcaagaaataaagatgacaggccaaacacagacattgtagatgaagatccatatgccattcagatcatctcctggtgtccagaaagtagaatgctgtgcatcgctggagtttcagctcatgtcattatttatagattcagcaagcaggaagtaatcacagaagtcattccgatgcttgaagttcgattattatatgagataaatgatgtggaaactccggagggtgagcagccaccacctttgccaacacccgtgggagggtccaaccctcagcccatccctcctcagtctcatccatctaccagtagcagttcatctgatgggcttcgtgataatgtaccttgtttaaaagttaaaaactcaccacttaaacagtctccaggttatcaaacagaactagttattcagttggtttgggtgggtggagaaccaccacaacaaataaccagcctggcagtcaattcttcctatggactggtggtttttggcaattgcaatggcattgctatggttgactacctccagaaagcagtgctgctcaacctgggcactattgaattatatggctctaatgatccttatcggagagaaccccgatctcctcgtaaatctcgacagccttcaggagccggtctgtgtgatattagtgaagggactgttgttccagaggatcgctgcaaatctccaacctctgcaaagatgtcaaggaagttaagcttacctactgacctaaagcctgatttagatgtaaaggataactcctttagccgatcacggagttcaagtgtaacaagcattgacaaagaatcccgagaagcgatctccgctcttcatttctgtgaaacgtttactcgaaagacggactcgtccccttccccttgtctgtgggttggaacaacgctaggaacagtgcttgtcattgcactgaaccttcccccagggggagagcaaagacttcttcagccagtaattgtgtctccaagtggtactatattgaggttaaaaggtgcaatcttgagaatggcatttctggataccacaggctgcttaataccacctgcgtatgaaccctggagagagcacaatgttcctgaagaaaaagacgaaaaggagaaattgaaaaaacggcggcctgtctcagtatccccctcctcttctcaggaaattagtgaaaaccagtatgcagtgatatgttctgaaaagcaagcaaaagtaatctcactgccaacccagaactgtgcttataagcaaaatattacagagacctcgtttgtgcttcgtggagatattgtagcattgagtaacagtatctgccttgcctgtttctgtgccaatggacatataatgacttttagtttgccaagtttaagacctctgttggatgtgtattacttgccccttaccaatatgcggatagccagaacgttctgctttaccaacaatggacaagcattataccttgtttcacctacagaaatccagagacttacttatagtcaagagacctgtgaaaatcttcaggaaatgttgggtgaactcttcactcctgtagaaacacctgaagcaccaaacaggggattctttaaaggcttatttggaggtggtgcacaatctcttgacagagaagaactatttggagaatcgtcctcaggaaaggcttcaaggagccttgcacagcatattcctggccctggtggcattgaaggcgtaaaaggggcagcatctggagttgttggtgaattagcacgagccaggctggcactagatgaaagagggcagaaacttggcgatctggaagaaagaactgcggccatgttatcaagtgcagagtcattttctaaacatgctcatgagattatgttgaaatacaaagataagaagtggtaccagttctgacaaccagaatccaataagtccaacttcagccagaaggaaaaaagttttccatttttattacattctttaggaaagttaacgttaaagggatgttcgtcactgaatactgttctttcctagcacagtcatgcactgttttacctcagtcatgtggctttaactgaggagtgttcacacgcactcgaaatggagtatatggtgtgtgccagttatgagttgaccatttgggaattaaacaggtcacacgtgacagatgaagaaaccaagggggctgctgaggagacctggtgcagggactaatcctggatcattcctgtattaaactttcatatgccaaaagggtttgtgccgttttatctgccatcagtgtttgacctgtttagggcagaggcaataagtcagaagtcttgaagttgaaatagttatatgtgtgtcattggactggattataaacagctgtcttggactttccctctcttaacactgactggtcatcagtatcattagtgaaaaagaaacaaattgtttgttatcatctctttagacagataagctgaatggtgggctttaaataataaaaacatacacatagttgacttgtgtatgagctactcttggattcttgttattatagacttgtatttagttcatattttgtcaaaagcaaaacaagaagatacatcacttttcattgaaaagaaaagtgtagagcatgactgaattgctcatcattctgggagtttccatgtagtggctatgcagtgtggaaagtgagaaaaacctccattgtggtgaggagaatacttcaatgtcccttgtccttgttctcattaattcagctaaaggtggatttgaccaaaataatgctggttaaatttgtagaaatgttgaaattggctgtgttttaaattttgcttgaatttttataaaatgtttaaccaaatgtacctttgcattctttaattaaaattgcttaaaaaaaaactttcattatttcagtaaaatgctcagctcccttttcaaaatgccctttatttgctaactgttccaatacactcaggtgatgagccaattaaatgttagtgcacatgctatcgcatggaaaattacaagcatctgttgtcaataattatataagagtttagtctgatgacctacaaaatattttgtgtagaaatatactataaatctgtacatatcctttcaaggttttaaaaaaccaaaaagaaaggaaaatatgtacactgtgataactaaattatttctgtattggaatataatacaatttgagaccagcaatggacaatgaatgattgtttcatagaatagcattacgggcaggaaagaaaccacctagtagatctagaagtaagcaatctcagaatacagactaatctgagattattattgattgttgttaaagcaacccagcaaaagcaaaatggaagcattaaaattaatgttaatgaaatttaaatattgtcttctataaaaaattcctttaaatgattttgttttttcattaagagataatcagagcacaaattgatagtaaacaggatggttgtttttctattctatatgatcattaaaggaatatgtaggacatcttaactttttcatacagtctgttatgcatattttcctctacttttcattaataaagcttttatgtttacattttataacatgcactactagatgcaaaagtttacatcaaagtttactttaaatatcatttggtagggactaaatgtgtgtgatagagataattgatcaagccaaaagaaatattttttaaataagcccttttcaaaagtttttgaatttatagaaagcaccaatgaataacatatttctgtttcgttaatgtcagctgcctgaacattcagcagtttataaattgcttaatttgtgttatctattatccagtaaacccatagttccatgatatgtcacaggaattgttaggtcctattttaaaggtacagttttgtgaatgtcatcaataaaatcaacagttatggatttgaagaagttgggaaagcattatgtagattaatatactggttggttccctatctatgtggaaggtcatattagctgcaattatttaatttgctgtgttattttgtgttatataacacaaatatatttgtatattaacttcatttttactgtcatttttcctgttgtatacaaaatgaactaatcttgtaattattttcaaatatagaagtatatacattagatggatttccaagattttgtaagaaaatcttaaatcagtgttttgagttatttaatttttaaattaatctacaaattatgcacaacaaactagagactcagttaggattagaaagcttaaagtatgtttgagtgtaggaaataagcttctcagagttatacttgattctgtctgtagataagagacagtctacagtaataactaacccagggaatttactgtaatttgagaggtaacatctctatttttttctttttaaatacagaaagtaatagtcaccagcaagccacgatttcaggaaaactgactaaaaaaaaaagtcaaaatagaaaatatcagaaaaatgaaagatttttgtgtgccctctccatatcctcattgtttttgttgcatttgtccttgactctaaaatcactgaagtattcatgattagtagtttgtaagtaggaagtggtttttctgtatgtaccatatatccagttcatttcagttttcaaactaaaatccatatgtatttgctgagaaagttatttgaaatcttatattctgacaaattctgtacattacatccatttgaagttttgcatcatcttaacacttttgctttgcatttcaattgtacaaagtgtttccaaaaaaatggttatagattcgactgagctattactaacttctccatttgattttttatggatgtgaaaaatgctgctacttgtctatgttattatgtggtatttgttctcttggattgaaatttatgcccacagatttttcttttcatttgaaaatgaatgtgaagatactgtttacagcttttgttaattgcacttttcatcactctgatcaatttcttgtaaagtgctatgggaattatttttcctgtgaatattaatgattttactactgcctccgaagttttaaaaaaggttctgtagacagaaaacagttgttgcaaccaaaaacaaccaaaaaaagaaaaaaagggaaaactggcttacctttctcagatgaattaaatgattttaataacttcccaattaccagggttataacattgctttcttcagttattaatacagtcaaattaattttaacaatataggcacaattcatttacaaattcagtacagtagtccagggctacatgtaagtggtctctttattttattctttacatcagaaaaatcatgaatgtcagttttgccagtattttacaatgaggcttatcgtttaaaattttatagtgtatgacatgtaaataaaccagtatttattgtaggttgtttgattcaggcatttcaaatggatataggttaatggcaatggaatcctatttatttggtagttggttttgtttgtttttgtttatttacttttgctatttgttttgtattgtctaaactttgcttcaactgaagacagtgtaaggagttgaaaatacaatcaacatagcaatggaaagcaatgcaaagagggtaaatcttgttttaatttttttaactttttttttttgtaaataaatagtactgtgatactttaggtgtgacctctattccacatgatagttagaaccagaaaaacacttttgctttctagttatactattggttcattgtaaatgcattaccaaaagacaatatgaaaaagagcaagattaagtttttctaacattgtccacttcaggggcaagcatgcttggtatagagctctagcttgtgtataccttaaactgtaacttgcaggtgtttttcagttgctgcactttttatttaatcttgctcagtcccagtaactatctcaaaggtaattgctggaatatgcattttgaaatacggtttaaaaaaaatctgtgtattgtttcatctaaaaagaaaagcactattggaaacactaaaaacgtgttaaactttgtagttattttgcattcctgtactttacaaactgtcatcacagcaaaaagtttaaaattaggtaatgaaatatttttgtaaataaataccgttaagctggtattttaaaaaatgtattataaattaattaatgtttctggaaaatgttcatatatatgtatatgaatgtctctttatgctgaagggctctgattgggcaaaataaaatactctaatctctcctgaaactaaacaa

SEQ ID NO: 735670 - DNA, 3331 bp, Homo sapiens
gtaagaaagagtgcctctgacagagttcactgagaacttcaatgtctttttttgacattgagttatctctgtggcttctgtcatttattagctcagaccacagcattaattactgatttttttaatcttaaatgacaagacactgctgtcctgggaccttgctttaggtttagttatggctttttcctcagcctatgtggcccacctttctaattttttttcctctcttttgacctccccagaccgagtgacggttctctacaggagcaaagccattcgctatacctggccttgtccatttcctatggccgactccagcccttgggttcatattaccctaggtgatggcagcaccttccagaccaaattgttggtagttgaagattcttattttgctaggggtcttgtatatctacatcttatcctagattctagggactctggttttcgatttaagctatagtttaattttaggcaaaacttttggttatgaggaccagtacctattcaggccagctcaagtggagatggtctcatcgtaaatcctgtacagggagcaatctcatgggccgtcttaggttgtgaaataacagatagctgggcctcacaggacaggcaccagagtgttgggaatggaggctgttctttccctctgaggagtctgtggtcattgatctcttgcctctcatttttctcctttctgctcacaagcttccctttttgcatggtagccattcctaaccctacatcagaactattcagctccagtgtgtgccccatactgaaactttccttattgctctctagttcaaatatcaggagggcctggctgagtttaactcatggctggcacctgttcagtcatgtccagctttggctctgttggctgaggctgatgtgacagtgcaggggctccacctctaggggctgtgagtgaagcaggcctgatggaattatcctgccacacaacaatcagagctggaggaaactttagggagcagagaaaaacttctgaagcagtttatgaagaggctggaagacttagcaggctcatgtgtccatgcagataggtgcagatggtcacaactccggagtacggcaggctgttggaatccagaatgtgagctggaactatgaccagtctgctgttgtggctactctgcatttatcagaggtaagatcctgagctgccatctggggactttattcataggcactaggtacttcacagagaaacttttctcctctctgttgcaggccacagaaaacaacgtagcctggcagagatttcttccctctgggcctattgctctgctcccggtaagaggtccttctgaccagtccgcccacatgcatgcaagcctttcctcttcactttctctcagcctttttctggtttcaagggaatctgcccaggctgtttgtaagttccctttttgtctttttatgcttgagagtttccaagtgcagcagagtcttagccgttggtattggtgttcttttgacacagctctcagacaccttgagttccttggtttggtccacgtcccatgaacatgcagcagagctagttagcatggatgaggaaaaatttgtggatgccgttaactctgcctttgtgagtatcaatttacccagctgatgatgtgctgtaagactgtgctgtctgcaaagccaaagccatcctttaacagggctgtgatgtagctgagatccatgcacaggaaaggactgcctgaggtgaagttttccaagttatcacacacttccctggcttttctttcaaaatcttcaacttttaaaataccccccttttcataatcaatcatgtctgtgtcaacagctcggtcataatagtaagagaaagcatagaaggaacctctctggacctcctctggctggtgaagttttcctcgtaccaccctcagcacttcggcatagcagggctcaaagcccacctccccttcttggttgccaccatactggtatttcacacccccaaagatccactctgcttccaaccatctcggtaaacaggcactccggaaagtgtgcccatcagtcccttctgtctccagggctcccagggttgctagtcttgcagctttcaatccaaatcccaggtaactatgtgtatagagcttataagtgctgttaaacatctcaaaggaagtgaggtagcccctaggagtttgttccagagttttctcaaactggggcaggaacgtgatttgggtggaggctccccctaggtccaaggtccccacagtctcctgtctgtggccatgcagctgacctgtcagaaaattcacagtaacccaagctaatatgccttcgtcggatccatccatgatgctaacactgccctttggtaccaggaaaggtgacttcctgaagatctcctttacctcaaagagcagagccttggctttgtgttctggcagtaagcgtagtcctgctgttgcctttaggaccactggggtctttttccagtgacttcgggggattgagtctttggccacctctaagagcccttgaacggtctcagcaccctgcttaggttgatctacaaaagcagaaagtcctggcttcacagaatcaaaaacttccccttctagaattggaagctgtcctggcattttctgcacaaaggtgtaaacatgaattcgagttccagtgctccctgcatcaaacataattccatacaaggtgctggcgctgacattgatggggcacatggaagacaggaagataccctcaaaccaagtctgctggttcctgtgggagacagcgctgcaaacacaggataccaccagcatgaaaaagactgtgccccaagaagtggccattcttttcccaagatgtggctgggtggaggcttttgttgcagaagcaatcctgctcgcacacctgcagaggctgtagtctcagctactcgggagggtgaggcaggaggatcgcttgagcccaggagtttgaagctgccgtgagctgtgattgcaccactgtactccagcctcggtgacagagtgagaccaattttttctttccttctgaattttctccttggttcctttattatatcactttttcaaccttacatctggatacaagtcctacctaacagcaccataatgatcttgtctgtatgaggattcagccaagacactccacatttctttgttgaccaggaacaaggaaaacgcgcgcgcgccacccttgcgcggcaggacgcgtgggtcgacgcctatctttgtacttccgggccggtccccccctctttcttcctcctggttgtttttccttttcttgtccttcctgggggctgggc

SEQ ID NO: 735671 - DNA, 2657 bp, Homo sapiens
atgttggtccactgtactgatgtgggctgagagagccaaccaaatccaagtggggttttgtcaggaacggtattggaaactctgaactagataaataattcaaaggatattagctaaagtgatcagggaccaggacaggaaggtactgttacaaacggagagaataaaagggcaaactgaaataatagatcctggaatagcacagacactgacctctgaccacagaccaaaagttagggcctagttgtatttcttagaaatacaaagaaaacaagtttagaatcatagaaaacactgttaacacattagcctgggaggtggtactggcactgaatatacacatacccataaagtcggatatgttcattaatcccagagttgactgataaaatgctgattaaagcaaaggtaggctatatgaggcagccacaccctcccaaaacatgtccccagagaccgggtggccttctttcttaaggctgtaatttatgcacagttaggagttactctctcatcctattaatatttaggatggctctcagctggctgattggagctaacacagaataggatcatacagattctgacatggtcccattttgcgttgttgaattatacatggaaagcaaaaccaggtttttttttttctctctttttcaggggaggtgggtgcagataagggtgggcagggcactgtatagggaggaaaaaaatactgatattgatgggtcttgggattgcaataagtcagtttaccatttaagaggaaaatttaaatattcagtggaatgaggcactcaaagggttgaaatgcgatttttctttggtttccagggacctgtccctgggctctcactccaaggttaagttccaaaactatactttttggctcacagggctctctgtgatgctctggtgccagctgtgtactcttgagtggttaggcagcagttcacattagatgtgtaaaattaattaaacctaaatctctaggctcaagtccaggatgtccccagactagttcagaaactaagtgctctctcctccccttaaaaaggtgttggcaaatgcaggtctccaaggaagtacgtggcctcaatgggagatgcccagagactgcaacaggtgaaaggtggcccccaaggcccagcccgtctctatgttgttcactttctttgtgagctgtaagactgtgctgtctgcaaagccaaagccatcctttaacagggctgtgatgtagctgagatccatgcacaggaaaggactgcctgaggtgaagttttccaagttatcacacacttccctggcttttctttcaaaatcttcaacttttaaaataccccccttttcataatcaatcatgtctgtgtcaacagctcggtcataatagtaagagaaagcatagaaggaacctctctggacctcctctggctggtgaagttttcctcgtaccaccctcagcacttcggcatagcagggctcaaagcccacctccccttcttggttgccaccatactggtatttcacacccccaaagatccactctgcttccaaccatctcggtaaacaggcactccggaaagtgtgcccatcagtcccttctgtctccagggctcccagggttgctagtcttgcagctttcaatccaaatcccaggtaactatgtgtatagagcttataagtgctgttaaacatctcaaaggaagtgaggtagcccctaggagtttgttccagagttttctcaaactggggcaggaacgtgatttgggtggaggctccccctaggtccaaggtccccacagtctcctgtctgtggccatgcagctgacctgtcagaaaattcacagtaacccaagctaatatgccttcgtcggatccatccatgatgctaacactgccctttggtaccaggaaaggtgacttcctgaagatctcctttacctcaaagagcagagccttggctttgtgttctggcagtaagcgtagtcctgctgttgcctttaggaccactggggtctttttccagtgacttcgggggattgagtctttggccacctctaagagcccttgaacggtctcagcaccctgcttaggttgatctacaaaagcagaaagtcctggcttcacagaatcaaaaacttccccttctagaattggaagctgtcctggcattttctgcacaaaggtgtaaacatgaattcgagttccagtgctccctgcatcaaacataattccatacaaggtgctggcgctgacattgatggggcacatggaagacaggaagataccctcaaaccaagtctgctggttcctgtgggagacagcgctgcaaacacaggataccaccagcatgaaaaagactgtgccccaagaagtggccattcttttcccaagatgtggctgggtggaggcttttgttgcagaagcaatcctgctcgcacacctgcagaggcaattttttctttccttctgaattttctccttggttcctttattatatcactttttcaaccttacatctggatacaagtcctacctaacagcaccataatgatcttgtctgtatgaggattcagccaagacactccacatttctttgttgaccaggaacaaggaaaacgccccggcgccctccttgccgaaatttcctggggcct

SEQ ID NO: 735672 - DNA, 408 bp, Homo sapiens
tttttcctctctaaattccatgtctagagcacatgttcccttctccctgtcttctatttcctgctatctcattccttctgtttattcctggccccagttcctttagttagatctttcactgatcctgcccctctccccctggaacgcatatcaacacctctcccaccttcgtcggatccatccatgatgctaacactgccctttggtaccaggaaaggtgacttcctgaagatctcctttacctagagaaaaaggaaaaaaaaaaaaaaagaattccctaaggcaataaaatagatttccatattttgacagtgtcctgtaagacttagaaaactactccatttttcctagataaaattttggcaaaactcattcctttgccctaagaaactagagaagaaactaggc

SEQ ID NO: 735673 - DNA, 932 bp, Homo sapiens
  misc_feature (1)..(1): n is a, c, g, or t
  misc_feature (21)..(22): n is a, c, g, or t
nggttaaatgcatcttcccgnnacaaaatggcccccacagtgattaaagaccagagacttatatctctgcatttgtcaagctggaacagtctttagtgaacacagcttacctcttttaaaactgctggtttctactgaaggaaacatggatgacatttagtgttctgtgactggtctggcaccctacttttgttgacaaagatgggaaggggtctaaaagtcatgtcacttataaaagaacttgggaggaacttttttcaaaagatccaaagattttggaaggagagattagagcagaactaagaccacttagaagataggtagatttcagctcaatataaggaatttttttttaatatcagtgcagttccaaatggaataagctgtttgaacatggcttagcagaagctgaatgacaacctgttagaaattctagggaattctgcactgagtacaacattggattatttctttgggctgtttccaactcaagattctgttatttcattataagcattttgaggaaggcagttggtataaaggtgaccttagtaataaaagtcagtgtgaagtctaaagaaattccacaatgaatttaaagacaagaattttagggacaaggatacagaaatttgcctagtaacttgcacacagcagatggtaaatatttattgactcaatggagtaatgttaaaaataaggtttcccatggactgtgtgagggccaggcatacttaacatcctttgtgagagagaggatggaaacggagtctactgtgaaagccacaagttttggggaaatacactcctgcaaagaagctggaggttaacaaccaaggcaaaggggccagaccacagggagatcttccaggtccaagagcactgcagggcagatgagaagcagggatgattatgttgaaagtgcaagataa

SEQ ID NO: 735674 - DNA, 443 bp, Homo sapiens; identical to SEQ ID NO: 367399

SEQ ID NO: 735675 - DNA, 777 bp, Homo sapiens
ccttctccaggctactagtggccggaaaccgggccgcggaggcacgatgagagccgtgagagccctagcacgacttgcccaaagacaatttctcaggatatgatattcactttcatgacaagaaaatcctgttgctcgaagcaggtccaaagaaagtactggagaaattgtcagaaacttacagcaacagggtcagctccatttcccctggctctgcaacgcttctcagtagttttggtgcctgggaccatatctgcaacatgagatacagagcctttcggcgaatgcaggtgtgggacgcctgctcagaggccctgataatgtttgataaggataatttagatgacatgggctatatcgtggagaatgatgtcatcatgcatgctctcactaagcagttggaggctgtgtctgaagctgccaaacttttctgaagaggctatacaatttcactttcccaccagtctataagggttccagtttctccacatcctcaccaacgcttattttccttctgtaaaaaaaaactgtagccatcctgttgagagtgaagttgtatctcattgtagtagtggttgcatttccttaataactaatgatgctgagtatcttttcatgtccttactggccatttgtgtatccactttggagaaatgtctgttcaaaatattttgcctgtttttaaattggattatttgtttttgagttataggagttctttatatattttaaatataaatttatcagttatgcggcttgcaaatatcttaatgttct

SEQ ID NO: 735676 - DNA, 1279 bp, Homo sapiens
ataaatctggaaagtcggattgtcactctgtttttgttttttttgtcctgttggtttctccctctctctttctaagctacctgaaatcctcatttttcattgtaaaaaagtaaccatttaggccgggcgtggtggctcatgcctataatcccagcactttgggaggccgaggtgggtggatcacttaaggtcaggagtttgagaccagcctggctggtgaaaccctctctactaaaaatgcaaaagttaaccaggtgtggtggcacagaaaaaataaccgcagcctgagatacaaccataggtaaaaaggtaatggcaaaaactgcaatagcttttgcaccaacctaatacaaaagttaaggagagggagctctctccaggaaaaataaaatgtagatcctattcttgagttagtattcattgtatagctatatttttcaaggagaaagtactgatttctggcctcaaaaaggactaaattctgtgatgtccaaatgttgaatggttggttattcaccaaccattactgccaagtgacagagaattctgttcctcacgttttggctgactgcctttggaacataaagccatctctctgttcttctgtgagacaaagtttttatttgtgtaatgagaatgctgtctgttgctataaggatgttagcttccaagagatgttgggtgctgtgtatcaaaatggtgggctcctagagataggtgctacataaagctgtggtattttccctttactagatgatactacaaatcattctaactcctccaaggaggtcccttcctcagctgttttgagaagccttcgggtgaatgtgggtccagacggagaggagacgagagctcagactgtacagaaatccccggagtttttgtccacttcagagtcttctagcttgttgcaagatctacagccaagtgatagcacttcttttattcttcttaacctaacaagagcaggtattctttccttttttttgggctctgcttatgccttcaaaagccatatcttctggagaaaagaaagggctctctaggaaacacttgctcctctctggtatagaaatttcacccaagttacacaggccaggccctcttctctgaaaaacttaacaggtgaggtcagcatgcatttattcagtgcctactgtgtgcctggcaccatgggaaagacaaaagtagaagatagggaccttaaaatccagttgagaagtgaaagcttacatatatatgggaaagaacattgagtacataaaagatagtatat

SEQ ID NO: 735677 - DNA, 713 bp, Homo sapiens; identical to SEQ ID NO: 384366

SEQ ID NO: 735678 - DNA, 912 bp, Homo sapiens
agaggggttagaaaaatgttggatgatgagtgctagaggggctctgtagactagccttgtaagtttgttggaggtgagaaaattcctggcacacaacagctttttagaatttgttgattgaaccaattagaatgaataaaaggattgctaagtaacagtgaatgaggacatagctgagagtaagtagcataactttttttagtagacctgttcagattttattacttttctctgctactgcttaacagtttaaaagctgggtactggagaaaataggtgatggaggttaatcagagcagaggcttgctgaggaagagatgaactcaaggaggagagggattctagaatggaatcaggtcattgttgaatgactggccgtgggaaacaaggggaagccagaacatgacaagtggagaggaggaactggaaagttacttatgaggaaagcaagctactgcagcaggagcaaggaagttggagagttataaacaatcagggatgtacatttcagagttgagatcttagaagtagagcagttttttaatatgatgacaagttctaagcagaggtggcaaactggtatcctgtaggctagatgtggacttcagatgtgttttgcttggattgtagagcgtttttattttactttactgtgtcagattatgtgaaagattcaccaaagtagagaaatttttttttatatagcaacagtggtgttatacctgtcaaaattaatatttccttggttttatcttataaccaatccatgttcagttttttctacttgtttcgaaaatgtcttttaaagttggtttgtttaaatcaggatccaacaagatccaatattatatttggttattaagtctttaaaaatctagatctttctacattgagttgttgttgttgttgttg

SEQ ID NO: 735679 - DNA, 1274 bp, Homo sapiens
  misc_feature (1207)..(1207): n is a, c, g, or t
  misc_feature (1247)..(1247): n is a, c, g, or t
  misc_feature (1254)..(1254): n is a, c, g, or t
gcaaatattttaaaataagtaatttcaagaagtcagtcaaactcacaaagctttaacaaggtggcatccagcttggaagtcaagtgttcaagcccgcagtcgggacatccaagagctctttacatcctaattacaacacggaacccagactcactgcataccccgtcccgtatataatgcaaaacttgattctgcaagttcctttctcgggcggtgaaacttcgaaggtcctctccatggagacctttgataaatgtttaagcagtgatcttttctttcgcgtttgcctccattgcaacgcctccgctgatgggaaaaactactccctccgctactgcggggtggcagtgacgtcaacgaattagctgacctgttttttcgggcttcgcggacataggagttccgaaggccgagagtgagtgagtgagtgggagcggggcggctgcggctcctcctgtccggggcggagccctgcgtcgcgggcctggggaggccccgccagcacccttgacgtctgggtcccgagcagtgcggcagccacacgacactgaggcgagcgagtgggtgtgtgcgtggggggtcagccaaacttcctgtcccgcgctcgagctgcttccggcgggagccggaagacgctgtgtgtggacggaattcgggaccgactgacggccggccggcttcccggaactggaaggttacattgattacccacctagtacaacatcttacgggaagagcatagtatttcctagaggaatatgaacataacaggaaggtatcattggctctgaattaaatttgaacttgtcccctgaatagctacaggttttggaagctgaatcaatgttatcagatgagttagaatccaaaccagagctcctggtacagtttgttcagaatacgtccatcccattgggacaggggcttgtagaatcagaagctaaagatattacttgcttgtccctccttcccgtgactgaagcctcagaatgcagtcggctaatgttaccaggtctgggctcttcagctgagcacttagtgtttgtacaggatgaggcagaagattcagggaatgatttcctctccagtgagagcacagacagtagcattccatggttcctccgggttcaggagttggcccatgacagtttgattgctgctactcgtgcacaactggcaaagaatgcaaaaaccagcagcaatgganaaatgtcaccttggtctgggatggcatcaaaaaatctggnccttctnagtggaaaaaactcagtgtc

SEQ ID NO: 735680 - DNA, 1327 bp, Homo sapiens
tgtaaaatccatggaacatctttagtacattgtaggtgctcaacaaatactaataattctggagtagacacagcctttggataatatgggtaccagtattacttttggagcctaaatgacactcaaagcctgctaccttcacaccaaagactccactgctctgtagtagcaacaagaataaagggaactgaacatactgaaatggattccgagataaatggtgaacactaccctactctgggccatttagtatatattcctggcacaggtctaggtcctctgcatatgctgtcagccttctgaagcccactaaggtctcggctcgccagctgcccccaagcgtagccagggtggatgccaaaagccgagttctgtttcctcttgggttgggacatgctgctgagtacgtcaggcctcgggtggcgctcattgggtaagacgataacagagcagggccactcccttctcactttgctgccagaggtcacacctgaactctgctttattcttagggatgcagcccacagagtccatccgcttgcaggacagggtgtcaacatgggctttggggatatctccagcttggcccatcacctcagtacggcagccttcaatgggaaggacttaggttccgtgagccacctcacaggttatgaaacagaaagacagcgtcacaacactgctcttctggctgctacagacttactaaaaaggctctattctaccagtgcctccccgcttgtgttgctcaggacgtggggcttgcaggccacaaatgcagtgtctccactcaaagaacagattatggcctttgcaagcaaatgagtactcctctcctaaagaaagattacgttgatgaaaaagaacatcctgcccaggacccatcatacatattttcaagatcttatttaatttaataaacttactttacattaaaaaaaaaaaaaaaaaaaaaaaaaaaagggggggggggctaagaaatttccccgggggggcccaattttggcggtcacccccgctttctttgggctcccacggggtccccctatggggagcgcgtatataaataacgcattggccacaggcgccgcgggtttcaaaccccgctcgttggccgggcggaaaacccggctccccctggcactcctcggggaagggacccttaactctgtgggcgttggcgccatctgtggcaccacctcccctcagagaatctatcgcgccgagggcaaatataccctctcacccgctcttcaccgggtacccaccgcccattatgtcttggcgcttgaaactttgggcacgcgcctctattctcacactcttc

SEQ ID NO: 735681 - DNA, 2032 bp, Homo sapiens; identical to SEQ ID NO: 384377

SEQ ID NO: 735682 - DNA, 3570 bp, Homo sapiens
gcaaatattttaaaataagtaatttcaagaagtcagtcaaactcacaaagctttaacaaggtggcatccagcttggaagtcaagtgttcaagcccgcagtcgggacatccaagagctctttacatcctaattacaacacggaacccagactcactgcataccccgtcccgtatataatgcaaaacttgattctgcaagttcctttctcgggcggtgaaacttcgaaggtcctctccatggagacctttgataaatgtttaagcagtgatcttttctttcgcgtttgcctccattgcaacgcctccgctgatgggaaaaactactccctccgctactgcggggtggcagtgacgtcaacgaattagctgacctgttttttcgggcttcgcggacataggagttccgaaggccgagagtgagtgagtgagtgggagcggggcggctgcggctcctcctgtccggggcggagccctgcgtcgcgggcctggggaggccccgccagcacccttgacgtctgggtcccgagcagtgcggcagccacacgacactgaggcgagcgagtgggtgtgtgcgtggggggtcagccaaacttcctgtcccgcgctcgagctgcttccggcgggagccggaagacgctgtgtgtggacggaattcgggaccgactgacggccggccggcttcccggaactggaaggttacattgattacccacctagtacaacatcttacgggaagagcatagtatttcctagaggaatatgaacataacaggaaggtatcattggctctgaattaaatttgaacttgtcccctgaatagctacaggttttggaagctgaatcaatgttatcagatgagttagaatccaaaccagagctcctggtacagtttgttcagaatacgtccatcccattgggacaggggcttgtagaatcagaagctaaagatattacttgcttgtccctccttcccgtgactgaagcctcagaatgcagtcggctaatgttaccagatgatactacaaatcattctaactcctccaaggaggtcccttcctcagctgttttgagaagccttcgggtgaatgtgggtccagacggagaggagacgagagctcagactgtacagaaatccccggagtttttgtccacttcagagtcttctagcttgttgcaagatctacagccaagtgatagcacttcttttattcttcttaacctaacaagagcaggtctgggctcttcagctgagcacttagtgtttgtacaggatgaggcagaagattcagggaatgatttcctctccagtgagagcacagacagtagcattccatggttcctccgggttcaggagttggcccatgacagtttgattgctgctactcgtgcacaactggcaaagaatgcaaaaaccagcagcaatggagaaaatgtccaccttggttctggtgatgggcagtcaaaagattctgggccccttcctcaagtggaaaagaagctcaagtgtacagttgaaggttgtgaccggacatttgtatggccagctcactttaaataccacctcaagactcatcgaaatgaccgctccttcatctgtcctgcagaaggttgtgggaaaagcttctatgtgctgcagaggctgaaggtgcacatgaggacccacaatggagagaagccctttatgtgccatgagtctggctgtggtaagcagtttactacagctggaaacctgaagaaccaccggcgcatccacacaggagagaaacctttcctttgtgaagcccaaggatgtggccgttcctttgctgagtattctagcctccgaaaacatctggtggttcactcaggagagaagcctcatcagtgccaagtctgtgggaagaccttctctcagagtggaagcaggaatgtgcatatgagaaagcatcacctgcagctgggagcagctgggagtcaagagcaggagcaaactgaggtgcttgctgaaggatccccacgttccctgtcttcagtgcctgatgtgacacatcacctggtgaccatgcagtcagggaggcaatcatatgaagtttctgtcttaactgcagtaaatccacaagagttactaaaccaaggagatttaactgaaagacggacatgagcgtgggtgctgactcctggaagagcaactctatctgatctcaaaatgcgtatactgggaacaggatgccttagcccacaacagaaccagaatgaatctttgaaggcacaagactctgcttttgccactcttcctctttcctggtatagaagatggatgtaggagagcttcttttctaactaccatctgatcagacaaggaatgaagcaatgactgtgggctgggaaactgtacctacctctcttcccactgcaaatttctgggatagaccaaaagtgaatttgattatgtgttggctgaagttcttcattctgactgttgaggggaggttttcctttgaagagttttcatcccagactcagctgtcttttcacatggatgaaataattcctgctaccaacaacagagcttcaccaggaagttgagttttcaagatgccttgttgctttgaagaagggagtgatgtcaattctcttgttacattctccctttagcaacctgagtaagagactctctgccactgggctgcaaaaaaataaattacttgaatctccccttggcccaggctgaggtactatcttgtcctatacacttctacttggtcactttgctttcttcgttaatggaacatacagtagcatgttaagagggatttcatgtttttgtttttttaaagttaaaaattacatgatgcagagattcaggttttcctttaaataaacaaaacagcccagtcagttctttggctcttgttttatacaaaatttgttttcttagagattaagaatttaatctttccctttaaaatagtgtattgatttacccttaggattccataccagtaaaactgaaccgaggagtcttaggaaacaacaagaacatcttcatttcttaagcccaggtgatagttactctgtcaccaccaaaaaagacgcatctgagaaaatggcaataaaaacagatacttttgaatttttccacaaagatagtttttttaaaaaagcttgagaaaggtgctttagttagagcaggcactcttgctatcaatcatcctgtctccacagctactgagaaaatatccactcatcatcattatgatttgagatggggtcttgctctgtcacccaggctggagtgcagtagtgtaatcatagctcaatgtaaccttgaactcctaggctcaaggcatcctcccacctcagcctcctgaatagctaggactataggcatgtaccaccagtccagctaactttttgtggtttttttggtagaaatgaggtctgtgttgcccaggctggtcttgaacgcctggcttcaagcgatcctcctgccttggcccctcaaagtgctgggattacaagcatgaaccactgcaccgagccagaatatccaattattattggtgagaagaaaattattccaaagttcacc

SEQ ID NO: 735683 - DNA, 7891 bp, Homo sapiens
gcaaatattttaaaataagtaatttcaagaagtcagtcaaactcacaaagctttaacaaggtggcatccagcttggaagtcaagtgttcaagcccgcagtcgggacatccaagagctctttacatcctaattacaacacggaacccagactcactgcataccccgtcccgtatataatgcaaaacttgattctgcaagttcctttctcgggcggtgaaacttcgaaggtcctctccatggagacctttgataaatgtttaagcagtgatcttttctttcgcgtttgcctccattgcaacgcctccgctgatgggaaaaactactccctccgctactgcggggtggcagtgacgtcaacgaattagctgacctgttttttcgggcttcgcggacataggagttccgaaggccgagagtgagtgagtgagtgggagcggggcggctgcggctcctcctgtccggggcggagccctgcgtcgcgggcctggggaggccccgccagcacccttgacgtctgggtcccgagcagtgcggcagccacacgacactgaggcgagcgagtgggtgtgtgcgtggggggtcagccaaacttcctgtcccgcgctcgagctgcttccggcgggagccggaagacgctgtgtgtggacggaattcgggaccgactgacggccggccggcttcccggaactggaaggttacattgattacccacctagtacaacatcttacgggaagagcatagtatttcctagaggaatatgaacataacaggaaggtatcattggctctgaattaaatttgaacttgtcccctgaatagctacaggttttggaagctgaatcaatgttatcagatgagttagaatccaaaccagagctcctggtacagtttgttcagaatacgtccatcccattgggacaggggcttgtagaatcagaagctaaagatattacttgcttgtccctccttcccgtgactgaagcctcagaatgcagtcggctaatgttaccagatgatactacaaatcattctaactcctccaaggaggtcccttcctcagctgttttgagaagccttcgggtgaatgtgggtccagacggagaggagacgagagctcagactgtacagaaatccccggagtttttgtccacttcagagtcttctagcttgttgcaagatctacagccaagtgatagcacttcttttattcttcttaacctaacaagagcaggtctgggctcttcagctgagcacttagtgtttgtacaggatgaggcagaagattcagggaatgatttcctctccagtgagagcacagacagtagcattccatggttcctccgggttcaggagttggcccatgacagtttgattgctgctactcgtgcacaactggcaaagaatgcaaaaaccagcagcaatggagaaaatgtccaccttggttctggtgatgggcagtcaaaagattctgggccccttcctcaagtggaaaagaagctcaagtgtacagttgaaggttgtgaccggacatttgtatggccagctcactttaaataccacctcaagactcatcgaaatgaccgctccttcatctgtcctgcagaaggttgtgggaaaagcttctatgtgctgcagaggctgaaggtgcacatgaggacccacaatggagagaagccctttatgtgccatgagtctggctgtggtaagcagtttactacagctggaaacctgaagaaccaccggcgcatccacacaggagagaaacctttcctttgtgaagcccaaggatgtggccgttcctttgctgagtattctagcctccgaaaacatctggtggttcactcaggagagaagcctcatcagtgccaagtctgtgggaagaccttctctcagagtggaagcaggaatgtgcatatgagaaagcatcacctgcagctgggagcagctgggagtcaagagcaggagcaaactgaggtgcttgctgaaggatccccacgttccctgtcttcagtgcctgatgtgacacatcacctggtgaccatgcagtcagggaggcaatcatatgaagtttctgtcttaactgcagtaaatccacaagagttactaaaccaaggagatttaactgaaagacggacatgagcgtgggtgctgactcctggaagagcaactctatctgatctcaaaatgcgtatactgggaacaggatgccttagcccacaacagaaccagaatgaatctttgaaggcacaagactctgcttttgccactcttcctctttcctggtatagaagatggatgtaggagagcttcttttctaactaccatctgatcagacaaggaatgaagcaatgactgtgggctgggaaactgtacctacctctcttcccactgcaaatttctgggatagaccaaaagtgaatttgattatgtgttggctgaagttcttcattctgactgttgaggggaggttttcctttgaagagttttcatcccagactcagctgtcttttcacatggatgaaataattcctgctaccaacaacagagcttcaccaggaagttgagttttcaagatgccttgttgctttgaagaagggagtgatgtcaattctcttgttacattctccctttagcaacctgagtaagagactctctgccactgggctgcaaaaaaataaattacttgaatctccccttggcccaggctgaggtactatcttgtcctatacacttctacttggtcactttgctttcttcgttaatggaacatacagtagcatgttaagagggatttcatgtttttgtttttttaaagttaaaaattacatgatgcagagattcaggttttcctttaaataaacaaaacagcccagtcagttctttggctcttgttttatacaaaatttgttttcttagagattaagaatttaatctttccctttaaaatagtgtattgatttacccttaggattccataccagtaaaactgaaccgaggagtcttaggaaacaacaagaacatcttcatttcttaagcccaggtgatagttactctgtcaccaccaaaaaagacgcatctgggaaaatccttgattttggtctctttctcttgaacagcccgggtgccttgacccttgtttctcacaaagtcttcctccagcccagcctgcttcagggtgtctagataccactgttctgcttctttcttggctagatccttggcaacttgttcaaagagatagggccttgtttgtattcgctgcttcatttcctccagttctttcttatattctttcgctcttttacggtcattgttccggttctctttcagctttgctttgaacacttcctccaggcttttatggggatccatggcttttgcacgcaaggtcacagatttggacattgcttgagacttctttttgtgtatctccagccactgaatactctcatctgctttgttctttttttcaagtgcacttctgactgcagattccctcttcctggtggcatctgtgatgtgcacagggagagtgttggcagagagggaagcaaggccgctcagagaacgactccttggcaggggtgtagctggtggctgtggggaatcctgcctccttccggtggtggcagcatcacagggccgctgagggtggcgcaggttggcggtcctcagcaagaagggcttgttgcgagtggcctcttgggtttctcttcttttggctgctcttctctggaaggccttgtaaaggccctcatagtcagggaccacaggattcacccgaggctggaatctgaagttagtgtgcagaaacccaagcttttcctgctgggttcgggtggctgtgcggggctgtgggttagcccggttactagaggaggcgataggggaagaggccatctggagcatgtccagggctctcatttggatgcgaattttcctgaagagctcagcttcctggagtttatccccaagggctggctccagaatggacttgggaatccttctggtggccttctgcttggagatcttggcttcagctgtggctgccaagtctctctgtcgagcagcttcctttagctgctcctccttctccaggaagctgaagggcttcaaagaagagaggagcagttccttcctcttctggatccctgcctgccttcgggcctcgctgcgctccatgatctcttggtagaggggcaggtagacatgtgcaggcacaggctgtgcccggaactgcctgtggcactcggcctcttcctcaccctgcctctgggcccgctgcctctcctgctcaaaggaggcaggtgagcccagccactcggccttcttccgggcctcgcgcagcgtcatgcggaatggccgagggacagtaatggatgatgcccaggagctgacgcttctgtgctgggagggaggccgggagcctgagggtggctgggtctgaggcctgggaatgttggagggaaggttgttcagggagctgcagcgccttgtggagccacacctcagagcctgcgggcactggacctgcaccatccccctgtccttgtcttggaagaaactctccaggtcctcctcatcttcagagaggttttcatcactctctgggtcagactgaaagagagactccaacagacaccatctccctttctgcttcagttcctgtaagttctggtaaatgctcccagttgagtcagaagtagaatctatctcctcctctgggctgaggaactcgtcaagtttgctggccctgggcaaaaccagcccatccccggacagctcctctcctgcctctgtgtctgcgaaggactcggggggaaatatctgacggctcccctccgcgcctccgggggctccctcaggcctccccacggtcatttcagctggacagaggcagcagcgacagtgacagcgatagtggcagcagcggtggcagcgagagctatgcggggccagggtccacccctttctagctttggcgtctggttggcttccagggcagcctccgatccatcccgcccgaggaggcaaggatatgatattcactttcatgacaagaaaatcctgttgctcgaagcaggtccaaagaaagtactggagaaattgtcagaaacttacagcaacagggtcagctccatttcccctggctctgcaacgcttctcagtagttttggtgcctgggaccatatctgcaacatgagatacagagcctttcggcgaatgcaggtgcccctttatcttttcaattttgtcaagatgtcttggtctgtcttaagatatcggagtccactttctccaagtgttctgtgaatgtaggaggaatcagacaaggttcacattcagtccgaggaagtggggagaagcattcccaggagaattttcttctcattttatattttcctaccagagaggctgacaaattgtgattttctgctctgtcacttgggaaagcaatattgtttctgattggagtgatgtttccctcttggttttaatgcagactttccttttgtgtttccaggtgtgggacgcctgctcagaggccctgataatgtttgataaggataatttagatgacatgggctatatcgtggagaatgatgtcatcatgcatgctctcactaagcagttggaggctgtgtctgaccgagtgacggttctctacaggagcaaagccattcgctatacctggccttgtccatttcctatggccgactccagcccttgggttcatattaccctaggtgatggcagcaccttccagaccaaattgttggtagttgaagattcttattttgctaggggtcttgtatatctacatcttatcctagattctagggactctggttttcgatttaagctatagtttaattttaggcaaaacttttggttatgaggaccagtacctattcaggccagctcaagtggagatggtctcatcgtaaatcctgtacagggagcaatctcatgggccgtcttaggttgtgaaataacagatagctgggcctcacaggacaggcaccagagtgttgggaatggaggctgttctttccctctgaggagtctgtggtcattgatctcttgcctctcatttttctcctttctgctcacaagcttccctttttgcatggtagccattcctaaccctacatcagaactattcagctccagtgtgtgccccatactgaaactttccttattgctctctagttcaaatatcaggagggcctggctgagtttaactcatggctggcacctgttcagtcatgtccagctttggctctgttggctgaggctgatgtgacagtgcaggggctccacctctaggggctgtgagtgaagcaggcctgatggaattatcctgccacacaacaatcagagctggaggaaactttagggagcagagaaaaacttctgaagcagtttatgaagaggctggaagacttagcaggctcatgtgtccatgcagataggtgcagatggtcacaactccggagtacggcaggctgttggaatccagaatgtgagctggaactatgaccagtctgctgttgtggctactctgcatttatcagaggtaagatcctgagctgccatctggggactttattcataggcactaggtacttcacagagaaacttttctcctctctgttgcaggccacagaaaacaacgtagcctggcagagatttcttccctctgggcctattgctctgctcccggtaagaggtccttctgaccagtccgcccacatgcatgcaagcctttcctcttcactttctctcagcctttttctggtttcaagggaatctgcccaggctgtttgtaagttccctttttgtctttttatgcttgagagtttccaagtgcagcagagtcttagccgttggtattggtgttcttttgacacagctctcagacaccttgagttccttggtttggtccacgtcccatgaacatgcagcagagctagttagcatggatgaggaaaaatttgtggatgccgttaactctgccttttggagtgatgctgaccacacggacttcatcgacacagctggtgccatgctgcagtatgctgtcagccttctgaagcccactaaggtctcggctcgccagctgcccccaagcgtagccagggtggatgccaaaagccgagttctgtttcctcttgggttgggacatgctgctgagtacgtcaggcctcgggtggcgctcattgggtaagacgataacagagcagggccactcccttctcactttgctgccagaggtcacacctgaactctgctttattcttagggatgcagcccacagagtccatccgcttgcaggacagggtgtcaacatgggctttggggatatctccagcttggcccatcacctcagtacggcagccttcaatgggaaggacttaggtaaggattcagatactatggggaagtatccagaggtcatatagttaggcaagatcagggcccacagtagcaagagggagtggacataaaatatatctggcttgctaggagatggaagaaaaccttattattggattagggatttaatctttcctctgcccttcaggttccgtgagccacctcacaggttatgaaacagaaagacagcgtcacaacactgctcttctggctgctacagacttactaaaaaggctctattctaccagtgcctccccgcttgtgttgctcaggacgtggggcttgcaggccacaaatgcagtgtctccactcaaagtaagaggttgctcagaggaatgactttgcaaacagctcttaatttcttttgcttttttttgaaacagaaggttgcagtgagccgagatctcaccactgcactccagcctgggtgacagagcaagactctgtctca

SEQ ID NO: 735684 - DNA, 10233 bp, Homo sapiens
gcaaatattttaaaataagtaatttcaagaagtcagtcaaactcacaaagctttaacaaggtggcatccagcttggaagtcaagtgttcaagcccgcagtcgggacatccaagagctctttacatcctaattacaacacggaacccagactcactgcataccccgtcccgtatataatgcaaaacttgattctgcaagttcctttctcgggcggtgaaacttcgaaggtcctctccatggagacctttgataaatgtttaagcagtgatcttttctttcgcgtttgcctccattgcaacgcctccgctgatgggaaaaactactccctccgctactgcggggtggcagtgacgtcaacgaattagctgacctgttttttcgggcttcgcggacataggagttccgaaggccgagagtgagtgagtgagtgggagcggggcggctgcggctcctcctgtccggggcggagccctgcgtcgcgggcctggggaggccccgccagcacccttgacgtctgggtcccgagcagtgcggcagccacacgacactgaggcgagcgagtgggtgtgtgcgtggggggtcagccaaacttcctgtcccgcgctcgagctgcttccggcgggagccggaagacgctgtgtgtggacggaattcgggaccgactgacggccggccggcttcccggaactggaaggttacattgattacccacctagtacaacatcttacgggaagagcatagtatttcctagaggaatatgaacataacaggaaggtatcattggctctgaattaaatttgaacttgtcccctgaatagctacaggttttggaagctgaatcaatgttatcagatgagttagaatccaaaccagagctcctggtacagtttgttcagaatacgtccatcccattgggacaggggcttgtagaatcagaagctaaagatattacttgcttgtccctccttcccgtgactgaagcctcagaatgcagtcggctaatgttaccagatgatactacaaatcattctaactcctccaaggaggtcccttcctcagctgttttgagaagccttcgggtgaatgtgggtccagacggagaggagacgagagctcagactgtacagaaatccccggagtttttgtccacttcagagtcttctagcttgttgcaagatctacagccaagtgatagcacttcttttattcttcttaacctaacaagagcaggtctgggctcttcagctgagcacttagtgtttgtacaggatgaggcagaagattcagggaatgatttcctctccagtgagagcacagacagtagcattccatggttcctccgggttcaggagttggcccatgacagtttgattgctgctactcgtgcacaactggcaaagaatgcaaaaaccagcagcaatggagaaaatgtccaccttggttctggtgatgggcagtcaaaagattctgggccccttcctcaagtggaaaagaagctcaagtgtacagttgaaggttgtgaccggacatttgtatggccagctcactttaaataccacctcaagactcatcgaaatgaccgctccttcatctgtcctgcagaaggttgtgggaaaagcttctatgtgctgcagaggctgaaggtgcacatgaggacccacaatggagagaagccctttatgtgccatgagtctggctgtggtaagcagtttactacagctggaaacctgaagaaccaccggcgcatccacacaggagagaaacctttcctttgtgaagcccaaggatgtggccgttcctttgctgagtattctagcctccgaaaacatctggtggttcactcaggagagaagcctcatcagtgccaagtctgtgggaagaccttctctcagagtggaagcaggaatgtgcatatgagaaagcatcacctgcagctgggagcagctgggagtcaagagcaggagcaaactgaggtgcttgctgaaggatccccacgttccctgtcttcagtgcctgatgtgacacatcacctggtgaccatgcagtcagggaggcaatcatatgaagtttctgtcttaactgcagtaaatccacaagagttactaaaccaaggagatttaactgaaagacggacatgagcgtgggtgctgactcctggaagagcaactctatctgatctcaaaatgcgtatactgggaacaggatgccttagcccacaacagaaccagaatgaatctttgaaggcacaagactctgcttttgccactcttcctctttcctggtatagaagatggatgtaggagagcttcttttctaactaccatctgatcagacaaggaatgaagcaatgactgtgggctgggaaactgtacctacctctcttcccactgcaaatttctgggatagaccaaaagtgaatttgattatgtgttggctgaagttcttcattctgactgttgaggggaggttttcctttgaagagttttcatcccagactcagctgtcttttcacatggatgaaataattcctgctaccaacaacagagcttcaccaggaagttgagttttcaagatgccttgttgctttgaagaagggagtgatgtcaattctcttgttacattctccctttagcaacctgagtaagagactctctgccactgggctgcaaaaaaataaattacttgaatctccccttggcccaggctgaggtactatcttgtcctatacacttctacttggtcactttgctttcttcgttaatggaacatacagtagcatgttaagagggatttcatgtttttgtttttttaaagttaaaaattacatgatgcagagattcaggttttcctttaaataaacaaaacagcccagtcagttctttggctcttgttttatacaaaatttgttttcttagagattaagaatttaatctttccctttaaaatagtgtattgatttacccttaggattccataccagtaaaactgaaccgaggagtcttaggaaacaacaagaacatcttcatttcttaagcccaggtgatagttactctgtcaccaccaaaaaagacgcatctgggaaaatccttgattttggtctctttctcttgaacagcccgggtgccttgacccttgtttctcacaaagtcttcctccagcccagcctgcttcagggtgtctagataccactgttctgcttctttcttggctagatccttggcaacttgttcaaagagatagggccttgtttgtattcgctgcttcatttcctccagttctttcttatattctttcgctcttttacggtcattgttccggttctctttcagctttgctttgaacacttcctccaggcttttatggggatccatggcttttgcacgcaaggtcacagatttggacattgcttgagacttctttttgtgtatctccagccactgaatactctcatctgctttgttctttttttcaagtgcacttctgactgcagattccctcttcctggtggcatctgtgatgtgcacagggagagtgttggcagagagggaagcaaggccgctcagagaacgactccttggcaggggtgtagctggtggctgtggggaatcctgcctccttccggtggtggcagcatcacagggccgctgagggtggcgcaggttggcggtcctcagcaagaagggcttgttgcgagtggcctcttgggtttctcttcttttggctgctcttctctggaaggccttgtaaaggccctcatagtcagggaccacaggattcacccgaggctggaatctgaagttagtgtgcagaaacccaagcttttcctgctgggttcgggtggctgtgcggggctgtgggttagcccggttactagaggaggcgataggggaagaggccatctggagcatgtccagggctctcatttggatgcgaattttcctgaagagctcagcttcctggagtttatccccaagggctggctccagaatggacttgggaatccttctggtggccttctgcttggagatcttggcttcagctgtggctgccaagtctctctgtcgagcagcttcctttagctgctcctccttctccaggaagctgaagggcttcaaagaagagaggagcagttccttcctcttctggatccctgcctgccttcgggcctcgctgcgctccatgatctcttggtagaggggcaggtagacatgtgcaggcacaggctgtgcccggaactgcctgtggcactcggcctcttcctcaccctgcctctgggcccgctgcctctcctgctcaaaggaggcaggtgagcccagccactcggccttcttccgggcctcgcgcagcgtcatgcggaatggccgagggacagtaatggatgatgcccaggagctgacgcttctgtgctgggagggaggccgggagcctgagggtggctgggtctgaggcctgggaatgttggagggaaggttgttcagggagctgcagcgccttgtggagccacacctcagagcctgcgggcactggacctgcaccatccccctgtccttgtcttggaagaaactctccaggtcctcctcatcttcagagaggttttcatcactctctgggtcagactgaaagagagactccaacagacaccatctccctttctgcttcagttcctgtaagttctggtaaatgctcccagttgagtcagaagtagaatctatctcctcctctgggctgaggaactcgtcaagtttgctggccctgggcaaaaccagcccatccccggacagctcctctcctgcctctgtgtctgcgaaggactcggggggaaatatctgacggctcccctccgcgcctccgggggctccctcaggcctccccacggtcatttcagctggacagaggcagcagcgacagtgacagcgatagtggcagcagcggtggcagcgagagctatgcggggccagggtccacccctttctagctttggcgtctggttggcttccagggcagcctccgatccatcccgcccgaggaggcaaggatatgatattcactttcatgacaagaaaatcctgttgctcgaagcaggtccaaagaaagtactggagaaattgtcagaaacttacagcaacagggtcagctccatttcccctggctctgcaacgcttctcagtagttttggtgcctgggaccatatctgcaacatgagatacagagcctttcggcgaatgcaggtgcccctttatcttttcaattttgtcaagatgtcttggtctgtcttaagatatcggagtccactttctccaagtgttctgtgaatgtaggaggaatcagacaaggttcacattcagtccgaggaagtggggagaagcattcccaggagaattttcttctcattttatattttcctaccagagaggctgacaaattgtgattttctgctctgtcacttgggaaagcaatattgtttctgattggagtgatgtttccctcttggttttaatgcagactttccttttgtgtttccaggtgtgggacgcctgctcagaggccctgataatgtttgataaggataatttagatgacatgggctatatcgtggagaatgatgtcatcatgcatgctctcactaagcagttggaggctgtgtctgaccgagtgacggttctctacaggagcaaagccattcgctatacctggccttgtccatttcctatggccgactccagcccttgggttcatattaccctaggtgatggcagcaccttccagaccaaattgttggtagttgaagattcttattttgctaggggtcttgtatatctacatcttatcctagattctagggactctggttttcgatttaagctatagtttaattttaggcaaaacttttggttatgaggaccagtacctattcaggccagctcaagtggagatggtctcatcgtaaatcctgtacagggagcaatctcatgggccgtcttaggttgtgaaataacagatagctgggcctcacaggacaggcaccagagtgttgggaatggaggctgttctttccctctgaggagtctgtggtcattgatctcttgcctctcatttttctcctttctgctcacaagcttccctttttgcatggtagccattcctaaccctacatcagaactattcagctccagtgtgtgccccatactgaaactttccttattgctctctagttcaaatatcaggagggcctggctgagtttaactcatggctggcacctgttcagtcatgtccagctttggctctgttggctgaggctgatgtgacagtgcaggggctccacctctaggggctgtgagtgaagcaggcctgatggaattatcctgccacacaacaatcagagctggaggaaactttagggagcagagaaaaacttctgaagcagtttatgaagaggctggaagacttagcaggctcatgtgtccatgcagataggtgcagatggtcacaactccggagtacggcaggctgttggaatccagaatgtgagctggaactatgaccagtctgctgttgtggctactctgcatttatcagaggtaagatcctgagctgccatctggggactttattcataggcactaggtacttcacagagaaacttttctcctctctgttgcaggccacagaaaacaacgtagcctggcagagatttcttccctctgggcctattgctctgctcccggtaagaggtccttctgaccagtccgcccacatgcatgcaagcctttcctcttcactttctctcagcctttttctggtttcaagggaatctgcccaggctgtttgtaagttccctttttgtctttttatgcttgagagtttccaagtgcagcagagtcttagccgttggtattggtgttcttttgacacagctctcagacaccttgagttccttggtttggtccacgtcccatgaacatgcagcagagctagttagcatggatgaggaaaaatttgtggatgccgttaactctgccttttggagtgatgctgaccacacggacttcatcgacacagctggtgccatgctgcagtatgctgtcagccttctgaagcccactaaggtctcggctcgccagctgcccccaagcgtagccagggtggatgccaaaagccgagttctgtttcctcttgggttgggacatgctgctgagtacgtcaggcctcgggtggcgctcattgggtaagacgataacagagcagggccactcccttctcactttgctgccagaggtcacacctgaactctgctttattcttagggatgcagcccacagagtccatccgcttgcaggacagggtgtcaacatgggctttggggatatctccagcttggcccatcacctcagtacggcagccttcaatgggaaggacttaggtaaggattcagatactatggggaagtatccagaggtcatatagttaggcaagatcagggcccacagtagcaagagggagtggacataaaatatatctggcttgctaggagatggaagaaaaccttattattggattagggatttaatctttcctctgcccttcaggttccgtgagccacctcacaggttatgaaacagaaagacagcgtcacaacactgctcttctggctgctacagacttactaaaaaggctctattctaccagtgcctccccgcttgtgttgctcaggacgtggggcttgcaggccacaaatgcagtgtctccactcaaagaacagattatggcctttgcaagcaaatgagtactcctctcctaaagaaagattacgttgatgaaaaagaacatcctgcccaggacccatcatacatattttcaagatcttatttaatttaataaacttactttacattaaaattctctttttcttctttgcttaatgggcctgtggcacccaaataatgaatgataatttgctgtgaggagcgtatattagccagaccaaaggaaaaaacttcgaaggaagacttactttttggttgaaaagagctttttattactaaaaaacccacaaggtgctgtctcactcatttccagttaatcatttctaaagagaaaatttacattttgtttttgttttaatgttggtcataaatttatacagttgttttttgatagaggtaagaattagactcgatgcatttttgttagaattgctgtttaaatgttaacatcagaatgcaaattaaatataaattgctttaacctttgttacaggtatactggactttctgaaaggaaaaccaggtctcattaatgctagttattactttatcacagcaccagatttccattttatttatggttcctctctgggacaccactgtcggtttaataaaacaataaataattcattgcacagatccgaagacctcaggaaccagatcacaagggaaaccgattagcagcagaatttgttcatgtttggtggcagactggtggccaactggagggaggggagttttactgtgggtttttgaagaggtctcgtcacaagaccagagatgcctcttgaagagatttttaggttgtaggtttgcttactctaaagaacatcttgcccagaagtctgatttgagatgaaatgaagagaaacagtctgcttttgaaccaagtaaggtattcttgggaataatttttagagccatgagaaatctattcttacaggggtgcttttcaggcaaatgcagaaaatttaaaagagtctagaacaaaaaagtgacaatgtcacaaccttgctggaatctcaggaaaaagaattaaagatggcagctgctgtgaaaagctgtgtgactcctggcggagactgcagggacaaggtcatctttcacaaaaaatggaaaggtggcctagatgaggaggacacagactctccagaagttatgcaaacaaaatcaggcaagatgaagaattttaaggcacacctccattggcccacagagagtgttcttcatatgacaatgatgttaaacaccatctgtcacgtaccaggccatgtcctaagtattttaaatatgttaacacatctacaaagaggaaactattagaatctgtaggacctcttaagcccaaagggtctactgcaggcaggatgggcgttacagaaaaaaataaaaactctcattccaaattgctcctaagatggacaaattggttacttctccagaaggtctaatcaaggttaacaaaataggtaagttcgtggagttagaatgcatcttccctggagttcagaggtatttgggatgaccaaaggagtctgctggacagtatgtgtgttttacaaaatggcccccacagtgattaaagaccagagacttatatctctgcatttgtcaagctggaacagtctttagtgaacacagcttacctcttttaaaactgctggtttctactgaaggaaacatggatgacatttagtgttctgtgactggtctggcaccctacttttgttgacaaagatgggaaggggtctaaaagtcatgtcacttataaaagaacttgggaggaacttttttcaaaagatccaaagattttggaaggagagattagagcagaactaagaccacttagaagataggtagatttcagctcaatataaggaatttttttttaatatcagtgcagttccaaatggaataagctgtttgaacatggcttagcagaagctgaatgacaacctgttagaaattctagggaattctgcactgagtacaacattggattatttctttgggctgtttccaactcaagattctgttatttcattataagcattttgaggaaggcagttggtataaaggtgaccttagtaataaaagtcagtgtgaagtctaaagaaattccacaatgaatttaaagacaagaattttagggacaaggatacagaaatttgcctagtaacttgcacacagcagatggtaaatatttattgactcaatggagtaatgttaaaaataaggtttcccatggactgtgtgagggccaggcatacttaacatcctttgtgagagagaggatggaaacggagtctactgtgaaagccacaagttttggggaaatacactcctgcaaagaagctggaggttaacaaccaaggcaaaggggccagaccacagggagatcttccaggtccaagagcactgcagggcagatgagaagcagggatgattatgttgaaagtgcaagataa

SEQ ID NO: 735685 - DNA, 7818 bp, Homo sapiens
gcaaatattttaaaataagtaatttcaagaagtcagtcaaactcacaaagctttaacaaggtggcatccagcttggaagtcaagtgttcaagcccgcagtcgggacatccaagagctctttacatcctaattacaacacggaacccagactcactgcataccccgtcccgtatataatgcaaaacttgattctgcaagttcctttctcgggcggtgaaacttcgaaggtcctctccatggagacctttgataaatgtttaagcagtgatcttttctttcgcgtttgcctccattgcaacgcctccgctgatgggaaaaactactccctccgctactgcggggtggcagtgacgtcaacgaattagctgacctgttttttcgggcttcgcggacataggagttccgaaggccgagagtgagtgagtgagtgggagcggggcggctgcggctcctcctgtccggggcggagccctgcgtcgcgggcctggggaggccccgccagcacccttgacgtctgggtcccgagcagtgcggcagccacacgacactgaggcgagcgagtgggtgtgtgcgtggggggtcagccaaacttcctgtcccgcgctcgagctgcttccggcgggagccggaagacgctgtgtgtggacggaattcgggaccgactgacggccggccggcttcccggaactggaaggttacattgattacccacctagtacaacatcttacgggaagagcatagtatttcctagaggaatatgaacataacaggaaggtatcattggctctgaattaaatttgaacttgtcccctgaatagctacaggttttggaagctgaatcaatgttatcagatgagttagaatccaaaccagagctcctggtacagtttgttcagaatacgtccatcccattgggacaggggcttgtagaatcagaagctaaagatattacttgcttgtccctccttcccgtgactgaagcctcagaatgcagtcggctaatgttaccagatgatactacaaatcattctaactcctccaaggaggtcccttcctcagctgttttgagaagccttcgggtgaatgtgggtccagacggagaggagacgagagctcagactgtacagaaatccccggagtttttgtccacttcagagtcttctagcttgttgcaagatctacagccaagtgatagcacttcttttattcttcttaacctaacaagagcaggtctgggctcttcagctgagcacttagtgtttgtacaggatgaggcagaagattcagggaatgatttcctctccagtgagagcacagacagtagcattccatggttcctccgggttcaggagttggcccatgacagtttgattgctgctactcgtgcacaactggcaaagaatgcaaaaaccagcagcaatggagaaaatgtccaccttggttctggtgatgggcagtcaaaagattctgggccccttcctcaagtggaaaagaagctcaagtgtacagttgaaggttgtgaccggacatttgtatggccagctcactttaaataccacctcaagactcatcgaaatgaccgctccttcatctgtcctgcagaaggttgtgggaaaagcttctatgtgctgcagaggctgaaggtgcacatgaggacccacaatggagagaagccctttatgtgccatgagtctggctgtggtaagcagtttactacagctggaaacctgaagaaccaccggcgcatccacacaggagagaaacctttcctttgtgaagcccaaggatgtggccgttcctttgctgagtattctagcctccgaaaacatctggtggttcactcaggagagaagcctcatcagtgccaagtctgtgggaagaccttctctcagagtggaagcaggaatgtgcatatgagaaagcatcacctgcagctgggagcagctgggagtcaagagcaggagcaaactgaggtgcttgctgaaggatccccacgttccctgtcttcagtgcctgatgtgacacatcacctggtgaccatgcagtcagggaggcaatcatatgaagtttctgtcttaactgcagtaaatccacaagagttactaaaccaaggagatttaactgaaagacggacatgagcgtgggtgctgactcctggaagagcaactctatctgatctcaaaatgcgtatactgggaacaggatgccttagcccacaacagaaccagaatgaatctttgaaggcacaagactctgcttttgccactcttcctctttcctggtatagaagatggatgtaggagagcttcttttctaactaccatctgatcagacaaggaatgaagcaatgactgtgggctgggaaactgtacctacctctcttcccactgcaaatttctgggatagaccaaaagtgaatttgattatgtgttggctgaagttcttcattctgactgttgaggggaggttttcctttgaagagttttcatcccagactcagctgtcttttcacatggatgaaataattcctgctaccaacaacagagcttcaccaggaagttgagttttcaagatgccttgttgctttgaagaagggagtgatgtcaattctcttgttacattctccctttagcaacctgagtaagagactctctgccactgggctgcaaaaaaataaattacttgaatctccccttggcccaggctgaggtactatcttgtcctatacacttctacttggtcactttgctttcttcgttaatggaacatacagtagcatgttaagagggatttcatgtttttgtttttttaaagttaaaaattacatgatgcagagattcaggttttcctttaaataaacaaaacagcccagtcagttctttggctcttgttttatacaaaatttgttttcttagagattaagaatttaatctttccctttaaaatagtgtattgatttacccttaggattccataccagtaaaactgaaccgaggagtcttaggaaacaacaagaacatcttcatttcttaagcccaggtgatagttactctgtcaccaccaaaaaagacgcatctgggaaaatccttgattttggtctctttctcttgaacagcccgggtgccttgacccttgtttctcacaaagtcttcctccagcccagcctgcttcagggtgtctagataccactgttctgcttctttcttggctagatccttggcaacttgttcaaagagatagggccttgtttgtattcgctgcttcatttcctccagttctttcttatattctttcgctcttttacggtcattgttccggttctctttcagctttgctttgaacacttcctccaggcttttatggggatccatggcttttgcacgcaaggtcacagatttggacattgcttgagacttctttttgtgtatctccagccactgaatactctcatctgctttgttctttttttcaagtgcacttctgactgcagattccctcttcctggtggcatctgtgatgtgcacagggagagtgttggcagagagggaagcaaggccgctcagagaacgactccttggcaggggtgtagctggtggctgtggggaatcctgcctccttccggtggtggcagcatcacagggccgctgagggtggcgcaggttggcggtcctcagcaagaagggcttgttgcgagtggcctcttgggtttctcttcttttggctgctcttctctggaaggccttgtaaaggccctcatagtcagggaccacaggattcacccgaggctggaatctgaagttagtgtgcagaaacccaagcttttcctgctgggttcgggtggctgtgcggggctgtgggttagcccggttactagaggaggcgataggggaagaggccatctggagcatgtccagggctctcatttggatgcgaattttcctgaagagctcagcttcctggagtttatccccaagggctggctccagaatggacttgggaatccttctggtggccttctgcttggagatcttggcttcagctgtggctgccaagtctctctgtcgagcagcttcctttagctgctcctccttctccaggaagctgaagggcttcaaagaagagaggagcagttccttcctcttctggatccctgcctgccttcgggcctcgctgcgctccatgatctcttggtagaggggcaggtagacatgtgcaggcacaggctgtgcccggaactgcctgtggcactcggcctcttcctcaccctgcctctgggcccgctgcctctcctgctcaaaggaggcaggtgagcccagccactcggccttcttccgggcctcgcgcagcgtcatgcggaatggccgagggacagtaatggatgatgcccaggagctgacgcttctgtgctgggagggaggccgggagcctgagggtggctgggtctgaggcctgggaatgttggagggaaggttgttcagggagctgcagcgccttgtggagccacacctcagagcctgcgggcactggacctgcaccatccccctgtccttgtcttggaagaaactctccaggtcctcctcatcttcagagaggttttcatcactctctgggtcagactgaaagagagactccaacagacaccatctccctttctgcttcagttcctgtaagttctggtaaatgctcccagttgagtcagaagtagaatctatctcctcctctgggctgaggaactcgtcaagtttgctggccctgggcaaaaccagcccatccccggacagctcctctcctgcctctgtgtctgcgaaggactcggggggaaatatctgacggctcccctccgcgcctccgggggctccctcaggcctccccacggtcatttcagctggacagaggcagcagcgacagtgacagcgatagtggcagcagcggtggcagcgagagctatgcggggccagggtccacccctttctagctttggcgtctggttggcttccagggcagcctccgatccatcccgcccgaggaggcaaggatatgatattcactttcatgacaagaaaatcctgttgctcgaagcaggtccaaagaaagtactggagaaattgtcagaaacttacagcaacagggtcagctccatttcccctggctctgcaacgcttctcagtagttttggtgcctgggaccatatctgcaacatgagatacagagcctttcggcgaatgcaggtgcccctttatcttttcaattttgtcaagatgtcttggtctgtcttaagatatcggagtccactttctccaagtgttctgtgaatgtaggaggaatcagacaaggttcacattcagtccgaggaagtggggagaagcattcccaggagaattttcttctcattttatattttcctaccagagaggctgacaaattgtgattttctgctctgtcacttgggaaagcaatattgtttctgattggagtgatgtttccctcttggttttaatgcagactttccttttgtgtttccaggtgtgggacgcctgctcagaggccctgataatgtttgataaggataatttagatgacatgggctatatcgtggagaatgatgtcatcatgcatgctctcactaagcagttggaggctgtgtctgaccgagtgacggttctctacaggagcaaagccattcgctatacctggccttgtccatttcctatggccgactccagcccttgggttcatattaccctaggtgatggcagcaccttccagaccaaattgttggtagttgaagattcttattttgctaggggtcttgtatatctacatcttatcctagattctagggactctggttttcgatttaagctatagtttaattttaggcaaaacttttggttatgaggaccagtacctattcaggccagctcaagtggagatggtctcatcgtaaatcctgtacagggagcaatctcatgggccgtcttaggttgtgaaataacagatagctgggcctcacaggacaggcaccagagtgttgggaatggaggctgttctttccctctgaggagtctgtggtcattgatctcttgcctctcatttttctcctttctgctcacaagcttccctttttgcatggtagccattcctaaccctacatcagaactattcagctccagtgtgtgccccatactgaaactttccttattgctctctagttcaaatatcaggagggcctggctgagtttaactcatggctggcacctgttcagtcatgtccagctttggctctgttggctgaggctgatgtgacagtgcaggggctccacctctaggggctgtgagtgaagcaggcctgatggaattatcctgccacacaacaatcagagctggaggaaactttagggagcagagaaaaacttctgaagcagtttatgaagaggctggaagacttagcaggctcatgtgtccatgcagataggtgcagatggtcacaactccggagtacggcaggctgttggaatccagaatgtgagctggaactatgaccagtctgctgttgtggctactctgcatttatcagaggtaagatcctgagctgccatctggggactttattcataggcactaggtacttcacagagaaacttttctcctctctgttgcaggccacagaaaacaacgtagcctggcagagatttcttccctctgggcctattgctctgctcccggtaagaggtccttctgaccagtccgcccacatgcatgcaagcctttcctcttcactttctctcagcctttttctggtttcaagggaatctgcccaggctgtttgtaagttccctttttgtctttttatgcttgagagtttccaagtgcagcagagtcttagccgttggtattggtgttcttttgacacagctctcagacaccttgagttccttggtttggtccacgtcccatgaacatgcagcagagctagttagcatggatgaggaaaaatttgtggatgccgttaactctgccttttggagtgatgctgaccacacggacttcatcgacacagctggtgccatgctgcagtatgctgtcagccttctgaagcccactaaggtctcggctcgccagctgcccccaagcgtagccagggtggatgccaaaagccgagttctgtttcctcttgggttgggacatgctgctgagtacgtcaggcctcgggtggcgctcattgggtaagacgataacagagcagggccactcccttctcactttgctgccagaggtcacacctgaactctgctttattcttagggatgcagcccacagagtccatccgcttgcaggacagggtgtcaacatgggctttggggatatctccagcttggcccatcacctcagtacggcagcctgtaagactgtgctgtctgcaaagccaaagccatcctttaacagggctgtgatgtagctgagatccatgcacaggaaaggactgcctgaggtgaagttttccaagttatcacacacttccctggcttttctttcaaaatcttcaacttttaaaataccccccttttcataatcaatcatgtctgtgtcaacagctcggtcataatagtaagagaaagcatagaaggaacctctctggacctcctctggctggtgaagttttcctcgtaccaccctcagcacttcggcatagcagggctcaaagcccacctcccctgccaggcaaaggtgcacaggggtaaggtgagaacgacgctgggggaaggggacactctctgaggcaggctgctggagacaatgagggaacagcaggaagg

SEQ ID NO: 735686 - DNA, 8805 bp, Homo sapiens
gcaaatattttaaaataagtaatttcaagaagtcagtcaaactcacaaagctttaacaaggtggcatccagcttggaagtcaagtgttcaagcccgcagtcgggacatccaagagctctttacatcctaattacaacacggaacccagactcactgcataccccgtcccgtatataatgcaaaacttgattctgcaagttcctttctcgggcggtgaaacttcgaaggtcctctccatggagacctttgataaatgtttaagcagtgatcttttctttcgcgtttgcctccattgcaacgcctccgctgatgggaaaaactactccctccgctactgcggggtggcagtgacgtcaacgaattagctgacctgttttttcgggcttcgcggacataggagttccgaaggccgagagtgagtgagtgagtgggagcggggcggctgcggctcctcctgtccggggcggagccctgcgtcgcgggcctggggaggccccgccagcacccttgacgtctgggtcccgagcagtgcggcagccacacgacactgaggcgagcgagtgggtgtgtgcgtggggggtcagccaaacttcctgtcccgcgctcgagctgcttccggcgggagccggaagacgctgtgtgtggacggaattcgggaccgactgacggccggccggcttcccggaactggaaggttacattgattacccacctagtacaacatcttacgggaagagcatagtatttcctagaggaatatgaacataacaggaaggtatcattggctctgaattaaatttgaacttgtcccctgaatagctacaggttttggaagctgaatcaatgttatcagatgagttagaatccaaaccagagctcctggtacagtttgttcagaatacgtccatcccattgggacaggggcttgtagaatcagaagctaaagatattacttgcttgtccctccttcccgtgactgaagcctcagaatgcagtcggctaatgttaccagatgatactacaaatcattctaactcctccaaggaggtcccttcctcagctgttttgagaagccttcgggtgaatgtgggtccagacggagaggagacgagagctcagactgtacagaaatccccggagtttttgtccacttcagagtcttctagcttgttgcaagatctacagccaagtgatagcacttcttttattcttcttaacctaacaagagcaggtctgggctcttcagctgagcacttagtgtttgtacaggatgaggcagaagattcagggaatgatttcctctccagtgagagcacagacagtagcattccatggttcctccgggttcaggagttggcccatgacagtttgattgctgctactcgtgcacaactggcaaagaatgcaaaaaccagcagcaatggagaaaatgtccaccttggttctggtgatgggcagtcaaaagattctgggccccttcctcaagtggaaaagaagctcaagtgtacagttgaaggttgtgaccggacatttgtatggccagctcactttaaataccacctcaagactcatcgaaatgaccgctccttcatctgtcctgcagaaggttgtgggaaaagcttctatgtgctgcagaggctgaaggtgcacatgaggacccacaatggagagaagccctttatgtgccatgagtctggctgtggtaagcagtttactacagctggaaacctgaagaaccaccggcgcatccacacaggagagaaacctttcctttgtgaagcccaaggatgtggccgttcctttgctgagtattctagcctccgaaaacatctggtggttcactcaggagagaagcctcatcagtgccaagtctgtgggaagaccttctctcagagtggaagcaggaatgtgcatatgagaaagcatcacctgcagctgggagcagctgggagtcaagagcaggagcaaactgaggtgcttgctgaaggatccccacgttccctgtcttcagtgcctgatgtgacacatcacctggtgaccatgcagtcagggaggcaatcatatgaagtttctgtcttaactgcagtaaatccacaagagttactaaaccaaggagatttaactgaaagacggacatgagcgtgggtgctgactcctggaagagcaactctatctgatctcaaaatgcgtatactgggaacaggatgccttagcccacaacagaaccagaatgaatctttgaaggcacaagactctgcttttgccactcttcctctttcctggtatagaagatggatgtaggagagcttcttttctaactaccatctgatcagacaaggaatgaagcaatgactgtgggctgggaaactgtacctacctctcttcccactgcaaatttctgggatagaccaaaagtgaatttgattatgtgttggctgaagttcttcattctgactgttgaggggaggttttcctttgaagagttttcatcccagactcagctgtcttttcacatggatgaaataattcctgctaccaacaacagagcttcaccaggaagttgagttttcaagatgccttgttgctttgaagaagggagtgatgtcaattctcttgttacattctccctttagcaacctgagtaagagactctctgccactgggctgcaaaaaaataaattacttgaatctccccttggcccaggctgaggtactatcttgtcctatacacttctacttggtcactttgctttcttcgttaatggaacatacagtagcatgttaagagggatttcatgtttttgtttttttaaagttaaaaattacatgatgcagagattcaggttttcctttaaataaacaaaacagcccagtcagttctttggctcttgttttatacaaaatttgttttcttagagattaagaatttaatctttccctttaaaatagtgtattgatttacccttaggattccataccagtaaaactgaaccgaggagtcttaggaaacaacaagaacatcttcatttcttaagcccaggtgatagttactctgtcaccaccaaaaaagacgcatctgggaaaatccttgattttggtctctttctcttgaacagcccgggtgccttgacccttgtttctcacaaagtcttcctccagcccagcctgcttcagggtgtctagataccactgttctgcttctttcttggctagatccttggcaacttgttcaaagagatagggccttgtttgtattcgctgcttcatttcctccagttctttcttatattctttcgctcttttacggtcattgttccggttctctttcagctttgctttgaacacttcctccaggcttttatggggatccatggcttttgcacgcaaggtcacagatttggacattgcttgagacttctttttgtgtatctccagccactgaatactctcatctgctttgttctttttttcaagtgcacttctgactgcagattccctcttcctggtggcatctgtgatgtgcacagggagagtgttggcagagagggaagcaaggccgctcagagaacgactccttggcaggggtgtagctggtggctgtggggaatcctgcctccttccggtggtggcagcatcacagggccgctgagggtggcgcaggttggcggtcctcagcaagaagggcttgttgcgagtggcctcttgggtttctcttcttttggctgctcttctctggaaggccttgtaaaggccctcatagtcagggaccacaggattcacccgaggctggaatctgaagttagtgtgcagaaacccaagcttttcctgctgggttcgggtggctgtgcggggctgtgggttagcccggttactagaggaggcgataggggaagaggccatctggagcatgtccagggctctcatttggatgcgaattttcctgaagagctcagcttcctggagtttatccccaagggctggctccagaatggacttgggaatccttctggtggccttctgcttggagatcttggcttcagctgtggctgccaagtctctctgtcgagcagcttcctttagctgctcctccttctccaggaagctgaagggcttcaaagaagagaggagcagttccttcctcttctggatccctgcctgccttcgggcctcgctgcgctccatgatctcttggtagaggggcaggtagacatgtgcaggcacaggctgtgcccggaactgcctgtggcactcggcctcttcctcaccctgcctctgggcccgctgcctctcctgctcaaaggaggcaggtgagcccagccactcggccttcttccgggcctcgcgcagcgtcatgcggaatggccgagggacagtaatggatgatgcccaggagctgacgcttctgtgctgggagggaggccgggagcctgagggtggctgggtctgaggcctgggaatgttggagggaaggttgttcagggagctgcagcgccttgtggagccacacctcagagcctgcgggcactggacctgcaccatccccctgtccttgtcttggaagaaactctccaggtcctcctcatcttcagagaggttttcatcactctctgggtcagactgaaagagagactccaacagacaccatctccctttctgcttcagttcctgtaagttctggtaaatgctcccagttgagtcagaagtagaatctatctcctcctctgggctgaggaactcgtcaagtttgctggccctgggcaaaaccagcccatccccggacagctcctctcctgcctctgtgtctgcgaaggactcggggggaaatatctgacggctcccctccgcgcctccgggggctccctcaggcctccccacggtcatttcagctggacagaggcagcagcgacagtgacagcgatagtggcagcagcggtggcagcgagagctatgcggggccagggtccacccctttctagctttggcgtctggttggcttccagggcagcctccgatccatcccgcccgaggaggcaaggatatgatattcactttcatgacaagaaaatcctgttgctcgaagcaggtccaaagaaagtactggagaaattgtcagaaacttacagcaacagggtcagctccatttcccctggctctgcaacgcttctcagtagttttggtgcctgggaccatatctgcaacatgagatacagagcctttcggcgaatgcaggtgcccctttatcttttcaattttgtcaagatgtcttggtctgtcttaagatatcggagtccactttctccaagtgttctgtgaatgtaggaggaatcagacaaggttcacattcagtccgaggaagtggggagaagcattcccaggagaattttcttctcattttatattttcctaccagagaggctgacaaattgtgattttctgctctgtcacttgggaaagcaatattgtttctgattggagtgatgtttccctcttggttttaatgcagactttccttttgtgtttccaggtgtgggacgcctgctcagaggccctgataatgtttgataaggataatttagatgacatgggctatatcgtggagaatgatgtcatcatgcatgctctcactaagcagttggaggctgtgtctgaccgagtgacggttctctacaggagcaaagccattcgctatacctggccttgtccatttcctatggccgactccagcccttgggttcatattaccctaggtgatggcagcaccttccagaccaaattgttggtagttgaagattcttattttgctaggggtcttgtatatctacatcttatcctagattctagggactctggttttcgatttaagctatagtttaattttaggcaaaacttttggttatgaggaccagtacctattcaggccagctcaagtggagatggtctcatcgtaaatcctgtacagggagcaatctcatgggccgtcttaggttgtgaaataacagatagctgggcctcacaggacaggcaccagagtgttgggaatggaggctgttctttccctctgaggagtctgtggtcattgatctcttgcctctcatttttctcctttctgctcacaagcttccctttttgcatggtagccattcctaaccctacatcagaactattcagctccagtgtgtgccccatactgaaactttccttattgctctctagttcaaatatcaggagggcctggctgagtttaactcatggctggcacctgttcagtcatgtccagctttggctctgttggctgaggctgatgtgacagtgcaggggctccacctctaggggctgtgagtgaagcaggcctgatggaattatcctgccacacaacaatcagagctggaggaaactttagggagcagagaaaaacttctgaagcagtttatgaagaggctggaagacttagcaggctcatgtgtccatgcagataggtgcagatggtcacaactccggagtacggcaggctgttggaatccagaatgtgagctggaactatgaccagtctgctgttgtggctactctgcatttatcagaggtaagatcctgagctgccatctggggactttattcataggcactaggtacttcacagagaaacttttctcctctctgttgcaggccacagaaaacaacgtagcctggcagagatttcttccctctgggcctattgctctgctcccggtaagaggtccttctgaccagtccgcccacatgcatgcaagcctttcctcttcactttctctcagcctttttctggtttcaagggaatctgcccaggctgtttgtaagttccctttttgtctttttatgcttgagagtttccaagtgcagcagagtcttagccgttggtattggtgttcttttgacacagctctcagacaccttgagttccttggtttggtccacgtcccatgaacatgcagcagagctagttagcatggatgaggaaaaatttgtggatgccgttaactctgccttttggagtgatgctgaccacacggacttcatcgacacagctggtgccatgctgcagtatgctgtcagccttctgaagcccactaaggtctcggctcgccagctgcccccaagcgtagccagggtggatgccaaaagccgagttctgtttcctcttgggttgggacatgctgctgagtacgtcaggcctcgggtggcgctcattgggtaagacgataacagagcagggccactcccttctcactttgctgccagaggtcacacctgaactctgctttattcttagggatgcagcccacagagtccatccgcttgcaggacagggtgtcaacatgggctttggggatatctccagcttggcccatcacctcagtacggcagcctgtaagactgtgctgtctgcaaagccaaagccatcctttaacagggctgtgatgtagctgagatccatgcacaggaaaggactgcctgaggtgaagttttccaagttatcacacacttccctggcttttctttcaaaatcttcaacttttaaaataccccccttttcataatcaatcatgtctgtgtcaacagctcggtcataatagtaagagaaagcatagaaggaacctctctggacctcctctggctggtgaagttttcctcgtaccaccctcagcacttcggcatagcagggctcaaagcccacctccccttcttggttgccaccatactggtatttcacacccccaaagatccactctgcttccaaccatctcggtaaacaggcactccggaaagtgtgcccatcagtcccttctgtctccagggctcccagggttgctagtcttgcagctttcaatccaaatcccaggtaactatgtgtatagagcttataagtgctgttaaacatctcaaaggaagtgaggtagcccctaggagtttgttccagagttttctcaaactggggcaggaacgtgatttgggtggaggctccccctaggtccaaggtccccacagtctcctgtctgtggccatgcagctgacctgtcagaaaattcacagtaacccaagctaatatgccttcgtcggatccatccatgatgctaacactgccctttggtaccaggaaaggtgacttcctgaagatctcctttacctcaaagagcagagccttggctttgtgttctggcagtaagcgtagtcctgctgttgcctttaggaccactggggtctttttccagtgacttcgggggattgagtctttggccacctctaagagcccttgaacggtctcagcaccctgcttaggttgatctacaaaagcagaaagtcctggcttcacagaatcaaaaacttccccttctagaattggaagctgtcctggcattttctgcacaaaggtgtaaacatgaattcgagttccagtgctccctgcatcaaacataattccatacaaggtgctggcgctgacattgatggggcacatggaagacaggaagataccctcaaaccaagtctgctggttcctgtgggagacagcgctgcaaacacaggataccaccagcatgaaaaagactgtgccccaagaagtggccattcttttcccaagatgtggctgggtggaggcttttgttgcagaagcaatcctgctcgcacacctgcagaggctgcttgtgtctgccggttccctgagtccttgctttcgctgcaggttgccttttgctctttgctcctgtttcagctcttcttaatcaagcgagcctcatgaaccgcattcacctttgtgccagtttgcaacta

SEQ ID NO: 735687 - DNA, 9988 bp, Homo sapiens
gcaaatattttaaaataagtaatttcaagaagtcagtcaaactcacaaagctttaacaaggtggcatccagcttggaagtcaagtgttcaagcccgcagtcgggacatccaagagctctttacatcctaattacaacacggaacccagactcactgcataccccgtcccgtatataatgcaaaacttgattctgcaagttcctttctcgggcggtgaaacttcgaaggtcctctccatggagacctttgataaatgtttaagcagtgatcttttctttcgcgtttgcctccattgcaacgcctccgctgatgggaaaaactactccctccgctactgcggggtggcagtgacgtcaacgaattagctgacctgttttttcgggcttcgcggacataggagttccgaaggccgagagtgagtgagtgagtgggagcggggcggctgcggctcctcctgtccggggcggagccctgcgtcgcgggcctggggaggccccgccagcacccttgacgtctgggtcccgagcagtgcggcagccacacgacactgaggcgagcgagtgggtgtgtgcgtggggggtcagccaaacttcctgtcccgcgctcgagctgcttccggcgggagccggaagacgctgtgtgtggacggaattcgggaccgactgacggccggccggcttcccggaactggaaggttacattgattacccacctagtacaacatcttacgggaagagcatagtatttcctagaggaatatgaacataacaggaaggtatcattggctctgaattaaatttgaacttgtcccctgaatagctacaggttttggaagctgaatcaatgttatcagatgagttagaatccaaaccagagctcctggtacagtttgttcagaatacgtccatcccattgggacaggggcttgtagaatcagaagctaaagatattacttgcttgtccctccttcccgtgactgaagcctcagaatgcagtcggctaatgttaccagatgatactacaaatcattctaactcctccaaggaggtcccttcctcagctgttttgagaagccttcgggtgaatgtgggtccagacggagaggagacgagagctcagactgtacagaaatccccggagtttttgtccacttcagagtcttctagcttgttgcaagatctacagccaagtgatagcacttcttttattcttcttaacctaacaagagcaggtctgggctcttcagctgagcacttagtgtttgtacaggatgaggcagaagattcagggaatgatttcctctccagtgagagcacagacagtagcattccatggttcctccgggttcaggagttggcccatgacagtttgattgctgctactcgtgcacaactggcaaagaatgcaaaaaccagcagcaatggagaaaatgtccaccttggttctggtgatgggcagtcaaaagattctgggccccttcctcaagtggaaaagaagctcaagtgtacagttgaaggttgtgaccggacatttgtatggccagctcactttaaataccacctcaagactcatcgaaatgaccgctccttcatctgtcctgcagaaggttgtgggaaaagcttctatgtgctgcagaggctgaaggtgcacatgaggacccacaatggagagaagccctttatgtgccatgagtctggctgtggtaagcagtttactacagctggaaacctgaagaaccaccggcgcatccacacaggagagaaacctttcctttgtgaagcccaaggatgtggccgttcctttgctgagtattctagcctccgaaaacatctggtggttcactcaggagagaagcctcatcagtgccaagtctgtgggaagaccttctctcagagtggaagcaggaatgtgcatatgagaaagcatcacctgcagctgggagcagctgggagtcaagagcaggagcaaactgaggtgcttgctgaaggatccccacgttccctgtcttcagtgcctgatgtgacacatcacctggtgaccatgcagtcagggaggcaatcatatgaagtttctgtcttaactgcagtaaatccacaagagttactaaaccaaggagatttaactgaaagacggacatgagcgtgggtgctgactcctggaagagcaactctatctgatctcaaaatgcgtatactgggaacaggatgccttagcccacaacagaaccagaatgaatctttgaaggcacaagactctgcttttgccactcttcctctttcctggtatagaagatggatgtaggagagcttcttttctaactaccatctgatcagacaaggaatgaagcaatgactgtgggctgggaaactgtacctacctctcttcccactgcaaatttctgggatagaccaaaagtgaatttgattatgtgttggctgaagttcttcattctgactgttgaggggaggttttcctttgaagagttttcatcccagactcagctgtcttttcacatggatgaaataattcctgctaccaacaacagagcttcaccaggaagttgagttttcaagatgccttgttgctttgaagaagggagtgatgtcaattctcttgttacattctccctttagcaacctgagtaagagactctctgccactgggctgcaaaaaaataaattacttgaatctccccttggcccaggctgaggtactatcttgtcctatacacttctacttggtcactttgctttcttcgttaatggaacatacagtagcatgttaagagggatttcatgtttttgtttttttaaagttaaaaattacatgatgcagagattcaggttttcctttaaataaacaaaacagcccagtcagttctttggctcttgttttatacaaaatttgttttcttagagattaagaatttaatctttccctttaaaatagtgtattgatttacccttaggattccataccagtaaaactgaaccgaggagtcttaggaaacaacaagaacatcttcatttcttaagcccaggtgatagttactctgtcaccaccaaaaaagacgcatctgggaaaatccttgattttggtctctttctcttgaacagcccgggtgccttgacccttgtttctcacaaagtcttcctccagcccagcctgcttcagggtgtctagataccactgttctgcttctttcttggctagatccttggcaacttgttcaaagagatagggccttgtttgtattcgctgcttcatttcctccagttctttcttatattctttcgctcttttacggtcattgttccggttctctttcagctttgctttgaacacttcctccaggcttttatggggatccatggcttttgcacgcaaggtcacagatttggacattgcttgagacttctttttgtgtatctccagccactgaatactctcatctgctttgttctttttttcaagtgcacttctgactgcagattccctcttcctggtggcatctgtgatgtgcacagggagagtgttggcagagagggaagcaaggccgctcagagaacgactccttggcaggggtgtagctggtggctgtggggaatcctgcctccttccggtggtggcagcatcacagggccgctgagggtggcgcaggttggcggtcctcagcaagaagggcttgttgcgagtggcctcttgggtttctcttcttttggctgctcttctctggaaggccttgtaaaggccctcatagtcagggaccacaggattcacccgaggctggaatctgaagttagtgtgcagaaacccaagcttttcctgctgggttcgggtggctgtgcggggctgtgggttagcccggttactagaggaggcgataggggaagaggccatctggagcatgtccagggctctcatttggatgcgaattttcctgaagagctcagcttcctggagtttatccccaagggctggctccagaatggacttgggaatccttctggtggccttctgcttggagatcttggcttcagctgtggctgccaagtctctctgtcgagcagcttcctttagctgctcctccttctccaggaagctgaagggcttcaaagaagagaggagcagttccttcctcttctggatccctgcctgccttcgggcctcgctgcgctccatgatctcttggtagaggggcaggtagacatgtgcaggcacaggctgtgcccggaactgcctgtggcactcggcctcttcctcaccctgcctctgggcccgctgcctctcctgctcaaaggaggcaggtgagcccagccactcggccttcttccgggcctcgcgcagcgtcatgcggaatggccgagggacagtaatggatgatgcccaggagctgacgcttctgtgctgggagggaggccgggagcctgagggtggctgggtctgaggcctgggaatgttggagggaaggttgttcagggagctgcagcgccttgtggagccacacctcagagcctgcgggcactggacctgcaccatccccctgtccttgtcttggaagaaactctccaggtcctcctcatcttcagagaggttttcatcactctctgggtcagactgaaagagagactccaacagacaccatctccctttctgcttcagttcctgtaagttctggtaaatgctcccagttgagtcagaagtagaatctatctcctcctctgggctgaggaactcgtcaagtttgctggccctgggcaaaaccagcccatccccggacagctcctctcctgcctctgtgtctgcgaaggactcggggggaaatatctgacggctcccctccgcgcctccgggggctccctcaggcctccccacggtcatttcagctggacagaggcagcagcgacagtgacagcgatagtggcagcagcggtggcagcgagagctatgcggggccagggtccacccctttctagctttggcgtctggttggcttccagggcagcctccgatccatcccgcccgaggaggcaaggatatgatattcactttcatgacaagaaaatcctgttgctcgaagcaggtccaaagaaagtactggagaaattgtcagaaacttacagcaacagggtcagctccatttcccctggctctgcaacgcttctcagtagttttggtgcctgggaccatatctgcaacatgagatacagagcctttcggcgaatgcaggtgcccctttatcttttcaattttgtcaagatgtcttggtctgtcttaagatatcggagtccactttctccaagtgttctgtgaatgtaggaggaatcagacaaggttcacattcagtccgaggaagtggggagaagcattcccaggagaattttcttctcattttatattttcctaccagagaggctgacaaattgtgattttctgctctgtcacttgggaaagcaatattgtttctgattggagtgatgtttccctcttggttttaatgcagactttccttttgtgtttccaggtgtgggacgcctgctcagaggccctgataatgtttgataaggataatttagatgacatgggctatatcgtggagaatgatgtcatcatgcatgctctcactaagcagttggaggctgtgtctgaccgagtgacggttctctacaggagcaaagccattcgctatacctggccttgtccatttcctatggccgactccagcccttgggttcatattaccctaggtgatggcagcaccttccagaccaaattgttggtagttgaagattcttattttgctaggggtcttgtatatctacatcttatcctagattctagggactctggttttcgatttaagctatagtttaattttaggcaaaacttttggttatgaggaccagtacctattcaggccagctcaagtggagatggtctcatcgtaaatcctgtacagggagcaatctcatgggccgtcttaggttgtgaaataacagatagctgggcctcacaggacaggcaccagagtgttgggaatggaggctgttctttccctctgaggagtctgtggtcattgatctcttgcctctcatttttctcctttctgctcacaagcttccctttttgcatggtagccattcctaaccctacatcagaactattcagctccagtgtgtgccccatactgaaactttccttattgctctctagttcaaatatcaggagggcctggctgagtttaactcatggctggcacctgttcagtcatgtccagctttggctctgttggctgaggctgatgtgacagtgcaggggctccacctctaggggctgtgagtgaagcaggcctgatggaattatcctgccacacaacaatcagagctggaggaaactttagggagcagagaaaaacttctgaagcagtttatgaagaggctggaagacttagcaggctcatgtgtccatgcagataggtgcagatggtcacaactccggagtacggcaggctgttggaatccagaatgtgagctggaactatgaccagtctgctgttgtggctactctgcatttatcagaggtaagatcctgagctgccatctggggactttattcataggcactaggtacttcacagagaaacttttctcctctctgttgcaggccacagaaaacaacgtagcctggcagagatttcttccctctgggcctattgctctgctcccggtaagaggtccttctgaccagtccgcccacatgcatgcaagcctttcctcttcactttctctcagcctttttctggtttcaagggaatctgcccaggctgtttgtaagttccctttttgtctttttatgcttgagagtttccaagtgcagcagagtcttagccgttggtattggtgttcttttgacacagctctcagacaccttgagttccttggtttggtccacgtcccatgaacatgcagcagagctagttagcatggatgaggaaaaatttgtggatgccgttaactctgccttttggagtgatgctgaccacacggacttcatcgacacagctggtgccatgctgcagtatgctgtcagccttctgaagcccactaaggtctcggctcgccagctgcccccaagcgtagccagggtggatgccaaaagccgagttctgtttcctcttgggttgggacatgctgctgagtacgtcaggcctcgggtggcgctcattggggatgcagcccacagagtccatccgcttgcaggacagggtgtcaacatgggctttggggatatctccagcttggcccatcacctcagtacggcagccttcaatgggaaggacttaggttccgtgagccacctcacaggttatgaaacagaaagacagcgtcacaacactgctcttctggctgctacagacttactaaaaaggctctattctaccagtgcctccccgcttgtgttgctcaggacgtggggcttgcaggccacaaatgcagtgtctccactcaaagaacagattatggcctttgcaagcaaatgagtactcctctcctaaagaaagattacgttgatgaaaaagaacatcctgcccaggacccatcatacatattttcaagatcttatttaatttaataaacttactttacattaaaattctctttttcttctttgcttaatgggcctgtggcacccaaataatgaatgataatttgctgtgaggagcgtatattagccagaccaaaggaaaaaacttcgaaggaagacttactttttggttgaaaagagctttttattactaaaaaacccacaaggtgctgtctcactcatttccagttaatcatttctaaagagaaaatttacattttgtttttgttttaatgttggtcataaatttatacagttgttttttgatagaggtaagaattagactcgatgcatttttgttagaattgctgtttaaatgttaacatcagaatgcaaattaaatataaattgctttaacctttgttacaggtatactggactttctgaaaggaaaaccaggtctcattaatgctagttattactttatcacagcaccagatttccattttatttatggttcctctctgggacaccactgtcggtttaataaaacaataaataattcattgcacagatccgaagacctcaggaaccagatcacaagggaaaccgattagcagcagaatttgttcatgtttggtggcagactggtggccaactggagggaggggagttttactgtgggtttttgaagaggtctcgtcacaagaccagagatgcctcttgaagagatttttaggttgtaggtttgcttactctaaagaacatcttgcccagaagtctgatttgagatgaaatgaagagaaacagtctgcttttgaaccaagtaaggtattcttgggaataatttttagagccatgagaaatctattcttacaggggtgcttttcaggcaaatgcagaaaatttaaaagagtctagaacaaaaaagtgacaatgtcacaaccttgctggaatctcaggaaaaagaattaaagatggcagctgctgtgaaaagctgtgtgactcctggcggagactgcagggacaaggtcatctttcacaaaaaatggaaaggtggcctagatgaggaggacacagactctccagaagttatgcaaacaaaatcaggcaagatgaagaattttaaggcacacctccattggcccacagagagtgttcttcatatgacaatgatgttaaacaccatctgtcacgtaccaggccatgtcctaagtattttaaatatgttaacacatctacaaagaggaaactattagaatctgtaggacctcttaagcccaaagggtctactgcaggcaggatgggcgttacagaaaaaaataaaaactctcattccaaattgctcctaagatggacaaattggttacttctccagaaggtctaatcaaggttaacaaaataggtaagttcgtggagttagaatgcatcttccctggagttcagaggtatttgggatgaccaaaggagtctgctggacagtatgtgtgttttacaaaatggcccccacagtgattaaagaccagagacttatatctctgcatttgtcaagctggaacagtctttagtgaacacagcttacctcttttaaaactgctggtttctactgaaggaaacatggatgacatttagtgttctgtgactggtctggcaccctacttttgttgacaaagatgggaaggggtctaaaagtcatgtcacttataaaagaacttgggaggaacttttttcaaaagatccaaagattttggaaggagagattagagcagaactaagaccacttagaagataggtagatttcagctcaatataaggaatttttttttaatatcagtgcagttccaaatggaataagctgtttgaacatggcttagcagaagctgaatgacaacctgttagaaattctagggaattctgcactgagtacaacattggattatttctttgggctgtttccaactcaagattctgttatttcattataagcattttgaggaaggcagttggtataaaggtgaccttagtaataaaagtcagtgtgaagtctaaagaaattccacaatgaatttaaagacaagaattttagggacaaggatacagaaatttgcctagtaacttgcacacagcagatggtaaatatttattgactcaatggagtaatgttaaaaataaggtttcccatggactgtgtgagggccaggcatacttaacatcctttgtgagagagaggatggaaacggagtctactgtgaaagccacaagttttggggaaatacactcctgcaaagaagctggaggttaacaaccaaggcaaaggggccagaccacagggagatcttccaggtccaagagcactgcagggcagatgagaagcagggatgattatgttgaaagtgcaagataa

SEQ ID NO: 735688 - DNA, 9937 bp, Homo sapiens
gcaaatattttaaaataagtaatttcaagaagtcagtcaaactcacaaagctttaacaaggtggcatccagcttggaagtcaagtgttcaagcccgcagtcgggacatccaagagctctttacatcctaattacaacacggaacccagactcactgcataccccgtcccgtatataatgcaaaacttgattctgcaagttcctttctcgggcggtgaaacttcgaaggtcctctccatggagacctttgataaatgtttaagcagtgatcttttctttcgcgtttgcctccattgcaacgcctccgctgatgggaaaaactactccctccgctactgcggggtggcagtgacgtcaacgaattagctgacctgttttttcgggcttcgcggacataggagttccgaaggccgagagtgagtgagtgagtgggagcggggcggctgcggctcctcctgtccggggcggagccctgcgtcgcgggcctggggaggccccgccagcacccttgacgtctgggtcccgagcagtgcggcagccacacgacactgaggcgagcgagtgggtgtgtgcgtggggggtcagccaaacttcctgtcccgcgctcgagctgcttccggcgggagccggaagacgctgtgtgtggacggaattcgggaccgactgacggccggccggcttcccggaactggaaggttacattgattacccacctagtacaacatcttacgggaagagcatagtatttcctagaggaatatgaacataacaggaaggtatcattggctctgaattaaatttgaacttgtcccctgaatagctacaggttttggaagctgaatcaatgttatcagatgagttagaatccaaaccagagctcctggtacagtttgttcagaatacgtccatcccattgggacaggggcttgtagaatcagaagctaaagatattacttgcttgtccctccttcccgtgactgaagcctcagaatgcagtcggctaatgttaccagatgatactacaaatcattctaactcctccaaggaggtcccttcctcagctgttttgagaagccttcgggtgaatgtgggtccagacggagaggagacgagagctcagactgtacagaaatccccggagtttttgtccacttcagagtcttctagcttgttgcaagatctacagccaagtgatagcacttcttttattcttcttaacctaacaagagcaggtctgggctcttcagctgagcacttagtgtttgtacaggatgaggcagaagattcagggaatgatttcctctccagtgagagcacagacagtagcattccatggttcctccgggttcaggagttggcccatgacagtttgattgctgctactcgtgcacaactggcaaagaatgcaaaaaccagcagcaatggagaaaatgtccaccttggttctggtgatgggcagtcaaaagattctgggccccttcctcaagtggaaaagaagctcaagtgtacagttgaaggttgtgaccggacatttgtatggccagctcactttaaataccacctcaagactcatcgaaatgaccgctccttcatctgtcctgcagaaggttgtgggaaaagcttctatgtgctgcagaggctgaaggtgcacatgaggacccacaatggagagaagccctttatgtgccatgagtctggctgtggtaagcagtttactacagctggaaacctgaagaaccaccggcgcatccacacaggagagaaacctttcctttgtgaagcccaaggatgtggccgttcctttgctgagtattctagcctccgaaaacatctggtggttcactcaggagagaagcctcatcagtgccaagtctgtgggaagaccttctctcagagtggaagcaggaatgtgcatatgagaaagcatcacctgcagctgggagcagctgggagtcaagagcaggagcaaactgaggtgcttgctgaaggatccccacgttccctgtcttcagtgcctgatgtgacacatcacctggtgaccatgcagtcagggaggcaatcatatgaagtttctgtcttaactgcagtaaatccacaagagttactaaaccaaggagatttaactgaaagacggacatgagcgtgggtgctgactcctggaagagcaactctatctgatctcaaaatgcgtatactgggaacaggatgccttagcccacaacagaaccagaatgaatctttgaaggcacaagactctgcttttgccactcttcctctttcctggtatagaagatggatgtaggagagcttcttttctaactaccatctgatcagacaaggaatgaagcaatgactgtgggctgggaaactgtacctacctctcttcccactgcaaatttctgggatagaccaaaagtgaatttgattatgtgttggctgaagttcttcattctgactgttgaggggaggttttcctttgaagagttttcatcccagactcagctgtcttttcacatggatgaaataattcctgctaccaacaacagagcttcaccaggaagttgagttttcaagatgccttgttgctttgaagaagggagtgatgtcaattctcttgttacattctccctttagcaacctgagtaagagactctctgccactgggctgcaaaaaaataaattacttgaatctccccttggcccaggctgaggtactatcttgtcctatacacttctacttggtcactttgctttcttcgttaatggaacatacagtagcatgttaagagggatttcatgtttttgtttttttaaagttaaaaattacatgatgcagagattcaggttttcctttaaataaacaaaacagcccagtcagttctttggctcttgttttatacaaaatttgttttcttagagattaagaatttaatctttccctttaaaatagtgtattgatttacccttaggattccataccagtaaaactgaaccgaggagtcttaggaaacaacaagaacatcttcatttcttaagcccaggtgatagttactctgtcaccaccaaaaaagacgcatctgggaaaatccttgattttggtctctttctcttgaacagcccgggtgccttgacccttgtttctcacaaagtcttcctccagcccagcctgcttcagggtgtctagataccactgttctgcttctttcttggctagatccttggcaacttgttcaaagagatagggccttgtttgtattcgctgcttcatttcctccagttctttcttatattctttcgctcttttacggtcattgttccggttctctttcagctttgctttgaacacttcctccaggcttttatggggatccatggcttttgcacgcaaggtcacagatttggacattgcttgagacttctttttgtgtatctccagccactgaatactctcatctgctttgttctttttttcaagtgcacttctgactgcagattccctcttcctggtggcatctgtgatgtgcacagggagagtgttggcagagagggaagcaaggccgctcagagaacgactccttggcaggggtgtagctggtggctgtggggaatcctgcctccttccggtggtggcagcatcacagggccgctgagggtggcgcaggttggcggtcctcagcaagaagggcttgttgcgagtggcctcttgggtttctcttcttttggctgctcttctctggaaggccttgtaaaggccctcatagtcagggaccacaggattcacccgaggctggaatctgaagttagtgtgcagaaacccaagcttttcctgctgggttcgggtggctgtgcggggctgtgggttagcccggttactagaggaggcgataggggaagaggccatctggagcatgtccagggctctcatttggatgcgaattttcctgaagagctcagcttcctggagtttatccccaagggctggctccagaatggacttgggaatccttctggtggccttctgcttggagatcttggcttcagctgtggctgccaagtctctctgtcgagcagcttcctttagctgctcctccttctccaggaagctgaagggcttcaaagaagagaggagcagttccttcctcttctggatccctgcctgccttcgggcctcgctgcgctccatgatctcttggtagaggggcaggtagacatgtgcaggcacaggctgtgcccggaactgcctgtggcactcggcctcttcctcaccctgcctctgggcccgctgcctctcctgctcaaaggaggcaggtgagcccagccactcggccttcttccgggcctcgcgcagcgtcatgcggaatggccgagggacagtaatggatgatgcccaggagctgacgcttctgtgctgggagggaggccgggagcctgagggtggctgggtctgaggcctgggaatgttggagggaaggttgttcagggagctgcagcgccttgtggagccacacctcagagcctgcgggcactggacctgcaccatccccctgtccttgtcttggaagaaactctccaggtcctcctcatcttcagagaggttttcatcactctctgggtcagactgaaagagagactccaacagacaccatctccctttctgcttcagttcctgtaagttctggtaaatgctcccagttgagtcagaagtagaatctatctcctcctctgggctgaggaactcgtcaagtttgctggccctgggcaaaaccagcccatccccggacagctcctctcctgcctctgtgtctgcgaaggactcggggggaaatatctgacggctcccctccgcgcctccgggggctccctcaggcctccccacggtcatttcagctggacagaggcagcagcgacagtgacagcgatagtggcagcagcggtggcagcgagagctatgcggggccagggtccacccctttctagctttggcgtctggttggcttccagggcagcctccgatccatcccgcccgaggaggcaaggatatgatattcactttcatgacaagaaaatcctgttgctcgaagcaggtccaaagaaagtactggagaaattgtcagaaacttacagcaacagggtcagctccatttcccctggctctgcaacgcttctcagtagttttggtgcctgggaccatatctgcaacatgagatacagagcctttcggcgaatgcaggtgcccctttatcttttcaattttgtcaagatgtcttggtctgtcttaagatatcggagtccactttctccaagtgttctgtgaatgtaggaggaatcagacaaggttcacattcagtccgaggaagtggggagaagcattcccaggagaattttcttctcattttatattttcctaccagagaggctgacaaattgtgattttctgctctgtcacttgggaaagcaatattgtttctgattggagtgatgtttccctcttggttttaatgcagactttccttttgtgtttccaggtgtgggacgcctgctcagaggccctgataatgtttgataaggataatttagatgacatgggctatatcgtggagaatgatgtcatcatgcatgctctcactaagcagttggaggctgtgtctgaccgagtgacggttctctacaggagcaaagccattcgctatacctggccttgtccatttcctatggccgactccagcccttgggttcatattaccctaggtgatggcagcaccttccagaccaaattgttggtagttgaagattcttattttgctaggggtcttgtatatctacatcttatcctagattctagggactctggttttcgatttaagctatagtttaattttaggcaaaacttttggttatgaggaccagtacctattcaggccagctcaagtggagatggtctcatcgtaaatcctgtacagggagcaatctcatgggccgtcttaggttgtgaaataacagatagctgggcctcacaggacaggcaccagagtgttgggaatggaggctgttctttccctctgaggagtctgtggtcattgatctcttgcctctcatttttctcctttctgctcacaagcttccctttttgcatggtagccattcctaaccctacatcagaactattcagctccagtgtgtgccccatactgaaactttccttattgctctctagttcaaatatcaggagggcctggctgagtttaactcatggctggcacctgttcagtcatgtccagctttggctctgttggctgaggctgatgtgacagtgcaggggctccacctctaggggctgtgagtgaagcaggcctgatggaattatcctgccacacaacaatcagagctggaggaaactttagggagcagagaaaaacttctgaagcagtttatgaagaggctggaagacttagcaggctcatgtgtccatgcagataggtgcagatggtcacaactccggagtacggcaggctgttggaatccagaatgtgagctggaactatgaccagtctgctgttgtggctactctgcatttatcagaggtaagatcctgagctgccatctggggactttattcataggcactaggtacttcacagagaaacttttctcctctctgttgcaggccacagaaaacaacgtagcctggcagagatttcttccctctgggcctattgctctgctcccggtaagaggtccttctgaccagtccgcccacatgcatgcaagcctttcctcttcactttctctcagcctttttctggtttcaagggaatctgcccaggctgtttgtaagttccctttttgtctttttatgcttgagagtttccaagtgcagcagagtcttagccgttggtattggtgttcttttgacacagctctcagacaccttgagttccttggtttggtccacgtcccatgaacatgcagcagagctagttagcatggatgaggaaaaatttgtggatgccgttaactctgccttttggagtgatgctgaccacacggacttcatcgacacagctggtgccatgctgcagtatgctgtcagccttctgaagcccactaaggtctcggctcgccagctgcccccaagcgtagccagggtggatgccaaaagccgagttctgtttcctcttgggttgggacatgctgctgagtacgtcaggcctcgggtggcgctcattggggatgcagcccacagagtccatccgcttgcaggacagggtgtcaacatgggctttggggatatctccagcttggcccatcacctcagtacggcagccttcaatgggaaggacttaggttccgtgagccacctcacaggttatgaaacagaaagacagcgtcacaacactgctcttctggctgctacagacttactaaaaaggctctattctaccagtgcctccccgcttgtgttgctcaggacgtggggcttgcaggccacaaatgcagtgtctccactcaaagaacagattatggcctttgcaagcaaatgagtactcctctcctaaagaaagattacgttgatgaaaaagaacatcctgcccaggacccatcatacatattttcaagatcttatttaatttaataaacttactttacattaaaattctctttttcttctttgcttaatgggcctgtggcacccaaataatgaatgataatttgctgtgaggagcgtatattagccagaccaaaggaaaaaacttcgaaggaagacttactttttggttgaaaagagctttttattactaaaaaacccacaaggtgctgtctcactcatttccagttaatcatttctaaagagaaaatttacattttgtttttgttttaatgttggtcataaatttatacagttgttttttgatagaggtaagaattagactcgatgcatttttgttagaattgctgtttaaatgttaacatcagaatgcaaattaaatataaattgctttaacctttgttacaggtatactggactttctgaaaggaaaaccaggtctcattaatgctagttattactttatcacagcaccagatttccattttatttatggttcctctctgggacaccactgtcggtttaataaaacaataaataattcattgcacagatccgaagacctcaggaaccagatcacaagggaaaccgattagcagcagaatttgttcatgtttggtggcagactggtggccaactggagggaggggagttttactgtgggtttttgaagaggtctcgtcacaagaccagagatgcctcttgaagagatttttaggttgtaggtttgcttactctaaagaacatcttgcccagaagtctgatttgagatgaaatgaagagaaacagtctgcttttgaaccaagtaaggtattcttgggaataatttttagagccatgagaaatctattcttacaggggtgcttttcaggcaaatgcagaaaatttaaaagagtctagaacaaaaaagtgacaatgtcacaaccttgctggaatctcaggaaaaagaattaaagatggcagctgctgtgaaaagctgtgtgactcctggcggagactgcagggacaaggtcatctttcacaaaaaatggaaaggtggcctagatgaggaggacacagactctccagaagttatgcaaacaaaatcaggcaagatgaagaattttaaggcacacctccattggcccacagagagtgttcttcatatgacaatgatgttaaacaccatctgtcacgtaccaggccatgtcctaagtattttaaatatgttaacacatctacaaagaggaaactattagaatctgtaggacctcttaagcccaaagggtctactgcaggcaggatgggcgttacagaaaaaaataaaaactctcattccaaattgctcctaagatggacaaattggttacttctccagaaggtctaatcaaggttaacaaaataggtaagttcgtggagttagaatgcatcttccctggagttcagaggtatttgggatgaccaaaggagtctgctggacagtatgtgtgttttacaaaatggcccccacagtgattaaagaccagagacttatatctctgcatttgtcaagctggaacagtctttagtgaacacagcttacctcttttaaaactgctggtttctactgaaggaaacatggatgacatttagtgttctgtgactggtctggcaccctacttttgttgacaaagatgggaaggggtctaaaagtcatgtcacttataaaagaacttgggaggaacttttttcaaaagatccaaagattttggaaggagagattagagcagaactaagaccacttagaagataggtagatttcagctcaatataaggaatttttttttaatatcagtgcagttccaaatggaataagctgtttgaacatggcttagcagaagctgaatgacaacctgttagaaattctagggaattctgcactgagtacaacattggcattttgaggaaggcagttggtataaaggtgaccttagtaataaaagtcagtgtgaagtctaaagaaattccacaatgaatttaaagacaagaattttagggacaaggatacagaaatttgcctagtaacttgcacacagcagatggtaaatatttattgactcaatggagtaatgttaaaaataaggtttcccatggactgtgtgagggccaggcatacttaacatcctttgtgagagagaggatggaaacggagtctactgtgaaagccacaagttttggggaaatacactcctgcaaagaagctggaggttaacaaccaaggcaaaggggccagaccacagggagatcttccaggtccaagagcactgcagggcagatgagaagcagggatgattatgttgaaagtgcaagataa

SEQ ID NO: 735689 - DNA, 9068 bp, Homo sapiens
gcaaatattttaaaataagtaatttcaagaagtcagtcaaactcacaaagctttaacaaggtggcatccagcttggaagtcaagtgttcaagcccgcagtcgggacatccaagagctctttacatcctaattacaacacggaacccagactcactgcataccccgtcccgtatataatgcaaaacttgattctgcaagttcctttctcgggcggtgaaacttcgaaggtcctctccatggagacctttgataaatgtttaagcagtgatcttttctttcgcgtttgcctccattgcaacgcctccgctgatgggaaaaactactccctccgctactgcggggtggcagtgacgtcaacgaattagctgacctgttttttcgggcttcgcggacataggagttccgaaggccgagagtgagtgagtgagtgggagcggggcggctgcggctcctcctgtccggggcggagccctgcgtcgcgggcctggggaggccccgccagcacccttgacgtctgggtcccgagcagtgcggcagccacacgacactgaggcgagcgagtgggtgtgtgcgtggggggtcagccaaacttcctgtcccgcgctcgagctgcttccggcgggagccggaagacgctgtgtgtggacggaattcgggaccgactgacggccggccggcttcccggaactggaaggttacattgattacccacctagtacaacatcttacgggaagagcatagtatttcctagaggaatatgaacataacaggaaggtatcattggctctgaattaaatttgaacttgtcccctgaatagctacaggttttggaagctgaatcaatgttatcagatgagttagaatccaaaccagagctcctggtacagtttgttcagaatacgtccatcccattgggacaggggcttgtagaatcagaagctaaagatattacttgcttgtccctccttcccgtgactgaagcctcagaatgcagtcggctaatgttaccagatgatactacaaatcattctaactcctccaaggaggtcccttcctcagctgttttgagaagccttcgggtgaatgtgggtccagacggagaggagacgagagctcagactgtacagaaatccccggagtttttgtccacttcagagtcttctagcttgttgcaagatctacagccaagtgatagcacttcttttattcttcttaacctaacaagagcaggtctgggctcttcagctgagcacttagtgtttgtacaggatgaggcagaagattcagggaatgatttcctctccagtgagagcacagacagtagcattccatggttcctccgggttcaggagttggcccatgacagtttgattgctgctactcgtgcacaactggcaaagaatgcaaaaaccagcagcaatggagaaaatgtccaccttggttctggtgatgggcagtcaaaagattctgggccccttcctcaagtggaaaagaagctcaagtgtacagttgaaggttgtgaccggacatttgtatggccagctcactttaaataccacctcaagactcatcgaaatgaccgctccttcatctgtcctgcagaaggttgtgggaaaagcttctatgtgctgcagaggctgaaggtgcacatgaggacccacaatggagagaagccctttatgtgccatgagtctggctgtggtaagcagtttactacagctggaaacctgaagaaccaccggcgcatccacacaggagagaaacctttcctttgtgaagcccaaggatgtggccgttcctttgctgagtattctagcctccgaaaacatctggtggttcactcaggagagaagcctcatcagtgccaagtctgtgggaagaccttctctcagagtggaagcaggaatgtgcatatgagaaagcatcacctgcagctgggagcagctgggagtcaagagcaggagcaaactgaggtgcttgctgaaggatccccacgttccctgtcttcagtgcctgatgtgacacatcacctggtgaccatgcagtcagggaggcaatcatatgaagtttctgtcttaactgcagtaaatccacaagagttactaaaccaaggagatttaactgaaagacggacatgagcgtgggtgctgactcctggaagagcaactctatctgatctcaaaatgcgtatactgggaacaggatgccttagcccacaacagaaccagaatgaatctttgaaggcacaagactctgcttttgccactcttcctctttcctggtatagaagatggatgtaggagagcttcttttctaactaccatctgatcagacaaggaatgaagcaatgactgtgggctgggaaactgtacctacctctcttcccactgcaaatttctgggatagaccaaaagtgaatttgattatgtgttggctgaagttcttcattctgactgttgaggggaggttttcctttgaagagttttcatcccagactcagctgtcttttcacatggatgaaataattcctgctaccaacaacagagcttcaccaggaagttgagttttcaagatgccttgttgctttgaagaagggagtgatgtcaattctcttgttacattctccctttagcaacctgagtaagagactctctgccactgggctgcaaaaaaataaattacttgaatctccccttggcccaggctgaggtactatcttgtcctatacacttctacttggtcactttgctttcttcgttaatggaacatacagtagcatgttaagagggatttcatgtttttgtttttttaaagttaaaaattacatgatgcagagattcaggttttcctttaaataaacaaaacagcccagtcagttctttggctcttgttttatacaaaatttgttttcttagagattaagaatttaatctttccctttaaaatagtgtattgatttacccttaggattccataccagtaaaactgaaccgaggagtcttaggaaacaacaagaacatcttcatttcttaagcccaggtgatagttactctgtcaccaccaaaaaagacgcatctgggaaaatccttgattttggtctctttctcttgaacagcccgggtgccttgacccttgtttctcacaaagtcttcctccagcccagcctgcttcagggtgtctagataccactgttctgcttctttcttggctagatccttggcaacttgttcaaagagatagggccttgtttgtattcgctgcttcatttcctccagttctttcttatattctttcgctcttttacggtcattgttccggttctctttcagctttgctttgaacacttcctccaggcttttatggggatccatggcttttgcacgcaaggtcacagatttggacattgcttgagacttctttttgtgtatctccagccactgaatactctcatctgctttgttctttttttcaagtgcacttctgactgcagattccctcttcctggtggcatctgtgatgtgcacagggagagtgttggcagagagggaagcaaggccgctcagagaacgactccttggcaggggtgtagctggtggctgtggggaatcctgcctccttccggtggtggcagcatcacagggccgctgagggtggcgcaggttggcggtcctcagcaagaagggcttgttgcgagtggcctcttgggtttctcttcttttggctgctcttctctggaaggccttgtaaaggccctcatagtcagggaccacaggattcacccgaggctggaatctgaagttagtgtgcagaaacccaagcttttcctgctgggttcgggtggctgtgcggggctgtgggttagcccggttactagaggaggcgataggggaagaggccatctggagcatgtccagggctctcatttggatgcgaattttcctgaagagctcagcttcctggagtttatccccaagggctggctccagaatggacttgggaatccttctggtggccttctgcttggagatcttggcttcagctgtggctgccaagtctctctgtcgagcagcttcctttagctgctcctccttctccaggaagctgaagggcttcaaagaagagaggagcagttccttcctcttctggatccctgcctgccttcgggcctcgctgcgctccatgatctcttggtagaggggcaggtagacatgtgcaggcacaggctgtgcccggaactgcctgtggcactcggcctcttcctcaccctgcctctgggcccgctgcctctcctgctcaaaggaggcaggtgagcccagccactcggccttcttccgggcctcgcgcagcgtcatgcggaatggccgagggacagtaatggatgatgcccaggagctgacgcttctgtgctgggagggaggccgggagcctgagggtggctgggtctgaggcctgggaatgttggagggaaggttgttcagggagctgcagcgccttgtggagccacacctcagagcctgcgggcactggacctgcaccatccccctgtccttgtcttggaagaaactctccaggtcctcctcatcttcagagaggttttcatcactctctgggtcagactgaaagagagactccaacagacaccatctccctttctgcttcagttcctgtaagttctggtaaatgctcccagttgagtcagaagtagaatctatctcctcctctgggctgaggaactcgtcaagtttgctggccctgggcaaaaccagcccatccccggacagctcctctcctgcctctgtgtctgcgaaggactcggggggaaatatctgacggctcccctccgcgcctccgggggctccctcaggcctccccacggtcatttcagctggacagaggcagcagcgacagtgacagcgatagtggcagcagcggtggcagcgagagctatgcggggccagggtccacccctttctagctttggcgtctggttggcttccagggcagcctccgatccatcccgcccgaggaggcaaggatatgatattcactttcatgacaagaaaatcctgttgctcgaagcaggtccaaagaaagtactggagaaattgtcagaaacttacagcaacagggtcagctccatttcccctggctctgcaacgcttctcagtagttttggtgcctgggaccatatctgcaacatgagatacagagcctttcggcgaatgcaggtgcccctttatcttttcaattttgtcaagatgtcttggtctgtcttaagatatcggagtccactttctccaagtgttctgtgaatgtaggaggaatcagacaaggttcacattcagtccgaggaagtggggagaagcattcccaggagaattttcttctcattttatattttcctaccagagaggctgacaaattgtgattttctgctctgtcacttgggaaagcaatattgtttctgattggagtgatgtttccctcttggttttaatgcagactttccttttgtgtttccaggtgtgggacgcctgctcagaggccctgataatgtttgataaggataatttagatgacatgggctatatcgtggagaatgatgtcatcatgcatgctctcactaagcagttggaggctgtgtctgaccgagtgacggttctctacaggagcaaagccattcgctatacctggccttgtccatttcctatggccgactccagcccttgggttcatattaccctaggtgatggcagcaccttccagaccaaattgttggtagttgaagattcttattttgctaggggtcttgtatatctacatcttatcctagattctagggactctggttttcgatttaagctatagtttaattttaggcaaaacttttggttatgaggaccagtacctattcaggccagctcaagtggagatggtctcatcgtaaatcctgtacagggagcaatctcatgggccgtcttaggttgtgaaataacagatagctgggcctcacaggacaggcaccagagtgttgggaatggaggctgttctttccctctgaggagtctgtggtcattgatctcttgcctctcatttttctcctttctgctcacaagcttccctttttgcatggtagccattcctaaccctacatcagaactattcagctccagtgtgtgccccatactgaaactttccttattgctctctagttcaaatatcaggagggcctggctgagtttaactcatggctggcacctgttcagtcatgtccagctttggctctgttggctgaggctgatgtgacagtgcaggggctccacctctaggggctgtgagtgaagcaggcctgatggaattatcctgccacacaacaatcagagctggaggaaactttagggagcagagaaaaacttctgaagcagtttatgaagaggctggaagacttagcaggctcatgtgtccatgcagataggtgcagatggtcacaactccggagtacggcaggctgttggaatccagaatgtgagctggaactatgaccagtctgctgttgtggctactctgcatttatcagaggtaagatcctgagctgccatctggggactttattcataggcactaggtacttcacagagaaacttttctcctctctgttgcaggccacagaaaacaacgtagcctggcagagatttcttccctctgggcctattgctctgctcccggtaagaggtccttctgaccagtccgcccacatgcatgcaagcctttcctcttcactttctctcagcctttttctggtttcaagggaatctgcccaggctgtttgtaagttccctttttgtctttttatgcttgagagtttccaagtgcagcagagtcttagccgttggtattggtgttcttttgacacagctctcagacaccttgagttccttggtttggtccacgtcccatgaacatgcagcagagctagttagcatggatgaggaaaaatttgtggatgccgttaactctgccttttggagtgatgctgaccacacggacttcatcgacacagctggtgccatgctgcagtatgctgtcagccttctgaagcccactaaggtctcggctcgccagctgcccccaagcgtagccagggtggatgccaaaagccgagttctgtttcctcttgggttgggacatgctgctgagtacgtcaggcctcgggtggcgctcattggggatgcagcccacagagtccatccgcttgcaggacagggtgtcaacatgggctttggggatatctccagcttggcccatcacctcagtacggcagccttcaatgggaaggacttaggttccgtgagccacctcacaggttatgaaacagaaagacagcgtcacaacactgctcttctggctgctacagacttactaaaaaggctctattctaccagtgcctccccgcttgtgttgctcaggacgtggggcttgcaggccacaaatgcagtgtctccactcaaagaacagattatggcctttgcaagcaaatgagtactcctctcctaaagaaagattacgttgatgaaaaagaacatcctgcccaggacccatcatacatattttcaagatcttatttaatttaataaacttactttacattaaaattctctttttcttctttgcttaatgggcctgtggcacccaaataatgaatgataatttgctgtgaggagcgtatattagccagaccaaaggaaaaaacttcgaaggaagacttactttttggttgaaaagagctttttattactaaaaaacccacaaggtgctgtctcactcatttccagttaatcatttctaaagagaaaatttacattttgtttttgttttaatgttggtcataaatttatacagttgttttttgatagaggtaagaattagactcgatgcatttttgttagaattgctgtttaaatgttaacatcagaatgcaaattaaatataaattgctttaacctttgttacaggtatactggactttctgaaaggaaaaccaggtctcattaatgctagttattactttatcacagcaccagatttccattttatttatggttcctctctgggacaccactgtcggtttaataaaacaataaataattcattgcacagatccgaagacctcaggaaccagatcacaagggaaaccgattagcagcagaatttgttcatgtttggtggcagactggtggccaactggagggaggggagttttactgtgggtttttgaagaggtctcgtcacaagaccagagatgcctcttgaagagatttttaggttgtaggtttgcttactctaaagaacatcttgcccagaagtctgatttgagatgaaatgaagagaaacagtctgcttttgaaccaagtaaggtattcttgggaataatttttagagccatgagaaatctattcttacaggggtgcttttcaggcaaatgcagaaaatttaaaagagtctagaacaaaaaagtgacaatgtcacaaccttgctggaatctcaggaaaaagaattaaagatggcagctgctgtgaaaagctgtgtgactcctggcggagactgcagggacaaggtcatctttcacaaaaaatggaaaggtggcctagatgaggaggacacagactctccagaagttatgcaaacaaaatcaggcaagatgaagaattttaaggcacacctccattggcccacagagagtgttcttcatatgacaatgatgttaaacaccatctgtcacgtaccaggccatgtcctaagtattttaaatatgttaacacatctacaaagaggaaactattagaatctgtaggacctcttaagcccaaagggtctactgcaggcaggatgggcgttacagaaaaaaataaaaactctcattccaaattgctcctaagatggacaaattggttacttctccagaaggtctaatcaaggttaacaaaataggtaagatgcattctaactccacgaacttacctattttgttaaccttgattggttacttctcccagaaggtctaatcaag

SEQ ID NO: 735690 - DNA, 8042 bp, Homo sapiens
gcaaatattttaaaataagtaatttcaagaagtcagtcaaactcacaaagctttaacaaggtggcatccagcttggaagtcaagtgttcaagcccgcagtcgggacatccaagagctctttacatcctaattacaacacggaacccagactcactgcataccccgtcccgtatataatgcaaaacttgattctgcaagttcctttctcgggcggtgaaacttcgaaggtcctctccatggagacctttgataaatgtttaagcagtgatcttttctttcgcgtttgcctccattgcaacgcctccgctgatgggaaaaactactccctccgctactgcggggtggcagtgacgtcaacgaattagctgacctgttttttcgggcttcgcggacataggagttccgaaggccgagagtgagtgagtgagtgggagcggggcggctgcggctcctcctgtccggggcggagccctgcgtcgcgggcctggggaggccccgccagcacccttgacgtctgggtcccgagcagtgcggcagccacacgacactgaggcgagcgagtgggtgtgtgcgtggggggtcagccaaacttcctgtcccgcgctcgagctgcttccggcgggagccggaagacgctgtgtgtggacggaattcgggaccgactgacggccggccggcttcccggaactggaaggttacattgattacccacctagtacaacatcttacgggaagagcatagtatttcctagaggaatatgaacataacaggaaggtatcattggctctgaattaaatttgaacttgtcccctgaatagctacaggttttggaagctgaatcaatgttatcagatgagttagaatccaaaccagagctcctggtacagtttgttcagaatacgtccatcccattgggacaggggcttgtagaatcagaagctaaagatattacttgcttgtccctccttcccgtgactgaagcctcagaatgcagtcggctaatgttaccagatgatactacaaatcattctaactcctccaaggaggtcccttcctcagctgttttgagaagccttcgggtgaatgtgggtccagacggagaggagacgagagctcagactgtacagaaatccccggagtttttgtccacttcagagtcttctagcttgttgcaagatctacagccaagtgatagcacttcttttattcttcttaacctaacaagagcaggtctgggctcttcagctgagcacttagtgtttgtacaggatgaggcagaagattcagggaatgatttcctctccagtgagagcacagacagtagcattccatggttcctccgggttcaggagttggcccatgacagtttgattgctgctactcgtgcacaactggcaaagaatgcaaaaaccagcagcaatggagaaaatgtccaccttggttctggtgatgggcagtcaaaagattctgggccccttcctcaagtggaaaagaagctcaagtgtacagttgaaggttgtgaccggacatttgtatggccagctcactttaaataccacctcaagactcatcgaaatgaccgctccttcatctgtcctgcagaaggttgtgggaaaagcttctatgtgctgcagaggctgaaggtgcacatgaggacccacaatggagagaagccctttatgtgccatgagtctggctgtggtaagcagtttactacagctggaaacctgaagaaccaccggcgcatccacacaggagagaaacctttcctttgtgaagcccaaggatgtggccgttcctttgctgagtattctagcctccgaaaacatctggtggttcactcaggagagaagcctcatcagtgccaagtctgtgggaagaccttctctcagagtggaagcaggaatgtgcatatgagaaagcatcacctgcagctgggagcagctgggagtcaagagcaggagcaaactgaggtgcttgctgaaggatccccacgttccctgtcttcagtgcctgatgtgacacatcacctggtgaccatgcagtcagggaggcaatcatatgaagtttctgtcttaactgcagtaaatccacaagagttactaaaccaaggagatttaactgaaagacggacatgagcgtgggtgctgactcctggaagagcaactctatctgatctcaaaatgcgtatactgggaacaggatgccttagcccacaacagaaccagaatgaatctttgaaggcacaagactctgcttttgccactcttcctctttcctggtatagaagatggatgtaggagagcttcttttctaactaccatctgatcagacaaggaatgaagcaatgactgtgggctgggaaactgtacctacctctcttcccactgcaaatttctgggatagaccaaaagtgaatttgattatgtgttggctgaagttcttcattctgactgttgaggggaggttttcctttgaagagttttcatcccagactcagctgtcttttcacatggatgaaataattcctgctaccaacaacagagcttcaccaggaagttgagttttcaagatgccttgttgctttgaagaagggagtgatgtcaattctcttgttacattctccctttagcaacctgagtaagagactctctgccactgggctgcaaaaaaataaattacttgaatctccccttggcccaggctgaggtactatcttgtcctatacacttctacttggtcactttgctttcttcgttaatggaacatacagtagcatgttaagagggatttcatgtttttgtttttttaaagttaaaaattacatgatgcagagattcaggttttcctttaaataaacaaaacagcccagtcagttctttggctcttgttttatacaaaatttgttttcttagagattaagaatttaatctttccctttaaaatagtgtattgatttacccttaggattccataccagtaaaactgaaccgaggagtcttaggaaacaacaagaacatcttcatttcttaagcccaggtgatagttactctgtcaccaccaaaaaagacgcatctgggaaaatccttgattttggtctctttctcttgaacagcccgggtgccttgacccttgtttctcacaaagtcttcctccagcccagcctgcttcagggtgtctagataccactgttctgcttctttcttggctagatccttggcaacttgttcaaagagatagggccttgtttgtattcgctgcttcatttcctccagttctttcttatattctttcgctcttttacggtcattgttccggttctctttcagctttgctttgaacacttcctccaggcttttatggggatccatggcttttgcacgcaaggtcacagatttggacattgcttgagacttctttttgtgtatctccagccactgaatactctcatctgctttgttctttttttcaagtgcacttctgactgcagattccctcttcctggtggcatctgtgatgtgcacagggagagtgttggcagagagggaagcaaggccgctcagagaacgactccttggcaggggtgtagctggtggctgtggggaatcctgcctccttccggtggtggcagcatcacagggccgctgagggtggcgcaggttggcggtcctcagcaagaagggcttgttgcgagtggcctcttgggtttctcttcttttggctgctcttctctggaaggccttgtaaaggccctcatagtcagggaccacaggattcacccgaggctggaatctgaagttagtgtgcagaaacccaagcttttcctgctgggttcgggtggctgtgcggggctgtgggttagcccggttactagaggaggcgataggggaagaggccatctggagcatgtccagggctctcatttggatgcgaattttcctgaagagctcagcttcctggagtttatccccaagggctggctccagaatggacttgggaatccttctggtggccttctgcttggagatcttggcttcagctgtggctgccaagtctctctgtcgagcagcttcctttagctgctcctccttctccaggaagctgaagggcttcaaagaagagaggagcagttccttcctcttctggatccctgcctgccttcgggcctcgctgcgctccatgatctcttggtagaggggcaggtagacatgtgcaggcacaggctgtgcccggaactgcctgtggcactcggcctcttcctcaccctgcctctgggcccgctgcctctcctgctcaaaggaggcaggtgagcccagccactcggccttcttccgggcctcgcgcagcgtcatgcggaatggccgagggacagtaatggatgatgcccaggagctgacgcttctgtgctgggagggaggccgggagcctgagggtggctgggtctgaggcctgggaatgttggagggaaggttgttcagggagctgcagcgccttgtggagccacacctcagagcctgcgggcactggacctgcaccatccccctgtccttgtcttggaagaaactctccaggtcctcctcatcttcagagaggttttcatcactctctgggtcagactgaaagagagactccaacagacaccatctccctttctgcttcagttcctgtaagttctggtaaatgctcccagttgagtcagaagtagaatctatctcctcctctgggctgaggaactcgtcaagtttgctggccctgggcaaaaccagcccatccccggacagctcctctcctgcctctgtgtctgcgaaggactcggggggaaatatctgacggctcccctccgcgcctccgggggctccctcaggcctccccacggtcatttcagctggacagaggcagcagcgacagtgacagcgatagtggcagcagcggtggcagcgagagctatgcggggccagggtccacccctttctagctttggcgtctggttggcttccagggcagcctccgatccatcccgcccgaggaggcaaggatatgatattcactttcatgacaagaaaatcctgttgctcgaagcaggtccaaagaaagtactggagaaattgtcagaaacttacagcaacagggtcagctccatttcccctggctctgcaacgcttctcagtagttttggtgcctgggaccatatctgcaacatgagatacagagcctttcggcgaatgcaggtgcccctttatcttttcaattttgtcaagatgtcttggtctgtcttaagatatcggagtccactttctccaagtgttctgtgaatgtaggaggaatcagacaaggttcacattcagtccgaggaagtggggagaagcattcccaggagaattttcttctcattttatattttcctaccagagaggctgacaaattgtgattttctgctctgtcacttgggaaagcaatattgtttctgattggagtgatgtttccctcttggttttaatgcagactttccttttgtgtttccaggtgtgggacgcctgctcagaggccctgataatgtttgataaggataatttagatgacatgggctatatcgtggagaatgatgtcatcatgcatgctctcactaagcagttggaggctgtgtctgaccgagtgacggttctctacaggagcaaagccattcgctatacctggccttgtccatttcctatggccgactccagcccttgggttcatattaccctaggtgatggcagcaccttccagaccaaattgttggtagttgaagattcttattttgctaggggtcttgtatatctacatcttatcctagattctagggactctggttttcgatttaagctatagtttaattttaggcaaaacttttggttatgaggaccagtacctattcaggccagctcaagtggagatggtctcatcgtaaatcctgtacagggagcaatctcatgggccgtcttaggttgtgaaataacagatagctgggcctcacaggacaggcaccagagtgttgggaatggaggctgttctttccctctgaggagtctgtggtcattgatctcttgcctctcatttttctcctttctgctcacaagcttccctttttgcatggtagccattcctaaccctacatcagaactattcagctccagtgtgtgccccatactgaaactttccttattgctctctagttcaaatatcaggagggcctggctgagtttaactcatggctggcacctgttcagtcatgtccagctttggctctgttggctgaggctgatgtgacagtgcaggggctccacctctaggggctgtgagtgaagcaggcctgatggaattatcctgccacacaacaatcagagctggaggaaactttagggagcagagaaaaacttctgaagcagtttatgaagaggctggaagacttagcaggctcatgtgtccatgcagataggtgcagatggtcacaactccggagtacggcaggctgttggaatccagaatgtgagctggaactatgaccagtctgctgttgtggctactctgcatttatcagaggtaagatcctgagctgccatctggggactttattcataggcactaggtacttcacagagaaacttttctcctctctgttgcaggccacagaaaacaacgtagcctggcagagatttcttccctctgggcctattgctctgctcccggtaagaggtccttctgaccagtccgcccacatgcatgcaagcctttcctcttcactttctctcagcctttttctggtttcaagggaatctgcccaggctgtttgtaagttccctttttgtctttttatgcttgagagtttccaagtgcagcagagtcttagccgttggtattggtgttcttttgacacagctctcagacaccttgagttccttggtttggtccacgtcccatgaacatgcagcagagctagttagcatggatgaggaaaaatttgtggatgccgttaactctgccttttggagtgatgctgaccacacggacttcatcgacacagctggtgccatgctgcagtatgctgtcagccttctgaagcccactaaggtctcggctcgccagctgcccccaagcgtagccagggtggatgccaaaagccgagttctgtttcctcttgggttgggacatgctgctgagtacgtcaggcctcgggtggcgctcattggggatgcagcccacagagtccatccgcttgcaggacagggtgtcaacatgggctttggggatatctccagcttggcccatcacctcagtacggcagccttcaatgggaaggacttaggttccgtgagccacctcacaggttatgaaacagaaagacagcgtcacaacactgctcttctggctgctacagacttactaaaaaggctctattctaccagtgcctccccgcttgtgttgctcaggacgtggggcttgcaggccacaaatgcagtgtctccactcaaagaacagattatggcctttgcaagcaaatgagtactcctctcctaaagaaagattacgttgatgaaaaagaacatcctgcccaggacccatcatacatattttcaagatcttatttaatttaataaacttactttacattaaaaaaaaaaaaaaaaaaaaaaaaaaaagggggggggggctaagaaatttccccgggggggcccaattttggcggtcacccccgctttctttgggctcccacggggtccccctatggggagcgcgtatataaataacgcattggccacaggcgccgcgggtttcaaaccccgctcgttggccgggcggaaaacccggctccccctggcactcctcggggaagggacccttaactctgtgggcgttggcgccatctgtggcaccacctcccctcagagaatctatcgcgccgagggcaaatataccctctcacccgctcttcaccgggtacccaccgcccattatgtcttggcgcttgaaactttgggcacgcgcctctattctcacactcttc

SEQ ID NO: 735691 - DNA, 1850 bp, Homo sapiens
gcatgagtctccggcagggctgtgaaggtttccgggaagccagccaatcattcccaacggaaactcagtagcggcattttcaactggataaactggccttagtcccgccttctcgttccagagttttgtgcgaaggaaaccgatggggatcggaaccgtagcggttgagctgctgctgctacggatatctgacagaagccttcggtggttgtcggcctaatgagcggacggcaaagaacgctttttcagacgtggggctcaagtatctcccgatcatctgggactccgggttgcagctccggaactgagcgacctcagagccctggcagctccaaggcgcctttgccagcagcagcggaggctcagctggagtcggacgatgatgtgttgcttgtcgcggcgtacgaggctgagcggcagttgtgtctagagaatggcgggttctgcacctccgcgggcgccctgtggatttaccctaccaattgcccagtgcgggactaccagctgcacatttcccgggctgctctgttttgcaatacgctggtgtgtctgcctaccggactgggaaagacctttattgccgccgtggtcatgtacaatttctaccgctggttcccttcaggaaaggtggtcttcatggccccaacgaaacccttggtgacacagcagatcgaggcttgctaccaggtgatgggtatcccgcaatcccacatggccgaaatgacagggtctacacaagcttccaccaggaaggaaatatggtgcagtaagagagtgctttttcttacacctcaggtcatggtaaatgacctttctagaggagcttgtcccgctgctgaaataaagtgtttagttattgatgaagctcataaagctctcggaaactatgcttattgccaggttgtaagagaactagtcaaatatacaaatcactttagaatcttggctctaagtgccacaccaggtagtgatataaaggctgtgcaacaagttattactaacctgctaattgggcagatagagcttcgttctgaagattctccagatattttgacatattctcatgaaagaaaagttgaaaagcttattgttccgcttggtgaagaacttgcagccatccaaaagacctatatccagattttggaatcatttgctcgttctttgattcagaggaatgttttgatgagaagggatatcccaaatctaacaaaatatcagataattctggcaagagatcagtttaggaaaaacccatctccgaatattgtgggaatacaacaaggcataatcgagggagagtttgctatttgtattagtttatatcatggttatgaattattgcagcaaatgggaatgagatcattatatttcttcctttgtggaattatggatggaactaaagggatgacacggtcaaaaaatgaacttggccgaaatgaagacttcatgaaactctataatcatctagagtgtatgtttgcacgtacacgtagtacttcagcaaatggtatttctgctatccaacaaggagataaaaataaaaaatttgtttatagtcatccaaagttaaagaaattagaagaagttgtaattgaacacttcaagtcatggaatgctgaaaacactactgaaaagaaacgtgatgagacccgagttatgatcttctcttcatttcgagatagtgttcaagaaattgcagaaatgctttcacagcatcagccaattattagagtaatgacttttgtcggccatgcctcagggaaaagcacgaagggttttacccagaaggagcaactggaggtaattatttttggaattgataaaaataaaaataagattgattagctttg

SEQ ID NO: 735692 - DNA, 2255 bp, Homo sapiens
gcatgagtctccggcagggctgtgaaggtttccgggaagccagccaatcattcccaacggaaactcagtagcggcattttcaactggataaactggccttagtcccgccttctcgttccagagttttgtgcgaaggaaaccgatggggatcggaaccgtagcggttgagctgctgctgctacggatatctgacagaagccttcggtggttgtcggcctaatgagcggacggcaaagaacgctttttcagacgtggggctcaagtatctcccgatcatctgggactccgggttgcagctccggaactgagcgacctcagagccctggcagctccaaggcgcctttgccagcagcagcggaggctcagctggagtcggacgatgatgtgttgcttgtcgcggcgtacgaggctgagcggcagttgtgtctagagaatggcgggttctgcacctccgcgggcgccctgtggatttaccctaccaattgcccagtgcgggactaccagctgcacatttcccgggctgctctgttttgcaatacgctggtgtgtctgcctaccggactgggaaagacctttattgccgccgtggtcatgtacaatttctaccgctggttcccttcaggaaaggtggtcttcatggccccaacgaaacccttggtgacacagcagatcgaggcttgctaccaggtgatgggtatcccgcaatcccacatggccgaaatgacagggtctacacaagcttccaccaggaaggaaatatggtgcagtaagagagtgctttttcttacacctcaggtcatggtaaatgacctttctagaggagcttgtcccgctgctgaaataaagtgtttagttattgatgaagctcataaagctctcggaaactatgcttattgccaggttgtaagagaactagtcaaatatacaaatcactttagaatcttggctctaagtgccacaccaggtagtgatataaaggctgtgcaacaagttattactaacctgctaattgggcagatagagcttcgttctgaagattctccagatattttgacatattctcatgaaagaaaagttgaaaagcttattgttccgcttggtgaagaacttgcagccatccaaaagacctatatccagattttggaatcatttgctcgttctttgattcagaggaatgttttgatgagaagggatatcccaaatctaacaaaatatcagataattctggcaagagatcagtttaggaaaaacccatctccgaatattgtgggaatacaacaaggcataatcgagggagagtttgctatttgtattagtttatatcatggttatgaattattgcagcaaatgggaatgagatcattatatttcttcctttgtggaattatggatggaactaaagggatgacacggtcaaaaaatgaacttggccgaaatgaagacttcatgaaactctataatcatctagagtgtatgtttgcacgtacacgtagtacttcagcaaatggtatttctgctatccaacaaggagataaaaataaaaaatttgtttatagtcatccaaagttaaagaaattagaagaagttgtaattgaacacttcaagtcatggaatgctgaaaacactactgaaaagaaacgtgatgagacccgagttatgatcttctcttcatttcgagatagtgttcaagaaattgcagaaatgctttcacagcatcagccaattattagagtaatgacttttgtcggccatgcctcagggaaaagcacgaagggttttacccagaaggagcaactggaggtagtgaaacagtttcgtgacggtggttacaacacgctggtttctacctgtgtgggtgaagaaggtttggatataggagaagttgatcttataatatgttttgattcccagaagagcccaattcgtcttgtacaacgaatgggtagaactggccgtaaacgtcaaggcaggatagttattatcctttctgaaggacgagaggaacgtatttataatcagagtcagtccaacaaaagaagtatatataaagctatttcaagtaacaggcaggtccttcatttttaccaaagaagtccacgaatggttcctgatggaatcaacccaaaattacacaaaatgttcatcacacatggtgtctatgaaccagagaagccttctcggaacttgcagcgaaagtcatctatcttttcctatagggatggtaaataaattttgcatttgacacatgcattttt

SEQ ID NO: 735693 - DNA, 1414 bp, Homo sapiens
  misc_feature (423)..(423): n is a, c, g, or t
  misc_feature (973)..(973): n is a, c, g, or t
aagctactaaagaaaagccagaaacagcgtaagaattccctactcaaatatgattcagagacgagggtggggactttattccactggacttcagtcccagtgacaaggccactactattgtgaattaatatcaggctaattaaacttgatgttattaaatgttctatccataaaatttttcattcagaattcttgtttttcaaacaacattctggattattatttagctgtcaaagtagctgtgttcttagaaaatacatcagtcagggctgggtacagtggctcatgtctgtaatcctagtgctttgggaggccaagacaggaggatcacatgaggccaggagtttgagaccaactaagtcaacatggtaggaccctgtctctatccccctctaccccccaaaaaattagtcagacatggtngcacatgcttgtagtcctagctacttgggaggctgaggtgggaggatctcttgagcccaagagttcaaggtagcagtgagctgattgcactactgcactctggctcatgcaagataggaagaccctgtctcagaaaagattaaaagaaaataaactaatcacacaaatttcaaatatactatttataatggtagaaacattttagtgagcaatgatcctggcctttagtgaggtttttctcataacaatttgtcataaatgaataatttctgggtaaaacattataatttcattttttctttatttatttatttttatttttatttttgaaacagaatctcattttgttgtccaggctggagtgtccgcctcccaggctccagtgatcctccagcctcagcctcttgagtagctgggactacaggcatgctccaccacgctcggctaatttttgtattttttgttgagaaggggttgtgccatggtgtccaggcttgacttgaactcctgggctcaaacaatcagcctgctttggcctcccaaagtgctngaactacaggcatgagccatggagcccaacctgtgatttctttgctgtgtacccccatttgatggataattttttggcatgttgataaacgtcagggtgtaaagtatccagtatgaggggtaaagccaggattataataaatttgtcaacttcaggttttcttgctagccttttctgtgatatacaaagtgcacatacaactacatgggtaggagaattgttgaaataagttatcattgttcaaacaataatttgttggaaccaaatatcacccacaatgcaattgtctacctttaaagaatggccatagagtcaaaaactttcttttgaatcctggattcactatttatttgatgtgagatcacctttacttttataccatcaatttcctcagtgtaaagagtgtattattaaaattccctcgtacggtcaaaaaaaaat

SEQ ID NO: 735694 - DNA, 1152 bp, Homo sapiens
aagatgaagaaagcagcattcagaagagacgctcaaaccgccaagttaagcgaaaaaaatatacagaggacctggatataaagatcacagatgatgaagaagaagaagaggtggatgtaactggtccaataaaacctgagcctatcctccctgaaccagtgcaagaaccagatggcgagactttgccttccatgcagttctttgtggagaatcccagtgaagaagatgcagccattgtagacaaagtgctttctatgcggattgtgaagaaggagctcccttctggacaatatactgaagcagaagaattctttgtcaagtacaagaactactcctatctgcattgtgaatgggctactatctcccaactagagaaggataagaggatacatcaaaaattaaagcgcttcaaaaccaaaatggctcagatgagacacttcttccatgaggatgaagagccctttaatccagactacgtagaggtggataggatattggatgagtctcacagtattgacaaggacaatggggagcccgttatttactacctggtgaaatggtgctctctgccctatgaggatagcacatgggagctaaaagaagatgttgatgagggcaagattcgagaatttaaacggattcagtcaaggcacccagaactcaaaagggtgaatcgtccgcaggcaagtgcctggaagaaattggagctatcacatgaatataaaaacagaaaccagctacgggaatatcagttggaaggggttaattggctgctctttaattggtataacaggcagaactgcatcctggctgatgagatgggattgggcaaaactattcagtccattgccttcttgcaggaagtatataatgtgggcatccatggtcccttcttggtcattgccccactgtccacaattactaactgggagcgagaatttaatacatggacagaaatgaacactattgtgtaccatggcagtctggccagcaggcagatgattcaacagtatgaaatgtactgcaaagattcacgggtgagttgcatgtcttgggaatactatgagttagagaaagtcggccaaggtacctggtattttaagggctatatatgaatagaagacttttattgaaagtcttcaatatgcctat

SEQ ID NO: 735695 - DNA, 1713 bp, Homo sapiens
aagatgaagaaagcagcattcagaagagacgctcaaaccgccaagttaagcgaaaaaaatatacagaggacctggatataaagatcacagatgatgaagaagaagaagaggtggatgtaactggtccaataaaacctgagcctatcctccctgaaccagtgcaagaaccagatggcgagactttgccttccatgcagttctttgtggagaatcccagtgaagaagatgcagccattgtagacaaagtgctttctatgcggattgtgaagaaggagctcccttctggacaatatactgaagcagaagaattctttgtcaagtacaagaactactcctatctgcattgtgaatgggctactatctcccaactagagaaggataagaggatacatcaaaaattaaagcgcttcaaaaccaaaatggctcagatgagacacttcttccatgaggatgaagagccctttaatccagactacgtagaggtggataggatattggatgagtctcacagtattgacaaggacaatggggagcccgttatttactacctggtgaaatggtgctctctgccctatgaggatagcacatgggagctaaaagaagatgttgatgagggcaagattcgagaatttaaacggattcagtcaaggcacccagaactcaaaagggtgaatcgtccgcaggcaagtgcctggaagaaattggagctatcacatgaatataaaaacagaaaccagctacgggaatatcagttggaaggggttaattggctgctctttaattggtataacaggcagaactgcatcctggctgatgagatgggattgggcaaaactattcagtccattgccttcttgcaggaagtatataatgtgggcatccatggtcccttcttggtcattgccccactgtccacaattactaactgggagcgagaatttaatacatggacagaaatgaacactattgtgtaccatggcagtctggccagcaggcagatgattcaacagtatgaaatgtactgcaaagattcacggggacgcctcatcccaggcgcatacaagtttgacgctctgatcaccacttttgagatgattttgtcagattgtcctgagcttcgtgaaattgaatggcgttgtgttatcattgatgaagcccatcgactgaaaaaccgtaattgcaagctgcttgatagtctcaagcacatggacctggaacacaaggtgctactcacaggaacaccattgcaaaatactgtagaagaactgtttagcttgcttcatttcttggaaccgtcacaatttccctcagaatcagagtttctcaaggactttggggatctcaagacagaggaacaggttcaaaagctacaggccattcttaagccaatgatgctgagaagactcaaagaggatgttgaaaaaaacttggcacccaaacaggaaacaattattgaagtagagctgactaatatccagaagaaatactatcgggctattttggagaagaatttctccttcctttccaaaggggcaggtcataccaacatgcctaatctacttaacacaatgatggagttgcgcaagtgctgcaaccacccatatctcatcaatggtgagggaatgcttggtatatacctgaacttctgtagtacctgtgtttactttccggatgattctccttggggacaatggatgcattgactcaaccaac

SEQ ID NO: 735696 - DNA, 6467 bp, Homo sapiens
aagatgaagaaagcagcattcagaagagacgctcaaaccgccaagttaagcgaaaaaaatatacagaggacctggatataaagatcacagatgatgaagaagaagaagaggtggatgtaactggtccaataaaacctgagcctatcctccctgaaccagtgcaagaaccagatggcgagactttgccttccatgcagttctttgtggagaatcccagtgaagaagatgcagccattgtagacaaagtgctttctatgcggattgtgaagaaggagctcccttctggacaatatactgaagcagaagaattctttgtcaagtacaagaactactcctatctgcattgtgaatgggctactatctcccaactagagaaggataagaggatacatcaaaaattaaagcgcttcaaaaccaaaatggctcagatgagacacttcttccatgaggatgaagagccctttaatccagactacgtagaggtggataggatattggatgagtctcacagtattgacaaggacaatggggagcccgttatttactacctggtgaaatggtgctctctgccctatgaggatagcacatgggagctaaaagaagatgttgatgagggcaagattcgagaatttaaacggattcagtcaaggcacccagaactcaaaagggtgaatcgtccgcaggcaagtgcctggaagaaattggagctatcacatgaatataaaaacagaaaccagctacgggaatatcagttggaaggggttaattggctgctctttaattggtataacaggcagaactgcatcctggctgatgagatgggattgggcaaaactattcagtccattgccttcttgcaggaagtatataatgtgggcatccatggtcccttcttggtcattgccccactgtccacaattactaactgggagcgagaatttaatacatggacagaaatgaacactattgtgtaccatggcagtctggccagcaggcagatgattcaacagtatgaaatgtactgcaaagattcacggggacgcctcatcccaggcgcatacaagtttgacgctctgatcaccacttttgagatgattttgtcagattgtcctgagcttcgtgaaattgaatggcgttgtgttatcattgatgaagcccatcgactgaaaaaccgtaattgcaagctgcttgatagtctcaagcacatggacctggaacacaaggtgctactcacaggaacaccattgcaaaatactgtagaagaactgtttagcttgcttcatttcttggaaccgtcacaatttccctcagaatcagagtttctcaaggactttggggatctcaagacagaggaacaggttcaaaagctacaggccattcttaagccaatgatgctgagaagactcaaagaggatgttgaaaaaaacttggcacccaaacaggaaacaattattgaagtagagctgactaatatccagaagaaatactatcgggctattttggagaagaatttctccttcctttccaaaggggcaggtcataccaacatgcctaatctacttaacacaatgatggagttgcgcaagtgctgcaaccacccatatctcatcaatggtgctgaagaaaaaatcctaacagaattccgtgaagcttgccatattatacctcatgactttcacctgcaggccatggttcgttcagccggcaaactggttcttattgacaagttgcttccaaagcttaaagctggtggccataaagttctgatcttctctcagatggtacgctgcctagacatcctagaggattatttaatccagaggaggtacttatatgaacgtattgatgggcgagttagaggcaaccttcgacaggctgccattgaccgcttcagcaagcctgactcagaccgctttgtcttcttactgtgtacccgggctggtggacttggtattaatcttacagctgctgatacctgcatcatctttgattcagactggaatccacaaaatgacctgcaggcccaggcacgatgtcatcgaattgggcagagcaaagctgtgaaggtgtaccgcctcatcactcgtaattcctacgagagagagatgtttgataaggccagcctcaagttggggttggataaggctgtgcttcaatccatgagtggtcgggatggcaacattactggaatccaacagttctctaagaaggagattgaagatcttttaagaaaaggagcatatgcagccatcatggaggaagatgatgaaggctccaagttttgtgaagaggacattgaccagatcttgttaagacgaactacaaccatcaccattgaatctgaaggaaaaggttccacctttgctaaggcaagctttgttgcttctgaaaacaggacagatatttctttggatgaccccaacttttggcaaaagtgggccaaaaaggctgacctagacatggatctgctcaacagcaagaataatttggtaattgacacacctagagtacgaaaacaaacgcgccactttagcactctgaaagatgatgacctggtggaattctctgatttggaaagtgaggatgatgagcggccacgctcccgcagacatgaccgtcatcatgcctatgggcgcactgactgctttcgggtggaaaagcatctcctggtatatggttggggacgatggcgagatattttatctcatggacgcttcaagcgacgtatgactgaacgagatgtggagaccatttgtcgggccattctcgtgtactgtcttctacactaccgtggggatgaaaatattaaaggcttcatctgggacttgattagcccagctgaaaatggcaagacaaaagaattgcagaatcattcaggtctatctatccctgtgcctcgtggacgcaaaggaaaaaaagtaaagtcacaaagcacttttgatatccataaggcagattggatccggaaatataaccctgacactttgttccaagatgaaagttataagaagcacttgaaacatcagtgtaacaaggtactgttgcgggtacgaatgctatactacctgaggcaggaggttattggagaccaagcagaaaaggtgttagggggtgcgattgccagtgagattgacatatggttcccagtagtggatcaactggaggttccaacaacttggtgggacagtgaggctgacaagtcgctgctcattggagtctttaaacatggctatgagaaatataataccatgagggcagacccagccttatgtttcctagaaaaggctggccgaccagatgacaaagcaattgcagcagaacatcgagtgttggataacttctctgacatagtagaaggggttgactttgataaagattgtgaagatcctgaatataaaccactccaaggtcccccaaaggaccaagatgatgagggtgatcccttgatgatgatggatgaggagatctcagtgattgatggagatgaagcccaggtgacccaacagccaggccatttattctggcctccgggctctgccctaacagctaggcttcggcgtctagtaacagcgtatcagcgcagctacaagagagaacaaatgaagatagaggctgcagaacgtggggaccggcgaaggcggcgttgtgaagcagccttcaagctgaaagaaattgcacggcgggagaaacaacaacgatggacaaggcgtgaacaaactgatttttatcgagtggtgtctacgtttggtgtggaatatgaccctgacaccatgcagttccattgggatcgcttccgcacttttgctcgactagacaaaaagacagatgaaagccttaccaagtacttccatggctttgtggccatgtgccgccaagtatgccgccttcccccagcagctggagatgaaccccccgaccctaacctgttcattgagcccatcactgaggagagagcctcacggactctctaccgtatagaattgcttcggcgcttacgggaacaagttttatgccacccccttttggaagatcggctggcattgtgtcagcctcctggtcctgaattgcccaaatggtgggagcctgttcggcatgatggggagcttctaagaggggcagcccgccatggggtgagccaaacagactgcaacatcatgcaggacccagacttctcttttctggctgcccgtatgaattatatgcagaaccatcaagcaggagcaccagctccatccttgtcacgctgctctactccactgctgcaccagcagtatacctcacgcactgcctcaccactgcccctgcgcccagatgctcctgttgaaaagtcacccgaggagacagctacccaggtccccagtctggagagtctgactttaaagctagagcacgaggtggtggccaggagccgaccaaccccacaagactatgagatgcgagtatccccctctgatactacccctctggtttcccggagtgttccaccagtcaaactggaggatgaggatgattcggactctgagctggacttgagcaagctgtcaccatcttcttcttcttcctcatcctcatccagctccagctccagcactgatgagagtgaggatgagaaggaagagaagctaactgaccagtcccgctcaaagctctatgatgaagagagtctcctgtccctcactatgtcccaagatggattcccaaatgaagatggagaacaaatgacccctgagcttctgctactgcaggaaagacaaagagcctctgagtggcccaaggatcgtgtcctgataaaccgtattgacctcgtctgccaggctgtactctcagggaagtggccttctagccgtaggagccaggaaatggtaacaggaggaattttggggccaggcaaccacttgctagacagtccctcattgactcctggagaatatggtgactctccagtccccacaccacgaagtagtagtgcagcttccatggcagaggaggaagcatctgcagtcagcacagcggcagcccagttcaccaaacttcgccgaggcatggatgaaaaggagtttacagttcaaatcaaagatgaggaaggattgaagttaacattccagaagcacaagttgatggcgaatggagtaatgggagatggacatccactgtttcataagaagaaggggaacagaaagaagctagtagagctggaggtggagtgcatggaagagcctaatcaccttgatgtggacctggagacccggatccctgtcatcaataaggtggatggtactttgctggtgggtgaggatgcccctcgccgggctgaactggagatgtggttacagggtcatccagagtttgctgttgatccccgatttctagcgtatatggaggatcgcagaaaacagaagtggcaaagatgtaaaaaaaataataaggcagaattgaactgtttgggaatggaaccagtacagacagctaactctagaaatgggaaaaagggtcatcacactgaaacggtgttcaaccgggttttgccagggcctattgcaccagagagcagcaagaagcgggcccgtaggatgcgaccagacctttctaagatgatggccctcatgcagggtggaagcactgggtctctatctctgcataacacgttccaacacagcagtagtggcctacagtctgtgtcatctttgggtcacagcagtgccacttctgcatctttgccttttatgccatttgtgatgggtggtgcaccatcatcccctcatgtagactccagcaccatgcttcatcaccaccaccaccacccccacccccaccatcaccaccatcaccatccaggcttgagagcccctggctacccctcttcaccagtgactaccgcctctggtactaccttgcggttgccaccactgcaacctgaggaggatgacgatgaggatgaagaagatgatgatgacttatctcagggctatgatagctcagaaagggacttctcactcattgatgatcctatgatgccagctaactcagactccagtgaagatgctgatgactgaagccccagcatgggccccattgcttgggcggctgctgtattttcatttactctggcccttggactatggaaacgtgggaggggcaggggagatgtggggaagtccaggactccaggaggtgaaaaggaaaaaaaaaaaaaaatgtacctgattgctcccaattatgagaggattgggtgggcaggggaactcctaaaataatacatgaccacttcctcatttctggggaaggaaaggagactagagcagctggtgtgctcacccctccctagtcacctccattaaccacagactatgtagcgctggccctagcctctggcagagcctgttcctggccgaactgtggatacagctggagggtcaggaactgttaccttctttccccttggcattaataaatttaagttaatcctt

SEQ ID NO: 735697 - DNA, 3190 bp, Homo sapiens
aagatgaagaaagcagcattcagaagagacgctcaaaccgccaagttaagcgaaaaaaatatacagaggacctggatataaagatcacagatgatgaagaagaagaagaggtggatgtaactggtccaataaaacctgagcctatcctccctgaaccagtgcaagaaccagatggcgagactttgccttccatgcagttctttgtggagaatcccagtgaagaagatgcagccattgtagacaaagtgctttctatgcggattgtgaagaaggagctcccttctggacaatatactgaagcagaagaattctttgtcaagtacaagaactactcctatctgcattgtgaatgggctactatctcccaactagagaaggataagaggatacatcaaaaattaaagcgcttcaaaaccaaaatggctcagatgagacacttcttccatgaggatgaagagccctttaatccagactacgtagaggtggataggatattggatgagtctcacagtattgacaaggacaatggggagcccgttatttactacctggtgaaatggtgctctctgccctatgaggatagcacatgggagctaaaagaagatgttgatgagggcaagattcgagaatttaaacggattcagtcaaggcacccagaactcaaaagggtgaatcgtccgcaggcaagtgcctggaagaaattggagctatcacatgaatataaaaacagaaaccagctacgggaatatcagttggaaggggttaattggctgctctttaattggtataacaggcagaactgcatcctggctgatgagatgggattgggcaaaactattcagtccattgccttcttgcaggaagtatataatgtgggcatccatggtcccttcttggtcattgccccactgtccacaattactaactgggagcgagaatttaatacatggacagaaatgaacactattgtgtaccatggcagtctggccagcaggcagatgattcaacagtatgaaatgtactgcaaagattcacggggacgcctcatcccaggcgcatacaagtttgacgctctgatcaccacttttgagatgattttgtcagattgtcctgagcttcgtgaaattgaatggcgttgtgttatcattgatgaagcccatcgactgaaaaaccgtaattgcaagctgcttgatagtctcaagcacatggacctggaacacaaggtgctactcacaggaacaccattgcaaaatactgtagaagaactgtttagcttgcttcatttcttggaaccgtcacaatttccctcagaatcagagtttctcaaggactttggggatctcaagacagaggaacaggttcaaaagctacaggccattcttaagccaatgatgctgagaagactcaaagaggatgttgaaaaaaacttggcacccaaacaggaaacaattattgaagtagagctgactaatatccagaagaaatactatcgggctattttggagaagaatttctccttcctttccaaaggggcaggtcataccaacatgcctaatctacttaacacaatgatggagttgcgcaagtgctgcaaccacccatatctcatcaatggtgctgaagaaaaaatcctaacagaattccgtgaagcttgccatattatacctcatgactttcacctgcaggccatggttcgttcagccggcaaactggttcttattgacaagttgcttccaaagcttaaagctggtggccataaagttctgatcttctctcagatggtacgctgcctagacatcctagaggattatttaatccagaggaggtacttatatgaacgtattgatgggcgagttagaggcaaccttcgacaggctgccattgaccgcttcagcaagcctgactcagaccgctttgtcttcttactgtgtacccgggctggtggacttggtattaatcttacagctgctgatacctgcatcatctttgattcagactggaatccacaaaatgacctgcaggcccaggcacgatgtcatcgaattgggcagagcaaagctgtgaaggtgtaccgcctcatcactcgtaattcctacgagagagagatgtttgataaggccagcctcaagttggggttggataaggctgtgcttcaatccatgagtggtcgggatggcaacattactggaatccaacagttctctaagaaggagattgaagatcttttaagaaaaggagcatatgcagccatcatggaggaagatgatgaaggctccaagttttgtgaagaggacattgaccagatcttgttaagacgaactacaaccatcaccattgaatctgaaggaaaaggttccacctttgctaaggcaagctttgttgcttctgaaaacaggacagatatttctttggatgaccccaacttttggcaaaagtgggccaaaaaggctgacctagacatggatctgctcaacagcaagaataatttggtaattgacacacctagagtacgaaaacaaacgcgccactttagcactctgaaagatgatgacctggtggaattctctgatttggaaagtgaggatgatgagcggccacgctcccgcagacatgaccgtcatcatgcctatgggcgcactgactgctttcgggtggaaaagcatctcctggtatatggttggggacgatggcgagatattttatctcatggacgcttcaagcgacgtatgactgaacgagatgtggagaccatttgtcgggccattctcgtgtactgtcttctacactaccgtggggatgaaaatattaaaggcttcatctgggacttgattagcccagctgaaaatggcaagacaaaagaattgcagaatcattcaggtaattatcaactctttactttatgtttttctataggttaatctaatccttttcaggtccaagggtttttctcaatccaagtctttgatgtctcccctttcccaggtctatctatccctgtgcctcgtggacgcaaaggaaaaaaagtaaagtcacaaagcacttttgatatccataaggcagattggatccggaaatataaccctgacactttgttccaagatgaaagttataagaagcacttgaaacatcagtgtaacaagtaagcatagaattagcagacattttccacctcaaacttctacagtgttac

SEQ ID NO: 735698 - DNA, 1237 bp, Homo sapiens; identical to SEQ ID NO: 339925

SEQ ID NO: 735699 - DNA, 1837 bp, Homo sapiens; identical to SEQ ID NO: 339934

SEQ ID NO: 735700 - DNA, 2597 bp, Homo sapiens
atggtctgacgatctctttttcgcacgctggagttgaaccccccgaccctaacctgttcattgagcccatcactgaggagagagcctcacggactctctaccgtatagaattgcttcggcgcttacgggaacaagttttatgccacccccttttggaagatcggctggcattgtgtcagcctcctggtcctgaattgcccaaatggtgggagcctgttcggcatgatggggagcttctaagaggggcagcccgccatggggtgagccaaacagactgcaacatcatgcaggacccagacttctcttttctggctgcccgtatgaattatatgcagaaccatcaagcaggagcaccagctccatccttgtcacgctgctctactccactgctgcaccagcagtatacctcacgcactgcctcaccactgcccctgcgcccagatgctcctgttgaaaagtcacccgaggagacagctacccaggtccccagtctggagagtctgactttaaagctagagcacgaggtggtggccaggagccgaccaaccccacaagactatgagatgcgagtatccccctctgatactacccctctggtttcccggagtgttccaccagtcaaactggaggatgaggatgattcggactctgagctggacttgagcaagctgtcaccatcttcttcttcttcctcatcctcatccagctccagctccagcactgatgagagtgaggatgagaaggaagagaagctaactgaccagtcccgctcaaagctctatgatgaagagagtctcctgtccctcactatgtcccaagatggattcccaaatgaagatggagaacaaatgacccctgagcttctgctactgcaggaaagacaaagagcctctgagtggcccaaggatcgtgtcctgataaaccgtattgacctcgtctgccaggctgtactctcagggaagtggccttctagccgtaggagccaggaaatggtaacaggaggaattttggggccaggcaaccacttgctagacagtccctcattgactcctggagaatatggtgactctccagtccccacaccacgaagtagtagtgcagcttccatggcagaggaggaagcatctgcagtcagcacagcggcagcccagttcaccaaacttcgccgaggcatggatgaaaaggagtttacagttcaaatcaaagatgaggaaggattgaagttaacattccagaagcacaagttgatggcgaatggagtaatgggagatggacatccactgtttcataagaagaaggggaacagaaagaagctagtagagctggaggtggagtgcatggaagagcctaatcaccttgatgtggacctggagacccggatccctgtcatcaataaggtggatggtactttgctggtgggtgaggatgcccctcgccgggctgaactggagatgtggttacagggtcatccagagtttgctgttgatccccgatttctagcgtatatggaggatcgcagaaaacagaagtggcaaagatgtaaaaaaaataataaggcagaattgaactgtttgggaatggaaccagtacagacagctaactctagaaatgggaaaaagggtcatcacactgaaacggtgttcaaccgggttttgccagggcctattgcaccagagagcagcaagaagcgggcccgtaggatgcgaccagacctttctaagatgatggccctcatgcagggtggaagcactgggtctctatctctgcataacacgttccaacacagcagtagtggcctacagtctgtgtcatctttgggtcacagcagtgccacttctgcatctttgccttttatgccatttgtgatgggtggtgcaccatcatcccctcatgtagactccagcaccatgcttcatcaccaccaccaccacccccacccccaccatcaccaccatcaccatccaggcttgagagcccctggctacccctcttcaccagtgactaccgcctctggtactaccttgcggttgccaccactgcaacctgaggaggatgacgatgaggatgaagaagatgatgatgacttatctcagggctatgatagctcagaaagggacttctcactcattgatgatcctatgatgccagctaactcagactccagtgaagatgctgatgactgaagccccagcatgggccccattgcttgggcggctgctgtattttcatttactctggcccttggactatggaaacgtgggaggggcaggggagatgtggggaagtccaggactccaggaggtgaaaaggaaaaaaaaaaaaaaatgtacctgattgctcccaattatgagaggattgggtgggcaggggaactcctaaaataatacatgaccacttcctcatttctggggaaggaaaggagactagagcagctggtgtgctcacccctccctagtcacctccattaaccacagactatgtagcgctggccctagcctctggcagagcctgttcctggccgaactgtggatacagctggagggtcaggaactgttaccttctttccccttggcattaataaatttaagttaatcctt

SEQ ID NO: 735701 - DNA, 3649 bp, Homo sapiens; identical to SEQ ID NO: 339931

SEQ ID NO: 735702 - DNA, 4770 bp, Homo sapiens
aagatgaagaaagcagcattcagaagagacgctcaaaccgccaagttaagcgaaaaaaatatacagaggacctggatataaagatcacagatgatgaagaagaagaagaggtggatgtaactggtccaataaaacctgagcctatcctccctgaaccagtgcaagaaccagatggcgagactttgccttccatgcagttctttgtggagaatcccagtgaagaagatgcagccattgtagacaaagtgctttctatgcggattgtgaagaaggagctcccttctggacaatatactgaagcagaagaattctttgtcaagtacaagaactactcctatctgcattgtgaatgggctactatctcccaactagagaaggataagaggatacatcaaaaattaaagcgcttcaaaaccaaaatggctcagatgagacacttcttccatgaggatgaagagccctttaatccagactacgtagaggtggataggatattggatgagtctcacagtattgacaaggacaatggggagcccgttatttactacctggtgaaatggtgctctctgccctatgaggatagcacatgggagctaaaagaagatgttgatgagggcaagattcgagaatttaaacggattcagtcaaggcacccagaactcaaaagggtgaatcgtccgcaggcaagtgcctggaagaaattggagctatcacatgaatataaaaacagaaaccagctacgggaatatcagttggaaggggttaattggctgctctttaattggtataacaggcagaactgcatcctggctgatgagatgggattgggcaaaactattcagtccattgccttcttgcaggaagtatataatgtgggcatccatggtcccttcttggtcattgccccactgtccacaattactaactgggagcgagaatttaatacatggacagaaatgaacactattgtgtaccatggcagtctggccagcaggcagatgattcaacagtatgaaatgtactgcaaagattcacggggacgcctcatcccaggcgcatacaagtttgacgctctgatcaccacttttgagatgattttgtcagattgtcctgagcttcgtgaaattgaatggcgttgtgttatcattgatgaagcccatcgactgaaaaaccgtaattgcaagctgcttgatagtctcaagcacatggacctggaacacaaggtgctactcacaggaacaccattgcaaaatactgtagaagaactgtttagcttgcttcatttcttggaaccgtcacaatttccctcagaatcagagtttctcaaggactttggggatctcaagacagaggaacaggttcaaaagctacaggccattcttaagccaatgatgctgagaagactcaaagaggatgttgaaaaaaacttggcacccaaacaggaaacaattattgaagtagagctgactaatatccagaagaaatactatcgggctattttggagaagaatttctccttcctttccaaaggggcaggtcataccaacatgcctaatctacttaacacaatgatggagttgcgcaagtgctgcaaccacccatatctcatcaatggtgctgaagaaaaaatcctaacagaattccgtgaagcttgccatattatacctcatgactttcacctgcaggccatggttcgttcagccggcaaactggttcttattgacaagttgcttccaaagcttaaagctggtggccataaagttctgatcttctctcagatggtacgctgcctagacatcctagaggattatttaatccagaggaggtacttatatgaacgtattgatgggcgagttagaggcaaccttcgacaggctgccattgaccgcttcagcaagcctgactcagaccgctttgtcttcttactgtgtacccgggctggtggacttggtattaatcttacagctgctgatacctgcatcatctttgattcagactggaatccacaaaatgacctgcaggcccaggcacgatgtcatcgaattgggcagagcaaagctgtgaaggtgtaccgcctcatcactcgtaattcctacgagagagagatgtttgataaggccagcctcaagttggggttggataaggctgtgcttcaatccatgagtggtcgggatggcaacattactggaatccaacagttctctaagaaggagattgaagatcttttaagaaaaggagcatatgcagccatcatggaggaagatgatgaaggctccaagttttgtgaagaggacattgaccagatcttgttaagacgaactacaaccatcaccattgaatctgaaggaaaaggttccacctttgctaaggcaagctttgttgcttctgaaaacaggacagatatttctttggatgaccccaacttttggcaaaagtgggccaaaaaggctgacctagacatggatctgctcaacagcaagaataatttggtaattgacacacctagagtacgaaaacaaacgcgccactttagcactctgaaagatgatgacctggtggaattctctgatttggaaagtgaggatgatgagcggccacgctcccgcagacatgaccgtcatcatgcctatgggcgcactgactgctttcgggtggaaaagcatctcctggtatatggttggggacgatggcgagatattttatctcatggacgcttcaagcgacgtatgactgaacgagatgtggagaccatttgtcgggccattctcgtgtactgtcttctacactaccgtggggatgaaaatattaaaggcttcatctgggacttgattagcccagctgaaaatggcaagacaaaagaattgcagaatcattcaggtctatctatccctgtgcctcgtggacgcaaaggaaaaaaagtaaagtcacaaagcacttttgatatccataaggcagattggatccggaaatataaccctgacactttgttccaagatgaaagttataagaagcacttgaaacatcagtgtaacaaggtactgttgcgggtacgaatgctatactacctgaggcaggaggttattggagaccaagcagaaaaggtgttagggggtgcgattgccagtgagattgacatatggttcccagtagtggatcaactggaggttccaacaacttggtgggacagtgaggctgacaagtcgctgctcattggagtctttaaacatggctatgagaaatataataccatgagggcagacccagccttatgtttcctagaaaaggctggccgaccagatgacaaagcaattgcagcagaacatcgagtgttggataacttctctgacatagtagaaggggttgactttgataaagattgtgaagatcctgaatataaaccactccaaggtcccccaaaggaccaagatgatgagggtgatcccttgatgatgatggatgaggagatctcagtgattgatggagatgaagcccaggtgacccaacagccaggccatttattctggcctccgggctctgccctaacagctaggcttcggcgtctagtaacagcgtatcagcgcagctacaagagagaacaaatgaagatagaggctgcagaacgtggggaccggcgaaggcggcgttgtgaagcagccttcaagctgaaagaaattgcacggcgggagaaacaacaacgatggacaaggcgtgaacaaactgatttttatcgagtggtgtctacgtttggtgtggaatatgaccctgacaccatgcagttccattgggatcgcttccgcacttttgctcgactagacaaaaagacagatgaaagccttaccaagtacttccatggctttgtggccatgtgccgccaagtatgccgccttcccccagcagctggagatgaaccccccgaccctaacctgttcattgagcccatcactgaggagagagcctcacggactctctaccgtatagaattgcttcggcgcttacgggaacaagttttatgccacccccttttggaagatcggctggcattgtgtcagcctcctggtcctgaattgcccaaatggtgggagcctgttcggcatgatggggagcttctaagaggggcagcccgccatggggtgagccaaacagactgcaacatcatgcaggacccagacttctcttttctggctgcccgtatgaattatatgcagaaccatcaagcaggagcaccagctccatccttgtcacgctgctctactccactgctgcaccagcagtatacctcacgcactgcctcaccactgcccctgcgcccagatgctcctgttgaaaagtcacccgaggagacagctacccaggtccccagtctggagagtctgactttaaagctagagcacgaggtggtggccaggagccgaccaaccccacaagactatgagatgcgagtatccccctctgatactacccctctggtttcccggagtgttccaccagtcaaactggaggatgaggatgattcggactctgagctggacttgagcaagctgtcaccatcttcttcttcttcctcatcctcatccagctccagctccagcactgatgagagtgaggatgagaaggaagagaagctaagtgagtgcatgtgacaggctgttggcccccttccctatttccccctctcttctctttcccttttctaaatgcatcctcttgagagagatttggattttgatttgataaaatgtcaaaagagtgccattctttgggcctttattc

SEQ ID NO: 735703 - DNA, 6866 bp, Homo sapiens
aagatgaagaaagcagcattcagaagagacgctcaaaccgccaagttaagcgaaaaaaatatacagaggacctggatataaagatcacagatgatgaagaagaagaagaggtggatgtaactggtccaataaaacctgagcctatcctccctgaaccagtgcaagaaccagatggcgagactttgccttccatgcagttctttgtggagaatcccagtgaagaagatgcagccattgtagacaaagtgctttctatgcggattgtgaagaaggagctcccttctggacaatatactgaagcagaagaattctttgtcaagtacaagaactactcctatctgcattgtgaatgggctactatctcccaactagagaaggataagaggatacatcaaaaattaaagcgcttcaaaaccaaaatggctcagatgagacacttcttccatgaggatgaagagccctttaatccagactacgtagaggtggataggatattggatgagtctcacagtattgacaaggacaatggggagcccgttatttactacctggtgaaatggtgctctctgccctatgaggatagcacatgggagctaaaagaagatgttgatgagggcaagattcgagaatttaaacggattcagtcaaggcacccagaactcaaaagggtgaatcgtccgcaggcaagtgcctggaagaaattggagctatcacatgaatataaaaacagaaaccagctacgggaatatcagttggaaggggttaattggctgctctttaattggtataacaggcagaactgcatcctggctgatgagatgggattgggcaaaactattcagtccattgccttcttgcaggaagtatataatgtgggcatccatggtcccttcttggtcattgccccactgtccacaattactaactgggagcgagaatttaatacatggacagaaatgaacactattgtgtaccatggcagtctggccagcaggcagatgattcaacagtatgaaatgtactgcaaagattcacggggacgcctcatcccaggcgcatacaagtttgacgctctgatcaccacttttgagatgattttgtcagattgtcctgagcttcgtgaaattgaatggcgttgtgttatcattgatgaagcccatcgactgaaaaaccgtaattgcaagctgcttgatagtctcaagcacatggacctggaacacaaggtgctactcacaggaacaccattgcaaaatactgtagaagaactgtttagcttgcttcatttcttggaaccgtcacaatttccctcagaatcagagtttctcaaggactttggggatctcaagacagaggaacaggttcaaaagctacaggccattcttaagccaatgatgctgagaagactcaaagaggatgttgaaaaaaacttggcacccaaacaggaaacaattattgaagtagagctgactaatatccagaagaaatactatcgggctattttggagaagaatttctccttcctttccaaaggggcaggtcataccaacatgcctaatctacttaacacaatgatggagttgcgcaagtgctgcaaccacccatatctcatcaatggtgctgaagaaaaaatcctaacagaattccgtgaagcttgccatattatacctcatgactttcacctgcaggccatggttcgttcagccggcaaactggttcttattgacaagttgcttccaaagcttaaagctggtggccataaagttctgatcttctctcagatggtacgctgcctagacatcctagaggattatttaatccagaggaggtacttatatgaacgtattgatgggcgagttagaggcaaccttcgacaggctgccattgaccgcttcagcaagcctgactcagaccgctttgtcttcttactgtgtacccgggctggtggacttggtattaatcttacagctgctgatacctgcatcatctttgattcagactggaatccacaaaatgacctgcaggcccaggcacgatgtcatcgaattgggcagagcaaagctgtgaaggtgtaccgcctcatcactcgtaattcctacgagagagagatgtttgataaggccagcctcaagttggggttggataaggctgtgcttcaatccatgagtggtcgggatggcaacattactggaatccaacagttctctaagaaggagattgaagatcttttaagaaaaggagcatatgcagccatcatggaggaagatgatgaaggctccaagttttgtgaagaggacattgaccagatcttgttaagacgaactacaaccatcaccattgaatctgaaggaaaaggttccacctttgctaaggcaagctttgttgcttctgaaaacaggacagatatttctttggatgaccccaacttttggcaaaagtgggccaaaaaggctgacctagacatggatctgctcaacagcaagaataatttggtaattgacacacctagagtacgaaaacaaacgcgccactttagcactctgaaagatgatgacctggtggaattctctgatttggaaagtgaggatgatgagcggccacgctcccgcagacatgaccgtcatcatgcctatgggcgcactgactgctttcgggtggaaaagcatctcctggtatatggttggggacgatggcgagatattttatctcatggacgcttcaagcgacgtatgactgaacgagatgtggagaccatttgtcgggccattctcgtgtactgtcttctacactaccgtggggatgaaaatattaaaggcttcatctgggacttgattagcccagctgaaaatggcaagacaaaagaattgcagaatcattcaggtctatctatccctgtgcctcgtggacgcaaaggaaaaaaagtaaagtcacaaagcacttttgatatccataaggcagattggatccggaaatataaccctgacactttgttccaagatgaaagttataagaagcacttgaaacatcagtgtaacaaggtactgttgcgggtacgaatgctatactacctgaggcaggaggttattggagaccaagcagaaaaggtgttagggggtgcgattgccagtgagattgacatatggttcccagtagtggatcaactggaggttccaacaacttggtgggacagtgaggctgacaagtcgctgctcattggagtctttaaacatggctatgagaaatataataccatgagggcagacccagccttatgtttcctagaaaaggctggccgaccagatgacaaagcaattgcagcagaacatcgagtgttggataacttctctgacatagtagaaggggttgactttgataaagattgtgaagatcctgaatataaaccactccaaggtcccccaaaggaccaagatgatgagggtgatcccttgatgatgatggatgaggagatctcagtgattgatggagatgaagcccaggtgacccaacagccaggccatttattctggcctccgggctctgccctaacagctaggcttcggcgtctagtaacagcgtatcagcgcagctacaagagagaacaaatgaagatagaggctgcagaacgtggggaccggcgaaggcggcgttgtgaagcagccttcaagctgaaagaaattgcacggcgggagaaacaacaacgatggacaaggcgtgaacaaactgatttttatcgagtggtgtctacgtttggtgtggaatatgaccctgacaccatgcagttccattgggatcgcttccgcacttttgctcgactagacaaaaagacagatgaaagccttaccaagtacttccatggctttgtggccatgtgccgccaagtatgccgccttcccccagcagctggagatgaaccccccgaccctaacctgttcattgagcccatcactgaggagagagcctcacggactctctaccgtatagaattgcttcggcgcttacgggaacaagttttatgccacccccttttggaagatcggctggcattgtgtcagcctcctggtcctgaattgcccaaatggtgggagcctgttcggcatgatggggagcttctaagaggggcagcccgccatggggtgagccaaacagactgcaacatcatgcaggacccagacttctcttttctggctgcccgtatgaattatatgcagaaccatcaagcaggagcaccagctccatccttgtcacgctgctctactccactgctgcaccagcagtatacctcacgcactgcctcaccactgcccctgcgcccagatgctcctgttgaaaagtcacccgaggagacagctacccaggtccccagtctggagagtctgactttaaagctagagcacgaggtggtggccaggagccgaccaaccccacaagactatgagatgcgagtatccccctctgatactacccctctggtttcccggagtgttccaccagtcaaactggaggatgaggatgattcggactctgagctggacttgagcaagctgtcaccatcttcttcttcttcctcatcctcatccagctccagctccagcactgatgagagtgaggatgagaaggaagagaagctaactgaccagtcccgctcaaagctctatgatgaagagagtctcctgtccctcactatgtcccaagatggattcccaaatgaagatggagaacaaatgacccctgagcttctgctactgcaggaaagacaaagagcctctgagtggcccaaggatcgtgtcctgataaaccgtattgacctcgtctgccaggctgtactctcagggaagtggccttctagccgtaggagccaggaaatggtaacaggaggaattttggggccaggcaaccacttgctagacagtccctcattgactcctggagaatatggtgactctccagtccccacaccacgaagtagtagtgcagcttccatggcagaggaggaagcatctgcagtcagcacagcggcagcccagttcaccaaacttcgccgaggcatggatgaaaaggagtttacagttcaaatcaaagatgaggaaggattgaagttaacattccagaagcacaagttgatggcgaatggagtaatgggagatggacatccactgtttcataagaagaaggggaacagaaagaagctagtagagctggaggtggagtgcatggaagagcctaatcaccttgatgtggacctggagacccggatccctgtcatcaataaggtggatggtactttgctggtgggtgaggatgcccctcgccgggctgaactggagatgtggttacagggtcatccagagtttgctgttgatccccgatttctagcggtgagtggcagtcccatccagcaagatttaaagtcattcctttggtatttaagctgcatgagaaagagaaagcatgacatactgtgtcatcgtttctgtatctgcaagataagggtaataattaataatacccagtcttccaacctcacaattgttgtgatgcccaaaataaaataatgttgaagtactttaagtgctaggcaaatatttactattgaactattatataaaccacctaatattttttggagagatcccacttaatggcagttttccactaggatgaatcctttatctatgtaataagtgtttattatcaaacaaaagacactagtactttaataattactccagagaagatttctattcctctaggataactgattttttctattgcagtatatggaggatcgcagaaaacagaagtggcaaagatgtaaaaaaaataataaggcagaattgaactgtttgggaatggaaccagtacagacagctaactctagaaatgggaaaaagggtcatcacactgaaacggtgttcaaccgggttttgccagggcctattgcaccagagagcagcaagaagcgggcccgtaggatgcgaccagacctttctaagatgatggccctcatgcagggtggaagcactgggtctctatctctgcataacacgttccaacacagcagtagtggcctacagtctgtgtcatctttgggtcacagcagtgccacttctgcatctttgccttttatgccatttgtgatgggtggtgcaccatcatcccctcatgtagactccagcaccatgcttcatcaccaccaccaccacccccacccccaccatcaccaccatcaccatccaggcttgagagcccctggctacccctcttcaccagtgactaccgcctctggtactaccttgcggttgccaccactgcaacctgaggaggatgacgatgaggatgaagaagatgatgatgacttatctcagggctatgatagctcagaaagggacttctcactcattgatgatcctatgatgccagctaactcagactccagtgaagatgctgatgactgaagccccagcatgggccccattgcttgggcggctgctgtattttcatttactctggcccttggactatggaaacgtgggaggggcaggggagatgtggggaagtccaggactccaggaggtgaaaaggaaaaaaaaaaaaaaatgtacctgattgctcccaattatgagaggattgggtgggcaggggaactcctaaaataatacatgaccacttcctcatttctggggaaggaaaggagactagagcagctggtgtgctcacccctccctagtcacctccattaaccacagactatgtagcgctggccctagcctctggcagagcctgttcctggccgaactgtggatacagctggagggtcaggaactgttaccttctttccccttggcattaataaatttaagttaatcctt

SEQ ID NO: 735704 - DNA, 6142 bp, Homo sapiens
aagatgaagaaagcagcattcagaagagacgctcaaaccgccaagttaagcgaaaaaaatatacagaggacctggatataaagatcacagatgatgaagaagaagaagaggtggatgtaactggtccaataaaacctgagcctatcctccctgaaccagtgcaagaaccagatggcgagactttgccttccatgcagttctttgtggagaatcccagtgaagaagatgcagccattgtagacaaagtgctttctatgcggattgtgaagaaggagctcccttctggacaatatactgaagcagaagaattctttgtcaagtacaagaactactcctatctgcattgtgaatgggctactatctcccaactagagaaggataagaggatacatcaaaaattaaagcgcttcaaaaccaaaatggctcagatgagacacttcttccatgaggatgaagagccctttaatccagactacgtagaggtggataggatattggatgagtctcacagtattgacaaggacaatggggagcccgttatttactacctggtgaaatggtgctctctgccctatgaggatagcacatgggagctaaaagaagatgttgatgagggcaagattcgagaatttaaacggattcagtcaaggcacccagaactcaaaagggtgaatcgtccgcaggcaagtgcctggaagaaattggagctatcacatgaatataaaaacagaaaccagctacgggaatatcagttggaaggggttaattggctgctctttaattggtataacaggcagaactgcatcctggctgatgagatgggattgggcaaaactattcagtccattgccttcttgcaggaagtatataatgtgggcatccatggtcccttcttggtcattgccccactgtccacaattactaactgggagcgagaatttaatacatggacagaaatgaacactattgtgtaccatggcagtctggccagcaggcagatgattcaacagtatgaaatgtactgcaaagattcacggggacgcctcatcccaggcgcatacaagtttgacgctctgatcaccacttttgagatgattttgtcagattgtcctgagcttcgtgaaattgaatggcgttgtgttatcattgatgaagcccatcgactgaaaaaccgtaattgcaagctgcttgatagtctcaagcacatggacctggaacacaaggtgctactcacaggaacaccattgcaaaatactgtagaagaactgtttagcttgcttcatttcttggaaccgtcacaatttccctcagaatcagagtttctcaaggactttggggatctcaagacagaggaacaggttcaaaagctacaggccattcttaagccaatgatgctgagaagactcaaagaggatgttgaaaaaaacttggcacccaaacaggaaacaattattgaagtagagctgactaatatccagaagaaatactatcgggctattttggagaagaatttctccttcctttccaaaggggcaggtcataccaacatgcctaatctacttaacacaatgatggagttgcgcaagtgctgcaaccacccatatctcatcaatggtgctgaagaaaaaatcctaacagaattccgtgaagcttgccatattatacctcatgactttcacctgcaggccatggttcgttcagccggcaaactggttcttattgacaagttgcttccaaagcttaaagctggtggccataaagttctgatcttctctcagatggtacgctgcctagacatcctagaggattatttaatccagaggaggtacttatatgaacgtattgatgggcgagttagaggcaaccttcgacaggctgccattgaccgcttcagcaagcctgactcagaccgctttgtcttcttactgtgtacccgggctggtggacttggtattaatcttacagctgctgatacctgcatcatctttgattcagactggaatccacaaaatgacctgcaggcccaggcacgatgtcatcgaattgggcagagcaaagctgtgaaggtgtaccgcctcatcactcgtaattcctacgagagagagatgtttgataaggccagcctcaagttggggttggataaggctgtgcttcaatccatgagtggtcgggatggcaacattactggaatccaacagttctctaagaaggagattgaagatcttttaagaaaaggagcatatgcagccatcatggaggaagatgatgaaggctccaagttttgtgaagaggacattgaccagatcttgttaagacgaactacaaccatcaccattgaatctgaaggaaaaggttccacctttgctaaggcaagctttgttgcttctgaaaacaggacagatatttctttggatgaccccaacttttggcaaaagtgggccaaaaaggctgacctagacatggatctgctcaacagcaagaataatttggtaattgacacacctagagtacgaaaacaaacgcgccactttagcactctgaaagatgatgacctggtggaattctctgatttggaaagtgaggatgatgagcggccacgctcccgcagacatgaccgtcatcatgcctatgggcgcactgactgctttcgggtggaaaagcatctcctggtatatggttggggacgatggcgagatattttatctcatggacgcttcaagcgacgtatgactgaacgagatgtggagaccatttgtcgggccattctcgtgtactgtcttctacactaccgtggggatgaaaatattaaaggcttcatctgggacttgattagcccagctgaaaatggcaagacaaaagaattgcagaatcattcaggtctatctatccctgtgcctcgtggacgcaaaggaaaaaaagtaaagtcacaaagcacttttgatatccataaggcagattggatccggaaatataaccctgacactttgttccaagatgaaagttataagaagcacttgaaacatcagtgtaacaaggtactgttgcgggtacgaatgctatactacctgaggcaggaggttattggagaccaagcagaaaaggtgttagggggtgcgattgccagtgagattgacatatggttcccagtagtggatcaactggaggttccaacaacttggtgggacagtgaggctgacaagtcgctgctcattggagtctttaaacatggctatgagaaatataataccatgagggcagacccagccttatgtttcctagaaaaggctggccgaccagatgacaaagcaattgcagcagaacatcgagtgttggataacttctctgacatagtagaaggggttgactttgataaagattgtgaagatcctgaatataaaccactccaaggtcccccaaaggaccaagatgatgagggtgatcccttgatgatgatggatgaggagatctcagtgattgatggagatgaagcccaggtgacccaacagccaggccatttattctggcctccgggctctgccctaacagctaggcttcggcgtctagtaacagcgtatcagcgcagctacaagagagaacaaatgaagatagaggctgcagaacgtggggaccggcgaaggcggcgttgtgaagcagccttcaagctgaaagaaattgcacggcgggagaaacaacaacgatggacaaggcgtgaacaaactgatttttatcgagtggtgtctacgtttggtgtggaatatgaccctgacaccatgcagttccattgggatcgcttccgcacttttgctcgactagacaaaaagacagatgaaagccttaccaagtacttccatggctttgtggccatgtgccgccaagtatgccgccttcccccagcagctggagatgaaccccccgaccctaacctgttcattgagcccatcactgaggagagagcctcacggactctctaccgtatagaattgcttcggcgcttacgggaacaagttttatgccacccccttttggaagatcggctggcattgtgtcagcctcctggtcctgaattgcccaaatggtgggagcctgttcggcatgatggggagcttctaagaggggcagcccgccatggggtgagccaaacagactgcaacatcatgcaggacccagacttctcttttctggctgcccgtatgaattatatgcagaaccatcaagcaggagcaccagctccatccttgtcacgctgctctactccactgctgcaccagcagtatacctcacgcactgcctcaccactgcccctgcgcccagatgctcctgttgaaaagtcacccgaggagacagctacccaggtccccagtctggagagtctgactttaaagctagagcacgaggtggtggccaggagccgaccaaccccacaagactatgagatgcgagtatccccctctgatactacccctctggtttcccggagtgttccaccagtcaaactggaggatgaggatgattcggactctgagctggacttgagcaagctgtcaccatcttcttcttcttcctcatcctcatccagctccagctccagcactgatgagagtgaggatgagaaggaagagaagctaactgaccagtcccgctcaaagctctatgatgaagagagtctcctgtccctcactatgtcccaagatggattcccaaatgaagatggagaacaaatgacccctgagcttctgctactgcaggaaagacaaagagcctctgagtggcccaaggatcgtgtcctgataaaccgtattgacctcgtctgccaggctgtactctcagggaagtggccttctagccgtaggagccaggaaatggtaacaggaggaattttggggccaggcaaccacttgctagacagtccctcattgactcctggagaatatggtgactctccagtccccacaccacgaagtagtagtgcagcttccatggcagaggaggaagcatctgcagtcagcacagcggcagcccagttcaccaaacttcgccgaggcatggatgaaaaggagtttacagttcaaatcaaagatgaggaaggattgaagttaacattccagaagcacaagttgatggcgaatggagtaatgggagatggacatccactgtttcataagaagaaggggaacagaaagaagctagtagagctggaggtggagtgcatggaagagcctaatcaccttgatgtggacctggagacccggatccctgtcatcaataaggtggatggtactttgctggtgggtgaggatgcccctcgccgggctgaactggagatgtggttacagggtcatccagagtttgctgttgatccccgatttctagcgtatatggaggatcgcagaaaacagaagtggcaaagatgtaaaaaaaataataaggcagaattgaactgtttgggaatggaaccagtacagacagctaactctagaaatgggaaaaagggtcatcacactgaaacggtgttcaaccgggttttgccagggcctattgcaccagagagcagcaagaagcgggcccgtaggatgcgaccagacctttctaagatgatggccctcatgcagggtggaagcactgggtctctatctctgcataacacgttccaacacagcagtagtggcctacagtctgtgtcatctttgggtcacagcagtgccacttctgcatctttgccttttatgccatttgtgatgggtggtgcaccatcatcccctcatgtagactccagcaccatgcttcatcaccaccaccaccacccccacccccaccatcaccaccatcaccatccaggactccaggaggtgaaaaggaaaaaaaaaaaaaaatgtacctgattgctcccaattatgagaggattgggtgggcaggggaactcctaaaataatacatgaccacttcctcatttctggggaaggaaaggagactagagcagctggtgtgctcacccctccctagtcacctccattaaccacagactatgtagcgctggccctagcctctggcagagcctgttcctggccgaactgtggatacagctggagggtcaggaactgttaccttctttccccttggcattaataaatttaagttaatcctt

SEQ ID NO: 735705 - DNA, 6404 bp, Homo sapiens
aagatgaagaaagcagcattcagaagagacgctcaaaccgccaagttaagcgaaaaaaatatacagaggacctggatataaagatcacagatgatgaagaagaagaagaggtggatgtaactggtccaataaaacctgagcctatcctccctgaaccagtgcaagaaccagatggcgagactttgccttccatgcagttctttgtggagaatcccagtgaagaagatgcagccattgtagacaaagtgctttctatgcggattgtgaagaaggagctcccttctggacaatatactgaagcagaagaattctttgtcaagtacaagaactactcctatctgcattgtgaatgggctactatctcccaactagagaaggataagaggatacatcaaaaattaaagcgcttcaaaaccaaaatggctcagatgagacacttcttccatgaggatgaagagccctttaatccagactacgtagaggtggataggatattggatgagtctcacagtattgacaaggacaatggggagcccgttatttactacctggtgaaatggtgctctctgccctatgaggatagcacatgggagctaaaagaagatgttgatgagggcaagattcgagaatttaaacggattcagtcaaggcacccagaactcaaaagggtgaatcgtccgcaggcaagtgcctggaagaaattggagctatcacatgaatataaaaacagaaaccagctacgggaatatcagttggaaggggttaattggctgctctttaattggtataacaggcagaactgcatcctggctgatgagatgggattgggcaaaactattcagtccattgccttcttgcaggaagtatataatgtgggcatccatggtcccttcttggtcattgccccactgtccacaattactaactgggagcgagaatttaatacatggacagaaatgaacactattgtgtaccatggcagtctggccagcaggcagatgattcaacagtatgaaatgtactgcaaagattcacggggacgcctcatcccaggcgcatacaagtttgacgctctgatcaccacttttgagatgattttgtcagattgtcctgagcttcgtgaaattgaatggcgttgtgttatcattgatgaagcccatcgactgaaaaaccgtaattgcaagctgcttgatagtctcaagcacatggacctggaacacaaggtgctactcacaggaacaccattgcaaaatactgtagaagaactgtttagcttgcttcatttcttggaaccgtcacaatttccctcagaatcagagtttctcaaggactttggggatctcaagacagaggaacaggttcaaaagctacaggccattcttaagccaatgatgctgagaagactcaaagaggatgttgaaaaaaacttggcacccaaacaggaaacaattattgaagtagagctgactaatatccagaagaaatactatcgggctattttggagaagaatttctccttcctttccaaaggggcaggtcataccaacatgcctaatctacttaacacaatgatggagttgcgcaagtgctgcaaccacccatatctcatcaatggtgctgaagaaaaaatcctaacagaattccgtgaagcttgccatattatacctcatgactttcacctgcaggccatggttcgttcagccggcaaactggttcttattgacaagttgcttccaaagcttaaagctggtggccataaagttctgatcttctctcagatggtacgctgcctagacatcctagaggattatttaatccagaggaggtacttatatgaacgtattgatgggcgagttagaggcaaccttcgacaggctgccattgaccgcttcagcaagcctgactcagaccgctttgtcttcttactgtgtacccgggctggtggacttggtattaatcttacagctgctgatacctgcatcatctttgattcagactggaatccacaaaatgacctgcaggcccaggcacgatgtcatcgaattgggcagagcaaagctgtgaaggtgtaccgcctcatcactcgtaattcctacgagagagagatgtttgataaggccagcctcaagttggggttggataaggctgtgcttcaatccatgagtggtcgggatggcaacattactggaatccaacagttctctaagaaggagattgaagatcttttaagaaaaggagcatatgcagccatcatggaggaagatgatgaaggctccaagttttgtgaagaggacattgaccagatcttgttaagacgaactacaaccatcaccattgaatctgaaggaaaaggttccacctttgctaaggcaagctttgttgcttctgaaaacaggacagatatttctttggatgaccccaacttttggcaaaagtgggccaaaaaggctgacctagacatggatctgctcaacagcaagaataatttggtaattgacacacctagagtacgaaaacaaacgcgccactttagcactctgaaagatgatgacctggtggaattctctgatttggaaagtgaggatgatgagcggccacgctcccgcagacatgaccgtcatcatgcctatgggcgcactgactgctttcgggtggaaaagcatctcctggtatatggttggggacgatggcgagatattttatctcatggacgcttcaagcgacgtatgactgaacgagatgtggagaccatttgtcgggccattctcgtgtactgtcttctacactaccgtggggatgaaaatattaaaggcttcatctgggacttgattagcccagctgaaaatggcaagacaaaagaattgcagaatcattcaggtctatctatccctgtgcctcgtggacgcaaaggaaaaaaagtaaagtcacaaagcacttttgatatccataaggcagattggatccggaaatataaccctgacactttgttccaagatgaaagttataagaagcacttgaaacatcagtgtaacaaggtactgttgcgggtacgaatgctatactacctgaggcaggaggttattggagaccaagcagaaaaggtgttagggggtgcgattgccagtgagattgacatatggttcccagtagtggatcaactggaggttccaacaacttggtgggacagtgaggctgacaagtcgctgctcattggagtctttaaacatggctatgagaaatataataccatgagggcagacccagccttatgtttcctagaaaaggctggccgaccagatgacaaagcaattgcagcagaacatcgagtgttggataacttctctgacatagtagaaggggttgactttgataaagattgtgaagatcctgaatataaaccactccaaggtcccccaaaggaccaagatgatgagggtgatcccttgatgatgatggatgaggagatctcagtgattgatggagatgaagcccaggtgacccaacagccaggccatttattctggcctccgggctctgccctaacagctaggcttcggcgtctagtaacagcgtatcagcgcagctacaagagagaacaaatgaagatagaggctgcagaacgtggggaccggcgaaggcggcgttgtgaagcagccttcaagctgaaagaaattgcacggcgggagaaacaacaacgatggacaaggcgtgaacaaactgatttttatcgagtggtgtctacgtttggtgtggaatatgaccctgacaccatgcagttccattgggatcgcttccgcacttttgctcgactagacaaaaagacagatgaaagccttaccaagtacttccatggctttgtggccatgtgccgccaagtatgccgccttcccccagcagctggagatgaaccccccgaccctaacctgttcattgagcccatcactgaggagagagcctcacggactctctaccgtatagaattgcttcggcgcttacgggaacaagttttatgccacccccttttggaagatcggctggcattgtgtcagcctcctggtcctgaattgcccaaatggtgggagcctgttcggcatgatggggagcttctaagaggggcagcccgccatggggtgagccaaacagactgcaacatcatgcaggacccagacttctcttttctggctgcccgtatgaattatatgcagaaccatcaagcaggagcaccagctccatccttgtcacgctgctctactccactgctgcaccagcagtatacctcacgcactgcctcaccactgcccctgcgcccagatgctcctgttgaaaagtcacccgaggagacagctacccaggtccccagtctggagagtctgactttaaagctagagcacgaggtggtggccaggagccgaccaaccccacaagactatgagatgcgagtatccccctctgatactacccctctggtttcccggagtgttccaccagtcaaactggaggatgaggatgattcggactctgagctggacttgagcaagctgtcaccatcttcttcttcttcctcatcctcatccagctccagctccagcactgatgagagtgaggatgagaaggaagagaagctaactgaccagtcccgctcaaagctctatgatgaagagagtctcctgtccctcactatgtcccaagatggattcccaaatgaagatggagaacaaatgacccctgagcttctgctactgcaggaaagacaaagagcctctgagtggcccaaggatcgtgtcctgataaaccgtattgacctcgtctgccaggctgtactctcagggaagtggccttctagccgtaggagccaggaaatggtaacaggaggaattttggggccaggcaaccacttgctagacagtccctcattgactcctggagaatatggtgactctccagtccccacaccacgaagtagtagtgcagcttccatggcagaggaggaagcatctgcagtcagcacagcggcagcccagttcaccaaacttcgccgaggcatggatgaaaaggagtttacagttcaaatcaaagatgaggaaggattgaagttaacattccagaagcacaagttgatggcgaatggagtaatgggagatggacatccactgtttcataagaagaaggggaacagaaagaagctagtagagctggaggtggagtgcatggaagagcctaatcaccttgatgtggacctggagacccggatccctgtcatcaataaggtggatggtactttgctggtgggtgaggatgcccctcgccgggctgaactggagatgtggttacagggtcatccagagtttgctgttgatccccgatttctagcgtatatggaggatcgcagaaaacagaagtggcaaagatgtaaaaaaaataataagggtcatcacactgaaacggtgttcaaccgggttttgccagggcctattgcaccagagagcagcaagaagcgggcccgtaggatgcgaccagacctttctaagatgatggccctcatgcagggtggaagcactgggtctctatctctgcataacacgttccaacacagcagtagtggcctacagtctgtgtcatctttgggtcacagcagtgccacttctgcatctttgccttttatgccatttgtgatgggtggtgcaccatcatcccctcatgtagactccagcaccatgcttcatcaccaccaccaccacccccacccccaccatcaccaccatcaccatccaggcttgagagcccctggctacccctcttcaccagtgactaccgcctctggtactaccttgcggttgccaccactgcaacctgaggaggatgacgatgaggatgaagaagatgatgatgacttatctcagggctatgatagctcagaaagggacttctcactcattgatgatcctatgatgccagctaactcagactccagtgaagatgctgatgactgaagccccagcatgggccccattgcttgggcggctgctgtattttcatttactctggcccttggactatggaaacgtgggaggggcaggggagatgtggggaagtccaggactccaggaggtgaaaaggaaaaaaaaaaaaaaatgtacctgattgctcccaattatgagaggattgggtgggcaggggaactcctaaaataatacatgaccacttcctcatttctggggaaggaaaggagactagagcagctggtgtgctcacccctccctagtcacctccattaaccacagactatgtagcgctggccctagcctctggcagagcctgttcctggccgaactgtggatacagctggagggtcaggaactgttaccttctttccccttggcattaataaatttaagttaatcctt

SEQ ID NO: 735706 - DNA, 5153 bp, Homo sapiens
aagatgaagaaagcagcattcagaagagacgctcaaaccgccaagttaagcgaaaaaaatatacagaggacctggatataaagatcacagatgatgaagaagaagaagaggtggatgtaactggtccaataaaacctgagcctatcctccctgaaccagtgcaagaaccagatggcgagactttgccttccatgcagttctttgtggagaatcccagtgaagaagatgcagccattgtagacaaagtgctttctatgcggattgtgaagaaggagctcccttctggacaatatactgaagcagaagaattctttgtcaagtacaagaactactcctatctgcattgtgaatgggctactatctcccaactagagaaggataagaggatacatcaaaaattaaagcgcttcaaaaccaaaatggctcagatgagacacttcttccatgaggatgaagagccctttaatccagactacgtagaggtggataggatattggatgagtctcacagtattgacaaggacaatggggagcccgttatttactacctggtgaaatggtgctctctgccctatgaggatagcacatgggagctaaaagaagatgttgatgagggcaagattcgagaatttaaacggattcagtcaaggcacccagaactcaaaagggtgaatcgtccgcaggcaagtgcctggaagaaattggagctatcacatgaatataaaaacagaaaccagctacgggaatatcagttggaaggggttaattggctgctctttaattggtataacaggcagaactgcatcctggctgatgagatgggattgggcaaaactattcagtccattgccttcttgcaggaagtatataatgtgggcatccatggtcccttcttggtcattgccccactgtccacaattactaactgggagcgagaatttaatacatggacagaaatgaacactattgtgtaccatggcagtctggccagcaggcagatgattcaacagtatgaaatgtactgcaaagattcacggggacgcctcatcccaggcgcatacaagtttgacgctctgatcaccacttttgagatgattttgtcagattgtcctgagcttcgtgaaattgaatggcgttgtgttatcattgatgaagcccatcgactgaaaaaccgtaattgcaagctgcttgatagtctcaagcacatggacctggaacacaaggtgctactcacaggaacaccattgcaaaatactgtagaagaactgtttagcttgcttcatttcttggaaccgtcacaatttccctcagaatcagagtttctcaaggactttggggatctcaagacagaggaacaggttcaaaagctacaggccattcttaagccaatgatgctgagaagactcaaagaggatgttgaaaaaaacttggcacccaaacaggaaacaattattgaagtagagctgactaatatccagaagaaatactatcgggctattttggagaagaatttctccttcctttccaaaggggcaggtcataccaacatgcctaatctacttaacacaatgatggagttgcgcaagtgctgcaaccacccatatctcatcaatggtgctgaagaaaaaatcctaacagaattccgtgaagcttgccatattatacctcatgactttcacctgcaggccatggttcgttcagccggcaaactggttcttattgacaagttgcttccaaagcttaaagctggtggccataaagttctgatcttctctcagatggtacgctgcctagacatcctagaggattatttaatccagaggaggtacttatatgaacgtattgatgggcgagttagaggcaaccttcgacaggctgccattgaccgcttcagcaagcctgactcagaccgctttgtcttcttactgtgtacccgggctggtggacttggtattaatcttacagctgctgatacctgcatcatctttgattcagactggaatccacaaaatgacctgcaggcccaggcacgatgtcatcgaattgggcagagcaaagctgtgaaggtgtaccgcctcatcactcgtaattcctacgagagagagatgtttgataaggccagcctcaagttggggttggataaggctgtgcttcaatccatgagtggtcgggatggcaacattactggaatccaacagttctctaagaaggagattgaagatcttttaagaaaaggagcatatgcagccatcatggaggaagatgatgaaggctccaagttttgtgaagaggacattgaccagatcttgttaagacgaactacaaccatcaccattgaatctgaaggaaaaggttccacctttgctaaggcaagctttgttgcttctgaaaacaggacagatatttctttggatgaccccaacttttggcaaaagtgggccaaaaaggctgacctagacatggatctgctcaacagcaagaataatttggtaattgacacacctagagtacgaaaacaaacgcgccactttagcactctgaaagatgatgacctggtggaattctctgatttggaaagtgaggatgatgagcggccacgctcccgcagacatgaccgtcatcatgcctatgggcgcactgactgctttcgggtggaaaagcatctcctggtatatggttggggacgatggcgagatattttatctcatggacgcttcaagcgacgtatgactgaacgagatgtggagaccatttgtcgggccattctcgtgtactgtcttctacactaccgtggggatgaaaatattaaaggcttcatctgggacttgattagcccagctgaaaatggcaagacaaaagaattgcagaatcattcaggtctatctatccctgtgcctcgtggacgcaaaggaaaaaaagtaaagtcacaaagcacttttgatatccataaggcagattggatccggaaatataaccctgacactttgttccaagatgaaagttataagaagcacttgaaacatcagtgtaacaaggtactgttgcgggtacgaatgctatactacctgaggcaggaggttattggagaccaagcagaaaaggtgttagggggtgcgattgccagtgagattgacatatggttcccagtagtggatcaactggaggttccaacaacttggtgggacagtgaggctgacaagtcgctgctcattggagtctttaaacatggctatgagaaatataataccatgagggcagacccagccttatgtttcctagaaaaggctggccgaccagatgacaaagcaattgcagcagaacatcgagtgttggataacttctctgacatagtagaaggggttgactttgataaagattgtgaagatcctgaatataaaccactccaaggtcccccaaaggaccaagatgatgagggtgatcccttgatgatgatggatgaggagatctcagtgattgatggagatgaagcccaggtgacccaacagccaggccatttattctggcctccgggctctgccctaacagctaggcttcggcgtctagtaacagcgtatcagcgcagctacaagagagaacaaatgaagatagaggctgcagaacgtggggaccggcgaaggcggcgttgtgaagcagccttcaagctgaaagaaattgcacggcgggagaaacaacaacgatggacaaggcgtgaacaaactgatttttatcgagtggtgtctacgtttggtgtggaatatgaccctgacaccatgcagttccattgggatcgcttccgcacttttgctcgactagacaaaaagacagatgaaagccttaccaagtacttccatggctttgtggccatgtgccgccaagtatgccgccttcccccagcagctggagatgaaccccccgaccctaacctgttcattgagcccatcactgaggagagagcctcacggactctctaccgtatagaattgcttcggcgcttacgggaacaagttttatgccacccccttttggaagatcggctggcattgtgtcagcctcctggtcctgaattgcccaaatggtgggagcctgttcggcatgatggggagcttctaagaggggcagcccgccatggggtgagccaaacagactgcaacatcatgcaggacccagacttctcttttctggctgcccgtatgaattatatgcagaaccatcaagcaggagcaccagctccatccttgtcacgctgctctactccactgctgcaccagcagtatacctcacgcactgcctcaccactgcccctgcgcccagatgctcctgttgaaaagtcacccgaggagacagctacccaggtccccagtctggagagtctgactttaaagctagagcacgaggtggtggccaggagccgaccaaccccacaagactatgagatgcgagtatccccctctgatactacccctctggtttcccggagtgttccaccagtcaaactggaggatgaggatgattcggactctgagctggacttgagcaagctgtcaccatcttcttcttcttcctcatcctcatccagctccagctccagcactgatgagagtgaggatgagaaggaagagaagctaactgaccagtcccgctcaaagctctatgatgaagagagtctcctgtccctcactatgtcccaagatggacatccactgtttcataagaagaaggggaacagaaagaagctagtagagctggaggtggagtgcatggaagagcctaatcaccttgatgtggacctggagacccggatccctgtcatcaataaggtggatggtactttgctggtgggtgaggatgcccctcgccgggctgtcctggagaatatggtgactctccagtccccacaccacgaagtagtagtgcagcttccatggcagaggaggaagcatctgcagtcagcacagcggcagcccagttcaccaaacttcgccgaggcatggatgaaaaggagtttacagttcaaatcaaagatgaggaaggattgaagttaacattcctagcctctggcagagcctgttcctggccgaactgtggatacagctggagggtcaggaactgttaccttctttccccttggcattaataaatttaagttaatcctt

SEQ ID NO: 735707 - DNA, 4031 bp, Homo sapiens
aagatgaagaaagcagcattcagaagagacgctcaaaccgccaagttaagcgaaaaaaatatacagaggacctggatataaagatcacagatgatgaagaagaagaagaggtggatgtaactggtccaataaaacctgagcctatcctccctgaaccagtgcaagaaccagatggcgagactttgccttccatgcagttctttgtggagaatcccagtgaagaagatgcagccattgtagacaaagtgctttctatgcggattgtgaagaaggagctcccttctggacaatatactgaagcagaagaattctttgtcaagtacaagaactactcctatctgcattgtgaatgggctactatctcccaactagagaaggataagaggatacatcaaaaattaaagcgcttcaaaaccaaaatggctcagatgagacacttcttccatgaggatgaagagccctttaatccagactacgtagaggtggataggatattggatgagtctcacagtattgacaaggacaatggggagcccgttatttactacctggtgaaatggtgctctctgccctatgaggatagcacatgggagctaaaagaagatgttgatgagggcaagattcgagaatttaaacggattcagtcaaggcacccagaactcaaaagggtgaatcgtccgcaggcaagtgcctggaagaaattggagctatcacatgaatataaaaacagaaaccagctacgggaatatcagttggaaggggttaattggctgctctttaattggtataacaggcagaactgcatcctggctgatgagatgggattgggcaaaactattcagtccattgccttcttgcaggaagtatataatgtgggcatccatggtcccttcttggtcattgccccactgtccacaattactaactgggagcgagaatttaatacatggacagaaatgaacactattgtgtaccatggcagtctggccagcaggcagatgattcaacagtatgaaatgtactgcaaagattcacggggacgcctcatcccaggcgcatacaagtttgacgctctgatcaccacttttgagatgattttgtcagattgtcctgagcttcgtgaaattgaatggcgttgtgttatcattgatgaagcccatcgactgaaaaaccgtaattgcaagctgcttgatagtctcaagcacatggacctggaacacaaggtgctactcacaggaacaccattgcaaaatactgtagaagaactgtttagcttgcttcatttcttggaaccgtcacaatttccctcagaatcagagtttctcaaggactttggggatctcaagacagaggaacaggttcaaaagctacaggccattcttaagccaatgatgctgagaagactcaaagaggatgttgaaaaaaacttggcacccaaacaggaaacaattattgaagtagagctgactaatatccagaagaaatactatcgggctattttggagaagaatttctccttcctttccaaaggggcaggtcataccaacatgcctaatctacttaacacaatgatggagttgcgcaagtgctgcaaccacccatatctcatcaatggtgctgaagaaaaaatcctaacagaattccgtgaagcttgccatattatacctcatgactttcacctgcaggccatggttcgttcagccggcaaactggttcttattgacaagttgcttccaaagcttaaagctggtggccataaagttctgatcttctctcagatggtacgctgcctagacatcctagaggattatttaatccagaggaggtacttatatgaacgtattgatgggcgagttagaggcaaccttcgacaggctgccattgaccgcttcagcaagcctgactcagaccgctttgtcttcttactgtgtacccgggctggtggacttggtattaatcttacagctgctgatacctgcatcatctttgattcagactggaatccacaaaatgacctgcaggcccaggcacgatgtcatcgaattgggcagagcaaagctgtgaaggtgtaccgcctcatcactcgtaattcctacgagagagagatgtttgataaggccagcctcaagttggggttggataaggctgtgcttcaatccatgagtggtcgggatggcaacattactggaatccaacagttctctaagaaggagattgaagatcttttaagaaaaggagcatatgcagccatcatggaggaagatgatgaaggctccaagttttgtgaagaggacattgaccagatcttgttaagacgaactacaaccatcaccattgaatctgaaggaaaaggttccacctttgctaaggcaagctttgttgcttctgaaaacaggacagatatttctttggatgaccccaacttttggcaaaagtgggccaaaaaggctgacctagacatggatctgctcaacagcaagaataatttggtaattgacacacctagagtacgaaaacaaacgcgccactttagcactctgaaagatgatgacctggtggaattctctgatttggaaagtgaggatgatgagcggccacgctcccgcagacatgaccgtcatcatgcctatgggcgcactgactgctttcgggtggaaaagcatctcctggtatatggttggggacgatggcgagatattttatctcatggacgcttcaagcgacgtatgactgaacgagatgtggagaccatttgtcgggccattctcgtgtactgtcttctacactaccgtggggatgaaaatattaaaggcttcatctgggacttgattagcccagctgaaaatggcaagacaaaagaattgcagaatcattcaggtctatctatccctgtgcctcgtggacgcaaaggaaaaaaagtaaagtcacaaagcacttttgatatccataaggcagattggatccggaaatataaccctgacactttgttccaagatgaaagttataagaagcacttgaaacatcagtgtaacaaggtactgttgcgggtacgaatgctatactacctgaggcaggaggttattggagaccaagcagaaaaggtgttagggggtgcgattgccagtgagattgacatatggttcccagtagtggatcaactggaggttccaacaacttggtgggacagtgaggctgacaagtcgctgctcattggagtctttaaacatggctatgagaaatataataccatgagggcagacccagccttatgtttcctagaaaaggctggccgaccagatgacaaagcaattgcagcagaacatcgagtgttggataacttctctgacatagtagaaggggttgactttgataaagattgtgaagatcctgaatataaaccactccaaggtcccccaaaggaccaagatgatgagggtgatcccttgatgatgatggatgaggagatctcagtgattgatggagatgaagcccaggtgacccaacagccaggccatttattctggcctccgggctctgccctaacagctaggcttcggcgtctagtaacagcgtatcagcgcagctacaagagagaacaaatgaagatagaggctgcagaacgtggggaccggcgaaggcggcgttgtgaagcagccttcaagctgaaagaaattgcacggcgggagaaacaacaacgatggacaaggcgtgaacaaactgatttttatcgagtggtgtctacgtttggtgtggaatatgaccctgacaccatgcagttccattgggatcgcttccgcacttttgctcgactagacaaaaagacagatgaaagccttaccaagtacttccatggctttgtggccatgtgccgccaagtatgccgccttcccccagcagctggagatgattggagaccaagcagaaaagtgtttagggggtgcgattccagtgagattgacatatggttcccagtagtggatcaactggaggttccaacaacttggtgggacagtgaggcttacaagtcgctg

SEQ ID NO: 735708 - DNA, 2705 bp, Homo sapiens
tgctgttggtctgtctctagagtatccccgtctcacttctgaatcccgactacaaaaagacagatgaaagccttaccaagtacttccatggctttgtggccatgtgccgccaagtatgccgccttcccccagcagctggagatgaaccccccgaccctaacctgttcattgagcccatcactgaggagagagcctcacggactctctaccgtatagaattgcttcggcgcttacgggaacaagttttatgccacccccttttggaagatcggctggcattgtgtcagcctcctggtcctgaattgcccaaatggtgggagcctgttcggcatgatggggagcttctaagaggggcagcccgccatggggtgagccaaacagactgcaacatcatgcaggacccagacttctcttttctggctgcccgtatgaattatatgcagaaccatcaagcaggagcaccagctccatccttgtcacgctgctctactccactgctgcaccagcagtatacctcacgcactgcctcaccactgcccctgcgcccagatgctcctgttgaaaagtcacccgaggagacagctacccaggtccccagtctggagagtctgactttaaagctagagcacgaggtggtggccaggagccgaccaaccccacaagactatgagatgcgagtatccccctctgatactacccctctggtttcccggagtgttccaccagtcaaactggaggatgaggatgattcggactctgagctggacttgagcaagctgtcaccatcttcttcttcttcctcatcctcatccagctccagctccagcactgatgagagtgaggatgagaaggaagagaagctaactgaccagtcccgctcaaagctctatgatgaagagagtctcctgtccctcactatgtcccaagatggattcccaaatgaagatggagaacaaatgacccctgagcttctgctactgcaggaaagacaaagagcctctgagtggcccaaggatcgtgtcctgataaaccgtattgacctcgtctgccaggctgtactctcagggaagtggccttctagccgtaggagccaggaaatggtaacaggaggaattttggggccaggcaaccacttgctagacagtccctcattgactcctggagaatatggtgactctccagtccccacaccacgaagtagtagtgcagcttccatggcagaggaggaagcatctgcagtcagcacagcggcagcccagttcaccaaacttcgccgaggcatggatgaaaaggagtttacagttcaaatcaaagatgaggaaggattgaagttaacattccagaagcacaagttgatggcgaatggagtaatgggagatggacatccactgtttcataagaagaaggggaacagaaagaagctagtagagctggaggtggagtgcatggaagagcctaatcaccttgatgtggacctggagacccggatccctgtcatcaataaggtggatggtactttgctggtgggtgaggatgcccctcgccgggctgaactggagatgtggttacagggtcatccagagtttgctgttgatccccgatttctagcgtatatggaggatcgcagaaaacagaagtggcaaagatgtaaaaaaaataataaggcagaattgaactgtttgggaatggaaccagtacagacagctaactctagaaatgggaaaaagggtcatcacactgaaacggtgttcaaccgggttttgccagggcctattgcaccagagagcagcaagaagcgggcccgtaggatgcgaccagacctttctaagatgatggccctcatgcagggtggaagcactgggtctctatctctgcataacacgttccaacacagcagtagtggcctacagtctgtgtcatctttgggtcacagcagtgccacttctgcatctttgccttttatgccatttgtgatgggtggtgcaccatcatcccctcatgtagactccagcaccatgcttcatcaccaccaccaccacccccacccccaccatcaccaccatcaccatccaggcttgagagcccctggctacccctcttcaccagtgactaccgcctctggtactaccttgcggttgccaccactgcaacctgaggaggatgacgatgaggatgaagaagatgatgatgacttatctcagggctatgatagctcagaaagggacttctcactcattgatgatcctatgatgccagctaactcagactccagtgaagatgctgatgactgaagccccagcatgggccccattgcttgggcggctgctgtattttcatttactctggcccttggactatggaaacgtgggaggggcaggggagatgtggggaagtccaggactccaggaggtgaaaaggaaaaaaaaaaaaaaatgtacctgattgctcccaattatgagaggattgggtgggcaggggaactcctaaaataatacatgaccacttcctcatttctggggaaggaaaggagactagagcagctggtgtgctcacccctccctagtcacctccattaaccacagactatgtagcgctggccctagcctctggcagagcctgttcctggccgaactgtggatacagctggagggtcaggaactgttaccttctttccccttggcattaataaatttaagttaatcctt

SEQ ID NO: 735709 - DNA, 1691 bp, Homo sapiens
  misc_feature (1668)..(1669): n is a, c, g, or t
tgtgagttcctttcccttgttcagtggttaatgcatactaagttggtttaatttaaaaaaaaaaaagaggtttaacagtataagggaaaccaccagaagtacaaaagccacagtatcaccatcaaaaccagaaagcctgaggatgaagaaggaaagatgtgtatatctgatacaggtttcataattgatagtcaaaagatatcatccaaatttattagatcactagatattaaaacaaacaagacaaaaaggaagacaaattcattaaaaacaggacatttctcccagctatttgggaggctgtggtgggaagatcaattgagccggtaggtagagacttcagtgagccgtgatcctactgcactctagtgagggcaacagagtgagaccctgtctcaaaaacaaaaacaaatgacatttctcttaaaaaatttttgtttcgtttttttgagacagagtctcatcccgtcatccaggctggagtgcagtggcctgatcttggctcactgcaacctccgcctcccgggttcaagccattctcctgcctcagccacctgagtagctgggattacaggcccgcaccaccacactcggctaatttttagtagagacagggcttcaccatgttggccaggctggtctcaaactcctgacctcaactgatccacccacctcggcctcccaaagtactgggattacaggcgtgagccactgtacccagcccaacatttcttttgctcatgaatctgcagactgggcagactgtttctcagctcagcttatgttggctcccctcagtgtcaactaggattgcttgaaggctggggctggaaatgtttaaatcttatccacatgtctgtgcctgggctgggaagactcatgcagctggggttggagcaggtgggcctcctgggtatccctctctctacgtgaaacactgtacgcagcctctccagtatggtggcttcagggtagccaattaagatatggttttacaatctattaaactggtaaatgtgatgcccaaggctggcaaggatagatctattgttggcaagggtaagctgactaaaccacttgggagggcaatttggcaatacacaccaaaatgttaaattccgtttgctctaataattctactgctaggaatttacctttcagatataaacaaaagtgtaccgaaatattttgtatgaaaatgtccactgcagcactgaatataccagcaaaaaatctgaacactcaagtgtccatcagcagggactatgcagtgaaacagtggttcaaacctcaccatcaccctgctgatgtaggacaccttcagctatggcctgcactactgaagcacctcccagctcacggctcacacctgctggggtcctcttctgatcacttctcctgtgcaaccagtgcaacctggactgcctttcacacccaccccatcacaattaagatccaccagggcgtcccaaactcctaccaaactccatgtgctacgctcctccaacctgggcctgcactgggccccagcctccccgctggccttcctgctgcctctccctctgccacttctagccacagggtcttagctcagactgtttcctctgcctgccttactctatttctcctctcctcctcttgccctcagagaaggcctctgtaacaccnngcctcgtacctagccgtaggtt

SEQ ID NO: 735710 - DNA, 2982 bp, Homo sapiens
tgcttggaaagtggccctttattcaacaaaagtatcataagaaaagtggcttagtctcaccctcctacccaattcctgctattcagactggccaggggtcctgcatcttcttcaacattctagctgatgcctagcgtttgtacagtcctttgcagcttgcaaaactcttatttgttccagaaaactaaagcccagagaacctacatggcttgtccaaggccaggcagcttcggtggtgaagcctagcacaggcttgctggctgtgctggaagaagccatccaggagggacatgtcagcatgacacccattatcatcacaaaaactaggtgcagggagagtcctcagagaggctgtatgggcggcagagaagctccacgggcaataatgataatgatcattgtggttgctattcaatgttcagccttgcactttgcacaacatgttataattatctcacttactcattaataacctgtgcagcaggtactattatttccatttaagatgaggacaccaagaatttaacagccaagccacttgcttaaggttaggacttggatcctaatcttcctaactcaaagctgggcttcttagttatacaccatcctcactatggaaaacatcaaaatcagaaacccatcatatggggcaatgagaaaaatcagaagcaatgcaaacccttcaaaccagccaaaggaggacataaggaaaagagaagtatcctttccagcccagtcctgaaatcattttggagcctctgtcttttaaattaagatcccggttgccaaaagctgatgtatgtaaggtgacctaagttgaatggcactttcccggtggtgataaatgcatgttgcctgccaagatgggctgagtatagacgtggattcccatgcccctcggatgctcaagctgtgaactgcaagatggagagtgctgtgtgggtttcaggggtttagagttctaatctggggtgcaccatttactccacactcttggtcagatttcttcacctctcagaactctttctagagccacagagtgatagagtggggaaggagatcttgtagatcaatgccatcatttgatggatgggaacactgggcttcagagaggggcagggacttgctggttgtcctaggggcagctcgaaggtaggcaggttcctaggaggtctcctcccttacagtttgccccatttcctgctgtgcatggctcccctgtctacaacaaagccatcaccctgcctaggtggcagtgaggctcaggtgagaccctgcctgccccatacaaacacatgtcaggcaccatcagtagctgagcacagagctcttcccaaggggccacagtgcagtgtggctaggcggtacctggtgggcgtggggggctggcgatggggagccatggaacggggtggggcagccgtcctctcatagggcttttgctcaggagactcatcattgcttttcagaagcaaatggcattcgttggcttcaaaggcagcttccggcccatctgggtgacactggacactgaggatcacaaagccaaaatcttccaagttgtgcccatcccttgccttgccccaaggcggggtgtccataagagcaggtggagatggttcaaagaaagagaagatatcattcatatggctggccatgtccagaacttgctgcgtcctccacatttctaagctgtcaggaggctgtcacttcaactcccctccccgatggggaagccaggcagaagcaggactctcttttcctcccaggccctgtttggctggaggccaaacacatttgacaagagcatgggggctgaggtgggaaaaacaggtccaaatcaaactggcagacgagaggcaggcacaggtagagggcacctcaggcagcactggaaggggctcaggggtcaagtgtaaatgggaaaaagcaacacagtcacatttccatgtaaggagattttatagtaaacatgaatttgtcagtgtccagtattaattagaaaacatctgtcttcttacttgaagcctattaagcagtaattctttgaccacaaactggtcatgtggcagaccctttctagaagacactagaatgtcatccggtgtgcagttgcctgagaccactcccaccccaggagctgggcaaagagctctccacgtccacctgtccccccacagcgcgtcactgctgccccatcacaggtcttctcttttattcccagctcgattttcttccttggaagaccgagatttcagatctccttccttcttttttttgcccttgtcttgctttgttttatttttctctttgcttcctcctcctttgccggggtacacctggccctccagagttacatcagcacacctgtcttgaccgaccaaaaagtccttgatctcccaggcgtagctcccatcgcgaagcatgaagatagcacggtctgatcccacaatgaacctctggacgtcatagttggcattgaaaaggctgccctgccagaggctcgtaatttcctctgtctccttctcagtagggcttcctgatacagtgacaaacatcatgagagtcttcccttttttcgtcattttcaatatgctttcaggcttgcttgggtctatctttgagaagtcgacaggtgctgaaggtctcttgtgctctggaagatctccttcttcaatgtcatcatctttctcccattgctccagaagacgcgccatgtctgcatcattgtaatcgcgaatatccttcttcttcttccggggaggtggggtagactcgtcgggcgtcccgggcgagccttcggccgcgcaggacccaggcggtggtagcagtagcagcagcagcagcaggtcagaggcacaaagcaggaccacggccttgcgcgcccacctggaagccgccattttcgctgcgccgcgcagcgccctagacgcgcttacccgacctgcgcgggccggaccccgccttgcacacgccttcctg

SEQ ID NO: 735711 - DNA, 655 bp, Homo sapiens
tatgaagatgaacagaaagcattagctggattacacagtaaggcctgggctgcgtccatcagcagaaagagatgtccccttatttggcctttctttcattcaagccttctaaaaagggttctgtaaagagaaagtgcctttgaaagtgcggtctatagtcagatgttagccagacgctcttggaataatccttcgtaatagcctcattgtgtgtttcctttttgggttttaaaagatgtacattcaagcctacaagaccagtaacctgcgaatgaagatcatcaagaatgacttccccagccaccctctttacctggagggggcgctcaccaggagcacccattaccagcaataccaaccggttgtcaccctgcagaagggctacaccatccactgggaccagacggcccccgccgaactcgccatctggctcatcaacttcaacaagtgagtgggtgtccagccaggagcagtgagctcaaagctgataacgatgccttgttgcaaagtcctggacttgcgtctaacgaaaccacaggctagcccatgtgatccatgcaggagtacctagaggggttgacatcacccaggagttaagaattaaaggacacagccatcgagcccccgctccagcatgggtaaccttggccagcgc

SEQ ID NO: 735712 - DNA, 467 bp, Homo sapiens; identical to SEQ ID NO: 364019

SEQ ID NO: 735713 - DNA, 3620 bp, Homo sapiens
  misc_feature (2899)..(2899): n is a, c, g, or t
tgactggctatactttccttccttattaccccagtctggtccctttggtctctatgccaaagatgacagcagctgcagcccttgctctaaattgcatgtctttgaatgatagtcatggtcaggatgcagacacaccctggctctgggatgggccccagctggcagggatcatgccctccctggaggcctgctccctaaattctccacctggccttgtagctgctcaccagccagccctcatccactgagacctcactctgtgccaggccctgggctgaatgctggggacaagggggcaaaaaccagctccttgcccacccagagcccaccatgcggtgggaggaggcagacatttgaacaaaagacattaggcggcttccaccttagggcaagagtggatggggcttagaagtgttgtgatgtagttacataagtctgggttcaagttttagctctgccacctactggctttgtgatcctgggtaagtaactgaacctctctgaggatgagtttccttatctgtaaaactaacagcagcctcatagttttgctatgaagatgaaatgagataatataggtaagcatctagctttagtggttctcaaactttcttgcccattagaatcacctgggcaacttttcaaagtccagatgtccatgctgcaccccagacacaatcaaatctgaggctccgaggatggggactgggcatgagtattttttaaagactcctccccatgggatgcagaaccatgtttggactgttggccgctgttcatggtgctggtagtggtggtgcaaattgtaaaaagtggccagcccagatcctagaagagtggctacttattgtaaatgctccgtaaaatgttcacccagccataagcagtagatcactggtttcgatactgagtactgtaggacctcaggccaggcatttatctattccaagactttaggctgtctttctcataacaaaactgatgggggcaatcattgggataatcatctcgggccgttgtaaatagtgttgcagcagggacaattttagacttctgagtatatgtttagaacattaatcagcaccttccttctctataaaaaaaaaacgactttgctctgtaatttctgtgtcattcccaggccactacaatggatggagttaacctcagcaccgaggttgtctacaaaaaaggccaggattataggtttgcttgctacgaccggggcagagcctgccggagctaccgtgtacggttcctctgtgggaagcctggtaagcagccccttgtcggggacacagatgcaactatggctcggttccttgaactggcagctatgcaggcaacttccagacctctcagtgagacagtgctcccaaaggagagcacttttgtgacacgggagcagtgggaggatccttggagttggcaggagacagcagaaccccaccctgcccataagcctttcaggaaggggaagggcctggtccaaggcagtcaaggtacaaatggacagagctgccctcccctgcagagatgtgcagttctttgcctctttgggtgctattattttaaatccagtacctaaggtgcttgttagaagagattggaaatggtcgggttgttctcggaggcacttggccatctccagaaggcagtcattaggaatgaaagtttagggggagaagtttatggctaccgaaaataatagttgagaggaactatatttgttttacatcttgagcaaagtgggtggggtgaggcagccacatttaactccagctaagaagttagtggaaaattcccccgcccagagctaatgaatggctcttttctggtagggtttttgttgacttcaaaaacctttaccaagagtgggatggagcaagccagtgatctgggttttggataggcaaacctggcatttagttatttagggaggggaagggaaaaaagaggtagccaaaagtttgccaagagcaaagggctctatctcagtctttcctgttttgggttacagtgaggcccaaactcacagtcaccattgacaccaatgtgaacagcaccattctgaacttggaggataatgtacagtcatggaaacctggagataccctggtcattgccagtactgattactccatgtaccaggcagaagagttccaggtgcttccctgcagatcctgcgcccccaaccaggtcaaagtggcaggtaggacttttactaatcccttcctagactggatgaatctgaaaattgttaggcttaaagtaaactgaagttacaacaaatctgtatcagtcagctatggctgtaataatgctgcataacaaaaaaaatcttaaaacttcatgacaggtctttatttcttactcatgtatctgcaggttgtctagggatcagcttctctagactgagcctgactccaggctgagagttgggttcaagtcacttccatatgactcccattcttcccaaaacatattcttctcacgggggagattgcaaactcctagtggtgagcagaaacacagaactcttaaggcctaggctcaaagatggcacattctcacacattccattggctaaagtaagtcacatggtaaagcacaacacaaataggctagggaagcatatgtctgtcaccaagtttgagggggaggaagtgaatatttgttagacagttattcaatctactacaaaatttttaatctcttgtatctgtgagtttggggtttttctttttcttctcctaaatcttgatttagatgtcctgtaatttatgttattggaggttactggaatcacagattgttgaaggtaaaaagagacttcaaatataatccaggtcaattattcttagtagggggagttatgtatcaattagagttctttggntgttagcaacagaatccaacttgactatcttaagcaaaacaggaatttattgagaggctattcaacttggagaactaaaggataagctgaataactaacctccaaaaggacagggaacagggtagcttctgggatctgggtagcaggaactaatggactgtatccttaaggcatcatctttaagaaccatgcttaggccatgggacatagtgctcaaaagtcaccttccagggagagagcatctgcttgggctggtggcttgtgtgctcaccctttggctaggaaaggcaggaacagtcattgaaagttcttctaagactgcattaaatggataaatggctgttccgcaaaggaaaattgggatatattaccagaagaaaggggaatcagaacttaagaggtgttaaacgtatcacatgctacaggaccataccacctggaggagtattagaatatggggttgggagaaagaccatggattgagaaagcgtatccaatatactcaccatatctattattttggaaagaaacccacagaacataaaattcaacacaatctttttggctgcctgagatgtgcttgtggaagaatctgtggaggcaaagtttaaaaaatctgagaacactgatggaattcagtccccttatcttaacactcatgggggaggcggacctagaggtcatgtggtggaggcagtccacaaacaatgcagctgtgatg

SEQ ID NO: 735714 - DNA, 931 bp, Homo sapiens
gagaccccgtctcaaaaaaatttaaaaaaaaagagctaaagcgacactttagatgggccttcaggacacagtagtagcctcctttgcccagcaaaggctgcgggaagcgctgcagttctaatgccaaggaggaattcagaccgtgagacatgctagagctctgcaatctgaatttgttgggaggctggaactaaactttcaaaactgaaacaaaagaatggatgatcatctcttcccaagtgaatgaatgtcctaattttcttttatttacttaaaaaatatttttaaagaaatgagtcaatgcccatgtgcgtaggggggtttccttgccttggagtcacaactttttgaatttgggggtctgtccagctcctaaagggtctcgtttctctgacaggacatcgaggctctgctgctgcccgggtattcaaattgttccagacagagcatggcgaatatttcaatgtttctttgtccagtgagtgggttcaaggtgaggagtttcagacaatttggtgacacctaacagtgggatagaagaccagaaatcactgtctttgcagaactaggatttatctcttataccagtaggaccactttaatttttgcagaatcaactaaaaatgtgcaaccaaaagttgtctttaattagacaagccactttagcccatagcccagaaggatgttctcctctggctaagatttcaatttcacctcagtcagggtctgcggcattcagcttagttcacggaatatctttgatgtggcaggcaatggcactgaacaggaaatgcagataggaatagaacctgccctccaaatagcccacatgcagggattgcagaaagcagcaatcctagttgcagtccttggataacgggtttacagatggattttctttcttttctctttaatttgcttttgcaataac

SEQ ID NO: 735715 - DNA, 4678 bp, Homo sapiens
gagctagcgctcaagcagagcccagcgcggtgctatcggacagagcctggcgagcgcaagcggcgcggggagccagcggggctgagcgcggccagggtctgaacccagatttcccagactagctaccactccgcttgcccacgccccgggagctcgcggcgcctggcggtcagcgaccagacgtccggggccgctgcgctcctggcccgcgaggcgtgacactgtctcggctacagacccagagggagcacactgccaggatgggagctgctgggaggcaggacttcctcttcaaggccatgctgaccatcagctggctcactctgacctgcttccctggggccacatccacagtggctgctgggtgccctgaccagagccctgagttgcaaccctggaaccctggccatgaccaagaccaccatgtgcatatcggccagggcaagacactgctgctcacctcttctgccacggtctattccatccacatctcagagggaggcaagctggtcattaaagaccacgacgagccgattgttttgcgaacccggcacatcctgattgacaacggaggagagctgcatgctgggagtgccctctgccctttccagggcaatttcaccatcattttgtatggaagggctgatgaaggtattcagccggatccttactatggtctgaagtacattggggttggtaaaggaggcgctcttgagttgcatggacagaaaaagctctcctggacatttctgaacaagacccttcacccaggtggcatggcagaaggaggctatttttttgaaaggagctggggccaccgtggagttattgttcatgtcatcgaccccaaatcaggcacagtcatccattctgaccggtttgacacctatagatccaagaaagagagtgaacgtctggtccagtatttgaacgcggtgcccgatggcaggatcctttctgttgcagtgaatgatgaaggttctcgaaatctggatgacatggccaggaaggcgatgaccaaattgggaagcaaacacttcctgcaccttggatttagacacccttggagttttctaactgtgaaaggaaatccatcatcttcagtggaagaccatattgaatatcatggacatcgaggctctgctgctgcccgggtattcaaattgttccagacagagcatggcgaatatttcaatgtttctttgtccagtgagtgggttcaagacgtggagtggacggagtggttcgatcatgataaagtatctcagactaaaggtggggagaaaatttcagacctctggaaagctcacccaggaaaaatatgcaatcgtcccattgatatacaggccactacaatggatggagttaacctcagcaccgaggttgtctacaaaaaaggccaggattataggtttgcttgctacgaccggggcagagcctgccggagctaccgtgtacggttcctctgtgggaagcctgtgaggcccaaactcacagtcaccattgacaccaatgtgaacagcaccattctgaacttggaggataatgtacagtcatggaaacctggagataccctggtcattgccagtactgattactccatgtaccaggcagaagagttccaggtgcttccctgcagatcctgcgcccccaaccaggtcaaagtggcagggaaaccaatgtacctgcacatcggggaggagatagacggcgtggacatgcgggcggaggttgggcttctgagccggaacatcatagtgatgggggagatggaggacaaatgctacccctacagaaaccacatctgcaatttctttgacttcgatacctttgggggccacatcaagtttgctctgggatttaaggcagcacacttggagggcacggagctgaagcatatgggacagcagctggtgggtcagtacccgattcacttccacctggccggtgatgtagacgaaaggggaggttatgacccacccacatacatcagggacctctccatccatcatacattctctcgctgcgtcacagtccatggctccaatggcttgttgatcaaggacgttgtgggctataactctttgggccactgcttcttcacggaagatgggccggaggaacgcaacacttttgaccactgtcttggcctccttgtcaagtctggaaccctcctcccctcggaccgtgacagcaagatgtgcaagatgatcacagaggactcctacccagggtacatccccaagcccaggcaagactgcaatgctgtgtccaccttctggatggccaatcccaacaacaacctcatcaactgtgccgctgcaggatctgaggaaactggattttggtttatttttcaccacgtaccaacgggcccctccgtgggaatgtactccccaggttattcagagcacattccactgggaaaattctataacaaccgagcacattccaactaccgggctggcatgatcatagacaacggagtcaaaaccaccgaggcctctgccaaggacaagcggccgttcctctcaatcatctctgccagatacagccctcaccaggacgccgacccgctgaagccccgggagccggccatcatcagacacttcattgcctacaagaaccaggaccacggggcctggctgcgcggcggggatgtgtggctggacagctgccgatttcagaggggaggctcaggaaggcttcttgcttacaggaatgaaggctgggggcattttgctggggggagatgaggcagcctctggaatggctcagggattcagccctccctgccgctgcctgctgaagctggtgactacggggtcgccctttgctcacgtctctctggcccactcatgatggagaagtgtggtcagaggggagcaatgggctttgctgcttatgagcacagaggaattcagtccccaggcagccctgcctctgactccaagagggtgaagtccacagaagtgagctcctgccttagggcctcatttgctcttcatccagggaactgagcacagggggcctccaggagaccctagatgtgctcgtactccctcggcctgggatttcagagctggaaatatagaaaatatctagcccaaagccttcattttaacagatggggaaagtgagcccccaagatgggaaagaaccacacagctaagggagggcctggggagccccaccctagcccttgctgccacaccacattgcctcaacaaccggccccagagtgcccaggcactcctgaggtagcttctggaaatggggacaagtcccctcgaaggaaaggaaatgactagagtagaatgacagctagcagatctcttccctcctgctcccagcgcacacaaacccgccctccccttggtgttggcggtccctgtggccttcactttgttcactacctgtcagcccagcctgggtgcacagtagctgcaactccccattggtgctacctggctctcctgtctctgcagctctacaggtgaggcccagcagagggagtagggctcgccatgtttctggtgagccaatttggctgatcttgggtgtctgaacagctattgggtccaccccagtccctttcagctgctgcttaatgccctgctctctccctggcccaccttatagagagcccaaagagctcctgtaagagggagaactctatctgtggtttataatcttgcacgaggcaccagagtctccctgggtcttgtgatgaactacatttatcccctttcctgccccaaccacaaactctttccttcaaagagggcctgcctggctccctccacccaactgcacccatgagactcggtccaagagtccattccccaggtgggagccaactgtcagggaggtctttcccaccaaacatctttcagctgctgggaggtgaccatagggctctgcttttaaagatatggctgcttcaaaggccagagtcacaggaaggacttcttccagggagattagtggtgatggagaggagagttaaaatgacctcatgtccttcttgtccacggttttgttgagttttcactcttctaatgcaagggtctcacactgtgaaccacttaggatgtgatcactttcaggtggccaggaatgttgaatgtctttggctcagttcatttaaaaaagatatctatttgaaagttctcagagttgtacatatgtttcacagtacaggatctgtacataaaagtttctttcctaaaccattcaccaagagccaatatctaggcattttcttggtagcacaaattttcttattgcttagaaaattgtcctccttgttatttctgtttgtaagacttaagtgagttaggtctttaaggaaagcaacgctcctctgaaatgcttgtcttttttctgttgccgaaatagctggtcctttttcgggagttagatgtatagagtgtttgtatgtaaacatttcttgtaggcatcaccatgaacaaagatatattttctatttatttattatatgtgcacttcaagaagtcactgtcagagaaataaagaattgtcttaaatgtcatgattggagatgtcctttgcattgcttggaaggggtgtacctagagccaaggaaattggctctggtttggaaaaattttgctgttattatagtaaacatacaaaggatgtcatcatcaagtct

SEQ ID NO: 735716 - DNA, 918 bp, Homo sapiens
gagctagcgctcaagcagagcccagcgcggtgctatcggacagagcctggcgagcgcaagcggcgcggggagccagcggggctgagcgcggccagggtctgaacccagatttcccagactagctaccactccgcttgcccacgccccgggagctcgcggcgcctggcggtcagcgaccagacgtccggggccgctgcgctcctggcccgcgaggcgtgacactgtctcggctacagacccagagggagcacactgccaggatgggagctgctgggaggcaggacttcctcttcaaggccatgctgaccatcagctggctcactctgacctgcttccctggggccacatccacagtggctgctgggtgccctgaccagagccctgagttgcaaccctggaaccctggccatgaccaagaccaccatgtgcatatcggccagggcaagacactgctgctcacctcttctgccacggtctattccatccacatctcagagggaggcaagctggtcattaaagaccacgacgagccgattgttttgcgaacccggcacatcctgattgacaacggaggagagctgcatgctgggagtgccctctgccctttccagggcaatttcaccatcattttgtatggaagggctgatgaaggtattcagccggatccttactatggtctgaagtacattggggttggtaaaggaggcgctcttgagttgcatggacagaaaaagctctcctggacatttctgaacaagacccttcacccaggtggcatggcagaaggaggctatttttttgaaaggagctggggccaccgtggagttattgttcatgtcatcgaccccaaatcaggcacagtcatccattctgaccggtttgacacctatagatcaagtgcgtgtgagggtcggagct

SEQ ID NO: 735717 - DNA, 442 bp, Homo sapiens
gaggttgaaaatattccaaataatttgcacctgtaccgaacatgtacagatttttccttgtcattatttccttaaaatacagtttgacaactatttatacagtatttacattgaactaggtattataagcaatctagagatgatttcaagtatatgggaggatgtgcataggttagatgcaaatatgcaaatactatgccatttaatcagcgactggagcatccatggagtttggtatctgggaggtgctggaaccaattcccttcagatactgagggatgactttacttgtaagtacaccaagcataggaatgtttggaagatgtgcctttttgcctgccccggtgagatggggagtgcttagggagtctgcccttggctctgatataaccttacccttaacactgtgttattaaacctccccccaatgctacctcttcag

SEQ ID NO: 735718 - DNA, 698 bp, Homo sapiens; identical to SEQ ID NO: 364017

SEQ ID NO: 735719 - DNA, 3892 bp, Homo sapiens
gagctagcgctcaagcagagcccagcgcggtgctatcggacagagcctggcgagcgcaagcggcgcggggagccagcggggctgagcgcggccagggtctgaacccagatttcccagactagctaccactccgcttgcccacgccccgggagctcgcggcgcctggcggtcagcgaccagacgtccggggccgctgcgctcctggcccgcgaggcgtgacactgtctcggctacagacccagagggagcacactgccaggatgggagctgctgggaggcaggacttcctcttcaaggccatgctgaccatcagctggctcactctgacctgcttccctggggccacatccacagtggctgctgggtgccctgaccagagccctgagttgcaaccctggaaccctggccatgaccaagaccaccatgtgcatatcggccagggcaagacactgctgctcacctcttctgccacggtctattccatccacatctcagagggaggcaagctggtcattaaagaccacgacgagccgattgttttgcgaacccggcacatcctgattgacaacggaggagagctgcatgctgggagtgccctctgccctttccagggcaatttcaccatcattttgtatggaagggctgatgaaggtattcagccggatccttactatggtctgaagtacattggggttggtaaaggaggcgctcttgagttgcatggacagaaaaagctctcctggacatttctgaacaagacccttcacccaggtggcatggcagaaggaggctatttttttgaaaggagctggggccaccgtggagttattgttcatgtcatcgaccccaaatcaggcacagtcatccattctgaccggtttgacacctatagatccaagaaagagagtgaacgtctggtccagtatttgaacgcggtgcccgatggcaggatcctttctgttgcagtgaatgatgaaggttctcgaaatctggatgacatggccaggaaggcgatgaccaaattgggaagcaaacacttcctgcaccttggatttagacacccttggagttttctaactgtgaaaggaaatccatcatcttcagtggaagaccatattgaatatcatggacatcgaggctctgctgctgcccgggtattcaaattgttccagacagagcatggcgaatatttcaatgtttctttgtccagtgagtgggttcaagacgtggagtggacggagtggttcgatcatgataaagtatctcagactaaaggtggggagaaaatttcagacctctggaaagctcacccaggaaaaatatgcaatcgtcccattgatatacaggccactacaatggatggagttaacctcagcaccgaggttgtctacaaaaaaggccaggattataggtttgcttgctacgaccggggcagagcctgccggagctaccgtgtacggttcctctgtgggaagcctggtaagcagccccttgtcggggacacagatgcaactatggctcggttccttgaactggcagctatgcaggcaacttccagacctctcagtgagacagtgctcccaaaggagagcacttttgtgacacgggagcagtgggaggatccttggagttggcaggagacagcagaaccccaccctgcccataagcctttcaggaaggggaagggcctggtccaaggcagtcaaggtacaaatggacagagctgccctcccctgcagagatgtgcagttctttgcctctttgggtgctattattttaaatccagtacctaaggtgcttgttagaagagattggaaatggtcgggttgttctcggaggcacttggccatctccagaaggcagtcattaggaatgaaagtttagggggagaagtttatggctaccgaaaataatagttgagaggaactatatttgttttacatcttgagcaaagtgggtggggtgaggcagccacatttaactccagctaagaagttagtggaaaattcccccgcccagagctaatgaatggctcttttctggtagggtttttgttgacttcaaaaacctttaccaagagtgggatggagcaagccagtgatctgggttttggataggcaaacctggcatttagttatttagggaggggaagggaaaaaagaggtagccaaaagtttgccaagagcaaagggctctatctcagtctttcctgttttgggttacagtgaggcccaaactcacagtcaccattgacaccaatgtgaacagcaccattctgaacttggaggataatgtacagtcatggaaacctggagataccctggtcattgccagtactgattactccatgtaccaggcagaagagttccaggtgcttccctgcagatcctgcgcccccaaccaggtcaaagtggcaggtaggacttttactaatcccttcctagactggatgaatctgaaaattgttaggcttaaagtaaactgaagttacaacaaatctgtatcagtcagctatggctgtaataatgctgcataacaaaaaaaatcttaaaacttcatgacaggtctttatttcttactcatgtatctgcaggttgtctagggatcagcttctctagactgagcctgactccaggctgagagttgggttcaagtcacttccatatgactcccattcttcccaaaacatattcttctcacgggggagattgcaaactccatatctattattttggaaagaaacccacagaacataaaattcaacacaatctttttggctgcctgagatgtgcttgtggaagaatcaaaggtaccaagcagagatgggagagtgattactttgtggtggtttctgggagtccagtttttcctgtacttcattggcatcacatgaaatctggagatcattccacggccacacagcatgacagctctgctaactgcagacagggggatcatgcgaagacccggctgtggtatctacccaacagatttgagatggtgacaacaatgggctttttttcttctgatgaaccaagtgttccttcaggagcaagtgctggtgggcgtggggggctggcgatggggagccatggaacggggtggggcagccgtcctctcatagggcttttgctcaggagactcatcattgcttttcagaagcaaatggcattcgttggcttcaaaggcagcttccggcccatctgggtgacactggacactgaggatcacaaagccaaaatcttccaagttgtgcccatcccttgccttgccccaaggcggggtgtccataagagcaggtggagatggttcaaagaaagagaagatatcattcatatggctggccatgtccagaacttgctgcgtcctccacatttctaagctgtcaggaggctgtcacttcaactcccctccccgatggggaagccaggcagaagcaggactctcttttcctcccaggccctgtttggctggaggccaaacacatttgacaagagcatgggggctgaggtgggaaaaacaggtccaaatcaaactggcagacgagaggcaggcacaggtagagggcacctcaggcagcactggaaggggctcaggggtctcccattgctccagaagacgcgccatgtctgcatcattgtaatcgcgaatatccttcttcttcttccggggaggtggggtagactcgtcgggcgtcccgggcgagccttcggccgcgcaggacccaggcggtggtagcagtagcagcagcagcagcaggtcagaggcacaaagcaggaccacggccttgcgcgcccacctggaagccgccattttcgctgcgccgcgcagcgccctagacgcgcttacccgacctgcgcgggccggaccccgccttgcacacgccttcctg

SEQ ID NO: 735720 - DNA, 3064 bp, Homo sapiens
gagctagcgctcaagcagagcccagcgcggtgctatcggacagagcctggcgagcgcaagcggcgcggggagccagcggggctgagcgcggccagggtctgaacccagatttcccagactagctaccactccgcttgcccacgccccgggagctcgcggcgcctggcggtcagcgaccagacgtccggggccgctgcgctcctggcccgcgaggcgtgacactgtctcggctacagacccagagggagcacactgccaggatgggagctgctgggaggcaggacttcctcttcaaggccatgctgaccatcagctggctcactctgacctgcttccctggggccacatccacagtggctgctgggtgccctgaccagagccctgagttgcaaccctggaaccctggccatgaccaagaccaccatgtgcatatcggccagggcaagacactgctgctcacctcttctgccacggtctattccatccacatctcagagggaggcaagctggtcattaaagaccacgacgagccgattgttttgcgaacccggcacatcctgattgacaacggaggagagctgcatgctgggagtgccctctgccctttccagggcaatttcaccatcattttgtatggaagggctgatgaaggtattcagccggatccttactatggtctgaagtacattggggttggtaaaggaggcgctcttgagttgcatggacagaaaaagctctcctggacatttctgaacaagacccttcacccaggtggcatggcagaaggaggctatttttttgaaaggagctggggccaccgtggagttattgttcatgtcatcgaccccaaatcaggcacagtcatccattctgaccggtttgacacctatagatccaagaaagagagtgaacgtctggtccagtatttgaacgcggtgcccgatggcaggatcctttctgttgcagtgaatgatgaaggttctcgaaatctggatgacatggccaggaaggcgatgaccaaattgggaagcaaacacttcctgcaccttggatttagacacccttggagttttctaactgtgaaaggaaatccatcatcttcagtggaagaccatattgaatatcatggacatcgaggctctgctgctgcccgggtattcaaattgttccagacagagcatggcgaatatttcaatgtttctttgtccagtgagtgggttcaagacgtggagtggacggagtggttcgatcatgataaagtatctcagactaaaggtggggagaaaatttcagacctctggaaagctcacccaggaaaaatatgcaatcgtcccattgatatacaggccactacaatggatggagttaacctcagcaccgaggttgtctacaaaaaaggccaggattataggtttgcttgctacgaccggggcagagcctgccggagctaccgtgtacggttcctctgtgggaagcctggtaagcagccccttgtcggggacacagatgcaactatggctcggttccttgaactggcagctatgcaggcaacttccagacctctcagtgagacagtgctcccaaaggagagcacttttgtgacacgggagcagtgggaggatccttggagttggcaggagacagcagaaccccaccctgcccataagcctttcaggaaggggaagggcctggtccaaggcagtcaaggtacaaatggacagagctgccctcccctgcagagatgtgcagttctttgcctctttgggtgctattattttaaatccagtacctaaggtgcttgttagaagagattggaaatggtcgggttgttctcggaggcacttggccatctccagaaggcagtcattaggaatgaaagtttagggggagaagtttatggctaccgaaaataatagttgagaggaactatatttgttttacatcttgagcaaagtgggtggggtgaggcagccacatttaactccagctaagaagttagtggaaaattcccccgcccagagctaatgaatggctcttttctggtagggtttttgttgacttcaaaaacctttaccaagagtgggatggagcaagccagtgatctgggttttggataggcaaacctggcatttagttatttagggaggggaagggaaaaaagaggtagccaaaagtttgccaagagcaaagggctctatctcagtctttcctgttttgggttacagtgaggcccaaactcacagtcaccattgacaccaatgtgaacagcaccattctgaacttggaggataatgtacagtcatggaaacctggagataccctggtcattgccagtactgattactccatgtaccaggcagaagagttccaggtgcttccctgcagatcctgcgcccccaaccaggtcaaagtggcaggtaggacttttactaatcccttcctagactggatgaatctgaaaattgttaggcttaaagtaaactgaagttacaacaaatctgtatcagtcagctatggctgtaataatgctgcataacaaaaaaaatcttaaaacttcatgacaggtctttatttcttactcatgtatctgcaggttgtctagggatcagcttctctagactgagcctgactccaggctgagagttgggttcaagtcacttccatatgactcccattcttcccaaaacatattcttctcacgggggagattgcaaactccatatctattattttggaaagaaacccacagaacataaaattcaacacaatctttttggctgcctgagatgtgcttgtggaagaatcaaaggtaccaagcagagatgggagagtgattactttgtggtggtttctgggagtccagtttttcctgtacttcattggcatcacatgaaatctggagatcattccacggccacacagcatgacagctctgctaactgcagacagggggatcatgcgaagacccggctgtggtatctacccaacagatggtgggtcgttctctccttaattataacattcacagccacagaactaatcatattttatatcttcttcgaaa

SEQ ID NO: 735721 - DNA, 6282 bp, Homo sapiens
gagctagcgctcaagcagagcccagcgcggtgctatcggacagagcctggcgagcgcaagcggcgcggggagccagcggggctgagcgcggccagggtctgaacccagatttcccagactagctaccactccgcttgcccacgccccgggagctcgcggcgcctggcggtcagcgaccagacgtccggggccgctgcgctcctggcccgcgaggcgtgacactgtctcggctacagacccagagggagcacactgccaggatgggagctgctgggaggcaggacttcctcttcaaggccatgctgaccatcagctggctcactctgacctgcttccctggggccacatccacagtggctgctgggtgccctgaccagagccctgagttgcaaccctggaaccctggccatgaccaagaccaccatgtgcatatcggccagggcaagacactgctgctcacctcttctgccacggtctattccatccacatctcagagggaggcaagctggtcattaaagaccacgacgagccgattgttttgcgaacccggcacatcctgattgacaacggaggagagctgcatgctgggagtgccctctgccctttccagggcaatttcaccatcattttgtatggaagggctgatgaaggtattcagccggatccttactatggtctgaagtacattggggttggtaaaggaggcgctcttgagttgcatggacagaaaaagctctcctggacatttctgaacaagacccttcacccaggtggcatggcagaaggaggctatttttttgaaaggagctggggccaccgtggagttattgttcatgtcatcgaccccaaatcaggcacagtcatccattctgaccggtttgacacctatagatccaagaaagagagtgaacgtctggtccagtatttgaacgcggtgcccgatggcaggatcctttctgttgcagtgaatgatgaaggttctcgaaatctggatgacatggccaggaaggcgatgaccaaattgggaagcaaacacttcctgcaccttggatttagacacccttggagttttctaactgtgaaaggaaatccatcatcttcagtggaagaccatattgaatatcatggacatcgaggctctgctgctgcccgggtattcaaattgttccagacagagcatggcgaatatttcaatgtttctttgtccagtgagtgggttcaagacgtggagtggacggagtggttcgatcatgataaagtatctcagactaaaggtggggagaaaatttcagacctctggaaagctcacccaggaaaaatatgcaatcgtcccattgatatacaggccactacaatggatggagttaacctcagcaccgaggttgtctacaaaaaaggccaggattataggtttgcttgctacgaccggggcagagcctgccggagctaccgtgtacggttcctctgtgggaagcctggtaagcagccccttgtcggggacacagatgcaactatggctcggttccttgaactggcagctatgcaggcaacttccagacctctcagtgagacagtgctcccaaaggagagcacttttgtgacacgggagcagtgggaggatccttggagttggcaggagacagcagaaccccaccctgcccataagcctttcaggaaggggaagggcctggtccaaggcagtcaaggtacaaatggacagagctgccctcccctgcagagatgtgcagttctttgcctctttgggtgctattattttaaatccagtacctaaggtgcttgttagaagagattggaaatggtcgggttgttctcggaggcacttggccatctccagaaggcagtcattaggaatgaaagtttagggggagaagtttatggctaccgaaaataatagttgagaggaactatatttgttttacatcttgagcaaagtgggtggggtgaggcagccacatttaactccagctaagaagttagtggaaaattcccccgcccagagctaatgaatggctcttttctggtagggtttttgttgacttcaaaaacctttaccaagagtgggatggagcaagccagtgatctgggttttggataggcaaacctggcatttagttatttagggaggggaagggaaaaaagaggtagccaaaagtttgccaagagcaaagggctctatctcagtctttcctgttttgggttacagtgaggcccaaactcacagtcaccattgacaccaatgtgaacagcaccattctgaacttggaggataatgtacagtcatggaaacctggagataccctggtcattgccagtactgattactccatgtaccaggcagaagagttccaggtgcttccctgcagatcctgcgcccccaaccaggtcaaagtggcaggtaggacttttactaatcccttcctagactggatgaatctgaaaattgttaggcttaaagtaaactgaagttacaacaaatctgtatcagtcagctatggctgtaataatgctgcataacaaaaaaaatcttaaaacttcatgacaggtctttatttcttactcatgtatctgcaggttgtctagggatcagcttctctagactgagcctgactccaggctgagagttgggttcaagtcacttccatatgactcccattcttcccaaaacatattcttctcacgggggagattgcaaactccatatctattattttggaaagaaacccacagaacataaaattcaacacaatctttttggctgcctgagatgtgcttgtggaagaatctagggacacagctatctcttaggcttctcttccccaggctggctgcagacacggacacgatctccctgggtccttcttcctcattgctcccagatttcattctacaggactgtttgcatttcccttaaggcctttcaaaggtaccaagcagagatgggagagtgattactttgtggtggtttctgggagtccagtttttcctgtacttcattggcatcacatgaaatctggagatcattccacggccacacagcatgacagctctgctaactgcagacagggggatcatgcgaagacccggctgtggtatctacccaacagatttgagatggtgacaacaatgggctttttttcttctgatgaaccaagtgttccttcaggagcaagtgctggtgggcgtggggggctggcgatggggagccatggaacggggtggggcagccgtcctctcatagggcttttgctcaggagactcatcattgcttttcagaagcaaatggcattcgttggcttcaaaggcagcttccggcccatctgggtgacactggacactgaggatcacaaagccaaaatcttccaagttgtgcccatccctgtggtgaagaagaagaagttgtgaggacagctgccgcccggtgccacctcgtggtagactatgacggtgactcttggcagcagaccagtgggggatggctgggtcccccagcccctgccagcagctgcctgggaaggccgtgtttcagccctgatgggccaagggaaggctatcagagaccctggtgctgccacctgcccctactcaagtgtctacctggagcccctggggcggtgctggccaatgctggaaacattcactttcctgcagcctcttgggtgcttctctcctatctgtgcctcttcagtgggggtttggggaccatatcaggagacctgggttgtgctgacagcaaagatccactttggcaggagccctgacccagctaggaggtagtctggagggctggtcattcacagatccccatggtcttcagcagacaagtgagggtggtaaatgtaggagaaagagccttggccttaaggaaatctttactcctgtaagcaagagccaacctcacaggattaggagctggggtagaactggctatccttggggaagaggcaagccctgcctctggccgtgtccacctttcaggagactttgagtggcaggtttggacttggactagatgactctcaaaggcccttttagttctgagattccagaaatctgctgcatttcacatggtacctggaacccaacagttcatggatatccactgatatccatgatgctgggtgccccagcgcacacgggatggagaggtgagaactaatgcctagcttgaggggtctgcagtccagtagggcaggcagtcaggtccatgtgcactgcaatgccaggtggagaaatcacagagaggtaaaatggaggccagtgccatttcagaggggaggctcaggaaggcttcttgcttacaggaatgaaggctgggggcattttgctggggggagatgaggcagcctctggaatggctcagggattcagccctccctgccgctgcctgctgaagctggtgactacggggtcgccctttgctcacgtctctctggcccactcatgatggagaagtgtggtcagaggggagcaatgggctttgctgcttatgagcacagaggaattcagtccccaggcagccctgcctctgactccaagagggtgaagtccacagaagtgagctcctgccttagggcctcatttgctcttcatccagggaactgagcacagggggcctccaggagaccctagatgtgctcgtactccctcggcctgggatttcagagctggaaatatagaaaatatctagcccaaagccttcattttaacagatggggaaagtgagcccccaagatgggaaagaaccacacagctaagggagggcctggggagccccaccctagcccttgctgccacaccacattgcctcaacaaccggccccagagtgcccaggcactcctgaggtagcttctggaaatggggacaagtcccctcgaaggaaaggaaatgactagagtagaatgacagctagcagatctcttccctcctgctcccagcgcacacaaacccgccctccccttggtgttggcggtccctgtggccttcactttgttcactacctgtcagcccagcctgggtgcacagtagctgcaactccccattggtgctacctggctctcctgtctctgcagctctacaggtgaggcccagcagagggagtagggctcgccatgtttctggtgagccaatttggctgatcttgggtgtctgaacagctattgggtccaccccagtccctttcagctgctgcttaatgccctgctctctccctggcccaccttatagagagcccaaagagctcctgtaagagggagaactctatctgtggtttataatcttgcacgaggcaccagagtctccctgggtcttgtgatgaactacatttatcccctttcctgccccaaccacaaactctttccttcaaagagggcctgcctggctccctccacccaactgcacccatgagactcggtccaagagtccattccccaggtgggagccaactgtcagggaggtctttcccaccaaacatctttcagctgctgggaggtgaccatagggctctgcttttaaagatatggctgcttcaaaggccagagtcacaggaaggacttcttccagggagattagtggtgatggagaggagagttaaaatgacctcatgtccttcttgtccacggttttgttgagttttcactcttctaatgcaagggtctcacactgtgaaccacttaggatgtgatcactttcaggtggccaggaatgttgaatgtctttggctcagttcatttaaaaaagatatctatttgaaagttctcagagttgtacatatgtttcacagtacaggatctgtacataaaagtttctttcctaaaccattcaccaagagccaatatctaggcattttcttggtagcacaaattttcttattgcttagaaaattgtcctccttgttatttctgtttgtaagacttaagtgagttaggtctttaaggaaagcaacgctcctctgaaatgcttgtcttttttctgttgccgaaatagctggtcctttttcgggagttagatgtatagagtgtttgtatgtaaacatttcttgtaggcatcaccatgaacaaagatatattttctatttatttattatatgtgcacttcaagaagtcactgtcagagaaataaagaattgtcttaaatgtcatgattggagatgtcctttgcattgcttggaaggggtgtacctagagccaaggaaattggctctggtttggaaaaattttgctgttattatagtaaacatacaaaggatgtcatcatcaagtct

SEQ ID NO: 735722 - DNA, 4164 bp, Homo sapiens
gagctagcgctcaagcagagcccagcgcggtgctatcggacagagcctggcgagcgcaagcggcgcggggagccagcggggctgagcgcggccagggtctgaacccagatttcccagactagctaccactccgcttgcccacgccccgggagctcgcggcgcctggcggtcagcgaccagacgtccggggccgctgcgctcctggcccgcgaggcgtgacactgtctcggctacagacccagagggagcacactgccaggatgggagctgctgggaggcaggacttcctcttcaaggccatgctgaccatcagctggctcactctgacctgcttccctggggccacatccacagtggctgctgggtgccctgaccagagccctgagttgcaaccctggaaccctggccatgaccaagaccaccatgtgcatatcggccagggcaagacactgctgctcacctcttctgccacggtctattccatccacatctcagagggaggcaagctggtcattaaagaccacgacgagccgattgttttgcgaacccggcacatcctgattgacaacggaggagagctgcatgctgggagtgccctctgccctttccagggcaatttcaccatcattttgtatggaagggctgatgaaggtattcagccggatccttactatggtctgaagtacattggggttggtaaaggaggcgctcttgagttgcatggacagaaaaagctctcctggacatttctgaacaagacccttcacccaggtggcatggcagaaggaggctatttttttgaaaggagctggggccaccgtggagttattgttcatgtcatcgaccccaaatcaggcacagtcatccattctgaccggtttgacacctatagatccaagaaagagagtgaacgtctggtccagtatttgaacgcggtgcccgatggcaggatcctttctgttgcagtgaatgatgaaggttctcgaaatctggatgacatggccaggaaggcgatgaccaaattgggaagcaaacacttcctgcaccttggatttagacacccttggagttttctaactgtgaaaggaaatccatcatcttcagtggaagaccatattgaatatcatggacatcgaggctctgctgctgcccgggtattcaaattgttccagacagagcatggcgaatatttcaatgtttctttgtccagtgagtgggttcaagacgtggagtggacggagtggttcgatcatgataaagtatctcagactaaaggtggggagaaaatttcagacctctggaaagctcacccaggaaaaatatgcaatcgtcccattgatatacaggccactacaatggatggagttaacctcagcaccgaggttgtctacaaaaaaggccaggattataggtttgcttgctacgaccggggcagagcctgccggagctaccgtgtacggttcctctgtgggaagcctggtaagcagccccttgtcggggacacagatgcaactatggctcggttccttgaactggcagctatgcaggcaacttccagacctctcagtgagacagtgctcccaaaggagagcacttttgtgacacgggagcagtgggaggatccttggagttggcaggagacagcagaaccccaccctgcccataagcctttcaggaaggggaagggcctggtccaaggcagtcaaggtacaaatggacagagctgccctcccctgcagagatgtgcagttctttgcctctttgggtgctattattttaaatccagtacctaaggtgcttgttagaagagattggaaatggtcgggttgttctcggaggcacttggccatctccagaaggcagtcattaggaatgaaagtttagggggagaagtttatggctaccgaaaataatagttgagaggaactatatttgttttacatcttgagcaaagtgggtggggtgaggcagccacatttaactccagctaagaagttagtggaaaattcccccgcccagagctaatgaatggctcttttctggtagggtttttgttgacttcaaaaacctttaccaagagtgggatggagcaagccagtgatctgggttttggataggcaaacctggcatttagttatttagggaggggaagggaaaaaagaggtagccaaaagtttgccaagagcaaagggctctatctcagtctttcctgttttgggttacagtgaggcccaaactcacagtcaccattgacaccaatgtgaacagcaccattctgaacttggaggataatgtacagtcatggaaacctggagataccctggtcattgccagtactgattactccatgtaccaggcagaagagttccaggtgcttccctgcagatcctgcgcccccaaccaggtcaaagtggcagggaaaccaatgtacctgcacatcggggaggagatagacggcgtggacatgcgggcggaggttgggcttctgagccggaacatcatagtgatgggggagatggaggacaaatgctacccctacagaaaccacatctgcaatttctttgacttcgatacctttgggggccacatcaagtttgctctgggatttaaggcagcacacttggagggcacggagctgaagcatatgggacagcagctggtgggtcagtacccgattcacttccacctggccggtgatgtagacgaaaggggaggttatgacccacccacatacatcagggacctctccatccatcatacattctctcgctgcgtcacagtccatggctccaatggcttgttgatcaaggacgttgtgggctataactctttgggccactgcttcttcacggaagatgggccggaggaacgcaacacttttgaccactgtcttggcctccttgtcaagtctggaaccctcctcccctcggaccgtgacagcaagatgtgcaagatgatcacagaggactcctacccagggtacatccccaagcccaggcaagactgcaatgctgtgtccaccttctggatggccaatcccaacaacaacctcatcaactgtgccgctgcaggatctgaggaaactggattttggtttatttttcaccacgtaccaacgggcccctccgtgggaatgtactccccaggttattcagagcacattccactgggaaaattctataacaaccgagcacattccaactaccgggctggcatgatcatagacaacggagtcaaaaccaccgaggcctctgccaaggacaagcggccgttcctctcaatcatctctgccagatacagccctcaccaggacgccgacccgctgaagccccgggagccggccatcatcagacacttcattgcctacaagaaccaggaccacggggcctggctgcgcggcggggatgtgtggctggacagctgccggtttgctgacaatggcattggcctgaccctggccagtggtggaaccttcccgtatgacgacggctccaagcaagagataaagaacagcttgtttgttggcgagagtggcaacgtggggacggaaatgatggacaataggatctggggccctggcggcttggaccatagcggaaggaccctccctataggccagtaggtttgcaaccatgtagctccttattctgagtggcttaacctaagtggctgtgatggaagggaaaaagttaatgggtagtttctacctgttgactatgaattcttctaccagccagaggaatcactgaggtgactgagactaacaattaagggatgaaatctggaatggggagagagaagtcaaaaagtggtgttgaatatgagtcaacagggtgacgtggccatcaaaatgcgtaatgcattcctgggctatgttaatgggaatttagtgtgtctgggatcagggactgtgagtccttttctctgacagcactctcacttggagtgtagcatccactcctgaggatggcagagcaatagagtcaggccgaagcacacttaaaggagaataaccaggagggtgacaaaagccgaagctatgtcacatgcaggttggggtcttcaaccagaagacaggatcatcactttggggacaacatgggggatattgttacatgttctcagagctgctgtgcacataggggatgagactcattctacacg

SEQ ID NO: 735723 - DNA, 7950 bp, Homo sapiens
gagctagcgctcaagcagagcccagcgcggtgctatcggacagagcctggcgagcgcaagcggcgcggggagccagcggggctgagcgcggccagggtctgaacccagatttcccagactagctaccactccgcttgcccacgccccgggagctcgcggcgcctggcggtcagcgaccagacgtccggggccgctgcgctcctggcccgcgaggcgtgacactgtctcggctacagacccagagggagcacactgccaggatgggagctgctgggaggcaggacttcctcttcaaggccatgctgaccatcagctggctcactctgacctgcttccctggggccacatccacagtggctgctgggtgccctgaccagagccctgagttgcaaccctggaaccctggccatgaccaagaccaccatgtgcatatcggccagggcaagacactgctgctcacctcttctgccacggtctattccatccacatctcagagggaggcaagctggtcattaaagaccacgacgagccgattgttttgcgaacccggcacatcctgattgacaacggaggagagctgcatgctgggagtgccctctgccctttccagggcaatttcaccatcattttgtatggaagggctgatgaaggtattcagccggatccttactatggtctgaagtacattggggttggtaaaggaggcgctcttgagttgcatggacagaaaaagctctcctggacatttctgaacaagacccttcacccaggtggcatggcagaaggaggctatttttttgaaaggagctggggccaccgtggagttattgttcatgtcatcgaccccaaatcaggcacagtcatccattctgaccggtttgacacctatagatccaagaaagagagtgaacgtctggtccagtatttgaacgcggtgcccgatggcaggatcctttctgttgcagtgaatgatgaaggttctcgaaatctggatgacatggccaggaaggcgatgaccaaattgggaagcaaacacttcctgcaccttggatttagacacccttggagttttctaactgtgaaaggaaatccatcatcttcagtggaagaccatattgaatatcatggacatcgaggctctgctgctgcccgggtattcaaattgttccagacagagcatggcgaatatttcaatgtttctttgtccagtgagtgggttcaagacgtggagtggacggagtggttcgatcatgataaagtatctcagactaaaggtggggagaaaatttcagacctctggaaagctcacccaggaaaaatatgcaatcgtcccattgatatacaggccactacaatggatggagttaacctcagcaccgaggttgtctacaaaaaaggccaggattataggtttgcttgctacgaccggggcagagcctgccggagctaccgtgtacggttcctctgtgggaagcctggtaagcagccccttgtcggggacacagatgcaactatggctcggttccttgaactggcagctatgcaggcaacttccagacctctcagtgagacagtgctcccaaaggagagcacttttgtgacacgggagcagtgggaggatccttggagttggcaggagacagcagaaccccaccctgcccataagcctttcaggaaggggaagggcctggtccaaggcagtcaaggtacaaatggacagagctgccctcccctgcagagatgtgcagttctttgcctctttgggtgctattattttaaatccagtacctaaggtgcttgttagaagagattggaaatggtcgggttgttctcggaggcacttggccatctccagaaggcagtcattaggaatgaaagtttagggggagaagtttatggctaccgaaaataatagttgagaggaactatatttgttttacatcttgagcaaagtgggtggggtgaggcagccacatttaactccagctaagaagttagtggaaaattcccccgcccagagctaatgaatggctcttttctggtagggtttttgttgacttcaaaaacctttaccaagagtgggatggagcaagccagtgatctgggttttggataggcaaacctggcatttagttatttagggaggggaagggaaaaaagaggtagccaaaagtttgccaagagcaaagggctctatctcagtctttcctgttttgggttacagtgaggcccaaactcacagtcaccattgacaccaatgtgaacagcaccattctgaacttggaggataatgtacagtcatggaaacctggagataccctggtcattgccagtactgattactccatgtaccaggcagaagagttccaggtgcttccctgcagatcctgcgcccccaaccaggtcaaagtggcagggaaaccaatgtacctgcacatcggggaggagatagacggcgtggacatgcgggcggaggttgggcttctgagccggaacatcatagtgatgggggagatggaggacaaatgctacccctacagaaaccacatctgcaatttctttgacttcgatacctttgggggccacatcaagtttgctctgggatttaaggcagcacacttggagggcacggagctgaagcatatgggacagcagctggtgggtcagtacccgattcacttccacctggccggtgatgtagacgaaaggggaggttatgacccacccacatacatcagggacctctccatccatcatacattctctcgctgcgtcacagtccatggctccaatggcttgttgatcaaggacgttgtgggctataactctttgggccactgcttcttcacggaagatgggccggaggaacgcaacacttttgaccactgtcttggcctccttgtcaagtctggaaccctcctcccctcggaccgtgacagcaagatgtgcaagatgatcacagaggactcctacccagggtacatccccaagcccaggcaagactgcaatgctgtgtccaccttctggatggccaatcccaacaacaacctcatcaactgtgccgctgcaggatctgaggaaactggattttggtttatttttcaccacgtaccaacgggcccctccgtgggaatgtactccccaggttattcagagcacattccactgggaaaattctataacaaccgagcacattccaactaccgggctggcatgatcatagacaacggagtcaaaaccaccgaggcctctgccaaggacaagcggccgttcctctcaatcatctctgccagatacagccctcaccaggacgccgacccgctgaagccccgggagccggccatcatcagacacttcattgcctacaagaaccaggaccacggggcctggctgcgcggcggggatgtgtggctggacagctgccggtttgctgacaatggcattggcctgaccctggccagtggtggaaccttcccgtatgacgacggctccaagcaagagataaagaacagcttgtttgttggcgagagtggcaacgtggggacggaaatgatggacaataggatctggggccctggcggcttggaccatagcggaaggaccctccctataggccagaattttccaattagaggaattcagttatatgatggccccatcaacatccaaaactgcactttccgaaagtttgtggccctggagggccggcacaccagcgccctggccttccgcctgaataatgcctggcagagctgcccccataacaacgtgaccggcattgcctttgaggacgttccgattacttccagagtgttcttcggagagcctgggccctggttcaaccagctggacatggatggggataagacatctgtgttccatgacgtcgacggctccgtgtccgagtaccctggctcctacctcacgaagaatgacaactggctggtccggcacccagactgcatcaatgttcccgactggagaggggccatttgcagtgggtgctatgcacagatgtacattcaagcctacaagaccagtaacctgcgaatgaagatcatcaagaatgacttccccagccaccctctttacctggagggggcgctcaccaggagcacccattaccagcaataccaaccggttgtcaccctgcagaagggctacaccatccactgggaccagacggcccccgccgaactcgccatctggctcatcaacttcaacaagggcgactggatccgagtggggctctgctacccgcgaggcaccacattctccatcctctcggatgttcacaatcgcctgctgaagcaaacgtccaagacgggcgtcttcgtgaggaccttgcagatggacaaagtggagcagagctaccctggcaggagccactactactgggacgaggactcagggctgttgttcctgaagctgaaagctcagaacgagagagagaagtttgctttctgctccatgaaaggctgtgagaggataaagattaaagctctgattccaaagaacgcaggcgtcagtgactgcacagccacagcttaccccaagttcaccgagagggctgtcgtagacgtgccgatgcccaagaagctctttggttctcagctgaaaacaaaggaccatttcttggaggtgaagatggagagttccaagcagcacttcttccacctctggaacgacttcgcttacattgaagtggatgggaagaagtaccccagttcggaggatggcatccaggtggtggtgattgacgggaaccaagggcgcgtggtgagccacacgagcttcaggaactccattctgcaaggcataccatggcagcttttcaactatgtggcgaccatccctgacaattccatagtgcttatggcatcaaagggaagatacgtctccagaggcccatggaccagagtgctggaaaagcttggggcagacaggggtctcaagttgaaagagcaaatggcattcgttggcttcaaaggcagcttccggcccatctgggtgacactggacactgaggatcacaaagccaaaatcttccaagttgtgcccatccctgtggtgaagaagaagaagttgtgaggacagctgccgcccggtgccacctcgtggtagactatgacggtgactcttggcagcagaccagtgggggatggctgggtcccccagcccctgccagcagctgcctgggaaggccgtgtttcagccctgatgggccaagggaaggctatcagagaccctggtgctgccacctgcccctactcaagtgtctacctggagcccctggggcggtgctggccaatgctggaaacattcactttcctgcagcctcttgggtgcttctctcctatctgtgcctcttcagtgggggtttggggaccatatcaggagacctgggttgtgctgacagcaaagatccactttggcaggagccctgacccagctaggaggtagtctggagggctggtcattcacagatccccatggtcttcagcagacaagtgagggtggtaaatgtaggagaaagagccttggccttaaggaaatctttactcctgtaagcaagagccaacctcacaggattaggagctggggtagaactggctatccttggggaagaggcaagccctgcctctggccgtgtccacctttcaggagactttgagtggcaggtttggacttggactagatgactctcaaaggcccttttagttctgagattccagaaatctgctgcatttcacatggtacctggaacccaacagttcatggatatccactgatatccatgatgctgggtgccccagcgcacacgggatggagaggtgagaactaatgcctagcttgaggggtctgcagtccagtagggcaggcagtcaggtccatgtgcactgcaatgccaggtggagaaatcacagagaggtaaaatggaggccagtgccatttcagaggggaggctcaggaaggcttcttgcttacaggaatgaaggctgggggcattttgctggggggagatgaggcagcctctggaatggctcagggattcagccctccctgccgctgcctgctgaagctggtgactacggggtcgccctttgctcacgtctctctggcccactcatgatggagaagtgtggtcagaggggagcaatgggctttgctgcttatgagcacagaggaattcagtccccaggcagccctgcctctgactccaagagggtgaagtccacagaagtgagctcctgccttagggcctcatttgctcttcatccagggaactgagcacagggggcctccaggagaccctagatgtgctcgtactccctcggcctgggatttcagagctggaaatatagaaaatatctagcccaaagccttcattttaacagatggggaaagtgagcccccaagatgggaaagaaccacacagctaagggagggcctggggagccccaccctagcccttgctgccacaccacattgcctcaacaaccggccccagagtgcccaggcactcctgaggtagcttctggaaatggggacaagtcccctcgaaggaaaggaaatgactagagtagaatgacagctagcagatctcttccctcctgctcccagcgcacacaaacccgccctccccttggtgttggcggtccctgtggccttcactttgttcactacctgtcagcccagcctgggtgcacagtagctgcaactccccattggtgctacctggctctcctgtctctgcagctctacaggtgaggcccagcagagggagtagggctcgccatgtttctggtgagccaatttggctgatcttgggtgtctgaacagctattgggtccaccccagtccctttcagctgctgcttaatgccctgctctctccctggcccaccttatagagagcccaaagagctcctgtaagagggagaactctatctgtggtttataatcttgcacgaggcaccagagtctccctgggtcttgtgatgaactacatttatcccctttcctgccccaaccacaaactctttccttcaaagagggcctgcctggctccctccacccaactgcacccatgagactcggtccaagagtccattccccaggtgggagccaactgtcagggaggtctttcccaccaaacatctttcagctgctgggaggtgaccatagggctctgcttttaaagatatggctgcttcaaaggccagagtcacaggaaggacttcttccagggagattagtggtgatggagaggagagttaaaatgacctcatgtccttcttgtccacggttttgttgagttttcactcttctaatgcaagggtctcacactgtgaaccacttaggatgtgatcactttcaggtggccaggaatgttgaatgtctttggctcagttcatttaaaaaagatatctatttgaaagttctcagagttgtacatatgtttcacagtacaggatctgtacataaaagtttctttcctaaaccattcaccaagagccaatatctaggcattttcttggtagcacaaattttcttattgcttagaaaattgtcctccttgttatttctgtttgtaagacttaagtgagttaggtctttaaggaaagcaacgctcctctgaaatgcttgtcttttttctgttgccgaaatagctggtcctttttcgggagttagatgtatagagtgtttgtatgtaaacatttcttgtaggcatcaccatgaacaaagatatattttctatttatttattatatgtgcacttcaagaagtcactgtcagagaaataaagaattgtcttaaatgtcatgattggagatgtcctttgcattgcttggaaggggtgtacctagagccaaggaaattggctctggtttggaaaaattttgctgttattatagtaaacatacaaaggatgtcatcatcaagtct

SEQ ID NO: 735724 - DNA, 6475 bp, Homo sapiens
gagctagcgctcaagcagagcccagcgcggtgctatcggacagagcctggcgagcgcaagcggcgcggggagccagcggggctgagcgcggccagggtctgaacccagatttcccagactagctaccactccgcttgcccacgccccgggagctcgcggcgcctggcggtcagcgaccagacgtccggggccgctgcgctcctggcccgcgaggcgtgacactgtctcggctacagacccagagggagcacactgccaggatgggagctgctgggaggcaggacttcctcttcaaggccatgctgaccatcagctggctcactctgacctgcttccctggggccacatccacagtggctgctgggtgccctgaccagagccctgagttgcaaccctggaaccctggccatgaccaagaccaccatgtgcatatcggccagggcaagacactgctgctcacctcttctgccacggtctattccatccacatctcagagggaggcaagctggtcattaaagaccacgacgagccgattgttttgcgaacccggcacatcctgattgacaacggaggagagctgcatgctgggagtgccctctgccctttccagggcaatttcaccatcattttgtatggaagggctgatgaaggtattcagccggatccttactatggtctgaagtacattggggttggtaaaggaggcgctcttgagttgcatggacagaaaaagctctcctggacatttctgaacaagacccttcacccaggtggcatggcagaaggaggctatttttttgaaaggagctggggccaccgtggagttattgttcatgtcatcgaccccaaatcaggcacagtcatccattctgaccggtttgacacctatagatccaagaaagagagtgaacgtctggtccagtatttgaacgcggtgcccgatggcaggatcctttctgttgcagtgaatgatgaaggttctcgaaatctggatgacatggccaggaaggcgatgaccaaattgggaagcaaacacttcctgcaccttggatttagacacccttggagttttctaactgtgaaaggaaatccatcatcttcagtggaagaccatattgaatatcatggacatcgaggctctgctgctgcccgggtattcaaattgttccagacagagcatggcgaatatttcaatgtttctttgtccagtgagtgggttcaagacgtggagtggacggagtggttcgatcatgataaagtatctcagactaaaggtggggagaaaatttcagacctctggaaagctcacccaggaaaaatatgcaatcgtcccattgatatacaggccactacaatggatggagttaacctcagcaccgaggttgtctacaaaaaaggccaggattataggtttgcttgctacgaccggggcagagcctgccggagctaccgtgtacggttcctctgtgggaagcctggtaagcagccccttgtcggggacacagatgcaactatggctcggttccttgaactggcagctatgcaggcaacttccagacctctcagtgagacagtgctcccaaaggagagcacttttgtgacacgggagcagtgggaggatccttggagttggcaggagacagcagaaccccaccctgcccataagcctttcaggaaggggaagggcctggtccaaggcagtcaaggtacaaatggacagagctgccctcccctgcagagatgtgcagttctttgcctctttgggtgctattattttaaatccagtacctaaggtgcttgttagaagagattggaaatggtcgggttgttctcggaggcacttggccatctccagaaggcagtcattaggaatgaaagtttagggggagaagtttatggctaccgaaaataatagttgagaggaactatatttgttttacatcttgagcaaagtgggtggggtgaggcagccacatttaactccagctaagaagttagtggaaaattcccccgcccagagctaatgaatggctcttttctggtagggtttttgttgacttcaaaaacctttaccaagagtgggatggagcaagccagtgatctgggttttggataggcaaacctggcatttagttatttagggaggggaagggaaaaaagaggtagccaaaagtttgccaagagcaaagggctctatctcagtctttcctgttttgggttacagtgaggcccaaactcacagtcaccattgacaccaatgtgaacagcaccattctgaacttggaggataatgtacagtcatggaaacctggagataccctggtcattgccagtactgattactccatgtaccaggcagaagagttccaggtgcttccctgcagatcctgcgcccccaaccaggtcaaagtggcagggaaaccaatgtacctgcacatcggggaggagatagacggcgtggacatgcgggcggaggttgggcttctgagccggaacatcatagtgatgggggagatggaggacaaatgctacccctacagaaaccacatctgcaatttctttgacttcgatacctttgggggccacatcaagtttgctctgggatttaaggcagcacacttggagggcacggagctgaagcatatgggacagcagctggtgggtcagtacccgattcacttccacctggccggtgatgtagacgaaaggggaggttatgacccacccacatacatcagggacctctccatccatcatacattctctcgctgcgtcacagtccatggctccaatggcttgttgatcaaggacgttgtgggctataactctttgggccactgcttcttcacggaagatgggccggaggaacgcaacacttttgaccactgtcttggcctccttgtcaagtctggaaccctcctcccctcggaccgtgacagcaagatgtgcaagatgatcacagaggactcctacccagggtacatccccaagcccaggcaagactgcaatgctgtgtccaccttctggatggccaatcccaacaacaacctcatcaactgtgccgctgcaggatctgaggaaactggattttggtttatttttcaccacgtaccaacgggcccctccgtgggaatgtactccccaggttattcagagcacattccactgggaaaattctataacaaccgagcacattccaactaccgggctggcatgatcatagacaacggagtcaaaaccaccgaggcctctgccaaggacaagcggccgttcctctcaatcatctctgccagatacagccctcaccaggacgccgacccgctgaagccccgggagccggccatcatcagacacttcattgcctacaagaaccaggaccacggggcctggctgcgcggcggggatgtgtggctggacagctgccggtttgctgacaatggcattggcctgaccctggccagtggtggaaccttcccgtatgacgacggctccaagcaagagataaagaacagcttgtttgttggcgagagtggcaacgtggggacggaaatgatggacaataggatctggggccctggcggcttggaccatagcggaaggaccctccctataggccagaattttccaattagaggaattcagttatatgatggccccatcaacatccaaaactgcactttccgaaagtttgtggccctggagggccggcacaccagcgccctggccttccgcctgaataatgcctggcagagctgcccccataacaacgtgaccggcattgcctttgaggacgttccgattacttccagagtgttcttcggagagcctgggccctggttcaaccagctggacatggatggggataagacatctgtgttccatgacgtcgacggctccgtgtccgagtaccctggctcctacctcacgaagaatgacaactggctggtccggcacccagactgcatcaatgttcccgactggagaggggccatttgcagtgggtgctatgcacagatgtacattcaagcctacaagaccagtaacctgcgaatgaagatcatcaagaatgacttccccagccaccctctttacctggagggggcgctcaccaggagcacccattaccagcaataccaaccggttgtcaccctgcagaagggctacaccatccactgggaccagacggcccccgccgaactcgccatctggctcatcaacttcaacaagggcgactggatccgagtggggctctgctacccgcgaggcaccacattctccatcctctcggatgttcacaatcgcctgctgaagcaaacgtccaagacgggcgtcttcgtgaggaccttgcagatggacaaagtggagcagagctaccctggcaggagccactactactgggacgaggactcagggctgttgttcctgaagctgaaagctcagaacgagagagagaagtttgctttctgctccatgaaaggctgtgagaggataaagattaaagctctgattccaaagaacgcaggcgtcagtgactgcacagccacagcttaccccaagttcaccgagagggctgtcgtagacgtgccgatgcccaagaagctctttggttctcagctgaaaacaaaggaccatttcttggaggtgaagatggagagttccaagcagcacttcttccacctctggaacgacttcgcttacattgaagtggatgggaagaagtaccccagttcggaggatggcatccaggtggtggtgattgacgggaaccaagggcgcgtggtgagccacacgagcttcaggaactccattctgcaaggcataccatggcagcttttcaactatgtggcgaccatccctgacaattccatagtgcttatggcatcaaagggaagatacgtctccagaggcccatggaccagagtgctggaaaagcttggggcagacaggggtctcaagttgaaagagcaaatggcattcgttggcttcaaaggcagcttccggcccatctgggtgacactggacactgaggatcacaaagccaaaatcttccaagttgtgcccatccctgtggtgaagaagaagaagttgtgaggacagctgccgcccggtgccacctcgtggtagactatgacggtgactcttggcagcagaccagtgggggatggctgggtcccccagcccctgccagcagctgcctgggaaggccgtgtttcagccctgatgggccaagggaaggctatcagagaccctggtgctgccacctgcccctactcaagtgtctacctggagcccctggggcggtgctggccaatgctggaaacattcactttcctgcagcctcttgggtgcttctctcctatctgtgcctcttcagtgggggtttggggaccatatcaggagacctgggttgtgctgacagcaaagatccactttggcaggagccctgacccagctaggaggtagtctggagggctggtcattcacagatccccatggtcttcagcagacaagtgagggtggtaaatgtaggagaaagagccttggccttaaggaaatctttactcctgtaagcaagagccaacctcacaggattaggagctggggtagaactggctatccttggggaagaggcaagccctgcctctggccgtgtccacctttcaggagactttgagtggcaggtttggacttggactagatgactctcaaaggcccttttagttctgagattccagaaatctgctgcatttcacatggtacctggaacccaacagttcatggatatccactgatatccatgatgctgggtgccccagcgcacacgggatggagaggtgagaactaatgcctagcttgaggggtctgcagtccagtagggcaggcagtcaggtccatgtgcactgcaatgccaggtggagaaatcacagagaggtaaaatggaggccagtgccatttcagaggggaggctcaggaaggcttcttgcttacaggaatgaaggctgggggcattttgctggggggagatgaggcagcctctggaatggctcagggattcagccctccctgccgctgcctgctgaagctggtgactacggggtcgccctttgctcacgtctctctggcccactcatgatggagaagtgtggtcagaggggagcaatgggctttgctgcttatgagcacagaggaattcagtccccaggcagccctgcctctgactccaagagggtgaagtccacagaagtgagctcctgccttagggcctcatttgctcttcatccagggaactgagcacagggggcctccaggagaccctagatgtgctcgtactccctcggcctgggatttcagagctggaaatatagaaaatatctagcccaaagccttcattttaataaagcagcaggtggtgagccacctgatcgagaagctgccacagcagcgtgggtgagaagtcgacccccagccgaggtg

SEQ ID NO: 735725 - DNA, 7857 bp, Homo sapiens
gagctagcgctcaagcagagcccagcgcggtgctatcggacagagcctggcgagcgcaagcggcgcggggagccagcggggctgagcgcggccagggtctgaacccagatttcccagactagctaccactccgcttgcccacgccccgggagctcgcggcgcctggcggtcagcgaccagacgtccggggccgctgcgctcctggcccgcgaggcgtgacactgtctcggctacagacccagagggagcacactgccaggatgggagctgctgggaggcaggacttcctcttcaaggccatgctgaccatcagctggctcactctgacctgcttccctggggccacatccacagtggctgctgggtgccctgaccagagccctgagttgcaaccctggaaccctggccatgaccaagaccaccatgtgcatatcggccagggcaagacactgctgctcacctcttctgccacggtctattccatccacatctcagagggaggcaagctggtcattaaagaccacgacgagccgattgttttgcgaacccggcacatcctgattgacaacggaggagagctgcatgctgggagtgccctctgccctttccagggcaatttcaccatcattttgtatggaagggctgatgaaggtattcagccggatccttactatggtctgaagtacattggggttggtaaaggaggcgctcttgagttgcatggacagaaaaagctctcctggacatttctgaacaagacccttcacccaggtggcatggcagaaggaggctatttttttgaaaggagctggggccaccgtggagttattgttcatgtcatcgaccccaaatcaggcacagtcatccattctgaccggtttgacacctatagatccaagaaagagagtgaacgtctggtccagtatttgaacgcggtgcccgatggcaggatcctttctgttgcagtgaatgatgaaggttctcgaaatctggatgacatggccaggaaggcgatgaccaaattgggaagcaaacacttcctgcaccttggatttagacacccttggagttttctaactgtgaaaggaaatccatcatcttcagtggaagaccatattgaatatcatggacatcgaggctctgctgctgcccgggtattcaaattgttccagacagagcatggcgaatatttcaatgtttctttgtccagtgagtgggttcaagacgtggagtggacggagtggttcgatcatgataaagtatctcagactaaaggtggggagaaaatttcagacctctggaaagctcacccaggaaaaatatgcaatcgtcccattgatatacaggccactacaatggatggagttaacctcagcaccgaggttgtctacaaaaaaggccaggattataggtttgcttgctacgaccggggcagagcctgccggagctaccgtgtacggttcctctgtgggaagcctggtaagcagccccttgtcggggacacagatgcaactatggctcggttccttgaactggcagctatgcaggcaacttccagacctctcagtgagacagtgctcccaaaggagagcacttttgtgacacgggagcagtgggaggatccttggagttggcaggagacagcagaaccccaccctgcccataagcctttcaggaaggggaagggcctggtccaaggcagtcaaggtacaaatggacagagctgccctcccctgcagagatgtgcagttctttgcctctttgggtgctattattttaaatccagtacctaaggtgcttgttagaagagattggaaatggtcgggttgttctcggaggcacttggccatctccagaaggcagtcattaggaatgaaagtttagggggagaagtttatggctaccgaaaataatagttgagaggaactatatttgttttacatcttgagcaaagtgggtggggtgaggcagccacatttaactccagctaagaagttagtggaaaattcccccgcccagagctaatgaatggctcttttctggtagggtttttgttgacttcaaaaacctttaccaagagtgggatggagcaagccagtgatctgggttttggataggcaaacctggcatttagttatttagggaggggaagggaaaaaagaggtagccaaaagtttgccaagagcaaagggctctatctcagtctttcctgttttgggttacagtgaggcccaaactcacagtcaccattgacaccaatgtgaacagcaccattctgaacttggaggataatgtacagtcatggaaacctggagataccctggtcattgccagtactgattactccatgtaccaggcagaagagttccaggtgcttccctgcagatcctgcgcccccaaccaggtcaaagtggcagggaaaccaatgtacctgcacatcggggaggagatagacggcgtggacatgcgggcggaggttgggcttctgagccggaacatcatagtgatgggggagatggaggacaaatgctacccctacagaaaccacatctgcaatttctttgacttcgatacctttgggggccacatcaagtttgctctgggatttaaggcagcacacttggagggcacggagctgaagcatatgggacagcagctggtgggtcagtacccgattcacttccacctggccggtgatgtagacgaaaggggaggttatgacccacccacatacatcagggacctctccatccatcatacattctctcgctgcgtcacagtccatggctccaatggcttgttgatcaaggacgttgtgggctataactctttgggccactgcttcttcacggaagatgggccggaggaacgcaacacttttgaccactgtcttggcctccttgtcaagtctggaaccctcctcccctcggaccgtgacagcaagatgtgcaagatgatcacagaggactcctacccagggtacatccccaagcccaggcaagactgcaatgctgtgtccaccttctggatggccaatcccaacaacaacctcatcaactgtgccgctgcaggatctgaggaaactggattttggtttatttttcaccacgtaccaacgggcccctccgtgggaatgtactccccaggttattcagagcacattccactgggaaaattctataacaaccgagcacattccaactaccgggctggcatgatcatagacaacggagtcaaaaccaccgaggcctctgccaaggacaagcggccgttcctctcaatcatctctgccagatacagccctcaccaggacgccgacccgctgaagccccgggagccggccatcatcagacacttcattgcctacaagaaccaggaccacggggcctggctgcgcggcggggatgtgtggctggacagctgccggtttgctgacaatggcattggcctgaccctggccagtggtggaaccttcccgtatgacgacggctccaagcaagagataaagaacagcttgtttgttggcgagagtggcaacgtggggacggaaatgatggacaataggatctggggccctggcggcttggaccatagcggaaggaccctccctataggccagaattttccaattagaggaattcagttatatgatggccccatcaacatccaaaactgcactttccgaaagtttgtggccctggagggccggcacaccagcgccctggccttccgcctgaataatgcctggcagagctgcccccataacaacgtgaccggcattgcctttgaggacgttccgattacttccagagtgttcttcggagagcctgggccctggttcaaccagctggacatggatggggataagacatctgtgttccatgacgtcgacggctccgtgtccgagtaccctggctcctacctcacgaagaatgacaactggctggtccggcacccagactgcatcaatgttcccgactggagaggggccatttgcagtgggtgctatgcacagatgtacattcaagcctacaagaccagtaacctgcgaatgaagatcatcaagaatgacttccccagccaccctctttacctggagggggcgctcaccaggagcacccattaccagcaataccaaccggttgtcaccctgcagaagggctacaccatccactgggaccagacggcccccgccgaactcgccatctggctcatcaacttcaacaagggcgactggatccgagtggggctctgctacccgcgaggcaccacattctccatcctctcggatgttcacaatcgcctgctgaagcaaacgtccaagacgggcgtcttcgtgaggaccttgcagatggacaaagtggagcagagctaccctggcaggagccactactactgggacgaggactcagggctgttgttcctgaagctgaaagctcagaacgagagagagaagtttgctttctgctccatgaaaggctgtgagaggataaagattaaagctctgattccaaagaacgcaggcgtcagtgactgcacagccacagcttaccccaagttcaccgagagggctgtcgtagacgtgccgatgcccaagaagctctttggttctcagctgaaaacaaaggaccatttcttggaggtgaagatggagagttccaagcagcacttcttccacctctggaacgacttcgcttacattgaagtggatgggaagaagtaccccagttcggaggatggcatccaggtggtggtgattgacgggaaccaagggcgcgtggtgagccacacgagcttcaggaactccattctgcaaggcataccatggcagcttttcaactatgtggcgaccatccctgacaattccatagtgcttatggcatcaaagggaagatacgtctccagaggcccatggaccagagtgctggaaaagcttggggcagacaggggtctcaagttgaaagagcaaatggcattcgttggcttcaaaggcagcttccggcccatctgggtgacactggacactgaggatcacaaagccaaaatcttccaagttgtgcccatccctgtggtgaagaagaagaagttgtgaggacagctgccgcccggtgccacctcgtggtagactatgacggtgactcttggcagcagaccagtgggggatggctgggtcccccagcccctgccagcagctgcctgggaaggccgtgtttcagccctgatgggccaagggaaggctatcagagaccctggtgctgccacctgcccctactcaagtgtctacctggagcccctggggcggtgctggccaatgctggaaacattcactttcctgcagcctcttgggtgcttctctcctatctgtgcctcttcagtgggggtttggggaccatatcaggagacctgggttgtgctgacagcaaagatccactttggcaggagccctgacccagctaggaggtagtctggagggctggtcattcacagatccccatggtcttcagcagacaagtgagggtggtaaatgtaggagaaagagccttggccttaaggaaatctttactcctgtaagcaagagccaacctcacaggattaggagctggggtagaactggctatccttggggaagaggcaagccctgcctctggccgtgtccacctttcaggagactttgagtggcaggtttggacttggactagatgactctcaaaggcccttttagttctgagattccagaaatctgctgcatttcacatggtacctggaacccaacagttcatggatatccactgatatccatgatgctgggtgccccagcgcacacgggatggagaggtgagaactaatgcctagcttgaggggtctgcagtccagtagggcaggcagtcaggtccatgtgcactgcaatgccaggtggagaaatcacagagaggtaaaatggaggccagtgccatttcagaggggaggctcaggaaggcttcttgcttacaggaatgaaggctgggggcattttgctggggggagatgaggcagcctctggaatggctcagggattcagccctccctgccgctgcctgctgaagctggtgactacggggtcgccctttgctcacgtctctctggcccactcatgatggagaagtgtggtcagaggggagcaatgggctttgctgcttatgagcacagaggaattcagtccccaggcagccctgcctctgactccaagagggtgaagtccacagaagtgagctcctgccttagggcctcatttgctcttcatccagggaactgagcacagggggcctccaggagaccctagatgtgctcgtactccctcggcctgggatttcagagctggaaatatagaaaatatcctagcccttgctgccacaccacattgcctcaacaaccggccccagagtgcccaggcactcctgaggtagcttctggaaatggggacaagtcccctcgaaggaaaggaaatgactagagtagaatgacagctagcagatctcttccctcctgctcccagcgcacacaaacccgccctccccttggtgttggcggtccctgtggccttcactttgttcactacctgtcagcccagcctgggtgcacagtagctgcaactccccattggtgctacctggctctcctgtctctgcagctctacaggtgaggcccagcagagggagtagggctcgccatgtttctggtgagccaatttggctgatcttgggtgtctgaacagctattgggtccaccccagtccctttcagctgctgcttaatgccctgctctctccctggcccaccttatagagagcccaaagagctcctgtaagagggagaactctatctgtggtttataatcttgcacgaggcaccagagtctccctgggtcttgtgatgaactacatttatcccctttcctgccccaaccacaaactctttccttcaaagagggcctgcctggctccctccacccaactgcacccatgagactcggtccaagagtccattccccaggtgggagccaactgtcagggaggtctttcccaccaaacatctttcagctgctgggaggtgaccatagggctctgcttttaaagatatggctgcttcaaaggccagagtcacaggaaggacttcttccagggagattagtggtgatggagaggagagttaaaatgacctcatgtccttcttgtccacggttttgttgagttttcactcttctaatgcaagggtctcacactgtgaaccacttaggatgtgatcactttcaggtggccaggaatgttgaatgtctttggctcagttcatttaaaaaagatatctatttgaaagttctcagagttgtacatatgtttcacagtacaggatctgtacataaaagtttctttcctaaaccattcaccaagagccaatatctaggcattttcttggtagcacaaattttcttattgcttagaaaattgtcctccttgttatttctgtttgtaagacttaagtgagttaggtctttaaggaaagcaacgctcctctgaaatgcttgtcttttttctgttgccgaaatagctggtcctttttcgggagttagatgtatagagtgtttgtatgtaaacatttcttgtaggcatcaccatgaacaaagatatattttctatttatttattatatgtgcacttcaagaagtcactgtcagagaaataaagaattgtcttaaatgtcatgattggagatgtcctttgcattgcttggaaggggtgtacctagagccaaggaaattggctctggtttggaaaaattttgctgttattatagtaaacatacaaaggatgtcatcatcaagtct

SEQ ID NO: 735726 - DNA, 6276 bp, Homo sapiens
gagctagcgctcaagcagagcccagcgcggtgctatcggacagagcctggcgagcgcaagcggcgcggggagccagcggggctgagcgcggccagggtctgaacccagatttcccagactagctaccactccgcttgcccacgccccgggagctcgcggcgcctggcggtcagcgaccagacgtccggggccgctgcgctcctggcccgcgaggcgtgacactgtctcggctacagacccagagggagcacactgccaggatgggagctgctgggaggcaggacttcctcttcaaggccatgctgaccatcagctggctcactctgacctgcttccctggggccacatccacagtggctgctgggtgccctgaccagagccctgagttgcaaccctggaaccctggccatgaccaagaccaccatgtgcatatcggccagggcaagacactgctgctcacctcttctgccacggtctattccatccacatctcagagggaggcaagctggtcattaaagaccacgacgagccgattgttttgcgaacccggcacatcctgattgacaacggaggagagctgcatgctgggagtgccctctgccctttccagggcaatttcaccatcattttgtatggaagggctgatgaaggtattcagccggatccttactatggtctgaagtacattggggttggtaaaggaggcgctcttgagttgcatggacagaaaaagctctcctggacatttctgaacaagacccttcacccaggtggcatggcagaaggaggctatttttttgaaaggagctggggccaccgtggagttattgttcatgtcatcgaccccaaatcaggcacagtcatccattctgaccggtttgacacctatagatccaagaaagagagtgaacgtctggtccagtatttgaacgcggtgcccgatggcaggatcctttctgttgcagtgaatgatgaaggttctcgaaatctggatgacatggccaggaaggcgatgaccaaattgggaagcaaacacttcctgcaccttggatttagacacccttggagttttctaactgtgaaaggaaatccatcatcttcagtggaagaccatattgaatatcatggacatcgaggctctgctgctgcccgggtattcaaattgttccagacagagcatggcgaatatttcaatgtttctttgtccagtgagtgggttcaagacgtggagtggacggagtggttcgatcatgataaagtatctcagactaaaggtggggagaaaatttcagacctctggaaagctcacccaggaaaaatatgcaatcgtcccattgatatacaggccactacaatggatggagttaacctcagcaccgaggttgtctacaaaaaaggccaggattataggtttgcttgctacgaccggggcagagcctgccggagctaccgtgtacggttcctctgtgggaagcctggtaagcagccccttgtcggggacacagatgcaactatggctcggttccttgaactggcagctatgcaggcaacttccagacctctcagtgagacagtgctcccaaaggagagcacttttgtgacacgggagcagtgggaggatccttggagttggcaggagacagcagaaccccaccctgcccataagcctttcaggaaggggaagggcctggtccaaggcagtcaaggtacaaatggacagagctgccctcccctgcagagatgtgcagttctttgcctctttgggtgctattattttaaatccagtacctaaggtgcttgttagaagagattggaaatggtcgggttgttctcggaggcacttggccatctccagaaggcagtcattaggaatgaaagtttagggggagaagtttatggctaccgaaaataatagttgagaggaactatatttgttttacatcttgagcaaagtgggtggggtgaggcagccacatttaactccagctaagaagttagtggaaaattcccccgcccagagctaatgaatggctcttttctggtagggtttttgttgacttcaaaaacctttaccaagagtgggatggagcaagccagtgatctgggttttggataggcaaacctggcatttagttatttagggaggggaagggaaaaaagaggtagccaaaagtttgccaagagcaaagggctctatctcagtctttcctgttttgggttacagtgaggcccaaactcacagtcaccattgacaccaatgtgaacagcaccattctgaacttggaggataatgtacagtcatggaaacctggagataccctggtcattgccagtactgattactccatgtaccaggcagaagagttccaggtgcttccctgcagatcctgcgcccccaaccaggtcaaagtggcagggaaaccaatgtacctgcacatcggggaggagatagacggcgtggacatgcgggcggaggttgggcttctgagccggaacatcatagtgatgggggagatggaggacaaatgctacccctacagaaaccacatctgcaatttctttgacttcgatacctttgggggccacatcaagtttgctctgggatttaaggcagcacacttggagggcacggagctgaagcatatgggacagcagctggtgggtcagtacccgattcacttccacctggccggtgatgtagacgaaaggggaggttatgacccacccacatacatcagggacctctccatccatcatacattctctcgctgcgtcacagtccatggctccaatggcttgttgatcaaggacgttgtgggctataactctttgggccactgcttcttcacggaagatgggccggaggaacgcaacacttttgaccactgtcttggcctccttgtcaagtctggaaccctcctcccctcggaccgtgacagcaagatgtgcaagatgatcacagaggactcctacccagggtacatccccaagcccaggcaagactgcaatgctgtgtccaccttctggatggccaatcccaacaacaacctcatcaactgtgccgctgcaggatctgaggaaactggattttggtttatttttcaccacgtaccaacgggcccctccgtgggaatgtactccccaggttattcagagcacattccactgggaaaattctataacaaccgagcacattccaactaccgggctggcatgatcatagacaacggagtcaaaaccaccgaggcctctgccaaggacaagcggccgttcctctcaatcatctctgccagatacagccctcaccaggacgccgacccgctgaagccccgggagccggccatcatcagacacttcattgcctacaagaaccaggaccacggggcctggctgcgcggcggggatgtgtggctggacagctgccggtttgctgacaatggcattggcctgaccctggccagtggtggaaccttcccgtatgacgacggctccaagcaagagataaagaacagcttgtttgttggcgagagtggcaacgtggggacggaaatgatggacaataggatctggggccctggcggcttggaccatagcggaaggaccctccctataggccagaattttccaattagaggaattcagttatatgatggccccatcaacatccaaaactgcactttccgaaagtttgtggccctggagggccggcacaccagcgccctggccttccgcctgaataatgcctggcagagctgcccccataacaacgtgaccggcattgcctttgaggacgttccgattacttccagagtgttcttcggagagcctgggccctggttcaaccagctggacatggatggggataagacatctgtgttccatgacgtcgacggctccgtgtccgagtaccctggctcctacctcacgaagaatgacaactggctggtccggcacccagactgcatcaatgttcccgactggagaggggccatttgcagtgggtgctatgcacagatgtacattcaagcctacaagaccagtaacctgcgaatgaagatcatcaagaatgacttccccagccaccctctttacctggagggggcgctcaccaggagcacccattaccagcaataccaaccggttgtcaccctgcagaagggctacaccatccactgggaccagacggcccccgccgaactcgccatctggctcatcaacttcaacaagggcgactggatccgagtggggctctgctacccgcgaggcaccacattctccatcctctcggatgttcacaatcgcctgctgaagcaaacgtccaagacgggcgtcttcgtgaggaccttgcagatggacaaagtggagcagagctaccctggcaggagccactactactgggacgaggactcagggctgttgttcctgaagctgaaagctcagaacgagagagagaagtttgctttctgctccatgaaaggctgtgagaggataaagattaaagctctgattccaaagaacgcaggcgtcagtgactgcacagccacagcttaccccaagttcaccgagagggctgtcgtagacgtgccgatgcccaagaagctctttggttctcagctgaaaacaaaggaccatttcttggaggtgaagatggagagttccaagcagcacttcttccacctctggaacgacttcgcttacattgaagtggatgggaagaagtaccccagttcggaggatggcatccaggtggtggtgattgacgggaaccaagggcgcgtggtgagccacacgagcttcaggaactccattctgcaaggcataccatggcagcttttcaactatgtggcgaccatccctgacaattccatagtgcttatggcatcaaagggaagatacgtctccagaggcccatggaccagagtgctggaaaagcttggggcagacaggggtctcaagttgaaagagcaaatggcattcgttggcttcaaaggcagcttccggcccatctgggtgacactggacactgaggatcacaaagccaaaatcttccaagttgtgcccatcccttgccttgccccaaggcggggtgtccataagagcaggtggagatggttcaaagaaagagaagatatcattcatatggctggccatgtccagaacttgctgcgtcctccacatttctaagctgtcaggaggctgtcacttcaactcccctccccgatggggaagccaggcagaagcaggactctcttttcctcccaggccctgtttggctggaggccaaacacatttgacaagagcatgggggctgaggtgggaaaaacaggtccaaatcaaactggcagacgagaggcaggcacaggtagagggcacctcaggcagcactggaaggggctcaggggtctttaacataatgaaaatgatgtatatggcatgaagagtttactcaattaagtcaagagttttaaagtcttctctgatcagaatttgctatctgatcagagcaggccacccaatcacagcaggtgcttggaggggagtggaatctcagtagagttgatgactcaccaagtgtaaatgggaaaaagcaacacagtcacatttccatgtaaggagattttatagtaaacatgaatttgtcagtgtccagtattaattagaaaacatctgtcttcttacttgaagcctattaagcagtaattctttgaccacaaactggtcatgtggcagaccctttctagaagacactagaatgtcatccggtgtgcagttgcctgagaccactcccaccccaggagctgggcaaagagctctccacgtccacctgtccccccacagcgcgtcactgctgccccatcacaggtcttctcttttattcccagctcgattttcttccttggaagaccgagatttcagatctccttccttcttttttttgcccttgtcttgctttgttttatttttctctttgcttcctcctcctttgccggggtacacctggccctccagagttacatcagcacacctgtcttgaccgaccaaaaagtccttgatctcccaggcgtagctcccatcgcgaagcatgaagatagcacggtctgatcccacaatgaaccttgggcagagagatgcaatcagtcagccagcacgtactagtaaggtgctaaggggtcagagcaattctctggcacttatcagtttatttcaaattctacatgaatatggaatgaaaaattggattttccaaagcctagcagctactgatatctcatgta

SEQ ID NO: 735727 - DNA, 6641 bp, Homo sapiens
gagctagcgctcaagcagagcccagcgcggtgctatcggacagagcctggcgagcgcaagcggcgcggggagccagcggggctgagcgcggccagggtctgaacccagatttcccagactagctaccactccgcttgcccacgccccgggagctcgcggcgcctggcggtcagcgaccagacgtccggggccgctgcgctcctggcccgcgaggcgtgacactgtctcggctacagacccagagggagcacactgccaggatgggagctgctgggaggcaggacttcctcttcaaggccatgctgaccatcagctggctcactctgacctgcttccctggggccacatccacagtggctgctgggtgccctgaccagagccctgagttgcaaccctggaaccctggccatgaccaagaccaccatgtgcatatcggccagggcaagacactgctgctcacctcttctgccacggtctattccatccacatctcagagggaggcaagctggtcattaaagaccacgacgagccgattgttttgcgaacccggcacatcctgattgacaacggaggagagctgcatgctgggagtgccctctgccctttccagggcaatttcaccatcattttgtatggaagggctgatgaaggtattcagccggatccttactatggtctgaagtacattggggttggtaaaggaggcgctcttgagttgcatggacagaaaaagctctcctggacatttctgaacaagacccttcacccaggtggcatggcagaaggaggctatttttttgaaaggagctggggccaccgtggagttattgttcatgtcatcgaccccaaatcaggcacagtcatccattctgaccggtttgacacctatagatccaagaaagagagtgaacgtctggtccagtatttgaacgcggtgcccgatggcaggatcctttctgttgcagtgaatgatgaaggttctcgaaatctggatgacatggccaggaaggcgatgaccaaattgggaagcaaacacttcctgcaccttggatttagacacccttggagttttctaactgtgaaaggaaatccatcatcttcagtggaagaccatattgaatatcatggacatcgaggctctgctgctgcccgggtattcaaattgttccagacagagcatggcgaatatttcaatgtttctttgtccagtgagtgggttcaagacgtggagtggacggagtggttcgatcatgataaagtatctcagactaaaggtggggagaaaatttcagacctctggaaagctcacccaggaaaaatatgcaatcgtcccattgatatacaggccactacaatggatggagttaacctcagcaccgaggttgtctacaaaaaaggccaggattataggtttgcttgctacgaccggggcagagcctgccggagctaccgtgtacggttcctctgtgggaagcctggtaagcagccccttgtcggggacacagatgcaactatggctcggttccttgaactggcagctatgcaggcaacttccagacctctcagtgagacagtgctcccaaaggagagcacttttgtgacacgggagcagtgggaggatccttggagttggcaggagacagcagaaccccaccctgcccataagcctttcaggaaggggaagggcctggtccaaggcagtcaaggtacaaatggacagagctgccctcccctgcagagatgtgcagttctttgcctctttgggtgctattattttaaatccagtacctaaggtgcttgttagaagagattggaaatggtcgggttgttctcggaggcacttggccatctccagaaggcagtcattaggaatgaaagtttagggggagaagtttatggctaccgaaaataatagttgagaggaactatatttgttttacatcttgagcaaagtgggtggggtgaggcagccacatttaactccagctaagaagttagtggaaaattcccccgcccagagctaatgaatggctcttttctggtagggtttttgttgacttcaaaaacctttaccaagagtgggatggagcaagccagtgatctgggttttggataggcaaacctggcatttagttatttagggaggggaagggaaaaaagaggtagccaaaagtttgccaagagcaaagggctctatctcagtctttcctgttttgggttacagtgaggcccaaactcacagtcaccattgacaccaatgtgaacagcaccattctgaacttggaggataatgtacagtcatggaaacctggagataccctggtcattgccagtactgattactccatgtaccaggcagaagagttccaggtgcttccctgcagatcctgcgcccccaaccaggtcaaagtggcagggaaaccaatgtacctgcacatcggggaggagatagacggcgtggacatgcgggcggaggttgggcttctgagccggaacatcatagtgatgggggagatggaggacaaatgctacccctacagaaaccacatctgcaatttctttgacttcgatacctttgggggccacatcaagtttgctctgggatttaaggcagcacacttggagggcacggagctgaagcatatgggacagcagctggtgggtcagtacccgattcacttccacctggccggtgatgtagacgaaaggggaggttatgacccacccacatacatcagggacctctccatccatcatacattctctcgctgcgtcacagtccatggctccaatggcttgttgatcaaggacgttgtgggctataactctttgggccactgcttcttcacggaagatgggccggaggaacgcaacacttttgaccactgtcttggcctccttgtcaagtctggaaccctcctcccctcggaccgtgacagcaagatgtgcaagatgatcacagaggactcctacccagggtacatccccaagcccaggcaagactgcaatgctgtgtccaccttctggatggccaatcccaacaacaacctcatcaactgtgccgctgcaggatctgaggaaactggattttggtttatttttcaccacgtaccaacgggcccctccgtgggaatgtactccccaggttattcagagcacattccactgggaaaattctataacaaccgagcacattccaactaccgggctggcatgatcatagacaacggagtcaaaaccaccgaggcctctgccaaggacaagcggccgttcctctcaatcatctctgccagatacagccctcaccaggacgccgacccgctgaagccccgggagccggccatcatcagacacttcattgcctacaagaaccaggaccacggggcctggctgcgcggcggggatgtgtggctggacagctgccggtttgctgacaatggcattggcctgaccctggccagtggtggaaccttcccgtatgacgacggctccaagcaagagataaagaacagcttgtttgttggcgagagtggcaacgtggggacggaaatgatggacaataggatctggggccctggcggcttggaccatagcggaaggaccctccctataggccagaattttccaattagaggaattcagttatatgatggccccatcaacatccaaaactgcactttccgaaagtttgtggccctggagggccggcacaccagcgccctggccttccgcctgaataatgcctggcagagctgcccccataacaacgtgaccggcattgcctttgaggacgttccgattacttccagagtgttcttcggagagcctgggccctggttcaaccagctggacatggatggggataagacatctgtgttccatgacgtcgacggctccgtgtccgagtaccctggctcctacctcacgaagaatgacaactggctggtccggcacccagactgcatcaatgttcccgactggagaggggccatttgcagtgggtgctatgcacagatgtacattcaagcctacaagaccagtaacctgcgaatgaagatcatcaagaatgacttccccagccaccctctttacctggagggggcgctcaccaggagcacccattaccagcaataccaaccggttgtcaccctgcagaagggctacaccatccactgggaccagacggcccccgccgaactcgccatctggctcatcaacttcaacaagggcgactggatccgagtggggctctgctacccgcgaggcaccacattctccatcctctcggatgttcacaatcgcctgctgaagcaaacgtccaagacgggcgtcttcgtgaggaccttgcagatggacaaagtggagcagagctaccctggcaggagccactactactgggacgaggactcagggctgttgttcctgaagctgaaagctcagaacgagagagagaagtttgctttctgctccatgaaaggctgtgagaggataaagattaaagctctgattccaaagaacgcaggcgtcagtgactgcacagccacagcttaccccaagttcaccgagagggctgtcgtagacgtgccgatgcccaagaagctctttggttctcagctgaaaacaaaggaccatttcttggaggtgaagatggagagttccaagcagcacttcttccacctctggaacgacttcgcttacattgaagtggatgggaagaagtaccccagttcggaggatggcatccaggtggtggtgattgacgggaaccaagggcgcgtggtgagccacacgagcttcaggaactccattctgcaaggcataccatggcagcttttcaactatgtggcgaccatccctgacaattccatagtgcttatggcatcaaagggaagatacgtctccagaggcccatggaccagagtgctggaaaagcttggggcagacaggggtctcaagttgaaagagcaaatggcattcgttggcttcaaaggcagcttccggcccatctgggtgacactggacactgaggatcacaaagccaaaatcttccaagttgtgcccatcccttgccttgccccaaggcggggtgtccataagagcaggtggagatggttcaaagaaagagaagatatcattcatatggctggccatgtccagaacttgctgcgtcctccacatttctaagctgtcaggaggctgtcacttcaactcccctccccgatggggaagccaggcagaagcaggactctcttttcctcccaggccctgtttggctggaggccaaacacatttgacaagagcatgggggctgaggtgggaaaaacaggtccaaatcaaactggcagacgagaggcaggcacaggtagagggcacctcaggcagcactggaaggggctcaggggtctttaacataatgaaaatgatgtatatggcatgaagagtttactcaattaagtcaagagttttaaagtcttctctgatcagaatttgctatctgatcagagcaggccacccaatcacagcaggtgcttggaggggagtggaatctcagtagagttgatgactcaccaagtgtaaatgggaaaaagcaacacagtcacatttccatgtaaggagattttatagtaaacatgaatttgtcagtgtccagtattaattagaaaacatctgtcttcttacttgaagcctattaagcagtaattctttgaccacaaactggtcatgtggcagaccctttctagaagacactagaatgtcatccggtgtgcagttgcctgagaccactcccaccccaggagctgggcaaagagctctccacgtccacctgtccccccacagcgcgtcactgctgccccatcacaggtcttctcttttattcccagctcgattttcttccttggaagaccgagatttcagatctccttccttcttttttttgcccttgtcttgctttgttttatttttctctttgcttcctcctcctttgccggggtacacctggccctccagagttacatcagcacacctgtcttgaccgaccaaaaagtccttgatctcccaggcgtagctcccatcgcgaagcatgaagatagcacggtctgatcccacaatgaacctctggacgtcatagttggcattgaaaaggctgccctgccagaggctcgtaatttcctctgtctccttctcagtagggcttcctgatacagtgacaaacatcatgagagtcttcccttttttcgtcattttcaatatgctttcaggcttgcttgggtctatctttgagaagtcgacaggtgctgaaggtctcttgtgctctggaagatctccttcttcaatgtcatcatctttctcccattgctccagaagacgcgccatgtctgcatcattgtaatcgcgaatatccttcttcttcttccggggaggtggggtagactcgtcgggcgtcccgggcgagccttcggccgcgcaggacccaggcggtggtagcagtagcagcagcagcagcaggtcagaggcacaaagcaggaccacggccttgcgcgcccacctggaagccgccattttcgctgcgccgcgcagcgccctagacgcgcttacccgacctgcgcgggccggaccccgccttgcacacgccttcctg

SEQ ID NO: 735728 - DNA, 6617 bp, Homo sapiens
  misc_feature (6594)..(6595): n is a, c, g, or t
gagctagcgctcaagcagagcccagcgcggtgctatcggacagagcctggcgagcgcaagcggcgcggggagccagcggggctgagcgcggccagggtctgaacccagatttcccagactagctaccactccgcttgcccacgccccgggagctcgcggcgcctggcggtcagcgaccagacgtccggggccgctgcgctcctggcccgcgaggcgtgacactgtctcggctacagacccagagggagcacactgccaggatgggagctgctgggaggcaggacttcctcttcaaggccatgctgaccatcagctggctcactctgacctgcttccctggggccacatccacagtggctgctgggtgccctgaccagagccctgagttgcaaccctggaaccctggccatgaccaagaccaccatgtgcatatcggccagggcaagacactgctgctcacctcttctgccacggtctattccatccacatctcagagggaggcaagctggtcattaaagaccacgacgagccgattgttttgcgaacccggcacatcctgattgacaacggaggagagctgcatgctgggagtgccctctgccctttccagggcaatttcaccatcattttgtatggaagggctgatgaaggtattcagccggatccttactatggtctgaagtacattggggttggtaaaggaggcgctcttgagttgcatggacagaaaaagctctcctggacatttctgaacaagacccttcacccaggtggcatggcagaaggaggctatttttttgaaaggagctggggccaccgtggagttattgttcatgtcatcgaccccaaatcaggcacagtcatccattctgaccggtttgacacctatagatccaagaaagagagtgaacgtctggtccagtatttgaacgcggtgcccgatggcaggatcctttctgttgcagtgaatgatgaaggttctcgaaatctggatgacatggccaggaaggcgatgaccaaattgggaagcaaacacttcctgcaccttggatttagacacccttggagttttctaactgtgaaaggaaatccatcatcttcagtggaagaccatattgaatatcatggacatcgaggctctgctgctgcccgggtattcaaattgttccagacagagcatggcgaatatttcaatgtttctttgtccagtgagtgggttcaagacgtggagtggacggagtggttcgatcatgataaagtatctcagactaaaggtggggagaaaatttcagacctctggaaagctcacccaggaaaaatatgcaatcgtcccattgatatacaggccactacaatggatggagttaacctcagcaccgaggttgtctacaaaaaaggccaggattataggtttgcttgctacgaccggggcagagcctgccggagctaccgtgtacggttcctctgtgggaagcctggtaagcagccccttgtcggggacacagatgcaactatggctcggttccttgaactggcagctatgcaggcaacttccagacctctcagtgagacagtgctcccaaaggagagcacttttgtgacacgggagcagtgggaggatccttggagttggcaggagacagcagaaccccaccctgcccataagcctttcaggaaggggaagggcctggtccaaggcagtcaaggtacaaatggacagagctgccctcccctgcagagatgtgcagttctttgcctctttgggtgctattattttaaatccagtacctaaggtgcttgttagaagagattggaaatggtcgggttgttctcggaggcacttggccatctccagaaggcagtcattaggaatgaaagtttagggggagaagtttatggctaccgaaaataatagttgagaggaactatatttgttttacatcttgagcaaagtgggtggggtgaggcagccacatttaactccagctaagaagttagtggaaaattcccccgcccagagctaatgaatggctcttttctggtagggtttttgttgacttcaaaaacctttaccaagagtgggatggagcaagccagtgatctgggttttggataggcaaacctggcatttagttatttagggaggggaagggaaaaaagaggtagccaaaagtttgccaagagcaaagggctctatctcagtctttcctgttttgggttacagtgaggcccaaactcacagtcaccattgacaccaatgtgaacagcaccattctgaacttggaggataatgtacagtcatggaaacctggagataccctggtcattgccagtactgattactccatgtaccaggcagaagagttccaggtgcttccctgcagatcctgcgcccccaaccaggtcaaagtggcagggaaaccaatgtacctgcacatcggggaggagatagacggcgtggacatgcgggcggaggttgggcttctgagccggaacatcatagtgatgggggagatggaggacaaatgctacccctacagaaaccacatctgcaatttctttgacttcgatacctttgggggccacatcaagtttgctctgggatttaaggcagcacacttggagggcacggagctgaagcatatgggacagcagctggtgggtcagtacccgattcacttccacctggccggtgatgtagacgaaaggggaggttatgacccacccacatacatcagggacctctccatccatcatacattctctcgctgcgtcacagtccatggctccaatggcttgttgatcaaggacgttgtgggctataactctttgggccactgcttcttcacggaagatgggccggaggaacgcaacacttttgaccactgtcttggcctccttgtcaagtctggaaccctcctcccctcggaccgtgacagcaagatgtgcaagatgatcacagaggactcctacccagggtacatccccaagcccaggcaagactgcaatgctgtgtccaccttctggatggccaatcccaacaacaacctcatcaactgtgccgctgcaggatctgaggaaactggattttggtttatttttcaccacgtaccaacgggcccctccgtgggaatgtactccccaggttattcagagcacattccactgggaaaattctataacaaccgagcacattccaactaccgggctggcatgatcatagacaacggagtcaaaaccaccgaggcctctgccaaggacaagcggccgttcctctcaatcatctctgccagatacagccctcaccaggacgccgacccgctgaagccccgggagccggccatcatcagacacttcattgcctacaagaaccaggaccacggggcctggctgcgcggcggggatgtgtggctggacagctgccggtttgctgacaatggcattggcctgaccctggccagtggtggaaccttcccgtatgacgacggctccaagcaagagataaagaacagcttgtttgttggcgagagtggcaacgtggggacggaaatgatggacaataggatctggggccctggcggcttggaccatagcggaaggaccctccctataggccagaattttccaattagaggaattcagttatatgatggccccatcaacatccaaaactgcactttccgaaagtttgtggccctggagggccggcacaccagcgccctggccttccgcctgaataatgcctggcagagctgcccccataacaacgtgaccggcattgcctttgaggacgttccgattacttccagagtgttcttcggagagcctgggccctggttcaaccagctggacatggatggggataagacatctgtgttccatgacgtcgacggctccgtgtccgagtaccctggctcctacctcacgaagaatgacaactggctggtccggcacccagactgcatcaatgttcccgactggagaggggccatttgcagtgggtgctatgcacagatgtacattcaagcctacaagaccagtaacctgcgaatgaagatcatcaagaatgacttccccagccaccctctttacctggagggggcgctcaccaggagcacccattaccagcaataccaaccggttgtcaccctgcagaagggctacaccatccactgggaccagacggcccccgccgaactcgccatctggctcatcaacttcaacaagggcgactggatccgagtggggctctgctacccgcgaggcaccacattctccatcctctcggatgttcacaatcgcctgctgaagcaaacgtccaagacgggcgtcttcgtgaggaccttgcagatggacaaagtggagcagagctaccctggcaggagccactactactgggacgaggactcagggctgttgttcctgaagctgaaagctcagaacgagagagagaagtttgctttctgctccatgaaaggctgtgagaggataaagattaaagctctgattccaaagaacgcaggcgtcagtgactgcacagccacagcttaccccaagttcaccgagagggctgtcgtagacgtgccgatgcccaagaagctctttggttctcagctgaaaacaaaggaccatttcttggaggtgaagatggagagttccaagcagcacttcttccacctctggaacgacttcgcttacattgaagtggatgggaagaagtaccccagttcggaggatggcatccaggtggtggtgattgacgggaaccaagggcgcgtggtgagccacacgagcttcaggaactccattctgcaaggcataccatggcagcttttcaactatgtggcgaccatccctgacaattccatagtgcttatggcatcaaagggaagatacgtctccagaggcccatggaccagagtgctggaaaagcttggggcagacaggggtctcaagttgaaagagcaaatggcattcgttggcttcaaaggcagcttccggcccatctgggtgacactggacactgaggatcacaaagccaaaatcttccaagttgtgcccatcccttgccttgccccaaggcggggtgtccataagagcaggtggagatggttcaaagaaagagaagatatcattcatatggctggccatgtccagaacttgctgcgtcctccacatttctaagctgtcaggaggctgtcacttcaactcccctccccgatggggaagccaggcagaagcaggactctcttttcctcccaggccctgtttggctggaggccaaacacatttgacaagagcatgggggctgaggtgggaaaaacaggtccaaatcaaactggcagacgagaggcaggcacaggtagagggcacctcaggcagcactggaaggggctcaggggtctttaacataatgaaaatgatgtatatggcatgaagagtttactcaattaagtcaagagttttaaagtcttctctgatcagaatttgctatctgatcagagcaggccacccaatcacagcaggtgcttggaggggagtggaatctcagtagagttgatgactcaccaagtgtaaatgggaaaaagcaacacagtcacatttccatgtaaggagattttatagtaaacatgaatttgtcagtgtccagtattaattagaaaacatctgtcttcttacttgaagcctattaagcagtaattctttgaccacaaactggtcatgtggcagaccctttctagaagacactagaatgtcatccggtgtgcagttgcctgagaccactcccaccccaggagctgggcaaagagctctccacgtccacctgtccccccacagcgcgtcactgctgccccatcacaggtcttctcttttattcccagctcgattttcttccttggaagaccgagatttcagatctccttccttcttttttttgcccttgtcttgctttgttttatttttctctttgcttcctcctcctttgccggggtacacctggccctccagagttacatcagcacacctgtcttgaccgaccaaaaagtccttgatctcccaggcgtagctcccatcgcgaagcatgaagatagcacggtctgatcccacaatgaacctctggacgtcatagttggcattgaaaaggctgccctgccagaggctcgtaatttcctctgtctccttctcagtagggcttcctgatacagtgacaaacatcatgagagtcttcccttttttcgtcattttcaatatgctttcaggcttgcttgggtctatctttgagaagtcgacaggtgctgaaggtctcttgtgctctggaagatctccttcttcaatgtcatcatctttctcccattgctccagaagacgcgccatgtctgcatcattgtaatcgcgaatatccttcttcttcttccggggaggtggggtagactcgtcgggcgtcccgggcgagccttcggccgcgcaggacccaggcggtggtagcagtagcagcagcagcagcaggtcagaggcacaaagcaggaccacggccttgcgcgcccacctggaagccgccattttcgctgcgccgcgcagcgcccttaacaccnngcctcgtacctagccgtaggtt

SEQ ID NO: 735729 - DNA, 6346 bp, Homo sapiens
gagctagcgctcaagcagagcccagcgcggtgctatcggacagagcctggcgagcgcaagcggcgcggggagccagcggggctgagcgcggccagggtctgaacccagatttcccagactagctaccactccgcttgcccacgccccgggagctcgcggcgcctggcggtcagcgaccagacgtccggggccgctgcgctcctggcccgcgaggcgtgacactgtctcggctacagacccagagggagcacactgccaggatgggagctgctgggaggcaggacttcctcttcaaggccatgctgaccatcagctggctcactctgacctgcttccctggggccacatccacagtggctgctgggtgccctgaccagagccctgagttgcaaccctggaaccctggccatgaccaagaccaccatgtgcatatcggccagggcaagacactgctgctcacctcttctgccacggtctattccatccacatctcagagggaggcaagctggtcattaaagaccacgacgagccgattgttttgcgaacccggcacatcctgattgacaacggaggagagctgcatgctgggagtgccctctgccctttccagggcaatttcaccatcattttgtatggaagggctgatgaaggtattcagccggatccttactatggtctgaagtacattggggttggtaaaggaggcgctcttgagttgcatggacagaaaaagctctcctggacatttctgaacaagacccttcacccaggtggcatggcagaaggaggctatttttttgaaaggagctggggccaccgtggagttattgttcatgtcatcgaccccaaatcaggcacagtcatccattctgaccggtttgacacctatagatccaagaaagagagtgaacgtctggtccagtatttgaacgcggtgcccgatggcaggatcctttctgttgcagtgaatgatgaaggttctcgaaatctggatgacatggccaggaaggcgatgaccaaattgggaagcaaacacttcctgcaccttggatttagacacccttggagttttctaactgtgaaaggaaatccatcatcttcagtggaagaccatattgaatatcatggacatcgaggctctgctgctgcccgggtattcaaattgttccagacagagcatggcgaatatttcaatgtttctttgtccagtgagtgggttcaagacgtggagtggacggagtggttcgatcatgataaagtatctcagactaaaggtggggagaaaatttcagacctctggaaagctcacccaggaaaaatatgcaatcgtcccattgatatacaggccactacaatggatggagttaacctcagcaccgaggttgtctacaaaaaaggccaggattataggtttgcttgctacgaccggggcagagcctgccggagctaccgtgtacggttcctctgtgggaagcctggtaagcagccccttgtcggggacacagatgcaactatggctcggttccttgaactggcagctatgcaggcaacttccagacctctcagtgagacagtgctcccaaaggagagcacttttgtgacacgggagcagtgggaggatccttggagttggcaggagacagcagaaccccaccctgcccataagcctttcaggaaggggaagggcctggtccaaggcagtcaaggtacaaatggacagagctgccctcccctgcagagatgtgcagttctttgcctctttgggtgctattattttaaatccagtacctaaggtgcttgttagaagagattggaaatggtcgggttgttctcggaggcacttggccatctccagaaggcagtcattaggaatgaaagtttagggggagaagtttatggctaccgaaaataatagttgagaggaactatatttgttttacatcttgagcaaagtgggtggggtgaggcagccacatttaactccagctaagaagttagtggaaaattcccccgcccagagctaatgaatggctcttttctggtagggtttttgttgacttcaaaaacctttaccaagagtgggatggagcaagccagtgatctgggttttggataggcaaacctggcatttagttatttagggaggggaagggaaaaaagaggtagccaaaagtttgccaagagcaaagggctctatctcagtctttcctgttttgggttacagtgaggcccaaactcacagtcaccattgacaccaatgtgaacagcaccattctgaacttggaggataatgtacagtcatggaaacctggagataccctggtcattgccagtactgattactccatgtaccaggcagaagagttccaggtgcttccctgcagatcctgcgcccccaaccaggtcaaagtggcagggaaaccaatgtacctgcacatcggggaggagatagacggcgtggacatgcgggcggaggttgggcttctgagccggaacatcatagtgatgggggagatggaggacaaatgctacccctacagaaaccacatctgcaatttctttgacttcgatacctttgggggccacatcaagtttgctctgggatttaaggcagcacacttggagggcacggagctgaagcatatgggacagcagctggtgggtcagtacccgattcacttccacctggccggtgatgtagacgaaaggggaggttatgacccacccacatacatcagggacctctccatccatcatacattctctcgctgcgtcacagtccatggctccaatggcttgttgatcaaggacgttgtgggctataactctttgggccactgcttcttcacggaagatgggccggaggaacgcaacacttttgaccactgtcttggcctccttgtcaagtctggaaccctcctcccctcggaccgtgacagcaagatgtgcaagatgatcacagaggactcctacccagggtacatccccaagcccaggcaagactgcaatgctgtgtccaccttctggatggccaatcccaacaacaacctcatcaactgtgccgctgcaggatctgaggaaactggattttggtttatttttcaccacgtaccaacgggcccctccgtgggaatgtactccccaggttattcagagcacattccactgggaaaattctataacaaccgagcacattccaactaccgggctggcatgatcatagacaacggagtcaaaaccaccgaggcctctgccaaggacaagcggccgttcctctcaatcatctctgccagatacagccctcaccaggacgccgacccgctgaagccccgggagccggccatcatcagacacttcattgcctacaagaaccaggaccacggggcctggctgcgcggcggggatgtgtggctggacagctgccggtttgctgacaatggcattggcctgaccctggccagtggtggaaccttcccgtatgacgacggctccaagcaagagataaagaacagcttgtttgttggcgagagtggcaacgtggggacggaaatgatggacaataggatctggggccctggcggcttggaccatagcggaaggaccctccctataggccagaattttccaattagaggaattcagttatatgatggccccatcaacatccaaaactgcactttccgaaagtttgtggccctggagggccggcacaccagcgccctggccttccgcctgaataatgcctggcagagctgcccccataacaacgtgaccggcattgcctttgaggacgttccgattacttccagagtgttcttcggagagcctgggccctggttcaaccagctggacatggatggggataagacatctgtgttccatgacgtcgacggctccgtgtccgagtaccctggctcctacctcacgaagaatgacaactggctggtccggcacccagactgcatcaatgttcccgactggagaggggccatttgcagtgggtgctatgcacagatgtacattcaagcctacaagaccagtaacctgcgaatgaagatcatcaagaatgacttccccagccaccctctttacctggagggggcgctcaccaggagcacccattaccagcaataccaaccggttgtcaccctgcagaagggctacaccatccactgggaccagacggcccccgccgaactcgccatctggctcatcaacttcaacaagggcgactggatccgagtggggctctgctacccgcgaggcaccacattctccatcctctcggatgttcacaatcgcctgctgaagcaaacgtccaagacgggcgtcttcgtgaggaccttgcagatggacaaagtggagcagagctaccctggcaggagccactactactgggacgaggactcagggctgttgttcctgaagctgaaagctcagaacgagagagagaagtttgctttctgctccatgaaaggctgtgagaggataaagattaaagctctgattccaaagaacgcaggcgtcagtgactgcacagccacagcttaccccaagttcaccgagagggctgtcgtagacgtgccgatgcccaagaagctctttggttctcagctgaaaacaaaggaccatttcttggaggtgaagatggagagttccaagcagcacttcttccacctctggaacgacttcgcttacattgaagtggatgggaagaagtaccccagttcggaggatggcatccaggtggtggtgattgacgggaaccaagggcgcgtggtgagccacacgagcttcaggaactccattctgcaaggcataccatggcagcttttcaactatgtggcgaccatccctgacaattccatagtgcttatggcatcaaagggaagatacgtctccagaggcccatggaccagagtgctggaaaagcttggggcagacaggggtctcaagttgaaagagcaaatggcattcgttggcttcaaaggcagcttccggcccatctgggtgacactggacactgaggatcacaaagccaaaatcttccaagttgtgcccatcccttgccttgccccaaggcggggtgtccataagagcaggtggagatggttcaaagaaagagaagatatcattcatatggctggccatgtccagaacttgctgcgtcctccacatttctaagctgtcaggaggctgtcacttcaactcccctccccgatggggaagccaggcagaagcaggactctcttttcctcccaggccctgtttggctggaggccaaacacatttgacaagagcatgggggctgaggtgggaaaaacaggtccaaatcaaactggcagacgagaggcaggcacaggtagagggcacctcaggcagcactggaaggggctcaggggtctttaacataatgaaaatgatgtatatggcatgaagagtttactcaattaagtcaagagttttaaagtcttctctgatcagaatttgctatctgatcagagcaggccacccaatcacagcaggtgcttggaggggagtggaatctcagtagagttgatgactcaccaagtgtaaatgggaaaaagcaacacagtcacatttccatgtaaggagattttatagtaaacatgaatttgtcagtgtccagtattaattagaaaacatctgtcttcttacttgaagcctattaagcagtaattctttgaccacaaactggtcatgtggcagaccctttctagaagacactagaatgtcatccggtgtgcagttgcctgagaccactcccaccccaggagctgggcaaagagctctccacgtccacctgtccccccacagcgcgtcactgctgccccatcacaggtcttctcttttattcccagctcgattttcttccttggaagaccgagatttcagatctccttccttcttttttttgcccttgtcttgctttgttttatttttctctttgcttcctcctcctttgccggggtacacctggccctccagagttacatcagcacacctgtcttgaccgaccaaaaagtccttgatctcccaggcgtagctcccatcgcgaagcatgaagatagcacggtctgatcccacaatgaacctctggacgtcatagttggcattgaaaaggctgccctgccagaggctcgtaatttcctctgtctccttctcagtagggcttcctgatacagtgacaaacatcatgagagtcttcccttttttcgtcattttcaatatgctttcaggcttgcttgggtctatctttgagaagtcgacaggtgctgaaggtctcttgtgggccaggtgtaccccggcaaaggaggaggaagc

SEQ ID NO: 735730 - DNA, 6145 bp, Homo sapiens
gagctagcgctcaagcagagcccagcgcggtgctatcggacagagcctggcgagcgcaagcggcgcggggagccagcggggctgagcgcggccagggtctgaacccagatttcccagactagctaccactccgcttgcccacgccccgggagctcgcggcgcctggcggtcagcgaccagacgtccggggccgctgcgctcctggcccgcgaggcgtgacactgtctcggctacagacccagagggagcacactgccaggatgggagctgctgggaggcaggacttcctcttcaaggccatgctgaccatcagctggctcactctgacctgcttccctggggccacatccacagtggctgctgggtgccctgaccagagccctgagttgcaaccctggaaccctggccatgaccaagaccaccatgtgcatatcggccagggcaagacactgctgctcacctcttctgccacggtctattccatccacatctcagagggaggcaagctggtcattaaagaccacgacgagccgattgttttgcgaacccggcacatcctgattgacaacggaggagagctgcatgctgggagtgccctctgccctttccagggcaatttcaccatcattttgtatggaagggctgatgaaggtattcagccggatccttactatggtctgaagtacattggggttggtaaaggaggcgctcttgagttgcatggacagaaaaagctctcctggacatttctgaacaagacccttcacccaggtggcatggcagaaggaggctatttttttgaaaggagctggggccaccgtggagttattgttcatgtcatcgaccccaaatcaggcacagtcatccattctgaccggtttgacacctatagatccaagaaagagagtgaacgtctggtccagtatttgaacgcggtgcccgatggcaggatcctttctgttgcagtgaatgatgaaggttctcgaaatctggatgacatggccaggaaggcgatgaccaaattgggaagcaaacacttcctgcaccttggatttagacacccttggagttttctaactgtgaaaggaaatccatcatcttcagtggaagaccatattgaatatcatggacatcgaggctctgctgctgcccgggtattcaaattgttccagacagagcatggcgaatatttcaatgtttctttgtccagtgagtgggttcaagacgtggagtggacggagtggttcgatcatgataaagtatctcagactaaaggtggggagaaaatttcagacctctggaaagctcacccaggaaaaatatgcaatcgtcccattgatatacaggccactacaatggatggagttaacctcagcaccgaggttgtctacaaaaaaggccaggattataggtttgcttgctacgaccggggcagagcctgccggagctaccgtgtacggttcctctgtgggaagcctggtaagcagccccttgtcggggacacagatgcaactatggctcggttccttgaactggcagctatgcaggcaacttccagacctctcagtgagacagtgctcccaaaggagagcacttttgtgacacgggagcagtgggaggatccttggagttggcaggagacagcagaaccccaccctgcccataagcctttcaggaaggggaagggcctggtccaaggcagtcaaggtacaaatggacagagctgccctcccctgcagagatgtgcagttctttgcctctttgggtgctattattttaaatccagtacctaaggtgcttgttagaagagattggaaatggtcgggttgttctcggaggcacttggccatctccagaaggcagtcattaggaatgaaagtttagggggagaagtttatggctaccgaaaataatagttgagaggaactatatttgttttacatcttgagcaaagtgggtggggtgaggcagccacatttaactccagctaagaagttagtggaaaattcccccgcccagagctaatgaatggctcttttctggtagggtttttgttgacttcaaaaacctttaccaagagtgggatggagcaagccagtgatctgggttttggataggcaaacctggcatttagttatttagggaggggaagggaaaaaagaggtagccaaaagtttgccaagagcaaagggctctatctcagtctttcctgttttgggttacagtgaggcccaaactcacagtcaccattgacaccaatgtgaacagcaccattctgaacttggaggataatgtacagtcatggaaacctggagataccctggtcattgccagtactgattactccatgtaccaggcagaagagttccaggtgcttccctgcagatcctgcgcccccaaccaggtcaaagtggcagggaaaccaatgtacctgcacatcggggaggagatagacggcgtggacatgcgggcggaggttgggcttctgagccggaacatcatagtgatgggggagatggaggacaaatgctacccctacagaaaccacatctgcaatttctttgacttcgatacctttgggggccacatcaagtttgctctgggatttaaggcagcacacttggagggcacggagctgaagcatatgggacagcagctggtgggtcagtacccgattcacttccacctggccggtgatgtagacgaaaggggaggttatgacccacccacatacatcagggacctctccatccatcatacattctctcgctgcgtcacagtccatggctccaatggcttgttgatcaaggacgttgtgggctataactctttgggccactgcttcttcacggaagatgggccggaggaacgcaacacttttgaccactgtcttggcctccttgtcaagtctggaaccctcctcccctcggaccgtgacagcaagatgtgcaagatgatcacagaggactcctacccagggtacatccccaagcccaggcaagactgcaatgctgtgtccaccttctggatggccaatcccaacaacaacctcatcaactgtgccgctgcaggatctgaggaaactggattttggtttatttttcaccacgtaccaacgggcccctccgtgggaatgtactccccaggttattcagagcacattccactgggaaaattctataacaaccgagcacattccaactaccgggctggcatgatcatagacaacggagtcaaaaccaccgaggcctctgccaaggacaagcggccgttcctctcaatcatctctgccagatacagccctcaccaggacgccgacccgctgaagccccgggagccggccatcatcagacacttcattgcctacaagaaccaggaccacggggcctggctgcgcggcggggatgtgtggctggacagctgccggtttgctgacaatggcattggcctgaccctggccagtggtggaaccttcccgtatgacgacggctccaagcaagagataaagaacagcttgtttgttggcgagagtggcaacgtggggacggaaatgatggacaataggatctggggccctggcggcttggaccatagcggaaggaccctccctataggccagaattttccaattagaggaattcagttatatgatggccccatcaacatccaaaactgcactttccgaaagtttgtggccctggagggccggcacaccagcgccctggccttccgcctgaataatgcctggcagagctgcccccataacaacgtgaccggcattgcctttgaggacgttccgattacttccagagtgttcttcggagagcctgggccctggttcaaccagctggacatggatggggataagacatctgtgttccatgacgtcgacggctccgtgtccgagtaccctggctcctacctcacgaagaatgacaactggctggtccggcacccagactgcatcaatgttcccgactggagaggggccatttgcagtgggtgctatgcacagatgtacattcaagcctacaagaccagtaacctgcgaatgaagatcatcaagaatgacttccccagccaccctctttacctggagggggcgctcaccaggagcacccattaccagcaataccaaccggttgtcaccctgcagaagggctacaccatccactgggaccagacggcccccgccgaactcgccatctggctcatcaacttcaacaagggcgactggatccgagtggggctctgctacccgcgaggcaccacattctccatcctctcggatgttcacaatcgcctgctgaagcaaacgtccaagacgggcgtcttcgtgaggaccttgcagatggacaaagtggagcagagctaccctggcaggagccactactactgggacgaggactcagggctgttgttcctgaagctgaaagctcagaacgagagagagaagtttgctttctgctccatgaaaggctgtgagaggataaagattaaagctctgattccaaagaacgcaggcgtcagtgactgcacagccacagcttaccccaagttcaccgagagggctgtcgtagacgtgccgatgcccaagaagctctttggttctcagctgaaaacaaaggaccatttcttggaggtgaagatggagagttccaagcagcacttcttccacctctggaacgacttcgcttacattgaagtggatgggaagaagtaccccagttcggaggatggcatccaggtggtggtgattgacgggaaccaagggcgcgtggtgagccacacgagcttcaggaactccattctgcaaggcataccatggcagcttttcaactatgtggcgaccatccctgacaattccatagtgcttatggcatcaaagggaagatacgtctccagaggcccatggaccagagtgctggaaaagcttggggcagacaggggtctcaagttgaaagagcaaatggcattcgttggcttcaaaggcagcttccggcccatctgggtgacactggacactgaggatcacaaagccaaaatcttccaagttgtgcccatcccttgccttgccccaaggcggggtgtccataagagcaggtggagatggttcaaagaaagagaagatatcattcatatggctggccatgtccagaacttgctgcgtcctccacatttctaagctgtcaggaggctgtcacttcaactcccctccccgatggggaagccaggcagaagcaggactctcttttcctcccaggccctgtttggctggaggccaaacacatttgacaagagcatgggggctgaggtgggaaaaacaggtccaaatcaaactggcagacgagaggcaggcacaggtagagggcacctcaggcagcactggaaggggctcaggggtctttaacataatgaaaatgatgtatatggcatgaagagtttactcaattaagtcaagagttttaaagtcttctctgatcagaatttgctatctgatcagagcaggccacccaatcacagcaggtgcttggaggggagtggaatctcagtagagttgatgactcaccaagtgtaaatgggaaaaagcaacacagtcacatttccatgtaaggagattttatagtaaacatgaatttgtcagtgtccagtattaattagaaaacatctgtcttcttacttgaagcctattaagcagtaattctttgaccacaaactggtcatgtggcagaccctttctagaagacactagaatgtcatccggtgtggaaaaccaatggcttagagtgggtcatgataagaggctatgaaggactcaagaggacacttggttgttggacaaaaatcctagcccttgagcttagcagcaagctgcccagctcgtccacactcgaaaggtcccaaggaacaaagcggaaagaatgaggcctgggtggagccctagtgtggccagcgggcaagattcttctgttccttagggactacaccacgcgttcccccttcagtttctaatgctcccaccactccacagagaccagtgggccttctggagcagacatcaccaagacatttatttgttctgtctaggtgtctatttaagctaattgaaaatattttgctggccggacactctctaagtactcct

SEQ ID NO: 735731 - DNA, 1153 bp, Homo sapiens
tgtttgcttggggatctgatcctgtagtgatgaccattgagaatgttgctgtgcgttcagccatgcaccgccatgggtgttcactgggctttctgacctctcgtggccttctttcgtccttttgatggtatgggcttcctgtttccagaaacctcatctctctcaagaagatccttgatgtgctttgagatttcacagggtggctgctagagagacggcccaagctctgaaaacactggcccaggccgcccgtggagtggctgcatcgacaaccgaccccgcggccgcccatgccatgttagattctgctcgagacgtgatggagggctccgccatgctcattcaagaggccaagcaggccctgattgcacctggagatgcagagcgtcaacaaagactggctcaggtggctaaagccgtctcacactccttgaataactgcgtaaattgcctccctgggcagaaggatgtggacgtggccttgaagagcatcggggagtccagcaagaagctgcttgtggattcgctacctccaagcacgaagcctttccaggaagcccagagtgaactgaaccaggcagcagctgatctgaaccagtctgctggggaagtggtccatgccacccggggccagagtggagagttggctgcagcctctggaaagttcagtgatgattttgatgaattcctcgatgctggcattgagatggctggccaagctcagacaaaagaagaccagatccaagtgatagggaacctcaagaatatctcgatggcatccagcaagctgctgttagctgccaagtctctctctgtagatccaggagctcccaatgcgaaaaatctcctggctgcagctgcaagagctgtgacagagagcatcaatcaactcatcactctgtgtacccaacaagctccgggccagaaagagtgcgataatgccctgcgggagctcgagactgtgaaggggatgttggacaatcctaatgaacctgttagtgacctctcttactttgactgcattgagagtgtgatggaaaactccaaggttctgggtgaatcgatggcagggatttcacagaatgccaagaccggagacctccctgcctttggggaatgtgtggggattgcatccaaggctctctgtgggctg

SEQ ID NO: 735732 - DNA, 893 bp, Homo sapiens; identical to SEQ ID NO: 263931

SEQ ID NO: 735733 - DNA, 1298 bp, Homo sapiens
tgctgagttccctgcactctcagtagggacaggccctatgctgccacctgtacatgctatctgaaggacagcctccagggcacacagaggatggtatttacacatgcacacatggctactgatggggcaagcacttcacaacccctcatgatcacgtgcagcagacaatgtggcctctgcagagggggaacggagaccggaggctgagactggcaaggctggacctgagtgtcgtcacctaaattcagacggggaactgcccctgcacatagtgaacggctcactgagcaaaccccgagtcccgaccaccgcctcagtgtggtctagctcctcacctgcttccatcctccctggtgcggggtgggcccagtgatatcagctgcctgctgttccccagatgtgccaagtgcattcttgtgtgcttgcatctcatggaacgccatttccccagacatccctgtggctggctcctgatgcccgaggcccaagtgtctgatgctttaaggcacatcaccccactcatgcttttccatgttctttggccgcagcaaggccgctctcactgcaaagttaactctgatgcgtgtgtaacacgacatcctcctcccagtcgcccctgtagctcccctacctccaagagcccagcccttgcccacagggccatactccacgtgcagagcagcctcagcactcaccgggcacgagcgagcctgtgtggtgcgcagggatgagaaggcagaggcgcgactggggttcatgaggaagggcaggaggagggtgtgggatggtggaggggtttgagaaggcagaggcgcgactggggttcatgaggaaagggagggggaggatgtgggatggtggaggggctgcagactctgggctagggaaagctgggatgtctctaaaggttggaatgaatggcctagaatccgacccaataagccaaagccacttccaccaacgttagaaggccttggcccccagagagccaatttcacaatccagaagtccccgtgccctaaagggtctgccctgattactcctggctccttgtgtgcagggggctcaggcatggcagggctgggagtaccagcaggcactcaagcggcttaagtgttccatgacagactggtatgaaggtggccacaattcagaaagaaaaaagaagagcaccatctccttccagtgaggaagcggggccaccacccagcgtgtgctccatcttttctggctggggaggaccctttacagcagatgaaggcctctccccagcgtgtgctccatcttttctggctggg

SEQ ID NO: 735734 - DNA, 1968 bp, Homo sapiens
tgctgagttccctgcactctcagtagggacaggccctatgctgccacctgtacatgctatctgaaggacagcctccagggcacacagaggatggtatttacacatgcacacatggctactgatggggcaagcacttcacaacccctcatgatcacgtgcagcagacaatgtggcctctgcagagggggaacggagaccggaggctgagactggcaaggctggacctgagtgtcgtcacctaaattcagacggggaactgcccctgcacatagtgaacggctcactgagcaaaccccgagtcccgaccaccgcctcagtgtggtctagctcctcacctgcttccatcctccctggtgcggggtgggcccagtgatatcagctgcctgctgttccccagatgtgccaagtgcattcttgtgtgcttgcatctcatggaacgccatttccccagacatccctgtggctggctcctgatgcccgaggcccaagtgtctgatgctttaaggcacatcaccccactcatgcttttccatgttctttggccgcagcaaggccgctctcactgcaaagttaactctgatgcgtgtgtaacacgacatcctcctcccagtcgcccctgtagctcccctacctccaagagcccagcccttgcccacagggccatactccacgtgcagagcagcctcagcactcaccgggcacgagcgagcctgtgtggtgcgcagggatgagaaggcagaggcgcgactggggttcatgaggaagggcaggaggagggtgtgggatggtggaggggtttgagaaggcagaggcgcgactggggttcatgaggaaagggagggggaggatgtgggatggtggaggggctgcagactctgggctagggaaagctgggatgtctctaaaggttggaatgaatggcctagaatccgacccaataagccaaagccacttccaccaacgttagaaggccttggcccccagagagccaatttcacaatccagaagtccccgtgccctaaagggtctgccctgattactcctggctccttgtgtgcagggggctcaggcatggcagggctgggagtaccagcaggcactcaagcggcttaagtgttccatgacagactggtatgaaggtggccacaattcagaaagaaaaaagaagagcaccatctccttccagtgaggaagcggggccaccacccagcgtgtgctccatcttttctggctggggagaggccttcatctgctgtaaagggtcctccagcacaagctgtcttaattgaccctagttcccagggcagcctcgttctgccttgggtgctgacacgaccttcggtaggtgcataagctctgcattcgaggtccacaggggcagtgggagggaactgagactggggagggacaaaggctgctctgtcctggtgctcccacaaaggagaagggctgatcactcaaagttgcgaacaccaagctcaacaatgagccctggaaaatttctggaatggattattaaacagagagtctgtaagcacttagaaaagggcacggtgagtcccaggggccagcactgctcgcaatgtacggcatttctctttgtaacaggattagtagcctgctgtgcccagggagaacatgcagcacagcgcatctcgagtcagcaggattttgacggcttctaacaaaatcttgtagacaagatggagctatgggggttggaggagagaacatataggaaaaatcagagccaaatgaaccacagccccaaagggcacagttgaacaatggactgattccagccttgcacggagggatctggcagagtccatccagttcattcaacacctggttagaaaactggggccagcacacaggggaagggtaagctggtttcatgatcgaatcaaggctcagacaatttttaaaggccagagggtagactgcaatcaccaagatgaaatttac

SEQ ID NO: 735735 - DNA, 630 bp, Homo sapiens
ccgagctatgcaccactgagtttgtgtcttagtatagacaggttcgccatgtcggtcaagctgatctcgaacgcctgcactcagttgatctacctgccttgccctcccaaaatgttggaattacaggcatgagccactgtgccctgccacaattattgtttaaaatgcattattttattctagatttatgtacatggtgacatctgtgtttcggtacaattttgaacttgtatttcaggtatgctaccgcattcttatgcaactctgtggacaatatgatcagccagtgcttgcagttcgagtgctttttgaaatgcagaaagctggtattgaccccaatgccattacttatggttattataataaggctgttttggaaagtacctggccttcaagaagtcgtagtggctattttctttggacaaaagtaagaaatgttgttttaggagtaacacagttcaaaagagctttaaagaagcatgcacacttatcacaaacaactctctcaggtggccagtctgatcttggatataattcattatctaaagatgaagttagaagaggggatacatctactgaagacattcaagaagaaaaagataaaaaagggagtgattgtagttcctgtag

SEQ ID NO: 735736 - DNA, 1096 bp, Homo sapiens
gttacagatcatacttaaggccaataacacaagccccatctgagacagccacagatgcagcctctctctttgccctacaagctttcttaagaagccgggaccggtcacatcaaaaattctataacatgatgaccaaaacacaaatgtttattcgcttcattgaagaatgttcttttgttagtgacaaagatgcaagcctggcattttttgatgattgtgtagataaagtggatatggacaagagcggtgaagtacgacttatagaactggatgaatctttcaaaagtgaacacactgtttttgtaacaccacctgagatcccccacctacccaatggtgaagaaccccctttacagtacagctataatggatttccagttcttaggaacaatttatttgaaagacctgaaggatttctacaagcaaagaagaacaaattgccttcaaaatcaagtagtcctaatagccctttgcccatgttcagaagaacaaaacaggaaattaaatcagcccataaaattgcaaagaggtactcttccatccctcagatgtggtctaggtgtctactgcgccactgttatggactgtggtttatttgtctcccagcttatgtgaaagtctgtcattcaaaagtcagggctctgaaaacagcatatgatgtgcttaaaaaaatgcagtcaaagaagatggatccacctgatgaggtatgctaccgcattcttatgcaactctgtggacaatatgatcagccagtgcttgcagttcgagtgctttttgaaatgcagaaagctggtattgaccccaatgccattacttatggttattataataaggctgttttggaaagtacctggccttcaagaagtcgtagtggctattttctttggacaaaagtaagaaatgttgttttaggagtaacacagttcaaaagagctttaaagaagcatgcacacttatcacaaacaactctctcaggtggccagtctgatcttggatataattcattatctaaagatgaagttagaagaggggatacatctactgaagacattcaagaagaaaaagataaaaaagggagtgattgtagttcctgtag

SEQ ID NO: 735737 - DNA, 3845 bp, Homo sapiens
cgaatggatagtaatttgtttgcatggggtagtatagagaagagatattaggttcacgacgatctgggagagggtgggatcagttaacattgttttgcgtgcacctcaggcttcctggctatgtgggactaaatagtaccggcattgtgggcctgtgcatactggaacttgcaacgggaccaacacgtgtaattgaagagtcagtgggaaatctagtctcttgaacaaacaacgtagaatttggaatataacggacggcctatgtgtaatatagagatagggcggcggggggtattgaatcataagttattagactgggtttgacagtaagttgaataatataactccgtctacgggaatggagttatagtaggtaaacaaaaaatagtaaggcaaagataacatcttgctcaaaaaaaaaacggggaaggtcttactcatccagttccactgaagaggacacttcaaaacaaaagaaacaaaaatatcagaagaaagaaaagaaaaaagaaaaaaagagtaaatcaaaaaaagggaaacatcacaaaaaggaaaaaaagaagagaaaaaaggaaaagcattcttctacacctaatagttctgaattctccagaaagtaactgagactttggcttaagccgttaaatttaaaaatttgtttttaaaacgtgtttgcccttccttggaatttgctatatattatgctttgcaataaatcacagccttttccatatagacatttttcgtatttgggaccattatccctctggcaatatatttttaatgtgctgtaactgtaaagtattaaatcagtcttgttacttgatagccatgccccaagtatagctatttgtgtatactaaacacatcatttttggtatttgtgtctctgtgtgtttggctagtgttactacttcataagttcattgtaaaatggctttactgccatcaacatgggtcatctacctagcagttaatgagtattgctgaatcaggtgtccaccttccaatgatgaagcaaggtaaggggtaatgttttgctcttgacacagagaaatttaatagctttatgtactaaaatataatatcttttaaagatagtgaaattcttcagttttttaaatctctagggattttttttcaatgttgtagaagatgcagctgcttaatggtcttgactaggactttttaaatgaatggtgtctgcaggtagatgatcatgaaaatatctctaacaaagttttactcttctatgaaatgcagaatttctagtacctgcctcctttgtttttgtaataattaaaatacttcttgtataaagagattagttcagcctgttagtaagtctgcagagatgatgctgagttggttgtgatttttagaatagactcctgggttgttttacaaatgtgccatattggcatgtcttacagtgatacctcaaacacagaaatttttatttaggaagatagctaaatctttattagaactgatttttattgtattcagtataaattttatgaagcttgtttctatgagtactgtggaaaattttataaatgtgagcatatatatttattttgtctgacataatttgtagttttaaagcaagtttcacactgaacttaacgttttcataaatgaccagtttgggatgtttctctcttttactttagtggcaaactcaagagtaaaaagtgtcaaaaaaagaattgagaattttattctgtactttttaaaatttaagagccagggagttgcatcatgaaagcctttgtataataatggaaattttatatgggtaagcattttcaaacacatattagtagatacgttttttaaatttctattttcacattgatcagtgttactttgcttaatacttaggtagcccttatgtccactaaagtaaatgcttatgttgtagaagcatcgaacatcaaccaatgtcatggcacagcaccaaagattgcaaatacctcactatggtgcgcttagaaattttcaaattgataacctatagatacggctgcaggtgaattcatgatagtgaaatcagctaagtatacttaacctcacaggctagaaaggtttactgattcttgtttcacctggcacccaatgtggataccctcagtaagactcagggagccttataactcctcttaacatatgcttacccatgcttaaattctagggaagctgtatccacagccctctgcattgcagccatgagagctctcacgctttcaacccttccataacctaatttagtcatttgggcctctcaaaaggaaatgcttttgtttaaataggtcagtcagttactgggagaaaaaatacagagccagtaggtttttagggatttgttttgcctttgctgctagttttttgaaaatattcttcgattatcaagattttaaaaatcggtttttaatataaagcttttttaaaaacgaggctggcacaagtgcagtggtgtttctttactcccactgcttgacttgactagccttgaaaaaataacagtaaaataaaatattaaaaaataattagaaaatgctacaaaggcaatgaccttattccattgagtaagatagttaaaaatgatagtaattgtagtgaaatagttaattacttgtaagttttattactgttaattgtagagattataaattggctcattaggtttctgaatggtgacacaataatgactgagaagagcaaaagtcagtcctcgttaactaatgtagtatgcaaattaaaatattttaatgatcagtaattttccccccagaaatgatgttggtatttctaagtaaatttcccataattttagcatagtttatgaaattgaataaaaatttattttcactgaagtaattttcttctaatatgatattattattgagattggatgcaaatctcatgaatatgttttagaagaaaattaatgaaattccctcccaggcagtatgtaccagaaggaaaactgaatttagcagtaaaacagtcctggtcattctaactacctgtatgatcttgaacaaagtcacttagtttccctgggccttggtgtctttcgtctataaaatattgtaccagattatctctgaaatcacttcaaggtttaatatatataattatcaatattttaaaattcaagcaatattcactttagaaattattataacattctataatagtaaaggttgaatttattaatataataaacacgttcaacttcttcaagcagataattgatatttggttcatattcttacaacctaatgcatgtcattttcaccaaatgcaggcagaatttatatttaggtttgcatctggaactagattatctggcactttatggccattatttttgggttgatggaccttctcaccacacaatttcccccttttttttttttgcatatcatatgttggttgatatttctcagaggtatccctatttcttcatacttaatatacatctccatttacatctttgactctctgaggtcaaaacaacaataaatgagaagtaaaacaactatatgtgtttgtatttacaactgtatctaaaattatataaccctagtttaccttcagagtaaactaggctgaagagttgttaataatgttgataaaaatgccattgaatcctttcttcaacaaatatttattgagtacctaacgtggcaaacgctgtgctaagtactggggatacagagataagtaagacacatttgcctccctgaaggacttcacagtgtagttggtaggagaaacaccagagcatacaccgttatataattagtgcagtaattgacatgaacatgagttta

SEQ ID NO: 735738 - DNA, 3592 bp, Homo sapiens
cagcaaaaattctaaattcatcgttttaagggaatgcaaatatatgaagcattttttaagtttatgtttatactccctaccttactccaagaagaatttaaggcagttcaaatcccacttaaatttatctatcagtcataaatgcaattctcagtcagtatgtattattatccataggtcttactcatccagttccactgaagaggacacttcaaaacaaaagaaacaaaaatatcagaagaaagaaaagaaaaaagaaaaaaagagtaaatcaaaaaaagggaaacatcacaaaaaggaaaaaaagaagagaaaaaaggaaaagcattcttctacacctaatagttctgaattctccagaaagtaactgagactttggcttaagccgttaaatttaaaaatttgtttttaaaacgtgtttgcccttccttggaatttgctatatattatgctttgcaataaatcacagccttttccatatagacatttttcgtatttgggaccattatccctctggcaatatatttttaatgtgctgtaactgtaaagtattaaatcagtcttgttacttgatagccatgccccaagtatagctatttgtgtatactaaacacatcatttttggtatttgtgtctctgtgtgtttggctagtgttactacttcataagttcattgtaaaatggctttactgccatcaacatgggtcatctacctagcagttaatgagtattgctgaatcaggtgtccaccttccaatgatgaagcaaggtaaggggtaatgttttgctcttgacacagagaaatttaatagctttatgtactaaaatataatatcttttaaagatagtgaaattcttcagttttttaaatctctagggattttttttcaatgttgtagaagatgcagctgcttaatggtcttgactaggactttttaaatgaatggtgtctgcaggtagatgatcatgaaaatatctctaacaaagttttactcttctatgaaatgcagaatttctagtacctgcctcctttgtttttgtaataattaaaatacttcttgtataaagagattagttcagcctgttagtaagtctgcagagatgatgctgagttggttgtgatttttagaatagactcctgggttgttttacaaatgtgccatattggcatgtcttacagtgatacctcaaacacagaaatttttatttaggaagatagctaaatctttattagaactgatttttattgtattcagtataaattttatgaagcttgtttctatgagtactgtggaaaattttataaatgtgagcatatatatttattttgtctgacataatttgtagttttaaagcaagtttcacactgaacttaacgttttcataaatgaccagtttgggatgtttctctcttttactttagtggcaaactcaagagtaaaaagtgtcaaaaaaagaattgagaattttattctgtactttttaaaatttaagagccagggagttgcatcatgaaagcctttgtataataatggaaattttatatgggtaagcattttcaaacacatattagtagatacgttttttaaatttctattttcacattgatcagtgttactttgcttaatacttaggtagcccttatgtccactaaagtaaatgcttatgttgtagaagcatcgaacatcaaccaatgtcatggcacagcaccaaagattgcaaatacctcactatggtgcgcttagaaattttcaaattgataacctatagatacggctgcaggtgaattcatgatagtgaaatcagctaagtatacttaacctcacaggctagaaaggtttactgattcttgtttcacctggcacccaatgtggataccctcagtaagactcagggagccttataactcctcttaacatatgcttacccatgcttaaattctagggaagctgtatccacagccctctgcattgcagccatgagagctctcacgctttcaacccttccataacctaatttagtcatttgggcctctcaaaaggaaatgcttttgtttaaataggtcagtcagttactgggagaaaaaatacagagccagtaggtttttagggatttgttttgcctttgctgctagttttttgaaaatattcttcgattatcaagattttaaaaatcggtttttaatataaagcttttttaaaaacgaggctggcacaagtgcagtggtgtttctttactcccactgcttgacttgactagccttgaaaaaataacagtaaaataaaatattaaaaaataattagaaaatgctacaaaggcaatgaccttattccattgagtaagatagttaaaaatgatagtaattgtagtgaaatagttaattacttgtaagttttattactgttaattgtagagattataaattggctcattaggtttctgaatggtgacacaataatgactgagaagagcaaaagtcagtcctcgttaactaatgtagtatgcaaattaaaatattttaatgatcagtaattttccccccagaaatgatgttggtatttctaagtaaatttcccataattttagcatagtttatgaaattgaataaaaatttattttcactgaagtaattttcttctaatatgatattattattgagattggatgcaaatctcatgaatatgttttagaagaaaattaatgaaattccctcccaggcagtatgtaccagaaggaaaactgaatttagcagtaaaacagtcctggtcattctaactacctgtatgatcttgaacaaagtcacttagtttccctgggccttggtgtctttcgtctataaaatattgtaccagattatctctgaaatcacttcaaggtttaatatatataattatcaatattttaaaattcaagcaatattcactttagaaattattataacattctataatagtaaaggttgaatttattaatataataaacacgttcaacttcttcaagcagataattgatatttggttcatattcttacaacctaatgcatgtcattttcaccaaatgcaggcagaatttatatttaggtttgcatctggaactagattatctggcactttatggccattatttttgggttgatggaccttctcaccacacaatttcccccttttttttttttgcatatcatatgttggttgatatttctcagaggtatccctatttcttcatacttaatatacatctccatttacatctttgactctctgaggtcaaaacaacaataaatgagaagtaaaacaactatatgtgtttgtatttacaactgtatctaaaattatataaccctagtttaccttcagagtaaactaggctgaagagttgttaataatgttgataaaaatgccattgaatcctttcttcaacaaatatttattgagtacctaacgtggcaaacgctgtgctaagtactggggatacagagataagtaagacacatttgcctccctgaaggacttcacagtgtagttggtaggagaaacaccagagcatacaccgttatataattagtgcagtaattgacatgaacatgagttta

SEQ ID NO: 735739 - DNA, 3874 bp, Homo sapiens
atgccagccagtgtggatgttgtgaccacagagcaggattgtgcattggctttagagctactcctcagctgatggcccacttttgtttatataaataagagcttctgccccacctgcagacatgtttactaatgatcatagccaggattagaaccactttcaaacattggggccttcttaacaaaagtctttgataacttaagaaccaaaagcaagaggagaggaaaacagaggctgaggagagagaccaaaaaggggaaaagaaaaatcagaaaaggaacgagaagaagaaccagaaggggcaggaggaggtggagatgcccagcaaggagaagcaacagccccagaagccacaggcgcagaagcggggcgggcgggagtgccgggaataaatgaagaagaggaaaagaagaaagaaaaaagcaaagaaaaaatcaaattgaaaaaaaaaaggaaaaggtcttactcatccagttccactgaagaggacacttcaaaacaaaagaaacaaaaatatcagaagaaagaaaagaaaaaagaaaaaaagagtaaatcaaaaaaagggaaacatcacaaaaaggaaaaaaagaagagaaaaaaggaaaagcattcttctacacctaatagttctgaattctccagaaagtaactgagactttggcttaagccgttaaatttaaaaatttgtttttaaaacgtgtttgcccttccttggaatttgctatatattatgctttgcaataaatcacagccttttccatatagacatttttcgtatttgggaccattatccctctggcaatatatttttaatgtgctgtaactgtaaagtattaaatcagtcttgttacttgatagccatgccccaagtatagctatttgtgtatactaaacacatcatttttggtatttgtgtctctgtgtgtttggctagtgttactacttcataagttcattgtaaaatggctttactgccatcaacatgggtcatctacctagcagttaatgagtattgctgaatcaggtgtccaccttccaatgatgaagcaaggtaaggggtaatgttttgctcttgacacagagaaatttaatagctttatgtactaaaatataatatcttttaaagatagtgaaattcttcagttttttaaatctctagggattttttttcaatgttgtagaagatgcagctgcttaatggtcttgactaggactttttaaatgaatggtgtctgcaggtagatgatcatgaaaatatctctaacaaagttttactcttctatgaaatgcagaatttctagtacctgcctcctttgtttttgtaataattaaaatacttcttgtataaagagattagttcagcctgttagtaagtctgcagagatgatgctgagttggttgtgatttttagaatagactcctgggttgttttacaaatgtgccatattggcatgtcttacagtgatacctcaaacacagaaatttttatttaggaagatagctaaatctttattagaactgatttttattgtattcagtataaattttatgaagcttgtttctatgagtactgtggaaaattttataaatgtgagcatatatatttattttgtctgacataatttgtagttttaaagcaagtttcacactgaacttaacgttttcataaatgaccagtttgggatgtttctctcttttactttagtggcaaactcaagagtaaaaagtgtcaaaaaaagaattgagaattttattctgtactttttaaaatttaagagccagggagttgcatcatgaaagcctttgtataataatggaaattttatatgggtaagcattttcaaacacatattagtagatacgttttttaaatttctattttcacattgatcagtgttactttgcttaatacttaggtagcccttatgtccactaaagtaaatgcttatgttgtagaagcatcgaacatcaaccaatgtcatggcacagcaccaaagattgcaaatacctcactatggtgcgcttagaaattttcaaattgataacctatagatacggctgcaggtgaattcatgatagtgaaatcagctaagtatacttaacctcacaggctagaaaggtttactgattcttgtttcacctggcacccaatgtggataccctcagtaagactcagggagccttataactcctcttaacatatgcttacccatgcttaaattctagggaagctgtatccacagccctctgcattgcagccatgagagctctcacgctttcaacccttccataacctaatttagtcatttgggcctctcaaaaggaaatgcttttgtttaaataggtcagtcagttactgggagaaaaaatacagagccagtaggtttttagggatttgttttgcctttgctgctagttttttgaaaatattcttcgattatcaagattttaaaaatcggtttttaatataaagcttttttaaaaacgaggctggcacaagtgcagtggtgtttctttactcccactgcttgacttgactagccttgaaaaaataacagtaaaataaaatattaaaaaataattagaaaatgctacaaaggcaatgaccttattccattgagtaagatagttaaaaatgatagtaattgtagtgaaatagttaattacttgtaagttttattactgttaattgtagagattataaattggctcattaggtttctgaatggtgacacaataatgactgagaagagcaaaagtcagtcctcgttaactaatgtagtatgcaaattaaaatattttaatgatcagtaattttccccccagaaatgatgttggtatttctaagtaaatttcccataattttagcatagtttatgaaattgaataaaaatttattttcactgaagtaattttcttctaatatgatattattattgagattggatgcaaatctcatgaatatgttttagaagaaaattaatgaaattccctcccaggcagtatgtaccagaaggaaaactgaatttagcagtaaaacagtcctggtcattctaactacctgtatgatcttgaacaaagtcacttagtttccctgggccttggtgtctttcgtctataaaatattgtaccagattatctctgaaatcacttcaaggtttaatatatataattatcaatattttaaaattcaagcaatattcactttagaaattattataacattctataatagtaaaggttgaatttattaatataataaacacgttcaacttcttcaagcagataattgatatttggttcatattcttacaacctaatgcatgtcattttcaccaaatgcaggcagaatttatatttaggtttgcatctggaactagattatctggcactttatggccattatttttgggttgatggaccttctcaccacacaatttcccccttttttttttttgcatatcatatgttggttgatatttctcagaggtatccctatttcttcatacttaatatacatctccatttacatctttgactctctgaggtcaaaacaacaataaatgagaagtaaaacaactatatgtgtttgtatttacaactgtatctaaaattatataaccctagtttaccttcagagtaaactaggctgaagagttgttaataatgttgataaaaatgccattgaatcctttcttcaacaaatatttattgagtacctaacgtggcaaacgctgtgctaagtactggggatacagagataagtaagacacatttgcctccctgaaggacttcacagtgtagttggtaggagaaacaccagagcatacaccgttatataattagtgcagtaattgacatgaacatgagttta

SEQ ID NO: 735740 - DNA, 472 bp, Homo sapiens
tcagaggatccccttatttccttctttatgctaccctggtcacctgacttttgaatgccgcaattttctccgagtagaccctaaaagggacatagttttggatgtcagcagtacaagtagtgaagatagcgatgaagagaatgaagaactgaataaattgcaggcattacaggaaaaaagaataaatgaagaagaggaaaagaagaaagaaaaaagcaaagaaaaaatcaaattgaaaaaaaaaaggaaaaggtcttactcatccagttccactgaagaggacacttcaaaacaaaagaaacaaaaatatcagaagaaagaaaagaaaaaagaaggaaaataagcttattttccttctttatggcaatacggtctttcttcagtggtcccatgaatgctttcttctcctccatggtctggaagcggccatggccaaacttggaggtggtgtcaatgaacttaaggtcaatct

SEQ ID NO: 735741 - DNA, 3895 bp, Homo sapiens
actggttctgccgtcgctagaggcgtacaggcccttcccgaccgtagcgagggtgctgctgcgctgggggaaggaaaacgccgctttgactgtgccttgttctcacagctggcgggaagcaagcgccttttcgaaagccagaggctcgagttacccctcttaccaccgtcatggcagtcccaggtaaggagcaattacagggcctctgcgtccaggttgcaacaaggacagtgtcagagcaggctgtaaaaaatgtggctaccctggtcacctgacttttgaatgccgcaattttctccgagtagaccctaaaagggacatagttttggatgtcagcagtacaagtagtgaagatagcgatgaagagaatgaagaactgaataaattgcaggcattacaggaaaaaagaataaatgaagaagaggaaaagaagaaagaaaaaagcaaagaaaaaatcaaattgaaaaaaaaaaggaaaaggtcttactcatccagttccactgaagaggacacttcaaaacaaaagaaacaaaaatatcagaagaaagaaaagaaaaaagaaaaaaagagtaaatcaaaaaaagggaaacatcacaaaaaggaaaaaaagaagagaaaaaaggaaaagcattcttctacacctaatagttctgaattctccagaaagtaactgagactttggcttaagccgttaaatttaaaaatttgtttttaaaacgtgtttgcccttccttggaatttgctatatattatgctttgcaataaatcacagccttttccatatagacatttttcgtatttgggaccattatccctctggcaatatatttttaatgtgctgtaactgtaaagtattaaatcagtcttgttacttgatagccatgccccaagtatagctatttgtgtatactaaacacatcatttttggtatttgtgtctctgtgtgtttggctagtgttactacttcataagttcattgtaaaatggctttactgccatcaacatgggtcatctacctagcagttaatgagtattgctgaatcaggtgtccaccttccaatgatgaagcaaggtaaggggtaatgttttgctcttgacacagagaaatttaatagctttatgtactaaaatataatatcttttaaagatagtgaaattcttcagttttttaaatctctagggattttttttcaatgttgtagaagatgcagctgcttaatggtcttgactaggactttttaaatgaatggtgtctgcaggtagatgatcatgaaaatatctctaacaaagttttactcttctatgaaatgcagaatttctagtacctgcctcctttgtttttgtaataattaaaatacttcttgtataaagagattagttcagcctgttagtaagtctgcagagatgatgctgagttggttgtgatttttagaatagactcctgggttgttttacaaatgtgccatattggcatgtcttacagtgatacctcaaacacagaaatttttatttaggaagatagctaaatctttattagaactgatttttattgtattcagtataaattttatgaagcttgtttctatgagtactgtggaaaattttataaatgtgagcatatatatttattttgtctgacataatttgtagttttaaagcaagtttcacactgaacttaacgttttcataaatgaccagtttgggatgtttctctcttttactttagtggcaaactcaagagtaaaaagtgtcaaaaaaagaattgagaattttattctgtactttttaaaatttaagagccagggagttgcatcatgaaagcctttgtataataatggaaattttatatgggtaagcattttcaaacacatattagtagatacgttttttaaatttctattttcacattgatcagtgttactttgcttaatacttaggtagcccttatgtccactaaagtaaatgcttatgttgtagaagcatcgaacatcaaccaatgtcatggcacagcaccaaagattgcaaatacctcactatggtgcgcttagaaattttcaaattgataacctatagatacggctgcaggtgaattcatgatagtgaaatcagctaagtatacttaacctcacaggctagaaaggtttactgattcttgtttcacctggcacccaatgtggataccctcagtaagactcagggagccttataactcctcttaacatatgcttacccatgcttaaattctagggaagctgtatccacagccctctgcattgcagccatgagagctctcacgctttcaacccttccataacctaatttagtcatttgggcctctcaaaaggaaatgcttttgtttaaataggtcagtcagttactgggagaaaaaatacagagccagtaggtttttagggatttgttttgcctttgctgctagttttttgaaaatattcttcgattatcaagattttaaaaatcggtttttaatataaagcttttttaaaaacgaggctggcacaagtgcagtggtgtttctttactcccactgcttgacttgactagccttgaaaaaataacagtaaaataaaatattaaaaaataattagaaaatgctacaaaggcaatgaccttattccattgagtaagatagttaaaaatgatagtaattgtagtgaaatagttaattacttgtaagttttattactgttaattgtagagattataaattggctcattaggtttctgaatggtgacacaataatgactgagaagagcaaaagtcagtcctcgttaactaatgtagtatgcaaattaaaatattttaatgatcagtaattttccccccagaaatgatgttggtatttctaagtaaatttcccataattttagcatagtttatgaaattgaataaaaatttattttcactgaagtaattttcttctaatatgatattattattgagattggatgcaaatctcatgaatatgttttagaagaaaattaatgaaattccctcccaggcagtatgtaccagaaggaaaactgaatttagcagtaaaacagtcctggtcattctaactacctgtatgatcttgaacaaagtcacttagtttccctgggccttggtgtctttcgtctataaaatattgtaccagattatctctgaaatcacttcaaggtttaatatatataattatcaatattttaaaattcaagcaatattcactttagaaattattataacattctataatagtaaaggttgaatttattaatataataaacacgttcaacttcttcaagcagataattgatatttggttcatattcttacaacctaatgcatgtcattttcaccaaatgcaggcagaatttatatttaggtttgcatctggaactagattatctggcactttatggccattatttttgggttgatggaccttctcaccacacaatttcccccttttttttttttgcatatcatatgttggttgatatttctcagaggtatccctatttcttcatacttaatatacatctccatttacatctttgactctctgaggtcaaaacaacaataaatgagaagtaaaacaactatatgtgtttgtatttacaactgtatctaaaattatataaccctagtttaccttcagagtaaactaggctgaagagttgttaataatgttgataaaaatgccattgaatcctttcttcaacaaatatttattgagtacctaacgtggcaaacgctgtgctaagtactggggatacagagataagtaagacacatttgcctccctgaaggacttcacagtgtagttggtaggagaaacaccagagcatacaccgttatataattagtgcagtaattgacatgaacatgagttta

SEQ ID NO: 735742 - DNA, 3863 bp, Homo sapiens
actggttctgccgtcgctagaggcgtacaggcccttcccgaccgtagcgagggtgctgctgcgctgggggaaggaaaacgccgctttgactgtgccttgttctcacagctggcgggaagcaagcgccttttcgaaagccagaggctcgagttacccctcttaccaccgtcatggcagtcccaggttgcaacaaggacagtgtcagagcaggctgtaaaaaatgtggctaccctggtcacctgacttttgaatgccgcaattttctccgagtagaccctaaaagggacatagttttggatgtcagcagtacaagtagtgaagatagcgatgaagagaatgaagaactgaataaattgcaggcattacaggaaaaaagaataaatgaagaagaggaaaagaagaaagaaaaaagcaaagaaaaaatcaaattgaaaaaaaaaaggaaaaggtcttactcatccagttccactgaagaggacacttcaaaacaaaagaaacaaaaatatcagaagaaagaaaagaaaaaagaaaaaaagagtaaatcaaaaaaagggaaacatcacaaaaaggaaaaaaagaagagaaaaaaggaaaagcattcttctacacctaatagttctgaattctccagaaagtaactgagactttggcttaagccgttaaatttaaaaatttgtttttaaaacgtgtttgcccttccttggaatttgctatatattatgctttgcaataaatcacagccttttccatatagacatttttcgtatttgggaccattatccctctggcaatatatttttaatgtgctgtaactgtaaagtattaaatcagtcttgttacttgatagccatgccccaagtatagctatttgtgtatactaaacacatcatttttggtatttgtgtctctgtgtgtttggctagtgttactacttcataagttcattgtaaaatggctttactgccatcaacatgggtcatctacctagcagttaatgagtattgctgaatcaggtgtccaccttccaatgatgaagcaaggtaaggggtaatgttttgctcttgacacagagaaatttaatagctttatgtactaaaatataatatcttttaaagatagtgaaattcttcagttttttaaatctctagggattttttttcaatgttgtagaagatgcagctgcttaatggtcttgactaggactttttaaatgaatggtgtctgcaggtagatgatcatgaaaatatctctaacaaagttttactcttctatgaaatgcagaatttctagtacctgcctcctttgtttttgtaataattaaaatacttcttgtataaagagattagttcagcctgttagtaagtctgcagagatgatgctgagttggttgtgatttttagaatagactcctgggttgttttacaaatgtgccatattggcatgtcttacagtgatacctcaaacacagaaatttttatttaggaagatagctaaatctttattagaactgatttttattgtattcagtataaattttatgaagcttgtttctatgagtactgtggaaaattttataaatgtgagcatatatatttattttgtctgacataatttgtagttttaaagcaagtttcacactgaacttaacgttttcataaatgaccagtttgggatgtttctctcttttactttagtggcaaactcaagagtaaaaagtgtcaaaaaaagaattgagaattttattctgtactttttaaaatttaagagccagggagttgcatcatgaaagcctttgtataataatggaaattttatatgggtaagcattttcaaacacatattagtagatacgttttttaaatttctattttcacattgatcagtgttactttgcttaatacttaggtagcccttatgtccactaaagtaaatgcttatgttgtagaagcatcgaacatcaaccaatgtcatggcacagcaccaaagattgcaaatacctcactatggtgcgcttagaaattttcaaattgataacctatagatacggctgcaggtgaattcatgatagtgaaatcagctaagtatacttaacctcacaggctagaaaggtttactgattcttgtttcacctggcacccaatgtggataccctcagtaagactcagggagccttataactcctcttaacatatgcttacccatgcttaaattctagggaagctgtatccacagccctctgcattgcagccatgagagctctcacgctttcaacccttccataacctaatttagtcatttgggcctctcaaaaggaaatgcttttgtttaaataggtcagtcagttactgggagaaaaaatacagagccagtaggtttttagggatttgttttgcctttgctgctagttttttgaaaatattcttcgattatcaagattttaaaaatcggtttttaatataaagcttttttaaaaacgaggctggcacaagtgcagtggtgtttctttactcccactgcttgacttgactagccttgaaaaaataacagtaaaataaaatattaaaaaataattagaaaatgctacaaaggcaatgaccttattccattgagtaagatagttaaaaatgatagtaattgtagtgaaatagttaattacttgtaagttttattactgttaattgtagagattataaattggctcattaggtttctgaatggtgacacaataatgactgagaagagcaaaagtcagtcctcgttaactaatgtagtatgcaaattaaaatattttaatgatcagtaattttccccccagaaatgatgttggtatttctaagtaaatttcccataattttagcatagtttatgaaattgaataaaaatttattttcactgaagtaattttcttctaatatgatattattattgagattggatgcaaatctcatgaatatgttttagaagaaaattaatgaaattccctcccaggcagtatgtaccagaaggaaaactgaatttagcagtaaaacagtcctggtcattctaactacctgtatgatcttgaacaaagtcacttagtttccctgggccttggtgtctttcgtctataaaatattgtaccagattatctctgaaatcacttcaaggtttaatatatataattatcaatattttaaaattcaagcaatattcactttagaaattattataacattctataatagtaaaggttgaatttattaatataataaacacgttcaacttcttcaagcagataattgatatttggttcatattcttacaacctaatgcatgtcattttcaccaaatgcaggcagaatttatatttaggtttgcatctggaactagattatctggcactttatggccattatttttgggttgatggaccttctcaccacacaatttcccccttttttttttttgcatatcatatgttggttgatatttctcagaggtatccctatttcttcatacttaatatacatctccatttacatctttgactctctgaggtcaaaacaacaataaatgagaagtaaaacaactatatgtgtttgtatttacaactgtatctaaaattatataaccctagtttaccttcagagtaaactaggctgaagagttgttaataatgttgataaaaatgccattgaatcctttcttcaacaaatatttattgagtacctaacgtggcaaacgctgtgctaagtactggggatacagagataagtaagacacatttgcctccctgaaggacttcacagtgtagttggtaggagaaacaccagagcatacaccgttatataattagtgcagtaattgacatgaacatgagttta

SEQ ID NO: 735743 - DNA, 271 bp, Homo sapiens; identical to SEQ ID NO: 11667

SEQ ID NO: 735744 - DNA, 821 bp, Homo sapiens; identical to SEQ ID NO: 11666

SEQ ID NO: 735745 - DNA, 4010 bp, Homo sapiens
actggttctgccgtcgctagaggcgtacaggcccttcccgaccgtagcgagggtgctgctgcgctgggggaaggaaaacgccgctttgactgtgccttgttctcacagctggcgggaagcaagcgccttttcgaaagccagaggctcgagttacccctcttaccaccgtcatggcagtcccagttgttgaaattacctccaacattcatgtcagtgattcaccactctccatgaagagctgaactggcacaagtggcaacgtatgttactgatgtaattggcacaaaactgttttcttattatctccttcactgaagccctatagccaaggttgcaacaaggacagtgtcagagcaggctgtaaaaaatgtggctaccctggtcacctgacttttgaatgccgcaattttctccgagtagaccctaaaagggacatagttttggatgtcagcagtacaagtagtgaagatagcgatgaagagaatgaagaactgaataaattgcaggcattacaggaaaaaagaataaatgaagaagaggaaaagaagaaagaaaaaagcaaagaaaaaatcaaattgaaaaaaaaaaggaaaaggtcttactcatccagttccactgaagaggacacttcaaaacaaaagaaacaaaaatatcagaagaaagaaaagaaaaaagaaaaaaagagtaaatcaaaaaaagggaaacatcacaaaaaggaaaaaaagaagagaaaaaaggaaaagcattcttctacacctaatagttctgaattctccagaaagtaactgagactttggcttaagccgttaaatttaaaaatttgtttttaaaacgtgtttgcccttccttggaatttgctatatattatgctttgcaataaatcacagccttttccatatagacatttttcgtatttgggaccattatccctctggcaatatatttttaatgtgctgtaactgtaaagtattaaatcagtcttgttacttgatagccatgccccaagtatagctatttgtgtatactaaacacatcatttttggtatttgtgtctctgtgtgtttggctagtgttactacttcataagttcattgtaaaatggctttactgccatcaacatgggtcatctacctagcagttaatgagtattgctgaatcaggtgtccaccttccaatgatgaagcaaggtaaggggtaatgttttgctcttgacacagagaaatttaatagctttatgtactaaaatataatatcttttaaagatagtgaaattcttcagttttttaaatctctagggattttttttcaatgttgtagaagatgcagctgcttaatggtcttgactaggactttttaaatgaatggtgtctgcaggtagatgatcatgaaaatatctctaacaaagttttactcttctatgaaatgcagaatttctagtacctgcctcctttgtttttgtaataattaaaatacttcttgtataaagagattagttcagcctgttagtaagtctgcagagatgatgctgagttggttgtgatttttagaatagactcctgggttgttttacaaatgtgccatattggcatgtcttacagtgatacctcaaacacagaaatttttatttaggaagatagctaaatctttattagaactgatttttattgtattcagtataaattttatgaagcttgtttctatgagtactgtggaaaattttataaatgtgagcatatatatttattttgtctgacataatttgtagttttaaagcaagtttcacactgaacttaacgttttcataaatgaccagtttgggatgtttctctcttttactttagtggcaaactcaagagtaaaaagtgtcaaaaaaagaattgagaattttattctgtactttttaaaatttaagagccagggagttgcatcatgaaagcctttgtataataatggaaattttatatgggtaagcattttcaaacacatattagtagatacgttttttaaatttctattttcacattgatcagtgttactttgcttaatacttaggtagcccttatgtccactaaagtaaatgcttatgttgtagaagcatcgaacatcaaccaatgtcatggcacagcaccaaagattgcaaatacctcactatggtgcgcttagaaattttcaaattgataacctatagatacggctgcaggtgaattcatgatagtgaaatcagctaagtatacttaacctcacaggctagaaaggtttactgattcttgtttcacctggcacccaatgtggataccctcagtaagactcagggagccttataactcctcttaacatatgcttacccatgcttaaattctagggaagctgtatccacagccctctgcattgcagccatgagagctctcacgctttcaacccttccataacctaatttagtcatttgggcctctcaaaaggaaatgcttttgtttaaataggtcagtcagttactgggagaaaaaatacagagccagtaggtttttagggatttgttttgcctttgctgctagttttttgaaaatattcttcgattatcaagattttaaaaatcggtttttaatataaagcttttttaaaaacgaggctggcacaagtgcagtggtgtttctttactcccactgcttgacttgactagccttgaaaaaataacagtaaaataaaatattaaaaaataattagaaaatgctacaaaggcaatgaccttattccattgagtaagatagttaaaaatgatagtaattgtagtgaaatagttaattacttgtaagttttattactgttaattgtagagattataaattggctcattaggtttctgaatggtgacacaataatgactgagaagagcaaaagtcagtcctcgttaactaatgtagtatgcaaattaaaatattttaatgatcagtaattttccccccagaaatgatgttggtatttctaagtaaatttcccataattttagcatagtttatgaaattgaataaaaatttattttcactgaagtaattttcttctaatatgatattattattgagattggatgcaaatctcatgaatatgttttagaagaaaattaatgaaattccctcccaggcagtatgtaccagaaggaaaactgaatttagcagtaaaacagtcctggtcattctaactacctgtatgatcttgaacaaagtcacttagtttccctgggccttggtgtctttcgtctataaaatattgtaccagattatctctgaaatcacttcaaggtttaatatatataattatcaatattttaaaattcaagcaatattcactttagaaattattataacattctataatagtaaaggttgaatttattaatataataaacacgttcaacttcttcaagcagataattgatatttggttcatattcttacaacctaatgcatgtcattttcaccaaatgcaggcagaatttatatttaggtttgcatctggaactagattatctggcactttatggccattatttttgggttgatggaccttctcaccacacaatttcccccttttttttttttgcatatcatatgttggttgatatttctcagaggtatccctatttcttcatacttaatatacatctccatttacatctttgactctctgaggtcaaaacaacaataaatgagaagtaaaacaactatatgtgtttgtatttacaactgtatctaaaattatataaccctagtttaccttcagagtaaactaggctgaagagttgttaataatgttgataaaaatgccattgaatcctttcttcaacaaatatttattgagtacctaacgtggcaaacgctgtgctaagtactggggatacagagataagtaagacacatttgcctccctgaaggacttcacagtgtagttggtaggagaaacaccagagcatacaccgttatataattagtgcagtaattgacatgaacatgagttta

SEQ ID NO: 735746 - DNA, 680 bp, Homo sapiens
actggttctgccgtcgctagaggcgtacaggcccttcccgaccgtagcgagggtgctgctgcgctgggggaaggaaaacgccgctttgactgtgccttgttctcacagctggcgggaagcaagcgccttttcgaaagccagaggctcgagttacccctcttaccaccgtcatggcagtcccaggttgcaacaaggacagtgtcagagcaggctgtaaaaaatgtggctaccctggtcacctgacttttgaatgccgcaattttctccgagtagaccctaaaagggacatagttttggatgtcagcagtacaagtagtgaagatagcgatgaagagaatgaagaactgaataaattgcaggcattacaggaaaaaagaataaatgaagaagaggaaaagaagaaagaaaaaagcaaagaaaaaatcaaattgaaaaaaaaaaggaaaaggtcttactcatccagttccactgaagaggacacttcaaaacaaaagaaacaaaaattattcataaggactagcatcttatcacaacgacaaaaatggagtgaaatctaaaacaaagcggtaaaccattcacacaaactgggaacaatacaaggaaccaggaataagaagggagaaaggcaatctctcttctaacacccttacatacgttttctgtaatctcttcccacgaaa

SEQ ID NO: 735747 - DNA, 3940 bp, Homo sapiens
actggttctgccgtcgctagaggcgtacaggcccttcccgaccgtagcgagggtgctgctgcgctgggggaaggaaaacgccgctttgactgtgccttgttctcacagctggcgggaagcaagcgccttttcgaaagccagaggctcgagttacccctcttaccaccgtcatggcagtcccagttgttgaaattacctccaacattcatgtcagtgattcaccactctccatgaagagctgaactggcacaagtggcaacgttgcaacaaggacagtgtcagagcaggctgtaaaaaatgtggctaccctggtcacctgacttttgaatgccgcaattttctccgagtagaccctaaaagggacatagttttggatgtcagcagtacaagtagtgaagatagcgatgaagagaatgaagaactgaataaattgcaggcattacaggaaaaaagaataaatgaagaagaggaaaagaagaaagaaaaaagcaaagaaaaaatcaaattgaaaaaaaaaaggaaaaggtcttactcatccagttccactgaagaggacacttcaaaacaaaagaaacaaaaatatcagaagaaagaaaagaaaaaagaaaaaaagagtaaatcaaaaaaagggaaacatcacaaaaaggaaaaaaagaagagaaaaaaggaaaagcattcttctacacctaatagttctgaattctccagaaagtaactgagactttggcttaagccgttaaatttaaaaatttgtttttaaaacgtgtttgcccttccttggaatttgctatatattatgctttgcaataaatcacagccttttccatatagacatttttcgtatttgggaccattatccctctggcaatatatttttaatgtgctgtaactgtaaagtattaaatcagtcttgttacttgatagccatgccccaagtatagctatttgtgtatactaaacacatcatttttggtatttgtgtctctgtgtgtttggctagtgttactacttcataagttcattgtaaaatggctttactgccatcaacatgggtcatctacctagcagttaatgagtattgctgaatcaggtgtccaccttccaatgatgaagcaaggtaaggggtaatgttttgctcttgacacagagaaatttaatagctttatgtactaaaatataatatcttttaaagatagtgaaattcttcagttttttaaatctctagggattttttttcaatgttgtagaagatgcagctgcttaatggtcttgactaggactttttaaatgaatggtgtctgcaggtagatgatcatgaaaatatctctaacaaagttttactcttctatgaaatgcagaatttctagtacctgcctcctttgtttttgtaataattaaaatacttcttgtataaagagattagttcagcctgttagtaagtctgcagagatgatgctgagttggttgtgatttttagaatagactcctgggttgttttacaaatgtgccatattggcatgtcttacagtgatacctcaaacacagaaatttttatttaggaagatagctaaatctttattagaactgatttttattgtattcagtataaattttatgaagcttgtttctatgagtactgtggaaaattttataaatgtgagcatatatatttattttgtctgacataatttgtagttttaaagcaagtttcacactgaacttaacgttttcataaatgaccagtttgggatgtttctctcttttactttagtggcaaactcaagagtaaaaagtgtcaaaaaaagaattgagaattttattctgtactttttaaaatttaagagccagggagttgcatcatgaaagcctttgtataataatggaaattttatatgggtaagcattttcaaacacatattagtagatacgttttttaaatttctattttcacattgatcagtgttactttgcttaatacttaggtagcccttatgtccactaaagtaaatgcttatgttgtagaagcatcgaacatcaaccaatgtcatggcacagcaccaaagattgcaaatacctcactatggtgcgcttagaaattttcaaattgataacctatagatacggctgcaggtgaattcatgatagtgaaatcagctaagtatacttaacctcacaggctagaaaggtttactgattcttgtttcacctggcacccaatgtggataccctcagtaagactcagggagccttataactcctcttaacatatgcttacccatgcttaaattctagggaagctgtatccacagccctctgcattgcagccatgagagctctcacgctttcaacccttccataacctaatttagtcatttgggcctctcaaaaggaaatgcttttgtttaaataggtcagtcagttactgggagaaaaaatacagagccagtaggtttttagggatttgttttgcctttgctgctagttttttgaaaatattcttcgattatcaagattttaaaaatcggtttttaatataaagcttttttaaaaacgaggctggcacaagtgcagtggtgtttctttactcccactgcttgacttgactagccttgaaaaaataacagtaaaataaaatattaaaaaataattagaaaatgctacaaaggcaatgaccttattccattgagtaagatagttaaaaatgatagtaattgtagtgaaatagttaattacttgtaagttttattactgttaattgtagagattataaattggctcattaggtttctgaatggtgacacaataatgactgagaagagcaaaagtcagtcctcgttaactaatgtagtatgcaaattaaaatattttaatgatcagtaattttccccccagaaatgatgttggtatttctaagtaaatttcccataattttagcatagtttatgaaattgaataaaaatttattttcactgaagtaattttcttctaatatgatattattattgagattggatgcaaatctcatgaatatgttttagaagaaaattaatgaaattccctcccaggcagtatgtaccagaaggaaaactgaatttagcagtaaaacagtcctggtcattctaactacctgtatgatcttgaacaaagtcacttagtttccctgggccttggtgtctttcgtctataaaatattgtaccagattatctctgaaatcacttcaaggtttaatatatataattatcaatattttaaaattcaagcaatattcactttagaaattattataacattctataatagtaaaggttgaatttattaatataataaacacgttcaacttcttcaagcagataattgatatttggttcatattcttacaacctaatgcatgtcattttcaccaaatgcaggcagaatttatatttaggtttgcatctggaactagattatctggcactttatggccattatttttgggttgatggaccttctcaccacacaatttcccccttttttttttttgcatatcatatgttggttgatatttctcagaggtatccctatttcttcatacttaatatacatctccatttacatctttgactctctgaggtcaaaacaacaataaatgagaagtaaaacaactatatgtgtttgtatttacaactgtatctaaaattatataaccctagtttaccttcagagtaaactaggctgaagagttgttaataatgttgataaaaatgccattgaatcctttcttcaacaaatatttattgagtacctaacgtggcaaacgctgtgctaagtactggggatacagagataagtaagacacatttgcctccctgaaggacttcacagtgtagttggtaggagaaacaccagagcatacaccgttatataattagtgcagtaattgacatgaacatgagttta

SEQ ID NO: 735748 - DNA, 614 bp, Homo sapiens
gataaaaaaaaaaaaaaaaaaaaaaaaacttttttttgcggtgaggttgtctagtccacgctcggagccatgccgtccaagggtccgctgcagtcggtgcaggtcttcggacgcaagaagacagcgacagctgtggcgcactgcaaacgcggcaatggtctcatcaaggtgaacgggcggcccctggagatgattgagccgcgcacgctacagtacaagctgctggagccagttctgcttctcggcaaggagcgatttgctggtgtagacatccgtgtccgtgtaaagggtggtggtcacgtggcccagatttatgctatccgtcagtccatctccaaagccctggtggcctattaccagaaatatgtggatgaggcttccaagaaggagatcaaagacatcctcatccagtatgaccggaccctgctggtagctgaccctcgtcgctgcgagtccaaaaagtttggaggccctggtgcccgcgctcgctaccagaaatcctaccgataagcccatcgtgactcaaaactcacttgtataataaacagtttttgagggattttaaagtttcaacagacatagcaagacccagattatgcacaacatgtcgtaca

SEQ ID NO: 735749 - DNA, 632 bp, Homo sapiens
  misc_feature (61)..(62): n is a, c, g, or t
cctccccccctcccgcccccgcccgtcacgtactatgcccccgcctgggtggcgaattcgnnacgagggcggtgaggttgtctagtccacgctcggagccatgccgtccaagggtccgctgcagtcggtgcaggtcttcggacgcaagaagacagcgacagctgtggcgcactgcaaacgcggcaatggtctcatcaaggtgaacgggcggcccctggagatgattgagccgcgcacgctacagtacaagctgctggagccagttctgcttctcggcaaggagcgatttgctggtgtagacatccgtgtccgtgtaaagggtggtggtcacgtggcccagatttatgctatccgtcagtccatctccaaagccctggtggcctattaccagaaatatgtggatgaggcttccaagaaggagatcaaagacatcctcatccagtatgaccggaccctgctggtagctgaccctcgtcgctgcgagtccaaaaagtttggaggccctggtgcccgcgctcgctaccagaaatcctaccgataagcccatcgtgactcaaaactcacttgtataataaacagtttttgagggattttaaagtttcaacggacgcgtgggtcgacccacgcgtccg

SEQ ID NO: 735750 - DNA, 830 bp, Homo sapiens
aaaaaacaagacaaacttaggctagtacgaggcctggtgtttaatcggccgaggggcggtgaggttgtctagtccacgctcggagccatgccgtccaagggtccgctgcagtcggtgcaggtcttcggacgcaagaagacagcgacagctgtggcgcactgcaaacgcggcaatggtctcatcaaggtgaacgggcggcccctggagatgattgagccgcgcacgctacagtacaagctgctggagccagttctgcttctcggcaaggagcgatttgctggtgtagacatccgtgtccgtgtaaagggtggtggtcacgtggcccagatttatgctatccgtcagtccatctccaaagccctggtggcctattaccagaaatatgtggatgaggcttccaagaaggagatcaaagacatcctcatccagtatgaccggaccctgctggtagctgaccctcgtcgctgcgagtccaaaaagtttggaggccctggtgcccgcgctcgctaccagaaatcctaccgataagcccatcgtgactcaaaactcacttgtataataaacagtttttgagggattttaaagtttcaaaacaaaccaaaaaaaacaagaaacaaacaaaagaggggggggccggactaaagaaaagtccccctcacaggagggggcgcccggcgagtagacggcgtaaccacgagtttctgtggcacagagggggcccccataaaggagaggcgaattaaaaccgataggaaactgggccgagcggttaaacaacgtcgggcgcgggggcaaacaggggtaaccggggcactctggcaaggaaccct

SEQ ID NO: 735751 - DNA, 1040 bp, Homo sapiens
  misc_feature (63)..(63): n is a, c, g, or t
  misc_feature (625)..(625): n is a, c, g, or t
  misc_feature (630)..(630): n is a, c, g, or t
  misc_feature (1039)..(1039): n is a, c, g, or t
aacacccccacccacaaactatacgtgctataaagggtactgagggccccgggtgttatcggncgagcggtgaggttgtctagtccacgctcggagccatgccgtccaagggtccgctgcagtcggtgcaggtcttcggacgcaagaagacagcgacagctgtggcgcactgcaaacgcggcaatggtctcatcaaggtgaacgggcggcccctggagatgattgagccgcgcacgctacagtacaagctgctggagccagttctgcttctcggcaaggagcgatttgctggtgtagacatccgtgtccgtgtaaagggtggtggtcacgtggcccagatttatgctatccgtcagtccatctccaaagccctggtggcctattaccagaaatatgtggatgaggcttccaagaaggagatcaaagacatcctcatccagtatgaccggaccctgctggtagctgaccctcgtcgctgcgagtccaaaaagtttggaggccctggtgcccgcgctcgctaccagaaatcctaccgataagcccatcgtgactcaaaactcacttgtataataaacagtttttgagggattttaaagtttcaaaaaaaaaaaaaaaaactcgagantagtnctctctctctcggtgggggatgagcccttccggtgtgggcttccgtttggcaccaatcgaggtcagccctgtattttgtggacctccatcgggggggaagtgtgagctcctctcggaagaatccccggggggctcttctccccggtgagccagaccatgtcgcttgttaactagggtacccttttttgatccccttacaatgagcccgttgctgttactggtttccgtacccgggggcagagtgcgcccggcgggaaacttctggtcatggccttgctggtttggccttgaccaatggtctgtggcccgggacttgttggaccaggcgtgcccgggggggggggcccaagacggggaccacccaggttggagggggggcccctgccaactgcccgcccgctgtgcggcng

SEQ ID NO: 735752 - DNA, 841 bp, Homo sapiens
taccaccacatcacacaaccaaaagataggcataggcggagcctgggtgttaatcaggacgaggcggtgaggttgtctagtccacgctcggagccatgccgtccaagggtccgctgcagtcggtgcaggtcttcggacgcaagaagacagcgacagctgtggcgcactgcaaacgcggcaatggtctcatcaaggtgaacgggcggcccctggagatgattgagccgcgcacgctacagtacaagctgctggagccagttctgcttctcggcaaggagcgatttgctggtgtagacatccgtgtccgtgtaaagggtggtggtcacgtggcccagatttatgctatccgtcagtccatctccaaagccctggtggcctattaccagaaatatgtggatgaggcttccaagaaggagatcaaagacatcctcatccagtatgaccggaccctgctggtagctgaccctcgtcgctgcgagtccaaaaagtttggaggccctggtgcccgcgctcgctaccagaaatcctaccgataagcccatcgtgactcaaaactcacttgtataataaacagtttttgagggattttaaagtttcaaacacacaacaaaaaccacaaaacaccccgcgcgcacctccacagacagaggacggcggacaaacaaagccacagaaaagggcccagggccaaaagcggcaacacgtgaccccaagcgttaccggcggcaacaagcggcggaaaaaaccagcgcgagagacccccccccacaagcggacgaccaaaatcaaaaaccgcaaaacgcccacggctaacaccgggacaaaagaaaccccgacaaaa

SEQ ID NO: 735753 - DNA, 846 bp, Homo sapiens
ccctaatccggctaaggtacgagccccggcgttgttgtaaattcggccacgcagcgcggtgaggttgtctagtccacgctcggagccatgccgtccaagggtccgctgcagtcggtgcaggtcttcggacgcaagaagacagcgacagctgtggcgcactgcaaacgcggcaatggtctcatcaaggtgaacgggcggcccctggagatgattgagccgcgcacgctacagtacaagctgctggagccagttctgcttctcggcaaggagcgatttgctggtgtagacatccgtgtccgtgtaaagggtggtggtcacgtggcccagatttatgctatccgtcagtccatctccaaagccctggtggcctattaccagaaatatgtggatgaggcttccaagaaggagatcaaagacatcctcatccagtatgaccggaccctgctggtagctgaccctcgtcgctgcgagtccaaaaagtttggaggccctggtgcccgcgctcgctaccagaaatcctaccgataagcccatcgtgactcaaaactcacttgtataataaacagtttttgagggattttaaagtttcaaacacaacacacaaaacaatcaaacacaaacaacacaaaaccagggggacgaaccctaatcattaccacggggcgagggaaacacagaaagctccgacgacacagcggccccgagcggacacacatgtgtcaccccgcaaacccccgactagtctgcgctcccagcggggcgaagaaccctgcgcggggcacccccacatgaggagccagcataaagccgcaaaccaaccgcgtacccgcgcataacaccccacaa

SEQ ID NO: 735754 - DNA, 813 bp, Homo sapiens
aagtagttaccgggccgatcgtccagttgttagttacgtaacgaggcgcgcgtgaagtggtcttgatctgggccgtcggattccacaacgcggtgaggttgtctagtccacgctcggagccatgccgtccaagggtccgctgcagtcggtgcaggtcttcggacgcaagaagacagcgacagctgtggcgcactgcaaacgcggcaatggtctcatcaaggtgaacgggcggcccctggagatgattgagccgcgcacgctacagtacaagctgctggagccagttctgcttctcggcaaggagcgatttgctggtgtagacatccgtgtccgtgtaaagggtggtggtcacgtggcccagatttatgctatccgtcagtccatctccaaagccctggtggcctattaccagaaatatgtggatgaggcttccaagaaggagatcaaagacatcctcatccagtatgaccggaccctgctggtagctgaccctcgtcgctgcgagtccaaaaagtttggaggccctggtgcccgcgctcgctaccagaaatcctaccgataagcccatcgtgactcaaaactcacttgtataataaacagtttttgagggattttaaagtttcaatacacagttttccaagaaacaaaaaaaacaacaaacaacacaacaaaaaaaaaaaaaaaaaaaccacacggaggcaacttcatatctgcgggtgccgcaaacgagtggctttgtgcactagtgcccctgtgtctccatgacggtggtacctgggacgcccccttttgtggtcccaggtgtcaaccctc

SEQ ID NO: 735755 - DNA, 777 bp, Homo sapiens
  misc_feature (603)..(603): n is a, c, g, or t
aagtcaggagggctcgcgtttacagttctacatctacatgtgccctcggcgtgttacccatttgcagacctggttcttggtctccgagacaacacgcatagaccacgcgcgagtcgtcgcgcagcagtgtagcccatccagaatggacaccactcagagctgctggagccagttctgcttctcggcaaggagcgatttgctggtgtagacatccgtgtccgtgtaaagggtggtggtcacgtggcccagatttatgctatccgtcagtccatctccaaagccctggtggcctattaccagaaatatgtggatgaggcttccaagaaggagatcaaagacatcctcatccagtatgaccggaccctgctggtagctgaccctcgtcgctgcgagtccaaaaagtttggaggccctggtgcccgcgctcgctaccagaaatcctaccgataagcccatcgtgactcaaaactcacttgtataataaacagtttttgagggattttaaagtttcaatttcaagaactgtgtgtggccttatgtgttggtattggatgtttaaccagacagaaatcagtaaacatcctggacctataaaaaacgaanaaaacacacgagggcaacccacaccacacaaaaaaaaaactgggggcgccgggcccaaaacagtgtaaacccacttggggggcggcgcccaagagaaaagcacggcctcggggacaagagaaccgggcgcagcggggttccccaaacaagccggggacggggtggacacacggg

SEQ ID NO: 735756 - DNA, 2998 bp, Homo sapiens
  misc_feature (2806)..(2806): n is a, c, g, or t
  misc_feature (2840)..(2841): n is a, c, g, or t
  misc_feature (2843)..(2843): n is a, c, g, or t
  misc_feature (2855)..(2856): n is a, c, g, or t
  misc_feature (2998)..(2998): n is a, c, g, or t
agtgctcaaggcgcctgcgcagaccctgaaaagcggccagggtggcccctagctttccttttccggttgcggcgccgcgcggtgaggttgtctagtccacgctcggagccatgccgtccaagggtccgctgcagtcggtgcaggtcttcggacgcaagaagacagcgacagctgtggcgcactgcaaacgcggcaatggtctcatcaaggtgaacgggcggcccctggagatgattgagccgcgcacgctacagtacaaggtgctgggatccggcaccggcgttgagtggatggaggactcttggagacagagatgttgtagctcttgaaagctgggggggctggcatcagcaacgggatgtttagaagttgtgttgggtgtagaacagtggggtatttggcaatagagctgggcttggggttcagaagatgtaaaagctgagatgggggtgttgaagattaagggtttgctttgagaactgggatgttaggaagctcacctcactggggcggggggacccaaagggtgaagggacaccgactattttttattttatttatttgttttgagagggagtctcgctgtgtcgcccaggctggagtgtagtggcgcgatctcggatcactgcaaccttcgcctcccgggttaaagcgattctcctgcctcagcctcttgagtagctgagattacaggcatgcaccaccacgcccggctaatttttgtatttttagtagagacggggtttcgccatattggccagagtggtctcgaactcattacctcaggtgatccaccagcctcggcctcccgaagtgctgggattgcaggcgtcagccaccgtgtgcggccgaatttgggtctgtttaaatgcttgcttgtaaaaggggttcctctgttccctttttgggactctcaatttctttggctcagaatggaaagaaaccagagtctgatttctgccccttctgaactctactacttttaaaagaaagaatatctacattgcagggtcagttaaaaaaaatttttttgagttataaggttgttttttaaaaacagtatcttgctgtcacctaccctggagtgcagtagcacaatcctaatgaactgcagccttaaactcctgagttggagatcctcccacctcagcctttcggttgccaagactacaggcacatcaccacgcctggctcatttgagaaatatttttctgtagacgtggggtctcactttattgcccaggctggtccttggtctcatgtgatccttctgcctggactgggattacaggtgtgatcaccatgcctggcctagaatttaataaaaattctgagatttcctttgtgtagcagatgttgaatgttactgttattggctgtcactgtatttgaaggatttgtatgtgtaccctctgttgagttttggggacatagcagtgatccagatgacttcaggtcttgccttcatggacctgccagcctagttggggagaaggactgggcccaataccagaagctgatccaaagtggtcagaactggggaaggagacctgtgagctgaaagcaggtaaaggaagtatccagacagaggcactggtaaaagacctggagctgggaagggtctagggaccagggacaggttgtactgtaattctggaaacctgtgaggctcaaagaaagggcagagagctcaggtgggaaatagaaaaggcacctgaacagtccagggatggctttcgactacttgaaacagccttgggagtttcagaagctattggaatgctccttactgttcagccttctaagaaccagtcttagaggtagggtgtctgaggtccagtgagggacacaagtaggagggagcccagatcttgttccctttaccttgcctatatttcttaacaccacttcagcagtctcatatctggcttttttgactttcctcttctctgggtctgtagagggccttggagtgacaccctgacccccatccactagtacttgaaggccagtggtggcagaagccacagaaacaagaagcccagtgagatggctaagctgcccagcatgtaacttaaatccctgttcattccccattcctttagctgctggagccagttctgcttctcggcaaggagcgatttgctggtgtagacatccgtgtccgtgtaaagggtggtggtcacgtggcccagatttatggtgagtcccaggaactgggcgcatggaggaggtggctctgggagggaggccttcacagcgctcctgtaccctttaattgtgtgtctttctcacagctatccgtcagtccatctccaaagccctggtggcctattaccagaaattgtgagtgagcatgggtccttcccatgaggtagatgggtgtgtggggatcaagtcaaggactctgtgtgattatctaaatcctcgtccctgctcttcttgccagatgtggatgaggcttccaagaaggagatcaaagacatcctcatccagtatgaccggaccctgctggtagctgaccctcgtcgctgcgagtccaaaaagtttggaggccctggtgcccgcgctcgctaccagaaatcctaccgataagcccatcgtgactcaaaactcacttgtataataaacagtttttgagggattttaaagtttcaaaaaacaaaaaacaaaaaaaaaaaaaccgggggcttttttgcggggggggggaaaaaggggttttggaaggggccctgggccatagtgggttccctggacccagtttttttggtccaagggggaaatttggggggcccccataaggggnggcggataaaattcgaaaagccggggtacctgtnntnttccaaaaaacnnttaacacacaaggcgcaaaataaaaggcgcacactgtaaccaaacagagacgacaaacacacaatgccactacaacactccctaccacataaacttattctcactcaaatatgtctcatactataacagtaacaacatgaan

SEQ ID NO: 735757 - DNA, 2900 bp, Homo sapiens
  misc_feature (2759)..(2761): n is a, c, g, or t
  misc_feature (2839)..(2840): n is a, c, g, or t
  misc_feature (2843)..(2844): n is a, c, g, or t
  misc_feature (2854)..(2854): n is a, c, g, or t
  misc_feature (2859)..(2859): n is a, c, g, or t
  misc_feature (2872)..(2873): n is a, c, g, or t
  misc_feature (2875)..(2875): n is a, c, g, or t
  misc_feature (2888)..(2888): n is a, c, g, or t
  misc_feature (2895)..(2895): n is a, c, g, or t
agtgctcaaggcgcctgcgcagaccctgaaaagcggccagggtggcccctagctttccttttccggttgcggcgccgcgcggtgaggttgtctagtccacgctcggagccatgccgtccaagggtccgctgcagtcggtgcaggtcttcggacgcaagaagacagcgacagctgtggcgcactgcaaacgcggcaatggtctcatcaaggtgaacgggcggcccctggagatgattgagccgcgcacgctacagtacaaggtgctgggatccggcaccggcgttgagtggatggaggactcttggagacagagatgttgtagctcttgaaagctgggggggctggcatcagcaacgggatgtttagaagttgtgttgggtgtagaacagtggggtatttggcaatagagctgggcttggggttcagaagatgtaaaagctgagatgggggtgttgaagattaagggtttgctttgagaactgggatgttaggaagctcacctcactggggcggggggacccaaagggtgaagggacaccgactattttttattttatttatttgttttgagagggagtctcgctgtgtcgcccaggctggagtgtagtggcgcgatctcggatcactgcaaccttcgcctcccgggttaaagcgattctcctgcctcagcctcttgagtagctgagattacaggcatgcaccaccacgcccggctaatttttgtatttttagtagagacggggtttcgccatattggccagagtggtctcgaactcattacctcaggtgatccaccagcctcggcctcccgaagtgctgggattgcaggcgtcagccaccgtgtgcggccgaatttgggtctgtttaaatgcttgcttgtaaaaggggttcctctgttccctttttgggactctcaatttctttggctcagaatggaaagaaaccagagtctgatttctgccccttctgaactctactacttttaaaagaaagaatatctacattgcagggtcagttaaaaaaaatttttttgagttataaggttgttttttaaaaacagtatcttgctgtcacctaccctggagtgcagtagcacaatcctaatgaactgcagccttaaactcctgagttggagatcctcccacctcagcctttcggttgccaagactacaggcacatcaccacgcctggctcatttgagaaatatttttctgtagacgtggggtctcactttattgcccaggctggtccttggtctcatgtgatccttctgcctggactgggattacaggtgtgatcaccatgcctggcctagaatttaataaaaattctgagatttcctttgtgtagcagatgttgaatgttactgttattggctgtcactgtatttgaaggatttgtatgtgtaccctctgttgagttttggggacatagcagtgatccagatgacttcaggtcttgccttcatggacctgccagcctagttggggagaaggactgggcccaataccagaagctgatccaaagtggtcagaactggggaaggagacctgtgagctgaaagcaggtaaaggaagtatccagacagaggcactggtaaaagacctggagctgggaagggtctagggaccagggacaggttgtactgtaattctggaaacctgtgaggctcaaagaaagggcagagagctcaggtgggaaatagaaaaggcacctgaacagtccagggatggctttcgactacttgaaacagccttgggagtttcagaagctattggaatgctccttactgttcagccttctaagaaccagtcttagaggtagggtgtctgaggtccagtgagggacacaagtaggagggagcccagatcttgttccctttaccttgcctatatttcttaacaccacttcagcagtctcatatctggcttttttgactttcctcttctctgggtctgtagagggccttggagtgacaccctgacccccatccactagtacttgaaggccagtggtggcagaagccacagaaacaagaagcccagtgagatggctaagctgcccagcatgtaacttaaatccctgttcattccccattcctttagctgctggagccagttctgcttctcggcaaggagcgatttgctggtgtagacatccgtgtccgtgtaaagggtggtggtcacgtggcccagatttatggtgagtcccaggaactgggcgcatggaggaggtggctctgggagggaggccttcacagcgctcctgtaccctttaattgtgtgtctttctcacagctatccgtcagtccatctccaaagccctggtggcctattaccagaaattgtgagtgagcatgggtccttcccatgaggtagatgggtgtgtggggatcaagtcaaggactctgtgtgattatctaaatcctcgtccctgctcttcttgccagatgtggatgaggcttccaagaaggagatcaaagacatcctcatccagtatgaccggaccctgctggtagctgaccctcgtcgctgcgagtccaaaaagtttggaggccctggtgcccgcgctcgctaccagaaatcctaccgataagcccatcgtgactcaaaactcacttgtataataaacagtttttgagggattttaaagtttcaacaaaaaaaaaaaaaaaaaaaaaaaaaaaaaaaaaaaaaaaaaaaaaaaaaaaaaaaaaaaaaaaaaaaaaaaaaaaaaaaaaaaaaaaaaaaaaaaaaaannnaaaaaaaaaaaaaaaaaaaaaaaaaaaaccccggggggccatttttggggggggggaaaaaagggtttataaaggggnnggnngaaaaggttncgcgncccctttttttgnncnaagggggaaaatnggggggnccccc

SEQ ID NO: 735758 - DNA, 2827 bp, Homo sapiens
  misc_feature (2666)..(2666): n is a, c, g, or t
  misc_feature (2669)..(2669): n is a, c, g, or t
  misc_feature (2680)..(2680): n is a, c, g, or t
  misc_feature (2766)..(2767): n is a, c, g, or t
  misc_feature (2770)..(2771): n is a, c, g, or t
  misc_feature (2781)..(2781): n is a, c, g, or t
  misc_feature (2786)..(2786): n is a, c, g, or t
  misc_feature (2799)..(2800): n is a, c, g, or t
  misc_feature (2802)..(2802): n is a, c, g, or t
  misc_feature (2815)..(2815): n is a, c, g, or t
  misc_feature (2822)..(2822): n is a, c, g, or t
agtgctcaaggcgcctgcgcagaccctgaaaagcggccagggtggcccctagctttccttttccggttgcggcgccgcgcggtgaggttgtctagtccacgctcggagccatgccgtccaagggtccgctgcagtcggtgcaggtcttcggacgcaagaagacagcgacagctgtggcgcactgcaaacgcggcaatggtctcatcaaggtgaacgggcggcccctggagatgattgagccgcgcacgctacagtacaaggtgctgggatccggcaccggcgttgagtggatggaggactcttggagacagagatgttgtagctcttgaaagctgggggggctggcatcagcaacgggatgtttagaagttgtgttgggtgtagaacagtggggtatttggcaatagagctgggcttggggttcagaagatgtaaaagctgagatgggggtgttgaagattaagggtttgctttgagaactgggatgttaggaagctcacctcactggggcggggggacccaaagggtgaagggacaccgactattttttattttatttatttgttttgagagggagtctcgctgtgtcgcccaggctggagtgtagtggcgcgatctcggatcactgcaaccttcgcctcccgggttaaagcgattctcctgcctcagcctcttgagtagctgagattacaggcatgcaccaccacgcccggctaatttttgtatttttagtagagacggggtttcgccatattggccagagtggtctcgaactcattacctcaggtgatccaccagcctcggcctcccgaagtgctgggattgcaggcgtcagccaccgtgtgcggccgaatttgggtctgtttaaatgcttgcttgtaaaaggggttcctctgttccctttttgggactctcaatttctttggctcagaatggaaagaaaccagagtctgatttctgccccttctgaactctactacttttaaaagaaagaatatctacattgcagggtcagttaaaaaaaatttttttgagttataaggttgttttttaaaaacagtatcttgctgtcacctaccctggagtgcagtagcacaatcctaatgaactgcagccttaaactcctgagttggagatcctcccacctcagcctttcggttgccaagactacaggcacatcaccacgcctggctcatttgagaaatatttttctgtagacgtggggtctcactttattgcccaggctggtccttggtctcatgtgatccttctgcctggactgggattacaggtgtgatcaccatgcctggcctagaatttaataaaaattctgagatttcctttgtgtagcagatgttgaatgttactgttattggctgtcactgtatttgaaggatttgtatgtgtaccctctgttgagttttggggacatagcagtgatccagatgacttcaggtcttgccttcatggacctgccagcctagttggggagaaggactgggcccaataccagaagctgatccaaagtggtcagaactggggaaggagacctgtgagctgaaagcaggtaaaggaagtatccagacagaggcactggtaaaagacctggagctgggaagggtctagggaccagggacaggttgtactgtaattctggaaacctgtgaggctcaaagaaagggcagagagctcaggtgggaaatagaaaaggcacctgaacagtccagggatggctttcgactacttgaaacagccttgggagtttcagaagctattggaatgctccttactgttcagccttctaagaaccagtcttagaggtagggtgtctgaggtccagtgagggacacaagtaggagggagcccagatcttgttccctttaccttgcctatatttcttaacaccacttcagcagtctcatatctggcttttttgactttcctcttctctgggtctgtagagggccttggagtgacaccctgacccccatccactagtacttgaaggccagtggtggcagaagccacagaaacaagaagcccagtgagatggctaagctgcccagcatgtaacttaaatccctgttcattccccattcctttagctgctggagccagttctgcttctcggcaaggagcgatttgctggtgtagacatccgtgtccgtgtaaagggtggtggtcacgtggcccagatttatggtgagtcccaggaactgggcgcatggaggaggtggctctgggagggaggccttcacagcgctcctgtaccctttaattgtgtgtctttctcacagctatccgtcagtccatctccaaagccctggtggcctattaccagaaattgtgagtgagcatgggtccttcccatgaggtagatgggtgtgtggggatcaagtcaaggactctgtgtgattatctaaatcctcgtccctgctcttcttgccagatgtggatgaggcttccaagaaggagatcaaagacatcctcatccagtatgaccggaccctgctggtagctgaccctcgtcgctgcgagtccaaaaagtttggaggccctggtgcccgcgctcgctaccagaaatcctaccgataagcccatcgtgactcaaaactcacttgtataataaacagtttttgagggattttaaagtttcaaaaaaaaanaanaaaaaaaaaanaaaaaaaaaaaaaaaaaaaaaaaaaaaaaaaaaaaaccccggggggccatttttggggggggggaaaaaagggtttataaaggggnnggnngaaaaggttncgcgncccctttttttgnncnaagggggaaaatnggggggnccccc

SEQ ID NO: 735759 - DNA, 531 bp, Homo sapiens
aggtacctgggtcaagagtgacccagagactcatccctgccagacccaacctccagccagtcaccctctgactccagtccatggggcgaggctggagtgctggccctgacctctccagcatctgcaccaggagggcttcagcggaatgtggtcccagttgatgccccatgccaacagtagcagcagcagttgttaggcatagagattgaagccagacagggcctgggattcctctgctgggagcctaaactgcaggagatggggaaggatccaagtgtgagctggggctcctagcacaaaactcacattgaaagataaaatggttaagaatttcaggatagccacaggagaacctcaagccaagtgtaggatccttctagctgcagggcctgggggtactgagactagccctgttgacaggagccatgctttaggaagactgatctatttgtagtcagcaagagttttaaggagctccattaacaatttaggcacgatgccaagatgggatattatattttccaagcaaga

SEQ ID NO: 735760 - DNA, 1395 bp, Homo sapiens
ggccctctttcctcttcctggtttccttacctgccctccccttactcttgtttctcctccgccgaggcactgtgcggtatttgtaaatattgggcgaggaaagtctcggaagaagaaataacgctgataataatactttattaatatttatagtaattattataatactaataacacaatccaagcgcatgacaaatcacataatttctaactgtcaatggaggatgcatcttcccattccaccccgcgctcccctcaattaggaggagaaaccgcacaagctaccaaatatataaaaggcattgattcccggagcaaagggaggggagggggcccgggtaatgtacatagctgttcaagttaaggtttagtttccttccttcccctctgacccctaagctttcacttttcctttagcttccctttcctccccattcccaccctcagccgggctcaggcaatagtatattataaagaaaatgtctacattaagcaccaggactgcaagaggccatagagaatagtccccggaaagtgtttatgacaggtacccctcgccagtccgcccatttctcaccctttggttaaccattacattttccaggacagagcatttaatttactttttaaaatgaccctcgctggccgagcataagtacgttaaaatctttaaatgagttttttttaaaaagctaacgctttcattccctgccccgcccccacccgtacacctttgacttgtgacattttcaggatttacaaaggatctgggagctgtccagccaggtctggtgctgaagtcgcctcaccgttctgattacttcctctagttgtgaaggcagaggaggggctgttttggaaagtgactattctggcttttggttgggttctttcttctttttctacaatcgagttagcgtgtactattggttttcttattattaaacattgcataagttaccttttttgtaaaaaaaaaaaagtattaggtgatgtgcagtactgaaagtgcagtatctaaccaactagaacgtttgttttatttttagaacaagtgcacctttgttatatatttagtatattggtaccaaatacagaaaaaaactatagttctgtactatgtcctccaaactgtatattattgttcttaatttccagctgttgatataatggttaccactggatgagaaattcagtggtgcagacctggcttctgctgtttccagaagtgttcttttgtaccttattctgtagtagactgttataaaaagatgacacacacgctttattttttcttttgcaaataatagaaaaaacacaaccacagaaacaaacaaataatggatgtgcaagaatgccatctattaaaaacatggttaatatttaaaaaaaaaa

SEQ ID NO: 735761 - DNA, 479 bp, Homo sapiens
atgaaatattctttttccattagatttgttcttatgtggacatagatatctacagtcattacattagccttagaatttagcatcatacttttaagcaccctgggattctaatcttcctctgcaactgtcttccaggacttactggcacttattacactgtgataagtggcagaaaagtagaatgaaatattctttttccattagatttgttcttatgtgaccatgtaccaagccagctataaagtattgtatttctgtagaatatggaaaatagtatttgtcttacctttgctaaatgtttgcaatttctaagtaaaccttttatctcctaaaaaaaaaaaggggggtaatataggagggcagtagtcagttgaagggccaaagggttaaaaagggggacgggggaagcgggtgtgacactgggggatggacccacaacgaaaaagtgacgtggagtaaaaaaaacgaagtaatctatc

SEQ ID NO: 735762 - DNA, 4838 bp, Homo sapiens
ttgaataaatttctcaaatagaactgtgcaaaccctagcactttatgtgttgctgcctccccatacctaggtatgctctgtaataagctcccatttaatggagagatgtgtggaggcactgagaagttaatgaagaaaaatcaaccctaagaattccttattgtcacatagtgtcttttaaaaaataactgtagagactgtgttaattcgagtgcctttcttacttttttgggagcaagattatatttaatgtttaagaaaacaggatggaagttttatcaaacagttgattgtggcccattgttttatttattcccatcgctaggcatggccccgtagggtattttatccttcagtgagagactgatataagcaggcaggatgctttgattattccattagttatcattttaagcaccctaccaagatttagttctttctttctggcaactaacgttttgggggttggaggcatcccatttagaggatggtgtgtgcacaaatagattagcctgaaacctgcgtccaaagggaaacagtggcactctgccctaaaataaaggccagaacgttgtcctaaatgaatcctttgccttactttaggaccttccttccctctcaaattcaggcataatgtaatatagttgaaagggggaaaacagtacttgctttctctcaggtattggaggaaaagaagtaaatgcgtagatgaaattttaaatgtatcattttatctgtttgtatatggagaagggagggataggaattccatatttcaagatagcaaatataatttcatagaaatatatagctaaagattccaaagtgcttttacagagaactgttgaataatatattcctaaagggcagcaatatgccatgttcatggtgaagacagaaaaccaatgaatcagttgtggatctcaggtgggagaggaaacctcaggctcccaactttgacttctctactctcaccaggccatgttaacactgtaaaaccaaactctttgctaagaacaatacagggcagtagtttagtctgctgatgaaaccttgtgcttccaagaatattagctatatataatttgtgctttctggatgattctattgtccagaaagctaaccctgacgttacttttattagtctgttgttattcctcagggtgtagaagatttagtaaattcaggacaaattttatattcagtggcaaaaagaaaaggcaaaaatatgctaaatatattattagctcttaaattttagtatagatcgtattttttataaactattaccagtacagtagctagtagatattctgtgactgcctcattgtttatcttgctgctttggtccctatggctctagtatgaacattctcgtgtcttctgtggaaatgatttctgtgttatagttccatctttggtagaggtggggatgattgtattttgttttagttgacatcattctcaacttttagaaatactgttgaggaaaatgattaccgttggttttcaaattgacaactattttgcttccaaagacttcagtttccctttgttttatgtgtagacctcatatatgttcaacacattgcatactgccttgcacattgtaggaattcaacaagtcaagagttgataaaagctagaaagataaaactagcttagctatcatatcatcattgtccatattcttagctttgggaaaaatataccattttgcataaaatacataatcagtttcaaatgcataaggcaaagatatacagttgcacaacattgcaagtgaaatttacaaaggatttttatttttgtgtatgctaaaagtgctcctacttaaagcagttttctttattagaccaacaccttccagcaaagttagaaaccaaacacaagtgctcatttgcccaaattaaccagatagttatgtaaactgttcatattaagtctttagtggtttacaaacaataacattctggcttttcttccataccttttaggaatcagccttaattttaagtatagcagtcactttcctcaaggtactatgcagcatactttagattgcttatttatcattataaggtgataggtaataaatttgaggtttacttgtcatataatttcatatggcagatattgattcaaggagcattctattagaaaaagttgataaattatcctcccttacaaatatcatcttgcatttggagcaggtatttttttcttattagttaaagactgggtacagttatagtagatgctcaataaatgcttagtcagtgattgatctaacatcaaactaacagctttcagaaaggagactgttgacatcttttcaccaaggagtatatttgtagagtaatatatgtgtggaattttgaaattatatcatttgacatgatttatgaggcttatttaagctggagttagtaacgtaatagaagtattatttatacagaacatagttgaaagataggagatgtgaaagattaagtagtattttcttgtgcaaggcatattaataaatgtaattaaatgtcttaataagcagctggctgaactctagagagaactgctgtagtcttctgcaatcagtctctgtattggtatatccagtactatcgggtttaggttctttttatttttccttaaatcttacttgtttctagcgtcttaagagtggtaatggtaaaatgtgaagttacaataaacttctgcttgttttctcagaacatctttggcatgaggaagaactttttgtgaatgatacagtagtctcagcatctgttaatttgtggttttcaaagcatttttgacagagtttacctaatgtaaaaagattaaacagttttataaaacacaaataaacattcctacctgaactgtgaggaacagagtgtatagtacaaatgtaattaggcattgcctcctggcgaggttcttgatgcatgacttcgatgctggctgctgactgaggtgaccactgtcagtattgtactttggcatatgttgtttttaggaaaataatggaatgcattcttagattaacttactgtttttgagttggaaaaaataaaagatgaggtattataagtatgccaaatatttatacactacaaaagattaaaaaaggagagggagaaaaaaaaaaggccagttatgattttaatagcgtctaatttttttttgactcgaattttgtggacactagtcaattgcataatttaacatggaggagctttcatttaaaagaagttctcagctactatattctgccattaaaattaaccatgcctgttaattttacattgcttgaagatataagtaagctgccgtcaatattgttttaagattttcttatagtttatgtttaaatggaaaagttacatatataatctatggtgcagggtcaggcattggccattaaagataagtttggctaactattttactgaagagactaatggtcttccctctgttgtactgctatgtttcttgatctgtttttccccaatgtaacagtctacattgaagtcctttagctctctccatatactaattgacatttgttaaggattcaatattttgtgaattctttttacccttaaaatgcatatctttcagagagataagaatgaattttgcaataatttatatgcagagtgtgcttatgggtttctgggagttcaagttagtaccccagagtgcttaaaagtatgatgctaaattctaaggctaatgtaatgactgtagattatctatgtccacattgttcaacagaaatataatgtgaaccacaacataatttttaattttctagtagccatattaaaaaagaaacaagcaaaattaattttaataacagtttatgtaacccagtatattaaaaatatcatttcaacatgtaatcaatataaaagattattaatgaaacaccttatcttctttttcttccatactaagtcttagatttgagtgtattttgcactcacagcacatctcaattctgactggccacattttaagtgctcagtagtcacatatggctaagggctactatactggacagtacagattcatagagtataaaatatgactttaactttggagatggtgaggtaggcctgtaattatggtactttaaaaattcagaatatttagaaaagcatctaatagaattatccacttgttttccttcatcttcattttaatatgttctagaagtaggatcagcctgttccaatttgccaagcattattaaggaggaataattccataccatgtaaaataccatgatatgctgattatactacattaacaaatttttaagttgcgttcactaaattctgtcctgtttcttcaaaataatatagcttaaattgcatgttaattgtatatcttacctattttgtttttatattattcttacaatataatcatgtatattaacaaacagccctgggattctaatcttcctctgcaactgtcttccaggacttactggcacttattacactgtgataagtggcagaaaagtagaatgaaatattctttttccattagatttgttcttatgtgaccatgtaccaagccagctataaagtattgtatttctgtagaatatggaaaatagtatttgtcttacctttgctaaatgtttgcaatttctaagtaaaccttttatctcctaaaaaaaaaaaggggggtaatataggagggcagtagtcagttgaagggccaaagggttaaaaagggggacgggggaagcgggtgtgacactgggggatggacccacaacgaaaaagtgacgtggagtaaaaaaaacgaagtaatctatc

SEQ ID NO: 735763 - DNA, 4705 bp, Homo sapiens
ttgaataaatttctcaaatagaactgtgcaaaccctagcactttatgtgttgctgcctccccatacctaggtatgctctgtaataagctcccatttaatggagagatgtgtggaggcactgagaagttaatgaagaaaaatcaaccctaagaattccttattgtcacatagtgtcttttaaaaaataactgtagagactgtgttaattcgagtgcctttcttacttttttgggagcaagattatatttaatgtttaagaaaacaggatggaagttttatcaaacagttgattgtggcccattgttttatttattcccatcgctaggcatggccccgtagggtattttatccttcagtgagagactgatataagcaggcaggatgctttgattattccattagttatcattttaagcaccctaccaagatttagttctttctttctggcaactaacgttttgggggttggaggcatcccatttagaggatggtgtgtgcacaaatagattagcctgaaacctgcgtccaaagggaaacagtggcactctgccctaaaataaaggccagaacgttgtcctaaatgaatcctttgccttactttaggaccttccttccctctcaaattcaggcataatgtaatatagttgaaagggggaaaacagtacttgctttctctcaggtattggaggaaaagaagtaaatgcgtagatgaaattttaaatgtatcattttatctgtttgtatatggagaagggagggataggaattccatatttcaagatagcaaatataatttcatagaaatatatagctaaagattccaaagtgcttttacagagaactgttgaataatatattcctaaagggcagcaatatgccatgttcatggtgaagacagaaaaccaatgaatcagttgtggatctcaggtgggagaggaaacctcaggctcccaactttgacttctctactctcaccaggccatgttaacactgtaaaaccaaactctttgctaagaacaatacagggcagtagtttagtctgctgatgaaaccttgtgcttccaagaatattagctatatataatttgtgctttctggatgattctattgtccagaaagctaaccctgacgttacttttattagtctgttgttattcctcagggtgtagaagatttagtaaattcaggacaaattttatattcagtggcaaaaagaaaaggcaaaaatatgctaaatatattattagctcttaaattttagtatagatcgtattttttataaactattaccagtacagtagctagtagatattctgtgactgcctcattgtttatcttgctgctttggtccctatggctctagtatgaacattctcgtgtcttctgtggaaatgatttctgtgttatagttccatctttggtagaggtggggatgattgtattttgttttagttgacatcattctcaacttttagaaatactgttgaggaaaatgattaccgttggttttcaaattgacaactattttgcttccaaagacttcagtttccctttgttttatgtgtagacctcatatatgttcaacacattgcatactgccttgcacattgtaggaattcaacaagtcaagagttgataaaagctagaaagataaaactagcttagctatcatatcatcattgtccatattcttagctttgggaaaaatataccattttgcataaaatacataatcagtttcaaatgcataaggcaaagatatacagttgcacaacattgcaagtgaaatttacaaaggatttttatttttgtgtatgctaaaagtgctcctacttaaagcagttttctttattagaccaacaccttccagcaaagttagaaaccaaacacaagtgctcatttgcccaaattaaccagatagttatgtaaactgttcatattaagtctttagtggtttacaaacaataacattctggcttttcttccataccttttaggaatcagccttaattttaagtatagcagtcactttcctcaaggtactatgcagcatactttagattgcttatttatcattataaggtgataggtaataaatttgaggtttacttgtcatataatttcatatggcagatattgattcaaggagcattctattagaaaaagttgataaattatcctcccttacaaatatcatcttgcatttggagcaggtatttttttcttattagttaaagactgggtacagttatagtagatgctcaataaatgcttagtcagtgattgatctaacatcaaactaacagctttcagaaaggagactgttgacatcttttcaccaaggagtatatttgtagagtaatatatgtgtggaattttgaaattatatcatttgacatgatttatgaggcttatttaagctggagttagtaacgtaatagaagtattatttatacagaacatagttgaaagataggagatgtgaaagattaagtagtattttcttgtgcaaggcatattaataaatgtaattaaatgtcttaataagcagctggctgaactctagagagaactgctgtagtcttctgcaatcagtctctgtattggtatatccagtactatcgggtttaggttctttttatttttccttaaatcttacttgtttctagcgtcttaagagtggtaatggtaaaatgtgaagttacaataaacttctgcttgttttctcagaacatctttggcatgaggaagaactttttgtgaatgatacagtagtctcagcatctgttaatttgtggttttcaaagcatttttgacagagtttacctaatgtaaaaagattaaacagttttataaaacacaaataaacattcctacctgaactgtgaggaacagagtgtatagtacaaatgtaattaggcattgcctcctggcgaggttcttgatgcatgacttcgatgctggctgctgactgaggtgaccactgtcagtattgtactttggcatatgttgtttttaggaaaataatggaatgcattcttagattaacttactgtttttgagttggaaaaaataaaagatgaggtattataagtatgccaaatatttatacactacaaaagattaaaaaaggagagggagaaaaaaaaaaggccagttatgattttaatagcgtctaatttttttttgactcgaattttgtggacactagtcaattgcataatttaacatggaggagctttcatttaaaagaagttctcagctactatattctgccattaaaattaaccatgcctgttaattttacattgcttgaagatataagtaagctgccgtcaatattgttttaagattttcttatagtttatgtttaaatggaaaagttacatatataatctatggtgcagggtcaggcattggccattaaagataagtttggctaactattttactgaagagactaatggtcttccctctgttgtactgctatgtttcttgatctgtttttccccaatgtaacagtctacattgaagtcctttagctctctccatatactaattgacatttgttaaggattcaatattttgtgaattctttttacccttaaaatgcatatctttcagagagataagaatgaattttgcaataatttatatgcagagtgtgcttatgggtttctgggagttcaagttagtaccccagagtgcttaaaagtatgatgctaaattctaaggctaatgtaatgactgtagattatctatgtccacattgttcaacagaaatataatgtgaaccacaacataatttttaattttctagtagccatattaaaaaagaaacaagcaaaattaattttaataacagtttatgtaacccagtatattaaaaatatcatttcaacatgtaatcaatataaaagattattaatgaaacaccttatcttctttttcttccatactaagtcttagatttgagtgtattttgcactcacagcacatctcaattctgactggccacattttaagtgctcagtagtcacatatggctaagggctactatactggacagtacagattcatagagtataaaatatgactttaactttggagatggtgaggtaggcctgtaattatggtactttaaaaattcagaatatttagaaaagcatctaatagaattatccacttgttttccttcatcttcattttaatatgttctagaagtaggatcagcctgttccaatttgccaagcattattaaggaggaataattccataccatgtaaaataccatgatatgctgattatactacattaacaaatttttaagttgcgttcactaaattctgtcctgtttcttcaaaataatatagcttaaattgcatgttaattgtatatcttacctattttgtttttatattattcttacaatataatcatgtatattaacaaacagccctgggattctaatcttcctctgcaactgtcttccaggacttactggcacttattacactgtgataagtggcagaaaagtagaatgaaatattctttttccattagatttgttcttatgtgaccatgtaccaagccagctataaagtattgtataaagcgctttatacaatactgatagttattttatccacgtacaataaatcactcatttaattaaatagttttataaaagaaacatatttataaa

SEQ ID NO: 735764 - DNA, 4786 bp, Homo sapiens
ttgaataaatttctcaaatagaactgtgcaaaccctagcactttatgtgttgctgcctccccatacctaggtatgctctgtaataagctcccatttaatggagagatgtgtggaggcactgagaagttaatgaagaaaaatcaaccctaagaattccttattgtcacatagtgtcttttaaaaaataactgtagagactgtgttaattcgagtgcctttcttacttttttgggagcaagattatatttaatgtttaagaaaacaggatggaagttttatcaaacagttgattgtggcccattgttttatttattcccatcgctaggcatggccccgtagggtattttatccttcagtgagagactgatataagcaggcaggatgctttgattattccattagttatcattttaagcaccctaccaagatttagttctttctttctggcaactaacgttttgggggttggaggcatcccatttagaggatggtgtgtgcacaaatagattagcctgaaacctgcgtccaaagggaaacagtggcactctgccctaaaataaaggccagaacgttgtcctaaatgaatcctttgccttactttaggaccttccttccctctcaaattcaggcataatgtaatatagttgaaagggggaaaacagtacttgctttctctcaggtattggaggaaaagaagtaaatgcgtagatgaaattttaaatgtatcattttatctgtttgtatatggagaagggagggataggaattccatatttcaagatagcaaatataatttcatagaaatatatagctaaagattccaaagtgcttttacagagaactgttgaataatatattcctaaagggcagcaatatgccatgttcatggtgaagacagaaaaccaatgaatcagttgtggatctcaggtgggagaggaaacctcaggctcccaactttgacttctctactctcaccaggccatgttaacactgtaaaaccaaactctttgctaagaacaatacagggcagtagtttagtctgctgatgaaaccttgtgcttccaagaatattagctatatataatttgtgctttctggatgattctattgtccagaaagctaaccctgacgttacttttattagtctgttgttattcctcagggtgtagaagatttagtaaattcaggacaaattttatattcagtggcaaaaagaaaaggcaaaaatatgctaaatatattattagctcttaaattttagtatagatcgtattttttataaactattaccagtacagtagctagtagatattctgtgactgcctcattgtttatcttgctgctttggtccctatggctctagtatgaacattctcgtgtcttctgtggaaatgatttctgtgttatagttccatctttggtagaggtggggatgattgtattttgttttagttgacatcattctcaacttttagaaatactgttgaggaaaatgattaccgttggttttcaaattgacaactattttgcttccaaagacttcagtttccctttgttttatgtgtagacctcatatatgttcaacacattgcatactgccttgcacattgtaggaattcaacaagtcaagagttgataaaagctagaaagataaaactagcttagctatcatatcatcattgtccatattcttagctttgggaaaaatataccattttgcataaaatacataatcagtttcaaatgcataaggcaaagatatacagttgcacaacattgcaagtgaaatttacaaaggatttttatttttgtgtatgctaaaagtgctcctacttaaagcagttttctttattagaccaacaccttccagcaaagttagaaaccaaacacaagtgctcatttgcccaaattaaccagatagttatgtaaactgttcatattaagtctttagtggtttacaaacaataacattctggcttttcttccataccttttaggaatcagccttaattttaagtatagcagtcactttcctcaaggtactatgcagcatactttagattgcttatttatcattataaggtgataggtaataaatttgaggtttacttgtcatataatttcatatggcagatattgattcaaggagcattctattagaaaaagttgataaattatcttaaagactgggtacagttatagtagatgctcaataaatgcttagtcagtgattgatctaacatcaaactaacagctttcagaaaggagactgttgacatcttttcaccaaggagtatatttgtagagtaatatatgtgtggaattttgaaattatatcatttgacatgatttatgaggcttatttaagctggagttagtaacgtaatagaagtattatttatacagaacatagttgaaagataggagatgtgaaagattaagtagtattttcttgtgcaaggcatattaataaatgtaattaaatgtcttaataagcagctggctgaactctagagagaactgctgtagtcttctgcaatcagtctctgtattggtatatccagtactatcgggtttaggttctttttatttttccttaaatcttacttgtttctagcgtcttaagagtggtaatggtaaaatgtgaagttacaataaacttctgcttgttttctcagaacatctttggcatgaggaagaactttttgtgaatgatacagtagtctcagcatctgttaatttgtggttttcaaagcatttttgacagagtttacctaatgtaaaaagattaaacagttttataaaacacaaataaacattcctacctgaactgtgaggaacagagtgtatagtacaaatgtaattaggcattgcctcctggcgaggttcttgatgcatgacttcgatgctggctgctgactgaggtgaccactgtcagtattgtactttggcatatgttgtttttaggaaaataatggaatgcattcttagattaacttactgtttttgagttggaaaaaataaaagatgaggtattataagtatgccaaatatttatacactacaaaagattaaaaaaggagagggagaaaaaaaaaaggccagttatgattttaatagcgtctaatttttttttgactcgaattttgtggacactagtcaattgcataatttaacatggaggagctttcatttaaaagaagttctcagctactatattctgccattaaaattaaccatgcctgttaattttacattgcttgaagatataagtaagctgccgtcaatattgttttaagattttcttatagtttatgtttaaatggaaaagttacatatataatctatggtgcagggtcaggcattggccattaaagataagtttggctaactattttactgaagagactaatggtcttccctctgttgtactgctatgtttcttgatctgtttttccccaatgtaacagtctacattgaagtcctttagctctctccatatactaattgacatttgttaaggattcaatattttgtgaattctttttacccttaaaatgcatatctttcagagagataagaatgaattttgcaataatttatatgcagagtgtgcttatgggtttctgggagttcaagttagtaccccagagtgcttaaaagtatgatgctaaattctaaggctaatgtaatgactgtagattatctatgtccacattgttcaacagaaatataatgtgaaccacaacataatttttaattttctagtagccatattaaaaaagaaacaagcaaaattaattttaataacagtttatgtaacccagtatattaaaaatatcatttcaacatgtaatcaatataaaagattattaatgaaacaccttatcttctttttcttccatactaagtcttagatttgagtgtattttgcactcacagcacatctcaattctgactggccacattttaagtgctcagtagtcacatatggctaagggctactatactggacagtacagattcatagagtataaaatatgactttaactttggagatggtgaggtaggcctgtaattatggtactttaaaaattcagaatatttagaaaagcatctaatagaattatccacttgttttccttcatcttcattttaatatgttctagaagtaggatcagcctgttccaatttgccaagcattattaaggaggaataattccataccatgtaaaataccatgatatgctgattatactacattaacaaatttttaagttgcgttcactaaattctgtcctgtttcttcaaaataatatagcttaaattgcatgttaattgtatatcttacctattttgtttttatattattcttacaatataatcatgtatattaacaaacagccctgggattctaatcttcctctgcaactgtcttccaggacttactggcacttattacactgtgataagtggcagaaaagtagaatgaaatattctttttccattagatttgttcttatgtgaccatgtaccaagccagctataaagtattgtatttctgtagaatatggaaaatagtatttgtcttacctttgctaaatgtttgcaatttctaagtaaaccttttatctcctaaaaaaaaaaaggggggtaatataggagggcagtagtcagttgaagggccaaagggttaaaaagggggacgggggaagcgggtgtgacactgggggatggacccacaacgaaaaagtgacgtggagtaaaaaaaacgaagtaatctatc

SEQ ID NO: 735765 - DNA, 732 bp, Homo sapiens
tatatttccaacaaaagaagcactgtaatacaaaaaagattattaaatatttttagttagtgcttttcatgagaggttgccaaagaaaaatatacactttaaaaatgctggcactttagtgatttttttacaaagtattttgtgtaaggttacttcagcagtagagataggactaaaatcctgtatattatcacaattgatctccatgcattcaattgacagtcacaatggaagcaattatattcaaattatgaagaaaatacataccaaacttctataattacttaaccttgaggctagcctagagatatttaaaacaaaaaatctgttaggctgttattaacatatagaaagataaattctaactagcttaaataaacccagtctttttttgttgtttccagtttttgttttgtttgttttttgagacagagtctcactgtcactcaggctagagtccagtagtgtcatcatggtttactgcagcatcaaattgctgggctcaagcaatccttctgcctcagcctcctgagtagctggccccacaggtgcatgcccacatattggctaattttatttttaagattttttgtagaaacaaggctatgttgcccaggctggcctcaaattcatgggctcaagcgattcttctgccttggcttcctaaagtgttgggattacaggaatgagccactgcacctggccaacccagtatttcatgctagaatatgg

SEQ ID NO: 735766 - DNA, 1212 bp, Homo sapiens
gagagtgcaggcgctgaggacagcgacgatcccgagacgagacccaacggcgagaaaggagagagcaagagatgccatggactacaaggtgatgaataccactatgagctcactacaagatctcaaagatttcaagccactggctgttacaaagcataaagccacccttctggagcagcggcgggaggcaggctgggaggaggccccaagttttggccagacgatagaccacctccttaggtgtccggggagctgctgaaacataatgaggaagatgctgctgatccaaaggataaaaacacagaaactagaaccaagaagcacctaaagtggactcatgcccagcatccctgcagactgactttctctgagctatagttctgcattggactgtttttcctttgctatcacctgcccaacacacaatcctggatgcttttgattggttggatttctttttttttttcctgccttttctttttctttccttgaccctgggaattataaacgagaaattgctttaaaaagtattgttctgtgctaaaattagccttgtttatgaacaagttttatccctagggatttcctgaattgcaatcccagattaccttgtaaatggggctgtgttgtttgatttgtatagtactgatctgtaggttaaaatacgtttcctttcttttgtttcattctttttttaaaagtctggatccaggtaatggcctgagtcacatttgcttagctactgaagcgatctcaatatgttatcgcttagagttgaaacataatcaaacatacgttatacctggggctcttgcacactatttgatatatatatgttactctacaaagaaacacaaaccttgtatgttgaaatgtaattcctgtttgatcctgcagctagaatgctaaagaaattgcaaatatcaaaagtgacttcaaataccctgaatataagctagtcaacagtaagtggatggttccagaataccatattctaagacaaagcaggaattagagatcaactgacctcatccataatgttgctcaggtctgtctgtggatctgtccattttggagtaaaaaacaaggcatgcttctgtgattgtgtttatgaaaactgtagtatttcagatttatgttttgcaattgtgcctgccttgcaataaaacaccttcagttgactcagcaataaggtctctgtcaatttcctgc

SEQ ID NO: 735767 - DNA, 307 bp, Homo sapiens
tgcttaatgtgattttgagaggagcagaaggtcgaaatctcattgatgaagattccactattacagagcagttgttgctgttattaacttagcgttaagacaacatttttcagagcacgaatcaatcatcattaatctttctcatgcaccttcttcatagatgcaagaagaaggttccagccagcaagcgcttcaccatccacagaacatccaacgtcttaaccctttccctcaagcgctttgccaacttcagcggggggaagatcaccaaggtgagcgctcgtgacaccatcccaggcagctccgt

SEQ ID NO: 735768 - DNA, 230 bp, Homo sapiens
gaccccatgcttcacgacgacataccaacgctttgccaacttcagcggggggaagatcaccaaggatgtaggctatccggaattcctcaacatacgtccgtatatgtcccagaataatggtgatcctgtcatgtatggactctatgctgtcctggtgcactcgggctacagctgccatgccgggcactattactgctacgtgaagctcaagcatgcgggatcctctagat

SEQ ID NO: 735769 - DNA, 1365 bp, Homo sapiens
  misc_feature (165)..(165): n is a, c, g, or t
cattggtgtgaatcagagtcctccccaccttccaggaaatgcagagtagggcactgggcttcctcctgggcaccataagccccgaagctgcaccggcctccactactccctgggcccagtcctcagcctccaagccctccgaggagctctcctcatcttcctccncactgactggaaagcgacaagactctgggacgatgaagaagccgcacaccactgaagagattggtgtgcccatatccaggaatggctccaccctgggcctgaagtcccagaacggctgcattcctccaaagctgccctcggggtccccttcccccaaactctcccagacacccacacacatgccaaccatcctagacgaccctggaaagaaggtgaagaagccagctcctccacagcacttttcccccagaactgctcaggggctgcctgggaccagcaactcgaatagcagcagatctgggagccaaaggcagggctcctgggacagcagggatgttgtcctctctacctcacctaagctcctggctacagccactgccaacgggcatgggctgaaggggaacgacgagagcgctggcctcgacaggaggggctccagcagctccagcccagagcactcggccagcagcgactccaccaaggccccccagacccccaggagtggagcggcccatctctgcgattctcaggaaacgaactgttccaccgctggccactccaaaacgccgccaagtggagcagattctaagacggtgaagctgaagtcccctgtcctgagcaacaccaccactgagcctgcaagcaccatgtctcctccaccagccaaaaaactggccctttctgccaagaaggccagcaccctgtggagggcgaccggcaatgacctccgtccacctcccccctcaccatcctccgacctcacccaccccatgaaaacctctcaccccgtcgttgcctccacttggcccgtccatagagccaggtaagctttgggccgggatcttctgggtgccaactggttctccctgtggttgcgtgtgcttggctggtgaggagttggacgaatcgccaacctcacaggacagacaaagcattggggcagccaggaggtacaggggggcgtcactgaccaagatccccctcttctgtgttcccctgtggtaaaggagctttgggtggtgaaggcagttcggcctctgcagtcctgatgtcttagttctgtctttgttggtggtctgtctgcgacatccttgtggtgatgtggtgtgctggggactgacctgtcctgtatccctaccagccccatgacagtacttcccagtcgaagagaaaggcgaagtgaggccttggcgagaggct

SEQ ID NO: 735770 - DNA, 357 bp, Homo sapiens; identical to SEQ ID NO: 333800

SEQ ID NO: 735771 - DNA, 452 bp, Homo sapiens
tttaaaccctcagccgtggcacgaaggtggcttctgtccgtggcaggatccagaacagctgcttctgagggttggggcagggtgaggagccccacacatgctgtgtcttgggtagggaaggggcagagtgacgaagctcttccaacctgggtaatgtcacttcttgctcagagcatgtttttattcagacttcgagaccaaacatgacatctttgttcctcagacgagggcatgggtttagaaagaactgaactctttggctgtggtttagggtttagctaagagggcatcgctgggggttccatgctgaccgaccacacatgggcgtcgagccgtcctcctcttgtccttctcttcaccacaaggtggcactcaaaattgttgactaattatgagtagactagttggtaaatgacactcttgaagtgaagccacaggggacctgggaacct

SEQ ID NO: 735772 - DNA, 494 bp, Homo sapiens
aaggacacaagtcctgtttgattaggtcccaccctaatgatctcatgttaacttgattacatctgcaaagaccccacttccaaataaggtcaccattcacaggtactggggcttaggacttcaacatatcttttgttgggacatgactcaacccataacagtatggaaaggttctcttctcagagttaaatgtggctcccaatctctacctcacagatgatcaagcggtgctgattcacgagagtggaagcctccagagcttggggctttctggctgctcttcattgacctgtgtgttcccagcacacgaacagcgcccctaacggagatttgttcagcgactgaatatacacctgtaaacgagtagcatgtatacattgattttgattacaaatggttctgtattatataccaccgttctgactgcttttttcacttatagcttggaaattgtcttctgttggtaatacagaaatctgtttcagtcttttgaa

SEQ ID NO: 735773 - DNA, 6084 bp, Homo sapiens
ctttcggagttagcgcagcgcgaacgctgggtgcggcgcctttaagcgtcgcggtgacacgtgtgtgaggcgccggaggcccggatggtgcgcgtgctgggccgcgggccgaaggagtcgccagggctgcgtaggcttgtggcgcgcccgcggagaggccggggctctgacgcccgctctgcggcttcggtgtttgaacaggccacagtccaggagcgcttacattcaggagctccgcgtagcacctgcccaaccaaactcagccctccgttaagatcctggttccatgccgcagtaggacagcaggcccaagtctgcacatcccagtgatgcaccatgccaatagtggataagttgaaggaggccctgaaacccggccgcaaggactcggctgatgatggagaactggggaagcttcttgcctcctctgccaagaaggtccttttacagaaaatcgagttcgagccagccagcaagagcttctcctaccagctggaggccttaaagagcaaatatgtgttgctcaaccccaaaacagagggagctagtcgccacaagagtggagatgacccaccggccaggagacagggcagtgagcacacgtatgagagctgtggtgacggagtcccagccccgcagaaagtgcttttccccacggagcgactgtctctgaggtgggagcgggtcttccgcgtgggcgcaggactccacaaccttggcaacacctgctttctcaatgccaccatccagtgcttgacctacacaccacctctagccaactacctgctctccaaggagcatgctcgcagctgccaccagggaagcttctgcatgctgtgtgtcatgcagaaccacattgtccaggccttcgccaacagcggcaacgccatcaagcccgtctccttcatccgagacctgaaaaagatcgcccgacacttccgctttgggaaccaggaggacgcgcatgagttcctgcggtacaccatcgacgccatgcagaaagcctgcctgaatggctgtgccaagttggatcgtcaaacgcaggctactaccttggtccatcaaatttttggagggtatctcagatcacgcgtgaagtgctccgtgtgcaagagcgtctcggacacctacgacccctacttggacgtcgcgctggagatccggcaagctgcgaatattgtgcgtgctctggaactttttgtgaaagcagatgtcctgagtggagagaatgcctacatgtgtgctaaatgcaagaagaaggttccagccagcaagcgcttcaccatccacagaacatccaacgtcttaaccctttccctcaagcgctttgccaacttcagcggggggaagatcaccaaggatgtaggctatccggaattcctcaacatacgtccgtatatgtcccagaataatggtgatcctgtcatgtatggactctatgctgtcctggtgcactcgggctacagctgccatgccgggcactattactgctacgtgaaggcaagcaatggacagtggtaccagatgaatgattccttggtccattccagcaacgtcaaggtggttctgaaccagcaggcctacgtgctgttctatctgcgaattccaggctctaagaaaagtcccgagggcctcatctccaggacaggctcctcctcccttcccggccgcccgagtgtgattccagatcactccaagaagaacatcggcaatgggattatttcctccccactgactggaaagcgacaagactctgggacgatgaagaagccgcacaccactgaagagattggtgtgcccatatccaggaatggctccaccctgggcctgaagtcccagaacggctgcattcctccaaagctgccctcggggtccccttcccccaaactctcccagacacccacacacatgccaaccatcctagacgaccctggaaagaaggtgaagaagccagctcctccacagcacttttcccccagaactgctcaggggctgcctgggaccagcaactcgaatagcagcagatctgggagccaaaggcagggctcctgggacagcagggatgttgtcctctctacctcacctaagctcctggctacagccactgccaacgggcatgggctgaaggggaacgacgagagcgctggcctcgacaggaggggctccagcagctccagcccagagcactcggccagcagcgactccaccaaggccccccagacccccaggagtggagcggcccatctctgcgattctcaggaaacgaactgttccaccgctggccactccaaaacgccgccaagtggagcagattctaagacggtgaagctgaagtcccctgtcctgagcaacaccaccactgagcctgcaagcaccatgtctcctccaccagccaaaaaactggccctttctgccaagaaggccagcaccctgtggagggcgaccggcaatgacctccgtccacctcccccctcaccatcctccgacctcacccaccccatgaaaacctctcaccccgtcgttgcctccacttggcccgtccatagagccagggctgtgtcacctgctccccaatcatccagccgcctgcaaccccccttcagcccccaccccacattgctgtccagtacccccaagcccccagggacgtcagaaccacggagctgctcctccatctcgacggcgctgcctcaggtcaacgaggaccttgtgtcccttccacaccagttgccagaggccagtgagcccccccggagcccctctgagaagaggaaaaagacctttgtgggagagccgcagaggctgggctcagagacgtgcctcccacagcacatcagggaggccactgcggctccccacgggaagaggaagaggaagaagaagaagcgcccggaggacacagctgccagcgccctgcaggaggggcagacacagagacagcctgggagccccatgtacaggagggagggccaggcacagctgcccgctgtcagacggcaggaagatggcacacagccacaggtgaatggccagcaggtgggatgtgttacggacggccaccacgcgagcagcaggaagcggaggaggaaaggagcagaaggtcttggtgaagaaggcggcctgcaccaggacccacttcggcacagctgctctcccatgggtgatggtgatccagaggccatggaagagtctccaaggaaaaaagaaaaaaagaaagcaggagacacagcgggcagtagaagaggatgggcatctcaaatgcccaaggagtgccaagccccaagatgctgttgtccccgagtccagcagctgcgcaccatccgcgaatggctggtgtcctggggaccgcatggggctgagccaggcccctcctgtgtcttggaatggagagcgggagtctgatgtggtccaggaactgctcaaatactcatctgataaagcttacgggagaaaagttctgacctgggatggcaagatgtcggcggtcagtcaggatgctattgaagacagcagacaggcccggactgagaccgtggttgatgactgggacgaagagtttgaccgagggaaggaaaagaaaattaaaaaatttaagagagagaagaggagaaacttcaacgccttccagaaacttcagactcgacggaacttctggtctgtgactcacccagcaaaggctgccagcctcagctatcgccgctgactgtgcccctgtggaaggaggtcggttccgagggggtgggtgtaagggtgaggtgggggtgtgtgtgccgtgtatgtgtgtaggggtgtggtggggtgtggcgtgtgtgtatgatgtatgtgggctgtgtatctggcacatgtgtgttgggtggtgtgtgtggtgtgggcgcgtctgtggtgtgtgtcctagtcacttggagaagggtgtgtgtgggatgcgtgtgtataagggggtgtgtgtgggatgcgtgtgtataagggggtgtgtgtagtgtgtgttgggtgtggggtgtgtacacctggcatctgtggcatgtgttctggtcacttggagaagggcatgtgtggggtgtgtgtgggatgtgggttgtgtgtatatctggcatgtgtcccagtcacttgcagaagggtgacttcttgccagccgcatcgagatgccatgcattgggttcctaggttggactcatacccgagggtggcagtgggaagattcgggtctcgtttctctctgtcaggactaccgtggtttgttctgcagcctcctggagacaaggcgtcccttcccgggagctgtcggtctggatctgagggagctctctgtgtgggctctgctgtgctgggagcctgtcacggtaggagctctcccggtaccagtgtccacagaccgcccaacatagaggctttgaggcttctctagatcggaacctctttggtgacattcccgaccagccctgcaagagaaacgacagtgtgtgtgtgagcagaggtggctgcacacctgctggacatctttgccaggctgtgccttctcatgtttcatagacagtggtctgtgctggcagaggctgctgcccctggttggggctatcaggagagtgggggatggtggccacatgtcctccaggtggtctcccggtgcatagctggtggctctgggcaagccatcccttgcttctcggggctgacgccaccgttgtgtccgagcccgccctcccctgcttcctcagcgggaccccttcatctgttggccttacctgtcctcagaaaggaagaggtgaccccacccagccacctctcccttttatggaactcgagagggtggccctactgtgcaccccttccttgtgagtagctctcaactgtcctggagagcagaggctatttggggtcggaggagccctcgatacctgcgaatacatctgctttccaggctgctgtttattctgagacgactgtgctgtagcttcccttgcagctgcaataacccgcaggtcttcactgaggtggaggctttggggtagaattctccatttattttactacttaatacaaaacatttatttttgaccagtcctgtggcttccattagcaatatgtttcctttcccaaatatgcaaatagtggctttgtttgctcaattttgtgagtgctttggaatttaaatgattgtataactcaagaagattacttttctatgttgctcaagctgtgcctgccaacttgtaacttaataaatacaggaaatcctcagagaaggtgatattttcaggaaaaagacaaatgccctcatagtagtgggaagtgtgaaggtgaccgtgaacatccttcctcatcgggtctgtccccgtcatttcctcccggagtcgtcgcaggtggagatggacaacgtggtgttggacttagacctccttcagtgtggctctgctgggccagaggcatcctgctgtcccgggtggctgcctcgctgtctgcaccccctctccctggggcagctttgcttcctgcccctgtgctcggggcctgggtggttactggcgtgtagatggaattgcttttttaatatgggaagatacatttatttttttccatgtgggtgggtgtctctttttggattttcttctgtttttacgtttctcttcttagaagggtgggagagaatcaagctcctgtggccacctgtgtcccagcagcagtgagtggagctgctcagggtgccctctcctgcggaccagtctctgaatgttcaaagatgagggcctggcttccgtgctctggctttgtaacttatctggaagggaaagcacatgccttcacgggcaggatgatcaagcggtgctgattcacgagagtggaagcctccagagcttggggctttctggctgctcttcattgacctgtgtgttcccagcacacgaacagcgcccctaacggagatttgttcagcgactgaatatacacctgtaaacgagtagcatgtatacattgattttgattacaaatggttctgtattatataccaccgttctgactgcttttttcacttatagcttggaaattgtcttctgttggtaatacagaaatctgtttcagtcttttgaa

SEQ ID NO: 735774 - DNA, 5981 bp, Homo sapiens
ctttcggagttagcgcagcgcgaacgctgggtgcggcgcctttaagcgtcgcggtgacacgtgtgtgaggcgccggaggcccggatggtgcgcgtgctgggccgcgggccgaaggagtcgccagggctgcgtaggcttgtggcgcgcccgcggagaggccggggctctgacgcccgctctgcggcttcggtgtttgaacaggccacagtccaggagcgcttacattcaggagctccgcgtagcacctgcccaaccaaactcagccctccgttaagatcctggttccatgccgcagtaggacagcaggcccaagtctgcacatcccagtgatgcaccatgccaatagtggataagttgaaggaggccctgaaacccggccgcaaggactcggctgatgatggagaactggggaagcttcttgcctcctctgccaagaaggtccttttacagaaaatcgagttcgagccagccagcaagagcttctcctaccagctggaggccttaaagagcaaatatgtgttgctcaaccccaaaacagagggagctagtcgccacaagagtggagatgacccaccggccaggagacagggcagtgagcacacgtatgagagctgtggtgacggagtcccagccccgcagaaagtgcttttccccacggagcgactgtctctgaggtgggagcgggtcttccgcgtgggcgcaggactccacaaccttggcaacacctgctttctcaatgccaccatccagtgcttgacctacacaccacctctagccaactacctgctctccaaggagcatgctcgcagctgccaccagggaagcttctgcatgctgtgtgtcatgcagaaccacattgtccaggccttcgccaacagcggcaacgccatcaagcccgtctccttcatccgagacctgaaaaagatcgcccgacacttccgctttgggaaccaggaggacgcgcatgagttcctgcggtacaccatcgacgccatgcagaaagcctgcctgaatggctgtgccaagttggatcgtcaaacgcaggctactaccttggtccatcaaatttttggagggtatctcagatcacgcgtgaagtgctccgtgtgcaagagcgtctcggacacctacgacccctacttggacgtcgcgctggagatccggcaagctgcgaatattgtgcgtgctctggaactttttgtgaaagcagatgtcctgagtggagagaatgcctacatgtgtgctaaatgcaagaagaaggttccagccagcaagcgcttcaccatccacagaacatccaacgtcttaaccctttccctcaagcgctttgccaacttcagcggggggaagatcaccaaggatgtaggctatccggaattcctcaacatacgtccgtatatgtcccagaataatggtgatcctgtcatgtatggactctatgctgtcctggtgcactcgggctacagctgccatgccgggcactattactgctacgtgaaggcaagcaatggacagtggtaccagatgaatgattccttggtccattccagcaacgtcaaggtggttctgaaccagcaggcctacgtgctgttctatctgcgaattccaggctctaagaaaagtcccgagggcctcatctccaggacaggctcctcctcccttcccggccgcccgagtgtgattccagatcactccaagaagaacatcggcaatgggattatttcctccccactgactggaaagcgacaagactctgggacgatgaagaagccgcacaccactgaagagattggtgtgcccatatccaggaatggctccaccctgggcctgaagtcccagaacggctgcattcctccaaagctgccctcggggtccccttcccccaaactctcccagacacccacacacatgccaaccatcctagacgaccctggaaagaaggtgaagaagccagctcctccacagcacttttcccccagaactgctcaggggctgcctgggaccagcaactcgaatagcagcagatctgggagccaaaggcagggctcctgggacagcagggatgttgtcctctctacctcacctaagctcctggctacagccactgccaacgggcatgggctgaaggggaacgacgagagcgctggcctcgacaggaggggctccagcagctccagcccagagcactcggccagcagcgactccaccaaggccccccagacccccaggagtggagcggcccatctctgcgattctcaggaaacgaactgttccaccgctggccactccaaaacgccgccaagtggagcagattctaagacggtgaagctgaagtcccctgtcctgagcaacaccaccactgagcctgcaagcaccatgtctcctccaccagccaaaaaactggccctttctgccaagaaggccagcaccctgtggagggcgaccggcaatgacctccgtccacctcccccctcaccatcctccgacctcacccaccccatgaaaacctctcaccccgtcgttgcctccacttggcccgtccatagagccagggctgtgtcacctgctccccaatcatccagccgcctgcaaccccccttcagcccccaccccacattgctgtccagtacccccaagcccccagggacgtcagaaccacggagctgctcctccatctcgacggcgctgcctcaggtcaacgaggaccttgtgtcccttccacaccagttgccagaggccagtgagcccccccggagcccctctgagaagaggaaaaagacctttgtgggagagccgcagaggctgggctcagagacgtgcctcccacagcacatcagggaggccactgcggctccccacgggaagaggaagaggaagaagaagaagcgcccggaggacacagctgccagcgccctgcaggaggggcagacacagagacagcctgggagccccatgtacaggagggagggccaggcacagctgcccgctgtcagacggcaggaagatggcacacagccacaggtgaatggccagcaggtgggatgtgttacggacggccaccacgcgagcagcaggaagcggaggaggaaaggagcagaaggtcttggtgaagaaggcggcctgcaccaggacccacttcggcacagctgctctcccatgggtgatggtgatccagaggccatggaagagtctccaaggaaaaaagaaaaaaagaaagcaggagacacagcgggcagtagaagaggatgggcatctcaaatgcccaaggagtgccaagccccaagatgctgttgtccccgagtccagcagctgcgcaccatccgcgaatggctggtgtcctggggaccgcatggggctgagccaggcccctcctgtgtcttggaatggagagcgggagtctgatgtggtccaggaactgctcaaatactcatctgataaagcttacgggagaaaagttctgacctgggatggcaagatgtcggcggtcagtcaggatgctattgaagacagcagacaggcccggactgagaccgtggttgatgactgggacgaagagtttgaccgagggaaggaaaagaaaattaaaaaatttaagagagagaagaggagaaacttcaacgccttccagaaacttcagactcgacggaacttctggtctgtgactcacccagcaaaggctgccagcctcagctatcgccgctgactgtgcccctgtggaaggaggactaccgtggtttgttctgcagcctcctggagacaaggcgtcccttcccgggagctgtcggtctggatctgagggagctctctgtgtgggctctgctgtgctgggagcctgtcacggtaggagctctcccggtaccagtgtccacagaccgcccaacatagaggctttgaggcttctctagatcggaacctctttggtgacattcccgaccagccctgcaagagaaacgacagtgtgtgtgtgagcagaggtggctgcacacctgctggacatctttgccaggctgtgccttctcatgtttcatagacagtggtctgtgctggcagaggctgctgcccctggttggggctatcaggagagtgggggatggtggccacatgtcctccaggtggtctcccggtgcatagctggtggctctgggcaagccatcccttgcttctcggggctgacgccaccgttgtgtccgagcccgccctcccctgcttcctcagcgggaccccttcatctgttggccttacctgtcctcagaaaggaagaggtgaccccacccagccacctctcccttttatggaactcgagagggtggccctactgtgcaccccttccttgtgagtagctctcaactgtcctggagagcagaggctatttggggtcggaggagccctcgatacctgcgaatacatctgctttccaggctgctgtttattctgagacgactgtgctgtagcttcccttgcagctgcaataacccgcaggtcttcactgaggtggaggctttggggtagaattctccatttattttactacttaatacaaaacatttatttttgaccagtcctgtggcttccattagcaatatgtttcctttcccaaatatgcaaatagtggctttgtttgctcaattttgtgagtgctttggaatttaaatgattgtataactcaagaagattacttttctatgttgctcaagctgtgcctgccaacttgtaacttaataaatacaggaaatcctcagagaaggtgatattttcaggaaaaagacaaatgccctcatagtagtgggaagtgtgaaggtgaccgtgaacatccttcctcatcgggtctgtccccgtcatttcctcccggagtcgtcgcaggtggagatggacaacgtggtgttggacttagacctccttcagtgtggctctgctgggccagaggcatcctgctgtcccgggtggctgcctcgctgtctgcaccccctctccctggggcagctttgcttcctgcccctgtgctcggggcctgggtggttactggcgtgtagatggaattgcttttttaatatgggaagatacatttatttttttccatgtgggtgggtgtctctttttggattttcttctgtttttacgtttctcttcttagaagggtgggagagaatcaagctcctgtggccacctgtgtcccagcagcagtgagtggagctgctcagggtgccctctcctgcggaccagtctctgaatgttcaaagatgagggcctggcttccgtgctctggctttgtaacttatctggaagggaaagcacatgccttcacgggcagggtatgttccttttcttctcggggtgttgacttgcattcctgtgtgaactgttccctctgccatgtttaccgtgtgatgttctgtagttgaaaatgttagttgtctgctggcacagaatttatctcgttcctttctctcccttctctcctccaaatcagtctcttcccttctccactagataactgtaaaaccttttcctggggtacatacattcgttaactcttgggcagtggtgagcacgagatgactttctgcagcgtttatcactgttgggtggagtcacgtcccttccctccaccgaagtcatcaaccagatagggaagggaaagatgaggcccagaaaacgagttcaaactctaggtcttgtacacgtatgtaagtaaatgtcaataacccaagcctttgtcatagcagtcacttggttgacttaggatctgggtctgttgaattttgtgcttgggaatggagctggagggagtggggcctgtgtacagcagctacctctcccaggtcctctcacttgcctgccccgcgtcctggttgcatggccgcacctgtgtgtgtgcagaggtctgtgtcccatcctctgcacctcctttccgggggcctggggagccccacgtgttgccaagatcttggtgcaataaaatactccggttttgtgaaaaaaaa

SEQ ID NO: 735775 - DNA, 5763 bp, Homo sapiens
ctttcggagttagcgcagcgcgaacgctgggtgcggcgcctttaagcgtcgcggtgacacgtgtgtgaggcgccggaggcccggatggtgcgcgtgctgggccgcgggccgaaggagtcgccagggctgcgtaggcttgtggcgcgcccgcggagaggccggggctctgacgcccgctctgcggcttcggtgtttgaacaggccacagtccaggagcgcttacattcaggagctccgcgtagcacctgcccaaccaaactcagccctccgttaagatcctggttccatgccgcagtaggacagcaggcccaagtctgcacatcccagtgatgcaccatgccaatagtggataagttgaaggaggccctgaaacccggccgcaaggactcggctgatgatggagaactggggaagcttcttgcctcctctgccaagaaggtccttttacagaaaatcgagttcgagccagccagcaagagcttctcctaccagctggaggccttaaagagcaaatatgtgttgctcaaccccaaaacagagggagctagtcgccacaagagtggagatgacccaccggccaggagacagggcagtgagcacacgtatgagagctgtggtgacggagtcccagccccgcagaaagtgcttttccccacggagcgactgtctctgaggtgggagcgggtcttccgcgtgggcgcaggactccacaaccttggcaacacctgctttctcaatgccaccatccagtgcttgacctacacaccacctctagccaactacctgctctccaaggagcatgctcgcagctgccaccagggaagcttctgcatgctgtgtgtcatgcagaaccacattgtccaggccttcgccaacagcggcaacgccatcaagcccgtctccttcatccgagacctgaaaaagatcgcccgacacttccgctttgggaaccaggaggacgcgcatgagttcctgcggtacaccatcgacgccatgcagaaagcctgcctgaatggctgtgccaagttggatcgtcaaacgcaggctactaccttggtccatcaaatttttggagggtatctcagatcacgcgtgaagtgctccgtgtgcaagagcgtctcggacacctacgacccctacttggacgtcgcgctggagatccggcaagctgcgaatattgtgcgtgctctggaactttttgtgaaagcagatgtcctgagtggagagaatgcctacatgtgtgctaaatgcaagaagaaggttccagccagcaagcgcttcaccatccacagaacatccaacgtcttaaccctttccctcaagcgctttgccaacttcagcggggggaagatcaccaaggatgtaggctatccggaattcctcaacatacgtccgtatatgtcccagaataatggtgatcctgtcatgtatggactctatgctgtcctggtgcactcgggctacagctgccatgccgggcactattactgctacgtgaaggcaagcaatggacagtggtaccagatgaatgattccttggtccattccagcaacgtcaaggtggttctgaaccagcaggcctacgtgctgttctatctgcgaattccaggctctaagaaaagtcccgagggcctcatctccaggacaggctcctcctcccttcccggccgcccgagtgtgattccagatcactccaagaagaacatcggcaatgggattatttcctccccactgactggaaagcgacaagactctgggacgatgaagaagccgcacaccactgaagagattggtgtgcccatatccaggaatggctccaccctgggcctgaagtcccagaacggctgcattcctccaaagctgccctcggggtccccttcccccaaactctcccagacacccacacacatgccaaccatcctagacgaccctggaaagaaggtgaagaagccagctcctccacagcacttttcccccagaactgctcaggggctgcctgggaccagcaactcgaatagcagcagatctgggagccaaaggcagggctcctgggacagcagggatgttgtcctctctacctcacctaagctcctggctacagccactgccaacgggcatgggctgaaggggaacgacgagagcgctggcctcgacaggaggggctccagcagctccagcccagagcactcggccagcagcgactccaccaaggccccccagacccccaggagtggagcggcccatctctgcgattctcaggaaacgaactgttccaccgctggccactccaaaacgccgccaagtggagcagattctaagacggtgaagctgaagtcccctgtcctgagcaacaccaccactgagcctgcaagcaccatgtctcctccaccagccaaaaaactggccctttctgccaagaaggccagcaccctgtggagggcgaccggcaatgacctccgtccacctcccccctcaccatcctccgacctcacccaccccatgaaaacctctcaccccgtcgttgcctccacttggcccgtccatagagccagggctgtgtcacctgctccccaatcatccagccgcctgcaaccccccttcagcccccaccccacattgctgtccagtacccccaagcccccagggacgtcagaaccacggagctgctcctccatctcgacggcgctgcctcaggtcaacgaggaccttgtgtcccttccacaccagttgccagaggccagtgagcccccccggagcccctctgagaagaggaaaaagacctttgtgggagagccgcagaggctgggctcagagacgtgcctcccacagcacatcagggaggccactgcggctccccacgggaagaggaagaggaagaagaagaagcgcccggaggacacagctgccagcgccctgcaggaggggcagacacagagacagcctgggagccccatgtacaggagggagggccaggcacagctgcccgctgtcagacggcaggaagatggcacacagccacaggtgaatggccagcaggtgggatgtgttacggacggccaccacgcgagcagcaggaagcggaggaggaaaggagcagaaggtcttggtgaagaaggcggcctgcaccaggacccacttcggcacagctgctctcccatgggtgatggtgatccagaggccatggaagagtctccaaggaaaaaagaaaaaaagaaagcaggagacacagcgggcagtagaagaggatgggcatctcaaatgcccaaggagtgccaagccccaagatgctgttgtccccgagtccagcagctgcgcaccatccgcgaatggctggtgtcctggggaccgcatggggctgagccaggcccctcctgtgtcttggaatggagagcgggagtctgatgtggtccaggaactgctcaaatactcatctgataaagcttacgggagaaaagttctgacctgggatggcaagatgtcggcggtcagtcaggatgctattgaagacagcagacaggcccggactgagaccgtggttgatgactgggacgaagagtttgaccgagggaaggaaaagaaaattaaaaaatttaagagagagaagaggagaaacttcaacgccttccagaaacttcagactcgacggaacttctggtctgtgactcacccagcaaaggctgccagcctcagctatcgccgctgactgtgcccctgtggaaggaggactaccgtggtttgttctgcagcctcctggagacaaggcgtcccttcccgggagctgtcggtctggatctgagggagctctctgtgtgggctctgctgtgctgggagcctgtcacggtaggagctctcccggtaccagtgtccacagaccgcccaacatagaggctttgaggcttctctagatcggaacctctttggtgacattcccgaccagccctgcaagagaaacgacagtgtgtgtgtgagcagaggtggctgcacacctgctggacatctttgccaggctgtgccttctcatgtttcatagacagtggtctgtgctggcagaggctgctgcccctggttggggctatcaggagagtgggggatggtggccacatgtcctccaggtggtctcccggtgcatagctggtggctctgggcaagccatcccttgcttctcggggctgacgccaccgttgtgtccgagcccgccctcccctgcttcctcagcgggaccccttcatctgttggccttacctgtcctcagaaaggaagaggtgaccccacccagccacctctcccttttatggaactcgagagggtggccctactgtgcaccccttccttgtgagtagctctcaactgtcctggagagcagaggctatttggggtcggaggagccctcgatacctgcgaatacatctgctttccaggctgctgtttattctgagacgactgtgctgtagcttcccttgcagctgcaataacccgcaggtcttcactgaggtggaggctttggggtagaattctccatttattttactacttaatacaaaacatttatttttgaccagtcctgtggcttccattagcaatatgtttcctttcccaaatatgcaaatagtggctttgtttgctcaattttgtgagtgctttggaatttaaatgattgtataactcaagaagattacttttctatgttgctcaagctgtgcctgccaacttgtaacttaataaatacaggaaatcctcagagaaggtgatattttcaggaaaaagacaaatgccctccctgtgctcggggcctgggtggttactggcgtgtagatggaattgcttttttaatatgggaagatacatttatttttttccatgtgggtgggtgtctctttttggattttcttctgtttttacgtttctcttcttagaagggtgggagagaatcaagctcctgtggccacctgtgtcccagcagcagtgagtggagctgctcagggtgccctctcctgcggaccagtctctgaatgttcaaagatgagggcctggcttccgtgctctggctttgtaacttatctggaagggaaagcacatgccttcacgggcagggtatgttccttttcttctcggggtgttgacttgcattcctgtgtgaactgttccctctgccatgtttaccgtgtgatgttctgtagttgaaaatgttagttgtctgctggcacagaatttatctcgttcctttctctcccttctctcctccaaatcagtctcttcccttctccactagataactgtaaaaccttttcctggggtacatacattcgttaactcttgggcagtggtgagcacgagatgactttctgcagcgtttatcactgttgggtggagtcacgtcccttccctccaccgaagtcatcaaccagatagggaagggaaagatgaggcccagaaaacgagttcaaactctaggtcttgtacacgtatgtaagtaaatgtcaataacccaagcctttgtcatagcagtcacttggttgacttaggatctgggtctgttgaattttgtgcttgggaatggagctggagggagtggggcctgtgtacagcagctacctctcccaggtcctctcacttgcctgccccgcgtcctggttgcatggccgcacctgtgtgtgtgcagaggtctgtgtcccatcctctgcacctcctttccgggggcctggggagccccacgtgttgccaagatcttggtgcaataaaatactccggttttgtgaaaaaaaa

SEQ ID NO: 735776 - DNA, 4974 bp, Homo sapiens
ctttcggagttagcgcagcgcgaacgctgggtgcggcgcctttaagcgtcgcggtgacacgtgtgtgaggcgccggaggcccggatggtgcgcgtgctgggccgcgggccgaaggagtcgccagggctgcgtaggcttgtggcgcgcccgcggagaggccggggctctgacgcccgctctgcggcttcggtgtttgaacaggccacagtccaggagcgcttacattcaggagctccgcgtagcacctgcccaaccaaactcagccctccgttaagatcctggttccatgccgcagtaggacagcaggcccaagtctgcacatcccagtgatgcaccatgccaatagtggataagttgaaggaggccctgaaacccggccgcaaggactcggctgatgatggagaactggggaagcttcttgcctcctctgccaagaaggtccttttacagaaaatcgagttcgagccagccagcaagagcttctcctaccagctggaggccttaaagagcaaatatgtgttgctcaaccccaaaacagagggagctagtcgccacaagagtggagatgacccaccggccaggagacagggcagtgagcacacgtatgagagctgtggtgacggagtcccagccccgcagaaagtgcttttccccacggagcgactgtctctgaggtgggagcgggtcttccgcgtgggcgcaggactccacaaccttggcaacacctgctttctcaatgccaccatccagtgcttgacctacacaccacctctagccaactacctgctctccaaggagcatgctcgcagctgccaccagggaagcttctgcatgctgtgtgtcatgcagaaccacattgtccaggccttcgccaacagcggcaacgccatcaagcccgtctccttcatccgagacctgaaaaagatcgcccgacacttccgctttgggaaccaggaggacgcgcatgagttcctgcggtacaccatcgacgccatgcagaaagcctgcctgaatggctgtgccaagttggatcgtcaaacgcaggctactaccttggtccatcaaatttttggagggtatctcagatcacgcgtgaagtgctccgtgtgcaagagcgtctcggacacctacgacccctacttggacgtcgcgctggagatccggcaagctgcgaatattgtgcgtgctctggaactttttgtgaaagcagatgtcctgagtggagagaatgcctacatgtgtgctaaatgcaagaagaaggttccagccagcaagcgcttcaccatccacagaacatccaacgtcttaaccctttccctcaagcgctttgccaacttcagcggggggaagatcaccaaggatgtaggctatccggaattcctcaacatacgtccgtatatgtcccagaataatggtgatcctgtcatgtatggactctatgctgtcctggtgcactcgggctacagctgccatgccgggcactattactgctacgtgaaggcaagcaatggacagtggtaccagatgaatgattccttggtccattccagcaacgtcaaggtggttctgaaccagcaggcctacgtgctgttctatctgcgaattccaggctctaagaaaagtcccgagggcctcatctccaggacaggctcctcctcccttcccggccgcccgagtgtgattccagatcactccaagaagaacatcggcaatgggattatttcctccccactgactggaaagcgacaagactctgggacgatgaagaagccgcacaccactgaagagattggtgtgcccatatccaggaatggctccaccctgggcctgaagtcccagaacggctgcattcctccaaagctgccctcggggtccccttcccccaaactctcccagacacccacacacatgccaaccatcctagacgaccctggaaagaaggtgaagaagccagctcctccacagcacttttcccccagaactgctcaggggctgcctgggaccagcaactcgaatagcagcagatctgggagccaaaggcagggctcctgggacagcagggatgttgtcctctctacctcacctaagctcctggctacagccactgccaacgggcatgggctgaaggggaacgacgagagcgctggcctcgacaggaggggctccagcagctccagcccagagcactcggccagcagcgactccaccaaggccccccagacccccaggagtggagcggcccatctctgcgattctcaggaaacgaactgttccaccgctggccactccaaaacgccgccaagtggagcagattctaagacggtgaagctgaagtcccctgtcctgagcaacaccaccactgagcctgcaagcaccatgtctcctccaccagccaaaaaactggccctttctgccaagaaggccagcaccctgtggagggcgaccggcaatgacctccgtccacctcccccctcaccatcctccgacctcacccaccccatgaaaacctctcaccccgtcgttgcctccacttggcccgtccatagagccagggctgtgtcacctgctccccaatcatccagccgcctgcaaccccccttcagcccccaccccacattgctgtccagtacccccaagcccccagggacgtcagaaccacggagctgctcctccatctcgacggcgctgcctcaggtcaacgaggaccttgtgtcccttccacaccagttgccagaggccagtgagcccccccggagcccctctgagaagaggaaaaagacctttgtgggagagccgcagaggctgggctcagagacgtgcctcccacagcacatcagggaggccactgcggctccccacgggaagaggaagaggaagaagaagaagcgcccggaggacacagctgccagcgccctgcaggaggggcagacacagagacagcctgggagccccatgtacaggagggagggccaggcacagctgcccgctgtcagacggcaggaagatggcacacagccacaggtgaatggccagcaggtgggatgtgttacggacggccaccacgcgagcagcaggaagcggaggaggaaaggagcagaaggtcttggtgaagaaggcggcctgcaccaggacccacttcggcacagctgctctcccatgggtgatggtgatccagaggccatggaagagtctccaaggaaaaaagaaaaaaagaaagcaggagacacagcgggcagtagaagaggatgggcatctcaaatgcccaaggagtgccaagccccaagatgctgttgtccccgagtccagcagctgcgcaccatccgcgaatggctggtgtcctggggaccgcatggggctgagccaggcccctcctgtgtcttggaatggagagcgggagtctgatgtggtccaggaactgctcaaatactcatctgataaagcttacgggagaaaagttctgacctgggatggcaagatgtcggcggtcagtcaggatgctattgaagacagcagacaggcccggactgagaccgtggttgatgactgggacgaagagtttgaccgagggaaggaaaagaaaattaaaaaatttaagagagagaagaggagaaacttcaacgccttccagaaacttcagactcgacggaacttctggtctgtgactcacccagcaaaggctgccagcctcagctatcgccgctgactgtgcccctgtggaaggaggactaccgtggtttgttctgcagcctcctggagacaaggcgtcccttcccgggagctgtcggtctggatctgagggagctctctgtgtgggctctgctgtgctgggagcctgtcacggtaggagctctcccggtaccagtgtccacagaccgcccaacatagaggctttgaggcttctctagatcggaacctctttggtgacattcccgaccagccctgcaagagaaacgacagtgtgtgtgtgagcagaggtggctgcacacctgctggacatctttgccaggctgtgccttctcatgtttcatagacagtggtctgtgctggcagaggctgctgcccctggttggggctatcaggagagtgggggatggtggccacatgtcctccaggtggtctcccggtgcatagctggtggctctgggcaagccatcccttgcttctcggggctgacgccaccgttgtgtccgagcccgccctcccctgcttcctcagcgggaccccttcatctgttggccttacctgtcctcagaaaggaagaggtgaccccacccagccacctctcccttttatggaactcgagagggtggccctactgtgcaccccttccttgtgagtagctctcaactgtcctggagagcagaggctatttggggtcggaggagccctcgatacctgcgaatacatctgctttccaggctgctgtttattctgagacgactgtgctgtagcttcccttgcagctgcaataacccgcaggtcttcactgaggtggaggctttggggtagaattctccatttattttactacttaatacaaaacatttatttttgaccagtcctgtggcttccattagcaatatgtttcctttcccaaatatgcaaatagtggctttgtttgctcaattttgtgagtgctttggaatttaaatgattgtataactcaagaagattacttttctatgttgctcaagctgtgcctgccaacttgtaacttaataaatacaggaaatcctcagagaaggtgatattttcaggaaaaagacaaatgccctcggagtggggcctgtgtacagcagctacctctcccaggtcctctcacttgcctgccccgcgtcctggttgcatggccgcacctgtgtgtgtgcagaggtctgtgtcccatcctctgcacctcctttccgggggcctggggagccccacgtgttgccaagatcttggtgcaataaaatactccggttttgtgaaaaaaaa

SEQ ID NO: 735777 - DNA, 4236 bp, Homo sapiens
ctttcggagttagcgcagcgcgaacgctgggtgcggcgcctttaagcgtcgcggtgacacgtgtgtgaggcgccggaggcccggatggtgcgcgtgctgggccgcgggccgaaggagtcgccagggctgcgtaggcttgtggcgcgcccgcggagaggccggggctctgacgcccgctctgcggcttcggtgtttgaacaggccacagtccaggagcgcttacattcaggagctccgcgtagcacctgcccaaccaaactcagccctccgttaagatcctggttccatgccgcagtaggacagcaggcccaagtctgcacatcccagtgatgcaccatgccaatagtggataagttgaaggaggccctgaaacccggccgcaaggactcggctgatgatggagaactggggaagcttcttgcctcctctgccaagaaggtccttttacagaaaatcgagttcgagccagccagcaagagcttctcctaccagctggaggccttaaagagcaaatatgtgttgctcaaccccaaaacagagggagctagtcgccacaagagtggagatgacccaccggccaggagacagggcagtgagcacacgtatgagagctgtggtgacggagtcccagccccgcagaaagtgcttttccccacggagcgactgtctctgaggtgggagcgggtcttccgcgtgggcgcaggactccacaaccttggcaacacctgctttctcaatgccaccatccagtgcttgacctacacaccacctctagccaactacctgctctccaaggagcatgctcgcagctgccaccagggaagcttctgcatgctgtgtgtcatgcagaaccacattgtccaggccttcgccaacagcggcaacgccatcaagcccgtctccttcatccgagacctgaaaaagatcgcccgacacttccgctttgggaaccaggaggacgcgcatgagttcctgcggtacaccatcgacgccatgcagaaagcctgcctgaatggctgtgccaagttggatcgtcaaacgcaggctactaccttggtccatcaaatttttggagggtatctcagatcacgcgtgaagtgctccgtgtgcaagagcgtctcggacacctacgacccctacttggacgtcgcgctggagatccggcaagctgcgaatattgtgcgtgctctggaactttttgtgaaagcagatgtcctgagtggagagaatgcctacatgtgtgctaaatgcaagaagaaggttccagccagcaagcgcttcaccatccacagaacatccaacgtcttaaccctttccctcaagcgctttgccaacttcagcggggggaagatcaccaaggatgtaggctatccggaattcctcaacatacgtccgtatatgtcccagaataatggtgatcctgtcatgtatggactctatgctgtcctggtgcactcgggctacagctgccatgccgggcactattactgctacgtgaaggcaagcaatggacagtggtaccagatgaatgattccttggtccattccagcaacgtcaaggtggttctgaaccagcaggcctacgtgctgttctatctgcgaattccaggctctaagaaaagtcccgagggcctcatctccaggacaggctcctcctcccttcccggccgcccgagtgtgattccagatcactccaagaagaacatcggcaatgggattatttcctccccactgactggaaagcgacaagactctgggacgatgaagaagccgcacaccactgaagagattggtgtgcccatatccaggaatggctccaccctgggcctgaagtcccagaacggctgcattcctccaaagctgccctcggggtccccttcccccaaactctcccagacacccacacacatgccaaccatcctagacgaccctggaaagaaggtgaagaagccagctcctccacagcacttttcccccagaactgctcaggggctgcctgggaccagcaactcgaatagcagcagatctgggagccaaaggcagggctcctgggacagcagggatgttgtcctctctacctcacctaagctcctggctacagccactgccaacgggcatgggctgaaggggaacgacgagagcgctggcctcgacaggaggggctccagcagctccagcccagagcactcggccagcagcgactccaccaaggccccccagacccccaggagtggagcggcccatctctgcgattctcaggaaacgaactgttccaccgctggccactccaaaacgccgccaagtggagcagattctaagacggtgaagctgaagtcccctgtcctgagcaacaccaccactgagcctgcaagcaccatgtctcctccaccagccaaaaaactggccctttctgccaagaaggccagcaccctgtggagggcgaccggcaatgacctccgtccacctcccccctcaccatcctccgacctcacccaccccatgaaaacctctcaccccgtcgttgcctccacttggcccgtccatagagccagggctgtgtcacctgctccccaatcatccagccgcctgcaaccccccttcagcccccaccccacattgctgtccagtacccccaagcccccagggacgtcagaaccacggagctgctcctccatctcgacggcgctgcctcaggtcaacgaggaccttgtgtcccttccacaccagttgccagaggccagtgagcccccccggagcccctctgagaagaggaaaaagacctttgtgggagagccgcagaggctgggctcagagacgtgcctcccacagcacatcagggaggccactgcggctccccacgggaagaggaagaggaagaagaagaagcgcccggaggacacagctgccagcgccctgcaggaggggcagacacagagacagcctgggagccccatgtacaggagggagggccaggcacagctgcccgctgtcagacggcaggaagatggcacacagccacaggtgaatggccagcaggtgggatgtgttacggacggccaccacgcgagcagcaggaagcggaggaggaaaggagcagaaggtcttggtgaagaaggcggcctgcaccaggacccacttcggcacagctgctctcccatgggtgatggtgatccagaggccatggaagagtctccaaggaaaaaagaaaaaaagaaagcaggagacacagcgggcagtagaagaggatgggcatctcaaatgcccaaggagtgccaagccccaagatgctgttgtccccgagtccagcagctgcgcaccatccgcgaatggctggtgtcctggggaccgcatggggctgagccaggcccctcctgtgtcttggaatggagagcgggagtctgatgtggtccaggaactgctcaaatactcatctgataaagcttacgggagaaaagttctgacctgggatggcaagatgtcggcggtcagtcaggatgctattgaagacagcagacaggcccggactgagaccgtggttgatgactgggacgaagagtttgaccgagggaaggaaaagaaaattaaaaaatttaagagagagaagaggagaaacttcaacgccttccagaaacttcagactcgacggaacttctggtctgtgactcacccagcaaaggctgccagcctcagctatcgccgctgactgtgcccctgtggaaggaggactaccgtggtttgttctgcagcctcctggagacaaggcgtcccttcccgggagctgtcggtctggatctgagggagctctctgtgtgggctctgctgtgctgggagcctgtcacgaagggtgggagagaatcaagctcctgtggccacctgtgtcccagcagcagtgagtggagctgctcagggtgccctctcctgcggaccagtctctgaatgttcaaagatgagggcctggcttccgtgctctggctttgtaacttatctggaagggaaagcacatgccttcacgggcagggatttgacactgttgacctccgcaccctggagagctcctctaagatgtgagcctgttgcatttgctgcatactctagatcaagcccagaatcaactgatccagtcaatacatcccactgaacagccgaccgatccaccctctgtcaggatctctactgtagacactgaaagaggtgccccctcagtataggatcctggcctcaaataatcttctcgcc

SEQ ID NO: 735778 - DNA, 5958 bp, Homo sapiens
ctttcggagttagcgcagcgcgaacgctgggtgcggcgcctttaagcgtcgcggtgacacgtgtgtgaggcgccggaggcccggatggtgcgcgtgctgggccgcgggccgaaggagtcgccagggctgcgtaggcttgtggcgcgcccgcggagaggccggggctctgacgcccgctctgcggcttcggtgtttgaacaggccacagtccaggagcgcttacattcaggagctccgcgtagcacctgcccaaccaaactcagccctccgttaagatcctggttccatgccgcagtaggacagcaggcccaagtctgcacatcccagtgatgcaccatgccaatagtggataagttgaaggaggccctgaaacccggccgcaaggactcggctgatgatggagaactggggaagcttcttgcctcctctgccaagaaggtccttttacagaaaatcgagttcgagccagccagcaagagcttctcctaccagctggaggccttaaagagcaaatatgtgttgctcaaccccaaaacagagggagctagtcgccacaagagtggagatgacccaccggccaggagacagggcagtgagcacacgtatgagagctgtggtgacggagtcccagccccgcagaaagtgcttttccccacggagcgactgtctctgaggtgggagcgggtcttccgcgtgggcgcaggactccacaaccttggcaacacctgctttctcaatgccaccatccagtgcttgacctacacaccacctctagccaactacctgctctccaaggagcatgctcgcagctgccaccagggaagcttctgcatgctgtgtgtcatgcagaaccacattgtccaggccttcgccaacagcggcaacgccatcaagcccgtctccttcatccgagacctgaaaaagatcgcccgacacttccgctttgggaaccaggaggacgcgcatgagttcctgcggtacaccatcgacgccatgcagaaagcctgcctgaatggctgtgccaagttggatcgtcaaacgcaggctactaccttggtccatcaaatttttggagggtatctcagatcacgcgtgaagtgctccgtgtgcaagagcgtctcggacacctacgacccctacttggacgtcgcgctggagatccggcaagctgcgaatattgtgcgtgctctggaactttttgtgaaagcagatgtcctgagtggagagaatgcctacatgtgtgctaaatgcaagaagaaggttccagccagcaagcgcttcaccatccacagaacatccaacgtcttaaccctttccctcaagcgctttgccaacttcagcggggggaagatcaccaaggatgtaggctatccggaattcctcaacatacgtccgtatatgtcccagaataatggtgatcctgtcatgtatggactctatgctgtcctggtgcactcgggctacagctgccatgccgggcactattactgctacgtgaaggcaagcaatggacagtggtaccagatgaatgattccttggtccattccagcaacgtcaaggtggttctgaaccagcaggcctacgtgctgttctatctgcgaattccaggctctaagaaaagtcccgagggcctcatctccaggacaggctcctcctcccttcccggccgcccgagtgtgattccagatcactccaagaagaacatcggcaatgggattatttcctccccactgactggaaagcgacaagactctgggacgatgaagaagccgcacaccactgaagagattggtgtgcccatatccaggaatggctccaccctgggcctgaagtcccagaacggctgcattcctccaaagctgccctcggggtccccttcccccaaactctcccagacacccacacacatgccaaccatcctagacgaccctggaaagaaggtgaagaagccagctcctccacagcacttttcccccagaactgctcaggggctgcctgggaccagcaactcgaatagcagcagatctgggagccaaaggcagggctcctgggacagcagggatgttgtcctctctacctcacctaagctcctggctacagccactgccaacgggcatgggctgaaggggaacgacgagagcgctggcctcgacaggaggggctccagcagctccagcccagagcactcggccagcagcgactccaccaaggccccccagacccccaggagtggagcggcccatctctgcgattctcaggaaacgaactgttccaccgctggccactccaaaacgccgccaagtggagcagattctaagacggtgaagctgaagtcccctgtcctgagcaacaccaccactgagcctgcaagcaccatgtctcctccaccagccaaaaaactggccctttctgccaagaaggccagcaccctgtggagggcgaccggcaatgacctccgtccacctcccccctcaccatcctccgacctcacccaccccatgaaaacctctcaccccgtcgttgcctccacttggcccgtccatagagccagggctgtgtcacctgctccccaatcatccagccgcctgcaaccccccttcagcccccaccccacattgctgtccagtacccccaagcccccagggacgtcagaaccacggagctgctcctccatctcgacggcgctgcctcaggtcaacgaggaccttgtgtcccttccacaccagttgccagaggccagtgagcccccccggagcccctctgagaagaggaaaaagacctttgtgggagagccgcagaggctgggctcagagacgtgcctcccacagcacatcagggaggccactgcggctccccacgggaagaggaagaggaagaagaagaagcgcccggaggacacagctgccagcgccctgcaggaggggcagacacagagacagcctgggagccccatgtacaggagggagggccaggcacagctgcccgctgtcagacggcaggaagatggcacacagccacaggtgaatggccagcaggtgggatgtgttacggacggccaccacgcgagcagcaggaagcggaggaggaaaggagcagaaggtcttggtgaagaaggcggcctgcaccaggacccacttcggcacagctgctctcccatgggtgatggtgatccagaggccatggaagagtctccaaggaaaaaagaaaaaaagaaagcaggagacacagcgggcagtagaagaggatgggcatctcaaatgcccaaggagtgccaagccccaagatgctgttgtccccgagtccagcagctgcgcaccatccgcgaatggctggtgtcctggggaccgcatggggctgagccaggcccctcctgtgtcttggaatggagagcgggagtctgatgtggtccaggaactgctcaaatactcatctgataaagcttacgggagaaaagttctgacctgggatggcaagatgtcggcggtcagtcaggatgctattgaagacagcagacaggcccggactgagaccgtggttgatgactgggacgaagagtttgaccgagggaaggaaaagaaaattaaaaaatttaagagagagaagaggagaaacttcaacgccttccagaaacttcagactcgacggaacttctggtctgtgactcacccagcaaaggctgccagcctcagctatcgccgctgactgtgcccctgtggaaggagcctcctggagacaaggcgtcccttcccgggagctgtcggtctggatctgagggagctctctgtgtgggctctgctgtgctgggagcctgtcacggtaggagctctcccggtaccagtgtccacagaccgcccaacatagaggctttgaggcttctctagatcggaacctctttggtgacattcccgaccagccctgcaagagaaacgacagtgtgtgtgtgagcagaggtggctgcacacctgctggacatctttgccaggctgtgccttctcatgtttcatagacagtggtctgtgctggcagaggctgctgcccctggttggggctatcaggagagtgggggatggtggccacatgtcctccaggtggtctcccggtgcatagctggtggctctgggcaagccatcccttgcttctcggggctgacgccaccgttgtgtccgagcccgccctcccctgcttcctcagcgggaccccttcatctgttggccttacctgtcctcagaaaggaagaggtgaccccacccagccacctctcccttttatggaactcgagagggtggccctactgtgcaccccttccttgtgagtagctctcaactgtcctggagagcagaggctatttggggtcggaggagccctcgatacctgcgaatacatctgctttccaggctgctgtttattctgagacgactgtgctgtagcttcccttgcagctgcaataacccgcaggtcttcactgaggtggaggctttggggtagaattctccatttattttactacttaatacaaaacatttatttttgaccagtcctgtggcttccattagcaatatgtttcctttcccaaatatgcaaatagtggctttgtttgctcaattttgtgagtgctttggaatttaaatgattgtataactcaagaagattacttttctatgttgctcaagctgtgcctgccaacttgtaacttaataaatacaggaaatcctcagagaaggtgatattttcaggaaaaagacaaatgccctcatagtagtgggaagtgtgaaggtgaccgtgaacatccttcctcatcgggtctgtccccgtcatttcctcccggagtcgtcgcaggtggagatggacaacgtggtgttggacttagacctccttcagtgtggctctgctgggccagaggcatcctgctgtcccgggtggctgcctcgctgtctgcaccccctctccctggggcagctttgcttcctgcccctgtgctcggggcctgggtggttactggcgtgtagatggaattgcttttttaatatgggaagatacatttatttttttccatgtgggtgggtgtctctttttggattttcttctgtttttacgtttctcttcttagaagggtgggagagaatcaagctcctgtggccacctgtgtcccagcagcagtgagtggagctgctcagggtgccctctcctgcggaccagtctctgaatgttcaaagatgagggcctggcttccgtgctctggctttgtaacttatctggaagggaaagcacatgccttcacgggcagggtatgttccttttcttctcggggtgttgacttgcattcctgtgtgaactgttccctctgccatgtttaccgtgtgatgttctgtagttgaaaatgttagttgtctgctggcacagaatttatctcgttcctttctctcccttctctcctccaaatcagtctcttcccttctccactagataactgtaaaaccttttcctggggtacatacattcgttaactcttgggcagtggtgagcacgagatgactttctgcagcgtttatcactgttgggtggagtcacgtcccttccctccaccgaagtcatcaaccagatagggaagggaaagatgaggcccagaaaacgagttcaaactctaggtcttgtacacgtatgtaagtaaatgtcaataacccaagcctttgtcatagcagtcacttggttgacttaggatctgggtctgttgaattttgtgcttgggaatggagctggagggagtggggcctgtgtacagcagctacctctcccaggtcctctcacttgcctgccccgcgtcctggttgcatggccgcacctgtgtgtgtgcagaggtctgtgtcccatcctctgcacctcctttccgggggcctggggagccccacgtgttgccaagatcttggtgcaataaaatactccggttttgtgaaaaaaaa

SEQ ID NO: 735779 - DNA, 4095 bp, Homo sapiens
ctttcggagttagcgcagcgcgaacgctgggtgcggcgcctttaagcgtcgcggtgacacgtgtgtgaggcgccggaggcccggatggtgcgcgtgctgggccgcgggccgaaggagtcgccagggctgcgtaggcttgtggcgcgcccgcggagaggccggggctctgacgcccgctctgcggcttcggtgtttgaacaggccacagtccaggagcgcttacattcaggagctccgcgtagcacctgcccaaccaaactcagccctccgttaagatcctggttccatgccgcagtaggacagcaggcccaagtctgcacatcccagtgatgcaccatgccaatagtggataagttgaaggaggccctgaaacccggccgcaaggactcggctgatgatggagaactggggaagcttcttgcctcctctgccaagaaggtccttttacagaaaatcgagttcgagccagccagcaagagcttctcctaccagctggaggccttaaagagcaaatatgtgttgctcaaccccaaaacagagggagctagtcgccacaagagtggagatgacccaccggccaggagacagggcagtgagcacacgtatgagagctgtggtgacggagtcccagccccgcagaaagtgcttttccccacggagcgactgtctctgaggtgggagcgggtcttccgcgtgggcgcaggactccacaaccttggcaacacctgctttctcaatgccaccatccagtgcttgacctacacaccacctctagccaactacctgctctccaaggagcatgctcgcagctgccaccagggaagcttctgcatgctgtgtgtcatgcagaaccacattgtccaggccttcgccaacagcggcaacgccatcaagcccgtctccttcatccgagacctgaaaaagatcgcccgacacttccgctttgggaaccaggaggacgcgcatgagttcctgcggtacaccatcgacgccatgcagaaagcctgcctgaatggctgtgccaagttggatcgtcaaacgcaggctactaccttggtccatcaaatttttggagggtatctcagatcacgcgtgaagtgctccgtgtgcaagagcgtctcggacacctacgacccctacttggacgtcgcgctggagatccggcaagctgcgaatattgtgcgtgctctggaactttttgtgaaagcagatgtcctgagtggagagaatgcctacatgtgtgctaaatgcaagaagaaggttccagccagcaagcgcttcaccatccacagaacatccaacgtcttaaccctttccctcaagcgctttgccaacttcagcggggggaagatcaccaaggatgtaggctatccggaattcctcaacatacgtccgtatatgtcccagaataatggtgatcctgtcatgtatggactctatgctgtcctggtgcactcgggctacagctgccatgccgggcactattactgctacgtgaaggcaagcaatggacagtggtaccagatgaatgattccttggtccattccagcaacgtcaaggtggttctgaaccagcaggcctacgtgctgttctatctgcgaattccaggctctaagaaaagtcccgagggcctcatctccaggacaggctcctcctcccttcccggccgcccgagtgtgattccagatcactccaagaagaacatcggcaatgggattatttcctccccactgactggaaagcgacaagactctgggacgatgaagaagccgcacaccactgaagagattggtgtgcccatatccaggaatggctccaccctgggcctgaagtcccagaacggctgcattcctccaaagctgccctcggggtccccttcccccaaactctcccagacacccacacacatgccaaccatcctagacgaccctggaaagaaggtgaagaagccagctcctccacagcacttttcccccagaactgctcaggggctgcctgggaccagcaactcgaatagcagcagatctgggagccaaaggcagggctcctgggacagcagggatgttgtcctctctacctcacctaagctcctggctacagccactgccaacgggcatgggctgaaggggaacgacgagagcgctggcctcgacaggaggggctccagcagctccagcccagagcactcggccagcagcgactccaccaaggccccccagacccccaggagtggagcggcccatctctgcgattctcaggaaacgaactgttccaccgctggccactccaaaacgccgccaagtggagcagattctaagacggtgaagctgaagtcccctgtcctgagcaacaccaccactgagcctgcaagcaccatgtctcctccaccagccaaaaaactggccctttctgccaagaaggccagcaccctgtggagggcgaccggcaatgacctccgtccacctcccccctcaccatcctccgacctcacccaccccatgaaaacctctcaccccgtcgttgcctccacttggcccgtccatagagccagggctgtgtcacctgctccccaatcatccagccgcctgcaaccccccttcagcccccaccccacattgctgtccagtacccccaagcccccagggacgtcagaaccacggagctgctcctccatctcgacggcgctgcctcaggtcaacgaggaccttgtgtcccttccacaccagttgccagaggccagtgagcccccccggagcccctctgagaagaggaaaaagacctttgtgggagagccgcagaggctgggctcagagacgtgcctcccacagcacatcagggaggccactgcggctccccacgggaagaggaagaggaagaagaagaagcgcccggaggacacagctgccagcgccctgcaggaggggcagacacagagacagcctgggagccccatgtacaggagggagggccaggcacagctgcccgctgtcagacggcaggaagatggcacacagccacaggtgaatggccagcaggtgggatgtgttacggacggccaccacgcgagcagcaggaagcggaggaggaaaggagcagaaggtcttggtgaagaaggcggcctgcaccaggacccacttcggcacagctgctctcccatgggtgatggtgatccagaggccatggaagagtctccaaggaaaaaagaaaaaaagaaagcaggagacacagcgggcagtagaagaggatgggcatctcaaatgcccaaggagtgccaagccccaagatgctgttgtccccgagtccagcagctgcgcaccatccgcgaatggctggtgtcctggggaccgcatggggctgagccaggcccctcctgtgtcttggaatggagagcgggagtctgatgtggtccaggaactgctcaaatactcatctgataaagcttacgggagaaaagttctgacctgggatggcaagatgtcggcggtcagtcaggatgctattgaagacagcagacaggcccggactgagaccgtggttgatgactgggacgaagagtttgaccgagggaaggaaaagaaaattaaaaaatttaagagagagaagaggagaaacttcaacgccttccagaaacttcagactcgacggaacttctggtctgtgactcacccagcaaaggctgccagcctcagctatcgccgctgactgtgcccctgtggaaggagcctcctggagacaaggcgtcccttcccgggagctgtcggtctggatctgagggagctctctgtgtgggctctgctgtgctgggagcctgtcacgatgatcaagcggtgctgattcacgagagtggaagcctccagagcttggggctttctggctgctcttcattgacctgtgtgttcccagcacacgaacagcgcccctaacggagatttgttcagcgactgaatatacacctgtaaacgagtagcatgtatacattgattttgattacaaatggttctgtattatataccaccgttctgactgcttttttcacttatagcttggaaattgtcttctgttggtaatacagaaatctgtttcagtcttttgaa

SEQ ID NO: 735780 - DNA, 3863 bp, Homo sapiens
ctttcggagttagcgcagcgcgaacgctgggtgcggcgcctttaagcgtcgcggtgacacgtgtgtgaggcgccggaggcccggatggtgcgcgtgctgggccgcgggccgaaggagtcgccagggctgcgtaggcttgtggcgcgcccgcggagaggccggggctctgacgcccgctctgcggcttcggtgtttgaacaggccacagtccaggagcgcttacattcaggagctccgcgtagcacctgcccaaccaaactcagccctccgttaagatcctggttccatgccgcagtaggacagcaggcccaagtctgcacatcccagtgatgcaccatgccaatagtggataagttgaaggaggccctgaaacccggccgcaaggactcggctgatgatggagaactggggaagcttcttgcctcctctgccaagaaggtccttttacagaaaatcgagttcgagccagccagcaagagcttctcctaccagctggaggccttaaagagcaaatatgtgttgctcaaccccaaaacagagggagctagtcgccacaagagtggagatgacccaccggccaggagacagggcagtgagcacacgtatgagagctgtggtgacggagtcccagccccgcagaaagtgcttttccccacggagcgactgtctctgaggtgggagcgggtcttccgcgtgggcgcaggactccacaaccttggcaacacctgctttctcaatgccaccatccagtgcttgacctacacaccacctctagccaactacctgctctccaaggagcatgctcgcagctgccaccagggaagcttctgcatgctgtgtgtcatgcagaaccacattgtccaggccttcgccaacagcggcaacgccatcaagcccgtctccttcatccgagacctgaaaaagatcgcccgacacttccgctttgggaaccaggaggacgcgcatgagttcctgcggtacaccatcgacgccatgcagaaagcctgcctgaatggctgtgccaagttggatcgtcaaacgcaggctactaccttggtccatcaaatttttggagggtatctcagatcacgcgtgaagtgctccgtgtgcaagagcgtctcggacacctacgacccctacttggacgtcgcgctggagatccggcaagctgcgaatattgtgcgtgctctggaactttttgtgaaagcagatgtcctgagtggagagaatgcctacatgtgtgctaaatgcaagaagaaggttccagccagcaagcgcttcaccatccacagaacatccaacgtcttaaccctttccctcaagcgctttgccaacttcagcggggggaagatcaccaaggatgtaggctatccggaattcctcaacatacgtccgtatatgtcccagaataatggtgatcctgtcatgtatggactctatgctgtcctggtgcactcgggctacagctgccatgccgggcactattactgctacgtgaaggcaagcaatggacagtggtaccagatgaatgattccttggtccattccagcaacgtcaaggtggttctgaaccagcaggcctacgtgctgttctatctgcgaattccaggctctaagaaaagtcccgagggcctcatctccaggacaggctcctcctcccttcccggccgcccgagtgtgattccagatcactccaagaagaacatcggcaatgggattatttcctccccactgactggaaagcgacaagactctgggacgatgaagaagccgcacaccactgaagagattggtgtgcccatatccaggaatggctccaccctgggcctgaagtcccagaacggctgcattcctccaaagctgccctcggggtccccttcccccaaactctcccagacacccacacacatgccaaccatcctagacgaccctggaaagaaggtgaagaagccagctcctccacccactgccaacgggcatgggctgaaggggaacgacgagagcgctggcctcgacaggaggggctccagcagctccagcccagagcactcggccagcagcgactccaccaaggccccccagacccccaggagtggagcggcccatctctgcgattctcaggaaacgaactgttccaccgctggccactccaaaacgccgccaagtggagcagattctaagacggtgaagctgaagtcccctgtcctgagcaacaccaccactgagcctgcaagcaccatgtctcctccaccagccaaaaaactggccctttctgccaagaaggccagcaccctgtggagggcgaccggcaatgacctccgtccacctcccccctcaccatcctccgacctcacccaccccatgaaaacctctcaccccgtcgttgcctccacttggcccgtccatagagccagggctgtgtcacctgctccccaatcatccagccgcctgcaaccccccttcagcccccaccccacattgctgtccagtacccccaagcccccagggacgtcagaaccacggagctgctcctccatctcgacggcgctgcctcaggtcaacgaggaccttgtgtcccttccacaccagttgccagaggccagtgagcccccccggagcccctctgagaagaggaaaaagacctttgtgggagagccgcagaggctgggctcagagacgtgcctcccacagcacatcagggaggccactgcggctccccacgggaagaggaagaggaagaagaagaagcgcccggaggacacagctgccagcgccctgcaggaggggcagacacagagacagcctgggagccccatgtacaggagggagggccaggcacagctgcccgctgtcagacggcaggaagatggcacacagccacaggtgaatggccagcaggtgggatgtgttacggacggccaccacgcgagcagcaggaagcggaggaggaaaggagcagaaggtcttggtgaagaaggcggcctgcaccaggacccacttcggcacagctgctctcccatgggtgatggtgatccagaggccatggaagagtctccaaggaaaaaagaaaaaaagaaagcaggagacacagcgggcagtagaagaggatgggcatctcaaatgcccaaggagtgccaagccccaagatgctgttgtccccgagtccagcagctgcgcaccatccgcgaatggctggtgtcctggggaccgcatggggctgagccaggcccctcctgtgtcttggaatggagagcgggagtctgatgtggtccaggaactgctcaaatactcatctgataaagcttacgggagaaaagttctgacctgggatggcaagatgtcggcggtcagtcaggatgctattgaagacagcagacaggcccggactgagaccgtggttgatgactgggacgaagagtttgaccgagggaaggaaaagaaaattaaaaaatttaagagagagaagaggagaaacttcaacgccttccagaaacttcagactcgacggaacttctggtctgtgactcacccagcaaaggctgccagcctcagctatcgccgctgactgtgcccctgtggaaggagatgatcaagcggtgctgattcacgagagtggaagcctccagagcttggggctttctggctgctcttcattgacctgtgtgttcccagcacacgaacagcgcccctaacggagatttgttcagcgactgaatatacacctgtaaacgagtagcatgtatacattgattttgattacaaatggttctgtattatataccaccgttctgactgcttttttcacttatagcttggaaattgtcttctgttggtaatacagaaatctgtttcagtcttttgaa

SEQ ID NO: 735781 - DNA, 746 bp, Homo sapiens
  misc_feature (538)..(538): n is a, c, g, or t
aacaagttatcttcagaaaaaagaaattatgaagtaaatgcgtaccatcaggagacatggaaaagaaataaaaccttcaaccttatgaggtttattttcagaactgacccacagtacacaattgaatttgggagacaacagagacctaaagtgggatgttttagtcaaatgatattcaaaaaacataaatcccttcctctacataagagaaataacacaagagagaaatcatatgagtgtaaggaatataagaagggctttagaaaatatttgcaccttactgaacatctgagagaccatactggtgtgataccctatgaatgtaatgaatgtggaaaagcatttgtagttttccagcattttattagacatcgaaaaatccacactgatttgaaaccctatgaatgcaatggatgtgagaaggcctttaggttttattcacagcttattcagcatcagataattcatactggtatgaaaccctatgaatgtaagcaatgcgggaaggcttttagacgtcattctcaccttacagaanatcagaaaattcatgttggcttgaaaccctttgaatgtaaggaatgtggggaaacgtttagattatatcgacatatgtgtctgcatcagaaaattcatcatggtgtgaaaccctacaaatgtaaagaatgtggaaaggcttttggtcatcgttcaagtctttaccaacataagaaaattcattctggtgagaaaccatataaatgtga

SEQ ID NO: 735782 - DNA, 901 bp, Homo sapiens
  misc_feature (823)..(823): n is a, c, g, or t
  misc_feature (826)..(826): n is a, c, g, or t
  misc_feature (844)..(844): n is a, c, g, or t
gtcttccttctataagatttatttttagtaattctaacaattatcataaaaataatgtatttagtaagcaaatacgatgtgccagatgcctttccaagtatttatattctatattaactagtttaatcttcactatagcatcataatagtgacaacagtaaaaatgtgccatggctaaaggctttccctctcattacattaagagtctctcaccatggtgaaatctttgatgttgactaagttgatagcaatgactaaaggccttaccacattctttgcatttctgtggtttcacaccagtatgaattgtctcatgttgagtaagtcgatcactgcgattaaaggccttatcacattctttacattcatagggtttttcaccagtatgaattctcttatgttgagaaagacctgagatagaacgaaaggccttcttacattctttacatacatagggtttcaaaccagtatgaattgtctgatgataaattagttgagaattaagtctaaaggtttttccacattccttacattcatagggtttctccccagcatgaattgattgatgtgtcttaaggtctccaacacgactgaaggctttcccacattgcttacattcatatggcttcaaatcagtatgaattatctgatgttgaataagatatgaatgaagcttaaaagtcttcccacattctttacattcatgtggcttctcaccagtatgaattctctgatgctgtgtaagttgagagcctctacaaaaggcctttccacaatccttacaatcatagagtttctcactactatgaattctcttatgttnaanaaggcttgagcccttacnaaaagcctttccacattccatgcattcatgaggtttctcaccagtatgacttctttg

SEQ ID NO: 735783 - DNA, 589 bp, Homo sapiens
tatgattgatatatagtattacaaaatgtagaggataaagcaactgaaacagctgtaatttttataaatgaatacattttatactagtgaatttactattcttaatgagtaagttataatcaaatgacttctgtctgtggataaataggtcattcttctctatgttctattgtgaagactaaaagtgttagattagtaaagtaagttctgaaaaagataaagagttggaatatgataagcatattcattttggtgttgcttttcaatttgtaggaagaaccaatagaacggcttagtgttcctgatatacccaaagaacattttggtcaaagacttcttgtaaaatgcttatcactcaagtgagtatttatttcttttacttacaacttttattttccaggataaaattttagtagtgatgtaacaaaatctgagtagattttatagttgcatttgtgtccttttgagaagtattgttctacatgtcattttaaatactattcagcattcaaacgtatgtatgaagctgagcctactgtgctaagcctaacgtatttatgaagctaagcctactgtgtagcaaacataa

SEQ ID NO: 735784 - DNA, 2623 bp, Homo sapiens
  misc_feature (2249)..(2249): n is a, c, g, or t
agccgccgccgccgtcgccgtcgccgcagcagccatggccgagcgccgcgccttcgcccagaagatcagcagaacggtggcagccgaagttaggaagcagatctccggacaatatagtggttctccccaactgctcaaaaaccttaatattgttggcaatatatcccatcacaccacagtgccccttaccgaagcagtagatccagtggatttggaagattacctcattactcatcctttggctgtggattctgggcctttacgggatttgattgaatttcctccagatgatattgaagttgtttatagtcctcgggactgcagaactcttgtttcagctgtacctgaagaaagtgaaatggatccacatgttagagactgtataagaagttatacagaagactgggcaattgtcatcagaaaatatcataaattgggaacaggatttaatcccaatacattagataaacagaaagaaaggcaaaaaggtttgccaaaacaagtttttgaatctgatgaagctccagatggcaacagctaccaggatgatcaagatgaccttaaaagacgttcaatgtcaatagatgataccccaaggggtagctgggcctgtagtatctttgacttgaaaaattcacttcctgatgctttgcttcccaatttacttgatcgaactccaaatgaagaaatagaccgtcagaatgatgaccaaaggaaatcaaaccgtcacaaagaactttttgctttgcatccatcaccagatgaggaagaaccaatagaacggcttagtgttcctgatatacccaaagaacattttggtcaaagacttcttgtaaaatgcttatcactcaagtttgaaattgaaattgaacccatttttgcaagtttggctttatatgatgtcaaggaaaagaaaaagatttcagaaaacttttattttgaccttaattctgagcagatgaaagggttgttacgtccacatgtaccacctgctgccattactaccctggcaagatcagcaattttttctatcacttatccttcccaagatgtttttcttgtaataaagctagaaaaagtcctacagcaaggagacattggagagtgtgcagaaccatatatgattttcaaagaagcagatgccaccaagaataaagaaaaactggagaaactgaagagtcaagcagatcagttttgccaaagacttgggaaatatcgcatgccttttgcttggactgcaatccatttaatgaatattgttagcagtgctgggagtttggaaagagattctacagaagtagaaatcagtactggagaacgaaaagggtcttggtcagagaggaggaattctagtattgttggcagacgatcacttgaaaggacaacaagtggagatgatgcttgtaacttgacgagctttcgaccagctactctcacagtgacaaatttttttaagcaggaaggagaccgcttaagtgatgaagatctctacaaattccttgctgatatgagaaggccatcttctgtcttacggcgactaagacctattacagctcagctcaagatagacatttctcccgcacctgaaaatccccattattgcctaactccggagctgcttcaagtgaagctttaccctgacagtagagttagacctaccagagaaatcttagagtttcccgcaagatggtttatgttccaaacactacttacagaaatcttctctacatataccctcagagtcttaattttgccaatcgtcaaggttctgctagaaatataacagtgaaagtccagtttatgtatgggagaggatccaagcaatgccatgccgagccccagctggcacccatcctattaccgacagttaggacctctccctctttggtgctaccatagcatcttctcacttctttcatgggactttatcacttgatgattctatatttcttaatttcacccattagattgtgagctccttgagggcagggacgatgtcttactcatgtctatatcttgactcctgtcacatttttggataaataattaatgctcaatccatattgctaaatgattaaaagtacatgtcaaatggtcaaaaaaggaacactgtctgctttatgtcatattatgaaaataaacaagttattttgtgaaaagtgatagcttctcagagggaaaaaaggtattgcatttcttttacttgtgtgttattagtcatatggaaaatacaatgtttttatgtatgnaaatggccgatttgaaagagtatataaacatagacatactgtgtttgcccttttttaaaaaaagggctgtttaaatgggtcctaagataactttttgataatgtaatattgacatgataaaattgtaaacttcataattctggcacaggaacaatttatgaaaacatactaaggtatttgtaaattgatgaaataatatatatcttaggaaagtcataattattacacttgtacatacccttaaaataaaagagcctgcttgaaatgttgcaaaaagaaacagaaatacctgctaatatgcccttctaattaaggatgatgccaattaatctctttatataaataataaactttgagttgttttaaaaaaaaaa

SEQ ID NO: 735785 - DNA, 1955 bp, Homo sapiens
agccgccgccgccgtcgccgtcgccgcagcagccatggccgagcgccgcgccttcgcccagaagatcagcagaacggtggcagccgaagttaggaagcagatctccggacaatatagtggttctccccaactgctcaaaaaccttaatattgttggcaatatatcccatcacaccacagtgccccttaccgaagcagtagatccagtggatttggaagattacctcattactcatcctttggctgtggattctgggcctttacgggatttgattgaatttcctccagatgatattgaagttgtttatagtcctcgggactgcagaactcttgtttcagctgtacctgaagaaagtgaaatggatccacatgttagagactgtataagaagttatacagaagactgggcaattgtcatcagaaaatatcataaattgggaacaggatttaatcccaatacattagataaacagaaagaaaggcaaaaaggtttgccaaaacaagtttttgaatctgatgaagctccagatggcaacagctaccaggatgatcaagatgaccttaaaagacgttcaatgtcaatagatgataccccaaggggtagctgggcctgtagtatctttgacttgaaaaattcacttcctgatgctttgcttcccaatttacttgatcgaactccaaatgaagaaatagaccgtcagaatgatgaccaaaggaaatcaaaccgtcacaaagaactttttgctttgcatccatcaccagatgaggaagaaccaatagaacggcttagtgttcctgatatacccaaagaacattttggtcaaagacttcttgtaaaatgcttatcactcaagtttgaaattgaaattgaacccatttttgcaagtttggctttatatgatgtcaaggaaaagaaaaagatttcagaaaacttttattttgaccttaattctgagcagatgaaagggttgttacgtccacatgtaccacctgctgccattactaccctggcaagatcagcaattttttctatcacttatccttcccaagatgtttttcttgtaataaagctagaaaaagtcctacagcaaggagacattggagagtgtgcagaaccatatatgattttcaaagaagcagatgccaccaagaataaagaaaaactggagaaactgaagagtcaagcagatcagttttgccaaagacttgggaaatatcgcatgccttttgcttggactgcaatccatttaatgaatattgttagcagtgctgggagtttggaaagagattctacagaagtagaaatcagtactggagaacgaaaagggtcttggtcagagaggaggaattctagtattgttggcagacgatcacttgaaaggacaacaagtggagatgatgcttgtaacttgacgagctttcgaccagctactctcacagtgacaaatttttttaagcaggaaggagaccgcttaagtgatgaagatctctacaaattccttgctgatatgagaaggccatcttctgtcttacggcgactaagacctattacagctcagctcaagatagacatttctcccgcacctgaaaatccccattattgcctaactccggagctgcttcaagtgaagctttaccctgacagtagagttagacctaccagagaaatcttagagtttcccgcaagatggtttatgttccaaacactacttacagaaatcttctctacatataccctcagagtcttaattttgccaatcgtcaaggttctgctagaaatataacagtgaaagtccagtttatgtatgggagaggatccaagcaatgccatgccggtaatctttggtaaatctagctgttcagaattttcaaaggaagcctatacagccgtagtatatcataacaggtctcctgattttcatgaagaaatcaaggttaagcttcctgctactttaa

SEQ ID NO: 735786 - DNA, 2005 bp, Homo sapiens
tcgggagccttcagggatgcgctgccagctgcgcccgggcgtttctccggacctgttgtgccagatcggaaagcgggttggctgtgcgcgggaccaagggggtggccttcggggagaacccccgagccgcaggcacctgctcccagtcccccttcttcccggtggctccacctcccggtgtaaggctttgggttctgtgccctgacaggttcacaggcgcctttcttctgagaacgaccctggccttgaacgtcagagccggggacgaaggcccccggaggctgctgcgagctccgcgcgttccttcgcgcccttccgcgccgctcgcgccggcgccggcctccacccccgcgcgccgcctcccaccagtcccgatgcaggcgcccggccgggggccactcgggctgcggctgatgatgcccgggcgccggggggcgctgcgcgagccgggcggctgcggatcctgcctgggggtggcgctggccctgctgttgctgctactgcccgcctgctgccccgtgcgggcgcagaacgacacggagcccatcgtgctggagggcaagtgcctggtggtgtgcgactccagcccgtcggcggacggcgccgtcacctcctccctaggcatctccgtgcgctccggcagcgccaaggtggccttctccgccacgcggagcaccaaccacgagccgtccgagatgagcaaccgcaccatgaccatctatttcgaccaggtattagtaaatattggcaaccactttgatcttgcttccagtatatttgtagcaccgagaaaagggatttatagcttcagcttccacgtggtcaaagtgtataacagacaaaccatccaggtcagtttaatgcagaatggctacccagtgatctcggcctttgcaggagaccaggatgtcaccagagaagctgctagcaatggcgtgctgctgctcatggaaagggaagacaaagtgcatctcaaacttgagagaggcaacctcatggggggctggaaatactccacattctcgggcttcttggtgtttcctctataaacacagagccccctagatggtgggggaatggcaaactggacccaggactccgccctttaaaacaccctgaacttactggaattggacaccttgtttccaacctccgtcagactgttgcagtagaagaatgatttcctttgaaacctccagtacttttgtttttgttttttggaatactgacaattcctcgggaacctggcctctaattagttttagatgacaaggtcttaaggagaaatgaaattatcgatttgagcaatttgtacctgtgattgtaaagtcaatatcggattttattgttgggaccatggacctcttttgtttgtatgttgtattgtcgtcccaacggaaggagagctcctgactccaggatgggctgcaggttgcagtcagggcttgaagtaggagcccagcaaagaaccacctgctggacagtccttgacatgtgttctgtgtgtgtctgtatagccttaagaaaaagaatggcttcactttcattctgtattcttccccccaccatgtggctgggaggacttgggagggggatggggacattggggaacctgtcaagaagtgctttatccagagaagcaaattttgcacgattgggactgcaatttttgttttgtattgtttgtgttttttcttgaaaagctttacttttctttccacactcagctctccctcctcaaccccacttttatttttcttgctggggttgaggagagaaaatatagaattcctggataagaccaaacaaaacaaaacattaaaatacctgtatgttttgttttagacgagaccaaactaaacaaaaagtatctgtttatcaaagtaaaagtaacacaatggacaattctgcttattctctcaaagagattctaagatgcacctttagaactattaatagcaacctgcatttttttttaatttatacttcagaatcctttaagaac

SEQ ID NO: 735787 - DNA, 1893 bp, Homo sapiens
atctcctgtttttggtgatggcggcggccgtggtacggtccggattattcgagcaacttcgcggacagcggagctcgcccagcatggatgttccaggttcacaggcgcctttcttctgagaacgaccctggccttgaacgtcagagccggggacgaaggcccccggaggctgctgcgagctccgcgcgttccttcgcgcccttccgcgccgctcgcgccggcgccggcctccacccccgcgcgccgcctcccaccagtcccgatgcaggcgcccggccgggggccactcgggctgcggctgatgatgcccgggcgccggggggcgctgcgcgagccgggcggctgcggatcctgcctgggggtggcgctggccctgctgttgctgctactgcccgcctgctgccccgtgcgggcgcagaacgacacggagcccatcgtgctggagggcaagtgcctggtggtgtgcgactccagcccgtcggcggacggcgccgtcacctcctccctaggcatctccgtgcgctccggcagcgccaaggtggccttctccgccacgcggagcaccaaccacgagccgtccgagatgagcaaccgcaccatgaccatctatttcgaccaggtattagtaaatattggcaaccactttgatcttgcttccagtatatttgtagcaccgagaaaagggatttatagcttcagcttccacgtggtcaaagtgtataacagacaaaccatccaggtcagtttaatgcagaatggctacccagtgatctcggcctttgcaggagaccaggatgtcaccagagaagctgctagcaatggcgtgctgctgctcatggaaagggaagacaaagtgcatctcaaacttgagagaggcaacctcatggggggctggaaatactccacattctcgggcttcttggtgtttcctctataaacacagagccccctagatggtgggggaatggcaaactggacccaggactccgccctttaaaacaccctgaacttactggaattggacaccttgtttccaacctccgtcagactgttgcagtagaagaatgatttcctttgaaacctccagtacttttgtttttgttttttggaatactgacaattcctcgggaacctggcctctaattagttttagatgacaaggtcttaaggagaaatgaaattatcgatttgagcaatttgtacctgtgattgtaaagtcaatatcggattttattgttgggaccatggacctcttttgtttgtatgttgtattgtcgtcccaacggaaggagagctcctgactccaggatgggctgcaggttgcagtcagggcttgaagtaggagcccagcaaagaaccacctgctggacagtccttgacatgtgttctgtgtgtgtctgtatagccttaagaaaaagaatggcttcactttcattctgtattcttccccccaccatgtggctgggaggacttgggagggggatggggacattggggaacctgtcaagaagtgctttatccagagaagcaaattttgcacgattgggactgcaatttttgttttgtattgtttgtgttttttcttgaaaagctttacttttctttccacactcagctctccctcctcaaccccacttttatttttcttgctggggttgaggagagaaaatatagaattcctggataagaccaaacaaaacaaaacattaaaatacctgtatgttttgttttagacgagaccaaactaaacaaaaagtatctgtttatcaaagtaaaagtaacacaatggacaattctgcttattctctcaaagagattctaagatgcacctttagaactattaatagcaacctgcatttttttttaatttatacttcagaatcctttaagaac

SEQ ID NO: 735788 - DNA, 1878 bp, Homo sapiens
ccgacagctcccactcgcctcattttctctaagcagagcaacttcgcggacagcggagctcgcccagcatggatgttccaggttcacaggcgcctttcttctgagaacgaccctggccttgaacgtcagagccggggacgaaggcccccggaggctgctgcgagctccgcgcgttccttcgcgcccttccgcgccgctcgcgccggcgccggcctccacccccgcgcgccgcctcccaccagtcccgatgcaggcgcccggccgggggccactcgggctgcggctgatgatgcccgggcgccggggggcgctgcgcgagccgggcggctgcggatcctgcctgggggtggcgctggccctgctgttgctgctactgcccgcctgctgccccgtgcgggcgcagaacgacacggagcccatcgtgctggagggcaagtgcctggtggtgtgcgactccagcccgtcggcggacggcgccgtcacctcctccctaggcatctccgtgcgctccggcagcgccaaggtggccttctccgccacgcggagcaccaaccacgagccgtccgagatgagcaaccgcaccatgaccatctatttcgaccaggtattagtaaatattggcaaccactttgatcttgcttccagtatatttgtagcaccgagaaaagggatttatagcttcagcttccacgtggtcaaagtgtataacagacaaaccatccaggtcagtttaatgcagaatggctacccagtgatctcggcctttgcaggagaccaggatgtcaccagagaagctgctagcaatggcgtgctgctgctcatggaaagggaagacaaagtgcatctcaaacttgagagaggcaacctcatggggggctggaaatactccacattctcgggcttcttggtgtttcctctataaacacagagccccctagatggtgggggaatggcaaactggacccaggactccgccctttaaaacaccctgaacttactggaattggacaccttgtttccaacctccgtcagactgttgcagtagaagaatgatttcctttgaaacctccagtacttttgtttttgttttttggaatactgacaattcctcgggaacctggcctctaattagttttagatgacaaggtcttaaggagaaatgaaattatcgatttgagcaatttgtacctgtgattgtaaagtcaatatcggattttattgttgggaccatggacctcttttgtttgtatgttgtattgtcgtcccaacggaaggagagctcctgactccaggatgggctgcaggttgcagtcagggcttgaagtaggagcccagcaaagaaccacctgctggacagtccttgacatgtgttctgtgtgtgtctgtatagccttaagaaaaagaatggcttcactttcattctgtattcttccccccaccatgtggctgggaggacttgggagggggatggggacattggggaacctgtcaagaagtgctttatccagagaagcaaattttgcacgattgggactgcaatttttgttttgtattgtttgtgttttttcttgaaaagctttacttttctttccacactcagctctccctcctcaaccccacttttatttttcttgctggggttgaggagagaaaatatagaattcctggataagaccaaacaaaacaaaacattaaaatacctgtatgttttgttttagacgagaccaaactaaacaaaaagtatctgtttatcaaagtaaaagtaacacaatggacaattctgcttattctctcaaagagattctaagatgcacctttagaactattaatagcaacctgcatttttttttaatttatacttcagaatcctttaagaac

SEQ ID NO: 735789 - DNA, 1896 bp, Homo sapiens
aatattccagaaatttactggctacagacagggatagtggtgaaggaaccatcctaaacagagtaaatgcagaagttactgtacagaaaggaacatgcagaacacatccaccaacgctctcccaccctctcccttctcccacaagcaccacacagagtgactcgagaaaagcaaaaaagaaaaaaaggaaaataatcagtcaactgaaaaacgcaaagaattctcccccactgagtttctaacacaagttactgatcaagtgagaaaaggctgtactttggctctttcctttctttctaaaatacacagtatttgaaattcctggttgaaaaacacagtagatgacagccactgaggtcaactggggcccacattatcccgctcagctgcctgcctagctcttcaaaactgcgtatctcagtcatttccgatgcccacaaaagcacaaacaatgcacaaaatcagggtaatccaattccactagagagctcccggcagcccgtggcaggcctgaaggtctctgggcagctagtaccagcagaggcaagcccaggtagggcagccacatagaactgggacatacttacactaggaacttcttcactgtttatccaaaatgcaaacttaattgagtgtcctatatttttatttgctaagtctgacccggatgaaggggccttacctgcaggccataaagcccctgggtgccacctgaaagcctgcctaggccaggtctgctgaggccaccaaagcatatgtcctgatgctgaagtcccctctgggatcactgactccccacttcctgttcaaacagaagccagtgtctggggcaaacttttttggccctccccatcccccaagaaatagaagctcaagggcaaaggcagccaggtgtacagattgtgctagcgcagagctgggtttctgccagcaccccgtccctttttctttttaaagatccggccttcattattcacagtacatcaaatttccacccccttctcaatgtttccctgctgctgtgcagctctgcaagtttctgtctttgaaggaacagccctgagtctcatttgatcctgggagacattattctcctccaccttctttcagactgaatgcctattaagggcccccacggtgaatcacggagtctgaatctaggcacgtggagctgatccagaggatgtggggaggagcctggcacaggaggacaaagcaaagcatctgctcattcaaatatctgctgagcaatctactgtgggccagataccccagagagggcacacaggagaagcatatttcaaaaaccaaggttaggacaggaaaatatcctctttccctgggttagcaacttagaaccacgagtacttcacttaggtgatcctggacaaaaaaacgaaaaaaacgagcctacttttaaagaattatgcacaactctgggaacaaatcagtgcttaatttacctcagatattccagctacctagcacggcccagcacacaaagaggttttgaaatcatctgctgcaatggaatcttggctgataaatacacgtggcctatctagccagtcacaagttatgtgcgtaacaaggcaaaaaagcagcacagaccacttgaaatctcttttcagaacactttagtaatttttaacttttttccttttcggttggaaacaagtggcagaaagatttatttccttcctgtccctgccctgtgagggataccaatatattatggaactgtcagaagatggtggaagatgggaagacttgtggattcagcgtaggataaagaatgggggatattttcttccacagtttagacaactcctgtttaatgagatgctgacttcttcctggtatttctgagatgcaggaacaaaagctcaattctga

SEQ ID NO: 735790 - DNA, 1477 bp, Homo sapiens
ggagataaagataataaactcaatctacagtaagaatagaataaggaaatattatattaaataatagagctcccggcagcccgtggcaggcctgaaggtctctgggcagctagtaccagcagaggcaagcccaggtagggcagccacatagaactgggacatacttacactaggaacttcttcactgtttatccaaaatgcaaacttaattgagtgtcctatatttttatttgctaagtctgacccggatgaaggggccttacctgcaggccataaagcccctgggtgccacctgaaagcctgcctaggccaggtctgctgaggccaccaaagcatatgtcctgatgctgaagtcccctctgggatcactgactccccacttcctgttcaaacagaagccagtgtctggggcaaacttttttggccctccccatcccccaagaaatagaagctcaagggcaaaggcagccaggtgtacagattgtgctagcgcagagctgggtttctgccagcaccccgtccctttttctttttaaagatccggccttcattattcacagtacatcaaatttccacccccttctcaatgtttccctgctgctgtgcagctctgcaagtttctgtctttgaaggaacagccctgagtctcatttgatcctgggagacattattctcctccaccttctttcagactgaatgcctattaagggcccccacggtgaatcacggagtctgaatctaggcacgtggagctgatccagaggatgtggggaggagcctggcacaggaggacaaagcaaagcatctgctcattcaaatatctgctgagcaatctactgtgggccagataccccagagagggcacacaggagaagcatatttcaaaaaccaaggttaggacaggaaaatatcctctttccctgggttagcaacttagaaccacgagtacttcacttaggtgatcctggacaaaaaaacgaaaaaaacgagcctacttttaaagaattatgcacaactctgggaacaaatcagtgcttaatttacctcagatattccagctacctagcacggcccagcacacaaagaggttttgaaatcatctgctgcaatggaatcttggctgataaatacacgtggcctatctagccagtcacaagttatgtgcgtaacaaggcaaaaaagcagcacagaccacttgaaatctcttttcagaacactttagtaatttttaacttttttccttttcggttggaaacaagtggcagaaagatttatttccttcctgtccctgccctgtgagggataccaatatattatggaactgtcagaagatggtggaagatgggaagacttgtggattcagcgtaggataaagaatgggggatattttcttccacagtttagacaactcctgtttaatgagatgctgacttcttcctggtatttctgagatgcaggaacaaaagctcaattctga

SEQ ID NO: 735791 - DNA, 1105 bp, Homo sapiens
tcccttcacccgcggctgcctcctgcccccatgactacagtgtgatgctgtctgggaagctgaatgtcatcttccctgggcttacctgccaggctcctctcatccacatcttccagcctctagccacatggacccctccggaaagcatgtgtgtgtggggggtatgtgtgaacatttttcatgcttgatgtgagccggaagaaaaatgagcttctctatttgataagtgtggacctgcccacagcactaaatttggttctgccgtcaccggcgccatgaagcagcagcctggtttagaggcttgcctttggtttcaaataatttctccaggctcatgttacatatgacccattcacagaggctggagggcatggcttctccagtccttagcactaaagacgtgtcttttggctcctgcacgactagcacaggcagtagaaccagatgggggatgctctgaggttgcagaggcaggaaggcaagcgggagagagcttgggcctggacagagggatgagctggctccctccccagctgtgaaatctctgagtctcagtttgcttctctgcaaaatgaggataataatccccacctcgggactgaggattaacgaggcaatggttttagcagaataatccactgctgctattattatcagcatcttcgtatagcaaaactcatttggaccaatggggagtgcgttaagttggtctgaagtagggcaaaggaacgattatagaatgtttcaaaggaaatgtgttttttattatttccatgtatatagagtactggaactgagtgctaggaggtggagaactgacttgatttaaataaggagagctcatttgacattggcctgtttgatttctcaacatccaactgtgttaataaagagggttttgagctatctatgtgcccagctctgtgactggagaaggaaagtcacataagacacagtccttgccctcacaggacgtgcaacctgtgggcagatgagtcctacacaggaagcgggggcaagaaggaaactgtgaggcactggggagcacggcgctgccacaggtgagaggaaacgcgtagcctctggaccttgagtgccaaggctg

SEQ ID NO: 735792 - DNA, 6609 bp, Homo sapiens
gggctgttagctcggctgggcacgggcggctccgtggcgcttcctgccacgccaggcctgcctgggccgcgccagcgccgctccaccgagggccgcgcgtcggccgccgccgggcctggatggggccttacctgccaggctgatcccttggagtagttctgaggcatgatgagtcatccgtgtgtgtctcttttggttccacctactccccaaggtcttaccctccccaggatggagccccaggaaaccaggtcctggcagtccctcttgagatgccagaggatttggtgacatttgatgatgtggcatggtacctcaccacaagggagtggtttaagctggaccctgaacagagggcactggaatattatgggaacgtgacctctgtgggcgttcctgttttaaatcctgccttggtccctcacctggcacaaggacaagtgctactggtgtcagacccatcgcccaacactgatcctgctaagtactctgaaagcacctccgcgacccgacaccagatgaagggggaagatgcccagccacaggagatggcgtccacaagcttcccaagggccagtggtcccagtcctgaattcagacagcacggggactctgacgggaagagagggagcccacagaatctgcccatagaacatcattttgcttgtaaagagtgttggggacacctttcggcttaaagtcctgcttgtccagcaccagagagtccacagtgaggagaagggctgggaatgtggcgactgcgggaaggtctttaggggggtggcggagtttaatgagcacaggaaaagccacgtagctgcggagccccagcccggccccagtagggccctggagaatgccgcggagaagagggagcagatggagagggaggcaaagcccttcgagtgcgaggagtgcggaaaacggtttaagaagaatgcaggcctgagtcagcatctgagggtccacagcagagagaagccctttgattgcgaggaatgcgggcggtcgttcaaagtcaacacccacctcttccgacatcagaaacttcacacttcggaaaagcctttcgcctgcaaggcgtgcagcagggatttcctggatcgccaggagcttctcaagcaccagcgcatgcacactggccacctgcccttcgactgcgacgactgcggcaagtccttccgaggggtcaacgggctggccgagcaccagcgcatccacagtggggccaagccatacgggtgtccccactgcggcaagctcttccgaaggagctcggagctcaccaagcaccggcggatccacacgggcgagaagccctacgcctgcggccagtgcggcaaggccttccgccagagctccagcctcctggagcacgcacgcatccacagtggcgagcggccctacgcatgcggcgagtgtggcaaggccttccgtgggccctctgacctcatcaagcaccggcgcatccacagcggactgaaaccctatgagtgcgacaaatgcggcaaggccttccgccggagctccggcctcagtcgccaccggcggatccacagtggggcgcggcgctgcgaatgcagccagtgtggccgcgtgttcaagaggcgctcggcactgcagaagcatcagccaacccaccacgagtagaaacgccctgtggtcccgcgggacagggacggagtccccagaggggatggcagagtcaaaggagatgaacagttttgtagcgcttatatattttgtcttccaaaaggttgagaccgatttatactgccaccagcaatttataagtgttacgttatgcccatcaagagtagcttgtaccatttaacttagtttggctagtttaactggtaggaagtaccatcaaggtatttcagtccacatgccttgaatccaagaatgagagaggacaaatctggatgtggggtagggaggggcttagaggtcatcaactccaagctccccccgccccagagaaacacacagagctgttccacgatggcgtcctcataatgtgatcccagctttcctgaagagaacgttgccctcatgatttttggcctacttgaatttataaatttttagggatgtaaatagaacactcaaatgtcttaaaatatttaatttattaatttagttatacatacatactgtaaatcacatattatataaaataatatattaatttagaaaataccccatttttgccaccctccctttcacgaaatcattttactctgactcctcaccgtcttcaccaacatgggaaccctgtttgagtcatcagacagtttcaagacacacccagtcacttccatccgagctctgcacggtcgctcagtgacgatcccttcatgaggctctcattagaaattttctcccaagccataagaccatatttgcagaacattaggacgatttctcttgtcgttttttaatctgtcctgtgactgtacaatataaccacttaaggtcatactttttcaaacaacctttaaacgtcttttcttttaaagcacccaaaatgtcattgtgaggccaaacgcctagtaacagttactgaatctgggttaaatgtcggtatctttttttcttaaaccatttcaatttggtgtcccctatacatatccaaaactagcatcgattggggttgttttgaactaatgggtcttgtcctcaagcagcactattttgttcaaaataaaatagttgagagcatgcccctaagaagagatacatctcaaggactcaagtgcagggtgacgcctccttttggaaatgagcctctcctggtatcaggcctagatggtacttctccagccttccgtttcttgttctataaaacaggggtgatcacagcacctacctccgaaggttatcacgaggactgccatcgtggctgcagagtgccaggaccaccggcctggtatggaggtacacactcagtgaaggccatctgctgtcattgtcattgtcatagttattgccgtcattctgtggcttgtcaattccagaactggggatagaccccaggcctcctgaccaccagtctcatctttctcttatgcgatgacttaaatggtgtttctgttttttgcatgcaaatggtccgttcatctcctttgactagttatcaacttaccttcggatatattaactttatgtagcagttctttctatattgatggtgatgttctcttttccaattttattgctttgctttttgtagcagttttattacgtttttgttgtgaaagcttttaatttttacatatccaagcattcattttttgtccactcagtcataactttcattgcttctgtagctagatatgatgacattttctctagaattttaattacaaacaaaaagctgcaaccccagcccatcagaaggtgagtacaccaggtgggcaggctggatggaaatgggccagagaagcaggctctttcctcatccgagatgcggactccctgtctatctgtgggcaccacttgactatccaacctgaccactgcggcacactggagatgctcccatcatagattagccagaactctgtgactgctcatcattatagaccccgccagcagcagtggggcttggcctcacctagatcaatggagtggtccaaacttggtctgggagcaagcagcccagccatcctttgagctcctgggagccttggcaatgctccgagtggattcagtgactgagcagcagattcacccaagaaacatctccttggacacaagaagacttgcctagaccacatcctcctttcagccggtgactctagaactagaaagagattggttcataggcttctgctgtgggcagctaggggaaaattcacccatgtgttctggcatcacttcctatagccacacctaagtgagggcaacagagcagaggctcggagaggaaccctgcccctccgatggcttgtgcgttatgctgatagaagctggcagcactgccctgggctatgatttgcaacagccatgcccaggaggagcactaaagcaaaggtttggagggcagtggaacccttctgaaagcctgtgtggcatagaagtagaagctggtcctcctgggtctgagctaccatttccagtgggctcccccaagaggaacagcagcaagggctagcgaggaacctgcccctccagtggcccacagaagccacagatagaagccagccccaccagggctgtgctgtgacttcccagcagctgtggctggggacagggacactaggagggcctggcaaggaagtgtgcccttctcgtgggcccaccaaggctgaggcagagcttcctagcagacacaacttggaagggcttctcaggcacccatcctgacccccaggctggagaggagccaaaagcacttgttacatagtgattccttttgccctgtgggcctcagttcttgcagtagttgtgaatctgtgtctgaaatcactactttcttctcggatcctttttctcttttcgagttgttaggatgtgttttgtacagctgtcatttgataaagaaggttgacctctaccaggggcaagtctggcacctttacctagaagtactctgccatgtcttgcccgttcatttatcgtttgttgggtttcatgagggatcccattgaagtagatcccttttatgaagggatcccattgaatgcagcattaactcagaacgtagcataaagtcgtcactgctcccagctgggacgtggtgtcttggcatcccttcctgccgtccttgactctttcccatcttcagttctataattttctcccaaacaaatgctcttttagagttaacactaaagatctggtctttgccgtcaaggttgacagaacagctgttcatggtgtttgcggtgaaacccgtgttctctttcaatgcagtctgtggctttaacgtgtgtcctgtaatttcgccaagttcatttcttgcctctggtaacttgggggtggatttccttgggctctctaggtgtactgctatgtcagatgcaaaatgtcacccagcttcctgtcacatatccttgtctgtgcattcatgcatctacctcattccggttttctttctaatctcatgtattcctgttgtgaggaaatgtgttcttttcccgatccttttgtagttcatacacgtgacaattgggtttccacgcacgtgcatgagatgttcctccttcaaaccttgttactatgtcagcacattaactgcctggcatggaaaaagaaaaaaaaaaaagaaatatgttcttttcctaccatttgaaaaaaatcctccattgcttttattagagttttgaatacttgtgaaaattttcaaaagaaagtaattgattaccatttttgctgcttattacgatgagctgtgtccattagctgtgtcaccccactcttgcatttccagaatagtccctacccaattgcagcgggcatgtttttgagtggtgttgcattccatgtgcttgattttgtcctagaactggcacagcgcctgccctacctgcagccctgggttgtggccctgttgcgtaccatgtgatttgccaccccgcttctaggccatattaattcagccagaactgaacacctgacccaagggcagcaagcaatcatcagagcatagagctgacagaacatgatggaccacggacaccaccaggccttccagatctgaaatgcaaacaaggaaacagaagcttctaggcatcagaaggtgtggggagcagcacagtactcagaggagtgaggagcgtggcgcctgctgggaggaaggcctggccatggtatgttcttggatttctggcagcagccctcattggtccacgtgcgtccccactacagactccttgacttgagccagcttgagtgggtctctactcttttctattgtgttttgccacttggctgcttcctggccaagtcgcacctgactgcatgaacacctgttcaaacgtgtgttctctgttctctaagatgggtgaaagtcgatgccttctagtctcagtgaatttaacctgtgattttatgtctacgtatattgttcctttactgaacccaccacatgcgggccataaaatgagtgaaatcacagtgcaccctgttctcttatttttgaagtgtttcacgatttccagcatgtccatcagatggggggattgctaacttctctcttactcatgtacttacattctgtagttctcattgcatcactttggatgtttactttgaaaagcagaaactgtctctttaaacttggccctcaatgtcatttgcgtatctctgagaacaatagctatgtcccaccccagtttgtatttccgttggttgttggcacttttttctcattcccccatctcattaccttgtctgttttctggcactcactataatcagccttgcactagagctgtttgtggacttggcttcaccccctcctcctcagccctcccccacccattaaattgtgagctcttagaagacaggggtggcctttcatgtctgatcccctaccaaatctagcacagtgccttgcatcaagtagatttcaataaatatatgttaaatggcaaaaaaaaa

SEQ ID NO: 735793 - DNA, 1341 bp, Homo sapiens
tggaccggtccggaattcccttgacatttgaaaaaaatcctccattgcttttattagagttttgaatacttgtgaaaattttcaaaagaaagtaattgattaccatttttgctgcttattacgatgagctgtgtccattagctgtgtcaccccactcttgcatttccagaatagtccctacccaattgcagcgggcatgtttttgagtggtgttgcattccatgtgcttgattttgtcctagaactggcacagcgcctgccctacctgcagccctgggttgtggccctgttgcgtaccatgtgatttgccaccccgcttctaggccatattaattcagccagaactgaacacctgacccaagggcagcaagcaatcatcagagcatagagctgacagaacatgatggaccacggacaccaccaggccttccagatctgaaatgcaaacaaggaaacagaagcttctaggcatcagaaggtgtggggagcagcacagtactcagaggagtgaggagcgtggcgcctgctgggaggaaggcctggccatggtatgttcttggatttctggcagcagccctcattggtccacgtgcgtccccactacagactccttgacttgagccagcttgagtgggtctctactcttttctattgtgttttgccacttggctgcttcctggccaagtcgcacctgactgcatgaacacctgttcaaacgtgtgttctctgttctctaagatgggtgaaagtcgatgccttctagtctcagtgaatttaacctgtgattttatgtctacgtatattgttcctttactgaacccaccacatgcgggccataaaatgagtgaaatcacagtgcaccctgttctcttatttttgaagtgtttcacgatttccagcatgtccatcagatggggggattgctaacttctctcttactcatgtacttacattctgtagttctcattgcatcactttggatgtttactttgaaaagcagaaactgtctctttaaacttggccctcaatgtcatttgcgtatctctgagaacaatagctatgtcccaccccagtttgtatttccgttggttgttggcacttttttctcattcccccatctcattaccttgtctgttttctggcactcactataatcagccttgcactagagctgtttgtggacttggcttcaccccctcctcctcagccctcccccacccattaaattgtgagctcttagaagacaggggtggcctttcatgtctgatcccctaccaaatctagcacagtgccttgcatcaagtagatttcaataaatatatgttaaatggcaaaaaaaaa

SEQ ID NO: 735794 - DNA, 1311 bp, Homo sapiens
ctgcctggcatgtttaaaagaaaatagagttttgaatacttgtgaaaattttcaaaagaaagtaattgattaccatttttgctgcttattacgatgagctgtgtccattagctgtgtcaccccactcttgcatttccagaatagtccctacccaattgcagcgggcatgtttttgagtggtgttgcattccatgtgcttgattttgtcctagaactggcacagcgcctgccctacctgcagccctgggttgtggccctgttgcgtaccatgtgatttgccaccccgcttctaggccatattaattcagccagaactgaacacctgacccaagggcagcaagcaatcatcagagcatagagctgacagaacatgatggaccacggacaccaccaggccttccagatctgaaatgcaaacaaggaaacagaagcttctaggcatcagaaggtgtggggagcagcacagtactcagaggagtgaggagcgtggcgcctgctgggaggaaggcctggccatggtatgttcttggatttctggcagcagccctcattggtccacgtgcgtccccactacagactccttgacttgagccagcttgagtgggtctctactcttttctattgtgttttgccacttggctgcttcctggccaagtcgcacctgactgcatgaacacctgttcaaacgtgtgttctctgttctctaagatgggtgaaagtcgatgccttctagtctcagtgaatttaacctgtgattttatgtctacgtatattgttcctttactgaacccaccacatgcgggccataaaatgagtgaaatcacagtgcaccctgttctcttatttttgaagtgtttcacgatttccagcatgtccatcagatggggggattgctaacttctctcttactcatgtacttacattctgtagttctcattgcatcactttggatgtttactttgaaaagcagaaactgtctctttaaacttggccctcaatgtcatttgcgtatctctgagaacaatagctatgtcccaccccagtttgtatttccgttggttgttggcacttttttctcattcccccatctcattaccttgtctgttttctggcactcactataatcagccttgcactagagctgtttgtggacttggcttcaccccctcctcctcagccctcccccacccattaaattgtgagctcttagaagacaggggtggcctttcatgtctgatcccctaccaaatctagcacagtgccttgcatcaagtagatttcaataaatatatgttaaatggcaaaaaaaaa

SEQ ID NO: 735795 - DNA, 1043 bp, Homo sapiens; identical to SEQ ID NO: 414823

SEQ ID NO: 735796 - DNA, 6307 bp, Homo sapiens
gggctgttagctcggctgggcacgggcggctccgtggcgcttcctgccacgccaggcctgcctgggccgcgccagcgccgctccaccgagggccgcgcgtcggccgccgccgggcctggatggggccttacctgccaggctgatcccttggagtagttctgaggcatgatgagtcatccgtgtgtgtctcttttggttccacctactccccaaggtcttaccctccccaggatggagccccaggaaaccaggtcctggcagtccctcttgagatgccagaggatttggtgacatttgatgatgtggcatggtacctcaccacaagggagtggtttaagctggaccctgaacagagggcactggaatattatgggaacgtgacctctgtgggcgttcctgttttaaatcctgccttggtccctcacctggcacaaggacaagtgctactggtgtcagacccatcgcccaacactgatcctgctaagtactctgaaagcacctccgcgacccgacaccagatgaagggggaagatgcccagccacaggagatggcgtccacaagcttcccaagggccagtggtcccagtcctgaattcagacagcacggggactctgacgggaagagagggagcccacagaatctgcccatagaacatcattttgcttgtaaagagtgttggggacacctttcggcttaaagtcctgcttgtccagcaccagagagtccacagtgaggagaagggctgggaatgtggcgactgcgggaaggtctttaggggggtggcggagtttaatgagcacaggaaaagccacgtagctgcggagccccagcccggccccagtagggccctggagaatgccgcggagaagagggagcagatggagagggaggcaaagcccttcgagtgcgaggagtgcggaaaacggtttaagaagaatgcaggcctgagtcagcatctgagggtccacagcagagagaagccctttgattgcgaggaatgcgggcggtcgttcaaagtcaacacccacctcttccgacatcagaaacttcacacttcggaaaagcctttcgcctgcaaggcgtgcagcagggatttcctggatcgccaggagcttctcaagcaccagcgcatgcacactggccacctgcccttcgactgcgacgactgcggcaagtccttccgaggggtcaacgggctggccgagcaccagcgcatccacagtggggccaagccatacgggtgtccccactgcggcaagctcttccgaaggagctcggagctcaccaagcaccggcggatccacacgggcgagaagccctacgcctgcggccagtgcggcaaggccttccgccagagctccagcctcctggagcacgcacgcatccacagtggcgagcggccctacgcatgcggcgagtgtggcaaggccttccgtgggccctctgacctcatcaagcaccggcgcatccacagcggactgaaaccctatgagtgcgacaaatgcggcaaggccttccgccggagctccggcctcagtcgccaccggcggatccacagtggggcgcggcgctgcgaatgcagccagtgtggccgcgtgttcaagaggcgctcggcactgcagaagcatcagccaacccaccacgagtagaaacgccctgtggtcccgcgggacagggacggagtccccagaggggatggcagagtcaaaggagatgaacagttttgtagcgcttatatattttgtcttccaaaaggttgagaccgatttatactgccaccagcaatttataagtgttacgttatgcccatcaagagtagcttgtaccatttaacttagtttggctagtttaactggtaggaagtaccatcaaggtatttcagtccacatgccttgaatccaagaatgagagaggacaaatctggatgtggggtagggaggggcttagaggtcatcaactccaagctccccccgccccagagaaacacacagagctgttccacgatggcgtcctcataatgtgatcccagctttcctgaagagaacgttgccctcatgatttttggcctacttgaatttataaatttttagggatgtaaatagaacactcaaatgtcttaaaatatttaatttattaatttagttatacatacatactgtaaatcacatattatataaaataatatattaatttagaaaataccccatttttgccaccctccctttcacgaaatcattttactctgactcctcaccgtcttcaccaacatgggaaccctgtttgagtcatcagacagtttcaagacacacccagtcacttccatccgagctctgcacggtcgctcagtgacgatcccttcatgaggctctcattagaaattttctcccaagccataagaccatatttgcagaacattaggacgatttctcttgtcgttttttaatctgtcctgtgactgtacaatataaccacttaaggtcatactttttcaaacaacctttaaacgtcttttcttttaaagcacccaaaatgtcattgtgaggccaaacgcctagtaacagttactgaatctgggttaaatgtcggtatctttttttcttaaaccatttcaatttggtgtcccctatacatatccaaaactagcatcgattggggttgttttgaactaatgggtcttgtcctcaagcagcactattttgttcaaaataaaatagttgagagcatgcccctaagaagagatacatctcaaggactcaagtgcagggtgacgcctccttttggaaatgagcctctcctggtatcaggcctagatggtacttctccagccttccgtttcttgttctataaaacaggggtgatcacagcacctacctccgaaggttatcacgaggactgccatcgtggctgcagagtgccaggaccaccggcctggtatggaggtacacactcagtgaaggccatctgctgtcattgtcattgtcatagttattgccgtcattctgtggcttgtcaattccagaactggggatagaccccaggcctcctgaccaccagtctcatctttctcttatgcgatgacttaaatggtgtttctgttttttgcatgcaaatggtccgttcatctcctttgactagttatcaacttaccttcggatatattaactttatgtagcagttctttctatattgatggtgatgttctcttttccaattttattgctttgctttttgtagcagttttattacgtttttgttgtgaaagcttttaatttttacatatccaagcattcattttttgtccactcagtcataactttcattgcttctgtagctagatatgatgacattttctctagaattttaattacaaacaaaaagctgcaaccccagcccatcagaaggtgagtacaccaggtgggcaggctggatggaaatgggccagagaagcaggctctttcctcatccgagatgcggactccctgtctatctgtgggcaccacttgactatccaacctgaccactgcggcacactggagatgctcccatcatagattagccagaactctgtgactgctcatcattatagaccccgccagcagcagtggggcttggcctcacctagatcaatggagtggtccaaacttggtctgggagcaagcagcccagccatcctttgagctcctgggagccttggcaatgctccgagtggattcagtgactgagcagcagattcacccaagaaacatctccttggacacaagaagacttgcctagaccacatcctcctttcagccggtgactctagaactagaaagagattggttcataggcttctgctgtgggcagctaggggaaaattcacccatgtgttctggcatcacttcctatagccacacctaagtgagggcaacagagcagaggctcggagaggaaccctgcccctccgatggcttgtgcgttatgctgatagaagctggcagcactgccctgggctatgatttgcaacagccatgcccaggaggagcactaaagcaaaggtttggagggcagtggaacccttctgaaagcctgtgtggcatagaagtagaagctggtcctcctgggtctgagctaccatttccagtgggctcccccaagaggaacagcagcaagggctagcgaggaacctgcccctccagtggcccacagaagccacagatagaagccagccccaccagggctgtgctgtgacttcccagcagctgtggctggggacagggacactaggagggcctggcaaggaagtgtgcccttctcgtgggcccaccaaggctgaggcagagcttcctagcagacacaacttggaagggcttctcaggcacccatcctgacccccaggctggagaggagccaaaagcacttgttacatagtgattccttttgccctgtgggcctcagttcttgcagtagttgtgaatctgtgtctgaaatcactactttcttctcggatcctttttctcttttcgagttgttaggatgtgttttgtacagctgtcatttgataaagaaggttgacctctaccaggggcaagtctggcacctttacctagaagtactctgccatgtcttgcccgttcatttatcgtttgttgggtttcatgagggatcccattgaagtagatcccttttatgaagggatcccattgaatgcagcattaactcagaacgtagcataaagtcgtcactgctcccagctgggacgtggtgtcttggcatcccttcctgccgtccttgactctttcccatcttcagttctataattttctcccaaacaaatgctcttttagagttaacactaaagatctggtctttgccgtcaaggttgacagaacagctgttcatggtgtttgcggtgaaacccgtgttctctttcaatgcagtctgtggctttaacgtgtgtcctgtaatttcgccaagttcatttcttgcctctggtaacttgggggtggatttccttgggctctctaggtgtactgctatgtcagatgcaaaatgtcacccagcttcctgtcacatatccttgtctgtgcattcatgcatctacctcattccggttttctttctaatctcatgtattcctgttgtgaggaaatgtgttcttttcccgatccttttgtagttcatacacgtgacaattgggtttccacgcacgtgcatgagatgttcctccttcaaaccttgttactatgtcagcacattaactgcctggcatggaaaaagaaaaaaaaaaaagaaatatgttcttttcctaccatttgaaaaaaatcctccattgcttttattagagttttgaatacttgtgaaaattttcaaaagaaagtaattgattaccatttttgctgcttattacgatgagctgtgtccattagctgtgtcaccccactcttgcatttccagaatagtccctacccaattgcagcgggcatgtttttgagtggtgttgcattccatgtgcttgattttgtcctagaactggcacagcgcctgccctacctgcagccctgggttgtggccctgttgcgtaccatgtgatttgccaccccgcttctaggccatattaattcagccagaactgaacacctgacccaagggcagcaagcaatcatcagagcatagagctgacagaacatgatggaccacggacaccaccaggccttccagatctgaaatgcaaacaaggaaacagaagcttctaggcatcagaaggtgtggggagcagcacagtactcagaggagtgaggagcgtggcgcctgctgggaggaaggcctggccatgatgagtggccaactctggagcccaggatgttgcttcccagtctggtggtgaatcctccacaatctgagctggccctctggtgcccaaagcagactcctggggtccctgtattgggcacttacccacttcctgctggccgcagcatgacacctgatgctcctagagcagccaactgaattccagaagaaaggcttcagtggtgtgttttccagaaggaacctggctcctaggattaacagttgggtcaaatctcaaaaactctttgcccttaactgctgaaaactgccagcatctatagcagtcatagtcacaagatttcctttaaatttttcagcaattgttttcctaaggcattctgtaaagtctggcttgaagtttgtttagttgagataaaaatgtgtttgactgcactccagcctgagagacagagtgacatattgtctcaaaaataaataaacaaataagttttttaaaacatgtttgagaaccac

SEQ ID NO: 735797 - DNA, 5817 bp, Homo sapiens
  misc_feature (5758)..(5758): n is a, c, g, or t
  misc_feature (5760)..(5760): n is a, c, g, or t
  misc_feature (5764)..(5764): n is a, c, g, or t
  misc_feature (5780)..(5780): n is a, c, g, or t
  misc_feature (5784)..(5784): n is a, c, g, or t
  misc_feature (5786)..(5787): n is a, c, g, or t
  misc_feature (5791)..(5791): n is a, c, g, or t
  misc_feature (5802)..(5802): n is a, c, g, or t
gggctgttagctcggctgggcacgggcggctccgtggcgcttcctgccacgccaggcctgcctgggccgcgccagcgccgctccaccgagggccgcgcgtcggccgccgccgggcctggatggggccttacctgccaggctgatcccttggagtagttctgaggcatgatgagtcatccgtgtgtgtctcttttggttccacctactccccaaggtcttaccctccccaggatggagccccaggaaaccaggtcctggcagtccctcttgagatgccagaggatttggtgacatttgatgatgtggcatggtacctcaccacaagggagtggtttaagctggaccctgaacagagggcactggaatattatgggaacgtgacctctgtgggcgttcctgttttaaatcctgccttggtccctcacctggcacaaggacaagtgctactggtgtcagacccatcgcccaacactgatcctgctaagtactctgaaagcacctccgcgacccgacaccagatgaagggggaagatgcccagccacaggagatggcgtccacaagcttcccaagggccagtggtcccagtcctgaattcagacagcacggggactctgacgggaagagagggagcccacagaatctgcccatagaacatcattttgcttgtaaagagtgttggggacacctttcggcttaaagtcctgcttgtccagcaccagagagtccacagtgaggagaagggctgggaatgtggcgactgcgggaaggtctttaggggggtggcggagtttaatgagcacaggaaaagccacgtagctgcggagccccagcccggccccagtagggccctggagaatgccgcggagaagagggagcagatggagagggaggcaaagcccttcgagtgcgaggagtgcggaaaacggtttaagaagaatgcaggcctgagtcagcatctgagggtccacagcagagagaagccctttgattgcgaggaatgcgggcggtcgttcaaagtcaacacccacctcttccgacatcagaaacttcacacttcggaaaagcctttcgcctgcaaggcgtgcagcagggatttcctggatcgccaggagcttctcaagcaccagcgcatgcacactggccacctgcccttcgactgcgacgactgcggcaagtccttccgaggggtcaacgggctggccgagcaccagcgcatccacagtggggccaagccatacgggtgtccccactgcggcaagctcttccgaaggagctcggagctcaccaagcaccggcggatccacacgggcgagaagccctacgcctgcggccagtgcggcaaggccttccgccagagctccagcctcctggagcacgcacgcatccacagtggcgagcggccctacgcatgcggcgagtgtggcaaggccttccgtgggccctctgacctcatcaagcaccggcgcatccacagcggactgaaaccctatgagtgcgacaaatgcggcaaggccttccgccggagctccggcctcagtcgccaccggcggatccacagtggggcgcggcgctgcgaatgcagccagtgtggccgcgtgttcaagaggcgctcggcactgcagaagcatcagccaacccaccacgagtagaaacgccctgtggtcccgcgggacagggacggagtccccagaggggatggcagagtcaaaggagatgaacagttttgtagcgcttatatattttgtcttccaaaaggttgagaccgatttatactgccaccagcaatttataagtgttacgttatgcccatcaagagtagcttgtaccatttaacttagtttggctagtttaactggtaggaagtaccatcaaggtatttcagtccacatgccttgaatccaagaatgagagaggacaaatctggatgtggggtagggaggggcttagaggtcatcaactccaagctccccccgccccagagaaacacacagagctgttccacgatggcgtcctcataatgtgatcccagctttcctgaagagaacgttgccctcatgatttttggcctacttgaatttataaatttttagggatgtaaatagaacactcaaatgtcttaaaatatttaatttattaatttagttatacatacatactgtaaatcacatattatataaaataatatattaatttagaaaataccccatttttgccaccctccctttcacgaaatcattttactctgactcctcaccgtcttcaccaacatgggaaccctgtttgagtcatcagacagtttcaagacacacccagtcacttccatccgagctctgcacggtcgctcagtgacgatcccttcatgaggctctcattagaaattttctcccaagccataagaccatatttgcagaacattaggacgatttctcttgtcgttttttaatctgtcctgtgactgtacaatataaccacttaaggtcatactttttcaaacaacctttaaacgtcttttcttttaaagcacccaaaatgtcattgtgaggccaaacgcctagtaacagttactgaatctgggttaaatgtcggtatctttttttcttaaaccatttcaatttggtgtcccctatacatatccaaaactagcatcgattggggttgttttgaactaatgggtcttgtcctcaagcagcactattttgttcaaaataaaatagttgagagcatgcccctaagaagagatacatctcaaggactcaagtgcagggtgacgcctccttttggaaatgagcctctcctggtatcaggcctagatggtacttctccagccttccgtttcttgttctataaaacaggggtgatcacagcacctacctccgaaggttatcacgaggactgccatcgtggctgcagagtgccaggaccaccggcctggtatggaggtacacactcagtgaaggccatctgctgtcattgtcattgtcatagttattgccgtcattctgtggcttgtcaattccagaactggggatagaccccaggcctcctgaccaccagtctcatctttctcttatgcgatgacttaaatggtgtttctgttttttgcatgcaaatggtccgttcatctcctttgactagttatcaacttaccttcggatatattaactttatgtagcagttctttctatattgatggtgatgttctcttttccaattttattgctttgctttttgtagcagttttattacgtttttgttgtgaaagcttttaatttttacatatccaagcattcattttttgtccactcagtcataactttcattgcttctgtagctagatatgatgacattttctctagaattttaattacaaacaaaaagctgcaaccccagcccatcagaaggtgagtacaccaggtgggcaggctggatggaaatgggccagagaagcaggctctttcctcatccgagatgcggactccctgtctatctgtgggcaccacttgactatccaacctgaccactgcggcacactggagatgctcccatcatagattagccagaactctgtgactgctcatcattatagaccccgccagcagcagtggggcttggcctcacctagatcaatggagtggtccaaacttggtctgggagcaagcagcccagccatcctttgagctcctgggagccttggcaatgctccgagtggattcagtgactgagcagcagattcacccaagaaacatctccttggacacaagaagacttgcctagaccacatcctcctttcagccggtgactctagaactagaaagagattggttcataggcttctgctgtgggcagctaggggaaaattcacccatgtgttctggcatcacttcctatagccacacctaagtgagggcaacagagcagaggctcggagaggaaccctgcccctccgatggcttgtgcgttatgctgatagaagctggcagcactgccctgggctatgatttgcaacagccatgcccaggaggagcactaaagcaaaggtttggagggcagtggaacccttctgaaagcctgtgtggcatagaagtagaagctggtcctcctgggtctgagctaccatttccagtgggctcccccaagaggaacagcagcaagggctagcgaggaacctgcccctccagtggcccacagaagccacagatagaagccagccccaccagggctgtgctgtgacttcccagcagctgtggctggggacagggacactaggagggcctggcaaggaagtgtgcccttctcgtgggcccaccaaggctgaggcagagcttcctagcagacacaacttggaagggcttctcaggcacccatcctgacccccaggctggagaggagccaaaagcacttgttacatagtgattccttttgccctgtgggcctcagttcttgcagtagttgtgaatctgtgtctgaaatcactactttcttctcggatcctttttctcttttcgagttgttaggatgtgttttgtacagctgtcatttgataaagaaggttgacctctaccaggggcaagtctggcacctttacctagaagtactctgccatgtcttgcccgttcatttatcgtttgttgggtttcatgagggatcccattgaagtagatcccttttatgaagggatcccattgaatgcagcattaactcagaacgtagcataaagtcgtcactgctcccagctgggacgtggtgtcttggcatcccttcctgccgtccttgactctttcccatcttcagttctataattttctcccaaacaaatgctcttttagagttaacactaaagatctggtctttgccgtcaaggttgacagaacagctgttcatggtgtttgcggtgaaacccgtgttctctttcaatgcagtctgtggctttaacgtgtgtcctgtaatttcgccaagttcatttcttgcctctggtaacttgggggtggatttccttgggctctctaggtgtactgctatgtcagatgcaaaatgtcacccagcttcctgtcacatatccttgtctgtgcattcatgcatctacctcattccggttttctttctaatctcatgtattcctgttgtgaggaaatgtgttcttttcccgatccttttgtagttcatacacgtgacaattgggtttccacgcacgtgcatgagatgttcctccttcaaaccttgttactatgtcagcacattaactgcctggcatggaaaaagaaaaaaaaaaaagaaatatgttcttttcctaccatttgaaaaaaatcctccattgcttttattagagttttgaatacttgtgaaaattttcaaaagaaagtaattgattaccatttttgctgcttattacgatgagctgtgtccattagctgtgtcaccccactcttgcatttccagaatagtccctacccaattgcagcgggcatgtttttgagtggtgttgcattccatgtgcttgattttgtcctagaactggcacagcgcctgccctacctgcagccctgggttgtggccctgttgcgtaccatgtgatttgccaccccgcttctaggccatattaattcagccagaactgaacacctgacccaagggcagcaagcaatcatcagagcatagagctgacagaacatgatggaccacggacaccaccaggccttccagatctgaaatgcaaacaaggaaacagaagcttctaggcatcctggaaggcctgccatngnatgntctggatttctgccancccntnnttgntcacgtgcgtncccactacgctcttg

SEQ ID NO: 735798 - DNA, 6555 bp, Homo sapiens
gggctgttagctcggctgggcacgggcggctccgtggcgcttcctgccacgccaggcctgcctgggccgcgccagcgccgctccaccgagggccgcgcgtcggccgccgccgggcctggatggggccttacctgccaggctgatcccttggagtagttctgaggcatgatgagtcatccgtgtgtgtctcttttggttccacctactccccaaggtcttaccctccccaggatggagccccaggaaaccaggtcctggcagtccctcttgagatgccagaggatttggtgacatttgatgatgtggcatggtacctcaccacaagggagtggtttaagctggaccctgaacagagggcactggaatattatgggaacgtgacctctgtgggcgttcctgttttaaatcctgccttggtccctcacctggcacaaggacaagtgctactggtgtcagacccatcgcccaacactgatcctgctaagtactctgaaagcacctccgcgacccgacaccagatgaagggggaagatgcccagccacaggagatggcgtccacaagcttcccaagggccagtggtcccagtcctgaattcagacagcacggggactctgacgggaagagagggagcccacagaatctgcccatagaacatcattttgcttgtaaagagtgttggggacacctttcggcttaaagtcctgcttgtccagcaccagagagtccacagtgaggagaagggctgggaatgtggcgactgcgggaaggtctttaggggggtggcggagtttaatgagcacaggaaaagccacgtagctgcggagccccagcccggccccagtagggccctggagaatgccgcggagaagagggagcagatggagagggaggcaaagcccttcgagtgcgaggagtgcggaaaacggtttaagaagaatgcaggcctgagtcagcatctgagggtccacagcagagagaagccctttgattgcgaggaatgcgggcggtcgttcaaagtcaacacccacctcttccgacatcagaaacttcacacttcggaaaagcctttcgcctgcaaggcgtgcagcagggatttcctggatcgccaggagcttctcaagcaccagcgcatgcacactggccacctgcccttcgactgcgacgactgcggcaagtccttccgaggggtcaacgggctggccgagcaccagcgcatccacagtggggccaagccatacgggtgtccccactgcggcaagctcttccgaaggagctcggagctcaccaagcaccggcggatccacacgggcgagaagccctacgcctgcggccagtgcggcaaggccttccgccagagctccagcctcctggagcacgcacgcatccacagtggcgagcggccctacgcatgcggcgagtgtggcaaggccttccgtgggccctctgacctcatcaagcaccggcgcatccacagcggactgaaaccctatgagtgcgacaaatgcggcaaggccttccgccggagctccggcctcagtcgccaccggcggatccacagtggggcgcggcgctgcgaatgcagccagtgtggccgcgtgttcaagaggcgctcggcactgcagaagcatcagccaacccaccacgagtagaaacgccctgtggtcccgcgggacagggacggagtccccagaggggatggcagagtcaaaggagatgaacagttttgtagcgcttatatattttgtcttccaaaaggttgagaccgatttatactgccaccagcaatttataagtgttacgttatgcccatcaagagtagcttgtaccatttaacttagtttggctagtttaactggtaggaagtaccatcaaggtatttcagtccacatgccttgaatccaagaatgagagaggacaaatctggatgtggggtagggaggggcttagaggtcatcaactccaagctccccccgccccagagaaacacacagagctgttccacgatggcgtcctcataatgtgatcccagctttcctgaagagaacgttgccctcatgatttttggcctacttgaatttataaatttttagggatgtaaatagaacactcaaatgtcttaaaatatttaatttattaatttagttatacatacatactgtaaatcacatattatataaaataatatattaatttagaaaataccccatttttgccaccctccctttcacgaaatcattttactctgactcctcaccgtcttcaccaacatgggaaccctgtttgagtcatcagacagtttcaagacacacccagtcacttccatccgagctctgcacggtcgctcagtgacgatcccttcatgaggctctcattagaaattttctcccaagccataagaccatatttgcagaacattaggacgatttctcttgtcgttttttaatctgtcctgtgactgtacaatataaccacttaaggtcatactttttcaaacaacctttaaacgtcttttcttttaaagcacccaaaatgtcattgtgaggccaaacgcctagtaacagttactgaatctgggttaaatgtcggtatctttttttcttaaaccatttcaatttggtgtcccctatacatatccaaaactagcatcgattggggttgttttgaactaatgggtcttgtcctcaagcagcactattttgttcaaaataaaatagttgagagcatgcccctaagaagagatacatctcaaggactcaagtgcagggtgacgcctccttttggaaatgagcctctcctggtatcaggcctagatggtacttctccagccttccgtttcttgttctataaaacaggggtgatcacagcacctacctccgaaggttatcacgaggactgccatcgtggctgcagagtgccaggaccaccggcctggtatggaggtacacactcagtgaaggccatctgctgtcattgtcattgtcatagttattgccgtcattctgtggcttgtcaattccagaactggggatagaccccaggcctcctgaccaccagtctcatctttctcttatgcgatgacttaaatggtgtttctgttttttgcatgcaaatggtccgttcatctcctttgactagttatcaacttaccttcggatatattaactttatgtagcagttctttctatattgatggtgatgttctcttttccaattttattgctttgctttttgtagcagttttattacgtttttgttgtgaaagcttttaatttttacatatccaagcattcattttttgtccactcagtcataactttcattgcttctgtagctagatatgatgacattttctctagaattttaattacaaacaaaaagctgcaaccccagcccatcagaaggtgagtacaccaggtgggcaggctggatggaaatgggccagagaagcaggctctttcctcatccgagatgcggactccctgtctatctgtgggcaccacttgactatccaacctgaccactgcggcacactggagatgctcccatcatagattagccagaactctgtgactgctcatcattatagaccccgccagcagcagtggggcttggcctcacctagatcaatggagtggtccaaacttggtctgggagcaagcagcccagccatcctttgagctcctgggagccttggcaatgctccgagtggattcagtgactgagcagcagattcacccaagaaacatctccttggacacaagaagacttgcctagaccacatcctcctttcagccggtgactctagaactagaaagagattggttcataggcttctgctgtgggcagctaggggaaaattcacccatgtgttctggcatcacttcctatagccacacctaagtgagggcaacagagcagaggctcggagaggaaccctgcccctccgatggcttgtgcgttatgctgatagaagctggcagcactgccctgggctatgatttgcaacagccatgcccaggaggagcactaaagcaaaggtttggagggcagtggaacccttctgaaagcctgtgtggcatagaagtagaagctggtcctcctgggtctgagctaccatttccagtgggctcccccaagaggaacagcagcaagggctagcgaggaacctgcccctccagtggcccacagaagccacagatagaagccagccccaccagggctgtgctgtgacttcccagcagctgtggctggggacagggacactaggagggcctggcaaggaagtgtgcccttctcgtgggcccaccaaggctgaggcagagcttcctagcagacacaacttggaagggcttctcaggcacccatcctgacccccaggctggagaggagccaaaagcacttgttacatagtgattccttttgccctgtgggcctcagttcttgcagtagttgtgaatctgtgtctgaaatcactactttcttctcggatcctttttctcttttcgagttgttaggatgtgttttgtacagctgtcatttgataaagaaggttgacctctaccaggggcaagtctggcacctttacctagaagtactctgccatgtcttgcccgttcatttatcgtttgttgggtttcatgagggatcccattgaagtagatcccttttatgaagggatcccattgaatgcagcattaactcagaacgtagcataaagtcgtcactgctcccagctgggacgtggtgtcttggcatcccttcctgccgtccttgactctttcccatcttcagttctataattttctcccaaacaaatgctcttttagagttaacactaaagatctggtctttgccgtcaaggttgacagaacagctgttcatggtgtttgcggtgaaacccgtgttctctttcaatgcagtctgtggctttaacgtgtgtcctgtaatttcgccaagttcatttcttgcctctggtaacttgggggtggatttccttgggctctctaggtgtactgctatgtcagatgcaaaatgtcacccagcttcctgtcacatatccttgtctgtgcattcatgcatctacctcattccggttttctttctaatctcatgtattcctgttgtgaggaaatgtgttcttttcccgatccttttgtagttcatacacgtgacaattgggtttccacgcacgtgcatgagatgttcctccttcaaaccttgttactatgtcagcacattaactgcctggcatggaaaaagaaaaaaaaaaaagaaatatgttcttttcctaccatttgaaaaaaatcctccattgcttttattagagttttgaatacttgtgaaaattttcaaaactgtgtcaccccactcttgcatttccagaatagtccctacccaattgcagcgggcatgtttttgagtggtgttgcattccatgtgcttgattttgtcctagaactggcacagcgcctgccctacctgcagccctgggttgtggccctgttgcgtaccatgtgatttgccaccccgcttctaggccatattaattcagccagaactgaacacctgacccaagggcagcaagcaatcatcagagcatagagctgacagaacatgatggaccacggacaccaccaggccttccagatctgaaatgcaaacaaggaaacagaagcttctaggcatcagaaggtgtggggagcagcacagtactcagaggagtgaggagcgtggcgcctgctgggaggaaggcctggccatggtatgttcttggatttctggcagcagccctcattggtccacgtgcgtccccactacagactccttgacttgagccagcttgagtgggtctctactcttttctattgtgttttgccacttggctgcttcctggccaagtcgcacctgactgcatgaacacctgttcaaacgtgtgttctctgttctctaagatgggtgaaagtcgatgccttctagtctcagtgaatttaacctgtgattttatgtctacgtatattgttcctttactgaacccaccacatgcgggccataaaatgagtgaaatcacagtgcaccctgttctcttatttttgaagtgtttcacgatttccagcatgtccatcagatggggggattgctaacttctctcttactcatgtacttacattctgtagttctcattgcatcactttggatgtttactttgaaaagcagaaactgtctctttaaacttggccctcaatgtcatttgcgtatctctgagaacaatagctatgtcccaccccagtttgtatttccgttggttgttggcacttttttctcattcccccatctcattaccttgtctgttttctggcactcactataatcagccttgcactagagctgtttgtggacttggcttcaccccctcctcctcagccctcccccacccattaaattgtgagctcttagaagacaggggtggcctttcatgtctgatcccctaccaaatctagcacagtgccttgcatcaagtagatttcaataaatatatgttaaatggcaaaaaaaaa

SEQ ID NO: 735799 - DNA, 7058 bp, Homo sapiens
tactttccccattgttcaagatgtgttttctcaggcatctccgtgccctggcttgtcattcagccagcatgtgagagaagactcaacaagatcagaaaccaaggaagaagaaatcaccagtctcttcccaggggatccagggacagggctgtcgtcactcatggcctttttcactttctttagttccacctactccccaaggtcttaccctccccaggatggagccccaggaaaccaggtcctggcagtccctcttgagatgccagagctaggtgagctgtgcttccctctgccttgcttgggattctctcaccgctccctgaatctggcctcagcctctgtctcttgccccagcatgacacacggcagagtatgaaccccagctgctgccttcctaccctccctctgcttctcttctggaggctgccaaggattggatgtccactgggcttggagttccaatcatccaggtggggaagctgagtttccatccaggaaagtgattgaatggaggtcccttggaaagacgagaggccaggtccatggcccagggatcctagtgcttgatcaggttctcttttcaggacttcttggagctgtggttaggcctccatgttagcaacagacacccactccagaccctcacctcttgaccctggcattactggcgctgcccctgcctcattctaaaatagatggaaagactgatgagccctgggaattctttcaggatttggtgacatttgatgatgtggcatggtacctcaccacaagggagtggtttaagctggaccctgaacagagggcactggaatattatgggaacgtgacctctgtgggcgttcctgttttaaatcctgccttggtccctcacctggcacaaggacaagtgctactggtgtcagacccatcgcccaacactgatcctgctaagtactctgaaagcacctccgcgacccgacaccagatgaagggggaagatgcccagccacaggagatggcgtccacaagcttcccaagggccagtggtcccagtcctgaattcagacagcacggggactctgacgggaagagagggagcccacagaatctgcccatagaacatcattttgcttgtaaagagtgttggggacacctttcggcttaaagtcctgcttgtccagcaccagagagtccacagtgaggagaagggctgggaatgtggcgactgcgggaaggtctttaggggggtggcggagtttaatgagcacaggaaaagccacgtagctgcggagccccagcccggccccagtagggccctggagaatgccgcggagaagagggagcagatggagagggaggcaaagcccttcgagtgcgaggagtgcggaaaacggtttaagaagaatgcaggcctgagtcagcatctgagggtccacagcagagagaagccctttgattgcgaggaatgcgggcggtcgttcaaagtcaacacccacctcttccgacatcagaaacttcacacttcggaaaagcctttcgcctgcaaggcgtgcagcagggatttcctggatcgccaggagcttctcaagcaccagcgcatgcacactggccacctgcccttcgactgcgacgactgcggcaagtccttccgaggggtcaacgggctggccgagcaccagcgcatccacagtggggccaagccatacgggtgtccccactgcggcaagctcttccgaaggagctcggagctcaccaagcaccggcggatccacacgggcgagaagccctacgcctgcggccagtgcggcaaggccttccgccagagctccagcctcctggagcacgcacgcatccacagtggcgagcggccctacgcatgcggcgagtgtggcaaggccttccgtgggccctctgacctcatcaagcaccggcgcatccacagcggactgaaaccctatgagtgcgacaaatgcggcaaggccttccgccggagctccggcctcagtcgccaccggcggatccacagtggggcgcggcgctgcgaatgcagccagtgtggccgcgtgttcaagaggcgctcggcactgcagaagcatcagccaacccaccacgagtagaaacgccctgtggtcccgcgggacagggacggagtccccagaggggatggcagagtcaaaggagatgaacagttttgtagcgcttatatattttgtcttccaaaaggttgagaccgatttatactgccaccagcaatttataagtgttacgttatgcccatcaagagtagcttgtaccatttaacttagtttggctagtttaactggtaggaagtaccatcaaggtatttcagtccacatgccttgaatccaagaatgagagaggacaaatctggatgtggggtagggaggggcttagaggtcatcaactccaagctccccccgccccagagaaacacacagagctgttccacgatggcgtcctcataatgtgatcccagctttcctgaagagaacgttgccctcatgatttttggcctacttgaatttataaatttttagggatgtaaatagaacactcaaatgtcttaaaatatttaatttattaatttagttatacatacatactgtaaatcacatattatataaaataatatattaatttagaaaataccccatttttgccaccctccctttcacgaaatcattttactctgactcctcaccgtcttcaccaacatgggaaccctgtttgagtcatcagacagtttcaagacacacccagtcacttccatccgagctctgcacggtcgctcagtgacgatcccttcatgaggctctcattagaaattttctcccaagccataagaccatatttgcagaacattaggacgatttctcttgtcgttttttaatctgtcctgtgactgtacaatataaccacttaaggtcatactttttcaaacaacctttaaacgtcttttcttttaaagcacccaaaatgtcattgtgaggccaaacgcctagtaacagttactgaatctgggttaaatgtcggtatctttttttcttaaaccatttcaatttggtgtcccctatacatatccaaaactagcatcgattggggttgttttgaactaatgggtcttgtcctcaagcagcactattttgttcaaaataaaatagttgagagcatgcccctaagaagagatacatctcaaggactcaagtgcagggtgacgcctccttttggaaatgagcctctcctggtatcaggcctagatggtacttctccagccttccgtttcttgttctataaaacaggggtgatcacagcacctacctccgaaggttatcacgaggactgccatcgtggctgcagagtgccaggaccaccggcctggtatggaggtacacactcagtgaaggccatctgctgtcattgtcattgtcatagttattgccgtcattctgtggcttgtcaattccagaactggggatagaccccaggcctcctgaccaccagtctcatctttctcttatgcgatgacttaaatggtgtttctgttttttgcatgcaaatggtccgttcatctcctttgactagttatcaacttaccttcggatatattaactttatgtagcagttctttctatattgatggtgatgttctcttttccaattttattgctttgctttttgtagcagttttattacgtttttgttgtgaaagcttttaatttttacatatccaagcattcattttttgtccactcagtcataactttcattgcttctgtagctagatatgatgacattttctctagaattttaattacaaacaaaaagctgcaaccccagcccatcagaaggtgagtacaccaggtgggcaggctggatggaaatgggccagagaagcaggctctttcctcatccgagatgcggactccctgtctatctgtgggcaccacttgactatccaacctgaccactgcggcacactggagatgctcccatcatagattagccagaactctgtgactgctcatcattatagaccccgccagcagcagtggggcttggcctcacctagatcaatggagtggtccaaacttggtctgggagcaagcagcccagccatcctttgagctcctgggagccttggcaatgctccgagtggattcagtgactgagcagcagattcacccaagaaacatctccttggacacaagaagacttgcctagaccacatcctcctttcagccggtgactctagaactagaaagagattggttcataggcttctgctgtgggcagctaggggaaaattcacccatgtgttctggcatcacttcctatagccacacctaagtgagggcaacagagcagaggctcggagaggaaccctgcccctccgatggcttgtgcgttatgctgatagaagctggcagcactgccctgggctatgatttgcaacagccatgcccaggaggagcactaaagcaaaggtttggagggcagtggaacccttctgaaagcctgtgtggcatagaagtagaagctggtcctcctgggtctgagctaccatttccagtgggctcccccaagaggaacagcagcaagggctagcgaggaacctgcccctccagtggcccacagaagccacagatagaagccagccccaccagggctgtgctgtgacttcccagcagctgtggctggggacagggacactaggagggcctggcaaggaagtgtgcccttctcgtgggcccaccaaggctgaggcagagcttcctagcagacacaacttggaagggcttctcaggcacccatcctgacccccaggctggagaggagccaaaagcacttgttacatagtgattccttttgccctgtgggcctcagttcttgcagtagttgtgaatctgtgtctgaaatcactactttcttctcggatcctttttctcttttcgagttgttaggatgtgttttgtacagctgtcatttgataaagaaggttgacctctaccaggggcaagtctggcacctttacctagaagtactctgccatgtcttgcccgttcatttatcgtttgttgggtttcatgagggatcccattgaagtagatcccttttatgaagggatcccattgaatgcagcattaactcagaacgtagcataaagtcgtcactgctcccagctgggacgtggtgtcttggcatcccttcctgccgtccttgactctttcccatcttcagttctataattttctcccaaacaaatgctcttttagagttaacactaaagatctggtctttgccgtcaaggttgacagaacagctgttcatggtgtttgcggtgaaacccgtgttctctttcaatgcagtctgtggctttaacgtgtgtcctgtaatttcgccaagttcatttcttgcctctggtaacttgggggtggatttccttgggctctctaggtgtactgctatgtcagatgcaaaatgtcacccagcttcctgtcacatatccttgtctgtgcattcatgcatctacctcattccggttttctttctaatctcatgtattcctgttgtgaggaaatgtgttcttttcccgatccttttgtagttcatacacgtgacaattgggtttccacgcacgtgcatgagatgttcctccttcaaaccttgttactatgtcagcacattaactgcctggcatggaaaaagaaaaaaaaaaaagaaatatgttcttttcctaccatttgaaaaaaatcctccattgcttttattagagttttgaatacttgtgaaaattttcaaaagaaagtaattgattaccatttttgctgcttattacgatgagctgtgtccattagctgtgtcaccccactcttgcatttccagaatagtccctacccaattgcagcgggcatgtttttgagtggtgttgcattccatgtgcttgattttgtcctagaactggcacagcgcctgccctacctgcagccctgggttgtggccctgttgcgtaccatgtgatttgccaccccgcttctaggccatattaattcagccagaactgaacacctgacccaagggcagcaagcaatcatcagagcatagagctgacagaacatgatggaccacggacaccaccaggccttccagatctgaaatgcaaacaaggaaacagaagcttctaggcatcagaaggtgtggggagcagcacagtactcagaggagtgaggagcgtggcgcctgctgggaggaaggcctggccatggtatgttcttggatttctggcagcagccctcattggtccacgtgcgtccccactacagactccttgacttgagccagcttgagtgggtctctactcttttctattgtgttttgccacttggctgcttcctggccaagtcgcacctgactgcatgaacacctgttcaaacgtgtgttctctgttctctaagatgggtgaaagtcgatgccttctagtctcagtgaatttaacctgtgattttatgtctacgtatattgttcctttactgaacccaccacatgcgggccataaaatgagtgaaatcacagtgcaccctgttctcttatttttgaagtgtttcacgatttccagcatgtccatcagatggggggattgctaacttctctcttactcatgtacttacattctgtagttctcattgcatcactttggatgtttactttgaaaagcagaaactgtctctttaaacttggccctcaatgtcatttgcgtatctctgagaacaatagctatgtcccaccccagtttgtatttccgttggttgttggcacttttttctcattcccccatctcattaccttgtctgttttctggcactcactataatcagccttgcactagagctgtttgtggacttggcttcaccccctcctcctcagccctcccccacccattaaattgtgagctcttagaagacaggggtggcctttcatgtctgatcccctaccaaatctagcacagtgccttgcatcaagtagatttcaataaatatatgttaaatggcaaaaaaaaa

SEQ ID NO: 735800 - DNA, 167 bp, Homo sapiens
tcgaattcaagcttctaacgatgtacggggacattcttcatgggggtaagaaaagctggtctggagttgctgaatgttgcattaattgtgctgtttgcttgtagttgaataaaaatagaaacctgaatgaagaataaaaatagaaacctgaatgaaaaaacaaagac

SEQ ID NO: 735801 - DNA, 165 bp, Homo sapiens
gatcagggatcatcgagctcagtctgctcgtatcttcatgggggtaagaaaagctggtctggagttgctgaatgttgcattaattgtgctgtttgcttgtagttgaataaaaatagaaacctgaatgaagaataaaaatagaaacctgaatgaaaaaacaaagac

SEQ ID NO: 735802 - DNA, 180 bp, Homo sapiens
gagaagacgacagaaggggaagaacgtgggatctaagatgattaggatcttcatgggggtaagaaaagctggtctggagttgctgaatgttgcattaattgtgctgtttgcttgtagttgaataaaaatagaaacctgaatgaagaataaaaatagaaacctgaatgaaaaaacaaagac

SEQ ID NO: 735803 - DNA, 617 bp, Homo sapiens
ttaaaccttccttaaagattctttgatgctttgctcctgtgatggggtcatcaaattattaatctgaaaatagcaacccagaatgtaaaaaagaaaaaactggggggaaaaagaccaggtctacagtgatagagcaaagcatcaaagaatctttaagggaggtttaaaaaaaaaaaaaaaaaaaaagattggttgcctctgcctttgtgatcctgagtccagaatggtacacaatgtgattttatggtgatgtcactcacctagacaaccagaggctggcattgaggctaacctccaacacagtgcatctcagatgcctcagtaggcatcagtatgtcactctggtccctttaaagagcaatcctggaagaagcaggagggagggtggctttgctgttgttgggacatggcaatctagaccggcagcagcgctcgctgacagcttgggaggaaacctgagatctgtgttttttaaattgatcgttcttcatgggggtaagaaaagctggtctggagttgctgaatgttgcattaattgtgctgtttgcttgtagttgaataaaaatagaaacctgaatgaagaataaaaatagaaacctgaatgaaaaaacaaagac

SEQ ID NO: 735804 - DNA, 962 bp, Homo sapiens
  misc_feature (877)..(877): n is a, c, g, or t
  misc_feature (901)..(901): n is a, c, g, or t
aaataggctagtagaggctgggtgtgaatcggccgagggcgcagtgtgctgagctctccgcgtcgcctctgtcgcccgcgcctggcctaccgcggcactcccggctgcacgctctgcttggcctcgccatgccggtggacctcagcaagtggtccgggcccttgagcctgcaagaagtggacgagcagccgcagcacccgctgcatgtcacctacgccggggcggcggtggacgagctgggcaaagtgctgacgcccacccaggttaagaatagacccaccagcatttcgtgggatggtcttgattcagggaagctctacaccttggtcctgacagacccggatgctcccagcaggaaggatcccaaatacagagaatggcatcatttcctggtggtcaacatgaagggcaatgacatcagcagtggcacagtcctctccgattatgtgggctcggggcctcccaagggcacaggcctccaccgctatgtctggctggtttacgagcaggacaggccgctaaagtgtgacgagcccatcctcagcaaccgatctggagaccaccgtggcaaattcaaggtggcgtccttccgtaaaaagtatgagctcagggccccggtggctggcacgtgttaccaggccgagtgggatgactatgtgcccaaactgtacgagcagctgtctgggaagtagggggttagcttggggacctgaactgtcctggaggccccaagccatgttccccagttcagtgttgcatgtataatagatttctcctcttcctgccccccttggcatgggtgagacctgaccagtcagatggtagttgagggtgacttttcctgctgccttacccccccgtttgttggcccatggcnccctgggggtgggcggcgggggcncatttttgaagccccgttttaactggggggcacgtctcttggcccaactttggtgcgacaa

SEQ ID NO: 735805 - DNA, 1495 bp, Homo sapiens
gctggtacggtcaggagattaggggcgcagtgtgctgagctctccgcgtcgcctctgtcgcccgcgcctggcctaccgcggcactcccggctgcacgctctgcttggcctcgccatgccggtggacctcagcaagtggtccgggcccttgagcctgcaagaagtggacgagcagccgcagcacccgctgcatgtcacctacgccggggcggcggtggacgagctgggcaaagtgctgacgcccacccaggttaagaatagacccaccagcatttcgtgggatggtcttgattcagggaagctctacaccttggtcctgacagacccggatgctcccagcaggaaggatcccaaatacagagaatggcatcatttcctggtggtcaacatgaagggcaatgacatcagcagtggcacagtcctctccgattatgtgggctcggggcctcccaagggcacaggcctccaccgctatgtctggctggtttacgagcaggacaggccgctaaagtgtgacgagcccatcctcagcaaccgatctggagaccaccgtggcaaattcaaggtggcgtccttccgtaaaaagtatgagctcagggccccggtggctggcacgtgttaccaggccgagtgggatgactatgtgcccaaactgtacgagcagctgtctgggaagtagggggttagcttggggacctgaactgtcctggaggccccaagccatgttccccagttcagtgttgcatgtataatagatttctcctcttcctgccccccttggcatgggtgagacctgaccagtcagatggtagttgagggtgacttttcctgctgcctggcctttataattttactcactcactctgatttatgttttgatcaaatttgaacttcattttggggggtattttggtactgtgatggggtcatcaaattattaatctgaaaatagcaacccagaatgtaaaaaagaaaaaactggggggaaaaagaccaggtctacagtgatagagcaaagcatcaaagaatctttaagggaggtttaaaaaaaaaaaaaaaaaaaaagattggttgcctctgcctttgtgatcctgagtccagaatggtacacaatgtgattttatggtgatgtcactcacctagacaaccagaggctggcattgaggctaacctccaacacagtgcatctcagatgcctcagtaggcatcagtatgtcactctggtccctttaaagagcaatcctggaagaagcaggagggagggtggctttgctgttgttgggacatggcaatctagaccggcagcagcgctcgctgacagcttgggaggaaacctgagatctgtgttttttaaattgatcgttcttcatgggggtaagaaaagctggtctggagttgctgaatgttgcattaattgtgctgtttgcttgtagttgaataaaaatagaaacctgaatgaagaataaaaatagaaacctgaatgaaaaaacaaagac

SEQ ID NO: 735806 - DNA, 940 bp, Homo sapiens
  misc_feature (1)..(1): n is a, c, g, or t
naacttatggctaggtacgaggctgggtggtgcccgcagtgtgctgagctctccgcgtcgcctctgtcgcccgcgcctggcctaccgcggcactcccggctgcacgctctgcttggcctcgccatgccggtggacctcagcaagtggtccgggcccttgagcctgcaagaagtggacgagcagccgcagcacccgctgcatgtcacctacgccggggcggcggtggacgagctgggcaaagtgctgacgcccacccaggttaagaatagacccaccagcatttcgtgggatggtcttgattcagggaagctctacaccttggtcctgacagacccggatgctcccagcaggaaggatcccaaatacagagaatggcatcatttcctggtggtcaacatgaagggcaatgacatcagcagtggcacagtcctctccgattatgtgggctcggggcctcccaagggcacaggcctccaccgctatgtctggctggtttacgagcaggacaggccgctaaagtgtgacgagcccatcctcagcaaccgatctggagaccaccgtggcaaattcaaggtggcgtccttccgtaaaaagtatgagctcagggccccggtggctggcacgtgttaccaggccgagtgggatgactatgtgcccaaactgtacgagcagctgtctgggaagtagggggttagcttggggacctgaactgtcctggaggccccaagccatgttccccagttcagtgttgcatgtataatagatttctcctcttcctgccccccttggcatgggtgagacctgaccagtcagatggtagttgagggtgacttttcctgctgcctggcctttataattttactcactcactctgatttataggtcgagcccattggacttcttggggggattgggccgggggggcccattttctctggct

SEQ ID NO: 735807 - DNA, 394 bp, Homo sapiens
tttttttgatagcagctttatttttattttattttattttgagacagagtcttccttcgtagcccaggctggatgcgagactccatatcaaaaaaaaaaaaaaaagaaacccaaaaggtagaaaccccaagtcccatcggactctgtcttgagtccacccatactcccctttcttgagtgtgtatttttcgctttgcaataaatctttgtactttcatcattttctgacacactcttgaattccttctccagatggtgtcaagagcctggataccagctggggttgaggtcccaccagcctccgtttacaaactggaatcaccaggtggcgctctcggccctgaacagaatctgggttccacagccaaggtcatctcagggataatagttggtg

SEQ ID NO: 735808 - DNA, 517 bp, Homo sapiens
gcacgagctcgtgccgtttttttaaacctccatcaaagaatctttaagggaggtttaaaaaaaaaaaaaaaaaaaaagattggttgcctctgcctttgtgatcctgagtccagaatggtacacaatgtgattttatggtgatgtcactcacctagacaaccagaggctggcattgaggctaacctccaacacagtgcatctcagatgcctcagtaggcatcagtatgtcactctggtccctttaaagagcaatcctggaagaagcaggagggagggtggctttgctgttgttgggacatggcaatctagaccggcagcagcgctcgctgacagcttgggaggaaacctgagatctgtgttttttaaattgatcgttcttcatgggggtaagaaaagctggtctggagttgctgaatgttgcattaattgtgctgtttgcttgtagttgaataaaaatagaaacctgaatgaagaaaaaacagagagcttacagtggctagtgtgcgtgagtcgtgtt

SEQ ID NO: 735809 - DNA, 2419 bp, Homo sapiens
tttttttgatagcagctttatttttattttattttattttgagacagagtcttccttcgtagcccaggctggatgcgagactccatatcaaaaaaaaaaaaaaaagaaacccaaaaggtagaaaccccaagtcccatcggactctgtcttgagtccacccatactcccctttcttgagtgtgtatttttcgctttgcaataaatctttgtactttcatcattttctgacacactcttgaattccttctccagatggtgtcaagagcctggataccagctggggttgaggtcccaccagcctccgtctgaaagccgggctttcgggggaaggatccacttccaaggtcactcactggttgctggcaaaattcagttcctggaggggtgttgggctacggtctcaggtcctcgctggctgttggccagaagccgcccttggttccttgccacctgggcctctgccacacgatggcttgcttcccagaggcctgcaagcttgtccaggatggtctcaaactcctgggctcaagcgatcttcctgctttggcctcccaaagtgctgggaatacaggcatgagccaccgcgacaggccatgttgctgaatttggaaagtggagcaaagaatcatgcaaaaaattaagaaaaccaaaacgcaaccaaggcgaattcaattgcatttttttttcccagcgacactttctgagacacgaacctctctcttcggcgaacctattccagggcgcccttcattttcatttcttgaaacaacagccttgcaggccgagccgctgttcccgagaactcggcagccacagggagcaggttgcatggacccaggagcgcgagaggccctgctctgccagcttcggccaatcagaggccagggagcggtgggcgtgacgtggggcggtgcgcggggctgggcggcggctgaggcgcgtgctctcgcgtggtcgctgggtctgcgtcttcccgagccacgcagtgtgctgagctctccgcgtcgcctctgtcgcccgcgcctggcctaccgcggcactcccggctgcacgctctgcttggcctcgccatgccggtggacctcagcaagtggtccgggcccttgagcctgcaagaagtggacgagcagccgcagcacccgctgcatgtcacctacgccggggcggcggtggacgagctgggcaaagtgctgacgcccacccaggttaagaatagacccaccagcatttcgtgggatggtcttgattcagggaagctctacaccttggtcctgacagacccggatgctcccagcaggaaggatcccaaatacagagaatggcatcatttcctggtggtcaacatgaagggcaatgacatcagcagtggcacagtcctctccgattatgtgggctcggggcctcccaagggcacaggcctccaccgctatgtctggctggtttacgagcaggacaggccgctaaagtgtgacgagcccatcctcagcaaccgatctggagaccaccgtggcaaattcaaggtggcgtccttccgtaaaaaccgagtgggatgactatgtgcccaaactgtacgagcagctgtctgggaagtagggggttagcttggggacctgaactgtcctggaggccccaagccatgttccccagttcagtgttgcatgtataatagatttctcctcttcctgccccccttggcatgggtgagacctgaccagtcagatggtagttgagggtgacttttcctgctgcctggcctttataattttactcactcactctgatttatgttttgatcaaatttgaacttcattttggggggtattttggtactgtgatggggtcatcaaattattaatctgaaaatagcaacccagaatgtaaaaaagaaaaaactggggggaaaaagaccaggtctacagtgatagagcaaagcatcaaagaatctttaagggaggtttaaaaaaaaaaaaaaaaaaaaagattggttgcctctgcctttgtgatcctgagtccagaatggtacacaatgtgattttatggtgatgtcactcacctagacaaccagaggctggcattgaggctaacctccaacacagtgcatctcagatgcctcagtaggcatcagtatgtcactctggtccctttaaagagcaatcctggaagaagcaggagggagggtggctttgctgttgttgggacatggcaatctagaccggcagcagcgctcgctgacagcttgggaggaaacctgagatctgtgttttttaaattgatcgttcttcatgggggtaagaaaagctggtctggagttgctgaatgttgcattaattgtgctgtttgcttgtagttgaataaaaatagaaacctgaatgaagaaaaaacagagagcttacagtggctagtgtgcgtgagtcgtgtt

SEQ ID NO: 735810 - DNA, 2315 bp, Homo sapiens
tttttttgatagcagctttatttttattttattttattttgagacagagtcttccttcgtagcccaggctggatgcgagactccatatcaaaaaaaaaaaaaaaagaaacccaaaaggtagaaaccccaagtcccatcggactctgtcttgagtccacccatactcccctttcttgagtgtgtatttttcgctttgcaataaatctttgtactttcatcattttctgacacactcttgaattccttctccagatggtgtcaagagcctggataccagctggggttgaggtcccaccagcctccgtctgaaagccgggctttcgggggaaggatccacttccaaggtcactcactggttgctggcaaaattcagttcctggaggggtgttgggctacggtctcaggtcctcgctggctgttggccagaagccgcccttggttccttgccacctgggcctctgccacacgatggcttgcttcccagaggcctgcaagcttgtccaggatggtctcaaactcctgggctcaagcgatcttcctgctttggcctcccaaagtgctgggaatacaggcatgagccaccgcgacaggccatgttgctgaatttggaaagtggagcaaagaatcatgcaaaaaattaagaaaaccaaaacgcaaccaaggcgaattcaattgcatttttttttcccagcgacactttctgagacacgaacctctctcttcggcgaacctattccagggcgcccttcattttcatttcttgaaacaacagccttgcaggccgagccgctgttcccgagaactcggcagccacagggagcaggttgcatggacccaggagcgcgagaggccctgctctgccagcttcggccaatcagaggccagggagcggtgggcgtgacgtggggcggtgcgcggggctgggcggcggctgaggcgcgtgctctcgcgtggtcgctgggtctgcgtcttcccgagccacgcagtgtgctgagctctccgcgtcgcctctgtcgcccgcgcctggcctaccgcggcactcccggctgcacgctctgcttggcctcgccatgccggtggacctcagcaagtggtccgggcccttgagcctgcaagaagtggacgagcagccgcagcacccgctgcatgtcacctacgccggggcggcggtggacgagctgggcaaagtgctgacgcccacccaggttaagaatagacccaccagcatttcgtgggatggtcttgattcagggaagctctacaccttggtcctgacagacccggatgctcccagcaggaaggatcccaaatacagagaatggcatcatttcctggtggtcaacatgaagggcaatgacatcagcagtggcacagtcctctccgattatgtgggctcggggcctcccaagggcacaggcctccaccgctatgtctggccgagtgggatgactatgtgcccaaactgtacgagcagctgtctgggaagtagggggttagcttggggacctgaactgtcctggaggccccaagccatgttccccagttcagtgttgcatgtataatagatttctcctcttcctgccccccttggcatgggtgagacctgaccagtcagatggtagttgagggtgacttttcctgctgcctggcctttataattttactcactcactctgatttatgttttgatcaaatttgaacttcattttggggggtattttggtactgtgatggggtcatcaaattattaatctgaaaatagcaacccagaatgtaaaaaagaaaaaactggggggaaaaagaccaggtctacagtgatagagcaaagcatcaaagaatctttaagggaggtttaaaaaaaaaaaaaaaaaaaaagattggttgcctctgcctttgtgatcctgagtccagaatggtacacaatgtgattttatggtgatgtcactcacctagacaaccagaggctggcattgaggctaacctccaacacagtgcatctcagatgcctcagtaggcatcagtatgtcactctggtccctttaaagagcaatcctggaagaagcaggagggagggtggctttgctgttgttgggacatggcaatctagaccggcagcagcgctcgctgacagcttgggaggaaacctgagatctgtgttttttaaattgatcgttcttcatgggggtaagaaaagctggtctggagttgctgaatgttgcattaattgtgctgtttgcttgtagttgaataaaaatagaaacctgaatgaagaaaaaacagagagcttacagtggctagtgtgcgtgagtcgtgtt

SEQ ID NO: 735811 - DNA, 2209 bp, Homo sapiens
tttttttgatagcagctttatttttattttattttattttgagacagagtcttccttcgtagcccaggctggatgcgagactccatatcaaaaaaaaaaaaaaaagaaacccaaaaggtagaaaccccaagtcccatcggactctgtcttgagtccacccatactcccctttcttgagtgtgtatttttcgctttgcaataaatctttgtactttcatcattttctgacacactcttgaattccttctccagatggtgtcaagagcctggataccagctggggttgaggtcccaccagcctccgtctgaaagccgggctttcgggggaaggatccacttccaaggtcactcactggttgctggcaaaattcagttcctggaggggtgttgggctacggtctcaggtcctcgctggctgttggccagaagccgcccttggttccttgccacctgggcctctgccacacgatggcttgcttcccagaggcctgcaagcttgtccaggatggtctcaaactcctgggctcaagcgatcttcctgctttggcctcccaaagtgctgggaatacaggcatgagccaccgcgacaggccatgttgctgaatttggaaagtggagcaaagaatcatgcaaaaaattaagaaaaccaaaacgcaaccaaggcgaattcaattgcatttttttttcccagcgacactttctgagacacgaacctctctcttcggcgaacctattccagggcgcccttcattttcatttcttgaaacaacagccttgcaggccgagccgctgttcccgagaactcggcagccacagggagcaggttgcatggacccaggagcgcgagaggccctgctctgccagcttcggccaatcagaggccagggagcggtgggcgtgacgtggggcggtgcgcggggctgggcggcggctgaggcgcgtgctctcgcgtggtcgctgggtctgcgtcttcccgagccacgcagtgtgctgagctctccgcgtcgcctctgtcgcccgcgcctggcctaccgcggcactcccggctgcacgctctgcttggcctcgccatgccggtggacctcagcaagtggtccgggcccttgagcctgcaagaagtggacgagcagccgcagcacccgctgcatgtcacctacgccggggcggcggtggacgagctgggcaaagtgctgacgcccacccaggttaagaatagacccaccagcatttcgtgggatggtcttgattcagggaagctctacaccttggtcctgacagacccggatgctcccagcaggaaggatcccaaatacagagaatggcatcatttcctggtggtcaacatgaagggcaatgacatcagcagtggcacagtcctctccgattatgtgggctcggggcctcccaagggcacaggccccaagccatgttccccagttcagtgttgcatgtataatagatttctcctcttcctgccccccttggcatgggtgagacctgaccagtcagatggtagttgagggtgacttttcctgctgcctggcctttataattttactcactcactctgatttatgttttgatcaaatttgaacttcattttggggggtattttggtactgtgatggggtcatcaaattattaatctgaaaatagcaacccagaatgtaaaaaagaaaaaactggggggaaaaagaccaggtctacagtgatagagcaaagcatcaaagaatctttaagggaggtttaaaaaaaaaaaaaaaaaaaaagattggttgcctctgcctttgtgatcctgagtccagaatggtacacaatgtgattttatggtgatgtcactcacctagacaaccagaggctggcattgaggctaacctccaacacagtgcatctcagatgcctcagtaggcatcagtatgtcactctggtccctttaaagagcaatcctggaagaagcaggagggagggtggctttgctgttgttgggacatggcaatctagaccggcagcagcgctcgctgacagcttgggaggaaacctgagatctgtgttttttaaattgatcgttcttcatgggggtaagaaaagctggtctggagttgctgaatgttgcattaattgtgctgtttgcttgtagttgaataaaaatagaaacctgaatgaagaaaaaacagagagcttacagtggctagtgtgcgtgagtcgtgtt

SEQ ID NO: 735812 - DNA, 1624 bp, Homo sapiens
tttttttgatagcagctttatttttattttattttattttgagacagagtcttccttcgtagcccaggctggatgcgagactccatatcaaaaaaaaaaaaaaaagaaacccaaaaggtagaaaccccaagtcccatcggactctgtcttgagtccacccatactcccctttcttgagtgtgtatttttcgctttgcaataaatctttgtactttcatcattttctgacacactcttgaattccttctccagatggtgtcaagagcctggataccagctggggttgaggtcccaccagcctccgtctgaaagccgggctttcgggggaaggatccacttccaaggtcactcactggttgctggcaaaattcagttcctggaggggtgttgggctacggtctcaggtcctcgctggctgttggccagaagccgcccttggttccttgccacctgggcctctgccacacgatggcttgcttcccagaggcctgcaagcttgtccaggatggtctcaaactcctgggctcaagcgatcttcctgctttggcctcccaaagtgctgggaatacaggcatgagccaccgcgacaggccatgttgctgaatttggaaagtggagcaaagaatcatgcaaaaaattaagaaaaccaaaacgcaaccaaggcgaattcaattgcatttttttttcccagcgacactttctgagacacgaacctctctcttcggcgaacctattccagggcgcccttcattttcatttcttgaaacaacagccttgcaggccgagccgctgttcccgagaactcggcagccacagggagcaggttgcatggacccaggagcgcgagaggccctgctctgccagcttcggccaatcagaggccagggagcggtgggcgtgacgtggggcggtgcgcggggctgggcggcggctgaggcgcgtgctctcgcgtggtcgctgggtctgcgtcttcccgagccacgcagtgtgctgagctctccgcgtcgcctctgtcgcccgcgcctggcctaccgcggcactcccggctgcacgctctgcttggcctcgccatgccggtggacctcagcaagtggtccgggcccttgagcctgcaagaagtggacgagcagccgcagcacccgctgcatgtcacctacgccggggcggcggtggacgagctgggcaaagtgctgacgcccacccaggcctgtgccggcctcctgggtgggacccagcggagacagggccaggggcggtggggaggttcagcctgcgtgtgtcgaggcccccccaggccagaggtcccggggtccatgtcccatgcctgggggccaccccgagcaccgggaacccggcctgtggcgtggccaggcaggttcggcctgcggcagaaattcattcacttttcccgggcttcagacccaagagggacctaggttcggaaacaggccggatccccctctccccccacaggccagggcgctggagagggacgtcgccgggacagagtaggctgtggctgcccggacgcccccagagcttcccctagggcctcagcattttaggcctggttttggagggctgaagcctcacccgagagcctgtgacgcattatgtaactggc

SEQ ID NO: 735813 - DNA, 1554 bp, Homo sapiens
tttttttgatagcagctttatttttattttattttattttgagacagagtcttccttcgtagcccaggctggatgcgagactccatatcaaaaaaaaaaaaaaaagaaacccaaaaggtagaaaccccaagtcccatcggactctgtcttgagtccacccatactcccctttcttgagtgtgtatttttcgctttgcaataaatctttgtactttcatcattttctgacacactcttgaattccttctccagatggtgtcaagagcctggataccagctggggttgaggtcccaccagcctccgtctgaaagccgggctttcgggggaaggatccacttccaaggtcactcactggttgctggcaaaattcagttcctggaggggtgttgggctacggtctcaggtcctcgctggctgttggccagaagccgcccttggttccttgccacctgggcctctgccacacgatggcttgcttcccagaggcctgcaagcttgtccaggatggtctcaaactcctgggctcaagcgatcttcctgctttggcctcccaaagtgctgggaatacaggcatgagccaccgcgacaggccatgttgctctctcttcggcgaacctattccagggcgcccttcattttcatttcttgaaacaacagccttgcaggccgagccgctgttcccgagaactcggcagccacagggagcaggttgcatggacccaggagcgcgagaggccctgctctgccagcttcggccaatcagaggccagggagcggtgggcgtgacgtggggcggtgcgcggggctgggcggcggctgaggcgcgtgctctcgcgtggtcgctgggtctgcgtcttcccgagccacgcagtgtgctgagctctccgcgtcgcctctgtcgcccgcgcctggcctaccgcggcactcccggctgcacgctctgcttggcctcgccatgccggtggacctcagcaagtggtccgggcccttgagcctgcaagaagtggacgagcagccgcagcacccgctgcatgtcacctacgccggggcggcggtggacgagctgggcaaagtgctgacgcccacccagggtacaccgggcggcgggcgtgcagcgagcggcacggcgcggaggcctgtgccggcctcctgggtgggacccagcggagacagggccaggggcggtggggaggttcagcctgcgtgtgtcgaggcccccccaggccagaggtcccggggtccatgtcccatgcctgggggccaccccgagcaccgggaacccggcctgtggcgtggccaggcaggttcggcctgcggcagaaattcattcacttttcccgggcttcagacccaagagggacctaggttcggaaacaggccggatccccctctccccccacaggccagggcgctggagagggacgtcgccgggacagagtaggctgtggctgcccggacgcccccagagcttcccctagggcctcagcattttaggcctggttttggagggctgaagcctcacccgagagcctgtgacgcattatgtaactggc

SEQ ID NO: 735814 - DNA, 2346 bp, Homo sapiens
tttttttgatagcagctttatttttattttattttattttgagacagagtcttccttcgtagcccaggctggatgcgagactccatatcaaaaaaaaaaaaaaaagaaacccaaaaggtagaaaccccaagtcccatcggactctgtcttgagtccacccatactcccctttcttgagtgtgtatttttcgctttgcaataaatctttgtactttcatcattttctgacacactcttgaattccttctccagatggtgtcaagagcctggataccagctggggttgaggtcccaccagcctccgtctgaaagccgggctttcgggggaaggatccacttccaaggtcactcactggttgctggcaaaattcagttcctggaggggtgttgggctacggtctcaggtcctcgctggctgttggccagaagccgcccttggttccttgccacctgggcctctgccacacgatggcttgcttcccagaggcctgcaagcttgtccaggatggtctcaaactcctgggctcaagcgatcttcctgctttggcctcccaaagtgctgggaatacaggcatgagccaccgcgacaggccatgttgctctctcttcggcgaacctattccagggcgcccttcattttcatttcttgaaacaacagccttgcaggccgagccgctgttcccgagaactcggcagccacagggagcaggttgcatggacccaggagcgcgagaggccctgctctgccagcttcggccaatcagaggccagggagcggtgggcgtgacgtggggcggtgcgcggggctgggcggcggctgaggcgcgtgctctcgcgtggtcgctgggtctgcgtcttcccgagccacgcagtgtgctgagctctccgcgtcgcctctgtcgcccgcgcctggcctaccgcggcactcccggctgcacgctctgcttggcctcgccatgccggtggacctcagcaagtggtccgggcccttgagcctgcaagaagtggacgagcagccgcagcacccgctgcatgtcacctacgccggggcggcggtggacgagctgggcaaagtgctgacgcccacccaggttaagaatagacccaccagcatttcgtgggatggtcttgattcagggaagctctacaccttggtcctgacagacccggatgctcccagcaggaaggatcccaaatacagagaatggcatcatttcctggtggtcaacatgaagggcaatgacatcagcagtggcacagtcctctccgattatgtgggctcggggcctcccaagggcacaggcctccaccgctatgtctggctggtttacgagcaggacaggccgctaaagtgtgacgagcccatcctcagcaaccgatctggagaccaccgtggcaaattcaaggtggcgtccttccgtaaaaagtatgagctcagggccccggtggctggcacgtgttaccaggccgagtgggatgactatgtgcccaaactgtacgagcagctgtctgggaagtagggggttagcttggggacctgaactgtcctggaggccccaagccatgttccccagttcagtgttgcatgtataatagatttctcctcttcctgccccccttggcatgggtgagacctgaccagtcagatggtagttgagggtgacttttcctgctgcctggcctttataattttactcactcactctgatttatgttttgatcaaatttgaacttcattttggggggtattttggtactgtgatggggtcatcaaattattaatctgaaaatagcaacccagaatgtaaaaaagaaaaaactggggggaaaaagaccaggtctacagtgatagagcaaagcatcaaagaatctttaagggaggtttaaaaaaaaaaaaaaaaaaaaagattggttgcctctgcctttgtgatcctgagtccagaatggtacacaatgtgattttatggtgatgtcactcacctagacaaccagaggctggcattgaggctaacctccaacacagtgcatctcagatgcctcagtaggcatcagtatgtcactctggtccctttaaagagcaatcctggaagaagcaggagggagggtggctttgctgttgttgggacatggcaatctagaccggcagcagcgctcgctgacagcttgggaggaaacctgagatctgtgttttttaaattgatcgttcttcatgggggtaagaaaagctggtctggagttgctgaatgttgcattaattgtgctgtttgcttgtagttgaataaaaatagaaacctgaatgaagaaaaaacagagagcttacagtggctagtgtgcgtgagtcgtgtt

SEQ ID NO: 735815 - DNA, 2448 bp, Homo sapiens
  misc_feature (2371)..(2371): n is a, c, g, or t
  misc_feature (2419)..(2419): n is a, c, g, or t
tttttttgatagcagctttatttttattttattttattttgagacagagtcttccttcgtagcccaggctggatgcgagactccatatcaaaaaaaaaaaaaaaagaaacccaaaaggtagaaaccccaagtcccatcggactctgtcttgagtccacccatactcccctttcttgagtgtgtatttttcgctttgcaataaatctttgtactttcatcattttctgacacactcttgaattccttctccagatggtgtcaagagcctggataccagctggggttgaggtcccaccagcctccgtctgaaagccgggctttcgggggaaggatccacttccaaggtcactcactggttgctggcaaaattcagttcctggaggggtgttgggctacggtctcaggtcctcgctggctgttggccagaagccgcccttggttccttgccacctgggcctctgccacacgatggcttgcttcccagaggcctgcaagcttgtccaggatggtctcaaactcctgggctcaagcgatcttcctgctttggcctcccaaagtgctgggaatacaggcatgagccaccgcgacaggccatgttgctctctcttcggcgaacctattccagggcgcccttcattttcatttcttgaaacaacagccttgcaggccgagccgctgttcccgagaactcggcagccacagggagcaggttgcatggacccaggagcgcgagaggccctgctctgccagcttcggccaatcagaggccagggagcggtgggcgtgacgtggggcggtgcgcggggctgggcggcggctgaggcgcgtgctctcgcgtggtcgctgggtctgcgtcttcccgagccacgcagtgtgctgagctctccgcgtcgcctctgtcgcccgcgcctggcctaccgcggcactcccggctgcacgctctgcttggcctcgccatgccggtggacctcagcaagtggtccgggcccttgagcctgcaagaagtggacgagcagccgcagcacccgctgcatgtcacctacgccggggcggcggtggacgagctgggcaaagtgctgacgcccacccaggttaagaatagacccaccagcatttcgtgggatggtcttgattcagggaagctctacaccttggtcctgacagacccggatgctcccagcaggaaggatcccaaatacagagaatggcatcatttcctggtggtcaacatgaagggcaatgacatcagcagtggcacagtcctctccgattatgtgggctcggggcctcccaagggcacaggcctccaccgctatgtctggctggtttacgagcaggacaggccgctaaagtgtgacgagcccatcctcagcaaccgatctggagaccaccgtggcaaattcaaggtggcgtccttccgtaaaaagtatgagctcagggccccggtggctggcacgtgttaccaggccgagtgggatgactatgtgcccaaactgtacgagcagctgtctgggaagtagggggttagcttggggacctgaactgtcctggaggccccaagccatgttccccagttcagtgttgcatgtataatagatttctcctcttcctgccccccttggcatgggtgagacctgaccagtcagatggtagttgagggtgacttttcctgctgcctggcctttataattttactcactcactctgatttatgttttgatcaaatttgaacttcattttggggggtattttggtactgtgatggggtcatcaaattattaatctgaaaatagcaacccagaatgtaaaaaagaaaaaactggggggaaaaagaccaggtctacagtgatagagcaaagcatcaaagaatctttaagggaggtttaaaaaaaaaaaaaaaaaaaaagattggttgcctctgcctttgtgatcctgagtccagaatggtacacaatgtgattttatggtgatgtcactcacctagacaaccagaggctggcattgaggctaacctccaacacagtgcatctcagatgcctcagtaggcatcagtatgtcactctggtccctttaaagagcaatcctggaagaagcaggagggagggtggctttgctgttgttgggacatggcaatctagaccggcagcagcgctcgctgacagcttgggaggaaacctgagatctgtgttttttaaattgatcgttcttcatgggggtaagaaaagctggtctggagttgctgaatgttgcattaattgtgctgtttgcttgtagttgaataaaaatagaaacctgaatgaagaaaaaaaaaaaaaaacctcgaggtcgacggtatcgataagcttgatatcgaattcggcacgagggaggntgaggtctggggttctttaaagtctctggtgggctgcctcatgacttnaatcagcttggaactgccagtgcaccagc

SEQ ID NO: 735816 - DNA, 2328 bp, Homo sapiens
tttttttgatagcagctttatttttattttattttattttgagacagagtcttccttcgtagcccaggctggatgcgagactccatatcaaaaaaaaaaaaaaaagaaacccaaaaggtagaaaccccaagtcccatcggactctgtcttgagtccacccatactcccctttcttgagtgtgtatttttcgctttgcaataaatctttgtactttcatcattttctgacacactcttgaattccttctccagatggtgtcaagagcctggataccagctggggttgaggtcccaccagcctccgtctgaaagccgggctttcgggggaaggatccacttccaaggtcactcactggttgctggcaaaattcagttcctggaggggtgttgggctacggtctcaggtcctcgctggctgttggccagaagccgcccttggttccttgccacctgggcctctgccacacgatggcttgcttcccagaggcctgcaagcttgtccaggatggtctcaaactcctgggctcaagcgatcttcctgctttggcctcccaaagtgctgggaatacaggcatgagccaccgcgacaggccatgttgctctctcttcggcgaacctattccagggcgcccttcattttcatttcttgaaacaacagccttgcaggccgagccgctgttcccgagaactcggcagccacagggagcaggttgcatggacccaggagcgcgagaggccctgctctgccagcttcggccaatcagaggccagggagcggtgggcgtgacgtggggcggtgcgcggggctgggcggcggctgaggcgcgtgctctcgcgtggtcgctgggtctgcgtcttcccgagccacgcagtgtgctgagctctccgcgtcgcctctgtcgcccgcgcctggcctaccgcggcactcccggctgcacgctctgcttggcctcgccatgccggtggacctcagcaagtggtccgggcccttgagcctgcaagaagtggacgagcagccgcagcacccgctgcatgtcacctacgccggggcggcggtggacgagctgggcaaagtgctgacgcccacccaggttaagaatagacccaccagcatttcgtgggatggtcttgattcagggaagctctacaccttggtcctgacagacccggatgctcccagcaggaaggatcccaaatacagagaatggcatcatttcctggtggtcaacatgaagggcaatgacatcagcagtggcacagtcctctccgattatgtgggctcggggcctcccaagggcacaggcctccaccgctatgtctggctggtttacgagcaggacaggccgctaaagtgtgacgagcccatcctcagcaaccgatctggagaccaccgtggcaaattcaaggtggcgtccttccgtaaaaagtatgagctcagggccccggtggctggcacgtgttaccaggccgagtgggatgactatgtgcccaaactgtacgagcagctgtctgggaagtagggggttagcttggggacctgaactgtcctggaggccccaagccatgttccccagttcagtgttgcatgtataatagatttctcctcttcctgccccccttggcatgggtgagacctgaccagtcagatggtagttgagggtgacttttcctgctgcctggcctttataattttactcactcactctgatttatgttttgatcaaatttgaacttcattttggggggtattttggtactgtgatggggtcatcaaattattaatctgaaaatagcaacccagaatgtaaaaaagaaaaaactggggggaaaaagaccaggtctacagtgatagagcaaagcatcaaagaatctttaagggaggtttaaaaaaaaaaaaaaaaaaaaagattggttgcctctgcctttgtgatcctgagtccagaatggtacacaatgtgattttatggtgatgtcactcacctagacaaccagaggctggcattgaggctaacctccaacacagtgcatctcagatgcctcagtaggcatcagtatgtcactctggtccctttaaagagcaatcctggaagaagcaggagggagggtggctttgctgttgttgggacatggcaatctagaccggcagcagcgctcgctgacagcttgggaggaaacctgagatctgtgttttttaaattgatcgttcttcatgggggtaagaaaagctggtctggagttgctgaatgttgcattaattgtgctgtttgcttgtagttgaataaaaatagaaacctgaatgaagtggagtagcactggtaccgagctcga

SEQ ID NO: 735817 - DNA, 2377 bp, Homo sapiens
  misc_feature (2305)..(2306): n is a, c, g, or t
  misc_feature (2309)..(2309): n is a, c, g, or t
  misc_feature (2317)..(2317): n is a, c, g, or t
  misc_feature (2320)..(2321): n is a, c, g, or t
  misc_feature (2342)..(2342): n is a, c, g, or t
  misc_feature (2349)..(2349): n is a, c, g, or t
tttttttgatagcagctttatttttattttattttattttgagacagagtcttccttcgtagcccaggctggatgcgagactccatatcaaaaaaaaaaaaaaaagaaacccaaaaggtagaaaccccaagtcccatcggactctgtcttgagtccacccatactcccctttcttgagtgtgtatttttcgctttgcaataaatctttgtactttcatcattttctgacacactcttgaattccttctccagatggtgtcaagagcctggataccagctggggttgaggtcccaccagcctccgtctgaaagccgggctttcgggggaaggatccacttccaaggtcactcactggttgctggcaaaattcagttcctggaggggtgttgggctacggtctcaggtcctcgctggctgttggccagaagccgcccttggttccttgccacctgggcctctgccacacgatggcttgcttcccagaggcctgcaagcttgtccaggatggtctcaaactcctgggctcaagcgatcttcctgctttggcctcccaaagtgctgggaatacaggcatgagccaccgcgacaggccatgttgctctctcttcggcgaacctattccagggcgcccttcattttcatttcttgaaacaacagccttgcaggccgagccgctgttcccgagaactcggcagccacagggagcaggttgcatggacccaggagcgcgagaggccctgctctgccagcttcggccaatcagaggccagggagcggtgggcgtgacgtggggcggtgcgcggggctgggcggcggctgaggcgcgtgctctcgcgtggtcgctgggtctgcgtcttcccgagccacgcagtgtgctgagctctccgcgtcgcctctgtcgcccgcgcctggcctaccgcggcactcccggctgcacgctctgcttggcctcgccatgccggtggacctcagcaagtggtccgggcccttgagcctgcaagaagtggacgagcagccgcagcacccgctgcatgtcacctacgccggggcggcggtggacgagctgggcaaagtgctgacgcccacccaggttaagaatagacccaccagcatttcgtgggatggtcttgattcagggaagctctacaccttggtcctgacagacccggatgctcccagcaggaaggatcccaaatacagagaatggcatcatttcctggtggtcaacatgaagggcaatgacatcagcagtggcacagtcctctccgattatgtgggctcggggcctcccaagggcacaggcctccaccgctatgtctggctggtttacgagcaggacaggccgctaaagtgtgacgagcccatcctcagcaaccgatctggagaccaccgtggcaaattcaaggtggcgtccttccgtaaaaagtatgagctcagggccccggtggctggcacgtgttaccaggccgagtgggatgactatgtgcccaaactgtacgagcagctgtctgggaagtagggggttagcttggggacctgaactgtcctggaggccccaagccatgttccccagttcagtgttgcatgtataatagatttctcctcttcctgccccccttggcatgggtgagacctgaccagtcagatggtagttgagggtgacttttcctgctgcctggcctttataattttactcactcactctgatttatgttttgatcaaatttgaacttcattttggggggtattttggtactgtgatggggtcatcaaattattaatctgaaaatagcaacccagaatgtaaaaaagaaaaaactggggggaaaaagaccaggtctacagtgatagagcaaagcatcaaagaatctttaagggaggtttaaaaaaaaaaaaaaaaaaaaagattggttgcctctgcctttgtgatcctgagtccagaatggtacacaatgtgattttatggtgatgtcactcacctagacaaccagaggctggcattgaggctaacctccaacacagtgcatctcagatgcctcagtaggcatcagtatgtcactctggtccctttaaagagcaatcctggaagaagcaggagggagggtggctttgctgttgttgggacatggcaatctagaccggcagcagcgctcgctgacagcttgggaggaaacctgagatctgtgttttttaaattgatcgttcttcatgggggtaagaaaagctggtctggagttgctgaatgttgcattaattgtgctgtttgcttgtagttgaataaaaatagaaacctgaatgaagcanntgngatccttntgnnccttacactaagcaacagagngaataantcctcgggggggtgcccggaccccaatt

SEQ ID NO: 735818 - DNA, 2357 bp, Homo sapiens
tttttttgatagcagctttatttttattttattttattttgagacagagtcttccttcgtagcccaggctggatgcgagactccatatcaaaaaaaaaaaaaaaagaaacccaaaaggtagaaaccccaagtcccatcggactctgtcttgagtccacccatactcccctttcttgagtgtgtatttttcgctttgcaataaatctttgtactttcatcattttctgacacactcttgaattccttctccagatggtgtcaagagcctggataccagctggggttgaggtcccaccagcctccgtctgaaagccgggctttcgggggaaggatccacttccaaggtcactcactggttgctggcaaaattcagttcctggaggggtgttgggctacggtctcaggtcctcgctggctgttggccagaagccgcccttggttccttgccacctgggcctctgccacacgatggcttgcttcccagaggcctgcaagcttgtccaggatggtctcaaactcctgggctcaagcgatcttcctgctttggcctcccaaagtgctgggaatacaggcatgagccaccgcgacaggccatgttgctctctcttcggcgaacctattccagggcgcccttcattttcatttcttgaaacaacagccttgcaggccgagccgctgttcccgagaactcggcagccacagggagcaggttgcatggacccaggagcgcgagaggccctgctctgccagcttcggccaatcagaggccagggagcggtgggcgtgacgtggggcggtgcgcggggctgggcggcggctgaggcgcgtgctctcgcgtggtcgctgggtctgcgtcttcccgagccacgcagtgtgctgagctctccgcgtcgcctctgtcgcccgcgcctggcctaccgcggcactcccggctgcacgctctgcttggcctcgccatgccggtggacctcagcaagtggtccgggcccttgagcctgcaagaagtggacgagcagccgcagcacccgctgcatgtcacctacgccggggcggcggtggacgagctgggcaaagtgctgacgcccacccaggttaagaatagacccaccagcatttcgtgggatggtcttgattcagggaagctctacaccttggtcctgacagacccggatgctcccagcaggaaggatcccaaatacagagaatggcatcatttcctggtggtcaacatgaagggcaatgacatcagcagtggcacagtcctctccgattatgtgggctcggggcctcccaagggcacaggcctccaccgctatgtctggctggtttacgagcaggacaggccgctaaagtgtgacgagcccatcctcagcaaccgatctggagaccaccgtggcaaattcaaggtggcgtccttccgtaaaaagtatgagctcagggccccggtggctggcacgtgttaccaggccgagtgggatgactatgtgcccaaactgtacgagcagctgtctgggaagtagggggttagcttggggacctgaactgtcctggaggccccaagccatgttccccagttcagtgttgcatgtataatagatttctcctcttcctgccccccttggcatgggtgagacctgaccagtcagatggtagttgagggtgacttttcctgctgcctggcctttataattttactcactcactctgatttatgttttgatcaaatttgaacttcattttggggggtattttggtactgtgatggggtcatcaaattattaatctgaaaatagcaacccagaatgtaaaaaagaaaaaactggggggaaaaagaccaggtctacagtgatagagcaaagcatcaaagaatctttaagggaggtttaaaaaaaaaaaaaaaaaaaaagattggttgcctctgcctttgtgatcctgagtccagaatggtacacaatgtgattttatggtgatgtcactcacctagacaaccagaggctggcattgaggctaacctccaacacagtgcatctcagatgcctcagtaggcatcagtatgtcactctggtccctttaaagagcaatcctggaagaagcaggagggagggtggctttgctgttgttgggacatggcaatctagaccggcagcagcgctcgctgacagcttgggaggaaacctgagatctgtgttttttaaattgatcgttcttcatgggggtaagaaaagctggtctggagttgctgaatgttgcattaattgtgctgtttgcttgtagttgaataaaaatagaaacctgaatgaagaggttgctaacgtcctacgtgtacctgatgctcgacattctgtacatcactggtc

SEQ ID NO: 735819 - DNA, 2247 bp, Homo sapiens
tttttttgatagcagctttatttttattttattttattttgagacagagtcttccttcgtagcccaggctggatgcgagactccatatcaaaaaaaaaaaaaaaagaaacccaaaaggtagaaaccccaagtcccatcggactctgtcttgagtccacccatactcccctttcttgagtgtgtatttttcgctttgcaataaatctttgtactttcatcattttctgacacactcttgaattccttctccagatggtgtcaagagcctggataccagctggggttgaggtcccaccagcctccgtctgaaagccgggctttcgggggaaggatccacttccaaggtcactcactggttgctggcaaaattcagttcctggaggggtgttgggctacggtctcaggtcctcgctggctgttggccagaagccgcccttggttccttgccacctgggcctctgccacacgatggcttgcttcccagaggcctgcaagcttgtccaggatggtctcaaactcctgggctcaagcgatcttcctgctttggcctcccaaagtgctgggaatacaggcatgagccaccgcgacaggccatgttgctctctcttcggcgaacctattccagggcgcccttcattttcatttcttgaaacaacagccttgcaggccgagccgctgttcccgagaactcggcagccacagggagcaggttgcatggacccaggagcgcgagaggccctgctctgccagcttcggccaatcagaggccagggagcggtgggcgtgacgtggggcggtgcgcggggctgggcggcggctgaggcgcgtgctctcgcgtggtcgctgggtctgcgtcttcccgagccacgcagtgtgctgagctctccgcgtcgcctctgtcgcccgcgcctggcctaccgcggcactcccggctgcacgctctgcttggcctcgccatgccggtggacctcagcaagtggtccgggcccttgagcctgcaagaagtggacgagcagccgcagcacccgctgcatgtcacctacgccggggcggcggtggacgagctgggcaaagtgctgacgcccacccaggttaagaatagacccaccagcatttcgtgggatggtcttgattcagggaagctctacaccttggtcctgacagacccggatgctcccagcaggaaggatcccaaatacagagaatggcatcatttcctggtggtcaacatgaagggcaatgacatcagcagtggcacagtcctctccgattatgtgggctcggggcctcccaagggcacaggcctccaccgctatgtctggctggtttacgagcaggacaggccgctaaagtgtgacgagcccatcctcagcaaccgatctggagaccaccgtggcaaattcaaggtggcgtccttccgtaaaaagtatgagctcagggccccggtggctggcacgtgttaccaggccgagtgggatgactatgtgcccaaactgtacgagcagctgtctgggaagtagggggttagcttggggacctgaactgtcctggaggccccaagccatgttccccagttcagtgttgcatgtataatagatttctcctcttcctgccccccttggcatgggtgagacctgaccagtcagatggtagttgagggtgacttttcctgctgcctggcctttataattttactcactcactctgatttatgttttgatcaaatttgaacttcattttggggggtattttggtactgtgatggggtcatcaaattattaatctgaaaatagcaacccagaatgtaaaaaagaaaaaactggggggaaaaagaccaggtctacagtgatagagcaaagcatcaaagaatctttaagggaggtttaaaaaaaaaaaaaaaaaaaaagattggttgcctctgcctttgtgatcctgagtccagaatggtacacaatgtgattttatggtgatgtcactcacctagacaaccagaggctggcattgaggctaacctccaacacagtgcatctcagatgcctcagtaggcatcagtatgtcactctggtccctttaaagagcaatcctggaagaagcaggagggagggtggctttgctgttgttgggacatggcaactccaaaccagcttttcttacccccatgaagaacgatcaatttaaaaaacacagatctcaggtttcctcccaagctgtcagcgagcgctgctgccggtctagattgcgtcgacg

SEQ ID NO: 735820 - DNA, 2186 bp, Homo sapiens
tttttttgatagcagctttatttttattttattttattttgagacagagtcttccttcgtagcccaggctggatgcgagactccatatcaaaaaaaaaaaaaaaagaaacccaaaaggtagaaaccccaagtcccatcggactctgtcttgagtccacccatactcccctttcttgagtgtgtatttttcgctttgcaataaatctttgtactttcatcattttctgacacactcttgaattccttctccagatggtgtcaagagcctggataccagctggggttgaggtcccaccagcctccgtctgaaagccgggctttcgggggaaggatccacttccaaggtcactcactggttgctggcaaaattcagttcctggaggggtgttgggctacggtctcaggtcctcgctggctgttggccagaagccgcccttggttccttgccacctgggcctctgccacacgatggcttgcttcccagaggcctgcaagcttgtccaggatggtctcaaactcctgggctcaagcgatcttcctgctttggcctcccaaagtgctgggaatacaggcatgagccaccgcgacaggccatgttgctctctcttcggcgaacctattccagggcgcccttcattttcatttcttgaaacaacagccttgcaggccgagccgctgttcccgagaactcggcagccacagggagcaggttgcatggacccaggagcgcgagaggccctgctctgccagcttcggccaatcagaggccagggagcggtgggcgtgacgtggggcggtgcgcggggctgggcggcggctgaggcgcgtgctctcgcgtggtcgctgggtctgcgtcttcccgagccacgcagtgtgctgagctctccgcgtcgcctctgtcgcccgcgcctggcctaccgcggcactcccggctgcacgctctgcttggcctcgccatgccggtggacctcagcaagtggtccgggcccttgagcctgcaagaagtggacgagcagccgcagcacccgctgcatgtcacctacgccggggcggcggtggacgagctgggcaaagtgctgacgcccacccaggttaagaatagacccaccagcatttcgtgggatggtcttgattcagggaagctctacaccttggtcctgacagacccggatgctcccagcaggaaggatcccaaatacagagaatggcatcatttcctggtggtcaacatgaagggcaatgacatcagcagtggcacagtcctctccgattatgtgggctcggggcctcccaagggcacaggcctccaccgctatgtctggctggtttacgagcaggacaggccgctaaagtgtgacgagcccatcctcagcaaccgatctggagaccaccgtggcaaattcaaggtggcgtccttccgtaaaaagtatgagctcagggccccggtggctggcacgtgttaccaggccgagtgggatgactatgtgcccaaactgtacgagcagctgtctgggaagtagggggttagcttggggacctgaactgtcctggaggccccaagccatgttccccagttcagtgttgcatgtataatagatttctcctcttcctgccccccttggcatgggtgagacctgaccagtcagatggtagttgagggtgacttttcctgctgcctggcctttataattttactcactcactctgatttatgttttgatcaaatttgaacttcattttggggggtattttggtactgtgatggggtcatcaaattattaatctgaaaatagcaacccagaatgtaaaaaagaaaaaactggggggaaaaagaccaggtctacagtgatagagcaaagcatcaaagaatctttaagggaggtttaaaaaaaattcactggccgtcgttttacaacgtcgtgactgggaaaaccctggcgttacccaacttaatcgccttgcagcacatccccctttcgccagctggcgtaatagcgaaaaggccggaacgatcggccttcccaacagttgcgcagcctgaatgcgaatggcacttgtagcgtcatatttgtcaaatcccgttacatttgggcagccatattaccatagcgaacggggaccccttatactacgaaggtggtttgccttggaagaccaattaaggggcactgggacgtctggggcct

SEQ ID NO: 735821 - DNA, 1917 bp, Homo sapiens
tttttttgatagcagctttatttttattttattttattttgagacagagtcttccttcgtagcccaggctggatgcgagactccatatcaaaaaaaaaaaaaaaagaaacccaaaaggtagaaaccccaagtcccatcggactctgtcttgagtccacccatactcccctttcttgagtgtgtatttttcgctttgcaataaatctttgtactttcatcattttctgacacactcttgaattccttctccagatggtgtcaagagcctggataccagctggggttgaggtcccaccagcctccgtctgaaagccgggctttcgggggaaggatccacttccaaggtcactcactggttgctggcaaaattcagttcctggaggggtgttgggctacggtctcaggtcctcgctggctgttggccagaagccgcccttggttccttgccacctgggcctctgccacacgatggcttgcttcccagaggcctgcaagcttgtccaggatggtctcaaactcctgggctcaagcgatcttcctgctttggcctcccaaagtgctgggaatacaggcatgagccaccgcgacaggccatgttgctctctcttcggcgaacctattccagggcgcccttcattttcatttcttgaaacaacagccttgcaggccgagccgctgttcccgagaactcggcagccacagggagcaggttgcatggacccaggagcgcgagaggccctgctctgccagcttcggccaatcagaggccagggagcggtgggcgtgacgtggggcggtgcgcggggctgggcggcggctgaggcgcgtgctctcgcgtggtcgctgggtctgcgtcttcccgagccacgcagtgtgctgagctctccgcgtcgcctctgtcgcccgcgcctggcctaccgcggcactcccggctgcacgctctgcttggcctcgccatgccggtggacctcagcaagtggtccgggcccttgagcctgcaagaagtggacgagcagccgcagcacccgctgcatgtcacctacgccggggcggcggtggacgagctgggcaaagtgctgacgcccacccaggttaagaatagacccaccagcatttcgtgggatggtcttgattcagggaagctctacaccttggtcctgacagacccggatgctcccagcaggaaggatcccaaatacagagaatggcatcatttcctggtggtcaacatgaagggcaatgacatcagcagtggcacagtcctctccgattatgtgggctcggggcctcccaagggcacaggcctccaccgctatgtctggctggtttacgagcaggacaggccgctaaagtgtgacgagcccatcctcagcaaccgatctggagaccaccgtggcaaattcaaggtggcgtccttccgtaaaaagtatgagctcagggccccggtggctggcacgtgttaccaggccgagtgggatgactatgtgcccaaactgtacgagcagctgtctgggaagtagggggttagcttggggacctgaactgtcctggaggccccaagccatgttccccagttcagtgttgcatgtataatagatttctcctcttcctgccccccttggcatgggtgagacctgaccagtcagatggtagttgagggtgacttttcctgctgcctggcctttataattttactcactcactctgatttatgttttgatcaaatttgaacttcattttggggggtattttggtactgtgatggggtcatcaaattattaatctgaaaatagcaacccagaatgtaactgcggggagtttcaacacacgtctaataatatactcggagggggggggggggggggggcgccccccccccccccccccccccgggggggggggggggctgtcgtcccc

SEQ ID NO: 735822 - DNA, 1817 bp, Homo sapiens
  misc_feature (1727)..(1727): n is a, c, g, or t
tttttttgatagcagctttatttttattttattttattttgagacagagtcttccttcgtagcccaggctggatgcgagactccatatcaaaaaaaaaaaaaaaagaaacccaaaaggtagaaaccccaagtcccatcggactctgtcttgagtccacccatactcccctttcttgagtgtgtatttttcgctttgcaataaatctttgtactttcatcattttctgacacactcttgaattccttctccagatggtgtcaagagcctggataccagctggggttgaggtcccaccagcctccgtctgaaagccgggctttcgggggaaggatccacttccaaggtcactcactggttgctggcaaaattcagttcctggaggggtgttgggctacggtctcaggtcctcgctggctgttggccagaagccgcccttggttccttgccacctgggcctctgccacacgatggcttgcttcccagaggcctgcaagcttgtccaggatggtctcaaactcctgggctcaagcgatcttcctgctttggcctcccaaagtgctgggaatacaggcatgagccaccgcgacaggccatgttgctctctcttcggcgaacctattccagggcgcccttcattttcatttcttgaaacaacagccttgcaggccgagccgctgttcccgagaactcggcagccacagggagcaggttgcatggacccaggagcgcgagaggccctgctctgccagcttcggccaatcagaggccagggagcggtgggcgtgacgtggggcggtgcgcggggctgggcggcggctgaggcgcgtgctctcgcgtggtcgctgggtctgcgtcttcccgagccacgcagtgtgctgagctctccgcgtcgcctctgtcgcccgcgcctggcctaccgcggcactcccggctgcacgctctgcttggcctcgccatgccggtggacctcagcaagtggtccgggcccttgagcctgcaagaagtggacgagcagccgcagcacccgctgcatgtcacctacgccggggcggcggtggacgagctgggcaaagtgctgacgcccacccaggttaagaatagacccaccagcatttcgtgggatggtcttgattcagggaagctctacaccttggtcctgacagacccggatgctcccagcaggaaggatcccaaatacagagaatggcatcatttcctggtggtcaacatgaagggcaatgacatcagcagtggcacagtcctctccgattatgtgggctcggggcctcccaagggcacaggcctccaccgctatgtctggctggtttacgagcaggacaggccgctaaagtgtgacgagcccatcctcagcaaccgatctggagaccaccgtggcaaattcaaggtggcgtccttccgtaaaaagtatgagctcagggccccggtggctggcacgtgttaccaggccgagtgggatgactatgtgcccaaactgtacgagcagctgtctgggaagtagggggttagcttggggacctgaactgtcctggaggccccaagccatgttccccagttcagtgttgcatgtataatagatttctcctcttcctgccccccttggcatgggtgagacctgaccagtcagatggtagttgagggtgacttttcctgctgcctggcctttataattttactcactcactctgatttatgtcaacttgactcnttgggggcattggacggcagggccacatcttctgatccccattaacaccggcgcgaaacgtctacacccaacctcgggacacaaacgctc

SEQ ID NO: 735823 - DNA, 1959 bp, Homo sapiens
  misc_feature (1679)..(1680): n is a, c, g, or t
  misc_feature (1687)..(1688): n is a, c, g, or t
  misc_feature (1691)..(1692): n is a, c, g, or t
tttttttgatagcagctttatttttattttattttattttgagacagagtcttccttcgtagcccaggctggatgcgagactccatatcaaaaaaaaaaaaaaaagaaacccaaaaggtagaaaccccaagtcccatcggactctgtcttgagtccacccatactcccctttcttgagtgtgtatttttcgctttgcaataaatctttgtactttcatcattttctgacacactcttgaattccttctccagatggtgtcaagagcctggataccagctggggttgaggtcccaccagcctccgtctgaaagccgggctttcgggggaaggatccacttccaaggtcactcactggttgctggcaaaattcagttcctggaggggtgttgggctacggtctcaggtcctcgctggctgttggccagaagccgcccttggttccttgccacctgggcctctgccacacgatggcttgcttcccagaggcctgcaagcttgtccaggatggtctcaaactcctgggctcaagcgatcttcctgctttggcctcccaaagtgctgggaatacaggcatgagccaccgcgacaggccatgttgctctctcttcggcgaacctattccagggcgcccttcattttcatttcttgaaacaacagccttgcaggccgagccgctgttcccgagaactcggcagccacagggagcaggttgcatggacccaggagcgcgagaggccctgctctgccagcttcggccaatcagaggccagggagcggtgggcgtgacgtggggcggtgcgcggggctgggcggcggctgaggcgcgtgctctcgcgtggtcgctgggtctgcgtcttcccgagccacgcagtgtgctgagctctccgcgtcgcctctgtcgcccgcgcctggcctaccgcggcactcccggctgcacgctctgcttggcctcgccatgccggtggacctcagcaagtggtccgggcccttgagcctgcaagaagtggacgagcagccgcagcacccgctgcatgtcacctacgccggggcggcggtggacgagctgggcaaagtgctgacgcccacccaggttaagaatagacccaccagcatttcgtgggatggtcttgattcagggaagctctacaccttggtcctgacagacccggatgctcccagcaggaaggatcccaaatacagagaatggcatcatttcctggtggtcaacatgaagggcaatgacatcagcagtggcacagtcctctccgattatgtgggctcggggcctcccaagggcacaggcctccaccgctatgtctggctggtttacgagcaggacaggccgctaaagtgtgacgagcccatcctcagcaaccgatctggagaccaccgtggcaaattcaaggtggcgtccttccgtaaaaagtatgagctcagggccccggtggctggcacgtgttaccaggccgagtgggatgactatgtgcccaaactgtacgagcagctgtctgggaagtagggggttagcttggggacctgaactgtcctggaggccccaagccatgttccccagttcagtgttgcatgtataatagatttctcctcttcctgccccccttggcatgggtgagacctgaccagtcagatggtagttgagggtgacttttcctgctgcccnngcgggcnnggnnccttttaaaattttaaacccactaacctccggagatatagggctcgggatcacaacttggaccttcccttctttggggagggtctctctctcccccctggattcgccgccccgcccaaattccccccaatcctcggagcaaccccccccctcaaaagggttcagcgaagaagattattgcgggggggcggaacagaccaaacaccggtcttccgagtgggataagacaccataacacccgcgcggcacagttatctattggaaggta

SEQ ID NO: 735824 - DNA, 2194 bp, Homo sapiens
tttttttgatagcagctttatttttattttattttattttgagacagagtcttccttcgtagcccaggctggatgcgagactccatatcaaaaaaaaaaaaaaaagaaacccaaaaggtagaaaccccaagtcccatcggactctgtcttgagtccacccatactcccctttcttgagtgtgtatttttcgctttgcaataaatctttgtactttcatcattttctgacacactcttgaattccttctccagatggtgtcaagagcctggataccagctggggttgaggtcccaccagcctccgtctgaaagccgggctttcgggggaaggatccacttccaaggtcactcactggttgctggcaaaattcagttcctggaggggtgttgggctacggtctcaggtcctcgctggctgttggccagaagccgcccttggttccttgccacctgggcctctgccacacgatggcttgcttcccagaggcctgcaagcttgtccaggatggtctcaaactcctgggctcaagcgatcttcctgctttggcctcccaaagtgctgggaatacaggcatgagccaccgcgacaggccatgttgctctctcttcggcgaacctattccagggcgcccttcattttcatttcttgaaacaacagccttgcaggccgagccgctgttcccgagaactcggcagccacagggagcaggttgcatggacccaggagcgcgagaggccctgctctgccagcttcggccaatcagaggccagggagcggtgggcgtgacgtggggcggtgcgcggggctgggcggcggctgaggcgcgtgctctcgcgtggtcgctgggtctgcgtcttcccgagccacgcagtgtgctgagctctccgcgtcgcctctgtcgcccgcgcctggcctaccgcggcactcccggctgcacgctctgcttggcctcgccatgccggtggacctcagcaagtggtccgggcccttgagcctgcaagaagtggacgagcagccgcagcacccgctgcatgtcacctacgccggggcggcggtggacgagctgggcaaagtgctgacgcccacccaggttaagaatagacccaccagcatttcgtgggatggtcttgattcagggaagctctacaccttggtcctgacagacccggatgctcccagcaggaaggatcccaaatacagagaatggcatcatttcctggtggtcaacatgaagggcaatgacatcagcagtggcacagtcctctccgattatgtgggctcggggcctcccaagggcacaggcctccaccgctatgtctggctggtttacgagcaggacaggccgctaaagtgtgacgagcccatcctcagcaaccgatctggagaccaccgtggcaaattcaaggtggcgtccttccgtaaaaagtatgagctcagggccccggtggctggcacgtgttaccaggtggcatgggtgagacctgaccagtcagatggtagttgagggtgacttttcctgctgcctggcctttataattttactcactcactctgatttatgttttgatcaaatttgaacttcattttggggggtattttggtactgtgatggggtcatcaaattattaatctgaaaatagcaacccagaatgtaaaaaagaaaaaactggggggaaaaagaccaggtctacagtgatagagcaaagcatcaaagaatctttaagggaggtttaaaaaaaaaaaaaaaaaaaaagattggttgcctctgcctttgtgatcctgagtccagaatggtacacaatgtgattttatggtgatgtcactcacctagacaaccagaggctggcattgaggctaacctccaacacagtgcatctcagatgcctcagtaggcatcagtatgtcactctggtccctttaaagagcaatcctggaagaagcaggagggagggtggctttgctgttgttgggacatggcaatctagaccggcagcagcgctcgctgacagcttgggaggaaacctgagatctgtgttttttaaattgatcgttcttcatgggggtaagaaaagctggtctggagttgctgaatgttgcattaattgtgctgtttgcttgtagttgaataaaaatagaaacctgaatgaagaaaaaacagagagcttacagtggctagtgtgcgtgagtcgtgtt

SEQ ID NO: 735825 - DNA, 777 bp, Homo sapiens
ccctctttacatcactgcctttacctggtggggatgaggccccatggggaaggtgctgatgtggagggaggaagtggagaccgagattcgccatactgcccagggaggctgtgtgagaactgggctgtgtatggtccctaaagcctcaactctgccccagctgggcgatgggtgcccctctctgggcttcctgcctagcttccccttctgcctccagcctggagccttgctttccctggagacaagcccgtggagtcccccaccacactggagggagcacgaccaccacactgctgggcctggcagacaccacatctttggcagggctcctggacgggcatgccttatgctgctctgcagggtcagagtggaaaggggccctttgccctggctggcctgtgccctcacccttgagcccctccccccactccacccctggcctcggatgcggctaatttctcagccatggagccagctgcaccagccctcgagggggtaattttgttgcccctggcaagtgaaaggattatcctcagtgttgattgtccttttttgtaatcctcctgctgttctgttctgttgtgctgtgcaacattttgctacatagactattttatagcagaaagctagaagaatatttattatgaatattaaagcaatagtgcatcaatgaaaaggcggagacattaggaattgtgtaaatgcttagattcacttttggtggattttttgtactttatttataactaataaaaatgaactgcattgctaactaca

SEQ ID NO: 735826 - DNA, 918 bp, Homo sapiens
  misc_feature (721)..(721): n is a, c, g, or t
  misc_feature (867)..(867): n is a, c, g, or t
  misc_feature (886)..(886): n is a, c, g, or t
aggcagtctggtctgtggaatgtgttgagataatttaatactggcttggacacactggattccaggtgcaggaaccctggaaccccctggaatgtgctagagataagcataaggcatcctgtctgtgcccactccaccctggttgggagtcgcagaatgaggacctcctgacttgagacagattctttatccagagaatctgagattccaattcagatcctggagctgggcctgctactcacctccccagtaaatgtccaggcagcattggacagagaggctggccccgccctgacgggggctgaagaacaggcccccagcagccttgttgttgggctactgagcacttcagaggttgggaggacctggaacagtcgccccagatccatgtgccttctgtttggggtacacctgagtagcctctaacagccactgattggcaccaagagagaatccaaatgttggcatcacaaaccttaagtatggagcagggagcaagtgcctgggggctgtttgccccatcttatgaatgaatagctctcgtaatgtctctggatttttggagacgggaagaaatggccaagtaacagcatcctcattcccaactctactgagaatcaactacggtggaacagaacatcaggggctgcatgggtgtgcgcctcagtttccctctactgcccccaaactgcctactccaggagtttcccaaaagggaggngggagatgaggagataggcatgcaaatgcccatttggagattttcagctactctgggccattatcccatttcagagcacaccagacaggaagggcaaagaggtcccatcatgagtgccaaattgattggtactggctgcccagaanactgtgctgggaagaattntgacattcccccatgtgcttgcccttgaattg

SEQ ID NO: 735827 - DNA, 353 bp, Homo sapiens; identical to SEQ ID NO: 14531

SEQ ID NO: 735828 - DNA, 589 bp, Homo sapiens
aaattcttctcaaatataaatgtagtacattggctaaaggactaataatctagtaaatttagtagtacagtatactgaaaggtacattgatgtatgggcacaaaatacttcttatagttagtggattggtcagtttaatatgtggtctctttacacaaaggttttggttaaattaaaatgtggagaaattaatattaagacttttaaaaatattatacagatataggtgccttaaaaaaaaaaaaacaacagttacaaccaaaagaattgaaatgaccagtgcactttattttccttttagctcctggagcctgtctgccatcagctgtttgagctctatcgtagctcagaggttcgacttaagaggttcacactgcagttcttgccagaattgatgtgggtttatttacggcttacagttagccgagacagacagagtaatggttgcattgaagcacttctgttaggaatttacaatttggtaagttgaagatgacagtttgggaaattttaagtattttttaaggtcctctgaaataatacttaaggaatgtttagagaaaaataaattggccaggcgcagtggctc

SEQ ID NO: 735829 - DNA, 714 bp, Homo sapiens; identical to SEQ ID NO: 341562

SEQ ID NO: 735830 - DNA, 818 bp, Homo sapiens; identical to SEQ ID NO: 341561

SEQ ID NO: 735831 - DNA, 1483 bp, Homo sapiens
cgctgcagttggcaggctgctgcgggaggcggcggcggtaggaagccggagacagcagggtgacagaattggaaaatatttaactcttaacaaatgaattccccacttgaactctgccgaattcctgtgccacctcctcctttagaaaactgatcttaatacagagataaaagaggagtagaaggtaaaagaaaatgctgggaactgaccgttgtgttgtggaagaatggttatcagaattcaaggcattacctgacactcagatcaccagttatgcagcaactttacaccggaaaaaaacacttgtaccagccctctataaagttattcaagattcaaataatgagctcctggagcctgtctgccatcagctgtttgagctctatcgtagctcagaggttcgacttaagaggttcacactgcagttcttgccagaattgatgtgggtttatttacggcttacagttagccgagacagacagagtaatggttgcattgaagcacttctgttaggaatttacaatttggaaatcgctgataaagatgggaacaataaagttctgtctttcactatcccctccttatccaagccttcaatataccatgaaccttcaacaattggatccatggctttgacagaaggggcattgtgtcagcatgatctcatcagagttgtttatagtgatcttcatcctcagagggaaacattcactgcacagaaccggtttgaagtcctgagttttctcatgctgtgttataattctgctattgtatatatgcctgcctcatcttaccaatctctttgtcggatgggttccagggtttgtgtgagtggctttccacggcaacatgaaaaacactggaaagaactctgtggtcgaatagtattggatcctgaatttatggtgcaacttctcacaggggtttattatgccatgtataatggacagtgggaccttggccaggaagttcttgatgatatcatttatagagcccagctagagcttttttctcaaccactattggttgccaatgccatgaaaaactcattaccatttgatgctcctgattctacacaagaaggccagaaagtccttaaagttgaagtcactccaacagtgccgaggatttctcggactgcaattacaacagcttcaatccgtcgtcatagatggagaagagaaggtgagtacaaaatccccatagtccacacatggagtcaagtaaatttatcactgtttttacagactgtcttagcacgtgatattaaaagaccctgtataattaaagtaattttttttgttaaaaatatcactagaaatgtgactaaatgtctaaagttattttaatatgtatttataaaatagatgtttagattgctgtataaagattaaaacaaaataagatgaggttaaattttgtctttttttgaactaaataagaacaataggaaagaagttgctttaaccttgttaccatactg

SEQ ID NO: 735832 - DNA, 1636 bp, Homo sapiens
cgctgcagttggcaggctgctgcgggaggcggcggcggtaggaagccggagacagcagggtgacaggctggagtgcagtggcgtgatctcggctcactgcagcctcgcctcctgggctcaagtgattctcctgcctctgcctcctgaatagctggcactacagaattggaaaatatttaactcttaacaaatgaattccccacttgaactctgccgaattcctgtgccacctcctcctttagaaaactgatcttaatacagagataaaagaggagtagaaggtaaaagaaaatgctgggaactgaccgttgtgttgtggaagaatggttatcagaattcaaggcattacctgacactcagatcaccagttatgcagcaactttacaccggaaaaaaacacttgtaccagccctctataaagttattcaagattcaaataatgagatacagcctccaagagtgcctctgctgtgtactggagtgagtttgaagaagttcagctcctggagcctgtctgccatcagctgtttgagctctatcgtagctcagaggttcgacttaagaggttcacactgcagttcttgccagaattgatgtgggtttatttacggcttacagttagccgagacagacagagtaatggttgcattgaagcacttctgttaggaatttacaatttggaaatcgctgataaagatgggaacaataaagttctgtctttcactatcccctccttatccaagccttcaatataccatgaaccttcaacaattggatccatggctttgacagaaggggcattgtgtcagcatgatctcatcagagttgtttatagtgatcttcatcctcagagggaaacattcactgcacagaaccggtttgaagtcctgagttttctcatgctgtgttataattctgctattgtatatatgcctgcctcatcttaccaatctctttgtcggatgggttccagggtttgtgtgagtggctttccacggcaacatgaaaaacactggaaagaactctgtggtcgaatagtattggatcctgaatttatggtgcaacttctcacaggggtttattatgccatgtataatggacagtgggaccttggccaggaagttcttgatgatatcatttatagagcccagctagagcttttttctcaaccactattggttgccaatgccatgaaaaactcattaccatttgatgctcctgattctacacaagaaggccagaaagtccttaaagttgaagtcactccaacagtgccgaggatttctcggactgcaattacaacagcttcaatccgtcgtcatagatggagaagagaaggtgagtacaaaatccccatagtccacacatggagtcaagtaaatttatcactgtttttacagactgtcttagcacgtgatattaaaagaccctgtataattaaagtaattttttttgttaaaaatatcactagaaatgtgactaaatgtctaaagttattttaatatgtatttataaaatagatgtttagattgctgtataaagattaaaacaaaataagatgaggttaaattttgtctttttttgaactaaataagaacaataggaaagaagttgctttaaccttgttaccatactg

SEQ ID NO: 735833 - DNA, 354 bp, Homo sapiens
  misc_feature (338)..(338): n is a, c, g, or t
caagcgtgagccactgtgacctgcctttgtttcatattttcttccgtgtttttttcttccccccctcctgttgcccaggctggagtgcagtggcgtgatctcggctcactgcagcctcgcctcctgggctcaagtgattctcctgcctctgcctcctgaatagctggcactacaggtgcgtaccactgcactgggctagtttttgtatttttaatagggatggggtttcactatgtcgcacaagttagcctcgaactcctgagttcaagtggtccacccgccttgccctccaaaagtgctaggattacaggcatgagccaccacatgccactcaatantaagcatcctctaaca

SEQ ID NO: 735834 - DNA, 940 bp, Homo sapiens
caagcgtgagccactgtgacctgcctttgtttcatattttcttccgtgtttttttcttccccccctcctgttgcccaggctggagtgcagtggcgtgatctcggctcactgcagcctcgcctcctgggctcaagtgattctcctgcctctgcctcctgaatagctggcactacagaattggaaaatatttaactcttaacaaatgaattccccacttgaactctgccgaattcctgtgccacctcctcctttagaaaactgatcttaatacagagataaaagaggagtagaaggtaaaagaaaatgctgggaactgaccgttgtgttgtggaagaatggttatcagaattcaaggcattacctgacactcagatcaccagttatgcagcaactttacaccggaaaaaaacacttgtaccagccctctataaagttattcaagattcaaataatgagatacagcctccaagagtgcctctgctgtgtactggagtgagtttgaagaagttcagtgtatttctgaatgttttataactctgggtatgcataatgtacgtatatgcatatccatatggtcaagagttttcagaattctttgtttgaataatgaatgtgtgtattccctaccccttgttttgctctgtcttaacatttaagctttgcttattaaaatgtatttgttttaatgctttctctttagattgtaagctcttcatgggcagtggtcagatattctgtatttgtaacttcccgagaatctagtattttatcatgtacataatgaacatagaatagtattgattggaaggacagtgaagtacaaaatgagattctaaaatgacattttcattagggctcacaagtgtataagaagtatccctttcctatttttttgtttaatactttagaagctattacattaaaaaagctattctcatta

SEQ ID NO: 735835 - DNA, 1437 bp, Homo sapiens
aaattcttctcaaatataaatgtagtacattggctaaaggactaataatctagtaaatttagtagtacagtatactgaaaggtacattgatgtatgggcacaaaatacttcttatagttagtggattggtcagtttaatatgtggtctctttacacaaaggttttggttaaattaaaatgtggagaaattaatattaagacttttaaaaatattatacagatataggtgccttaaaaaaaaaaaaacaacagttacaaccaaaagaattgaaatgaccagtgcactttattttccttttagctcctggagcctgtctgccatcagctgtttgagctctatcgtagctcagaggttcgacttaagaggttcacactgcagttcttgccagaattgatgtgggtttatttacggcttacagttagccgagacagacagagtaatggttgcattgaagcacttctgttaggaatttacaatttggaaatcgctgataaagatgggaacaataaagttctgtctttcactatcccctccttatccaagccttcaatataccatgaaccttcaacaattggatccatggctttgacagaaggggcattgtgtcagcatgatctcatcagagttgtttatagtgatcttcatcctcagagggaaacattcactgcacagaaccggtttgaagtcctgagttttctcatgctgtgttataattctgctattgtatatatgcctgcctcatcttaccaatctctttgtcggatgggttccagggtttgtgtgagtggctttccacggcaacatgaaaaacactggaaagaactctgtggtcgaatagtattggatcctgaatttatggtgcaacttctcacaggggtttattatgccatgtataatggacagtgggaccttggccaggaagttcttgatgatatcatttatagagcccagctagagcttttttctcaaccactattggttgccaatgccatgaaaaactcattaccatttgatgctcctgattctacacaagaaggccagaaagtccttaaagttgaagtcactccaacagtgccgaggatttctcggactgcaattacaacagcttcaatccgtcgtcatagatggagaagagaaggtgagtacaaaatccccatagtccacacatggagtcaagtaaatttatcactgtttttacagactgtcttagcacgtgatattaaaagaccctgtataattaaagtaattttttttgttaaaaatatcactagaaatgtgactaaatgtctaaagttattttaatatgtatttataaaatagatgtttagattgctgtataaagattaaaacaaaataagatgaggttaaattttgtctttttttgaactaaataagaacaataggaaagaagttgctttaaccttgttaccatactg

SEQ ID NO: 735836 - DNA, 1606 bp, Homo sapiens
  misc_feature (91)..(91): n is a, c, g, or t
  misc_feature (247)..(247): n is a, c, g, or t
  misc_feature (362)..(362): n is a, c, g, or t
cttaactcaaatgctataactggttcaaaggacaatccgaagaacacatttaatgattaggaatactgatataaacttgctaatggacaanaaatattggctttcctacaaggtaggaagcattccctctaccagacagaattcatttcctgcccacagacaagcgcgtttgcattgccagcagctatttacaacttatgaagctgtaaaacagctcccaagcaatgaaggctgcaagcagataagntggcaggccgtgagcaggcctcaaatggagttttacagtgaagcacaaatgttcccctacagaacccaagatgtctctttaaaagaaatcatgaaagaagaggggattaagtggngcttatggactgctccagggttaagtggcctccaaaataaacaacaggactgctcagtagtcagagtgaattttgggtggggtttgaaagagttccagctttcctctgctaatggtgacataaaatgttcatttcatacccatgcatatacactgatgtatacatgtagttgaggaggcagtggcagaagccagaaggctttctctgccatgagctcctcctaggagccctgggttgcagagggtgaggactgctaggaaagtccgtcagttaaggccgaagggacattagctttgccttaaaccacattggctgtgcttgcctttgtgtcttcacctgatttaatgggttttagctcacactctccgaatctatttacctccaagtcagttaaggcagactgtactgttgacaaagctaagcagaacagaatttccccatggcttctagcttcaaggaatcccagctatttatccatcaccaagaaatgaagccccatgggtggctgacggttcatttactccagcccagggtgttggatttcaattagtgcattcgcttttccctctaggcagagctcaccctttaaagtcgctccttggcctgctaactgtcttaagatgcactttcccatctcaacaatgatacaggacgtgtcttacagggctgtagttctcattcacagcattcttcctctgagtggtccaggaaatactcgcaggccttacagtcaagtcaccttagatttaaagtacggaatacgcgaaaccttcctaactggtaaagcgctcagtaatgcaagctctgggtgcaactcagtggttcttagtatagtcagagttatgcgatcatcagcacaatctactcacaccctcctcgaggtattaaataaatatttcagaatccacaatgcagccaatctcatcaataactttactgaatcctgtagcccagcactcaggggttctctaaaaccctgccccgccttcccctccaattgcggtgcccactgtctcttttaaatagactctgtcctcatcaagcctgttctctgtcccccaaatatgccgtatcattccttaatgcatgcattttttccccagttccctacaatcttataattagtggttacgctaatctatatgtgtgtttaaactcatagaattgtatacaaaaaagtcaactgtactgtgtacacacatttaaaagataaaatgtgttcttttaacgcttaaaaaaaaaaa

SEQ ID NO: 735837 - DNA, 817 bp, Homo sapiens
ctttatggtgagcaaccatataattttaaagaccgatatttttataggagaacccagatggcaaaaaatttttattctggaaatcctttggcaagtattatgaagcccaaatttagaaaactatgagatttcaaaccacataaacatgattctgttttccattttattttttaactgttaggtatttgcagttctgttccgtggaacttctgcaggcctgtatttagcatgctgtaagtacttttgggtgaaataggctctgagtctaaattctcagacatgtttctgatgtattaccatgaaaagcttgtgccacatgacagaagtgagatcatagtcttaacctcttcttgacgtggactggtcttcactcgggcaccgataaataacagatttggagtatctcctggtgcttattttagatgatgaagtcaaatcaacccaattagtgtcctgttagtaggtataatgagcctatttctttctaaaaagacttgtgatctggacatgcttttacaagaaatagtgaccttggggaatatgtaaacaaaagacctttttctaagagttgggagggggtgggggactgtataatgaaaagaattagcttacaaaaaagaaattgatattcaaagtattttaggcaaagccagtcaaaatgctttcatgatattttgagatgtaaattttgtctgatttgtattgttcttttcatttgccttcttaactttatatgtgacctgaattttccataacttgatgactatagattgcacctaggcattccaataaaagccaacccaatgtgtgtgtgttt

SEQ ID NO: 735838 - DNA, 4935 bp, Homo sapiens
tggcaggtcgaggccgggggtgagaaattttatatgatagcacaagagtcagttttacctatgatgaaacagcaggagtcctaaagacagtaaacctccagagtgatggttttatttgcaccattagatacaggcaaattggtcccctgattgacaggcagattttccgctttagtgaagatgggatggtaaatgcaagatttgactatagctatgacaacagctttcgagtgaccagcatgcagggtgtgatcaatgaaacgccactgcctattgatctgtatcagtttgatgacatttctggcaaagttgagcagtttggaaagtttggagttatatattatgatattaaccagatcatttctacagctgtaatgacctatacgaagcactttgatgctcatggccgtatcaaggagattcaatatgagatattcaggtcgctcatgtactggattacaattcagtatgataacatgggtcgggtaaccaagagagagattaaaatagggccctttgccaacaccaccaaatatgcttatgaatatgatgttgatggacagctccaaacagtttacctcaatgaaaagataatgtggcggtacaactacgatctgaatggaaacctccatttactgaacccaagtaacagtgcgcgtctgacaccccttcgctatgacctgcgagacagaatcactcgactgggtgatgttcaatatcggttggatgaagatggtttcctacgtcaaaggggcacggaaatctttgaatatagctccaaggggcttctaactcgagtttacagtaaaggcagtggctggacagtgatctaccgttatgacggcctgggaaggcgtgtttctagcaaaaccagtctaggacagcacctgcagtttttttatgctgacttaacttatcccactaggattactcatgtctacaaccattcgagttcagaaattacctccctgtattatgatctccaaggacatctttttgccatggaaatcagcagtggggatgaattctatattgcatcggataacacagggacaccactggctgtgttcagtagcaatgggcttatgctgaaacagattcagtacactgcatatggggaaatctattttgactctaatattgactttcaactggtaattggatttcatggtggcctgtatgacccactcaccaaattaatccactttggagaaagagattatgacattttggcaggacggtggacaacacctgacatagaaatctggaaaagaattgggaaggacccagctccttttaacttgtacatgtttaggaataacaaccctgcaagcaaaatccatgacgtgaaagattacatcacagatgttaacagctggctggtgacatttggtttccatctgcacaatgctattcctggattccctgttcccaaatttgatttaacagaaccttcttacgaacttgtgaagagtcagcagtgggatgatataccgcccatcttcggagtccagcagcaagtggcgcggcaggccaaggccttcctgtcgctggggaagatggccgaggtgcaggtgagccggcgccgggccggcggcgcgcagtcctggctgtggttcgccacggtcaagtcgctgatcggcaagggcgtcatgctggccgtcagccagggccgcgtgcagaccaacgtgctcaacatcgccaacgaggactgcatcaaggtggcggccgtgctcaacaacgccttctacctggagaacctgcacttcaccatcgagggcaaggacacgcactacttcatcaagaccaccacgcccgagagcgacctgggcacgctgcggttgaccagcggccgcaaggcgctggagaacggcatcaacgtgacggtgtcgcagtccaccacggtggtgaacggcaggacgcgcaggttcgcggacgtggagatgcagttcggcgcgctggcgctgcacgtgcgctacggcatgaccctggacgaggagaaggcgcgcatcctggagcaggcgcggcagcgcgcgctcgcccgggcctgggcgcgcgagcagcagcgcgtgcgcgacggcgaggagggcgcgcgcctctggacggagggcgagaagcggcagctgctgagcgccggcaaggtgcagggctacgacgggtactacgtactctcggtggagcagtaccccgagctggccgacagcgccaacaacatccagttcctgcggcagagcgagatcggcaggaggtaacgcccgggccgcgcccgccgagccgctcacgccctgcccacattgtcctgtggcacaacccgagtgggactctccaacgcccaagagccttcctcccgggggaatgagactgctgttacgacccacacccacaccgcgaaaacaaggaccgcttttttccgaatgaccttaaaggtgatcggctttaacgaatatgtttacatatgcatagcgctgcactcagtcggactgaacgtagccagaggaaaaaaaaatcatcaaggacaaaggcctcgacctgttgcgctgggccgtctgttccttctaggcactgtatttaactaactttaaaaaagaaaaaaaaatgtatacagtgtttccaaatagtcccgaattgtcgacctttgcttacaagaagtagtctgtctgcataggatgtgatagctatctctgttcattttacaatgtggggcaaagttactgtttctagacaacccaactgctttccctgtgcagctttgtagaaggacattggcacagtgacttctgcggcggggatttattaatggattttacaatgctaacgtggtttcccttcggggaaaaaactggcaactagaatccttgtcactgataagcaaaggaaatcctgatttttttgtaaattatgtgagacaagttgtttatggatttttatatgaattacaatttactgtacatcaaatcttagtctcagaggagttaatttatgtaaagtgtttaaaaatttatacttaaaaataaaatgataaaaacgtgaactgtgtgatttttttaaaaggattgcaccttttgttatctgttatagctgtacagtatgaattattatattgtagagatataacaacttatgcctataatgtccagaagtgttaatatttttgtattaggttgaaaaaatgtgcaagcttctatcactagatggataggaccgtgcaattctaggtgggtggcgaatcagagagctcctttctcttccctctctcacgcatcaggccagtgtcctcagcattgtcaactgagaggcacagtagacaactagggctggtggaatgtaagggaagaagattgaaaaaacgggaggaagggttctctggccctctctcaaccttgcaagtcaatggggagttgttgatataattaaccccgaggtttttactgttactgttccaaagctctgtctcttgatgggaggagagaccacatcagatgctggggaaataggaggaggaaaggttctgatgtagtcgtgatcctaaacacgtgtcttaagatctaggaaagacagcagaaaccgagcagtggtgggtgagccagatggagccggtcagggttactctaagcccacatgaccaaaccatcttggggggctggtttgaatgacagcctctgctctgtctcggggaagccgggggtggcagatccagctggaagtgaactgacagccgcgccctcctgcacacatgcatgcacgcgtgtgggaacgagcccagccgccatctgcacttccgtgtcggctcagctctgacaaatctctttcctgagcactaaattcagccacgaaaatatttttagaagatatttctcagttcatcgagctatagtacacactgttttcctctatgtataatggtgataaaatatagcaagtgaacatgtcgtaaatataaaggttcaagtgatgtattgaaaataattttctaactgctttgtatgtatcacatactctaaattgcacagtaggcgtgtttattaaacagatgattggctgggaaagtttcaaaatagctactgaatttacagtatcagtgctattactgtctttgtgtatttggtagagcataccgaagtaattaatcttctaatgaatgctgatgatattttattagaatgaaagcacagattagcattaatattttttattctggaaatcctttggcaagtattatgaagcccaaatttagaaaactatgagatttcaaaccacataaacatgattctgttttccattttattttttaactgttaggtatttgcagttctgttccgtggaacttctgcaggcctgtatttagcatgctgtaagtacttttgggtgaaataggctctgagtctaaattctcagacatgtttctgatgtattaccatgaaaagcttgtgccacatgacagaagtgagatcatagtcttaacctcttcttgacgtggactggtcttcactcgggcaccgataaataacagatttggagtatctcctggtgcttattttagatgatgaagtcaaatcaacccaattagtgtcctgttagtaggtataatgagcctatttctttctaaaaagacttgtgatctggacatgcttttacaagaaatagtgaccttggggaatatgtaaacaaaagacctttttctaagagttgggagggggtgggggactgtataatgaaaagaattagcttacaaaaaagaaattgatattcaaagtattttaggcaaagccagtcaaaatgctttcatgatattttgagatgtaaattttgtctgatttgtattgttcttttcatttgccttcttaactttatatgtgacctgaattttccataacttgatgactatagattgcacctaggcattccaataaaagccaacccaatgtgtgtgtgttt

SEQ ID NO: 735839 - DNA, 447 bp, Homo sapiens
ttctttcttcagacgacaccatcatttttgaaattttctctggtgctgcatggggacatggacaaggctatcacagtggacattgagtcatctagccgagaagaagatgtcagcatcacttcaaatctgtcctcgatcgattctttctacaccatggttcaaggtaaacacgaaagcatcattttaaacaagtaccaccagcacccagacagaatgcggcaacacccactttccaaggtgaaccagaaaagggaaggtgaaaatgtaaacctctagaaatattggtgacataatctacagtgtacatgtaatatttatttacttgtatagacatattttaaaaccacatataagataatctgtcatccttggaatagtgtctgtttccattcccatgtattaaaacaacttcattccagcccttcacatgcatcatcaggcgatttt

SEQ ID NO: 735840 - DNA, 3196 bp, Homo sapiens
  misc_feature (434)..(434): n is a, c, g, or t
  misc_feature (1163)..(1163): n is a, c, g, or t
gccagaatcagccctattgtcggggactgccggatcctcaggacatcattagccaaagccttcaatcgccttctcagcaagctgccaaatccttttatgatcgaatcagtttccttataggatctgatagcacccatgttatacctggagaaagtcctttcaataagagccttgcatctgtcatcagaggccaagtactgactgctgatggaactccacttattggagtaaatgtctcgtttttccattacccagaatatggatatactattacccgccaggacggaatgtttgacttggtggcaaatggtggggcctctctaactttggtatttgaacgatccccattcctcactcagtatcatactgtgtggattccatggaatgtcttttatgtgatggataccctagtcatgaagaaagaagagaatganattcccagctgtgatctgagtggattcgtgaggccaaatcccatcattgtgtcatcacctttatccacctttttcagatcttctcctgaagacagtcccatcattcccgaaacacaggtactccacgaggaaactacaattccaggaacagatttgaaactctcctacttgagttccagagctgcagggtataagtcagttctcaagatcaccatgacccagtctattattccatttaatttaatgaaggttcatcttatggtagctgtagtaggaagactcttccaaaagtggtttcctgcctcaccaaacttggcctatactttcatatgggataaaacagatgcatataatcagaaagtctatggtctatctgaagctgttgtgtcagttggatatgagtatgagtcgtgtttggacctgactctgtgggaaaagaggactgccattctgcagggctatgaattggatgcgtccaacatgggtggctggacattagataaacatcacgtgctggatgtacagaacggtatactgtacaagggaaacggggaaaaccagttcatctcccagcagcctccagtcgtgagtagcatcatgggcaatgggcgaaggcgcagcatttcctgccccagttgcaatggtcaagctgatggtaacaagttactggccccagtggcgctagcttgtgggatcgatggcagtctgtacgtaggcgatttcaactangtgcggcggatattcccttctggaaatgtaacaagtgtcttagaactaagaaataaagattttagacatagcagcaacccagctcatagatactaccttgcaacggatccagtcacgggagatctgtacgtttctgacacaaacacccgcagaatttatcgcccaaagtcacttacgggggcaaaagacttgactaaaaatgcagaagtcgtcgcagggacaggggagcaatgccttccgtttgacgaggcgagatgtggggatggagggaaggccgtggaagccacactcatgagtcccaaaggaatggcagttgataagaatggattaatctactttgttgatggaaccatgattaggaaagttgaccaaaatggaatcatatcaactcttctgggctctaacgatttgacttcagccagacctttaacttgtgacaccagcatgcacatcagccaggtacgtctggaatggcccactgacctagccattaaccctatggataactccatttatgtcctggataataatgtagttttacagatcactgaaaatcgtcaagttcgcattgctgctggacggcccatgcactgtcaggttcccggagtggaatatcctgtggggaagcacgcggtgcagacaacactggaatcagccactgccattgctgtgtcctacagtggggtcctgtacattactgaaactgatgagaagaaaattaaccggataaggcaggtcacaacagatggagaaatctccttagtggccggaataccttcagagtgtgactgcaaaaatgatgccaactgtgactgttaccagagtggagatggctacgccaaggatgccaaactcagtgccccatcctccctggctgcttctccagatggtacactgtatattgcagatctagggaatatccggatccgggctgtgtcaaagaataagcctttacttaactctatgaacttctatgaagttgcgtctccaactgatcaagaactctacatctttgacatcaatggtactcaccaatatactgtaagtttagtcactggtgattacctttacaattttagctacagcaatgacaatgatattactgctgtgacagacagcaatggcaacacccttagaattagacgggacccaaatcgcatgccagttcgagtggtgtctcctgataaccaagtgatatggttgacaataggaacaaatggatgtttgaaaagcatgactgctcaaggactggaattagttttgtttacttaccatggcaatagtggccttttagccactaaaagtgatgaaactggatggacaacgttttttgagtaagtatatgaaaattctactctgattataaaatactgtgatataataatatcatctataataacaatataatcttaagagctggaggattccatgtttttgagagtctagagcttctgtaatttttggatcccggctgggcacggtggctcattcccgtagtctcagctcctggggaggctgagacgggaggattgcttgagcccaggacttcgaggccacagtgagctatgattgtgccactgcactccaggctgagtgacagagccagaacgtatctctaaagaaaaaaaaatggccgggcgcagtggctcacgcctgtaatcccagcactttgggaggccgaggcgggcggatcacgaggtcagaagatcgagaccatcctggataacacggtgaaacccccgtctctactaaaaatacaaaaaaaatagccgggcgtggtggcgggcgcctgtagtcccagctactcgggaggctgaggcaggagaatggcgtgaacccgggaggcgcagcttgcagtgagccgagatcgcgccactgcactccagtctctgggcgacagagcgagactccgcctcaaaaaaaaaaagatacctctttctgagaaagaagacaaaattgcaagatacaagatgtagggccttggaaagggaagggactcgtgtaagggagaagcccaaagcttaagtttcagt

SEQ ID NO: 735841 - DNA, 8388 bp, Homo sapiens
  misc_feature (434)..(434): n is a, c, g, or t
  misc_feature (1163)..(1163): n is a, c, g, or t
gccagaatcagccctattgtcggggactgccggatcctcaggacatcattagccaaagccttcaatcgccttctcagcaagctgccaaatccttttatgatcgaatcagtttccttataggatctgatagcacccatgttatacctggagaaagtcctttcaataagagccttgcatctgtcatcagaggccaagtactgactgctgatggaactccacttattggagtaaatgtctcgtttttccattacccagaatatggatatactattacccgccaggacggaatgtttgacttggtggcaaatggtggggcctctctaactttggtatttgaacgatccccattcctcactcagtatcatactgtgtggattccatggaatgtcttttatgtgatggataccctagtcatgaagaaagaagagaatganattcccagctgtgatctgagtggattcgtgaggccaaatcccatcattgtgtcatcacctttatccacctttttcagatcttctcctgaagacagtcccatcattcccgaaacacaggtactccacgaggaaactacaattccaggaacagatttgaaactctcctacttgagttccagagctgcagggtataagtcagttctcaagatcaccatgacccagtctattattccatttaatttaatgaaggttcatcttatggtagctgtagtaggaagactcttccaaaagtggtttcctgcctcaccaaacttggcctatactttcatatgggataaaacagatgcatataatcagaaagtctatggtctatctgaagctgttgtgtcagttggatatgagtatgagtcgtgtttggacctgactctgtgggaaaagaggactgccattctgcagggctatgaattggatgcgtccaacatgggtggctggacattagataaacatcacgtgctggatgtacagaacggtatactgtacaagggaaacggggaaaaccagttcatctcccagcagcctccagtcgtgagtagcatcatgggcaatgggcgaaggcgcagcatttcctgccccagttgcaatggtcaagctgatggtaacaagttactggccccagtggcgctagcttgtgggatcgatggcagtctgtacgtaggcgatttcaactangtgcggcggatattcccttctggaaatgtaacaagtgtcttagaactaagaaataaagattttagacatagcagcaacccagctcatagatactaccttgcaacggatccagtcacgggagatctgtacgtttctgacacaaacacccgcagaatttatcgcccaaagtcacttacgggggcaaaagacttgactaaaaatgcagaagtcgtcgcagggacaggggagcaatgccttccgtttgacgaggcgagatgtggggatggagggaaggccgtggaagccacactcatgagtcccaaaggaatggcagttgataagaatggattaatctactttgttgatggaaccatgattaggaaagttgaccaaaatggaatcatatcaactcttctgggctctaacgatttgacttcagccagacctttaacttgtgacaccagcatgcacatcagccaggtacgtctggaatggcccactgacctagccattaaccctatggataactccatttatgtcctggataataatgtagttttacagatcactgaaaatcgtcaagttcgcattgctgctggacggcccatgcactgtcaggttcccggagtggaatatcctgtggggaagcacgcggtgcagacaacactggaatcagccactgccattgctgtgtcctacagtggggtcctgtacattactgaaactgatgagaagaaaattaaccggataaggcaggtcacaacagatggagaaatctccttagtggccggaataccttcagagtgtgactgcaaaaatgatgccaactgtgactgttaccagagtggagatggctacgccaaggatgccaaactcagtgccccatcctccctggctgcttctccagatggtacactgtatattgcagatctagggaatatccggatccgggctgtgtcaaagaataagcctttacttaactctatgaacttctatgaagttgcgtctccaactgatcaagaactctacatctttgacatcaatggtactcaccaatatactgtaagtttagtcactggtgattacctttacaattttagctacagcaatgacaatgatattactgctgtgacagacagcaatggcaacacccttagaattagacgggacccaaatcgcatgccagttcgagtggtgtctcctgataaccaagtgatatggttgacaataggaacaaatggatgtttgaaaagcatgactgctcaaggactggaattagttttgtttacttaccatggcaatagtggccttttagccactaaaagtgatgaaactggatggacaacgttttttgactatgacagtgaaggtcgtctgacaaatgttacgtttccaactggagtggtcacaaacctgcatggggacatggacaaggctatcacagtggacattgagtcatctagccgagaagaagatgtcagcatcacttcaaatctgtcctcgatcgattctttctacaccatggttcaagatcagttaagaaacagctaccagattggttatgacggctccctcagaattatctacgccagtggcctggactcacactaccaaacagagccgcacgttctggctggcaccgctaatccgacggttgccaaaagaaacatgactttgcctggcgagaacggtcaaaacttggtggaatggagattccgaaaagagcaagcccaagggaaagtcaatgtctttggccgcaagctcagggttaatggcagaaacctcctttcagttgactttgatcgaacaacaaagacagaaaagatctatgacgaccaccgtaaatttctactgaggatcgcctacgacacgtctgggcacccgactctctggctgccaagcagcaagctgatggccgtcaatgtcacctattcatccacaggtcaaattgccagcatccagcgaggcaccactagcgagaaagtagattatgacggacaggggaggatcgtgtctcgggtctttgctgatggtaaaacatggagttacacatatttagaaaagtccatggttcttctgcttcatagccagcggcagtacatcttcgaatacgatatgtgggaccgcctgtctgccatcaccatgcccagtgtggctcgccacaccatgcagaccatccgatccattggctactaccgcaacatatacaaccccccggaaagcaacgcctccatcatcacggactacaacgaggaagggctgcttctacaaacagctttcttgggtacaagtcggagggtcttattcaaatacagaaggcagactaggctctcagaaattttatatgatagcacaagagtcagttttacctatgatgaaacagcaggagtcctaaagacagtaaacctccagagtgatggttttatttgcaccattagatacaggcaaattggtcccctgattgacaggcagattttccgctttagtgaagatgggatggtaaatgcaagatttgactatagctatgacaacagctttcgagtgaccagcatgcagggtgtgatcaatgaaacgccactgcctattgatctgtatcagtttgatgacatttctggcaaagttgagcagtttggaaagtttggagttatatattatgatattaaccagatcatttctacagctgtaatgacctatacgaagcactttgatgctcatggccgtatcaaggagattcaatatgagatattcaggtcgctcatgtactggattacaattcagtatgataacatgggtcgggtaaccaagagagagattaaaatagggccctttgccaacaccaccaaatatgcttatgaatatgatgttgatggacagctccaaacagtttacctcaatgaaaagataatgtggcggtacaactacgatctgaatggaaacctccatttactgaacccaagtaacagtgcgcgtctgacaccccttcgctatgacctgcgagacagaatcactcgactgggtgatgttcaatatcggttggatgaagatggtttcctacgtcaaaggggcacggaaatctttgaatatagctccaaggggcttctaactcgagtttacagtaaaggcagtggctggacagtgatctaccgttatgacggcctgggaaggcgtgtttctagcaaaaccagtctaggacagcacctgcagtttttttatgctgacttaacttatcccactaggattactcatgtctacaaccattcgagttcagaaattacctccctgtattatgatctccaaggacatctttttgccatggaaatcagcagtggggatgaattctatattgcatcggataacacagggacaccactggctgtgttcagtagcaatgggcttatgctgaaacagattcagtacactgcatatggggaaatctattttgactctaatattgactttcaactggtaattggatttcatggtggcctgtatgacccactcaccaaattaatccactttggagaaagagattatgacattttggcaggacggtggacaacacctgacatagaaatctggaaaagaattgggaaggacccagctccttttaacttgtacatgtttaggaataacaaccctgcaagcaaaatccatgacgtgaaagattacatcacagatgttaacagctggctggtgacatttggtttccatctgcacaatgctattcctggattccctgttcccaaatttgatttaacagaaccttcttacgaacttgtgaagagtcagcagtgggatgatataccgcccatcttcggagtccagcagcaagtggcgcggcaggccaaggccttcctgtcgctggggaagatggccgaggtgcaggtgagccggcgccgggccggcggcgcgcagtcctggctgtggttcgccacggtcaagtcgctgatcggcaagggcgtcatgctggccgtcagccagggccgcgtgcagaccaacgtgctcaacatcgccaacgaggactgcatcaaggtggcggccgtgctcaacaacgccttctacctggagaacctgcacttcaccatcgagggcaaggacacgcactacttcatcaagaccaccacgcccgagagcgacctgggcacgctgcggttgaccagcggccgcaaggcgctggagaacggcatcaacgtgacggtgtcgcagtccaccacggtggtgaacggcaggacgcgcaggttcgcggacgtggagatgcagttcggcgcgctggcgctgcacgtgcgctacggcatgaccctggacgaggagaaggcgcgcatcctggagcaggcgcggcagcgcgcgctcgcccgggcctgggcgcgcgagcagcagcgcgtgcgcgacggcgaggagggcgcgcgcctctggacggagggcgagaagcggcagctgctgagcgccggcaaggtgcagggctacgacgggtactacgtactctcggtggagcagtaccccgagctggccgacagcgccaacaacatccagttcctgcggcagagcgagatcggcaggaggtaacgcccgggccgcgcccgccgagccgctcacgccctgcccacattgtcctgtggcacaacccgagtgggactctccaacgcccaagagccttcctcccgggggaatgagactgctgttacgacccacacccacaccgcgaaaacaaggaccgcttttttccgaatgaccttaaaggtgatcggctttaacgaatatgtttacatatgcatagcgctgcactcagtcggactgaacgtagccagaggaaaaaaaaatcatcaaggacaaaggcctcgacctgttgcgctgggccgtctgttccttctaggcactgtatttaactaactttaaaaaagaaaaaaaaatgtatacagtgtttccaaatagtcccgaattgtcgacctttgcttacaagaagtagtctgtctgcataggatgtgatagctatctctgttcattttacaatgtggggcaaagttactgtttctagacaacccaactgctttccctgtgcagctttgtagaaggacattggcacagtgacttctgcggcggggatttattaatggattttacaatgctaacgtggtttcccttcggggaaaaaactggcaactagaatccttgtcactgataagcaaaggaaatcctgatttttttgtaaattatgtgagacaagttgtttatggatttttatatgaattacaatttactgtacatcaaatcttagtctcagaggagttaatttatgtaaagtgtttaaaaatttatacttaaaaataaaatgataaaaacgtgaactgtgtgatttttttaaaaggattgcaccttttgttatctgttatagctgtacagtatgaattattatattgtagagatataacaacttatgcctataatgtccagaagtgttaatatttttgtattaggttgaaaaaatgtgcaagcttctatcactagatggataggaccgtgcaattctaggtgggtggcgaatcagagagctcctttctcttccctctctcacgcatcaggccagtgtcctcagcattgtcaactgagaggcacagtagacaactagggctggtggaatgtaagggaagaagattgaaaaaacgggaggaagggttctctggccctctctcaaccttgcaagtcaatggggagttgttgatataattaaccccgaggtttttactgttactgttccaaagctctgtctcttgatgggaggagagaccacatcagatgctggggaaataggaggaggaaaggttctgatgtagtcgtgatcctaaacacgtgtcttaagatctaggaaagacagcagaaaccgagcagtggtgggtgagccagatggagccggtcagggttactctaagcccacatgaccaaaccatcttggggggctggtttgaatgacagcctctgctctgtctcggggaagccgggggtggcagatccagctggaagtgaactgacagccgcgccctcctgcacacatgcatgcacgcgtgtgggaacgagcccagccgccatctgcacttccgtgtcggctcagctctgacaaatctctttcctgagcactaaattcagccacgaaaatatttttagaagatatttctcagttcatcgagctatagtacacactgttttcctctatgtataatggtgataaaatatagcaagtgaacatgtcgtaaatataaaggttcaagtgatgtattgaaaataattttctaactgctttgtatgtatcacatactctaaattgcacagtaggcgtgtttattaaacagatgattggctgggaaagtttcaaaatagctactgaatttacagtatcagtgctattactgtctttgtgtatttggtagagcataccgaagtaattaatcttctaatgaatgctgatgatattttattagaatgaaagcacagattagcattaatattttttattctggaaatcctttggcaagtattatgaagcccaaatttagaaaactatgagatttcaaaccacataaacatgattctgttttccattttattttttaactgttaggtatttgcagttctgttccgtggaacttctgcaggcctgtatttagcatgctgtaagtacttttgggtgaaataggctctgagtctaaattctcagacatgtttctgatgtattaccatgaaaagcttgtgccacatgacagaagtgagatcatagtcttaacctcttcttgacgtggactggtcttcactcgggcaccgataaataacagatttggagtatctcctggtgcttattttagatgatgaagtcaaatcaacccaattagtgtcctgttagtaggtataatgagcctatttctttctaaaaagacttgtgatctggacatgcttttacaagaaatagtgaccttggggaatatgtaaacaaaagacctttttctaagagttgggagggggtgggggactgtataatgaaaagaattagcttacaaaaaagaaattgatattcaaagtattttaggcaaagccagtcaaaatgctttcatgatattttgagatgtaaattttgtctgatttgtattgttcttttcatttgccttcttaactttatatgtgacctgaattttccataacttgatgactatagattgcacctaggcattccaataaaagccaacccaatgtgtgtgtgttt

SEQ ID NO: 735842 - DNA, 5612 bp, Homo sapiens
  misc_feature (434)..(434): n is a, c, g, or t
  misc_feature (1163)..(1163): n is a, c, g, or t
gccagaatcagccctattgtcggggactgccggatcctcaggacatcattagccaaagccttcaatcgccttctcagcaagctgccaaatccttttatgatcgaatcagtttccttataggatctgatagcacccatgttatacctggagaaagtcctttcaataagagccttgcatctgtcatcagaggccaagtactgactgctgatggaactccacttattggagtaaatgtctcgtttttccattacccagaatatggatatactattacccgccaggacggaatgtttgacttggtggcaaatggtggggcctctctaactttggtatttgaacgatccccattcctcactcagtatcatactgtgtggattccatggaatgtcttttatgtgatggataccctagtcatgaagaaagaagagaatganattcccagctgtgatctgagtggattcgtgaggccaaatcccatcattgtgtcatcacctttatccacctttttcagatcttctcctgaagacagtcccatcattcccgaaacacaggtactccacgaggaaactacaattccaggaacagatttgaaactctcctacttgagttccagagctgcagggtataagtcagttctcaagatcaccatgacccagtctattattccatttaatttaatgaaggttcatcttatggtagctgtagtaggaagactcttccaaaagtggtttcctgcctcaccaaacttggcctatactttcatatgggataaaacagatgcatataatcagaaagtctatggtctatctgaagctgttgtgtcagttggatatgagtatgagtcgtgtttggacctgactctgtgggaaaagaggactgccattctgcagggctatgaattggatgcgtccaacatgggtggctggacattagataaacatcacgtgctggatgtacagaacggtatactgtacaagggaaacggggaaaaccagttcatctcccagcagcctccagtcgtgagtagcatcatgggcaatgggcgaaggcgcagcatttcctgccccagttgcaatggtcaagctgatggtaacaagttactggccccagtggcgctagcttgtgggatcgatggcagtctgtacgtaggcgatttcaactangtgcggcggatattcccttctggaaatgtaacaagtgtcttagaactaagaaataaagattttagacatagcagcaacccagctcatagatactaccttgcaacggatccagtcacgggagatctgtacgtttctgacacaaacacccgcagaatttatcgcccaaagtcacttacgggggcaaaagacttgactaaaaatgcagaagtcgtcgcagggacaggggagcaatgccttccgtttgacgaggcgagatgtggggatggagggaaggccgtggaagccacactcatgagtcccaaaggaatggcagttgataagaatggattaatctactttgttgatggaaccatgattaggaaagttgaccaaaatggaatcatatcaactcttctgggctctaacgatttgacttcagccagacctttaacttgtgacaccagcatgcacatcagccaggtacgtctggaatggcccactgacctagccattaaccctatggataactccatttatgtcctggataataatgtagttttacagatcactgaaaatcgtcaagttcgcattgctgctggacggcccatgcactgtcaggttcccggagtggaatatcctgtggggaagcacgcggtgcagacaacactggaatcagccactgccattgctgtgtcctacagtggggtcctgtacattactgaaactgatgagaagaaaattaaccggataaggcaggtcacaacagatggagaaatctccttagtggccggaataccttcagagtgtgactgcaaaaatgatgccaactgtgactgttaccagagtggagatggctacgccaaggatgccaaactcagtgccccatcctccctggctgcttctccagatggtacactgtatattgcagatctagggaatatccggatccgggctgtgtcaaagaataagcctttacttaactctatgaacttctatgaagttgcgtctccaactgatcaagaactctacatcccatcttcggagtccagcagcaagtggcgcggcaggccaaggccttcctgtcgctggggaagatggccgaggtgcaggtgagccggcgccgggccggcggcgcgcagtcctggctgtggttcgccacggtcaagtcgctgatcggcaagggcgtcatgctggccgtcagccagggccgcgtgcagaccaacgtgctcaacatcgccaacgaggactgcatcaaggtggcggccgtgctcaacaacgccttctacctggagaacctgcacttcaccatcgagggcaaggacacgcactacttcatcaagaccaccacgcccgagagcgacctgggcacgctgcggttgaccagcggccgcaaggcgctggagaacggcatcaacgtgacggtgtcgcagtccaccacggtggtgaacggcaggacgcgcaggttcgcggacgtggagatgcagttcggcgcgctggcgctgcacgtgcgctacggcatgaccctggacgaggagaaggcgcgcatcctggagcaggcgcggcagcgcgcgctcgcccgggcctgggcgcgcgagcagcagcgcgtgcgcgacggcgaggagggcgcgcgcctctggacggagggcgagaagcggcagctgctgagcgccggcaaggtgcagggctacgacgggtactacgtactctcggtggagcagtaccccgagctggccgacagcgccaacaacatccagttcctgcggcagagcgagatcggcaggaggtaacgcccgggccgcgcccgccgagccgctcacgccctgcccacattgtcctgtggcacaacccgagtgggactctccaacgcccaagagccttcctcccgggggaatgagactgctgttacgacccacacccacaccgcgaaaacaaggaccgcttttttccgaatgaccttaaaggtgatcggctttaacgaatatgtttacatatgcatagcgctgcactcagtcggactgaacgtagccagaggaaaaaaaaatcatcaaggacaaaggcctcgacctgttgcgctgggccgtctgttccttctaggcactgtatttaactaactttaaaaaagaaaaaaaaatgtatacagtgtttccaaatagtcccgaattgtcgacctttgcttacaagaagtagtctgtctgcataggatgtgatagctatctctgttcattttacaatgtggggcaaagttactgtttctagacaacccaactgctttccctgtgcagctttgtagaaggacattggcacagtgacttctgcggcggggatttattaatggattttacaatgctaacgtggtttcccttcggggaaaaaactggcaactagaatccttgtcactgataagcaaaggaaatcctgatttttttgtaaattatgtgagacaagttgtttatggatttttatatgaattacaatttactgtacatcaaatcttagtctcagaggagttaatttatgtaaagtgtttaaaaatttatacttaaaaataaaatgataaaaacgtgaactgtgtgatttttttaaaaggattgcaccttttgttatctgttatagctgtacagtatgaattattatattgtagagatataacaacttatgcctataatgtccagaagtgttaatatttttgtattaggttgaaaaaatgtgcaagcttctatcactagatggataggaccgtgcaattctaggtgggtggcgaatcagagagctcctttctcttccctctctcacgcatcaggccagtgtcctcagcattgtcaactgagaggcacagtagacaactagggctggtggaatgtaagggaagaagattgaaaaaacgggaggaagggttctctggccctctctcaaccttgcaagtcaatggggagttgttgatataattaaccccgaggtttttactgttactgttccaaagctctgtctcttgatgggaggagagaccacatcagatgctggggaaataggaggaggaaaggttctgatgtagtcgtgatcctaaacacgtgtcttaagatctaggaaagacagcagaaaccgagcagtggtgggtgagccagatggagccggtcagggttactctaagcccacatgaccaaaccatcttggggggctggtttgaatgacagcctctgctctgtctcggggaagccgggggtggcagatccagctggaagtgaactgacagccgcgccctcctgcacacatgcatgcacgcgtgtgggaacgagcccagccgccatctgcacttccgtgtcggctcagctctgacaaatctctttcctgagcactaaattcagccacgaaaatatttttagaagatatttctcagttcatcgagctatagtacacactgttttcctctatgtataatggtgataaaatatagcaagtgaacatgtcgtaaatataaaggttcaagtgatgtattgaaaataattttctaactgctttgtatgtatcacatactctaaattgcacagtaggcgtgtttattaaacagatgattggctgggaaagtttcaaaatagctactgaatttacagtatcagtgctattactgtctttgtgtatttggtagagcataccgaagtaattaatcttctaatgaatgctgatgatattttattagaatgaaagcacagattagcattaatattttttattctggaaatcctttggcaagtattatgaagcccaaatttagaaaactatgagatttcaaaccacataaacatgattctgttttccattttattttttaactgttaggtatttgcagttctgttccgtggaacttctgcaggcctgtatttagcatgctgtaagtacttttgggtgaaataggctctgagtctaaattctcagacatgtttctgatgtattaccatgaaaagcttgtgccacatgacagaagtgagatcatagtcttaacctcttcttgacgtggactggtcttcactcgggcaccgataaataacagatttggagtatctcctggtgcttattttagatgatgaagtcaaatcaacccaattagtgtcctgttagtaggtataatgagcctatttctttctaaaaagacttgtgatctggacatgcttttacaagaaatagtgaccttggggaatatgtaaacaaaagacctttttctaagagttgggagggggtgggggactgtataatgaaaagaattagcttacaaaaaagaaattgatattcaaagtattttaggcaaagccagtcaaaatgctttcatgatattttgagatgtaaattttgtctgatttgtattgttcttttcatttgccttcttaactttatatgtgacctgaattttccataacttgatgactatagattgcacctaggcattccaataaaagccaacccaatgtgtgtgtgttt

SEQ ID NO: 735843 - DNA, 2437 bp, Homo sapiens
  misc_feature (434)..(434): n is a, c, g, or t
  misc_feature (1163)..(1163): n is a, c, g, or t
  misc_feature (1923)..(1923): n is a, c, g, or t
gccagaatcagccctattgtcggggactgccggatcctcaggacatcattagccaaagccttcaatcgccttctcagcaagctgccaaatccttttatgatcgaatcagtttccttataggatctgatagcacccatgttatacctggagaaagtcctttcaataagagccttgcatctgtcatcagaggccaagtactgactgctgatggaactccacttattggagtaaatgtctcgtttttccattacccagaatatggatatactattacccgccaggacggaatgtttgacttggtggcaaatggtggggcctctctaactttggtatttgaacgatccccattcctcactcagtatcatactgtgtggattccatggaatgtcttttatgtgatggataccctagtcatgaagaaagaagagaatganattcccagctgtgatctgagtggattcgtgaggccaaatcccatcattgtgtcatcacctttatccacctttttcagatcttctcctgaagacagtcccatcattcccgaaacacaggtactccacgaggaaactacaattccaggaacagatttgaaactctcctacttgagttccagagctgcagggtataagtcagttctcaagatcaccatgacccagtctattattccatttaatttaatgaaggttcatcttatggtagctgtagtaggaagactcttccaaaagtggtttcctgcctcaccaaacttggcctatactttcatatgggataaaacagatgcatataatcagaaagtctatggtctatctgaagctgttgtgtcagttggatatgagtatgagtcgtgtttggacctgactctgtgggaaaagaggactgccattctgcagggctatgaattggatgcgtccaacatgggtggctggacattagataaacatcacgtgctggatgtacagaacggtatactgtacaagggaaacggggaaaaccagttcatctcccagcagcctccagtcgtgagtagcatcatgggcaatgggcgaaggcgcagcatttcctgccccagttgcaatggtcaagctgatggtaacaagttactggccccagtggcgctagcttgtgggatcgatggcagtctgtacgtaggcgatttcaactangtgcggcggatattcccttctggaaatgtaacaagtgtcttagaactaagaaataaagattttagacatagcagcaacccagctcatagatactaccttgcaacggatccagtcacgggagatctgtacgtttctgacacaaacacccgcagaatttatcgcccaaagtcacttacgggggcaaaagacttgactaaaaatgcagaagtcgtcgcagggacaggggagcaatgccttccgtttgacgaggcgagatgtggggatggagggaaggccgtggaagccacactcatgagtcccaaaggaatggcagttgataagaatggattaatctactttgttgatggaaccatgattaggaaagttgaccaaaatggaatcatatcaactcttctgggctctaacgatttgacttcagccagacctttaacttgtgacaccagcatgcacatcagccaggtacgtctggaatggcccactgacctagccattaaccctatggataactccatttatgtcctggataataatgtagttttacagatcactgaaaatcgtcaagttcgcattgctgctggacctgccctgtcctcagcacgcgtgtgcaaaagtgaacaataaatcatttcaaagatgaaaaaaaaaaaaaaaaaaaaaaaaaaaaaaaaaaaaaaaaaaaaaaaaaaaaaaaaaaaaaaaaaaaaaaaaaaaaaaaaaaaaaaaaaaaaaaaaaaaaaaaaaaaaaaaaaaaaaaaaaaanggggggggcccccttcaaaatttcccccgaggggccccagtttttcccgatccccccttttttttgtaaaaagggggcccctaaagagggggccctttttaaaaacttggggcttggggccccccttttttaaaacccccggtgatgggaaaaaattggttaaattgggggacttttttggggggagggaaaccttttttttttgggggggggggcaaatttttggggaaaaatattttttcttcgagaaatttttttaacctctccttgggggaaaaattaaaaattttttttttaaggggggaaaaaagggggggaaaaaaaaaaaacggcgcaaaaatttgcttttgccgcttttttaaaaaaaaatttttcccctccccccggggagaataagacattttctggggggaaaaatattttttttcccccccccggggggacccctttgggggactctcccccaaaatttttttttttgggggggaatattttttttaaaaaaatccccccc

SEQ ID NO: 735844 - DNA, 2113 bp, Homo sapiens
tttcctgcatatctcttttgacaagtactttgaagttaaccattttccaattacgttagaattattctgggtagactttccctttgacaatgcacattcttataattaatttcttgcaggatacaaaaattacatagaaaagcaacattttaaaaagacaaaaggggtctcccacgttctttctgtgccctcaccccagtctcatttcaagagagtagtcgctattacccacaatgtcatgccttttcaaatgccagtaattatatgcttaagaagattaaagctttatttgctcagatcttaagtccatgggacttctattagtaactaatcaaaatgatcattactgttagaaggtgggaaatggtagaacattgcttttgaaaactatatttggcaccattaatacaaaggctgggatcgttgtgatgagtgctggtcatgctaaccatgttcccgcatggctggtgattatgtcctgggttgggttctgcacggtagcctgctttgggttagggacagtcacacctggtctgtcctgacttctttctgggccctcctaaccaaaccaggggaggggagaaggacccaattcttttcctttggtgcacgtagcctggacccgttatggacagaggccaaaggaagataacagtgtggtgtccagagatgaaaccaagtggttgatgggcagttctttgagcaaccttgtttatgagcctattgatatgcagatatagaggcatccaatactattgactaatttaaaatcttattcagtgagtcaacactctaaataagcaatggagatggttccattcatttttttgcaagtatcatttttataaacataaatttcctgagatttttgttttcatcttagcctctgtggagctgcttcgtggttatgataagtgctgtgtgatgctcaccttgggaggtctgcgacatatattgaagtcatctctaacctgaagtactgacagactttctggaagaaaaggcttgtaggaggaaacttcagaattctattaaatggtgtaaatgatgaaattatagttgatatatgctagagcatcagtgctgggtattttagaagggatggagtcatcattggctaatgttcccagtgaaggattgagggaggaacattgtgctgaaggatcaacagagtctggatgtgctctgagcaggagcacatgggctttgcaggccacgaaacagcaagagtaaggacaaggtgaacacgataggttgatgcagtgcattaatgctcatgagcggtttagagaagcagtcagagatgagaggatggcagctagctgaaagataaggacagacaatggaagaccttgagtggctggatgtagatcgagtgacattgcataggttgaacaggtgttttatacagttaatgaaatccatttttgttttgttaacttttagcattttttaaaagtatatattgtatataacattcttggtagaaaagttacaaaatgctcattagtaaatagaaaagatgtcaattactcatactaccaccatccagaaatatcactctgaacatgttggcacacatccttcctaacatttttctctacacataacacgtgtgtaagacttttttttgaacaaaaaatagaatcacaaacatgctgatttattttttcccctttattggtctttagctcccaaatgcctcctcacagatacccactgtgatgtgtttgatgtgtgtcctgaacacgcatgcttccttataaaaggtgtgtgtgtgtgtgtatgtgtgtctgtgtgtgtgttttaaagtttacataactcagccgggcacggtggctcacgcctgtaatgccagctgttgggaggccaaggcaggtggatcacttgaggtcaagagtttgagaccagcctggtcaacatggcgaaaccctgtctctactaacaatacaaaaaaaaaaaaattagccaggcatggttgcagacgcctgtaatctcagcttctcaggaggctgaggcaggagaattgcatgaacctaggaggcggaggttgcagtgagccaagatcgcaccactgcactccagcctgggcaacacagcaaggctgtctcaa

SEQ ID NO: 735845 - DNA, 2059 bp, Homo sapiens
tttcctgcatatctcttttgacaagtactttgaagttaaccattttccaattacgttagaattattctgggtagactttccctttgacaatgcacattcttataattaatttcttgcaggatacaaaaattacatagaaaagcaacattttaaaaagacaaaaggggtctcccacgttctttctgtgccctcaccccagtctcatttcaagagagtagtcgctattacccacaatgtcatgccttttcaaatgccagtaattatatgcttaagaagattaaagctttatttgctcagatcttaagtccatgggacttctattagtaactaatcaaaatgatcattactgttagaaggtgggaaatggtagaacattgctttttggtcatgctaaccatgttcccgcatggctggtgattatgtcctgggttgggttctgcacggtagcctgctttgggttagggacagtcacacctggtctgtcctgacttctttctgggccctcctaaccaaaccaggggaggggagaaggacccaattcttttcctttggtgcacgtagcctggacccgttatggacagaggccaaaggaagataacagtgtggtgtccagagatgaaaccaagtggttgatgggcagttctttgagcaaccttgtttatgagcctattgatatgcagatatagaggcatccaatactattgactaatttaaaatcttattcagtgagtcaacactctaaataagcaatggagatggttccattcatttttttgcaagtatcatttttataaacataaatttcctgagatttttgttttcatcttagcctctgtggagctgcttcgtggttatgataagtgctgtgtgatgctcaccttgggaggtctgcgacatatattgaagtcatctctaacctgaagtactgacagactttctggaagaaaaggcttgtaggaggaaacttcagaattctattaaatggtgtaaatgatgaaattatagttgatatatgctagagcatcagtgctgggtattttagaagggatggagtcatcattggctaatgttcccagtgaaggattgagggaggaacattgtgctgaaggatcaacagagtctggatgtgctctgagcaggagcacatgggctttgcaggccacgaaacagcaagagtaaggacaaggtgaacacgataggttgatgcagtgcattaatgctcatgagcggtttagagaagcagtcagagatgagaggatggcagctagctgaaagataaggacagacaatggaagaccttgagtggctggatgtagatcgagtgacattgcataggttgaacaggtgttttatacagttaatgaaatccatttttgttttgttaacttttagcattttttaaaagtatatattgtatataacattcttggtagaaaagttacaaaatgctcattagtaaatagaaaagatgtcaattactcatactaccaccatccagaaatatcactctgaacatgttggcacacatccttcctaacatttttctctacacataacacgtgtgtaagacttttttttgaacaaaaaatagaatcacaaacatgctgatttattttttcccctttattggtctttagctcccaaatgcctcctcacagatacccactgtgatgtgtttgatgtgtgtcctgaacacgcatgcttccttataaaaggtgtgtgtgtgtgtgtatgtgtgtctgtgtgtgtgttttaaagtttacataactcagccgggcacggtggctcacgcctgtaatgccagctgttgggaggccaaggcaggtggatcacttgaggtcaagagtttgagaccagcctggtcaacatggcgaaaccctgtctctactaacaatacaaaaaaaaaaaaattagccaggcatggttgcagacgcctgtaatctcagcttctcaggaggctgaggcaggagaattgcatgaacctaggaggcggaggttgcagtgagccaagatcgcaccactgcactccagcctgggcaacacagcaaggctgtctcaa

SEQ ID NO: 735846 - DNA, 2058 bp, Homo sapiens
tttcctgcatatctcttttgacaagtactttgaagttaaccattttccaattacgttagaattattctgggtagactttccctttgacaatgcacattcttataattaatttcttgcaggatacaaaaattacatagaaaagcaacattttaaaaagacaaaaggggtctcccacgttctttctgtgccctcaccccagtctcatttcaagagagtagtcgctattacccacaatgtcatgccttttcaaatgccagtaattatatgcttaagaagattaaagctttatttgctcagatcttaagtccatgggacttctattagtaactaatcaaaatgatcattactgttagaaggtgggaaatggtagaacattgcttttgaaaactatatttggcaccattaatacaaaggctgggatcgttgtgatgagtgctggtcatgctaaccatgttcccgcatggctggtgattatgtcctgggttgggttctgcacggtagcctgctttgggttagggacagtcacacctggtctgtcctgacttctttctgggccctcctaaccaaaccaggggaggggagaaggacccaattcttttcctttggtgcacgtagcctggacccgttatggacagaggcttctttgagcaaccttgtttatgagcctattgatatgcagatatagaggcatccaatactattgactaatttaaaatcttattcagtgagtcaacactctaaataagcaatggagatggttccattcatttttttgcaagtatcatttttataaacataaatttcctgagatttttgttttcatcttagcctctgtggagctgcttcgtggttatgataagtgctgtgtgatgctcaccttgggaggtctgcgacatatattgaagtcatctctaacctgaagtactgacagactttctggaagaaaaggcttgtaggaggaaacttcagaattctattaaatggtgtaaatgatgaaattatagttgatatatgctagagcatcagtgctgggtattttagaagggatggagtcatcattggctaatgttcccagtgaaggattgagggaggaacattgtgctgaaggatcaacagagtctggatgtgctctgagcaggagcacatgggctttgcaggccacgaaacagcaagagtaaggacaaggtgaacacgataggttgatgcagtgcattaatgctcatgagcggtttagagaagcagtcagagatgagaggatggcagctagctgaaagataaggacagacaatggaagaccttgagtggctggatgtagatcgagtgacattgcataggttgaacaggtgttttatacagttaatgaaatccatttttgttttgttaacttttagcattttttaaaagtatatattgtatataacattcttggtagaaaagttacaaaatgctcattagtaaatagaaaagatgtcaattactcatactaccaccatccagaaatatcactctgaacatgttggcacacatccttcctaacatttttctctacacataacacgtgtgtaagacttttttttgaacaaaaaatagaatcacaaacatgctgatttattttttcccctttattggtctttagctcccaaatgcctcctcacagatacccactgtgatgtgtttgatgtgtgtcctgaacacgcatgcttccttataaaaggtgtgtgtgtgtgtgtatgtgtgtctgtgtgtgtgttttaaagtttacataactcagccgggcacggtggctcacgcctgtaatgccagctgttgggaggccaaggcaggtggatcacttgaggtcaagagtttgagaccagcctggtcaacatggcgaaaccctgtctctactaacaatacaaaaaaaaaaaaattagccaggcatggttgcagacgcctgtaatctcagcttctcaggaggctgaggcaggagaattgcatgaacctaggaggcggaggttgcagtgagccaagatcgcaccactgcactccagcctgggcaacacagcaaggctgtctcaa

SEQ ID NO: 735847 - DNA, 2204 bp, Homo sapiens
aactgttaactgaaggtgactcagggtaactaattctggatctttgggtgcacagcctctcactggagtctgagaggaggaggtggagactatcagtgcacggcccgcaaccaggaaggactcccagactaacgccaaaggtgtgttgggctcagctgctccactgtggaaaaggaaagccctggccctgtggcaggagaggattgttctagtcaagtgtggcgttgcacggacaggcggtgccgagtgtttgggtgcagacacaggcagctgctgccctccacttcctgctcttgcaagtcacagatgattccagtacaatgtgggaggtcctccttacaggggcacttgcaacaggaaggcagagagtttcgtcaattcaggtacaggtctgtctgggagacctggccctgtggaggcaggaacaccgtgcaggggcatggcagcgcctgtctttgctatcacatcatttgccttttccttgtaggacccaaagatctatgtccaaaacttagtccagaaacatctgcattcctgtttaaacttcagctcagtttcttaaccaagaaccacgtcaaccctccagggttgtggtttgtatttttgcctttaagcattatctcctttccaccaagaagcctacttaggtttaacacatgaaagcagtgtcagggaatttttttaacacacagtgtagagcctttgccagagatgttgaaagggagattaaaggcttgagggatgaatttgatcatcattcttaaagtcccttccaatcctgtgattctctgattccctgagtctcgtttattattggacatgcctagcccatcaccagtgacctgcccgcatattgctggcttcccttggataacggagagcctatcaccacatgcctttgttgtcttccatcatatcaagtgagttgctttctggactttttccatctagagcctgctaggtttggttttgagaaaagatggtgaagtttcttttcatgagtttgtagggcaaaaaaaattctttttaaagatggtaagggtggaaattaatcatggtaccatctcattaaaaatagatacctcaaaatgtttacctttacaagtcaagaagagtatctgactttcttggaagtgtcaagaattgcaggttggctgaaaagttagattgagaatctgaccttgttacttatgattcttttttcccttggttctcggggatgcatgagaaggtgagctgtcactcacaaaaaaagggaaaatgatttgaaaaatgtttcacatatacactttttatcattttagtggatggcagccttacgtcagtagtatatgccactatgaagtatggccaaaaccctagcgtcacttgtaaccattgtactcttatggatttgtgtcttacaccatttgccttgctttttaaatgactttgtttttcaaggtgctgtcattttgcaaaaggaaatctttatatgaaatgtacaaaaaccgttactaactggacaacagggaaggtgctggccccacattagtgcctgcccaccgctctacttctaaccagggacacggatcttccattctctacatccaccggactgcagcccaagtctggacctggctgcagtgggcatattaccgtatggatatctttttctttctttttttaaagtgaggagattcttcagggggtcaggctgagaatgtaataagcctgacattggaacagatttctcccgtgtggtctagctggacccctccggcatttgccacactccctgccagtcctgacattgacttcctgaatgtgattaggtggtaatgagcaagaatttcctaggatgttgaaacatctgtatccaggcccccaatcaaatgctgctgaatattgtgaatgtttttactccgctcactttcccactgtgctttcctctaaccaaaatatacgtgtagccattaccaatgtacaactctcaatgcggagttgccgccacggtttaaaataaatctctgtgaaaacctttctgcagctatggtcccatcacggttacatgtggccacgcacacaccgacaaccttgctgtgctgtttagccctgtgggttctgtccagttggtgggagggggaggttccagaccactccacctgctgtctagatgccagggagagctgctgtttggaggtgaagatgagccctgttcacca

SEQ ID NO: 735848 - DNA, 2261 bp, Homo sapiens
aactgttaactgaaggtgactcagggtaactaattctggatctttgggtgcacagcctctcactggagtctgagaggaggaggtggagactatcagtgcacggcccgcaaccaggaaggactcccagactaacgccaaaggtgtgttgggctcagctgctccactgtggaaaaggaaagccctggccctgtggcaggagaggattgttctagtcaagtgtggcgttgcacggacaggcggtgccgagtgtttgggtgcagacacaggcagctgctgccctccacttcctgctcttgcaagtcacagatgattccagtacaatgtgggaggtcctccttacaggggcacttgcaacaggaaggcagagagtttcgtcaattcaggtacaggtctgtctgggagacctggccctgtggaggcaggaacaccgtgcaggggcatggcagcgcctgtctttgctatcacatcatttgccttttccttgtaggacccaaagatctatgtccaaaacttagtccagaaacatctgcattcctgtttaaacttcagctcagtttcttaaccaagaaccacgtcaaccctccagggttgtggtttgtatttttgcctttaagcattatctcctttccaccaagaagcctacttaggtttaacacatgaaagcagtgtctaaaaattagatcggtcctaaattggaatgggatgtcttccttgcatgtcccataccagggaatttttttaacacacagtgtagagcctttgccagagatgttgaaagggagattaaaggcttgagggatgaatttgatcatcattcttaaagtcccttccaatcctgtgattctctgattccctgagtctcgtttattattggacatgcctagcccatcaccagtgacctgcccgcatattgctggcttcccttggataacggagagcctatcaccacatgcctttgttgtcttccatcatatcaagtgagttgctttctggactttttccatctagagcctgctaggtttggttttgagaaaagatggtgaagtttcttttcatgagtttgtagggcaaaaaaaattctttttaaagatggtaagggtggaaattaatcatggtaccatctcattaaaaatagatacctcaaaatgtttacctttacaagtcaagaagagtatctgactttcttggaagtgtcaagaattgcaggttggctgaaaagttagattgagaatctgaccttgttacttatgattcttttttcccttggttctcggggatgcatgagaaggtgagctgtcactcacaaaaaaagggaaaatgatttgaaaaatgtttcacatatacactttttatcattttagtggatggcagccttacgtcagtagtatatgccactatgaagtatggccaaaaccctagcgtcacttgtaaccattgtactcttatggatttgtgtcttacaccatttgccttgctttttaaatgactttgtttttcaaggtgctgtcattttgcaaaaggaaatctttatatgaaatgtacaaaaaccgttactaactggacaacagggaaggtgctggccccacattagtgcctgcccaccgctctacttctaaccagggacacggatcttccattctctacatccaccggactgcagcccaagtctggacctggctgcagtgggcatattaccgtatggatatctttttctttctttttttaaagtgaggagattcttcagggggtcaggctgagaatgtaataagcctgacattggaacagatttctcccgtgtggtctagctggacccctccggcatttgccacactccctgccagtcctgacattgacttcctgaatgtgattaggtggtaatgagcaagaatttcctaggatgttgaaacatctgtatccaggcccccaatcaaatgctgctgaatattgtgaatgtttttactccgctcactttcccactgtgctttcctctaaccaaaatatacgtgtagccattaccaatgtacaactctcaatgcggagttgccgccacggtttaaaataaatctctgtgaaaacctttctgcagctatggtcccatcacggttacatgtggccacgcacacaccgacaaccttgctgtgctgtttagccctgtgggttctgtccagttggtgggagggggaggttccagaccactccacctgctgtctagatgccagggagagctgctgtttggaggtgaagatgagccctgttcacca

SEQ ID NO: 735849 - DNA, 3655 bp, Homo sapiens
  misc_feature (88)..(88): n is a, c, g, or t
  misc_feature (277)..(277): n is a, c, g, or t
aaaatattttaagagatttattctgagccaaatatgagtgaccgtggcccgtgacatagcccttaggaggtcctgagaacatgtgccnaaggtggtcggggtacagctgagttttatatatcttaagaaggcatgagacatcaatcaaatacatttaagaaatacattggtttggttcagaaaagtgggaccacttaaagcgggggcttcaaggctataggtaaatttaaacgttttttggttgacaattggttgagtttatctgaagacctgggancaacggaaaggaatgttcaggttaaggtaaaggattgtggagaccaggttttattgtgcagaggaatcttttagatagcagcctttagagacagcaggttgtaaaatgttccttaccagacctaaaacggtgcctggctcttagttggttatctcctgggtgtaggaaggaaggaaggaaaacaaaggggaaaggggatatagaatgtggatttttcccacaagagactttgcagggcaattttaaggcatggcaaggaaatataatttggggtaaaacattttgattttcttccttgttacgccagagtcagactggaaagtaagtcatgacctacatggtcaaaacccatctgatgagaatttatggtttttgtaggccatgactccccagaccccttagataggaatttgggcaagataaaaaagcagagcttagtcttcacgatcaaccccacatgccaggccttctggtaggcacctaacattcagtcagtaactacagtaactctgtccgttgtctggagcaagctaaaaaggctggattgctggggaaatggaaagaagccagcactaggggcctgggttcaagtctggagggaaggaggggttgtttagccctaactttgcactaaagtaaccttggctgtgtaatttagccatctaagaaaacgaggggatagacaccccatatgttctctgagctcccttgaagatgtctgtatgaaagattctctccttttcatgtcccttccgtgccactattccgagcatcagtctgaccctaggagtggtgacgtcctactcagctgggggctgcccctcagttcccatagaggcaagtctgggtcctgacttggccaatggccctggaggccgctgagctcctcaggcccatagcgcagaaagtgggcgataggtcattccaggacaagggggcggaggctccaagaaactacgactcccaggaggccactgggttccctccggcagcctgggcctggtgcatgttgggagcagtaagcggcctcccgccgcgcttcattgttaagaccgctaggccaggtagcccgcgcgcatgccaagtcacgtcccaacgagttgggcggctttccttcctgcaggcctcttctctttccggtcttgctgaggcgctcctttccccgccccacctccgccctcttttcagggaatttcgaaggggcgtggcgtctggcaagcgcgtccccaggggtgtgtatacgcgcgttcacgggaggttaaagagggaggagcctaacccttgggtgtgtaaggcagagagaagaccgcgaggaacggaaagcgcatgcgtcctagtggtgctgcagcgcccggggagtcgcggaggggaggggtgaaaatgggcttgcgggactgacgcacgcgcattgggataccagatccccgcctcctgctccaggtttcccctcctccttcaccaccctcccggaagtggagccgccctcgcgcccaccagcggctaccccctgcggcaggccccgcccacacaggctccgccccccggcgctccgccccctcctcttgtagtggcgccggcttgcatcccaggtcgtggcggttttggtgcctgaagcagggagcgcggagtcgttcccgagagaggcggccaggctatgctcgccggtttccggcgttccgctccggccagccagagtctctgtctcaacctgtgtccgtgctccagcagtctcctcagcccggccccgcggcgcggttggcggcggcgccccaggcgcgccccctcctccgatggcggcggagatccagcccaagcctctgacccgcaagccgatcctgctgcagcggatggaggggtcccaggaggtggtgaatatggccgtgatcgtgcccaaagaggagggcgtcatcagcgtctccgaggacaggacagttcgtgtttggttaaagagagacagtggacagtattggccaagcgtataccatgcaatgccttctccatgttcatgcatgtcttttaacccggaaacaagaagactgtccataggtctagacaatggtacaatctcagagtttatattgtcagaagattataacaagatgactcctgtgaaaaactatcaagcgcatcagagcagagtgacgatgatcctgtttgtcctggagctggagtgggtgctgagcacaggacaggacaagcaatttgcctggcactgctctgagagtgggcagcgcctgggaggttatcggaccagtgctgtggcctcaggcctgcaatttgatgttgaaacccggcatgtgtttatcggtgaccactcaggccaagtaacaatcctcaaactggagcaagaaaactgcaccctggtcacaacattcagaggacacacaggtggggtgaccgctctctgttgggacccagtccagcgggtgttgttctcaggcagttcagatcactctgtcatcatgtgggacatcggtgggagaaaaggaacagccatcgagctccaaggacacaacgacagagtccaggccctctcctatgcacagcacacgcgacaattgatctcctgtggcggtgatggtgggattgtcgtctggaacatggacgtggagaggcaggagacccctgaatggttggacagtgattcctgccaaaagtgtgatcagcctttcttctggaacttcaagcaaatgtgggacagtaagaaaattggtctaagacagcaccactgccgcaagtgtgggaaggccgtctgtggcaagtgcagctccaagcgctcctccatccccctgatgggcttcgagtttgaagtgagggtctgtgacagctgccacgaggccatcacagatgaagagtaagttcctgcagcctgcagaccgcttcaggttaaggcgagaatttaatctgagccttgcactcagcgccgcaaccatcactcaggttgctctagtttctgctggtttagaatatagtccacggcaagcagtaaaagctctcctttgccaccaagagatttgtggtatcctgtgagatgagagaagagaaaatacactcaaagaattcatctctgtgttctttctaatttctaggttatgtgcctttaaattagctgctcccagaacaaacccttctgtctgctcatttacttgagaattacccaggagtataagggctcaggattcactttctgtcccaagctggtatctttacaggagttgagtgagtccatgggtccagaaggtttcattttccgggaagagctaagtcgctttacccaagaggcaaatattcccagttgcccagttactcagctggctgcttgtcagacctgcccagtaacccaggacataggttacttaccccttggtgtgctgtgga

SEQ ID NO: 735850 - DNA, 3493 bp, Homo sapiens
  misc_feature (88)..(88): n is a, c, g, or t
  misc_feature (277)..(277): n is a, c, g, or t
aaaatattttaagagatttattctgagccaaatatgagtgaccgtggcccgtgacatagcccttaggaggtcctgagaacatgtgccnaaggtggtcggggtacagctgagttttatatatcttaagaaggcatgagacatcaatcaaatacatttaagaaatacattggtttggttcagaaaagtgggaccacttaaagcgggggcttcaaggctataggtaaatttaaacgttttttggttgacaattggttgagtttatctgaagacctgggancaacggaaaggaatgttcaggttaaggtaaaggattgtggagaccaggttttattgtgcagaggaatcttttagatagcagcctttagagacagcaggttgtaaaatgttccttaccagacctaaaacggtgcctggctcttagttggttatctcctgggtgtaggaaggaaggaaggaaaacaaaggggaaaggggatatagaatgtggatttttcccacaagagactttgcagggcaattttaaggcatggcaaggaaatataatttggggtaaaacattttgattttcttccttgttacgccagagtcagactggaaagtaagtcatgacctacatggtcaaaacccatctgatgagaatttatggtttttgtaggccatgactccccagaccccttagataggaatttgggcaagataaaaaagcagagcttagtcttcacgatcaaccccacatgccaggccttctggtaggcacctaacattcagtcagtaactacagtaactctgtccgttgtctggagcaagctaaaaaggctggattgctggggaaatggaaagaagccagcactaggggcctgggttcaagtctggagggaaggaggggttgtttagccctaactttgcactaaagtaaccttggctgtgtaatttagccatctaagaaaacgaggggatagacaccccatatgttctctgagctcccttgaagatgtctgtatgaaagattctctccttttcatgtcccttccgtgccactattccgagcatcagtctgaccctaggagtggtgacgtcctactcagctgggggctgcccctcagttcccatagaggcaagtctgggtcctgacttggccaatggccctggaggccgctgagctcctcaggcccatagcgcagaaagtgggcgataggtcattccaggacaagggggcggaggctccaagaaactacgactcccaggaggccactgggttccctccggcagcctgggcctggtgcatgttgggagcagtaagcggcctcccgccgcgcttcattgttaagaccgctaggccaggtagcccgcgcgcatgccaagtcacgtcccaacgagttgggcggctttccttcctgcaggcctcttctctttccggtcttgctgaggcgctcctttccccgccccacctccgccctcttttcagggaatttcgaaggggcgtggcgtctggcaagcgcgtccccaggggtgtgtatacgcgcgttcacgggaggttaaagagggaggagcctaacccttgggtgtgtaaggcagagagaagaccgcgaggaacggaaagcgcatgcgtcctagtggtgctgcagcgcccggggagtcgcggaggggaggggtgaaaatgggcttgcgggactgacgcacgcgcattgggataccagatccccgcctcctgctccaggtttcccctcctccttcaccaccctcccggaagtggagccgccctcgcgcccaccagcggctaccccctgcggcaggccccgcccacacaggctccgccccccggcgctccgccccctcctcttgtagtggcgccggcttgcatcccaggtcgtggcggttttggtgcctgaagcagggagcgcggagtcgttcccgagagaggcggccaggctatgctcgccggtttccggcgttccgctccggccagccagagtctctgtctcaacctgtgtccgtgctccagcagtctcctcagcccggccccgcggcgcggttggcggcggcgccccaggcgcgccccctcctccgatggcggcggagatccagcccaagcctctgacccgcaagccgatcctgctgcagcggatggaggggtcccaggaggtggtgaatatggccgtgatcgtgcccaaagaggagggcgtcatcagcgtctccgaggacaggacagttcgtgtttggttaaagagagacagtggacagtattggccaagcgtataccatgcaatgccttctccatgttcatgcatgtcttttaacccggaaacaagaagactgtccataggtctagacaatggtacaatctcagagtttatattgtcagaagattataacaagatgactcctgtgaaaaactatcaagcgcatcagagcagagtgacgatgatcctgtttgtcctggagctggagtgggtgctgagcacaggacaggacaagcaatttgcctggcactgctctgagagtgggcagcgcctgggaggttatcggaccagtgctgtggcctcaggcctgcaatttgatgttgaaacccggcatgtgtttatcggtgaccactcaggccaagtaacaatcctcaaactggagcaagaaaactgcaccctggtcacaacattcagaggacacacaggtggggtgaccgctctctgttgggacccagtccagcgggtgttgttctcaggcagttcagatcactctgtcatcatgtgggacatcggtgggagaaaaggaacagccatcgagctccaaggacacaacgacagagtccaggccctctcctatgcacagcacacgcgacaattgatctcctgtggcggtgatggtgggattgtcgtctggaacatggacgtggagaggcaggagacccctgaatggttggacagtgattcctgccaaaagtgtgatcagcctttcttctggaacttcaagcaaatgtgggacagtaagaaaattggtctaagacagcaccactgccgcaagtgtgggaaggccgtctgtggcaagtgcagctccaagcgctcctccatccccctgatgggcttcgagtttgaagtgagggtctgtgacagctgccacgaggccatcacagatgaagaacgtgcacccacagccaccttccatgacagtaaacataacattgtgcatgtgcatttcgatgcaaccagaggatggttactgacttctggaactgacaaggttattaaggtaagatgccatcttattaagaagctttccatctttggcctcatataaatatacaggagcaccaagaacatgggaggcactgttctaaaggttatccttgggtagccggccatggtggcatgtgtctgtagtcccagctactcaggagatttaggagggaggattgcttgagtccaggagttgaaggctacagtgagctttgatcacatcactgcactctagcctgagcaacaaagcaagacctcatctctta

SEQ ID NO: 735851 - DNA, 3981 bp, Homo sapiens
  misc_feature (88)..(88): n is a, c, g, or t
  misc_feature (277)..(277): n is a, c, g, or t
aaaatattttaagagatttattctgagccaaatatgagtgaccgtggcccgtgacatagcccttaggaggtcctgagaacatgtgccnaaggtggtcggggtacagctgagttttatatatcttaagaaggcatgagacatcaatcaaatacatttaagaaatacattggtttggttcagaaaagtgggaccacttaaagcgggggcttcaaggctataggtaaatttaaacgttttttggttgacaattggttgagtttatctgaagacctgggancaacggaaaggaatgttcaggttaaggtaaaggattgtggagaccaggttttattgtgcagaggaatcttttagatagcagcctttagagacagcaggttgtaaaatgttccttaccagacctaaaacggtgcctggctcttagttggttatctcctgggtgtaggaaggaaggaaggaaaacaaaggggaaaggggatatagaatgtggatttttcccacaagagactttgcagggcaattttaaggcatggcaaggaaatataatttggggtaaaacattttgattttcttccttgttacgccagagtcagactggaaagtaagtcatgacctacatggtcaaaacccatctgatgagaatttatggtttttgtaggccatgactccccagaccccttagataggaatttgggcaagataaaaaagcagagcttagtcttcacgatcaaccccacatgccaggccttctggtaggcacctaacattcagtcagtaactacagtaactctgtccgttgtctggagcaagctaaaaaggctggattgctggggaaatggaaagaagccagcactaggggcctgggttcaagtctggagggaaggaggggttgtttagccctaactttgcactaaagtaaccttggctgtgtaatttagccatctaagaaaacgaggggatagacaccccatatgttctctgagctcccttgaagatgtctgtatgaaagattctctccttttcatgtcccttccgtgccactattccgagcatcagtctgaccctaggagtggtgacgtcctactcagctgggggctgcccctcagttcccatagaggcaagtctgggtcctgacttggccaatggccctggaggccgctgagctcctcaggcccatagcgcagaaagtgggcgataggtcattccaggacaagggggcggaggctccaagaaactacgactcccaggaggccactgggttccctccggcagcctgggcctggtgcatgttgggagcagtaagcggcctcccgccgcgcttcattgttaagaccgctaggccaggtagcccgcgcgcatgccaagtcacgtcccaacgagttgggcggctttccttcctgcaggcctcttctctttccggtcttgctgaggcgctcctttccccgccccacctccgccctcttttcagggaatttcgaaggggcgtggcgtctggcaagcgcgtccccaggggtgtgtatacgcgcgttcacgggaggttaaagagggaggagcctaacccttgggtgtgtaaggcagagagaagaccgcgaggaacggaaagcgcatgcgtcctagtggtgctgcagcgcccggggagtcgcggaggggaggggtgaaaatgggcttgcgggactgacgcacgcgcattgggataccagatccccgcctcctgctccaggtttcccctcctccttcaccaccctcccggaagtggagccgccctcgcgcccaccagcggctaccccctgcggcaggccccgcccacacaggctccgccccccggcgctccgccccctcctcttgtagtggcgccggcttgcatcccaggtcgtggcggttttggtgcctgaagcagggagcgcggagtcgttcccgagagaggcggccaggctatgctcgccggtttccggcgttccgctccggccagccagagtctctgtctcaacctgtgtccgtgctccagcagtctcctcagcccggccccgcggcgcggttggcggcggcgccccaggcgcgccccctcctccgatggcggcggagatccagcccaagcctctgacccgcaagccgatcctgctgcagcggatggaggggtcccaggaggtggtgaatatggccgtgatcgtgcccaaagaggagggcgtcatcagcgtctccgaggacaggacagttcgtgtttggttaaagagagacagtggacagtattggccaagcgtataccatgcaatgccttctccatgttcatgcatgtcttttaacccggaaacaagaagactgtccataggtctagacaatggtacaatctcagagtttatattgtcagaagattataacaagatgactcctgtgaaaaactatcaagcgcatcagagcagagtgacgatgatcctgtttgtcctggagctggagtgggtgctgagcacaggacaggacaagcaatttgcctggcactgctctgagagtgggcagcgcctgggaggttatcggaccagtgctgtggcctcaggcctgcaatttgatgttgaaacccggcatgtgtttatcggtgaccactcaggccaagtaacaatcctcaaactggagcaagaaaactgcaccctggtcacaacattcagaggacacacaggtggggtgaccgctctctgttgggacccagtccagcgggtgttgttctcaggcagttcagatcactctgtcatcatgtgggacatcggtgggagaaaaggaacagccatcgagctccaaggacacaacgacagagtccaggccctctcctatgcacagcacacgcgacaattgatctcctgtggcggtgatggtgggattgtcgtctggaacatggacgtggagaggcaggagacccctgaatggttggacagtgattcctgccaaaagtgtgatcagcctttcttctggaacttcaagcaaatgtgggacagtaagaaaattggtctaagacagcaccactgccgcaagtgtgggaaggccgtctgtggcaagtgcagctccaagcgctcctccatccccctgatgggcttcgagtttgaagtgagggtctgtgacagctgccacgaggccatcacagatgaagaacgtgcacccacagccaccttccatgacagtaaacataacattgtgcatgtgcatttcgatgcaaccagaggatggttactgacttctggaactgacaaggttattaagttgtgggatatgaccccagtcgtgtcttgatgactctcccaggaatcagaaagatagtatttactaaagaaacggttgttttaacccaaatcattaccagagtggtaaagcagacatgtgagaagtaagaaagaaactaaagaccctgaatgaatttgcagattacccatgtgcacagtggggacctggccagtgagcactcgcaaggggactcttccaacttgttcatacaatataaaagaagctatttttttaacaaatggtttatacagtctggctgtgctgcattgttttgagtgtaccgaaaaatctgtgtggggtgtttaatttttatacttttcaacaccccattttacttgttgctttgtcagagaaataagggaggtatctactcagagtattttggtcattatactttctgtgtttacttcaacatgtgtcacgtggccagcggctttttcttctcttccctctgcacctacctgcaccttctctgcctttcctggaggggatgtatttatgttatttattcccagtgtttctgctttcatgtcctcctcagtggagagatttggaaactcatcatgtggattcaccagccagctgctggaattgcctgaagagcgatttgtttgtaatgtctgcctcattcacgttcttatgaagtagaaaagactgtgtttctgcctcagttgcctctgtctttcccacattaaaaaaaaaaatgctgtgagaaaaaag

SEQ ID NO: 735852 - DNA, 3945 bp, Homo sapiens
  misc_feature (88)..(88): n is a, c, g, or t
  misc_feature (277)..(277): n is a, c, g, or t
  misc_feature (3933)..(3934): n is a, c, g, or t
  misc_feature (3937)..(3938): n is a, c, g, or t
  misc_feature (3942)..(3942): n is a, c, g, or t
aaaatattttaagagatttattctgagccaaatatgagtgaccgtggcccgtgacatagcccttaggaggtcctgagaacatgtgccnaaggtggtcggggtacagctgagttttatatatcttaagaaggcatgagacatcaatcaaatacatttaagaaatacattggtttggttcagaaaagtgggaccacttaaagcgggggcttcaaggctataggtaaatttaaacgttttttggttgacaattggttgagtttatctgaagacctgggancaacggaaaggaatgttcaggttaaggtaaaggattgtggagaccaggttttattgtgcagaggaatcttttagatagcagcctttagagacagcaggttgtaaaatgttccttaccagacctaaaacggtgcctggctcttagttggttatctcctgggtgtaggaaggaaggaaggaaaacaaaggggaaaggggatatagaatgtggatttttcccacaagagactttgcagggcaattttaaggcatggcaaggaaatataatttggggtaaaacattttgattttcttccttgttacgccagagtcagactggaaagtaagtcatgacctacatggtcaaaacccatctgatgagaatttatggtttttgtaggccatgactccccagaccccttagataggaatttgggcaagataaaaaagcagagcttagtcttcacgatcaaccccacatgccaggccttctggtaggcacctaacattcagtcagtaactacagtaactctgtccgttgtctggagcaagctaaaaaggctggattgctggggaaatggaaagaagccagcactaggggcctgggttcaagtctggagggaaggaggggttgtttagccctaactttgcactaaagtaaccttggctgtgtaatttagccatctaagaaaacgaggggatagacaccccatatgttctctgagctcccttgaagatgtctgtatgaaagattctctccttttcatgtcccttccgtgccactattccgagcatcagtctgaccctaggagtggtgacgtcctactcagctgggggctgcccctcagttcccatagaggcaagtctgggtcctgacttggccaatggccctggaggccgctgagctcctcaggcccatagcgcagaaagtgggcgataggtcattccaggacaagggggcggaggctccaagaaactacgactcccaggaggccactgggttccctccggcagcctgggcctggtgcatgttgggagcagtaagcggcctcccgccgcgcttcattgttaagaccgctaggccaggtagcccgcgcgcatgccaagtcacgtcccaacgagttgggcggctttccttcctgcaggcctcttctctttccggtcttgctgaggcgctcctttccccgccccacctccgccctcttttcagggaatttcgaaggggcgtggcgtctggcaagcgcgtccccaggggtgtgtatacgcgcgttcacgggaggttaaagagggaggagcctaacccttgggtgtgtaaggcagagagaagaccgcgaggaacggaaagcgcatgcgtcctagtggtgctgcagcgcccggggagtcgcggaggggaggggtgaaaatgggcttgcgggactgacgcacgcgcattgggataccagatccccgcctcctgctccaggtttcccctcctccttcaccaccctcccggaagtggagccgccctcgcgcccaccagcggctaccccctgcggcaggccccgcccacacaggctccgccccccggcgctccgccccctcctcttgtagtggcgccggcttgcatcccaggtcgtggcggttttggtgcctgaagcagggagcgcggagtcgttcccgagagaggcggccaggctatgctcgccggtttccggcgttccgctccggccagccagagtctctgtctcaacctgtgtccgtgctccagcagtctcctcagcccggccccgcggcgcggttggcggcggcgccccaggcgcgccccctcctccgatggcggcggagatccagcccaagcctctgacccgcaagccgatcctgctgcagcggatggaggggtcccaggaggtggtgaatatggccgtgatcgtgcccaaagaggagggcgtcatcagcgtctccgaggacaggacagttcgtgtttggttaaagagagacagtggacagtattggccaagcgtataccatgcaatgccttctccatgttcatgcatgtcttttaacccggaaacaagaagactgtccataggtctagacaatggtacaatctcagagtttatattgtcagaagattataacaagatgactcctgtgaaaaactatcaagcgcatcagagcagagtgacgatgatcctgtttgtcctggagctggagtgggtgctgagcacaggacaggacaagcaatttgcctggcactgctctgagagtgggcagcgcctgggaggttatcggaccagtgctgtggcctcaggcctgcaatttgatgttgaaacccggcatgtgtttatcggtgaccactcaggccaagtaacaatcctcaaactggagcaagaaaactgcaccctggtcacaacattcagaggacacacaggtggggtgaccgctctctgttgggacccagtccagcgggtgttgttctcaggcagttcagatcactctgtcatcatgtgggacatcggtgggagaaaaggaacagccatcgagctccaaggacacaacgacagagtccaggccctctcctatgcacagcacacgcgacaattgatctcctgtggcggtgatggtgggattgtcgtctggaacatggacgtggagaggcaggagacccctgaatggttggacagtgattcctgccaaaagtgtgatcagcctttcttctggaacttcaagcaaatgtgggacagtaagaaaattggtctaagacagcaccactgccgcaagtgtgggaaggccgtctgtggcaagtgcagctccaagcgctcctccatccccctgatgggcttcgagtttgaagtgagggtctgtgacagctgccacgaggccatcacagatgaagaacgtgcacccacagccaccttccatgacagtaaacataacattgtgcatgtgcatttcgatgcaaccagaggatggttactgacttctggaactgacaaggttattaagttgtgggatatgaccccagtcgtgtcttgatgactctcccaggaatcagaaagatagtatttactaaagaaacggttgttttaacccaaatcattaccagagtggtaaagcagacatgtgagaagtaagaaagaaactaaagaccctgaatgaatttgcagattacccatgtgcacagtggggacctggccagtgagcactcgcaaggggactcttccaacttgttcatacaatataaaagaagctatttttttaacaaatggtttatacagtctggctgtgctgcattgttttgagtgtaccgaaaaatctgtgtggggtgtttaatttttatacttttcaacaccccattttacttgttgctttgtcagagaaataagggaggtatctactcagagtattttggtcattatactttctgtgtttacttcaacatgtgtcacgtggccagcggctttttcttctcttccctctgcacctacctgcaccttctctgcctttcctggaggggatgtatttatgttatttattcccagtgtttctgctttcatgtcctcctcagtggagagatttggaaactcatcatgtggattcaccagccagctgctggaattgcctgaagagcgatttgtttgtaatgtctgcctcattcacgttcttatgaagtagaaaagactgtgaaaaaaaaaaaanntannatcntta

SEQ ID NO: 735853 - DNA, 4001 bp, Homo sapiens
  misc_feature (88)..(88): n is a, c, g, or t
  misc_feature (277)..(277): n is a, c, g, or t
aaaatattttaagagatttattctgagccaaatatgagtgaccgtggcccgtgacatagcccttaggaggtcctgagaacatgtgccnaaggtggtcggggtacagctgagttttatatatcttaagaaggcatgagacatcaatcaaatacatttaagaaatacattggtttggttcagaaaagtgggaccacttaaagcgggggcttcaaggctataggtaaatttaaacgttttttggttgacaattggttgagtttatctgaagacctgggancaacggaaaggaatgttcaggttaaggtaaaggattgtggagaccaggttttattgtgcagaggaatcttttagatagcagcctttagagacagcaggttgtaaaatgttccttaccagacctaaaacggtgcctggctcttagttggttatctcctgggtgtaggaaggaaggaaggaaaacaaaggggaaaggggatatagaatgtggatttttcccacaagagactttgcagggcaattttaaggcatggcaaggaaatataatttggggtaaaacattttgattttcttccttgttacgccagagtcagactggaaagtaagtcatgacctacatggtcaaaacccatctgatgagaatttatggtttttgtaggccatgactccccagaccccttagataggaatttgggcaagataaaaaagcagagcttagtcttcacgatcaaccccacatgccaggccttctggtaggcacctaacattcagtcagtaactacagtaactctgtccgttgtctggagcaagctaaaaaggctggattgctggggaaatggaaagaagccagcactaggggcctgggttcaagtctggagggaaggaggggttgtttagccctaactttgcactaaagtaaccttggctgtgtaatttagccatctaagaaaacgaggggatagacaccccatatgttctctgagctcccttgaagatgtctgtatgaaagattctctccttttcatgtcccttccgtgccactattccgagcatcagtctgaccctaggagtggtgacgtcctactcagctgggggctgcccctcagttcccatagaggcaagtctgggtcctgacttggccaatggccctggaggccgctgagctcctcaggcccatagcgcagaaagtgggcgataggtcattccaggacaagggggcggaggctccaagaaactacgactcccaggaggccactgggttccctccggcagcctgggcctggtgcatgttgggagcagtaagcggcctcccgccgcgcttcattgttaagaccgctaggccaggtagcccgcgcgcatgccaagtcacgtcccaacgagttgggcggctttccttcctgcaggcctcttctctttccggtcttgctgaggcgctcctttccccgccccacctccgccctcttttcagggaatttcgaaggggcgtggcgtctggcaagcgcgtccccaggggtgtgtatacgcgcgttcacgggaggttaaagagggaggagcctaacccttgggtgtgtaaggcagagagaagaccgcgaggaacggaaagcgcatgcgtcctagtggtgctgcagcgcccggggagtcgcggaggggaggggtgaaaatgggcttgcgggactgacgcacgcgcattgggataccagatccccgcctcctgctccaggtttcccctcctccttcaccaccctcccggaagtggagccgccctcgcgcccaccagcggctaccccctgcggcaggccccgcccacacaggctccgccccccggcgctccgccccctcctcttgtagtggcgccggcttgcatcccaggtcgtggcggttttggtgcctgaagcagggagcgcggagtcgttcccgagagaggcggccaggctatgctcgccggtttccggcgttccgctccggccagccagagtctctgtctcaacctgtgtccgtgctccagcagtctcctcagcccggccccgcggcgcggttggcggcggcgccccaggcgcgccccctcctccgatggcggcggagatccagcccaagcctctgacccgcaagccgatcctgctgcagcggatggaggggtcccaggaggtggtgaatatggccgtgatcgtgcccaaagaggagggcgtcatcagcgtctccgaggacaggacagttcgtgtttggttaaagagagacagtggacagtattggccaagcgtataccatgcaatgccttctccatgttcatgcatgtcttttaacccggaaacaagaagactgtccataggtctagacaatggtacaatctcagagtttatattgtcagaagattataacaagatgactcctgtgaaaaactatcaagcgcatcagagcagagtgacgatgatcctgtttgtcctggagctggagtgggtgctgagcacaggacaggacaagcaatttgcctggcactgctctgagagtgggcagcgcctgggaggttatcggaccagtgctgtggcctcaggcctgcaatttgatgttgaaacccggcatgtgtttatcggtgaccactcaggccaagtaacaatcctcaaactggagcaagaaaactgcaccctggtcacaacattcagaggacacacaggtggggtgaccgctctctgttgggacccagtccagcgggtgttgttctcaggcagttcagatcactctgtcatcatgtgggacatcggtgggagaaaaggaacagccatcgagctccaaggacacaacgacagagtccaggccctctcctatgcacagcacacgcgacaattgatctcctgtggcggtgatggtgggattgtcgtctggaacatggacgtggagaggcaggagacccctgaatggttggacagtgattcctgccaaaagtgtgatcagcctttcttctggaacttcaagcaaatgtgggacagtaagaaaattggtctaagacagcaccactgccgcaagtgtgggaaggccgtctgtggcaagtgcagctccaagcgctcctccatccccctgatgggcttcgagtttgaagtgagggtctgtgacagctgccacgaggccatcacagatgaagaacgtgcacccacagccaccttccatgacagtaaacataacattgtgcatgtgcatttcgatgcaaccagaggatggttactgacttctggaactgacaaggttattaaggtgctgtcattttgcaaaaggaaatctttatatgaaatgtacaaaaaccgttactaactggacaacagggaaggtgctggccccacattagtgcctgcccaccgctctacttctaaccagggacacggatcttccattctctacatccaccggactgcagcccaagtctggacctggctgcagtgggcatattaccgtatggatatctttttctttctttttttaaagtgaggagattcttcagggggtcaggctgagaatgtaataagcctgacattggaacagatttctcccgtgtggtctagctggacccctccggcatttgccacactccctgccagtcctgacattgacttcctgaatgtgattaggtggtaatgagcaagaatttcctaggatgttgaaacatctgtatccaggcccccaatcaaatgctgctgaatattgtgaatgtttttactccgctcactttcccactgtgctttcctctaaccaaaatatacgtgtagccattaccaatgtacaactctcaatgcggagttgccgccacggtttaaaataaatctctgtgaaaacctttctgcagctatggtcccatcacggttacatgtggccacgcacacaccgacaaccttgctgtgctgtttagccctgtgggttctgtccagttggtgggagggggaggttccagaccactccacctgctgtctagatgccagggagagctgctgtttggaggtgaagatgagccctgttcacca

SEQ ID NO: 735854 - DNA, 4128 bp, Homo sapiens
  misc_feature (88)..(88): n is a, c, g, or t
  misc_feature (277)..(277): n is a, c, g, or t
aaaatattttaagagatttattctgagccaaatatgagtgaccgtggcccgtgacatagcccttaggaggtcctgagaacatgtgccnaaggtggtcggggtacagctgagttttatatatcttaagaaggcatgagacatcaatcaaatacatttaagaaatacattggtttggttcagaaaagtgggaccacttaaagcgggggcttcaaggctataggtaaatttaaacgttttttggttgacaattggttgagtttatctgaagacctgggancaacggaaaggaatgttcaggttaaggtaaaggattgtggagaccaggttttattgtgcagaggaatcttttagatagcagcctttagagacagcaggttgtaaaatgttccttaccagacctaaaacggtgcctggctcttagttggttatctcctgggtgtaggaaggaaggaaggaaaacaaaggggaaaggggatatagaatgtggatttttcccacaagagactttgcagggcaattttaaggcatggcaaggaaatataatttggggtaaaacattttgattttcttccttgttacgccagagtcagactggaaagtaagtcatgacctacatggtcaaaacccatctgatgagaatttatggtttttgtaggccatgactccccagaccccttagataggaatttgggcaagataaaaaagcagagcttagtcttcacgatcaaccccacatgccaggccttctggtaggcacctaacattcagtcagtaactacagtaactctgtccgttgtctggagcaagctaaaaaggctggattgctggggaaatggaaagaagccagcactaggggcctgggttcaagtctggagggaaggaggggttgtttagccctaactttgcactaaagtaaccttggctgtgtaatttagccatctaagaaaacgaggggatagacaccccatatgttctctgagctcccttgaagatgtctgtatgaaagattctctccttttcatgtcccttccgtgccactattccgagcatcagtctgaccctaggagtggtgacgtcctactcagctgggggctgcccctcagttcccatagaggcaagtctgggtcctgacttggccaatggccctggaggccgctgagctcctcaggcccatagcgcagaaagtgggcgataggtcattccaggacaagggggcggaggctccaagaaactacgactcccaggaggccactgggttccctccggcagcctgggcctggtgcatgttgggagcagtaagcggcctcccgccgcgcttcattgttaagaccgctaggccaggtagcccgcgcgcatgccaagtcacgtcccaacgagttgggcggctttccttcctgcaggcctcttctctttccggtcttgctgaggcgctcctttccccgccccacctccgccctcttttcagggaatttcgaaggggcgtggcgtctggcaagcgcgtccccaggggtgtgtatacgcgcgttcacgggaggttaaagagggaggagcctaacccttgggtgtgtaaggcagagagaagaccgcgaggaacggaaagcgcatgcgtcctagtggtgctgcagcgcccggggagtcgcggaggggaggggtgaaaatgggcttgcgggactgacgcacgcgcattgggataccagatccccgcctcctgctccaggtttcccctcctccttcaccaccctcccggaagtggagccgccctcgcgcccaccagcggctaccccctgcggcaggccccgcccacacaggctccgccccccggcgctccgccccctcctcttgtagtggcgccggcttgcatcccaggtcgtggcggttttggtgcctgaagcagggagcgcggagtcgttcccgagagaggcggccaggctatgctcgccggtttccggcgttccgctccggccagccagagtctctgtctcaacctgtgtccgtgctccagcagtctcctcagcccggccccgcggcgcggttggcggcggcgccccaggcgcgccccctcctccgatggcggcggagatccagcccaagcctctgacccgcaagccgatcctgctgcagcggatggaggggtcccaggaggtggtgaatatggccgtgatcgtgcccaaagaggagggcgtcatcagcgtctccgaggacaggacagttcgtgtttggttaaagagagacagtggacagtattggccaagcgtataccatgcaatgccttctccatgttcatgcatgtcttttaacccggaaacaagaagactgtccataggtctagacaatggtacaatctcagagtttatattgtcagaagattataacaagatgactcctgtgaaaaactatcaagcgcatcagagcagagtgacgatgatcctgtttgtcctggagctggagtgggtgctgagcacaggacaggacaagcaatttgcctggcactgctctgagagtgggcagcgcctgggaggttatcggaccagtgctgtggcctcaggcctgcaatttgatgttgaaacccggcatgtgtttatcggtgaccactcaggccaagtaacaatcctcaaactggagcaagaaaactgcaccctggtcacaacattcagaggacacacaggtggggtgaccgctctctgttgggacccagtccagcgggtgttgttctcaggcagttcagatcactctgtcatcatgtgggacatcggtgggagaaaaggaacagccatcgagctccaaggacacaacgacagagtccaggccctctcctatgcacagcacacgcgacaattgatctcctgtggcggtgatggtgggattgtcgtctggaacatggacgtggagaggcaggagcctctgtggagctgcttcgtggttatgataagtgctgtgtgatgctcaccttgggaggtctgcgacatatattgaagtcatctctaacctgaagtactgacagactttctggaagaaaaggcttgtaggaggaaacttcagaattctattaaatggtgtaaatgatgaaattatagttgatatatgctagagcatcagtgctgggtattttagaagggatggagtcatcattggctaatgttcccagtgaaggattgagggaggaacattgtgctgaaggatcaacagagtctggatgtgctctgagcaggagcacatgggctttgcaggccacgaaacagcaagagtaaggacaaggtgaacacgataggttgatgcagtgcattaatgctcatgagcggtttagagaagcagtcagagatgagaggatggcagctagctgaaagataaggacagacaatggaagaccttgagtggctggatgtagatcgagtgacattgcataggttgaacaggtgttttatacagttaatgaaatccatttttgttttgttaacttttagcattttttaaaagtatatattgtatataacattcttggtagaaaagttacaaaatgctcattagtaaatagaaaagatgtcaattactcatactaccaccatccagaaatatcactctgaacatgttggcacacatccttcctaacatttttctctacacataacacgtgtgtaagacttttttttgaacaaaaaatagaatcacaaacatgctgatttattttttcccctttattggtctttagctcccaaatgcctcctcacagatacccactgtgatgtgtttgatgtgtgtcctgaacacgcatgcttccttataaaaggtgtgtgtgtgtgtgtatgtgtgtctgtgtgtgtgttttaaagtttacataactcagccgggcacggtggctcacgcctgtaatgccagctgttgggaggccaaggcaggtggatcacttgaggtcaagagtttgagaccagcctggtcaacatggcgaaaccctgtctctactaacaatacaaaaaaaaaaaaattagccaggcatggttgcagacgcctgtaatctcagcttctcaggaggctgaggcaggagaattgcatgaacctaggaggcggaggttgcagtgagccaagatcgcaccactgcactccagcctgggcaacacagcaaggctgtctcaa

SEQ ID NO: 735855 - DNA, 1700 bp, Homo sapiens
agtttgatctcagactgctgtgctagcaatcagcaagactgtgggcgtaggaccctccgagccaggagtttatattgtcagaagattataacaagatgactcctgtgaaaaactatcaagcgcatcagagcagagtgacgatgatcctgtttgtcctggagctggagtgggtgctgagcacaggacaggacaagcaatttgcctggcactgctctgagagtgggcagcgcctgggaggttatcggaccagtgctgtggcctcaggcctgcaatttgatgttgaaacccggcatgtgtttatcggtgaccactcaggccaagtaacaatcctcaaactggagcaagaaaactgcaccctggtcacaacattcagaggacacacaggtggggtgaccgctctctgttgggacccagtccagcgggtgttgttctcaggcagttcagatcactctgtcatcatgtgggacatcggtgggagaaaaggaacagccatcgagctccaaggacacaacgacagagtccaggccctctcctatgcacagcacacgcgacaattgatctcctgtggcggtgatggtgggattgtcgtctggaacatggacgtggagaggcaggagacccctgaatggttggacagtgattcctgccaaaagtgtgatcagcctttcttctggaacttcaagcaaatgtgggacagtaagaaaattggtctaagacagcaccactgccgcaagtgtgggaaggccgtctgtggcaagtgcagctccaagcgctcctccatccccctgatgggcttcgagtttgaagtgagggtctgtgacagctgccacgaggccatcacagatgaagaacgtgcacccacagccaccttccatgacagtaaacataacattgtgcatgtgcatttcgatgcaaccagaggatggttactgacttctggaactgacaaggttattaagttgtgggatatgaccccagtcgtgtcttgatgactctcccaggaatcagaaagatagtatttactaaagaaacggttgttttaacccaaatcattaccagagtggtaaagcagacatgtgagaagtaagaaagaaactaaagaccctgaatgaatttgcagattacccatgtgcacagtggggacctggccagtgagcactcgcaaggggactcttccaacttgttcatacaatataaaagaagctatttttttaacaaatggtttatacagtctggctgtgctgcattgttttgagtgtaccgaaaaatctgtgtggggtgtttaatttttatacttttcaacaccccattttacttgttgctttgtcagagaaataagggaggtatctactcagagtattttggtcattatactttctgtgtttacttcaacatgtgtcacgtggccagcggctttttcttctcttccctctgcacctacctgcaccttctctgcctttcctggaggggatgtatttatgttatttattcccagtgtttctgctttcatgtcctcctcagtggagagatttggaaactcatcatgtggattcaccagccagctgctggaattgcctgaagagcgatttgtttgtaatgtctgcctcattcacgttcttatgaagtagaaaagactgtgtttctgcctcagttgcctctgtctttcccacattaaaaaaaaaaatgctgtgagaaaaaag

SEQ ID NO: 735856 - DNA, 1268 bp, Homo sapiens; identical to SEQ ID NO: 323042

SEQ ID NO: 735857 - DNA, 1181 bp, Homo sapiens
attagactattttactggcaagtccttctgagctcaaacttagcaaaagccctgtggttttaaaagctcgggtggagattatcacagacaccattggagcaacattctccagaaggacttttagaaattttcatctctttcccattttaaagactataagatttcttgtattttttttttatcataactggtcaccagggaataaaggcagatctgaggagcattcctgtcagtgaagcagttttagccacgaggccaaaatttagagcctaatgtcatcctagatctctctcattcatatgtcaccaccttttcccctcagaagctttctttgctccttctagacgtgcacccacagccaccttccatgacagtaaacataacattgtgcatgtgcatttcgatgcaaccagaggatggttactgacttctggaactgacaaggttattaagttgtgggatatgaccccagtcgtgtcttgatgactctcccaggaatcagaaagatagtatttactaaagaaacggttgttttaccagagtggtaaagcagacatgtgagaagtaagaaagaaactaaagaccctgaatgaatttgcagattacccatgtgcacagtggggacctggccagtgagcactcgcaaggggactcttccaacttgttcatacaatataaaagaagctatttttttaacaaatggtttatacagtctggctgtgctgcattgttttgagtgtaccgaaaaatctgtgtggggtgtttaatttttatacttttcaacaccccattttacttgttgctttgtcagagaaataagggaggtatctactcagagtattttggtcattatactttctgtgtttacttcaacatgtgtcacgtggccagcggctttttcttctcttccctctgcacctacctgcaccttctctgcctttcctggaggggatgtatttatgttatttattcccagtgtttctgctttcatgtcctcctcagtggagagatttggaaactcatcatgtggattcaccagccagctgctggaattgcctgaagagcgatttgtttgtaatgtctgcctcattcacgttcttatgaagtagaaaagactgtgtttctgcctcagttgcctctgtctttcccacattaaaaaaaaaaatgctgtgagaaaaaag

SEQ ID NO: 735858 - DNA, 2005 bp, Homo sapiens
gtgacaggggaaacaggcagaacaagtcagggcaaaggaccccagcatgaagagttgtggaggtggaggtggggaagcagcctcacatctcacacttccttccttctcttaaatgtgagcagctgactccaagccttgtggaaactctagaaggtagaaccagccatctggggaagctggccttacagatgccccgtctggcatagtggaggttcctgtgctctgagaacgcagtgtgaatctagacatccactgcagcctgggaagagctgtgttttcttcaaaagtctttaactttcacagtcacccctctaaagaaatgttctctgattgaaggcatgcttctattcctactttattgtgtttcatgcattctgccagagtaattacttttcataccaattcttggatgcagagaaatctctggtagtctaaggggatttcgatccaagtaaagctactatctcctattccatccagacttttccgtctgcctccattctctcagtcacatacctagaagcaagccagaaagcctgtccaaccaaaatcactctccaaagcccaagcactttattgttctccctgtctgttatcgagccaaggtgtatttggcctcattttatgccattagttgtctggctttcatggctctgcaccacattacagtcagagcaggaaggccagcagtggagatagaattatggcagaaacccagagtagaggcctctgctggtgagggagcctgcagcactctccacgctggtgggtcctagcatgcccaacagacccccatcccttcccatcagccttgggccttgagtctcattccaactcatcccctcccctttcccttctttccagtcccaggtgacacttgatgcctctgactcctttgaagagggcatcaagaagtgaaagaacaaagtccttttctgttcgggatctgggcccatcctgggagaggtttttggcagaaatggctgcagtggaaccctctgactgccagggtgaaatagtgctccagcaggctgcggtagactcgctgccagagtgggtcaggactggcccagaggacagggtcgtctcttgagagtcctcccagctccagggcctgattttaaagcagtaacacgaggatataggttatatacaggctcctggaaggcaggtgccgcagctcctgtgacaccccatatgcctgagcaagcttctccagcacaagagatgatgcaagtatgaatgggtacggggggagcttaaaacctgccaacactgagacttgatgccaggggccgtgcacccgctctgccacctgctaggtctgtgcaatggtcagagcagaggtgtgtgatgagttcagctcccaagcacatccacacttaggaagtgttctgtgtgtttttaaataatccttaccatgtaaagattgtattacatttgtatacaaaatttttttgcattttacttttgtaatatttggggttttatagatttttattttatggccaagtatacttttgtaaggaaatgttgaagtcttgagtatttttattcttttaaaaaactatagttagtgtcaactgtgagcactgataaatattattcatgtgtggttttccttctttttaatccagactttttaagaaactgttttggcatagagctttacttaaaatgctgcttcattttacacattgtgaatactgaagattctaaaaaataaagatgcatttaaaatctctgtgctgttccattgtagaaatggtaatgtgcattgctttgccaaagtggtaattaaatgtttaatggtttagaactcctagttcacaacagggcttctcgtcatcacttgcagcgtgtgagcttccaaataagccgccatttctttggaaaacgcacgcacttaggcatggcgatctcctgttccgttaggaaatacggttatgttgacattatggttactgtgcttgtggttttgcaataaacatgtattgaaagcact

SEQ ID NO: 735859 - DNA, 1700 bp, Homo sapiens
  misc_feature (1045)..(1045): n is a, c, g, or t
gggattacaggcgcccaccaccacgcccggctaatttttgtatttttaatggagacggggtttcaccttgttggccaggctggtctcaaactcctgacctcaagtgatccacccacctcagcttcccaaagtgctggaattacaggcgtgagccctcgcgcccagttcaacatctttcttaagtgggcccaaggttggggggaaaatctcaccgtagagatatttgttagatatcgagcatgtgctgaagaaggcatctgtgatgattaattttatgtgtcagttggactggaccatggggtgcccagatatcagcttgaacattactctgggtccatctgtgagggcgtggggtaggactggcatttatgttggtggagcaagtaaagcaggctgcctccctaacgcaggggatcctcatccatcagctgagggcccaaatagaacaaaaggctgagttggagggcgcccctcctgcatgaccaactttcaagtggtgacatcagctttcttcctgtttttggacttgaactgaaacatcagctcttcctggatcttcagcctgctggccttcagactagaactacaacctcggctctcctgggtctcggcttgctgactcaccctgcagaacttgggacttgtcagcctctacatttgtatgagccaattccttataatgtctttctgtatatatacatatatctccacatcttattgttctgcttctctggagaaccctgagtaatacagcatcattccaagatcagcagaaatgttagtgcttctggggaattactgcaaagggtacctgaatagcagcacatgctctcagtacccccgccttctgttgtctgctgttgcctgctccctccccaccctttgggttgatttcaggatagagatatggggatgggactggggttgggtgtgcggttacccagaacagccaggatgtgtgcacgctgtgacccaggagcatcaagcactgctcaagctgcttggaaaagaaaacaaaagtcaggaaagtgaggagctgggaggntgctggaaaggagcaggaagaaacgggcaagggtaggagagaagcagaaaaaacaatccctgagacagagctggtgtaaccaaggctctgtttcccccacggtttgagagtgggtgagcctgacttcaaggcccagctctgttcaaagataggacactgattttcttcaagaaggcagagctggtgagtggcctcatgtcttaccatcatggaaaggcgagggctgggggagagagaaggggcagccaaggcctcagagtggtgtaggcctcacccttgtgctcacatgtcccaaccactgccagcggtgccacctctgaatcccagaccccacatgtaaccatcctctacctggaccacaggaggaagctccacgttctttgccagggttcagggtaaggggcatgatctaagttgggcaaaagagagtcatcctgttaccttaaaaaggagtctagggtgagccccagtctgctggtggccatcttcaccacctttggggagagatggcctgagcagacacacaaagcaaagaggtggagagaaactgtgtctttgtgtcattgtttgagtccctggacccagcccagtccccccgactacgctgaacttttcaattgtggaaaacaataaattccatttagttaagaaaatt

SEQ ID NO: 735860 - DNA, 1010 bp, Homo sapiens
ggacgcgtgggtcgacccacgcgccaaagacatctcgggtcaactcttctcaggaccagatccaagtcgccagtgagaacacacattcaggcagcctccaccagcgccctgcctcaggagcgaggctccctgcttcatgtgggcaagagctgcccttgttttcccagcgggcagttgggggtctggagcctaggaagcaaagtgaagcacacactcctgcttccttccttccctgcagttgagacgggagtcttactttgttgcccaggctggtctcaaactcctggcttcaagcaatccttccactttggccttccaaagtgctgggattacaggcatgagccaccatgcccagcctccttctcttactagctgagaactaagagaagacactctggagacagaggaggaaacagtgacgatgccacatgatgaatacataatggagggtgaagacaaggctccgtcaggggcaccaaggagggaaacccagttctgtggggaaggtatggggcagcttcacaagcccagtgtctgctccctttgtgggagacgtgttgtttcagcatccattcccccttcttttaggaaaagtgcttgaatttccttttcatggaaccacccacctccctctcatccatgcattctattcccagtatcaggggtagacaagtgacttcaggcttggccaattagggttctgactcttggtcaaatcagagtgaatcctgagtcatttgtaaactccaaggaaagggcttgctttgttttctgttgaatgcagtgctctgagatagccggaaatgaaactgctctcttgccacactgaaggctagagaagggcctggccaggaaatgatgccagtgatcaggggtggagctggaagagggggagtgaggaggcccagacatcttgggagccccaaattcacctcaggatttaacttctccgctgctcagccaataaattcctttcttccatgacaaaaaaacaacacaaaaaacgggcg

SEQ ID NO: 735861 - DNA, 881 bp, Homo sapiens
agagagttcggaagcactcttattatcttagcagcagcatgtgtggaaatcatttctcattacagcggagggcaggcattgtgcagagggttaagtgggcctgcttgaagttggttgttgttagctctcatgtctatgccttggtccctttcccctcaggacttggagagcaagctgtttgagtctgatgcaacccctgggctttgactatcatgccaaaaggcagcaaataagtgccttttcttcccttcagaatacatggacaatccaaagctctattagtctattattcagaatgaaaagtgtttacaatattcgtcctcttactcctcagtatgtgagactgttcctcgtagcaggtaatttcttccgaattcaaaaactcctcatggaagcatctgtttttgtcatcaaggagggggctgtatgtggaattgcaaggccaaagacatctcgggtcaactcttctcaggaccagatccaagtcgccagtgagaacacacattcaggcagcctccaccagcgccctgcctcaggagcgaggctccctgcttcatgtgggcaagagctgcccttgttttcccagcgggcagttgggggtctggagcctaggaagcaaagtgaagcacacactcctgcttccttccttccctgcagttggtgagtatctggctcagtttaggttaatatcatctcttcagcctggcccagtttaccactatgggaaggagcccagcagcaggggctgccagacctggaaatagatctgctcattgcagtgtggcaggtgcagagaaacagagccagctatagctggaagagaatcttagggcacagagatgcaccaacatgtatgaacaagtcgagacccaagtaccaag

SEQ ID NO: 735862 - DNA, 1950 bp, Homo sapiens
  misc_feature (1295)..(1295): n is a, c, g, or t
agagagttcggaagcactcttattatcttagcagcagcatgtgtggaaatcatttctcattacagcggagggcaggcattgtgcagagggttaagtgggcctgcttgaagttggttgttgttagctctcatgtctatgccttggtccctttcccctcaggacttggagagcaagctgtttgagtctgatgcaacccctgggctttgactatcatgccaaaaggcagcaaataagtgccttttcttcccttcagaatacatggacaatccaaagctctattagtctattattcagaatgaaaagtgtttacaatattcgtcctcttactcctcagtatgtgagactgttcctcgtagcaggtaatttcttccgaattcaaaaactcctcatggaagcatctgtttttgtcatcaaggagggggctgtatgtggaattgcaaggccaaagacatctcgggtcaactcttctcaggaccagatccaagtcgccagtgagaacacacattcaggcagcctccaccagcgccctgcctcaggagcgaggctccctgcttcatgtgggcaagagctgcccttgttttcccagcgggcagttgggggtctggagcctaggaagcaaagtgaagcacacactcctgcttccttccttccctgcagttggggatcctcatccatcagctgagggcccaaatagaacaaaaggctgagttggagggcgcccctcctgcatgaccaactttcaagtggtgacatcagctttcttcctgtttttggacttgaactgaaacatcagctcttcctggatcttcagcctgctggccttcagactagaactacaacctcggctctcctgggtctcggcttgctgactcaccctgcagaacttgggacttgtcagcctctacatttgtatgagccaattccttataatgtctttctgtatatatacatatatctccacatcttattgttctgcttctctggagaaccctgagtaatacagcatcattccaagatcagcagaaatgttagtgcttctggggaattactgcaaagggtacctgaatagcagcacatgctctcagtacccccgccttctgttgtctgctgttgcctgctccctccccaccctttgggttgatttcaggatagagatatggggatgggactggggttgggtgtgcggttacccagaacagccaggatgtgtgcacgctgtgacccaggagcatcaagcactgctcaagctgcttggaaaagaaaacaaaagtcaggaaagtgaggagctgggaggntgctggaaaggagcaggaagaaacgggcaagggtaggagagaagcagaaaaaacaatccctgagacagagctggtgtaaccaaggctctgtttcccccacggtttgagagtgggtgagcctgacttcaaggcccagctctgttcaaagataggacactgattttcttcaagaaggcagagctggtgagtggcctcatgtcttaccatcatggaaaggcgagggctgggggagagagaaggggcagccaaggcctcagagtggtgtaggcctcacccttgtgctcacatgtcccaaccactgccagcggtgccacctctgaatcccagaccccacatgtaaccatcctctacctggaccacaggaggaagctccacgttctttgccagggttcagggtaaggggcatgatctaagttgggcaaaagagagtcatcctgttaccttaaaaaggagtctagggtgagccccagtctgctggtggccatcttcaccacctttggggagagatggcctgagcagacacacaaagcaaagaggtggagagaaactgtgtctttgtgtcattgtttgagtccctggacccagcccagtccccccgactacgctgaacttttcaattgtggaaaacaataaattccatttagttaagaaaatt

SEQ ID NO: 735863 - DNA, 1799 bp, Homo sapiens
tagcctccaaactgtgagacaatacatttctgttgcttaagccactcagttagtgtgctttattttggcagtcttagcaaactaatacatcccccaatccagaactgtcctcctttggataataaaaacagcaataattatagtgtcattaccctgagtgactggtcccactgttggtcattctttgtagatgtgagttattgccctattgagatcagaagtcctctcacttagaggcatatctaagacttttttcttgtggagggagctcactcaactgtaggtaaggtttgactcatctgggttagtagtaagaacaaacttccaagtggcaccatcttaaaggtgcaagcccatgtgggcgatgaccaggtctggtatattaagaggctcttggtagcacattagaaacacctggagagattttaaaatttacaaagcctagccaaaccccagacccattaaccctgactctctgagaataggaccctggcacctgtgttttaaggattctaggtgatttcaatgtgtagccaaggttcactgccatagcctgtcctggaatgcaggtaactaaaacttcagcagattatgaaaaacaaaagttactttcttggatgcatatattcttatagcctcaaaactgaaactgcaaactgaacaatgctgcagtcagatacacacacatatttcaactgcataacttcctttaataatacttttatttttccaaatttgaagactgtccctaagtcatttcttctaaaagttagtaataatcccaccaactcacatttacatagaagttacagtttaaagtttgcatctcgtaataacttggtgagatagggcaagcattatttctaatttgcatatgagaaaaaactaaggctcggatgagttatgtgacttccctgagtcatgttagagtaactaactcctgatttgtaaactgaaggtcccaaatcctgggaactccctcagctctgggcaagccaggacaggtaggtcaccctgcacctacacaaggactgagctgagttctagttacctgctgtgaaggactgtagaggttatctaagccagctcctccttttactggaaaaggaaaagactgagataagtttccaaaacccctgctggagcaccttctacttctagaaagatgttgaggggcttccagggcacaaaggaaagagaagtaactgtgtctccttccccaaccatgtatgtgatacattcattctctaggattggaaattcccagaaagctgtgtcagcaatgagatttgtttcattgttttgccttgttttgtcattgagttgttatagttaaagtttattattttttaatgcagaaaaaagtgacttttgggggagtgcagagttctatgaatttttaacacatgtctagttatttgaccacaaccgtaatcaagatacagaacagttttatcatttcaagtgctctcctgctatgcttttataacacacccttccccaccccaactcctggcaattactgctctattctccgtaactgtagttttgccttttcgagaatatcatataaataatcatgtattatgtaacattctgagacaggcttctttcacccagcataatgcctttgagattcatccagatcgttgtgtgtatcagtagtttgtttttattactgggttatagttcattgtatggatataccacagtttctttagccattcacccactgaaagtcatttgggttgtttctaggctttggtgattatgaataaagctgctatcaacatccacgt

SEQ ID NO: 735864 - DNA, 760 bp, Homo sapiens
  misc_feature (1)..(1): n is a, c, g, or t
ncaagtaaaggcgctgttaggagcaaggagcaggcttagctgggtccacagagggactaagctccttagtgacctgttactgcctcatctacggagtttgaactccattcaccatcacctttgagaatttggccttgttttaactaaggattgttgaagttaattataacaagggaccatcctcaccctgtgtttgctttgttccattaaacgtgcgtttggcctaatgaagtcagtgaatgttcctcttttttcttttttggtttctttgactgatttttggatgatatatgttgctttatttctcccattttctttgattactgtggacaaaggaaaacactgaggcaaaagtaggtcgtcaatcacattactttgacccagttgtgcagaacccctttcctacctgcaggtgttaattccaattcaatgcaaatatccttttcaatccggtccattcttggagaagaaacccattgtaagagctgtcttctgtggttgggatattactttgtaaagtattaaagcactaaaccagtttttgcaatatgtagtaaatcttgctttcattttggaaaacttccagtaatgactactgcactttttatagaagaattgtatttaatttctttcttttatgaaagattatttcaagtaaaaatagctctgtaatctgtgtgacatggcttctccattacctgacacagagagaagctttgatgcctactcaataaaattaacatgtttgtaaagtaaaaaa

SEQ ID NO: 735865 - DNA, 631 bp, Homo sapiens
  misc_feature (1)..(1): n is a, c, g, or t
ncaagtaaaggcgctgttaggagcaaggagcaggcttagctgggtccacagagggactaagctccttagtgacctgttactgcctcatctacggagtttgaactccattcaccatcacctttgagaatttggccttgttttaactaaggattgttgaagttaattataacaagggaccatcctcaccctgtgtttgctttgttccattaaacgtgcgtttggcctaatgaagtcagtgaatgttcctcttttttcttttttggtttctttgactgatttttggatgatatatgttgctttatttctcccattttctttgattactgtggacaaaggaaaacactgaggcaaaagtaggtcgtcaatcacattactttgacccagttgtgcagaacccctttcctacctgcaggtgttaattccaattcaatgcaaatatccttttcaatccggtccattcttggagaagaaacccattgtaagagctgtcttctgtggttgggatattactttgtaaagtattaaagcactaaaccagtttttgcaatatgtagtaaatcttgctttcattttggaaaacttccagtaatgactactgcacactgtcgagagggatcctctagacgcccca

SEQ ID NO: 735866 - DNA, 324 bp, Homo sapiens; identical to SEQ ID NO: 443850

SEQ ID NO: 735867 - DNA, 1923 bp, Homo sapiens
agcggagttggcgcgggccgcgggcgaggcggggccgcgcgcggggtcccctcctcctgccggtcaggtcccctcaggagcgccgggcgcagtctgcgcctcccgctccccgcctccggccgggtccgggacgccgcggctgtggggtcggcccgctaaggacaaggtcgggagactgggtggcgatgcccgagtgcgactggaggcagccgagcggaggcgacggcggttgggatctgtccctcctgaccggggagcgggactcggacgggcgccggtgaggaggaggagaagcggcggcggagaggttttctgcggccggaattcccttcaacagcatccctgtcggcgcccgcgagcgcagtctcgccgggcaggggcgccggggaagatggagactgggggccgggcccgcactggtaccccgcagccagcggccccgggggtgtggagggctcggccggcgggcggcggcggcgggggcgcctcctcctggctgctggacgggaacagctggctgctgtgctatggcttcctctacctggcgctctacgcgcaggtgtcccagtccaagccgtgcgagaggaccggctcctgcttctcgggccgctgtgtcaactccacctgcctctgcgacccgggctgggtgggggaccagtgccagcactgccagggcaggttcaagttaacagaaccttctggatatttaacagatggcccaattaactataaatataaaactaaatgtacttggctcattgaaggctatccaaatgcagtgttaagattaagattcaatcattttgctacagaatgtagctgggatcatatgtatgtttatgatggagattcaatatatgcacctttaatagctgtacttagtggtttgatagtccctgaaataaggggcaatgaaactgtgcctgaagttgttactacatctggctatgcactgttacatttttttagtgatgctgcgtataatctaactggtttcaacattttctattcaatcaattcttgtcctaacaattgctctggtcatgggaagtgtacaactagtgtctctgttccaagtcaagtatattgtgaatgtgataaatactggaagggtgaagcttgtgatattccttactgtaaagccaattgcggcagtccagatcacggttactgtgacctgactggagaaaaattatgtgtctgcaatgatagttggcaaggtcctgattgttctttgaatgttccctctactgagtcttactggattctgccaaacgttaaacccttcagtccttctgtaggtcgggcttcacataaagcagttttacacgggaaatttatgtgggtgattggtggatatacttttaactacagttcttttcaaatggtcctaaattacaatttagaaagcagtatatggaatgtaggaactccatcaaggggacctctccagagatatggacactctcttgctttatatcaggaaaacatctttatgtatggaggcagaattgaaacaaatgatggcaatgtcacagatgaattatgggtttttaacatacatagtcagtcatggagtacaaaaactcctactgttcttggacatggtcagcagtatgctgtggagggacattcagcacatattatggagttggatagtagagatgttgtcatgatcataatatttggatattctgcaatatatggttatacaagcagcatacaggaataccatatctcatcaaacacttggcttgttccagaaactaaaggagctattgtacaaggtggatatggccatactagtgtgtatgatgaaataacaaagtccatttatgttcatggagggtataaagcattgccagggaacaaatatggattggttgatgatctttataaatatgaagttaacactaagacttg

SEQ ID NO: 735868 - DNA, 1667 bp, Homo sapiens
agcggagttggcgcgggccgcgggcgaggcggggccgcgcgcggggtcccctcctcctgccggtcaggtcccctcaggagcgccgggcgcagtctgcgcctcccgctccccgcctccggccgggtccgggacgccgcggctgtggggtcggcccgctaaggacaaggtcgggagactgggtggcgatgcccgagtgcgactggaggcagccgagcggaggcgacggcggttgggatctgtccctcctgaccggggagcgggactcggacgggcgccggtgaggaggaggagaagcggcggcggagaggttttctgcggccggaattcccttcaacagcatccctgtcggcgcccgcgagcgcagtctcgccgggcaggggcgccggggaagatggagactgggggccgggcccgcactggtaccccgcagccagcggccccgggggtgtggagggctcggccggcgggcggcggcggcgggggcgcctcctcctggctgctggacgggaacagctggctgctgtgctatggcttcctctacctggcgctctacgcgcaggtgtcccagtccaagccgtgcgagaggaccggctcctgcttctcgggccgctgtgtcaactccacctgcctctgcgacccgggctgggtgggggaccagtgccagcactgccagggcaggttcaagttaacagaaccttctggatatttaacagatggcccaattaactataaatataaaactaaatgtacttggctcattgaaggctatccaaatgcagtgttaagattaagattcaatcattttgctacagaatgtagctgggatcatatgtatgtttatgatggagattcaatatatgcacctttaatagctgtacttagtggtttgatagtccctgaaataaggggcaatgaaactgtgcctgaagttgttactacatctggctatgcactgttacatttttttagtgatgctgcgtataatctaactggtttcaacattttctattcaatcaattcttgtcctaacaattgctctggtcatgggaagtgtacaactagtgtctctgttccaagtcaagtatattgtgaatgtgataaatactggaagggtgaagcttgtgatattccttactgtaaagccaattgcggcagtccagatcacggttactgtgacctgactggagaaaaattatgtgtctgcaatgatagttggcaaggtcctgattgttctttgaatgttccctctactgagtcttactggattctgccaaacgttaaacccttcagtccttctgtaggtcgggcttcacataaagcagttttacacgggaaatttatgtgggtgattggtggatatacttttaactacagttcttttcaaatggtcctaaattacaatttagaaagcagtatatggaatgtaggaactccatcaaggggacctctccagagatatggacactctcttgctttatatcagcatcaaacacttggcttgttccagaaactaaaggagctattgtacaaggtggatatggccatactagtgtgtatgatgaaataacaaagtccatttatgttcatggagggtataaagcattgccagggaacaaatatggattggttgatgatctttataaatatgaagttaacactaagacttg

SEQ ID NO: 735869 - DNA, 1403 bp, Homo sapiens
agcggagttggcgcgggccgcgggcgaggcggggccgcgcgcggggtcccctcctcctgccggtcaggtcccctcaggagcgccgggcgcagtctgcgcctcccgctccccgcctccggccgggtccgggacgccgcggctgtggggtcggcccgctaaggacaaggtcgggagactgggtggcgatgcccgagtgcgactggaggcagccgagcggaggcgacggcggttgggatctgtccctcctgaccggggagcgggactcggacgggcgccggttaacagaaccttctggatatttaacagatggcccaattaactataaatataaaactaaatgtacttggctcattgaaggctatccaaatgcagtgttaagattaagattcaatcattttgctacagaatgtagctgggatcatatgtatgtttatgatggagattcaatatatgcacctttaatagctgtacttagtggtttgatagtccctgaaataaggggcaatgaaactgtgcctgaagttgttactacatctggctatgcactgttacatttttttagtgatgctgcgtataatctaactggtttcaacattttctattcaatcaattcttgtcctaacaattgctctggtcatgggaagtgtacaactagtgtctctgttccaagtcaagtatattgtgaatgtgataaatactggaagggtgaagcttgtgatattccttactgtaaagccaattgcggcagtccagatcacggttactgtgacctgactggagaaaaattatgtgtctgcaatgatagttggcaaggtcctgattgttctttgaatgttccctctactgagtcttactggattctgccaaacgttaaacccttcagtccttctgtaggtcgggcttcacataaagcagttttacacgggaaatttatgtgggtgattggtggatatacttttaactacagttcttttcaaatggtcctaaattacaatttagaaagcagtatatggaatgtaggaactccatcaaggggacctctccagagatatggacactctcttgctttatatcaggaaaacatctttatgtatggaggcagaattgaaacaaatgatggcaatgtcacagatgaattatgggtttttaacatacatagtcagtcatggagtacaaaaactcctactgttcttggacatggtcagcagtatgctgtggagggacattcagcacatattatggagttggatagtagagatgttgtcatgatcataatatttggatattctgcaatatatggttatacaagcagcatacaggaataccatatctgtgagttacttaaaaattgtaatttctttattgattgggaatgtttttctctttaataaaatcttcatatg

SEQ ID NO: 735870 - DNA, 1598 bp, Homo sapiens
agcggagttggcgcgggccgcgggcgaggcggggccgcgcgcggggtcccctcctcctgccggtcaggtcccctcaggagcgccgggcgcagtctgcgcctcccgctccccgcctccggccgggtccgggacgccgcggctgtggggtcggcccgctaaggacaaggtcgggagactgggtggcgatgcccgagtgcgactggaggcagccgagcggaggcgacggcggttgggatctgtccctcctgaccggggagcgggactcggacgggcgccgggatttcgccagggaataaaaatgttcttcaaatgtttcttgaggatagaagattgatagttgggggaagaaatgcagaagcaaatatagtatcaaaagtggtacttcagttctcttagcattgattccagtcttctgttttcatttgaaaagaataaagcactcagaataacaagccattccttccttacacaggttaacagaaccttctggatatttaacagatggcccaattaactataaatataaaactaaatgtacttggctcattgaaggctatccaaatgcagtgttaagattaagattcaatcattttgctacagaatgtagctgggatcatatgtatgtttatgatggagattcaatatatgcacctttaatagctgtacttagtggtttgatagtccctgaaataaggggcaatgaaactgtgcctgaagttgttactacatctggctatgcactgttacatttttttagtgatgctgcgtataatctaactggtttcaacattttctattcaatcaattcttgtcctaacaattgctctggtcatgggaagtgtacaactagtgtctctgttccaagtcaagtatattgtgaatgtgataaatactggaagggtgaagcttgtgatattccttactgtaaagccaattgcggcagtccagatcacggttactgtgacctgactggagaaaaattatgtgtctgcaatgatagttggcaaggtcctgattgttctttgaatgttccctctactgagtcttactggattctgccaaacgttaaacccttcagtccttctgtaggtcgggcttcacataaagcagttttacacgggaaatttatgtgggtgattggtggatatacttttaactacagttcttttcaaatggtcctaaattacaatttagaaagcagtatatggaatgtaggaactccatcaaggggacctctccagagatatggacactctcttgctttatatcaggaaaacatctttatgtatggaggcagaattgaaacaaatgatggcaatgtcacagatgaattatgggtttttaacatacatagtcagtcatggagtacaaaaactcctactgttcttggacatggtcagcagtatgctgtggagggacattcagcacatattatggagttggatagtagagatgttgtcatgatcataatatttggatattctgcaatatatggttatacaagcagcatacaggaataccatatctgtgagttacttaaaaattgtaatttctttattgattgggaatgtttttctctttaataaaatcttcatatg

SEQ ID NO: 735871 - DNA, 1162 bp, Homo sapiens
gtattctggaaacactctcttaatttccccgctacagttaacagaaccttctggatatttaacagatggcccaattaactataaatataaaactaaatgtacttggctcattgaaggctatccaaatgcagtgttaagattaagattcaatcattttgctacagaatgtagctgggatcatatgtatgtttatgatggagattcaatatatgcacctttaatagctgtacttagtggtttgatagtccctgaaataaggggcaatgaaactgtgcctgaagttgttactacatctggctatgcactgttacatttttttagtgatgctgcgtataatctaactggtttcaacattttctattcaatcaattcttgtcctaacaattgctctggtcatgggaagtgtacaactagtgtctctgttccaagtcaagtatattgtgaatgtgataaatactggaagggtgaagcttgtgatattccttactgtaaagccaattgcggcagtccagatcacggttactgtgacctgactggagaaaaattatgtgtctgcaatgatagttggcaaggtcctgattgttctttgaatgttccctctactgagtcttactggattctgccaaacgttaaacccttcagtccttctgtaggtcgggcttcacataaagcagttttacacgggaaatttatgtgggtgattggtggatatacttttaactacagttcttttcaaatggtcctaaattacaatttagaaagcagtatatggaatgtaggaactccatcaaggggacctctccagagatatggacactctcttgctttatatcaggaaaacatctttatgtatggaggcagaattgaaacaaatgatggcaatgtcacagatgaattatgggtttttaacatacatagtcagtcatggagtacaaaaactcctactgttcttggacatggtcagcagtatgctgtggagggacattcagcacatattatggagttggatagtagagatgttgtcatgatcataatatttggatattctgcaatatatggttatacaagcagcatacaggaataccatatctgtgagttacttaaaaattgtaatttctttattgattgggaatgtttttctctttaataaaatcttcatatg

SEQ ID NO: 735872 - DNA, 1362 bp, Homo sapiens
gatcacggttactgtgacctgactggagaaaaattatgtgtctgcaatgatatttcggcaggtcctgacactccggtgaaagtcacctccacggagtcgtactggattccgccacacgttaaacccttcagtccttctgtaggtcgggcttcacataaagcagttttacacgggaaatttatgtgggtgattggtggatatacttttaactacagttcttttcaaatggtcctaaagttaacagaaccttctggatatttaacagatggcccaattaactataaatataaaactaaatgtacttggctcattgaaggctatccaaatgcagtgttaagattaagattcaatcattttgctacagaatgtagctgggatcatatgtatgtttatgatggagattcaatatatgcacctttaatagctgtacttagtggtttgatagtccctgaaataaggggcaatgaaactgtgcctgaagttgttactacatctggctatgcactgttacatttttttagtgatgctgcgtataatctaactggtttcaacattttctattcaatcaattcttgtcctaacaattgctctggtcatgggaagtgtacaactagtgtctctgttccaagtcaagtatattgtgaatgtgataaatactggaagggtgaagcttgtgatattccttactgtaaagccaattgcggcagtccagatcacggttactgtgacctgactggagaaaaattatgtgtctgcaatgatagttggcaaggtcctgattgttctttgaatgttccctctactgagtcttactggattctgccaaacgttaaacccttcagtccttctgtaggtcgggcttcacataaagcagttttacacgggaaatttatgtgggtgattggtggatatacttttaactacagttcttttcaaatggtcctaaattacaatttagaaagcagtatatggaatgtaggaactccatcaaggggacctctccagagatatggacactctcttgctttatatcaggaaaacatctttatgtatggaggcagaattgaaacaaatgatggcaatgtcacagatgaattatgggtttttaacatacatagtcagtcatggagtacaaaaactcctactgttcttggacatggtcagcagtatgctgtggagggacattcagcacatattatggagttggatagtagagatgttgtcatgatcataatatttggatattctgcaatatatggttatacaagcagcatacaggaataccatatctgtgagttacttaaaaattgtaatttctttattgattgggaatgtttttctctttaataaaatcttcatatg

SEQ ID NO: 735873 - DNA, 666 bp, Homo sapiens
  misc_feature (661)..(661): n is a, c, g, or t
agatccaggtaacacatttttattgtaaaatatccacttgagttgaaaaagttgtcaaatacaagtttaaggatacgttatatattttgcttagttgtgaaaataatgtacatttagaatttaaatcacttaaattcattccattgtaccaatattatttatgcatccttatacttaagaatagcatctactaagacaattatgcagaaaagatcccagggataatgcaacacctaaatataatggtgggggagataagagtaaatgtactaatgagttgtctaactaaagaatagttcaattttattttttcaaaggcattttattcttgactttaacattaaaagtactcaagggattggggcataagtcagtgagaaggcttattaagttttctacattaaggtatgaagagtttttaagtcttacgggctttaagactttttttaaagaaaatcactgactacatgagctaaaagtagaaaagcatattttaagtgttaatctgaataccttaaatatagtgattttaatgctcaaaattacaatttagatattctggtatttagagaaatgtaaaaataccggcattttagtatttagatttgctaaaacatagtaactcaaagcagttacgttttgagttatccataatattagnatagg

SEQ ID NO: 735874 - DNA, 1866 bp, Homo sapiens
  misc_feature (1346)..(1346): n is a, c, g, or t
cattgctgtgaaatcttttatttttgttttatgacacagcatcaatttcatgaatactttgaaagggccattagaaaaaataagagccaatttgggtcatttgagaaacattttcagcacaattacagtgggggcacgggccgttcggctccagctgggttttcccagatgcaacaatcgcggttctggcttctccactggtggggatggggatcgcgccttcggagctctcagggcgcctgtctgtcgggggctgggtgcgtccacagccccgggggatggcgcgtggcgtagcccaggaacggcatgtgggtgggtctctgacctgcttgtgcagggacttgagggacctcatcccgatggccgaggcaggggctccccacgggataaaaggatccggcctggccttggggtccaagaggagggccaagggagtggacctggcccctgtcccctctcctcctcgaaacactggacaccctgaagcgagactatggctgctgaggatcctgtgtgatgtggccgcggggcgtcccctctggcctcaggggaagaaggactgggcggctcggcccaggtcaccctctaggaagcagaggaggtgcaggtgccagttcagggcagaaagaaagagccactgaggccattgtcctgaaggcggtgacccccaggcactcctgctgccccccaggaagccctgggctgcgctggacaccgggccgagtctccgtcttctggaccgaggctcttctgggctttcaggctcagctcgtcggtccattcagcaagttcaggggcagactgagccctgctctggccatggctcagccggaaacaagagctgccatgttcgtagcacctgagtacccccgccggggaggtctctgtcatctcatgtccccgctgggcaggtgccccacagcaggggagccctgggctctctctgtcccaagctcccagctgcatccaacctcagctcacagttgtggatcaccctgaccttccagagttcccctcccaaggggcagacccagcatcctggagtccccaccccgagctgtgctgaaggacagctggggcggtagggccaggaccagaccaggcctctgacaaagtctcatcgaaatgaaaccaatgtgcccgggccaccttaaggggccctgaccaggaaagttaggcctgaagctgccaatgccagatcctcagggtgttacctgtgtccttacgtggctaggcctgaccccaagtgccacaacccccaacttggggagggcagggccacctggtggggacgggccagccagagcccttggtctcagctgtggcagccacatccctggcccggncttgccctgagggcctttgggacatctctgggcagaggcatgagggaggggagagtccagtagccaagtccggcagagccagtggggcaggaacgcccagcagaaggaagctgggcttggggcagcagagacgtgccaagccaccaggcctggccatgaggatgaagcacctgggcgggggaagggacgtacctgccaccccaaggctccaccaggcagagagacccaacgggctgccaactcaaaccagaacccaagcacgtcataatgtcctacagacagcatggtgccaattatatgataaccccacatcagtgagaataagtaacggcggtggcaggggctgggtggggggcacactcgctccccacacaggccagggctgagcaggaggcctcagagctgctcttggggagcaacccagggccttggggcttctctcccatgcccagaagggctgcaccaggaacacccagccctgtctcctgctccagttccacagcacccctcacaccctgcc

SEQ ID NO: 735875 - DNA, 2495 bp, Homo sapiens
tgagggcttcatggggtctgtgctccaggtctgggtgatcgccaacaaagtgcagggcagccacagcctgagccgggggacagtgtgtcatcgcaccggcgtgcagcctcacgagcccaagggccacggctgggactacggcatcgggggaggctgggaccatatctctgtccgggccaatgccaccagggccccccggagctcgtcccaggagcaggagccgagtgccccaccagaggcccatggccccgtctgctgctgaggcccccccacacacctacatgcagggacggtgcccagtttgggggatcaaggctgagccattcttgtgctggagtgtgcaccgtgggagcaatgtggcccaggtggactcaggagggaacctggccccaaggctgcggccacttcagaggcactggctgagacggccctgaaatgtgaagctccgcggacactcccacacgtgtccccgtctgcgaggagtcccggggtgtggggcatggggtggggctgcacctcccagaggcccctcccacccttcccttcccctctcccttctgcctttccaggactagaaccgggaacctggagccctccgggaacgccggccctggggcagcagagccaggatggagccctcctgagctggcatctcagacagcacccgggcccgccacccctcaccaagagagatggccatggggctcagggcctctttaccatgtgcagtgaccatttctcagagcaggacttgcaaagaggctttaatttcaaaagtgaaggaaggaggccaggcgccgtggctcacgcctgtaatcccagcactttgggaggctgaggtgggcagatcacctaggtcaagagtttcaaaccagacgggccaacatggtgaaaccccatctctactaaaaatacaaaaaaaaaaaaaattagctgggcatggtggtgggtgcctgtaatcccagctactcgggaggctgaggcaggagaatcgtttgaacccgggaggcggaggctgcagtgagccgagatcatgccactgcactccagcctgggcgacagagactccatctcaaaaaaaaaaaaaaaaaagtgaaggaaggagacagcagattggaaataacactggagtggatgggatgtcctcttccctgagggggccggggtaccagacgggaggctgggagaggatgagaggctgccccatggctggaggcagcgtccgtgtgtgcagtcaccatcatcaacccccattcggccccttccccagatgcgctggtgacaggggcttcttggatgtcaaatcatgttgtaggagggtgcagactgcgggcttctgtggggagcagtactactgtgtctgtcggcagtggccatgggaccctcagcccgtcctgtacatggagcagggtgcacagtcaccctccatcctgtggcgagaggctggcccggcccggccaggcgaggcagaaggtgtcggccaagtggccccgaccccatcccgcaatctctcagctgctttttattacctttgtgccccatttgggagtttgcttcctccacctggacactttgcccgggaggtcatcagagcccaaccccaggctctgctcggttggagaggggatgacttcaccaccacctgaccttcctagggtcctggtctcactgtcagctgggggtccgttgtgtgtatttgtacagttttgctgtatggggtttgtcacccaaaagctgatgctgagaaaggcctccctggggcccctcccgcgggcatctgagagacctggtgttccagtgtttctggaaatgggtcccagtgccgccggctgtgaagctctcagatcaatcacgggaagggcctggcggtggtggccacctggaaccaccctgtcctgtctgtttacatttcactatcaggttttctctgggcattacgatttgttcccctacaacagtgacctgtgcattctgctgtggcctgctgtgtctgcaggtggctctcagcgaggtacggggagggcgtcaccctgcagaacggcagagtgacgcgtcctctcgctgctgagcaccagctgtttacctgccctgcatcacttcctcggatactttactcaataagcatttcccctggagtgtccgtgccctggtgttttttatcgatacgttgattaaaacgcgtggttccccgtgtgcctgaagcagaaaaaaaaaaaaaaaaaaacaaaacaaaaaaaaaaaccggggggaataaagtgggggggcgaggaaaacaaggggaaacaaaaggggcccaggggaaacagaaggacaccgagaccgagatttgttggacaacagagggggaaaaaatcaggccggggaacccacataaagaggaggcgcgcaaaaataaattgcgaaagcgcacgggtcaccgcggggataatagaggctgcacaaaaaggaaagagaacaagagggacgaagagaacaaaaaagacacgggggagaaa

SEQ ID NO: 735876 - DNA, 3244 bp, Homo sapiens
tttgaaatgagacctttgctctggagtccggcagggctcagaccctgctcaggacaagcccctaggaccagtggacactgcctgtggtccgagtgggtccctgtgccctggggcagttggcccaggaatgaggcgggtggggcgggggtgacagaggtgggccaaggggacactgcggctctttggcacccagtccttggtggtcagcaccccggtgaggtgcacacgcccacgggggcgctttccctgctcgcaggaggatgagatgcgcccaggatttcaacaagcaccgagatcaggccgggtggggctgtgtgactcccggctgtcccccagccacctatgctgcccacgcgctaggcccatttctgctggtcctggaggtggggccctgggggtgggggccctggtgacctcagcgcccctccttgctatccccagggctcctcctggctgcacgttggcaccgaccagcccttcgcctccatctccatcggggcctgctaccaggtgtgggccgtggcaagggacggctccgccttctaccggggatccgtgtacccctcgcagccagccggtgactgctggtaccacatcccgtccccaccgagacagaggctgaagcaggtgtccgcggggcagacgtcggtgtatgccctggatgagaatggaaacctgtggtatcgccaagggatcacgcccagctacccgcagggctccagctgggagcacgtgtccaacaacgtgtgccgagtgtccgtggggcccctggaccaggtctgggtgatcgccaacaaagtgcagggcagccacagcctgagccgggggacagtgtgtcatcgcaccggcgtgcagcctcacgagcccaagggccacggctgggactacggcatcgggggaggctgggaccatatctctgtccgggccaatgccaccagggccccccggagctcgtcccaggagcaggagccgagtgccccaccagaggcccatggccccgtctgctgctgaggcccccccacacacctacatgcagggacggtgcccagtttgggggatcaaggctgagccattcttgtgctggagtgtgcaccgtgggagcaatgtggcccaggtggactcaggagggaacctggccccaaggctgcggccacttcagaggcactggctgagacggccctgaaatgtgaagctccgcggacactcccacacgtgtccccgtctgcgaggagtcccggggtgtggggcatggggtggggctgcacctcccagaggcccctcccacccttcccttcccctctcccttctgcctttccaggactagaaccgggaacctggagccctccgggaacgccggccctggggcagcagagccaggatggagccctcctgagctggcatctcagacagcacccgggcccgccacccctcaccaagagagatggccatggggctcagggcctctttaccatgtgcagtgaccatttctcagagcaggacttgcaaagaggctttaatttcaaaagtgaaggaaggaggccaggcgccgtggctcacgcctgtaatcccagcactttgggaggctgaggtgggcagatcacctaggtcaagagtttcaaaccagacgggccaacatggtgaaaccccatctctactaaaaatacaaaaaaaaaaaaaattagctgggcatggtggtgggtgcctgtaatcccagctactcgggaggctgaggcaggagaatcgtttgaacccgggaggcggaggctgcagtgagccgagatcatgccactgcactccagcctgggcgacagagactccatctcaaaaaaaaaaaaaaaaaagtgaaggaaggagacagcagattggaaataacactggagtggatgggatgtcctcttccctgagggggccggggtaccagacgggaggctgggagaggatgagaggctgccccatggctggaggcagcgtccgtgtgtgcagtcaccatcatcaacccccattcggccccttccccagatgcgctggtgacaggggcttcttggatgtcaaatcatgttgtaggagggtgcagactgcgggcttctgtggggagcagtactactgtgtctgtcggcagtggccatgggaccctcagcccgtcctgtacatggagcagggtgcacagtcaccctccatcctgtggcgagaggctggcccggcccggccaggcgaggcagaaggtgtcggccaagtggccccgaccccatcccgcaatctctcagctgctttttattacctttgtgccccatttgggagtttgcttcctccacctggacactttgcccgggaggtcatcagagcccaaccccaggctctgctcggttggagaggggatgacttcaccaccacctgaccttcctagggtcctggtctcactgtcagctgggggtccgttgtgtgtatttgtacagttttgctgtatggggtttgtcacccaaaagctgatgctgagaaaggcctccctggggcccctcccgcgggcatctgagagacctggtgttccagtgtttctggaaatgggtcccagtgccgccggctgtgaagctctcagatcaatcacgggaagggcctggcggtggtggccacctggaaccaccctgtcctgtctgtttacatttcactatcaggttttctctgggcattacgatttgttcccctacaacagtgacctgtgcattctgctgtggcctgctgtgtctgcaggtggctctcagcgaggtacggggagggcgtcaccctgcagaacggcagagtgacgcgtcctctcgctgctgagcaccagctgtttacctgccctgcatcacttcctcggatactttactcaataagcatttcccctggagtgtccgtgccctggtgttttttatcgatacgttgattaaaacgcgtggttccccgtgtgcctgaagcagaaaaaaaaaaaaaaaaaaacaaaacaaaaaaaaaaaccggggggaataaagtgggggggcgaggaaaacaaggggaaacaaaaggggcccaggggaaacagaaggacaccgagaccgagatttgttggacaacagagggggaaaaaatcaggccggggaacccacataaagaggaggcgcgcaaaaataaattgcgaaagcgcacgggtcaccgcggggataatagaggctgcacaaaaaggaaagagaacaagagggacgaagagaacaaaaaagacacgggggagaaa

SEQ ID NO: 735877 - DNA, 444 bp, Homo sapiens; identical to SEQ ID NO: 198778

SEQ ID NO: 735878 - DNA, 2718 bp, Homo sapiens
  misc_feature (1)..(2): n is a, c, g, or t
nnaccctcttgcccggtccccgggagggccggtccgctcctcccggacgccgaggacctaccaccgcgacttcgccccgcccggcgcgggcccaggaccctgatgtcgcttttgaacagcccctgcacctggcagccagcgagctactgtagtaggcattgccgactgtttgcataccggatgggagtgacagtgtaatagaaaaacaagcaagaaaccttttagcgctggaatcccatgggcggcttctgtgagaagctcctgctgagtgaccgctgggggtggagtgacgtgagtgggctccagcaccggccgctggacagggtggcactgccctcgccgcactgggagtgggagtctgactggtacgtggatgagaattttggaggtgaacccactgagaaaggggggtggacgtacgccatcgactttcccgccacctacacgaaagacaagaagtggaattcttgtgtgcggcgccggaagtggatccggtacaggagatacaagtcccgggacatctgggccaagatcccctcgaaggatgaccccaaggagctgcccgaccccttcaacgacctctctgtagggggctgggagatcacggaggagcctgtgggccgcctgtcagtgtgggctgtgtctctgcagggcaaggtgctgtgtccctgtcttgcctcccaggtgtggtacagagaggacgtcagccactccaaccccgaagggtcctcctggtccctgctggacacccccggggaggtggttcagatcagctgtgggccccacgacctcctgtgggccacactctgggagggacaggccctggtccgggaaggaatcaacaggagcaatcccaaaggaagttcctggtccatcgtggagcctcctggatctgaaaacggggtcatgcacatctcggtgggagtcagcgtggtctgggctgtcaccaaggactggaaggtgtggttccgaagaggcgtcaactctcacaatccctgcggcaccagttggattgagatggttggtgagatgacgatggtgaacgtgggaatgaacgaccaggtgtggggcattggctgtgaggaccgagccgtgtacttccggcagggtgtcacccccagcgagctcagtgggaagacctggaaagccatcatcgcggcccgagagtgtgaccggtcacactctggcagctcgtctagtctcctcagtgccggctgcttcttcggtgatgaggtgaggggtagtggcgagtctgcccccagcgacaccgatgcctcctcggaagtcgagagaccagggcctggccagattctccctgcagaacctctagacgattccaagaatgccacagggaactcagcctcaggcctgggggctggcaggaccgcagaagataccgtggaagatgcctgcccagccgagggcagcagggaggccagacccaacacgcaccccggcccggcccccaccccggccgagctgccctggaccaatattgacctcaaggaggccaagaaagtgcccagccactcggccgctggcttccccgagaccaccagcctctcctctctggggctcctcccactgggcttggaggagccgtatggggtggatgaccacccgctgtgggcctgggtgtcgggaggcggctgcgtggtggaggcatgtgccatgcccagatggttcactgtccaggcgggcctgtcctcctcggtacacatgctgtccctgtccatcacgccggcccagaccgctgcctggaggaagcagatcttccagcagctcacggaaaggaccaagcgggagctggagaacttcagacactacgagcaggccgtggagcagtcggtgtgggtgaagaccggggcgctgcagtggtggtgcgactggaagccccacaagtgggtggacgtgcgcttggccctggagcagttcacggggcacgacggcgtccgggacagcatcctcttcatctactatgtggtccacgaggagaagaagtacatccacatattcctgaatgaggtggtggcgctggtcccagtgctgaacgagaccaagcactcctttgccctgtacacccctgagcggacacggcagaggtggccggtgcgtctggctgctgccaccgagcaggacatgaatgactggctcgccctgctcagcctgtcttgctgcgagagccggaaggtgcagggccgcccgtccccgcaggccatctggtccatcacctgcaagggggacatcttcgtgagcgagcccagcccagacctggaggcccacgagcaccccctgccctgcgaccagatgttttggcggcagatgggaggccacctgcggatggtggaggccaacagccggggcgtggtgtggggcatcggctatgaccacacggcctgggtatacacaggcggctatggaggcggctgcttccaaggcctggccagcagcaccagtaacatctacacgcagtcagacgtgaagtgtgttcacatctatgagaaccagcgctggaaccccgtcacaggctacaccagcagtagagacaggatttcaccatgttggtgaggctggtctccaactcctgaactcccgaagcccgcctcagcctcccaaagtgttgagattacaggcatcatcaggcgagagccactgcgcccggcctccacttctgccttttccaaattgacgaaataaacacttagtaatagaaacaac

SEQ ID NO: 735879 - DNA, 5367 bp, Homo sapiens
  misc_feature (1)..(2): n is a, c, g, or t
  misc_feature (2245)..(2245): n is a, c, g, or t
nnaccctcttgcccggtccccgggagggccggtccgctcctcccggacgccgaggacctaccaccgcgacttcgccccgcccggcgcgggcccaggaccctgatgtcgcttttgaacagcccctgcacctggcagccagcgagctactgtagtaggcattgccgactgtttgcataccggatgggagtgacagtgtaatagaaaaacaagcaagaaaccttttaggtaggactcctaaggctcagaggaagttacctccagccgctgccatgcccaactcagtgctgtgggcggtggacctcttcgggagagtgtacacgctgtccacagcaggccagtactgggaaatgtgcaaggactcccagctggagttcaagcgcgtcagcgccaccacgcagtgctgctggggcattgcctgtgacaaccaggtctacgtgtatgtgtgtgccagcgatgtccccatccgccgccgagaggaggcctatgagaatcagcgctggaatcccatgggcggcttctgtgagaagctcctgctgagtgaccgctgggggtggagtgacgtgagtgggctccagcaccggccgctggacagggtggcactgccctcgccgcactgggagtgggagtctgactggtacgtggatgagaattttggaggtgaacccactgagaaaggggggtggacgtacgccatcgactttcccgccacctacacgaaagacaagaagtggaattcttgtgtgcggcgccggaagtggatccggtacaggagatacaagtcccgggacatctgggccaagatcccctcgaaggatgaccccaaggagctgcccgaccccttcaacgacctctctgtagggggctgggagatcacggaggagcctgtgggccgcctgtcagtgtgggctgtgtctctgcagggcaaggtgtggtacagagaggacgtcagccactccaaccccgaagggtcctcctggtccctgctggacacccccggggaggtggttcagatcagctgtgggccccacgacctcctgtgggccacactctgggagggacaggccctggtccgggaaggaatcaacaggagcaatcccaaaggaagttcctggtccatcgtggagcctcctggatctgaaaacggggtcatgcacatctcggtgggagtcagcgtggtctgggctgtcaccaaggactggaaggtgtggttccgaagaggcgtcaactctcacaatccctgcggcaccagttggattgagatggttggtgagatgacgatggtgaacgtgggaatgaacgaccaggtgtggggcattggctgtgaggaccgagccgtgtacttccggcagggtgtcacccccagcgagctcagtgggaagacctggaaagccatcatcgcggcccgagagtgtgaccggtcacactctggcagctcgtctagtctcctcagtgccggctgcttcttcggtgatgaggtgaggggtagtggcgagtctgcccccagcgacaccgatgcctcctcggaagtcgagagaccagggcctggccagattctccctgcagaacctctagacgattccaagaatgccacagggaactcagcctcaggcctgggggctggcaggaccgcagaagataccgtggaagatgcctgcccagccgagggcagcagggaggccagacccaacacgcaccccggcccggcccccaccccggccgagctgccctggaccaatattgacctcaaggaggccaagaaagtgcccagccactcggccgctggcttccccgagaccaccagcctctcctctctggggctcctcccactgggcttggaggagccgtatggggtggatgaccacccgctgtgggcctgggtgtcgggaggcggctgcgtggtggaggcatgtgccatgcccagatggttcactgtccaggcgggtaagggctcctgcagggcctgggggcatccacatggccaggtgccctgggggtgtggggtgtgggaggaggccggggtcagggggctcgggcaggcctgctgtcctccctggacgcctcactgtgctcagcagctctgagccaggcattgcgctcctctgtggcctccagagaccagcccgaggctgtcaggacctggaagcacggtggccagtgccccttcccctgtctgcagcccctcccctgtgctagcggtggtggctgctttccaggctgaattactgggggagagcaactcatccancagggcaaagggtggaaggaggcttaacagagagcgtagcttttgagctagaaagggctgatttggtggaggggagcgccgtggcttcctgcccagctgcgggcaggacagtgccccggccctgaggctctctctgccccacaggcctgtcctcctcggtacacatgctgtccctgtccatcacgccggcccagaccgctgcctggaggaagcagatcttccagcagctcacggaaaggaccaagcgggagctggagaacttcagacactacgagcaggccgtggagcagtcggtgtgggtgaagaccggggcgctgcagtggtggtgcgactggaagccccacaagtgggtggacgtgcgcttggccctggagcagttcacggggcacgacggcgtccgggacagcatcctcttcatctactatgtggtccacgaggagaagaagtacatccacatattcctgaatgaggtggtggcgctggtcccagtgctgaacgagaccaagcactcctttgccctgtacacccctgagcggacacggcagaggtggccggtgcgtctggctgctgccaccgagcaggacatgaatgactggctcgccctgctcagcctgtcttgctgcgagagccggaaggtgcagggccgcccgtccccgcaggccatctggtccatcacctgcaagggggacatcttcgtgagcgagcccagcccagacctggaggcccacgagcaccccctgccctgcgaccagatgttttggcggcagatgggaggccacctgcggatggtggaggccaacagccggggcgtggtgtggggcatcggctatgaccacacggcctgggtatacacaggcggctatggaggcggctgcttccaaggcctggccagcagcaccagtaacatctacacgcagtcagacgtgaagtgtgttcacatctatgagaaccagcgctggaaccccgtcacaggctacaccagcaggggtctgcccacggaccggtacatgtggagcgatgcctcggggctgcaggagtgcacgaaggctggcacgaagcccccgtccctgcagtgggcctgggtttccgactggttcgtggatttcagcgttccggggggcacggaccaggaggggtggcagtatgccagcgacttccctgcctcataccatgggtccaaaacgatgaaggattttgtgaggaggaggtgctgggccagaaaatgcaagctggtgaccagtgggccctggctggaggtgccccccatcgccctcagggacgtgtccatcatcccggagagcccgggtgccgaggggagtgggcacagcatcgccctctgggccgtcagcgacaagggggatgtgctgtgccgcctgggcgtgtcggagctcaaccctgcgggctcctcctggctgcacgttggcaccgaccagcccttcgcctccatctccatcggggcctgctaccaggtgtgggccgtggcaagggacggctccgccttctaccggggatccgtgtacccctcgcagccagccggtgactgctggtaccacatcccgtccccaccgagacagaggctgaagcaggtgtccgcggggcagacgtcggtgtatgccctggatgagaatggaaacctgtggtatcgccaagggatcacgcccagctacccgcagggctccagctgggagcacgtgtccaacaacgtgtgccgagtgtccgtggggcccctggaccaggtctgggtgatcgccaacaaagtgcagggcagccacagcctgagccgggggacagtgtgtcatcgcaccggcgtgcagcctcacgagcccaagggccacggctgggactacggcatcgggggaggctgggaccatatctctgtccgggccaatgccaccagggccccccggagctcgtcccaggagcaggagccgagtgccccaccagaggcccatggccccgtctgctgctgaggcccccccacacacctacatgcagggacggtgcccagtttgggggatcaaggctgagccattcttgtgctggagtgtgcaccgtgggagcaatgtggcccaggtggactcaggagggaacctggccccaaggctgcggccacttcagaggcactggctgagacggccctgaaatgtgaagctccgcggacactcccacacgtgtccccgtctgcgaggagtcccggggtgtggggcatggggtggggctgcacctcccagaggcccctcccacccttcccttcccctctcccttctgcctttccaggactagaaccgggaacctggagccctccgggaacgccggccctggggcagcagagccaggatggagccctcctgagctggcatctcagacagcacccgggcccgccacccctcaccaagagagatggccatggggctcagggcctctttaccatgtgcagtgaccatttctcagagcaggacttgcaaagaggctttaatttcaaaagtgaaggaaggaggccaggcgccgtggctcacgcctgtaatcccagcactttgggaggctgaggttttctctgggcattacgatttgttcccctacaacagtgacctgtgcattctgctgtggcctgctgtgtctgcaggtggctctcagcgaggtacggggagggcgtcaccctgcagaacggcagagtgacgcgtcctctcgctgctgagcaccagctgtttacctgccctgcatcacttcctcggatactttactcaataagcatttcccctggagtgtccgtgccctggtgttttttatcgatacgttgattaaaacgcgtggttccccgtgtgcctgaagcagaaaaaaaaaaaaaaaaaaacaaaacaaaaaaaaaaaccggggggaataaagtgggggggcgaggaaaacaaggggaaacaaaaggggcccaggggaaacagaaggacaccgagaccgagatttgttggacaacagagggggaaaaaatcaggccggggaacccacataaagaggaggcgcgcaaaaataaattgcgaaagcgcacgggtcaccgcggggataatagaggctgcacaaaaaggaaagagaacaagagggacgaagagaacaaaaaagacacgggggagaaa

SEQ ID NO: 735880 - DNA, 6000 bp, Homo sapiens
  misc_feature (1)..(2): n is a, c, g, or t
nnaccctcttgcccggtccccgggagggccggtccgctcctcccggacgccgaggacctaccaccgcgacttcgccccgcccggcgcgggcccaggaccctgatgtcgcttttgaacagcccctgcacctggcagccagcgagctactgtagtaggcattgccgactgtttgcataccggatgggagtgacagtgtaatagaaaaacaagcaagaaaccttttaggtaggactcctaaggctcagaggaagttacctccagccgctgccatgcccaactcagtgctgtgggcggtggacctcttcgggagagtgtacacgctgtccacagcaggccagtactgggaaatgtgcaaggactcccagctggagttcaagcgcgtcagcgccaccacgcagtgctgctggggcattgcctgtgacaaccaggtctacgtgtatgtgtgtgccagcgatgtccccatccgccgccgagaggaggcctatgagaatcagcgctggaatcccatgggcggcttctgtgagaagctcctgctgagtgaccgctgggggtggagtgacgtgagtgggctccagcaccggccgctggacagggtggcactgccctcgccgcactgggagtgggagtctgactggtacgtggatgagaattttggaggtgaacccactgagaaaggggggtggacgtacgccatcgactttcccgccacctacacgaaagacaagaagtggaattcttgtgtgcggcgccggaagtggatccggtacaggagatacaagtcccgggacatctgggccaagatcccctcgaaggatgaccccaaggagctgcccgaccccttcaacgacctctctgtagggggctgggagatcacggaggagcctgtgggccgcctgtcagtgtgggctgtgtctctgcagggcaaggtgtggtacagagaggacgtcagccactccaaccccgaagggtcctcctggtccctgctggacacccccggggaggtggttcagatcagctgtgggccccacgacctcctgtgggccacactctgggagggacaggccctggtccgggaaggaatcaacaggagcaatcccaaaggaagttcctggtccatcgtggagcctcctggatctgaaaacggggtcatgcacatctcggtgggagtcagcgtggtctgggctgtcaccaaggactggaaggtgtggttccgaagaggcgtcaactctcacaatccctgcggcaccagttggattgagatggttggtgagatgacgatggtgaacgtgggaatgaacgaccaggtgtggggcattggctgtgaggaccgagccgtgtacttccggcagggtgtcacccccagcgagctcagtgggaagacctggaaagccatcatcgcggcccgagagtgtgaccggtcacactctggcagctcgtctagtctcctcagtgccggctgcttcttcggtgatgaggtgaggggtagtggcgagtctgcccccagcgacaccgatgcctcctcggaagtcgagagaccagggcctggccagattctccctgcagaacctctagacgattccaagaatgccacagggaactcagcctcaggcctgggggctggcaggaccgcagaagataccgtggaagatgcctgcccagccgagggcagcagggaggccagacccaacacgcaccccggcccggcccccaccccggccgagctgccctggaccaatattgacctcaaggaggccaagaaagtgcccagccactcggccgctggcttccccgagaccaccagcctctcctctctggggctcctcccactgggcttggaggagccgtatggggtggatgaccacccgctgtgggcctgggtgtcgggaggcggctgcgtggtggaggcatgtgccatgcccagatggttcactgtccaggcgggcctgtcctcctcggtacacatgctgtccctgtccatcacgccggcccagaccgctgcctggaggaagcagatcttccagcagctcacggaaaggaccaagcgggagctggagaacttcagacactacgagcaggccgtggagcagtcggtgtgggtgaagaccggggcgctgcagtggtggtgcgactggaagccccacaagtgggtggacgtgcgcttggccctggagcagttcacggggcacgacggcgtccgggacagcatcctcttcatctactatgtggtccacgaggagaagaagtacatccacatattcctgaatgaggtggtggcgctggtcccagtgctgaacgagaccaagcactcctttgccctgtacacccctgagcggacacggcagaggtggccggtgcgtctggctgctgccaccgagcaggacatgaatgactggctcgccctgctcagcctgtcttgctgcgagagccggaaggtgcagggccgcccgtccccgcaggccatctggtccatcacctgcaagggggacatcttcgtgagcgagcccagcccagacctggaggcccacgagcaccccctgccctgcgaccagatgttttggcggcagatgggaggccacctgcggatggtggaggccaacagccggggcgtggtgtggggcatcggctatgaccacacggcctgggtatacacaggcggctatggaggcggctgcttccaaggcctggccagcagcaccagtaacatctacacgcagtcagacgtgaagtgtgttcacatctatgagaaccagcgctggaaccccgtcacaggctacaccagcaggggtctgcccacggaccggtacatgtggagcgatgcctcggggctgcaggagtgcacgaaggctggcacgaagcccccgtccctgcagtgggcctgggtttccgactggttcgtggatttcagcgttccggggggcacggaccaggaggggtggcagtatgccagcgacttccctgcctcataccatgggtccaaaacgatgaaggattttgtgaggaggaggtgctgggccagaaaatgcaagctggtgaccagtgggccctggctggaggtgccccccatcgccctcagggacgtgtccatcatcccggagagcccgggtgccgaggggagtgggcacagcatcgccctctgggccgtcagcgacaagggggatgtgctgtgccgcctgggcgtgtcggagctcaaccctgcgggctcctcctggctgcacgttggcaccgaccagcccttcgcctccatctccatcggggcctgctaccaggtgtgggccgtggcaagggacggctccgccttctaccggggatccgtgtacccctcgcagccagccggtgactgctggtaccacatcccgtccccaccgagacagaggctgaagcaggtgtccgcggggcagacgtcggtgtatgccctggatgagaatggaaacctgtggtatcgccaagggatcacgcccagctacccgcagggctccagctgggagcacgtgtccaacaacgtgtgccgagtgtccgtggggcccctggaccaggtctgggtgatcgccaacaaagtgcagggcagccacagcctgagccgggggacagtgtgtcatcgcaccggcgtgcagcctcacgagcccaagggccacggctgggactacggcatcgggggaggctgggaccatatctctgtccgggccaatgccaccagggccccccggagctcgtcccaggagcaggagccgagtgccccaccagaggcccatggccccgtctgctgctgaggcccccccacacacctacatgcagggacggtgcccagtttgggggatcaaggctgagccattcttgtgctggagtgtgcaccgtgggagcaatgtggcccaggtggactcaggagggaacctggccccaaggctgcggccacttcagaggcactggctgagacggccctgaaatgtgaagctccgcggacactcccacacgtgtccccgtctgcgaggagtcccggggtgtggggcatggggtggggctgcacctcccagaggcccctcccacccttcccttcccctctcccttctgcctttccaggactagaaccgggaacctggagccctccgggaacgccggccctggggcagcagagccaggatggagccctcctgagctggcatctcagacagcacccgggcccgccacccctcaccaagagagatggccatggggctcagggcctctttaccatgtgcagtgaccatttctcagagcaggacttgcaaagaggctttaatttcaaaagtgaaggaaggaggccaggcgccgtggctcacgcctgtaatcccagcactttgggaggctgaggtgggcagatcacctaggtcaagagtttcaaaccagacgggccaacatggtgaaaccccatctctactaaaaatacaaaaaaaaaaaaaattagctgggcatggtggtgggtgcctgtaatcccagctactcgggaggctgaggcaggagaatcgtttgaacccgggaggcggaggctgcagtgagccgagatcatgccactgcactccagcctgggcgacagagactccatctcaaaaaaaaaaaaaaaaaagtgaaggaaggagacagcagattggaaataacactggagtggatgggatgtcctcttccctgagggggccggggtaccagacgggaggctgggagaggatgagaggctgccccatggctggaggcagcgtccgtgtgtgcagtcaccatcatcaacccccattcggccccttccccagatgcgctggtgacaggggcttcttggatgtcaaatcatgttgtaggagggtgcagactgcgggcttctgtggggagcagtactactgtgtctgtcggcagtggccatgggaccctcagcccgtcctgtacatggagcagggtgcacagtcaccctccatcctgtggcgagaggctggcccggcccggccaggcgaggcagaaggtgtcggccaagtggccccgaccccatcccgcaatctctcagctgctttttattacctttgtgccccatttgggagtttgcttcctccacctggacactttgcccgggaggtcatcagagcccaaccccaggctctgctcggttggagaggggatgacttcaccaccacctgaccttcctagggtcctggtctcactgtcagctgggggtccgttgtgtgtatttgtacagttttgctgtatggggtttgtcacccaaaagctgatgctgagaaaggcctccctggggcccctcccgcgggcatctgagagacctggtgttccagtgtttctggaaatgggtcccagtgccgccggctgtgaagctctcagatcaatcacgggaagggcctggcggtggtggccacctggaaccaccctgtcctgtctgtttacatttcactatcaggttttctctgggcattacgatttgttcccctacaacagtgacctgtgcattctgctgtggcctgctgtgtctgcaggtggctctcagcgaggtacggggagggcgtcaccctgcagaacggcagagtgacgcgtcctctcgctgctgagcaccagctgtttacctgccctgcatcacttcctcggatactttactcaataagcatttcccctggagtgtccgtgccctggtgttttttatcgatacgttgattaaaacgcgtggttccccgtgtgcctgaagcagaaaaaaaaaaaaaaaaaaacaaaacaaaaaaaaaaaccggggggaataaagtgggggggcgaggaaaacaaggggaaacaaaaggggcccaggggaaacagaaggacaccgagaccgagatttgttggacaacagagggggaaaaaatcaggccggggaacccacataaagaggaggcgcgcaaaaataaattgcgaaagcgcacgggtcaccgcggggataatagaggctgcacaaaaaggaaagagaacaagagggacgaagagaacaaaaaagacacgggggagaaa

SEQ ID NO: 735881 - DNA, 5975 bp, Homo sapiens
  misc_feature (1)..(2): n is a, c, g, or t
nnaccctcttgcccggtccccgggagggccggtccgctcctcccggacgccgaggacctaccaccgcgacttcgccccgcccggcgcgggcccaggaccctgatgtcgcttttgaacagcccctgcacctggcagccagcgagctactgtagtaggcattgccgactgtttgcataccggatgggagtgacagtgtaatagaaaaacaagcaagaaaccttttaggttacctccagccgctgccatgcccaactcagtgctgtgggcggtggacctcttcgggagagtgtacacgctgtccacagcaggccagtactgggaaatgtgcaaggactcccagctggagttcaagcgcgtcagcgccaccacgcagtgctgctggggcattgcctgtgacaaccaggtctacgtgtatgtgtgtgccagcgatgtccccatccgccgccgagaggaggcctatgagaatcagcgctggaatcccatgggcggcttctgtgagaagctcctgctgagtgaccgctgggggtggagtgacgtgagtgggctccagcaccggccgctggacagggtggcactgccctcgccgcactgggagtgggagtctgactggtacgtggatgagaattttggaggtgaacccactgagaaaggggggtggacgtacgccatcgactttcccgccacctacacgaaagacaagaagtggaattcttgtgtgcggcgccggaagtggatccggtacaggagatacaagtcccgggacatctgggccaagatcccctcgaaggatgaccccaaggagctgcccgaccccttcaacgacctctctgtagggggctgggagatcacggaggagcctgtgggccgcctgtcagtgtgggctgtgtctctgcagggcaaggtgtggtacagagaggacgtcagccactccaaccccgaagggtcctcctggtccctgctggacacccccggggaggtggttcagatcagctgtgggccccacgacctcctgtgggccacactctgggagggacaggccctggtccgggaaggaatcaacaggagcaatcccaaaggaagttcctggtccatcgtggagcctcctggatctgaaaacggggtcatgcacatctcggtgggagtcagcgtggtctgggctgtcaccaaggactggaaggtgtggttccgaagaggcgtcaactctcacaatccctgcggcaccagttggattgagatggttggtgagatgacgatggtgaacgtgggaatgaacgaccaggtgtggggcattggctgtgaggaccgagccgtgtacttccggcagggtgtcacccccagcgagctcagtgggaagacctggaaagccatcatcgcggcccgagagtgtgaccggtcacactctggcagctcgtctagtctcctcagtgccggctgcttcttcggtgatgaggtgaggggtagtggcgagtctgcccccagcgacaccgatgcctcctcggaagtcgagagaccagggcctggccagattctccctgcagaacctctagacgattccaagaatgccacagggaactcagcctcaggcctgggggctggcaggaccgcagaagataccgtggaagatgcctgcccagccgagggcagcagggaggccagacccaacacgcaccccggcccggcccccaccccggccgagctgccctggaccaatattgacctcaaggaggccaagaaagtgcccagccactcggccgctggcttccccgagaccaccagcctctcctctctggggctcctcccactgggcttggaggagccgtatggggtggatgaccacccgctgtgggcctgggtgtcgggaggcggctgcgtggtggaggcatgtgccatgcccagatggttcactgtccaggcgggcctgtcctcctcggtacacatgctgtccctgtccatcacgccggcccagaccgctgcctggaggaagcagatcttccagcagctcacggaaaggaccaagcgggagctggagaacttcagacactacgagcaggccgtggagcagtcggtgtgggtgaagaccggggcgctgcagtggtggtgcgactggaagccccacaagtgggtggacgtgcgcttggccctggagcagttcacggggcacgacggcgtccgggacagcatcctcttcatctactatgtggtccacgaggagaagaagtacatccacatattcctgaatgaggtggtggcgctggtcccagtgctgaacgagaccaagcactcctttgccctgtacacccctgagcggacacggcagaggtggccggtgcgtctggctgctgccaccgagcaggacatgaatgactggctcgccctgctcagcctgtcttgctgcgagagccggaaggtgcagggccgcccgtccccgcaggccatctggtccatcacctgcaagggggacatcttcgtgagcgagcccagcccagacctggaggcccacgagcaccccctgccctgcgaccagatgttttggcggcagatgggaggccacctgcggatggtggaggccaacagccggggcgtggtgtggggcatcggctatgaccacacggcctgggtatacacaggcggctatggaggcggctgcttccaaggcctggccagcagcaccagtaacatctacacgcagtcagacgtgaagtgtgttcacatctatgagaaccagcgctggaaccccgtcacaggctacaccagcaggggtctgcccacggaccggtacatgtggagcgatgcctcggggctgcaggagtgcacgaaggctggcacgaagcccccgtccctgcagtgggcctgggtttccgactggttcgtggatttcagcgttccggggggcacggaccaggaggggtggcagtatgccagcgacttccctgcctcataccatgggtccaaaacgatgaaggattttgtgaggaggaggtgctgggccagaaaatgcaagctggtgaccagtgggccctggctggaggtgccccccatcgccctcagggacgtgtccatcatcccggagagcccgggtgccgaggggagtgggcacagcatcgccctctgggccgtcagcgacaagggggatgtgctgtgccgcctgggcgtgtcggagctcaaccctgcgggctcctcctggctgcacgttggcaccgaccagcccttcgcctccatctccatcggggcctgctaccaggtgtgggccgtggcaagggacggctccgccttctaccggggatccgtgtacccctcgcagccagccggtgactgctggtaccacatcccgtccccaccgagacagaggctgaagcaggtgtccgcggggcagacgtcggtgtatgccctggatgagaatggaaacctgtggtatcgccaagggatcacgcccagctacccgcagggctccagctgggagcacgtgtccaacaacgtgtgccgagtgtccgtggggcccctggaccaggtctgggtgatcgccaacaaagtgcagggcagccacagcctgagccgggggacagtgtgtcatcgcaccggcgtgcagcctcacgagcccaagggccacggctgggactacggcatcgggggaggctgggaccatatctctgtccgggccaatgccaccagggccccccggagctcgtcccaggagcaggagccgagtgccccaccagaggcccatggccccgtctgctgctgaggcccccccacacacctacatgcagggacggtgcccagtttgggggatcaaggctgagccattcttgtgctggagtgtgcaccgtgggagcaatgtggcccaggtggactcaggagggaacctggccccaaggctgcggccacttcagaggcactggctgagacggccctgaaatgtgaagctccgcggacactcccacacgtgtccccgtctgcgaggagtcccggggtgtggggcatggggtggggctgcacctcccagaggcccctcccacccttcccttcccctctcccttctgcctttccaggactagaaccgggaacctggagccctccgggaacgccggccctggggcagcagagccaggatggagccctcctgagctggcatctcagacagcacccgggcccgccacccctcaccaagagagatggccatggggctcagggcctctttaccatgtgcagtgaccatttctcagagcaggacttgcaaagaggctttaatttcaaaagtgaaggaaggaggccaggcgccgtggctcacgcctgtaatcccagcactttgggaggctgaggtgggcagatcacctaggtcaagagtttcaaaccagacgggccaacatggtgaaaccccatctctactaaaaatacaaaaaaaaaaaaaattagctgggcatggtggtgggtgcctgtaatcccagctactcgggaggctgaggcaggagaatcgtttgaacccgggaggcggaggctgcagtgagccgagatcatgccactgcactccagcctgggcgacagagactccatctcaaaaaaaaaaaaaaaaaagtgaaggaaggagacagcagattggaaataacactggagtggatgggatgtcctcttccctgagggggccggggtaccagacgggaggctgggagaggatgagaggctgccccatggctggaggcagcgtccgtgtgtgcagtcaccatcatcaacccccattcggccccttccccagatgcgctggtgacaggggcttcttggatgtcaaatcatgttgtaggagggtgcagactgcgggcttctgtggggagcagtactactgtgtctgtcggcagtggccatgggaccctcagcccgtcctgtacatggagcagggtgcacagtcaccctccatcctgtggcgagaggctggcccggcccggccaggcgaggcagaaggtgtcggccaagtggccccgaccccatcccgcaatctctcagctgctttttattacctttgtgccccatttgggagtttgcttcctccacctggacactttgcccgggaggtcatcagagcccaaccccaggctctgctcggttggagaggggatgacttcaccaccacctgaccttcctagggtcctggtctcactgtcagctgggggtccgttgtgtgtatttgtacagttttgctgtatggggtttgtcacccaaaagctgatgctgagaaaggcctccctggggcccctcccgcgggcatctgagagacctggtgttccagtgtttctggaaatgggtcccagtgccgccggctgtgaagctctcagatcaatcacgggaagggcctggcggtggtggccacctggaaccaccctgtcctgtctgtttacatttcactatcaggttttctctgggcattacgatttgttcccctacaacagtgacctgtgcattctgctgtggcctgctgtgtctgcaggtggctctcagcgaggtacggggagggcgtcaccctgcagaacggcagagtgacgcgtcctctcgctgctgagcaccagctgtttacctgccctgcatcacttcctcggatactttactcaataagcatttcccctggagtgtccgtgccctggtgttttttatcgatacgttgattaaaacgcgtggttccccgtgtgcctgaagcagaaaaaaaaaaaaaaaaaaacaaaacaaaaaaaaaaaccggggggaataaagtgggggggcgaggaaaacaaggggaaacaaaaggggcccaggggaaacagaaggacaccgagaccgagatttgttggacaacagagggggaaaaaatcaggccggggaacccacataaagaggaggcgcgcaaaaataaattgcgaaagcgcacgggtcaccgcggggataatagaggctgcacaaaaaggaaagagaacaagagggacgaagagaacaaaaaagacacgggggagaaa

SEQ ID NO: 735882 - DNA, 3498 bp, Homo sapiens
cgaaggcggaaacagacactgaaacggggcgttccaggccgcagcccacatgccccacgggggagcagctaaccccagagaactgtggtcccctgataccccaggaacgcatatctgagcaggctttccagcttccctgtgtgtgaggcaggaatgacctctgtcttcattttacaagcctggccagcagcaccagtaacatctacacgcagtcagacgtgaagtgtgttcacatctatgagaaccagcgctggaaccccgtcacaggctacaccagcaggggtctgcccacggaccggtacatgtggagcgatgcctcggggctgcaggagtgcacgaaggctggcacgaagcccccgtccctgcagtgggcctgggtttccgactggttcgtggatttcagcgttccggggggcacggaccaggaggggtggcagtatgccagcgacttccctgcctcataccatgggtccaaaacgatgaaggattttgtgaggaggaggtgctgggccagaaaatgcaagctggtgaccagtgggccctggctggaggtgccccccatcgccctcagggacgtgtccatcatcccggagagcccgggtgccgaggggagtgggcacagcatcgccctctgggccgtcagcgacaagggggatgtgctgtgccgcctgggcgtgtcggagctcaaccctgcgggctcctcctggctgcacgttggcaccgaccagcccttcgcctccatctccatcggggcctgctaccaggtgtgggccgtggcaagggacggctccgccttctaccggggatccgtgtacccctcgcagccagccggtgactgctggtaccacatcccgtccccaccgagacagaggctgaagcaggtgtccgcggggcagacgtcggtgtatgccctggatgagaatggaaacctgtggtatcgccaagggatcacgcccagctacccgcagggctccagctgggagcacgtgtccaacaacgtgtgccgagtgtccgtggggcccctggaccaggtctgggtgatcgccaacaaagtgcagggcagccacagcctgagccgggggacagtgtgtcatcgcaccggcgtgcagcctcacgagcccaagggccacggctgggactacggcatcgggggaggctgggaccatatctctgtccgggccaatgccaccagggccccccggagctcgtcccaggagcaggagccgagtgccccaccagaggcccatggccccgtctgctgctgaggcccccccacacacctacatgcagggacggtgcccagtttgggggatcaaggctgagccattcttgtgctggagtgtgcaccgtgggagcaatgtggcccaggtggactcaggagggaacctggccccaaggctgcggccacttcagaggcactggctgagacggccctgaaatgtgaagctccgcggacactcccacacgtgtccccgtctgcgaggagtcccggggtgtggggcatggggtggggctgcacctcccagaggcccctcccacccttcccttcccctctcccttctgcctttccaggactagaaccgggaacctggagccctccgggaacgccggccctggggcagcagagccaggatggagccctcctgagctggcatctcagacagcacccgggcccgccacccctcaccaagagagatggccatggggctcagggcctctttaccatgtgcagtgaccatttctcagagcaggacttgcaaagaggctttaatttcaaaagtgaaggaaggaggccaggcgccgtggctcacgcctgtaatcccagcactttgggaggctgaggtgggcagatcacctaggtcaagagtttcaaaccagacgggccaacatggtgaaaccccatctctactaaaaatacaaaaaaaaaaaaaattagctgggcatggtggtgggtgcctgtaatcccagctactcgggaggctgaggcaggagaatcgtttgaacccgggaggcggaggctgcagtgagccgagatcatgccactgcactccagcctgggcgacagagactccatctcaaaaaaaaaaaaaaaaaagtgaaggaaggagacagcagattggaaataacactggagtggatgggatgtcctcttccctgagggggccggggtaccagacgggaggctgggagaggatgagaggctgccccatggctggaggcagcgtccgtgtgtgcagtcaccatcatcaacccccattcggccccttccccagatgcgctggtgacaggggcttcttggatgtcaaatcatgttgtaggagggtgcagactgcgggcttctgtggggagcagtactactgtgtctgtcggcagtggccatgggaccctcagcccgtcctgtacatggagcagggtgcacagtcaccctccatcctgtggcgagaggctggcccggcccggccaggcgaggcagaaggtgtcggccaagtggccccgaccccatcccgcaatctctcagctgctttttattacctttgtgccccatttgggagtttgcttcctccacctggacactttgcccgggaggtcatcagagcccaaccccaggctctgctcggttggagaggggatgacttcaccaccacctgaccttcctagggtcctggtctcactgtcagctgggggtccgttgtgtgtatttgtacagttttgctgtatggggtttgtcacccaaaagctgatgctgagaaaggcctccctggggcccctcccgcgggcatctgagagacctggtgttccagtgtttctggaaatgggtcccagtgccgccggctgtgaagctctcagatcaatcacgggaagggcctggcggtggtggccacctggaaccaccctgtcctgtctgtttacatttcactatcaggttttctctgggcattacgatttgttcccctacaacagtgacctgtgcattctgctgtggcctgctgtgtctgcaggtggctctcagcgaggtacggggagggcgtcaccctgcagaacggcagagtgacgcgtcctctcgctgctgagcaccagctgtttacctgccctgcatcacttcctcggatactttactcaataagcatttcccctggagtgtccgtgccctggtgttttttatcgatacgttgattaaaacgcgtggttccccgtgtgcctgaagcagaaaaaaaaaaaaaaaaaaacaaaacaaaaaaaaaaaccggggggaataaagtgggggggcgaggaaaacaaggggaaacaaaaggggcccaggggaaacagaaggacaccgagaccgagatttgttggacaacagagggggaaaaaatcaggccggggaacccacataaagaggaggcgcgcaaaaataaattgcgaaagcgcacgggtcaccgcggggataatagaggctgcacaaaaaggaaagagaacaagagggacgaagagaacaaaaaagacacgggggagaaa

SEQ ID NO: 735883 - DNA, 5224 bp, Homo sapiens
gctgtaccgggcgaagtgtatgatatcccctcgaaggatgaccccaaggagctgcccgaccccttcaacgacctctctgtagggggctgggagatcacggaggagcctgtgggccgcctgtcagtgtgggctgtgtctctgcagggcaaggtgtggtacagagaggacgtcagccactccaaccccgaagggtcctcctggtccctgctggacacccccggggaggtggttcagatcagctgtgggccccacgacctcctgtgggccacactctgggagggacaggccctggtccgggaaggaatcaacaggagcaatcccaaaggaagttcctggtccatcgtggagcctcctggatctgaaaacggggtcatgcacatctcggtgggagtcagcgtggtctgggctgtcaccaaggactggaaggtgtggttccgaagaggcgtcaactctcacaatccctgcggcaccagttggattgagatggttggtgagatgacgatggtgaacgtgggaatgaacgaccaggtgtggggcattggctgtgaggaccgagccgtgtacttccggcagggtgtcacccccagcgagctcagtgggaagacctggaaagccatcatcgcggcccgagagtgtgaccggtcacactctggcagctcgtctagtctcctcagtgccggctgcttcttcggtgatgaggtgaggggtagtggcgagtctgcccccagcgacaccgatgcctcctcggaagtcgagagaccagggcctggccagattctccctgcagaacctctagacgattccaagaatgccacagggaactcagcctcaggcctgggggctggcaggaccgcagaagataccgtggaagatgcctgcccagccgagggcagcagggaggccagacccaacacgcaccccggcccggcccccaccccggccgagctgccctggaccaatattgacctcaaggaggccaagaaagtgcccagccactcggccgctggcttccccgagaccaccagcctctcctctctggggctcctcccactgggcttggaggagccgtatggggtggatgaccacccgctgtgggcctgggtgtcgggaggcggctgcgtggtggaggcatgtgccatgcccagatggttcactgtccaggcgggcctgtcctcctcggtacacatgctgtccctgtccatcacgccggcccagaccgctgcctggaggaagcagatcttccagcagctcacggaaaggaccaagcgggagctggagaacttcagacactacgagcaggccgtggagcagtcggtgtgggtgaagaccggggcgctgcagtggtggtgcgactggaagccccacaagtgggtggacgtgcgcttggccctggagcagttcacggggcacgacggcgtccgggacagcatcctcttcatctactatgtggtccacgaggagaagaagtacatccacatattcctgaatgaggtggtggcgctggtcccagtgctgaacgagaccaagcactcctttgccctgtacacccctgagcggacacggcagaggtggccggtgcgtctggctgctgccaccgagcaggacatgaatgactggctcgccctgctcagcctgtcttgctgcgagagccggaaggtgcagggccgcccgtccccgcaggccatctggtccatcacctgcaagggggacatcttcgtgagcgagcccagcccagacctggaggcccacgagcaccccctgccctgcgaccagatgttttggcggcagatgggaggccacctgcggatggtggaggccaacagccggggcgtggtgtggggcatcggctatgaccacacggcctgggtatacacaggcggctatggaggcggctgcttccaaggcctggccagcagcaccagtaacatctacacgcagtcagacgtgaagtgtgttcacatctatgagaaccagcgctggaaccccgtcacaggctacaccagcaggggtctgcccacggaccggtacatgtggagcgatgcctcggggctgcaggagtgcacgaaggctggcacgaagcccccgtccctgcagtgggcctgggtttccgactggttcgtggatttcagcgttccggggggcacggaccaggaggggtggcagtatgccagcgacttccctgcctcataccatgggtccaaaacgatgaaggattttgtgaggaggaggtgctgggccagaaaatgcaagctggtgaccagtgggccctggctggaggtgccccccatcgccctcagggacgtgtccatcatcccggagagcccgggtgccgaggggagtgggcacagcatcgccctctgggccgtcagcgacaagggggatgtgctgtgccgcctgggcgtgtcggagctcaaccctgcgggctcctcctggctgcacgttggcaccgaccagcccttcgcctccatctccatcggggcctgctaccaggtgtgggccgtggcaagggacggctccgccttctaccggggatccgtgtacccctcgcagccagccggtgactgctggtaccacatcccgtccccaccgagacagaggctgaagcaggtgtccgcggggcagacgtcggtgtatgccctggatgagaatggaaacctgtggtatcgccaagggatcacgcccagctacccgcagggctccagctgggagcacgtgtccaacaacgtgtgccgagtgtccgtggggcccctggaccaggtctgggtgatcgccaacaaagtgcagggcagccacagcctgagccgggggacagtgtgtcatcgcaccggcgtgcagcctcacgagcccaagggccacggctgggactacggcatcgggggaggctgggaccatatctctgtccgggccaatgccaccagggccccccggagctcgtcccaggagcaggagccgagtgccccaccagaggcccatggccccgtctgctgctgaggcccccccacacacctacatgcagggacggtgcccagtttgggggatcaaggctgagccattcttgtgctggagtgtgcaccgtgggagcaatgtggcccaggtggactcaggagggaacctggccccaaggctgcggccacttcagaggcactggctgagacggccctgaaatgtgaagctccgcggacactcccacacgtgtccccgtctgcgaggagtcccggggtgtggggcatggggtggggctgcacctcccagaggcccctcccacccttcccttcccctctcccttctgcctttccaggactagaaccgggaacctggagccctccgggaacgccggccctggggcagcagagccaggatggagccctcctgagctggcatctcagacagcacccgggcccgccacccctcaccaagagagatggccatggggctcagggcctctttaccatgtgcagtgaccatttctcagagcaggacttgcaaagaggctttaatttcaaaagtgaaggaaggaggccaggcgccgtggctcacgcctgtaatcccagcactttgggaggctgaggtgggcagatcacctaggtcaagagtttcaaaccagacgggccaacatggtgaaaccccatctctactaaaaatacaaaaaaaaaaaaaattagctgggcatggtggtgggtgcctgtaatcccagctactcgggaggctgaggcaggagaatcgtttgaacccgggaggcggaggctgcagtgagccgagatcatgccactgcactccagcctgggcgacagagactccatctcaaaaaaaaaaaaaaaaaagtgaaggaaggagacagcagattggaaataacactggagtggatgggatgtcctcttccctgagggggccggggtaccagacgggaggctgggagaggatgagaggctgccccatggctggaggcagcgtccgtgtgtgcagtcaccatcatcaacccccattcggccccttccccagatgcgctggtgacaggggcttcttggatgtcaaatcatgttgtaggagggtgcagactgcgggcttctgtggggagcagtactactgtgtctgtcggcagtggccatgggaccctcagcccgtcctgtacatggagcagggtgcacagtcaccctccatcctgtggcgagaggctggcccggcccggccaggcgaggcagaaggtgtcggccaagtggccccgaccccatcccgcaatctctcagctgctttttattacctttgtgccccatttgggagtttgcttcctccacctggacactttgcccgggaggtcatcagagcccaaccccaggctctgctcggttggagaggggatgacttcaccaccacctgaccttcctagggtcctggtctcactgtcagctgggggtccgttgtgtgtatttgtacagttttgctgtatggggtttgtcacccaaaagctgatgctgagaaaggcctccctggggcccctcccgcgggcatctgagagacctggtgttccagtgtttctggaaatgggtcccagtgccgccggctgtgaagctctcagatcaatcacgggaagggcctggcggtggtggccacctggaaccaccctgtcctgtctgtttacatttcactatcaggttttctctgggcattacgatttgttcccctacaacagtgacctgtgcattctgctgtggcctgctgtgtctgcaggtggctctcagcgaggtacggggagggcgtcaccctgcagaacggcagagtgacgcgtcctctcgctgctgagcaccagctgtttacctgccctgcatcacttcctcggatactttactcaataagcatttcccctggagtgtccgtgccctggtgttttttatcgatacgttgattaaaacgcgtggttccccgtgtgcctgaagcagaaaaaaaaaaaaaaaaaaacaaaacaaaaaaaaaaaccggggggaataaagtgggggggcgaggaaaacaaggggaaacaaaaggggcccaggggaaacagaaggacaccgagaccgagatttgttggacaacagagggggaaaaaatcaggccggggaacccacataaagaggaggcgcgcaaaaataaattgcgaaagcgcacgggtcaccgcggggataatagaggctgcacaaaaaggaaagagaacaagagggacgaagagaacaaaaaagacacgggggagaaa

SEQ ID NO: 735884 - DNA, 891 bp, Homo sapiens
ttattcgtttaaaaagcatcttttgtaccaaagcaaatttttttctctactcatttccatcatcaatttggacctatggtggtgaccaatgcattggttacagaaactttaagtgagtgccttgagaaaacttggaaatttgtgcctgaggtggtaaacttttaattaggttaattgtagtgcttaccaatcagtaacttcactatcactcagggctttcgtaccttctaggtaaaacttctttcattgtgtttttttaagatactgtatttttttttaagtgccatcatttaaatttcacttagtaagtggcagattacattattcagtcccacaagcacagaaacatagtaacactaggagatatttgaacatttattttacaatcgactgaatatattatgtaaatgaggtaagcaacttttgtagagattgtatgtgtgagataatgtaatgttcttttccagtttttggactacagttgaataaactttttaattatttaaaaacatctttaccgaataacatgtgatggttttttgtataatgtatttgattttgtaaatacgtatttcctgatgtgatttttgtgagaaatgctaaatcttttagtatatcatgtcctctcaaaattggcaggagctaaataatagtttgtgggcgatttgtattgtgtactgtacaataactggggaacttttataattataaaaatatatattaacttttagtgtgttgtttaaacaaatgactggaacatactaaagatattagtaggatttttctgaatatttcagacttgaactcaggctagctttcttgtgtttttcaaaacaaaatggtgtcttgtcttttaaaatcaataaatttgtttccttgttacaaataaat

SEQ ID NO: 735885 - DNA, 1095 bp, Homo sapiens
actctagacgatccctgtcaaaggtgaagatgagacccaaagaaagggaaagctgagattttgtgccattccttttaaaatattcatcaggttaggtggggctgtgggggaaaagctactacagggaagagtgttctctgctgtctcttcactggaaaacagggaggggggatttcagactgtgaagaaagttgaatggtggtttttaaattataaagtaatgtattaaaaggtgcattaggctgtagttctaatattgagttcaactgtgaaatccatcagatgtgccaaatggagaagacagaaagcaacaaagtgaattgttctttagcccaagtggtacagtgaatttgctttaacagatgttgaaaactaaattttctactgtattcccagcacgggtgacttctttttctcttcattagccagagatgactaatttaaatttagaaccagattttaatttaaattaatatttccattaataacctattcattgcagatacctattatactgtgtaacagttgttttggaaattttatgtaaaattaaaactatcagtattttacagatgttttaattagacattgttattaacaggaacagtgcagaaactagaatcaagccttataatatcttatagaccatgcatttttgaagttagtgtccactagggtcctattaactgtacatttgcaagatttcattatttttgcctctgacactatgggaaaaattttttagaagctattgggacagattcaagcttttatgcacttggttactacagctgtaaaatgaaatctcgtcttgtagcatggattattcttctcatgttaaacccaccaaaataaaggggactaaataggtaatgattttcctagtgcatttgcatactgtgataatcctgggccttgcaatagttctacagggctcttgggcattgaattattaggatgtaattgtacatcattgtagtgttcaccttattgaagctcactctgatgttaatgagcttcgggttttgatgcttgtttagagatcagcagtcttggatgggagggaacaaagctaaataaatgttagtttggtga

SEQ ID NO: 735886 - DNA, 2206 bp, Homo sapiens; identical to SEQ ID NO: 371040

SEQ ID NO: 735887 - DNA, 2243 bp, Homo sapiens; identical to SEQ ID NO: 371037

SEQ ID NO: 735888 - DNA, 1801 bp, Homo sapiens; identical to SEQ ID NO: 371039

SEQ ID NO: 735889 - DNA, 889 bp, Homo sapiens
gaaggcgccggccgtggaggcgccacgtcccttgcggcggcgggagagaaatcgcttggacttcggggcggcctcggacggccatggcctttaccctgtactcactgctgcaggcagccctgctctgcgtcaacgccatcgcagtgctgcacgaggagcgattcctcaagaacattggctggggaacagaccagggaattggtggatttggagaagagccgggaattaaatcacagctaatgaaccttattcgatctgtaagaaccgtgatgagagtgccattgataatagtaaactcaattgcaattgtgttacttttattatttggatgaatatcagtggagaaaatggagactcagaagaggacatgccagtagaagttattactttggtcattattggaatatttatatcttagctggctgaccttgcacttgtcaaaaatgtaaagctgaaaataaaaccagggtttctattaaaaaaaaaaaaaaaaaaaaaaaaaaaaaaaacaaaaaaaaaaaaaaaaaaaaaggggggggggcgcaaaaaaatcccccgggggggcccccacaaggcatacccattcgggcacacaggggcgcccaaaaggagaggccaaaactaacactggcaagggcgcgcgctcaaaacaggcgcgagggggaaacacgggcaacggggaaaccctgcggagaggacacccctaccagcggggggggaggcaaacaatggtggggaacaacatatactccacgtaaagtttaaaagcctcgggagagaacattttcagacattctgaggggtatgaaaggtggtgtaaacagagcgacaaatgagcggggtcggtaacaattgtgctaacgaagaaatatattgagaaaaattttcg

SEQ ID NO: 735890 - DNA, 1587 bp, Homo sapiens
gaaggcgccggccgtggaggcgccacgtcccttgcggcggcgggagagaaatcgcttggacttcggggcggcctcggacggccatggcctttaccctgtactcactgctgcaggcagccctgctctgcgtcaacgccatcgcagtgctgcacgaggagcgattcctcaagaacattggctggggaacagaccagggaattggtggatttggagaagagccgggaattaaatcacagctaatgaaccttattcgatctgtaagaaccgtgatgagagtgccattgataatagtaaactcaattgcaattgtgttacttttattatttggatgaatatcagtggagaaaatggagactcagaagaggacatgccagtagaagttattactttggtcattattggaatatttatatcttagctggctgaccttgcacttgtcaaaaatgtaaagctgaaaataaaaccagggtttctatttatctgttttttttttaatgttgcacttgtagtttcattacaaaagatcagatcatgaaaggcagtaactctccaggactggaatatctgattgctcagtgttaatagtagttcatgctgtggtgagattgttaaaagggtgcaagactgttgcttctctttttttagatatttttctatctctcacttctcagggatgaaattctttttcaaagttttgaagttccttgcaacttagccatgatgtgagtggttatccctagataaaattaaaaggatttttaaaaagtaattactgcacataaaatgataaataggtaatttgaataattttattttaagctccttggttaattattttgtctattgtctcagctataaattcaaatttatacatactattgagtattaatattctctgatttcagggagaattctgtcagtcacatgatgattatgtttttgtttaacattctttccatgcacttgttattttattaatttgcctgaatgatgagaccagaccagtgtctacagattttcattgtcagaaaaatctataagtctgccctttttacaatgatgatttaaaaaaaacaacagcgtaaatattagcccacaagagcagtcctaaacaatcacaattacactgtactacccaagaagactgtttattgtgaagcatttacctttcaaaaaatcattacatttctatttcttggtggagcagcacattgtggagtgtgattcttaattcttcattgagtttgtcaataggacattgatgctggataggttgtcttttgtttttatgtctcagaccatcttgtgagattgtttgcctatctcataatacagttttatgcagaaaggttgaaactatgtaaatggtttttatggaaattatcagttacaatattttaaaggtgtagaatggcatctttgtttataggagaacatttgtaaataaagttaaatttctaagtcaacctttaaaatattgtaactgataatttccataaaaaccatttacatagtttcaacctttctgcataaaactgtattatgagataggcaaacaatctcacaagatggtctgagacataaaaa

SEQ ID NO: 735891 - DNA, 799 bp, Homo sapiens
gaaggcgccggccgtggaggcgccacgtcccttgcggcggcgggagagaaatcgcttggacttcggggcggcctcggacggccatggcctttaccctgtactcactgctgcaggcagccctgctctgcgtcaacgccatcgcagtgctgcacgaggagcgattcctcaagaacattggctggggaacagaccagggaattggtggatttggagaagagccgggaattaaatcacagctaatgaaccttattcgatctgtaagaaccgtgatgagagtgccattgataatagtaaactcaattgcaattgtgttacttttattatttggatgaatatcagtggagaaaatggagactcagaagaggacatgccagtagaagttattactttggtcattattggaatatttatatcttagctggctgaccttgcacttgtcaaaaatgtaaagctgaaaataaaaccagggtttctatttatctgttttttttttaatgttgcacttgtagtttcattacaaaagatcagatcatgaaaggcagtaactctccaggactggaatatctgattgctcagtgttaatagtagttcatgctgtggtgagattgttaaaagggtgcaagactgttgcttctctttttttagatatttttctatctctcacttctcagggatgaaattctttttcaaagttttgaagttccttgcaacttagccatgatgtgagtggttatccctagataaaattaagggtttttagtgattactgtgcattattgtctattgtcttagctatttt

SEQ ID NO: 735892 - DNA, 549 bp, Homo sapiens
  misc_feature (546)..(546): n is a, c, g, or t
gaaggcgccggccgtggaggcgccacgtcccttgcggcggcgggagagaaatcgcttggacttcggggcggcctcggacggccatggcctttaccctgtactcactgctgcaggcagccctgctctgcgtcaacgccatcgcagtgctgcacgaggagcgattcctcaagaacattggctggggaacagaccagggaattggtggatttggagaagagccgggaattaaatcacagctaatgaaccttattcgatctgtaagaaccgtgatgagagtgccattgataatagtaaactcaattgcaattgtgttacttttattatttggatgaatatcagtggagaaaatggagactcagaagaggacatgccagtagaagttattactttggtcattattggaatatttatatcttagctggctgaccttgcacttgtcaaaaatgtaaagctgaaaataaaaccagggtttctattcttaaaaaaaaatgagcaagttatgtatgcgcgcgcaattcgagtcacttgggccattcgccctatagnggg

SEQ ID NO: 735893 - DNA, 2236 bp, Homo sapiens
gaaggcgccggccgtggaggcgccacgtcccttgcggcggcgggagagaaatcgcttggacttcggggcggcctcggacggccatggcctttaccctgtactcactgctgcaggcagccctgctctgcgtcaacgccatcgcagtgctgcacgaggagcgattcctcaagaacaggaatgaaggatggcagcatgccgtgcattaaaagctgttttggtagatctcagtggcacacttcacattgaagatgcagctgtgccaggcgcacaggaagctcttaaaaggttacgtggtgcttctgtaatcattaggtttgtgaccaatacaaccaaagagagcaagcaagacctgttagaaaggttgagaaaattggaatttgatatctctgaagatgaaatattcacatctctgactgcagccagaagtttactagagcggaaacaagtcagacccatgctgctagttgatgatcgggcactacctgatttcaaaggaatacaaacaagtgatcctaatgctgtggtcatgggattggcaccagaacattttcattatcaaattctgaatcaagcattccggttactcctggatggagcacctctgatagcaatccacaaagccaggtattacaagaggaaagatggcttagccctggggcctggaccatttgtgactgctttagagtatgccacagataccaaagccacagtcgtggggaaaccagagaagacgttctttttggaagcattgcggggcactggctgtgaacctgaggaggctgtcatgataggagatgattgcagggatgatgttggtggggctcaagatgtcggcatgctgggcatcttagtaaagactgggaaatatcgagcatcagatgaagaaaaaattaatccacctccttacttaacttgtgagagtttccctcatgctgtggaccacattctgcagcacctattgtgaagcaatgtgtgcatctgaagcaacttgaaatgcagcttcttattgtctggaatgaatcccttaccaactcagtgccagcatcggtagacaccagtcagtgctgatcgctttttaaccctcttttgttgtgcattaattagaaagaaaggtattgaattgcggctagccagtaagccttgctaatctcttttattttgtaactgaagatgagacccaaagaaagggaaagctgagattttgtgccattccttttaaaatattcatcaggttaggtggggctgtgggggaaaagctactacagggaagagtgttctctgctgtctcttcactggaaaacagggaggggggatttcagactgtgaagaaagttgaatggtggtttttaaattataaagtaatgtattaaaaggtgcattaggctgtagttctaatattgagttcaactgtgaaatccatcagatgtgccaaatggagaagacagaaagcaacaaagtgaattgttctttagcccaagtggtacagtgaatttgctttaacagatgttgaaaactaaattttctactgtattcccagcacgggtgacttctttttctcttcattagccagagatgactaatttaaatttagaaccagattttaatttaaattaatatttccattaataacctattcattgcagatacctattatactgtgtaacagttgttttggaaattttatgtaaaattaaaactatcagtattttacagatgttttaattagacattgttattaacaggaacagtgcagaaactagaatcaagccttataatatcttatagaccatgcatttttgaagttagtgtccactagggtcctattaactgtacatttgcaagatttcattatttttgcctctgacactatgggaaaaattttttagaagctattgggacagattcaagcttttatgcacttggttactacagctgtaaaatgaaatctcgtcttgtagcatggattattcttctcatgttaaacccaccaaaataaaggggactaaataggtaatgattttcctagtgcatttgcatactgtgataatcctgggccttgcaatagttctacagggctcttgggcattgaattattaggatgtaattgtacatcattgtagtgttcaccttattgaagctcactctgatgttaatgagcttcgggttttgatgcttgtttagagatcagcagtcttggatgggagggaacaaagctaaataaatgttagtttggtga

SEQ ID NO: 735894 - DNA, 425 bp, Homo sapiens
  misc_feature (2)..(2): n is a, c, g, or t
  misc_feature (12)..(12): n is a, c, g, or t
gntgactctagnaggatccccaagctcccaacagagcagtcctaaacaatcacaattacactgtactacccaagaagactgtttattgtgaagcatttacctttcaaaaaatcattacatttctatttcttggtggagcagcacattgtggagtgtgattcttaattcttcattgagtttgtcaataggacattgatgctggataggttgtcttttgtttttatgtctcagaccatcttgtgagattgtttgcctatctcataatacagttttatgcagaaaggttgaaactatgtaaatggtttttatggaaattatcagttacaatattttaaaggtgtagaatggcatctttgtttataggagaacatttgtaaataaagttaaatttctaagtcaaaagcacttgtttttgtaccttagta

SEQ ID NO: 735895 - DNA, 1417 bp, Homo sapiens
gttccggcgcggccagggcccaacttccggcgtccgtcgggcagcagcggggctgtctatcccggctgaggacccgcggccagtgcgggtggctggctttgccattagcgggggcctttcctgaggacggcgtacggagtgtggggaatgaaggatggcagcatgccgtgcattaaaagctgttttggtagatctcagtggcacacttcacattgaagatgcagctgtgccaggcgcacaggaagctcttaaaaggttacgtggtgcttctgtaatcattaggtttgtgaccaatacaaccaaagagagcaagcaagacctgttagaaaggttgagaaaattggaatttgatatctctgaagatgaaatattcacatctctgactgcagccagaagtttactagagcggaaacaagtcagacccatgctgctagttgatgatcgggcactacctgatttcaaaggaatacaaacaagtgatcctaatgctgtggtcatgggattggcaccagaacattttcattatcaaattctgaatcaagcattccggttactcctggatggagcacctctgatagcaatccacaaagccaggtattacaagaggaaagatggcttagccctggggcctggaccatttgtgactgctttagagtatgccacagataccaaagccacagtcgtggggaaaccagagaagacgttctttttggaagcattgcggggcactggctgtgaacctgaggaggctgtcatgataggagatgtaagtagaagaacccaggaggtgctcccagctcacctgttgtgctgggaaagccagcttagaaacactgctttaggaaaggggacattctgttactgacaatgtggacagtatatatataaatggctacctataaaatgaggtttcctgtcgatgtttagtggtattcttctaaagaactgaaatttttattatttctgacatttctccatagcgtaataggagatttgtgtgttatgatacatatatatatgtagttaactcctataatatatatatatttgtatattatatatatagttcaaaagccatttatattgcaagtcaattgaatgctttaaatgtctttttgagaaacaatgctgcacaaatgagaacctacaccaaagaattctaccactattgtttttttccttagcatatgctgtatggaagaacttctctatctgtgtgccacaaatagctaaagctactgatcaccttagccctttgagtggcagggctgagcctgggatgattggaggccctggatggtcacctgtggccgtgagcaccttgtcagtttaccccagtgtactaggcaaatgttatttcccatgtgtgtcttgatgggaaaacagctggaaagcacactgccacatggtaaattgg

SEQ ID NO: 735896 - DNA, 2179 bp, Homo sapiens; identical to SEQ ID NO: 371042

SEQ ID NO: 735897 - DNA, 2183 bp, Homo sapiens; identical to SEQ ID NO: 371043

SEQ ID NO: 735898 - DNA, 2167 bp, Homo sapiens
tgtaaaacactttattaaaaatttctgaattaaaaagaaacttacattttggagtagaggaaacaggagttcagatattttaggagttaatatcactgcagcaacaattgtgtagtattgtaaaaggctcaggagcctcctgcttaccattggggaaggttgaaacaacttgtctcattaagttaagcttcttccctggagtgtcttatttagctttagttctcttaattctctttccctggtgatttgggtagtgtctgaaaccactaaaggtaaaaggttgaagcaatcccaaatttaataatctatcacctttctttagtgtatctgagtgtaattcccagcagttctttgtgaattcattagaagacagcaagtcattaaaagttaataagaaactatttgtttctgtgggtgtgaatacagccactttgtaagtctgacattcgttcccagtcataaaagccttgcttttagccaatttgttttttttgttgttgttctctctaggttactcctggatggagcacctctgatagcaatccacaaagccaggtattacaagaggaaagatggcttagccctggggcctggaccatttgtgactgctttagagtatgccacagataccaaagccacagtcgtggggaaaccagagaagacgttctttttggaagcattgcggggcactggctgtgaacctgaggaggctgtcatgataggagatgattgcagggatgatgttggtggggctcaagatgtcggcatgctgggcatcttagtaaagactgggaaatatcgagcatcagatgaagaaaaaattaatccacctccttacttaacttgtgagagtttccctcatgctgtggaccacattctgcagcacctattgtgaagcaatgtgtgcatctgaagcaacttgaaatgcagcttcttattgtctggaatgaatcccttaccaactcagtgccagcatcggtagacaccagtcagtgctgatcgctttttaaccctcttttgttgtgcattaattagaaagaaaggtattgaattgcggctagccagtaagccttgctaatctcttttattttgtaactgaagatgagacccaaagaaagggaaagctgagattttgtgccattccttttaaaatattcatcaggttaggtggggctgtgggggaaaagctactacagggaagagtgttctctgctgtctcttcactggaaaacagggaggggggatttcagactgtgaagaaagttgaatggtggtttttaaattataaagtaatgtattaaaaggtgcattaggctgtagttctaatattgagttcaactgtgaaatccatcagatgtgccaaatggagaagacagaaagcaacaaagtgaattgttctttagcccaagtggtacagtgaatttgctttaacagatgttgaaaactaaattttctactgtattcccagcacgggtgacttctttttctcttcattagccagagatgactaatttaaatttagaaccagattttaatttaaattaatatttccattaataacctattcattgcagatacctattatactgtgtaacagttgttttggaaattttatgtaaaattaaaactatcagtattttacagatgttttaattagacattgttattaacaggaacagtgcagaaactagaatcaagccttataatatcttatagaccatgcatttttgaagttagtgtccactagggtcctattaactgtacatttgcaagatttcattatttttgcctctgacactatgggaaaaattttttagaagctattgggacagattcaagcttttatgcacttggttactacagctgtaaaatgaaatctcgtcttgtagcatggattattcttctcatgttaaacccaccaaaataaaggggactaaataggtaatgattttcctagtgcatttgcatactgtgataatcctgggccttgcaatagttctacagggctcttgggcattgaattattaggatgtaattgtacatcattgtagtgttcaccttattgaagctcactctgatgttaatgagcttcgggttttgatgcttgtttagagatcagcagtcttggatgggagggaacaaagctaaataaatgttagtttggtga

SEQ ID NO: 735899 - DNA, 1315 bp, Homo sapiens
tctagagagatccccgagtgtcttcagaacattggctggggaacagaccagggaattggtggatttggagaagagccgggaattaaatcacagctaatgaaccttattcgatctgtaagaaccgtgatgagagtgccattgataatagtaaactcaattgcaattgtgttacttttattatttggatgaatatcagtggagaaaatggagactcagaagaggacatgccagtagaagttattactttggtcattattggaatatttatatcttagctggctgaccttgcacttgtcaaaaatgtaaagctgaaaataaaaccagggtttctatttatctgttttttttttaatgttgcacttgtagtttcattacaaaagatcagatcatgaaaggcagtaactctccaggactggaatatctgattgctcagtgttaatagtagttcatgctgtggtgagattgttaaaagggtgcaagactgttgcttctctttttttagatatttttctatctctcacttctcagggatgaaattctttttcaaagttttgaagttccttgcaacttagccatgatgtgagtggttatccctagataaaattaaaaggatttttaaaaagtaattactgcactttgtctattgtctcagctataaattcaaatttatacatactattgagtattaatattctctgatttcagggagaattctgtcagtcacatgatgattatgtttttgtttaacattctttccatgcacttgttattttattaatttgcctgaatgatgagaccagaccagtgtctacagattttcattgtcagaaaaatctataagtctgccctttttacaatgatgatttaaaaaaaacaacagcgtaaatattagcccacaagagcagtcctaaacaatcacaattacactgtactacccaagaagactgtttattgtgaagcatttacctttcaaaaaatcattacatttctatttcttggtggagcagcacattgtggagtgtgattcttaattcttcattgagtttgtcaataggacattgatgctggataggttgtcttttgtttttatgtctcagaccatcttgtgagattgtttgcctatctcataatacagttttatgcagaaaggttgaaactatgtaaatggtttttatggaaattatcagttacaatattttaaaggtgtagaatggcatctttgtttataggagaacatttgtaaataaagttaaatttctaagtcaaaaaaaaaaaaaaaaaaaatcttttggcgccccccccaaaattaaacctg

SEQ ID NO: 735900 - DNA, 1340 bp, Homo sapiens
tctggggctgccccaaagggcagacaggtttattgggcagcagccgggaattaaatcacagctaatgaaccttattcgatctgtaagaaccgtgatgagagtgccattgataatagtaaactcaattgcaattgtgttacttttattatttggatgaatatcagtggagaaaatggagactcagaagaggacatgccagtagaagttattactttggtcattattggaatatttatatcttagctggctgaccttgcacttgtcaaaaatgtaaagctgaaaataaaaccagggtttctatttatctgttttttttttaatgttgcacttgtagtttcattacaaaagatcagatcatgaaaggcagtaactctccaggactggaatatctgattgctcagtgttaatagtagttcatgctgtggtgagattgttaaaagggtgcaagactgttgcttctctttttttagatatttttctatctctcacttctcagggatgaaattctttttcaaagttttgaagttccttgcaacttagccatgatgtgagtggttatccctagataaaattaaaaggatttttaaaaagtaattactgcacataaaatgataaataggtaatttgaataattttattttaagctccttggttaattattttgtctattgtctcagctataaattcaaatttatacatactattgagtattaatattctctgatttcagggagaattctgtcagtcacatgatgattatgtttttgtttaacattctttccatgcacttgttattttattaatttgcctgaatgatgagaccagaccagtgtctacagattttcattgtcagaaaaatctataagtctgccctttttacaatgatgatttaaaaaaaacaacagcgtaaatattagcccacaagagcagtcctaaacaatcacaattacactgtactacccaagaagactgtttattgtgaagcatttacctttcaaaaaatcattacatttctatttcttggtggagcagcacattgtggagtgtgattcttaattcttcattgagtttgtcaataggacattgatgctggataggttgtcttttgtttttatgtctcagaccatcttgtgagattgtttgcctatctcataatacagttttatgcagaaaggttgaaactatgtaaatggtttttatggaaattatcagttacaatattttaaaggtgtagaatggcatctttgtttataggagaacatttgtaaataaagttaaatttctaagtcaaaaaaaaaaaaaaaaaaaatcttttggcgccccccccaaaattaaacctg

SEQ ID NO: 735901 - DNA, 1520 bp, Homo sapiens
  misc_feature (2)..(2): n is a, c, g, or t
gnccgctctagagtatccccacagcataaactacccttgcggcggcgggagagaaatcgcttggacttcggggcggcctcggacggccatggcctttaccctgtactcactgctgcaggcagccctgctctgcgtcaacgccatcgcagtgctgcacgaggagcgattcctcaagaacattggctggggaacagaccagggaattggtggatttggagaagagccgggaattaaatcacagctaatgaaccttattcgatctgtaagaaccgtgatgagagtgccattgataatagtaaactcaattgcaattgtgttacttttattatttggatgaatatcagtggagaaaatggagactcagaagaggacatgccagtagaagttattactttggtcattattggaatatttatatcttagctggctgaccttgcacttgtcaaaaatgtaaagctgaaaataaaaccagggtttctatttatctgttttttttttaatgttgcacttgtagtttcattacaaaagatcagatcatgaaaggcagtaactctccaggactggaatatctgattgctcagtgttaatagtagttcatgctgtggtgagattgttaaaagggtgcaagactgttgcttctctttttttagatatttttctatctctcacttctcagggatgaaattctttttcaaagttttgaagttccttgcaacttagccatgatgtgagtggttatccctagataaaattaaaaggatttttaaaaagtaattactgcacataaaatgataaataggtaatttgaataattttattttaagctccttggttaattattttgtctattgtctcagctataaattcaaatttatacatactattgagtattaatattctctgatttcagggagaattctgtcagtcacatgatgattatgtttttgtttaacattctttccatgcacttgttattttattaatttgcctgaatgatgagaccagaccagtgtctacagattttcattgtcagaaaaatctataagtctgccctttttacaatgatgatttaaaaaaaacaacagcgtaaatattagcccacaagagcagtcctaaacaatcacaattacactgtactacccaagaagactgtttattgtgaagcatttacctttcaaaaaatcattacatttctatttcttggtggagcagcacattgtggagtgtgattcttaattcttcattgagtttgtcaataggacattgatgctggataggttgtcttttgtttttatgtctcagaccatcttgtgagattgtttgcctatctcataatacagttttatgcagaaaggttgaaactatgtaaatggtttttatggaaattatcagttacaatattttaaaggtgtagaatggcatctttgtttataggagaacatttgtaaataaagttaaatttctaagtcaaaaaaaaaaaaaaaaaaaatcttttggcgccccccccaaaattaaacctg

SEQ ID NO: 735902 - DNA, 413 bp, Homo sapiens
gaggaccccagatgcaaccaagagcagtcctaaacaatcacaattacactgtactacccaagaagactgtttattgtgaagcatttacctttcaaaaaatcattacatttctatttcttggtggagcagcacattgtggagtgtgattcttaattcttcattgagtttgtcaataggacattgatgctggataggttgtcttttgtttttatgtctcagaccatcttgtgagattgtttgcctatctcataatacagttttatgcagaaaggttgaaactatgtaaatggtttttatggaaattatcagttacaatattttaaaggtgtagaatggcatctttgtttataggagaacatttgtaaataaagttaaatttctaagtcaaaagcacttgtttttgtaccttagta

SEQ ID NO: 735903 - DNA, 1495 bp, Homo sapiens
ggcactcatcagctcgcacccacgcgtcgcaccccttgcggcggcgggagagaaatcgcttggacttcggggcggcctcggacggccatggcctttaccctgtactcactgctgcaggcagccctgctctgcgtcaacgccatcgcagtgctgcacgaggagcgattcctcaagaacattggctggggaacagaccagggaattggtggatttggagaagagccgggaattaaatcacagctaatgaaccttattcgatctgtaagaaccgtgatgagagtgccattgataatagtaaactcaattgcaattgtgttacttttattatttggatgaatatcagtggagaaaatggagactcagaagaggacatgccagtagaagttattactttggtcattattggaatatttatatcttagctggctgaccttgcacttgtcaaaaatgtaaagctgaaaataaaaccagggtttctatttatctgttttttttttaatgttgcacttgtagtttcattacaaaagatcagatcatgaaaggcagtaactctccaggactggaatatctgattgctcagtgttaatagtagttcatgctgtggtgagattgttaaaagggtgcaagactgttgcttctctttttttagatatttttctatctctcacttctcagggatgaaattctttttcaaagttttgaagttccttgcaacttagccatgatgtgagtggttatccctagataaaattaaaaggatttttaaaaagtaattactgcacataaaatgataaataggtaatttgaataattttattttaagctccttggttaattattttgtctattgtctcagctataaattcaaatttatacatactattgagtattaatattctctgatttcagggagaattctgtcagtcacatgatgattatgtttttgtttaacattctttccatgcacttgttattttattaatttgcctgaatgatgagaccagaccagtgtctacagattttcattgtcagaaaaatctataagtctgccctttttacaatgatgatttaaaaaaaacaacagcgtaaatattagcccacaagagcagtcctaaacaatcacaattacactgtactacccaagaagactgtttattgtgaagcatttacctttcaaaaaatcattacatttctatttcttggtggagcagcacattgtggagtgtgattcttaattcttcattgagtttgtcaataggacattgatgctggataggttgtcttttgtttttatgtctcagaccatcttgtgagattgtttgcctatctcataatacagttttatgcagaaaggttgaaactatgtaaatggtttttatggaaattatcagttacaatattttaaaggtgtagaatggcatctttgtttataggagaacatttgtaaataaagttaaatttctaagtcaaaagcacttgtttttgtaccttagta

SEQ ID NO: 735904 - DNA, 1519 bp, Homo sapiens
ggcactcatcagctcgcacccacgcgtcgcaccccttgcggcggcgggagagaaatcgcttggacttcggggcggcctcggacggccatggcctttaccctgtactcactgctgcaggcagccctgctctgcgtcaacgccatcgcagtgctgcacgaggagcgattcctcaagaacattggctggggaacagaccagggaattggtggatttggagaagagccgggaattaaatcacagctaatgaaccttattcgatctgtaagaaccgtgatgagagtgccattgataatagtaaactcaattgcaattgtgttacttttattatttggatgaatatcagtggagaaaatggagactcagaagaggacatgccagtagaagttattactttggtcattattggaatatttatatcttagctggctgaccttgcacttgtcaaaaatgtaaagctgaaaataaaaccagggtttctatttatctgttttttttttaatgttgcacttgtagtttcattacaaaagatcagatcatgaaaggcagtaactctccaggactggaatatctgattgctcagtgttaatagtagttcatgctgtggtgagattgttaaaagggtgcaagactgttgcttctctttttttagatatttttctatctctcacttctcagggatgaaattctttttcaaagttttgaagttccttgcaacttagccatgatgtgagtggttatccctagataaaattaaaaggatttttaaaaagtaattactgcacataaaatgataaataggtaatttgaataattttattttaagctccttggttaattattttgtctattgtctcagctataaattcaaatttatacatactattgagtattaatattctctgatttcagggagaattctgtcagtcacatgatgattatgtttttgtttaacattctttccatgcacttgttattttattaatttgcctgaatgatgagaccagaccagtgtctacagattttcattgtcagaaaaatctataagtctgccctttttacaatgatgatttaaaaaaaacaacagcgtaaatattagcccacaagagcagtcctaaacaatcacaattacactgtactacccaagaagactgtttattgtgaagcatttacctttcaaaaaatcattacatttctatttcttggtggagcagcacattgtggagtgtgattcttaattcttcattgagtttgtcaataggacattgatgctggataggttgtcttttgtttttatgtctcagaccatcttgtgagattgtttgcctatctcataatacagttttatgcagaaaggttgaaactatgtaaatggtttttatggaaattatcagttacaatattttaaaggtgtagaatggcatctttgtttataggagaacatttgtaaataaagttaaatttctaagtcaaaaaaaaaaaaaaaaaaaatcttttggcgccccccccaaaattaaacctg

SEQ ID NO: 735905 - DNA, 1786 bp, Homo sapiens
ggcactcatcagctcgcacccacgcgtcgcaccccttgcggcggcgggagagaaatcgcttggacttcggggcggcctcggacggccatggcctttaccctgtactcactgctgcaggcagccctgctctgcgtcaacgccatcgcagtgctgcacgaggagcgattcctcaagaacattggctggggaacagaccagggaattggtggatttggagaagagccgggaattaaatcacagctaatgaaccttattcgatctgtaagaaccgtgatgagagtgccattgataatagtaaactcaattgcaattgtgttacttttattatttggatgaatatcagtggagaaaatggagactcagaagaggacatgccagtagaagttattactttggtcattattggaatatttatatcttagctggctgaccttgcacttgtcaaaaatgtaaagctgaaaataaaaccagggtttctatttatctgttttttttttaatgttgcacttgtagtttcattacaaaagatcagatcatgaaaggcagtaactctccaggactggaatatctgattgctcagtgttaatagtagttcatgctgtggtgagattgttaaaagggtgcaagactgttgcttctctttttttagatatttttctatctctcacttctcagggatgaaattctttttcaaagttttgaagttccttgcaacttagccatgatgtgagtggttatccctagataaaattaaaaggatttttaaaaagtaattactgcacataaaatgataaataggtaatttgaataattttattttaagctccttggttaattattttgtctattgtctcagctataaattcaaatttatacatactattgagtattaatattctctgatttcagggagaattctgtcagtcacatgatgattatgtttttgtttaacattctttccatgcacttgttattttattaatttgcctgaatgatgagaccagaccagtgtctacagattttcattgtcagaaaaatctataagtctgccctttttacaatgatgatttaaaaaaaacaacagcgtaaatattagcccacaagagcagtcctaaacaatcacaattacactgtactacccaagaagactgtttattgtgaagcatttacctttcaaaaaatcattacatttctatttcttggtggagcagcacattgtggagtgtgattcttaattcttcattgagtttgtcaataggacattgatgctggataggttgtcttttgtttttatgtctcagaccatcttgtgagattgtttgcctatctcataatacagttttatgcagaaaggttgaaactatgtaaatggtttttatggaaattatcagttacaatattttaaaggtgtagaatggcatctttgtttataggagaacatttgtaaataaagttaaatttctaagtcaaaaaaaaaacccaccgccccaccaccgcagcgccccggcaccaccacacaccacacaataccgcgcaccagagtaccccactaacgcgatcctcactcacaaccgccatgagacgtcatcacaccgcgcagggcaacccgcaaacacgacgtccctggcaacaccccaccactccggatgcgaaaacccgaactccgatctacagaccccgcaccacaaaacacagccagacacacacctaccatcacatcaacacgcctcctccactagtcggtctgatcgctataatgccgccggtactcatcaccacccccccc

SEQ ID NO: 735906 - DNA, 1490 bp, Homo sapiens
ggcactcatcagctcgcacccacgcgtcgcaccccttgcggcggcgggagagaaatcgcttggacttcggggcggcctcggacggccatggcctttaccctgtactcactgctgcaggcagccctgctctgcgtcaacgccatcgcagtgctgcacgaggagcgattcctcaagaacattggctggggaacagaccagggaattggtggatttggagaagagccgggaattaaatcacagctaatgaaccttattcgatctgtaagaaccgtgatgagagtgccattgataatagtaaactcaattgcaattgtgttacttttattatttggatgaatatcagtggagaaaatggagactcagaagaggacatgccagtagaagttattactttggtcattattggaatatttatatcttagctggctgaccttgcacttgtcaaaaatgtaaagctgaaaataaaaccagggtttctatttatctgttttttttttaatgttgcacttgtagtttcattacaaaagatcagatcatgaaaggcagtaactctccaggactggaatatctgattgctcagtgttaatagtagttcatgctgtggtgagattgttaaaagggtgcaagactgttgcttctctttttttagatatttttctatctctcacttctcagggatgaaattctttttcaaagttttgaagttccttgcaacttagccatgatgtgagtggttatccctagataaaattaaaaggatttttaaaaagtaattactgcacataaaatgataaataggtaatttgaataattttattttaagctccttggttaattattttgtctattgtctcagctataaattcaaatttatacatactattgagtattaatattctctgatttcagggagaattctgtcagtcacatgatgattatgtttttgtttaacattctttccatgcacttgttattttattaatttgcctgaatgatgagaccagaccagtgtctacagattttcattgtcagaaaaatctataagtctgccctttttacaatgatgatttaaaaaaaacaacagcgtaaatattagcccacaagagcagtcctaaacaatcacaattacactgtactacccaagaagactgtttattgtgaagcatttacctttcaaaaaatcattacatttctatttcttggtggagcagcacattgtggagtgtgattcttaattcttcattgagtttgtcaataggacattgatgctggataggttgtcttttgtttttatgtctcagaccatcttgtgagattgtttgcctatctcataatacagttttatgcagaaaggttgaaactatgtaaatggtttttatggaaattatcagttacaatattttaaaggtgtagaaatttaactttatttacaaatgttctcctataaacaaagatgccatgtcgacgcggccgcgaatttagtagtagta

SEQ ID NO: 735907 - DNA, 1353 bp, Homo sapiens
tcgtgccgaattcggcacgagagaacatcagtaaacagataagaagtaggagacaggattggcattatatctatggtcatgtcgaggagggacaagattgagtggtgagaagattagaatttggatagattctaaggccctggcatgactctacagggaaccagggaagtgatgtgtctcttcttcagtgcgattctctctccgaagatagctttggcagcccccgccggcgcactcgacctacaggaaagttgctcccgagctgtggaggggcgtcatcgcctcctagcaacgctcctagcaaccgggtaacatctgctccctgtggtccaatgcgagctgagaacagctgcgcgcccgcctagcgctgcgaacccggagtgagaggcgcttcagagactggagggacggacctgcaggagccagggctgcccgccgagctgcagttgccgctactgccgctgtcagcgcccgactgaagagtgacagccgcaaaagcaggagtgagcaccgaaccccgcgcttctacctaacaggtgcatgcgccgatctggtgagtggacccagctcacaagatctcaggtaaccattcatgagcctgaggctgtgagaaatgctcgctgtgcaaaggggaactctcaccagattttctgaaactgttctagaaatacacttttcggattgattcagcattaccagcttatccaacaaaagtattaacatatacattaacaacgtcgaaagtagcctactttaagagaaaatatgcagaagaagaagatttacatcaagattaccatgggtattttccaaaacacctgatattacctgaggacagaacttgcattctcaaactttctctggagaagctcaggtttcttgaagacccagaaacctacttaagaaggtctgtgttaattaacaatttgctgaggaagatacatctagagacggagaaagagagctatgaatactttaaagaagctccctgttataagactgcatattctgatacaagaaaacggctgaagtttatggtacaggaatgctgttctcagtctctctattatgaagagctgcattcgtatcatattgtgccttatgcttcggagaatgccatttatgaaatgggctacactagcagccacttggagcaaaattctcagttgcttatttataaaatgaattaaagtaactgttaagtccattgatactttgtttctaaatgcttgaactgtttatagtgaagatgttaatataaggcactcattaccagtgcacttgatatcaaagatgagatgcatgctgaactgattggagagagcaatggttattactcagcagtccttagaa

SEQ ID NO: 735908 - DNA, 1331 bp, Homo sapiens
tcgtgccgaattcggcacgagagaacatcagtaaacagataagaagtaggagacaggattggcattatatctatggtcatgtcgaggagggacaagattgagtggtgagaagattagaatttggatagattctaaggccctggcatgactctacagggaaccagggaagtgatgtgtctcttcttcagtgcgattctctctccgaagatagctttggcagcccccgccggcgcactcgacctacaggaaagttgctcccgagctgtggaggggcgtcatcgcctcctagcaacgctcctagcaaccgggtaacatctgctccctgtggtccaatgcgagctgagaacagctgcgcgcccgcctagcgctgcgaacccggagtgagaggcgcttcagagactggagggacggacctgcaggagccagggctgcccgccgagctgcagttgccgctactgccgctgtcagcgcccgactgaagagtgacagccgcaaaagcaggagtgagcaccgaaccccgcgcttctacctaacaggtgcatgcgccgatctgatctcaggtaaccattcatgagcctgaggctgtgagaaatgctcgctgtgcaaaggggaactctcaccagattttctgaaactgttctagaaatacacttttcggattgattcagcattaccagcttatccaacaaaagtattaacatatacattaacaacgtcgaaagtagcctactttaagagaaaatatgcagaagaagaagatttacatcaagattaccatgggtattttccaaaacacctgatattacctgaggacagaacttgcattctcaaactttctctggagaagctcaggtttcttgaagacccagaaacctacttaagaaggtctgtgttaattaacaatttgctgaggaagatacatctagagacggagaaagagagctatgaatactttaaagaagctccctgttataagactgcatattctgatacaagaaaacggctgaagtttatggtacaggaatgctgttctcagtctctctattatgaagagctgcattcgtatcatattgtgccttatgcttcggagaatgccatttatgaaatgggctacactagcagccacttggagcaaaattctcagttgcttatttataaaatgaattaaagtaactgttaagtccattgatactttgtttctaaatgcttgaactgtttatagtgaagatgttaatataaggcactcattaccagtgcacttgatatcaaagatgagatgcatgctgaactgattggagagagcaatggttattactcagcagtccttagaa

SEQ ID NO: 735909 - DNA, 998 bp, Homo sapiens
gcccaaattgtaattttattaaatgagtggaaagaaaattacttcctaataatactgatatatgaggatttcccatattcttgacctgctgttaggcttttaataggcatctcatttaatcgcactacatcgagggtctgggcccagcacctcctatctccaagtctgacatcccttcttggacactactgttcctgtatatcttttgttatgtgcattcattaccttttgtaacatatgtgcactttgcttgctccgaagtctatggtatgcacatgtacctcacctacttcccttcactgtgatggctgatgatttttcccccagcttccgtggctatgtcacatgtccagttcattcctcgtaggtgctggaggtagtgatcaaaaggcacaaaactagagtccctgtgactgactgtgacccagcagaaagagtgcccatcacccaacctgtatttgcctgcaggtgcattcccatgtgtgtacatcaaatatcctggtcaggaaacctgtggatcattcttccatgaaataaatttgttctgttatggatagaagtgaaatagagcccctagtgtcatgaagaagaccacattagcacatcatgccactcttactattttagggactccacccagtgaagtcagtgatgtgctgttcttgcttccctagcttgaagaagagtatcagacttaatattacattcatacagtggctctatgatttgggtgataaataattgaatctgctttgctaatgtgagaaatagattattcagggtcactcaagccagggttccacttttcaaagttctaggtggtaagctagatcattaggaacccacttatttgtttacaaaatggaaattttcagtctttgtgagaatttgtcagcataacaatttgccaacagagactgttgattcagaggtgtctgtggcatgatagaattcacagcagcacagttttaaataaagttacacctttcagaaagcgc

SEQ ID NO: 735910 - DNA, 979 bp, Homo sapiens
ggaattgaagcacaacaggtagttttacttcttgaggattaccagtttgtacatcctacatttttggagatgatcaatagccttttgtcttcaggtgaagttcctggactctatactcttgaagaattagagcccttgctgttaccacttaaggatcaagcttcacaagatggtttttttggaccagtcttcaattacttcacatatagaattcagcaaaacttgcatattgtcttgataatggattctgcaaattcaaacttcatgataaactgtgagagtaatccagctttgcataagaaatgccaggtgttgtggatggagggttggtccaatagcagtatgaagaaaatacctgaaatgttattcagtgaaacaggtggtggagaaaaatacaatgataaaaaacgaaaagaagaaaagaaaaaaaattcagttgatcctgattttctaaaatcatttttattaatccatgaatcttgtaaagcatatggtgctacaccaagccaatacatgacctttttacatgtgtattctgccattagtagtagcaagaaaaaggaattattaaaaagacaaagtcatttgcaggctggtgtatctaaactaaatgaagctaaagctcttgtggatgaactgaacagaaaagctggagaacaaagtgtgttacttaaaacgaagcaagatgaagcagatgctgcccttcaaatgatcacagtgtcaatgcaggatgctagtgagcaaaaaacagaacttgaaagactgaagcacagaatagcagaagaagttgttaaaattgaagaaagaaaaaataaaattgatgatgaattaaaagaagtacaacctttagtcaatgaagctaaactagcagttggaaacattaagcccgaatcactttcagaaattcgctcactacgcatgccacctgatgtaattagagatattcttgaaggagttttaaggttgatgggtatctttg

SEQ ID NO: 735911 - DNA, 1119 bp, Homo sapiens
aagtaaaaaaagaagctgtgtcttaaagatgcatcttcctttaaagtaatgaataacaaaggtaggccataaggagcttcttatctactttaagctctggctggcttttccaggaagtttgaggagataaatcatgactcattttctgcagggtcagtggggaaactggagaggtggctgtccctgttcctgccggtgcctgaagctttcagtgttgttccatcacactctggctccatacctttcctcctgtcctccctccctgttggctggagtctaatgtgacacttcttccaaaacacagaaccgcctacattgtgtaaactgattcatgagccattgcgcccagccctccatctcatatttttagcctatttataggttctgcttacttatggcttcatcttcctcataagttttgcttgcttatgaccctcttgacctcacctctgcattgtgttggcttgctgtgtatcctttcagcttcagtttcctttgcgaactgtgattacttttaatagctcgattccaattcctgagaagacaaatttactaggcctgttgtatcccagtttagttaagatatttatatacccacagcaacagtttgtggatcttcacttttgttttctgccattaatatgatgattaccctgttttgctgcttttactttgcttgtttcttatagcttagcttataaagtatccattaacaactgactgttggacttctctctctttgtttcaaggactgcaattgcaaatgcctgtaggatccagatgccataaatgtataagatggttctggtgttttcttcttttcttgaaacactgtcttgtgtgtgtgaggggggtgatcttttgttcagtcatttttgatagagacattagaagagcgatttctttaaaatataaacaagggtgcaaatgggatggtaaagggcaactgacgctactaggaggatagtagggagtgtttgacattgtgtgtaattgggacatacatatttcctccaaaagggaagactttagtacttctgctgattgttgcctagtggaaatgtctgcctaagattaccagttgtctacaaaaagcctgattggcttcaggtttttttt

SEQ ID NO: 735912 - DNA, 965 bp, Homo sapiens
aaatgtcttctacctgaacctcgaatacctgggattacaggcaccagccaccatgcctggctaatttttgtatttttagtagagatggggtttcaccaaattggccagcctggtctcgaactcctgacatcaggtcatcctcccgcctcggcctcccaaagtgctgagattacaagcatgagccattgcgcccagccctccatctcatatttttagcctatttataggttctgcttacttatggcttcatcttcctcataagttttgcttgcttatgaccctcttgacctcacctctgcattgtgttggcttgctgtgtatcctttcagcttcagtttcctttgcgaactgtgattacttttaatagctcgattccaattcctgagaagacaaatttactaggcctgttgtatcccagtttagttaagatatttatatacccacagcaacagtttgtggatcttcacttttgttttctgccattaatatgatgattaccctgttttgctgcttttactttgcttgtttcttatagcttagcttataaagtatccattaacaactgactgttggacttctctctctttgtttcaaggactgcaattgcaaatgcctgtaggatccagatgccataaatgtataagatggttctggtgttttcttcttttcttgaaacactgtcttgtgtgtgtgaggggggtgatcttttgttcagtcatttttgatagagacattagaagagcgatttctttaaaatataaacaagggtgcaaatgggatggtaaagggcaactgacgctactaggaggatagtagggagtgtttgacattgtgtgtaattgggacatacatatttcctccaaaagggaagactttagtacttctgctgattgttgcctagtggaaatgtctgcctaagattaccagttgtctacaaaaagcctgattggcttcaggtttttttt

SEQ ID NO: 735913 - DNA, 1735 bp, Homo sapiens
aatttagatatgatttaacgtatatgataggatgtgtataggttgtatgcaattactagaacattttctataaaggtcatgaatatctgtggtggatcctggaaccaatggggttgggagggcagcttcaattgttttaaaatgtttcaggccaacagaatatgcttataaatgcttttataacctcatagcttctgtttctttatagttttggcttatttgtaatgtttcctttttctcatgtggtacaaaacatggttatgtaccattacctcttcaactcagccagtggcttggcagtttcccttgtgcagtgtttaaaactgggccacagttttgaatgcagttgtggatattaaaatgaaatagattaggaaagaatagattaagatagaatacagataagaaaataagaaaatatcagccttcatctggcaaagaaaataccagccttcatctggcaaagggcatcatcaggcatcaccaggaggtgctctgtatccataggttccctatctgtgggttccaccaccactgataaaaaatatttggaaaaaaatacaacaatgcaaaataatacaaatttaaaaaaatacaatatatttatgtggtgtttacattgtattcgttattataagtaatctagagatgatttaaagggacgggaagatatatgtaggttatatgtaaatataccattttatataaggaacgtgtatatccatggattttagaatctgtagggattcctggaaccagtcttccatggataccgagggatgactgtattgttctgtgaaatttttgtcccagctacatatttgtatgtatgtatgtttttggtccggtataattgtataatatttcttactatgggttaaacaactttataagacattgtgaggaacctggtatcctctggactagatcattcccgtagacagttccattgtgcacacatagtatttcgttaaaatcaggtgactgtttaaaaattaaaaagattttagataaaaatctagatttttactttctcctgaaatatcagaagatggggtctaaattcacactgaggccaagcagtggtaggctcattttaaagaagggctttctgctctctggtttaccccattgtatactaattagcctggtcttacttttatatattacctgaatagccacttagggcattttgaacacgtggcttgcattgctttgtctttttgaaatccgctgtggcaggcccaaaccttgcctttggtgggcttaagtaaggtctggtttccagtacaaaggcaaaggcaaatgaggattattagtattccattttgccctatggatattctcagtgctttctactggaaactcacaaccaattctgaatatgccacatactgtgtgatttgcccttgctgtccaaccctgttcttgctgccatttaaaaacaatcaggccaggtgtggtggctcatttctgtaatcccagcactttgggaggccaaggtgggtggatcatttgagctctggagttcgagaccagccagggccacatggcaagacctcgtctctactaaaaattaaaaaaaaaaaaaattagctgggcatggcggtggttcatgcctgtagtcctagcactttgggtgccagggcgggaggatcgtttgagctcagcagttcaagaccagcctgggcatcatagtgagaccctgtctctatttataaaaaaaaaatgaaaa

SEQ ID NO: 735914 - DNA, 1279 bp, Homo sapiens
  misc_feature (1245)..(1245): n is a, c, g, or t
  misc_feature (1257)..(1258): n is a, c, g, or t
  misc_feature (1270)..(1270): n is a, c, g, or t
aatttagatatgatttaacgtatatgataggatgtgtataggttgtatgcaattactagaacattttctataaaggtcatgaatatctgtggtggatcctggaaccaatggggttgggagggcagcttcaattgttttaaaatgtttcaggccaacagaatatgcttataaatgcttttataacctcatagcttctgtttctttatagttttggcttatttgtaatgtttcctttttctcatgtggtacaaaacatggttatgtaccattacctcttcaactcagccagtggcttggcagtttcccttgtgcagtgtttaaaactgggccacagttttgaatgcagttgtggatattaaaatgaaatagattaggaaagaatagattaagatagaatacagataagaaaataagaaaatatcagccttcatctggcaaagaaaataccagccttcatctggcaaagggcatcatcaggcatcaccaggaggtgctctgtatccataggttccctatctgtgggttccaccaccactgataaaaaatatttggaaaaaaatacaacaatgcaaaataatacaaatttaaaaaaatacaatatatttatgtggtgtttacattgtattcgttattataagtaatctagagatgatttaaagggacgggaagatatatgtaggttatatgtaaatataccattttatataaggaacgtgtatatccatggattttagaatctgtagggattcctggaaccagtcttccatggataccgagggatgactgtattgttctgtgaaatttttgtcccagctacatatttgtatgtatgtatgtttttggtccggtataattgtataatatttcttactatgggttaaacaactttataagacattgtgaggaacctggtatcctctggactagatcattcccgtagacagttccattgtgcacacatagtatttcgttaaaatcaggtgactgtttaaaaattaaaaagattttagataaaaatctagatttttactttctcctgaaatatcagaagatggggtctaaattcacactgaggccaagcagtggtaggctcattttaaagaagggctttctgctctctggtttaccccattgtatactaattagcctggtcttacttttatatattacctgaatagccacttagggcattttgaacacgtggcttgcattgctttgtctttttgaaatcctgtgggtactccnccgagcttcctnnagatgttacctntccgcatac

SEQ ID NO: 735915 - DNA, 1419 bp, Homo sapiens
aatttagatatgatttaacgtatatgataggatgtgtataggttgtatgcaattactagaacattttctataaaggtcatgaatatctgtggtggatcctggaaccaatggggttgggagggcagcttcaattgttttaaaatgtttcaggccaacagaatatgcttataaatgcttttataacctcatagcttctgtttctttatagttttggcttatttgtaatgtttcctttttctcatgtggtacaaaacatggttatgtaccattacctcttcaactcagccagtggcttggcagtttcccttgtgcagtgtttaaaactgggccacagttttgaatgcagttgtggatattaaaatgaaatagattaggaaagaatagattaagatagaatacagataagaaaataagaaaatatcagccttcatctggcaaagaaaataccagccttcatctggcaaagggcatcatcaggcatcaccaggaggtgctctgtatccataggttccctatctgtgggttccaccaccactgataaaaaatatttcttactatgggttaaacaactttataagacattgtgaggaacctggtatcctctggactagatcattcccgtagacagttccattgtgcacacatagtatttcgttaaaatcaggtgactgtttaaaaattaaaaagattttagataaaaatctagatttttactttctcctgaaatatcagaagatggggtctaaattcacactgaggccaagcagtggtaggctcattttaaagaagggctttctgctctctggtttaccccattgtatactaattagcctggtcttacttttatatattacctgaatagccacttagggcattttgaacacgtggcttgcattgctttgtctttttgaaatccgctgtggcaggcccaaaccttgcctttggtgggcttaagtaaggtctggtttccagtacaaaggcaaaggcaaatgaggattattagtattccattttgccctatggatattctcagtgctttctactggaaactcacaaccaattctgaatatgccacatactgtgtgatttgcccttgctgtccaaccctgttcttgctgccatttaaaaacaatcaggccaggtgtggtggctcatttctgtaatcccagcactttgggaggccaaggtgggtggatcatttgagctctggagttcgagaccagccagggccacatggcaagacctcgtctctactaaaaattaaaaaaaaaaaaaattagctgggcatggcggtggttcatgcctgtagtcctagcactttgggtgccagggcgggaggatcgtttgagctcagcagttcaagaccagcctgggcatcatagtgagaccctgtctctatttataaaaaaaaaatgaaaa

SEQ ID NO: 735916 - DNA, 1041 bp, Homo sapiens
ggcctcgcgaacgtgtatccctcggtatcatggattttagaatctgtagggattcctggaaccagtcttccatggataccgagggatgactgtattgttctgtgaaatttttgtcccagctacatatttgtatgtatgtatgtttttggtccggtataattgtataatatttcttactatgggttaaacaactttataagacattgtgaggaacctggtatcctctggactagatcattcccgtagacagttccattgtgcacacatagtatttcgttaaaatcaggtgactgtttaaaaattaaaaagattttagataaaaatctagatttttactttctcctgaaatatcagaagatggggtctaaattcacactgaggccaagcagtggtaggctcattttaaagaagggctttctgctctctggtttaccccattgtatactaattagcctggtcttacttttatatattacctgaatagccacttagggcattttgaacacgtggcttgcattgctttgtctttttgaaatccgctgtggcaggcccaaaccttgcctttggtgggcttaagtaaggtctggtttccagtacaaaggcaaaggcaaatgaggattattagtattccattttgccctatggatattctcagtgctttctactggaaactcacaaccaattctgaatatgccacatactgtgtgatttgcccttgctgtccaaccctgttcttgctgccatttaaaaacaatcaggccaggtgtggtggctcatttctgtaatcccagcactttgggaggccaaggtgggtggatcatttgagctctggagttcgagaccagccagggccacatggcaagacctcgtctctactaaaaattaaaaaaaaaaaaaattagctgggcatggcggtggttcatgcctgtagtcctagcactttgggtgccagggcgggaggatcgtttgagctcagcagttcaagaccagcctgggcatcatagtgagaccctgtctctatttataaaaaaaaaatgaaaa

SEQ ID NO: 735917 - DNA, 2699 bp, Homo sapiens
caagcttggcacgaggatctcacatgtcctcagtgaacttgttctgatgcaggcagatgagcagctcttaatctgcctgaactctcaagtccccatttttttttctaaacaacagcaacagaagccaatttagcaataacccgcggcactggggctgcacataagttttgtccccaaatcctacttctgaaagtttattttgcgatatgacctcactagttacacagaacctgaacatgtcctcagcagcactgcatgtgatagttagaaaggacatgtaaaatattcttaaatatgatatgtattagataaattatacaactgctaaaaaagaatgaggcagaaaatgtgttgacacagaaaagctaacagtaagtgaaaaaggtgagctgtagcatgttgtatatgatatcgtatgtaatatatgtgttgtatatgcctttataaccataaaccatgtctggcagaatacacagaaactattaacagattacccaggagtgggactcgggggtaagtgaggttatagagagagaggcttactttttgctttgtacttttttgtattatttaaattagaaacaattaaaactaggaacatgattatttcataatttaaaaaataggagccacggggttagtgaataagctgttacgtgtcataatgaaccctcctgtttgtgtaacgaatcccatttacagtagtctgtaggcagacattgtgaagaaactagtagttctttctttctcctatatgcacctataggccggcagaaatatctagccctgaaaagtgaaatgaagcatgctttctgaatggttcatcatttactgtttccttccagtgaatggaagattttaacacaaaggagagtttgcaggcagatgttgagaagaagctagtagaagcttccaccttgttaatctttatgtatttatttagttatcaagtcatttgtcttgatattagttcatttaattatttaaatgaattaatgcctgtaatgtaggcagaagaaaaaaattcaattttaccattaactaaacataattttggaaacgctgagggatttcccagaacccaaagccagcctcttggctcctagtggccccgagcagccctggtgccctgcaaacccacccaccagctgccccacagaggatctcttctctcaaggagagggccattgttactcctccccaccagggaggcactggggatccttgattagggtttgggggagcaggaggaggtcccattgaggacacacaccagacttgtgctgagtaggggcttgggccacatgcagcactctcatgagatttgccaattcaccaaagcaaacccagatcaacactttgttgctctaatagggtgttgtgaccttcttcttctaattgttgaatatttaactgatgttaaaaatggtgattattgttgtaagcaatgaaaacacaataggcatataaatgggatatgtttgtatgtcagattaaatataacctataaatatgtctccccagccctgctctctaagagagaactctgttcacaattgagtctcctcctgctagtatttccccgtactcttagtaccactcctattactctcctttttgtcctgtctgtcaaagcatacaagttcccaggttcagaaatttaattctcctcttccgtcagttccctttcatagaagcaggttttccagtgaacactcgatttctttagtgcaaaagtgatctgtgtccttttttgtagaaaatgtaggaagtaggtttaagtaaaagaagaaaatacagcacacaacaggatttgggtttccaagctgctgaagtaggaaggggcatgccaaagtctgcagttccactcccttgtccccagccagacccaccctggtggccatccctgaagcaagagccaggacccccatctgccaggcaccaagaagcacttctccattgccaattaatttttttttctttttgagacagagtttcgctcttgtcgcccaggctggagtgcaatggtacaatctcagctcactgcagcctccacctcctgggttcaaccaattctcccacctcaacctcccaagtagctaggattacaggtgctcgccaccacacccagctaatttttgtatttttagtagagatggggtttcaccatgttggccaggctggtctcaaactcctgacgtcaggtaatccacccaccttggcctcccaaagtgctgggattacaggcatgagccaccatgcctggcccactgccaattaagtgtaaggggtggaggcccgagggagaacccaaggtctatttgccctaagccatcaatgccagggatggctccttgcccagaacaccttcccagatggaccagttaatgcttctggtgatgatgccatccgaatgctatactgaaagcccttcagccgaggatcaaggttctgcttgtatgcacggttgttgaaatgctatttaaaagtgccgtgccgtggtgtggtgtggggacctagagacctgggctttggggccaacagtaagaatttgaatcctgctgcttccacttgttagtcttgggcttgttgcttaaatctctctgcaattcactgtccttgtctgcaaaatgggaataattgttgttacagcactactagtagtaactgggcttaataaatactgaatagctgtggtc

SEQ ID NO: 735918 - DNA, 4734 bp, Homo sapiens
agtgcagtctaggcctccgcctccgttaccctggagcccaggttaccgccgctgccacccaggagccccgatcctcgcctctgtcccatccttgtgttcaaacctcccgcatctcggcaacctcggcacccgcccggcagcctccgcaggaaccaggcacccgctctttggcggtcagacgccgaggccccagctgggagtttggtcctaagagggaaggcaaggaggcgggacgccgcatcggctctgctgaagagcctgcgggttggaggtgggctttgaagtgggcgtggagacggcgggggaggtggaggtgcgagtataaatgatcaaccagaaattatcttcaaaggaataaaaccagaagtatgtaaataaaaagcccaagataaagaaacagaaaagctgacactacatgaagcagagggcaaaaaagtttatcttctggatgccaatgtgaattgtggtctacaaatacattgtggagaaaatagattgcacagaaatgaatattatcaggatctgaagactgtgaaaatgtttttcagtattgtcatagtctcctctggagaaaataatctgtgaaattatgtgaatagagaccatttttcaaaacaatgggggaaagagcaggaagtccaggtactgatcaagaaagaaaggcaggcaaacaccattattcttacttatctgattttgaaacgccacagtcttctggccgatcatcgctggtcagttcttcacctgcaagtgttaggagaaaaaatcctaaaagacaaacttcagatggccaagtacatcaccaagcccctcggaaaccaagccctaagggtctaccaaacagaaagggagtccgagtgggatttcgctcccagagcctcaatagagagccacttcggaaagatactgatcttgttacaaaacggattctgtctgcaagactgctaaaaatcaatgagttgcagaatgaagtatctgaactccaggtcaagttagctgagctgctaaaagaaaataaatctttgaaaaggcttcagtacagacaggagaaagccctgaataagtttgaagatgccgaaaatgaaatctcacaacttatatttcgtcataacaatgagattacagcactcaaagaacgcttaagaaaatctcaagagaaagaacgggcaactgagaaaagggtaaaagatacagaaagtgaactatttaggacaaaattttccttacagaaactgaaagagatctctgaagctagacacctacctgaacgagatgatttggcaaagaaactagtttcagcagagttaaagttagatgacaccgagagaagaattaaggagctatcgaaaaaccttgaactgagtactaacagtttccaacgacagttgcttgctgaaaggaaaagggcatatgaggctcatgatgaaaataaagttcttcaaaaggaggtacagcgactatatcacaaattaaaggaaaaggagagagaactggatataaaaaatatatattctaatcgtctgccaaagtcctctccaaataaagagaaagaacttgcattaagaaaaaatgctgcatgccagagtgattttgcagacctgtgtacaaaaggagtacaaaccatggaagacttcaagccagaagaatatcctttaactccagaaacaattatgtgttacgaaaacaaatgggaagaaccaggacatcttactttggacttgcaatctcaaaagcaagacaggcatggagaagcagggattctaaacccaattatggaaagagaagaaaaatttgttacagatgaagaactccatgtcgtaaaacaggaggttgaaaagctggaggatgaatgggaaagagaagaacttgataaaaagcaaaaagaaaaggcatctttactggaaagagaagaaaagccagagtgggaaactggaaggtaccaactaggaatgtatccaattcagaatatggataaattgcaaggagaggaagaagaaagactgaagagagaaatgctacttgctaaactgaatgaaattgacagagaactccaagattctcgaaatctaaaataccctgttttgccattgttacctgattttgaatcaaaactacactccccagagagaagccccaaaacatacaggttctctgaatcctcagagagattatttaatgggcatcatttgcaagacatcagtttctcaactccaaaaggagaaggtcagaattcaggaaatgttagaagtccagcctcccctaatgagttcgcatttggtagctacgtgccttcgtttgcaaaaacatcagagaggtcaaatccatttagtcaaaaaagtagttttttggatttccaaagaaacagtatggaaaaacttagtaaagatggtgtagatttaattacaagaaaagagaaaaaagctaatttgatggaacagttatttggtgccagtggtagcagcaccatttcctccaaaagcagtgacccaaattctgtggcttccagtaaaggagacattgaccctctaaattttctccctgggaataaaggcagcagagatcaagaacatgatgaagatgaaggctttttcctcagtgaaggaagaagttttaatccaaataggcaccgattaaaacatgcagacgataaaccagcagtaaaagcagctgattctgtagaagatgaaattgaagaagtagcactgagatgactgactagagtatacattttttctaattgtaaatattgaaatattttaatacagtatttattataaacatttagactttttaatgctaaaatgtccttattaaggaatgatttttaatagctaaatacaatgcagttaaaaagaagtagatcatacatacaccacatagatagtttgccaagaatgaaggaggcttttttgaatgaaaccaaaaataaaaatatgtcttgaaaaatgaaatagattttaactcttcatccagtgctatggcaagtttaactgcactggaggtggtattccttttctacttttattcctatttatgtatttatttttaatcatattctcactgtgctaaatacagtcttcccactaattgttgaatgaaaattaagggtgaaagtctgtgttgggaagtgtagctccggatggtggagaaccagtgcttcttaggagcccttccctttatggatagggccaggggtccctatcttacgtggcagtcctaagctactcttgagtgatagcagtcacaacattgggatttcccattcctctgaaagtacccacagctaaacactactcatttcccaatttcagtatttactgaaatcacttacctacaattctgttagaatattatgttgagttcggaagacatttctctgtttgcaaggacagttagttgctctctgtcatagcccgcagaagcttggctacagtgtaattcctctccttgttctcctacactctttgtatctcagtgactgggtgtaagatttcatgccaaatgcaaggaatagtggaaatacataccaactgcaaagaatagaaaaactttatcccaatatattatagaaagatcttcagttcaattatgtccagagtaatataatttggcaatgttaatgcttttaagatttgaacttgtcctcaaaccaaggagacaacaatagtgtaatactattggacttacaggattagttttaaagcaactttgaatagaagtgtttcagacataggacttctgccttgttgactagagtggatagttttctgtttaaatgcattggtcttttggctgtttgtaattcacttcagcttatagagaagttgatgaccttggatcatgctgggtatgattggtctttaaaaagcagtaatataccaccagcccaaggagaaaacattgttaaaatgaagagtggtggaaatagtgtgttgggaagaataaaaaatttagattggcacttattctaaagtgagctgtttttttcaagaatttactagcatttgctcgtagtatgatttctgacgccagtcatatatactgatgaggggaaggagttactgtgttattctgagttcttataaatgcatattattgaatttcattgcatgactatttgtcaagacttacctggttaggtctccaattaaaagatgtaccacctgtcatcttctaaattgtgttcctttcatttattgggaacagaatctctcaaaagtgctaaactatattaaaaagttttcttaatagatttgtatgtctgatatgtataaccatttactataatatgttgcaaatcattctaatatatgtaaaacaatattatttgtaatgcagttattggtaaaatattatgtaatgttaattttgttcctagctgctaatttttctgccaaaagtattctaattttcaggttgttttaaaggcttttaaaactttttagttaagttttttattcacgtcatttaaattagttttttgctttttttctacctgataatctctttaacaagatgcaacaagacagaattattaaaattaaacctaaagttaagttacagatttaaaggcattatgatattaagcattaaaattggagattaaaatgtacaaaacagggttttccttatgaacaaaccttacagggtaaattgtttttttttctaaatgtcattaaatttatttgtactcagaactgttactaataaaaattaaaaatgcaaaaaaaaact

SEQ ID NO: 735919 - DNA, 4579 bp, Homo sapiens
agtgcagtctaggcctccgcctccgttaccctggagcccaggttaccgccgctgccacccaggagccccgatcctcgcctctgtcccatccttgtgttcaaacctcccgcatctcggcaacctcggcacccgcccggcagcctccgcaggaaccaggcacccgctctttggcggtcagacgccgaggccccagctgggagtttggtcctaagagggaaggcaaggaggcgggacgccgcatcggctctgctgaagagcctgcgggttggagggcaaaaaagtttatcttctggatgccaatgtgaattgtggtctacaaatacattgtggagaaaatagattgcacagaaatgaatattatcaggatctgaagactgtgaaaatgtttttcagtattgtcatagtctcctctggagaaaataatctgtgaaattatgtgaatagagaccatttttcaaaacaatgggggaaagagcaggaagtccaggtactgatcaagaaagaaaggcaggcaaacaccattattcttacttatctgattttgaaacgccacagtcttctggccgatcatcgctggtcagttcttcacctgcaagtgttaggagaaaaaatcctaaaagacaaacttcagatggccaagtacatcaccaagcccctcggaaaccaagccctaagggtctaccaaacagaaagggagtccgagtgggatttcgctcccagagcctcaatagagagccacttcggaaagatactgatcttgttacaaaacggattctgtctgcaagactgctaaaaatcaatgagttgcagaatgaagtatctgaactccaggtcaagttagctgagctgctaaaagaaaataaatctttgaaaaggcttcagtacagacaggagaaagccctgaataagtttgaagatgccgaaaatgaaatctcacaacttatatttcgtcataacaatgagattacagcactcaaagaacgcttaagaaaatctcaagagaaagaacgggcaactgagaaaagggtaaaagatacagaaagtgaactatttaggacaaaattttccttacagaaactgaaagagatctctgaagctagacacctacctgaacgagatgatttggcaaagaaactagtttcagcagagttaaagttagatgacaccgagagaagaattaaggagctatcgaaaaaccttgaactgagtactaacagtttccaacgacagttgcttgctgaaaggaaaagggcatatgaggctcatgatgaaaataaagttcttcaaaaggaggtacagcgactatatcacaaattaaaggaaaaggagagagaactggatataaaaaatatatattctaatcgtctgccaaagtcctctccaaataaagagaaagaacttgcattaagaaaaaatgctgcatgccagagtgattttgcagacctgtgtacaaaaggagtacaaaccatggaagacttcaagccagaagaatatcctttaactccagaaacaattatgtgttacgaaaacaaatgggaagaaccaggacatcttactttggacttgcaatctcaaaagcaagacaggcatggagaagcagggattctaaacccaattatggaaagagaagaaaaatttgttacagatgaagaactccatgtcgtaaaacaggaggttgaaaagctggaggatgaatgggaaagagaagaacttgataaaaagcaaaaagaaaaggcatctttactggaaagagaagaaaagccagagtgggaaactggaaggtaccaactaggaatgtatccaattcagaatatggataaattgcaaggagaggaagaagaaagactgaagagagaaatgctacttgctaaactgaatgaaattgacagagaactccaagattctcgaaatctaaaataccctgttttgccattgttacctgattttgaatcaaaactacactccccagagagaagccccaaaacatacaggttctctgaatcctcagagagattatttaatgggcatcatttgcaagacatcagtttctcaactccaaaaggagaaggtcagaattcaggaaatgttagaagtccagcctcccctaatgagttcgcatttggtagctacgtgccttcgtttgcaaaaacatcagagaggtcaaatccatttagtcaaaaaagtagttttttggatttccaaagaaacagtatggaaaaacttagtaaagatggtgtagatttaattacaagaaaagagaaaaaagctaatttgatggaacagttatttggtgccagtggtagcagcaccatttcctccaaaagcagtgacccaaattctgtggcttccagtaaaggagacattgaccctctaaattttctccctgggaataaaggcagcagagatcaagaacatgatgaagatgaaggctttttcctcagtgaaggaagaagttttaatccaaataggcaccgattaaaacatgcagacgataaaccagcagtaaaagcagctgattctgtagaagatgaaattgaagaagtagcactgagatgactgactagagtatacattttttctaattgtaaatattgaaatattttaatacagtatttattataaacatttagactttttaatgctaaaatgtccttattaaggaatgatttttaatagctaaatacaatgcagttaaaaagaagtagatcatacatacaccacatagatagtttgccaagaatgaaggaggcttttttgaatgaaaccaaaaataaaaatatgtcttgaaaaatgaaatagattttaactcttcatccagtgctatggcaagtttaactgcactggaggtggtattccttttctacttttattcctatttatgtatttatttttaatcatattctcactgtgctaaatacagtcttcccactaattgttgaatgaaaattaagggtgaaagtctgtgttgggaagtgtagctccggatggtggagaaccagtgcttcttaggagcccttccctttatggatagggccaggggtccctatcttacgtggcagtcctaagctactcttgagtgatagcagtcacaacattgggatttcccattcctctgaaagtacccacagctaaacactactcatttcccaatttcagtatttactgaaatcacttacctacaattctgttagaatattatgttgagttcggaagacatttctctgtttgcaaggacagttagttgctctctgtcatagcccgcagaagcttggctacagtgtaattcctctccttgttctcctacactctttgtatctcagtgactgggtgtaagatttcatgccaaatgcaaggaatagtggaaatacataccaactgcaaagaatagaaaaactttatcccaatatattatagaaagatcttcagttcaattatgtccagagtaatataatttggcaatgttaatgcttttaagatttgaacttgtcctcaaaccaaggagacaacaatagtgtaatactattggacttacaggattagttttaaagcaactttgaatagaagtgtttcagacataggacttctgccttgttgactagagtggatagttttctgtttaaatgcattggtcttttggctgtttgtaattcacttcagcttatagagaagttgatgaccttggatcatgctgggtatgattggtctttaaaaagcagtaatataccaccagcccaaggagaaaacattgttaaaatgaagagtggtggaaatagtgtgttgggaagaataaaaaatttagattggcacttattctaaagtgagctgtttttttcaagaatttactagcatttgctcgtagtatgatttctgacgccagtcatatatactgatgaggggaaggagttactgtgttattctgagttcttataaatgcatattattgaatttcattgcatgactatttgtcaagacttacctggttaggtctccaattaaaagatgtaccacctgtcatcttctaaattgtgttcctttcatttattgggaacagaatctctcaaaagtgctaaactatattaaaaagttttcttaatagatttgtatgtctgatatgtataaccatttactataatatgttgcaaatcattctaatatatgtaaaacaatattatttgtaatgcagttattggtaaaatattatgtaatgttaattttgttcctagctgctaatttttctgccaaaagtattctaattttcaggttgttttaaaggcttttaaaactttttagttaagttttttattcacgtcatttaaattagttttttgctttttttctacctgataatctctttaacaagatgcaacaagacagaattattaaaattaaacctaaagttaagttacagatttaaaggcattatgatattaagcattaaaattggagattaaaatgtacaaaacagggttttccttatgaacaaaccttacagggtaaattgtttttttttctaaatgtcattaaatttatttgtactcagaactgttactaataaaaattaaaaatgcaaaaaaaaact

SEQ ID NO: 735920 - DNA, 1717 bp, Homo sapiens
gtctcgcccaggcttgagtgtaaccggtgtggtcatagctcactacattctcaaactcctggccttaagtcatcctcctgcctcagcctcccaaaggcaagtaaggttaagaataggggaaaggtgaagtttcacagcttttctagaattctttttattcaagggactctcagatcatcaaacccacccagaatctgctcaattttcaagatttgcttataaatatttataatataaacactcaattgctatctgttttttaggttctcctctctctcccagaacagtggtaacaggaactcttgggggcttctccctgttcttgcagatgtggcaggatgtgttcctggggggctcccatgccagtccacaccctctgtggtgtaagcagggattggtaattaatgagatgctaaaccctccagaagtgagcgctcatgtcccagaaacacatcttccacctcagcagccagtgggaaaactagactttgtgtctgcatatttgttcttaaacacactcttctgcagtctaactctgctgaccactttccagtttgctcatatcagaatttcttcggttctaagatgcatattttctttttgtattctgacttgttagaaattagaatatgtcttgcagtcaataaaatctatgacaacatttttttttcttaatggttcctaaaactcctgtagttgatggtgtcttgcttaggtttaatgaaagagattttaatatatggcgtggttatgtggagttgtatctctatcagtattaatgggctcgggatgatttatattcaactgaacccccaaattcaacattttgtgttgaatatttattttatcagttattctttatcctgtactcattttggatacttactaaagtattgtatgtatttgttataataaaatggcttgccgtgtttgaacacactgtgtatctgacaatgttctaagacctaatttgatcttcatgacaactgcataaaatagttactattattctcaattcacaaatgagaaagtgagacacagagatgctaaggaattgcccaaagtcacacagctactgagtggcagagccagggtctgggcccagccagtgtggctccaggtgccgcccactcttgacgtgatacttaccgtcaatgctccttaccagttagggatgagctgattctcatatttttccaagatacattttaattttagctttatttgctgtatcatcatcatcagtatcatcatcatcatcagttttcttgttttaaaatagggtttggagtctcttcaaggctttctgttttggaaaagtaaaacttaaaaatctatagccatgtgaattatacttatggagaaaaagagtcttgttttattaacatcagacatctttgttcctactaattattttggagtaatgttcagtatcgggctaatgatcgatggatatcactcatccaattatgatgcatggattagaccacggccttaaactttgtacatagtgttgaataaattcatcttatttgcagtcttattgtcatctagctttgatacacttgccctttcatatgtctcttgtcactattctgtgtaagattataatcccaaataccactatatgtatttttcttcatattctattattgaacagtattaatgcttaatgttaatatataagtaatatatacattttaaaaattaaaaatgc

SEQ ID NO: 735921 - DNA, 1382 bp, Homo sapiens; identical to SEQ ID NO: 278006

SEQ ID NO: 735922 - DNA, 1026 bp, Homo sapiens; identical to SEQ ID NO: 277999

SEQ ID NO: 735923 - DNA, 1284 bp, Homo sapiens; identical to SEQ ID NO: 277997

SEQ ID NO: 735924 - DNA, 256 bp, Homo sapiens
gtagactattaagtcaaattcactactttggttttaaaaactcccttattttaaaatcttactgtctgccagactagtgtttttaaaataagctttaaaggagattaaacttaaggacccatctgtgaatcagcttgtgagattcaagtttgtacctatgcaaaattttaaattgctgcacatcacagatcttccctgtcactcaggtagtcaagactaataagagtactgaatccttgaatgccattgggtctgc

SEQ ID NO: 735925 - DNA, 622 bp, Homo sapiens
cttggttaatctgagcctactgtttctccttagataattcaccatacaataatgtactcaccatttgaatgaaacttgtttttagagccccattctgagacaactaaaccagctggttcatgcacaaagaataaaaattctaatggttctaaatctctcattaactgactgaatttctcattgtccttatcagtcatttcttcccattcacagcccccagccatccctcctcccaaagcagaatgcctattctgctaatgacatacctggaatatcaaaatcacttagttaagtctagagataaaagtaaatgttatctacattcctgcctaggcccagtccaacttgggccttcaagctcctgctaaagtgccacactatcccttaaacctctaaccctcacctggaagccacaccctttctgattgttctctacatataccatatgatgctgtccagatcttgaatcccttttttgtcccacatagaaagcattaagtagctgcggaattaatctgatgcatacttacctttccttgctgaatgaatgaatattcagaggctcttcttcctaaaatatggatagataaatgcagaaaggaatatatagcatcttcacatg

SEQ ID NO: 735926 - DNA, 543 bp, Homo sapiens
gttagaggtcaaatactaaaaggtttaaatatccaaagtactgacacttaggacttacctctaaagtctgactagctctaagttgtgaatgccccatcagcttggaccaccataacctggctacgagactgtgatagaatgcttgaagagctagcagaagtgtaaaaataaatagaaaaacagtgacactgtttctttacccaaaattaaccacagataaaatttaaaaatcacaaaagcactacacaagacacacttggcatatgtgtatatttgataactaaacacttacacatagtggcagagttttgtattcatttcaaaaattgcacagctcctttataagactctaaagggagcctctacattcacctaacgacataacgagacaactcacagaatgtaaatagagaccagttaaggtcataattaaattaaaaataacactgttttaaaataccatatgagccaggcccagtggctcacacctacaatcccagctactcaggaggccaaggtgggaggatcgcttgaggtcagaag

SEQ ID NO: 735927 - DNA, 223 bp, Homo sapiens
aactaggtttcttaatattctgaacactaaccttaaaatatggcacaactataaaaataattttgcatattagagaaagtcctctaaaagaacaattattttaatagattgacaggttaaattagagtttaagagtcacagttacataaaacccaatgaatctgatattctaaaacacatattgaaaaaatcaaaattcatgaaaactttagaaaaatcttac

SEQ ID NO: 735928 - DNA, 8011 bp, Homo sapiens
cggctccgaggaccgggcagcgcatttggggtgcccgctacagggccccccaagaggctgccaggtcgggagcgcagcctgaggccacggggggaagggggtgggtgggctgagagcagctcggcggcgagactggcccgccgccccttccccccacacccgtcgaccttgtgggcagaagcttcccagagctccttaggccggcgcgatggcgactgctgtggagacggaggcctgtcagccgacggatgcgagttgggaaagtggcggcggcggagacgacgagatgaagcaggcgcttccggagcttgagtcctcccaacaaaatggcggcggcggcggcctcaacatcgctgagcccagcggcggcgctgggcgtgaggagaacgcgggggccgaggccgcccagagcctcagccacgagcagcctcaggactcctctgaggcgggcgcggccgccctgcccagaggccccgaagagcccgaaaggcctgttaggaggagttttcagatccccaggaagagcagagaaaagaaagcacttttccagccattaactccaggctctcgagaatttgaagatgttgtaaatattctccattcttcttaccttgaaccaacctcagtaacaaattttaactacagacgtgcttgcttggtacacaatgagcttttggaaaaggagtttacagaaaagcgaagagaactgaagtttgatggtcgtttagataaggaactttcagaatcctatgcatttctgatggttgatcgataccaggttcaaaccatatgtgaaaaaggattacatgtgggtcagtccaaaataacaattcttggcagtccttccatgggtgtctatctttctaggtatgctgatttattacaagcgaatcctttggacacgggggcaatgggtgatgttgttatttttaaaataatgaagggtaaaataaagagtatatatgaccccatgggtgtaaaaagtttggaatctatgttaaataagagtgctttggaccccacaccaaagcatgaatgtcacgtgtcaaagaatgccaatcgaattacatcacttttggcttacagagcctatgagcttactcagtattatttttatgagtatggctttgatgagctaaggcgaagaccaagacacgtttgtccatatgcagttgtgtcttttacttacaaagatgatatacaaactccgaagtttgtaccttcatcaagatctaacagctttaatacagatagaaacatagataaatataactataccttgtggaaaggacagcttttaaataaaggaaaacttttgtgttatatttctctgaggtcagccactcgtgcttttttgcctatcaaactacctgagaaattagatgttgaaacagttatgagtattgatcatctgaaacagaaaatccctccagcactgttttataaggaaacatacttaggtccaaatgaagttttgaagaatggaatgtattgcagcctttatgaagttgtggaaaagacaagaattggaagtaacatggagagtttactgcaaaaactagacagagaaaaacttgttcttgttaaacctttgggagaccgaggatacctttttcttctctccccttatcagatggttcctccatatgaatatcagactgccaagtctcgagtcctacatgctttgtttctatttcaagaacctagaagcatagttacttcacaaaaaggttcaaccaatgcagcaccacaggagaggcatgagagcatgccagatgtattaaaaatagctcagtttttacaattttctttgattcagtgtcgaaaggaattcaaaaatataagcgccataaattttcattctgttgttgaaaagtatgtaagtgaattttttaagcgaggttttggttcaggtaaacgagagtttattatgtttccatatgattcacgattagatgataaaaaattcttatactcagctcccagaaataaatcccatattgatacttgtttgcatgcctatatttttcggcctgaagtgtatcagttacctatttgtaaattaaaagaactatttgaagaaaatagaaaacttcagcagtttagtccactttcagattatgaaggtcaagaagaagaaatgaatggtacaaaaatgaaatttggaaaacgaaataactcaagaggtgaagccattatatctggaaagcaaagatcatctcattctttggattatgataaggatagagtcaaagaattgattaatttaattcagtgtaggaaaaagagtgtgggtggggactcagacacagaagatatgagaagcaaaactgtcttgaagaggaagcttgaggatctacctgaaaatatgagaaagctcgccaaaaccagtaatttatctgaaaattgccatctgtatgaagagtctccacagcctattggctcacttggacatgatgctgacttgaggcggcagcagcaggatacctgtaactccggcattgctgacatccataggctgtttaattggttatcagaaacactagcaaatgcgcgccattctgatgcatctctgacagacacagtcaacaaagccttaggattgagcactgatgatgcctatgaagagctgaggcaaaaacatgagtatgagttgaactctaccccagataagaaagactatgagcagcctacttgtgcaaaagttgaaaatgcacagtttaagggtactcagagcttattactagaagttgatgcaacatctaagtattctgttgctatttctaccagcgaagtgggcactgaccataagctacatttgaaagaagatccaaatttaattagcgtgaataattttgaagattgcagtttgtgtcccagtgttcccattgaacatggatttcgtagacaacagtctaagtcaaataatgttgaagagactgaaatacattggaaactgattccaattacaggagggaatgcaagaagcccagaagaccagctggggaaacatggtgagaaacaaacaccagacacactaaagggcaccactgaggatgacgtgttgacaggtcaggtggaggagcagtgtgtgccagcagcagaggcagagccgcctgcagtgagcgaaaccacagagaggacagtgttaggagagtacaatctcttttctaggaagatagaagagattttgaagcaaaagaatgtttcatatgtcagtagagtttccacacctatcttttcaacacaagagaagatgaaacggctttccgagttcatatattctaagacttccaaagctggtgtgcaggagtttgtagatggtttgcatgagaagctaaatactattattattaaagcatcagccaagggtgggaatttgccaccagtcagtcctaacgattctggtgctaagatagcatcgaatcctctggaaaggcatgtcataccagtttcctcaagtgacttcaacaataaacatctccttgagccactgtgtagtgatcctttgaaagataccaactctgatgagcagcattccacttcggctttaactgaagtagaaatgaaccagcctcaacatgccacagagttaatggtgacttctgatcatattgtacctggtgatatggcccgggaaccagtagaagaaacaacaaaatcccccagtgatgtaaacatttctgctcaaccagctctttcaaattttataagccagttagaacctgaagtatttaatagtttggttaaaatcatgaaagacgtccagaaaaatactgtgaaattttatattcatgaagaagaagagagtgtgctctgtaaagaaataaaggaatatcttatcaaattaggcaatacagaatgtcatcctgaacagtttttggaaagaagatcaaaattagataaactattgattattattcaaaatgaagacattgcaggtttcattcacaagatacctggcttggtgactttaaagaagctcccctgtgttagttttgctggtgttgatagcctggatgatgttaaaaatcatacatacaatgaattatttgtatctggaggttttatcgtatctgatgaatcaattctaaacccagaggttgtcacagttgagaaccttaaaaattttttgacattccttgaggaacttagtactccagaaggaaaatggcaatggaaagtccactgtaaatttcagaagaaactaaaggaactaggcagattgaatgctaaagctctaagtctgttgacgcttctgaatgtctatcagaagaaacatctggttgaaattttgtcataccacaattgtgattcacaaactcgaaatgctccagaattggattgccttatcagacttcaggctcagaacatacagcaacgacacatagtctttttaacagagaagaacatcaagatgctttccagttatacagataatggaatagtggttgcaactgctgaagacttcatgcaaaactttaaaaatcttgtgggctatcacaattcaatcacagaagaaaaccttccacagcttggtgctaatgagaatcttgagtcgcagtcagctcttttagaaaacgatgaaaaggatgaagaggatatgtctctggattcaggggatgaaatctcacatatagaagtatgcagcaattttcattcagaaatatgggagaaagagaccaaaggatcacgtggaacagatcaaaaaaagaatactcaaattgagttgcaatcgtctcctgatgtgcaaaacagtttattagaagataagacttaccttgattctgaagagagaacttctattgatatagtatgctctgaaggagagaacagcaattcaacagaacaagattcatatagtaactttcaggtttatcatagtcaattaaatatgtcccatcagtttagtcattttaatgttctcactcatcagacatttttggggacaccatatgccctttcatcaagtcagtctcaagaaaatgagaattacttcttatctgcttatactgaaagcttggatagagataaatctccacctcccttaagttgggggaaaagtgattcttccaggccatattcacaagagaaataactgtagtaactttttttttaagagattgttgtggactttgtttattaacaatttatatttcattctctaaacaaaaggttcttgttctttctcaaatgttttttcttttatttaaatcatgatggcctgtaacagttgaagcatctaaaaattgaaataaatatatatttttaacatatattgtacttgaattatctcatgttggcacttctaagttttactttttgtatgttacctgtacttaggcttcaaattgaagcctgttttatgtgtaaaatcagatgcttgcaggaggacggtaaacagcaaaggctttacttctttttctctaatgtcacctgatataaagtacttttgttgaagtgaattattttgatgtaggcttttgtatactgtgtttacacaggtataagtcagtaatagcagtgttaatatttacaggattttggctcgatacctcaagatttatctaacagtgcagtttcatttagataataaactatgtacataggacacattttttatctctaggcttagtcatgtaaaaactgcctattgctaaaattctggtaactttttgagagtattggataattttcagtacctgcgcaatccttgatttaatgaaattaaattttttatttcaaaagataggcttctgtttatcaaaggcgttgaacaatttgatttttaaattagttttagcaaaatggaagtataatgggaatatatttttgaggtggtcttagtagtaattaccatttgttgaacacattaatgctatactagacagatacagtggagatagctttcaaacccgtatctattcctaactactgcctctaatactaattactaacttgttactaatgctaacttttaaaaatgtttttgaaaattgcaatttctacaaataaatgtcatagtgcaaataaatgtcaggatttagagaaggagcctaaactgaatttgtgttatttcagtaaaagttatggagttatgggtctagacgtgttaataagttagacagaactttggcactttagaacaaatgcatgagtggtatttcagttcctaagttacataaaaagtgtgaaagaacactgtgaggtcccagcaacgccagactatattaaggtaagtagaaagtgtttttatagggcttcaatacccaggtggtgacagagcagaagaaccggtttttttttttttttttttactactaagcttttacaaaagaagtatctgttttattgtatagaacaagtacagcattttactacatagtatacaagtttttaatgagcatttaaaaaaataagtaaatctaggctatttgaaaaatacagttgagccagtgagcacattttataatttggaagacacaaatcaaatgtgaaggatttgattttctacatttaaaatgaagaaccaaaactctcttcttgattttcagctaaaggcaggagactactttccaactccttttgcttctggagaaggccctgaaatcacattgatatatgtttgttagtaaaatgtgcacacctgacttgcaatgttgtgttaaactagaattatattcacttggaaaacatatcgcttaggataaaattttgtcattcaaaaattttttcagaaatgcttgtactagaccacctcatttggatatatagctatcacatttgtaagattctgtttttagcataaaaatcaatagggatgaaaattttcttagaactcaagactccataactatgggggtaaatgaagtcatcccttctcccccagtccacccccaagtgctcttagatactgaaggagtctcccttaacatacagtgttttttttttgttgttgtttttttgtttttttttggagatggagtctcgctctgtcgcccaagctggagtacagtggtgcaatctcactgcaagctctgcctcccaggttcacaccattctcctgcctcaacctcccgaatggctgggactacaggcacccaccaccacgcctggctaactaactaactaactttttgtatttttagtagagacagggtttcactgtgttagccaggatggtcttgatctcctgacctcatgatctgcctgcctcagcctcccaaagtgctgggattacaggcttgagccactgctcctggccaacatccagtattttatcttgactgtcctaaccttaccttagatgctaacagaagggtcctgctgaaataacactgggtgctatattgatgggtaaatgtgtacatcctattccttcctctttatctcacaatttttgtctccactaagcaagaagtaaactaacacttcgtcactctaaagaaataacttatgtaaaactcttagtaaccctgtttgtcttcaaatgagtaaatagaccaaagtggggggacaattttctagttctgtagagggaaaaacatctgagtcaacattttgaaatgcagagggtattggtacatgacgacatggaaaagggcacttttaaacacagcttactcttcctcaagtacagagagtatatagtgaatcaaaactaactacagccattctttttaaagcccaagggatggagcaaaggtgtaaggatgttacctgtttgttttaatcagagagcaaaaagaagtcacaatagtttgggagaaaaagtagtatggtgagtaaggttatgcgtataatttcatactgaatttattactatttgggatgtacgtcaatgttctaacaaacactgccaacacgtcaattttttaaaaagcgtgggccacattgctaagaatttgttaaagcataactgtattttttgttttagggccttattgatgttttgccgttccaatgtatgcatttttttactcaataaacttgtcttaattttaaaaaagtc

SEQ ID NO: 735929 - DNA, 7776 bp, Homo sapiens
cggctccgaggaccgggcagcgcatttggggtgcccgctacagggccccccaagaggctgccaggtcgggagcgcagcctgaggccacggggggaagggggtgggtgggctgagagcagctcggcggcgagactggcccgccgccccttccccccacacccgtcgaccttgtgggcagaagcttcccagagctccttaggccggcgcgatggcgactgctgtggagacggaggcctgtcagccgacggatgcgagttgggaaagtggcggcggcggagacgacgagatgaagcaggcgcttccggagcttgagtcctcccaacaaaatggcggcggcggcggcctcaacatcgctgagcccagcggcggcgctgggcgtgaggagaacgcgggggccgaggccgcccagagcctcagccacgagcagcctcaggactcctctgaggcgggcgcggccgccctgcccagaggccccgaagagcccgaaaggcctgttaggaggagttttcagatccccaggaagagcagagaaaagaaagcacttttccagccattaactccaggctctcgagaatttgaagatgttgtaaatattctccattcttcttaccttgaaccaacctcagtaacaaattttaactacagacgtgcttgcttggtacacaatgagcttttggaaaaggagtttacagaaaagcgaagagaactgaagtttgatggtcgtttagataaggaactttcagaatcctatgcatttctgatggttgatcgataccaggttcaaaccatatgtgaaaaaggattacatgtgggtcagtccaaaataacaattcttggcagtccttccatgggtgtctatctttctaggtatgctgatttattacaagcgaatcctttggacacgggggcaatgggtgatgttgttatttttaaaataatgaagggtaaaataaagagtatatatgaccccatgggtgtaaaaagtttggaatctatgttaaataagagtgctttggaccccacaccaaagcatgaatgtcacgtgtcaaagaatgccaatcgaattacatcacttttggcttacagagcctatgagcttactcagtattatttttatgagtatggctttgatgagctaaggcgaagaccaagacacgtttgtccatatgcagttgtgtcttttacttacaaagatgatatacaaactccgaagtttgtaccttcatcaagatctaacagctttaatacagatagaaacatagataaatataactataccttgtggaaaggacagcttttaaataaaggaaaacttttgtgttatatttctctgaggtcagccactcgtgcttttttgcctatcaaactacctgagaaattagatgttgaaacagttatgagtattgatcatctgaaacagaaaatccctccagcactgttttataaggaaacatacttaggtccaaatgaagttttgaagaatggaatgtattgcagcctttatgaagttgtggaaaagacaagaattggaagtaacatggagagtttactgcaaaaactagacagagaaaaacttgttcttgttaaacctttgggagaccgaggatacctttttcttctctccccttatcagatggttcctccatatgaatatcagactgccaagtctcgagtcctacatgctttgtttctatttcaagaacctagaagcatagttacttcacaaaaaggttcaaccaatgcagcaccacaggagaggcatgagagcatgccagatgtattaaaaatagctcagtttttacaattttctttgattcagtgtcgaaaggaattcaaaaatataagcgccataaattttcattctgttgttgaaaagtatgtaagtgaattttttaagcgaggttttggttcaggtaaacgagagtttattatgtttccatatgattcacgattagatgataaaaaattcttatactcagctcccagaaataaatcccatattgatacttgtttgcatgcctatatttttcggcctgaagtgtatcagttacctatttgtaaattaaaagaactatttgaagaaaatagaaaacttcagcagtttagtccactttcagattatgaaggtcaagaagaagaaatgaatggtacaaaaatgaaatttggaaaacgaaataactcaagaggtgaagccattatatctggaaagcaaagatcatctcattctttggattatgataaggatagagtcaaagaattgattaatttaattcagtgtaggaaaaagagtgtgggtggggactcagacacagaagatatgagaagcaaaactgtcttgaagaggaagcttgaggatctacctgaaaatatgagaaagctcgccaaaaccagtaatttatctgaaaattgccatctgtatgaagagtctccacagcctattggctcacttggacatgatgctgacttgaggcggcagcagcaggatacctgtaactccggcattgctgacatccataggctgtttaattggttatcagaaacactagcaaatgcgcgccattctgatgcatctctgacagacacagtcaacaaagccttaggattgagcactgatgatgcctatgaagagctgaggcaaaaacatgagtatgagttgaactctaccccagataagaaagactatgagcagcctacttgtgcaaaagttgaaaatgcacagtttaagggtactcagagcttattactagaagttgatgcaacatctaagtattctgttgctatttctaccagcgaagtgggcactgaccataagctacatttgaaagaagatccaaatttaattagcgtgaataattttgaagattgcagtttgtgtcccagtgttcccattgaacatggatttcgtagacaacagtctaagtcaaataatgttgaagagactgaaatacattggaaactgattccaattacaggagggaatgcaagaagcccagaagaccagctggggaaacatggtgagaaacaaacaccagacacactaaagggcaccactgaggatgacgtgttgacaggtcaggtggaggagcagtgtgtgccagcagcagaggcagagccgcctgcagtgagcgaaaccacagagaggacagtgttaggagagtacaatctcttttctaggaagatagaagagattttgaagcaaaagaatgtttcatatgtcagtagagtttccacacctatcttttcaacacaagagaagatgaaacggctttccgagttcatatattctaagacttccaaagctggtgtgcaggagtttgtagatggtttgcatgagaagctaaatactattattattaaagcatcagccaagggtgggaatttgccaccagtcagtcctaacgattctggtgctaagatagcatcgaatcctctggaaaggcatgtcataccagtttcctcaagtgacttcaacaataaacatctccttgagccactgtgtagtgatcctttgaaagataccaactctgatgagcagcattccacttcggctttaactgaagtagaaatgaaccagcctcaacatgccacagagttaatggtgacttctgatcatattgtacctggtgatatggcccgggaaccagtagaagaaacaacaaaatcccccagtgatgtaaacatttctgctcaaccagctctttcaaattttataagccagttagaacctgaagtatttaatagtttggttaaaatcatgaaagacgtccagaaaaatactgtgaaattttatattcatgaagaagaagagagtgtgctctgtaaagaaataaaggaatatcttatcaaattaggcaatacagaatgtcatcctgaacagtttttggaaagaagatcaaaattagataaactattgattattattcaaaatgaagacattgcaggtttcattcacaagatacctggcttggtgactttaaagaagctcccctgtgttagttttgctggtgttgatagcctggatgatgttaaaaatcatacatacaatgaattatttgtatctggaggttttatcgtatctgatgaatcaattctaaacccagaggttgtcacagttgagaaccttaaaaattttttgacattccttgaggaacttagtactccagaaggaaaatggcaatggaaagtccactgtaaatttcagaagaaactaaaggaactaggcagattgaatgctaaagctctaagtctgttgacgcttctgaatgtctatcagaagaaacatctggttgaaattttgtcataccacaattgtgattcacaaactcgaaatgctccagaattggattgccttatcagacttcaggctcagaacatacagcaacgacacatagtctttttaacagagaagaacatcaagatgctttccagttatacagataatggaatagtggttgcaactgctgaagacttcatgcaaaactttaaaaatcttgtgggctatcacaattcaatcacagaagaaaaccttccacagcttggtgctaatgagaatcttgagtcgcagtcagctcttttagaaaacgatgaaaaggatgaagaggatatgtctctggattcaggggatgaaatctcacatatagaagtatgcagcaattttcattcagaaatatgggagaaagagaccaaaggatcacgtggaacagatcaaaaaaagaatactcaaattgagttgcaatcgtctcctgatgtgcaaaacagtttattagaagataagacttaccttgattctgaagagagaacttctattgatatagtatgctctgaaggagagaacagcaattcaacagaacaagattcatatagtaactttcaggtttatcatagtcaattaaatatgtcccatcagtttagtcattttaatgttctcactcatcagacatttttggggacaccatatgccctttcatcaagtcagtctcaagaaaatgagaattacttcttatctgcttatactgaaagcttggatagagataaatctccacctcccttaagttgggggaaaagtgattcttccaggccatattcacaagagaaataactgtagtaactttttttttaagagattgttgtggactttgtttattaacaatttatatttcattctctaaacaaaaggttcttgttctttctcaaatgttttttcttttatttaaatcatgatggcctgtaacagttgaagcatctaaaaattgaaataaatatatatttttaacatatattgtacttgaattatctcatgttggcacttctaagttttactttttgtatgttacctgtacttaggcttcaaattgaagcctgttttatgtgtaaaatcagatgcttgcaggaggacggtaaacagcaaaggctttacttctttttctctaatgtcacctgatataaagtacttttgttgaagtgaattattttgatgtaggcttttgtatactgtgtttacacaggtataagtcagtaatagcagtgttaatatttacaggattttggctcgatacctcaagatttatctaacagtgcagtttcatttagataataaactatgtacataggacacattttttatctctaggcttagtcatgtaaaaactgcctattgctaaaattctggtaactttttgagagtattggataattttcagtacctgcgcaatccttgatttaatgaaattaaattttttatttcaaaagataggcttctgtttatcaaaggcgttgaacaatttgatttttaaattagttttagcaaaatggaagtataatgggaatatatttttgaggtggtcttagtagtaattaccatttgttgaacacattaatgctatactagacagatacagtggagatagctttcaaacccgtatctattcctaactactgcctctaatactaattactaacttgttactaatgctaacttttaaaaatgtttttgaaaattgcaatttctacaaataaatgtcatagtgcaaataaatgtcaggatttagagaaggagcctaaactgaatttgtgttatttcagtaaaagttatggagttatgggtctagacgtgttaataagttagacagaactttggcactttagaacaaatgcatgagtggtatttcagttcctaagttacataaaaagtgtgaaagaacactgtgaggtcccagcaacgccagactatattaaggtaagtagaaagtgtttttatagggcttcaatacccaggtggtgacagagcagaagaaccggtttttttttttttttttttactactaagcttttacaaaagaagtatctgttttattgtatagaacaagtacagcattttactacatagtatacaagtttttaatgagcatttaaaaaaataagtaaatctaggctatttgaaaaatacagttgagccagtgagcacattttataatttggaagacacaaatcaaatgtgaaggatttgattttctacatttaaaatgaagaaccaaaactctcttcttgattttcagctaaaggcaggagactactttccaactccttttgcttctggagaaggccctgaaatcacattgatatatgtttgttagtaaaatgtgcacacctgacttgcaatgttgtgttaaactagaattatattcacttggaaaacatatcgcttaggataaaattttgtcattcaaaaattttttcagaaatgcttgtactagaccacctcatttggatatatagctatcacatttgtaagattctgtttttagcataaaaatcaatagggatgaaaattttcttagaactcaagactccataactatgggggtaaatgaagtcatcccttctcccccagtccacccccaagtgctcttagatactgaaggagtctcccttaacatacagtgttttttttttgttgttgtttttttgtttttttttggagatggagtctcgctctgtcgcccaagctggagtacagtggtgcaatctcactgcaagctctgcctcccaggttcacaccattctcctgcctcaacctcccgaatggctgggactacaggcacccaccaccacgcctggctaactaactaactaactttttgtatttttagtagagacagggtttcactgtgttagccaggatggtcttgatctcctgacctcatgatctgcctgcctcagcctcccaaagtgctgggattacaggcttgagccactgctcctggccaacatccagtattttatcttgactgtcctaaccttaccttagatgctaacagaagggtcctgctgaaataacactgggtgctatattgatgggtaaatgtgtacatcctattccttcctctttatctcacaatttttgtctccactaagcaagaagtaaactaacacttcgtcactctaaagaaataacttatgtaaaactcttagtaaccctgtttgtcttcaaatgagtaaatagaccaaagtggggggacaattttctagttctgtagagggaaaaacatctgagtcaacattttgaaatgcagagggtattggtacatgacgacatggaaaagggcacttttaaacacagcttactcttcctcaagtacagagagtatatagtgaatcaaaactaactacagccattctttttaaagcccaagggatggagcaaaggtgtaaggatgttacctgtttgttttaatcagagagcaaagacagcaaccaaaagagcaaagaccccaaaag

SEQ ID NO: 735930 - DNA, 8615 bp, Homo sapiens
cggctccgaggaccgggcagcgcatttggggtgcccgctacagggccccccaagaggctgccaggtcgggagcgcagcctgaggccacggggggaagggggtgggtgggctgagagcagctcggcggcgagactggcccgccgccccttccccccacacccgtcgaccttgtgggcagaagcttcccagagctccttaggccggcgcgatggcgactgctgtggagacggaggcctgtcagccgacggatgcgagttgggaaagtggcggcggcggagacgacgagatgaagcaggcgcttccggagcttgagtcctcccaacaaaatggcggcggcggcggcctcaacatcgctgagcccagcggcggcgctgggcgtgaggagaacgcgggggccgaggccgcccagagcctcagccacgagcagcctcaggactcctctgaggcgggcgcggccgccctgcccagaggccccgaagagcccgaaaggcctgttaggaggagttttcagatccccaggaagagcagagaaaagaaagcacttttccagccattaactccaggctctcgagaatttgaagatgttgtaaatattctccattcttcttaccttgaaccaacctcagtaacaaattttaactacagacgtgcttgcttggtacacaatgagcttttggaaaaggagtttacagaaaagcgaagagaactgaagtttgatggtcgtttagataaggaactttcagaatcctatgcatttctgatggttgatcgataccaggttcaaaccatatgtgaaaaaggattacatgtgggtcagtccaaaataacaattcttggcagtccttccatgggtgtctatctttctaggtatgctgatttattacaagcgaatcctttggacacgggggcaatgggtgatgttgttatttttaaaataatgaagggtaaaataaagagtatatatgaccccatgggtgtaaaaagtttggaatctatgttaaataagagtgctttggaccccacaccaaagcatgaatgtcacgtgtcaaagaatgccaatcgaattacatcacttttggcttacagagcctatgagcttactcagtattatttttatgagtatggctttgatgagctaaggcgaagaccaagacacgtttgtccatatgcagttgtgtcttttacttacaaagatgatatacaaactccgaagtttgtaccttcatcaagatctaacagctttaatacagatagaaacatagataaatataactataccttgtggaaaggacagcttttaaataaaggaaaacttttgtgttatatttctctgaggtcagccactcgtgcttttttgcctatcaaactacctgagaaattagatgttgaaacagttatgagtattgatcatctgaaacagaaaatccctccagcactgttttataaggaaacatacttaggtccaaatgaagttttgaagaatggaatgtattgcagcctttatgaagttgtggaaaagacaagaattggaagtaacatggagagtttactgcaaaaactagacagagaaaaacttgttcttgttaaacctttgggagaccgaggatacctttttcttctctccccttatcagatggttcctccatatgaatatcagactgccaagtctcgagtcctacatgctttgtttctatttcaagaacctagaagcatagttacttcacaaaaaggttcaaccaatgcagcaccacaggagaggcatgagagcatgccagatgtattaaaaatagctcagtttttacaattttctttgattcagtgtcgaaaggaattcaaaaatataagcgccataaattttcattctgttgttgaaaagtatgtaagtgaattttttaagcgaggttttggttcaggtaaacgagagtttattatgtttccatatgattcacgattagatgataaaaaattcttatactcagctcccagaaataaatcccatattgatacttgtttgcatgcctatatttttcggcctgaagtgtatcagttacctatttgtaaattaaaagaactatttgaagaaaatagaaaacttcagcagtttagtccactttcagattatgaaggtcaagaagaagaaatgaatggtacaaaaatgaaatttggaaaacgaaataactcaagaggtgaagccattatatctggaaagcaaagatcatctcattctttggattatgataaggatagagtcaaagaattgattaatttaattcagtgtaggaaaaagagtgtgggtggggactcagacacagaagatatgagaagcaaaactgtcttgaagaggaagcttgaggatctacctgaaaatatgagaaagctcgccaaaaccagtaatttatctgaaaattgccatctgtatgaagagtctccacagcctattggctcacttggacatgatgctgacttgaggcggcagcagcaggatacctgtaactccggcattgctgacatccataggctgtttaattggttatcagaaacactagcaaatgcgcgccattctgatgcatctctgacagacacagtcaacaaagccttaggattgagcactgatgatgcctatgaagagctgaggcaaaaacatgagtatgagttgaactctaccccagataagaaagactatgagcagcctacttgtgcaaaagttgaaaatgcacagtttaagggtactcagagcttattactagaagttgatgcaacatctaagtattctgttgctatttctaccagcgaagtgggcactgaccataagctacatttgaaagaagatccaaatttaattagcgtgaataattttgaagattgcagtttgtgtcccagtgttcccattgaacatggatttcgtagacaacagtctaagtcaaataatgttgaagagactgaaatacattggaaactgattccaattacaggagggaatgcaagaagcccagaagaccagctggggaaacatggtgagaaacaaacaccagacacactaaagggcaccactgaggatgacgtgttgacaggtcaggtggaggagcagtgtgtgccagcagcagaggcagagccgcctgcagtgagcgaaaccacagagaggacagtgttaggagagtacaatctcttttctaggaagatagaagagattttgaagcaaaagaatgtttcatatgtcagtagagtttccacacctatcttttcaacacaagagaagatgaaacggctttccgagttcatatattctaagacttccaaagctggtgtgcaggagtttgtagatggtttgcatgagaagctaaatactattattattaaagcatcagccaagggtgggaatttgccaccagtcagtcctaacgattctggtgctaagatagcatcgaatcctctggaaaggcatgtcataccagtttcctcaagtgacttcaacaataaacatctccttgagccactgtgtagtgatcctttgaaagataccaactctgatgagcagcattccacttcggctttaactgaagtagaaatgaaccagcctcaacatgccacagagttaatggtgacttctgatcatattgtacctggtgatatggcccgggaaccagtagaagaaacaacaaaatcccccagtgatgtaaacatttctgctcaaccagctctttcaaattttataagccagttagaacctgaagtatttaatagtttggttaaaatcatgaaagacgtccagaaaaatactgtgaaattttatattcatgaagaagaagagagtgtgctctgtaaagaaataaaggaatatcttatcaaattaggcaatacagaatgtcatcctgaacagtttttggaaagaagatcaaaattagataaactattgattattattcaaaatgaagacattgcaggtttcattcacaagatacctggcttggtgactttaaagaagctcccctgtgttagttttgctggtgttgatagcctggatgatgttaaaaatcatacatacaatgaattatttgtatctggaggttttatcgtatctgatgaatcaattctaaacccagaggttgtcacagttgagaaccttaaaaattttttgacattccttgaggaacttagtactccagaaggaaaatggcaatggaaagtccactgtaaatttcagaagaaactaaaggaactaggcagattgaatgctaaagctctaagtctgttgacgcttctgaatgtctatcagaagaaacatctggttgaaattttgtcataccacaattgtgattcacaaactcgaaatgctccagaattggattgccttatcagacttcaggctcagaacatacagcaacgacacatagtctttttaacagagaagaacatcaagatgctttccagttatacagataatggaatagtggttgcaactgctgaagacttcatgcaaaactttaaaaatcttgtgggctatcacaattcaatcacagaagaaaaccttccacagcttggtgctaatgagaatcttgagtcgcagtcagctcttttagaaaacgatgaaaaggatgaagaggatatgtctctggattcaggggatgaaatctcacatatagaagtatgcagcaattttcattcagaaatatgggagaaagagaccaaaggatcacgtggaacagatcaaaaaaagaatactcaaattgagttgcaatcgtctcctgatgtgcaaaacagtttattagaagataagacttaccttgattctgaagagagaacttctattgatatagtatgctctgaaggagagaacagcaattcaacagaacaagattcatatagtaactttcaggtttatcatagtcaattaaatatgtcccatcagtttagtcattttaatgttctcactcatcagacatttttggggacaccatatgccctttcatcaagtcagtctcaagaaaatgagaattacttcttatctgcttatactgaaagcttggatagagataaatctccacctcccttaagttgggggaaaagtgattcttccaggccatattcacaagagaaataactgtagtaactttttttttaagagattgttgtggactttgtttattaacaatttatatttcattctctaaacaaaaggttcttgttctttctcaaatgttttttcttttatttaaatcatgatggcctgtaacagttgaagcatctaaaaattgaaataaatatatatttttaacatatattgtacttgaattatctcatgttggcacttctaagttttactttttgtatgttacctgtacttaggcttcaaattgaagcctgttttatgtgtaaaatcagatgcttgcaggaggacggtaaacagcaaaggctttacttctttttctctaatgtcacctgatataaagtacttttgttgaagtgaattattttgatgtaggcttttgtatactgtgtttacacaggtataagtcagtaatagcagtgttaatatttacaggattttggctcgatacctcaagatttatctaacagtgcagtttcatttagataataaactatgtacataggacacattttttatctctaggcttagtcatgtaaaaactgcctattgctaaaattctggtaactttttgagagtattggataattttcagtacctgcgcaatccttgatttaatgaaattaaattttttatttcaaaagataggcttctgtttatcaaaggcgttgaacaatttgatttttaaattagttttagcaaaatggaagtataatgggaatatatttttgaggtggtcttagtagtaattaccatttgttgaacacattaatgctatactagacagatacagtggagatagctttcaaacccgtatctattcctaactactgcctctaatactaattactaacttgttactaatgctaacttttaaaaatgtttttgaaaattgcaatttctacaaataaatgtcatagtgcaaataaatgtcaggatttagagaaggagcctaaactgaatttgtgttatttcagtaaaagttatggagttatgggtctagacgtgttaataagttagacagaactttggcactttagaacaaatgcatgagtggtatttcagttcctaagttacataaaaagtgtgaaagaacactgtgaggtcccagcaacgccagactatattaaggtaagtagaaagtgtttttatagggcttcaatacccaggtggtgacagagcagaagaaccggtttttttttttttttttttactactaagcttttacaaaagaagtatctgttttattgtatagaacaagtacagcattttactacatagtatacaagtttttaatgagcatttaaaaaaataagtaaatctaggctatttgaaaaatacagttgagccagtgagcacattttataatttggaagacacaaatcaaatgtgaaggatttgattttctacatttaaaatgaagaaccaaaactctcttcttgattttcagctaaaggcaggagactactttccaactccttttgcttctggagaaggccctgtctcagttctgaaagtcccttaaggattgcttgctgtcgatccctatttttcaccatgttaggattaagaagtggatccctgacacagtcagaatcaaatagctgtcgtttttggccacagtctaaagccagatgaaagtaacaagtcagtcaattacattagtaaaatgacatagccctgtgctatataatattgtcaggagtcattataataagtatgtatcctaggaaagtactaagaaaaatttaagacatattcaagaaactttatagaactaagtgcaggaattactaatttggaatttaaagttgttgacggggtttacatgggtcttcaatttttacagttagaatgcttaatatttacttaccttgtgaattttggtactgagggtcctgggttgaaggcccagacaatggtgcatcgggatcaaggtaatagatctcatttgttcgaacatacggaataaaatgggatgattcagaaatcccagatgataattctgtttgattacttcctgagatcaaattctctctctcatagctactgttttttagtggtaaatgtaatgtattttgagtttgttgggttctgtttttcactactggaactggtgatgatggagacctttccttgctgaatgaatgaatattcagaggctcttcttcctttttgactagatgccacctcaactttgactccgtttcttgatgagatgaatgaaaaatttctggtgaaatgcctctgttttgagagaggtgcccaggattatttttttctaccaaatgaagcaattccatctgcctccttacttttttttcttctctctgcttttgaagctgtttagggtacttttctgatgctggaatataccttttaggtggcttatttatattccaatcaggccttttaggatatttcttcatgtgttttgtttgtttctctattcttgtgaactgattacactggtcattacaccgattgttttctttttctaagctggctcctttatcctgagttagttcttgcttgtttttcttggtgctaaactgtccaataagttctgccgaaatctcaggagatgaacaatttgtgatgtccctctccattaatgatccacaatgtgattctgcattggtgaatattcctatatttaagtcatctgtttgcacaccagtatccttcttaggagaagtcgtagaattcatatatgtattcattttaccactgatttcatcagaatcatgtcttgaatttgaaatgttagatgcattatattccatttgtattgtatcaacaccaagatttttaatcagtctagaagtgtcatgtcccttttgcgccaattctcggattctttgttcttgttttagtctctgtgccagttcctgtgctcgctgcattgtctggaatagctcatttgtcttgagagtcatgatttcttccttttgtttttgcttaagtatgtcttcttcatactgtttctgcatctcttcacgttcctgtgctaagcgaagctcctcttcttgttcttccttctttctttgctcttcctccagttgtttcttcctgcgcttctcttctacctgggcagtgatggctttctagtcataagcaatcacgtaaatcattgtcaaaaataaaaatctaagcaggagggaattcaagatggctgactagatacattcagtgctcacctcttccacagaggggaaccaaaataatgagtagacaatcatacttcacgtagatctaacagagaacagtggaattcaacatgacaggaagcatcaaaagcaaggaagaaagcaaagcagcctgtcttgacaggattagctaggagtctacagaggctgcctaattggaggaaaaggaaagtgagcaatccccagcaatccacatgcccatcaaggactcctacaatcctaaccatcaaacagccccttgactcttgtgggtctcaagactaacagggcgttacctggagaccacatgaaagcactgctca

SEQ ID NO: 735931 - DNA, 9709 bp, Homo sapiens
cggctccgaggaccgggcagcgcatttggggtgcccgctacagggccccccaagaggctgccaggtcgggagcgcagcctgaggccacggggggaagggggtgggtgggctgagagcagctcggcggcgagactggcccgccgccccttccccccacacccgtcgaccttgtgggcagaagcttcccagagctccttaggccggcgcgatggcgactgctgtggagacggaggcctgtcagccgacggatgcgagttgggaaagtggcggcggcggagacgacgagatgaagcaggcgcttccggagcttgagtcctcccaacaaaatggcggcggcggcggcctcaacatcgctgagcccagcggcggcgctgggcgtgaggagaacgcgggggccgaggccgcccagagcctcagccacgagcagcctcaggactcctctgaggcgggcgcggccgccctgcccagaggccccgaagagcccgaaaggcctgttaggaggagttttcagatccccaggaagagcagagaaaagaaagcacttttccagccattaactccaggctctcgagaatttgaagatgttgtaaatattctccattcttcttaccttgaaccaacctcagtaacaaattttaactacagacgtgcttgcttggtacacaatgagcttttggaaaaggagtttacagaaaagcgaagagaactgaagtttgatggtcgtttagataaggaactttcagaatcctatgcatttctgatggttgatcgataccaggttcaaaccatatgtgaaaaaggattacatgtgggtcagtccaaaataacaattcttggcagtccttccatgggtgtctatctttctaggtatgctgatttattacaagcgaatcctttggacacgggggcaatgggtgatgttgttatttttaaaataatgaagggtaaaataaagagtatatatgaccccatgggtgtaaaaagtttggaatctatgttaaataagagtgctttggaccccacaccaaagcatgaatgtcacgtgtcaaagaatgccaatcgaattacatcacttttggcttacagagcctatgagcttactcagtattatttttatgagtatggctttgatgagctaaggcgaagaccaagacacgtttgtccatatgcagttgtgtcttttacttacaaagatgatatacaaactccgaagtttgtaccttcatcaagatctaacagctttaatacagatagaaacatagataaatataactataccttgtggaaaggacagcttttaaataaaggaaaacttttgtgttatatttctctgaggtcagccactcgtgcttttttgcctatcaaactacctgagaaattagatgttgaaacagttatgagtattgatcatctgaaacagaaaatccctccagcactgttttataaggaaacatacttaggtccaaatgaagttttgaagaatggaatgtattgcagcctttatgaagttgtggaaaagacaagaattggaagtaacatggagagtttactgcaaaaactagacagagaaaaacttgttcttgttaaacctttgggagaccgaggatacctttttcttctctccccttatcagatggttcctccatatgaatatcagactgccaagtctcgagtcctacatgctttgtttctatttcaagaacctagaagcatagttacttcacaaaaaggttcaaccaatgcagcaccacaggagaggcatgagagcatgccagatgtattaaaaatagctcagtttttacaattttctttgattcagtgtcgaaaggaattcaaaaatataagcgccataaattttcattctgttgttgaaaagtatgtaagtgaattttttaagcgaggttttggttcaggtaaacgagagtttattatgtttccatatgattcacgattagatgataaaaaattcttatactcagctcccagaaataaatcccatattgatacttgtttgcatgcctatatttttcggcctgaagtgtatcagttacctatttgtaaattaaaagaactatttgaagaaaatagaaaacttcagcagtttagtccactttcagattatgaaggtcaagaagaagaaatgaatggtacaaaaatgaaatttggaaaacgaaataactcaagaggtgaagccattatatctggaaagcaaagatcatctcattctttggattatgataaggatagagtcaaagaattgattaatttaattcagtgtaggaaaaagagtgtgggtggggactcagacacagaagatatgagaagcaaaactgtcttgaagaggaagcttgaggatctacctgaaaatatgagaaagctcgccaaaaccagtaatttatctgaaaattgccatctgtatgaagagtctccacagcctattggctcacttggacatgatgctgacttgaggcggcagcagcaggatacctgtaactccggcattgctgacatccataggctgtttaattggttatcagaaacactagcaaatgcgcgccattctgatgcatctctgacagacacagtcaacaaagccttaggattgagcactgatgatgcctatgaagagctgaggcaaaaacatgagtatgagttgaactctaccccagataagaaagactatgagcagcctacttgtgcaaaagttgaaaatgcacagtttaagggtactcagagcttattactagaagttgatgcaacatctaagtattctgttgctatttctaccagcgaagtgggcactgaccataagctacatttgaaagaagatccaaatttaattagcgtgaataattttgaagattgcagtttgtgtcccagtgttcccattgaacatggatttcgtagacaacagtctaagtcaaataatgttgaagagactgaaatacattggaaactgattccaattacaggagggaatgcaagaagcccagaagaccagctggggaaacatggtgagaaacaaacaccagacacactaaagggcaccactgaggatgacgtgttgacaggtcaggtggaggagcagtgtgtgccagcagcagaggcagagccgcctgcagtgagcgaaaccacagagaggacagtgttaggagagtacaatctcttttctaggaagatagaagagattttgaagcaaaagaatgtttcatatgtcagtagagtttccacacctatcttttcaacacaagagaagatgaaacggctttccgagttcatatattctaagacttccaaagctggtgtgcaggagtttgtagatggtttgcatgagaagctaaatactattattattaaagcatcagccaagggtgggaatttgccaccagtcagtcctaacgattctggtgctaagatagcatcgaatcctctggaaaggcatgtcataccagtttcctcaagtgacttcaacaataaacatctccttgagccactgtgtagtgatcctttgaaagataccaactctgatgagcagcattccacttcggctttaactgaagtagaaatgaaccagcctcaacatgccacagagttaatggtgacttctgatcatattgtacctggtgatatggcccgggaaccagtagaagaaacaacaaaatcccccagtgatgtaaacatttctgctcaaccagctctttcaaattttataagccagttagaacctgaagtatttaatagtttggttaaaatcatgaaagacgtccagaaaaatactgtgaaattttatattcatgaagaagaagagagtgtgctctgtaaagaaataaaggaatatcttatcaaattaggcaatacagaatgtcatcctgaacagtttttggaaagaagatcaaaattagataaactattgattattattcaaaatgaagacattgcaggtttcattcacaagatacctggcttggtgactttaaagaagctcccctgtgttagttttgctggtgttgatagcctggatgatgttaaaaatcatacatacaatgaattatttgtatctggaggttttatcgtatctgatgaatcaattctaaacccagaggttgtcacagttgagaaccttaaaaattttttgacattccttgaggaacttagtactccagaaggaaaatggcaatggaaagtccactgtaaatttcagaagaaactaaaggaactaggcagattgaatgctaaagctctaagtctgttgacgcttctgaatgtctatcagaagaaacatctggttgaaattttgtcataccacaattgtgattcacaaactcgaaatgctccagaattggattgccttatcagacttcaggctcagaacatacagcaacgacacatagtctttttaacagagaagaacatcaagatgctttccagttatacagataatggaatagtggttgcaactgctgaagacttcatgcaaaactttaaaaatcttgtgggctatcacaattcaatcacagaagaaaaccttccacagcttggtgctaatgagaatcttgagtcgcagtcagctcttttagaaaacgatgaaaaggatgaagaggatatgtctctggattcaggggatgaaatctcacatatagaagtatgcagcaattttcattcagaaatatgggagaaagagaccaaaggatcacgtggaacagatcaaaaaaagaatactcaaattgagttgcaatcgtctcctgatgtgcaaaacagtttattagaagataagacttaccttgattctgaagagagaacttctattgatatagtatgctctgaaggagagaacagcaattcaacagaacaagattcatatagtaactttcaggtttatcatagtcaattaaatatgtcccatcagtttagtcattttaatgttctcactcatcagacatttttggggacaccatatgccctttcatcaagtcagtctcaagaaaatgagaattacttcttatctgcttatactgaaagcttggatagagataaatctccacctcccttaagttgggggaaaagtgattcttccaggccatattcacaagagaaataactgtagtaactttttttttaagagattgttgtggactttgtttattaacaatttatatttcattctctaaacaaaaggttcttgttctttctcaaatgttttttcttttatttaaatcatgatggcctgtaacagttgaagcatctaaaaattgaaataaatatatatttttaacatatattgtacttgaattatctcatgttggcacttctaagttttactttttgtatgttacctgtacttaggcttcaaattgaagcctgttttatgtgtaaaatcagatgcttgcaggaggacggtaaacagcaaaggctttacttctttttctctaatgtcacctgatataaagtacttttgttgaagtgaattattttgatgtaggcttttgtatactgtgtttacacaggtataagtcagtaatagcagtgttaatatttacaggattttggctcgatacctcaagatttatctaacagtgcagtttcatttagataataaactatgtacataggacacattttttatctctaggcttagtcatgtaaaaactgcctattgctaaaattctggtaactttttgagagtattggataattttcagtacctgcgcaatccttgatttaatgaaattaaattttttatttcaaaagataggcttctgtttatcaaaggcgttgaacaatttgatttttaaattagttttagcaaaatggaagtataatgggaatatatttttgaggtggtcttagtagtaattaccatttgttgaacacattaatgctatactagacagatacagtggagatagctttcaaacccgtatctattcctaactactgcctctaatactaattactaacttgttactaatgctaacttttaaaaatgtttttgaaaattgcaatttctacaaataaatgtcatagtgcaaataaatgtcaggatttagagaaggagcctaaactgaatttgtgttatttcagtaaaagttatggagttatgggtctagacgtgttaataagttagacagaactttggcactttagaacaaatgcatgagtggtatttcagttcctaagttacataaaaagtgtgaaagaacactgtgaggtcccagcaacgccagactatattaaggtaagtagaaagtgtttttatagggcttcaatacccaggtggtgacagagcagaagaaccggtttttttttttttttttttactactaagcttttacaaaagaagtatctgttttattgtatagaacaagtacagcattttactacatagtatacaagtttttaatgagcatttaaaaaaataagtaaatctaggctatttgaaaaatacagttgagccagtgagcacattttataatttggaagacacaaatcaaatgtgaaggatttgattttctacatttaaaatgaagaaccaaaactctcttcttgattttcagctaaaggcaggagactactttccaactccttttgcttctggagaaggccctgtctcagttctgaaagtcccttaaggattgcttgctgtcgatccctatttttcaccatgttaggattaagaagtggatccctgacacagtcagaatcaaatagctgtcgtttttggccacagtctaaagccagatgaaagtaacaagtcagtcaattacattagtaaaatgacatagccctgtgctatataatattgtcaggagtcattataataagtatgtatcctaggaaagtactaagaaaaatttaagacatattcaagaaactttatagaactaagtgcaggaattactaatttggaatttaaagttgttgacggggtttacatgggtcttcaatttttacagttagaatgcttaatatttacttaccttgtgaattttggtactgagggtcctgggttgaaggcccagacaatggtgcatcgggatcaaggtaatagatctcatttgttcgaacatacggaataaaatgggatgattcagaaatcccagatgataattctgtttgattacttcctgagatcaaattctctctctcatagctactgttttttagtggtaaatgtaatgtattttgagtttgttgggttctgtttttcactactggaactggtgatgatggagacctttccttgctgaatgaatgaatattcagaggctcttcttcctttttgactagatgccacctcaactttgactccgtttcttgatgagatgaatgaaaaatttctggtgaaatgcctctgttttgagagaggtgcccaggattatttttttctaccaaatgaagcaattccatctgcctccttacttttttttcttctctctgcttttgaagctgtttagggtacttttctgatgctggaatataccttttaggtggcttatttatattccaatcaggccttttaggatatttcttcatgtgttttgtttgtttctctattcttgtgaactgattacactggtcattacaccgattgttttctttttctaagctggctcctttatcctgagttagttcttgcttgtttttcttggtgctaaactgtccaataagttctgccgaaatctcaggagatgaacaatttgtgatgtccctctccattaatgatccacaatgtgattctgcattggtgaatattcctatatttaagtcatctgtttgcacaccagtatccttcttaggagaagtcgtagaattcatatatgtattcattttaccactgatttcatcagaatcatgtcttgaatttgaaatgttagatgcattatattccatttgtattgtatcaacaccaagatttttaatcagtctagaagtgtcatgtcccttttgcgccaattctcggattctttgttcttgttttagtctctgtgccagttcctgtgctcgctgcattgtctggaatagctcatttgtcttgagagtcatgatttcttccttttgtttttgcttaagtatgtcttcttcatactgtttctgcatctcttcacgttcctgtgctaagcgaagctcctcttcttgttcttccttctttctttgctcttcctccagttgtttcttcctgcgcttctcttctacctgggcagtgatggctttctgatgctctaattgtttttgtcgtcgtctgtctcgttcctcaatctgagctgggtccaagagagcagtcatagaacggagaaagtttgttttcttactgtttgccataaccacatccttaataggttttgctatatgctcctcctctgaaggttcaacctggcttccggttgtaggtgtacaaacactgctgacatcagccagctcctgagtgtcaggagagacacagaagtactcaggttgtttgtgtgttgaccgagagaacagctgagattgagaaccaggataactctttaatgaatcaaagtgcattgcccatctgtcatgttcctcaccctttgaatatataattttttcctctatttttctttgacggtcatcttctatttgcttattcaactcttcaatccattttctctgcagttcttgtttcacagcactgaaagggtgctccagcagtactgtttccctagattggtcaagaatttgatgtttttcccatattattttatcactttcagattttttccaaggatcattccatttttcagaaacttctttttctttcttctttaaagcaacctgttcatctagctctttcctccactgggctttttttgcttccaacgaacttctatcacattccctttcccccagagtactgaatatatcagctggtttccattcattctctatggcaattttttgctcacactgtttagatgtctcctgatgttcatttaagacagatttattttcagctgggacagatgaaaccatttcagtttttttgaataatcccataatgttctcatcctttggctgattagaaatactgtttaaatatagactatattgactttttgcctcctttccattctcagtcagggaaagagatctatttccttggtttacagtcatcaaaatctgttgtagttggtcttgtgttagacacaccaaactgctcttcatgttttcagctgtgatgtgttttttgtgaggcttctgtttacctactagagatgtatttacggtgtttctagtcttctgcatattaggagttgcaggtgaaatctctttctggatatgaagacagtctttatctatacattgtttacataaatccttagtggatgaaaaagtcattccatttttttcaccttttgcctgtgatgtttctgaaccaactggcttcttttgcaaaagtttttcactcccaatacaagtatcttgtgttgattttagaatgtgcccagtttttgttcttaaaggacattttgcaatcttggccttatttcccattctgttaaaacaccagaagcttattctttataactgtccaagaaaaatcaccaattatctttatatgatctgtgataaatcagtcctctaaacttttttccattttgctatttaggtaatataaccataagaaactaactcttaatacttgcaaatcttcatcaacaactagaaattatcttacttcaggaacttt

SEQ ID NO: 735932 - DNA, 9729 bp, Homo sapiens
cggctccgaggaccgggcagcgcatttggggtgcccgctacagggccccccaagaggctgccaggtcgggagcgcagcctgaggccacggggggaagggggtgggtgggctgagagcagctcggcggcgagactggcccgccgccccttccccccacacccgtcgaccttgtgggcagaagcttcccagagctccttaggccggcgcgatggcgactgctgtggagacggaggcctgtcagccgacggatgcgagttgggaaagtggcggcggcggagacgacgagatgaagcaggcgcttccggagcttgagtcctcccaacaaaatggcggcggcggcggcctcaacatcgctgagcccagcggcggcgctgggcgtgaggagaacgcgggggccgaggccgcccagagcctcagccacgagcagcctcaggactcctctgaggcgggcgcggccgccctgcccagaggccccgaagagcccgaaaggcctgttaggaggagttttcagatccccaggaagagcagagaaaagaaagcacttttccagccattaactccaggctctcgagaatttgaagatgttgtaaatattctccattcttcttaccttgaaccaacctcagtaacaaattttaactacagacgtgcttgcttggtacacaatgagcttttggaaaaggagtttacagaaaagcgaagagaactgaagtttgatggtcgtttagataaggaactttcagaatcctatgcatttctgatggttgatcgataccaggttcaaaccatatgtgaaaaaggattacatgtgggtcagtccaaaataacaattcttggcagtccttccatgggtgtctatctttctaggtatgctgatttattacaagcgaatcctttggacacgggggcaatgggtgatgttgttatttttaaaataatgaagggtaaaataaagagtatatatgaccccatgggtgtaaaaagtttggaatctatgttaaataagagtgctttggaccccacaccaaagcatgaatgtcacgtgtcaaagaatgccaatcgaattacatcacttttggcttacagagcctatgagcttactcagtattatttttatgagtatggctttgatgagctaaggcgaagaccaagacacgtttgtccatatgcagttgtgtcttttacttacaaagatgatatacaaactccgaagtttgtaccttcatcaagatctaacagctttaatacagatagaaacatagataaatataactataccttgtggaaaggacagcttttaaataaaggaaaacttttgtgttatatttctctgaggtcagccactcgtgcttttttgcctatcaaactacctgagaaattagatgttgaaacagttatgagtattgatcatctgaaacagaaaatccctccagcactgttttataaggaaacatacttaggtccaaatgaagttttgaagaatggaatgtattgcagcctttatgaagttgtggaaaagacaagaattggaagtaacatggagagtttactgcaaaaactagacagagaaaaacttgttcttgttaaacctttgggagaccgaggatacctttttcttctctccccttatcagatggttcctccatatgaatatcagactgccaagtctcgagtcctacatgctttgtttctatttcaagaacctagaagcatagttacttcacaaaaaggttcaaccaatgcagcaccacaggagaggcatgagagcatgccagatgtattaaaaatagctcagtttttacaattttctttgattcagtgtcgaaaggaattcaaaaatataagcgccataaattttcattctgttgttgaaaagtatgtaagtgaattttttaagcgaggttttggttcaggtaaacgagagtttattatgtttccatatgattcacgattagatgataaaaaattcttatactcagctcccagaaataaatcccatattgatacttgtttgcatgcctatatttttcggcctgaagtgtatcagttacctatttgtaaattaaaagaactatttgaagaaaatagaaaacttcagcagtttagtccactttcagattatgaaggtcaagaagaagaaatgaatggtacaaaaatgaaatttggaaaacgaaataactcaagaggtgaagccattatatctggaaagcaaagatcatctcattctttggattatgataaggatagagtcaaagaattgattaatttaattcagtgtaggaaaaagagtgtgggtggggactcagacacagaagatatgagaagcaaaactgtcttgaagaggaagcttgaggatctacctgaaaatatgagaaagctcgccaaaaccagtaatttatctgaaaattgccatctgtatgaagagtctccacagcctattggctcacttggacatgatgctgacttgaggcggcagcagcaggatacctgtaactccggcattgctgacatccataggctgtttaattggttatcagaaacactagcaaatgcgcgccattctgatgcatctctgacagacacagtcaacaaagccttaggattgagcactgatgatgcctatgaagagctgaggcaaaaacatgagtatgagttgaactctaccccagataagaaagactatgagcagcctacttgtgcaaaagttgaaaatgcacagtttaagggtactcagagcttattactagaagttgatgcaacatctaagtattctgttgctatttctaccagcgaagtgggcactgaccataagctacatttgaaagaagatccaaatttaattagcgtgaataattttgaagattgcagtttgtgtcccagtgttcccattgaacatggatttcgtagacaacagtctaagtcaaataatgttgaagagactgaaatacattggaaactgattccaattacaggagggaatgcaagaagcccagaagaccagctggggaaacatggtgagaaacaaacaccagacacactaaagggcaccactgaggatgacgtgttgacaggtcaggtggaggagcagtgtgtgccagcagcagaggcagagccgcctgcagtgagcgaaaccacagagaggacagtgttaggagagtacaatctcttttctaggaagatagaagagattttgaagcaaaagaatgtttcatatgtcagtagagtttccacacctatcttttcaacacaagagaagatgaaacggctttccgagttcatatattctaagacttccaaagctggtgtgcaggagtttgtagatggtttgcatgagaagctaaatactattattattaaagcatcagccaagggtgggaatttgccaccagtcagtcctaacgattctggtgctaagatagcatcgaatcctctggaaaggcatgtcataccagtttcctcaagtgacttcaacaataaacatctccttgagccactgtgtagtgatcctttgaaagataccaactctgatgagcagcattccacttcggctttaactgaagtagaaatgaaccagcctcaacatgccacagagttaatggtgacttctgatcatattgtacctggtgatatggcccgggaaccagtagaagaaacaacaaaatcccccagtgatgtaaacatttctgctcaaccagctctttcaaattttataagccagttagaacctgaagtatttaatagtttggttaaaatcatgaaagacgtccagaaaaatactgtgaaattttatattcatgaagaagaagagagtgtgctctgtaaagaaataaaggaatatcttatcaaattaggcaatacagaatgtcatcctgaacagtttttggaaagaagatcaaaattagataaactattgattattattcaaaatgaagacattgcaggtttcattcacaagatacctggcttggtgactttaaagaagctcccctgtgttagttttgctggtgttgatagcctggatgatgttaaaaatcatacatacaatgaattatttgtatctggaggttttatcgtatctgatgaatcaattctaaacccagaggttgtcacagttgagaaccttaaaaattttttgacattccttgaggaacttagtactccagaaggaaaatggcaatggaaagtccactgtaaatttcagaagaaactaaaggaactaggcagattgaatgctaaagctctaagtctgttgacgcttctgaatgtctatcagaagaaacatctggttgaaattttgtcataccacaattgtgattcacaaactcgaaatgctccagaattggattgccttatcagacttcaggctcagaacatacagcaacgacacatagtctttttaacagagaagaacatcaagatgctttccagttatacagataatggaatagtggttgcaactgctgaagacttcatgcaaaactttaaaaatcttgtgggctatcacaattcaatcacagaagaaaaccttccacagcttggtgctaatgagaatcttgagtcgcagtcagctcttttagaaaacgatgaaaaggatgaagaggatatgtctctggattcaggggatgaaatctcacatatagaagtatgcagcaattttcattcagaaatatgggagaaagagaccaaaggatcacgtggaacagatcaaaaaaagaatactcaaattgagttgcaatcgtctcctgatgtgcaaaacagtttattagaagataagacttaccttgattctgaagagagaacttctattgatatagtatgctctgaaggagagaacagcaattcaacagaacaagattcatatagtaactttcaggtttatcatagtcaattaaatatgtcccatcagtttagtcattttaatgttctcactcatcagacatttttggggacaccatatgccctttcatcaagtcagtctcaagaaaatgagaattacttcttatctgcttatactgaaagcttggatagagataaatctccacctcccttaagttgggggaaaagtgattcttccaggccatattcacaagagaaataactgtagtaactttttttttaagagattgttgtggactttgtttattaacaatttatatttcattctctaaacaaaaggttcttgttctttctcaaatgttttttcttttatttaaatcatgatggcctgtaacagttgaagcatctaaaaattgaaataaatatatatttttaacatatattgtacttgaattatctcatgttggcacttctaagttttactttttgtatgttacctgtacttaggcttcaaattgaagcctgttttatgtgtaaaatcagatgcttgcaggaggacggtaaacagcaaaggctttacttctttttctctaatgtcacctgatataaagtacttttgttgaagtgaattattttgatgtaggcttttgtatactgtgtttacacaggtataagtcagtaatagcagtgttaatatttacaggattttggctcgatacctcaagatttatctaacagtgcagtttcatttagataataaactatgtacataggacacattttttatctctaggcttagtcatgtaaaaactgcctattgctaaaattctggtaactttttgagagtattggataattttcagtacctgcgcaatccttgatttaatgaaattaaattttttatttcaaaagataggcttctgtttatcaaaggcgttgaacaatttgatttttaaattagttttagcaaaatggaagtataatgggaatatatttttgaggtggtcttagtagtaattaccatttgttgaacacattaatgctatactagacagatacagtggagatagctttcaaacccgtatctattcctaactactgcctctaatactaattactaacttgttactaatgctaacttttaaaaatgtttttgaaaattgcaatttctacaaataaatgtcatagtgcaaataaatgtcaggatttagagaaggagcctaaactgaatttgtgttatttcagtaaaagttatggagttatgggtctagacgtgttaataagttagacagaactttggcactttagaacaaatgcatgagtggtatttcagttcctaagttacataaaaagtgtgaaagaacactgtgaggtcccagcaacgccagactatattaaggtaagtagaaagtgtttttatagggcttcaatacccaggtggtgacagagcagaagaaccggtttttttttttttttttttactactaagcttttacaaaagaagtatctgttttattgtatagaacaagtacagcattttactacatagtatacaagtttttaatgagcatttaaaaaaataagtaaatctaggctatttgaaaaatacagttgagccagtgagcacattttataatttggaagacacaaatcaaatgtgaaggatttgattttctacatttaaaatgaagaaccaaaactctcttcttgattttcagctaaaggcaggagactactttccaactccttttgcttctggagaaggccctgtctcagttctgaaagtcccttaaggattgcttgctgtcgatccctatttttcaccatgttaggattaagaagtggatccctgacacagtcagaatcaaatagctgtcgtttttggccacagtctaaagccagatgaaagtaacaagtcagtcaattacattagtaaaatgacatagccctgtgctatataatattgtcaggagtcattataataagtatgtatcctaggaaagtactaagaaaaatttaagacatattcaagaaactttatagaactaagtgcaggaattactaatttggaatttaaagttgttgacggggtttacatgggtcttcaatttttacagttagaatgcttaatatttacttaccttgtgaattttggtactgagggtcctgggttgaaggcccagacaatggtgcatcgggatcaaggtaatagatctcatttgttcgaacatacggaataaaatgggatgattcagaaatcccagatgataattctgtttgattacttcctgagatcaaattctctctctcatagctactgttttttagtggtaaatgtaatgtattttgagtttgttgggttctgtttttcactactggaactggtgatgatggagacctttccttgctgaatgaatgaatattcagaggctcttcttcctttttgactagatgccacctcaactttgactccgtttcttgatgagatgaatgaaaaatttctggtgaaatgcctctgttttgagagaggtgcccaggattatttttttctaccaaatgaagcaattccatctgcctccttacttttttttcttctctctgcttttgaagctgtttagggtacttttctgatgctggaatataccttttaggtggcttatttatattccaatcaggccttttaggatatttcttcatgtgttttgtttgtttctctattcttgtgaactgattacactggtcattacaccgattgttttctttttctaagctggctcctttatcctgagttagttcttgcttgtttttcttggtgctaaactgtccaataagttctgccgaaatctcaggagatgaacaatttgtgatgtccctctccattaatgatccacaatgtgattctgcattggtgaatattcctatatttaagtcatctgtttgcacaccagtatccttcttaggagaagtcgtagaattcatatatgtattcattttaccactgatttcatcagaatcatgtcttgaatttgaaatgttagatgcattatattccatttgtattgtatcaacaccaagatttttaatcagtctagaagtgtcatgtcccttttgcgccaattctcggattctttgttcttgttttagtctctgtgccagttcctgtgctcgctgcattgtctggaatagctcatttgtcttgagagtcatgatttcttccttttgtttttgcttaagtatgtcttcttcatactgtttctgcatctcttcacgttcctgtgctaagcgaagctcctcttcttgttcttccttctttctttgctcttcctccagttgtttcttcctgcgcttctcttctacctgggcagtgatggctttctgatgctctaattgtttttgtcgtcgtctgtctcgttcctcaatctgagctgggtccaagagagcagtcatagaacggagaaagtttgttttcttactgtttgccataaccacatccttaataggttttgctatatgctcctcctctgaaggttcaacctggcttccggttgtaggtgtacaaacactgctgacatcagccagctcctgagtgtcaggagagacacagaagtactcaggttgtttgtgtgttgaccgagagaacagctgagattgagaaccaggataactctttaatgaatcaaagtgcattgcccatctgtcatgttcctcaccctttgaatatataattttttcctctatttttctttgacggtcatcttctatttgcttattcaactcttcaatccattttctctgcagttcttgtttcacagcactgaaagggtgctccagcagtactgtttccctagattggtcaagaatttgatgtttttcccatattattttatcactttcagattttttccaaggatcattccatttttcagaaacttctttttctttcttctttaaagcaacctgttcatctagctctttcctccactgggctttttttgcttccaacgaacttctatcacattccctttcccccagagtactgaatatatcagctggtttccattcattctctatggcaattttttgctcacactgtttagatgtctcctgatgttcatttaagacagatttattttcagctgggacagatgaaaccatttcagtttttttgaataatcccataatgttctcatcctttggctgattagaaatactgtttaaatatagactatattgactttttgcctcctttccattctcagtcagggaaagagatctatttccttggtttacagtcatcaaaatctgttgtagttggtcttgtgttagacacaccaaactgctcttcatgttttcagctgtgatgtgttttttgtgaggcttctgtttacctactagagatgtatttacggtgtttctagtcttctgcatattaggagttgcaggtgaaatctctttctggatatgaagacagtctttatctatacattgtttacataaatccttagtggatgaaaaagtcattccatttttttcaccttttgcctgtgatgtttctgaaccaactggcttcttttgcaaaagtttttcactcccaatacaagtatcttgtgttgattttagaatgtgcccagtttttgttcttaaaggacattttgcaatcttggccttatttcccattctgttaaaacaccagaagcttattctttataacttcacagaaatttttgatttatgttcatatggagacaatattagcttggtttttccatccagtaattcagtttcaagctttaaaccatctcccaagttcatggcctgacctcgcactctctccacagaacgctcaagccccttgtgtacgtcggttgccgccgccgctcagcaagcgctacc

SEQ ID NO: 735933 - DNA, 9696 bp, Homo sapiens
cggctccgaggaccgggcagcgcatttggggtgcccgctacagggccccccaagaggctgccaggtcgggagcgcagcctgaggccacggggggaagggggtgggtgggctgagagcagctcggcggcgagactggcccgccgccccttccccccacacccgtcgaccttgtgggcagaagcttcccagagctccttaggccggcgcgatggcgactgctgtggagacggaggcctgtcagccgacggatgcgagttgggaaagtggcggcggcggagacgacgagatgaagcaggcgcttccggagcttgagtcctcccaacaaaatggcggcggcggcggcctcaacatcgctgagcccagcggcggcgctgggcgtgaggagaacgcgggggccgaggccgcccagagcctcagccacgagcagcctcaggactcctctgaggcgggcgcggccgccctgcccagaggccccgaagagcccgaaaggcctgttaggaggagttttcagatccccaggaagagcagagaaaagaaagcacttttccagccattaactccaggctctcgagaatttgaagatgttgtaaatattctccattcttcttaccttgaaccaacctcagtaacaaattttaactacagacgtgcttgcttggtacacaatgagcttttggaaaaggagtttacagaaaagcgaagagaactgaagtttgatggtcgtttagataaggaactttcagaatcctatgcatttctgatggttgatcgataccaggttcaaaccatatgtgaaaaaggattacatgtgggtcagtccaaaataacaattcttggcagtccttccatgggtgtctatctttctaggtatgctgatttattacaagcgaatcctttggacacgggggcaatgggtgatgttgttatttttaaaataatgaagggtaaaataaagagtatatatgaccccatgggtgtaaaaagtttggaatctatgttaaataagagtgctttggaccccacaccaaagcatgaatgtcacgtgtcaaagaatgccaatcgaattacatcacttttggcttacagagcctatgagcttactcagtattatttttatgagtatggctttgatgagctaaggcgaagaccaagacacgtttgtccatatgcagttgtgtcttttacttacaaagatgatatacaaactccgaagtttgtaccttcatcaagatctaacagctttaatacagatagaaacatagataaatataactataccttgtggaaaggacagcttttaaataaaggaaaacttttgtgttatatttctctgaggtcagccactcgtgcttttttgcctatcaaactacctgagaaattagatgttgaaacagttatgagtattgatcatctgaaacagaaaatccctccagcactgttttataaggaaacatacttaggtccaaatgaagttttgaagaatggaatgtattgcagcctttatgaagttgtggaaaagacaagaattggaagtaacatggagagtttactgcaaaaactagacagagaaaaacttgttcttgttaaacctttgggagaccgaggatacctttttcttctctccccttatcagatggttcctccatatgaatatcagactgccaagtctcgagtcctacatgctttgtttctatttcaagaacctagaagcatagttacttcacaaaaaggttcaaccaatgcagcaccacaggagaggcatgagagcatgccagatgtattaaaaatagctcagtttttacaattttctttgattcagtgtcgaaaggaattcaaaaatataagcgccataaattttcattctgttgttgaaaagtatgtaagtgaattttttaagcgaggttttggttcaggtaaacgagagtttattatgtttccatatgattcacgattagatgataaaaaattcttatactcagctcccagaaataaatcccatattgatacttgtttgcatgcctatatttttcggcctgaagtgtatcagttacctatttgtaaattaaaagaactatttgaagaaaatagaaaacttcagcagtttagtccactttcagattatgaaggtcaagaagaagaaatgaatggtacaaaaatgaaatttggaaaacgaaataactcaagaggtgaagccattatatctggaaagcaaagatcatctcattctttggattatgataaggatagagtcaaagaattgattaatttaattcagtgtaggaaaaagagtgtgggtggggactcagacacagaagatatgagaagcaaaactgtcttgaagaggaagcttgaggatctacctgaaaatatgagaaagctcgccaaaaccagtaatttatctgaaaattgccatctgtatgaagagtctccacagcctattggctcacttggacatgatgctgacttgaggcggcagcagcaggatacctgtaactccggcattgctgacatccataggctgtttaattggttatcagaaacactagcaaatgcgcgccattctgatgcatctctgacagacacagtcaacaaagccttaggattgagcactgatgatgcctatgaagagctgaggcaaaaacatgagtatgagttgaactctaccccagataagaaagactatgagcagcctacttgtgcaaaagttgaaaatgcacagtttaagggtactcagagcttattactagaagttgatgcaacatctaagtattctgttgctatttctaccagcgaagtgggcactgaccataagctacatttgaaagaagatccaaatttaattagcgtgaataattttgaagattgcagtttgtgtcccagtgttcccattgaacatggatttcgtagacaacagtctaagtcaaataatgttgaagagactgaaatacattggaaactgattccaattacaggagggaatgcaagaagcccagaagaccagctggggaaacatggtgagaaacaaacaccagacacactaaagggcaccactgaggatgacgtgttgacaggtcaggtggaggagcagtgtgtgccagcagcagaggcagagccgcctgcagtgagcgaaaccacagagaggacagtgttaggagagtacaatctcttttctaggaagatagaagagattttgaagcaaaagaatgtttcatatgtcagtagagtttccacacctatcttttcaacacaagagaagatgaaacggctttccgagttcatatattctaagacttccaaagctggtgtgcaggagtttgtagatggtttgcatgagaagctaaatactattattattaaagcatcagccaagggtgggaatttgccaccagtcagtcctaacgattctggtgctaagatagcatcgaatcctctggaaaggcatgtcataccagtttcctcaagtgacttcaacaataaacatctccttgagccactgtgtagtgatcctttgaaagataccaactctgatgagcagcattccacttcggctttaactgaagtagaaatgaaccagcctcaacatgccacagagttaatggtgacttctgatcatattgtacctggtgatatggcccgggaaccagtagaagaaacaacaaaatcccccagtgatgtaaacatttctgctcaaccagctctttcaaattttataagccagttagaacctgaagtatttaatagtttggttaaaatcatgaaagacgtccagaaaaatactgtgaaattttatattcatgaagaagaagagagtgtgctctgtaaagaaataaaggaatatcttatcaaattaggcaatacagaatgtcatcctgaacagtttttggaaagaagatcaaaattagataaactattgattattattcaaaatgaagacattgcaggtttcattcacaagatacctggcttggtgactttaaagaagctcccctgtgttagttttgctggtgttgatagcctggatgatgttaaaaatcatacatacaatgaattatttgtatctggaggttttatcgtatctgatgaatcaattctaaacccagaggttgtcacagttgagaaccttaaaaattttttgacattccttgaggaacttagtactccagaaggaaaatggcaatggaaagtccactgtaaatttcagaagaaactaaaggaactaggcagattgaatgctaaagctctaagtctgttgacgcttctgaatgtctatcagaagaaacatctggttgaaattttgtcataccacaattgtgattcacaaactcgaaatgctccagaattggattgccttatcagacttcaggctcagaacatacagcaacgacacatagtctttttaacagagaagaacatcaagatgctttccagttatacagataatggaatagtggttgcaactgctgaagacttcatgcaaaactttaaaaatcttgtgggctatcacaattcaatcacagaagaaaaccttccacagcttggtgctaatgagaatcttgagtcgcagtcagctcttttagaaaacgatgaaaaggatgaagaggatatgtctctggattcaggggatgaaatctcacatatagaagtatgcagcaattttcattcagaaatatgggagaaagagaccaaaggatcacgtggaacagatcaaaaaaagaatactcaaattgagttgcaatcgtctcctgatgtgcaaaacagtttattagaagataagacttaccttgattctgaagagagaacttctattgatatagtatgctctgaaggagagaacagcaattcaacagaacaagattcatatagtaactttcaggtttatcatagtcaattaaatatgtcccatcagtttagtcattttaatgttctcactcatcagacatttttggggacaccatatgccctttcatcaagtcagtctcaagaaaatgagaattacttcttatctgcttatactgaaagcttggatagagataaatctccacctcccttaagttgggggaaaagtgattcttccaggccatattcacaagagaaataactgtagtaactttttttttaagagattgttgtggactttgtttattaacaatttatatttcattctctaaacaaaaggttcttgttctttctcaaatgttttttcttttatttaaatcatgatggcctgtaacagttgaagcatctaaaaattgaaataaatatatatttttaacatatattgtacttgaattatctcatgttggcacttctaagttttactttttgtatgttacctgtacttaggcttcaaattgaagcctgttttatgtgtaaaatcagatgcttgcaggaggacggtaaacagcaaaggctttacttctttttctctaatgtcacctgatataaagtacttttgttgaagtgaattattttgatgtaggcttttgtatactgtgtttacacaggtataagtcagtaatagcagtgttaatatttacaggattttggctcgatacctcaagatttatctaacagtgcagtttcatttagataataaactatgtacataggacacattttttatctctaggcttagtcatgtaaaaactgcctattgctaaaattctggtaactttttgagagtattggataattttcagtacctgcgcaatccttgatttaatgaaattaaattttttatttcaaaagataggcttctgtttatcaaaggcgttgaacaatttgatttttaaattagttttagcaaaatggaagtataatgggaatatatttttgaggtggtcttagtagtaattaccatttgttgaacacattaatgctatactagacagatacagtggagatagctttcaaacccgtatctattcctaactactgcctctaatactaattactaacttgttactaatgctaacttttaaaaatgtttttgaaaattgcaatttctacaaataaatgtcatagtgcaaataaatgtcaggatttagagaaggagcctaaactgaatttgtgttatttcagtaaaagttatggagttatgggtctagacgtgttaataagttagacagaactttggcactttagaacaaatgcatgagtggtatttcagttcctaagttacataaaaagtgtgaaagaacactgtgaggtcccagcaacgccagactatattaaggtaagtagaaagtgtttttatagggcttcaatacccaggtggtgacagagcagaagaaccggtttttttttttttttttttactactaagcttttacaaaagaagtatctgttttattgtatagaacaagtacagcattttactacatagtatacaagtttttaatgagcatttaaaaaaataagtaaatctaggctatttgaaaaatacagttgagccagtgagcacattttataatttggaagacacaaatcaaatgtgaaggatttgattttctacatttaaaatgaagaaccaaaactctcttcttgattttcagctaaaggcaggagactactttccaactccttttgcttctggagaaggccctgtctcagttctgaaagtcccttaaggattgcttgctgtcgatccctatttttcaccatgttaggattaagaagtggatccctgacacagtcagaatcaaatagctgtcgtttttggccacagtctaaagccagatgaaagtaacaagtcagtcaattacattagtaaaatgacatagccctgtgctatataatattgtcaggagtcattataataagtatgtatcctaggaaagtactaagaaaaatttaagacatattcaagaaactttatagaactaagtgcaggaattactaatttggaatttaaagttgttgacggggtttacatgggtcttcaatttttacagttagaatgcttaatatttacttaccttgtgaattttggtactgagggtcctgggttgaaggcccagacaatggtgcatcgggatcaaggtaatagatctcatttgttcgaacatacggaataaaatgggatgattcagaaatcccagatgataattctgtttgattacttcctgagatcaaattctctctctcatagctactgttttttagtggtaaatgtaatgtattttgagtttgttgggttctgtttttcactactggaactggtgatgatggagacctttccttgctgaatgaatgaatattcagaggctcttcttcctttttgactagatgccacctcaactttgactccgtttcttgatgagatgaatgaaaaatttctggtgaaatgcctctgttttgagagaggtgcccaggattatttttttctaccaaatgaagcaattccatctgcctccttacttttttttcttctctctgcttttgaagctgtttagggtacttttctgatgctggaatataccttttaggtggcttatttatattccaatcaggccttttaggatatttcttcatgtgttttgtttgtttctctattcttgtgaactgattacactggtcattacaccgattgttttctttttctaagctggctcctttatcctgagttagttcttgcttgtttttcttggtgctaaactgtccaataagttctgccgaaatctcaggagatgaacaatttgtgatgtccctctccattaatgatccacaatgtgattctgcattggtgaatattcctatatttaagtcatctgtttgcacaccagtatccttcttaggagaagtcgtagaattcatatatgtattcattttaccactgatttcatcagaatcatgtcttgaatttgaaatgttagatgcattatattccatttgtattgtatcaacaccaagatttttaatcagtctagaagtgtcatgtcccttttgcgccaattctcggattctttgttcttgttttagtctctgtgccagttcctgtgctcgctgcattgtctggaatagctcatttgtcttgagagtcatgatttcttccttttgtttttgcttaagtatgtcttcttcatactgtttctgcatctcttcacgttcctgtgctaagcgaagctcctcttcttgttcttccttctttctttgctcttcctccagttgtttcttcctgcgcttctcttctacctgggcagtgatggctttctgatgctctaattgtttttgtcgtcgtctgtctcgttcctcaatctgagctgggtccaagagagcagtcatagaacggagaaagtttgttttcttactgtttgccataaccacatccttaataggttttgctatatgctcctcctctgaaggttcaacctggcttccggttgtaggtgtacaaacactgctgacatcagccagctcctgagtgtcaggagagacacagaagtactcaggttgtttgtgtgttgaccgagagaacagctgagattgagaaccaggataactctttaatgaatcaaagtgcattgcccatctgtcatgttcctcaccctttgaatatataattttttcctctatttttctttgacggtcatcttctatttgcttattcaactcttcaatccattttctctgcagttcttgtttcacagcactgaaagggtgctccagcagtactgtttccctagattggtcaagaatttgatgtttttcccatattattttatcactttcagattttttccaaggatcattccatttttcagaaacttctttttctttcttctttaaagcaacctgttcatctagctctttcctccactgggctttttttgcttccaacgaacttctatcacattccctttcccccagagtactgaatatatcagctggtttccattcattctctatggcaattttttgctcacactgtttagatgtctcctgatgttcatttaagacagatttattttcagctgggacagatgaaaccatttcagtttttttgaataatcccataatgttctcatcctttggctgattagaaatactgtttaaatatagactatattgactttttgcctcctttccattctcagtcagggaaagagatctatttccttggtttacagtcatcaaaatctgttgtagttggtcttgtgttagacacaccaaactgctcttcatgttttcagctgtgatgtgttttttgtgaggcttctgtttacctactagagatgtatttacggtgtttctagtcttctgcatattaggagttgcaggtgaaatctctttctggatatgaagacagtctttatctatacattgtttacataaatccttagtggatgaaaaagtcattccatttttttcaccttttgcctgtgatgtttctgaaccaactggcttcttttgcaaaagtttttcactcccaatacaagtatcttgtgttgattttagaatgtgcccagtttttgttcttaaaggacattttgcaatcttggccttatttcccatcttcacagaaatttttgatttatgttcatatggagacaatattagcttggtttttccatccagtaattcagtttcaagctttaaaccatctcccaagttcatggcctgacctcgcactctctccacagaacgctcaagccccttgtgtacgtcggttgccgccgccgctcagcaagcgctacc

SEQ ID NO: 735934 - DNA, 9677 bp, Homo sapiens
cggctccgaggaccgggcagcgcatttggggtgcccgctacagggccccccaagaggctgccaggtcgggagcgcagcctgaggccacggggggaagggggtgggtgggctgagagcagctcggcggcgagactggcccgccgccccttccccccacacccgtcgaccttgtgggcagaagcttcccagagctccttaggccggcgcgatggcgactgctgtggagacggaggcctgtcagccgacggatgcgagttgggaaagtggcggcggcggagacgacgagatgaagcaggcgcttccggagcttgagtcctcccaacaaaatggcggcggcggcggcctcaacatcgctgagcccagcggcggcgctgggcgtgaggagaacgcgggggccgaggccgcccagagcctcagccacgagcagcctcaggactcctctgaggcgggcgcggccgccctgcccagaggccccgaagagcccgaaaggcctgttaggaggagttttcagatccccaggaagagcagagaaaagaaagcacttttccagccattaactccaggctctcgagaatttgaagatgttgtaaatattctccattcttcttaccttgaaccaacctcagtaacaaattttaactacagacgtgcttgcttggtacacaatgagcttttggaaaaggagtttacagaaaagcgaagagaactgaagtttgatggtcgtttagataaggaactttcagaatcctatgcatttctgatggttgatcgataccaggttcaaaccatatgtgaaaaaggattacatgtgggtcagtccaaaataacaattcttggcagtccttccatgggtgtctatctttctaggtatgctgatttattacaagcgaatcctttggacacgggggcaatgggtgatgttgttatttttaaaataatgaagggtaaaataaagagtatatatgaccccatgggtgtaaaaagtttggaatctatgttaaataagagtgctttggaccccacaccaaagcatgaatgtcacgtgtcaaagaatgccaatcgaattacatcacttttggcttacagagcctatgagcttactcagtattatttttatgagtatggctttgatgagctaaggcgaagaccaagacacgtttgtccatatgcagttgtgtcttttacttacaaagatgatatacaaactccgaagtttgtaccttcatcaagatctaacagctttaatacagatagaaacatagataaatataactataccttgtggaaaggacagcttttaaataaaggaaaacttttgtgttatatttctctgaggtcagccactcgtgcttttttgcctatcaaactacctgagaaattagatgttgaaacagttatgagtattgatcatctgaaacagaaaatccctccagcactgttttataaggaaacatacttaggtccaaatgaagttttgaagaatggaatgtattgcagcctttatgaagttgtggaaaagacaagaattggaagtaacatggagagtttactgcaaaaactagacagagaaaaacttgttcttgttaaacctttgggagaccgaggatacctttttcttctctccccttatcagatggttcctccatatgaatatcagactgccaagtctcgagtcctacatgctttgtttctatttcaagaacctagaagcatagttacttcacaaaaaggttcaaccaatgcagcaccacaggagaggcatgagagcatgccagatgtattaaaaatagctcagtttttacaattttctttgattcagtgtcgaaaggaattcaaaaatataagcgccataaattttcattctgttgttgaaaagtatgtaagtgaattttttaagcgaggttttggttcaggtaaacgagagtttattatgtttccatatgattcacgattagatgataaaaaattcttatactcagctcccagaaataaatcccatattgatacttgtttgcatgcctatatttttcggcctgaagtgtatcagttacctatttgtaaattaaaagaactatttgaagaaaatagaaaacttcagcagtttagtccactttcagattatgaaggtcaagaagaagaaatgaatggtacaaaaatgaaatttggaaaacgaaataactcaagaggtgaagccattatatctggaaagcaaagatcatctcattctttggattatgataaggatagagtcaaagaattgattaatttaattcagtgtaggaaaaagagtgtgggtggggactcagacacagaagatatgagaagcaaaactgtcttgaagaggaagcttgaggatctacctgaaaatatgagaaagctcgccaaaaccagtaatttatctgaaaattgccatctgtatgaagagtctccacagcctattggctcacttggacatgatgctgacttgaggcggcagcagcaggatacctgtaactccggcattgctgacatccataggctgtttaattggttatcagaaacactagcaaatgcgcgccattctgatgcatctctgacagacacagtcaacaaagccttaggattgagcactgatgatgcctatgaagagctgaggcaaaaacatgagtatgagttgaactctaccccagataagaaagactatgagcagcctacttgtgcaaaagttgaaaatgcacagtttaagggtactcagagcttattactagaagttgatgcaacatctaagtattctgttgctatttctaccagcgaagtgggcactgaccataagctacatttgaaagaagatccaaatttaattagcgtgaataattttgaagattgcagtttgtgtcccagtgttcccattgaacatggatttcgtagacaacagtctaagtcaaataatgttgaagagactgaaatacattggaaactgattccaattacaggagggaatgcaagaagcccagaagaccagctggggaaacatggtgagaaacaaacaccagacacactaaagggcaccactgaggatgacgtgttgacaggtcaggtggaggagcagtgtgtgccagcagcagaggcagagccgcctgcagtgagcgaaaccacagagaggacagtgttaggagagtacaatctcttttctaggaagatagaagagattttgaagcaaaagaatgtttcatatgtcagtagagtttccacacctatcttttcaacacaagagaagatgaaacggctttccgagttcatatattctaagacttccaaagctggtgtgcaggagtttgtagatggtttgcatgagaagctaaatactattattattaaagcatcagccaagggtgggaatttgccaccagtcagtcctaacgattctggtgctaagatagcatcgaatcctctggaaaggcatgtcataccagtttcctcaagtgacttcaacaataaacatctccttgagccactgtgtagtgatcctttgaaagataccaactctgatgagcagcattccacttcggctttaactgaagtagaaatgaaccagcctcaacatgccacagagttaatggtgacttctgatcatattgtacctggtgatatggcccgggaaccagtagaagaaacaacaaaatcccccagtgatgtaaacatttctgctcaaccagctctttcaaattttataagccagttagaacctgaagtatttaatagtttggttaaaatcatgaaagacgtccagaaaaatactgtgaaattttatattcatgaagaagaagagagtgtgctctgtaaagaaataaaggaatatcttatcaaattaggcaatacagaatgtcatcctgaacagtttttggaaagaagatcaaaattagataaactattgattattattcaaaatgaagacattgcaggtttcattcacaagatacctggcttggtgactttaaagaagctcccctgtgttagttttgctggtgttgatagcctggatgatgttaaaaatcatacatacaatgaattatttgtatctggaggttttatcgtatctgatgaatcaattctaaacccagaggttgtcacagttgagaaccttaaaaattttttgacattccttgaggaacttagtactccagaaggaaaatggcaatggaaagtccactgtaaatttcagaagaaactaaaggaactaggcagattgaatgctaaagctctaagtctgttgacgcttctgaatgtctatcagaagaaacatctggttgaaattttgtcataccacaattgtgattcacaaactcgaaatgctccagaattggattgccttatcagacttcaggctcagaacatacagcaacgacacatagtctttttaacagagaagaacatcaagatgctttccagttatacagataatggaatagtggttgcaactgctgaagacttcatgcaaaactttaaaaatcttgtgggctatcacaattcaatcacagaagaaaaccttccacagcttggtgctaatgagaatcttgagtcgcagtcagctcttttagaaaacgatgaaaaggatgaagaggatatgtctctggattcaggggatgaaatctcacatatagaagtatgcagcaattttcattcagaaatatgggagaaagagaccaaaggatcacgtggaacagatcaaaaaaagaatactcaaattgagttgcaatcgtctcctgatgtgcaaaacagtttattagaagataagacttaccttgattctgaagagagaacttctattgatatagtatgctctgaaggagagaacagcaattcaacagaacaagattcatatagtaactttcaggtttatcatagtcaattaaatatgtcccatcagtttagtcattttaatgttctcactcatcagacatttttggggacaccatatgccctttcatcaagtcagtctcaagaaaatgagaattacttcttatctgcttatactgaaagcttggatagagataaatctccacctcccttaagttgggggaaaagtgattcttccaggccatattcacaagagaaataactgtagtaactttttttttaagagattgttgtggactttgtttattaacaatttatatttcattctctaaacaaaaggttcttgttctttctcaaatgttttttcttttatttaaatcatgatggcctgtaacagttgaagcatctaaaaattgaaataaatatatatttttaacatatattgtacttgaattatctcatgttggcacttctaagttttactttttgtatgttacctgtacttaggcttcaaattgaagcctgttttatgtgtaaaatcagatgcttgcaggaggacggtaaacagcaaaggctttacttctttttctctaatgtcacctgatataaagtacttttgttgaagtgaattattttgatgtaggcttttgtatactgtgtttacacaggtataagtcagtaatagcagtgttaatatttacaggattttggctcgatacctcaagatttatctaacagtgcagtttcatttagataataaactatgtacataggacacattttttatctctaggcttagtcatgtaaaaactgcctattgctaaaattctggtaactttttgagagtattggataattttcagtacctgcgcaatccttgatttaatgaaattaaattttttatttcaaaagataggcttctgtttatcaaaggcgttgaacaatttgatttttaaattagttttagcaaaatggaagtataatgggaatatatttttgaggtggtcttagtagtaattaccatttgttgaacacattaatgctatactagacagatacagtggagatagctttcaaacccgtatctattcctaactactgcctctaatactaattactaacttgttactaatgctaacttttaaaaatgtttttgaaaattgcaatttctacaaataaatgtcatagtgcaaataaatgtcaggatttagagaaggagcctaaactgaatttgtgttatttcagtaaaagttatggagttatgggtctagacgtgttaataagttagacagaactttggcactttagaacaaatgcatgagtggtatttcagttcctaagttacataaaaagtgtgaaagaacactgtgaggtcccagcaacgccagactatattaaggtaagtagaaagtgtttttatagggcttcaatacccaggtggtgacagagcagaagaaccggtttttttttttttttttttactactaagcttttacaaaagaagtatctgttttattgtatagaacaagtacagcattttactacatagtatacaagtttttaatgagcatttaaaaaaataagtaaatctaggctatttgaaaaatacagttgagccagtgagcacattttataatttggaagacacaaatcaaatgtgaaggatttgattttctacatttaaaatgaagaaccaaaactctcttcttgattttcagctaaaggcaggagactactttccaactccttttgcttctggagaaggccctgtctcagttctgaaagtcccttaaggattgcttgctgtcgatccctatttttcaccatgttaggattaagaagtggatccctgacacagtcagaatcaaatagctgtcgtttttggccacagtctaaagccagatgaaagtaacaagtcagtcaattacattagtaaaatgacatagccctgtgctatataatattgtcaggagtcattataataagtatgtatcctaggaaagtactaagaaaaatttaagacatattcaagaaactttatagaactaagtgcaggaattactaatttggaatttaaagttgttgacggggtttacatgggtcttcaatttttacagttagaatgcttaatatttacttaccttgtgaattttggtactgagggtcctgggttgaaggcccagacaatggtgcatcgggatcaaggtaatagatctcatttgttcgaacatacggaataaaatgggatgattcagaaatcccagatgataattctgtttgattacttcctgagatcaaattctctctctcatagctactgttttttagtggtaaatgtaatgtattttgagtttgttgggttctgtttttcactactggaactggtgatgatggagacctttccttgctgaatgaatgaatattcagaggctcttcttcctttttgactagatgccacctcaactttgactccgtttcttgatgagatgaatgaaaaatttctggtgaaatgcctctgttttgagagaggtgcccaggattatttttttctaccaaatgaagcaattccatctgcctccttacttttttttcttctctctgcttttgaagctgtttagggtacttttctgatgctggaatataccttttaggtggcttatttatattccaatcaggccttttaggatatttcttcatgtgttttgtttgtttctctattcttgtgaactgattacactggtcattacaccgattgttttctttttctaagctggctcctttatcctgagttagttcttgcttgtttttcttggtgctaaactgtccaataagttctgccgaaatctcaggagatgaacaatttgtgatgtccctctccattaatgatccacaatgtgattctgcattggtgaatattcctatatttaagtcatctgtttgcacaccagtatccttcttaggagaagtcgtagaattcatatatgtattcattttaccactgatttcatcagaatcatgtcttgaatttgaaatgttagatgcattatattccatttgtattgtatcaacaccaagatttttaatcagtctagaagtgtcatgtcccttttgcgccaattctcggattctttgttcttgttttagtctctgtgccagttcctgtgctcgctgcattgtctggaatagctcatttgtcttgagagtcatgatttcttccttttgtttttgcttaagtatgtcttcttcatactgtttctgcatctcttcacgttcctgtgctaagcgaagctcctcttcttgttcttccttctttctttgctcttcctccagttgtttcttcctgcgcttctcttctacctgggcagtgatggctttctgatgctctaattgtttttgtcgtcgtctgtctcgttcctcaatctgagctgggtccaagagagcagtcatagaacggagaaagtttgttttcttactgtttgccataaccacatccttaataggttttgctatatgctcctcctctgaaggttcaacctggcttccggttgtaggtgtacaaacactgctgacatcagccagctcctgagtgtcaggagagacacagaagtactcaggttgtttgtgtgttgaccgagagaacagctgagattgagaaccaggataactctttaatgaatcaaagtgcattgcccatctgtcatgttcctcaccctttgaatatataattttttcctctatttttctttgacggtcatcttctatttgcttattcaactcttcaatccattttctctgcagttcttgtttcacagcactgaaagggtgctccagcagtactgtttccctagattggtcaagaatttgatgtttttcccatattattttatcactttcagattttttccaaggatcattccatttttcagaaacttctttttctttcttctttaaagcaacctgttcatctagctctttcctccactgggctttttttgcttccaacgaacttctatcacattccctttcccccagagtactgaatatatcagctggtttccattcattctctatggcaattttttgctcacactgtttagatgtctcctgatgttcatttaagacagatttattttcagctgggacagatgaaaccatttcagtttttttgaataatcccataatgttctcatcctttggctgattagaaatactgtttaaatatagactatattgactttttgcctcctttccattctcagtcagggaaagagatctatttccttggtttacagtcatcaaaatctgttgtagttggtcttgtgttagacacaccaaactgctcttcatgttttcagctgtgatgtgttttttgtgaggcttctgtttacctactagagatgtatttacggtgtttctagtcttctgcatattaggagttgcaggtgaaatctctttctggatatgaagacagtctttatctatacattgtttacataaatccttagtggatgaaaaagtcattccatttttttcaccttttgcctgtgatgtttctgaaccaactggcttcttttgcaaaagtttttcactcccaatacaagtatcttgtgttgattttagaatgtgcccagtttttgttcttaaaggacattttgcaatcttggccttatttcccatcttcacagaaatttttgatttatgttcatatggagacaatattagcttggtttttccatccagtaattcagtttcaagctttaaaccatctctcgcactctctccacagaacgctcaagccccttgtgtacgtcggttgccgccgccgctcagcaagcgctacc

SEQ ID NO: 735935 - DNA, 9673 bp, Homo sapiens
cggctccgaggaccgggcagcgcatttggggtgcccgctacagggccccccaagaggctgccaggtcgggagcgcagcctgaggccacggggggaagggggtgggtgggctgagagcagctcggcggcgagactggcccgccgccccttccccccacacccgtcgaccttgtgggcagaagcttcccagagctccttaggccggcgcgatggcgactgctgtggagacggaggcctgtcagccgacggatgcgagttgggaaagtggcggcggcggagacgacgagatgaagcaggcgcttccggagcttgagtcctcccaacaaaatggcggcggcggcggcctcaacatcgctgagcccagcggcggcgctgggcgtgaggagaacgcgggggccgaggccgcccagagcctcagccacgagcagcctcaggactcctctgaggcgggcgcggccgccctgcccagaggccccgaagagcccgaaaggcctgttaggaggagttttcagatccccaggaagagcagagaaaagaaagcacttttccagccattaactccaggctctcgagaatttgaagatgttgtaaatattctccattcttcttaccttgaaccaacctcagtaacaaattttaactacagacgtgcttgcttggtacacaatgagcttttggaaaaggagtttacagaaaagcgaagagaactgaagtttgatggtcgtttagataaggaactttcagaatcctatgcatttctgatggttgatcgataccaggttcaaaccatatgtgaaaaaggattacatgtgggtcagtccaaaataacaattcttggcagtccttccatgggtgtctatctttctaggtatgctgatttattacaagcgaatcctttggacacgggggcaatgggtgatgttgttatttttaaaataatgaagggtaaaataaagagtatatatgaccccatgggtgtaaaaagtttggaatctatgttaaataagagtgctttggaccccacaccaaagcatgaatgtcacgtgtcaaagaatgccaatcgaattacatcacttttggcttacagagcctatgagcttactcagtattatttttatgagtatggctttgatgagctaaggcgaagaccaagacacgtttgtccatatgcagttgtgtcttttacttacaaagatgatatacaaactccgaagtttgtaccttcatcaagatctaacagctttaatacagatagaaacatagataaatataactataccttgtggaaaggacagcttttaaataaaggaaaacttttgtgttatatttctctgaggtcagccactcgtgcttttttgcctatcaaactacctgagaaattagatgttgaaacagttatgagtattgatcatctgaaacagaaaatccctccagcactgttttataaggaaacatacttaggtccaaatgaagttttgaagaatggaatgtattgcagcctttatgaagttgtggaaaagacaagaattggaagtaacatggagagtttactgcaaaaactagacagagaaaaacttgttcttgttaaacctttgggagaccgaggatacctttttcttctctccccttatcagatggttcctccatatgaatatcagactgccaagtctcgagtcctacatgctttgtttctatttcaagaacctagaagcatagttacttcacaaaaaggttcaaccaatgcagcaccacaggagaggcatgagagcatgccagatgtattaaaaatagctcagtttttacaattttctttgattcagtgtcgaaaggaattcaaaaatataagcgccataaattttcattctgttgttgaaaagtatgtaagtgaattttttaagcgaggttttggttcaggtaaacgagagtttattatgtttccatatgattcacgattagatgataaaaaattcttatactcagctcccagaaataaatcccatattgatacttgtttgcatgcctatatttttcggcctgaagtgtatcagttacctatttgtaaattaaaagaactatttgaagaaaatagaaaacttcagcagtttagtccactttcagattatgaaggtcaagaagaagaaatgaatggtacaaaaatgaaatttggaaaacgaaataactcaagaggtgaagccattatatctggaaagcaaagatcatctcattctttggattatgataaggatagagtcaaagaattgattaatttaattcagtgtaggaaaaagagtgtgggtggggactcagacacagaagatatgagaagcaaaactgtcttgaagaggaagcttgaggatctacctgaaaatatgagaaagctcgccaaaaccagtaatttatctgaaaattgccatctgtatgaagagtctccacagcctattggctcacttggacatgatgctgacttgaggcggcagcagcaggatacctgtaactccggcattgctgacatccataggctgtttaattggttatcagaaacactagcaaatgcgcgccattctgatgcatctctgacagacacagtcaacaaagccttaggattgagcactgatgatgcctatgaagagctgaggcaaaaacatgagtatgagttgaactctaccccagataagaaagactatgagcagcctacttgtgcaaaagttgaaaatgcacagtttaagggtactcagagcttattactagaagttgatgcaacatctaagtattctgttgctatttctaccagcgaagtgggcactgaccataagctacatttgaaagaagatccaaatttaattagcgtgaataattttgaagattgcagtttgtgtcccagtgttcccattgaacatggatttcgtagacaacagtctaagtcaaataatgttgaagagactgaaatacattggaaactgattccaattacaggagggaatgcaagaagcccagaagaccagctggggaaacatggtgagaaacaaacaccagacacactaaagggcaccactgaggatgacgtgttgacaggtcaggtggaggagcagtgtgtgccagcagcagaggcagagccgcctgcagtgagcgaaaccacagagaggacagtgttaggagagtacaatctcttttctaggaagatagaagagattttgaagcaaaagaatgtttcatatgtcagtagagtttccacacctatcttttcaacacaagagaagatgaaacggctttccgagttcatatattctaagacttccaaagctggtgtgcaggagtttgtagatggtttgcatgagaagctaaatactattattattaaagcatcagccaagggtgggaatttgccaccagtcagtcctaacgattctggtgctaagatagcatcgaatcctctggaaaggcatgtcataccagtttcctcaagtgacttcaacaataaacatctccttgagccactgtgtagtgatcctttgaaagataccaactctgatgagcagcattccacttcggctttaactgaagtagaaatgaaccagcctcaacatgccacagagttaatggtgacttctgatcatattgtacctggtgatatggcccgggaaccagtagaagaaacaacaaaatcccccagtgatgtaaacatttctgctcaaccagctctttcaaattttataagccagttagaacctgaagtatttaatagtttggttaaaatcatgaaagacgtccagaaaaatactgtgaaattttatattcatgaagaagaagagagtgtgctctgtaaagaaataaaggaatatcttatcaaattaggcaatacagaatgtcatcctgaacagtttttggaaagaagatcaaaattagataaactattgattattattcaaaatgaagacattgcaggtttcattcacaagatacctggcttggtgactttaaagaagctcccctgtgttagttttgctggtgttgatagcctggatgatgttaaaaatcatacatacaatgaattatttgtatctggaggttttatcgtatctgatgaatcaattctaaacccagaggttgtcacagttgagaaccttaaaaattttttgacattccttgaggaacttagtactccagaaggaaaatggcaatggaaagtccactgtaaatttcagaagaaactaaaggaactaggcagattgaatgctaaagctctaagtctgttgacgcttctgaatgtctatcagaagaaacatctggttgaaattttgtcataccacaattgtgattcacaaactcgaaatgctccagaattggattgccttatcagacttcaggctcagaacatacagcaacgacacatagtctttttaacagagaagaacatcaagatgctttccagttatacagataatggaatagtggttgcaactgctgaagacttcatgcaaaactttaaaaatcttgtgggctatcacaattcaatcacagaagaaaaccttccacagcttggtgctaatgagaatcttgagtcgcagtcagctcttttagaaaacgatgaaaaggatgaagaggatatgtctctggattcaggggatgaaatctcacatatagaagtatgcagcaattttcattcagaaatatgggagaaagagaccaaaggatcacgtggaacagatcaaaaaaagaatactcaaattgagttgcaatcgtctcctgatgtgcaaaacagtttattagaagataagacttaccttgattctgaagagagaacttctattgatatagtatgctctgaaggagagaacagcaattcaacagaacaagattcatatagtaactttcaggtttatcatagtcaattaaatatgtcccatcagtttagtcattttaatgttctcactcatcagacatttttggggacaccatatgccctttcatcaagtcagtctcaagaaaatgagaattacttcttatctgcttatactgaaagcttggatagagataaatctccacctcccttaagttgggggaaaagtgattcttccaggccatattcacaagagaaataactgtagtaactttttttttaagagattgttgtggactttgtttattaacaatttatatttcattctctaaacaaaaggttcttgttctttctcaaatgttttttcttttatttaaatcatgatggcctgtaacagttgaagcatctaaaaattgaaataaatatatatttttaacatatattgtacttgaattatctcatgttggcacttctaagttttactttttgtatgttacctgtacttaggcttcaaattgaagcctgttttatgtgtaaaatcagatgcttgcaggaggacggtaaacagcaaaggctttacttctttttctctaatgtcacctgatataaagtacttttgttgaagtgaattattttgatgtaggcttttgtatactgtgtttacacaggtataagtcagtaatagcagtgttaatatttacaggattttggctcgatacctcaagatttatctaacagtgcagtttcatttagataataaactatgtacataggacacattttttatctctaggcttagtcatgtaaaaactgcctattgctaaaattctggtaactttttgagagtattggataattttcagtacctgcgcaatccttgatttaatgaaattaaattttttatttcaaaagataggcttctgtttatcaaaggcgttgaacaatttgatttttaaattagttttagcaaaatggaagtataatgggaatatatttttgaggtggtcttagtagtaattaccatttgttgaacacattaatgctatactagacagatacagtggagatagctttcaaacccgtatctattcctaactactgcctctaatactaattactaacttgttactaatgctaacttttaaaaatgtttttgaaaattgcaatttctacaaataaatgtcatagtgcaaataaatgtcaggatttagagaaggagcctaaactgaatttgtgttatttcagtaaaagttatggagttatgggtctagacgtgttaataagttagacagaactttggcactttagaacaaatgcatgagtggtatttcagttcctaagttacataaaaagtgtgaaagaacactgtgaggtcccagcaacgccagactatattaaggtaagtagaaagtgtttttatagggcttcaatacccaggtggtgacagagcagaagaaccggtttttttttttttttttttactactaagcttttacaaaagaagtatctgttttattgtatagaacaagtacagcattttactacatagtatacaagtttttaatgagcatttaaaaaaataagtaaatctaggctatttgaaaaatacagttgagccagtgagcacattttataatttggaagacacaaatcaaatgtgaaggatttgattttctacatttaaaatgaagaaccaaaactctcttcttgattttcagctaaaggcaggagactactttccaactccttttgcttctggagaaggccctgtctcagttctgaaagtcccttaaggattgcttgctgtcgatccctatttttcaccatgttaggattaagaagtggatccctgacacagtcagaatcaaatagctgtcgtttttggccacagtctaaagccagatgaaagtaacaagtcagtcaattacattagtaaaatgacatagccctgtgctatataatattgtcaggagtcattataataagtatgtatcctaggaaagtactaagaaaaatttaagacatattcaagaaactttatagaactaagtgcaggaattactaatttggaatttaaagttgttgacggggtttacatgggtcttcaatttttacagttagaatgcttaatatttacttaccttgtgaattttggtactgagggtcctgggttgaaggcccagacaatggtgcatcgggatcaaggtaatagatctcatttgttcgaacatacggaataaaatgggatgattcagaaatcccagatgataattctgtttgattacttcctgagatcaaattctctctctcatagctactgttttttagtggtaaatgtaatgtattttgagtttgttgggttctgtttttcactactggaactggtgatgatggagacctttccttgctgaatgaatgaatattcagaggctcttcttcctttttgactagatgccacctcaactttgactccgtttcttgatgagatgaatgaaaaatttctggtgaaatgcctctgttttgagagaggtgcccaggattatttttttctaccaaatgaagcaattccatctgcctccttacttttttttcttctctctgcttttgaagctgtttagggtacttttctgatgctggaatataccttttaggtggcttatttatattccaatcaggccttttaggatatttcttcatgtgttttgtttgtttctctattcttgtgaactgattacactggtcattacaccgattgttttctttttctaagctggctcctttatcctgagttagttcttgcttgtttttcttggtgctaaactgtccaataagttctgccgaaatctcaggagatgaacaatttgtgatgtccctctccattaatgatccacaatgtgattctgcattggtgaatattcctatatttaagtcatctgtttgcacaccagtatccttcttaggagaagtcgtagaattcatatatgtattcattttaccactgatttcatcagaatcatgtcttgaatttgaaatgttagatgcattatattccatttgtattgtatcaacaccaagatttttaatcagtctagaagtgtcatgtcccttttgcgccaattctcggattctttgttcttgttttagtctctgtgccagttcctgtgctcgctgcattgtctggaatagctcatttgtcttgagagtcatgatttcttccttttgtttttgcttaagtatgtcttcttcatactgtttctgcatctcttcacgttcctgtgctaagcgaagctcctcttcttgttcttccttctttctttgctcttcctccagttgtttcttcctgcgcttctcttctacctgggcagtgatggctttctgatgctctaattgtttttgtcgtcgtctgtctcgttcctcaatctgagctgggtccaagagagcagtcatagaacggagaaagtttgttttcttactgtttgccataaccacatccttaataggttttgctatatgctcctcctctgaaggttcaacctggcttccggttgtaggtgtacaaacactgctgacatcagccagctcctgagtgtcaggagagacacagaagtactcaggttgtttgtgtgttgaccgagagaacagctgagattgagaaccaggataactctttaatgaatcaaagtgcattgcccatctgtcatgttcctcaccctttgaatatataattttttcctctatttttctttgacggtcatcttctatttgcttattcaactcttcaatccattttctctgcagttcttgtttcacagcactgaaagggtgctccagcagtactgtttccctagattggtcaagaatttgatgtttttcccatattattttatcactttcagattttttccaaggatcattccatttttcagaaacttctttttctttcttctttaaagcaacctgttcatctagctctttcctccactgggctttttttgcttccaacgaacttctatcacattccctttcccccagagtactgaatatatcagctggtttccattcattctctatggcaattttttgctcacactgtttagatgtctcctgatgttcatttaagacagatttattttcagctgggacagatgaaaccatttcagtttttttgaataatcccataatgttctcatcctttggctgattagaaatactgtttaaatatagactatattgactttttgcctcctttccattctcagtcagggaaagagatctatttccttggtttacagtcatcaaaatctgttgtagttggtcttgtgttagacacaccaaactgctcttcatgttttcagctgtgatgtgttttttgtgaggcttctgtttacctactagagatgtatttacggtgtttctagtcttctgcatattaggagttgcaggtgaaatctctttctggatatgaagacagtctttatctatacattgtttacataaatccttagtggatgaaaaagtcattccatttttttcaccttttgcctgtgatgtttctgaaccaactggcttcttttgcaaaagtttttcactcccaatacaagtatcttgtgttgattttagaatgtgcccagtttttgttcttaaaggacattttgcaatcttggccttatttcccatgcacacatatttcacaattcactgccaacaatgtattatatgtagtcgaaccacatcacgccctttgcattccagtatttgatatcctggttcagcactattatgcgtccacaggtggctagctcactctctctacatgggaccatgccgtcctgcagtc

SEQ ID NO: 735936 - DNA, 10045 bp, Homo sapiens
cggctccgaggaccgggcagcgcatttggggtgcccgctacagggccccccaagaggctgccaggtcgggagcgcagcctgaggccacggggggaagggggtgggtgggctgagagcagctcggcggcgagactggcccgccgccccttccccccacacccgtcgaccttgtgggcagaagcttcccagagctccttaggccggcgcgatggcgactgctgtggagacggaggcctgtcagccgacggatgcgagttgggaaagtggcggcggcggagacgacgagatgaagcaggcgcttccggagcttgagtcctcccaacaaaatggcggcggcggcggcctcaacatcgctgagcccagcggcggcgctgggcgtgaggagaacgcgggggccgaggccgcccagagcctcagccacgagcagcctcaggactcctctgaggcgggcgcggccgccctgcccagaggccccgaagagcccgaaaggcctgttaggaggagttttcagatccccaggaagagcagagaaaagaaagcacttttccagccattaactccaggctctcgagaatttgaagatgttgtaaatattctccattcttcttaccttgaaccaacctcagtaacaaattttaactacagacgtgcttgcttggtacacaatgagcttttggaaaaggagtttacagaaaagcgaagagaactgaagtttgatggtcgtttagataaggaactttcagaatcctatgcatttctgatggttgatcgataccaggttcaaaccatatgtgaaaaaggattacatgtgggtcagtccaaaataacaattcttggcagtccttccatgggtgtctatctttctaggtatgctgatttattacaagcgaatcctttggacacgggggcaatgggtgatgttgttatttttaaaataatgaagggtaaaataaagagtatatatgaccccatgggtgtaaaaagtttggaatctatgttaaataagagtgctttggaccccacaccaaagcatgaatgtcacgtgtcaaagaatgccaatcgaattacatcacttttggcttacagagcctatgagcttactcagtattatttttatgagtatggctttgatgagctaaggcgaagaccaagacacgtttgtccatatgcagttgtgtcttttacttacaaagatgatatacaaactccgaagtttgtaccttcatcaagatctaacagctttaatacagatagaaacatagataaatataactataccttgtggaaaggacagcttttaaataaaggaaaacttttgtgttatatttctctgaggtcagccactcgtgcttttttgcctatcaaactacctgagaaattagatgttgaaacagttatgagtattgatcatctgaaacagaaaatccctccagcactgttttataaggaaacatacttaggtccaaatgaagttttgaagaatggaatgtattgcagcctttatgaagttgtggaaaagacaagaattggaagtaacatggagagtttactgcaaaaactagacagagaaaaacttgttcttgttaaacctttgggagaccgaggatacctttttcttctctccccttatcagatggttcctccatatgaatatcagactgccaagtctcgagtcctacatgctttgtttctatttcaagaacctagaagcatagttacttcacaaaaaggttcaaccaatgcagcaccacaggagaggcatgagagcatgccagatgtattaaaaatagctcagtttttacaattttctttgattcagtgtcgaaaggaattcaaaaatataagcgccataaattttcattctgttgttgaaaagtatgtaagtgaattttttaagcgaggttttggttcaggtaaacgagagtttattatgtttccatatgattcacgattagatgataaaaaattcttatactcagctcccagaaataaatcccatattgatacttgtttgcatgcctatatttttcggcctgaagtgtatcagttacctatttgtaaattaaaagaactatttgaagaaaatagaaaacttcagcagtttagtccactttcagattatgaaggtcaagaagaagaaatgaatggtacaaaaatgaaatttggaaaacgaaataactcaagaggtgaagccattatatctggaaagcaaagatcatctcattctttggattatgataaggatagagtcaaagaattgattaatttaattcagtgtaggaaaaagagtgtgggtggggactcagacacagaagatatgagaagcaaaactgtcttgaagaggaagcttgaggatctacctgaaaatatgagaaagctcgccaaaaccagtaatttatctgaaaattgccatctgtatgaagagtctccacagcctattggctcacttggacatgatgctgacttgaggcggcagcagcaggatacctgtaactccggcattgctgacatccataggctgtttaattggttatcagaaacactagcaaatgcgcgccattctgatgcatctctgacagacacagtcaacaaagccttaggattgagcactgatgatgcctatgaagagctgaggcaaaaacatgagtatgagttgaactctaccccagataagaaagactatgagcagcctacttgtgcaaaagttgaaaatgcacagtttaagggtactcagagcttattactagaagttgatgcaacatctaagtattctgttgctatttctaccagcgaagtgggcactgaccataagctacatttgaaagaagatccaaatttaattagcgtgaataattttgaagattgcagtttgtgtcccagtgttcccattgaacatggatttcgtagacaacagtctaagtcaaataatgttgaagagactgaaatacattggaaactgattccaattacaggagggaatgcaagaagcccagaagaccagctggggaaacatggtgagaaacaaacaccagacacactaaagggcaccactgaggatgacgtgttgacaggtcaggtggaggagcagtgtgtgccagcagcagaggcagagccgcctgcagtgagcgaaaccacagagaggacagtgttaggagagtacaatctcttttctaggaagatagaagagattttgaagcaaaagaatgtttcatatgtcagtagagtttccacacctatcttttcaacacaagagaagatgaaacggctttccgagttcatatattctaagacttccaaagctggtgtgcaggagtttgtagatggtttgcatgagaagctaaatactattattattaaagcatcagccaagggtgggaatttgccaccagtcagtcctaacgattctggtgctaagatagcatcgaatcctctggaaaggcatgtcataccagtttcctcaagtgacttcaacaataaacatctccttgagccactgtgtagtgatcctttgaaagataccaactctgatgagcagcattccacttcggctttaactgaagtagaaatgaaccagcctcaacatgccacagagttaatggtgacttctgatcatattgtacctggtgatatggcccgggaaccagtagaagaaacaacaaaatcccccagtgatgtaaacatttctgctcaaccagctctttcaaattttataagccagttagaacctgaagtatttaatagtttggttaaaatcatgaaagacgtccagaaaaatactgtgaaattttatattcatgaagaagaagagagtgtgctctgtaaagaaataaaggaatatcttatcaaattaggcaatacagaatgtcatcctgaacagtttttggaaagaagatcaaaattagataaactattgattattattcaaaatgaagacattgcaggtttcattcacaagatacctggcttggtgactttaaagaagctcccctgtgttagttttgctggtgttgatagcctggatgatgttaaaaatcatacatacaatgaattatttgtatctggaggttttatcgtatctgatgaatcaattctaaacccagaggttgtcacagttgagaaccttaaaaattttttgacattccttgaggaacttagtactccagaaggaaaatggcaatggaaagtccactgtaaatttcagaagaaactaaaggaactaggcagattgaatgctaaagctctaagtctgttgacgcttctgaatgtctatcagaagaaacatctggttgaaattttgtcataccacaattgtgattcacaaactcgaaatgctccagaattggattgccttatcagacttcaggctcagaacatacagcaacgacacatagtctttttaacagagaagaacatcaagatgctttccagttatacagataatggaatagtggttgcaactgctgaagacttcatgcaaaactttaaaaatcttgtgggctatcacaattcaatcacagaagaaaaccttccacagcttggtgctaatgagaatcttgagtcgcagtcagctcttttagaaaacgatgaaaaggatgaagaggatatgtctctggattcaggggatgaaatctcacatatagaagtatgcagcaattttcattcagaaatatgggagaaagagaccaaaggatcacgtggaacagatcaaaaaaagaatactcaaattgagttgcaatcgtctcctgatgtgcaaaacagtttattagaagataagacttaccttgattctgaagagagaacttctattgatatagtatgctctgaaggagagaacagcaattcaacagaacaagattcatatagtaactttcaggtttatcatagtcaattaaatatgtcccatcagtttagtcattttaatgttctcactcatcagacatttttggggacaccatatgccctttcatcaagtcagtctcaagaaaatgagaattacttcttatctgcttatactgaaagcttggatagagataaatctccacctcccttaagttgggggaaaagtgattcttccaggccatattcacaagagaaataactgtagtaactttttttttaagagattgttgtggactttgtttattaacaatttatatttcattctctaaacaaaaggttcttgttctttctcaaatgttttttcttttatttaaatcatgatggcctgtaacagttgaagcatctaaaaattgaaataaatatatatttttaacatatattgtacttgaattatctcatgttggcacttctaagttttactttttgtatgttacctgtacttaggcttcaaattgaagcctgttttatgtgtaaaatcagatgcttgcaggaggacggtaaacagcaaaggctttacttctttttctctaatgtcacctgatataaagtacttttgttgaagtgaattattttgatgtaggcttttgtatactgtgtttacacaggtataagtcagtaatagcagtgttaatatttacaggattttggctcgatacctcaagatttatctaacagtgcagtttcatttagataataaactatgtacataggacacattttttatctctaggcttagtcatgtaaaaactgcctattgctaaaattctggtaactttttgagagtattggataattttcagtacctgcgcaatccttgatttaatgaaattaaattttttatttcaaaagataggcttctgtttatcaaaggcgttgaacaatttgatttttaaattagttttagcaaaatggaagtataatgggaatatatttttgaggtggtcttagtagtaattaccatttgttgaacacattaatgctatactagacagatacagtggagatagctttcaaacccgtatctattcctaactactgcctctaatactaattactaacttgttactaatgctaacttttaaaaatgtttttgaaaattgcaatttctacaaataaatgtcatagtgcaaataaatgtcaggatttagagaaggagcctaaactgaatttgtgttatttcagtaaaagttatggagttatgggtctagacgtgttaataagttagacagaactttggcactttagaacaaatgcatgagtggtatttcagttcctaagttacataaaaagtgtgaaagaacactgtgaggtcccagcaacgccagactatattaaggtaagtagaaagtgtttttatagggcttcaatacccaggtggtgacagagcagaagaaccggtttttttttttttttttttactactaagcttttacaaaagaagtatctgttttattgtatagaacaagtacagcattttactacatagtatacaagtttttaatgagcatttaaaaaaataagtaaatctaggctatttgaaaaatacagttgagccagtgagcacattttataatttggaagacacaaatcaaatgtgaaggatttgattttctacatttaaaatgaagaaccaaaactctcttcttgattttcagctaaaggcaggagactactttccaactccttttgcttctggagaaggccctgtctcagttctgaaagtcccttaaggattgcttgctgtcgatccctatttttcaccatgttaggattaagaagtggatccctgacacagtcagaatcaaatagctgtcgtttttggccacagtctaaagccagatgaaagtaacaagtcagtcaattacattagtaaaatgacatagccctgtgctatataatattgtcaggagtcattataataagtatgtatcctaggaaagtactaagaaaaatttaagacatattcaagaaactttatagaactaagtgcaggaattactaatttggaatttaaagttgttgacggggtttacatgggtcttcaatttttacagttagaatgcttaatatttacttaccttgtgaattttggtactgagggtcctgggttgaaggcccagacaatggtgcatcgggatcaaggtaatagatctcatttgttcgaacatacggaataaaatgggatgattcagaaatcccagatgataattctgtttgattacttcctgagatcaaattctctctctcatagctactgttttttagtggtaaatgtaatgtattttgagtttgttgggttctgtttttcactactggaactggtgatgatggagacctttccttgctgaatgaatgaatattcagaggctcttcttcctttttgactagatgccacctcaactttgactccgtttcttgatgagatgaatgaaaaatttctggtgaaatgcctctgttttgagagaggtgcccaggattatttttttctaccaaatgaagcaattccatctgcctccttacttttttttcttctctctgcttttgaagctgtttagggtacttttctgatgctggaatataccttttaggtggcttatttatattccaatcaggccttttaggatatttcttcatgtgttttgtttgtttctctattcttgtgaactgattacactggtcattacaccgattgttttctttttctaagctggctcctttatcctgagttagttcttgcttgtttttcttggtgctaaactgtccaataagttctgccgaaatctcaggagatgaacaatttgtgatgtccctctccattaatgatccacaatgtgattctgcattggtgaatattcctatatttaagtcatctgtttgcacaccagtatccttcttaggagaagtcgtagaattcatatatgtattcattttaccactgatttcatcagaatcatgtcttgaatttgaaatgttagatgcattatattccatttgtattgtatcaacaccaagatttttaatcagtctagaagtgtcatgtcccttttgcgccaattctcggattctttgttcttgttttagtctctgtgccagttcctgtgctcgctgcattgtctggaatagctcatttgtcttgagagtcatgatttcttccttttgtttttgcttaagtatgtcttcttcatactgtttctgcatctcttcacgttcctgtgctaagcgaagctcctcttcttgttcttccttctttctttgctcttcctccagttgtttcttcctgcgcttctcttctacctgggcagtgatggctttctgatgctctaattgtttttgtcgtcgtctgtctcgttcctcaatctgagctgggtccaagagagcagtcatagaacggagaaagtttgttttcttactgtttgccataaccacatccttaataggttttgctatatgctcctcctctgaaggttcaacctggcttccggttgtaggtgtacaaacactgctgacatcagccagctcctgagtgtcaggagagacacagaagtactcaggttgtttgtgtgttgaccgagagaacagctgagattgagaaccaggataactctttaatgaatcaaagtgcattgcccatctgtcatgttcctcaccctttgaatatataattttttcctctatttttctttgacggtcatcttctatttgcttattcaactcttcaatccattttctctgcagttcttgtttcacagcactgaaagggtgctccagcagtactgtttccctagattggtcaagaatttgatgtttttcccatattattttatcactttcagattttttccaaggatcattccatttttcagaaacttctttttctttcttctttaaagcaacctgttcatctagctctttcctccactgggctttttttgcttccaacgaacttctatcacattccctttcccccagagtactgaatatatcagctggtttccattcattctctatggcaattttttgctcacactgtttagatgtctcctgatgttcatttaagacagatttattttcagctgggacagatgaaaccatttcagtttttttgaataatcccataatgttctcatcctttggctgattagaaatactgtttaaatatagactatattgactttttgcctcctttccattctcagtcagggaaagagatctatttccttggtttacagtcatcaaaatctgttgtagttggtcttgtgttagacacaccaaactgctcttcatgttttcagctgtgatgtgttttttgtgaggcttctgtttacctactagagatgtatttacggtgtttctagtcttctgcatattaggagttgcaggtgaaatctctttctggatatgaagacagtctttatctatacattgtttacataaatccttagtggatgaaaaagtcattccatttttttcaccttttgcctgtgatgtttctgaaccaactggcttcttttgcaaaagtttttcactcccaatacaagtatcttgtgttgattttagaatgtgcccagtttttgttcttaaaggacattttgcaatcttggccttatttcccatctatttattgagtgatatttcgggtactccagcaacttcttcaccttaattaaacctgcaagtaaagccatcaagggcttagagttgaaggataaagtggtacatcatccaaactgggttctatccacagacaagcaaagactttaagacactgcaaagataaaagggggctgtagtaagttatggaagagaagagaaattcctactgatattaatctaaaaattaaaaaagaaataggtagcaagaagagtagaagtatcaaaacagttggctttttttgcttttgttttttgagaaggaattttccttgttccctcccatgcctagctggattgcagagttaagtttatgattatgaaataaaaactaaataacaaaaaaaaaaaaaaaaaaaaaaagaaaaatgcacagattttgatagaattaggaaagcactttgaccacatatatgttaaacttgatgataatgagatagagttcagctgtgtttaaagaacaaactatggagattacaataattcaacaagtggg

SEQ ID NO: 735937 - DNA, 9847 bp, Homo sapiens
cggctccgaggaccgggcagcgcatttggggtgcccgctacagggccccccaagaggctgccaggtcgggagcgcagcctgaggccacggggggaagggggtgggtgggctgagagcagctcggcggcgagactggcccgccgccccttccccccacacccgtcgaccttgtgggcagaagcttcccagagctccttaggccggcgcgatggcgactgctgtggagacggaggcctgtcagccgacggatgcgagttgggaaagtggcggcggcggagacgacgagatgaagcaggcgcttccggagcttgagtcctcccaacaaaatggcggcggcggcggcctcaacatcgctgagcccagcggcggcgctgggcgtgaggagaacgcgggggccgaggccgcccagagcctcagccacgagcagcctcaggactcctctgaggcgggcgcggccgccctgcccagaggccccgaagagcccgaaaggcctgttaggaggagttttcagatccccaggaagagcagagaaaagaaagcacttttccagccattaactccaggctctcgagaatttgaagatgttgtaaatattctccattcttcttaccttgaaccaacctcagtaacaaattttaactacagacgtgcttgcttggtacacaatgagcttttggaaaaggagtttacagaaaagcgaagagaactgaagtttgatggtcgtttagataaggaactttcagaatcctatgcatttctgatggttgatcgataccaggttcaaaccatatgtgaaaaaggattacatgtgggtcagtccaaaataacaattcttggcagtccttccatgggtgtctatctttctaggtatgctgatttattacaagcgaatcctttggacacgggggcaatgggtgatgttgttatttttaaaataatgaagggtaaaataaagagtatatatgaccccatgggtgtaaaaagtttggaatctatgttaaataagagtgctttggaccccacaccaaagcatgaatgtcacgtgtcaaagaatgccaatcgaattacatcacttttggcttacagagcctatgagcttactcagtattatttttatgagtatggctttgatgagctaaggcgaagaccaagacacgtttgtccatatgcagttgtgtcttttacttacaaagatgatatacaaactccgaagtttgtaccttcatcaagatctaacagctttaatacagatagaaacatagataaatataactataccttgtggaaaggacagcttttaaataaaggaaaacttttgtgttatatttctctgaggtcagccactcgtgcttttttgcctatcaaactacctgagaaattagatgttgaaacagttatgagtattgatcatctgaaacagaaaatccctccagcactgttttataaggaaacatacttaggtccaaatgaagttttgaagaatggaatgtattgcagcctttatgaagttgtggaaaagacaagaattggaagtaacatggagagtttactgcaaaaactagacagagaaaaacttgttcttgttaaacctttgggagaccgaggatacctttttcttctctccccttatcagatggttcctccatatgaatatcagactgccaagtctcgagtcctacatgctttgtttctatttcaagaacctagaagcatagttacttcacaaaaaggttcaaccaatgcagcaccacaggagaggcatgagagcatgccagatgtattaaaaatagctcagtttttacaattttctttgattcagtgtcgaaaggaattcaaaaatataagcgccataaattttcattctgttgttgaaaagtatgtaagtgaattttttaagcgaggttttggttcaggtaaacgagagtttattatgtttccatatgattcacgattagatgataaaaaattcttatactcagctcccagaaataaatcccatattgatacttgtttgcatgcctatatttttcggcctgaagtgtatcagttacctatttgtaaattaaaagaactatttgaagaaaatagaaaacttcagcagtttagtccactttcagattatgaaggtcaagaagaagaaatgaatggtacaaaaatgaaatttggaaaacgaaataactcaagaggtgaagccattatatctggaaagcaaagatcatctcattctttggattatgataaggatagagtcaaagaattgattaatttaattcagtgtaggaaaaagagtgtgggtggggactcagacacagaagatatgagaagcaaaactgtcttgaagaggaagcttgaggatctacctgaaaatatgagaaagctcgccaaaaccagtaatttatctgaaaattgccatctgtatgaagagtctccacagcctattggctcacttggacatgatgctgacttgaggcggcagcagcaggatacctgtaactccggcattgctgacatccataggctgtttaattggttatcagaaacactagcaaatgcgcgccattctgatgcatctctgacagacacagtcaacaaagccttaggattgagcactgatgatgcctatgaagagctgaggcaaaaacatgagtatgagttgaactctaccccagataagaaagactatgagcagcctacttgtgcaaaagttgaaaatgcacagtttaagggtactcagagcttattactagaagttgatgcaacatctaagtattctgttgctatttctaccagcgaagtgggcactgaccataagctacatttgaaagaagatccaaatttaattagcgtgaataattttgaagattgcagtttgtgtcccagtgttcccattgaacatggatttcgtagacaacagtctaagtcaaataatgttgaagagactgaaatacattggaaactgattccaattacaggagggaatgcaagaagcccagaagaccagctggggaaacatggtgagaaacaaacaccagacacactaaagggcaccactgaggatgacgtgttgacaggtcaggtggaggagcagtgtgtgccagcagcagaggcagagccgcctgcagtgagcgaaaccacagagaggacagtgttaggagagtacaatctcttttctaggaagatagaagagattttgaagcaaaagaatgtttcatatgtcagtagagtttccacacctatcttttcaacacaagagaagatgaaacggctttccgagttcatatattctaagacttccaaagctggtgtgcaggagtttgtagatggtttgcatgagaagctaaatactattattattaaagcatcagccaagggtgggaatttgccaccagtcagtcctaacgattctggtgctaagatagcatcgaatcctctggaaaggcatgtcataccagtttcctcaagtgacttcaacaataaacatctccttgagccactgtgtagtgatcctttgaaagataccaactctgatgagcagcattccacttcggctttaactgaagtagaaatgaaccagcctcaacatgccacagagttaatggtgacttctgatcatattgtacctggtgatatggcccgggaaccagtagaagaaacaacaaaatcccccagtgatgtaaacatttctgctcaaccagctctttcaaattttataagccagttagaacctgaagtatttaatagtttggttaaaatcatgaaagacgtccagaaaaatactgtgaaattttatattcatgaagaagaagagagtgtgctctgtaaagaaataaaggaatatcttatcaaattaggcaatacagaatgtcatcctgaacagtttttggaaagaagatcaaaattagataaactattgattattattcaaaatgaagacattgcaggtttcattcacaagatacctggcttggtgactttaaagaagctcccctgtgttagttttgctggtgttgatagcctggatgatgttaaaaatcatacatacaatgaattatttgtatctggaggttttatcgtatctgatgaatcaattctaaacccagaggttgtcacagttgagaaccttaaaaattttttgacattccttgaggaacttagtactccagaaggaaaatggcaatggaaagtccactgtaaatttcagaagaaactaaaggaactaggcagattgaatgctaaagctctaagtctgttgacgcttctgaatgtctatcagaagaaacatctggttgaaattttgtcataccacaattgtgattcacaaactcgaaatgctccagaattggattgccttatcagacttcaggctcagaacatacagcaacgacacatagtctttttaacagagaagaacatcaagatgctttccagttatacagataatggaatagtggttgcaactgctgaagacttcatgcaaaactttaaaaatcttgtgggctatcacaattcaatcacagaagaaaaccttccacagcttggtgctaatgagaatcttgagtcgcagtcagctcttttagaaaacgatgaaaaggatgaagaggatatgtctctggattcaggggatgaaatctcacatatagaagtatgcagcaattttcattcagaaatatgggagaaagagaccaaaggatcacgtggaacagatcaaaaaaagaatactcaaattgagttgcaatcgtctcctgatgtgcaaaacagtttattagaagataagacttaccttgattctgaagagagaacttctattgatatagtatgctctgaaggagagaacagcaattcaacagaacaagattcatatagtaactttcaggtttatcatagtcaattaaatatgtcccatcagtttagtcattttaatgttctcactcatcagacatttttggggacaccatatgccctttcatcaagtcagtctcaagaaaatgagaattacttcttatctgcttatactgaaagcttggatagagataaatctccacctcccttaagttgggggaaaagtgattcttccaggccatattcacaagagaaataactgtagtaactttttttttaagagattgttgtggactttgtttattaacaatttatatttcattctctaaacaaaaggttcttgttctttctcaaatgttttttcttttatttaaatcatgatggcctgtaacagttgaagcatctaaaaattgaaataaatatatatttttaacatatattgtacttgaattatctcatgttggcacttctaagttttactttttgtatgttacctgtacttaggcttcaaattgaagcctgttttatgtgtaaaatcagatgcttgcaggaggacggtaaacagcaaaggctttacttctttttctctaatgtcacctgatataaagtacttttgttgaagtgaattattttgatgtaggcttttgtatactgtgtttacacaggtataagtcagtaatagcagtgttaatatttacaggattttggctcgatacctcaagatttatctaacagtgcagtttcatttagataataaactatgtacataggacacattttttatctctaggcttagtcatgtaaaaactgcctattgctaaaattctggtaactttttgagagtattggataattttcagtacctgcgcaatccttgatttaatgaaattaaattttttatttcaaaagataggcttctgtttatcaaaggcgttgaacaatttgatttttaaattagttttagcaaaatggaagtataatgggaatatatttttgaggtggtcttagtagtaattaccatttgttgaacacattaatgctatactagacagatacagtggagatagctttcaaacccgtatctattcctaactactgcctctaatactaattactaacttgttactaatgctaacttttaaaaatgtttttgaaaattgcaatttctacaaataaatgtcatagtgcaaataaatgtcaggatttagagaaggagcctaaactgaatttgtgttatttcagtaaaagttatggagttatgggtctagacgtgttaataagttagacagaactttggcactttagaacaaatgcatgagtggtatttcagttcctaagttacataaaaagtgtgaaagaacactgtgaggtcccagcaacgccagactatattaaggtaagtagaaagtgtttttatagggcttcaatacccaggtggtgacagagcagaagaaccggtttttttttttttttttttactactaagcttttacaaaagaagtatctgttttattgtatagaacaagtacagcattttactacatagtatacaagtttttaatgagcatttaaaaaaataagtaaatctaggctatttgaaaaatacagttgagccagtgagcacattttataatttggaagacacaaatcaaatgtgaaggatttgattttctacatttaaaatgaagaaccaaaactctcttcttgattttcagctaaaggcaggagactactttccaactccttttgcttctggagaaggccctgtctcagttctgaaagtcccttaaggattgcttgctgtcgatccctatttttcaccatgttaggattaagaagtggatccctgacacagtcagaatcaaatagctgtcgtttttggccacagtctaaagccagatgaaagtaacaagtcagtcaattacattagtaaaatgacatagccctgtgctatataatattgtcaggagtcattataataagtatgtatcctaggaaagtactaagaaaaatttaagacatattcaagaaactttatagaactaagtgcaggaattactaatttggaatttaaagttgttgacggggtttacatgggtcttcaatttttacagttagaatgcttaatatttacttaccttgtgaattttggtactgagggtcctgggttgaaggcccagacaatggtgcatcgggatcaaggtaatagatctcatttgttcgaacatacggaataaaatgggatgattcagaaatcccagatgataattctgtttgattacttcctgagatcaaattctctctctcatagctactgttttttagtggtaaatgtaatgtattttgagtttgttgggttctgtttttcactactggaactggtgatgatggagacctttccttgctgaatgaatgaatattcagaggctcttcttcctttttgactagatgccacctcaactttgactccgtttcttgatgagatgaatgaaaaatttctggtgaaatgcctctgttttgagagaggtgcccaggattatttttttctaccaaatgaagcaattccatctgcctccttacttttttttcttctctctgcttttgaagctgtttagggtacttttctgatgctggaatataccttttaggtggcttatttatattccaatcaggccttttaggatatttcttcatgtgttttgtttgtttctctattcttgtgaactgattacactggtcattacaccgattgttttctttttctaagctggctcctttatcctgagttagttcttgcttgtttttcttggtgctaaactgtccaataagttctgccgaaatctcaggagatgaacaatttgtgatgtccctctccattaatgatccacaatgtgattctgcattggtgaatattcctatatttaagtcatctgtttgcacaccagtatccttcttaggagaagtcgtagaattcatatatgtattcattttaccactgatttcatcagaatcatgtcttgaatttgaaatgttagatgcattatattccatttgtattgtatcaacaccaagatttttaatcagtctagaagtgtcatgtcccttttgcgccaattctcggattctttgttcttgttttagtctctgtgccagttcctgtgctcgctgcattgtctggaatagctcatttgtcttgagagtcatgatttcttccttttgtttttgcttaagtatgtcttcttcatactgtttctgcatctcttcacgttcctgtgctaagcgaagctcctcttcttgttcttccttctttctttgctcttcctccagttgtttcttcctgcgcttctcttctacctgggcagtgatggctttctgatgctctaattgtttttgtcgtcgtctgtctcgttcctcaatctgagctgggtccaagagagcagtcatagaacggagaaagtttgttttcttactgtttgccataaccacatccttaataggttttgctatatgctcctcctctgaaggttcaacctggcttccggttgtaggtgtacaaacactgctgacatcagccagctcctgagtgtcaggagagacacagaagtactcaggttgtttgtgtgttgaccgagagaacagctgagattgagaaccaggataactctttaatgaatcaaagtgcattgcccatctgtcatgttcctcaccctttgaatatataattttttcctctatttttctttgacggtcatcttctatttgcttattcaactcttcaatccattttctctgcagttcttgtttcacagcactgaaagggtgctccagcagtactgtttccctagattggtcaagaatttgatgtttttcccatattattttatcactttcagattttttccaaggatcattccatttttcagaaacttctttttctttcttctttaaagcaacctgttcatctagctctttcctccactgggctttttttgcttccaacgaacttctatcacattccctttcccccagagtactgaatatatcagctggtttccattcattctctatggcaattttttgctcacactgtttagatgtctcctgatgttcatttaagacagatttattttcagctgggacagatgaaaccatttcagtttttttgaataatcccataatgttctcatcctttggctgattagaaatactgtttaaatatagactatattgactttttgcctcctttccattctcagtcagggaaagagatctatttccttggtttacagtcatcaaaatctgttgtagttggtcttgtgttagacacaccaaactgctcttcatgttttcagctgtgatgtgttttttgtgaggcttctgtttacctactagagatgtatttacggtgtttctagtcttctgcatattaggagttgcaggtgaaatctctttctggatatgaagacagtctttatctatacattgtttacataaatccttagtggatgaaaaagtcattccatttttttcaccttttgcctgtgatgtttctgaaccaactggcttcttttgcaaaagtttttcactcccaatacaagtatcttgtgttgattttagaatgtgcccagtttttgttcttaaaggacattttgcaatcttggccttatttcccatctatttattgagtgatatttcgggtactccagcaacttcttcaccttaattaaacctgcaagtaaagccatcaagggcttagagttgaaggataaagtggtacatcatccaaactgggttctatccacagacaagcaaagactttaagacacttcacagaaatttttgatttatgttcatatggagacaatattagcttggtttttccatccagtaattcagtttcaagctttaaaccatctcccaagttcatggcctgacctcgcactctctccacagaacgctcaagccccttgtgtacgtcggttgccgccgccgctcagcaagcgctacc

SEQ ID NO: 735938 - DNA, 9767 bp, Homo sapiens
cggctccgaggaccgggcagcgcatttggggtgcccgctacagggccccccaagaggctgccaggtcgggagcgcagcctgaggccacggggggaagggggtgggtgggctgagagcagctcggcggcgagactggcccgccgccccttccccccacacccgtcgaccttgtgggcagaagcttcccagagctccttaggccggcgcgatggcgactgctgtggagacggaggcctgtcagccgacggatgcgagttgggaaagtggcggcggcggagacgacgagatgaagcaggcgcttccggagcttgagtcctcccaacaaaatggcggcggcggcggcctcaacatcgctgagcccagcggcggcgctgggcgtgaggagaacgcgggggccgaggccgcccagagcctcagccacgagcagcctcaggactcctctgaggcgggcgcggccgccctgcccagaggccccgaagagcccgaaaggcctgttaggaggagttttcagatccccaggaagagcagagaaaagaaagcacttttccagccattaactccaggctctcgagaatttgaagatgttgtaaatattctccattcttcttaccttgaaccaacctcagtaacaaattttaactacagacgtgcttgcttggtacacaatgagcttttggaaaaggagtttacagaaaagcgaagagaactgaagtttgatggtcgtttagataaggaactttcagaatcctatgcatttctgatggttgatcgataccaggttcaaaccatatgtgaaaaaggattacatgtgggtcagtccaaaataacaattcttggcagtccttccatgggtgtctatctttctaggtatgctgatttattacaagcgaatcctttggacacgggggcaatgggtgatgttgttatttttaaaataatgaagggtaaaataaagagtatatatgaccccatgggtgtaaaaagtttggaatctatgttaaataagagtgctttggaccccacaccaaagcatgaatgtcacgtgtcaaagaatgccaatcgaattacatcacttttggcttacagagcctatgagcttactcagtattatttttatgagtatggctttgatgagctaaggcgaagaccaagacacgtttgtccatatgcagttgtgtcttttacttacaaagatgatatacaaactccgaagtttgtaccttcatcaagatctaacagctttaatacagatagaaacatagataaatataactataccttgtggaaaggacagcttttaaataaaggaaaacttttgtgttatatttctctgaggtcagccactcgtgcttttttgcctatcaaactacctgagaaattagatgttgaaacagttatgagtattgatcatctgaaacagaaaatccctccagcactgttttataaggaaacatacttaggtccaaatgaagttttgaagaatggaatgtattgcagcctttatgaagttgtggaaaagacaagaattggaagtaacatggagagtttactgcaaaaactagacagagaaaaacttgttcttgttaaacctttgggagaccgaggatacctttttcttctctccccttatcagatggttcctccatatgaatatcagactgccaagtctcgagtcctacatgctttgtttctatttcaagaacctagaagcatagttacttcacaaaaaggttcaaccaatgcagcaccacaggagaggcatgagagcatgccagatgtattaaaaatagctcagtttttacaattttctttgattcagtgtcgaaaggaattcaaaaatataagcgccataaattttcattctgttgttgaaaagtatgtaagtgaattttttaagcgaggttttggttcaggtaaacgagagtttattatgtttccatatgattcacgattagatgataaaaaattcttatactcagctcccagaaataaatcccatattgatacttgtttgcatgcctatatttttcggcctgaagtgtatcagttacctatttgtaaattaaaagaactatttgaagaaaatagaaaacttcagcagtttagtccactttcagattatgaaggtcaagaagaagaaatgaatggtacaaaaatgaaatttggaaaacgaaataactcaagaggtgaagccattatatctggaaagcaaagatcatctcattctttggattatgataaggatagagtcaaagaattgattaatttaattcagtgtaggaaaaagagtgtgggtggggactcagacacagaagatatgagaagcaaaactgtcttgaagaggaagcttgaggatctacctgaaaatatgagaaagctcgccaaaaccagtaatttatctgaaaattgccatctgtatgaagagtctccacagcctattggctcacttggacatgatgctgacttgaggcggcagcagcaggatacctgtaactccggcattgctgacatccataggctgtttaattggttatcagaaacactagcaaatgcgcgccattctgatgcatctctgacagacacagtcaacaaagccttaggattgagcactgatgatgcctatgaagagctgaggcaaaaacatgagtatgagttgaactctaccccagataagaaagactatgagcagcctacttgtgcaaaagttgaaaatgcacagtttaagggtactcagagcttattactagaagttgatgcaacatctaagtattctgttgctatttctaccagcgaagtgggcactgaccataagctacatttgaaagaagatccaaatttaattagcgtgaataattttgaagattgcagtttgtgtcccagtgttcccattgaacatggatttcgtagacaacagtctaagtcaaataatgttgaagagactgaaatacattggaaactgattccaattacaggagggaatgcaagaagcccagaagaccagctggggaaacatggtgagaaacaaacaccagacacactaaagggcaccactgaggatgacgtgttgacaggtcaggtggaggagcagtgtgtgccagcagcagaggcagagccgcctgcagtgagcgaaaccacagagaggacagtgttaggagagtacaatctcttttctaggaagatagaagagattttgaagcaaaagaatgtttcatatgtcagtagagtttccacacctatcttttcaacacaagagaagatgaaacggctttccgagttcatatattctaagacttccaaagctggtgtgcaggagtttgtagatggtttgcatgagaagctaaatactattattattaaagcatcagccaagggtgggaatttgccaccagtcagtcctaacgattctggtgctaagatagcatcgaatcctctggaaaggcatgtcataccagtttcctcaagtgacttcaacaataaacatctccttgagccactgtgtagtgatcctttgaaagataccaactctgatgagcagcattccacttcggctttaactgaagtagaaatgaaccagcctcaacatgccacagagttaatggtgacttctgatcatattgtacctggtgatatggcccgggaaccagtagaagaaacaacaaaatcccccagtgatgtaaacatttctgctcaaccagctctttcaaattttataagccagttagaacctgaagtatttaatagtttggttaaaatcatgaaagacgtccagaaaaatactgtgaaattttatattcatgaagaagaagagagtgtgctctgtaaagaaataaaggaatatcttatcaaattaggcaatacagaatgtcatcctgaacagtttttggaaagaagatcaaaattagataaactattgattattattcaaaatgaagacattgcaggtttcattcacaagatacctggcttggtgactttaaagaagctcccctgtgttagttttgctggtgttgatagcctggatgatgttaaaaatcatacatacaatgaattatttgtatctggaggttttatcgtatctgatgaatcaattctaaacccagaggttgtcacagttgagaaccttaaaaattttttgacattccttgaggaacttagtactccagaaggaaaatggcaatggaaagtccactgtaaatttcagaagaaactaaaggaactaggcagattgaatgctaaagctctaagtctgttgacgcttctgaatgtctatcagaagaaacatctggttgaaattttgtcataccacaattgtgattcacaaactcgaaatgctccagaattggattgccttatcagacttcaggctcagaacatacagcaacgacacatagtctttttaacagagaagaacatcaagatgctttccagttatacagataatggaatagtggttgcaactgctgaagacttcatgcaaaactttaaaaatcttgtgggctatcacaattcaatcacagaagaaaaccttccacagcttggtgctaatgagaatcttgagtcgcagtcagctcttttagaaaacgatgaaaaggatgaagaggatatgtctctggattcaggggatgaaatctcacatatagaagtatgcagcaattttcattcagaaatatgggagaaagagaccaaaggatcacgtggaacagatcaaaaaaagaatactcaaattgagttgcaatcgtctcctgatgtgcaaaacagtttattagaagataagacttaccttgattctgaagagagaacttctattgatatagtatgctctgaaggagagaacagcaattcaacagaacaagattcatatagtaactttcaggtttatcatagtcaattaaatatgtcccatcagtttagtcattttaatgttctcactcatcagacatttttggggacaccatatgccctttcatcaagtcagtctcaagaaaatgagaattacttcttatctgcttatactgaaagcttggatagagataaatctccacctcccttaagttgggggaaaagtgattcttccaggccatattcacaagagaaataactgtagtaactttttttttaagagattgttgtggactttgtttattaacaatttatatttcattctctaaacaaaaggttcttgttctttctcaaatgttttttcttttatttaaatcatgatggcctgtaacagttgaagcatctaaaaattgaaataaatatatatttttaacatatattgtacttgaattatctcatgttggcacttctaagttttactttttgtatgttacctgtacttaggcttcaaattgaagcctgttttatgtgtaaaatcagatgcttgcaggaggacggtaaacagcaaaggctttacttctttttctctaatgtcacctgatataaagtacttttgttgaagtgaattattttgatgtaggcttttgtatactgtgtttacacaggtataagtcagtaatagcagtgttaatatttacaggattttggctcgatacctcaagatttatctaacagtgcagtttcatttagataataaactatgtacataggacacattttttatctctaggcttagtcatgtaaaaactgcctattgctaaaattctggtaactttttgagagtattggataattttcagtacctgcgcaatccttgatttaatgaaattaaattttttatttcaaaagataggcttctgtttatcaaaggcgttgaacaatttgatttttaaattagttttagcaaaatggaagtataatgggaatatatttttgaggtggtcttagtagtaattaccatttgttgaacacattaatgctatactagacagatacagtggagatagctttcaaacccgtatctattcctaactactgcctctaatactaattactaacttgttactaatgctaacttttaaaaatgtttttgaaaattgcaatttctacaaataaatgtcatagtgcaaataaatgtcaggatttagagaaggagcctaaactgaatttgtgttatttcagtaaaagttatggagttatgggtctagacgtgttaataagttagacagaactttggcactttagaacaaatgcatgagtggtatttcagttcctaagttacataaaaagtgtgaaagaacactgtgaggtcccagcaacgccagactatattaaggtaagtagaaagtgtttttatagggcttcaatacccaggtggtgacagagcagaagaaccggtttttttttttttttttttactactaagcttttacaaaagaagtatctgttttattgtatagaacaagtacagcattttactacatagtatacaagtttttaatgagcatttaaaaaaataagtaaatctaggctatttgaaaaatacagttgagccagtgagcacattttataatttggaagacacaaatcaaatgtgaaggatttgattttctacatttaaaatgaagaaccaaaactctcttcttgattttcagctaaaggcaggagactactttccaactccttttgcttctggagaaggccctgtctcagttctgaaagtcccttaaggattgcttgctgtcgatccctatttttcaccatgttaggattaagaagtggatccctgacacagtcagaatcaaatagctgtcgtttttggccacagtctaaagccagatgaaagtaacaagtcagtcaattacattagtaaaatgacatagccctgtgctatataatattgtcaggagtcattataataagtatgtatcctaggaaagtactaagaaaaatttaagacatattcaagaaactttatagaactaagtgcaggaattactaatttggaatttaaagttgttgacggggtttacatgggtcttcaatttttacagttagaatgcttaatatttacttaccttgtgaattttggtactgagggtcctgggttgaaggcccagacaatggtgcatcgggatcaaggtaatagatctcatttgttcgaacatacggaataaaatgggatgattcagaaatcccagatgataattctgtttgattacttcctgagatcaaattctctctctcatagctactgttttttagtggtaaatgtaatgtattttgagtttgttgggttctgtttttcactactggaactggtgatgatggagacctttccttgctgaatgaatgaatattcagaggctcttcttcctttttgactagatgccacctcaactttgactccgtttcttgatgagatgaatgaaaaatttctggtgaaatgcctctgttttgagagaggtgcccaggattatttttttctaccaaatgaagcaattccatctgcctccttacttttttttcttctctctgcttttgaagctgtttagggtacttttctgatgctggaatataccttttaggtggcttatttatattccaatcaggccttttaggatatttcttcatgtgttttgtttgtttctctattcttgtgaactgattacactggtcattacaccgattgttttctttttctaagctggctcctttatcctgagttagttcttgcttgtttttcttggtgctaaactgtccaataagttctgccgaaatctcaggagatgaacaatttgtgatgtccctctccattaatgatccacaatgtgattctgcattggtgaatattcctatatttaagtcatctgtttgcacaccagtatccttcttaggagaagtcgtagaattcatatatgtattcattttaccactgatttcatcagaatcatgtcttgaatttgaaatgttagatgcattatattccatttgtattgtatcaacaccaagatttttaatcagtctagaagtgtcatgtcccttttgcgccaattctcggattctttgttcttgttttagtctctgtgccagttcctgtgctcgctgcattgtctggaatagctcatttgtcttgagagtcatgatttcttccttttgtttttgcttaagtatgtcttcttcatactgtttctgcatctcttcacgttcctgtgctaagcgaagctcctcttcttgttcttccttctttctttgctcttcctccagttgtttcttcctgcgcttctcttctacctgggcagtgatggctttctgatgctctaattgtttttgtcgtcgtctgtctcgttcctcaatctgagctgggtccaagagagcagtcatagaacggagaaagtttgttttcttactgtttgccataaccacatccttaataggttttgctatatgctcctcctctgaaggttcaacctggcttccggttgtaggtgtacaaacactgctgacatcagccagctcctgagtgtcaggagagacacagaagtactcaggttgtttgtgtgttgaccgagagaacagctgagattgagaaccaggataactctttaatgaatcaaagtgcattgcccatctgtcatgttcctcaccctttgaatatataattttttcctctatttttctttgacggtcatcttctatttgcttattcaactcttcaatccattttctctgcagttcttgtttcacagcactgaaagggtgctccagcagtactgtttccctagattggtcaagaatttgatgtttttcccatattattttatcactttcagattttttccaaggatcattccatttttcagaaacttctttttctttcttctttaaagcaacctgttcatctagctctttcctccactgggctttttttgcttccaacgaacttctatcacattccctttcccccagagtactgaatatatcagctggtttccattcattctctatggcaattttttgctcacactgtttagatgtctcctgatgttcatttaagacagatttattttcagctgggacagatgaaaccatttcagtttttttgaataatcccataatgttctcatcctttggctgattagaaatactgtttaaatatagactatattgactttttgcctcctttccattctcagtcagggaaagagatctatttccttggtttacagtcatcaaaatctgttgtagttggtcttgtgttagacacaccaaactgctcttcatgttttcagctgtgatgtgttttttgtgaggcttctgtttacctactagagatgtatttacggtgtttctagtcttctgcatattaggagttgcaggtgaaatctctttcttttgcctgtgatgtttctgaaccaactggcttcttttgcaaaagtttttcactcccaatacaagtatcttgtgttgattttagaatgtgcccagtttttgttcttaaaggacattttgcaatcttggccttatttcccatctatttattgagtgatatttcgggtactccagcaacttcttcaccttaattaaacctgcaagtaaagccatcaagggcttagagttgaaggataaagtggtacatcatccaaactgggttctatccacagacaagcaaagactttaagacacttcacagaaatttttgatttatgttcatatggagacaatattagcttggtttttccatccagtaattcagtttcaagctttaaaccatctcccaagttcatggcctgacctcgcactctctccacagaacgctcaagccccttgtgtacgtcggttgccgccgccgctcagcaagcgctacc

SEQ ID NO: 735939 - DNA, 9651 bp, Homo sapiens
cggctccgaggaccgggcagcgcatttggggtgcccgctacagggccccccaagaggctgccaggtcgggagcgcagcctgaggccacggggggaagggggtgggtgggctgagagcagctcggcggcgagactggcccgccgccccttccccccacacccgtcgaccttgtgggcagaagcttcccagagctccttaggccggcgcgatggcgactgctgtggagacggaggcctgtcagccgacggatgcgagttgggaaagtggcggcggcggagacgacgagatgaagcaggcgcttccggagcttgagtcctcccaacaaaatggcggcggcggcggcctcaacatcgctgagcccagcggcggcgctgggcgtgaggagaacgcgggggccgaggccgcccagagcctcagccacgagcagcctcaggactcctctgaggcgggcgcggccgccctgcccagaggccccgaagagcccgaaaggcctgttaggaggagttttcagatccccaggaagagcagagaaaagaaagcacttttccagccattaactccaggctctcgagaatttgaagatgttgtaaatattctccattcttcttaccttgaaccaacctcagtaacaaattttaactacagacgtgcttgcttggtacacaatgagcttttggaaaaggagtttacagaaaagcgaagagaactgaagtttgatggtcgtttagataaggaactttcagaatcctatgcatttctgatggttgatcgataccaggttcaaaccatatgtgaaaaaggattacatgtgggtcagtccaaaataacaattcttggcagtccttccatgggtgtctatctttctaggtatgctgatttattacaagcgaatcctttggacacgggggcaatgggtgatgttgttatttttaaaataatgaagggtaaaataaagagtatatatgaccccatgggtgtaaaaagtttggaatctatgttaaataagagtgctttggaccccacaccaaagcatgaatgtcacgtgtcaaagaatgccaatcgaattacatcacttttggcttacagagcctatgagcttactcagtattatttttatgagtatggctttgatgagctaaggcgaagaccaagacacgtttgtccatatgcagttgtgtcttttacttacaaagatgatatacaaactccgaagtttgtaccttcatcaagatctaacagctttaatacagatagaaacatagataaatataactataccttgtggaaaggacagcttttaaataaaggaaaacttttgtgttatatttctctgaggtcagccactcgtgcttttttgcctatcaaactacctgagaaattagatgttgaaacagttatgagtattgatcatctgaaacagaaaatccctccagcactgttttataaggaaacatacttaggtccaaatgaagttttgaagaatggaatgtattgcagcctttatgaagttgtggaaaagacaagaattggaagtaacatggagagtttactgcaaaaactagacagagaaaaacttgttcttgttaaacctttgggagaccgaggatacctttttcttctctccccttatcagatggttcctccatatgaatatcagactgccaagtctcgagtcctacatgctttgtttctatttcaagaacctagaagcatagttacttcacaaaaaggttcaaccaatgcagcaccacaggagaggcatgagagcatgccagatgtattaaaaatagctcagtttttacaattttctttgattcagtgtcgaaaggaattcaaaaatataagcgccataaattttcattctgttgttgaaaagtatgtaagtgaattttttaagcgaggttttggttcaggtaaacgagagtttattatgtttccatatgattcacgattagatgataaaaaattcttatactcagctcccagaaataaatcccatattgatacttgtttgcatgcctatatttttcggcctgaagtgtatcagttacctatttgtaaattaaaagaactatttgaagaaaatagaaaacttcagcagtttagtccactttcagattatgaaggtcaagaagaagaaatgaatggtacaaaaatgaaatttggaaaacgaaataactcaagaggtgaagccattatatctggaaagcaaagatcatctcattctttggattatgataaggatagagtcaaagaattgattaatttaattcagtgtaggaaaaagagtgtgggtggggactcagacacagaagatatgagaagcaaaactgtcttgaagaggaagcttgaggatctacctgaaaatatgagaaagctcgccaaaaccagtaatttatctgaaaattgccatctgtatgaagagtctccacagcctattggctcacttggacatgatgctgacttgaggcggcagcagcaggatacctgtaactccggcattgctgacatccataggctgtttaattggttatcagaaacactagcaaatgcgcgccattctgatgcatctctgacagacacagtcaacaaagccttaggattgagcactgatgatgcctatgaagagctgaggcaaaaacatgagtatgagttgaactctaccccagataagaaagactatgagcagcctacttgtgcaaaagttgaaaatgcacagtttaagggtactcagagcttattactagaagttgatgcaacatctaagtattctgttgctatttctaccagcgaagtgggcactgaccataagctacatttgaaagaagatccaaatttaattagcgtgaataattttgaagattgcagtttgtgtcccagtgttcccattgaacatggatttcgtagacaacagtctaagtcaaataatgttgaagagactgaaatacattggaaactgattccaattacaggagggaatgcaagaagcccagaagaccagctggggaaacatggtgagaaacaaacaccagacacactaaagggcaccactgaggatgacgtgttgacaggtcaggtggaggagcagtgtgtgccagcagcagaggcagagccgcctgcagtgagcgaaaccacagagaggacagtgttaggagagtacaatctcttttctaggaagatagaagagattttgaagcaaaagaatgtttcatatgtcagtagagtttccacacctatcttttcaacacaagagaagatgaaacggctttccgagttcatatattctaagacttccaaagctggtgtgcaggagtttgtagatggtttgcatgagaagctaaatactattattattaaagcatcagccaagggtgggaatttgccaccagtcagtcctaacgattctggtgctaagatagcatcgaatcctctggaaaggcatgtcataccagtttcctcaagtgacttcaacaataaacatctccttgagccactgtgtagtgatcctttgaaagataccaactctgatgagcagcattccacttcggctttaactgaagtagaaatgaaccagcctcaacatgccacagagttaatggtgacttctgatcatattgtacctggtgatatggcccgggaaccagtagaagaaacaacaaaatcccccagtgatgtaaacatttctgctcaaccagctctttcaaattttataagccagttagaacctgaagtatttaatagtttggttaaaatcatgaaagacgtccagaaaaatactgtgaaattttatattcatgaagaagaagagagtgtgctctgtaaagaaataaaggaatatcttatcaaattaggcaatacagaatgtcatcctgaacagtttttggaaagaagatcaaaattagataaactattgattattattcaaaatgaagacattgcaggtttcattcacaagatacctggcttggtgactttaaagaagctcccctgtgttagttttgctggtgttgatagcctggatgatgttaaaaatcatacatacaatgaattatttgtatctggaggttttatcgtatctgatgaatcaattctaaacccagaggttgtcacagttgagaaccttaaaaattttttgacattccttgaggaacttagtactccagaaggaaaatggcaatggaaagtccactgtaaatttcagaagaaactaaaggaactaggcagattgaatgctaaagctctaagtctgttgacgcttctgaatgtctatcagaagaaacatctggttgaaattttgtcataccacaattgtgattcacaaactcgaaatgctccagaattggattgccttatcagacttcaggctcagaacatacagcaacgacacatagtctttttaacagagaagaacatcaagatgctttccagttatacagataatggaatagtggttgcaactgctgaagacttcatgcaaaactttaaaaatcttgtgggctatcacaattcaatcacagaagaaaaccttccacagcttggtgctaatgagaatcttgagtcgcagtcagctcttttagaaaacgatgaaaaggatgaagaggatatgtctctggattcaggggatgaaatctcacatatagaagtatgcagcaattttcattcagaaatatgggagaaagagaccaaaggatcacgtggaacagatcaaaaaaagaatactcaaattgagttgcaatcgtctcctgatgtgcaaaacagtttattagaagataagacttaccttgattctgaagagagaacttctattgatatagtatgctctgaaggagagaacagcaattcaacagaacaagattcatatagtaactttcaggtttatcatagtcaattaaatatgtcccatcagtttagtcattttaatgttctcactcatcagacatttttggggacaccatatgccctttcatcaagtcagtctcaagaaaatgagaattacttcttatctgcttatactgaaagcttggatagagataaatctccacctcccttaagttgggggaaaagtgattcttccaggccatattcacaagagaaataactgtagtaactttttttttaagagattgttgtggactttgtttattaacaatttatatttcattctctaaacaaaaggttcttgttctttctcaaatgttttttcttttatttaaatcatgatggcctgtaacagttgaagcatctaaaaattgaaataaatatatatttttaacatatattgtacttgaattatctcatgttggcacttctaagttttactttttgtatgttacctgtacttaggcttcaaattgaagcctgttttatgtgtaaaatcagatgcttgcaggaggacggtaaacagcaaaggctttacttctttttctctaatgtcacctgatataaagtacttttgttgaagtgaattattttgatgtaggcttttgtatactgtgtttacacaggtataagtcagtaatagcagtgttaatatttacaggattttggctcgatacctcaagatttatctaacagtgcagtttcatttagataataaactatgtacataggacacattttttatctctaggcttagtcatgtaaaaactgcctattgctaaaattctggtaactttttgagagtattggataattttcagtacctgcgcaatccttgatttaatgaaattaaattttttatttcaaaagataggcttctgtttatcaaaggcgttgaacaatttgatttttaaattagttttagcaaaatggaagtataatgggaatatatttttgaggtggtcttagtagtaattaccatttgttgaacacattaatgctatactagacagatacagtggagatagctttcaaacccgtatctattcctaactactgcctctaatactaattactaacttgttactaatgctaacttttaaaaatgtttttgaaaattgcaatttctacaaataaatgtcatagtgcaaataaatgtcaggatttagagaaggagcctaaactgaatttgtgttatttcagtaaaagttatggagttatgggtctagacgtgttaataagttagacagaactttggcactttagaacaaatgcatgagtggtatttcagttcctaagttacataaaaagtgtgaaagaacactgtgaggtcccagcaacgccagactatattaaggtaagtagaaagtgtttttatagggcttcaatacccaggtggtgacagagcagaagaaccggtttttttttttttttttttactactaagcttttacaaaagaagtatctgttttattgtatagaacaagtacagcattttactacatagtatacaagtttttaatgagcatttaaaaaaataagtaaatctaggctatttgaaaaatacagttgagccagtgagcacattttataatttggaagacacaaatcaaatgtgaaggatttgattttctacatttaaaatgaagaaccaaaactctcttcttgattttcagctaaaggcaggagactactttccaactccttttgcttctggagaaggccctgtctcagttctgaaagtcccttaaggattgcttgctgtcgatccctatttttcaccatgttaggattaagaagtggatccctgacacagtcagaatcaaatagctgtcgtttttggccacagtctaaagccagatgaaagtaacaagtcagtcaattacattagtaaaatgacatagccctgtgctatataatattgtcaggagtcattataataagtatgtatcctaggaaagtactaagaaaaatttaagacatattcaagaaactttatagaactaagtgcaggaattactaatttggaatttaaagttgttgacggggtttacatgggtcttcaatttttacagttagaatgcttaatatttacttaccttgtgaattttggtactgagggtcctgggttgaaggcccagacaatggtgcatcgggatcaaggtaatagatctcatttgttcgaacatacggaataaaatgggatgattcagaaatcccagatgataattctgtttgattacttcctgagatcaaattctctctctcatagctactgttttttagtggtaaatgtaatgtattttgagtttgttgggttctgtttttcactactggaactggtgatgatggagacctttccttgctgaatgaatgaatattcagaggctcttcttcctttttgactagatgccacctcaactttgactccgtttcttgatgagatgaatgaaaaatttctggtgaaatgcctctgttttgagagaggtgcccaggattatttttttctaccaaatgaagcaattccatctgcctccttacttttttttcttctctctgcttttgaagctgtttagggtacttttctgatgctggaatataccttttaggtggcttatttatattccaatcaggccttttaggatatttcttcatgtgttttgtttgtttctctattcttgtgaactgattacactggtcattacaccgattgttttctttttctaagctggctcctttatcctgagttagttcttgcttgtttttcttggtgctaaactgtccaataagttctgccgaaatctcaggagatgaacaatttgtgatgtccctctccattaatgatccacaatgtgattctgcattggtgaatattcctatatttaagtcatctgtttgcacaccagtatccttcttaggagaagtcgtagaattcatatatgtattcattttaccactgatttcatcagaatcatgtcttgaatttgaaatgttagatgcattatattccatttgtattgtatcaacaccaagatttttaatcagtctagaagtgtcatgtcccttttgcgccaattctcggattctttgttcttgttttagtctctgtgccagttcctgtgctcgctgcattgtctggaatagctcatttgtcttgagagtcatgatttcttccttttgtttttgcttaagtatgtcttcttcatactgtttctgcatctcttcacgttcctgtgctaagcgaagctcctcttcttgttcttccttctttctttgctcttcctccagttgtttcttcctgcgcttctcttctacctgggcagtgatggctttctgatgctctaattgtttttgtcgtcgtctgtctcgttcctcaatctgagctgggtccaagagagcagtcatagaacggagaaagtttgttttcttactgtttgccataaccacatccttaataggttttgctatatgctcctcctctgaaggttcaacctggcttccggttgtaggtgtacaaacactgctgacatcagccagctcctgagtgtcaggagagacacagaagtactcaggttgtttgtgtgttgaccgagagaacagctgagattgagaaccaggataactctttaatgaatcaaagtgcattgcccatctgtcatgttcctcaccctttgaatatataattttttcctctatttttctttgacggtcatcttctatttgcttattcaactcttcaatccattttctctgcagttcttgtttcacagcactgaaagggtgctccagcagtactgtttccctagattggtcaagaatttgatgtttttcccatattattttatcactttcagattttttccaaggatcattccatttttcagaaacttctttttctttcttctttaaagcaacctgttcatctagctctttcctccactgggctttttttgcttccaacgaacttctatcacattccctttcccccagagtactgaatatatcagctggtttccattcattctctactgtttagatgtctcctgatgttcatttaagacagatttattttcagctgggacagatgaaaccatttcagtttttttgaataatcccataatgttctcatcctttggctgattagaaatactgtttaaatatagactatattgactttttgcctcctttccattctcagtcagggaaagagatctatttccttggtttacagtcatcaaaatctgttgtagttggtcttgtgttagacacaccaaactgctcttcatgttttcagctgtgatgtgttttttgtgaggcttctgtttacctactagagatgtatttacggtgtttctagtcttctgcatattaggagttgcaggtgaaatctctttctggatatgaagacagtctttatctatacattgtttacataaatccttagtggatgaaaaagtcattccatttttttcaccttttgcctgtgatgtttctgaaccaactggcttcttttgcaaaagtttttcactcccaatacaagtatcttgtgttgattttagaatgtgcccagtttttgttcttaaaggacattttgcaatcttggccttatttcccatcatatggagacaatattagcttggtttttccatccagtaattcagtttcaagctttaaaccatctcccaagttcatggcctgacctcgcactctctccacagaacgctcaagccccttgtgtacgtcggttgccgccgccgctcagcaagcgctacc

SEQ ID NO: 735940 - DNA, 9788 bp, Homo sapiens
cggctccgaggaccgggcagcgcatttggggtgcccgctacagggccccccaagaggctgccaggtcgggagcgcagcctgaggccacggggggaagggggtgggtgggctgagagcagctcggcggcgagactggcccgccgccccttccccccacacccgtcgaccttgtgggcagaagcttcccagagctccttaggccggcgcgatggcgactgctgtggagacggaggcctgtcagccgacggatgcgagttgggaaagtggcggcggcggagacgacgagatgaagcaggcgcttccggagcttgagtcctcccaacaaaatggcggcggcggcggcctcaacatcgctgagcccagcggcggcgctgggcgtgaggagaacgcgggggccgaggccgcccagagcctcagccacgagcagcctcaggactcctctgaggcgggcgcggccgccctgcccagaggccccgaagagcccgaaaggcctgttaggaggagttttcagatccccaggaagagcagagaaaagaaagcacttttccagccattaactccaggctctcgagaatttgaagatgttgtaaatattctccattcttcttaccttgaaccaacctcagtaacaaattttaactacagacgtgcttgcttggtacacaatgagcttttggaaaaggagtttacagaaaagcgaagagaactgaagtttgatggtcgtttagataaggaactttcagaatcctatgcatttctgatggttgatcgataccaggttcaaaccatatgtgaaaaaggattacatgtgggtcagtccaaaataacaattcttggcagtccttccatgggtgtctatctttctaggtatgctgatttattacaagcgaatcctttggacacgggggcaatgggtgatgttgttatttttaaaataatgaagggtaaaataaagagtatatatgaccccatgggtgtaaaaagtttggaatctatgttaaataagagtgctttggaccccacaccaaagcatgaatgtcacgtgtcaaagaatgccaatcgaattacatcacttttggcttacagagcctatgagcttactcagtattatttttatgagtatggctttgatgagctaaggcgaagaccaagacacgtttgtccatatgcagttgtgtcttttacttacaaagatgatatacaaactccgaagtttgtaccttcatcaagatctaacagctttaatacagatagaaacatagataaatataactataccttgtggaaaggacagcttttaaataaaggaaaacttttgtgttatatttctctgaggtcagccactcgtgcttttttgcctatcaaactacctgagaaattagatgttgaaacagttatgagtattgatcatctgaaacagaaaatccctccagcactgttttataaggaaacatacttaggtccaaatgaagttttgaagaatggaatgtattgcagcctttatgaagttgtggaaaagacaagaattggaagtaacatggagagtttactgcaaaaactagacagagaaaaacttgttcttgttaaacctttgggagaccgaggatacctttttcttctctccccttatcagatggttcctccatatgaatatcagactgccaagtctcgagtcctacatgctttgtttctatttcaagaacctagaagcatagttacttcacaaaaaggttcaaccaatgcagcaccacaggagaggcatgagagcatgccagatgtattaaaaatagctcagtttttacaattttctttgattcagtgtcgaaaggaattcaaaaatataagcgccataaattttcattctgttgttgaaaagtatgtaagtgaattttttaagcgaggttttggttcaggtaaacgagagtttattatgtttccatatgattcacgattagatgataaaaaattcttatactcagctcccagaaataaatcccatattgatacttgtttgcatgcctatatttttcggcctgaagtgtatcagttacctatttgtaaattaaaagaactatttgaagaaaatagaaaacttcagcagtttagtccactttcagattatgaaggtcaagaagaagaaatgaatggtacaaaaatgaaatttggaaaacgaaataactcaagaggtgaagccattatatctggaaagcaaagatcatctcattctttggattatgataaggatagagtcaaagaattgattaatttaattcagtgtaggaaaaagagtgtgggtggggactcagacacagaagatatgagaagcaaaactgtcttgaagaggaagcttgaggatctacctgaaaatatgagaaagctcgccaaaaccagtaatttatctgaaaattgccatctgtatgaagagtctccacagcctattggctcacttggacatgatgctgacttgaggcggcagcagcaggatacctgtaactccggcattgctgacatccataggctgtttaattggttatcagaaacactagcaaatgcgcgccattctgatgcatctctgacagacacagtcaacaaagccttaggattgagcactgatgatgcctatgaagagctgaggcaaaaacatgagtatgagttgaactctaccccagataagaaagactatgagcagcctacttgtgcaaaagttgaaaatgcacagtttaagggtactcagagcttattactagaagttgatgcaacatctaagtattctgttgctatttctaccagcgaagtgggcactgaccataagctacatttgaaagaagatccaaatttaattagcgtgaataattttgaagattgcagtttgtgtcccagtgttcccattgaacatggatttcgtagacaacagtctaagtcaaataatgttgaagagactgaaatacattggaaactgattccaattacaggagggaatgcaagaagcccagaagaccagctggggaaacatggtgagaaacaaacaccagacacactaaagggcaccactgaggatgacgtgttgacaggtcaggtggaggagcagtgtgtgccagcagcagaggcagagccgcctgcagtgagcgaaaccacagagaggacagtgttaggagagtacaatctcttttctaggaagatagaagagattttgaagcaaaagaatgtttcatatgtcagtagagtttccacacctatcttttcaacacaagagaagatgaaacggctttccgagttcatatattctaagacttccaaagctggtgtgcaggagtttgtagatggtttgcatgagaagctaaatactattattattaaagcatcagccaagggtgggaatttgccaccagtcagtcctaacgattctggtgctaagatagcatcgaatcctctggaaaggcatgtcataccagtttcctcaagtgacttcaacaataaacatctccttgagccactgtgtagtgatcctttgaaagataccaactctgatgagcagcattccacttcggctttaactgaagtagaaatgaaccagcctcaacatgccacagagttaatggtgacttctgatcatattgtacctggtgatatggcccgggaaccagtagaagaaacaacaaaatcccccagtgatgtaaacatttctgctcaaccagctctttcaaattttataagccagttagaacctgaagtatttaatagtttggttaaaatcatgaaagacgtccagaaaaatactgtgaaattttatattcatgaagaagaagagagtgtgctctgtaaagaaataaaggaatatcttatcaaattaggcaatacagaatgtcatcctgaacagtttttggaaagaagatcaaaattagataaactattgattattattcaaaatgaagacattgcaggtttcattcacaagatacctggcttggtgactttaaagaagctcccctgtgttagttttgctggtgttgatagcctggatgatgttaaaaatcatacatacaatgaattatttgtatctggaggttttatcgtatctgatgaatcaattctaaacccagaggttgtcacagttgagaaccttaaaaattttttgacattccttgaggaacttagtactccagaaggaaaatggcaatggaaagtccactgtaaatttcagaagaaactaaaggaactaggcagattgaatgctaaagctctaagtctgttgacgcttctgaatgtctatcagaagaaacatctggttgaaattttgtcataccacaattgtgattcacaaactcgaaatgctccagaattggattgccttatcagacttcaggctcagaacatacagcaacgacacatagtctttttaacagagaagaacatcaagatgctttccagttatacagataatggaatagtggttgcaactgctgaagacttcatgcaaaactttaaaaatcttgtgggctatcacaattcaatcacagaagaaaaccttccacagcttggtgctaatgagaatcttgagtcgcagtcagctcttttagaaaacgatgaaaaggatgaagaggatatgtctctggattcaggggatgaaatctcacatatagaagtatgcagcaattttcattcagaaatatgggagaaagagaccaaaggatcacgtggaacagatcaaaaaaagaatactcaaattgagttgcaatcgtctcctgatgtgcaaaacagtttattagaagataagacttaccttgattctgaagagagaacttctattgatatagtatgctctgaaggagagaacagcaattcaacagaacaagattcatatagtaactttcaggtttatcatagtcaattaaatatgtcccatcagtttagtcattttaatgttctcactcatcagacatttttggggacaccatatgccctttcatcaagtcagtctcaagaaaatgagaattacttcttatctgcttatactgaaagcttggatagagataaatctccacctcccttaagttgggggaaaagtgattcttccaggccatattcacaagagaaataactgtagtaactttttttttaagagattgttgtggactttgtttattaacaatttatatttcattctctaaacaaaaggttcttgttctttctcaaatgttttttcttttatttaaatcatgatggcctgtaacagttgaagcatctaaaaattgaaataaatatatatttttaacatatattgtacttgaattatctcatgttggcacttctaagttttactttttgtatgttacctgtacttaggcttcaaattgaagcctgttttatgtgtaaaatcagatgcttgcaggaggacggtaaacagcaaaggctttacttctttttctctaatgtcacctgatataaagtacttttgttgaagtgaattattttgatgtaggcttttgtatactgtgtttacacaggtataagtcagtaatagcagtgttaatatttacaggattttggctcgatacctcaagatttatctaacagtgcagtttcatttagataataaactatgtacataggacacattttttatctctaggcttagtcatgtaaaaactgcctattgctaaaattctggtaactttttgagagtattggataattttcagtacctgcgcaatccttgatttaatgaaattaaattttttatttcaaaagataggcttctgtttatcaaaggcgttgaacaatttgatttttaaattagttttagcaaaatggaagtataatgggaatatatttttgaggtggtcttagtagtaattaccatttgttgaacacattaatgctatactagacagatacagtggagatagctttcaaacccgtatctattcctaactactgcctctaatactaattactaacttgttactaatgctaacttttaaaaatgtttttgaaaattgcaatttctacaaataaatgtcatagtgcaaataaatgtcaggatttagagaaggagcctaaactgaatttgtgttatttcagtaaaagttatggagttatgggtctagacgtgttaataagttagacagaactttggcactttagaacaaatgcatgagtggtatttcagttcctaagttacataaaaagtgtgaaagaacactgtgaggtcccagcaacgccagactatattaaggtaagtagaaagtgtttttatagggcttcaatacccaggtggtgacagagcagaagaaccggtttttttttttttttttttactactaagcttttacaaaagaagtatctgttttattgtatagaacaagtacagcattttactacatagtatacaagtttttaatgagcatttaaaaaaataagtaaatctaggctatttgaaaaatacagttgagccagtgagcacattttataatttggaagacacaaatcaaatgtgaaggatttgattttctacatttaaaatgaagaaccaaaactctcttcttgattttcagctaaaggcaggagactactttccaactccttttgcttctggagaaggccctgtctcagttctgaaagtcccttaaggattgcttgctgtcgatccctatttttcaccatgttaggattaagaagtggatccctgacacagtcagaatcaaatagctgtcgtttttggccacagtctaaagccagatgaaagtaacaagtcagtcaattacattagtaaaatgacatagccctgtgctatataatattgtcaggagtcattataataagtatgtatcctaggaaagtactaagaaaaatttaagacatattcaagaaactttatagaactaagtgcaggaattactaatttggaatttaaagttgttgacggggtttacatgggtcttcaatttttacagttagaatgcttaatatttacttaccttgtgaattttggtactgagggtcctgggttgaaggcccagacaatggtgcatcgggatcaaggtaatagatctcatttgttcgaacatacggaataaaatgggatgattcagaaatcccagatgataattctgtttgattacttcctgagatcaaattctctctctcatagctactgttttttagtggtaaatgtaatgtattttgagtttgttgggttctgtttttcactactggaactggtgatgatggagacctttccttgctgaatgaatgaatattcagaggctcttcttcctttttgactagatgccacctcaactttgactccgtttcttgatgagatgaatgaaaaatttctggtgaaatgcctctgttttgagagaggtgcccaggattatttttttctaccaaatgaagcaattccatctgcctccttacttttttttcttctctctgcttttgaagctgtttagggtacttttctgatgctggaatataccttttaggtggcttatttatattccaatcaggccttttaggatatttcttcatgtgttttgtttgtttctctattcttgtgaactgattacactggtcattacaccgattgttttctttttctaagctggctcctttatcctgagttagttcttgcttgtttttcttggtgctaaactgtccaataagttctgccgaaatctcaggagatgaacaatttgtgatgtccctctccattaatgatccacaatgtgattctgcattggtgaatattcctatatttaagtcatctgtttgcacaccagtatccttcttaggagaagtcgtagaattcatatatgtattcattttaccactgatttcatcagaatcatgtcttgaatttgaaatgttagatgcattatattccatttgtattgtatcaacaccaagatttttaatcagtctagaagtgtcatgtcccttttgcgccaattctcggattctttgttcttgttttagtctctgtgccagttcctgtgctcgctgcattgtctggaatagctcatttgtcttgagagtcatgatttcttccttttgtttttgcttaagtatgtcttcttcatactgtttctgcatctcttcacgttcctgtgctaagcgaagctcctcttcttgttcttccttctttctttgctcttcctccagttgtttcttcctgcgcttctcttctacctgggcagtgatggctttctgatgctctaattgtttttgtcgtcgtctgtctcgttcctcaatctgagctgggtccaagagagcagtcatagaacggagaaagtttgttttcttactgtttgccataaccacatccttaataggttttgctatatgctcctcctctgaaggttcaacctggcttccggttgtaggtgtacaaacactgctgacatcagccagctcctgagtgtcaggagagacacagaagtactcaggttgtttgtgtgttgaccgagagaacagctgagattgagaaccaggataactctttaatgaatcaaagtgcattgcccatctgtcatgttcctcaccctttgaatatataattttttcctctatttttctttgacggtcatcttctatttgcttattcaactcttcaatccattttctctgcagttcttgtttcacagcactgaaagggtgctccagcagtactgtttcctctaaagtctgactagctctaagttgtgaatgccccatcagcttggaccaccataacctggctacgagactgtgatagaatgcttgaagagcctagattggtcaagaatttgatgtttttcccatattattttatcactttcagattttttccaaggatcattccatttttcagaaacttctttttctttcttctttaaagcaacctgttcatctagctctttcctccactgggctttttttgcttccaacgaacttctatcacattccctttcccccagagtactgaatatatcagctggtttccattcattctctatggcaattttttgctcacactgtttagatgtctcctgatgttcatttaagacagatttattttcagctgggacagatgaaaccatttcagtttttttgaataatcccataatgttctcatcctttggctgattagaaatactgtttaaatatagactatattgactttttgcctcctttccattctcagtcagggaaagagatctatttccttggtttacagtcatcaaaatctgttgtagttggtcttgtgttagacacaccaaactgctcttcatgttttcagctgtgatgtgttttttgtgaggcttctgtttacctactagagatgtatttacggtgtttctagtcttctgcatattaggagttgcaggtgaaatctctttctggatatgaagacagtctttatctatacattgtttacataaatccttagtggatgaaaaagtcattccatttttttcaccttttgcctgtgatgtttctgaaccaactggcttcttttgcaaaagtttttcactcccaatacaagtatcttgtgttgattttagaatgtgcccagtttttgttcttaaaggacattttgcaatcttggccttatttcccatcttcacagaaatttttgatttatgttcatatggagacaatattagcttggtttttccatccagtaattcagtttcaagctttaaaccatctcccaagttcatggcctgacctcgcactctctccacagaacgctcaagccccttgtgtacgtcggttgccgccgccgctcagcaagcgctacc

SEQ ID NO: 735941 - DNA, 1161 bp, Homo sapiens
  misc_feature (913)..(913): n is a, c, g, or t
  misc_feature (927)..(927): n is a, c, g, or t
gtaaaggatttaatattacctcttctaggagaattaacattttagaacagtagcctgcagagggcaatgtttaacccaatgaagaggctcaaattgtggactgtcaggcactgtgataagtggtagattcatggagacacaagataatcatgaccctcattgtcttactatttaagtcaccacacctttcacttattaggcatgggccacctgacttcacttttcatgaagagtagggcaagaaaagcataatggcccatatttcaagcaactggtcccaaaacacacaagctgaacaaaggaggaaacgcagacagtggggtggctggcctcttgattcacccctatcttgccctctccagcagcattccaggcaagtgccatcagctctatttattcttattccttcacacccacctagggccttaacatcactgatgaggaaatttgaaccccaaaggagttgacttagtagttgtcctggtaccagagcccagtctggctctataactcctagctgagaagttcctgctatgtcccaagggacactgctcccatttattggagcttcccctagggattgtgagggatgagaatattagactagagatggaaagaattaaaaccaaacaatgtgaaaatccaaacccaggacccaaccagaattggagaccaaagagctcattttccttatttgctcctctttttcaactggtcctcaaaacatgagtgttttcctggaccagttcttagctctcttctttcctatttcaacactttccttacagagtgcattcattgccaggccttcagctattattcctacgtagatggcttctaagtcagacagccccatggttctaatgaatacccccatatggatgtcccaccaccattccaaatacagtctgtntaaaatcaaatcanccttccatatttctggtaatagcaacattatttgattccctggattcatctaagtaactacagctctgtgggattcacttttgcttcttcccaccccacacatccaggctgtcacttagacttgttgaatcttattgtaattcttcagggtcttctctactctcattcacggtacattgttccaggttacgtattataatctttagcttgtgagctcaacttcagtggggattt

SEQ ID NO: 735942 - DNA, 2145 bp, Homo sapiens
aaaaaaatattgtattgtttttaccctgatttgattatcagtattttaggttaatttgtaagagaaaaatcaagtaatgctgtaaaagctcatgtaaatcacagaaaagaactgttttaatgacttttgtttgcttttaataacatcaaggtattagaatttattaattgccatttttatgaaagtattaataaaattgtttgctacaatgatatttctgaagccacagtttgttaaatatatttgtctttccattatttttcagaaaaatataaagcagtaaccaaactgatcatttcacccagatttgagggtaagatatagctttagcctactgtttatattcaacttaactgctaaatctctgttaaaaaaaaacgctttctttagaaacatattttcaatctgtgttccttcccactggcagcccctttggagaagagtctgacagtgccaagatcaacatgctttgattcttgcccattcttttgaatcagttggattctgacataacttcagataagcaaatactaatattcagtcttaactatctgctcaaatacttttagaaacccttcagtacctctgtattccattgccagtttgcctggttacaggttagttacccacttatggagtgaattgtgatttgtatttggttcttttaaagatgaccaaaattatcaatccatgactttacccaaattattactgttgtggaaaatgaactaattgcattacggttaacttgagggcagaaatgaatgtaactgactatattgaccaatacagtgggtttaaggttcatatatttatggtaagaaaagtaaacacagaaacagagagagagagagaatataaattaagattgttgttgctttacacgtatacataggtatgctgaaggtgtgaacagtatagatagcatatgcaagtacttttagactaaatgccttatgcatctgaggagatacaccgtaggattgtgttattttatttatttatgagtactgagcacagagctttgggttccagccacttctgttatgtagacaagtggcatcaaatcaaggtttggcatcatttctagtgctcatcccattagtcactgtggtcagatgggctgaactaaaataaaatatcctgtttgtggcttcacttacctagaataactggtgacatatatcaagttcacctgataattgttaactctcaatttcagatttcctaaggatctattctttgttaatttaaaagctaatgggaactcaaatgaattttaataacttactttgtacaaaactgcccttaatctaatttggaattttattttgttttatttatttatttatttatttatttaatgtctttttagtttctactggttgataggattgtgttttaaaagggaaaatcgaggaagggaaattgtgttgtttatcttataggaaatgatggttttttttaatttttaaaaattattttaacctgttgttcttatgtctacaaggggaaaataaagtagggctctgaggcatttgaatattttagaccaaataattgctattgagaataaagattcaagcttctcattaatccataattgacatttccactgactgtaggacccagaaccaggagagaattactcaaccctccacttcagtttacttttgtagacactgcctaaatagaaatagaaattctggtgatttcaataacatcaaaaatgacaaattacctgtttaacttaaaaaggtcatgaatgaggccttcagagaaataatattaataatataatgaataaccatagagcagtgcctttaaattagctataggaaggaaatagtcttttcaagtttctgaacaatatatttctcttagttggcacctcacaaatactagatcatgtcagacgctgctggttaatagctgcaggaaggcatgttgtgcagtggatattgctcatggaagtgtgtgaaaatcatagtaagctttgttctccctgctaagacttgctatgtatatttccatcattgtttcatgtaaactgaaccattgtggtaaacttttggagttgatatggaatcactttaatgctgttttcacaaataaaagttttttcttataggtcaaaaaaaaaac

SEQ ID NO: 735943 - DNA, 381 bp, Homo sapiens
gctttttaaatgacccaggcgtgtgtaataatataatgaataaccatagagcagtgcctttaaattagctataggaaggaaatagtcttttcaagtttctgaacaatatatttctcttagttggcacctcacaaatactagatcatgtcagacgctgctggttaatagctgcaggaaggcatgttgtgcagtggatattgctcatggaagtgtgtgaaaatcatagtaagctttgttctccctgctaagacttgctatgtatatttccatcattgtttcatgtaaactgaaccattgtggtaaacttttggagttgatatggaatcactttaatgctgttttcacaaataaaagttttttcttataggtcaaaaaaaaaac

SEQ ID NO: 735944 - DNA, 1401 bp, Homo sapiens
  misc_feature (48)..(48): n is a, c, g, or t
gaacatgccgtggctcggtgctagagtcatagcgggcacttctgtgtngtccgttgtcatcgcagtgtctgctctgcgggtgctggggcctgtgttggttaagactgacttggtgggggacgctgatgatgggggaggctgtgagtggtggggatgggaactccagactctccactgcagcttttttttttttgaaacacagtttcacttttgttgcccaggccagagcgcaacggtgcgatctcagctcactgcaaactccacctcccaggttcaagcaattctcctgcctcagcctcccgaagtgctgggattacaggcatatgccaccacacctggctctaagagagtattataacataatggttaaacttgcagattttggactcatacaggcctgggttcaaatcccacccagggcactggctaaatggttctatgagctacttttctgtagaacagacccctagaaatagaactatttgctcagtgtgattcttttaaatgttaactttaatagatattgccaaattgtcctccagaattatctcattatttttatatgcacaaccacaacctataagagaagatattaaattcttgatagctttcttatctactgcctcagcacactgaaaaatttaaactactacaaatacaacataaaataaatttggcactccttgacaactaaatgcccttatttttgtaatccaatttctcctcctttcttgttgactatagaaaaagaatgtagaatcatttaatttaaattgtctctaactgacctgatccaacctctgcagccaaatctgtttttcactcttatatttccattatgagagtcaaactttccaatcacccaagctaacaaaaaaataacaataatgaaaagggagaatcagcttttactcctctttcaccattcctatccagcctgtaggcaggtcctgttggttctacctgtgcctccttcctctacccccaaactcctttccctttgagtgagacctgcctaatttaggttgtcatcctctctgactagcatatgagactttcttccaatttgttttctgtctacttggatttttttcactcttgccaattttgtctgtctatctctattagccttgaagggctccccaaagagggaactctgtcttcctcacctttgactccttatgccagtacagtgccaggcacaaagcaaatgctcaggaattgtggaacagaactgaccatttgttgccactttattattctaagatttcagtggaatccaattgcttatcaaatcaaggcagggtaaagggttggactttgtttaacaggccacctccaacctcccttttctactatttccatgctttctatgctttagacaaagaactcattgtttta

SEQ ID NO: 735945 - DNA, 587 bp, Homo sapiens
aatgtgtacaaaccagtgagatttgttccaacacactataaactttcaaggagagaggctgtgtcttcttcatgtttatatctgctgcaacactgagttcatggcttttcacacataattgctcaacagagcaggtgccatggaaagtcaattcaatgagtaaaattacctcaaaatagtccgttaattcactcacctttgatgtagacagattattctgcattgatacttatctcttactcttaaaattcgctatgtattaataaatattttattgaatattaaggaatgatcactattttaataagatgttctttaccatatatttctatatgtacatgataattagaagtatcaaattatattgtggaatgtaaaagcttttcttctgaagccaagcatttgttttattgtcatttcagtggcaaatatggacttcatattcaaaatgatgttctatattatttttccttacaagctttttgaaaaacaatttaataattccatgattgttgtagcaccactgaattgattctgaaagcttactttttaaataaaaattgacctttatcaagcattccttgagg

SEQ ID NO: 735946 - DNA, 806 bp, Homo sapiens
  misc_feature (592)..(592): n is a, c, g, or t
agaattatcaaaggatggctgtacagaccacctagaaaataattcagtatttcaggtttttcttttctgggagtgtgataactgaaattgttagattttggctcagttaagaaaagaaagatctgttgcctttcttctgagtgaacagtggtgagaaaaaattttgcaaggccccgcttttcctttcttcacaggccagcagtagccatatctgatcaaaaaagatacctgaaggaatattgatcacattttcctgaggccctagcaagcacaggaattgagaagttaggactggaacaactttgtcatttgtcacaattgccaaacattagaatacacaggaaccgttttttcaggtaactctgtgacttggctggatcttcctgatcatcaagattagcacctcggggcctggaagaggttagggagggcaggaagaaggagtgagccagcatccagctctgcgtggggcaggctatggcgtggacagacttaacattccacagcacggctgaaagccctggacctctttcccttgcacccctaattcatggtgataaaaccaaaacatggtgaattaggttattagaangttggaacatctctgaagctcaaagccctcttatggctatgtgaaggcatacgtggaggcatacgtactccaccctgaagcttctccttcaattttaatgttaatcttaccaagcgacagctttcatcctggttaaggcagctcggtgtgtgtaaaagcagcctggcctgttaaacacaatgccgttaaatcaaactgcctttctttttttttt

SEQ ID NO: 735947 - DNA, 542 bp, Homo sapiens
taatgccttttggtaaccagaagacttttttatttcaaaaatgtctagacattataatgctttatcttgcactccaaacatattggcaacaaatattaactttgaatattgcccacagtcctggatagttttatttaaaacatcccagatatggattgaatagcccttggtaaaggtgaatttggttaaacattgagcccgctcctgaaattcacttgggcattctggaagtcttcagcccagatccaaagggtatcatttagcaagccactataagagttatagcttctgaagacataatttaaacaaggattagtttgggcactggaagagtcaagcactttggagtttagaatctgacaagcagcagctaagctactgaaagatgagagccttgtgggcatttatctgatggtttttcaaacaggcagccagattaactacaatcatcgtttgaaatctttaagaaagcaaaaggccttctgaaaacattgcttttggtttctctacctccaagttgtcagtactgaaaaggaaacttt

SEQ ID NO: 735948 - DNA, 7765 bp, Homo sapiens
ccaaccaaatctcggcccccccgccctagccataactgcacaaaaaagggtcaaggcacggaatttttcaaatacgggacccacgcgtccgcttccgatcagcccccgatgtgccggccgtgagtgtcattgtcaagaacaccagccgccaggagtcatttgaagcggagaaagaccacattactcccagtctcctacacaatggattccggggctcagatctgcctccagatccccacaactgtgggaaatttgattctacttttatgaatggagacagtgccaggagtttccctggcaaactggagcctcccaagtcagagccattacccaccttcaaccagttcagtccaatctccagcccagaacctgaggatcccatcaaagataacggatttgggataaagcccaaacactctgacagttatttcccaccccctcttgggtgcggggctgtgggaggcccagtcctggaggctctggctaagtttccggttccagagctgcatatgtttgatcatttttgtaagaaagaacccaagccagaacccctgcccttggggagccagcaggaacacgagcaaagtgggcagaacacagtggaacctcacaaggatccggatgccactcgattcttcggggaagctttggagttcaacagccatcctagcaacagtattggagagtccaaggggcttgcccgggagcttggtacctgctcatcagtcccccctaggcagcgtctaaagccagctcattccaagctgtcctcttgtgtggcagccttggtggccttgcaggccaaaagagtggctagtgtcactaaggaggatcagcctggccacacaaaggatctctcagggcccactaaagagagttctaaaggtagccccaaaatgcccaagtcaccaaagagtccccggagccctctggaggccactagaaaaagtatcaagccatcggacagccctcgtagcatctgcagtgacagcagcagcaaaggctcaccgtctgtggctgccagctccccaccagcaattcccaaagtgagaatcaaaaccattaagacatcatcaggggaaatcaaacggactgtcacaaggatcctgccagatcctgatgatccaagtaagtcccctgttgggtcacctctagggagcgccattgcagaggcccccagcgagatgccaggggatgaggtgcctgtggaagagcactttcctgaggcaggcacaaattcagggagcccccagggggccaggaaaggggacgagagcatgacaaaggccagtgactcgtcatctcccagctgcagttctgggccccgggtcccaaagggggctgccccaggctcacagacaggcaagaagcaacagagcacagcactgcaggcatccaccctggcccctgccaacctcctgcccaaagccgtgcacttggccaacctgaacctcgtcccccacagtgttgctgcatcagtgacagccaagtcttcagtgcaaagacggagccagccacagcttacacaaatgtcggtgcccctggtccaccaggtgaaaaaggctgccccactgattgtagaggtcttcaacaaggtccttcacagctccaaccccgtgcccctctatgcgccaaatctcagcccgcctgcggacagcaggatccacgtgccggccagtgggtactgctgcctggagtgtggagacgcatttgccttagagaagagcctgagccagcactatggccggcggagcgtccacattgaggtactgtgcacactgtgctccaagacgctgctcttcttcaacaagtgcagcctgctccggcacgcccgtgaccacaagagcaaggggctcgtcatgcagtgttcccagctgctggtgaagcctatctctgcggaccaaatgttcgtgtcggcccctgtgaactccacggcaccagcagccccagccccttcatcctctcccaaacatggcctcacttcgggcagtgccagtccccctcctccagccttgccactctacccagaccctgtgaggctcatccggtactcaatcaagtgtcttgaatgtcacaagcagatgcgggactacatggtcctggctgcacatttccagaggacaacagaggagacagaggggctgacctgccaggtatgccagatgctgctgcccaaccagtgcagtttctgtgcccaccagcggattcatgcacacaagtccccctactgctgcccggagtgtggggtcctctgccgctctgcctacttccagacccatgtaaaggagaattgcctgcactatgcccgcaaggtgggctacaggtgcatccactgtggtgtcgtccacctgaccttggccttgctgaaaagccacatccaggagcgacactgccaggttttccacaaatgtgcattctgccccatggccttcaagactgccagcagcactgcagaccacagtgccacccagcaccccacccagccccacagaccctcccagctcatttataagtgctcctgtgaaatggtcttcaacaagaagaggcacattcagcagcatttttaccagaatgtcagcaagacgcaggtgggcgtcttcaagtgccctgagtgcccactcttgttcgtgcagaagccggagttgatgcaacacgtcaagagcacccacggtgttccccgaaatgtggacgagctgtcaagcctccagtcttcagcggacacatcctcaagccgccctggctctcgagttcccactgagccaccagccactagtgtggctgctcggagcagctccctgccttctggccgctggggtaggcctgaagcccaccgcagggtggaagccaggccgcggctgaggaacactggctggacctgccaggagtgccaggagtgggttccagatcgggagagctacgtgtcccacatgaaaaagagccacggtcggacattgaagcggtacccatgccggcagtgtgaacagtccttccacacccccaacagcctgcgcaaacacatccgcaacaaccatgacacagtaaagaagttctacacctgcgggtactgcacagaggacagccccagctttcctcggccctcccttctggagagccacatcagccttatgcatggcatcagaaaccctgatttgagccagacgtccaaagtgaaacctccgggtggacattcccctcaggtgaaccatctgaaaagaccagtcagtggagtgggggacgctccaggcaccagcaatggcgcaactgtctcttccaccaaaaggcacaagtccctttttcagtgcgcgaaatgtagttttgccacagactcggggctcgagtttcagagccacatacctcagcaccaggtggacagctccacagcccaatgtctcctctgtggtttgtgctacacctctgccagctccctcagccgccacctcttcattgtccacaaggtgagagaccaggaggaggaggaggaagaggaggcggcggcagcggagatggcagtggaggtggcagagccagaggagggctccggggaggaggtgcccatggagactagagagaatggactggaagaatgtgccggtgagcctttgtcagctgacccagaggcgaggagattgctgggcccggcccctgaggacgatggtggccacaatgatcacagtcaaccacaggcctctcaggaccaggacagccacacactgtcccctcaggtgtgaccggagactttgcagtgtgcatggtcaggggtggtgccgaagtgtcttccacctgccctgcggaccgtggaaaataaaaggctctgcccccagtgtgagtgtgaccggttgtaccctggagtagtgtctgccctgagctgccagtgctgggtatcccccagccccaggaaatgtggggtcggccaggaccctcacagctctgaatttgcttctgttatttatggcttttcgctgcttcttggtgccccatctcttgtctgtgtccttccaaccccaagctgcttatgtggcccaaccccactgctgtcaactaggcttgaaccccacagcggctgtgctcttctgggaggttcccgcttgctgccttcagccagggcgctcctcagagctctattttcctgcagacaccagctctccttcctgcctttagatcctgagaaggagggaaatgaggggtgctgacacagtccctctgggagagctctgcctagtctggtttggcgagggcccttgatcaccttgcccctcctccctgtcttctctgattcttttccctcaaaatagtcctgagaactaattgtcacactggctcatcatgtctctgtgggtggggtgggagaaacctctgctgcacacctctgtttggaacctgggcagagcaggaggtaaggcaaaggcaggcaggcaccaagaaccagaccccttgagaaggcgctgtgggtgggtctttgttctgctgttctgcctttcctgacaggtggggttggggcacacagacattggaatatttgtactgctctcgtgccatttgagaggctgctgccccaggcaggccagcccctactcctcttggctacactcatgttgctcagactatatttcaaataaaaaatcttctcaccatgcaggtaggctcttgtattcctctccaagtgagcctggccccaccctattccacccaagggtctttcccagacttcccctgtttgtcccatctctgagggagaacaatacttcctactgtctaaggaaggccttctctagattctggagcttgtggttaggaaaccgggagccctgtactacttagttctctagagaccttctgaaggggtgaggggagcggctccacaatggtcaagtcacctccaagatctccaggctagtgacattggctttagggcgtatcgaaattttctaggcaccttcatctttccttcagttgattttcaacataagagaaccccttactggtaaaaagggaaaagggggtggagaagaggaattttataattttcttatagcattcaagaggtttcttatttcttacagcatcgctactgccacagagaactcaaatgtggcagaactgggattagacttgggagactggctgtcttttcactgatggtggagtcagggcccacccaagcacgaggagcaggctgtgtggaggtgtcgtctgacctctaacccaggtggcatggggttgcgcccagcaggatgtagtggagtaaagggaagagggtgctggccgggtgcttagaggtcatctttcaaggaggcattaaatatcaattataaattattaagtcagataaatatgcctgaccttttcacagttgaaaaaatacattttttcccctctatcaaatgccaagtttttagtggaaatgctaatggcagtgggaaaggttgcctcactttcagagagactctcgctgtctgcacccttttaataattgctcttcctggcaaggctgccacttccctgcctccccagctggcagtggggcaacccaggcctgtttccagctacctgcaaagccagacctagacctgccgtagctgttgtcccatgcctaattctagttacaggaagccatccctgtaccctgggtccattcacaggaatgggttccagaggaggctgatagaagggtttgaaatgactggctggatcccttcctgctcagacacagtggtagctggagagcaggcagagatggtagaattgcaggtttgaccacctgtcgtgaccccagatatacatctccttcctgggaagaacgtgagttggaaaaatgctgagccagtccctggaaaacctgggtcctggcctggattctgtccttagccagctcttaacaaatcccttaacctcactgtctcctctccttcacaatagagttagtaattcccatccaactggcttcacaggcttttgtgagcttatgaatgtgaaagtattttctagtttataaaacactatatgaatgtggggaaatctttacttgaccttagggcatggagggtggagcacattttgtctgctgtttggacttggatgctgattagcagttatgaagtggcccagacacctagccattctttagtaagagtgaagatagcattttaagccctccttgtgtgcctagcatcttactgaacactttctggtgattctctcctttaatcctcacaaagatctcacagttgtcctccattttacggagaagaaaccgaggctccgagaggttaaacgatgtgcagaggctacctgtagtgatggtgctgagtcaagcctgtcaaccactgtgctcgttagtgaccaaggctgctttgacaggctgccagcttgtcagtggtttgcagccccccagacatttgctttcctacttcccatgcagttggggtgccctgcaagtgccaggttctctttggagtccatctgtgccttgtcaccccaaggagggcctcgagcatcacaccgttgacatttcgaaacgtggtatctctacaacctttcattctcattgggatttaccttgccatttgaacaccatcattttttgaggactgtctagaaaaggttgcctaaccctcacagggaacacacagttccctcagagtccagcatcttctggtcttttctttttcaagatttttttaaatggttgtgctatcatttgtcatcatcagaaaatgcttgctgtaacaagcgtttatctgcacattatgctgcagtgaatgctctactgatcaagttaaacagataagatcccttcccttgtagaaactacaacttaatacagtctaagacttgacaaattacttagtatttattttccaactgctttatctctgtaaaatgatatgctgaattattataagctaattgttgtagaaagaactttccccttaacttatgtaaacagtctggttttaaaaaatttgataattgtggcccagtaagctcaacactttgccttccccaagactggggaacctctgtcctgttcaccactgtatattcagcaccaggcagtttctttttttgtttgtttgtttttttgttttgaaaaattaatacatatacatggtaagacattccacaatacaaaagggtatacaataaatggtaagcttccccatggaggtcagcctctagtcccctctccagagttaatcactgttatctatatgttgtgtatcctttcatagcaattctatgcatttacaagtttataaatatgtatatttatatatctatttttaatacaaatagtagaattctatacacagtgttctgaagcttgctttcttatatagtattttggagattattccaaattcatacattgggtcagagtaattctttaaaagttccttgcatataacagtgattcaaaaagtatatggatgaatgagtgaatgctgcatgaatgaatgaatctgattcaattggtagctacagctgttctctcagggtctgatctgaccaagacagcaccttctagattctagaatgtgtcctcctgactaaggggttcaggatactgttcaccttctccaacagatgccaccggagccttaggaactgggcacaggaagccttgggcccctggaggaaaaagttgagactaggacgcaggtcccaagtatgggatttttttgggttcctacttaaaatgcttttttctttattggaaaatgatgtaacattttagagaaattaaaaagcacacatatttata

SEQ ID NO: 735949 - DNA, 5607 bp, Homo sapiens
ccctcaggacgtacttgtcaagggtggaagtccaagtgattgagggagggagaaggtgcctggatagttctgttcctcttctccatccctcctcttgcagcaccacctctgggtccagtactccctatactccacccacactcacactaccccacttctgtctaggtgcatccactgtggtgtcgtccacctgaccttggccttgctgaaaagccacatccaggagcgacactgccaggttttccacaaatgtgcattctgccccatggccttcaagactgccagcagcactgcagaccacagtgccacccagcaccccacccagccccacagaccctcccagctcatttataagtgctcctgtgaaatggtcttcaacaagaagaggcacattcagcagcatttttaccagaatgtcagcaagacgcaggtgggcgtcttcaagtgccctgagtgcccactcttgttcgtgcagaagccggagttgatgcaacacgtcaagagcacccacggtgttccccgaaatgtggacgagctgtcaagcctccagtcttcagcggacacatcctcaagccgccctggctctcgagttcccactgagccaccagccactagtgtggctgctcggagcagctccctgccttctggccgctggggtaggcctgaagcccaccgcagggtggaagccaggccgcggctgaggaacactggctggacctgccaggagtgccaggagtgggttccagatcgggagagctacgtgtcccacatgaaaaagagccacggtcggacattgaagcggtacccatgccggcagtgtgaacagtccttccacacccccaacagcctgcgcaaacacatccgcaacaaccatgacacagtaaagaagttctacacctgcgggtactgcacagaggacagccccagctttcctcggccctcccttctggagagccacatcagccttatgcatggcatcagaaaccctgatttgagccagacgtccaaagtgaaacctccgggtggacattcccctcaggtgaaccatctgaaaagaccagtcagtggagtgggggacgctccaggcaccagcaatggcgcaactgtctcttccaccaaaaggcacaagtccctttttcagtgcgcgaaatgtagttttgccacagactcggggctcgagtttcagagccacatacctcagcaccaggtggacagctccacagcccaatgtctcctctgtggtttgtgctacacctctgccagctccctcagccgccacctcttcattgtccacaaggtgagagaccaggaggaggaggaggaagaggaggcggcggcagcggagatggcagtggaggtggcagagccagaggagggctccggggaggaggtgcccatggagactagagagaatggactggaagaatgtgccggtgagcctttgtcagctgacccagaggcgaggagattgctgggcccggcccctgaggacgatggtggccacaatgatcacagtcaaccacaggcctctcaggaccaggacagccacacactgtcccctcaggtgtgaccggagactttgcagtgtgcatggtcaggggtggtgccgaagtgtcttccacctgccctgcggaccgtggaaaataaaaggctctgcccccagtgtgagtgtgaccggttgtaccctggagtagtgtctgccctgagctgccagtgctgggtatcccccagccccaggaaatgtggggtcggccaggaccctcacagctctgaatttgcttctgttatttatggcttttcgctgcttcttggtgccccatctcttgtctgtgtccttccaaccccaagctgcttatgtggcccaaccccactgctgtcaactaggcttgaaccccacagcggctgtgctcttctgggaggttcccgcttgctgccttcagccagggcgctcctcagagctctattttcctgcagacaccagctctccttcctgcctttagatcctgagaaggagggaaatgaggggtgctgacacagtccctctgggagagctctgcctagtctggtttggcgagggcccttgatcaccttgcccctcctccctgtcttctctgattcttttccctcaaaatagtcctgagaactaattgtcacactggctcatcatgtctctgtgggtggggtgggagaaacctctgctgcacacctctgtttggaacctgggcagagcaggaggtaaggcaaaggcaggcaggcaccaagaaccagaccccttgagaaggcgctgtgggtgggtctttgttctgctgttctgcctttcctgacaggtggggttggggcacacagacattggaatatttgtactgctctcgtgccatttgagaggctgctgccccaggcaggccagcccctactcctcttggctacactcatgttgctcagactatatttcaaataaaaaatcttctcaccatgcaggtaggctcttgtattcctctccaagtgagcctggccccaccctattccacccaagggtctttcccagacttcccctgtttgtcccatctctgagggagaacaatacttcctactgtctaaggaaggccttctctagattctggagcttgtggttaggaaaccgggagccctgtactacttagttctctagagaccttctgaaggggtgaggggagcggctccacaatggtcaagtcacctccaagatctccaggctagtgacattggctttagggcgtatcgaaattttctaggcaccttcatctttccttcagttgattttcaacataagagaaccccttactggtaaaaagggaaaagggggtggagaagaggaattttataattttcttatagcattcaagaggtttcttatttcttacagcatcgctactgccacagagaactcaaatgtggcagaactgggattagacttgggagactggctgtcttttcactgatggtggagtcagggcccacccaagcacgaggagcaggctgtgtggaggtgtcgtctgacctctaacccaggtggcatggggttgcgcccagcaggatgtagtggagtaaagggaagagggtgctggccgggtgcttagaggtcatctttcaaggaggcattaaatatcaattataaattattaagtcagataaatatgcctgaccttttcacagttgaaaaaatacattttttcccctctatcaaatgccaagtttttagtggaaatgctaatggcagtgggaaaggttgcctcactttcagagagactctcgctgtctgcacccttttaataattgctcttcctggcaaggctgccacttccctgcctccccagctggcagtggggcaacccaggcctgtttccagctacctgcaaagccagacctagacctgccgtagctgttgtcccatgcctaattctagttacaggaagccatccctgtaccctgggtccattcacaggaatgggttccagaggaggctgatagaagggtttgaaatgactggctggatcccttcctgctcagacacagtggtagctggagagcaggcagagatggtagaattgcaggtttgaccacctgtcgtgaccccagatatacatctccttcctgggaagaacgtgagttggaaaaatgctgagccagtccctggaaaacctgggtcctggcctggattctgtccttagccagctcttaacaaatcccttaacctcactgtctcctctccttcacaatagagttagtaattcccatccaactggcttcacaggcttttgtgagcttatgaatgtgaaagtattttctagtttataaaacactatatgaatgtggggaaatctttacttgaccttagggcatggagggtggagcacattttgtctgctgtttggacttggatgctgattagcagttatgaagtggcccagacacctagccattctttagtaagagtgaagatagcattttaagccctccttgtgtgcctagcatcttactgaacactttctggtgattctctcctttaatcctcacaaagatctcacagttgtcctccattttacggagaagaaaccgaggctccgagaggttaaacgatgtgcagaggctacctgtagtgatggtgctgagtcaagcctgtcaaccactgtgctcgttagtgaccaaggctgctttgacaggctgccagcttgtcagtggtttgcagccccccagacatttgctttcctacttcccatgcagttggggtgccctgcaagtgccaggttctctttggagtccatctgtgccttgtcaccccaaggagggcctcgagcatcacaccgttgacatttcgaaacgtggtatctctacaacctttcattctcattgggatttaccttgccatttgaacaccatcattttttgaggactgtctagaaaaggttgcctaaccctcacagggaacacacagttccctcagagtccagcatcttctggtcttttctttttcaagatttttttaaatggttgtgctatcatttgtcatcatcagaaaatgcttgctgtaacaagcgtttatctgcacattatgctgcagtgaatgctctactgatcaagttaaacagataagatcccttcccttgtagaaactacaacttaatacagtctaagacttgacaaattacttagtatttattttccaactgctttatctctgtaaaatgatatgctgaattattataagctaattgttgtagaaagaactttccccttaacttatgtaaacagtctggttttaaaaaatttgataattgtggcccagtaagctcaacactttgccttccccaagactggggaacctctgtcctgttcaccactgtatattcagcaccaggcagtttctttttttgtttgtttgtttttttgttttgaaaaattaatacatatacatggtaagacattccacaatacaaaagggtatacaataaatggtaagcttccccatggaggtcagcctctagtcccctctccagagttaatcactgttatctatatgttgtgtatcctttcatagcaattctatgcatttacaagtttataaatatgtatatttatatatctatttttaatacaaatagtagaattctatacacagtgttctgaagcttgctttcttatatagtattttggagattattccaaattcatacattgggtcagagtaattctttaaaagttccttgcatataacagtgattcaaaaagtatatggatgaatgagtgaatgctgcatgaatgaatgaatctgattcaattggtagctacagctgttctctcagggtctgatctgaccaagacagcaccttctagattctagaatgtgtcctcctgactaaggggttcaggatactgttcaccttctccaacagatgccaccggagccttaggaactgggcacaggaagccttgggcccctggaggaaaaagttgagactaggacgcaggtcccaagtatgggatttttttgggttcctacttaaaatgcttttttctttattggaaaatgatgtaacattttagagaaattaaaaagcacacatatttata

SEQ ID NO: 735950 - DNA, 6049 bp, Homo sapiens
aattttcagatatcgtcgaccacgcgtccgtttggagcgtccacattgaggtactgtgcacactgtgctccaagacgctgctcttcttcaacaagtgcagcctgctccggcacgcccgtgaccacaagagcaaggggctcgtcatgcagtgttcccagctgctggtgaagcctatctctgcggaccaaatgttcgtgtcggcccctgtgaactccacggcaccagcagccccagccccttcatcctctcccaaacatggcctcacttcgggcagtgccagtccccctcctccagccttgccactctacccagaccctgtgaggctcatccggtactcaatcaagtgtcttgaatgtcacaagcagatgcgggactacatggtcctggctgcacatttccagaggacaacagaggagacagaggggctgacctgccaggtatgccagatgctgctgcccaaccagtgcagtttctgtgcccaccagcggattcatgcacacaagtccccctactgctgcccggagtgtggggtcctctgccgctctgcctacttccagacccatgtaaaggagaattgcctgcactatgcccgcaaggtgggctacaggtgcatccactgtggtgtcgtccacctgaccttggccttgctgaaaagccacatccaggagcgacactgccaggttttccacaaatgtgcattctgccccatggccttcaagactgccagcagcactgcagaccacagtgccacccagcaccccacccagccccacagaccctcccagctcatttataagtgctcctgtgaaatggtcttcaacaagaagaggcacattcagcagcatttttaccagaatgtcagcaagacgcaggtgggcgtcttcaagtgccctgagtgcccactcttgttcgtgcagaagccggagttgatgcaacacgtcaagagcacccacggtgttccccgaaatgtggacgagctgtcaagcctccagtcttcagcggacacatcctcaagccgccctggctctcgagttcccactgagccaccagccactagtgtggctgctcggagcagctccctgccttctggccgctggggtaggcctgaagcccaccgcagggtggaagccaggccgcggctgaggaacactggctggacctgccaggagtgccaggagtgggttccagatcgggagagctacgtgtcccacatgaaaaagagccacggtcggacattgaagcggtacccatgccggcagtgtgaacagtccttccacacccccaacagcctgcgcaaacacatccgcaacaaccatgacacagtaaagaagttctacacctgcgggtactgcacagaggacagccccagctttcctcggccctcccttctggagagccacatcagccttatgcatggcatcagaaaccctgatttgagccagacgtccaaagtgaaacctccgggtggacattcccctcaggtgaaccatctgaaaagaccagtcagtggagtgggggacgctccaggcaccagcaatggcgcaactgtctcttccaccaaaaggcacaagtccctttttcagtgcgcgaaatgtagttttgccacagactcggggctcgagtttcagagccacatacctcagcaccaggtggacagctccacagcccaatgtctcctctgtggtttgtgctacacctctgccagctccctcagccgccacctcttcattgtccacaaggtgagagaccaggaggaggaggaggaagaggaggcggcggcagcggagatggcagtggaggtggcagagccagaggagggctccggggaggaggtgcccatggagactagagagaatggactggaagaatgtgccggtgagcctttgtcagctgacccagaggcgaggagattgctgggcccggcccctgaggacgatggtggccacaatgatcacagtcaaccacaggcctctcaggaccaggacagccacacactgtcccctcaggtgtgaccggagactttgcagtgtgcatggtcaggggtggtgccgaagtgtcttccacctgccctgcggaccgtggaaaataaaaggctctgcccccagtgtgagtgtgaccggttgtaccctggagtagtgtctgccctgagctgccagtgctgggtatcccccagccccaggaaatgtggggtcggccaggaccctcacagctctgaatttgcttctgttatttatggcttttcgctgcttcttggtgccccatctcttgtctgtgtccttccaaccccaagctgcttatgtggcccaaccccactgctgtcaactaggcttgaaccccacagcggctgtgctcttctgggaggttcccgcttgctgccttcagccagggcgctcctcagagctctattttcctgcagacaccagctctccttcctgcctttagatcctgagaaggagggaaatgaggggtgctgacacagtccctctgggagagctctgcctagtctggtttggcgagggcccttgatcaccttgcccctcctccctgtcttctctgattcttttccctcaaaatagtcctgagaactaattgtcacactggctcatcatgtctctgtgggtggggtgggagaaacctctgctgcacacctctgtttggaacctgggcagagcaggaggtaaggcaaaggcaggcaggcaccaagaaccagaccccttgagaaggcgctgtgggtgggtctttgttctgctgttctgcctttcctgacaggtggggttggggcacacagacattggaatatttgtactgctctcgtgccatttgagaggctgctgccccaggcaggccagcccctactcctcttggctacactcatgttgctcagactatatttcaaataaaaaatcttctcaccatgcaggtaggctcttgtattcctctccaagtgagcctggccccaccctattccacccaagggtctttcccagacttcccctgtttgtcccatctctgagggagaacaatacttcctactgtctaaggaaggccttctctagattctggagcttgtggttaggaaaccgggagccctgtactacttagttctctagagaccttctgaaggggtgaggggagcggctccacaatggtcaagtcacctccaagatctccaggctagtgacattggctttagggcgtatcgaaattttctaggcaccttcatctttccttcagttgattttcaacataagagaaccccttactggtaaaaagggaaaagggggtggagaagaggaattttataattttcttatagcattcaagaggtttcttatttcttacagcatcgctactgccacagagaactcaaatgtggcagaactgggattagacttgggagactggctgtcttttcactgatggtggagtcagggcccacccaagcacgaggagcaggctgtgtggaggtgtcgtctgacctctaacccaggtggcatggggttgcgcccagcaggatgtagtggagtaaagggaagagggtgctggccgggtgcttagaggtcatctttcaaggaggcattaaatatcaattataaattattaagtcagataaatatgcctgaccttttcacagttgaaaaaatacattttttcccctctatcaaatgccaagtttttagtggaaatgctaatggcagtgggaaaggttgcctcactttcagagagactctcgctgtctgcacccttttaataattgctcttcctggcaaggctgccacttccctgcctccccagctggcagtggggcaacccaggcctgtttccagctacctgcaaagccagacctagacctgccgtagctgttgtcccatgcctaattctagttacaggaagccatccctgtaccctgggtccattcacaggaatgggttccagaggaggctgatagaagggtttgaaatgactggctggatcccttcctgctcagacacagtggtagctggagagcaggcagagatggtagaattgcaggtttgaccacctgtcgtgaccccagatatacatctccttcctgggaagaacgtgagttggaaaaatgctgagccagtccctggaaaacctgggtcctggcctggattctgtccttagccagctcttaacaaatcccttaacctcactgtctcctctccttcacaatagagttagtaattcccatccaactggcttcacaggcttttgtgagcttatgaatgtgaaagtattttctagtttataaaacactatatgaatgtggggaaatctttacttgaccttagggcatggagggtggagcacattttgtctgctgtttggacttggatgctgattagcagttatgaagtggcccagacacctagccattctttagtaagagtgaagatagcattttaagccctccttgtgtgcctagcatcttactgaacactttctggtgattctctcctttaatcctcacaaagatctcacagttgtcctccattttacggagaagaaaccgaggctccgagaggttaaacgatgtgcagaggctacctgtagtgatggtgctgagtcaagcctgtcaaccactgtgctcgttagtgaccaaggctgctttgacaggctgccagcttgtcagtggtttgcagccccccagacatttgctttcctacttcccatgcagttggggtgccctgcaagtgccaggttctctttggagtccatctgtgccttgtcaccccaaggagggcctcgagcatcacaccgttgacatttcgaaacgtggtatctctacaacctttcattctcattgggatttaccttgccatttgaacaccatcattttttgaggactgtctagaaaaggttgcctaaccctcacagggaacacacagttccctcagagtccagcatcttctggtcttttctttttcaagatttttttaaatggttgtgctatcatttgtcatcatcagaaaatgcttgctgtaacaagcgtttatctgcacattatgctgcagtgaatgctctactgatcaagttaaacagataagatcccttcccttgtagaaactacaacttaatacagtctaagacttgacaaattacttagtatttattttccaactgctttatctctgtaaaatgatatgctgaattattataagctaattgttgtagaaagaactttccccttaacttatgtaaacagtctggttttaaaaaatttgataattgtggcccagtaagctcaacactttgccttccccaagactggggaacctctgtcctgttcaccactgtatattcagcaccaggcagtttctttttttgtttgtttgtttttttgttttgaaaaattaatacatatacatggtaagacattccacaatacaaaagggtatacaataaatggtaagcttccccatggaggtcagcctctagtcccctctccagagttaatcactgttatctatatgttgtgtatcctttcatagcaattctatgcatttacaagtttataaatatgtatatttatatatctatttttaatacaaatagtagaattctatacacagtgttctgaagcttgctttcttatatagtattttggagattattccaaattcatacattgggtcagagtaattctttaaaagttccttgcatataacagtgattcaaaaagtatatggatgaatgagtgaatgctgcatgaatgaatgaatctgattcaattggtagctacagctgttctctcagggtctgatctgaccaagacagcaccttctagattctagaatgtgtcctcctgactaaggggttcaggatactgttcaccttctccaacagatgccaccggagccttaggaactgggcacaggaagccttgggcccctggaggaaaaagttgagactaggacgcaggtcccaagtatgggatttttttgggttcctacttaaaatgcttttttctttattggaaaatgatgtaacattttagagaaattaaaaagcacacatatttata

SEQ ID NO: 735951 - DNA, 3899 bp, Homo sapiens
cacgaggtttttttttgcatggtgagaagattttttatttgaaatatagtctgagcaacatgagtgtagccaagaggagtaggggctggcctgcctggggcagcagcctctcaaatggcacgagagcagtacaaatattccaatgtctgtggcccaaccccactgctgtcaactaggcttgaaccccacagcggctgtgctcttctgggaggttcccgcttgctgccttcagccagggcgctcctcagagctctattttcctgcagacaccagctctccttcctgcctttagatcctgagaaggagggaaatgaggggtgctgacacagtccctctgggagagctctgcctagtctggtttggcgagggcccttgatcaccttgcccctcctccctgtcttctctgattcttttccctcaaaatagtcctgagaactaattgtcacactggctcatcatgtctctgtgggtggggtgggagaaacctctgctgcacacctctgtttggaacctgggcagagcaggaggtaaggcaaaggcaggcaggcaccaagaaccagaccccttgagaaggcgctgtgggtgggtctttgttctgctgttctgcctttcctgacaggtggggttggggcacacagacattggaatatttgtactgctctcgtgccatttgagaggctgctgccccaggcaggccagcccctactcctcttggctacactcatgttgctcagactatatttcaaataaaaaatcttctcaccatgcaggtaggctcttgtattcctctccaagtgagcctggccccaccctattccacccaagggtctttcccagacttcccctgtttgtcccatctctgagggagaacaatacttcctactgtctaaggaaggccttctctagattctggagcttgtggttaggaaaccgggagccctgtactacttagttctctagagaccttctgaaggggtgaggggagcggctccacaatggtcaagtcacctccaagatctccaggctagtgacattggctttagggcgtatcgaaattttctaggcaccttcatctttccttcagttgattttcaacataagagaaccccttactggtaaaaagggaaaagggggtggagaagaggaattttataattttcttatagcattcaagaggtttcttatttcttacagcatcgctactgccacagagaactcaaatgtggcagaactgggattagacttgggagactggctgtcttttcactgatggtggagtcagggcccacccaagcacgaggagcaggctgtgtggaggtgtcgtctgacctctaacccaggtggcatggggttgcgcccagcaggatgtagtggagtaaagggaagagggtgctggccgggtgcttagaggtcatctttcaaggaggcattaaatatcaattataaattattaagtcagataaatatgcctgaccttttcacagttgaaaaaatacattttttcccctctatcaaatgccaagtttttagtggaaatgctaatggcagtgggaaaggttgcctcactttcagagagactctcgctgtctgcacccttttaataattgctcttcctggcaaggctgccacttccctgcctccccagctggcagtggggcaacccaggcctgtttccagctacctgcaaagccagacctagacctgccgtagctgttgtcccatgcctaattctagttacaggaagccatccctgtaccctgggtccattcacaggaatgggttccagaggaggctgatagaagggtttgaaatgactggctggatcccttcctgctcagacacagtggtagctggagagcaggcagagatggtagaattgcaggtttgaccacctgtcgtgaccccagatatacatctccttcctgggaagaacgtgagttggaaaaatgctgagccagtccctggaaaacctgggtcctggcctggattctgtccttagccagctcttaacaaatcccttaacctcactgtctcctctccttcacaatagagttagtaattcccatccaactggcttcacaggcttttgtgagcttatgaatgtgaaagtattttctagtttataaaacactatatgaatgtggggaaatctttacttgaccttagggcatggagggtggagcacattttgtctgctgtttggacttggatgctgattagcagttatgaagtggcccagacacctagccattctttagtaagagtgaagatagcattttaagccctccttgtgtgcctagcatcttactgaacactttctggtgattctctcctttaatcctcacaaagatctcacagttgtcctccattttacggagaagaaaccgaggctccgagaggttaaacgatgtgcagaggctacctgtagtgatggtgctgagtcaagcctgtcaaccactgtgctcgttagtgaccaaggctgctttgacaggctgccagcttgtcagtggtttgcagccccccagacatttgctttcctacttcccatgcagttggggtgccctgcaagtgccaggttctctttggagtccatctgtgccttgtcaccccaaggagggcctcgagcatcacaccgttgacatttcgaaacgtggtatctctacaacctttcattctcattgggatttaccttgccatttgaacaccatcattttttgaggactgtctagaaaaggttgcctaaccctcacagggaacacacagttccctcagagtccagcatcttctggtcttttctttttcaagatttttttaaatggttgtgctatcatttgtcatcatcagaaaatgcttgctgtaacaagcgtttatctgcacattatgctgcagtgaatgctctactgatcaagttaaacagataagatcccttcccttgtagaaactacaacttaatacagtctaagacttgacaaattacttagtatttattttccaactgctttatctctgtaaaatgatatgctgaattattataagctaattgttgtagaaagaactttccccttaacttatgtaaacagtctggttttaaaaaatttgataattgtggcccagtaagctcaacactttgccttccccaagactggggaacctctgtcctgttcaccactgtatattcagcaccaggcagtttctttttttgtttgtttgtttttttgttttgaaaaattaatacatatacatggtaagacattccacaatacaaaagggtatacaataaatggtaagcttccccatggaggtcagcctctagtcccctctccagagttaatcactgttatctatatgttgtgtatcctttcatagcaattctatgcatttacaagtttataaatatgtatatttatatatctatttttaatacaaatagtagaattctatacacagtgttctgaagcttgctttcttatatagtattttggagattattccaaattcatacattgggtcagagtaattctttaaaagttccttgcatataacagtgattcaaaaagtatatggatgaatgagtgaatgctgcatgaatgaatgaatctgattcaattggtagctacagctgttctctcagggtctgatctgaccaagacagcaccttctagattctagaatgtgtcctcctgactaaggggttcaggatactgttcaccttctccaacagatgccaccggagccttaggaactgggcacaggaagccttgggcccctggaggaaaaagttgagactaggacgcaggtcccaagtatgggatttttttgggttcctacttaaaatgcttttttctttattggaaaatgatgtaacattttagagaaattaaaaagcacacatatttata

SEQ ID NO: 735952 - DNA, 3895 bp, Homo sapiens
aaggatccccgtgtgcagccaacaggaaatgtggggtcggccaggaccctcacagctctgaatttgcttctgttatttatggcttttcgctgcttcttggtgccccatctcttgtctgtgtccttccaaccccaagctgcttatgtggcccaaccccactgctgtcaactaggcttgaaccccacagcggctgtgctcttctgggaggttcccgcttgctgccttcagccagggcgctcctcagagctctattttcctgcagacaccagctctccttcctgcctttagatcctgagaaggagggaaatgaggggtgctgacacagtccctctgggagagctctgcctagtctggtttggcgagggcccttgatcaccttgcccctcctccctgtcttctctgattcttttccctcaaaatagtcctgagaactaattgtcacactggctcatcatgtctctgtgggtggggtgggagaaacctctgctgcacacctctgtttggaacctgggcagagcaggaggtaaggcaaaggcaggcaggcaccaagaaccagaccccttgagaaggcgctgtgggtgggtctttgttctgctgttctgcctttcctgacaggtggggttggggcacacagacattggaatatttgtactgctctcgtgccatttgagaggctgctgccccaggcaggccagcccctactcctcttggctacactcatgttgctcagactatatttcaaataaaaaatcttctcaccatgcaggtaggctcttgtattcctctccaagtgagcctggccccaccctattccacccaagggtctttcccagacttcccctgtttgtcccatctctgagggagaacaatacttcctactgtctaaggaaggccttctctagattctggagcttgtggttaggaaaccgggagccctgtactacttagttctctagagaccttctgaaggggtgaggggagcggctccacaatggtcaagtcacctccaagatctccaggctagtgacattggctttagggcgtatcgaaattttctaggcaccttcatctttccttcagttgattttcaacataagagaaccccttactggtaaaaagggaaaagggggtggagaagaggaattttataattttcttatagcattcaagaggtttcttatttcttacagcatcgctactgccacagagaactcaaatgtggcagaactgggattagacttgggagactggctgtcttttcactgatggtggagtcagggcccacccaagcacgaggagcaggctgtgtggaggtgtcgtctgacctctaacccaggtggcatggggttgcgcccagcaggatgtagtggagtaaagggaagagggtgctggccgggtgcttagaggtcatctttcaaggaggcattaaatatcaattataaattattaagtcagataaatatgcctgaccttttcacagttgaaaaaatacattttttcccctctatcaaatgccaagtttttagtggaaatgctaatggcagtgggaaaggttgcctcactttcagagagactctcgctgtctgcacccttttaataattgctcttcctggcaaggctgccacttccctgcctccccagctggcagtggggcaacccaggcctgtttccagctacctgcaaagccagacctagacctgccgtagctgttgtcccatgcctaattctagttacaggaagccatccctgtaccctgggtccattcacaggaatgggttccagaggaggctgatagaagggtttgaaatgactggctggatcccttcctgctcagacacagtggtagctggagagcaggcagagatggtagaattgcaggtttgaccacctgtcgtgaccccagatatacatctccttcctgggaagaacgtgagttggaaaaatgctgagccagtccctggaaaacctgggtcctggcctggattctgtccttagccagctcttaacaaatcccttaacctcactgtctcctctccttcacaatagagttagtaattcccatccaactggcttcacaggcttttgtgagcttatgaatgtgaaagtattttctagtttataaaacactatatgaatgtggggaaatctttacttgaccttagggcatggagggtggagcacattttgtctgctgtttggacttggatgctgattagcagttatgaagtggcccagacacctagccattctttagtaagagtgaagatagcattttaagccctccttgtgtgcctagcatcttactgaacactttctggtgattctctcctttaatcctcacaaagatctcacagttgtcctccattttacggagaagaaaccgaggctccgagaggttaaacgatgtgcagaggctacctgtagtgatggtgctgagtcaagcctgtcaaccactgtgctcgttagtgaccaaggctgctttgacaggctgccagcttgtcagtggtttgcagccccccagacatttgctttcctacttcccatgcagttggggtgccctgcaagtgccaggttctctttggagtccatctgtgccttgtcaccccaaggagggcctcgagcatcacaccgttgacatttcgaaacgtggtatctctacaacctttcattctcattgggatttaccttgccatttgaacaccatcattttttgaggactgtctagaaaaggttgcctaaccctcacagggaacacacagttccctcagagtccagcatcttctggtcttttctttttcaagatttttttaaatggttgtgctatcatttgtcatcatcagaaaatgcttgctgtaacaagcgtttatctgcacattatgctgcagtgaatgctctactgatcaagttaaacagataagatcccttcccttgtagaaactacaacttaatacagtctaagacttgacaaattacttagtatttattttccaactgctttatctctgtaaaatgatatgctgaattattataagctaattgttgtagaaagaactttccccttaacttatgtaaacagtctggttttaaaaaatttgataattgtggcccagtaagctcaacactttgccttccccaagactggggaacctctgtcctgttcaccactgtatattcagcaccaggcagtttctttttttgtttgtttgtttttttgttttgaaaaattaatacatatacatggtaagacattccacaatacaaaagggtatacaataaatggtaagcttccccatggaggtcagcctctagtcccctctccagagttaatcactgttatctatatgttgtgtatcctttcatagcaattctatgcatttacaagtttataaatatgtatatttatatatctatttttaatacaaatagtagaattctatacacagtgttctgaagcttgctttcttatatagtattttggagattattccaaattcatacattgggtcagagtaattctttaaaagttccttgcatataacagtgattcaaaaagtatatggatgaatgagtgaatgctgcatgaatgaatgaatctgattcaattggtagctacagctgttctctcagggtctgatctgaccaagacagcaccttctagattctagaatgtgtcctcctgactaaggggttcaggatactgttcaccttctccaacagatgccaccggagccttaggaactgggcacaggaagccttgggcccctggaggaaaaagttgagactaggacgcaggtcccaagtatgggatttttttgggttcctacttaaaatgcttttttctttattggaaaatgatgtaacattttagagaaattaaaaagcacacatatttata

SEQ ID NO: 735953 - DNA, 7683 bp, Homo sapiens
cggcggggcccgtgtctggtatagtaggcggcaggctgccgctactactaccaagaacaccagccgccaggagtcatttgaagcggagaaagaccacattactcccagtctcctacacaatggattccggggctcagatctgcctccagatccccacaactgtgggaaatttgattctacttttatgaatggagacagtgccaggagtttccctggcaaactggagcctcccaagtcagagccattacccaccttcaaccagttcagtccaatctccagcccagaacctgaggatcccatcaaagataacggatttgggataaagcccaaacactctgacagttatttcccaccccctcttgggtgcggggctgtgggaggcccagtcctggaggctctggctaagtttccggttccagagctgcatatgtttgatcatttttgtaagaaagaacccaagccagaacccctgcccttggggagccagcaggaacacgagcaaagtgggcagaacacagtggaacctcacaaggatccggatgccactcgattcttcggggaagctttggagttcaacagccatcctagcaacagtattggagagtccaaggggcttgcccgggagcttggtacctgctcatcagtcccccctaggcagcgtctaaagccagctcattccaagctgtcctcttgtgtggcagccttggtggccttgcaggccaaaagagtggctagtgtcactaaggaggatcagcctggccacacaaaggatctctcagggcccactaaagagagttctaaaggtagccccaaaatgcccaagtcaccaaagagtccccggagccctctggaggccactagaaaaagtatcaagccatcggacagccctcgtagcatctgcagtgacagcagcagcaaaggctcaccgtctgtggctgccagctccccaccagcaattcccaaagtgagaatcaaaaccattaagacatcatcaggggaaatcaaacggactgtcacaaggatcctgccagatcctgatgatccaagtaagtcccctgttgggtcacctctagggagcgccattgcagaggcccccagcgagatgccaggggatgaggtgcctgtggaagagcactttcctgaggcaggcacaaattcagggagcccccagggggccaggaaaggggacgagagcatgacaaaggccagtgactcgtcatctcccagctgcagttctgggccccgggtcccaaagggggctgccccaggctcacagacaggcaagaagcaacagagcacagcactgcaggcatccaccctggcccctgccaacctcctgcccaaagccgtgcacttggccaacctgaacctcgtcccccacagtgttgctgcatcagtgacagccaagtcttcagtgcaaagacggagccagccacagcttacacaaatgtcggtgcccctggtccaccaggtgaaaaaggctgccccactgattgtagaggtcttcaacaaggtccttcacagctccaaccccgtgcccctctatgcgccaaatctcagcccgcctgcggacagcaggatccacgtgccggccagtgggtactgctgcctggagtgtggagacgcatttgccttagagaagagcctgagccagcactatggccggcggagcgtccacattgaggtactgtgcacactgtgctccaagacgctgctcttcttcaacaagtgcagcctgctccggcacgcccgtgaccacaagagcaaggggctcgtcatgcagtgttcccagctgctggtgaagcctatctctgcggaccaaatgttcgtgtcggcccctgtgaactccacggcaccagcagccccagccccttcatcctctcccaaacatggcctcacttcgggcagtgccagtccccctcctccagccttgccactctacccagaccctgtgaggctcatccggtactcaatcaagtgtcttgaatgtcacaagcagatgcgggactacatggtcctggctgcacatttccagaggacaacagaggagacagaggggctgacctgccaggtatgccagatgctgctgcccaaccagtgcagtttctgtgcccaccagcggattcatgcacacaagtccccctactgctgcccggagtgtggggtcctctgccgctctgcctacttccagacccatgtaaaggagaattgcctgcactatgcccgcaaggtgggctacaggtgcatccactgtggtgtcgtccacctgaccttggccttgctgaaaagccacatccaggagcgacactgccaggttttccacaaatgtgcattctgccccatggccttcaagactgccagcagcactgcagaccacagtgccacccagcaccccacccagccccacagaccctcccagctcatttataagtgctcctgtgaaatggtcttcaacaagaagaggcacattcagcagcatttttaccagaatgtcagcaagacgcaggtgggcgtcttcaagtgccctgagtgcccactcttgttcgtgcagaagccggagttgatgcaacacgtcaagagcacccacggtgttccccgaaatgtggacgagctgtcaagcctccagtcttcagcggacacatcctcaagccgccctggctctcgagttcccactgagccaccagccactagtgtggctgctcggagcagctccctgccttctggccgctggggtaggcctgaagcccaccgcagggtggaagccaggccgcggctgaggaacactggctggacctgccaggagtgccaggagtgggttccagatcgggagagctacgtgtcccacatgaaaaagagccacggtcggacattgaagcggtacccatgccggcagtgtgaacagtccttccacacccccaacagcctgcgcaaacacatccgcaacaaccatgacacagtaaagaagttctacacctgcgggtactgcacagaggacagccccagctttcctcggccctcccttctggagagccacatcagccttatgcatggcatcagaaaccctgatttgagccagacgtccaaagtgaaacctccgggtggacattcccctcaggtgaaccatctgaaaagaccagtcagtggagtgggggacgctccaggcaccagcaatggcgcaactgtctcttccaccaaaaggcacaagtccctttttcagtgcgcgaaatgtagttttgccacagactcggggctcgagtttcagagccacatacctcagcaccaggtggacagctccacagcccaatgtctcctctgtggtttgtgctacacctctgccagctccctcagccgccacctcttcattgtccacaaggtgagagaccaggaggaggaggaggaagaggaggcggcggcagcggagatggcagtggaggtggcagagccagaggagggctccggggaggaggtgcccatggagactagagagaatggactggaagaatgtgccggtgagcctttgtcagctgacccagaggcgaggagattgctgggcccggcccctgaggacgatggtggccacaatgatcacagtcaaccacaggcctctcaggaccaggacagccacacactgtcccctcaggtgtgaccggagactttgcagtgtgcatggtcaggggtggtgccgaagtgtcttccacctgccctgcggaccgtggaaaataaaaggctctgcccccagtgtgagtgtgaccggttgtaccctggagtagtgtctgccctgagctgccagtgctgggtatcccccagccccaggaaatgtggggtcggccaggaccctcacagctctgaatttgcttctgttatttatggcttttcgctgcttcttggtgccccatctcttgtctgtgtccttccaaccccaagctgcttatgtggcccaaccccactgctgtcaactaggcttgaaccccacagcggctgtgctcttctgggaggttcccgcttgctgccttcagccagggcgctcctcagagctctattttcctgcagacaccagctctccttcctgcctttagatcctgagaaggagggaaatgaggggtgctgacacagtccctctgggagagctctgcctagtctggtttggcgagggcccttgatcaccttgcccctcctccctgtcttctctgattcttttccctcaaaatagtcctgagaactaattgtcacactggctcatcatgtctctgtgggtggggtgggagaaacctctgctgcacacctctgtttggaacctgggcagagcaggaggtaaggcaaaggcaggcaggcaccaagaaccagaccccttgagaaggcgctgtgggtgggtctttgttctgctgttctgcctttcctgacaggtggggttggggcacacagacattggaatatttgtactgctctcgtgccatttgagaggctgctgccccaggcaggccagcccctactcctcttggctacactcatgttgctcagactatatttcaaataaaaaatcttctcaccatgcaggtaggctcttgtattcctctccaagtgagcctggccccaccctattccacccaagggtctttcccagacttcccctgtttgtcccatctctgagggagaacaatacttcctactgtctaaggaaggccttctctagattctggagcttgtggttaggaaaccgggagccctgtactacttagttctctagagaccttctgaaggggtgaggggagcggctccacaatggtcaagtcacctccaagatctccaggctagtgacattggctttagggcgtatcgaaattttctaggcaccttcatctttccttcagttgattttcaacataagagaaccccttactggtaaaaagggaaaagggggtggagaagaggaattttataattttcttatagcattcaagaggtttcttatttcttacagcatcgctactgccacagagaactcaaatgtggcagaactgggattagacttgggagactggctgtcttttcactgatggtggagtcagggcccacccaagcacgaggagcaggctgtgtggaggtgtcgtctgacctctaacccaggtggcatggggttgcgcccagcaggatgtagtggagtaaagggaagagggtgctggccgggtgcttagaggtcatctttcaaggaggcattaaatatcaattataaattattaagtcagataaatatgcctgaccttttcacagttgaaaaaatacattttttcccctctatcaaatgccaagtttttagtggaaatgctaatggcagtgggaaaggttgcctcactttcagagagactctcgctgtctgcacccttttaataattgctcttcctggcaaggctgccacttccctgcctccccagctggcagtggggcaacccaggcctgtttccagctacctgcaaagccagacctagacctgccgtagctgttgtcccatgcctaattctagttacaggaagccatccctgtaccctgggtccattcacaggaatgggttccagaggaggctgatagaagggtttgaaatgactggctggatcccttcctgctcagacacagtggtagctggagagcaggcagagatggtagaattgcaggtttgaccacctgtcgtgaccccagatatacatctccttcctgggaagaacgtgagttggaaaaatgctgagccagtccctggaaaacctgggtcctggcctggattctgtccttagccagctcttaacaaatcccttaacctcactgtctcctctccttcacaatagagttagtaattcccatccaactggcttcacaggcttttgtgagcttatgaatgtgaaagtattttctagtttataaaacactatatgaatgtggggaaatctttacttgaccttagggcatggagggtggagcacattttgtctgctgtttggacttggatgctgattagcagttatgaagtggcccagacacctagccattctttagtaagagtgaagatagcattttaagccctccttgtgtgcctagcatcttactgaacactttctggtgattctctcctttaatcctcacaaagatctcacagttgtcctccattttacggagaagaaaccgaggctccgagaggttaaacgatgtgcagaggctacctgtagtgatggtgctgagtcaagcctgtcaaccactgtgctcgttagtgaccaaggctgctttgacaggctgccagcttgtcagtggtttgcagccccccagacatttgctttcctacttcccatgcagttggggtgccctgcaagtgccaggttctctttggagtccatctgtgccttgtcaccccaaggagggcctcgagcatcacaccgttgacatttcgaaacgtggtatctctacaacctttcattctcattgggatttaccttgccatttgaacaccatcattttttgaggactgtctagaaaaggttgcctaaccctcacagggaacacacagttccctcagagtccagcatcttctggtcttttctttttcaagatttttttaaatggttgtgctatcatttgtcatcatcagaaaatgcttgctgtaacaagcgtttatctgcacattatgctgcagtgaatgctctactgatcaagttaaacagataagatcccttcccttgtagaaactacaacttaatacagtctaagacttgacaaattacttagtatttattttccaactgctttatctctgtaaaatgatatgctgaattattataagctaattgttgtagaaagaactttccccttaacttatgtaaacagtctggttttaaaaaatttgataattgtggcccagtaagctcaacactttgccttccccaagactggggaacctctgtcctgttcaccactgtatattcagcaccaggcagtttctttttttgtttgtttgtttttttgttttgaaaaattaatacatatacatggtaagacattccacaatacaaaagggtatacaataaatggtaagcttccccatggaggtcagcctctagtcccctctccagagttaatcactgttatctatatgttgtgtatcctttcatagcaattctatgcatttacaagtttataaatatgtatatttatatatctatttttaatacaaatagtagaattctatacacagtgttctgaagcttgctttcttatatagtattttggagattattccaaattcatacattgggtcagagtaattctttaaaagttccttgcatataacagtgattcaaaaagtatatggatgaatgagtgaatgctgcatgaatgaatgaatctgattcaattggtagctacagctgttctctcagggtctgatctgaccaagacagcaccttctagattctagaatgtgtcctcctgactaaggggttcaggatactgttcaccttctccaacagatgccaccggagccttaggaactgggcacaggaagccttgggcccctggaggaaaaagttgagactaggacgcaggtcccaagtatgggatttttttgggttcctacttaaaatgcttttttctttattggaaaatgatgtaacattttagagaaattaaaaagcacacatatttata

SEQ ID NO: 735954 - DNA, 2996 bp, Homo sapiens; identical to SEQ ID NO: 449091

SEQ ID NO: 735955 - DNA, 8411 bp, Homo sapiens
gcctgcgccgcgcagcccgcctcgggcgggaggcgggaggcgggaggccgggcccaggccggggcagcccctccaccgcaccgtcctgggccggtgcccaggtccgagtcgccttccgcctgccccccccgccaatcccccgccgcggcagccccagccaggtcccgccgccaggccggctcccgcccccgctccgcccccggagccgcagccccgcccgccatcgccgtcgccatgttgtggctcccgcagccggcgctggggacgcgcgcggccgagactctggcctgcagtcgccgccgccgccgccaggtggtgtttggactctagaccatgtgcctaggtagaagtttttcctttctccgcagctctgctcccctagcaacgctcgccacacccttgttttgagatcctctctaaggagcggagagtttaataggcaagaaggaagggagaagacagaaggaagacgctcccccgtacggagacagagggagggggggctccaaagccgaaagaggaggtccctacctgccacggataccagtcagcccttgccagcatccagccatgggggatatgaaaaccccagattttgatgaccttctggctgcctttgacatcccagaccccaccagccttgatgccaaggaggccatccagacacccagtgaggagaatgagagtcccctcaaacctccaggcatatgtatggatgaaagtgtgtccttgtctcactcaggatcagcccccgatgtgccggccgtgagtgtcattgtcaagaacaccagccgccaggagtcatttgaagcggagaaagaccacattactcccagtctcctacacaatggattccggggctcagatctgcctccagatccccacaactgtgggaaatttgattctacttttatgaatggagacagtgccaggagtttccctggcaaactggagcctcccaagtcagagccattacccaccttcaaccagttcagtccaatctccagcccagaacctgaggatcccatcaaagataacggatttgggataaagcccaaacactctgacagttatttcccaccccctcttgggtgcggggctgtgggaggcccagtcctggaggctctggctaagtttccggttccagagctgcatatgtttgatcatttttgtaagaaagaacccaagccagaacccctgcccttggggagccagcaggaacacgagcaaagtgggcagaacacagtggaacctcacaaggatccggatgccactcgattcttcggggaagctttggagttcaacagccatcctagcaacagtattggagagtccaaggggcttgcccgggagcttggtacctgctcatcagtcccccctaggcagcgtctaaagccagctcattccaagctgtcctcttgtgtggcagccttggtggccttgcaggccaaaagagtggctagtgtcactaaggaggatcagcctggccacacaaaggatctctcagggcccactaaagagagttctaaaggtagccccaaaatgcccaagtcaccaaagagtccccggagccctctggaggccactagaaaaagtatcaagccatcggacagccctcgtagcatctgcagtgacagcagcagcaaaggctcaccgtctgtggctgccagctccccaccagcaattcccaaagtgagaatcaaaaccattaagacatcatcaggggaaatcaaacggactgtcacaaggatcctgccagatcctgatgatccaagtaagtcccctgttgggtcacctctagggagcgccattgcagaggcccccagcgagatgccaggggatgaggtgcctgtggaagagcactttcctgaggcaggcacaaattcagggagcccccagggggccaggaaaggggacgagagcatgacaaaggccagtgactcgtcatctcccagctgcagttctgggccccgggtcccaaagggggctgccccaggctcacagacaggcaagaagcaacagagcacagcactgcaggcatccaccctggcccctgccaacctcctgcccaaagccgtgcacttggccaacctgaacctcgtcccccacagtgttgctgcatcagtgacagccaagtcttcagtgcaaagacggagccagccacagcttacacaaatgtcggtgcccctggtccaccaggtgaaaaaggctgccccactgattgtagaggtcttcaacaaggtccttcacagctccaaccccgtgcccctctatgcgccaaatctcagcccgcctgcggacagcaggatccacgtgccggccagtgggtactgctgcctggagtgtggagacgcatttgccttagagaagagcctgagccagcactatggccggcggagcgtccacattgaggtactgtgcacactgtgctccaagacgctgctcttcttcaacaagtgcagcctgctccggcacgcccgtgaccacaagagcaaggggctcgtcatgcagtgttcccagctgctggtgaagcctatctctgcggaccaaatgttcgtgtcggcccctgtgaactccacggcaccagcagccccagccccttcatcctctcccaaacatggcctcacttcgggcagtgccagtccccctcctccagccttgccactctacccagaccctgtgaggctcatccggtactcaatcaagtgtcttgaatgtcacaagcagatgcgggactacatggtcctggctgcacatttccagaggacaacagaggagacagaggggctgacctgccaggtatgccagatgctgctgcccaaccagtgcagtttctgtgcccaccagcggattcatgcacacaagtccccctactgctgcccggagtgtggggtcctctgccgctctgcctacttccagacccatgtaaaggagaattgcctgcactatgcccgcaaggtgggctacaggtgcatccactgtggtgtcgtccacctgaccttggccttgctgaaaagccacatccaggagcgacactgccaggttttccacaaatgtgcattctgccccatggccttcaagactgccagcagcactgcagaccacagtgccacccagcaccccacccagccccacagaccctcccagctcatttataagtgctcctgtgaaatggtcttcaacaagaagaggcacattcagcagcatttttaccagaatgtcagcaagacgcaggtgggcgtcttcaagtgccctgagtgcccactcttgttcgtgcagaagccggagttgatgcaacacgtcaagagcacccacggtgttccccgaaatgtggacgagctgtcaagcctccagtcttcagcggacacatcctcaagccgccctggctctcgagttcccactgagccaccagccactagtgtggctgctcggagcagctccctgccttctggccgctggggtaggcctgaagcccaccgcagggtggaagccaggccgcggctgaggaacactggctggacctgccaggagtgccaggagtgggttccagatcgggagagctacgtgtcccacatgaaaaagagccacggtcggacattgaagcggtacccatgccggcagtgtgaacagtccttccacacccccaacagcctgcgcaaacacatccgcaacaaccatgacacagtaaagaagttctacacctgcgggtactgcacagaggacagccccagctttcctcggccctcccttctggagagccacatcagccttatgcatggcatcagaaaccctgatttgagccagacgtccaaagtgaaacctccgggtggacattcccctcaggtgaaccatctgaaaagaccagtcagtggagtgggggacgctccaggcaccagcaatggcgcaactgtctcttccaccaaaaggcacaagtccctttttcagtgcgcgaaatgtagttttgccacagactcggggctcgagtttcagagccacatacctcagcaccaggtggacagctccacagcccaatgtctcctctgtggtttgtgctacacctctgccagctccctcagccgccacctcttcattgtccacaaggtgagagaccaggaggaggaggaggaagaggaggcggcggcagcggagatggcagtggaggtggcagagccagaggagggctccggggaggaggtgcccatggagactagagagaatggactggaagaatgtgccggtgagcctttgtcagctgacccagaggcgaggagattgctgggcccggcccctgaggacgatggtggccacaatgatcacagtcaaccacaggcctctcaggaccaggacagccacacactgtcccctcaggtgtgaccggagactttgcagtgtgcatggtcaggggtggtgccgaagtgtcttccacctgccctgcggaccgtggaaaataaaaggctctgcccccagtgtgagtgtgaccggttgtaccctggagtagtgtctgccctgagctgccagtgctgggtatcccccagccccaggaaatgtggggtcggccaggaccctcacagctctgaatttgcttctgttatttatggcttttcgctgcttcttggtgccccatctcttgtctgtgtccttccaaccccaagctgcttatgtggcccaaccccactgctgtcaactaggcttgaaccccacagcggctgtgctcttctgggaggttcccgcttgctgccttcagccagggcgctcctcagagctctattttcctgcagacaccagctctccttcctgcctttagatcctgagaaggagggaaatgaggggtgctgacacagtccctctgggagagctctgcctagtctggtttggcgagggcccttgatcaccttgcccctcctccctgtcttctctgattcttttccctcaaaatagtcctgagaactaattgtcacactggctcatcatgtctctgtgggtggggtgggagaaacctctgctgcacacctctgtttggaacctgggcagagcaggaggtaaggcaaaggcaggcaggcaccaagaaccagaccccttgagaaggcgctgtgggtgggtctttgttctgctgttctgcctttcctgacaggtggggttggggcacacagacattggaatatttgtactgctctcgtgccatttgagaggctgctgccccaggcaggccagcccctactcctcttggctacactcatgttgctcagactatatttcaaataaaaaatcttctcaccatgcaggtaggctcttgtattcctctccaagtgagcctggccccaccctattccacccaagggtctttcccagacttcccctgtttgtcccatctctgagggagaacaatacttcctactgtctaaggaaggccttctctagattctggagcttgtggttaggaaaccgggagccctgtactacttagttctctagagaccttctgaaggggtgaggggagcggctccacaatggtcaagtcacctccaagatctccaggctagtgacattggctttagggcgtatcgaaattttctaggcaccttcatctttccttcagttgattttcaacataagagaaccccttactggtaaaaagggaaaagggggtggagaagaggaattttataattttcttatagcattcaagaggtttcttatttcttacagcatcgctactgccacagagaactcaaatgtggcagaactgggattagacttgggagactggctgtcttttcactgatggtggagtcagggcccacccaagcacgaggagcaggctgtgtggaggtgtcgtctgacctctaacccaggtggcatggggttgcgcccagcaggatgtagtggagtaaagggaagagggtgctggccgggtgcttagaggtcatctttcaaggaggcattaaatatcaattataaattattaagtcagataaatatgcctgaccttttcacagttgaaaaaatacattttttcccctctatcaaatgccaagtttttagtggaaatgctaatggcagtgggaaaggttgcctcactttcagagagactctcgctgtctgcacccttttaataattgctcttcctggcaaggctgccacttccctgcctccccagctggcagtggggcaacccaggcctgtttccagctacctgcaaagccagacctagacctgccgtagctgttgtcccatgcctaattctagttacaggaagccatccctgtaccctgggtccattcacaggaatgggttccagaggaggctgatagaagggtttgaaatgactggctggatcccttcctgctcagacacagtggtagctggagagcaggcagagatggtagaattgcaggtttgaccacctgtcgtgaccccagatatacatctccttcctgggaagaacgtgagttggaaaaatgctgagccagtccctggaaaacctgggtcctggcctggattctgtccttagccagctcttaacaaatcccttaacctcactgtctcctctccttcacaatagagttagtaattcccatccaactggcttcacaggcttttgtgagcttatgaatgtgaaagtattttctagtttataaaacactatatgaatgtggggaaatctttacttgaccttagggcatggagggtggagcacattttgtctgctgtttggacttggatgctgattagcagttatgaagtggcccagacacctagccattctttagtaagagtgaagatagcattttaagccctccttgtgtgcctagcatcttactgaacactttctggtgattctctcctttaatcctcacaaagatctcacagttgtcctccattttacggagaagaaaccgaggctccgagaggttaaacgatgtgcagaggctacctgtagtgatggtgctgagtcaagcctgtcaaccactgtgctcgttagtgaccaaggctgctttgacaggctgccagcttgtcagtggtttgcagccccccagacatttgctttcctacttcccatgcagttggggtgccctgcaagtgccaggttctctttggagtccatctgtgccttgtcaccccaaggagggcctcgagcatcacaccgttgacatttcgaaacgtggtatctctacaacctttcattctcattgggatttaccttgccatttgaacaccatcattttttgaggactgtctagaaaaggttgcctaaccctcacagggaacacacagttccctcagagtccagcatcttctggtcttttctttttcaagatttttttaaatggttgtgctatcatttgtcatcatcagaaaatgcttgctgtaacaagcgtttatctgcacattatgctgcagtgaatgctctactgatcaagttaaacagataagatcccttcccttgtagaaactacaacttaatacagtctaagacttgacaaattacttagtatttattttccaactgctttatctctgtaaaatgatatgctgaattattataagctaattgttgtagaaagaactttccccttaacttatgtaaacagtctggttttaaaaaatttgataattgtggcccagtaagctcaacactttgccttccccaagactggggaacctctgtcctgttcaccactgtatattcagcaccaggcagtttctttttttgtttgtttgtttttttgttttgaaaaattaatacatatacatggtaagacattccacaatacaaaagggtatacaataaatggtaagcttccccatggaggtcagcctctagtcccctctccagagttaatcactgttatctatatgttgtgtatcctttcatagcaattctatgcatttacaagtttataaatatgtatatttatatatctatttttaatacaaatagtagaattctatacacagtgttctgaagcttgctttcttatatagtattttggagattattccaaattcatacattgggtcagagtaattctttaaaagttccttgcatataacagtgattcaaaaagtatatggatgaatgagtgaatgctgcatgaatgaatgaatctgattcaattggtagctacagctgttctctcagggtctgatctgaccaagacagcaccttctagattctagaatgtgtcctcctgactaaggggttcaggatactgttcaccttctccaacagatgccaccggagccttaggaactgggcacaggaagccttgggcccctggaggaaaaagttgagactaggacgcaggtcccaagtatgggatttttttgggttcctacttaaaatgcttttttctttattggaaaatgatgtaacattttagagaaattaaaaagcacacatatttata

SEQ ID NO: 735956 - DNA, 5420 bp, Homo sapiens; identical to SEQ ID NO: 449094

SEQ ID NO: 735957 - DNA, 8222 bp, Homo sapiens
gcctgcgccgcgcagcccgcctcgggcgggaggcgggaggcgggaggccgggcccaggccggggcagcccctccaccgcaccgtcctgggccggtgcccaggtccgagtcgccttccgcctgccccccccgccaatcccccgccgcggcagccccagccaggtcccgccgccaggccggctcccgcccccgctccgcccccggagccgcagccccgcccgccatcgccgtcgccatgttgtggctcccgcagccggcgctggggacgcgcgcggccgagactctggcctgcagtcgccgccgccgccgccaggtggtgtttggactctagaccatgtgcctaggtagaagtttttcctttctccgcagctctgctcccctagcaacgctcgccacacccttgttttgagatcctctctaaggagcggagagtttaataggcaagaaggaagggagaagacagaaggaagacgctcccccgtacggagacagagggagggggggctccaaagccgaaagaggaggtccctacctgccacggataccagtcagcccttgccagcatccagccatgggggatatgaaaaccccagattttgatgaccttctggctgcctttgacatcccagaccccaccagccttgatgccaaggaggccatccagacacccagtgaggagaatgagagtcccctcaaacctccaggcatatgtatggatgaaagtgtgtccttgtctcactcaggatcagcccccgatgtgccggccgtgagtgtcattgtcaagaacaccagccgccaggagtcatttgaagcggagaaagaccacattactcccagtctcctacacaatggattccggggctcagatctgcctccagatccccacaactgtgggaaatttgattctacttttatgaatggagacagtgccaggagtttccctggcaaactggagcctcccaagtcagagccattacccaccttcaaccagttcagtccaatctccagcccagaacctgaggatcccatcaaagataacggatttgggataaagcccaaacactctgacagttatttcccaccccctcttgggtgcggggctgtgggaggcccagtcctggaggctctggctaagtttccggttccagagctgcatatgtttgatcatttttgtaagaaagaacccaagccagaacccctgcccttggggagccagcaggaacacgagcaaagtgggcagaacacagtggaacctcacaaggatccggatgccactcgattcttcggggaagctttggagttcaacagccatcctagcaacagtattggagagtccaaggggcttgcccgggagcttggtacctgctcatcagtcccccctaggcagcgtctaaagccagctcattccaagctgtcctcttgtgtggcagccttggtggccttgcaggccaaaagagtggctagtgtcactaaggaggatcagcctggccacacaaaggatctctcagggcccactaaagagagttctaaaggtagccccaaaatgcccaagtcaccaaagagtccccggagccctctggaggccactagaaaaagtatcaagccatcggacagccctcgtagcatctgcagtgacagcagcagcaaaggctcaccgtctgtggctgccagctccccaccagcaattcccaaagtgagaatcaaaaccattaagacatcatcaggggaaatcaaacggactgtcacaaggatcctgccagatcctgatgatccaagtaagtcccctgttgggtcacctctagggagcgccattgcagaggcccccagcgagatgccaggggatgaggtgcctgtggaagagcactttcctgaggcaggcacaaattcagggagcccccagggggccaggaaaggggacgagagcatgacaaaggccagtgactcgtcatctcccagctgcagttctgggccccgggtcccaaagggggctgccccaggctcacagacaggcaagaagcaacagagcacagcactgcaggcatccaccctggcccctgccaacctcctgcccaaagccgtgcacttggccaacctgaacctcgtcccccacagtgttgctgcatcagtgacagccaagtcttcagtgcaaagacggagccagccacagcttacacaaatgtcggtgcccctggtccaccaggtgaaaaaggctgccccactgattgtagaggtcttcaacaaggtccttcacagctccaaccccgtgcccctctatgcgccaaatctcagcccgcctgcggacagcaggatccacgtgccggccagtgggtactgctgcctggagtgtggagacgcatttgccttagagaagagcctgagccagcactatggccggcggagcgtccacattgaggtactgtgcacactgtgctccaagacgctgctcttcttcaacaagtgcagcctgctccggcacgcccgtgaccacaagagcaaggggctcgtcatgcagtgttcccagctgctggtgaagcctatctctgcggaccaaatgttcgtgtcggcccctgtgaactccacggcaccagcagccccagccccttcatcctctcccaaacatggcctcacttcgggcagtgccagtccccctcctccagccttgccactctacccagaccctgtgaggctcatccggtactcaatcaagtgtcttgaatgtcacaagcagatgcgggactacatggtcctggctgcacatttccagaggacaacagaggagacagaggggctgacctgccaggtatgccagatgctgctgcccaaccagtgcagtttctgtgcccaccagcggattcatgcacacaagtccccctactgctgcccggagtgtggggtcctctgccgctctgcctacttccagacccatgtaaaggagaattgcctgcactatgcccgcaaggtgggctacaggtgcatccactgtggtgtcgtccacctgaccttggccttgctgaaaagccacatccaggagcgacactgccaggttttccacaaatgtgcattctgccccatggccttcaagactgccagcagcactgcagaccacagtgccacccagcaccccacccagccccacagaccctcccagctcatttataagtgctcctgtgaaatggtcttcaacaagaagaggcacattcagcagcatttttaccagaatgtcagcaagacgcaggtgggcgtcttcaagtgccctgagtgcccactcttgttcgtgcagaagccggagttgatgcaacacgtcaagagcacccacggtgttccccgaaatgtggacgagctgtcaagcctccagtcttcagcggacacatcctcaagccgccctggctctcgagttcccactgagccaccagccactagtgtggctgctcggagcagctccctgccttctggccgctggggtaggcctgaagcccaccgcagggtggaagccaggccgcggctgaggaacactggctggacctgccaggagtgccaggagtgggttccagatcgggagagctacgtgtcccacatgaaaaagagccacggtcggacattgaagcggtacccatgccggcagtgtgaacagtccttccacacccccaacagcctgcgcaaacacatccgcaacaaccatgacacagtaaagaagttctacacctgcgggtactgcacagaggacagccccagctttcctcggccctcccttctggagagccacatcagccttatgcatggcatcagaaaccctgatttgagccagacgtccaaagtgaaacctccgggtggacattcccctcaggtgaaccatctgaaaagaccagtcagtggagtgggggacgctccaggcaccagcaatggcgcaactgtctcttccaccaaaaggcacaagtccctttttcagtgcgcgaaatgtagttttgccacagactcggggctcgagtttcagagccacatacctcagcaccaggtggacagctccacagcccaatgtctcctctgtggtttgtgctacacctctgccagctccctcagccgccacctcttcattgtccacaaggtgagagaccaggaggaggaggaggaagaggaggcggcggcagcggagatggcagtggaggtggcagagccagaggagggctccggggaggaggtgcccatggagactagagagaatggactggaagaatgtgccggtgagcctttgtcagctgacccagaggcgaggagattgctgggcccggcccctgaggacgatggtggccacaatgatcacagtcaaccacaggcctctcaggaccaggacagccacacactgtcccctcaggtgtgaccggagactttgcagtgtgcatggtcaggggtggtgccgaagtgtcttccacctgccctgcggaccgtggaaaataaaaggctctgcccccagtgtgagtgtgaccggttgtaccctggagtagtgtctgccctgagctgccagtgctgggtatcccccagccccaggaaatgtggggtcggccaggaccctcacagctctgaatttgcttctgttatttatggcttttcgctgcttcttggtgccccatctcttgtctgtgtccttccaaccccaagctgcttatgtggcccaaccccactgctgtcaactaggcttgaaccccacagcggctgtgctcttctgggaggttcccgcttgctgccttcagccagggcgctcctcagagctctattttcctgcagacaccagctctccttcctgcctttagatcctgagaaggagggaaatgaggggtgctgacacagtccctctgggagagctctgcctagtctggtttggcgagggcccttgatcaccttgcccctcctccctgtcttctctgattcttttccctcaaaatagtcctgagaactaattgtcacaagacattggaatatttgtactgctctcgtgccatttgagaggctgctgccccaggcaggccagcccctactcctcttggctacactcatgttgctcagactatatttcaaataaaaaatcttctcaccatgcaggtaggctcttgtattcctctccaagtgagcctggccccaccctattccacccaagggtctttcccagacttcccctgtttgtcccatctctgagggagaacaatacttcctactgtctaaggaaggccttctctagattctggagcttgtggttaggaaaccgggagccctgtactacttagttctctagagaccttctgaaggggtgaggggagcggctccacaatggtcaagtcacctccaagatctccaggctagtgacattggctttagggcgtatcgaaattttctaggcaccttcatctttccttcagttgattttcaacataagagaaccccttactggtaaaaagggaaaagggggtggagaagaggaattttataattttcttatagcattcaagaggtttcttatttcttacagcatcgctactgccacagagaactcaaatgtggcagaactgggattagacttgggagactggctgtcttttcactgatggtggagtcagggcccacccaagcacgaggagcaggctgtgtggaggtgtcgtctgacctctaacccaggtggcatggggttgcgcccagcaggatgtagtggagtaaagggaagagggtgctggccgggtgcttagaggtcatctttcaaggaggcattaaatatcaattataaattattaagtcagataaatatgcctgaccttttcacagttgaaaaaatacattttttcccctctatcaaatgccaagtttttagtggaaatgctaatggcagtgggaaaggttgcctcactttcagagagactctcgctgtctgcacccttttaataattgctcttcctggcaaggctgccacttccctgcctccccagctggcagtggggcaacccaggcctgtttccagctacctgcaaagccagacctagacctgccgtagctgttgtcccatgcctaattctagttacaggaagccatccctgtaccctgggtccattcacaggaatgggttccagaggaggctgatagaagggtttgaaatgactggctggatcccttcctgctcagacacagtggtagctggagagcaggcagagatggtagaattgcaggtttgaccacctgtcgtgaccccagatatacatctccttcctgggaagaacgtgagttggaaaaatgctgagccagtccctggaaaacctgggtcctggcctggattctgtccttagccagctcttaacaaatcccttaacctcactgtctcctctccttcacaatagagttagtaattcccatccaactggcttcacaggcttttgtgagcttatgaatgtgaaagtattttctagtttataaaacactatatgaatgtggggaaatctttacttgaccttagggcatggagggtggagcacattttgtctgctgtttggacttggatgctgattagcagttatgaagtggcccagacacctagccattctttagtaagagtgaagatagcattttaagccctccttgtgtgcctagcatcttactgaacactttctggtgattctctcctttaatcctcacaaagatctcacagttgtcctccattttacggagaagaaaccgaggctccgagaggttaaacgatgtgcagaggctacctgtagtgatggtgctgagtcaagcctgtcaaccactgtgctcgttagtgaccaaggctgctttgacaggctgccagcttgtcagtggtttgcagccccccagacatttgctttcctacttcccatgcagttggggtgccctgcaagtgccaggttctctttggagtccatctgtgccttgtcaccccaaggagggcctcgagcatcacaccgttgacatttcgaaacgtggtatctctacaacctttcattctcattgggatttaccttgccatttgaacaccatcattttttgaggactgtctagaaaaggttgcctaaccctcacagggaacacacagttccctcagagtccagcatcttctggtcttttctttttcaagatttttttaaatggttgtgctatcatttgtcatcatcagaaaatgcttgctgtaacaagcgtttatctgcacattatgctgcagtgaatgctctactgatcaagttaaacagataagatcccttcccttgtagaaactacaacttaatacagtctaagacttgacaaattacttagtatttattttccaactgctttatctctgtaaaatgatatgctgaattattataagctaattgttgtagaaagaactttccccttaacttatgtaaacagtctggttttaaaaaatttgataattgtggcccagtaagctcaacactttgccttccccaagactggggaacctctgtcctgttcaccactgtatattcagcaccaggcagtttctttttttgtttgtttgtttttttgttttgaaaaattaatacatatacatggtaagacattccacaatacaaaagggtatacaataaatggtaagcttccccatggaggtcagcctctagtcccctctccagagttaatcactgttatctatatgttgtgtatcctttcatagcaattctatgcatttacaagtttataaatatgtatatttatatatctatttttaatacaaatagtagaattctatacacagtgttctgaagcttgctttcttatatagtattttggagattattccaaattcatacattgggtcagagtaattctttaaaagttccttgcatataacagtgattcaaaaagtatatggatgaatgagtgaatgctgcatgaatgaatgaatctgattcaattggtagctacagctgttctctcagggtctgatctgaccaagacagcaccttctagattctagaatgtgtcctcctgactaaggggttcaggatactgttcaccttctccaacagatgccaccggagccttaggaactgggcacaggaagccttgggcccctggaggaaaaagttgagactaggacgcaggtcccaagtatgggatttttttgggttcctacttaaaatgcttttttctttattggaaaatgatgtaacattttagagaaattaaaaagcacacatatttata

SEQ ID NO: 735958 - DNA, 3808 bp, Homo sapiens
gcctgcgccgcgcagcccgcctcgggcgggaggcgggaggcgggaggccgggcccaggccggggcagcccctccaccgcaccgtcctgggccggtgcccaggtccgagtcgccttccgcctgccccccccgccaatcccccgccgcggcagccccagccaggtcccgccgccaggccggctcccgcccccgctccgcccccggagccgcagccccgcccgccatcgccgtcgccatgttgtggctcccgcagccggcgctggggacgcgcgcggccgagactctggcctgcagtcgccgccgccgccgccaggtggtgtttggactctagaccatgtgcctaggtagaagtttttcctttctccgcagctctgctcccctagcaacgctcgccacacccttgttttgagatcctctctaaggagcggagagtttaataggcaagaaggaagggagaagacagaaggaagacgctcccccgtacggagacagagggagggggggctccaaagccgaaagaggaggtccctacctgccacggataccagtcagcccttgccagcatccagccatgggggatatgaaaaccccagattttgatgaccttctggctgcctttgacatcccagaccccaccagccttgatgccaaggaggccatccagacacccagtgaggagaatgagagtcccctcaaacctccaggcatatgtatggatgaaagtgtgtccttgtctcactcaggatcagcccccgatgtgccggccgtgagtgtcattgtcaagaacaccagccgccaggagtcatttgaagcggagaaagaccacattactcccagtctcctacacaatggattccggggctcagatctgcctccagatccccacaactgtgggaaatttgattctacttttatgaatggagacagtgccaggagtttccctggcaaactggagcctcccaagtcagagccattacccaccttcaaccagttcagtccaatctccagcccagaacctgaggatcccatcaaagataacggatttgggataaagcccaaacactctgacagttatttcccaccccctcttgggtgcggggctgtgggaggcccagtcctggaggctctggctaagtttccggttccagagctgcatatgtttgatcatttttgtaagaaagaacccaagccagaacccctgcccttggggagccagcaggaacacgagcaaagtgggcagaacacagtggaacctcacaaggatccggatgccactcgattcttcggggaagctttggagttcaacagccatcctagcaacagtattggagagtccaaggggcttgcccgggagcttggtacctgctcatcagtcccccctaggcagcgtctaaagccagctcattccaagctgtcctcttgtgtggcagccttggtggccttgcaggccaaaagagtggctagtgtcactaaggaggatcagcctggccacacaaaggatctctcagggcccactaaagagagttctaaaggtagccccaaaatgcccaagtcaccaaagagtccccggagccctctggaggccactagaaaaagtatcaagccatcggacagccctcgtagcatctgcagtgacagcagcagcaaaggctcaccgtctgtggctgccagctccccaccagcaattcccaaagtgagaatcaaaaccattaagacatcatcaggggaaatcaaacggactgtcacaaggatcctgccagatcctgatgatccaagtaagtcccctgttgggtcacctctagggagcgccattgcagaggcccccagcgagatgccaggggatgaggtgcctgtggaagagcactttcctgaggcaggcacaaattcagggagcccccagggggccaggaaaggggacgagagcatgacaaaggccagtgactcgtcatctcccagctgcagttctgggccccgggtcccaaagggggctgccccaggctcacagacaggcaagaagcaacagagcacagcactgcaggcatccaccctggcccctgccaacctcctgcccaaagccgtgcacttggccaacctgaacctcgtcccccacagtgttgctgcatcagtgacagccaagtcttcagtgcaaagacggagccagccacagcttacacaaatgtcggtgcccctggtccaccaggtgaaaaaggctgccccactgattgtagaggtcttcaacaaggtccttcacagctccaaccccgtgcccctctatgcgccaaatctcagcccgcctgcggacagcaggatccacgtgccggccagtgggtactgctgcctggagtgtggagacgcatttgccttagagaagagcctgagccagcactatggccggcggagcgtccacattgaggtactgtgcacactgtgctccaagacgctgctcttcttcaacaagtgcagcctgctccggcacgcccgtgaccacaagagcaaggggctcgtcatgcagtgttcccagctgctggtgaagcctatctctgcggaccaaatgttcgtgtcggcccctgtgaactccacggcaccagcagccccagccccttcatcctctcccaaacatggcctcacttcgggcagtgccagtccccctcctccagccttgccactctacccagaccctgtgaggctcatccggtactcaatcaagtgtcttgaatgtcacaagcagatgcgggactacatggtcctggctgcacatttccagaggacaacagaggagacagaggggctgacctgccaggtatgccagatgctgctgcccaaccagtgcagtttctgtgcccaccagcggattcatgcacacaagtccccctactgctgcccggagtgtggggtcctctgccgctctgcctacttccagacccatgtaaaggagaattgcctgcactatgcccgcaaggtgggctacaggtgcatccactgtggtgtcgtccacctgaccttggccttgctgaaaagccacatccaggagcgacactgccaggttttccacaaatgtgcattctgccccatggccttcaagactgccagcagcactgcagaccacagtgccacccagcaccccacccagccccacagaccctcccagctcatttataagtgctcctgtgaaatggtcttcaacaagaagaggcacattcagcagcatttttaccagaatgtcagcaagacgcaggtgggcgtcttcaagtgccctgagtgcccactcttgttcgtgcagaagccggagttgatgcaacacgtcaagagcacccacggtgttccccgaaatgtggacgagctgtcaagcctccagtcttcagcggacacatcctcaagccgccctggctctcgagttcccactgagccaccagccactagtgtggctgctcggagcagctccctgccttctggccgctggggtaggcctgaagcccaccgcagggtggaagccaggccgcggctgaggaacactggctggacctgccaggagtgccaggagtgggttccagatcgggagagctacgtgtcccacatgaaaaagagccacggtcggacattgaagcggtacccatgccggcagtgtgaacagtccttccacacccccaacagcctgcgcaaacacatccgcaacaaccatgacacagtaaagaagttctacacctgcgggtactgcacagaggacagccccagctttcctcggccctcccttctggagagccacatcagccttatgcatgagtgcacaagtgaacctccggcgaatgaag

SEQ ID NO: 735959 - DNA, 3340 bp, Homo sapiens
  misc_feature (3315)..(3315): n is a, c, g, or t
  misc_feature (3340)..(3340): n is a, c, g, or t
gcctgcgccgcgcagcccgcctcgggcgggaggcgggaggcgggaggccgggcccaggccggggcagcccctccaccgcaccgtcctgggccggtgcccaggtccgagtcgccttccgcctgccccccccgccaatcccccgccgcggcagccccagccaggtcccgccgccaggccggctcccgcccccgctccgcccccggagccgcagccccgcccgccatcgccgtcgccatgttgtggctcccgcagccggcgctggggacgcgcgcggccgagactctggcctgcagtcgccgccgccgccgccaggtggtgtttggactctagaccatgtgcctaggtagaagtttttcctttctccgcagctctgctcccctagcaacgctcgccacacccttgttttgagatcctctctaaggagcggagagtttaataggcaagaaggaagggagaagacagaaggaagacgctcccccgtacggagacagagggagggggggctccaaagccgaaagaggaggtccctacctgccacggataccagtcagcccttgccagcatccagccatgggggatatgaaaaccccagattttgatgaccttctggctgcctttgacatcccagaccccaccagccttgatgccaaggaggccatccagacacccagtgaggagaatgagagtcccctcaaacctccaggcatatgtatggatgaaagtgtgtccttgtctcactcaggatcagcccccgatgtgccggccgtgagtgtcattgtcaagaacaccagccgccaggagtcatttgaagcggagaaagaccacattactcccagtctcctacacaatggattccggggctcagatctgcctccagatccccacaactgtgggaaatttgattctacttttatgaatggagacagtgccaggagtttccctggcaaactggagcctcccaagtcagagccattacccaccttcaaccagttcagtccaatctccagcccagaacctgaggatcccatcaaagataacggatttgggataaagcccaaacactctgacagttatttcccaccccctcttgggtgcggggctgtgggaggcccagtcctggaggctctggctaagtttccggttccagagctgcatatgtttgatcatttttgtaagaaagaacccaagccagaacccctgcccttggggagccagcaggaacacgagcaaagtgggcagaacacagtggaacctcacaaggatccggatgccactcgattcttcggggaagctttggagttcaacagccatcctagcaacagtattggagagtccaaggggcttgcccgggagcttggtacctgctcatcagtcccccctaggcagcgtctaaagccagctcattccaagctgtcctcttgtgtggcagccttggtggccttgcaggccaaaagagtggctagtgtcactaaggaggatcagcctggccacacaaaggatctctcagggcccactaaagagagttctaaaggtagccccaaaatgcccaagtcaccaaagagtccccggagccctctggaggccactagaaaaagtatcaagccatcggacagccctcgtagcatctgcagtgacagcagcagcaaaggctcaccgtctgtggctgccagctccccaccagcaattcccaaagtgagaatcaaaaccattaagacatcatcaggggaaatcaaacggactgtcacaaggatcctgccagatcctgatgatccaagtaagtcccctgttgggtcacctctagggagcgccattgcagaggcccccagcgagatgccaggggatgaggtgcctgtggaagagcactttcctgaggcaggcacaaattcagggagcccccagggggccaggaaaggggacgagagcatgacaaaggccagtgactcgtcatctcccagctgcagttctgggccccgggtcccaaagggggctgccccaggctcacagacaggcaagaagcaacagagcacagcactgcaggcatccaccctggcccctgccaacctcctgcccaaagccgtgcacttggccaacctgaacctcgtcccccacagtgttgctgcatcagtgacagccaagtcttcagtgcaaagacggagccagccacagcttacacaaatgtcggtgcccctggtccaccaggtgaaaaaggctgccccactgattgtagaggtcttcaacaaggtccttcacagctccaaccccgtgcccctctatgcgccaaatctcagcccgcctgcggacagcaggatccacgtgccggccagtgggtactgctgcctggagtgtggagacgcatttgccttagagaagagcctgagccagcactatggccggcggagcgtccacattgaggtactgtgcacactgtgctccaagacgctgctcttcttcaacaagtgcagcctgctccggcacgcccgtgaccacaagagcaaggggctcgtcatgcagtgttcccagctgctggtgaagcctatctctgcggaccaaatgttcgtgtcggcccctgtgaactccacggcaccagcagccccagccccttcatcctctcccaaacatggcctcacttcgggcagtgccagtccccctcctccagccttgccactctacccagaccctgtgaggctcatccggtactcaatcaagtgtcttgaatgtcacaagcagatgcgggactacatggtcctggctgcacatttccagaggacaacagaggagacagaggggctgacctgccaggtatgccagatgctgctgcccaaccagtgcagtttctgtgcccaccagcggattcatgcacacaagtccccctactgctgcccggagtgtggggtcctctgccgctctgcctacttccagacccatgtaaaggagaattgcctgcactatgcccgcaaggtgggctacaggtgcatccactgtggtgtcgtccacctgaccttggccttgctgaaaagccacatccaggagcgacactgccaggttttccacaaatgtgcattctgccccatggccttcaagactgccagcagcactgcagaccacagtgccacccagcaccccacccagccccacagaccctcccagctcatttataagtgctcctgtgaaatggtcttcaacaagaagaggcacattcagcagcatttttaccagaatgtcagcaagacgcaggtgggcgtcttcaagtgccctgagtgcccactcttgttcgtgcagaagccggagttgatgcaacacgtcaagacaccacgngtccgaatgtgacactgcagctcan

SEQ ID NO: 735960 - DNA, 2765 bp, Homo sapiens; identical to SEQ ID NO: 449095

SEQ ID NO: 735961 - DNA, 1309 bp, Homo sapiens
gaggcatagatctcctcctctctgaatcccatgcccccatcagccacataccacatagggaggccacagatgggccgtggtgggtggtggtagcctttgcaccatggtgagcagagacggctggctctcctcagggctccggctggaaggtgtataccggaaagggggcgctcgtgcccgcagcctgagactcctggctgagttccgtcgggatgcccggtcggtgaagctccgaccaggggagcactttgtggaggatgtcactgacacactcaaacgcttctttcgtgagctcgatgaccctgtgacctctgcacggttgctgcctcgctggagggaggctgctggtattcctaagatccctgagagccaaggcccaaccaggatctctgccttcccccaccagaatccatggtttggcagccctccgccccatcacttcccaccctgggggatcatccagagacttggctcagggggaggtgggaagggggcagagacacatccatcctgcatttgtgcctaaaaatccctccctctgtaccagctgccactctttcttcccgggtcctccccaaccctcctccattccatccccagagctgccccagaagaatcagcgcctggagaaatataaagatgtgattggctgcctgccgcgggtcaaccgccgcacactggccaccctcattgggcatctctatcggtcagtatggctagaccctctgcagaacccttcctcacttcaatctgaccctgcactttcattcatttattcattcattcattcatttgttcattccacaaacagttgttaagtgaaggtatcatagcactaaggttcagagaatggatttgagggatcaggcagacctaggctttaatctggtgccgtcattctagctgtgtgactttgggtaagttacttgttctctctgggcctcaatttcttcatttctaaaaggaagtaatggatgatgtaatgaatcatatccacctcatagtttatgagagagttaaatgaaggctgggcgcgtggtgtctcacacctgtaatcccaacactttgggaagcaaggtgggcgggtcatctaaggccaggagtttgagactagcctggccaacatggtgaaacccagcctctactaaaaatacaaaaattagcctggcatggtggtacataccagtaatctcagctactcaggaggctgaggcacgagaatcgcttgagcacaggaggtggaggttgcagtgagccaagattgtaccacttcactccagcctgggtgacagagggagatcttgtctca

SEQ ID NO: 735962 - DNA, 5374 bp, Homo sapiens
ctgggacgagcggcgggcacccgctgagcggacggcggccgcgtagtgagcaatggcctgagcccccatggctgcccctcaggacctggacatcgctgtgtggctggccacggtgcacctggagcagtatgcagacacgttccgacggcatggcctggctacagcaggtgcagcccggggcctgggccacgaggagttgaagcagttgggcatcagcgccacagggcaccggaaacgcattctacgcctgctacagacaggcaccgaagagggctccctggatcccaaatcagatagtgccatggaaccatcccccagcccagccccgcaagcccagccccctaagcccgtgccgaagcccaggaccgtgtttggtggactcagtggccctgccaccactcagagacctgggctgagcccagccctcgggggaccaggagtgtccaggagcccagagcccagcccaaggccccctcctctccccacttcctcctctgagcagtcttcagccctaaatactgtggagatgatgcctaattccatctacttcggcctggactcaagaggcagggcacaggcagctcaggacaaggccccagacagctcccaaatctctgcccccacccctgccctcaggcccacaacaggcacagtgcacatcatggatcctggttgcctgtactatggtgtccaacctgtggggactccaggagcccccgacagaagagagagcagaggtgtttgtcagggcagggctgaacacaggctcagcagacaggatctggaggcacgggaggatgctggctatgccagccttgagctacctggagactccaccctcttatcgcccaccctggaaacagaggagaccagtgatgacctcatttcaccctatgccagcttctccttcacggcagaccgcctcacgcccctgctcagtggctggctagacaagctctcccctcagggaaactatgtcttccagagacgctttgtgcagttcaatgggaggagtctgatgtactttggcagtgacaaggaccccttccctaagggtgtgatacctttgactgccattgagatgacccgcagcagcaaggacaacaagttccaggtcatcaccggccagagggtgttcgtgttccgcacagagagcgaggctcagcgggacatgtggtgctccacgctgcagtcctgtctgaaggagcagcgcctcctgggccacccccggcccccccaaccaccccgacccctccgcacgggcatgctggagctgcgtggacacaaggccaaggtgtttgctgccttgagccctggagagctggcactgtacaagagtgagcaggccttctctctgggcatcgggatctgcttcatcgaactgcagggctgcagcgtccgggagaccaagagtcgaagctttgacctgctcacaccccatcgctgcttcagcttcacagccgagtctgggggtgctcggcagagctgggcggccgctctgcaggaagcagtaaccgagaccctgtctgactacgaggtggctgagaagatctggtctaatcgggccaaccggcagtgtgcggactgtgggtcctcccgcccagattgggctgctgtcaatttgggggtggtcatctgcaagcagtgtgcaggtcagcaccgggccctgggttctgggatctccaaggtgcagagcctgaagctggacacgagtgtctggagtaatgagatagtacagttattcattgtcctgggaaatgatcgtgccaaccgcttctgggcagggaccctacccccaggtgagggactacatccagatgcgacccctggcccccggggagagttcatctcccgaaagtaccgtctgggtctcttccggaagccccaccctcagtacccagatcatagccagcttctccaggcactgtgtgcagctgtggcaagacccaacctgctgaagaacatgacccagctcctctgtgttgaggcctttgaaggcgaggagccctggttccccccagcccctgatggcagctgccctggcctcttgccctcagacccctcccctggtgtgtacaatgaggtggtggtgcgtgctacttacagcggcttcctgtactgcagtcccgtcagcaacaaagctggaccctcaccccctcgcaggggccgggatgctcccccgcgcctttggtgtgtgctgggagcagctctggaaatgtttgcatcggaaaacagccctgaacccctcagcctcatacagccccaggatattgtatgtctgggtgtgagccccccacccactgacccaggtgacaggttccccttttcctttgagctcatcctcgctggggggaggatccagcattttggcacagatggagctgacagtctggaggcctggactagtgctgtgggcaagtggttctccccgctgagctgccaccagctgctgggccccgggctgctgcggctgggccgcctatggctgcggtccccctcccatacagccccggcccctggtctctggctgtcagggtttggcctccttcgtggtgaccacctcttcctgtgctcagcgccgggcccaggccccccagcccctgaggacatggtgcatctgcggcggctacaggagatcagtgtggtttctgcagctgacaccccagataagaaagagcatttggtcctggtggagacaggaaggaccctgtatctgcaaggagagggccggctggacttcacggcatggaacgcagccattgggggcgcggctggtgggggcggcacagggctgcaggagcagcagatgagccggggtgacatccccatcatcgtggatgcctgcatcagttttgttacccagcatgggctccggctggaaggtgtataccggaaagggggcgctcgtgcccgcagcctgagactcctggctgagttccgtcgggatgcccggtcggtgaagctccgaccaggggagcactttgtggaggatgtcactgacacactcaaacgcttctttcgtgagctcgatgaccctgtgacctctgcacggttgctgcctcgctggagggaggctgctgagctgccccagaagaatcagcgcctggagaaatataaagatgtgattggctgcctgccgcgggtcaaccgccgcacactggccaccctcattgggcatctctatcgggtgcagaaatgtgcggctctaaaccagatgtgcacgcggaacttggctctgctgtttgcacccagcgtgttccagacggatgggcgaggggagcacgaggtgcgagtgctgcaagagctcattgatggctacatctctgtctttgatatcgattctgaccaggtagctcagattgacttggaggtcagtcttatcaccacctggaaggacgtgcagctgtctcaggctggagacctcatcatggaagtttatatagagcagcagctcccagacaactgtgtcaccctgaaggtgtccccaaccctgactgctgaggagctgactaaccaggtactggagatgcgggggacagcagctgggatggacttgtgggtgacttttgagattcgcgagcatggggagctggagcggccactgcatcccaaggaaaaggtcttagagcaggctttacaatggtgccagctcccagagccctgctcagcttccctgctcttgaaaaaagtccccctggcccaagctggctgcctcttcacaggtatccgacgtgagagcccacgggtggggctgttgcggtgtcgtgaggagccacctcgcttgctgggaagccgcttccaggagaggttctttctgctgcgtggccgctgcctgctgctgctcaaggagaagaaaagctctaaaccagaacgggagtggcctttggaaggtgccaaggtctacctgggaatccgcaagaagttaaagcccccaacaccgtggggcttcacattgatactagagaagatgcacctctacttgtcctgcactgacgaggatgaaatgtgggattggaccaccagcatccttaaagcccagcacgatgaccagcagccagtggtcttacgacgccattcctcctctgaccttgcccgtcagaagtttggcactatgcctttgctgcctatccgtggggatgacagtggagccaccctcctctctgccaatcagaccctgcggcgactacacaaccggaggaccctgtccatgttctttccaatgaagtcatcccaggggtctgtggaggagcaagaggagctggaggagcctgtgtacgaggagccagtgtatgaggaagtaggggccttccctgagttgatccaggacacttctacctccttctccaccacacgggagtggacagtgaagccagagaaccccctcaccagccagaagtcattggatcaaccctttctctccaagtcaagcacccttggccaggaggagaggccacctgagccccctccaggccccccttcaaagagcagtccccaggcacgggggtccctagaggaacagctgctccaggagctcagcagcctcatcctgaggaaaggagagaccactgcaggcctgggaagtccttcccagccatccagcccccaatcccccagccccactggccttccaacacagacacctggcttccccacccaacccccatgcacttccagtccaccctccagccagcccctcacatgaccctaggaccagcagtctgagagggtaggtaccagaagacccagaaactcttatcgtggcactgttgcagcttcctctgccctggctggaaagactccagaatccagtgtggtgctgtggaaggagcactggactaaaggcttcagtggctgcgtgtcccaggacaggtcatggcccctctctgggcccagcccatttatctataccatgaggtaactgaagtaaggagagcagtgaatgtcaaactgtgtttcttagagccataagccccacatattatccctgaacaagggcagctcctgctttatatatttgatacgtaggggttccatgagagattttgggttttaaaggaatggttttactgcattaaagaaaaaaaatgctttggaaaccagaggcctgggtgatgttaaagtctatcctgtcccacttcctacattctgggactaccgtgaagcctggagtagggagagcgagtttgggagctgggactcggggagtcaaaaatagatgagtaattgtcaataaacctgggaaccaaaagactaccattctcattcattcattcaacaaatatgtattgtgcacctaattggtgccaggtctggggatatagcatgaacaaaacaaacagggcccctgctcttatgaatcctccgttgtggaggg

SEQ ID NO: 735963 - DNA, 5573 bp, Homo sapiens
ctgggacgagcggcgggcacccgctgagcggacggcggccgcgtagtgagcaatggcctgagcccccatggctgcccctcaggacctggacatcgctgtgtggctggccacggtgcacctggagcagtatgcagacacgttccgacggcatggcctggctacagcaggtgcagcccggggcctgggccacgaggagttgaagcagttgggcatcagcgccacagggcaccggaaacgcattctacgcctgctacagacaggcaccgaagagggctccctggatcccaaatcagatagtgccatggaaccatcccccagcccagccccgcaagcccagccccctaagcccgtgccgaagcccaggaccgtgtttggtggactcagtggccctgccaccactcagagacctgggctgagcccagccctcgggggaccaggagtgtccaggagcccagagcccagcccaaggccccctcctctccccacttcctcctctgagcagtcttcagccctaaatactgtggagatgatgcctaattccatctacttcggcctggactcaagaggcagggcacaggcagctcaggacaaggccccagacagctcccaaatctctgcccccacccctgccctcaggcccacaacaggcacagtgcacatcatggatcctggttgcctgtactatggtgtccaacctgtggggactccaggagcccccgacagaagagagagcagaggtgtttgtcagggcagggctgaacacaggctcagcagacaggatctggaggcacgggaggatgctggctatgccagccttgagctacctggagactccaccctcttatcgcccaccctggaaacagaggagaccagtgatgacctcatttcaccctatgccagcttctccttcacggcagaccgcctcacgcccctgctcagtggctggctagacaagctctcccctcagggaaactatgtcttccagagacgctttgtgcagttcaatgggaggagtctgatgtactttggcagtgacaaggaccccttccctaagggtgtgatacctttgactgccattgagatgacccgcagcagcaaggacaacaagttccaggtcatcaccggccagagggtgttcgtgttccgcacagagagcgaggctcagcgggacatgtggtgctccacgctgcagtcctgtctgaaggagcagcgcctcctgggccacccccggcccccccaaccaccccgacccctccgcacgggcatgctggagctgcgtggacacaaggccaaggtgtttgctgccttgagccctggagagctggcactgtacaagagtgagcaggccttctctctgggcatcgggatctgcttcatcgaactgcagggctgcagcgtccgggagaccaagagtcgaagctttgacctgctcacaccccatcgctgcttcagcttcacagccgagtctgggggtgctcggcagagctgggcggccgctctgcaggaagcagtaaccgagaccctgtctgactacgaggtggctgagaagatctggtctaatcgggccaaccggcagtgtgcggactgtgggtcctcccgcccagattgggctgctgtcaatttgggggtggtcatctgcaagcagtgtgcaggtcagcaccgggccctgggttctgggatctccaaggtgcagagcctgaagctggacacgagtgtctggagtaatgagatagtacagttattcattgtcctgggaaatgatcgtgccaaccgcttctgggcagggaccctacccccaggtgagggactacatccagatgcgacccctggcccccggggagagttcatctcccgaaagtaccgtctgggtctcttccggaagccccaccctcagtacccagatcatagccagcttctccaggcactgtgtgcagctgtggcaagacccaacctgctgaagaacatgacccagctcctctgtgttgaggcctttgaaggcgaggagccctggttccccccagcccctgatggcagctgccctggcctcttgccctcagacccctcccctggtgtgtacaatgaggtggtggtgcgtgctacttacagcggcttcctgtactgcagtcccgtcagcaacaaagctggaccctcaccccctcgcaggggccgggatgctcccccgcgcctttggtgtgtgctgggagcagctctggaaatgtttgcatcggaaaacagccctgaacccctcagcctcatacagccccaggatattgtatgtctgggtgtgagccccccacccactgacccaggtgacaggttccccttttcctttgagctcatcctcgctggggggaggatccagcattttggcacagatggagctgacagtctggaggcctggactagtgctgtgggcaagtggttctccccgctgagctgccaccagctgctgggccccgggctgctgcggctgggccgcctatggctgcggtccccctcccatacagccccggcccctggtctctggctgtcagggtttggcctccttcgtggtgaccacctcttcctgtgctcagcgccgggcccaggccccccagcccctgaggacatggtgcatctgcggcggctacaggagatcagtgtggtttctgcagctgacaccccagataagaaagagcatttggtcctggtggagacaggaaggaccctgtatctgcaaggagagggccggctggacttcacggcatggaacgcagccattgggggcgcggctggtgggggcggcacagggctgcaggagcagcagatgagccggggtgacatccccatcatcgtggatgcctgcatcagttttgttacccagcatgggctccggctggaaggtgtataccggaaagggggcgctcgtgcccgcagcctgagactcctggctgagttccgtcgggatgcccggtcggtgaagctccgaccaggggagcactttgtggaggatgtcactgacacactcaaacgcttctttcgtgagctcgatgaccctgtgacctctgcacggttgctgcctcgctggagggaggctgctgagctgccccagaagaatcagcgcctggagaaatataaagatgtgattggctgcctgccgcgggtcaaccgccgcacactggccaccctcattgggcatctctatcgggtgcagaaatgtgcggctctaaaccagatgtgcacgcggaacttggctctgctgtttgcacccagcgtgttccagacggatgggcgaggggagcacgaggtgcgagtgctgcaagagctcattgatggctacatctctgtctttgatatcgattctgaccaggtagctcagattgacttggaggtcagtcttatcaccacctggaaggacgtgcagctgtctcaggctggagacctcatcatggaagtttatatagagcagcagctcccagacaactgtgtcaccctgaaggtgtccccaaccctgactgctgaggagctgactaaccaggtactggagatgcgggggacagcagctgggatggacttgtgggtgacttttgagattcgcgagcatggggagctggagcggccactgcatcccaaggaaaaggtcttagagcaggctttacaatggtgccagctcccagagccctgctcagcttccctgctcttgaaaaaagtccccctggcccaagctggctgcctcttcacaggtatccgacgtgagagcccacgggtggggctgttgcggtgtcgtgaggagccacctcgcttgctgggaagccgcttccaggagaggttctttctgctgcgtggccgctgcctgctgctgctcaaggagaagaaaagctctaaaccagaacgggagtggcctttggaaggtgccaaggtctacctgggaatccgcaagaagttaaagcccccaacaccgtggggcttcacattgatactagagaagatgcacctctacttgtcctgcactgacgaggatgaaatgtgggattggaccaccagcatccttaaagcccagcacgatgaccagcagccagtggtcttacgacgccattcctcctctgaccttgcccgtcagaagtttggcactatgcctttgctgcctatccgtggggatgacagtggagccaccctcctctctgccaatcagaccctgcggcgactacacaaccggaggaccctgtccatgttctttccaatgaagtcatcccaggggtctgtggaggagcaagaggagctggaggagcctgtgtacgaggagccagtgtatgaggaagtaggggccttccctgagttgatccaggacacttctacctccttctccaccacacgggagtggacagtgaagccagagaaccccctcaccagccagaagtcattggatcaaccctttctctccaagtcaagcacccttggccaggaggagaggccacctgagccccctccaggccccccttcaaagagcagtccccaggcacgggggtccctagaggaacagctgctccaggagctcagcagcctcatcctgaggaaaggagagaccactgcaggcctgggaagtccttcccagccatccagcccccaatcccccagccccactggccttccaacacagacacctggcttccccacccaacccccatgcacttccagtccaccctccagccagcccctcacatgaccctaggaccagcagtctgagagggtaggtaccagaagacccagaaactcttatcgtggcactgttgcagcttcctctgccctggctggaaagactccagaatccagtgtggtgctgtggaaggagcactggactaaaggcttcagtggctgcgtgtcccaggacaggtcatggcccctctctgggcccagcccatttatctataccatgaggtaactgaagtaaggagagcagtgaatgtcaaactgtgtttcttagagccataagccccacatattatccctgaacaagggcagctcctgctttatatatttgatacgtaggggttccatgagagattttgggttttaaaggaatggttttactgcattaaagaaaaaaaatgctttggaaaccagaggcctgggtgatgttaaagtctatcctgtcccacttcctacattctgggactaccgtgaagcctggagtagggagagcgagtttgggagctgggactcggggagtcaaaaatagatgagtaattgtcaataaacctgggaaccaaaagacaaaaaaaaaaaaaaacaacaacgtgtgtgtgcgggcggcctttgggccctcgcgaagaaaagcttttttcaacaacacttcgcggtgggggcggcgcgggggcggcccccccagcagggttaggtgcaacaccggtggctccaagagcgggttccccagagggaaaatcgcgggccagagaacaagggccggggcatctcccccccattaaaaagcgccgcgggcgaacgcggagcgttcggaaacaatcccaggaggggctccgggaggcacatccggggtctatacgcgggcgttcccaggcgactcgctttcaatcagc

SEQ ID NO: 735964 - DNA, 5651 bp, Homo sapiens
ctgggacgagcggcgggcacccgctgagcggacggcggccgcgtagtgaggacctggacatcgctgtgtggctggccacggtgcacctggagcagtatgcagacacgttccgacggcatggcctggctacagcaggtgcagcccggggcctgggccacgaggagttgaagcagttgggcatcagcgccacagggcaccggaaacgcattctacgcctgctacagacaggcaccgaagagggctccctggatcccaaatcagatagtgccatggaaccatcccccagcccagccccgcaagcccagccccctaagcccgtgccgaagcccaggaccgtgtttggtggactcagtggccctgccaccactcagagacctgggctgagcccagccctcgggggaccaggagtgtccaggagcccagagcccagcccaaggccccctcctctccccacttcctcctctgagcagtcttcagccctaaatactgtggagatgatgcctaattccatctacttcggcctggactcaagaggcagggcacaggcagctcaggacaaggccccagacagctcccaaatctctgcccccacccctgccctcaggcccacaacaggcacagtgcacatcatggatcctggttgcctgtactatggtgtccaacctgtggggactccaggagcccccgacagaagagagagcagaggtgtttgtcagggcagggctgaacacaggctcagcagacaggatctggaggcacgggaggatgctggctatgccagccttgagctacctggagactccaccctcttatcgcccaccctggaaacagaggagaccagtgatgacctcatttcaccctatgccagcttctccttcacggcagaccgcctcacgcccctgctcagtggctggctagacaagctctcccctcagggaaactatgtcttccagagacgctttgtgcagttcaatgggaggagtctgatgtactttggcagtgacaaggaccccttccctaagggtgtgatacctttgactgccattgagatgacccgcagcagcaaggacaacaagttccaggtcatcaccggccagagggtgttcgtgttccgcacagagagcgaggctcagcgggacatgtggtgctccacgctgcagtcctgtctgaaggagcagcgcctcctgggccacccccggcccccccaaccaccccgacccctccgcacgggcatgctggagctgcgtggacacaaggccaaggtgtttgctgccttgagccctggagagctggcactgtacaagagtgagcaggccttctctctgggcatcgggatctgcttcatcgaactgcagggctgcagcgtccgggagaccaagagtcgaagctttgacctgctcacaccccatcgctgcttcagcttcacagccgagtctgggggtgctcggcagagctgggcggccgctctgcaggaagcagtaaccgagaccctgtctgactacgaggtggctgagaagatctggtctaatcgggccaaccggcagtgtgcggactgtgggtcctcccgcccagattgggctgctgtcaatttgggggtggtcatctgcaagcagtgtgcaggtcagcaccgggccctgggttctgggatctccaaggtgcagagcctgaagctggacacgagtgtctggagtaatgagatagtacagttattcattgtcctgggaaatgatcgtgccaaccgcttctgggcagggaccctacccccaggtgagggactacatccagatgcgacccctggcccccggggagagttcatctcccgaaagtaccgtctgggtctcttccggaagccccaccctcagtacccagatcatagccagcttctccaggcactgtgtgcagctgtggcaagacccaacctgctgaagaacatgacccagctcctctgtgttgaggcctttgaaggcgaggagccctggttccccccagcccctgatggcagctgccctggcctcttgccctcagacccctcccctggtgtgtacaatgaggtggtggtgcgtgctacttacagcggcttcctgtactgcagtcccgtcagcaacaaagctggaccctcaccccctcgcaggggccgggatgctcccccgcgcctttggtgtgtgctgggagcagctctggaaatgtttgcatcggaaaacagccctgaacccctcagcctcatacagccccaggatattgtatgtctgggtgtgagccccccacccactgacccaggtgacaggtaatagcccttctgtgaccactgagcttcccccttttctcttcccaacctccagcctgacagccctctcattggtcccatcctcctccctgacctcatcttctctccaggttccccttttcctttgagctcatcctcgctggggggaggatccagcattttggcacagatggagctgacagtctggaggcctggactagtgctgtgggcaagtggttctccccgctgagctgccaccagctgctgggccccgggctgctgcggctgggccgcctatggctgcggtccccctcccatacagccccggcccctggtctctggctgtcagggtttggcctccttcgtggtgaccacctcttcctgtgctcagcgccgggcccaggccccccagcccctgaggacatggtgcatctgcggcggctacaggagatcagtgtggtttctgcagctgacaccccagataagaaagagcatttggtcctggtggagacaggaaggaccctgtatctgcaaggagagggccggctggacttcacggcatggaacgcagccattgggggcgcggctggtgggggcggcacagggctgcaggagcagcagatgagccggggtgacatccccatcatcgtggatgcctgcatcagttttgttacccagcatgggctccggctggaaggtgtataccggaaagggggcgctcgtgcccgcagcctgagactcctggctgagttccgtcgggatgcccggtcggtgaagctccgaccaggggagcactttgtggaggatgtcactgacacactcaaacgcttctttcgtgagctcgatgaccctgtgacctctgcacggttgctgcctcgctggagggaggctgctgagctgccccagaagaatcagcgcctggagaaatataaagatgtgattggctgcctgccgcgggtcaaccgccgcacactggccaccctcattgggcatctctatcgggtgcagaaatgtgcggctctaaaccagatgtgcacgcggaacttggctctgctgtttgcacccagcgtgttccagacggatgggcgaggggagcacgaggtgcgagtgctgcaagagctcattgatggctacatctctgtctttgatatcgattctgaccaggtagctcagattgacttggaggtcagtcttatcaccacctggaaggacgtgcagctgtctcaggctggagacctcatcatggaagtttatatagagcagcagctcccagacaactgtgtcaccctgaaggtgtccccaaccctgactgctgaggagctgactaaccaggtactggagatgcgggggacagcagctgggatggacttgtgggtgacttttgagattcgcgagcatggggagctggagcggccactgcatcccaaggaaaaggtcttagagcaggctttacaatggtgccagctcccagagccctgctcagcttccctgctcttgaaaaaagtccccctggcccaagctggctgcctcttcacaggtatccgacgtgagagcccacgggtggggctgttgcggtgtcgtgaggagccacctcgcttgctgggaagccgcttccaggagaggttctttctgctgcgtggccgctgcctgctgctgctcaaggagaagaaaagctctaaaccagaacgggagtggcctttggaaggtgccaaggtctacctgggaatccgcaagaagttaaagcccccaacaccgtggggcttcacattgatactagagaagatgcacctctacttgtcctgcactgacgaggatgaaatgtgggattggaccaccagcatccttaaagcccagcacgatgaccagcagccagtggtcttacgacgccattcctcctctgaccttgcccgtcagaagtttggcactatgcctttgctgcctatccgtggggatgacagtggagccaccctcctctctgccaatcagaccctgcggcgactacacaaccggaggaccctgtccatgttctttccaatgaagtcatcccaggggtctgtggaggagcaagaggagctggaggagcctgtgtacgaggagccagtgtatgaggaagtaggggccttccctgagttgatccaggacacttctacctccttctccaccacacgggagtggacagtgaagccagagaaccccctcaccagccagaagtcattggatcaaccctttctctccaagtcaagcacccttggccaggaggagaggccacctgagccccctccaggccccccttcaaagagcagtccccaggcacgggggtccctagaggaacagctgctccaggagctcagcagcctcatcctgaggaaaggagagaccactgcaggcctgggaagtccttcccagccatccagcccccaatcccccagccccactggccttccaacacagacacctggcttccccacccaacccccatgcacttccagtccaccctccagccagcccctcacatgaccctaggaccagcagtctgagagggtaggtaccagaagacccagaaactcttatcgtggcactgttgcagcttcctctgccctggctggaaagactccagaatccagtgtggtgctgtggaaggagcactggactaaaggcttcagtggctgcgtgtcccaggacaggtcatggcccctctctgggcccagcccatttatctataccatgaggtaactgaagtaaggagagcagtgaatgtcaaactgtgtttcttagagccataagccccacatattatccctgaacaagggcagctcctgctttatatatttgatacgtaggggttccatgagagattttgggttttaaaggaatggttttactgcattaaagaaaaaaaatgctttggaaaccagaggcctgggtgatgttaaagtctatcctgtcccacttcctacattctgggactaccgtgaagcctggagtagggagagcgagtttgggagctgggactcggggagtcaaaaatagatgagtaattgtcaataaacctgggaaccaaaagacaaaaaaaaaaaaaaacaacaacgtgtgtgtgcgggcggcctttgggccctcgcgaagaaaagcttttttcaacaacacttcgcggtgggggcggcgcgggggcggcccccccagcagggttaggtgcaacaccggtggctccaagagcgggttccccagagggaaaatcgcgggccagagaacaagggccggggcatctcccccccattaaaaagcgccgcgggcgaacgcggagcgttcggaaacaatcccaggaggggctccgggaggcacatccggggtctatacgcgggcgttcccaggcgactcgctttcaatcagc

SEQ ID NO: 735965 - DNA, 5947 bp, Homo sapiens
gagcagagctttgacccagacccagggtgggcaggaactgaggggccaactctagcactgacttactgtgaacctggggcaagccccttcccctctctgggcctcagtttccttaacttcaaatgaagtcccttccctaagtagagagccattgctgttgttctgggatggctctgcttccagatcgcaggcctttcagcatctttctttggaggaagattggaggctggtgctcactgtccaggcctcagactctggggcagagagggggattctcagcctgagccctcccttcaccctgcccctccccccagcaatggcctgagcccccatggctgcccctcaggacctggacatcgctgtgtggctggccacggtgcacctggagcagtatgcagacacgttccgacggcatggcctggctacagcaggtgcagcccggggcctgggccacgaggagttgaagcagttgggcatcagcgccacagggcaccggaaacgcattctacgcctgctacagacaggcaccgaagagggctccctggatcccaaatcagatagtgccatggaaccatcccccagcccagccccgcaagcccagccccctaagcccgtgccgaagcccaggaccgtgtttggtggactcagtggccctgccaccactcagagacctgggctgagcccagccctcgggggaccaggagtgtccaggagcccagagcccagcccaaggccccctcctctccccacttcctcctctgagcagtcttcagccctaaatactgtggagatgatgcctaattccatctacttcggcctggactcaagaggcagggcacaggcagctcaggacaaggccccagacagctcccaaatctctgcccccacccctgccctcaggcccacaacaggcacagtgcacatcatggatcctggttgcctgtactatggtgtccaacctgtggggactccaggagcccccgacagaagagagagcagaggtgtttgtcagggcagggctgaacacaggctcagcagacaggatctggaggcacgggaggatgctggctatgccagccttgagctacctggagactccaccctcttatcgcccaccctggaaacagaggagaccagtgatgacctcatttcaccctatgccagcttctccttcacggcagaccgcctcacgcccctgctcagtggctggctagacaagctctcccctcagggaaactatgtcttccagagacgctttgtgcagttcaatgggaggagtctgatgtactttggcagtgacaaggaccccttccctaagggtgtgatacctttgactgccattgagatgacccgcagcagcaaggacaacaagttccaggtcatcaccggccagagggtgttcgtgttccgcacagagagcgaggctcagcgggacatgtggtgctccacgctgcagtcctgtctgaaggagcagcgcctcctgggccacccccggcccccccaaccaccccgacccctccgcacgggcatgctggagctgcgtggacacaaggccaaggtgtttgctgccttgagccctggagagctggcactgtacaagagtgagcaggccttctctctgggcatcgggatctgcttcatcgaactgcagggctgcagcgtccgggagaccaagagtcgaagctttgacctgctcacaccccatcgctgcttcagcttcacagccgagtctgggggtgctcggcagagctgggcggccgctctgcaggaagcagtaaccgagaccctgtctgactacgaggtggctgagaagatctggtctaatcgggccaaccggcagtgtgcggactgtgggtcctcccgcccagattgggctgctgtcaatttgggggtggtcatctgcaagcagtgtgcaggtcagcaccgggccctgggttctgggatctccaaggtgcagagcctgaagctggacacgagtgtctggagtaatgagatagtacagttattcattgtcctgggaaatgatcgtgccaaccgcttctgggcagggaccctacccccaggtgagggactacatccagatgcgacccctggcccccggggagagttcatctcccgaaagtaccgtctgggtctcttccggaagccccaccctcagtacccagatcatagccagcttctccaggcactgtgtgcagctgtggcaagacccaacctgctgaagaacatgacccagctcctctgtgttgaggcctttgaaggcgaggagccctggttccccccagcccctgatggcagctgccctggcctcttgccctcagacccctcccctggtgtgtacaatgaggtggtggtgcgtgctacttacagcggcttcctgtactgcagtcccgtcagcaacaaagctggaccctcaccccctcgcaggggccgggatgctcccccgcgcctttggtgtgtgctgggagcagctctggaaatgtttgcatcggaaaacagccctgaacccctcagcctcatacagccccaggatattgtatgtctgggtgtgagccccccacccactgacccaggtgacaggtaatagcccttctgtgaccactgagcttcccccttttctcttcccaacctccagcctgacagccctctcattggtcccatcctcctccctgacctcatcttctctccaggttccccttttcctttgagctcatcctcgctggggggaggatccagcattttggcacagatggagctgacagtctggaggcctggactagtgctgtgggcaagtggttctccccgctgagctgccaccagctgctgggccccgggctgctgcggctgggccgcctatggctgcggtccccctcccatacagccccggcccctggtctctggctgtcagggtttggcctccttcgtggtgaccacctcttcctgtgctcagcgccgggcccaggccccccagcccctgaggacatggtgcatctgcggcggctacaggagatcagtgtggtttctgcagctgacaccccagataagaaagagcatttggtcctggtggagacaggaaggaccctgtatctgcaaggagagggccggctggacttcacggcatggaacgcagccattgggggcgcggctggtgggggcggcacagggctgcaggagcagcagatgagccggggtgacatccccatcatcgtggatgcctgcatcagttttgttacccagcatgggctccggctggaaggtgtataccggaaagggggcgctcgtgcccgcagcctgagactcctggctgagttccgtcgggatgcccggtcggtgaagctccgaccaggggagcactttgtggaggatgtcactgacacactcaaacgcttctttcgtgagctcgatgaccctgtgacctctgcacggttgctgcctcgctggagggaggctgctgagctgccccagaagaatcagcgcctggagaaatataaagatgtgattggctgcctgccgcgggtcaaccgccgcacactggccaccctcattgggcatctctatcgggtgcagaaatgtgcggctctaaaccagatgtgcacgcggaacttggctctgctgtttgcacccagcgtgttccagacggatgggcgaggggagcacgaggtgcgagtgctgcaagagctcattgatggctacatctctgtctttgatatcgattctgaccaggtagctcagattgacttggaggtcagtcttatcaccacctggaaggacgtgcagctgtctcaggctggagacctcatcatggaagtttatatagagcagcagctcccagacaactgtgtcaccctgaaggtgtccccaaccctgactgctgaggagctgactaaccaggtactggagatgcgggggacagcagctgggatggacttgtgggtgacttttgagattcgcgagcatggggagctggagcggccactgcatcccaaggaaaaggtcttagagcaggctttacaatggtgccagctcccagagccctgctcagcttccctgctcttgaaaaaagtccccctggcccaagctggctgcctcttcacaggtatccgacgtgagagcccacgggtggggctgttgcggtgtcgtgaggagccacctcgcttgctgggaagccgcttccaggagaggttctttctgctgcgtggccgctgcctgctgctgctcaaggagaagaaaagctctaaaccagaacgggagtggcctttggaaggtgccaaggtctacctgggaatccgcaagaagttaaagcccccaacaccgtggggcttcacattgatactagagaagatgcacctctacttgtcctgcactgacgaggatgaaatgtgggattggaccaccagcatccttaaagcccagcacgatgaccagcagccagtggtcttacgacgccattcctcctctgaccttgcccgtcagaagtttggcactatgcctttgctgcctatccgtggggatgacagtggagccaccctcctctctgccaatcagaccctgcggcgactacacaaccggaggaccctgtccatgttctttccaatgaagtcatcccaggggtctgtggaggagcaagaggagctggaggagcctgtgtacgaggagccagtgtatgaggaagtaggggccttccctgagttgatccaggacacttctacctccttctccaccacacgggagtggacagtgaagccagagaaccccctcaccagccagaagtcattggatcaaccctttctctccaagtcaagcacccttggccaggaggagaggccacctgagccccctccaggccccccttcaaagagcagtccccaggcacgggggtccctagaggaacagctgctccaggagctcagcagcctcatcctgaggaaaggagagaccactgcaggcctgggaagtccttcccagccatccagcccccaatcccccagccccactggccttccaacacagacacctggcttccccacccaacccccatgcacttccagtccaccctccagccagcccctcacatgaccctaggaccagcagtctgagagggtaggtaccagaagacccagaaactcttatcgtggcactgttgcagcttcctctgccctggctggaaagactccagaatccagtgtggtgctgtggaaggagcactggactaaaggcttcagtggctgcgtgtcccaggacaggtcatggcccctctctgggcccagcccatttatctataccatgaggtaactgaagtaaggagagcagtgaatgtcaaactgtgtttcttagagccataagccccacatattatccctgaacaagggcagctcctgctttatatatttgatacgtaggggttccatgagagattttgggttttaaaggaatggttttactgcattaaagaaaaaaaatgctttggaaaccagaggcctgggtgatgttaaagtctatcctgtcccacttcctacattctgggactaccgtgaagcctggagtagggagagcgagtttgggagctgggactcggggagtcaaaaatagatgagtaattgtcaataaacctgggaaccaaaagacaaaaaaaaaaaaaaacaacaacgtgtgtgtgcgggcggcctttgggccctcgcgaagaaaagcttttttcaacaacacttcgcggtgggggcggcgcgggggcggcccccccagcagggttaggtgcaacaccggtggctccaagagcgggttccccagagggaaaatcgcgggccagagaacaagggccggggcatctcccccccattaaaaagcgccgcgggcgaacgcggagcgttcggaaacaatcccaggaggggctccgggaggcacatccggggtctatacgcgggcgttcccaggcgactcgctttcaatcagc

SEQ ID NO: 735966 - DNA, 4584 bp, Homo sapiens
gagcagagctttgacccagacccagggtgggcaggaactgaggggccaactctagcactgacttactgtgaacctggggcaagccccttcccctctctgggcctcagtttccttaacttcaaatgaagtcccttccctaagtagagagccattgctgttgttctgggatggctctgcttccagatcgcaggcctttcagcatctttctttggaggaagattggaggctggtgctcactgtccaggcctcagactctggggcagagagggggattctcagcctgagccctcccttcaccctgcccctccccccagcaatggcctgagcccccatggctgcccctcaggacctggacatcgctgtgtggctggccacggtgcacctggagcagtatgcagacacgttccgacggcatggcctggctacagcaggtgcagcccggggcctgggccacgaggagttgaagcagttgggcatcagcgccacagggcaccggaaacgcattctacgcctgctacagacaggcaccgaagagggctccctggatcccaaatcagatagtgccatggaaccatcccccagcccagccccgcaagcccagccccctaagcccgtgccgaagcccaggaccgtgtttggtggactcagtggccctgccaccactcagagacctgggctgagcccagccctcgggggaccaggagtgtccaggagcccagagcccagcccaaggccccctcctctccccacttcctcctctgagcagtcttcagccctaaatactgtggagatgatgcctaattccatctacttcggcctggactcaagaggcagggcacaggcagctcaggacaaggccccagacagctcccaaatctctgcccccacccctgccctcaggcccacaacaggcacagtgcacatcatggatcctggttgcctgtactatggtgtccaacctgtggggactccaggagcccccgacagaagagagagcagaggtgtttgtcagggcagggctgaacacaggctcagcagacaggatctggaggcacgggaggatgctggctatgccagccttgagctacctggagactccaccctcttatcgcccaccctggaaacagaggagaccagtgatgacctcatttcaccctatgccagcttctccttcacggcagaccgcctcacgcccctgctcagtggctggctagacaagctctcccctcagggaaactatgtcttccagagacgctttgtgcagttcaatgggaggagtctgatgtactttggcagtgacaaggaccccttccctaagggtgtgatacctttgactgccattgagatgacccgcagcagcaaggacaacaagttccaggtcatcaccggccagagggtgttcgtgttccgcacagagagcgaggctcagcgggacatgtggtgctccacgctgcagtcctgtctgaaggagcagcgcctcctgggccacccccggcccccccaaccaccccgacccctccgcacgggcatgctggagctgcgtggacacaaggccaaggtgtttgctgccttgagccctggagagctggcactgtacaagagtgagcaggccttctctctgggcatcgggatctgcttcatcgaactgcagggctgcagcgtccgggagaccaagagtcgaagctttgacctgctcacaccccatcgctgcttcagcttcacagccgagtctgggggtgctcggcagagctgggcggccgctctgcaggaagcagtaaccgagaccctgtctgactacgaggtggctgagaagatctggtctaatcgggccaaccggcagtgtgcggactgtgggtcctcccgcccagattgggctgctgtcaatttgggggtggtcatctgcaagcagtgtgcaggtcagcaccgggccctgggttctgggatctccaaggtgcagagcctgaagctggacacgagtgtctggagtaatgagatagtacagttattcattgtcctgggaaatgatcgtgccaaccgcttctgggcagggaccctacccccaggtgagggactacatccagatgcgacccctggcccccggggagagttcatctcccgaaagtaccgtctgggtctcttccggaagccccaccctcagtacccagatcatagccagcttctccaggcactgtgtgcagctgtggcaagacccaacctgctgaagaacatgacccagctcctctgtgttgaggcctttgaaggcgaggagccctggttccccccagcccctgatggcagctgccctggcctcttgccctcagacccctcccctggtgtgtacaatgaggtggtggtgcgtgctacttacagcggcttcctgtactgcagtcccgtcagcaacaaagctggaccctcaccccctcgcaggggccgggatgctcccccgcgcctttggtgtgtgctgggagcagctctggaaatgtttgcatcggaaaacagccctgaacccctcagcctcatacagccccaggatattgtatgtctgggtgtgagccccccacccactgacccaggtgacaggtaatagcccttctgtgaccactgagcttcccccttttctcttcccaacctccagcctgacagccctctcattggtcccatcctcctccctgacctcatcttctctccaggttccccttttcctttgagctcatcctcgctggggggaggatccagcattttggcacagatggagctgacagtctggaggcctggactagtgctgtgggcaagtggttctccccgctgagctgccaccagctgctgggccccgggctgctgcggctgggccgcctatggctgcggtccccctcccatacagccccggcccctggtctctggctgtcagggtttggcctccttcgtggtgaccacctcttcctgtgctcagcgccgggcccaggccccccagcccctgaggacatggtgcatctgcggcggctacaggagatcagtgtggtttctgcagctgacaccccagataagaaagagcatttggtcctggtggagacaggaaggaccctgtatctgcaaggagagggccggctggacttcacggcatggaacgcagccattgggggcgcggctggtgggggcggcacagggctgcaggagcagcagatgagccggggtgacatccccatcatcgtggatgcctgcatcagttttgttacccagcatgggctccggctggaaggtgtataccggaaagggggcgctcgtgcccgcagcctgagactcctggctgagttccgtcgggatgcccggtcggtgaagctccgaccaggggagcactttgtggaggatgtcactgacacactcaaacgcttctttcgtgagctcgatgaccctgtgacctctgcacggttgctgcctcgctggagggaggctgctgagctgccccagaagaatcagcgcctggagaaatataaagatgtgattggctgcctgccgcgggtcaaccgccgcacactggccaccctcattgggcatctctatcgggtgcagaaatgtgcggctctaaaccagatgtgcacgcggaacttggctctgctgtttgcacccagcgtgttccagacggatgggcgaggggagcacgaggtgcgagtgctgcaagagctcattgatggctacatctctgtctttgatatcgattctgaccaggtagctcagattgacttggaggtcagtcttatcaccacctggaaggacgtgcagctgtctcaggctggagacctcatcatggaagtttatatagagcagcagctcccagacaactgtgtcaccctgaaggtgtccccaaccctgactgctgaggagctgactaaccaggtactggagatgcgggggacagcagctgggatggacttgtgggtgacttttgagattcgcgagcatggggagctggagcggccactgcatcccaaggaaaaggtcttagagcaggctttacaatggtgccagctcccagagccctgctcagcttccctgctcttgaaaaaagtccccctggcccaagctggctgcctcttcacaggtatccgacgtgagagcccacgggtggggctgttgcggtgtcgtgaggagccacctcgcttgctgggaagccgcttccaggagaggttctttctgctgcgtggccgctgcctgctgctgctcaaggagaagaaaagctctaaaccagaacgggagtggcctttggaaggtgccaaggtctacctgggaatccgcaagaagttaaagcccccaacaccgtggggcttcacattgatactagagaagatgcacctctacttgtcctgcactgacgaggatgaaatgtgggattggaccaccagcatccttaaagcccagcacgatgaccagcagccagtggtcttacgacgccattcctcctctgaccttgcccgtcagaagtttggcactatgcctttgctgcctatccgtggggatgacagtggagccaccctcttgctcctccacagacccctgggatgacttcattggaaagaacatggacagggt

SEQ ID NO: 735967 - DNA, 4769 bp, Homo sapiens
  misc_feature (4474)..(4474): n is a, c, g, or t
  misc_feature (4478)..(4478): n is a, c, g, or t
  misc_feature (4501)..(4501): n is a, c, g, or t
  misc_feature (4634)..(4634): n is a, c, g, or t
  misc_feature (4636)..(4637): n is a, c, g, or t
  misc_feature (4648)..(4648): n is a, c, g, or t
  misc_feature (4661)..(4661): n is a, c, g, or t
  misc_feature (4663)..(4663): n is a, c, g, or t
gagcagagctttgacccagacccagggtgggcaggaactgaggggccaactctagcactgacttactgtgaacctggggcaagccccttcccctctctgggcctcagtttccttaacttcaaatgaagtcccttccctaagtagagagccattgctgttgttctgggatggctctgcttccagatcgcaggcctttcagcatctttctttggaggaagattggaggctggtgctcactgtccaggcctcagactctggggcagagagggggattctcagcctgagccctcccttcaccctgcccctccccccagcaatggcctgagcccccatggctgcccctcaggacctggacatcgctgtgtggctggccacggtgcacctggagcagtatgcagacacgttccgacggcatggcctggctacagcaggtgcagcccggggcctgggccacgaggagttgaagcagttgggcatcagcgccacagggcaccggaaacgcattctacgcctgctacagacaggcaccgaagagggctccctggatcccaaatcagatagtgccatggaaccatcccccagcccagccccgcaagcccagccccctaagcccgtgccgaagcccaggaccgtgtttggtggactcagtggccctgccaccactcagagacctgggctgagcccagccctcgggggaccaggagtgtccaggagcccagagcccagcccaaggccccctcctctccccacttcctcctctgagcagtcttcagccctaaatactgtggagatgatgcctaattccatctacttcggcctggactcaagaggcagggcacaggcagctcaggacaaggccccagacagctcccaaatctctgcccccacccctgccctcaggcccacaacaggcacagtgcacatcatggatcctggttgcctgtactatggtgtccaacctgtggggactccaggagcccccgacagaagagagagcagaggtgtttgtcagggcagggctgaacacaggctcagcagacaggatctggaggcacgggaggatgctggctatgccagccttgagctacctggagactccaccctcttatcgcccaccctggaaacagaggagaccagtgatgacctcatttcaccctatgccagcttctccttcacggcagaccgcctcacgcccctgctcagtggctggctagacaagctctcccctcagggaaactatgtcttccagagacgctttgtgcagttcaatgggaggagtctgatgtactttggcagtgacaaggaccccttccctaagggtgtgatacctttgactgccattgagatgacccgcagcagcaaggacaacaagttccaggtcatcaccggccagagggtgttcgtgttccgcacagagagcgaggctcagcgggacatgtggtgctccacgctgcagtcctgtctgaaggagcagcgcctcctgggccacccccggcccccccaaccaccccgacccctccgcacgggcatgctggagctgcgtggacacaaggccaaggtgtttgctgccttgagccctggagagctggcactgtacaagagtgagcaggccttctctctgggcatcgggatctgcttcatcgaactgcagggctgcagcgtccgggagaccaagagtcgaagctttgacctgctcacaccccatcgctgcttcagcttcacagccgagtctgggggtgctcggcagagctgggcggccgctctgcaggaagcagtaaccgagaccctgtctgactacgaggtggctgagaagatctggtctaatcgggccaaccggcagtgtgcggactgtgggtcctcccgcccagattgggctgctgtcaatttgggggtggtcatctgcaagcagtgtgcaggtcagcaccgggccctgggttctgggatctccaaggtgcagagcctgaagctggacacgagtgtctggagtaatgagatagtacagttattcattgtcctgggaaatgatcgtgccaaccgcttctgggcagggaccctacccccaggtgagggactacatccagatgcgacccctggcccccggggagagttcatctcccgaaagtaccgtctgggtctcttccggaagccccaccctcagtacccagatcatagccagcttctccaggcactgtgtgcagctgtggcaagacccaacctgctgaagaacatgacccagctcctctgtgttgaggcctttgaaggcgaggagccctggttccccccagcccctgatggcagctgccctggcctcttgccctcagacccctcccctggtgtgtacaatgaggtggtggtgcgtgctacttacagcggcttcctgtactgcagtcccgtcagcaacaaagctggaccctcaccccctcgcaggggccgggatgctcccccgcgcctttggtgtgtgctgggagcagctctggaaatgtttgcatcggaaaacagccctgaacccctcagcctcatacagccccaggatattgtatgtctgggtgtgagccccccacccactgacccaggtgacaggtaatagcccttctgtgaccactgagcttcccccttttctcttcccaacctccagcctgacagccctctcattggtcccatcctcctccctgacctcatcttctctccaggttccccttttcctttgagctcatcctcgctggggggaggatccagcattttggcacagatggagctgacagtctggaggcctggactagtgctgtgggcaagtggttctccccgctgagctgccaccagctgctgggccccgggctgctgcggctgggccgcctatggctgcggtccccctcccatacagccccggcccctggtctctggctgtcagggtttggcctccttcgtggtgaccacctcttcctgtgctcagcgccgggcccaggccccccagcccctgaggacatggtgcatctgcggcggctacaggagatcagtgtggtttctgcagctgacaccccagataagaaagagcatttggtcctggtggagacaggaaggaccctgtatctgcaaggagagggccggctggacttcacggcatggaacgcagccattgggggcgcggctggtgggggcggcacagggctgcaggagcagcagatgagccggggtgacatccccatcatcgtggatgcctgcatcagttttgttacccagcatgggctccggctggaaggtgtataccggaaagggggcgctcgtgcccgcagcctgagactcctggctgagttccgtcgggatgcccggtcggtgaagctccgaccaggggagcactttgtggaggatgtcactgacacactcaaacgcttctttcgtgagctcgatgaccctgtgacctctgcacggttgctgcctcgctggagggaggctgctgagctgccccagaagaatcagcgcctggagaaatataaagatgtgattggctgcctgccgcgggtcaaccgccgcacactggccaccctcattgggcatctctatcgggtgcagaaatgtgcggctctaaaccagatgtgcacgcggaacttggctctgctgtttgcacccagcgtgttccagacggatgggcgaggggagcacgaggtgcgagtgctgcaagagctcattgatggctacatctctgtctttgatatcgattctgaccaggtagctcagattgacttggaggtcagtcttatcaccacctggaaggacgtgcagctgtctcaggctggagacctcatcatggaagtttatatagagcagcagctcccagacaactgtgtcaccctgaaggtgtccccaaccctgactgctgaggagctgactaaccaggtactggagatgcgggggacagcagctgggatggacttgtgggtgacttttgagattcgcgagcatggggagctggagcggccactgcatcccaaggaaaaggtcttagagcaggctttacaatggtgccagctcccagagccctgctcagcttccctgctcttgaaaaaagtccccctggcccaagctggctgcctcttcacaggtatccgacgtgagagcccacgggtggggctgttgcggtgtcgtgaggagccacctcgcttgctgggaagccgcttccaggagaggttctttctgctgcgtggccgctgcctgctgctgctcaaggagaagaaaagctctaaaccagaacgggagtggcctttggaaggtgccaaggtctacctgggaatccgcaagaagttaaagcccccaacaccgtggggcttcacattgatactagagaagatgcacctctacttgtcctgcactgacgaggatgaaatgtgggattggaccaccagcatccttaaagcccagcacgatgaccagcagccagtggtcttacgacgccattcctcctcgtacacaggctggctgncaanatgccatccagactgaggaaganccggaaacttaggggctacgtgagccacggcaggcgcataggcaagcacggaagcacccggcggcgcggtaatgctggtggtctgcatcacagcggatcaattcgacaaaatacaccaggtattgggaaagtngnntgaagcttacnttagagaacgagntntgccaatgtcactgcaatgggttggcctgacgccggtgagtctaaacaaggggcccctggggggggggttatggagggcccagggggattaaaggaaagggggggg

SEQ ID NO: 735968 - DNA, 4433 bp, Homo sapiens
gagcagagctttgacccagacccagggtgggcaggaactgaggggccaactctagcactgacttactgtgaacctggggcaagccccttcccctctctgggcctcagtttccttaacttcaaatgaagtcccttccctaagtagagagccattgctgttgttctgggatggctctgcttccagatcgcaggcctttcagcatctttctttggaggaagattggaggctggtgctcactgtccaggcctcagactctggggcagagagggggattctcagcctgagccctcccttcaccctgcccctccccccagcaatggcctgagcccccatggctgcccctcaggacctggacatcgctgtgtggctggccacggtgcacctggagcagtatgcagacacgttccgacggcatggcctggctacagcaggtgcagcccggggcctgggccacgaggagttgaagcagttgggcatcagcgccacagggcaccggaaacgcattctacgcctgctacagacaggcaccgaagagggctccctggatcccaaatcagatagtgccatggaaccatcccccagcccagccccgcaagcccagccccctaagcccgtgccgaagcccaggaccgtgtttggtggactcagtggccctgccaccactcagagacctgggctgagcccagccctcgggggaccaggagtgtccaggagcccagagcccagcccaaggccccctcctctccccacttcctcctctgagcagtcttcagccctaaatactgtggagatgatgcctaattccatctacttcggcctggactcaagaggcagggcacaggcagctcaggacaaggccccagacagctcccaaatctctgcccccacccctgccctcaggcccacaacaggcacagtgcacatcatggatcctggttgcctgtactatggtgtccaacctgtggggactccaggagcccccgacagaagagagagcagaggtgtttgtcagggcagggctgaacacaggctcagcagacaggatctggaggcacgggaggatgctggctatgccagccttgagctacctggagactccaccctcttatcgcccaccctggaaacagaggagaccagtgatgacctcatttcaccctatgccagcttctccttcacggcagaccgcctcacgcccctgctcagtggctggctagacaagctctcccctcagggaaactatgtcttccagagacgctttgtgcagttcaatgggaggagtctgatgtactttggcagtgacaaggaccccttccctaagggtgtgatacctttgactgccattgagatgacccgcagcagcaaggacaacaagttccaggtcatcaccggccagagggtgttcgtgttccgcacagagagcgaggctcagcgggacatgtggtgctccacgctgcagtcctgtctgaaggagcagcgcctcctgggccacccccggcccccccaaccaccccgacccctccgcacgggcatgctggagctgcgtggacacaaggccaaggtgtttgctgccttgagccctggagagctggcactgtacaagagtgagcaggccttctctctgggcatcgggatctgcttcatcgaactgcagggctgcagcgtccgggagaccaagagtcgaagctttgacctgctcacaccccatcgctgcttcagcttcacagccgagtctgggggtgctcggcagagctgggcggccgctctgcaggaagcagtaaccgagaccctgtctgactacgaggtggctgagaagatctggtctaatcgggccaaccggcagtgtgcggactgtgggtcctcccgcccagattgggctgctgtcaatttgggggtggtcatctgcaagcagtgtgcaggtcagcaccgggccctgggttctgggatctccaaggtgcagagcctgaagctggacacgagtgtctggagtaatgagatagtacagttattcattgtcctgggaaatgatcgtgccaaccgcttctgggcagggaccctacccccaggtgagggactacatccagatgcgacccctggcccccggggagagttcatctcccgaaagtaccgtctgggtctcttccggaagccccaccctcagtacccagatcatagccagcttctccaggcactgtgtgcagctgtggcaagacccaacctgctgaagaacatgacccagctcctctgtgttgaggcctttgaaggcgaggagccctggttccccccagcccctgatggcagctgccctggcctcttgccctcagacccctcccctggtgtgtacaatgaggtggtggtgcgtgctacttacagcggcttcctgtactgcagtcccgtcagcaacaaagctggaccctcaccccctcgcaggggccgggatgctcccccgcgcctttggtgtgtgctgggagcagctctggaaatgtttgcatcggaaaacagccctgaacccctcagcctcatacagccccaggatattgtatgtctgggtgtgagccccccacccactgacccaggtgacaggtaatagcccttctgtgaccactgagcttcccccttttctcttcccaacctccagcctgacagccctctcattggtcccatcctcctccctgacctcatcttctctccaggttccccttttcctttgagctcatcctcgctggggggaggatccagcattttggcacagatggagctgacagtctggaggcctggactagtgctgtgggcaagtggttctccccgctgagctgccaccagctgctgggccccgggctgctgcggctgggccgcctatggctgcggtccccctcccatacagccccggcccctggtctctggctgtcagggtttggcctccttcgtggtgaccacctcttcctgtgctcagcgccgggcccaggccccccagcccctgaggacatggtgcatctgcggcggctacaggagatcagtgtggtttctgcagctgacaccccagataagaaagagcatttggtcctggtggagacaggaaggaccctgtatctgcaaggagagggccggctggacttcacggcatggaacgcagccattgggggcgcggctggtgggggcggcacagggctgcaggagcagcagatgagccggggtgacatccccatcatcgtggatgcctgcatcagttttgttacccagcatgggctccggctggaaggtgtataccggaaagggggcgctcgtgcccgcagcctgagactcctggctgagttccgtcgggatgcccggtcggtgaagctccgaccaggggagcactttgtggaggatgtcactgacacactcaaacgcttctttcgtgagctcgatgaccctgtgacctctgcacggttgctgcctcgctggagggaggctgctgagctgccccagaagaatcagcgcctggagaaatataaagatgtgattggctgcctgccgcgggtcaaccgccgcacactggccaccctcattgggcatctctatcgggtgcagaaatgtgcggctctaaaccagatgtgcacgcggaacttggctctgctgtttgcacccagcgtgttccagacggatgggcgaggggagcacgaggtgcgagtgctgcaagagctcattgatggctacatctctgtctttgatatcgattctgaccaggtagctcagattgacttggaggtcagtcttatcaccacctggaaggacgtgcagctgtctcaggctggagacctcatcatggaagtttatatagagcagcagctcccagacaactgtgtcaccctgaaggtgtccccaaccctgactgctgaggagctgactaaccaggtactggagatgcgggggacagcagctgggatggacttgtgggtgacttttgagattcgcgagcatggggagctggagcggccactgcatcccaaggaaaaggtcttagagcaggctttacaatggtgccagctcccagagccctgctcagcttccctgctcttgaaaaaagtccccctggcccaagctggctgcctcttcacaggtatccgacgtgagagcccacgggtggggctgttgcggtgtcgtgaggagccacctcgcttgctgggaagccgcttccaggagaggttctttctgctgcgtggccgctgcctgctgctgctcaaggagaagaaaagctctaaaccagaacgggagtggcctttggaaggtgccaaggtctacctgggaatccgcaagaagttaaagcccccaacaccgtggggcttcacattgatactagagaagatgcacctctacttgtcctgcactgacgaggatgaaatgtgggattggaccaccagcatccttaaagcccagcgtaccgtaattcgtgtgag

SEQ ID NO: 735969 - DNA, 5898 bp, Homo sapiens
  misc_feature (5889)..(5890): n is a, c, g, or t
  misc_feature (5892)..(5892): n is a, c, g, or t
  misc_feature (5894)..(5897): n is a, c, g, or t
gagcagagctttgacccagacccagggtgggcaggaactgaggggccaactctagcactgacttactgtgaacctggggcaagccccttcccctctctgggcctcagtttccttaacttcaaatgaagtcccttccctaagtagagagccattgctgttgttctgggatggctctgcttccagatcgcaggcctttcagcatctttctttggaggaagattggaggctggtgctcactgtccaggcctcagactctggggcagagagggggattctcagcctgagccctcccttcaccctgcccctccccccagcaatggcctgagcccccatggctgcccctcaggacctggacatcgctgtgtggctggccacggtgcacctggagcagtatgcagacacgttccgacggcatggcctggctacagcaggtgcagcccggggcctgggccacgaggagttgaagcagttgggcatcagcgccacagggcaccggaaacgcattctacgcctgctacagacaggcaccgaagagggctccctggatcccaaatcagatagtgccatggaaccatcccccagcccagccccgcaagcccagccccctaagcccgtgccgaagcccaggaccgtgtttggtggactcagtggccctgccaccactcagagacctgggctgagcccagccctcgggggaccaggagtgtccaggagcccagagcccagcccaaggccccctcctctccccacttcctcctctgagcagtcttcagccctaaatactgtggagatgatgcctaattccatctacttcggcctggactcaagaggcagggcacaggcagctcaggacaaggccccagacagctcccaaatctctgcccccacccctgccctcaggcccacaacaggcacagtgcacatcatggatcctggttgcctgtactatggtgtccaacctgtggggactccaggagcccccgacagaagagagagcagaggtgtttgtcagggcagggctgaacacaggctcagcagacaggatctggaggcacgggaggatgctggctatgccagccttgagctacctggagactccaccctcttatcgcccaccctggaaacagaggagaccagtgatgacctcatttcaccctatgccagcttctccttcacggcagaccgcctcacgcccctgctcagtggctggctagacaagctctcccctcagggaaactatgtcttccagagacgctttgtgcagttcaatgggaggagtctgatgtactttggcagtgacaaggaccccttccctaagggtgtgatacctttgactgccattgagatgacccgcagcagcaaggacaacaagttccaggtcatcaccggccagagggtgttcgtgttccgcacagagagcgaggctcagcgggacatgtggtgctccacgctgcagtcctgtctgaaggagcagcgcctcctgggccacccccggcccccccaaccaccccgacccctccgcacgggcatgctggagctgcgtggacacaaggccaaggtgtttgctgccttgagccctggagagctggcactgtacaagagtgagcaggccttctctctgggcatcgggatctgcttcatcgaactgcagggctgcagcgtccgggagaccaagagtcgaagctttgacctgctcacaccccatcgctgcttcagcttcacagccgagtctgggggtgctcggcagagctgggcggccgctctgcaggaagcagtaaccgagaccctgtctgactacgaggtggctgagaagatctggtctaatcgggccaaccggcagtgtgcggactgtgggtcctcccgcccagattgggctgctgtcaatttgggggtggtcatctgcaagcagtgtgcaggtcagcaccgggccctgggttctgggatctccaaggtgcagagcctgaagctggacacgagtgtctggagtaatgagatagtacagttattcattgtcctgggaaatgatcgtgccaaccgcttctgggcagggaccctacccccaggtgagggactacatccagatgcgacccctggcccccggggagagttcatctcccgaaagtaccgtctgggtctcttccggaagccccaccctcagtacccagatcatagccagcttctccaggcactgtgtgcagctgtggcaagacccaacctgctgaagaacatgacccagctcctctgtgttgaggcctttgaaggcgaggagccctggttccccccagcccctgatggcagctgccctggcctcttgccctcagacccctcccctggtgtgtacaatgaggtggtggtgcgtgctacttacagcggcttcctgtactgcagtcccgtcagcaacaaagctggaccctcaccccctcgcaggggccgggatgctcccccgcgcctttggtgtgtgctgggagcagctctggaaatgtttgcatcggaaaacagccctgaacccctcagcctcatacagccccaggatattgtatgtctgggtgtgagccccccacccactgacccaggtgacaggtaatagcccttctgtgaccactgagcttcccccttttctcttcccaacctccagcctgacagccctctcattggtcccatcctcctccctgacctcatcttctctccaggttccccttttcctttgagctcatcctcgctggggggaggatccagcattttggcacagatggagctgacagtctggaggcctggactagtgctgtgggcaagtggttctccccgctgagctgccaccagctgctgggccccgggctgctgcggctgggccgcctatggctgcggtccccctcccatacagccccggcccctggtctctggctgtcagggtttggcctccttcgtggtgaccacctcttcctgtgctcagcgccgggcccaggccccccagcccctgaggacatggtgcatctgcggcggctacaggagatcagtgtggtttctgcagctgacaccccagataagaaagagcatttggtcctggtggagacaggaaggaccctgtatctgcaaggagagggccggctggacttcacggcatggaacgcagccattgggggcgcggctggtgggggcggcacagggctgcaggagcagcagatgagccggggtgacatccccatcatcgtggatgcctgcatcagttttgttacccagcatgggctccggctggaaggtgtataccggaaagggggcgctcgtgcccgcagcctgagactcctggctgagttccgtcgggatgcccggtcggtgaagctccgaccaggggagcactttgtggaggatgtcactgacacactcaaacgcttctttcagctgccccagaagaatcagcgcctggagaaatataaagatgtgattggctgcctgccgcgggtcaaccgccgcacactggccaccctcattgggcatctctatcgggtgcagaaatgtgcggctctaaaccagatgtgcacgcggaacttggctctgctgtttgcacccagcgtgttccagacggatgggcgaggggagcacgaggtgcgagtgctgcaagagctcattgatggctacatctctgtctttgatatcgattctgaccaggtagctcagattgacttggaggtcagtcttatcaccacctggaaggacgtgcagctgtctcaggctggagacctcatcatggaagtttatatagagcagcagctcccagacaactgtgtcaccctgaaggtgtccccaaccctgactgctgaggagctgactaaccaggtactggagatgcgggggacagcagctgggatggacttgtgggtgacttttgagattcgcgagcatggggagctggagcggccactgcatcccaaggaaaaggtcttagagcaggctttacaatggtgccagctcccagagccctgctcagcttccctgctcttgaaaaaagtccccctggcccaagctggctgcctcttcacaggtatccgacgtgagagcccacgggtggggctgttgcggtgtcgtgaggagccacctcgcttgctgggaagccgcttccaggagaggttctttctgctgcgtggccgctgcctgctgctgctcaaggagaagaaaagctctaaaccagaacgggagtggcctttggaaggtgccaaggtctacctgggaatccgcaagaagttaaagcccccaacaccgtggggcttcacattgatactagagaagatgcacctctacttgtcctgcactgacgaggatgaaatgtgggattggaccaccagcatccttaaagcccagcacgatgaccagcagccagtggtcttacgacgccattcctcctctgaccttgcccgtcagaagtttggcactatgcctttgctgcctatccgtggggatgacagtggagccaccctcctctctgccaatcagaccctgcggcgactacacaaccggaggaccctgtccatgttctttccaatgaagtcatcccaggggtctgtggaggagcaagaggagctggaggagcctgtgtacgaggagccagtgtatgaggaagtaggggccttccctgagttgatccaggacacttctacctccttctccaccacacgggagtggacagtgaagccagagaaccccctcaccagccagaagtcattggatcaaccctttctctccaagtcaagcacccttggccaggaggagaggccacctgagccccctccaggccccccttcaaagagcagtccccaggcacgggggtccctagaggaacagctgctccaggagctcagcagcctcatcctgaggaaaggagagaccactgcaggcctgggaagtccttcccagccatccagcccccaatcccccagccccactggccttccaacacagacacctggcttccccacccaacccccatgcacttccagtccaccctccagccagcccctcacatgaccctaggaccagcagtctgagagggtaggtaccagaagacccagaaactcttatcgtggcactgttgcagcttcctctgccctggctggaaagactccagaatccagtgtggtgctgtggaaggagcactggactaaaggcttcagtggctgcgtgtcccaggacaggtcatggcccctctctgggcccagcccatttatctataccatgaggtaactgaagtaaggagagcagtgaatgtcaaactgtgtttcttagagccataagccccacatattatccctgaacaagggcagctcctgctttatatatttgatacgtaggggttccatgagagattttgggttttaaaggaatggttttactgcattaaagaaaaaaaatgctttggaaaccagaggcctgggtgatgttaaagtctatcctgtcccacttcctacattctgggactaccgtgaagcctggagtagggagagcgagtttgggagctgggactcggggagtcaaaaatagatgagtaattgtcaataaacctgggaaccaaaagacaaaaaaaaaaaaaaacaacaacgtgtgtgtgcgggcggcctttgggccctcgcgaagaaaagcttttttcaacaacacttcgcggtgggggcggcgcgggggcggcccccccagcagggttaggtgcaacaccggtggctccaagagcgggttccccagagggaaaatcgcgggccagagaacaagggccggggcatctcccccccattaaaaagcgccgcgggcgaacgcggagcgttcggaaacaatcccaggaggggctccgggaggcacatccggggtctatacgcgggcgttcccaggcgactcgctttcaatcagccnntngnnnng

SEQ ID NO: 735970 - DNA, 548 bp, Homo sapiens
tatttttttgtttgtacaataaaggacataataagagtagtgtccatgactaattaaaaatgcgattctgactggctcaaccccatgagctctatgcttccttatattttcacgtaactgttctctcacaatgctgctttttgtcacatgattctacaatattaatctcataaagctgtgctgcctaacatggtagtcacagatcacacatggctattgaaatttaaatcagttaaatgtgaaaagtcacttcctctagccaaatctgaagagctcaatagctatatgcagcaagacactaaactgtattgggtagcacagatatagaaatttctattattcgagaatgttctattggatggcactgtacaatggatttagaaactaagactgacccacttactttcttcttttaaaccacccatactaagatcaagactcccagcaacaacaggtaccattacatgtcatgtgccacgcactgaactaagcccttagtgtatattatctcatcaaatctttgtaataagctcatgttatcattaaga

SEQ ID NO: 735971 - DNA, 1462 bp, Homo sapiens
cggaagaggaggcctgatggggataccttcctgctgtccttcctgagcacaacctggctgaaaacctggaggtcacaacagtacaaagaatcaaagtcaagatcttgtgccagagagcaaatgaactcttcctcttgctgagaaaacccaccctgctcacctaaaccctggccttgcctggtaattccatccatgcgcctggaaggccccagacatcaaggctctgaggggccaggcacggggagaacccagcagtgccctgccctgcagtctgagctaccagattccttgtgaagataatttgaggaccatgactcacccaaccacatttcctggggcctcaaattgaaaattcaggatgggcttttctatatgactggctgatatccaactatgccatggtctttacatgccatgaacattctttcctgccagagttctaagaatctgtgttctctgccttagaccttctgcagatgagcccacaggaagctccacgtgtagctgagctacatgcaccaggcctcagtttgccccaagtcccctgtgtactctctcatggcctgtggccaagaaatgtattctctcactttggacttaggagtccaaagagaagcccagaaacaaaattgcttgaacttgaatttgtgtgcgtgcgcacgtgtgcacgtggtggtgaaggtgtatgttttcggctgttctatgcgtcactgtcaccaaactcccaaataatagtaacatttgtttagatgatgtctgctgacaaatcacaaacacgacgctaactcgcaactctctgctccactggcacagaatagggcatggagcctggtgctgggtgtcagcccatggtgttgggtgtcagttcacaggctgggtaagggagggaaaataatccattctttgatattagacatgacccaaaatttcctgctggcagccaaaggcctcctcgctcagagaagtcatctgaaaaaagctagcccaggggcaggaaagggcctcaggctggcgccccagaaggtggcccatcagtcactctgggaagacagatagacatcgtcagtctctttttacaagtcaagacagtaaaatcaaagtaatagtttcctggcaggaagaaagagaattgctggagcgttggagagccatctcttaacctctggggtgactcaaaggaagagttgcctggtctgagaactttagaccaaagaatttaaatcatgtgaactgaaaatgcatgtgtatccatatatacatgtacatatatgtttatatacccaatatagaaaggttaccagagacaaagaaatagcaacaatagttgttttggggaagggaaaggaagggctgtggggtgaggaagcatactttcactgaatatcctctgtactgtgtgcatttttgccacatgcatgaactaaacctacaagaaaataaacaaataaaaaaaaagaacaca

SEQ ID NO: 735972 - DNA, 1557 bp, Homo sapiens
ctccacccgacggggtggagtggggtctgaaggctgagaagggagccaagggccagctcagcagcacacacaacaccagggcagttagcttgtttctctcttcccctgtcgcacaggataccttcctgctgtccttcctgagcacaacctggctgaaaacctggaggtcacaacagtacaaagaatcaaagtcaagatcttgtgccagagagcaaatgaactcttcctcttgctgagaaaacccaccctgctcacctaaaccctggccttgcctggtaattccatccatgcgcctggaaggccccagacatcaaggctctgaggggccaggcacggggagaacccagcagtgccctgccctgcagtctgagctaccagattccttgtgaagataatttgaggaccatgactcacccaaccacatttcctggggcctcaaattgaaaattcaggatgggcttttctatatgactggctgatatccaactatgccatggtctttacatgccatgaacattctttcctgccagagttctaagaatctgtgttctctgccttagaccttctgcagatgagcccacaggaagctccacgtgtagctgagctacatgcaccaggcctcagtttgccccaagtcccctgtgtactctctcatggcctgtggccaagaaatgtattctctcactttggacttaggagtccaaagagaagcccagaaacaaaattgcttgaacttgaatttgtgtgcgtgcgcacgtgtgcacgtggtggtgaaggtgtatgttttcggctgttctatgcgtcactgtcaccaaactcccaaataatagtaacatttgtttagatgatgtctgctgacaaatcacaaacacgacgctaactcgcaactctctgctccactggcacagaatagggcatggagcctggtgctgggtgtcagcccatggtgttgggtgtcagttcacaggctgggtaagggagggaaaataatccattctttgatattagacatgacccaaaatttcctgctggcagccaaaggcctcctcgctcagagaagtcatctgaaaaaagctagcccaggggcaggaaagggcctcaggctggcgccccagaaggtggcccatcagtcactctgggaagacagatagacatcgtcagtctctttttacaagtcaagacagtaaaatcaaagtaatagtttcctggcaggaagaaagagaattgctggagcgttggagagccatctcttaacctctggggtgactcaaaggaagagttgcctggtctgagaactttagaccaaagaatttaaatcatgtgaactgaaaatgcatgtgtatccatatatacatgtacatatatgtttatatacccaatatagaaaggttaccagagacaaagaaatagcaacaatagttgttttggggaagggaaaggaagggctgtggggtgaggaagcatactttcactgaatatcctctgtactgtgtgcatttttgccacatgcatgaactaaacctacaagaaaataaacaaataaaaaaaaagaacaca

SEQ ID NO: 735973 - DNA, 3118 bp, Homo sapiens
aattttttcagcgtttttcctctgtatctaaacaccaataatatacttaatttttgaatataaaagaagtagcaattgactaagaataaatatgttataaaaactaggggattatcttgatttacatttcctagagtattaaaagagattaattacagactttcacttgataatattgaggagtctggagggtcatagcaaaattttctttagttcatcttaaaatttagggaggtaaaaaaagattttattcacataaaagatttcttggcatagggaaggcgtaatgttaagggcttcttccttacccaagtgggagctgaaccagtaattgtggggaaaactgaatttatagcaacaaaggatagtagtttctcaactgggagcatacgagcaatttctcagttcagagatatttatagcatcttggtgttatgcaataaacaatgacaacaacaagcattgagctttcactttggagttactcagatctgagtttaaattctaaaattattctagtagtattttcctgcggtgaatctgttaaggatgtaagctatagtgtagcttggggaatcatcttgaacagttatgaaactcattaaagcttcttttcccttgtctgtaaaatgggaaaaataaatacctctatagctcttaagaggcttaagagttctatggcttacacccacatacagtccttggctcagtgctaggcatgtagcaggtgctgactgcctctctcccttcccttctttactctcagttgtcttatttcttcttatgcagaagagattaccttaaagctgactagaaaactcagacataaattgacatttccttatcattgcctgaaacccactgaataagtcccctttgatttctctcaggaaggataaaaaaggctacagtacctgctcataggagttcagtaaatgtttattgattgaatgaaaagaatttgatttaaggaaacaataacactccatcctgggcaacagagcaagatcccgtctcaaaacaaaacaaaacaaaacaaaacagcaaattcataaaggccagcagttttcaagtctggggaaataggcacatggacagattatatgaaggtatttcattagctttcttctctttatggcagcttcagattgatgaatttgaggtacaaatgagtgagtgacatatgtatattttcctctgattttatgactgatttacaaattaggagtgcaaatgggctgttccccgatagcatcttctgggaagaatccaaccaagatacaaagcagatgatggtggatcggcaaactcttttctatgaaaagaaaaaccagatataccagggactggaaagcacctgcttgaaaattgatatgagcatgtctgaatttttcccttataagagcctgagtattgtaacaggtctcttgcacagggggttgaaaaataaaaaaagaagttaacataattaaaatgcttggacaaaacatttgctttatatagattcttacaagtaatatttgattaggtatcaaaataggtttaggcaggtggaagttctgaatttcaaggcaaataaggcatgaagggtggaacattgcatctagggaaaataagagaaataagtgaaagtctgaccctacattgccaattctcagaccaagtacaaagtattaggaattttttatatcagctgacatcttgtgcttacagtaaagccatatagatgcacacatagtgactttattaaatcaaatgagttgtgcagagcagagcaaatctattaggctttctcttttagagttttctaattttactcttattagctccctcagttgtcatcaattacatattcctacatcagatattttacactatcagattctttgattaaaaaatcatcttcagctttacattattaatctctgaggacataaaatcaaataactttctagtccatgatcattaatccctactattttagatatttccataaaaggcttaaagggaaaaaaaaatggtaggtagttcagaaaaaaatggctgggcacggtggctcacgcctgtaatcccagcactttgggaggccggggtgggcggatcatttgaggtcaggagtttgagaccagcctggccaacatggtgaaaccctgtgtctactaaaaatacaaaaaaaattggctgagtgtggtggtgtgcgcctgtaatcccagctactaaggcaggagaatggcttgaacccaggaggtggaggtcgcagtgagctgagatcgcgccagtgcgctccagcctgggcaacagagtgagactctgtctaaaaaaaaaaaaaaaagaaaagaaaaaagaaaaattgaagaacataacttttctacttatgaaatagataattttttaaaattgtttaaactcctggaaattaagtgttattttttattactgcagttgagagataccttttcagaggaaaacaagaggctaaattccatgttaagagctaagtagtatttttttcttaacaattttgccaaaatttcttctactggaccaaaaggaaataaatctacaataaatctactttctaaatattatttaagatgggaaatgtcttttataggtatattctgtataatacccttaattagatgaattatcccttatcattccaaaaatgaaatgctgtgttaaatatctccagggcaaagtggtatgttgactgggacaaacgttagaaattgtattgttcattgcacttgttgccctgttccccaagcttgtcaatgtttagagatactattcgggttgctaaagccattattcatagaaaatttctgcccctacagaagtgtgtgcatgggccttggaaaatctacatgtgtatatctgagtagcgaagcacagattcactctaattgaaagcagcagtttggttttgtaaatgtaattgcaattgacactttcttttccctttcagttattattttttttaaaggacgttatgagaaggcactatgaaaagcctaattggaatagcattatgaaccatgtaatgcatgcccatgcacactgtgatttgcaaacatatgtccgctcttcaataaatgttacggctttcacagcg

SEQ ID NO: 735974 - DNA, 1191 bp, Homo sapiens
gcaaaaaaggcaaccgctctctgtttctgaccgtcatgtctacaagtatcgctgtaaccattgtagcttggctttcaaaactatgcagaagcttcagatacattcccagtatcatgcaattcgggctgcgacaatgtgtaacctctgccagcgcagtttccgtacattccaggctttaaaaaaacacttggaagcaggccaccctgaactgagtgaagctgaacttcaacagctatatgcctccttgcccgtgaatggagaactgtgggcagagagcgaaactatgtcccaggatgaccatggcctagagcaggaaatggagagagagtatgaggtggaccacgaagggaaagcaagtcctgtaggaagtgatagtagctctattccagatgacatgggctctgaaccaaagcggaccttaccttttagaaaagggcccaattttacgatggaaaaattccttgatccatctcgtccatataaatgtacagtgtgtaaagagtcattcacccaaaagaacattctcttggtccactataattcagtttctcacttgcataagctgaaaaaagttttgcaggaagcctccagtcctgtcccacaagaaaccaacagcaacacagataacaaaccctacaagtgcagcatctgcaatgttgcatacagccaaagctcaacattggaaatccacatgaggtctgtgctccaccagacaaaggctagggctgcaaagctggagcccagtggtcatgtggctggtgggcacagcattgcagcaaatgtcaacagccctggccaggggatgttagattccatgagtttagcagctgtaaacagcaaagatacccatttagatgccaaagaattaaataaaaagcaaactcctgatttaatctctgctcaacctgcacatcacccaccacagtcaccagcacaaattcagatgcaactacagcacgaattacaacagcaagccgcattctttcagcctcagtttctaaacccagcctttttgcctcattttcctatgaccccagaagcactgctgcagtttcagcagcctcagtttctctttccattttatatacctgggacggagttcagcttggggccagatttgggcttgccaggctctgccacatttgggatgcctggcatgacaggaatggctggctccttgcttgaagacct

SEQ ID NO: 735975 - DNA, 448 bp, Homo sapiens; identical to SEQ ID NO: 95132

SEQ ID NO: 735976 - DNA, 851 bp, Homo sapiens
  misc_feature (757)..(757): n is a, c, g, or t
caaggtcaagttgaatctggtacaacatgtccgttcggtgaagcatcagcagactgagggcctacggaagctccagctccaccagcaaggcctggcaccagaggaggacaacctcagtgagatcttttttgttaaagattgcccaccaaatgagcttgcatcttcttgccaaatcttctggagcgcttgtaatttcctctgtacagagcccaacaggctcatcagcagcagaagaaactgcctcattgggagccaggacttgtgatgatgatcttacagagcagcagttgagatcaacctcagaagaacaaagtgaggaggcagaaggagctattaagcctacagcagtggccgaggacgatgaaaaagacacaagtgagagagacaatagtgaaggcaaaaactctaataaagactctgggataatcacaccagagaaggaactaaaagttagtgtggcagggggtacccagccactcctgctggcaaaagaagaggatgttgcaacaaaaaggtcaaaacctacagaggacaataaattctgtcatgaacagttctatcaatgtccttattgtaactacaatagtagggaccaaagtcgtatccagatgcacgtcctatcacagcactcggtgcagccggtcatctgctgtcctctctgtcaggacgtcctcagcaacaaaatgcatctccaactgcatctgacgcatttgcacagtgtgtctccagactgtgtggagaagctgcttatgacagngcctgtccctgatgtgatgatgccaaacagtatgctactgccagcagctgcctctgagaaatcagagcgggacacacctgcagccgtgacagct

SEQ ID NO: 735977 - DNA, 1339 bp, Homo sapiens
gtagagatgggcgggggcggcgggggggtcttactatgttgctcaggctggtcttgaactcctggcctcaagtgatccttggccttggcctcccaaagcactaacattacaggtttgagccatcatgcccagccagtaaataaaatttacttggaacagttatacctactcatttaagtctatggctgcttttgcattataagggcagaggcagagttgagccgtcacaacagagattatgtagtacgcaaagctaaaaatatataccatctgattcttcacagaaaaagtttgctgaccctagtctagaggacaagaagattcaaatatccacaactgtcggcactgtggtacaatataatgagtcaacaattttctataacacaggtacatcttttgcagggcagtcaaggtaccatcaaggatcttttgaatatgtgtcaaccttctagtaatttttcagactacaactcccagtaaatgctaggccaagagcttgggagtggggaaagatgaggaggccagataggcatgcaatggtgtgatcctttcagggaggcgtggctcccaatcaattagtcaatcaaccaaacaaccaatggagtgataggaaatctttctttgtactcccacagttatagaagattctagtttagtccaacagatgtgaaacagaaaaataatctattttagtatctagaatctaaacattagactctggctcaaaagctatgcacataacccaccctccctatagatctcagaaagggattctaccggcatccaaataaagaccaggtgaggtcaaggataaaccacatatattttctttgttgataaacagcatatctggctaaataaatacatcaggttaatggagaaaaaaaggtgataagaacatatatccataatacattctgggcaaatcaagtaatgcatcataaaaattaatgttggaaatatagaaatatatagaaagttagtgggatatgacttaagggacatcatttaagaaagaaaagaaaattggtgggagaacaagttatctcatgatatttaacagtacagtaataatacatttttaaaaccccaacaacagtatctaccaaattaacatttacttgagtttcactgattttgtggctctcttggtttggctgtagaattgtgcaagagcacaagaatttatagctggtttttgtttatacatatttaaataatattataataaatataatttaaatcaatattggaatttgtagggattttttccccttaaatggacccaaacattgtgaaggtctgtgaaacatcatttatagttacaaaatataatttc

SEQ ID NO: 735978 - DNA, 1347 bp, Homo sapiens
tggagacagggtcttgctctgttgcttgggctagagtgcagtggcacaaccatggctcactgaagtcttcccaggctcaatgatccttggccttggcctcccaaagcactaacattacaggtttgagccatcatgcccagccagtaaataaaatttacttggaacagttatacctactcatttaagtctatggctgcttttgcattataagggcagaggcagagttgagccgtcacaacagagattatgtagtacgcaaagctaaaaatatataccatctgattcttcacagaaaaagtttgctgaccctagtctagaggacaagaagattcaaatatccacaactgtcggcactgtggtacaatataatgagtcaacaattttctataacacaggtacatcttttgcagggcagtcaaggtaccatcaaggatcttttgaatatgtgtcaaccttctagtaatttttcagactacaactcccagtaaatgctaggccaagagcttgggagtggggaaagatgaggaggccagataggcatgcaatggtgtgatcctttcagggaggcgtggctcccaatcaattagtcaatcaaccaaacaaccaatggagtgataggaaatctttctttgtactcccacagttatagaagattctagtttagtccaacagatgtgaaacagaaaaataatctattttagtatctagaatctaaacattagactctggctcaaaagctatgcacataacccaccctccctatagatctcagaaagggattctaccggcatccaaataaagaccaggtgaggtcaaggataaaccacatatattttctttgttgataaacagcatatctggctaaataaatacatcaggttaatggagaaaaaaaggtgataagaacatatatccataatacattctgggcaaatcaagtaatgcatcataaaaattaatgttggaaatatagaaatatatagaaagttagtgggatatgacttaagggacatcatttaagaaagaaaagaaaattggtgggagaacaagttatctcatgatatttaacagtacagtaataatacatttttaaaaccccaacaacagtatctaccaaattaacatttacttgagtttcactgattttgtggctctcttggtttggctgtagaattgtgcaagagcacaagaatttatagctggtttttgtttatacatatttaaataatattataataaatataatttaaatcaatattggaatttgtagggattttttccccttaaatggacccaaacattgtgaaggtctgtgaaacatcatttatagttacaaaatataatttc

SEQ ID NO: 735979 - DNA, 444 bp, Homo sapiens
tggagacagggtcttgctctgttgcttgggctagagtgcagtggcacaaccatggctcactgaagtcttcccaggctcaagtgatcctcccacctcagccagcgtgcactaccatacctggctaatttttaataaattttttgtagagacagggtctcagttgttgcccagtctgatctcaaactcccgcactcaatcctctcgcctcagcatcccaaagtgctaggattgcaggcgtgagccactgagcctgatcaagacaaattctccaatcaaatgccagaatctggaatgagaaatgtaatcagcgacctgaaagcagtttggggagcgtggaaaagacaacaaacttgactgcttagaacaggggtatacaaactctggcctgcatgacaaatccagctgccacctgtctttgtaaataaaactgttttgctttctttg

SEQ ID NO: 735980 - DNA, 1006 bp, Homo sapiens
gggaaattgatgagttgaattcagaagacctggttctaatcctaactgtgctctctaattgccgagcacaccctgagcatgtcctttgacttctcagggcctcacttttcccacctttcaattttatgaattttaaatattccaccaataatttctagcatgatatccattgttaatatccactatctaaccagaccccagatttacgtaagcttgttttaaaatttgggcaggagggttaggtgccctgctgtgccccatagctcatggcacagtgacatcatctgtctattcaaaagcccttttcttagtccatgaaatcatccttggtggcaaatcgaatcatatgaggagttttagaaattcccaacaaccagacggtacctcagaccagtaaaatgagaatctctcagttgggacccaggcattggtcactcttagacccatttaattatctactcattttcccctcacaaccctgtcatcactcattcccgcccccttcaaaggcaggagctctgtgggattggacacagggactgaagttgagcaaatcatcttgatagcacgtggctttgctgtgtgtggttaatcaaccgatatgaacagtgctgacctgtagccctgccacatccccgcagtgagagcaagacaaggcacaggagagctgatcccaacacatatctaagcccatgggtcacagcaggtttcaaccatttagagaagaattttggattcttcattgttgcctgttcttatcaatgttactgattcattcagttcattcattcaacagatgtattttcagttttctgctaatatgccagacacagtgtaccagagactctgtggagggcagaaattaaccaggtggagggaagagcattctgggagatgggaatagcaggtgcaaaggcctggcaaataggagtctggcggaggttgcagtgagctgcgatcacaccactgcactccaccctgggcaacagagtgagactctgtctca

SEQ ID NO: 735981 - DNA, 1081 bp, Homo sapiens
ataaatggaaacagacctggcaagtaagacatctctgatttggaggatatattttttagtctacaaagaatccttgaatacatcaagatagagcatatcttacaaacatatgggcaaccatatgacatcatcctgtgtcactactagttttggtcatgtgaatccaaagggccctttggtgatgttactcaccaatacacttcccagtcatataaaattagataccttcccatccttaaccacttttagtagaaagaatgcccttcagtccacactgtgttactaggcccaaagcagtgttactagtagtctatttcttacagcatacaaaactgctctgtatcagtttgccagggctgtcataacaaagtaccacagactgtggcttaaacaacagaaataacaaagtagcacagactgtggcttaaacaacagaaatttattttccacaattctggaggccgaaagtctgagatcaaggaggcagcaaaggtggtttcttctgaggcctttctccttggcttgtagatgccattatctccctgtgtcttaatatggtcttccctctctgcatgtctgtgtcctaattcctctttttatgagaacaccagtcatattgcattagggcccaccctaatgacctcattttaactcgattctttaaagaccctgtcccccaaatacagtcacattctgaggtactgggaagttgtaacttcaatgcagaagctttagaggcacacaatttatcccacaacatgtcacttgcaagacttgctgtgctgttgcatatttagaaaaggaaaggtggtcagtaggcaagctgagaacacatgttaaactgcatcattcatggatcttgattgaaatcccttatttatgaaacaagcttgtatgtacactttgagtctgttaaatattatggtgaaattccatttatgcagtgggtcacacccaagacttcctgaaaggttagaggtgacccttgctcctaagttggggcctaaatcttggcagtcataaaaaagtatttcttaactaggctatacaatcaacattctcaattttattgaaaaaaaaa

SEQ ID NO: 735982 - DNA, 484 bp, Homo sapiens
gtcagttcatccaaaggcagctagagaggcagctcagcaagtatctcagaaaggctaagtcatatatgttctcaaactagcccttttttttcctcccatcttctgaaaaccactatggagatttttctccacattttatttctaaaaaattttaaacacatatcaaagctggaagaattgtatagtaaacaaactgtataccccaaactggattcttctgctaacatttttctgtgttgctatatcacatatctatccacatatgcatacctctatttatctttcgtcaagccatcttatgtttctgatgcatttcaaagtaaatagctgacatcagtaagacatctacctaaatattttattctgttttgttaaaatttacatacaaaaacatgcataatcttaagggtaccattccatgtattttgaaaagtgtacacatctgtgtaactaaacccccaataaaattgccatcacctcagaa

SEQ ID NO: 735983 - DNA, 533 bp, Homo sapiens; identical to SEQ ID NO: 4128

SEQ ID NO: 735984 - DNA, 2014 bp, Homo sapiens
gacggatcacccttccgctccaacatggctagttcctcaacgccgtgactcaagcctgttgtgccaggcagggcgcactcagcagcgcagccccacaggtggcgaaggctccgcgagagggttcccgccaggctagacagtggagtgccgcacagcgcgccttccagcctcgcagccgccaccctagcggttccgacccggcgccagcaggcctgcttggtcgatcttcgagccaaagatgcggcgaggctggaagatggctctgtctggggggctgcggtgctgccgccgggtactgtcctgggtgccagtgctcgttattgtcctcgtcgtgctctggtcctactatgcctacgtctttgaactctgcctggtgactgttttgagcccagcagaaaaagttatttacctcatactctaccatgccatctttgtgttctttacctggacctactggaagtctatctttacactcccacagcagccaaaccagaagttccacttgtcctacacagacaaggagcgctatgaaaatgaagaaagacctgaggtccagaagcagatgcttgttgatatggccaaaaagctaccggtttacacaagaactggaagtggagctgtacgattctgtgaccggtgtcatctgatcaagccagaccgctgccaccactgctctgtctgtgctatgtgtgtgttaaaaatggatcatcactgcccttgggttaataactgcattggattttccaactacaaattcttccttcaattcttagcttactctgttctctactgcctgtacattgctacgacagtcttcagctatttcatcaaatactggagaggggaattacccagtgttcgctctaagttccatgtcctttttcttctctttgtggcctgcatgttttttgtcagccttgtgattctctttggttaccattgttggcttgtcagcagaaacaaaaccaccttagaggccttctgcactccagtgtttacaagtggcccagagaaaaatgggttcaaccttggcttcatcaagaatatccagcaggtgtttggagataagaagaagttctggttaatacctattggttccagccctggtgatggacactccttccctatgaggtctatgaatgagtcacagaacccactgctagcaaatgaagaaacctgggaagacaacgaggatgacaaccaagattatccagaaggctcatcatctcttgctgtggaaacggaaacatagcagttttcacatttcctgcatctctcagacaggactcaccatctctgcctcccatgaggcttacagagttcaatgttggaaatcattgtaatcttcaaaataagtcaccgtgttggattgaaagcttcaaaatttgaaagaattccatcaaatacttgctgtgtaaatgtttctggactttatgttatttaatttactgactgaaatccaatttggaatttggtagcagttaattcaagccaattttttttgtttcttcatttcccctcccccaatccatgaaagcctaaatgtaaaatatatcttttcattcatcttatcaggtaaaaggaaattcagaaaatttccttagagtctttaattcccccacaaagattattaatcacatatatagggcctttttggtgttgaagggaatcaaactacatttgctgcttgtgtgcgtgtgcatttgtgaacacgtacagcatatctatacaaaattctgctatagtgtgaaaatcagggctaaaaacctgaagcctttgtttaattatgcttttcctctaaatagcaacttaaatatttgctagactttgaatcatcgctatatcaagtatctaaaatttgggagggtgaatcagtacactgtgaccaaggtcctcaaattggaatttgaacaacaatgtaaaacctgttctgtcacaaatgttcctgaaagcaccacagctactcaagaagatcaaattcaggacataaactttattgaacataataaccagt

SEQ ID NO: 735985 - DNA, 1065 bp, Homo sapiens; identical to SEQ ID NO: 4126

SEQ ID NO: 735986 - DNA, 1033 bp, Homo sapiens
  misc_feature (559)..(559): n is a, c, g, or t
  misc_feature (575)..(575): n is a, c, g, or t
gaaatcattgtcttacttgaaagttttctacttaagattccacaattaaaagaacaatgtttcctttaaggaatagtgctgcgggggcaggggcagaatttcttaaagcattttggggagtggtttaactaaataacctacatatagtagtgcacaagtttccaacttattaatagttgctttccagtgagtttttagctcctacattttttttggaagtaaatgtgatgtaattaaattaaatattctagcaactaacaacaaaaggctttttcaacagataataataaattgaactcggaaactgtaaaaagaatgaaggagaactaatagaaattgatatggaaaggtgtctaagacaaagtgaagtaaaaatatttgtataaaactatggacattggccaggcatcttggctcatgcctgtaatcacagcattttgggaagcagaggcatgcagatcgtttgagcccaggagttgaagaacaggctgggcaacatggcaaaaccctgtctctacaaaaactacaataattagttgggtgtgatagcatgtgcctntggtcccagctacttnggaggctgaggcaggaggatggattgatcccaggaggtcgaggatgcagtgagccctgatcacaccactgcatgccagcctggacaacagagtaagaccctatctcaaacaagaaaacaacaacaacaacaacaaaattgtggacacaatatgttcccatttgtgtgggttttttttttaaagaaacacacatgcatatatacacatactaatccctatgtaaatatatgcatacaaaatttacagaaggatatacacaaagctgtggaggttgattcaggaaggatgtaacaaatttactattatatagccttctgtactatagttttgttttcccatatgcatgtacccagttatatattgtccttttaatttaaacatctagtaaaaaataataatttcaatgagaccagaaattactaagcaaaggaaatggcaaggtagttctacttttttgg

SEQ ID NO: 735987 - DNA, 659 bp, Homo sapiens
  misc_feature (466)..(466): n is a, c, g, or t
  misc_feature (597)..(597): n is a, c, g, or t
  misc_feature (639)..(639): n is a, c, g, or t
tatttcttttattttcaaagcctaggattgagccagtaacaaattgcctaacataaatcagcattatggaacttctgtctctctattctcaactctttttgccttatattataagaaaacgtaaaaggagtcagaagaaaagcagagagcttgcagaaatagcttgccactagcaacttaattcagcccccaaaataggaaattcacagctggttaaacatctgtgggccactggcggctgagaatgttcaaacacttaaactgtgttttccagatcaagccaatccagaagtctttaaatcaccataataaccagagaatagaacttccctggctggctgtgggctctttgggtacagttagctcgtaccctcagctgctcagagtggccccagggcctgctggactctcagggcctggtgctggcatctgtgtttccctcaggctcctctgcaggacatgcccncgctgctgggagtggttctgctgccggtccccaccgaagtctgggcaccacgccggctgatgaccatctgggcacagcctgcagtcacctcctctccccagagcggaatcctgagggaggcgccacctggntcccgctgctttcctctaaaggaatcggtcggtgttccatgnagaggaaaagggagaggaaa

SEQ ID NO: 735988 - DNA, 636 bp, Homo sapiens
gccaccactggaggatagaggtgtgtcctctttaagtattcaatttgccaaactcccaaagggattaaagcacttaaatttatctaaaacctcattatcacctaaaggggtgaacagcctttctcagtcactcagtgccaatccattgaccgcctctacccttgtccacctcgacctctcagggaacgtccttcgtggagatgacctctcacacatgtataattttttggcccagccaaatgccattgttcatctggatttatccaatacagaatgttccctggacatggtctgtggagctcttctccgtggatgccttcaatatttagctgtgctcaacctctccagaactgtcttctctcaccggaaaggaaaagaagtacctccatctttcaagcaattttttagtagttctctggctttgatgcacatcaacctttcaggcacaaaactgtctcctgagcccttaaagtgagtggttaattcactttctccagagcttttaaagttcaacttatttttacgaatgtgcttgagggaagggagaaagatatataatccaaagacaaaaaccacagatgagaatgcctttttactctggggcagaaaaataaattaaaattttaaaaagtacat

SEQ ID NO: 735989 - DNA, 2430 bp, Homo sapiens
gaagagaccatatttgttcgcagaggaagccgttgctttctgggatctggctacgccagaaaagacatcggctccaacaggggtgttccacagggtagctgggagttggaagagccaagaacgcctccgagctctggatttgagcttctctgcccatgggtgaagcgcccatgctcagcttgtgagcttcttcccgggagagcagccatggcactgaggaatgtgccctttcgctcagaggtcctgggctgggaccccgacagccttgctgactatttcaagaagctcaactataaggactgtgagaaggcagtgaagaagtaccacatcgatggggctcgcttcttgaacctgacagaaaatgacatccagaagttccccaagctccgggtgccgattctcagtaagttaagtcaggaaatcaacaagaacgaagagaggaggagcatcttcacacgcaaaccccaagtcccgcggtttcctgaagagacagaaagccacgaagaggacaatgggggctggtcgtcctttgaagaagacgattatgaaagtcccaatgatgaccaggatggggaggatgatggagactatgagtcccccaatgaggaggaagaggcacccgtggaagatgacgcggattatgagccgccaccctccaatgacgaggaagctctgcagaactccatcctgcctgccaagcctttccccaactccaactccatgtacatcgaccggcccccctctgggaaaaccccccagcagcctcctgtgcccccccagagaccgatggccgccctcccgcccccaccagccggccggaatcactcgccactgcccccaccccagaccaaccacgaagaacccagcagaagcagaaaccacaaaacggcaaagctccctgctccttcaatagacagaagcacgaaacctcccctagatcgttcattagctccgtttgatagagaacccttcacactaggaaagaaaccaccattttctgacaagccctcgattccagcgggaaggtcactcggggagcatttacccaagattcaaaagcctcctttaccaccgaccacggaaagacatgaaaggagcagccccctgccagggaagaagccacctgtgccaaagcatggatggggaccagacagaagagagaatgatgaagatgatgtgcatcagagacctttgccccagccagcactacttcctatgagctccaacactttcccttcaagatctactaagccaagtcccatgaaccctctcccatcctctcacatgcctggagcattctcagaaagtaacagcagttttccacagagtgcctccctgccaccatacttctctcaaggccctagcaacagaccacctatcagagccgaaggcagaaacttccccttgccacttccaaacaaacctcggcccccatcccccgcggaggaagagaattcattaaatgaagagtggtacgtttcttatattacccgaccagaggcagaagctgctcttagaaagataaaccaggatggcacatttctggtcagagacagctctaaaaaaacaacaaccaatccatatgtcctcatggtgttgtacaaagataaagtttacaacatccagatccgttatcagaaggaaagtcaagtttacttgttgggaactggactccgagggaaagaggactttctgtctgtgtcagatattattgactacttcaggaaaatgccacttctgctcattgatgggaaaaaccgaggttccagataccagtgcacattaacgcatgctgcagggtacccatagcaagttatagccgagcaaatgaaccgtcctcctgcctctgttgccaacacgagatcaatcagccttggtcaatggacaaacacttaggactgaactgaacccctccccatgaacacaagggttttatcctttcctttaaaaacagtgtttgaaatgaagactgtcaactatcccataatttatttattcttcttcaatgtttgtaaagtgcatgagtcatgttcacacttgaagtctagtagtgcactgtaataattcattttttaaaagattatttaatgcccatttcaaaatacagtagtttacacagctacagaaacaatttggggcaagttttaaaacactgaaacagtaatagttattggtgtcacataaaactgatttgttttttacagccaaacctctgtcagtcagaggcattcattagttttatacatgtaatttgaaaatcactaaacctcgttttctcagcagcaataatttaagaggcttcaaaaatataatttcactcttatttagtattttttcctgggggcatttttacgtaatttttttatgaaaagacaaatgcatgttgagataacttctgggattaaaatagtcttttgctttaaaaaaaaa

SEQ ID NO: 735990 - DNA, 915 bp, Homo sapiens
ttcccccccccccccccctctaacgacgccatgatcgagctcgtacccggggttgttggttagattaccgaagaagactaaattcatgtgtaacagtgcagattatttaattgtatcacaaaatgtaaaattgcatgcatggtttgatggaaacatttctcacatttatgtcttctaacacacgtgggtaaagaatcagtaactgccaatgaatgagatagcataaaattttgactttcataaaacaaaacttgtaaatcatttctgaaatttataaggtttccagctgacaattttctgccaagttaacatttcaaaaatgaaaaacaaaatcaatgtgtattttagagtatcatctagatctgcgcccctttgtaaatggattctatggtggttaagtcatctagaaacaccctgggagcaaggttccatcctactacttcctaattacatctgatctgctttatttttgtgtcctctttatactagctgtttctaactggggggcggttatggaatgtttcttagtgacagctggggcctgccaatctcattcattgttttctacttctgcacagtgcatcagagacctttgccccagccagcactacttcctatgagctccaacactttcccttcaagatctactaagccaagtcccatgaaccctctcccatcctctcacatgcctggagcattctcagaaagtaacagcagttttccacagagtgcctccctgccaccatacttctctcaagccctaacaaacgccacctattaaaggccctaagggccagaacacttttcccctttgccaacttttcaaaccaaaccttcgtgccccccaatttcccccctcactcggcaaaccgcaattttcattcaatgtacgggcggccccgctttttttttctc

SEQ ID NO: 735991 - DNA, 698 bp, Homo sapiens
acattttttgcttgtttacattatttttattttgttttaaattatatatatacaaattagtaaactcaactctcccaaatatttgttagttcaacaataaaacagaaactcataacaaataagaaatcagatagaaaaactgttagaaacaagggatacatctgatattttagactcttcaaagagggggttgtttctttctgcttctgctaagttctcagtcttgatgggatgattaaaatgtaggataaggtcacaaagcaataactgggagagcttatttggtgcctaacgaacggccatgccctcttcttcttggagtcacagcttgattttgtttgaggtgttcctttccccagctcctgtagtaagttctgagtggtccaaactggtcttggcagtcccagtccccttagctgtggctgctgtaagcatcagcatgtgatgcaaatcttttatcttcttcaactccgaagaaattgtgttaatatttttaattactttgtccacatttagcttatgatcagtaacaggcttcttacccatctttaagtcaatccttgcctctaccttttcctgagcagggagaatttctgcaatttctctcatttcagagccactgtaaaaaaactggccaaccgtcaccgaggttctgacaggagcagggagccgacggtgaaggcgaagccgcgccccct

SEQ ID NO: 735992 - DNA, 585 bp, Homo sapiens
acattttttgcttgtttacattatttttattttgttttaaattatatatatacaaattagtaaactcaactctcccaaatatttgttagttcaacaataaaacagaaactcataacaaataagaaatcagatagaaaaactgttagaaacaagggatacatctgatattttagactcttcaaagagggggttgtttctttctgcttctgctaagttctcagtcttgatgggatgattaaaatgtaggataaggtcacaaagcaataactgggagagcttatttggtgcctaacgaacggccatgccctcttcttcttggagtcacagcttgattttgtttgaggtgttcctttccccagctcctgtagtaagttctgagtggtccaaatttgtccacatttagcttatgatcagtaacaggcttcttacccatctttaagtcaatccttgcctctaccttttcctgagcagggagaatttctgcaatttctctcatttcagagccactgtaaaaaaactggccaaccgtcaccgaggttctgacaggagcagggagccgacggtgaaggcgaagccgcgccccct

SEQ ID NO: 735993 - DNA, 524 bp, Homo sapiens
acattttttgcttgtttacattatttttattttgttttaaattatatatatacaaattagtaaactcaactctcccaaatatttgttagttcaacaataaaacagaaactcataacaaataagaaatcagatagaaaaactgttagaaacaagggatacatctgatattttagactcttcaaagagggggttgtttctttctgcttctgctaagttctcagtcttgatgggatgattaaaatgtaggataaggtcacaaagcaataactgggagagctcttttatcttcttcaactccgaagaaattgtgttaatatttttaattactttgtccacatttagcttatgatcagtaacaggcttcttacccatctttaagtcaatccttgcctctaccttttcctgagcagggagaatttctgcaatttctctcatttcagagccactgtaaaaaaactggccaaccgtcaccgaggttctgacaggagcagggagccgacggtgaaggcgaagccgcgccccct

SEQ ID NO: 735994 - DNA, 373 bp, Homo sapiens
acattttttgcttgtttacattatttttattttgttttaaattatatatatacaaattagtaaactcaactctcccaaatatttgttagttcaacaataaaacagaaactcataacaaataagaaatcagatagaaaaactgttagaaacaagggatacatctgatattttagactcttcaaagagggggttgtttctttctgcttctgctaagttctcagtcttgatgggatgattaaaatgtaggataaggtcacaaagcaataactgggagagctctcataggattatgatgaagagagttcatttatgcagagctcttagaagagtcctggattatggtaaattctgtaaaggttggctgctgacatta

SEQ ID NO: 735995 - DNA, 1055 bp, Homo sapiens
tagttattacattttattttatgaaagaatattctccaaactagaacaattagataatcaagtttggggggaatctaaagcttcttaactgttttaaatgagttcaagcatccagaaccatttattcatttaataaaaattttttaagaatcgaatcaatcaaggcaccgtgttaagtactagaaatacccataaggagcttacagttgagcagggataagaaaagtaaggaaatatgcaattataaaatagtataacaggtgatagcaaaaggcagaaaggataacatgctggctcaaaaaaagttttccattgtaagagaccttgactactagcagttaacctggtgtgttggaggtagggtatagcaatgggatttcagacagacaagtatgtgttgaaacagatacagaaaagcacttgtggagatatgcaaatagttcagtacagctggagcatagaacatgcagtaagaacagagtaagagactagaggggaaaggaggggaatgatctgagcaggtcatatagtccattctaagatgtttagactttatcctgaggacaatggtgagccaatgagggttttctgcagattcgcattttagaaggagaatcttcactgtggtgttgaagtatttggtgcctaacgaacggccatgccctcttcttcttggagtcacagcttgattttgtttgaggtgttcctttccccagctcctgtagtaagttctgagtggtccaaactggtcttggcagtcccagtccccttagctgtggctgctgtaagcatcagcatgtgatgcaaatcttttatcttcttcaactccgaagaaattgtgttaatatttttaattactttgtccacatttagcttatgatcagtaacaggcttcttacccatctttaagtcaatccttgcctctaccttttcctgagcagggagaatttctgcaatttctctcatttcagagccactgtaaaaaaactggccaaccgtcaccgaggttctgacaggagcagggagccgacggtgaaggcgaagccgcgccccct

SEQ ID NO: 735996 - DNA, 1114 bp, Homo sapiens
agtcagatttcttaatatgtactgtaaatttgtaaaatatgtagcataaagcactttccaaacttatttggccataagaacattgactctgttctactgtacaccatctattaacattgcttgaaacagcagggttcacagatcaaagtccaggaaatgctgtcctagggagaacacatggaaaaagcatattaggcactcactatttggtgcctaacgaacggccatgccctcttcttcttggagtcacagcttgattttgtttgaggtgttcctttccccagctcctgtagtaagttctgagtggtccaaactggtcttggcagtcccagtccccttagctgtggctgctgtaagcatcagcatgtgatgcaaatctggccaatgaaagggaactgtgctggagggatctgggaggagacttataaaaagagactgtctatatatgagcacctctgaaggtaatgatcatgaggggtaataaagagagtgaacatgacagagcagaaagatggaaagagcctggtccctgacaaaatctttaaacctctgaattaactttagggctctgctaccttggatcttcttgtttttccttattgtataagttaagttggtttttttgttacttatagatgtaggcctcataactgacacaggttatctttaaatacccaagagttgttttaaaaagaataactacatattcagtgtagttttcatggttagaaataggactcttaggtgaaagcaataggggaacagatttcagctagctggtgagaaggaattgtttaaaatagaatggattgactagtgagacaggaagttccccagcataagaaatgtttggtcagggatagattatccctagaaatattcaatcacagaaattttcttgggataaaataactgaatatgtctgtgaggtgagcgactaaacatcatgacctataaggtctaatcctactatatgaatctgtttaaaatgaagaagctttaagtcacagaatctaatttatactttttaatttggaatggaccttaggggcttagtaagaatttataaagacaatgaattttgctgaatgtgacatagtcttgaatggtgtgt

SEQ ID NO: 735997 - DNA, 739 bp, Homo sapiens
ggactggaggcaggacaggtctgggtcaagccctccccggggagctcggccaggccactacccagaaaggagaggctgctccaacagcaattcaccgggagtggggaagcggagaccagactgtaggggccataggaatggggggtcagaagccaggatgtcgctgactcaaggcctgataccactagagcgccatctccgggccacaggacgccgcccaggccctcagcccgcagccctgcagagccatcgttagcaccgcaggttctactctgaaagcccagcctcctccttggcccaactgacacctgggaggagccccagatctttagggccctcagcgacccaactgcccatgaagaccccccagatctttggggccatgagcggcccaaccacccgctcaacagctaaagatggagcctgaggcatctggaagtttccacagtcctcgccctcccagacaggatttggaatgaacctttggggcttactaagtttcttgccaagtggacaggattagggtaatgtaaaatgccctcagagtgaccccggcctacggacagccaccagccgccaggcccacccagccaaccgtccccttctcggcccaaccgacacccagggagaggctccgaggccagcccggcccaccgcccacccgttgggtggtggaaggtggagcctcgggcagcctggaaatttcagcggtcttcaccctcccaaaccagattccgct

SEQ ID NO: 735998 - DNA, 2733 bp, Homo sapiens
gaagagaccatatttgttcgcagaggaagccgttgctttctgggatctggctacgccagaaaagacatcggctccaacaggggtgttccacagggtagctgggagttggaagagccaagaacgcctccgagctctggatttgagcttctctgcccatgggtgaagcgcccatgctcagcttgtgagcttcttcccgggagagcagccatggcactgaggaatgtgccctttcgctcagaggtcctgggctgggaccccgacagccttgctgactatttcaagaagctcaactataaggactgtgagaaggcagtgaagaagtaccacatcgatggggctcgcttcttgaacctgacagaaaatgacatccagaagttccccaagctccgggtgccgattctcagtaagttaagtcaggaaatcaacaagaacgaagagaggaggagcatcttcacacgcaaaccccaagtcccgcggtttcctgaagagacagaaagccacgaagaggacaatgggggctggtcgtcctttgaagaagacgattatgaaagtcccaatgatgaccaggatggggaggatgatggagactatgagtcccccaatgaggaggaagaggcacccgtggaagatgacgcggattatgagccgccaccctccaatgacgaggaagctctgcagaactccatcctgcctgccaagcctttccccaactccaactccatgtacatcgaccggcccccctctgggaaaaccccccagcagcctcctgtgcccccccagagaccgatggccgccctcccgcccccaccagccggccggaatcactcgccactgcccccaccccagaccaaccacgaagaacccagcagaagcagaaaccacaaaacggcaaagctccctgctccttcaatagacagaagcacgaaacctcccctagatcgttcattagctccgtttgatagagaacccttcacactaggaaagaaaccaccattttctgacaagccctcgattccagcgggaaggtcactcggggagcatttacccaagattcaaaagcctcctttaccaccgaccacggaaagacatgaaaggagcagccccctgccagggaagaagccacctgtgccaaagcatggatggggaccagacagaagagagaatgatgaagatgatgtgcatcagagacctttgccccagccagcactacttcctatgagctccaacactttcccttcaagatctactaagccaagtcccatgaaccctctcccatcctctcacatgcctggagcattctcagaaagtaacagcagttttccacagagtgcctccctgccaccatacttctctcaaggccctagcaacagaccacctatcagagccgaaggcagaaacttccccttgccacttccaaacaaacctcggcccccatcccccgcggaggaagagaattcattaaatgaagagtggtacgtttcttatattacccgaccagaggcagaagctgctcttagaaagataaaccaggtattgtgctatagtttattttaacatagttgtaaatattaatggcagagaagggaactgacctgtcctgagtaccaattacaagctaggaattctgctaggtgctgttgctttctgtaatacctaggagacccattagtgccagcttcacaactaccagcacccatagcagggattcctaggctcgggaatcattaggctggcagaagaatctcaaggcagtcatttggttggcagcatcttaggagattttattaatgaaagagtctgtcttgtcataggaatcacatggtgtcagaaggagactctctttcaaagttccaacatcgtaccagttctatcttcctcttaacacagacgtgccatccatgttgatgtgaaaggaccaatattaaagagatggcagcaactttttgctttttgccctagacgtttctagctagtcctttaatatcataaagtcttaaacatatttcccgtagccagtgccgaaactttaccttagatttatttatcagaaatgggaaagcaaaaatctttcatctttcacacttaaactccacaccagtagttctcagtagtagttgcacatttagatcacccggagaacttttgaaaaatcccgattcctgggtctcaccttgagattctaattattctgggggtgctgtgtcagctctgggagtcttcaaacttcccaggtaattctaatttgaagccaagactgtgaatcactggtccagaagtatgtttgtttagcagagatgttctgacaggctcaattaacttgcaataaaaggaacaaaggaaagtcattattgccaactcatggctatttaaagctatcctgatttggtatgaggagaagggagtagtttaaaggagtccttaccaattaattctattttaatattagatctttacagtattaatattatgtagcaataatttattgaatggaaatttaaagtacaggacaatcaaaacagtagtttagcaaatatcagaaaaaagaaaagaaaagagaacatctgcattcaattttgctcaagggtctgatgaaggaaagactatctagagatcacagggttttaagaagggtgaatttcatggcatgtggatgttttctgactttggatgtggaaaagaaagtttagggaattaactcacaggaatactaggaagatatatcttgagttaacc

SEQ ID NO: 735999 - DNA, 2562 bp, Homo sapiens
gaagagaccatatttgttcgcagaggaagccgttgctttctgggatctggctacgccagaaaagacatcggctccaacaggggtgttccacagggtagctgggagttggaagagccaagaacgcctccgagctctggatttgagcttctctgcccatgggtgaagcgcccatgctcagcttgtgagcttcttcccgggagagcagccatggcactgaggaatgtgccctttcgctcagaggtcctgggctgggaccccgacagccttgctgactatttcaagaagctcaactataaggactgtgagaaggcagtgaagaagtaccacatcgatggggctcgcttcttgaacctgacagaaaatgacatccagaagttccccaagctccgggtgccgattctcagtaagttaagtcaggaaatcaacaagaacgaagagaggaggagcatcttcacacgcaaaccccaagtcccgcggtttcctgaagagacagaaagccacgaagaggacaatgggggctggtcgtcctttgaagaagacgattatgaaagtcccaatgatgaccaggatggggaggatgatggagactatgagtcccccaatgaggaggaagaggcacccgtggaagatgacgcggattatgagccgccaccctccaatgacgaggaagctctgcagaactccatcctgcctgccaagcctttccccaactccaactccatgtacatcgaccggcccccctctgggaaaaccccccagcagcctcctgtgcccccccagagaccgatggccgccctcccgcccccaccagccggccggaatcactcgccactgcccccaccccagaccaaccacgaagaacccagcagaagcagaaaccacaaaacggcaaagctccctgctccttcaatagacagaagcacgaaacctcccctagatcgttcattagctccgtttgatagagaacccttcacactaggaaagaaaccaccattttctgacaagccctcgattccagcgggaaggtcactcggggagcatttacccaagattcaaaagcctcctttaccaccgaccacggaaagacatgaaaggagcagccccctgccagggaagaagccacctgtgccaaagcatggatggggaccagacagaagagagaatgatgaagatgatgtgcatcagagacctttgccccagccagcactacttcctatgagctccaacactttcccttcaagatctactaagccaagtcccatgaaccctctcccatcctctcacatgcctggagcattctcagaaagtaacagcagttttccacagagtgcctccctgccaccatacttctctcaaggccctagcaacagaccacctatcagagccgaaggcagaaacttccccttgccacttccaaacaaacctcggcccccatcccccgcggaggaagagaattcattaaatgaagagtggtacgtttcttatattacccgaccagaggcagaagctgctcttagaaagataaaccaggtattgtgctatagtttattttaacatagttgtaaatattaatggcagagaagggaactgacctgtcctgagtaccaattacaagctaggaattctgctaggtgctgttgctttctgtaatacctaggagacccattagtgccagcttcacaactaccagcacccatagcagggattcctaggctcgggaatcattaggctggcagaagaatctcaaggcagtcatttggttggcagcatcttaggagattttattaatgaaagagtctgtcttgtcataggaatcacatggtgtcagaaggagactctctttcaaagttccaacatcgtaccagttctatcttcctcttaacacagacgtgccatccatgttgatgtgaaaggaccaatattaaagagatggcagcaactttttgctttttgccctagacgtttctagctagtcctttaatatcataaagtcttaaacatatttcccgtagccagtgccgaaactttaccttagatttatttatcagaaatgggaaagcaaaaatctttcatctttcacacttaaactccacaccagtagttctcagtagtagttgcacatttagatcacccggagaacttttgaaaaatcccgattcctgggtctcaccttgagattctaattattctgggggtgctgtgtcagctctgggagtcttcaaacttcccaggtaattctaatttgaagccaagactgtgaatcactggtccagaagtatgtttgtttagcagagatgttctgacaggctcaattaacttttatcttcttcaactccgaagaaattgtgttaatatttttaattactttgtccacatttagcttatgatcagtaacaggcttcttacccatctttaagtcaatccttgcctctaccttttcctgagcagggagaatttctgcaatttctctcatttcagagccactgtaaaaaaactggccaaccgtcaccgaggttctgacaggagcagggagccgacggtgaaggcgaagccgcgccccct

SEQ ID NO: 736000 - DNA, 1861 bp, Homo sapiens
gaagagaccatatttgttcgcagaggaagccgttgctttctgggatctggctacgccagaaaagacatcggctccaacaggggtgttccacagggtagctgggagttggaagagccaagaacgcctccgagctctggatttgagcttctctgcccatgggtgaagcgcccatgctcagcttgtgagcttcttcccgggagagcagccatggcactgaggaatgtgccctttcgctcagaggtcctgggctgggaccccgacagccttgctgactatttcaagaagctcaactataaggactgtgagaaggcagtgaagaagtaccacatcgatggggctcgcttcttgaacctgacagaaaatgacatccagaagttccccaagctccgggtgccgattctcagtaagttaagtcaggaaatcaacaagaacgaagagaggaggagcatcttcacacgcaaaccccaagtcccgcggtttcctgaagagacagaaagccacgaagaggacaatgggggctggtcgtcctttgaagaagacgattatgaaagtcccaatgatgaccaggatggggaggatgatggagactatgagtcccccaatgaggaggaagaggcacccgtggaagatgacgcggattatgagccgccaccctccaatgacgaggaagctctgcagaactccatcctgcctgccaagcctttccccaactccaactccatgtacatcgaccggcccccctctgggaaaaccccccagcagcctcctgtgcccccccagagaccgatggccgccctcccgcccccaccagccggccggaatcactcgccactgcccccaccccagaccaaccacgaagaacccagcagaagcagaaaccacaaaacggcaaagctccctgctccttcaatagacagaagcacgaaacctcccctagatcgttcattagctccgtttgatagagaacccttcacactaggaaagaaaccaccattttctgacaagccctcgattccagcgggaaggtcactcggggagcatttacccaagattcaaaagcctcctttaccaccgaccacggaaagacatgaaaggagcagccccctgccagggaagaagccacctgtgccaaagcatggatggggaccagacagaagagagaatgatgaagatgatgtgcatcagagacctttgccccagccagcactacttcctatgagctccaacactttcccttcaagatctactaagccaagtcccatgaaccctctcccatcctctcacatgcctggagcattctcagaaagtaacagcagttttccacagagtgcctccctgccaccatacttctctcaaggccctagcaacagaccacctatcagagccgaaggcagaaacttccccttgccacttccaaacaaacctcggcccccatcccccgcggaggaagagaattcattaaatgaagagtggtacgtttcttatattacccgaccagaggcagaagctgctcttagaaagataaaccaggatggcacatttctggtcagagacagctctaaaaaaacaacaaccaatccatatgtcctcatggtgttgtacaaagataaagtttacaacatccagatccgttatcagaaggaaagtcaagtttacttgttgggaactggactccgagggaaagaggtaaggatttcaaatttcgacattttcccaaagtctttatttatgccactctgcatgccttcatggagcgatctttgagagtccgtgctgtatggcaaatttaggattaaatcacatgagtgaagcccttcatttattggaagagaaataaagcaaaatctttacaatggttact

SEQ ID NO: 736001 - DNA, 1480 bp, Homo sapiens
gaagagaccatatttgttcgcagaggaagccgttgctttctgggatctggctacgccagaaaagacatcggctccaacaggggtgttccacagggtagctgggagttggaagagccaagaacgcctccgagctctggatttgagcttctctgcccatgggtgaagcgcccatgctcagcttgtgagcttcttcccgggagagcagccatggcactgaggaatgtgccctttcgctcagaggtcctgggctgggaccccgacagccttgctgactatttcaagaagctcaactataaggactgtgagaaggcagtgaagaagtaccacatcgatggggctcgcttcttgaacctgacagaaaatgacatccagaagttccccaagctccgggtgccgattctcagtaagttaagtcaggaaatcaacaagaacgaagagaggaggagcatcttcacacgcaaaccccaagtcccgcggtttcctgaagagacagaaagccacgaagaggacaatgggggctggtcgtcctttgaagaagacgattatgaaagtcccaatgatgaccaggatggggaggatgatggagactatgagtcccccaatgaggaggaagaggcacccgtggaagatgacgcggattatgagccgccaccctccaatgacgaggaagctctgcagaactccatcctgcctgccaagcctttccccaactccaactccatgtacatcgaccggcccccctctgggaaaaccccccagcagcctcctgtgcccccccagagaccgatggccgccctcccgcccccaccagccggccggaatcactcgccactgcccccaccccagaccaaccacgaagaacccagcagaagcagaaaccacaaaacggcaaagctccctgctccttcaatagacagaagcacgaaacctcccctagatcgttcattagctccgtttgatagagaacccttcacactaggaaagaaaccaccattttctgacaagccctcgattccagcgggaaggtcactcggggagcatttacccaagattcaaaagcctcctttaccaccgaccacggaaagacatgaaaggagcagccccctgccagggaagaagccacctgtgccaaagcatggatggggaccagacagaagagagaatgatgaagatgatgtgcatcagagacctttgccccagccagcactacttcctatgagctccaacactttcccttcaagatctactaagccaagtcccatgaaccctctcccatcctctcacatgcctggagcattctcagaaagtaacagcagttttccacagagtgcctccctgccaccatacttctctcaaggccctagcaacagaccacctatcagagccgaaggcagaaacttccccttgccacttccaaacaaacctcggcccccatcccccgcggaggaagagggttaggtgaggttcgcgggtaggagac

SEQ ID NO: 736002 - DNA, 1171 bp, Homo sapiens
gaagagaccatatttgttcgcagaggaagccgttgctttctgggatctggctacgccagaaaagacatcggctccaacaggggtgttccacagggtagctgggagttggaagagccaagaacgcctccgagctctggatttgagcttctctgcccatgggtgaagcgcccatgctcagcttgtgagcttcttcccgggagagcagccatggcactgaggaatgtgccctttcgctcagaggtcctgggctgggaccccgacagccttgctgactatttcaagaagctcaactataaggactgtgagaaggcagtgaagaagtaccacatcgatggggctcgcttcttgaacctgacagaaaatgacatccagaagttccccaagctccgggtgccgattctcagtaagttaagtcaggaaatcaacaagaacgaagagaggaggagcatcttcacacgcaaaccccaagtcccgcggtttcctgaagagacagaaagccacgaagaggacaatgggggctggtcgtcctttgaagaagacgattatgaaagtcccaatgatgaccaggatggggaggatgatggagactatgagtcccccaatgaggaggaagaggcacccgtggaagatgacgcggattatgagccgccaccctccaatgacgaggaagctctgcagaactccatcctgcctgccaagcctttccccaactccaactccatgtacatcgaccggcccccctctgggaaaaccccccagcagcctcctgtgcccccccagagaccgatggccgccctcccgcccccaccagccggccggaatcactcgccactgcccccaccccagaccaaccacgaagaacccagcagaagcagaaaccacaaaacggcaaagctccctgctccttcaatagacagaagcacgaaacctcccctagatcgttcattagctccgtttgatagagaacccttcacactaggaaagaaaccaccattttctgacaagccctcgattccacatcctccattcgtggccctctggacaagtggcgggctctgcactcatgagggcttcatatgttgctgcccccctcttaatcatggcctcatgttcctgtaataccaacttaaatgttcgcgctcctattcaatgttccgtcaacgggccgagc

SEQ ID NO: 736003 - DNA, 1789 bp, Homo sapiens
gtggcagagtctagaacagggagctcagataggaggctactgcggtagttcagtgaagaaatggacatggatgtttgtaggcagaacatgaagatgaggaaaagtgagcagatccagacaggttttgggagtgccggctcttgctgatgtattggaagtgcttcctaacgtttggatctttatgcagccactgcccccaccccagaccaaccacgaagaacccagcagaagcagaaaccacaaaacggcaaagctccctgctccttcaatagacagaagcacgaaacctcccctagatcgttcattagctccgtttgatagagaacccttcacactaggaaagaaaccaccattttctgacaagccctcgattccagcgggaaggtcactcggggagcatttacccaagattcaaaagcctcctttaccaccgaccacggaaagacatgaaaggagcagccccctgccagggaagaagccacctgtgccaaagcatggatggggaccagacagaagagagaatgatgaagatgatgtgcatcagagacctttgccccagccagcactacttcctatgagctccaacactttcccttcaagatctactaagccaagtcccatgaaccctctcccatcctctcacatgcctggagcattctcagaaagtaacagcagttttccacagagtgcctccctgccaccatacttctctcaaggccctagcaacagaccacctatcagagccgaaggcagaaacttccccttgccacttccaaacaaacctcggcccccatcccccgcggaggaagagaattcattaaatgaagagtggtacgtttcttatattacccgaccagaggcagaagctgctcttagaaagataaaccaggatggcacatttctggtcagagacagctctaaaaaaacaacaaccaatccatatgtcctcatggtgttgtacaaagataaagtttacaacatccagatccgttatcagaaggaaagtcaagtttacttgttgggaactggactccgagggaaagaggactttctgtctgtgtcagatattattgactacttcaggaaaatgccacttctgctcattgatgggaaaaaccgaggttccagataccagtgcacattaacgcatgctgcagggtacccatagcaagttatagccgagcaaatgaaccgtcctcctgcctctgttgccaacacgagatcaatcagccttggtcaatggacaaacacttaggactgaactgaacccctccccatgaacacaagggttttatcctttcctttaaaaacagtgtttgaaatgaagactgtcaactatcccataatttatttattcttcttcaatgtttgtaaagtgcatgagtcatgttcacacttgaagtctagtagtgcactgtaataattcattttttaaaagattatttaatgcccatttcaaaatacagtagtttacacagctacagaaacaatttggggcaagttttaaaacactgaaacagtaatagttattggtgtcacataaaactgatttgttttttacagccaaacctctgtcagtcagaggcattcattagttttatacatgtaatttgaaaatcactaaacctcgttttctcagcagcaataatttaagaggcttcaaaaatataatttcactcttatttagtattttttcctgggggcatttttacgtaatttttttatgaaaagacaaatgcatgttgagataacttctgggattaaaatagtcttttgctttaaaaaaaaa

SEQ ID NO: 736004 - DNA, 1345 bp, Homo sapiens
ttttcttttcacttacatctgtaactgtaaaatttattcagtttctaaaaatttacattttcagaattcattaaatgaagagtggtacgtttcttatattacccgaccagaggcagaagctgctcttagaaagataaaccaggtattgtgctatagtttattttaacatagttgtaaatattaatggcagagaagggaactgacctgtcctgagtaccaattacaagctaggaattctgctaggtgctgttgctttctgtaatacctaggagacccattagtgccagcttcacaactaccagcacccatagcagggattcctaggctcgggaatcattaggctggcagaagaatctcaaggcagtcatttggttggcagcatcttaggagattttattaatgaaagagtctgtcttgtcataggaatcacatggtgtcagaaggagactctctttcaaagttccaacatcgtaccagttctatcttcctcttaacacagacgtgccatccatgttgatgtgaaaggaccaatattaaagagatggcagcaactttttgctttttgccctagacgtttctagctagtcctttaatatcataaagtcttaaacatatttcccgtagccagtgccgaaactttaccttagatttatttatcagaaatgggaaagcaaaaatctttcatctttcacacttaaactccacaccagtagttctcagtagtagttgcacatttagatcacccggagaacttttgaaaaatcccgattcctgggtctcaccttgagattctaattattctgggggtgctgtgtcagctctgggagtcttcaaacttcccaggtaattctaatttgaagccaagactgtgaatcactggtccagaagtatgtttgtttagcagagatgttctgacaggctcaattaacttgcaataaaaggaacaaaggaaagtcattattgccaactcatggctatttaaagctatcctgatttggtatgaggagaagggagtagtttaaaggagtccttaccaattaattctattttaatattagatctttacagtattaatattatgtagcaataatttattgaatggaaatttaaagtacaggacaatcaaaacagtagtttagcaaatatcagaaaaaagaaaagaaaagagaacatctgcattcaattttgctcaagggtctgatgaaggaaagactatctagagatcacagggttttaagaagggtgaatttcatggcatgtggatgttttctgactttggatgtggaaaagaaagtttagggaattaactcacaggaatactaggaagatatatcttgagttaacc

SEQ ID NO: 736005 - DNA, 1189 bp, Homo sapiens
acattttttgcttgtttacattatttttattttgttttaaattatatatatacaaattagtaaactcaactctcccaaatatttgttagttcaacaataaaacagaaactcataacaaataagaaatcagatagaaaaactgttagaaacaagggatacatctgatattttagactcttcaaagagggggttgtttctttctgcttctgctaagttctcagtcttgatgggatgattaaaatgtaggataaggtcacaaagcaataactgggagagcttatttggtgcctaacgaacggccatgccctcttcttcttggagtcacagcttgattttgtttgaggtgttcctttccccagctcctgtagtaagttctgagtggtccaaactggtcttggcagtcccagtccccttagctgtggctgctgtaagcatcagcatgtgatgcaaatctggccaatgaaagggaactgtgctggagggatctgggaggagacttataaaaagagactgtctatatatgagcacctctgaaggtaatgatcatgaggggtaataaagagagtgaacatgacagagcagaaagatggaaagagcctggtccctgacaaaatctttaaacctctgaattaactttagggctctgctaccttggatcttcttgtttttccttattgtataagttaagttggtttttttgttacttatagatgtaggcctcataactgacacaggttatctttaaatacccaagagttgttttaaaaagaataactacatattcagtgtagttttcatggttagaaataggactcttaggtgaaagcaataggggaacagatttcagctagctggtgagaaggaattgtttaaaatagaatggattgactagtgagacaggaagttccccagcataagaaatgtttggtcagggatagattatccctagaaatattcaatcacagaaattttcttgggataaaataactgaatatgtctgtgaggtgagcgactaaacatcatgacctataaggtctaatcctactatatgaatctgtttaaaatgaagaagctttaagtcacagaatctaatttatactttttaatttggaatggaccttaggggcttagtaagaatttataaagacaatgaattttgctgaatgtgacatagtcttgaatggtgtgt

SEQ ID NO: 736006 - DNA, 936 bp, Homo sapiens
caactgacagactaaacttcccttgcacttcatctattaccgacagatatagtcagagacagctctaaaaaaacaacaaccaatccatatgtcctcatggtgttgtacaaagataaagtttacaacatccagatccgttatcagaaggaaagtcaagtttacttgttgggaactggactccgagggaaagaggactttctgtctgtgtcagatattattgactacttcaggaaaatgccacttctgctcattgatgggaaaaaccgaggttccagataccagtgcacattaacgcatgctgcagggtacccatagcaagttatagccgagcaaatgaaccgtcctcctgcctctgttgccaacacgagatcaatcagccttggtcaatggacaaacacttaggactgaactgaacccctccccatgaacacaagggttttatcctttcctttaaaaacagtgtttgaaatgaagactgtcaactatcccataatttatttattcttcttcaatgtttgtaaagtgcatgagtcatgttcacacttgaagtctagtagtgcactgtaataattcattttttaaaagattatttaatgcccatttcaaaatacagtagtttacacagctacagaaacaatttggggcaagttttaaaacactgaaacagtaatagttattggtgtcacataaaactgatttgttttttacagccaaacctctgtcagtcagaggcattcattagttttatacatgtaatttgaaaatcactaaacctcgttttctcagcagcaataatttaagaggcttcaaaaatataatttcactcttatttagtattttttcctgggggcatttttacgtaatttttttatgaaaagacaaatgcatgttgagataacttctgggattaaaatagtcttttgctttaaaaaaaaa

SEQ ID NO: 736007 - DNA, 2401 bp, Homo sapiens
  misc_feature (24)..(24): n is a, c, g, or t
  misc_feature (51)..(51): n is a, c, g, or t
atgccttattaagggctgaacacnttaatttagaaacccaacgcttgtggnttgtaaaactaaagcgtgtacgtcgatcggaggatgaagcagacgctcgagctctggatttgagcttctctgcccatgggtgaagcgcccatgctcagcttgtgagcttcttcccgggagagcagccatggcactgaggaatgtgccctttcgctcagaggtcctgggctgggaccccgacagccttgctgactatttcaagaagctcaactataaggactgtgagaaggcagtgaagaagtaccacatcgatggggctcgcttcttgaacctgacagaaaatgacatccagaagttccccaagctccgggtgccgattctcagtaagttaagtcaggaaatcaacaagaacgaagagaggaggagcatcttcacacgcaaaccccaagtcccgcggtttcctgaagagacagaaagccacgaagaggacaatgggggctggtcgtcctttgaagaagacgattatgaaagtcccaatgatgaccaggatggggaggatgatggagactatgagtcccccaatgaggaggaagaggcacccgtggaagatgacgcggattatgagccgccaccctccaatgacgaggaagctctgcagaactccatcctgcctgccaagcctttccccaactccaactccatgtacatcgaccggcccccctctgggaaaaccccccagcagcctcctgtgcccccccagagaccgatggccgccctcccgcccccaccagccggccggaatcactcgccactgcccccaccccagaccaaccacgaagaacccagcagaagcagaaaccacaaaacggcaaagctccctgctccttcaatagacagaagcacgaaacctcccctagatcgttcattagctccgtttgatagagaacccttcacactaggaaagaaaccaccattttctgacaagccctcgattccagcgggaaggtcactcggggagcatttacccaagattcaaaagcctcctttaccaccgaccacggaaagacatgaaaggagcagccccctgccagggaagaagccacctgtgccaaagcatggatggggaccagacagaagagagaatgatgaagatgatgtgcatcagagacctttgccccagccagcactacttcctatgagctccaacactttcccttcaagatctactaagccaagtcccatgaaccctctcccatcctctcacatgcctggagcattctcagaaagtaacagcagttttccacagagtgcctccctgccaccatacttctctcaaggccctagcaacagaccacctatcagagccgaaggcagaaacttccccttgccacttccaaacaaacctcggcccccatcccccgcggaggaagagaattcattaaatgaagagtggtacgtttcttatattacccgaccagaggcagaagctgctcttagaaagataaaccaggatggcacatttctggtcagagacagctctaaaaaaacaacaaccaatccatatgtcctcatggtgttgtacaaagataaagtttacaacatccagatccgttatcagaaggaaagtcaagtttacttgttgggaactggactccgagggaaagaggactttctgtctgtgtcagatattattgactacttcaggaaaatgccacttctgctcattgatgggaaaaaccgaggttccagataccagtgcacattaacgcatgctgcagggtacccatagcaagttatagccgagcaaatgaaccgtcctcctgcctctgttgccaacacgagatcaatcagccttggtcaatggacaaacacttaggactgaactgaacccctccccatgaacacaagggttttatcctttcctttaaaaacagtgtttgaaatgaagactgtcaactatcccataatttatttattcttcttcaatgtttgtaaagtgcatgagtcatgttcacacttgaagtctagtagtgcactgtaataattcattttttaaaagattatttaatgcccatttcaaaatacagtagtttacacagctacagaaacaatttggggcaagttttaaaacactgaaacagtaatagttattggtgtcacataaaactgatttgttttttacagccaaacctctgtcagtcagaggcattcattagttttatacatgtaatttgaaaatcactaaacctcgttttctcagcagcaataatttaagaggcttcaaaaatataatttcactcttatttagtattttttcctgggggcatttttacgtaatttttttatgaaaagacaaatgcatgttgagataacttctgggattaaaatagtcttttgctttaaaaaaaaa

SEQ ID NO: 736008 - DNA, 1890 bp, Homo sapiens
agctcaggtacccccagacggcaccaggatggggaggatgatggagactatgagtcccccaatgaggaggaagaggcacccgtggaagatgacgcggattatgagccgccaccctccaatgacgaggaagctctgcagaactccatcctgcctgccaagcctttccccaactccaactccatgtacatcgaccggcccccctctgggaaaaccccccagcagcctcctgtgcccccccagagaccgatggccgccctcccgcccccaccagccggccggaatcactcgccactgcccccaccccagaccaaccacgaagaacccagcagaagcagaaaccacaaaacggcaaagctccctgctccttcaatagacagaagcacgaaacctcccctagatcgttcattagctccgtttgatagagaacccttcacactaggaaagaaaccaccattttctgacaagccctcgattccagcgggaaggtcactcggggagcatttacccaagattcaaaagcctcctttaccaccgaccacggaaagacatgaaaggagcagccccctgccagggaagaagccacctgtgccaaagcatggatggggaccagacagaagagagaatgatgaagatgatgtgcatcagagacctttgccccagccagcactacttcctatgagctccaacactttcccttcaagatctactaagccaagtcccatgaaccctctcccatcctctcacatgcctggagcattctcagaaagtaacagcagttttccacagagtgcctccctgccaccatacttctctcaaggccctagcaacagaccacctatcagagccgaaggcagaaacttccccttgccacttccaaacaaacctcggcccccatcccccgcggaggaagagaattcattaaatgaagagtggtacgtttcttatattacccgaccagaggcagaagctgctcttagaaagataaaccaggatggcacatttctggtcagagacagctctaaaaaaacaacaaccaatccatatgtcctcatggtgttgtacaaagataaagtttacaacatccagatccgttatcagaaggaaagtcaagtttacttgttgggaactggactccgagggaaagaggactttctgtctgtgtcagatattattgactacttcaggaaaatgccacttctgctcattgatgggaaaaaccgaggttccagataccagtgcacattaacgcatgctgcagggtacccatagcaagttatagccgagcaaatgaaccgtcctcctgcctctgttgccaacacgagatcaatcagccttggtcaatggacaaacacttaggactgaactgaacccctccccatgaacacaagggttttatcctttcctttaaaaacagtgtttgaaatgaagactgtcaactatcccataatttatttattcttcttcaatgtttgtaaagtgcatgagtcatgttcacacttgaagtctagtagtgcactgtaataattcattttttaaaagattatttaatgcccatttcaaaatacagtagtttacacagctacagaaacaatttggggcaagttttaaaacactgaaacagtaatagttattggtgtcacataaaactgatttgttttttacagccaaacctctgtcagtcagaggcattcattagttttatacatgtaatttgaaaatcactaaacctcgttttctcagcagcaataatttaagaggcttcaaaaatataatttcactcttatttagtattttttcctgggggcatttttacgtaatttttttatgaaaagacaaatgcatgttgagataacttctgggattaaaatagtcttttgctttaaaaaaaaa

SEQ ID NO: 736009 - DNA, 1399 bp, Homo sapiens
  misc_feature (1163)..(1163): n is a, c, g, or t
tcccaaatggttacgtatttcttttacaaaatatgctgatgtctttttttttttacaggttgaaaaaagaatagcttaggagtagcacatagagagttcttgtgtgtggcctttgtttctcttgacttttataaaataggatgtttcttgaaagctgggtgctgttaaataatgcatggttttcaactggttagatggtacagcagaacactgggggtgaagaaacaaggatttcagtactaattcagccaacaactatccctgtaatagtgagcaagtaatctgtataatcctgcatttgctattctatttcatacaaataaagctataagttagaacttacacttgtagtgtttatgacactccaaaaatagcttgtggtgttcatgacaatttaggatttaacacaatgttcaaatttgataaaaatatgagaaagctatacgatacaaacatgcttaaaagctatttgccatttttaattttaacatatttaaaaaataaaatttaaagacatctggatttcttaagaacatagtggcggtttagttctcaagctttccttgatgttgctttgtgtggttttccaggaataatggtaatcaagcaaaaagatttaaacacacacacacacacacacacacacacacacacagtctctctctctcagcaaaaccaagagctagagtaaacctataactcccaatgccttgtaagtttagccagaaacaactaaaatactcagaacttttgttgaagcccacaacagtataatagggagacctgggaaagcaaagggagcctagcagttgtatgtcacagtgagaagtgtcagggacagggcacaaattgcacccagggcagccactagaagaatcagtgaattaacatgtgtaaagtacccagaaatatccagaggtgatatgtgtcagaaagcattattttgtaaaagtgaaggaaacacagtgggaatgatggctccttttgcaatggccagtaagaaacctggggagctcaaagcttgagatcagccctgtaagccagatgagagtcatagaattagagaaggtatggcttcaccggaagtgccatattttgaaggagccattcaattcagtagcaacagaggaaggagttcttgagcgagaacatccaccttctanatttatagaaatcctctgtgaagttatctggtccagggaaattcaactcaattacatatgaaaaactaaaaagcaataaataacaaagctttagagagacattctaaagaaaaacaataaaaaaaaaataacaataaaacccataaagctatagaccaaagtctcatagatttagatgcaaaatcctaaaatcgaaaaaaaacatctagccatatccataaactatatcatcacca

SEQ ID NO: 736010 - DNA, 581 bp, Homo sapiens
  misc_feature (3)..(3): n is a, c, g, or t
  misc_feature (511)..(511): n is a, c, g, or t
  misc_feature (513)..(515): n is a, c, g, or t
  misc_feature (537)..(537): n is a, c, g, or t
  misc_feature (539)..(539): n is a, c, g, or t
  misc_feature (545)..(546): n is a, c, g, or t
  misc_feature (552)..(552): n is a, c, g, or t
  misc_feature (565)..(565): n is a, c, g, or t
  misc_feature (574)..(574): n is a, c, g, or t
ggncattgtgccctgccaaggcacagcgtagatctggaaagagcagaatgctttccttttcagatgtggctggtcatggaaggggcagttgtccaagttgggctgggtcttggtacacaaatccacctgtcaggacgcctaggggtctgtaccgggctggcctgtgcctatcacctcttatgcacacctcccaccccctgtattcccacccctggactggtggcccctgccttggggaaggtctccccatgtgcctgcaccaggagacagacagagaaggcagcaggcggcctttgttgctcagcaaggggctctgccctccctccttccttcttgcttctcatagccccggtgtgcggtgcatacacccccacctcctgcaataaaatagtagcatcggcaaaaaaaaaaaaaaaaaaaaaaaaaaaaaaaaaaaaaaaaaaaaaaaaaaaaaaaaaaaaacaaaacaaaaaaaaaaaaaaaaaaaaaaaaaaaaaaaaaggggggggcncnnnaaaaattcccccggggggcccnantttacnncacccntttttttgaaaanggggccccnaaagggg

SEQ ID NO: 736011 - DNA, 955 bp, Homo sapiens
  misc_feature (631)..(631): n is a, c, g, or t
gttcccgactagccgacagcaaggggaggccccatggacgccagcgtggaggaggagggtgtgcggcgtgcactggactttgccgtcggcgagtacaacaaagccagcaacgacatgtaccacagccgcgcgctgcaggtggtgcgcgcccgcaagcagatcgtagctggggtgaactacttcttggacgtggagctgggccgaaccacgtgtaccaagacccagcccaacttggacaactgccccttccatgaccagccacatctgaaaaggaaagcattctgctctttccagatctacgctgtgccttggcagggcacaatgaccttgtcgaaatccacctgtcaggacgcctaggggtctgtaccgggctggcctgtgcctatcacctcttatgcacacctcccaccccctgtattcccacccctggactggtggcccctgccttggggaaggtctccccatgtgcctgcaccaggagacagacagagaaggcagcaggcggcctttgttgctcagcaaggggctctgccctccctccttccttcttgcttctcatagccccggtgtgcggtgcatacacccccacctcctgcaataaaatagtagcatcggcaaaaaaaacaccacnaccacaccccccaccccacccaccaccacggcgggcccccccacaacaacacccccccgaggcgcccccgcccacgccccccgccccgccccccaaggcgcccacaagcgacgcgccaacaacacaccccggccccgctgtacacaccccgacaacggtgccaccgcctcccgcgacccccgggcacagaaccccccctccgggagccaccacacgggccacccctccccgcctcacaccccagcgcaaccacacaccgcggactaccgcgcccacacccgccaaccgcccccgcacacccgcacgagccccccgcactccacg

SEQ ID NO: 736012 - DNA, 739 bp, Homo sapiens
gcacgagctcgtgccgaatcggcacgagctcaccggtacgcagcgggtcctctctatctagctccagcctctcgcctgcgccccactccccgcgtcccgcgtcctagccgaccatggccgggcccctgcgcgccccgctgctcctgctggccatcctggccgtggccctggccgtgagccccgcggccggctccagtcccggcaagccgccgcgcctggtgggaggccccatggacgccagcgtggaggaggagggtgtgcggcgtgcactggactttgccgtcggcgagtacaacaaagccagcaacgacatgtaccacagccgcgcgctgcaggtggtgcgcgcccgcaagcagatcgtagctggggtgaactacttcttggacgtggagctgggccgaaccacgtgtaccaagacccagcccaacttggacaactgccccttccatgaccagccacatctgaaaaggaaagcattctgctctttccagatctacgctgtgccttggcagggcacaatgaccttgtcgaaatccacctgtcaggacgcctaggggtctgtaccgggctggcctgtgcctatcacctcttatgcacacctcccaccccctgtattcccacccctggactggtggcccctgccttggggaaggtctccccatgtgctgactctgagaagaccgaggacgagggggcttgtgtcgggcgctgcttcctcttcttctggtctatagccgtt

SEQ ID NO: 736013 - DNA, 938 bp, Homo sapiens
  misc_feature (868)..(868): n is a, c, g, or t
  misc_feature (870)..(872): n is a, c, g, or t
  misc_feature (894)..(894): n is a, c, g, or t
  misc_feature (896)..(896): n is a, c, g, or t
  misc_feature (902)..(903): n is a, c, g, or t
  misc_feature (909)..(909): n is a, c, g, or t
  misc_feature (922)..(922): n is a, c, g, or t
  misc_feature (931)..(931): n is a, c, g, or t
tggccccggggataatttttatgtgggatttcgtcgaccacgcgtcgctagcggtacgcagcgggtcctctctatctagctccagcctctcgcctgcgccccactccccgcgtcccgcgtcctagccgaccatggccgggcccctgcgcgccccgctgctcctgctggccatcctggccgtggccctggccgtgagccccgcggccggctccagtcccggcaagccgccgcgcctggtgggaggccccatggacgccagcgtggaggaggagggtgtgcggcgtgcactggactttgccgtcggcgagtacaacaaagccagcaacgacatgtaccacagccgcgcgctgcaggtggtgcgcgcccgcaagcagatcgtagctggggtgaactacttcttggacgtggagctgggccgaaccacgtgtaccaagacccagcccaacttggacaactgccccttccatgaccagccacatctgaaaaggaaagcattctgctctttccagatctacgctgtgccttggcagggcacaatgaccttgtcgaaatccacctgtcaggacgcctaggggtctgtaccgggctggcctgtgcctatcacctcttatgcacacctcccaccccctgtattcccacccctggactggtggcccctgccttggggaaggtctccccatgtgcctgcaccaggagacagacagagaaggcagcaggcggcctttgttgctcagcaaggggctctgccctccctccttccttcttgcttctcatagccccggtgtgcggtgcatacacccccacctcctgcaataaaatagtagcatcggcaaaaaaaaaaaaaaaaaaaaaaaaaaaggggggggcncnnnaaaaattcccccggggggcccnantttacnncacccntttttttgaaaanggggccccnaaagggg

SEQ ID NO: 736014 - DNA, 968 bp, Homo sapiens
gaatatccgggatcgcctcggtatcgcagcgggtcctctctatcggtacgcagcgggtcctctctatctagctccagcctctcgcctgcgccccactccccgcgtcccgcgtcctagccgaccatggccgggcccctgcgcgccccgctgctcctgctggccatcctggccgtggccctggccgtgagccccgcggccggctccagtcccggcaagccgccgcgcctggtgggaggccccatggacgccagcgtggaggaggagggtgtgcggcgtgcactggactttgccgtcggcgagtacaacaaagccagcaacgacatgtaccacagccgcgcgctgcaggtggtgcgcgcccgcaagcagatcgtagctggggtgaactacttcttggacgtggagctgggccgaaccacgtgtaccaagacccagcccaacttggacaactgccccttccatgaccagccacatctgaaaaggaaagcattctgctctttccagatctacgctgtgccttggcagggcacaatgaccttgtcgaaatccacctgtcaggacgcctaggggtctgtaccgggctggcctgtgcctatcacctcttatgcacacctcccaccccctgtattcccacccctggactggtggcccctgccttggggaaggtctccccatgtgcctgcaccaggagacagacagagaaggcagcaggcggcctttgttgctcagcaaggggctctgccctccctccttccttcttgcttctcatagccccggtgtgcggtgcatacacccccacctcctgcaataaaatagtagcatcggcaaaacaaaaaaaacaaaaaacaaaaaacagggcgggcacaaaatacccgaggcaacacacaggcccacatttgaaaaaaggcccaaaggtgtaaaacgcaacgggcgggtaacacgcgaggagaagcggaactggacaccactgg

SEQ ID NO: 736015 - DNA, 950 bp, Homo sapiens
  misc_feature (880)..(880): n is a, c, g, or t
  misc_feature (882)..(884): n is a, c, g, or t
  misc_feature (906)..(906): n is a, c, g, or t
  misc_feature (908)..(908): n is a, c, g, or t
  misc_feature (914)..(915): n is a, c, g, or t
  misc_feature (921)..(921): n is a, c, g, or t
  misc_feature (934)..(934): n is a, c, g, or t
  misc_feature (943)..(943): n is a, c, g, or t
aacataggctagtacgggcctggtttaattggccgaggagcggtacgcagcgggtcctctctatctagctccagcctctcgcctgcgccccactccccgcgtcccgcgtcctagccgaccatggccgggcccctgcgcgccccgctgctcctgctggccatcctggccgtggccctggccgtgagccccgcggccggctccagtcccggcaagccgccgcgcctggtgggaggccccatggacgccagcgtggaggaggagggtgtgcggcgtgcactggactttgccgtcggcgagtacaacaaagccagcaacgacatgtaccacagccgcgcgctgcaggtggtgcgcgcccgcaagcagatcgtagctggggtgaactacttcttggacgtggagctgggccgaaccacgtgtaccaagacccagcccaacttggacaactgccccttccatgaccagccacatctgaaaaggaaagcattctgctctttccagatctacgctgtgccttggcagggcacaatgaccttgtcgaaatccacctgtcaggacgcctaggggtctgtaccgggctggcctgtgcctatcacctcttatgcacacctcccaccccctgtattcccacccctggactggtggcccctgccttggggaaggtctccccatgtgcctgcaccaggagacagacagagaaggcagcaggcggcctttgttgctcagcaaggggctctgccctccctccttccttcttgcttctcatagccccggtgtgcggtgcatacacccccacctcctgcaataaaatagtagcatcggcaaaaaaaaaaacaaaacaaaaaaaaaaaaaaaaaaaaaaaaaaaaaaaaaggggggggcncnnnaaaaattcccccggggggcccnantttacnncacccntttttttgaaaanggggccccnaaagggg

SEQ ID NO: 736016 - DNA, 920 bp, Homo sapiens
ccccctttacccttccccctcctatcttccccccctactcgctggcccggtccggaattttccacagcagcggtacgcagcgggtcctctctatctagctccagcctctcgcctgcgccccactccccgcgtcccgcgtcctagccgaccatggccgggcccctgcgcgccccgctgctcctgctggccatcctggccgtggccctggccgtgagccccgcggccggctccagtcccggcaagccgccgcgcctggtgggaggccccatggacgccagcgtggaggaggagggtgtgcggcgtgcactggactttgccgtcggcgagtacaacaaagccagcaacgacatgtaccacagccgcgcgctgcaggtggtgcgcgcccgcaagcagatcgtagctggggtgaactacttcttggacgtggagctgggccgaaccacgtgtaccaagacccagcccaacttggacaactgccccttccatgaccagccacatctgaaaaggaaagcattctgctctttccagatctacgctgtgccttggcagggcacaatgaccttgtcgaaatccacctgtcaggacgcctaggggtctgtacaccctgatgaaaagactgaggaaaatgctgcctttcctgaatggctaccaggcagggaatgatgctgggaagtgtttaccccacaggctctgtgccttctctgactgggcagctcatgctgtatgcatggaggcatcattaccaaacacacctctgaggccagcggccagcgtctgactcacaagccatgactgccccaccttcttacaacaacaatagcagtttccccgtgaggattcacccctcctcccctctcactccgcctttttccagggaagctgactctaccctttggaccacagcttggagcacttgaccc

SEQ ID NO: 736017 - DNA, 1010 bp, Homo sapiens
  misc_feature (814)..(814): n is a, c, g, or t
  misc_feature (819)..(819): n is a, c, g, or t
  misc_feature (822)..(822): n is a, c, g, or t
tcaggctggtacggtcccaaggtcttatgatccggtacgcagcgggtcctctctatctagctccagcctctcgcctgcgccccactccccgcgtcccgcgtcctagccgaccatggccgggcccctgcgcgccccgctgctcctgctggccatcctggccgtggccctggccgtgagccccgcggccggctccagtcccggcaagccgccgcgcctggtgggaggccccatggacgccagcgtggaggaggagggtgtgcggcgtgcactggactttgccgtcggcgagtacaacaaagccagcaacgacatgtaccacagccgcgcgctgcaggtggtgcgcgcccgcaagcagatcgtagctggggtgaactacttcttggacgtggagctgggccgaaccacgtgtaccaagacccagcccaacttggacaactgccccttccatgaccagccacatctgaaaaggaaagcattctgctctttccagatctacgctgtgccttggcagggcacaatgaccttgtcgaaatccacctgtcaggacgcctaggggtctgtaccgggctggcctgtgcctatcacctcttatgcacacctcccaccccctgtattcccacccctggactggtggcccctgccttggggaaggtctccccatgtgcctgcaccaggagacagacagagaaggcagcaggcggcctttgttgctcagcaaggggctctgccctccctccttccttcttgcttctcatagccccggtgtgcggtgcatacacccccacctcctgcaataaaatagtagcatcggcanaacanacnaaaacctccagggcctatatgggcgcgcacaggatgaacggactcgcaaagttgtcctggccgctcttgaaaggaaactgcggccagaggaaatatcgaacagacgataatcacgacgagaaataaaggagacaaagaatgaaaaccagcacccgacccattgcgaagaaaccagagagagagcgacc

SEQ ID NO: 736018 - DNA, 895 bp, Homo sapiens
agggccgaggacgcccgccccacccccacaccgcccctaaaaccttagacggcaagagtccggattctccggtacgcagcgggtcctctctatctagctccagcctctcgcctgcgccccactccccgcgtcccgcgtcctagccgaccatggccgggcccctgcgcgccccgctgctcctgctggccatcctggccgtggccctggccgtgagccccgcggccggctccagtcccggcaagccgccgcgcctggtgggaggccccatggacgccagcgtggaggaggagggtgtgcggcgtgcactggactttgccgtcggcgagtacaacaaagccagcaacgacatgtaccacagccgcgcgctgcaggtggtgcgcgcccgcaagcagatcgtagctggggtgaactacttcttggacgtggagctgggccgaaccacgtgtaccaagacccagcccaacttggacaactgccccttccatgaccagccacatctgaaaaggaaagcattctgctctttccagatctacgctgtgccttggcagggcacaatgaccttgtcgaaatccacctgtcaggacgcctaggggtctgtaccgggctggcctgtgcctatcacctcttatgcacacctcccaccccctgtattcccacccctggactggtggcccctgccttggggaaggtctccccatgtgcctgcaccaggagacagacagagaaggcagcaggcggcctttgttgctcagcaaggggctctgccctccctccttccttcttgcttctcatagccccggtgtgcggtgcatacacccccacctcctgcaataaaatagtagcatcggcaaaaaaaaaattctccggcggtcggcaaaggcggactccaaggggg

SEQ ID NO: 736019 - DNA, 933 bp, Homo sapiens
  misc_feature (827)..(827): n is a, c, g, or t
gcacgagctcgtgccgaatcggcacgagctcaccggtacgcagcgggtcctctctatctagctccagcctctcgcctgcgccccactccccgcgtcccgcgtcctagccgaccatggccgggcccctgcgcgccccgctgctcctgctggccatcctggccgtggccctggccgtgagccccgcggccggctccagtcccggcaagccgccgcgcctggtgggaggccccatggacgccagcgtggaggaggagggtgtgcggcgtgcactggactttgccgtcggcgagtacaacaaagccagcaacgacatgtaccacagccgcgcgctgcaggtggtgcgcgcccgcaagcagatcgtagctggggtgaactacttcttggacgtggagctgggccgaaccacgtgtaccaagacccagcccaacttggacaactgccccttccatgaccagccacatctgaaaaggaaagcattctgctctttccagatctacgctgtgccttggcagggcacaatgaccttgtcgaaatccacctgtcaggacgcctaggggtctgtaccgggctggcctgtgcctatcacctcttatgcacacctcccaccccctgtattcccacccctggactggtggcccctgccttggggaaggtctccccatgtgcctgcaccaggagacagacagagaaggcagcaggcggcctttgttgctcagcaaggggctctgccctccctccttccttcttgcttctcatagccccggtgtgcggtgcatacacccccacctcctgcaataaaatagtagcatcggcgcaaaaaaaaaaantctcagagcgaatacggcatagggctgaccttcaagggggcccgaaccagtttgtaccttagaaggtaattcagctttggggtaacctggctaaagttccgtgtaa

SEQ ID NO: 736020 - DNA, 916 bp, Homo sapiens
ggaaaagggagtgcaggccgcggtggggtggggcggcgaaggccggaagggataaaaccgcagtcgccggcctcgcggggctcacggcctcgcctcggtatcggtacgcagcgggtcctctctatctagctccagcctctcgcctgcgccccactccccgcgtcccgcgtcctagccgaccatggccgggcccctgcgcgccccgctgctcctgctggccatcctggccgtggccctggccgtgagccccgcggccggctccagtcccggcaagccgccgcgcctggtgggaggccccatggacgccagcgtggaggaggagggtgtgcggcgtgcactggactttgccgtcggcgagtacaacaaagccagcaacgacatgtaccacagccgcgcgctgcaggtggtgcgcgcccgcaagcagatcgtagctggggtgaactacttcttggacgtggagctgggccgaaccacgtgtaccaagacccagcccaacttggacaactgccccttccatgaccagccacatctgaaaaggaaagcattctgctctttccagatctacgctgtgccttggcagggcacaatgaccttgtcgaaatccacctgtcaggacgcctaggggtctgtaccgggctggcctgtgcctatcacctcttatgcacacctcccaccccctgtattcccacccctggactggtggcccctgccttggggaaggtctccccatgtgcctgcaccaggagacagacagagaaggcagcaggcggcctttgttgctcagcaaggggctctgccctccctccttccttcttgcttctcatagccccggtgtgcggtgcatacacccccacctcctgcaataaaatagtagcatcggcaaaaaaaatcgaccacgcgtccggtcctagatcgc

SEQ ID NO: 736021 - DNA, 855 bp, Homo sapiens
aacataggctagtacgggcctggtttaattggccgaggagcggtacgcagcgggtcctctctatctagctccagcctctcgcctgcgccccactccccgcgtcccgcgtcctagccgaccatggccgggcccctgcgcgccccgctgctcctgctggccatcctggccgtggccctggccgtgagccccgcggccggctccagtcccggcaagccgccgcgcctggtgggaggccccatggacgccagcgtggaggaggagggtgtgcggcgtgcactggactttgccgtcggcgagtacaacaaagccagcaacgacatgtaccacagccgcgcgctgcaggtggtgcgcgcccgcaagcagatcgtagctggggtgaactacttcttggacgtggagctgggccgaaccacgtgtaccaagacccagcccaacttggacaactgccccttccatgaccagccacatctgaaaaggaaagcattctgctctttccagatctacgctgtgccttggcagggcacaatgaccttgtcgaaatccacctgtcaggacgcctaggggtctgtaccgggctggcctgtgcctatcacctcttatgcacacctcccaccccctgtattcccacccctggactggtggcccctgccttggggaaggtctccccatgtgcctgcaccaggagacagacagagaaggcagcaggcggcctttgttgctcagcaaggggctctgccctccctccttccttcttgcttctcatagccccggtgtgcggtgcatacacccccacctcctgcaataaaatagtagcatcggcaaaaaaaatcgaccacgcgtccggtcctagatcgc

SEQ ID NO: 736022 - DNA, 848 bp, Homo sapiens
gcacgagctcgtgccgaatcggcacgagctcaccggtacgcagcgggtcctctctatctagctccagcctctcgcctgcgccccactccccgcgtcccgcgtcctagccgaccatggccgggcccctgcgcgccccgctgctcctgctggccatcctggccgtggccctggccgtgagccccgcggccggctccagtcccggcaagccgccgcgcctggtgggaggccccatggacgccagcgtggaggaggagggtgtgcggcgtgcactggactttgccgtcggcgagtacaacaaagccagcaacgacatgtaccacagccgcgcgctgcaggtggtgcgcgcccgcaagcagatcgtagctggggtgaactacttcttggacgtggagctgggccgaaccacgtgtaccaagacccagcccaacttggacaactgccccttccatgaccagccacatctgaaaaggaaagcattctgctctttccagatctacgctgtgccttggcagggcacaatgaccttgtcgaaatccacctgtcaggacgcctaggggtctgtaccgggctggcctgtgcctatcacctcttatgcacacctcccaccccctgtattcccacccctggactggtggcccctgccttggggaaggtctccccatgtgcctgcaccaggagacagacagagaaggcagcaggcggcctttgttgctcagcaaggggctctgccctccctccttccttcttgcttctcatagccccggtgtgcggtgcatacacccccacctcctgcaataaaatagtagcatcggcaaaaaaaatcgaccacgcgtccggtcctagatcgc

SEQ ID NO: 736023 - DNA, 1152 bp, Homo sapiens
  misc_feature (828)..(828): n is a, c, g, or t
gcacgagctcgtgccgaatcggcacgagctcaccggtacgcagcgggtcctctctatctagctccagcctctcgcctgcgccccactccccgcgtcccgcgtcctagccgaccatggccgggcccctgcgcgccccgctgctcctgctggccatcctggccgtggccctggccgtgagccccgcggccggctccagtcccggcaagccgccgcgcctggtgggaggccccatggacgccagcgtggaggaggagggtgtgcggcgtgcactggactttgccgtcggcgagtacaacaaagccagcaacgacatgtaccacagccgcgcgctgcaggtggtgcgcgcccgcaagcagatcgtagctggggtgaactacttcttggacgtggagctgggccgaaccacgtgtaccaagacccagcccaacttggacaactgccccttccatgaccagccacatctgaaaaggaaagcattctgctctttccagatctacgctgtgccttggcagggcacaatgaccttgtcgaaatccacctgtcaggacgcctaggggtctgtaccgggctggcctgtgcctatcacctcttatgcacacctcccaccccctgtattcccacccctggactggtggcccctgccttggggaaggtctccccatgtgcctgcaccaggagacagacagagaaggcagcaggcggcctttgttgctcagcaaggggctctgccctccctccttccttcttgcttctcatagccccggtgtgcggtgcatacacccccacctcctgcaataaaatagtagcatcggcaaaaaaaacaccacnaccacaccccccaccccacccaccaccacggcgggcccccccacaacaacacccccccgaggcgcccccgcccacgccccccgccccgccccccaaggcgcccacaagcgacgcgccaacaacacaccccggccccgctgtacacaccccgacaacggtgccaccgcctcccgcgacccccgggcacagaaccccccctccgggagccaccacacgggccacccctccccgcctcacaccccagcgcaaccacacaccgcggactaccgcgcccacacccgccaaccgcccccgcacacccgcacgagccccccgcactccacg

SEQ ID NO: 736024 - DNA, 762 bp, Homo sapiens
ggaaaagggagtgcaggccgcggtggggtggggcggcgaaggccggaagggataaaaccgcagtcgccggcctcgcggggctcacggcctcgcctcggtatcggtacgcagcgggtcctctctatctagctccagcctctcgcctgcgccccactccccgcgtcccgcgtcctagccgaccatggccgggcccctgcgcgccccgctgctcctgctggccatcctggccgtggccctggccgtgagccccgcggccggctccagtcccggcaagccgccgcgcctggtgggaggccccatggacgccagcgtggaggaggagggtgtgcggcgtgcactggactttgccgtcggcgagtacaacaaagccagcaacgacatgtaccacagccgcgcgctgcaggtggtgcgcgcccgcaagcagatcgtagctggggtgaactacttcttggacgtggagctgggccgaaccacgtgtaccaagacccagcccaacttggacaactgccccttccatgaccagccacatctgaaaagggtatgtgccttatatgggtccagggccagtcatacactgcagaggggtgtgtgtgtgtgtgtgtgtgtgtgatgcacatgttctgcagggtacgtgtgcatgtgcctgagtgtgtgtacacgtggagatgcatatgtgtttccaagtataggtttgtgtggggaagtgcacgtgagtgtgtgcaagtgggtgtgtggatgtgttggggaagtgtgggggtttat

SEQ ID NO: 736025 - DNA, 948 bp, Homo sapiens
ggaaaagggagtgcaggccgcggtggggtggggcggcgaaggccggaagggataaaaccgcagtcgccggcctcgcggggctcacggcctcgcctcggtatcggtacgcagcgggtcctctctatctagctccagcctctcgcctgcgccccactccccgcgtcccgcgtcctagccgaccatggccgggcccctgcgcgccccgctgctcctgctggccatcctggccgtggccctggccgtgagccccgcggccggctccagtcccggcaagccgccgcgcctggtgggaggccccatggacgccagcgtggaggaggagggtgtgcggcgtgcactggactttgccgtcggcgagtacaacaaagccagcaacgacatgtaccacagccgcgcgctgcaggtggtgcgcgcccgcaagcagatcgtagctggggtgaactacttcttggacgtggagctgggccgaaccacgtgtaccaagacccagcccaacttggacaactgccccttccatgaccagccacatctgaaaaggaaagcattctgctctttccagatctacgctgtgccttggcagggcacaatgaccttgtcgaaatccacctgtcaggacgcctaggggtctgtaccgggctggcctgtgcctatcacctcttatgcacacctcccaccccctgtattcccacccctggactggtggcccctgccttggggaaggtctccccatgtgcctgcaccaggagacagacagagaaggcagcaggcggcctttgttgctcagcaaggggctctgccctccctccttccttcttgcttctcatagccccggtgtgcggtgcatacacccccacctcctgcaataaaatagtagcatcggctccctctgagttcttggctgtctggggatgtgcacacaggcagggtttccgcagttcctttatgaag

SEQ ID NO: 736026 - DNA, 1026 bp, Homo sapiens
ggaaaagggagtgcaggccgcggtggggtggggcggcgaaggccggaagggataaaaccgcagtcgccggcctcgcggggctcacggcctcgcctcggtatcggtacgcagcgggtcctctctatctagctccagcctctcgcctgcgccccactccccgcgtcccgcgtcctagccgaccatggccgggcccctgcgcgccccgctgctcctgctggccatcctggccgtggccctggccgtgagccccgcggccggctccagtcccggcaagccgccgcgcctggtgggaggccccatggacgccagcgtggaggaggagggtgtgcggcgtgcactggactttgccgtcggcgagtacaacaaagccagcaacgacatgtaccacagccgcgcgctgcaggtggtgcgcgcccgcaagcagatcgtagctggggtgaactacttcttggacgtggagctgggccgaaccacgtgtaccaagacccagcccaacttggacaactgccccttccatgaccagccacatctgaaaaggaaagcattctgctctttccagatctacgctgtgccttggcagggcacaatgaccttgtcgaaatccacctgtcaggacgcctaggggtctgtaccgggctggcctgtgcctatcacctcttatgcacacctcccaccccctgtattcccacccctggactggtggcccctgccttggggaaggtctccccatgtgcctgcaccaggagacagacagagaaggcagcaggcggcctttgttgctcagcaaggggctctgccctccctccttccttcttgcttctcatagccccggtgtgcggtgcatacacccccacctcctgcaataaaatagtagcatcggcaaaacaaaaaaaacaaaaaacaaaaaacagggcgggcacaaaatacccgaggcaacacacaggcccacatttgaaaaaaggcccaaaggtgtaaaacgcaacgggcgggtaacacgcgaggagaagcggaactggacaccactgg

SEQ ID NO: 736027 - DNA, 1061 bp, Homo sapiens
  misc_feature (991)..(991): n is a, c, g, or t
  misc_feature (993)..(995): n is a, c, g, or t
  misc_feature (1017)..(1017): n is a, c, g, or t
  misc_feature (1019)..(1019): n is a, c, g, or t
  misc_feature (1025)..(1026): n is a, c, g, or t
  misc_feature (1032)..(1032): n is a, c, g, or t
  misc_feature (1045)..(1045): n is a, c, g, or t
  misc_feature (1054)..(1054): n is a, c, g, or t
ggaaaagggagtgcaggccgcggtggggtggggcggcgaaggccggaagggataaaaccgcagtcgccggcctcgcggggctcacggcctcgcctcggtatcggtacgcagcgggtcctctctatctagctccagcctctcgcctgcgccccactccccgcgtcccgcgtcctagccgaccatggccgggcccctgcgcgccccgctgctcctgctggccatcctggccgtggccctggccgtgagccccgcggccggctccagtcccggcaagccgccgcgcctggtgggaggccccatggacgccagcgtggaggaggagggtgtgcggcgtgcactggactttgccgtcggcgagtacaacaaagccagcaacgacatgtaccacagccgcgcgctgcaggtggtgcgcgcccgcaagcagatcgtagctggggtgaactacttcttggacgtggagctgggccgaaccacgtgtaccaagacccagcccaacttggacaactgccccttccatgaccagccacatctgaaaaggaaagcattctgctctttccagatctacgctgtgccttggcagggcacaatgaccttgtcgaaatccacctgtcaggacgcctaggggtctgtaccgggctggcctgtgcctatcacctcttatgcacacctcccaccccctgtattcccacccctggactggtggcccctgccttggggaaggtctccccatgtgcctgcaccaggagacagacagagaaggcagcaggcggcctttgttgctcagcaaggggctctgccctccctccttccttcttgcttctcatagccccggtgtgcggtgcatacacccccacctcctgcaataaaatagtagcatcggcaaaaaaaaaaaaaaaaaaaaaaaaaaaaaaaaaaaaaaaaaaaaaaaaaaaaaaaaaaaaacaaaacaaaaaaaaaaaaaaaaaaaaaaaaaaaaaaaaaggggggggcncnnnaaaaattcccccggggggcccnantttacnncacccntttttttgaaaanggggccccnaaagggg

SEQ ID NO: 736028 - DNA, 1040 bp, Homo sapiens
  misc_feature (970)..(970): n is a, c, g, or t
  misc_feature (972)..(974): n is a, c, g, or t
  misc_feature (996)..(996): n is a, c, g, or t
  misc_feature (998)..(998): n is a, c, g, or t
  misc_feature (1004)..(1005): n is a, c, g, or t
  misc_feature (1011)..(1011): n is a, c, g, or t
  misc_feature (1024)..(1024): n is a, c, g, or t
  misc_feature (1033)..(1033): n is a, c, g, or t
ggaaaagggagtgcaggccgcggtggggtggggcggcgaaggccggaagggataaaaccgcagtcgccggcctcgcggggctcacggcctcgcctcggtatcggtacgcagcgggtcctctctatctagctccagcctctcgcctgcgccccactccccgcgtcccgcgtcctagccgaccatggccgggcccctgcgcgccccgctgctcctgctggccatcctggccgtggccctggccgtgagccccgcggccggctccagtcccggcaagccgccgcgcctggtgggaggccccatggacgccagcgtggaggaggagggtgtgcggcgtgcactggactttgccgtcggcgagtacaacaaagccagcaacgacatgtaccacagccgcgcgctgcaggtggtgcgcgcccgcaagcagatcgtagctggggtgaactacttcttggacgtggagctgggccgaaccacgtgtaccaagacccagcccaacttggacaactgccccttccatgaccagccacatctgaaaaggaaagcattctgctctttccagatctacgctgtgccttggcagggcacaatgaccttgtcgaaatccacctgtcaggacgcctaggggtctgtaccgggctggcctgtgcctatcacctcttatgcacacctcccaccccctgtattcccacccctggactggtggcccctgccttggggaaggtctccccatgtgcctgcaccaggagacagacagagaaggcagcaggcggcctttgttgctcagcaaggggctctgccctccctccttccttcttgcttctcatagccccggtgtgcggtgcatacacccccacctcctgcaataaaatagtagcatcggcaaaaaaaaaaaaaaaaaaaaaaaaaaaaaaaaaaaaaaaacaaaacaaaaaaaaaaaaaaaaaaaaaaaaaaaaaaaaaggggggggcncnnnaaaaattcccccggggggcccnantttacnncacccntttttttgaaaanggggccccnaaagggg

SEQ ID NO: 736029 - DNA, 869 bp, Homo sapiens
ggaaaagggagtgcaggccgcggtggggtggggcggcgaaggccggaagggataaaaccgcagtcgccggcctcgcggggctcacggcctcgcctcggtatcggtacgcagcgggtcctctctatctagctccagcctctcgcctgcgccccactccccgcgtcccgcgtcctagccgaccatggccgggcccctgcgcgccccgctgctcctgctggccatcctggccgtggccctggccgtgagccccgcggccggctccagtcccggcaagccgccgcgcctggtgggaggccccatggacgccagcgtggaggaggagggtgtgcggcgtgcactggactttgccgtcggcgagtacaacaaagccagcaacgacatgtaccacagccgcgcgctgcaggtggtgcgcgcccgcaagcagatcgtagctggggtgaactacttcttggacgtggagctgggccgaaccacgtgtaccaagacccagcccaacttggacaactgccccttccatgaccagccacatctgaaaaggaaagcattctgctctttccagatctacgctgtgccttggcagggcacaatgaccttgtcgaaatccacctgtcaggacgcctaggggtctgtaccgggctggcctgtgcctatcacctcttatgcacacctcccaccccctgtattcccacccctggactggtggcccctgccttggggaaggtctccccatgtgcctgcaccaggagacagacagagaaggcagcaggcggcctttgttgctcagcaagggagcttttggccctacattaactttctttttgggtttcaaaaaaaccccccggaggggctggaggcattaaacccctaaa

SEQ ID NO: 736030 - DNA, 863 bp, Homo sapiens
ggaaaagggagtgcaggccgcggtggggtggggcggcgaaggccggaagggataaaaccgcagtcgccggcctcgcggggctcacggcctcgcctcggtatcggtacgcagcgggtcctctctatctagctccagcctctcgcctgcgccccactccccgcgtcccgcgtcctagccgaccatggccgggcccctgcgcgccccgctgctcctgctggccatcctggccgtggccctggccgtgagccccgcggccggctccagtcccggcaagccgccgcgcctggtgggaggccccatggacgccagcgtggaggaggagggtgtgcggcgtgcactggactttgccgtcggcgagtacaacaaagccagcaacgacatgtaccacagccgcgcgctgcaggtggtgcgcgcccgcaagcagatcgtagctggggtgaactacttcttggacgtggagctgggccgaaccacgtgtaccaagacccagcccaacttggacaactgccccttccatgaccagccacatctgaaaaggaaagcattctgctctttccagatctacgctgtgccttggcagggcacaatgaccttgtcgaaatccacctgtcaggacgcctaggggtctgtaccgggctggcctgtgcctatcacctcttatgcacacctcccaccccctgtattcccacccctggactggtggcccctgccttggggaaggtctccccacgtccccgcatcaacgccactaagcactccgctggcccttgttcccagcaaggggtctgcacctccttctccttctggctccacagccccctgtcggggcctccacccccttctcgatcacaaattcctcgcct

SEQ ID NO: 736031 - DNA, 458 bp, Homo sapiens
ggaaaagggagtgcaggccgcggtggggtggggcggcgaaggccggaagggataaaaccgcagtcgccggcctcgcggggctcacggcctcgcctcggtatcggtacgcagcgggtcctctctatctagctccagcctctcgcctgcgccccactccccgcgtcccgcgtcctagccgaccatggccgggcccctgcgcgccccgctgctcctgctggccatcctggccgtggccctggccgtgagccccgcggccggctccagtcccggcaagccgccgcgcctggtgggaggccccatggacgccagcgtggaggaggaggtcaaaatgtaattaaccatctccccgagcgtttgctccattttccctcagtgggaggcgatccatggttcgcgcactggcttgtgggccaacacccccaaagcaaactgagggccttgtggtgaaaccgcatccc

SEQ ID NO: 736032 - DNA, 742 bp, Homo sapiens
ggaaaagggagtgcaggccgcggtggggtggggcggcgaaggccggaagggataaaaccgcagtcgccggcctcgcggggctcacggcctcgcctcggtatcggtacgcagcgggtcctctctatctagctccagcctctcgcctgcgccccactccccgcgtcccgcgtcctagccgaccatggccgggcccctgcgcgccccgctgctcctgctggccatcctggccgtggccctggccgtgagccccgcggccggctccagtcccggcaagccgccgcgcctggtgggccgaaccacgtgtaccaagacccagcccaacttggacaactgccccttccatgaccagccacatctgaaaaggaaagcattctgctctttccagatctacgctgtgccttggcagggcacaatgaccttgtcgaaatccacctgtcaggacgcctaggggtctgtaccgggctggcctgtgcctatcacctcttatgcacacctcccaccccctgtattcccacccctggactggtggcccctgccttggggaaggtctccccatgtgcctgcaccaggagacagacagagaaggcagcaggcggcctttgttgctcagcaaggggctctgccctccctccttccttcttgcttctcatagccccggtgtgcggtgcatacacccccacctcctgcaataaaatagtagcatcggcaaaaaaaatcgaccacgcgtccggtcctagatcgc

SEQ ID NO: 736033 - DNA, 838 bp, Homo sapiens
ggaaaagggagtgcaggccgcggtggggtggggcggcgaaggccggaagggataaaaccgcagtcgccggcctcgcggggctcacggcctcgcctcggtatcggtacgcagcgggtcctctctatctagctccagcctctcgcctgcgccccactccccgcgtcccgcccccgcggccggctccagtcccggcaagccgccgcgcctggtgggaggccccatggacgccagcgtggaggaggagggtgtgcggcgtgcactggactttgccgtcggcgagtacaacaaagccagcaacgacatgtaccacagccgcgcgctgcaggtggtgcgcgcccgcaagcagatcgtagctggggtgaactacttcttggacgtggagctgggccgaaccacgtgtaccaagacccagcccaacttggacaactgccccttccatgaccagccacatctgaaaaggaaagcattctgctctttccagatctacgctgtgccttggcagggcacaatgaccttgtcgaaatccacctgtcaggacgcctaggggtctgtaccgggctggcctgtgcctatcacctcttatgcacacctcccaccccctgtattcccacccctggactggtggcccctgccttggggaaggtctccccatgtgcctgcaccaggagacagacagagaaggcagcaggcggcctttgttgctcagcaaggggctctgccctccctccttccttcttgcttctcatagccccggtgtgcggtgcatacacccccacctcctgcaataaaatagtagcatcggcaaaaaaaatcgaccacgcgtccggtcctagatcgc

SEQ ID NO: 736034 - DNA, 732 bp, Homo sapiens
ggaaaagggagtgcaggccgcggtggggtggggcggcgaaggccggaagggataaaaccgcaccccgcggccggctccagtcccggcaagccgccgcgcctggtgggaggccccatggacgccagcgtggaggaggagggtgtgcggcgtgcactggactttgccgtcggcgagtacaacaaagccagcaacgacatgtaccacagccgcgcgctgcaggtggtgcgcgcccgcaagcagatcgtagctggggtgaactacttcttggacgtggagctgggccgaaccacgtgtaccaagacccagcccaacttggacaactgccccttccatgaccagccacatctgaaaaggaaagcattctgctctttccagatctacgctgtgccttggcagggcacaatgaccttgtcgaaatccacctgtcaggacgcctaggggtctgtaccgggctggcctgtgcctatcacctcttatgcacacctcccaccccctgtattcccacccctggactggtggcccctgccttggggaaggtctccccatgtgcctgcaccaggagacagacagagaaggcagcaggcggcctttgttgctcagcaaggggctctgccctccctccttccttcttgcttctcatagccccggtgtgcggtgcatacacccccacctcctgcaataaaatagtagcatcggcaaaaaaaatcgaccacgcgtccggtcctagatcgc

SEQ ID NO: 736035 - DNA, 280 bp, Homo sapiens
gggtccggaattcccgggatcactgtgcgcttgaaagacctcttcatagttgagtaatcacctcagtacttaagcacttctgaacttgggtttcatgcctgccccccacaaattatgtttagaagcagcactgcatcttagcacatgctgccttatttctttccttcggcaggtgttcatgggaagtaggtggatcagtgaaggcataatgggctgtggagaccttcacttctagattattgattcaaaataaaaagaagccacaaagagtaattgagtt

SEQ ID NO: 736036 - DNA, 1900 bp, Homo sapiens
aacctacggctaggtacgaggcctgggtggggccagatctttgagaaacagcgggagaccaagaaacatctgtttggagggcagtctcagaaggccgtgcagcctccacaccttttcctttggctgatgaaactcaaaaacatgcttcttgccaagtttagcttttactttcatgaggctctgagccgacaaacgactgcttcagaaatgaaaacgttgacagcaaaagctaacccagacttttttggaaagatttccagcttcatcagaaaatatgatgctgccaatgtgtccttaatttttgacaacagaggttctgagagttttcagggtcatggttatcaccacccccattcctacagagaggcccccaagggtgtggaccagtatccagctgtagtgtctctgcccagcgacaggccagtcatgcactggcccaatgtcatcatgatcatgacggaccgcacatctgatctgaacagcttggagaaagtggtccacttctatgatgacaaagttcagagtacctacttcctaacccgcccggaacctcactttaccattgtcatcatttttgagtcaaagaaatctgagagagactcccactttatttccttcctcaatgaggtctcacttgcccttaagaaccccaaagtgtttgcaagtctgaaacctggatccaaaggttagcaggtgatttgcgtggaggggtttcaagactagaaactgttcttaattgccctaatgatctacggtggtctgtgaatagagtttacatccattcatgcctctttcagaactaaattaaagacaaatcctccctgtgttgcacactttataagcaattaaggccaattgaattaagtttccaaagagtaatctaggaagtggtcatgggctaccatgtgtctccatggtacagcaaagtagtttcagtattttcccctattttgctatatttcttgtagattgaatatttattgggcttttttttttcccatatgtttttctgttgttctaaacattgtgttctactgcaattccaaacagcctctctgtttccctccttcttggaagagtaatagggatgagatattaaatggcctttttagaattaagaactatatgttttctgtctcataaattagcaaatgaatatggagttagtagatttatgattctgatctacaaattaacatttttgatgccaaaattagggtcttggtaagaaatttctatcagttattgaaactgaaagtgagtcagattggtagcatgacgtaaggttttaacagttcagaagatcctcatggcagctttaatagccatgggttcttttggggtaatgtacacacctaactgcatttgttttgacttctttaatgtttgaatgtttcactctgttgtaaagtcagcataagccatcatgtgggctttcttcattcttcagcatattatccgcttcgctttctgtttatcacttttctgctgaaatgtacatgtttggctctactccttggttatttttaggcttaaaagcatgcagtcggtttttcagccacttttagatactcatgcaacatagcctacttttataaaatcaaaatgaaggtcttcatacgctgtacttgctaaaaatcaactgtgcgcttgaaagacctcttcatagttgagtaatcacctcagtacttaagcacttctgaacttgggtttcatgcctgccccccacaaattatgtttagaagcagcactgcatcttagcacatgctgccttatttctttccttcggcaggtgttcatgggaagtaggtggatcagtgaaggcataatgggctgtggagaccttcacttctagattattgattcaaaataaaaagaagccacaaagagtaattgagtt

SEQ ID NO: 736037 - DNA, 2632 bp, Homo sapiens
gaggagagccacgtgggtcgagctggggcgcagctcgcatgggggagtctatcccgctggccgccccggtcccggtggaacaggcggtgctggagacgttcttctctcacctgggtatcttctcttacgacaaggctaaggacaatgtggagaaggaacgagaggccaacaagagcgcgtgaggaggtcacgcctcgggtcgtgtacgcttgcgtggccgagccctttgatgcgccacgctgcgcctgctgcgcacgagaatacggtcgtattcgacacgcagctcagcgctatcgcatgcgcggtcagcaaacctagtggggccagtctttcttcagcaggaaggattccatccgcaccatctatacttcattgcataatgagctgaagaaggtggtgactggccgtggtgccctgggtgggactgctcctcacgtggaagaactcctttcccacctgtcagagcagctctgcttctttgttcaggctcggatggagatagcagacttctatgagaagatgtacaccctcagcacacagaagttcatcaatgctgaagagctcgttggccttttggatgccatcatgaaaaaatacagctccagatttcaccacccaatcctcagtcctttggaaagcagtttccagctggaagttgacgtcctgtgtcatctcctgaaagcccaggcccaggtctcagagtggaagttcctcccatctctggttaatttacacagtgcgcacaccaaactgcagacgtggggccagatctttgagaaacagcgggagaccaagaaacatctgtttggagggcagtctcagaaggccgtgcagcctccacaccttttcctttggctgatgaaactcaaaaacatgcttcttgccaagtttagcttttactttcatgaggctctgagccgacaaacgactgcttcagaaatgaaaacgttgacagcaaaagctaacccagacttttttggaaagatttccagcttcatcagaaaatatgatgctgccaatgtgtccttaatttttgacaacagaggttctgagagttttcagggtcatggttatcaccacccccattcctacagagaggcccccaagggtgtggaccagtatccagctgtagtgtctctgcccagcgacaggccagtcatgcactggcccaatgtcatcatgatcatgacggaccgcacatctgatctgaacagcttggagaaagtggtccacttctatgatgacaaagttcagagtacctacttcctaacccgcccggaacctcactttaccattgtcatcatttttgagtcaaagaaatctgagagagactcccactttatttccttcctcaatgaggtctcacttgcccttaagaaccccaaagtgtttgcaagtctgaaacctggatccaaaggttagcaggtgatttgcgtggaggggtttcaagactagaaactgttcttaattgccctaatgatctacggtggtctgtgaatagagtttacatccattcatgcctctttcagaactaaattaaagacaaatcctccctgtgttgcacactttataagcaattaaggccaattgaattaagtttccaaagagtaatctaggaagtggtcatgggctaccatgtgtctccatggtacagcaaagtagtttcagtattttcccctattttgctatatttcttgtagattgaatatttattgggcttttttttttcccatatgtttttctgttgttctaaacattgtgttctactgcaattccaaacagcctctctgtttccctccttcttggaagagtaatagggatgagatattaaatggcctttttagaattaagaactatatgttttctgtctcataaattagcaaatgaatatggagttagtagatttatgattctgatctacaaattaacatttttgatgccaaaattagggtcttggtaagaaatttctatcagttattgaaactgaaagtgagtcagattggtagcatgacgtaaggttttaacagttcagaagatcctcatggcagctttaatagccatgggttcttttggggtaatgtacacacctaactgcatttgttttgacttctttaatgtttgaatgtttcactctgttgtaaagtcagcataagccatcatgtgggctttcttcattcttcagcatattatccgcttcgctttctgtttatcacttttctgctgaaatgtacatgtttggctctactccttggttatttttaggcttaaaagcatgcagtcggtttttcagccacttttagatactcatgcaacatagcctacttttataaaatcaaaatgaaggtcttcatacgctgtacttgctaaaaatcaactgtgcgcttgaaagacctcttcatagttgagtaatcacctcagtacttaagcacttctgaacttgggtttcatgcctgccccccacaaattatgtttagaagcagcactgcatcttagcacatgctgccttatttctttccttcggcaggtgttcatgggaagtaggtggatcagtgaaggcataatgggctgtggagaccttcacttctagattattgattcaaaataaaaagaagccacaaagagtaattgagtt

SEQ ID NO: 736038 - DNA, 2586 bp, Homo sapiens
gaggagagccacgtgggtcgagctggggcgcagctcgcatgggggagtctatcccgctggccgccccggtcccggtggaacaggcggtgctggagacgttcttctctcacctgggtatcttctcttacgacaaggctaaggacaatgtggagaaggaacgagaggccaacaagagcgcggggggcagctggctgtcgctgctggcggccttggcgcacctggccgcggccgagaaggtctatcacagcctcacctacctggggcagaaactagggggccagtctttcttcagcaggaaggattccatccgcaccatctatacttcattgcataatgagctgaagaaggtggtgactggccgtggtgccctgggtgggactgctcctcacgtggaagaactcctttcccacctgtcagagcagctctgcttctttgttcaggctcggatggagatagcagacttctatgagaagatgtacaccctcagcacacagaagttcatcaatgctgaagagctcgttggccttttggatgccatcatgaaaaaatacagctccagatttcaccacccaatcctcagtcctttggaaagcagtttccagctggaagttgacgtcctgtgtcatctcctgaaagcccaggcccaggtctcagagtggaagttcctcccatctctggttaatttacacagtgcgcacaccaaactgcagacgtggggccagatctttgagaaacagcgggagaccaagaaacatctgtttggagggcagtctcagaaggccgtgcagcctccacaccttttcctttggctgatgaaactcaaaaacatgcttcttgccaagtttagcttttactttcatgaggctctgagccgacaaacgactgcttcagaaatgaaaacgttgacagcaaaagctaacccagacttttttggaaagatttccagcttcatcagaaaatatgatgctgccaatgtgtccttaatttttgacaacagaggttctgagagttttcagggtcatggttatcaccacccccattcctacagagaggcccccaagggtgtggaccagtatccagctgtagtgtctctgcccagcgacaggccagtcatgcactggcccaatgtcatcatgatcatgacggaccgcacatctgatctgaacagcttggagaaagtggtccacttctatgatgacaaagttcagagtacctacttcctaacccgcccggaacctcactttaccattgtcatcatttttgagtcaaagaaatctgagagagactcccactttatttccttcctcaatgaggtctcacttgcccttaagaaccccaaagtgtttgcaagtctgaaacctggatccaaaggttagcaggtgatttgcgtggaggggtttcaagactagaaactgttcttaattgccctaatgatctacggtggtctgtgaatagagtttacatccattcatgcctctttcagaactaaattaaagacaaatcctccctgtgttgcacactttataagcaattaaggccaattgaattaagtttccaaagagtaatctaggaagtggtcatgggctaccatgtgtctccatggtacagcaaagtagtttcagtattttcccctattttgctatatttcttgtagattgaatatttattgggcttttttttttcccatatgtttttctgttgttctaaacattgtgttctactgcaattccaaacagcctctctgtttccctccttcttggaagagtaatagggatgagatattaaatggcctttttagaattaagaactatatgttttctgtctcataaattagcaaatgaatatggagttagtagatttatgattctgatctacaaattaacatttttgatgccaaaattagggtcttggtaagaaatttctatcagttattgaaactgaaagtgagtcagattggtagcatgacgtaaggttttaacagttcagaagatcctcatggcagctttaatagccatgggttcttttggggtaatgtacacacctaactgcatttgttttgacttctttaatgtttgaatgtttcactctgttgtaaagtcagcataagccatcatgtgggctttcttcattcttcagcatattatccgcttcgctttctgtttatcacttttctgctgaaatgtacatgtttggctctactccttggttatttttaggcttaaaagcatgcagtcggtttttcagccacttttagatactcatgcaacatagcctacttttataaaatcaaaatgaaggtcttcatacgctgtacttgctaaaaatcaactgtgcgcttgaaagacctcttcatagttgagtaatcacctcagtacttaagcacttctgaacttgggtttcatgcctgccccccacaaattatgtttagaagcagcactgcatcttagcacatgctgccttatttctttccttcggcaggtgttcatgggaagtaggtggatcagtgaaggcataatgggctgtggagaccttcacttctagattattgattcaaaataaaaagaagccacaaagagtaattgagtt

SEQ ID NO: 736039 - DNA, 917 bp, Homo sapiens
gaggagagccacgtgggtcgagctggggcgcagctcgcatgggggagtctatcccgctggccgccccggtcccggtggaacaggcggtgctggagacgttcttctctcacctgggtatcttctcttacgacaaggctaaggacaatgtggagaaggaacgagaggccaacaagagcgcggggggcagctggctgtcgctgctggcggccttggcgcacctggccgcggccgagaaggtctatcacagcctcacctacctggggcagaaactagtcgcaggctcgactcggcattcccagatctcctcccaccgttcctttccttccctgggcttccacaagccccgcccaccggcctgcgctgctgatagattggcgaactgggtagatgctctttgcagggctgtgacccaaaccgaagggtttgcccttttgcctcgtgcatggattgatgccataaatgagaagttaaccaaactatgtcttcattgttttaattagtgacgctgcagccagaagagcaaaactttgcaaaacaacctagttctattactgaacactgttgtgtggcctcttaaggttaaggcccgagagtcacatttagagtcctaccccgtcttcatagtcccccaatacatatttaatgactaaagtaataaatgaatattgggcaggaaaggcaagaaatatgcctaacactagcaagaagagacttaaggggaaaatggtaaacactcttagcacttcatgtacatcttgcctctgaaataagattcaagagctgattcaactgatttttactagtagaagcaataagtataagtagatgagaaggaaataatagatgtaaaaggcatggaatatgcatacaaaataatattactgcttaattatgacaaataaatatatttgaatcct

SEQ ID NO: 736040 - DNA, 1018 bp, Homo sapiens
gaggagagccacgtgggtcgagctggggcgcagctcgcatgggggagtctatcccgctggccgccccggtcccggtggaacaggcggtgctggagacgttcttctctcacctgggtatcttctcttacgacaaggctaaggacaatgtggagaaggaacgagaggccaacaagagcgcggggggcagctggctgtcgctgctggcggccttggcgcacctggccgcggccgagaaggtctatcacagcctcacctacctggggcagaaactaggtacctccgccccgccccccgagccccttgaggaggaagtaaagggggtatattccccagtcggcagtggcttgggtttcccgtctctgtgtcacttctagtcgcaggctcgactcggcattcccagatctcctcccaccgttcctttccttccctgggcttccacaagccccgcccaccggcctgcgctgctgatagattggcgaactgggtagatgctctttgcagggctgtgacccaaaccgaagggtttgcccttttgcctcgtgcatggattgatgccataaatgagaagttaaccaaactatgtcttcattgttttaattagtgacgctgcagccagaagagcaaaactttgcaaaacaacctagttctattactgaacactgttgtgtggcctcttaaggttaaggcccgagagtcacatttagagtcctaccccgtcttcatagtcccccaatacatatttaatgactaaagtaataaatgaatattgggcaggaaaggcaagaaatatgcctaacactagcaagaagagacttaaggggaaaatggtaaacactcttagcacttcatgtacatcttgcctctgaaataagattcaagagctgattcaactgatttttactagtagaagcaataagtataagtagatgagaaggaaataatagatgtaaaaggcatggaatatgcatacaaaataatattactgcttaattatgacaaataaatatatttgaatcct

SEQ ID NO: 736041 - DNA, 1763 bp, Homo sapiens
gaggcctccactctgaagcgggattccacgctcctgcaccctaagatcagctagactctctgccttgtttcatcttctttcttttcctaaagaatcacggggagaactgacctctctgggactcaaccgtggctggaaggggacaggagaagccctttctggaggacagctgagccctgcagctgccatcctgcctggcaggctagggctgggctgcgggaaggccccccaggagggaggtccggccactgcaccccgaggaaagggctgctttcggcactctgcgtggaggtcctggcttctgccgtccctggaggctccgttcccgtttcgccagctattttgctgcctcggccatctgttccctccctgtcatctcctctctgctttaaccttaaccactacttcactgcagatggtaccaggcagttctgctctcgacatccttcacgacgcctggccctccttctcatctccagcaagtgaaccgctctgtcctttttaaagcctcatcccaaagacacggccagagcttggagttggattcgccccacacaactccccctctttgatgccatctgctttcaactccaccactggccaggggcaaacacctaccccttcccctgccttttcctcctgagacttcttctcaaactcggccaagaagctctcctggcatggacagcgtgtctgctccgggtctctacctggtctccatcaacagagccatgtaaccgcccagagggctccaggtccgcaagctgaggcggaggccagaaactctgaagttcactcctactgtggaggaacgagggctcgtgctgggagtttgggtcatgaacagtttccctgtagaaaatggacctgaacactctgcagtaaggaattgtttcccgtgctggcatggtgggaaccgaaccaaaacacattttctatgttgtctgagctcacagggaacatccctctgctgtccttgctgttattctggcatgctggtgagaaaatgcatgcatgggctttacttagcaactcgctctgcctctcctctctgtcagggcgctcccctaaaatctctcctcttgacgtcttttttctggcataaggacccggagctttgaggagcgcagcagcccagaagctcctaaggagagaagctgttttggtgagattggttccaccaggctacatgccttgactgggacagaaatgggctgggaaggccgaaatttgacttctgcacctggatttgggctaaaaagtctcacagctcagcctccttgataagggttcttctatctcccctctatacttcctctgcagcagaaaagagtatcttggccgtgcagggaacgctcttctctcactctcgccactggggttaagggcagctacattactatagctccaagtcttggttgcccccagagagaggcagagatgtagcctgcccacatctggacacttgaagactctccaaacacctagaggagctgtggattcaagtgaagcaaccatctgatgccaccacggtccctccttccctttgccttcccttcttcccacaaaagagaagcccaaatccgccaccagaccagcccatctgcccgtggaaaccaagggaaccaaatgcatcgtactgggttgcaggccttaatctactctcgctgaattattcagggatggcattaacttataaatgagtgtgtttgactgattttgtggttgatgtacagataaagtctaatgaaagacagttataa

SEQ ID NO: 736042 - DNA, 1709 bp, Homo sapiens
gaggcctccactctgaagcgggattccacgctcctgcaccctaagatcagctagactctctgccttgtttcatcttctttcttttcctaaagaatcacggggagaactgacctctctgggactcaaccgtggctggaaggggacaggagaagccctttctggaggacagctgagccctgcagctgccatcctgcctggcaggctagggctgggctgcgggaaggccccccaggagggaggtccggccactgcaccccgaggaaagggctgctttcggcactctgcgtggaggtcctggcttctgccgtccctggaggctccgttcccgtttcgccagctattttgctgcctcggccatctgttccctccctgtcatctcctctctgacatccttcacgacgcctggccctccttctcatctccagcaagtgaaccgctctgtcctttttaaagcctcatcccaaagacacggccagagcttggagttggattcgccccacacaactccccctctttgatgccatctgctttcaactccaccactggccaggggcaaacacctaccccttcccctgccttttcctcctgagacttcttctcaaactcggccaagaagctctcctggcatggacagcgtgtctgctccgggtctctacctggtctccatcaacagagccatgtaaccgcccagagggctccaggtccgcaagctgaggcggaggccagaaactctgaagttcactcctactgtggaggaacgagggctcgtgctgggagtttgggtcatgaacagtttccctgtagaaaatggacctgaacactctgcagtaaggaattgtttcccgtgctggcatggtgggaaccgaaccaaaacacattttctatgttgtctgagctcacagggaacatccctctgctgtccttgctgttattctggcatgctggtgagaaaatgcatgcatgggctttacttagcaactcgctctgcctctcctctctgtcagggcgctcccctaaaatctctcctcttgacgtcttttttctggcataaggacccggagctttgaggagcgcagcagcccagaagctcctaaggagagaagctgttttggtgagattggttccaccaggctacatgccttgactgggacagaaatgggctgggaaggccgaaatttgacttctgcacctggatttgggctaaaaagtctcacagctcagcctccttgataagggttcttctatctcccctctatacttcctctgcagcagaaaagagtatcttggccgtgcagggaacgctcttctctcactctcgccactggggttaagggcagctacattactatagctccaagtcttggttgcccccagagagaggcagagatgtagcctgcccacatctggacacttgaagactctccaaacacctagaggagctgtggattcaagtgaagcaaccatctgatgccaccacggtccctccttccctttgccttcccttcttcccacaaaagagaagcccaaatccgccaccagaccagcccatctgcccgtggaaaccaagggaaccaaatgcatcgtactgggttgcaggccttaatctactctcgctgaattattcagggatggcattaacttataaatgagtgtgtttgactgattttgtggttgatgtacagataaagtctaatgaaagacagttataa

SEQ ID NO: 736043 - DNA, 1270 bp, Homo sapiens
caactccaaaacccccttctacacataacaccatgctctcctaatggtaggaggagacaaaaatggcagccgcagttcagttttcagttggtggaatgatttttgtgcacctggtgaaatcactttcacccttaggtattaaaatctccaaacttcatacatgcaattaaaaattattttttatttttaaaaaatctttttccacatgttctatgcaatttttcatacaactcttccttaagaaactcctagaggatgtacgcaattaaaatgaagtcaactcagaaaaacacggctccaggaaagtggtgggttcaatgtaggaaaaaagtgaaggcaatatccaggtgaagagagatgaagagagagtccagaatgacaggagaacagcagccccagaaagcagtcagctcttactggagcaggagagaggactctgctaaatacatctccgcaaagatcaaattgatggaatacctgatgtgtttgaatgcactgagagacttacgcttatggcaaagtttaggggtgtgttaggaataggactattaagccaagcaaacaaaaaataatataaatattaactccgagaggaagaagttgtacaaaaaaagaaatataattcaagtatgtactatatctttgactattcataatactgtacacatcgaatatagattgaatcaaagcagaggatggttgaagctcaatttgggggatgggggaaaggggaagggaaaaaaggtgaagattaaacccttcccttccatggctggaagttctgtgccccagaattcccttggttcctgcatgttctccaagctgatctacatctaagagctcatcacgtctggtttccaggtgggtttggccagtgggaaacccaggcaggagatcagagaggatgaggagaatggggtcaggacaactatttcctcccttgtggtgacataaggtaggctgttaacagagggaaactgtcagaagtatttgaaccagagcaactccatcttgaatgggggctgggtaaaataaggctgagacctactgggctccattcctaggaggctaggcattcttagtcaaaggatgagataagaggttggcacaagatacaggtcacaaagacaccactggccaagacccaccaacactaagatggtgataaaagggacctctgttcgtccccactgctcattatatgctcattataatgcattagcatgcgaaagggctgctattctctaataaacttgctttcactttaaaa

SEQ ID NO: 736044 - DNA, 2135 bp, Homo sapiens; identical to SEQ ID NO: 31422

SEQ ID NO: 736045 - DNA, 2090 bp, Homo sapiens
tccatctcaaaaaaaaaaaaaaaagaaaaatattaataattgaccttggctgtatattaaaatagttacttttatagtagagcacatttctcaaacatgccctgaaaggcttttatcaagctcatataaagttaaagctttgagctaccttttcttggccaataaagtcactgacagtttatgtaaacattaatttcaacatggctgttgcattttaattatcaaaaatgtttaaaattgcatttgtaatttgttaaatttgaaatgaactattaccttgaaatatagtctttaaaaatttttaatggttaaagattaaattgaatgaaactgtagtctaatggtaactgatgatctgaatccgtctctctgataacctcctttccattttgaaaatgtgtcttattatacatggaagctagtaactacgtgaatgctgttggcaggatgagggtctgggtacctcagtctcttgtcctgtttccttcccccaaatccaccattgtgaagttgccaaccccctgccgccttcccctgccaagtacatgttgtcagagtcagccctataatgttcatttcccctcttgtttgtgggattatggatctctgcagaaatctgcatgccaattaacccatttctaaagcagaatccattttgcatgtcacaatcaagatgtacttggcaatctaagacacactgggagactgtaagaggaattaatatagaaaagctcttaattataataacatttggaagaaatttttcctttgttttgtaaagtggctaaggttgtaggagtgtgtggtatttattaccttttaaatgaactgtaaatttgccttagaaatttgtttaaaaggctagcaagtgagacccttgaggatgatcatatactaataaagattaccaaaagaaacttcttgtcctgttaggtcagtgttatgatttaatggttttaattacttaaccaattttaagaattgacaatttttaaaaatatttttttctaccattctaaagtaatgtcttttgttgtgggtttatgtgtaactacaggattttggaacataaacattttgaaggatagtcaatggtatttagtcttggatataaaaatagagaaaatttatagctttatgttattaaaataatttatcacacagagtgatttgaggttttcgcagagtagatttgtttgactcatggtttattagtctggattacttaagaacaatatgttgattttaatgttaattcccactaaatatataatattgataaatacatgtgaaattaatattgtttggaaaatgtagaggacacagctgggaattatgaatgcttttttcttaataggtttggtgtgtgtggctttgaatggttctgctgatgcatcatggaaagacagcagggaactgtagcctgccatcaaaactgtatcaactcttttaatgagcatgtgactgtattaggtacattttgaagaatataagtactgatgataaagtctagtatgcataataggattttggaggcatttcaggaattttccttttatagtatgctttttaggcatctgtatgtgtaatatcatagtatcatttattgctgggatggatcgaaaagcactgcttttacttttctgataagtatcaaaatgattttccagtaccaacttgactggcttttaattattgtcacacacacacaaaattcaactcctcaaggtttgggaaaattgtgtatttttttgtatacaagataaaagtgtcataaaaaggaatggatgaattgttgataggaacattagcagttaatttttacctgatactgagtttactgtaaaataggaaatgcataggaaggaatacctcctaaataatatgccttatagaatgatgaaatcttaccatagttcatactgaaaatgttgtttatttaaaagtattgtggagtgttgaaaataaagatacacaataagtattttctgaagagaaaattaatgaaggtatttaatgatataggaaataagtgacaagttaaagtccattttgtttcaataaaggagttgtgcaaactcaaaaaaaaa

SEQ ID NO: 736046 - DNA, 1256 bp, Homo sapiens; identical to SEQ ID NO: 34592

SEQ ID NO: 736047 - DNA, 931 bp, Homo sapiens
gtaggcaacccacaccaaggcagccgcagctgcggcgcttgggtacaccgccgtggactccaaatggcctaagagcgttcttttagccctgcgctctcagtgcctttagagttctttcctttccccggagcgccggcacaacgcattatgccgctgggtcggagcttagggctcggcagaggttgctaattcactgattataatcaccttcctctccaactcgtccgcagctgcccgctctggattaagccgctccgcggctcgtgctaggcagttcgtggcggagagatgctgatcgcgctgaactgaccggtgcggcccgggggtgagtggcgagtctccctctgagtcctccccagcagcgcggccggcgccggctctttgggcgaaccctccagttcctagactttgagaggcgtctctcccccgcccgaccgcccagatgcagtttcgccttttctcctttgccctcatcattctgaactgcatggattacagccactgccaaggcaaccgatggagacgcagtaagcgaggatgcagaatagaaaactgtgattcttgctttagcaaagacttttgtaccaagtgcaaagtaggcttttatttgcatagaggccgttgctttgatgaatgtccagatggttttgcaccattagaagaaaccatggaatgtgtggaaggatgtgaagttggtcattggagcgaatggggaacttgtagcagaaataatcgcacatgtggatttaaatggggtctggaaaccagaacacggcaaattgttaaaaagccagtgaaagacacaataccgtgtccaaccattgctgaatccaggagatgcaagatgacaatgaggcattgtccaggagggaagagaacaccaaaggcgaaggagaagaggaacaagaaaaagaaaaggaagctgatagaa

SEQ ID NO: 736048 - DNA, 657 bp, Homo sapiens; identical to SEQ ID NO: 34591

SEQ ID NO: 736049 - DNA, 3011 bp, Homo sapiens
  misc_feature (1233)..(1233): n is a, c, g, or t
ttgaactatggcacaaggataaaatgagtaaagatttacttctgggaattgcgagaatccagctttctaacatcttgtcttcagaaaaaactcgttttttaggttctaatggtgaacagtgttggcgtcaaacttacagtgaaagtgtgcctgttatagcagcacaaggatcaaataacaggatagcagatctttcttacacagtgactctagaagattatggactagtaaaaatgcgtgagatttttatctctgattcatctcagggtgtatctgccgtacagcaaaagccgtcttctcttcctccagcaccttgtccttcagagatccagacagagcctcgtgaaacgttagaatacaaagcagcacttgagctagaaatgtggaaggagatgcaagaagatatatttgaaaatcagctgaagcagaaagaactggctcatatgcaggctcttgcagaggaatggaagaaaagggaccgagaaagagaatcactagtaaagaaaaaggtggctgaatatactattctagaaggaaaacttcaaaaaactctaattgacttggagaagcgagagcagcagcttgctagtgtggaatcagagcttcaaagagaaaaaaaggaactgcaatcagaacgtcagcggaacctgcaagaactgcaggactctatccgtagggccaaagaggactgtattcaccaagtagaactagaaaggttaaaaatcaaacagctcgaagaggataaacaccgccttcagcaacagcttaatgatgctgaaaataagtataagattttggaaaaagagttccaacagttcaaggaccagcaaaacaacaaaccagaaatccgtctacagtctgaaataaatcttctcaccttggaaaaggttgaacttgaaagaaagttggaatctgcaactaagtctaaactgcattacaagcagcagtggggacgagctttgaaagaacttgccagacttaaaccagagggagcaagaaagtcaaatggctcgtcttaaaaaacagcaggaagaattggaacagatgagactacgttaccttgccgctgaggaaaaagatacagtaaaaaccgagcgacaagaattgttggatataagaaatgaattgaacaggttaaggcaacaagagcaaaaacaataccaggattccacagagattgcaagtggaaaaaaggatggcccccatggcagtgtattggaagaaggtttggangattatttgactcgcctgatagaagaaagggatactttgatgagaacgggtgtgtataatcacgaggatcgaataataagtgaactcgaccgacagatcagagagattttggcaaaaagcaatgccagtaattaataacatttggaaaagctttatagagactctaagtctaaattttaatttctttgtaaaaccctcaaaagtgaggaaaatggatgttttaaaatggtattttcaattttttataagcaaaattttgtatgttattgtatagtatttatttgatcttatttactttatgctacctctcccacactggttttatttgtaatttgcatttatatactcattttaaatgacttttcagtgtttttcatagtttataatctgatggctaactaactttcaaaacagcttttaactaagtttgttgtaggagaaatgactgcggtaatttccagttctataatgtttcatgttgagccaaaagagtatatcttgcactttaaaaacgctgcgtcctattccatttgaatgtaaattcttaaaagttgagaccaattgtaaccagtttaactcattttagatgacctttttttcttataatatttgcaagtgacaagtttgaaaacaaagcaagatcagtgcagagaagccacatgacatgttgggtgacagattggtcatttatttaaataaagttaatacagattaaatttgtttcaagagctattgaattttcaaattttcagtgtatttataacttttaagaacatgaagtattagcttaatatagttttctctgttggtttcttcctcaagtttgcattgttttcttttgttaaaattagagatttctttttattttccagttatagtaatactaggctgtcagcttaaaccctctgtaatagaacatggaaacagacacataaagacattagctgaaaaaatagagtgaaaatcaactattttttactcccgctaatttcaatcaatcgttttcaaaagcgcacgagattcactcattggatttatgcagtgccctgtctgtataaaaactcttaagagttcctttatatcatattcttcagagccaacatttgtcctcaaagcaacgtttcccacctccttttactgagtactgaaaaagttttagcaaagtcacagattaggttgaatttcaaaatatatgtactttaaaaagttctgatttccaaatataataaagttaaaattaagtatatactttaggaagttaccaataacttccatcaaagcagagtaggatatatggtaacattaattttcggtcatttcaaatgaggtatatttcttattagggaaattaaagtccctatatttattatatattttttccttattaacagagtattaatctagtaaaaaataacccagcagtaaataataaagaaattactgaatgagaggataatgaatctgaatcatagcaggaatttgcaatattaattatggttagctatttttctctcattgatttttgtgccacttgaatggaacagaagcaagccttatgttttggaaggtctgcggtaaaatgctgtgactgtttactttcaattgcattgtgtgttgcctgtgactgctttcaaacgctagagggggcctctgatttaaagaaataaaaaggacttttctaaaatggatgtgtagtttattttgccttttgtaaagctcttttggctattgtaacttaacaaataaaatcataattgtgtgcatctctgagttcttga

SEQ ID NO: 736050 - DNA, 555 bp, Homo sapiens; identical to SEQ ID NO: 254355

SEQ ID NO: 736051 - DNA, 2280 bp, Homo sapiens
  misc_feature (502)..(502): n is a, c, g, or t
catacattatccccatccacatcatagccttaacttaatgatgctgaaaataagtataagattttggaaaaagagttccaacagttcaaggaccagcaaaacaacaaaccagaaatccgtctacagtctgaaataaatcttctcaccttggaaaaggttgaacttgaaagaaagttggaatctgcaactaagtctaaactgcattacaagcagcagtggggacgagctttgaaagaacttgccagacttaaaccagagggagcaagaaagtcaaatggctcgtcttaaaaaacagcaggaagaattggaacagatgagactacgttaccttgccgctgaggaaaaagatacagtaaaaaccgagcgacaagaattgttggatataagaaatgaattgaacaggttaaggcaacaagagcaaaaacaataccaggattccacagagattgcaagtggaaaaaaggatggcccccatggcagtgtattggaagaaggtttggangattatttgactcgcctgatagaagaaagggatactttgatgagaacgggtgtgtataatcacgaggatcgaataataagtgaactcgaccgacagatcagagagattttggcaaaaagcaatgccagtaattaataacatttggaaaagctttatagagactctaagtctaaattttaatttctttgtaaaaccctcaaaagtgaggaaaatggatgttttaaaatggtattttcaattttttataagcaaaattttgtatgttattgtatagtatttatttgatcttatttactttatgctacctctcccacactggttttatttgtaatttgcatttatatactcattttaaatgacttttcagtgtttttcatagtttataatctgatggctaactaactttcaaaacagcttttaactaagtttgttgtaggagaaatgactgcggtaatttccagttctataatgtttcatgttgagccaaaagagtatatcttgcactttaaaaacgctgcgtcctattccatttgaatgtaaattcttaaaagttgagaccaattgtaaccagtttaactcattttagatgacctttttttcttataatatttgcaagtgacaagtttgaaaacaaagcaagatcagtgcagagaagccacatgacatgttgggtgacagattggtcatttatttaaataaagttaatacagattaaatttgtttcaagagctattgaattttcaaattttcagtgtatttataacttttaagaacatgaagtattagcttaatatagttttctctgttggtttcttcctcaagtttgcattgttttcttttgttaaaattagagatttctttttattttccagttatagtaatactaggctgtcagcttaaaccctctgtaatagaacatggaaacagacacataaagacattagctgaaaaaatagagtgaaaatcaactattttttactcccgctaatttcaatcaatcgttttcaaaagcgcacgagattcactcattggatttatgcagtgccctgtctgtataaaaactcttaagagttcctttatatcatattcttcagagccaacatttgtcctcaaagcaacgtttcccacctccttttactgagtactgaaaaagttttagcaaagtcacagattaggttgaatttcaaaatatatgtactttaaaaagttctgatttccaaatataataaagttaaaattaagtatatactttaggaagttaccaataacttccatcaaagcagagtaggatatatggtaacattaattttcggtcatttcaaatgaggtatatttcttattagggaaattaaagtccctatatttattatatattttttccttattaacagagtattaatctagtaaaaaataacccagcagtaaataataaagaaattactgaatgagaggataatgaatctgaatcatagcaggaatttgcaatattaattatggttagctatttttctctcattgatttttgtgccacttgaatggaacagaagcaagccttatgttttggaaggtctgcggtaaaatgctgtgactgtttactttcaattgcattgtgtgttgcctgtgactgctttcaaacgctagagggggcctctgatttaaagaaataaaaaggacttttctaaaatggatgtgtagtttattttgccttttgtaaagctcttttggctattgtaacttaacaaataaaatcataattgtgtgcatctctgagttcttga

SEQ ID NO: 736052 - DNA, 1306 bp, Homo sapiens
gagatgaggactaggtacaggctttagaggagagccaccgccccggacttctccctctgtcaccccgctttccatgaccctccttgcctgactttgtgactccttgcctcgctatcaaaacaagtgctgcaatctcagtgctttccaagagccctgcattgttagaaacttcccagcacgcagcaaaggctgctgcaatactcgctctgcctgcctttgccctgcgcttcctacttaccctccttttgtttctcccaaacatctgtccctgactatgctcatctcatgtttgtcctcagctgctgaaagggccacgtttgttttcattacaaataagaccaccgagtgggctcctggcgtgggggcgggagcagccgcgcgcagtcttcagaggcagccccccaggctgtctctggagggtgtgtctctgcttccctttccccgtgtttattttcagacgaagccaagtggcccggggggaccctccggactcccagccttcagagaggagggcagctcgggctttcgccgcagtgcttcctgcccgtcacgtgtgtgctcctagccggggtcgggggagctggtatcttggcccttctgggaggacgcgcacagcccgaggaggcagagccccagacgggaatgggcttttcagaggtggggtgcgggcgaggggacgatgcattatttttaatatttgatttatttttccaactggacttcttcccggggctctttctgggcccagctgcctttgtgatcccgcgccccggtcctcggcctctcacctccagcgccggggcgccccctgctgtcggaagcggctgtgaccgggcagaggtgctatctgggactctgggttctcagcccggggacagcgaaccgaggggcagatgatccatcagaaaagagccggcactgcccagccccgcgcccctgcccctgcctttttccgggagcgcgccgcgccgcacccgctacggccgcttgaccccatctttgagcccggccccaagctctgggaccgtcgtgcccctcatcaaggaagagccaaggaccccaaggagaagagaaaggagttcatgaaggcagaaatgcctggggcccacgaacatcccagtgtggccctggacgggacatcatgctgggcaacacagctaaaatgcgggtgaagaccagatttcttgcacatggcggtgacgggatgctccctagagagcttcaagtggattctttgctttttattttctctcttaataaaaatgtatgatgtttacattgtcagagaacaaacagaaaaatggct

SEQ ID NO: 736053 - DNA, 1779 bp, Homo sapiens
gagatgaggactaggtacaggctttagaggagagccaccgccccggacttctccctctgtcaccccgctttccatgaccctccttgcctgactttgtgactccttgcctcgctatcaaaacaagtgctgcaatctcagtgctttccaagagccctgcattgttagaaacttcccagcacgcagcaaaggctgctgcaatactcgctctgcctgcctttgccctgcgcttcctacttaccctccttttgtttctcccaaacatctgtccctgactatgctcatctcatgtttgtcctcagctgctgaaagggccacgtttgttttcattacaaataagaccaccgagtgggctcctggcgtgggggcgggagcagccgcgcgcagtcttcagaggcagccccccaggctgtctctggagggtgtgtctctgcttccctttccccgtgtttattttcagacgaagccaagtggcccggggggaccctccggactcccagccttcagagaggagggcagctcgggctttcgccgcagtgcttcctgcccgtcacgtgtgtgctcctagccggggtcgggggagctggtatcttggcccttctgggaggacgcgcacagcccgaggaggcagagccccagacgggaatgggcttttcagaggtggggtgcgggcgaggggacgatgcattatttttaatatttgatttatttttccaactggacttcttcccggggctctttctgggcccagctgcctttgtgatcccgcgccccggtcctcggcctctcacctccagcgccggggcgccccctgctgtcggaagcggctgtgaccgggcagaggtgctatctgggactctgggttctcagcccggggacagcgaaccgaggggcagatgatccatcagaaaagagccggcactgcccagccccgcgcccctgcccctgcctttttccgggagcgcgccgcgccgcacccgctacggccgcttgaccccatctttgagcccggccccaagctctgggaccgtcgtgcccctcatcaaggaagagccaaggaccccaaggagaaggtcaggagcggcggtgtggatgtcccttggctgcaggccccgccgcgcactcccttcagtccttcccttctctagggaccaggtagcatcagtgcctggatctcggccttgtgtgccctgctccctgccccacctactaagaaccaagtctggttcaccggctcccaagagctggaacccattctcagctagctgggggcccaggccaccccttccctccagacctgtgtgccttctgccctggctccagggccccccacaccgtgaccagggcgggatccctatggggctggccagtcggcaccgtgccaggcccacagtgccctgggcgtccatggaagtcgttctgtgtctttaaaatcagaaggaagacattaacctttaggctgaagaaaatgttttagtacacagcaataacttatttgtctttatccaacagccataaaatataactttaaatattctattgatagagaaaggagttcatgaaggcagaaatgcctggggcccacgaacatcccagtgtggccctggacgggacatcatgctgggcaacacagctaaaatgcgggtgaagaccagatttcttgcacatggcggtgacgggatgctccctagagagcttcaagtggattctttgctttttattttctctcttaataaaaatgtatgatgtttacattgtcagagaacaaacagaaaaatggct

SEQ ID NO: 736054 - DNA, 1438 bp, Homo sapiens
aactgtcaaatctgaccagagacgtccccatctttgtgtgtgccatggccttccccacggtcccatgtccactccacgtttttgagccccgctatcggcttatgataagaagatgcatggaaactggcaccaagcggtttggcatgtgtttatctgctgagcacgcggggctttcagagtatggatgcatgctggagattaaggacgtgagaacgtttcctgatggaagttctgttgtagacgcgattggcatcagtcggttccgagtgctaagccaccgccacagagatggctataacacagcggacattgaatatcttgaagatgaaaaggtggagggtccagagtatgaagaacttgccgctctccacgattctgtgcatcaacagtctgtttcctggttcgcgtctctccaggatcgcatgaaagaacaaattttaagtcattttggggtaatgccagacagagaacctgagcctcagagtaatcccagcggccctgcctggtcctggtggatcctggccgtgctgcccctggagcgcaaggctcagctggccatcctcggcatgacctcgctcaaagagcggctccttgccatccgacggatattagtcatcatcacgcgtaagatgaatagtcggcaagagctggctaatgccagggagagaaataattgatttttctctctgtcaaggtttctggcagcccttgtgcttttataaatgtcaggcatggacgaatagccgtccattcattgtgcttcatcaagtgcttgtggatgaggttccaaaatgggacgcttgccaaacattgagtcctcctcaaaaatgacaattctgtgtctggtgggatctgaccttgtgtgaggttagcctgaagtctgaatggagcccatagttggaaaacaacctaagaaaatctcttagaagcaggtgcttggggaatgcagttcactgacagcacaggaccctgcagatggtttacatgtggtttgggtttcacgagaaagaaggattcacttcccagtcagtatctggctctgccagatggtaaaggcgtgctttagtgtgtagacaatatgggggaaccacgtttttatctggaagtggatttcttagaacacaggctaaccaaaactacgcttaggctttgcgtgttgctgtgaagttgtctgtgaaatcgaataatcacaccattgttcagtgcaggagcccaaactagtccttacccaagaagtagtagcctctggatagaactgtgtttaatgtcctgttgtagtcccaggtgttgtaaattgcatgttgtaatcaaacgaatgtcaaaacataagaaagtataccttggatatagaaaaacctgagaacagtatcattcacttgaggatatatatatatatatttacacacaataaagtgagttaaaattgtatatgcattgg

SEQ ID NO: 736055 - DNA, 247 bp, Homo sapiens
gagctcggtacccctcggctctaccttgaaattatgaaagtaaacgtcaaagaaaaccaactaagaaacttcttgaatccaatgatttagaccctggatttatgcccaagaagggggaccttggcctttctaaaaagtgctatgaagctggtcacctggagaatggcataactgaatcttgtgccacatcttattcaaaagattttggtggaggcactaccagatatttgacaaacaggtagagcca

SEQ ID NO: 736056 - DNA, 8560 bp, Homo sapiens
ctcgctgccttctcccctgaagagagacgcggggggaggggggtgcggcgagcggccccgctctctccccaccgctccgctcgcaccccagtgtaatgagggtcaccccctccccccagctggcccgggagggggcgcggggcacggttgatgccggcccaggatggatcagacctgtgaactacccagaagaaattgtctgctgcccttttccaatccagtgaatttagatgcccctgaagacaaggacagccctttcggtaatggtcaatccaatttttctgagccacttaatgggtgtactatgcagttatcgactgtcagtggaacatcccaaaatgcttatggacaagattctccatcttgttacattccactgcggagactacaggatttggcctccatgatcaatgtagagtatttaaatgggtctgctgatggatcagaatcctttcaagaccctgaaaaaagtgattcaagagctcagacgccaattgtttgcacttccttgagtcctggtggtcctacagcacttgctatgaaacaggaaccctcttgtaataactcccctgaactccaggtaaaagtaacaaagactatcaagaatggctttctgcactttgagaattttacttgtgtggacgatgcagatgtagattctgaaatggacccagaacagccagtcacagaggatgagagtatagaggagatctttgaggaaactcagaccaatgccacctgcaattatgagactaaatcagagaatggtgtaaaagtggccatgggaagtgaacaagacagcacaccagagagtagacacggtgcagtcaaatcgccattcttgccattagctcctcagactgaaacacagaaaaataagcaaagaaatgaagtggacggcagcaatgaaaaagcagcccttctcccagcccccttttcactaggagacacaaacattacaatagaagagcaattaaactcaataaatttatcttttcaggatgatccagattccagtaccagtacattaggaaacatgctagaattacctggaacttcatcatcatctacttcacaggaattgccattttgtcaacctaagaaaaagtctacgccactgaagtatgaagttggagatctcatctgggcaaaattcaagagacgcccatggtggccctgcaggatttgttctgatccgttgattaacacacattcaaaaatgaaagtttccaaccggaggccctatcggcagtactacgtggaggcttttggagatccttctgagagagcctgggtggctggaaaagcaatcgtcatgtttgaaggcagacatcaattcgaagagctacctgtccttaggagaagagggaaacagaaagaaaaaggatataggcataaggttcctcagaaaattttgagtaaatgggaagccagtgttggacttgcagaacagtatgatgttcccaaggggtcaaagaaccgaaaatgtattcctggttcaatcaagttggacagtgaagaagatatgccatttgaagactgcacaaatgatcctgagtcagaacatgacctgttgcttaatggctgtttgaaatcactggcttttgattctgaacattctgcagatgagaaggaaaagccttgcgctaaatctcgagccagaaagagctctgataatccaaaaaggactagtgtgaaaaagggccacatacaatttgaagcacataaagatgaacggaggggaaagattccagagaaccttggcctaaactttatctctggggatatatctgatacgcaggcctctaatgaactttccaggatagcaaatagcctcacagggtccaacactgccccaggaagttttctgttttcttcctgtggaaaaaacactgcaaagaaagaatttgagacttcaaatggtgactctttattgggcttgcctgagggtgctttgatctcaaagtgttctcgagagaagaataaaccccaacgaagcctggtgtgtggttcaaaagtgaagctctgctatattggagcaggtgatgaggaaaagcgaagtgattccattagtatctgtaccacttctgatgatggaagcagtgacctggatcccatagaacacagctcagagtctgataacagtgtccttgaaattccagatgctttcgatagaacagagaacatgttatctatgcagaaaaatgaaaagataaagtattctaggtttgctgccacaaacactagggtaaaagcaaaacagaagcctctcattagtaactcacatacagaccacttaatgggttgtactaagagtgcagagcctggaaccgagacgtctcaggttaatctctctgatctgaaggcatctactcttgttcacaaaccccagtcagattttacaaatgatgctctctctccaaaattcaacctgtcatcaagcatatccagtgagaactcgttaataaagggtggggcagcaaatcaagctctattacattcgaaaagcaaacagcccaagttccgaagtataaagtgcaaacacaaagaaaatccagttatggcagaacccccagttataaatgaggagtgcagtttgaaatgctgctcttctgataccaaaggctctcctttggccagcatttctaaaagtgggaaagtggatggtctaaaactactgaacaatatgcatgagaaaaccagggattcaagtgacatagaaacagcagtggtgaaacatgttttatccgagttgaaggaactctcttacagatccttaggtgaggatgtcagtgactctggaacatcaaagccatcaaaaccattacttttctcttctgcttctagtcagaatcacatacctattgaaccagactacaaattcagtacattgctaatgatgttgaaagatatgcatgatagtaagacgaaggagcagcggttgatgactgctcaaaacctggtctcttaccggagtcctggtcgtggggactgttctactaatagtcctgtaggagtctctaaggttttggtttcaggaggctccacacacaattcagagaaaaagggagatggcactcagaactccgccaatcctagccctagtgggggtgactctgcattatctggcgagttgtctgcttccctacctggcttactgtccgacaagagagacctccctgcttctggtaaaagtcgttcagactgtgttactaggcgcaactgtggacgatcaaagccttcatccaaattgcgagatgctttttcagcccaaatggtaaagaacacagtgaaccgtaaagccttaaagaccgagcgcaaaagaaaactgaatcagcttccaagtgtgactcttgatgctgtactgcagggagaccgagaacgtggaggttcattgagaggtggggcagaagatcctagtaaagaggatccccttcagataatgggccacttaacaagtgaagatggtgaccatttttctgatgtgcatttcgatagcaaggttaagcaatctgatcctggtaaaatttctgaaaaaggactctcttttgaaaacggaaaaggcccagagctggactctgtaatgaacagtgagaatgatgaactcaatggtgtaaatcaagtggtgcctaaaaagcggtggcagcgtttaaaccaaaggcgcactaaacctcgtaagcgcatgaacagatttaaagagaaagaaaactctgagtgtgcctttagggtcttacttcctagtgaccctgtgcaggaggggcgggatgagtttccagagcatagaactccttcagcaagcatacttgaggaaccactgacagagcaaaatcatgctgactgcttagattcagctgggccacggttaaatgtttgtgataaatccagtgccagcattggtgacatggaaaaggagccaggaattcccagtttgacaccacaggctgagctccctgaaccagctgtgcggtcagagaagaaacgccttaggaagccaagcaagtggcttttggaatatacagaagaatatgatcagatatttgctcctaagaaaaaacaaaagaaggtacaggagcaggtgcacaaggtaagttcccgctgtgaagaggaaagccttctagcccgaggtcgatctagtgctcagaacaagcaggtggacgagaattctttgatttcaaccaaagaagagcctccagttcttgaaagggaggctccgtttttggagggccccttggctcagtcagaacttggaggtggacatgctgagttgccgcagctgaccttgtctgtgcctgtggctccggaagtctctccacggcctgcccttgagtctgaggaattgctagttaaaacgccaggaaattatgaaagtaaacgtcaaagaaaaccaactaagaaacttcttgaatccaatgatttagaccctggatttatgcccaagaagggggaccttggcctttctaaaaagtgctatgaagctggtcacctggagaatggcataactgaatcttgtgccacatcttattcaaaagattttggtggaggcactaccaagatatttgacaagccaaggaagcgaaaacgacagaggcatgctgcagccaagatgcagtgtaaaaaagtgaaaaatgatgactcgtcaaaagagattccaggctcagagggagaactaatgcctcacaggacggccacaagccccaaggagactgttgaggaaggtgtagaacacgatcccgggatgcctgcctctaaaaaaatgcagggtgaacgcggtggaggagctgcactcaaggagaatgtctgtcagaattgtgaaaaattgggtgagctgctgttatgtgaggctcagtgctgtggggctttccacctggagtgccttggattgactgagatgccaagaggaaaatttatctgcaatgaatgtcgcacaggaatccatacctgttttgtatgtaagcagagtggggaagatgttaaaaggtgccttctacccttgtgtggaaagttttaccatgaagagtgtgtccagaagtacccacccactgttatgcagaacaagggcttccggtgctccctccacatctgtataacctgtcatgctgctaatccagccaatgtttctgcatctaaaggtcggttgatgcgctgtgtccgctgtcctgtggcataccacgccaatgacttttgcctggctgctgggtcaaagatccttgcatctaatagtatcatctgccctaatcactttacccctaggcggggctgccgaaatcatgagcatgttaatgttagctggtgctttgtgtgctcagaaggaggcagccttctgtgctgtgattcttgccctgctgcttttcatcgtgaatgcctgaacattgatatccctgaaggaaactggtattgcaatgactgtaaagcaggcaaaaagccacactacagggagattgtctgggtaaaagttggacgatacaggtggtggccagctgagatctgccatcctcgagctgttccttccaacattgataagatgagacatgatgtgggagagttcccagtcctcttttttggatctaatgactatttgtggactcaccaggcccgagtcttcccttacatggagggtgacgtgagcagcaaggataagatgggcaaaggagtggatgggacatataaaaaagctcttcaggaagctgcagcaaggtttgaggaattaaaggcccaaaaagagctaagacagctgcaggaagaccgaaagaatgacaagaagccaccaccttataaacatataaaggtaaaccgtcctattggcagggtacagatcttcactgcagacttatctgaaataccccgttgcaactgtaaagctactgatgagaacccctgtgggatagactctgaatgcatcaaccgcatgctgctctatgagtgccaccccacagtgtgtcctgccggagggcgctgtcaaaaccagtgcttttccaagcgccaatatccagaggttgaaattttccgcacattacagcggggttggggtctacggacaaaaacagatattaaaaagggtgaatttgtgaatgagtatgtgggtgagcttatagatgaagaagaatgcagagctcgaattcgctatgctcaagaacatgatatcactaatttctatatgctcaccctagacaaagaccgaatcattgatgctggtcccaaaggaaactatgctcggttcatgaatcattgctgccagcccaactgtgaaacacagaagtggtctgtgaatggagatacccgtgtaggcctttttgcactaagtgacattaaagcaggcactgaacttaccttcaactacaacctagaatgtcttgggaatggaaagactgtttgcaaatgtggagccccgaactgcagtggcttcttgggtgtaaggccaaagaatcaacccattgccacggaagaaaagtcaaagaaattcaagaagaagcaacagggaaagcgcaggacccagggtgaaatcacaaaggagcgagaagatgagtgttttagttgtggggatgctggccagctcgtctcctgcaagaaaccaggctgcccaaaagtttaccacgcagactgtctcaatctgaccaagcgaccagcagggaaatgggaatgtccgtggcatcagtgtgacatctgcgggaaggaagcagcctccttctgtgagatgtgccccagctccttttgtaagcagcatcgagaagggatgcttttcatttccaaactggatgggcgtctgtcttgtactgagcatgacccctgtgggcccaatcctctggaacctggggagatccgtgagtatgtgcctcccccagtaccgctgcctccagggccaagcactcacctggcagagcaatcaacaggaatggctgctcaggcacccaaaatgtcagataaacctcctgctgacaccaaccagatgctgtcgctctccaaaaaagctctggcagggacttgtcagaggccactgctacctgaaagacctcttgagagaactgactccaggccccagcctttagataaggtcagagacctcgctggctcagggaccaaatcccaatccttggtttccagccagaggccactggacaggccaccagcagtggcaggaccaagaccccagctaagcgacaaaccctctccagtgaccagcccaagctcctcaccctcagtcaggtcccaaccactggaaagacctctggggacggctgacccaaggctggataaatccataggtgctgccagcccaaggccccagtcactggagaaaacctcagttcccactggcctgagacttccgccgccagacagactgctcattactagcagtcccaaaccccagacttcagacaggcctactgacaaaccccatgcctctttgtcccagagactcccacctcctgagaaagtactatcagctgtggtccagacccttgtagctaaagaaaaagcactgaggcctgtggaccagaatactcagtcaaaaaatagagctgctttggtgatggatctcatagacctaactcctcgccagaaggagcgggcagcttcacctcatcaggtcacaccacaggctgatgagaagatgccagtgttggagtcaagttcatggcctgccagcaaaggtctggggcatatgccgagagctgttgagaaaggctgtgtgtcagatcctcttcagacatctgggaaagcagcagccccttcagaggacccctggcaagctgttaaatcactcacccaggccagacttctttctcagcctcctgccaaggcctttttatatgagccaacaactcaggcctcaggaagagcttctgcaggggctgagcagaccccagggcctcttagccaatccccgggcctggtgaagcaggcgaagcagatggtcggaggccagcaactacctgcacttgccgccaagagtgggcaatcttttaggtctctcgggaaggccccagcctccctccccactgaagaaaagaagttggtaaccacagagcaaagtccctgggccctgggaaaagcctcatcacgggcagggctctggcccatagtggctggacagacactggcacagtcttgctggtctgctgggagcacacagacattggcacagacttgctggtctcttggaagagggcaagaccccaaaccagagcaaaatacacttccagctcttaaccaggctccttccagtcacaagtgtgcagaatcagaacagaagtagtaccaatcaatgtcacatgaacaaacaagctgcccccagggtaccatttggggaggggaaatcttttctttctttcccccttaaaaaaaaacacatctgccccgaacactttcccactggtattctttcctcatatcccaacactcagaactcttgtgacattagccagtgggggcttatggttgtgtgaaccatgtatgaaaatccagtgggccccaaccaaggagacagacagacttgggtctctttcccccaacttttccacatggtcatcgtgaaataaaaagtccactctggagtcaaaaa

SEQ ID NO: 736057 - DNA, 7704 bp, Homo sapiens
ggcctcgaagaccccagcccaagcccccaggttgatgccggcccaggatggatcagacctgtgaactacccagaagaaattgtctgctgcccttttccaatccagtgaatttagatgcccctgaagacaaggacagccctttcggatgatccagattccagtaccagtacattaggaaacatgctagaattacctggaacttcatcatcatctacttcacaggaattgccattttgtcaacctaagaaaaagtctacgccactgaagtatgaagttggagatctcatctgggcaaaattcaagagacgcccatggtggccctgcaggatttgttctgatccgttgattaacacacattcaaaaatgaaagtttccaaccggaggccctatcggcagtactacgtggaggcttttggagatccttctgagagagcctgggtggctggaaaagcaatcgtcatgtttgaaggcagacatcaattcgaagagctacctgtccttaggagaagagggaaacagaaagaaaaaggatataggcataaggttcctcagaaaattttgagtaaatgggaagccagtgttggacttgcagaacagtatgatgttcccaaggggtcaaagaaccgaaaatgtattcctggttcaatcaagttggacagtgaagaagatatgccatttgaagactgcacaaatgatcctgagtcagaacatgacctgttgcttaatggctgtttgaaatcactggcttttgattctgaacattctgcagatgagaaggaaaagccttgcgctaaatctcgagccagaaagagctctgataatccaaaaaggactagtgtgaaaaagggccacatacaatttgaagcacataaagatgaacggaggggaaagattccagagaaccttggcctaaactttatctctggggatatatctgatacgcaggcctctaatgaactttccaggatagcaaatagcctcacagggtccaacactgccccaggaagttttctgttttcttcctgtggaaaaaacactgcaaagaaagaatttgagacttcaaatggtgactctttattgggcttgcctgagggtgctttgatctcaaagtgttctcgagagaagaataaaccccaacgaagcctggtgtgtggttcaaaagtgaagctctgctatattggagcaggtgatgaggaaaagcgaagtgattccattagtatctgtaccacttctgatgatggaagcagtgacctggatcccatagaacacagctcagagtctgataacagtgtccttgaaattccagatgctttcgatagaacagagaacatgttatctatgcagaaaaatgaaaagataaagtattctaggtttgctgccacaaacactagggtaaaagcaaaacagaagcctctcattagtaactcacatacagaccacttaatgggttgtactaagagtgcagagcctggaaccgagacgtctcaggttaatctctctgatctgaaggcatctactcttgttcacaaaccccagtcagattttacaaatgatgctctctctccaaaattcaacctgtcatcaagcatatccagtgagaactcgttaataaagggtggggcagcaaatcaagctctattacattcgaaaagcaaacagcccaagttccgaagtataaagtgcaaacacaaagaaaatccagttatggcagaacccccagttataaatgaggagtgcagtttgaaatgctgctcttctgataccaaaggctctcctttggccagcatttctaaaagtgggaaagtggatggtctaaaactactgaacaatatgcatgagaaaaccagggattcaagtgacatagaaacagcagtggtgaaacatgttttatccgagttgaaggaactctcttacagatccttaggtgaggatgtcagtgactctggaacatcaaagccatcaaaaccattacttttctcttctgcttctagtcagaatcacatacctattgaaccagactacaaattcagtacattgctaatgatgttgaaagatatgcatgatagtaagacgaaggagcagcggttgatgactgctcaaaacctggtctcttaccggagtcctggtcgtggggactgttctactaatagtcctgtaggagtctctaaggttttggtttcaggaggctccacacacaattcagagaaaaagggagatggcactcagaactccgccaatcctagccctagtgggggtgactctgcattatctggcgagttgtctgcttccctacctggcttactgtccgacaagagagacctccctgcttctggtaaaagtcgttcagactgtgttactaggcgcaactgtggacgatcaaagccttcatccaaattgcgagatgctttttcagcccaaatggtaaagaacacagtgaaccgtaaagccttaaagaccgagcgcaaaagaaaactgaatcagcttccaagtgtgactcttgatgctgtactgcagggagaccgagaacgtggaggttcattgagaggtggggcagaagatcctagtaaagaggatccccttcagataatgggccacttaacaagtgaagatggtgaccatttttctgatgtgcatttcgatagcaaggttaagcaatctgatcctggtaaaatttctgaaaaaggactctcttttgaaaacggaaaaggcccagagctggactctgtaatgaacagtgagaatgatgaactcaatggtgtaaatcaagtggtgcctaaaaagcggtggcagcgtttaaaccaaaggcgcactaaacctcgtaagcgcatgaacagatttaaagagaaagaaaactctgagtgtgcctttagggtcttacttcctagtgaccctgtgcaggaggggcgggatgagtttccagagcatagaactccttcagcaagcatacttgaggaaccactgacagagcaaaatcatgctgactgcttagattcagctgggccacggttaaatgtttgtgataaatccagtgccagcattggtgacatggaaaaggagccaggaattcccagtttgacaccacaggctgagctccctgaaccagctgtgcggtcagagaagaaacgccttaggaagccaagcaagtggcttttggaatatacagaagaatatgatcagatatttgctcctaagaaaaaacaaaagaaggtacaggagcaggtgcacaaggtaagttcccgctgtgaagaggaaagccttctagcccgaggtcgatctagtgctcagaacaagcaggtggacgagaattctttgatttcaaccaaagaagagcctccagttcttgaaagggaggctccgtttttggagggccccttggctcagtcagaacttggaggtggacatgctgagttgccgcagctgaccttgtctgtgcctgtggctccggaagtctctccacggcctgcccttgagtctgaggaattgctagttaaaacgccaggaaattatgaaagtaaacgtcaaagaaaaccaactaagaaacttcttgaatccaatgatttagaccctggatttatgcccaagaagggggaccttggcctttctaaaaagtgctatgaagctggtcacctggagaatggcataactgaatcttgtgccacatcttattcaaaagattttggtggaggcactaccaagatatttgacaagccaaggaagcgaaaacgacagaggcatgctgcagccaagatgcagtgtaaaaaagtgaaaaatgatgactcgtcaaaagagattccaggctcagagggagaactaatgcctcacaggacggccacaagccccaaggagactgttgaggaaggtgtagaacacgatcccgggatgcctgcctctaaaaaaatgcagggtgaacgcggtggaggagctgcactcaaggagaatgtctgtcagaattgtgaaaaattgggtgagctgctgttatgtgaggctcagtgctgtggggctttccacctggagtgccttggattgactgagatgccaagaggaaaatttatctgcaatgaatgtcgcacaggaatccatacctgttttgtatgtaagcagagtggggaagatgttaaaaggtgccttctacccttgtgtggaaagttttaccatgaagagtgtgtccagaagtacccacccactgttatgcagaacaagggcttccggtgctccctccacatctgtataacctgtcatgctgctaatccagccaatgtttctgcatctaaaggtcggttgatgcgctgtgtccgctgtcctgtggcataccacgccaatgacttttgcctggctgctgggtcaaagatccttgcatctaatagtatcatctgccctaatcactttacccctaggcggggctgccgaaatcatgagcatgttaatgttagctggtgctttgtgtgctcagaaggaggcagccttctgtgctgtgattcttgccctgctgcttttcatcgtgaatgcctgaacattgatatccctgaaggaaactggtattgcaatgactgtaaagcaggcaaaaagccacactacagggagattgtctgggtaaaagttggacgatacaggtggtggccagctgagatctgccatcctcgagctgttccttccaacattgataagatgagacatgatgtgggagagttcccagtcctcttttttggatctaatgactatttgtggactcaccaggcccgagtcttcccttacatggagggtgacgtgagcagcaaggataagatgggcaaaggagtggatgggacatataaaaaagctcttcaggaagctgcagcaaggtttgaggaattaaaggcccaaaaagagctaagacagctgcaggaagaccgaaagaatgacaagaagccaccaccttataaacatataaaggtaaaccgtcctattggcagggtacagatcttcactgcagacttatctgaaataccccgttgcaactgtaaagctactgatgagaacccctgtgggatagactctgaatgcatcaaccgcatgctgctctatgagtgccaccccacagtgtgtcctgccggagggcgctgtcaaaaccagtgcttttccaagcgccaatatccagaggttgaaattttccgcacattacagcggggttggggtctacggacaaaaacagatattaaaaagggtgaatttgtgaatgagtatgtgggtgagcttatagatgaagaagaatgcagagctcgaattcgctatgctcaagaacatgatatcactaatttctatatgctcaccctagacaaagaccgaatcattgatgctggtcccaaaggaaactatgctcggttcatgaatcattgctgccagcccaactgtgaaacacagaagtggtctgtgaatggagatacccgtgtaggcctttttgcactaagtgacattaaagcaggcactgaacttaccttcaactacaacctagaatgtcttgggaatggaaagactgtttgcaaatgtggagccccgaactgcagtggcttcttgggtgtaaggccaaagaatcaacccattgccacggaagaaaagtcaaagaaattcaagaagaagcaacagggaaagcgcaggacccagggtgaaatcacaaaggagcgagaagatgagtgttttagttgtggggatgctggccagctcgtctcctgcaagaaaccaggctgcccaaaagtttaccacgcagactgtctcaatctgaccaagcgaccagcagggaaatgggaatgtccgtggcatcagtgtgacatctgcgggaaggaagcagcctccttctgtgagatgtgccccagctccttttgtaagcagcatcgagaagggatgcttttcatttccaaactggatgggcgtctgtcttgtactgagcatgacccctgtgggcccaatcctctggaacctggggagatccgtgagtatgtgcctcccccagtaccgctgcctccagggccaagcactcacctggcagagcaatcaacaggaatggctgctcaggcacccaaaatgtcagataaacctcctgctgacaccaaccagatgctgtcgctctccaaaaaagctctggcagggacttgtcagaggccactgctacctgaaagacctcttgagagaactgactccaggccccagcctttagataaggtcagagacctcgctggctcagggaccaaatcccaatccttggtttccagccagaggccactggacaggccaccagcagtggcaggaccaagaccccagctaagcgacaaaccctctccagtgaccagcccaagctcctcaccctcagtcaggtcccaaccactggaaagacctctggggacggctgacccaaggctggataaatccataggtgctgccagcccaaggccccagtcactggagaaaacctcagttcccactggcctgagacttccgccgccagacagactgctcattactagcagtcccaaaccccagacttcagacaggcctactgacaaaccccatgcctctttgtcccagagactcccacctcctgagaaagtactatcagctgtggtccagacccttgtagctaaagaaaaagcactgaggcctgtggaccagaatactcagtcaaaaaatagagctgctttggtgatggatctcatagacctaactcctcgccagaaggagcgggcagcttcacctcatcaggtcacaccacaggctgatgagaagatgccagtgttggagtcaagttcatggcctgccagcaaaggtctggggcatatgccgagagctgttgagaaaggctgtgtgtcagatcctcttcagacatctgggaaagcagcagccccttcagaggacccctggcaagctgttaaatcactcacccaggccagacttctttctcagcctcctgccaaggcctttttatatgagccaacaactcaggcctcaggaagagcttctgcaggggctgagcagaccccagggcctcttagccaatccccgggcctggtgaagcaggcgaagcagatggtcggaggccagcaactacctgcacttgccgccaagagtgggcaatcttttaggtctctcgggaaggccccagcctccctccccactgaagaaaagaagttggtaaccacagagcaaagtccctgggccctgggaaaagcctcatcacgggcagggctctggcccatagtggctggacagacactggcacagtcttgctggtctgctgggagcacacagacattggcacagacttgctggtctcttggaagagggcaagaccccaaaccagagcaaaatacacttccagctcttaaccaggctccttccagtcacaagtgtgcagaatcagaacagaagtagtaccaatcaatgtcacatgaacaaacaagctgcccccagggtaccatttggggaggggaaatcttttctttctttcccccttaaaaaaaaacacatctgccccgaacactttcccactggtattctttcctcatatcccaacactcagaactcttgtgacattagccagtgggggcttatggttgtgtgaaccatgtatgaaaatccagtgggccccaaccaaggagacagacagacttgggtctctttcccccaacttttccacatggtcatcgtgaaataaaaagtccactctggagtcaaaaa

SEQ ID NO: 736058 - DNA, 810 bp, Homo sapiens; identical to SEQ ID NO: 335078

SEQ ID NO: 736059 - DNA, 8135 bp, Homo sapiens
ggcctcgaagaccccagcccaagcccccaggttgatgccggcccaggatggatcagacctgtgaactacccagaagaaattgtctgctgcccttttccaatccagtgaatttagatgcccctgaagacaaggacagccctttcggtaatggtcaatccaatttttctgagccacttaatgggtgtactatgcagttatcgactgtcagtggaacatcccaaaatgcttatggacaagattctccatcttgttacattccactgcggagactacaggatttggcctccatgatcaatgtagagtatttaaatgggtctgctgatggatcagaatcctttcaagaccctgaaaaaagtgattcaagagctcagacgccaattgtttgcacttccttgagtcctggtggtcctacagcacttgctatgaaacaggaaccctcttgtaataactcccctgaactccaggtaaaagtaacaaagactatcaagaatggctttctgcactttgagaattttacttgtgtggacgatgcagatgtagattctgaaatggacccagaacagccagtcacagaggatgagagtatagaggagatctttgaggaaactcagaccaatgccacctgcaattatgagactaaatcagagaatggtgtaaaagtggccatgggaagtgaacaagacagcacaccagagagtagacacggtgcagtcaaatcgccattcttgccattagctcctcagactgaaacacagaaaaataagcaaagaaatgaagtggacggcagcaatgaaaaagcagcccttctcccagcccccttttcactaggagacacaaacattacaatagaagagcaattaaactcaataaatttatcttttcaggatgatccagattccagtaccagtacattaggaaacatgctagaattacctggaacttcatcatcatctacttcacaggaattgccatttgttcctcagaaaattttgagtaaatgggaagccagtgttggacttgcagaacagtatgatgttcccaaggggtcaaagaaccgaaaatgtattcctggttcaatcaagttggacagtgaagaagatatgccatttgaagactgcacaaatgatcctgagtcagaacatgacctgttgcttaatggctgtttgaaatcactggcttttgattctgaacattctgcagatgagaaggaaaagccttgcgctaaatctcgagccagaaagagctctgataatccaaaaaggactagtgtgaaaaagggccacatacaatttgaagcacataaagatgaacggaggggaaagattccagagaaccttggcctaaactttatctctggggatatatctgatacgcaggcctctaatgaactttccaggatagcaaatagcctcacagggtccaacactgccccaggaagttttctgttttcttcctgtggaaaaaacactgcaaagaaagaatttgagacttcaaatggtgactctttattgggcttgcctgagggtgctttgatctcaaagtgttctcgagagaagaataaaccccaacgaagcctggtgtgtggttcaaaagtgaagctctgctatattggagcaggtgatgaggaaaagcgaagtgattccattagtatctgtaccacttctgatgatggaagcagtgacctggatcccatagaacacagctcagagtctgataacagtgtccttgaaattccagatgctttcgatagaacagagaacatgttatctatgcagaaaaatgaaaagataaagtattctaggtttgctgccacaaacactagggtaaaagcaaaacagaagcctctcattagtaactcacatacagaccacttaatgggttgtactaagagtgcagagcctggaaccgagacgtctcaggttaatctctctgatctgaaggcatctactcttgttcacaaaccccagtcagattttacaaatgatgctctctctccaaaattcaacctgtcatcaagcatatccagtgagaactcgttaataaagggtggggcagcaaatcaagctctattacattcgaaaagcaaacagcccaagttccgaagtataaagtgcaaacacaaagaaaatccagttatggcagaacccccagttataaatgaggagtgcagtttgaaatgctgctcttctgataccaaaggctctcctttggccagcatttctaaaagtgggaaagtggatggtctaaaactactgaacaatatgcatgagaaaaccagggattcaagtgacatagaaacagcagtggtgaaacatgttttatccgagttgaaggaactctcttacagatccttaggtgaggatgtcagtgactctggaacatcaaagccatcaaaaccattacttttctcttctgcttctagtcagaatcacatacctattgaaccagactacaaattcagtacattgctaatgatgttgaaagatatgcatgatagtaagacgaaggagcagcggttgatgactgctcaaaacctggtctcttaccggagtcctggtcgtggggactgttctactaatagtcctgtaggagtctctaaggttttggtttcaggaggctccacacacaattcagagaaaaagggagatggcactcagaactccgccaatcctagccctagtgggggtgactctgcattatctggcgagttgtctgcttccctacctggcttactgtccgacaagagagacctccctgcttctggtaaaagtcgttcagactgtgttactaggcgcaactgtggacgatcaaagccttcatccaaattgcgagatgctttttcagcccaaatggtaaagaacacagtgaaccgtaaagccttaaagaccgagcgcaaaagaaaactgaatcagcttccaagtgtgactcttgatgctgtactgcagggagaccgagaacgtggaggttcattgagaggtggggcagaagatcctagtaaagaggatccccttcagataatgggccacttaacaagtgaagatggtgaccatttttctgatgtgcatttcgatagcaaggttaagcaatctgatcctggtaaaatttctgaaaaaggactctcttttgaaaacggaaaaggcccagagctggactctgtaatgaacagtgagaatgatgaactcaatggtgtaaatcaagtggtgcctaaaaagcggtggcagcgtttaaaccaaaggcgcactaaacctcgtaagcgcatgaacagatttaaagagaaagaaaactctgagtgtgcctttagggtcttacttcctagtgaccctgtgcaggaggggcgggatgagtttccagagcatagaactccttcagcaagcatacttgaggaaccactgacagagcaaaatcatgctgactgcttagattcagctgggccacggttaaatgtttgtgataaatccagtgccagcattggtgacatggaaaaggagccaggaattcccagtttgacaccacaggctgagctccctgaaccagctgtgcggtcagagaagaaacgccttaggaagccaagcaagtggcttttggaatatacagaagaatatgatcagatatttgctcctaagaaaaaacaaaagaaggtacaggagcaggtgcacaaggtaagttcccgctgtgaagaggaaagccttctagcccgaggtcgatctagtgctcagaacaagcaggtggacgagaattctttgatttcaaccaaagaagagcctccagttcttgaaagggaggctccgtttttggagggccccttggctcagtcagaacttggaggtggacatgctgagttgccgcagctgaccttgtctgtgcctgtggctccggaagtctctccacggcctgcccttgagtctgaggaattgctagttaaaacgccaggaaattatgaaagtaaacgtcaaagaaaaccaactaagaaacttcttgaatccaatgatttagaccctggatttatgcccaagaagggggaccttggcctttctaaaaagtgctatgaagctggtcacctggagaatggcataactgaatcttgtgccacatcttattcaaaagattttggtggaggcactaccaagatatttgacaagccaaggaagcgaaaacgacagaggcatgctgcagccaagatgcagtgtaaaaaagtgaaaaatgatgactcgtcaaaagagattccaggctcagagggagaactaatgcctcacaggacggccacaagccccaaggagactgttgaggaaggtgtagaacacgatcccgggatgcctgcctctaaaaaaatgcagggtgaacgcggtggaggagctgcactcaaggagaatgtctgtcagaattgtgaaaaattgggtgagctgctgttatgtgaggctcagtgctgtggggctttccacctggagtgccttggattgactgagatgccaagaggaaaatttatctgcaatgaatgtcgcacaggaatccatacctgttttgtatgtaagcagagtggggaagatgttaaaaggtgccttctacccttgtgtggaaagttttaccatgaagagtgtgtccagaagtacccacccactgttatgcagaacaagggcttccggtgctccctccacatctgtataacctgtcatgctgctaatccagccaatgtttctgcatctaaaggtcggttgatgcgctgtgtccgctgtcctgtggcataccacgccaatgacttttgcctggctgctgggtcaaagatccttgcatctaatagtatcatctgccctaatcactttacccctaggcggggctgccgaaatcatgagcatgttaatgttagctggtgctttgtgtgctcagaaggaggcagccttctgtgctgtgattcttgccctgctgcttttcatcgtgaatgcctgaacattgatatccctgaaggaaactggtattgcaatgactgtaaagcaggcaaaaagccacactacagggagattgtctgggtaaaagttggacgatacaggtggtggccagctgagatctgccatcctcgagctgttccttccaacattgataagatgagacatgatgtgggagagttcccagtcctcttttttggatctaatgactatttgtggactcaccaggcccgagtcttcccttacatggagggtgacgtgagcagcaaggataagatgggcaaaggagtggatgggacatataaaaaagctcttcaggaagctgcagcaaggtttgaggaattaaaggcccaaaaagagctaagacagctgcaggaagaccgaaagaatgacaagaagccaccaccttataaacatataaaggtaaaccgtcctattggcagggtacagatcttcactgcagacttatctgaaataccccgttgcaactgtaaagctactgatgagaacccctgtgggatagactctgaatgcatcaaccgcatgctgctctatgagtgccaccccacagtgtgtcctgccggagggcgctgtcaaaaccagtgcttttccaagcgccaatatccagaggttgaaattttccgcacattacagcggggttggggtctacggacaaaaacagatattaaaaagggtgaatttgtgaatgagtatgtgggtgagcttatagatgaagaagaatgcagagctcgaattcgctatgctcaagaacatgatatcactaatttctatatgctcaccctagacaaagaccgaatcattgatgctggtcccaaaggaaactatgctcggttcatgaatcattgctgccagcccaactgtgaaacacagaagtggtctgtgaatggagatacccgtgtaggcctttttgcactaagtgacattaaagcaggcactgaacttaccttcaactacaacctagaatgtcttgggaatggaaagactgtttgcaaatgtggagccccgaactgcagtggcttcttgggtgtaaggccaaagaatcaacccattgccacggaagaaaagtcaaagaaattcaagaagaagcaacagggaaagcgcaggacccagggtgaaatcacaaaggagcgagaagatgagtgttttagttgtggggatgctggccagctcgtctcctgcaagaaaccaggctgcccaaaagtttaccacgcagactgtctcaatctgaccaagcgaccagcagggaaatgggaatgtccgtggcatcagtgtgacatctgcgggaaggaagcagcctccttctgtgagatgtgccccagctccttttgtaagcagcatcgagaagggatgcttttcatttccaaactggatgggcgtctgtcttgtactgagcatgacccctgtgggcccaatcctctggaacctggggagatccgtgagtatgtgcctcccccagtaccgctgcctccagggccaagcactcacctggcagagcaatcaacaggaatggctgctcaggcacccaaaatgtcagataaacctcctgctgacaccaaccagatgctgtcgctctccaaaaaagctctggcagggacttgtcagaggccactgctacctgaaagacctcttgagagaactgactccaggccccagcctttagataaggtcagagacctcgctggctcagggaccaaatcccaatccttggtttccagccagaggccactggacaggccaccagcagtggcaggaccaagaccccagctaagcgacaaaccctctccagtgaccagcccaagctcctcaccctcagtcaggtcccaaccactggaaagacctctggggacggctgacccaaggctggataaatccataggtgctgccagcccaaggccccagtcactggagaaaacctcagttcccactggcctgagacttccgccgccagacagactgctcattactagcagtcccaaaccccagacttcagacaggcctactgacaaaccccatgcctctttgtcccagagactcccacctcctgagaaagtactatcagctgtggtccagacccttgtagctaaagaaaaagcactgaggcctgtggaccagaatactcagtcaaaaaatagagctgctttggtgatggatctcatagacctaactcctcgccagaaggagcgggcagcttcacctcatcaggtcacaccacaggctgatgagaagatgccagtgttggagtcaagttcatggcctgccagcaaaggtctggggcatatgccgagagctgttgagaaaggctgtgtgtcagatcctcttcagacatctgggaaagcagcagccccttcagaggacccctggcaagctgttaaatcactcacccaggccagacttctttctcagcctcctgccaaggcctttttatatgagccaacaactcaggcctcaggaagagcttctgcaggggctgagcagaccccagggcctcttagccaatccccgggcctggtgaagcaggcgaagcagatggtcggaggccagcaactacctgcacttgccgccaagagtgggcaatcttttaggtctctcgggaaggccccagcctccctccccactgaagaaaagaagttggtaaccacagagcaaagtccctgggccctgggaaaagcctcatcacgggcagggctctggcccatagtggctggacagacactggcacagtcttgctggtctgctgggagcacacagacattggcacagacttgctggtctcttggaagagggcaagaccccaaaccagagcaaaatacacttccagctcttaaccaggctccttccagtcacaagtgtgcagaatcagaacagaagtagtaccaatcaatgtcacatgaacaaacaagctgcccccagggtaccatttggggaggggaaatcttttctttctttcccccttaaaaaaaaacacatctgccccgaacactttcccactggtattctttcctcatatcccaacactcagaactcttgtgacattagccagtgggggcttatggttgtgtgaaccatgtatgaaaatccagtgggccccaaccaaggagacagacagacttgggtctctttcccccaacttttccacatggtcatcgtgaaataaaaagtccactctggagtcaaaaa

SEQ ID NO: 736060 - DNA, 815 bp, Homo sapiens
ggcctcgaagaccccagcccaagcccccaggttgatgccggcccaggatggatcagacctgtgaactacccagaagaaattgtctgctgcccttttccaatccagtgaatttagatgcccctgaagacaaggacagccctttcggtaatggtcaatccaatttttctgagccacttaatgggtgtactatgcagttatcgactgtcagtggaacatcccaaaatgcttatggacaagattctccatcttgttacattccactgcggagactacaggatttggcctccatgatcaatgtagagtatttaaatgggtctgctgatggatcagaatcctttcaagaccctgaaaaaagtgattcaagagctcagacgccaattgtttgcacttccttgagtcctggtggtcctacagcacttgctatgaaacaggaaccctcttgtaataactcccctgaactccaggtaaaagtaacaaagactatcaagaatggctttctgcactttgagaattttacttgtgtggacgatgcagatgtagattctgaaatggacccagaacagccagtcacagaggatgagagtatagaggagatctttgaggaaactcagaccaatgccacctgcaattatgagactaaatcagagaatggtgtaaaagtggccatgggaagtgaacaagacagcacaccagagagtagacacggtgcagtcaaatcgccattcttgccattagctcctcagactgaaacacagtcatagtagcagatgtttaatgtctgtcggcagccgggcagtgaaagcgtattcatcgct

SEQ ID NO: 736061 - DNA, 1678 bp, Homo sapiens; identical to SEQ ID NO: 335090

SEQ ID NO: 736062 - DNA, 4684 bp, Homo sapiens; identical to SEQ ID NO: 335080

SEQ ID NO: 736063 - DNA, 4970 bp, Homo sapiens
ctcgctgccttctcccctgaagagagacgcggggggaggggggtgcggcgagcggccccgctctctccccaccgctccgctcgcaccccagtgtaatgagggtcaccccctccccccagctggcccgggagggggcgcggggcacggttgatgccggcccaggatggatcagacctgtgaactacccagaagaaattgtctgctgcccttttccaatccagtgaatttagatgcccctgaagacaaggacagccctttcggtaatggtcaatccaatttttctgagccacttaatgggtgtactatgcagttatcgactgtcagtggaacatcccaaaatgcttatggacaagattctccatcttgttacattccactgcggagactacaggatttggcctccatgatcaatgtagagtatttaaatgggtctgctgatggatcagaatcctttcaagaccctgaaaaaagtgattcaagagctcagacgccaattgtttgcacttccttgagtcctggtggtcctacagcacttgctatgaaacaggaaccctcttgtaataactcccctgaactccaggtaaaagtaacaaagactatcaagaatggctttctgcactttgagaattttacttgtgtggacgatgcagatgtagattctgaaatggacccagaacagccagtcacagaggatgagagtatagaggagatctttgaggaaactcagaccaatgccacctgcaattatgagactaaatcagagaatggtgtaaaagtggccatgggaagtgaacaagacagcacaccagagagtagacacggtgcagtcaaatcgccattcttgccattagctcctcagactgaaacacagaaaaataagcaaagaaatgaagtggacggcagcaatgaaaaagcagcccttctcccagcccccttttcactaggagacacaaacattacaatagaagagcaattaaactcaataaatttatcttttcaggatgatccagattccagtaccagtacattaggaaacatgctagaattacctggaacttcatcatcatctacttcacaggaattgccattttgtcaacctaagaaaaagtctacgccactgaagtatgaagttggagatctcatctgggcaaaattcaagagacgcccatggtggccctgcaggatttgttctgatccgttgattaacacacattcaaaaatgaaagtttccaaccggaggccctatcggcagtactacgtggaggcttttggagatccttctgagagagcctgggtggctggaaaagcaatcgtcatgtttgaaggcagacatcaattcgaagagctacctgtccttaggagaagagggaaacagaaagaaaaaggatataggcataaggttcctcagaaaattttgagtaaatgggaagccagtgttggacttgcagaacagtatgatgttcccaaggggtcaaagaaccgaaaatgtattcctggttcaatcaagttggacagtgaagaagatatgccatttgaagactgcacaaatgatcctgagtcagaacatgacctgttgcttaatggctgtttgaaatcactggcttttgattctgaacattctgcagatgagaaggaaaagccttgcgctaaatctcgagccagaaagagctctgataatccaaaaaggactagtgtgaaaaagggccacatacaatttgaagcacataaagatgaacggaggggaaagattccagagaaccttggcctaaactttatctctggggatatatctgatacgcaggcctctaatgaactttccaggatagcaaatagcctcacagggtccaacactgccccaggaagttttctgttttcttcctgtggaaaaaacactgcaaagaaagaatttgagacttcaaatggtgactctttattgggcttgcctgagggtgctttgatctcaaagtgttctcgagagaagaataaaccccaacgaagcctggtgtgtggttcaaaagtgaagctctgctatattggagcaggtgatgaggaaaagcgaagtgattccattagtatctgtaccacttctgatgatggaagcagtgacctggatcccatagaacacagctcagagtctgataacagtgtccttgaaattccagatgctttcgatagaacagagaacatgttatctatgcagaaaaatgaaaagataaagtattctaggtttgctgccacaaacactagggtaaaagcaaaacagaagcctctcattagtaactcacatacagaccacttaatgggttgtactaagagtgcagagcctggaaccgagacgtctcaggttaatctctctgatctgaaggcatctactcttgttcacaaaccccagtcagattttacaaatgatgctctctctccaaaattcaacctgtcatcaagcatatccagtgagaactcgttaataaagggtggggcagcaaatcaagctctattacattcgaaaagcaaacagcccaagttccgaagtataaagtgcaaacacaaagaaaatccagttatggcagaacccccagttataaatgaggagtgcagtttgaaatgctgctcttctgataccaaaggctctcctttggccagcatttctaaaagtgggaaagtggatggtctaaaactactgaacaatatgcatgagaaaaccagggattcaagtgacatagaaacagcagtggtgaaacatgttttatccgagttgaaggaactctcttacagatccttaggtgaggatgtcagtgactctggaacatcaaagccatcaaaaccattacttttctcttctgcttctagtcagaatcacatacctattgaaccagactacaaattcagtacattgctaatgatgttgaaagatatgcatgatagtaagacgaaggagcagcggttgatgactgctcaaaacctggtctcttaccggagtcctggtcgtggggactgttctactaatagtcctgtaggagtctctaaggttttggtttcaggaggctccacacacaattcagagaaaaagggagatggcactcagaactccgccaatcctagccctagtgggggtgactctgcattatctggcgagttgtctgcttccctacctggcttactgtccgacaagagagacctccctgcttctggtaaaagtcgttcagactgtgttactaggcgcaactgtggacgatcaaagccttcatccaaattgcgagatgctttttcagcccaaatggtaaagaacacagtgaaccgtaaagccttaaagaccgagcgcaaaagaaaactgaatcagcttccaagtgtgactcttgatgctgtactgcagggagaccgagaacgtggaggttcattgagaggtggggcagaagatcctagtaaagaggatccccttcagataatgggccacttaacaagtgaagatggtgaccatttttctgatgtgcatttcgatagcaaggttaagcaatctgatcctggtaaaatttctgaaaaaggactctcttttgaaaacggaaaaggcccagagctggactctgtaatgaacagtgagaatgatgaactcaatggtgtaaatcaagtggtgcctaaaaagcggtggcagcgtttaaaccaaaggcgcactaaacctcgtaagcgcatgaacagatttaaagagaaagaaaactctgagtgtgcctttagggtcttacttcctagtgaccctgtgcaggaggggcgggatgagtttccagagcatagaactccttcagcaagcatacttgaggaaccactgacagagcaaaatcatgctgactgcttagattcagctgggccacggttaaatgtttgtgataaatccagtgccagcattggtgacatggaaaaggagccaggaattcccagtttgacaccacaggctgagctccctgaaccagctgtgcggtcagagaagaaacgccttaggaagccaagcaagtggcttttggaatatacagaagaatatgatcagatatttgctcctaagaaaaaacaaaagaaggtacaggagcaggtgcacaaggtaagttcccgctgtgaagaggaaagccttctagcccgaggtcgatctagtgctcagaacaagcaggtggacgagaattctttgatttcaaccaaagaagagcctccagttcttgaaagggaggctccgtttttggagggccccttggctcagtcagaacttggaggtggacatgctgagttgccgcagctgaccttgtctgtgcctgtggctccggaagtctctccacggcctgcccttgagtctgaggaattgctagttaaaacgccaggaaattatgaaagtaaacgtcaaagaaaaccaactaagaaacttcttgaatccaatgatttagaccctggatttatgcccaagaagggggaccttggcctttctaaaaagtgctatgaagctggtcacctggagaatggcataactgaatcttgtgccacatcttattcaaaagattttggtggaggcactaccaagatatttgacaagccaaggaagcgaaaacgacagaggcatgctgcagccaagatgcagtgtaaaaaagtgaaaaatgatgactcgtcaaaagagattccaggctcagagggagaactaatgcctcacaggacggccacaagccccaaggagactgttgaggaaggtgtagaacacgatcccgggatgcctgcctctaaaaaaatgcagggtgaacgcggtggaggagctgcactcaaggagaatgtctgtcagaattgtgaaaaattgggtgagctgctgttatgtgaggctcagtgctgtggggctttcctattgctgctggtgcagctgtaaaaaagaaaaaaccaaaaattttgggatgacatgaaaggccataatgtcaggaaagagtagagaggactgaataatccagatggca

SEQ ID NO: 736064 - DNA, 1623 bp, Homo sapiens; identical to SEQ ID NO: 335084

SEQ ID NO: 736065 - DNA, 2664 bp, Homo sapiens; identical to SEQ ID NO: 454971

SEQ ID NO: 736066 - DNA, 397 bp, Homo sapiens; identical to SEQ ID NO: 62284

SEQ ID NO: 736067 - DNA, 477 bp, Homo sapiens; identical to SEQ ID NO: 62287

SEQ ID NO: 736068 - DNA, 1271 bp, Homo sapiens
cggggcagagccgcggttcccgggcacaggggatggacgcgggaggtgagaagcggacgtgctttctgattggctgaggagtccgtggccgttggggcgggaaaaagctgtggagggttcgaggctgtggtggtaattgggttttcctcagacttgaggcgacgacacactcattggaaggggacgaggaatccagggtgtggcagaagactggagaggagctaagggggtcggtatgtggatccagtgaacccgtccaggtgccccaagaggctcgtgaatatggacggacccatgaggccacgatcggcctccctcgttgactttcagtttggagttgtcgccacagagacgattgaagacgccctgcttcacttggcccagcagaatgagcaagcagtgagggaggcttcggggcggctgggccgcttcagggagccccagatcgtgggtttatggtaaaacaggcagagaacatctgcaggcaagccacaatccagccaagagataataagagagagtctcagaattggagggctctgaaacagcagcttgtcaacaagtttactctccgtcttgtgtcatgtgttcagctggccagcaaactttccttccgaaacaaaataatcagcaacattacagtcttgaatttcctccaggctctaggctatctacacactaaagaagaactgctggaatcagagcttgatgttttgaagtccttgaacttccgaattaatctgcccactcccctggcatatgtggagacgctcctagaggttttaggatacaatggctgtttggttccagccatgaggctgcatgcaacctgcctgacactgctcgacctggtctatcttctgcatgaacccatatatgagagcctgttgagggcttcaattgagaactccactcccagtcagctgcaaggggaaaagtttacttcagtgaaggaagacttcatgctgttggcagtaggaatcattgcagcaagtgctttcatccaaaaccatgagtgttggagccaggtatgcaccactgagcaggaccagcatggttgtggggcatttgcagagcatcactggtattgccttggcaagcattgctgagttctcttatgcaatcctgactcacggagtgggagccaacactccggggagacagcagtctattcctccccacctggcagccagagctctgaagactgttgcttcctctaacacatgagggaggctgaatccaccaaatataaacagccatccgtcactgca

SEQ ID NO: 736069 - DNA, 1243 bp, Homo sapiens
cggggcagagccgcggttcccgggcacaggggatggacgcgggaggtgagaagcggacgtgctttctgattggctgaggagtccgtggccgttggggcgggaaaaagctgtggagggttcgaggctgtggtggtaattgggttttcctcagacttgaggcgacgacacactcattggaaggggacgaggaatccagggtgtggcagaagactggagaggagctaagggggtcggtatgtggatccagtgaacccgtccaggtgccccaagaggctcgtgaatatggacggacccatgaggccacgatcggcctccctcgttgactttcagtttggagttgtcgccacagagacgattgaagacgccctgcttcacttggcccagcagaatgagcaagcagtgagggaggcttcggggcggctgggccgcttcagggagccccagatcgtgggtttatggtaaaacaggcagagaacatctgcaggcaagccacaatccagccaagagataataagagagagtctcagaattggagggctctgaaacagcagcttgtcaacaagtttactctccgtcttgtgtcatgtgttcagctggccagcaaactttccttccgaaacaaaataatcagcaacattacagtcttgaatttcctccaggctctaggctatctacacactaaagaagaactgctggaatcagagcttgatgttttgaagtccttgaacttccgaattaatctgcccactcccctggcatatgtggagacgctcctagaggttttaggatacaatggctgtttggttccagccatgaggctgcatgcaacctgcctgacactgctcgacctggtctatcttctgcatgaacccatatatgagagcctgttgagggcttcaattgagaactccactcccagtcagctgcaaggggaaaagtttacttcagtgaaggaagacttcatgctgttggcagtaggaatcattgcagcaagtgctttcatccaaaaccatgagtgttggagccaggttgtggggcatttgcagagcatcactggtattgccttggcaagcattgctgagttctcttatgcaatcctgactcacggagtgggagccaacactccggggagacagcagtctattcctccccacctggcagccagagctctgaagactgttgcttcctctaacacatgagggaggctgaatccaccaaatataaacagccatccgtcactgca

SEQ ID NO: 736070 - DNA, 1319 bp, Homo sapiens
cggggcagagccgcggttcccgggcacaggggatggacgcgggaggtgagaagcggacgtgctttctgattggctgaggagtccgtggccgttggggcgggaaaaagctgtggagggttcgaggctgtggtggtaattgggttttcctcagacttgaggcgacgacacactcattggaaggggacgaggaatccagggtgtggcagaagactggagaggagctaagggggtcggtatgtggatccagtgaacccgtccaggtgccccaagaggctcgtgaatatggacggacccatgaggccacgatcggcctccctcgttgactttcagtttggagttgtcgccacagagacgattgaagacgccctgcttcacttggcccagcagaatgagcaagcagtgagggaggcttcggggcggctgggccgcttcagggagccccagatcgtggagtttgtttttctcctgtctgaacaatggtgtctggagaaatctgtgagctaccaggctgtagaaatcctagaaaggtttatggtaaaacaggcagagaacatctgcaggcaagccacaatccagccaagagataataagagagagtctcagaattggagggctctgaaacagcagcttgtcaacaagtttactctccgtcttgtgtcatgtgttcagctggccagcaaactttccttccgaaacaaaataatcagcaacattacagtcttgaatttcctccaggctctaggctatctacacactaaagaagaactgctggaatcagagcttgatgttttgaagtccttgaacttccgaattaatctgcccactcccctggcatatgtggagacgctcctagaggttttaggatacaatggctgtttggttccagccatgaggctgcatgcaacctgcctgacactgctcgacctggtctatcttctgcatgaacccatatatgagagcctgttgagggcttcaattgagaactccactcccagtcagctgcaaggggaaaagtttacttcagtgaaggaagacttcatgctgttggcagtaggaatcattgcagcaagtgctttcatccaaaaccatgagtgttggagccaggttgtggggcatttgcagagcatcactggtattgccttggcaagcattgctgagttctcttatgcaatcctgactcacggagtgggagccaacactccggggagacagcagtctattcctccccacctggcagccagagctctgaagactgttgcttcctctaacacatgagggaggctgaatccaccaaatataaacagccatccgtcactgca

SEQ ID NO: 736071 - DNA, 1356 bp, Homo sapiens
gatgtttattttattaatctattttttaactgggtagggattgcttttgtaattagaaaaagtattaaaaactctctttaattaggaagattatgtaaagctgtaaagcaaatttattttgcatttcagaggctgtttctttatcttgctctctctcctgtggcagattttatggccggaagatggtgaatatcttgatggcgaacactaagtttgatgcatttctgaagcaatctctcccatcttacgacttgcagaaggtcatggcggccattaaacagcagggaatagaagataatgatgaacttccctctgccaaaggccgcaaggtgttgaggagtctggtggtgtgtgagaacgggctgcccatcaaggaggggctcagctgcaatggcccaaggctggtggggctgcgctccacactgcagggccgcggggagatggtggagcagctacgggagctgacacggctgctggaggccaaggacttccggtcccggatggaaggcgtggggcagctcctggagctctgcaaggccaagacggagcttgtcactgcccacctggtccaggtctttgatgctttcaccccaaggcttcaggattccaacaagaaagtgaaccagtgggcgctggagtccttcgccaagatgatccccctcctcagagagagcttacaccccatgctgctctccatcatcatcactgttgcagacaacctcaactccaagaactcagggatttacgctgctgccgtggctgtgctggatgcgatggttgagagcctggacaacctttgccttctaccagcgcttgctgggcgagtgcgtttcctgagtggccgtgcggtgctggatgtcacagatcgcctggcagtgctggtggcctcagtttacccccggaagcctcaagctgtagagcggcatgtccttcccatcctctggcacttcctgaacaccgccaccaggaatggcaccctgcctggacccagcgggaacatccgcggggtggtgtgccggctgtccaggagcctccaggagcacatgggctcccgcctgctggactttgccgccagccagccaaagcacgtcctcaagacgctccaggaactcttagactcagagtccttgggaggcagccgcaaggccactgacagaggggtggcccctgacagcaagacaactggcagctcatacccttttcagctggattaaagatggatctgaaatgggcaattattatttatcttatttttttgatggactattctcctggttactttcccccttagagttccagatgtacatggtatattttgaagtagaaataaaagaattacttatttttctaaggttt

SEQ ID NO: 736072 - DNA, 837 bp, Homo sapiens
ccaatcgcctcgtctggaaaaatgggaatggaggagagttgtacctacccagggtggttctgtgggcatttaaagagcaacttcatgtgagacgtggagtccatgtgtggcccatggtgggctccaggaaatgttggtgatgacagggatgagggagcaactgagagccggcagtgaggtgacacacccaaggtcacgccaccagcagaggtagctggtcacgctgctgagagccggcaggaaatagatgcggacaaagcagggtcggttttcagcttctctccacggaaaggccggctgaagtttccctcaccacgcagaaatcgataagcaggaggtttttaaaaaccacctccccattgaacctgccactgccggagctgaaggctgtgcgttttgtggtccgctctgccccagggccacttagggtgcgtccacgctgggtgtgccaggcatgcacgtgggctgcagacgcccaggaggcagagccgagcctgccaaggttatgcgtgcacctctcagctccctgcttaacactgcgttcccgggagagagatttctccctggctgcttcacatccagaggagaacatcagctctcagcagaacataaggccctcttcacctgccagctgggcaacagcagttactctcattggagaccctttcccttcgccacttcccaggctactccagactgaatgcattcagggagtcacctcccaggtcaaaacctgctgtgataccatcaccctgcagcacagaccacagtcccaagcctcccattcttgaccccctccccagcccattcctgctgtcaaacaaacaaaaccttgca

SEQ ID NO: 736073 - DNA, 325 bp, Homo sapiens
gaggagcccacctgtcctcccggaagagatggcccctttcacttgagattccaggagattgcccagggagaaggtgtggagggaggggttttgagaaggaatatgaagcctccagtggtaagcagtaccagcaagacgaccaagaagaggcagttgggttggtcagttaggaggtcttgtcatccatcttggggttggcagagcaatagagacagacatcacatcaccatgggaagagaagagaataagaggaagatgaagattatattccatcagaagactggaaaaaggagattatggtgggaaggtctttgctggtgggaag

SEQ ID NO: 736074 - DNA, 2545 bp, Homo sapiens
gtaaccccattacctactcatagaggaggaactggaagccagagagggagatgccttattgacacagagcacaagtggcaggagctggcttcagacctcagtccatccggtgtggcagtccctcttcccaggaccaggtggagctggagagaaggaggaagaggagtctgtgaggtccagatggagatgctcggcaggccctttccaaaggtgggaggtgaggtcggcctggaaccctactggatgcttaagtgtcctgccgcactgctgatgaaagcaggtccccaccgcagtgtatatacattgtgtgtttgcatctaaaacgtctatagttgtttgaaatgtttaaatctttaacccatctgagatgtgttttcatgtatggtgtgacacagagctctaatttgctctttttgcagatatccagtttgctaagcaccatttattgttccaacaccatcttttctctcaattccctgtctagactccggttctgttgatctatttgtctatttctgagccaatagtacatattaatgagcaaagcttaataaagtgtcttatggcttgataagataagcactccacccttcccccaaggcctttattccttttttttctttttgagacggagtcttgctctgccgcccaggctggggttcagtggtgcagtctccgctcactgcaacctccgcctcccaggttcaagtgattctcctgcctcagcctcctgagtagctgggactacaggcacgcgccaccatgcccggctaatttttgtattttttggtgcagatagggtttcaccatgttggccaggctagtctcaaactcctgacctcaagagatccacccatctcggcctcccaaggtgctgggattataggcatgagccaccgtgcgcagccccttattcttttttaaaattgtcttggtcatattgcacatttactttttcaggtacattttataatcagcttgtcaaagttctgtgaacaaaatgtctgttggaagtttgagaagaattgcattgaaggggaaattaacatctttagaatataagttcttcccatctgtggacatggtgtctgtctctttttaatcagaattgtatttgttttgttttgttttgtttttaatgccttttaataaaggttggttgcttttgtcataaagatttttcacagttcttaataggtttattcctgaaaaccttattagttttgttgcttttgtgagtggaaaaactttcccttttttcattttgctttccaaattttaatcagtttactaatcactatgcttcattcacagacacacacacagcaaatgtgctttgtccctgggcacacaaatgaaaacacagcacacatgtaaatcagagctaattggctgaaaatgaattagaatttttgaattaaattttaattatacaagtaatacatgaatacattttcctttaaataaaattagagcattttaggtaaagaagtctctactggcctccccagcctgacctcaggccccttccccactttagaggcagctgctgttaggcatttgctgttgatccaaaatgttctcctatgcgcattgaaacatgtcctgtgttctattgttgcttttgtttgcttgcatagatgtggtggtgtacacactggaggtgctgctcctgagctcagggcaccttacgggactctcctcatgtcgcgtgtcacctgccgcagctggctccactgcccctttcagctggccgctggcaaccagaactgattgtgctatgatttatttagttgttgcttattgatcgactattaaaaggcttccagtcttgtttcaataagacaaacctgtaacagcatccttgtacatgccacttttgctcatgtacaagtgtttttctggagcagatacttagaaacagaattgatgggtcatagagtctacacatcttaaattctaatagtaactgctaaaatgttcttcaaagtacctttctgatttaatttcatgccagcagtatgtgtgtccatttctccagaccatctccaagttttacattttaaccaatctggtgggtgaaaaataatatcttgttttagtttgcatttttctgaattaccaggatggctgaagtctgtgtctcctatccatttatatttccttctctgcattacttgtccaaatcttttgcccatttcttttttttagggtacgttgtcttttccttattgattttttagaagttctttatgtattttgtatactttatgtgtattgcaaatattttctgtattgtgattcttgtcatttaattgtattgtgtctttggagaaatcttaaattttgatacagtcaaatcgatctattttaattttatgtctttttttcaattttatttaagaaagcctttcctgtactgaggtcataagcatttttcctgtatttcttctctaacatttatcatttacatatatgtgtgtgtgtgtgtgtgtgtatgccttttttaccacatgcaaaaaataaattccatatgcatacatga

SEQ ID NO: 736075 - DNA, 257 bp, Homo sapiens
tccagactagtattgtgaacaaagatatgcgagaagaaccttataaaagactgcccagcctggcatcctcgctgtggcagcagctcacatgtggtttaggagtagccccaccaggtggtagacaccctgtaaggtctggatgtaggtggactcctgggtcacttgtaagccaaggggattccctcttcttccctccctctacctttcccaccccctaaccctgcatatgtacttccccagctttcccgcttttatga

SEQ ID NO: 736076 - DNA, 1140 bp, Homo sapiens
  misc_feature (227)..(227): n is a, c, g, or t
tccagactagtattgtgaacaaagatatgcgagaagaaccttataaaagactgcccagcctggcatcctcgctgtggcagcagctcacatgtggtttaggagtagccccaccaggtggtagacaccctgtaaggtctggatgtaggtggactcctgggtcacttgtaagccaaggggattccctcttcttccctccctctacctttcccaccccctaaccctgcatntgggatttgtgtcccattctgttgcccttcagagcctcactttcaccactgtccttgtcttccctgtagtcatgaggggaagaaggaggtggagggctgcctgcagttagggagctggggcaaaggcaccagggaggctcccggtgctcagataggactggaagtctgggacacatcatttttcagagggggaagaggccagggaagagagaggctatttttaatagccaaatagatatgagcccattaaaaaccaggaggaaaggaataaaatgtttaataaaatctttaagtatctgcgtggaggacctctctaagctgaaaagcaaggaaatgacatcaagaagagaaaggccaacagcgaacagggataagtgatggcctgtgtcccaagtggcctggagtggacggcactagatggacagataggggcttagccttggatagcaagcatgcaacgacccacccacccaaacctgggaggcttagcactcggcaggtgacctcatctgttctcaagccatcactgggaggtactcaataaatatttgctggggtgaaataactgaaatgggaaattagatcaaagaggaaaaataccagcattaagctattgatgatacaagaagtgtccaggtgccgtggctcacgcctataatcccagcactttgggaggccaaggcgggtggatcacctgaggccaggagttcgagactagcctggccaacatggcaaaaccccatctctactaaaaatacaaaaaattagctgggcatggtggcatgcacctgtaaccccagctactcgggtgactgaggcatacgaatcgcttaaacccgggaggcggagctgcagtgagccgagatcatgctgctgcactccagcctcagtggcagagcgagaccctgtctca

SEQ ID NO: 736077 - DNA, 2537 bp, Homo sapiens
  misc_feature (227)..(227): n is a, c, g, or t
tccagactagtattgtgaacaaagatatgcgagaagaaccttataaaagactgcccagcctggcatcctcgctgtggcagcagctcacatgtggtttaggagtagccccaccaggtggtagacaccctgtaaggtctggatgtaggtggactcctgggtcacttgtaagccaaggggattccctcttcttccctccctctacctttcccaccccctaaccctgcatntgggatttgtgtcccattctgttgcccttcagagcctcactttcaccactgtccttgtcttccctgtagtcatgaggggaagaaggaggtggagggctgcctgcagttagggagctggggcaaaggcaccagggaggctcccggtgctcagataggactggaagtctgggacacatcatttttcagagggggaagaggccagggaagagagaggctatttttaatagccaaatagatatgagcccattaaaaaccaggaggaaaggaataaaatgtttaataaaatctttaagtatctgcgtggaggacctctctaagctgaaaagcaaggaaatgacatcaagaagagaaaggccaacagcgaacagggataagtgatggcctgtgtcccaagtggcctggagtggacggcactagatggacagataggggcttagccttggatagcaagcatgcaacgacccacccacccaaacctgggaggcttagcactcggcaggtgacctcatctgttctcaagccatcactgggaggtactcaataaatatttgctggggtgaaataactgaaatgggaaattagatcaaagaggaaaaataccagcattaagctattgatgatacaagaagtgtccaggtgctgggattataggcatgagccaccgtgcgcagccccttattcttttttaaaattgtcttggtcatattgcacatttactttttcaggtacattttataatcagcttgtcaaagttctgtgaacaaaatgtctgttggaagtttgagaagaattgcattgaaggggaaattaacatctttagaatataagttcttcccatctgtggacatggtgtctgtctctttttaatcagaattgtatttgttttgttttgttttgtttttaatgccttttaataaaggttggttgcttttgtcataaagatttttcacagttcttaataggtttattcctgaaaaccttattagttttgttgcttttgtgagtggaaaaactttcccttttttcattttgctttccaaattttaatcagtttactaatcactatgcttcattcacagacacacacacagcaaatgtgctttgtccctgggcacacaaatgaaaacacagcacacatgtaaatcagagctaattggctgaaaatgaattagaatttttgaattaaattttaattatacaagtaatacatgaatacattttcctttaaataaaattagagcattttaggtaaagaagtctctactggcctccccagcctgacctcaggccccttccccactttagaggcagctgctgttaggcatttgctgttgatccaaaatgttctcctatgcgcattgaaacatgtcctgtgttctattgttgcttttgtttgcttgcatagatgtggtggtgtacacactggaggtgctgctcctgagctcagggcaccttacgggactctcctcatgtcgcgtgtcacctgccgcagctggctccactgcccctttcagctggccgctggcaaccagaactgattgtgctatgatttatttagttgttgcttattgatcgactattaaaaggcttccagtcttgtttcaataagacaaacctgtaacagcatccttgtacatgccacttttgctcatgtacaagtgtttttctggagcagatacttagaaacagaattgatgggtcatagagtctacacatcttaaattctaatagtaactgctaaaatgttcttcaaagtacctttctgatttaatttcatgccagcagtatgtgtgtccatttctccagaccatctccaagttttacattttaaccaatctggtgggtgaaaaataatatcttgttttagtttgcatttttctgaattaccaggatggctgaagtctgtgtctcctatccatttatatttccttctctgcattacttgtccaaatcttttgcccatttcttttttttagggtacgttgtcttttccttattgattttttagaagttctttatgtattttgtatactttatgtgtattgcaaatattttctgtattgtgattcttgtcatttaattgtattgtgtctttggagaaatcttaaattttgatacagtcaaatcgatctattttaattttatgtctttttttcaattttatttaagaaagcctttcctgtactgaggtcataagcatttttcctgtatttcttctctaacatttatcatttacatatatgtgtgtgtgtgtgtgtgtgtatgccttttttaccacatgcaaaaaataaattccatatgcatacatga

SEQ ID NO: 736078 - DNA, 2452 bp, Homo sapiens
  misc_feature (227)..(227): n is a, c, g, or t
tccagactagtattgtgaacaaagatatgcgagaagaaccttataaaagactgcccagcctggcatcctcgctgtggcagcagctcacatgtggtttaggagtagccccaccaggtggtagacaccctgtaaggtctggatgtaggtggactcctgggtcacttgtaagccaaggggattccctcttcttccctccctctacctttcccaccccctaaccctgcatntgggatttgtgtcccattctgttgcccttcagagcctcactttcaccactgtccttgtcttccctgtagtcatgaggggaagaaggaggtggagggctgcctgcagttagggagctggggcaaaggcaccagggaggctcccggtgctcagataggactggaagtctgggacacatcatttttcagagggggaagaggccagggaagagagaggctatttttaatagccaaatagatatgagcccattaaaaaccaggaggaaaggaataaaatgtttaataaaatctttaagtatctgcgtggaggacctctctaagctgaaaagcaaggaaatgacatcaagaagagaaaggccaacagcgaacagggataagtgatggcctgtgtcccaagtggcctggagtggacggcactagatggacagataggggcttagccttggatagcaagcatgcaacgacccacccacccaaacctgggaggcttagcactcggcaggtgacctcatctgttctcaagccatcactgggaggtactcaataaatatttggtgctgggattataggcatgagccaccgtgcgcagccccttattcttttttaaaattgtcttggtcatattgcacatttactttttcaggtacattttataatcagcttgtcaaagttctgtgaacaaaatgtctgttggaagtttgagaagaattgcattgaaggggaaattaacatctttagaatataagttcttcccatctgtggacatggtgtctgtctctttttaatcagaattgtatttgttttgttttgttttgtttttaatgccttttaataaaggttggttgcttttgtcataaagatttttcacagttcttaataggtttattcctgaaaaccttattagttttgttgcttttgtgagtggaaaaactttcccttttttcattttgctttccaaattttaatcagtttactaatcactatgcttcattcacagacacacacacagcaaatgtgctttgtccctgggcacacaaatgaaaacacagcacacatgtaaatcagagctaattggctgaaaatgaattagaatttttgaattaaattttaattatacaagtaatacatgaatacattttcctttaaataaaattagagcattttaggtaaagaagtctctactggcctccccagcctgacctcaggccccttccccactttagaggcagctgctgttaggcatttgctgttgatccaaaatgttctcctatgcgcattgaaacatgtcctgtgttctattgttgcttttgtttgcttgcatagatgtggtggtgtacacactggaggtgctgctcctgagctcagggcaccttacgggactctcctcatgtcgcgtgtcacctgccgcagctggctccactgcccctttcagctggccgctggcaaccagaactgattgtgctatgatttatttagttgttgcttattgatcgactattaaaaggcttccagtcttgtttcaataagacaaacctgtaacagcatccttgtacatgccacttttgctcatgtacaagtgtttttctggagcagatacttagaaacagaattgatgggtcatagagtctacacatcttaaattctaatagtaactgctaaaatgttcttcaaagtacctttctgatttaatttcatgccagcagtatgtgtgtccatttctccagaccatctccaagttttacattttaaccaatctggtgggtgaaaaataatatcttgttttagtttgcatttttctgaattaccaggatggctgaagtctgtgtctcctatccatttatatttccttctctgcattacttgtccaaatcttttgcccatttcttttttttagggtacgttgtcttttccttattgattttttagaagttctttatgtattttgtatactttatgtgtattgcaaatattttctgtattgtgattcttgtcatttaattgtattgtgtctttggagaaatcttaaattttgatacagtcaaatcgatctattttaattttatgtctttttttcaattttatttaagaaagcctttcctgtactgaggtcataagcatttttcctgtatttcttctctaacatttatcatttacatatatgtgtgtgtgtgtgtgtgtgtatgccttttttaccacatgcaaaaaataaattccatatgcatacatga

SEQ ID NO: 736079 - DNA, 2826 bp, Homo sapiens
  misc_feature (516)..(516): n is a, c, g, or t
gaggagcccacctgtcctcccggaagagatggcccctttcacttgagattccaggagattgcccagggagaaggtgtggagggaggggttttgagaaggaatatgaagcctccagtggtaagcagtaccagcaagacgaccaagaagaggcagttgggttggtcagttaggaggtcttgtcatccatcttggggttggcagagcaatagagacagacatcacatcaccatgggaagagaagagaataagaggaagaagtggagatgagaggaacaggtcacctcttccaactatgaagggaaagaggtggatgagtggaagtgacccgtttggactggtctttttttatgtagctaatatttggcctgtgcttttctggatcaggccctgatgagcattttgtcaacaatatctccctgaaaccttaagagaacatcctagggttgacgtggttttgcccactatacagaagagcttcaaaagatgaaggcactttcccaagatggggggcagagntgggatttgtgtcccattctgttgcccttcagagcctcactttcaccactgtccttgtcttccctgtagtcatgaggggaagaaggaggtggagggctgcctgcagttagggagctggggcaaaggcaccagggaggctcccggtgctcagataggactggaagtctgggacacatcatttttcagagggggaagaggccagggaagagagaggctatttttaatagccaaatagatatgagcccattaaaaaccaggaggaaaggaataaaatgtttaataaaatctttaagtatctgcgtggaggacctctctaagctgaaaagcaaggaaatgacatcaagaagagaaaggccaacagcgaacagggataagtgatggcctgtgtcccaagtggcctggagtggacggcactagatggacagataggggcttagccttggatagcaagcatgcaacgacccacccacccaaacctgggaggcttagcactcggcaggtgacctcatctgttctcaagccatcactgggaggtactcaataaatatttgctggggtgaaataactgaaatgggaaattagatcaaagaggaaaaataccagcattaagctattgatgatacaagaagtgtccaggtgctgggattataggcatgagccaccgtgcgcagccccttattcttttttaaaattgtcttggtcatattgcacatttactttttcaggtacattttataatcagcttgtcaaagttctgtgaacaaaatgtctgttggaagtttgagaagaattgcattgaaggggaaattaacatctttagaatataagttcttcccatctgtggacatggtgtctgtctctttttaatcagaattgtatttgttttgttttgttttgtttttaatgccttttaataaaggttggttgcttttgtcataaagatttttcacagttcttaataggtttattcctgaaaaccttattagttttgttgcttttgtgagtggaaaaactttcccttttttcattttgctttccaaattttaatcagtttactaatcactatgcttcattcacagacacacacacagcaaatgtgctttgtccctgggcacacaaatgaaaacacagcacacatgtaaatcagagctaattggctgaaaatgaattagaatttttgaattaaattttaattatacaagtaatacatgaatacattttcctttaaataaaattagagcattttaggtaaagaagtctctactggcctccccagcctgacctcaggccccttccccactttagaggcagctgctgttaggcatttgctgttgatccaaaatgttctcctatgcgcattgaaacatgtcctgtgttctattgttgcttttgtttgcttgcatagatgtggtggtgtacacactggaggtgctgctcctgagctcagggcaccttacgggactctcctcatgtcgcgtgtcacctgccgcagctggctccactgcccctttcagctggccgctggcaaccagaactgattgtgctatgatttatttagttgttgcttattgatcgactattaaaaggcttccagtcttgtttcaataagacaaacctgtaacagcatccttgtacatgccacttttgctcatgtacaagtgtttttctggagcagatacttagaaacagaattgatgggtcatagagtctacacatcttaaattctaatagtaactgctaaaatgttcttcaaagtacctttctgatttaatttcatgccagcagtatgtgtgtccatttctccagaccatctccaagttttacattttaaccaatctggtgggtgaaaaataatatcttgttttagtttgcatttttctgaattaccaggatggctgaagtctgtgtctcctatccatttatatttccttctctgcattacttgtccaaatcttttgcccatttcttttttttagggtacgttgtcttttccttattgattttttagaagttctttatgtattttgtatactttatgtgtattgcaaatattttctgtattgtgattcttgtcatttaattgtattgtgtctttggagaaatcttaaattttgatacagtcaaatcgatctattttaattttatgtctttttttcaattttatttaagaaagcctttcctgtactgaggtcataagcatttttcctgtatttcttctctaacatttatcatttacatatatgtgtgtgtgtgtgtgtgtgtatgccttttttaccacatgcaaaaaataaattccatatgcatacatga

SEQ ID NO: 736080 - DNA, 1754 bp, Homo sapiens
  misc_feature (694)..(694): n is a, c, g, or t
ctgcgagagggagggaggaaagggctgtgcaataaagtcctctcccattatcttactcaacacaatttattgagcaaatactacgtgttctaggccctgtacaggccatctcacttgatggccacaacagtcctgggaagcagacaaaccaagaatgctaatgcccatctgacatcagagacggcagtgctccccagacctctcacagcaagctggatggacaggcagggccagaagagtcctccagccaagcctcctccttggttcttgtacccaaaggtagagaaactgcaggtcttctgggtctgagcctggggcaggggttctggctggacgaaaaggggcagggaagcagcaggagccagagaccacaggctgagctggagcccacatggttcctaagggcagaacaggctctgaggaaagatgtgaacagctggaaggctgacagtgaggtctcagcagtgtggtgcacccctccccagcacatccgagtccctggggtcccaggtaccataggtactgcaagatttcccaagagacagcaccagcaacctgggcctgaccctgtacaaccgccaaaccatcacgagccccgcccaggcttgtgagaaggacatgcatggatcaagaccttgcccttgacccatctgcttctcagatgggctcccaatcaccagaggaagttgctgtnagcccactttccagactgcccccacactggggctctaagtttcaggtctgagattttatgctctgtgatcccccacttggggttcccagactccaagctcctggctcctgtgttcagtggctgaattcaacgtccgagattcggaatatgggctccagcctgcagaaactcttctccaggcattgtggtttgtgcctcctagtgttggctccctcatgaaaagagggtcaacacccttggcccccagccaagatctctgctcaatgtccatacaaggaggaagccaaaaccaagtgaggtgctggagccacattcaaatgtggttgataatcttggggcaggccagctctgatgtggatgaaagctgagccaactgtcgccacagctgcccagctgggtccgctgctcccctggctggctgttcagctgtctactaagcccaaaaaaaatactatgcctcactagcagaggctagacccagaaagagggaacaatgaggacccctcccctcccagaggaaagagctgagccactctccccatccagggaacagtaggtccaggctggatgctggtatgatgggaactgcccttttcacctgccagggagttcctaaagctgatcttcctggggttctgaaggttgcgacctaggttaatgagaccaaattctaggaaccactgcccaggccaaccaccgccagtgctgcagagatcaaagaaatccacagccacaggaaaaggagcttctttggacatgcccagctccaaactgtcccagggggaactggcacagcccttacatagcccaccccctcttggcctcaccgtggcctggaaattggccagagggtccacatcctgcccaaaccactctcctctcgtcccaaggcaaaggtgatgccctgaggcctagggctggataaagcccagctctggatgctgctaacccactctgctgccccaccccatcctccaatttttatactaggctctttgccattgtgacgtcccatgacatagtctgatgcacgataaaacaattatttctttatcttgca

SEQ ID NO: 736081 - DNA, 654 bp, Homo sapiens
tgttggccaggtgtggtagctcacccctataatctcagcactttaggaggccaagggccacagtgagaggattgcttgaggccagggattcaagaccagcctgggcagcatagtgagacccctgactctgcaaaaagttttaaaaattagctgggcatggtggcacacacctgtaattccagcttctttgaaagctgagttgggaggaccatttgagcccaggaggcctaggttatagtgagctatgaataaaactctccataaaatagattattgagtatactgtaccattataacttttacttggtaaataagccagtaatagtctactgaaaattaaattactttaaaaaataaaacaattatgttactatctgctataaagaaaataataattgtgttctttaaatttttccagaatgctttttaaggaaagccggagtgttcataatcatcttacttctgctccgtgagtaaatgcagactccagattgcttcatttattcacattatgtgctttagtgaacaaaagtatcatttattaaatgctagttggaataggacttaaaaagatcattttgaccattgactatttagacttcagaacacatttatctattgaaataattgtcagggtactctctaaacacctac

SEQ ID NO: 736082 - DNA, 398 bp, Homo sapiens; identical to SEQ ID NO: 302986

SEQ ID NO: 736083 - DNA, 630 bp, Homo sapiens; identical to SEQ ID NO: 302980

SEQ ID NO: 736084 - DNA, 635 bp, Homo sapiens
atgctttaaaattaaattatgtagatattggaaaattggtatttacatcatagaattatattttcttataaaaacttctctctacaaatgtgggctaataatttactgtttctgggagaaggttatatttctcggataggttaatattaatagctgttacctttcctaagatgtcatttttaacaaaatctatagaatttgtatacattgtctttgggaaagatatagtgtccttggataagtgtttcttgaagtgtggcccaaagacttacttacaccagaatcaccagaatgcttgtttaaaatgcaaattataaggttctaactcagataactgaatcgaaaccggaggtgagagtgctcttgaaccccaaggatctgcagttataacaaacgattgtaatgcacactgacatttgagaaaaaccactgctgatgctggattgctaacatcaaagagtaaagcattgttacttacataaatgatcattcttttatcattttgcaggtccccaaaataaaagaagatgatattgagatgaagaagcggaagcggaaagaggaaggggaaaaggagaagaagccaaggaaaaaagttcccaaacaactggggtacgttaaattaaacctaagaa

SEQ ID NO: 736085 - DNA, 648 bp, Homo sapiens; identical to SEQ ID NO: 302979

SEQ ID NO: 736086 - DNA, 396 bp, Homo sapiens
gcggccgccgagggagacggtgcgcctggagctggtgcttaaggaccccaccgacgagagctgcgtggagttcagttacccggagctgctgctgtgcggagaacaacggaagaagctcattcacacagaagacccatttaatgatgaacatcaggagaggcaagaggtggaaatgttggctaagaagtttgaaatgaaatatggtgggaaaccccgtaaacaccggaaggatcggctacaagatttaattgatataggctttggctatgatgagacagatccatttattgataactcagaggcttatgatgaattagttcccgcttctctaacaacaaaatatggaggcggaggtggaaagggcccagttaccggtaccggatccacctcgtgccg

SEQ ID NO: 736087 - DNA, 2117 bp, Homo sapiens
gcggccgccgagggagacggtgcgcctggagctggtgcttaaggaccccaccgacgagagctgcgtggagttcagttacccggagctgctgctgtgcggagaacaacggaagaagctcattcacacagaagacccatttaatgatgaacatcaggagaggcaagaggtggaaatgttggctaagaagtttgaaatgaaatatggtgggaaaccccgtaaacaccggaaggatcggctacaagatttaattgatataggctttggctatgatgagacagatccatttattgataactcagaggcttatgatgaattagttcccgcttctctaacaacaaaatatggaggcttttatatcaacactggcactctacagtttcgccaagcttcagatactgaagaagatgatattacagacaaccaaaagcacaagccacccaaggtccccaaaataaaagaagatgatattgagatgaagaagcggaagcggaaagaggaaggggaaaaggagaagaagccaaggaaaaaagttcccaaacaactgggagttgtggctctaaattcacacaagtctgaaaaaaagaagaaacgttataaagattctctttctctagctgccatgattagaaaattccagaaagagaaggatgcattaaagaaggagtctaaccccaaagtcccagtgaccttgtcaaccccttctctgaataaacccccatgtgctgctgcagcactggggaatgacgtcccggacttaaatctgagcagcggtgatccagaccttcccatttttgttagcacaaatgaacatgagctgtttcaggaagctgaaaatgccctagagatgctagatgattttgacttcgacagattactggatgctgcttctgatggtagccccctatctgagtcggggggtgaaaatggaaccaccacccagccaacctacacttctcaggttatgcccaaagtggtacctacactcccagagggtctacctgtacttcttgaaaaacgtatcgaagaccttcgtgtagctgccaaactttttgatgaagaaggaaggaaaaaattctttacacaggatatgaataatattcttctggacattgagttacagctacaagaactaggccctgtcattcgcagtggtgtctactcccaccttgaagcttttgtgccatgcaataaagaaacactagtaaaacgtctgaagaagttacatctcaatgtccaggatgatcgtttaagagaacctctgcaaaaactgaaactggctgttagcaatgtcatgcctgaacagctatttaaataccaggaggactgccaggctcgtagtcaagctaagtgtgccaaattgcagacagatgaagaacgagaaaaaaatggatctgaagaggatgatgatgagaaaccaggaaaacgtgtcataggaccaagaaagaaattccactgggatgacactatcagaactttgttatgtaaccttgttgagatcaaattgggatgctatgagttagaaccaaataaaagccagtctgctgaagattatcttaagtcttttatggagacagaagtgaagcccctgtggcctaagggctggatgcaggcaagaatgctttttaaggaaagccggagtgttcataatcatcttacttctgctccggcaaagaaaaaggtgattcctgcacctaaacccaaagtaaaggtaagtactgaaacaaaatatttaattagttatagttggtgaatgttgaaatacattcctaagatgaaaaagatgtatggtatttagcagaggtcagtaggcactataagatagatgttttcaacttcataataatcttagtacttttgtatttgggagaatagattcctgtgtagcagtggggaatatgcatacaccaattgtgaagcttaactttattaatacttggaaatgctaggtaaaatacaacaaatattctttcatagcataggtgagattgaaaaatatgtaagaaaaattcataagaccagaaacaaaaaaggagctgacagtgttaatctgtcgcttacactttggttgcccttggaggcatttggcactttctacccatcactttatggtttctttt

SEQ ID NO: 736088 - DNA, 2059 bp, Homo sapiens
gcggccgccgagggagacggtgcgcctggagctggtgcttaaggaccccaccgacgagagctgcgtggagttcagttacccggagctgctgctgtgcggagaacaacggaagaagctcattcacacagaagacccatttaatgatgaacatcaggagaggcaagaggtggaaatgttggctaagaagtttgaaatgaaatatggtgggaaaccccgtaaacaccggaaggatcggctacaagatttaattgatataggctttggctatgatgagacagatccatttattgataactcagaggcttatgatgaattagttcccgcttctctaacaacaaaatatggaggcttttatatcaacactggcactctacagtttcgccaagcttcagatactgaagaagatgatattacagacaaccaaaagcacaagccacccaaggtccccaaaataaaagaagatgatattgagatgaagaagcggaagcggaaagaggaaggggaaaaggagaagaagccaaggaaaaaagttcccaaacaactgggagttgtggctctaaattcacacaagtctgaaaaaaagaagaaacgttataaagattctctttctctagctgccatgattagaaaattccagaaagagaaggatgcattaaagaaggagtctaaccccaaagtcccagtgaccttgtcaaccccttctctgaataaacccccatgtgctgctgcagcactggggaatgacgtcccggacttaaatctgagcagcggtgatccagaccttcccatttttgttagcacaaatgaacatgagctgtttcaggaagctgaaaatgccctagagatgctagatgattttgacttcgacagattactggatgctgcttctgatggtagccccctatctgagtcggggggtgaaaatggaaccaccacccagccaacctacacttctcaggttatgcccaaagtggtacctacactcccagagggtctacctgtacttcttgaaaaacgtatcgaagaccttcgtgtagctgccaaactttttgatgaagaaggaaggaaaaaattctttacacaggatatgaataatattcttctggacattgagttacagctacaagaactaggccctgtcattcgcagtggtgtctactcccaccttgaagcttttgtgccatgcaataaagaaacactagtaaaacgtctgaagaagttacatctcaatgtccaggatgatcgtttaagagaacctctgcaaaaactgaaactggctgttagcaatgtcatgcctgaacagctatttaaataccaggaggactgccaggctcgtagtcaagctaagtgtgccaaattgcagacagatgaagaacgagaaaaaaatggatctgaagaggatgatgatgagaaaccaggaaaacgtgtcataggaccaagaaagaaattccactgggatgacactatcagaactttgttatgtaaccttgttgagatcaaattgggatgctatgagttagaaccaaataaaagccagtctgctgaagattatcttaagtcttttatggagacagaagtgaagcccctgtggcctaagggctggatgcaggcaagaatgctttttaaggaaagccggagtgttcataatcatcttacttctgctccggcaaagaaaaaggtgattcctgcacctaaacccaaagtaaaggaggtgatggtaaagacccttcctctccattctttccccactatgcttaaggagtgtagtccaaaaaaggaccagaaaactccaacatccctggtggcttcggttagcggtcctccaacgagctccagcacagctgccattgctgcagctagctctagctctgcaccagcccaaggaaaaccatctgcctcgacgactcactagatgaagacctttctttccattcaccttcactggatcttgtttctgaagctttagcggttatcaacaatgggaacaagggccctccagttggctcaaggataagcatgccaaccacaaagcctcgtccaggactgagagaagaaaaat

SEQ ID NO: 736089 - DNA, 1904 bp, Homo sapiens
atcacacagaagtgtagttttgcttcccttaaaatcttctgtgctctgcctattcattcctccttccctcctaatcactggcacctactggtcttaactgtcttcagagttctaccttttccagaatgtcttatagagaaaatcatatatatgatgaattagttcccgcttctctaacaacaaaatatggaggcttttatatcaacactggcactctacagtttcgccaagcttcagatactgaagaagatgatattacagacaaccaaaagcacaagccacccaaggtccccaaaataaaagaagatgatattgagatgaagaagcggaagcggaaagaggaaggggaaaaggagaagaagccaaggaaaaaagttcccaaacaactgggagttgtggctctaaattcacacaagtctgaaaaaaagaagaaacgttataaagattctctttctctagctgccatgattagaaaattccagaaagagaaggatgcattaaagaaggagtctaaccccaaagtcccagtgaccttgtcaaccccttctctgaataaacccccatgtgctgctgcagcactggggaatgacgtcccggacttaaatctgagcagcggtgatccagaccttcccatttttgttagcacaaatgaacatgagctgtttcaggaagctgaaaatgccctagagatgctagatgattttgacttcgacagattactggatgctgcttctgatggtagccccctatctgagtcggggggtgaaaatggaaccaccacccagccaacctacacttctcaggttatgcccaaagtggtacctacactcccagagggtctacctgtacttcttgaaaaacgtatcgaagaccttcgtgtagctgccaaactttttgatgaagaaggaaggaaaaaattctttacacaggatatgaataatattcttctggacattgagttacagctacaagaactaggccctgtcattcgcagtggtgtctactcccaccttgaagcttttgtgccatgcaataaagaaacactagtaaaacgtctgaagaagttacatctcaatgtccaggatgatcgtttaagagaacctctgcaaaaactgaaactggctgttagcaatgtcatgcctgaacagctatttaaataccaggaggactgccaggctcgtagtcaagctaagtgtgccaaattgcagacagatgaagaacgagaaaaaaatggatctgaagaggatgatgatgagaaaccaggaaaacgtgtcataggaccaagaaagaaattccactgggatgacactatcagaactttgttatgtaaccttgttgagatcaaattgggatgctatgagttagaaccaaataaaagccagtctgctgaagattatcttaagtcttttatggagacagaagtgaagcccctgtggcctaagggctggatgcaggcaagaatgctttttaaggaaagccggagtgttcataatcatcttacttctgctccggcaaagaaaaaggtgattcctgcacctaaacccaaagtaaaggaggtgatggtaaagacccttcctctccattctttccccactatgcttaaggagtgtagtccaaaaaaggaccagaaaactccaacatccctggtggcttcggttagcggtcctccaacgagctccagcacagctgccattgctgcagctagctctagctctgcaccagcccaaggaaaaccatctgcctcgacgactcactagatgaagacctttctttccattcaccttcactggatcttgtttctgaagctttagcggttatcaacaatgggaacaagggccctccagttggctcaaggataagcatgccaaccacaaagcctcgtccaggactgagagaagaaaaat

SEQ ID NO: 736090 - DNA, 1083 bp, Homo sapiens
attcaagttagatatgacaccagattcttttgtctgctcgtagaagtctgcaacttcaatgctgccaaactttttgatgaagaaggaaggaaaaaattctttacacaggatatgaataatattcttctggacattgagttacagctacaagaactaggccctgtcattcgcagtggtgtctactcccaccttgaagcttttgtgccatgcaataaagaaacactagtaaaacgtctgaagaagttacatctcaatgtccaggatgatcgtttaagagaacctctgcaaaaactgaaactggctgttagcaatgtcatgcctgaacagctatttaaataccaggaggactgccaggctcgtagtcaagctaagtgtgccaaattgcagacagatgaagaacgagaaaaaaatggatctgaagaggatgatgatgagaaaccaggaaaacgtgtcataggaccaagaaagaaattccactgggatgacactatcagaactttgttatgtaaccttgttgagatcaaattgggatgctatgagttagaaccaaataaaagccagtctgctgaagattatcttaagtcttttatggagacagaagtgaagcccctgtggcctaagggctggatgcaggcaagaatgctttttaaggaaagccggagtgttcataatcatcttacttctgctccggcaaagaaaaaggtgattcctgcacctaaacccaaagtaaaggaggtgatggtaaagacccttcctctccattctttccccactatgcttaaggagtgtagtccaaaaaaggaccagaaaactccaacatccctggtggcttcggttagcggtcctccaacgagctccagcacagctgccattgctgcagctagctctagctctgcaccagcccaaggaaaaccatctgcctcgacgactcactagatgaagacctttctttccattcaccttcactggatcttgtttctgaagctttagcggttatcaacaatgggaacaagggccctccagttggctcaaggataagcatgccaaccacaaagcctcgtccaggactgagagaagaaaaat

SEQ ID NO: 736091 - DNA, 497 bp, Homo sapiens
tagtaaagtgtgtttttcatttcagcaactgttaattctgttggtaccaagcctcccgacagcctattgagtacacagtcgatatttgttactgaatgaacatgggtgcatttggagttcagctccgtaataactggtgtttgccatcacaggacttgctgcacgtgaagagcgtgaaggatattttagctctcatcttggcttttggaaattatatgaatggaggaaataggactcggggacaagccgatggatatagcttagaaattctgcccaaactcaaggatgtcaaaagtcgggtatttatttttcataataagttcccatgatctgccattattttctttctttacctttaattttaaaaaacgtattccagattgttccatttatctctatcctccccttaacaacatttatattagagcatgcatttttttgtttgctttcttttcactttcgaataaagagttttgtttggttttttttttttcaaa

SEQ ID NO: 736092 - DNA, 1767 bp, Homo sapiens
aagttatcacaagatctgatggttttgtaaggggcttctccctttgcttgactctcattcttctccttcctgccaccatgtgaagaaggacatgtttgcttccccttccaccacgactgcacagtttgaacttcgggcatttcatatccggggcgagcatgcaatgataacagcgagactagaagaaaccattgaaaatctgaaacacgagctagaacacagatggcgagggggttgtgaagagaggaaagatgtgtgcatttccaccgatgatgactgccctccaaagaccttcagaaatgtgtgcgtccagacagacagagagaccttcctcaagccctgtgaaagtgaaagcaagacaaccagaagtaatcaattagtacccaaaaagctgaatatctcctctttaagccagctctcacccccaaatgaccacaaagacatccatgcagcactccagccaatggagggcatggcatcaaatcagcagaaggcattgcctccgcctcccgcatccatccctccccctccgcccctcccctcaggacttggatctttgtctcccgcacctccaatgccacctgtgagtgctgggccaccgctaccacctccgcctcctccaccgccacctctacctccaccttcaagtgctggacctccaccacccccacccccacccccacttcctaactcccctgccccacccaaccctggagggcctcctcctgctccaccacccccaggacttgcacccccacctccccctggactcttctttggacttggctcttcttccagtcaatgtcctcgaaaaccagccatcgagcccagttgtcccatgaagcctttatattggactaggatacaaataagtgataggagccaaaatgctacaccaaccttatgggactccttagaagaacctgacattcgggaccccagtgaatttgagtatttattctccaaagacacaactcaacagaagaaaaaacctctgtcagagacttatgagaagaaaaacaaggtcaaaaagatcatcaaattgttggatggaaaacgatctcaaactgtgggaatcttgatatctagtttacatttagaaatgaaggatatccaacaggccattttcaatgtggatgactccgtggttgatctggagaccctggcagccttatatgaaaacagagcccaagaggatgagctggttaaaataagaaagtattacgagacatccaaagaagaagaactgaagctgctggataaacctgagcaatttttacatgagttagcccagattcctaattttgctgaacgtgcccagtgcataatcttcagatctgtcttttctgagggtatcacctccttgcacagaaaggtagagatcatcacgcgagcttctaaggacttgctgcacgtgaagagcgtgaaggatattttagctctcatcttggcttttggaaattatatgaatggaggaaataggactcggggacaagccgatggatatagcttagaaattctgcccaaactcaaggatgtcaaaagtcgggtatttatttttcataataagttcccatgatctgccattattttctttctttacctttaattttaaaaaacgtattccagattgttccatttatctctatcctccccttaacaacatttatattagagcatgcatttttttgtttgctttcttttcactttcgaataaagagttaccgagagccctttcttttctcttttaatgggcggcacgtgtga

SEQ ID NO: 736093 - DNA, 1894 bp, Homo sapiens
aagttatcacaagatctgatggttttgtaaggggcttctccctttgcttgactctcattcttctccttcctgccaccatgtgaagaaggacatgtttgcttccccttccaccacgactgcacagtttgaacttcgggcatttcatatccggggcgagcatgcaatgataacagcgagactagaagaaaccattgaaaatctgaaacacgagctagaacacagatggcgagggggttgtgaagagaggaaagatgtgtgcatttccaccgatgatgactgccctccaaagaccttcagaaatgtgtgcgtccagacagacagagagaccttcctcaagccctgtgaaagtgaaagcaagacaaccagaagtaatcaattagtacccaaaaagctgaatatctcctctttaagccagctctcacccccaaatgaccacaaagacatccatgcagcactccagccaatggagggcatggcatcaaatcagcagaaggcattgcctccgcctcccgcatccatccctccccctccgcccctcccctcaggacttggatctttgtctcccgcacctccaatgccacctgtgagtgctgggccaccgctaccacctccgcctcctccaccgccacctctacctccaccttcaagtgctggacctccaccacccccacccccacccccacttcctaactcccctgccccacccaaccctggagggcctcctcctgctccaccacccccaggacttgcacccccacctccccctggactcttctttggacttggctcttcttccagtcaatgtcctcgaaaaccagccatcgagcccagttgtcccatgaagcctttatattggactaggatacaaataagtgataggagccaaaatgctacaccaaccttatgggactccttagaagaacctgacattcgggaccccagtgaatttgagtatttattctccaaagacacaactcaacagaagaaaaaacctctgtcagagacttatgagaagaaaaacaaggtcaaaaagatcatcaaattgttggatggaaaacgatctcaaactgtgggaatcttgatatctagtttacatttagaaatgaaggatatccaacaggccattttcaatgtggatgactccgtggttgatctggagaccctggcagccttatatgaaaacagagcccaagaggatgagctggttaaaataagaaagtattacgagacatccaaagaagaagaactgaagctgctggataaacctgagcaatttttacatgagttagcccagattcctaattttgctgaacgtgcccagtgcataatcttcagatctgtcttttctgagggtatcacctccttgcacagaaaggtagagatcatcacgcgagcttctaagcaactgttaattctgttggtaccaagcctcccgacagcctattgagtacacagtcgatatttgttactgaatgaacatgggtgcatttggagttcagctccgtaataactggtgtttgccatcacaggacttgctgcacgtgaagagcgtgaaggatattttagctctcatcttggcttttggaaattatatgaatggaggaaataggactcggggacaagccgatggatatagcttagaaattctgcccaaactcaaggatgtcaaaagtcgggtatttatttttcataataagttcccatgatctgccattattttctttctttacctttaattttaaaaaacgtattccagattgttccatttatctctatcctccccttaacaacatttatattagagcatgcatttttttgtttgctttcttttcactttcgaataaagagttaccgagagccctttcttttctcttttaatgggcggcacgtgtga

SEQ ID NO: 736094 - DNA, 956 bp, Homo sapiens
gaacattcagctgaagcagagcctggtgcattttgaaaccaggatgaggacccaggaggacctgacccagggtctgcttcttattgactttgaacagctgaagattgagaaccaaaccttcaatgagaaaattgaggaacgaaatgaggaacttttaaaacttcgcagcaaggtgaccaacagtgtgcaagtaataacccacgtgaaggaaaagctgcacttcatggacatggagaacgcgtgcaaaaagacacagctggcagaaatcgaggcccaggccgccctaggaagagacatcctgaccaagacgaagcaagcccgagaggggctgcggacggacaacatcagactgaatcagaagtgcggccttctaggcaaggactcacttcttcgggacttggaagaaaaggtggacaagaccgaactgcttcaccggcgcctggaatccctgaagcgccaccacgctagcctcactttgtcctgcagaggcgtgaggcagaagatcagggaggccaaagcctttctcccttcttgaccagatcgatgagaagagtctgcaaaacacttcatcctcaggacgtgctgtcctgctttattttaccttcgttgctattaaaaaggcctgtgtcatttgggacgggactctattttgtatttatctcaaaacgttttagcttccaaatcagtgctgagcccaaacctgggttaggagttttatctgggattgagcaaaaataggtccagaaaagcaaacaaagggtgatttaatgtaactgacttctcatgaaaaactgtcaaaagtctcaagtctgagcaattctataatttcagtgatgtaatactaaagagtactgttcctctttcatatgtaggagggtttaaaagttcagcgaatgggcaaggtacaaaaaaaccctgtgcattaagctaattattaaattctttggatttattaa

SEQ ID NO: 736095 - DNA, 907 bp, Homo sapiens; identical to SEQ ID NO: 384885

SEQ ID NO: 736096 - DNA, 663 bp, Homo sapiens; identical to SEQ ID NO: 77245

SEQ ID NO: 736097 - DNA, 451 bp, Homo sapiens; identical to SEQ ID NO: 77247

SEQ ID NO: 736098 - DNA, 1043 bp, Homo sapiens
tgctgggaggagctgcccaggtgtgctgaggggcctgtactcaggaagagaaacagggaatcctccacagcactagaaaaacaccccaactcaccaatgacagcaaagcagatattggaagtcattcagaaagaagggttaaaagaaacaagtttcagaccccggcatggcttggagacagcgttggtgtgtatgaaggatcttcctccaatgaaggatttgggacaactttccatgatgattatattagagcctcagctgctttcgtgttggtcatgaggtgatgctgaaccgaatgcttgaactagcaggagtggctgggattgcattggagtggttccgttcattccttccggtttgttcgaagcaggtaactgatgaagcatcttccactcgagattcaagccttactaacacagcagtgcaaagcaagttagtgtcttccttccagcagcacaccaaaaaggctcttaaacaggctttgaggcagcagcagaaaagaagaaatggagtctcaatgatggtaaacaagactgttcctcgtgttgttttgacaccattaaaggtgtctgatgagcagtcggattcgccttcaggatctgaatctaaaaatggtgaagcagacagttcagataaagaaatgaaacatgggcaaaaatctcccactggaaaacaaacaagtcagcacttaaaacgattaaaaaagtctggtttagggcacttgaaatggaccaaagctgaggacattgacatagaaaccccaggatctattcttgtcaacactaacttgagggcattaataaataaacatacgtttgcttccttacctcagcattttcaacaatacctcctgcttttgctcccagaagtggataggcagatgggaagtgatggaattttacgcctcagtacttcagctctaaataatgaattctttgcatatgcagcacaagggtggaaacagcgactggcagaaggtaaatttgtattttctattattatgtgacatattggagtacacataccgtactgagcttgtacct

SEQ ID NO: 736099 - DNA, 313 bp, Homo sapiens; identical to SEQ ID NO: 449285

SEQ ID NO: 736100 - DNA, 4082 bp, Homo sapiens
attgatgttcctttcctcacagcaacagataccacactacagtgggacaatttagacactcctgttaacctaacgtatgggtcatcttactctggaagactatcagatctggagtgtgaaaaatgttcttgccaatgagtttttgaacctccttttccaggtgtgtcacatagttctggggttaagaccagctactccggaagaagaaggacaaattattagaggatggttagaacgagagagcaggtatggtctgcaagcaggacacaactggtttatcatctccatgcagtggtggcaacagtggaaagaatatgtcaaatacgatgccaaccctgtggtaattgagccatcatctgttttgaatggaggaaaatactcatttggaactgcagcccatcctatggagcaggtcgaagatagaattggaagcagcctcagttacgtgaatactacagaagagaaattttcagacaacatttctactgcatctgaagcctcagaaactgctggcagcggctttctgtattctgccacaccaggggcagatgtttgctttgctcgacaacataacacttctgacaataacaaccagtgtttgctgggagccaatgggaatattttgttgcaccttaaccctcagaaaccaggggctattgataatcagccattagtaactcaagaaccagtaaaggctacatcattaacactagaaggaggacgattaaaacgaactccacagctgattcatggaagagactatgaaatggtcccagaacctgtgtggagagcactttatcactggtatggagcaaacctggccttacctagaccagttatcaagaacagcaagacagacatcccagagctggaattatttccccgctatcttctcttcctgagacagcagcctgccactcggacacagcagtctaacatctgggtgaatatgggaaatgtaccttctccgaatgcacctttaaagcgggtattagcctatacaggctgttttagtcgaatgcagaccatcaaggaaattcacgaatatctatctcaaaggctgcgcattaaagaggaagatatgcgcctgtggctatacaacagtgagaactaccttactcttctggatgatgaggatcataaattggaatatttgaaaatccaggatgaacaacacctggtaattgaagttcgcaacaaagatatgagttggcctgaggagatgtcttttatagcaaatagtagtaaaatagatagacacaaggttcccacagaaaagggagccacaggtctaagcaatctgggaaacacatgcttcatgaactcaagcatccagtgtgttagtaacacacagccactgacacagtattttatctcagggagacatctttatgaactcaacaggacaaatcccattggtatgaaggggcatatggctaaatgctatggtgatttagtgcaggaactttggagtggaactcagaagaatgttgccccattaaagcttcggtggaccatagcaaaatatgctcccaggtttaatgggtttcagcaacaggactcccaagaacttctggcttttctcttggatggtcttcatgaagatcttaatcgagtccatgaaaagccatatgtggaactgaaggacagtgatgggcgaccagactgggaagtagctgcagaggcctgggacaaccatctaagaagaaatagatcaattgttgtggatttgttccatgggcagctaagatctcaagtaaaatgcaagacatgtgggcatataagtgtccgatttgaccctttcaattttttgtctttgccactaccaatggacagttatatgcacttagaaataacagtgattaagttagatggtactacccctgtacggtatggactaagactgaatatggatgaaaagtacacaggtttaaaaaaacagctgagtgatctctgtggacttaattcagaacaaatccttctagcagaagtacatggttccaacataaagaactttcctcaggacaaccaaaaagtacgactctcagtgagtggatttttgtgtgcatttgaaattcctgtccctgtgtctccaatttcagcttctagtccaacacagacagatttctcctcttcgccatctacaaatgaaatgttcaccctaactaccaatggggacctaccccgaccaatattcatccccaatggaatgccaaacactgttgtgccatgtggaactgagaagaacttcacaaatggaatggttaatggtcacatgccatctcttcctgacagcccctttacaggttacatcattgcagtccaccgaaaaatgatgaggacagaactgtatttcctgtcatctcagaagaatcgccccagcctctttggaatgccattgattgttccatgtactgtgcatacccggaagaaagacctatatgatgcggtttggattcaagtatcccggttagcgagcccactcccacctcaggaagctagtaatcatgcccaggattgtgacgacagtatgggctatcaatatccattcactctacgagttgtgcagaaagatgggaactcctgtgcttggtgcccatggtatagattttgcagaggctgtaaaattgattgtggggaagacagagctttcattggaaatgcctatatcgctgtggattgggatcccacagcccttcaccttcgctatcaaacatcccaggaaagggttgtagatgagcatgagagtgtggagcagagtcggcgagcgcaagccgagcccatcaacctggacagctgtctccgtgctttcaccagtgaggaagagctaggggaaaatgagatgtactactgttccaagtgtaagacccactgcttagcaacaaagaagctggatctctggaggcttccacccatcctgattattcaccttaagcgatttcaatttgtaaatggtcggtggataaaatcacagaaaattgtcaaatttcctcgggaaagttttgatccaagtgcttttttggtaccaagagacccggctctctgccagcataaaccactcacaccccagggggatgagctctctgagcccaggattctggcaagggaggtgaagaaagtggatgcgcagagttcggctggggaagaggacgtgctcctgagcaaaagcccatcctcactcagcgctaacatcatcagcagcccgaaaggttctccttcttcatcaagaaaaagtggaaccagctgtccctccagcaaaaacagcagccctaatagcagcccacggactttggggaggagcaaagggaggctccggctgccccagattggcagcaaaaataaactgtcaagtagtaaagagaacttggatgccagcaaagaaaatggggctgggcagatatgtgagctggctgacgccttgagtcgagggcatgtgctggggggcagccaaccagagttggtcactcctcaggaccatgaggtagctttggccaatggattcctttatgagcatgaagcatgtggcaatggctacagcaatggtcagcttggaaaccacagtgaagaagacagcactgatgaccaaagagaagatactcgtattaagcctatttataatctatatgcaatttcgtgccattcaggaattctgggtgggggccattacgtcacttatgccaaaaacccaaactgcaagtggtactgttacaatgacagcagctgtaaggaacttcacccggatgaaattgacaccgactctgcctacattcttttctatgagcagcaggggatagactatgcacaatttctgccaaagactgatggcaaaaagatggcagacacaagcagtatggatgaagactttgagtctgattacaaaaagtactgtgtgttacagtaaagctaccactctggctgctagacagcttggcggtgagggagatgactccttgtagctgacatttggcaaaagcgtcactgaaaggcaagctaaatgtagttattttatcctgtggccctgaagcacaaaataaaaattctaattaaaatagttaactttaaaaatagtaatcattttattt

SEQ ID NO: 736101 - DNA, 792 bp, Homo sapiens
acaaggagttataatcttaggaaatgggtttcggagcaggaattttaacagtaatcagatccatgtaacttaaatgtgtgagtttcagtaattactgaaatgtagctagtgaacttgttggacattttggtttagaaataaatctcagaagttagattaaaatggcaagttttgtttctttttttagtgatctctttttatcttttaaaacaataggttatcaagaacagcaagacagacatcccagagctggaattatttccccgctatcttctcttcctgagacagcagcctgccactcggacacagcagtctaacatctgggtgaatatgggtatgatgagcctgagaatgtttcctcagcatttaccgagaggtaacttaagaatgcagcaagaataccatgcatttccttaaaaaaaaaaaaaaaaaaaaaaaaaaggtgaaaactacgttgctcgaagtctggtgccactgtattgatacacattcccatcagctttcctacagactcagtaattaatttttacagggcttagaactatggtcatgcacaagactagatgaggggttgaagcaaacattccaacagcaaactgagatgggatgtttccttttctacttacaaagaaaataaatagaaatagattttacatgctttatttctttgagacaagccattgtaaattgttactagactaagtagtagtataccagtcattgactggtcttttcaactccactcaaatttgtaaaaagcaattcctcttatactatcatcttttttgtttt

SEQ ID NO: 736102 - DNA, 605 bp, Homo sapiens
ctactcttcttggtatccaaatattgccaataatttggaccttgggccttgggcctttgctcatcttttcaaagttgaggctttggactcactttaaaacacctggaaggctgggcttggtggctcacacctgtaatcccagcactttgggaagccgaggcaggtggatcgcttgagcccaggagttagagaccagccagggcaatatggccaagaccctgtctctacccaaaaatgtacaaaaattagccagatgtggtggcgtgcacctgtagtaccagctactcaggaggctgaggtgggaggattgcttgagccttggaggtggaggctgcagtgagccaaaatcacagcaccgcactctagtctggcaacataacaagactccatctattaaaaacaaacaaacaaacaaacaaacaaaaagaacttgggtctcctgcctgcattttaaagcgttttggtactcttcatttataaaattattacacctgtaattctcatttctcattattatttcctaaaatagtatggtccccattgctgagaggggtgcttctttttcacatctgccttttttcttactgtgattactgtaaccatag

SEQ ID NO: 736103 - DNA, 289 bp, Homo sapiens; identical to SEQ ID NO: 449284

SEQ ID NO: 736104 - DNA, 810 bp, Homo sapiens
ttagtagaggtccacggatctgggatgaacacaggcgcgcgtaatgccacaggtagggagacaaaaataaactgtcaagtagtaaagagaacttggatgccagcaaagaaaatggggctgggcagatatgtgagctggctgacgccttgagtcgagggcatgtgctggggggcagccaaccagagttggtcactcctcaggaccatgaggtagctttggccaatggattcctttatgagcatgaagcatgtggcaatggctacagcaatggtcagcttggaaaccacagtgaagaagacagcactgatgaccaaagagaagatactcgtattaagcctatttataatctatatgcaatttcgtgccattcaggaattctgggtgggggccattacgtcacttatgccaaaaacccaaactgcaagtggtactgttacaatgacagcagctgtaaggaacttcacccggatgaaattgacaccgactctgcctacattcttttctatgagcagcaggggatagactatgcacaatttctgccaaagactgatggcaaaaagatggcagacacaagcagtatggatgaagactttgagtctgattacaaaaagtactgtgtgttacagtaaagctaccactctggctgctagacagcttggcggtgagggagatgactccttgtagctgacatttggcaaaagcgtcactgaaaggcaagctaaatgtagttattttatcctgtggccctgaagcacaaaataaaaattctaattaaaatagttaactttaaaaatagtaatcattttattt

SEQ ID NO: 736105 - DNA, 3736 bp, Homo sapiens
gattggcgggaagatgggacgatgcgttacgtgcggagatgcgtccccctccccggcgctcctgcgcgcgttacagatgtagagctaaaacgactgaaggatgctttcaagaggacctgtggactctcatattacatgggccagcactgcttcatccgggaagtgcttggggatggagtgcctccaaaggttgctgaggtgatttactgttcttttggtggaacatccaaagggctgcacttcaataatttaatagttggacttgtcctccttacaagaggcaaagatgaagagaaagcaaaatacatttttagtcttttttcaagtgaatctgggaactatgttatacgggaagaaatggaaagaatgctccacgtggtggatggtaaagtcccagatacactcaggaagtgtttctcagagggtgaaaaggtaaactatgaaaagtttagaaattggctttttctaaacaaagatgcttttactttctctcgatggcttctatctggaggtgtgtatgttaccctcactgatgatagtgatactcctactttctaccaaactctggctggagtcacacatttggaggaatcagacatcattgatcttgagaaacgctattggttattgaaggctcaatcccggactggacgatttgatttagagacatttggcccattggtttcaccacctattcgtccatctctaagtgaaggtttgtttaatgcttttgatgaaaatcgtgacaatcacatagattttaaggagatatcctgtgggttatcagcctgttgcaggggacccctggctgaaagacaaaaattttgcttcaaggtatttgatgttgaccgtgatggagttctctccagggttgaactgagagacatggtggttgcacttttagaagtctggaaggacaaccgcactgatgatattcctgaattacatatggatctctctgatattgtagaaggcatactgaatgcacatgacaccacaaagatgggtcatcttactctggaagactatcagatctggagtgtgaaaaatgttcttgccaatgagtttttgaacctccttttccaggtgtgtcacatagttctggggttaagaccagctactccggaagaagaaggacaaattattagaggatggttagaacgagagagcaggtatggtctgcaagcaggacacaactggtttatcatctccatgcagtggtggcaacagtggaaagaatatgtcaaatacgatgccaaccctgtggtaattgagccatcatctgttttgaatggaggaaaatactcatttggaactgcagcccatcctatggagcaggtcgaagatagaattggaagcagcctcagttacgtgaatactacagaagagaaattttcagacaacatttctactgcatctgaagcctcagaaactgctggcagcggctttctgtattctgccacaccaggggcagatgtttgctttgctcgacaacataacacttctgacaataacaaccagtgtttgctgggagccaatgggaatattttgttgcaccttaaccctcagaaaccaggggctattgataatcagccattagtaactcaagaaccagtaaaggctacatcattaacactagaaggaggacgattaaaacgaactccacagctgattcatggaagagactatgaaatggtcccagaacctgtgtggagagcactttatcactggtatggagcaaacctggccttacctagaccagttatcaagaacagcaagacagacatcccagagctggaattatttccccgctatcttctcttcctgagacagcagcctgccactcggacacagcagtctaacatctgggtgaatatgggaaatgtaccttctccgaatgcacctttaaagcgggtattagcctatacaggctgttttagtcgaatgcagaccatcaaggaaattcacgaatatctatctcaaaggctgcgcattaaagaggaagatatgcgcctgtggctatacaacagtgagaactaccttactcttctggatgatgaggatcataaattggaatatttgaaaatccaggatgaacaacacctggtaattgaagttcgcaacaaagatatgagttggcctgaggagatgtcttttatagcaaatagtagtaaaatagatagacacaaggttcccacagaaaagggagccacaggtctaagcaatctgggaaacacatgcttcatgaactcaagcatccagtgtgttagtaacacacagccactgacacagtattttatctcagggagacatctttatgaactcaacaggacaaatcccattggtatgaaggggcatatggctaaatgctatggtgatttagtgcaggaactttggagtggaactcagaagaatgttgccccattaaagcttcggtggaccatagcaaaatatgctcccaggtttaatgggtttcagcaacaggactcccaagaacttctggcttttctcttggatggtcttcatgaagatcttaatcgagtccatgaaaagccatatgtggaactgaaggacagtgatgggcgaccagactgggaagtagctgcagaggcctgggacaaccatctaagaagaaatagatcaattgttgtggatttgttccatgggcagctaagatctcaagtaaaatgcaagacatgtgggcatataagtgtccgatttgaccctttcaattttttgtctttgccactaccaatggacagttatatgcacttagaaataacagtgattaagttagatggtactacccctgtacggtatggactaagactgaatatggatgaaaagtacacaggtttaaaaaaacagctgagtgatctctgtggacttaattcagaacaaatccttctagcagaagtacatggttccaacataaagaactttcctcaggacaaccaaaaagtacgactctcagtgagtggatttttgtgtgcatttgaaattcctgtccctgtgtctccaatttcagcttctagtccaacacagacagatttctcctcttcgccatctacaaatgaaatgttcaccctaactaccaatggggacctaccccgaccaatattcatccccaatggaatgccaaacactgttgtgccatgtggaactgagaagaacttcacaaatggaatggttaatggtcacatgccatctcttcctgacagcccctttacaggttacatcattgcagtccaccgaaaaatggttagttaaatgttaggcaactcactgccagtcttgctagtgtcatttgtgaaatagtcattttctgtctttgcaacatcattgaatgcattttcttctcttcttttctttaattttttaaaatttaataattttacaaattttatttttttacttttttatcctgtcctcaaaatctgttgctgtgaatgcattttcaatgtattatatatgctaatataagtgatcagagccaggatttagtattactcatggtggctaatgtatgaaatgacattccttatccgtatattaagaggcaacaggatagtcagtgcatctgagtactactttctttagaaatttgtgtctcctggccgggtgcagtggctcacacctgtaatcccaacactttgggaggctgaagcaggaggatcaccttagctcaggagttcaaggctagcctgggcaacatagtgagacctcgtctcttcta

SEQ ID NO: 736106 - DNA, 5008 bp, Homo sapiens
gattggcgggaagatgggacgatgcgttacgtgcggagatgcgtccccctccccggcgctcctgcgcgcgttacagatgtagagctaaaacgactgaaggatgctttcaagaggacctgtggactctcatattacatgggccagcactgcttcatccgggaagtgcttggggatggagtgcctccaaaggttgctgaggtgatttactgttcttttggtggaacatccaaagggctgcacttcaataatttaatagttggacttgtcctccttacaagaggcaaagatgaagagaaagcaaaatacatttttagtcttttttcaagtgaatctgggaactatgttatacgggaagaaatggaaagaatgctccacgtggtggatggtaaagtcccagatacactcaggaagtgtttctcagagggtgaaaaggtaaactatgaaaagtttagaaattggctttttctaaacaaagatgcttttactttctctcgatggcttctatctggaggtgtgtatgttaccctcactgatgatagtgatactcctactttctaccaaactctggctggagtcacacatttggaggaatcagacatcattgatcttgagaaacgctattggttattgaaggctcaatcccggactggacgatttgatttagagacatttggcccattggtttcaccacctattcgtccatctctaagtgaaggtttgtttaatgcttttgatgaaaatcgtgacaatcacatagattttaaggagatatcctgtgggttatcagcctgttgcaggggacccctggctgaaagacaaaaattttgcttcaaggtatttgatgttgaccgtgatggagttctctccagggttgaactgagagacatggtggttgcacttttagaagtctggaaggacaaccgcactgatgatattcctgaattacatatggatctctctgatattgtagaaggcatactgaatgcacatgacaccacaaagatgggtcatcttactctggaagactatcagatctggagtgtgaaaaatgttcttgccaatgagtttttgaacctccttttccaggtgtgtcacatagttctggggttaagaccagctactccggaagaagaaggacaaattattagaggatggttagaacgagagagcaggtatggtctgcaagcaggacacaactggtttatcatctccatgcagtggtggcaacagtggaaagaatatgtcaaatacgatgccaaccctgtggtaattgagccatcatctgttttgaatggaggaaaatactcatttggaactgcagcccatcctatggagcaggtcgaagatagaattggaagcagcctcagttacgtgaatactacagaagagaaattttcagacaacatttctactgcatctgaagcctcagaaactgctggcagcggctttctgtattctgccacaccaggggcagatgtttgctttgctcgacaacataacacttctgacaataacaaccagtgtttgctgggagccaatgggaatattttgttgcaccttaaccctcagaaaccaggggctattgataatcagccattagtaactcaagaaccagtaaaggctacatcattaacactagaaggaggacgattaaaacgaactccacagctgattcatggaagagactatgaaatggtcccagaacctgtgtggagagcactttatcactggtatggagcaaacctggccttacctagaccagttatcaagaacagcaagacagacatcccagagctggaattatttccccgctatcttctcttcctgagacagcagcctgccactcggacacagcagtctaacatctgggtgaatatgggaaatgtaccttctccgaatgcacctttaaagcgggtattagcctatacaggctgttttagtcgaatgcagaccatcaaggaaattcacgaatatctatctcaaaggctgcgcattaaagaggaagatatgcgcctgtggctatacaacagtgagaactaccttactcttctggatgatgaggatcataaattggaatatttgaaaatccaggatgaacaacacctggtaattgaagttcgcaacaaagatatgagttggcctgaggagatgtcttttatagcaaatagtagtaaaatagatagacacaaggttcccacagaaaagggagccacaggtctaagcaatctgggaaacacatgcttcatgaactcaagcatccagtgtgttagtaacacacagccactgacacagtattttatctcagggagacatctttatgaactcaacaggacaaatcccattggtatgaaggggcatatggctaaatgctatggtgatttagtgcaggaactttggagtggaactcagaagaatgttgccccattaaagcttcggtggaccatagcaaaatatgctcccaggtttaatgggtttcagcaacaggactcccaagaacttctggcttttctcttggatggtcttcatgaagatcttaatcgagtccatgaaaagccatatgtggaactgaaggacagtgatgggcgaccagactgggaagtagctgcagaggcctgggacaaccatctaagaagaaatagatcaattgttgtggatttgttccatgggcagctaagatctcaagtaaaatgcaagacatgtgggcatataagtgtccgatttgaccctttcaattttttgtctttgccactaccaatggacagttatatgcacttagaaataacagtgattaagttagatggtactacccctgtacggtatggactaagactgaatatggatgaaaagtacacaggtttaaaaaaacagctgagtgatctctgtggacttaattcagaacaaatccttctagcagaagtacatggttccaacataaagaactttcctcaggacaaccaaaaagtacgactctcagtgagtggatttttgtgtgcatttgaaattcctgtccctgtgtctccaatttcagcttctagtccaacacagacagatttctcctcttcgccatctacaaatgaaatgttcaccctaactaccaatggggacctaccccgaccaatattcatccccaatggaatgccaaacactgttgtgccatgtggaactgagaagaacttcacaaatggaatggttaatggtcacatgccatctcttcctgacagcccctttacaggttacatcattgcagtccaccgaaaaatgatgaggacagaactgtatttcctgtcatctcagaagaatcgccccagcctctttggaatgccattgattgttccatgtactgtgcatacccggaagaaagacctatatgatgcggtttggattcaagtatcccggttagcgagcccactcccacctcaggaagctagtaatcatgcccaggattgtgacgacagtatgggctatcaatatccattcactctacgagttgtgcagaaagatgggaactcctgtgcttggtgcccatggtatagattttgcagaggctgtaaaattgattgtggggaagacagagctttcattggaaatgcctatatcgctgtggattgggatcccacagcccttcaccttcgctatcaaacatcccaggaaagggttgtagatgagcatgagagtgtggagcagagtcggcgagcgcaagccgagcccatcaacctggacagctgtctccgtgctttcaccagtgaggaagagctaggggaaaatgagatgtactactgttccaagtgtaagacccactgcttagcaacaaagaagctggatctctggaggcttccacccatcctgattattcaccttaagcgatttcaatttgtaaatggtcggtggataaaatcacagaaaattgtcaaatttcctcgggaaagttttgatccaagtgcttttttggtaccaagagacccggctctctgccagcataaaccactcacaccccagggggatgagctctctgagcccaggattctggcaagggaggtgaagaaagtggatgcgcagagttcggctggggaagaggacgtgctcctgagcaaaagcccatcctcactcagcgctaacatcatcagcagcccgaaaggttctccttcttcatcaagaaaaagtggaaccagctgtccctccagcaaaaacagcagccctaatagcagcccacggactttggggaggagcaaagggaggctccggctgccccagattggcagcaaaaataaactgtcaagtagtaaagagaacttggatgccagcaaagaaaatggggctgggcagatatgtgagctggctgacgccttgagtcgagggcatgtgctggggggcagccaaccagagttggtcactcctcaggaccatgaggtagctttggccaatggattcctttatgagcatgaagcatgtggcaatggctacagcaatggtcagcttggaaaccacagtgaagaagacagcactgatgaccaaagagaagatactcgtattaagcctatttataatctatatgcaatttcgtgccattcaggaattctgggtgggggccattacgtcacttatgccaaaaacccaaactgcaagtggtactgttacaatgacagcagctgtaaggaacttcacccggatgaaattgacaccgactctgcctacattcttttctatgagcagcaggggatagactatgcacaatttctgccaaagactgatggcaaaaagatggcagacacaagcagtatggatgaagactttgagtctgattacaaaaagtactgtgtgttacagtaaagctaccactctggctgctagacagcttggcggtgagggagatgactccttgtagctgacatttggcaaaagcgtcactgaaaggcaagctaaatgtagttattttatcctgtggccctgaagcacaaaataaaaattctaattaaaatagttaactttaaaaatagtaatcattttattt

SEQ ID NO: 736107 - DNA, 4801 bp, Homo sapiens
gattggcgggaagatgggacgatgcgttacgtgcggagatgcgtccccctccccggcgctcctgcgcgcgttacagatgtagagctaaaacgactgaaggatgctttcaagaggacctgtggactctcatattacatgggccagcactgcttcatccgggaagtgcttggggatggagtgcctccaaaggttgctgaggtgatttactgttcttttggtggaacatccaaagggctgcacttcaataatttaatagttggacttgtcctccttacaagaggcaaagatgaagagaaagcaaaatacatttttagtcttttttcaagtgaatctgggaactatgttatacgggaagaaatggaaagaatgctccacgtggtggatggtaaagtcccagatacactcaggaagtgtttctcagagggtgaaaaggtaaactatgaaaagtttagaaattggctttttctaaacaaagatgcttttactttctctcgatggcttctatctggaggtgtgtatgttaccctcactgatgatagtgatactcctactttctaccaaactctggctggagtcacacatttggaggaatcagacatcattgatcttgagaaacgctattggttattgaaggctcaatcccggactggacgatttgatttagagacatttggcccattggtttcaccacctattcgtccatctctaagtgaaggtttgtttaatgcttttgatgaaaatcgtgacaatcacatagattttaaggagatatcctgtgggttatcagcctgttgcaggggacccctggctgaaagacaaaaattttgcttcaaggtatttgatgttgaccgtgatggagttctctccagggttgaactgagagacatggtggttgcacttttagaagtctggaaggacaaccgcactgatgatattcctgaattacatatggatctctctgatattgtagaaggcatactgaatgcacatgacaccacaaagatgggtcatcttactctggaagactatcagatctggagtgtgaaaaatgttcttgccaatgagtttttgaacctccttttccaggtgtgtcacatagttctggggttaagaccagctactccggaagaagaaggacaaattattagaggatggttagaacgagagagcaggtatggtctgcaagcaggacacaactggtttatcatctccatgcagtggtggcaacagtggaaagaatatgtcaaatacgatgccaaccctgtggtaattgagccatcatctgttttgaatggaggaaaatactcatttggaactgcagcccatcctatggagcaggtcgaagatagaattggaagcagcctcagttacgtgaatactacagaagagaaattttcagacaacatttctactgcatctgaagcctcagaaactgctggcagcggctttctgtattctgccacaccaggggcagatgtttgctttgctcgacaacataacacttctgacaataacaaccagtgtttgctgggagccaatgggaatattttgttgcaccttaaccctcagaaaccaggggctattgataatcagccattagtaactcaagaaccagtaaaggctacatcattaacactagaaggaggacgattaaaacgaactccacagctgattcatggaagagactatgaaatggtcccagaacctgtgtggagagcactttatcactggtatggagcaaacctggccttacctagaccagttatcaagaacagcaagacagacatcccagagctggaattatttccccgctatcttctcttcctgagacagcagcctgccactcggacacagcagtctaacatctgggtgaatatgggaaatgtaccttctccgaatgcacctttaaagcgggtattagcctatacaggctgttttagtcgaatgcagaccatcaaggaaattcacgaatatctatctcaaaggctgcgcattaaagaggaagatatgcgcctgtggctatacaacagtgagaactaccttactcttctggatgatgaggatcataaattggaatatttgaaaatccaggatgaacaacacctggtaattgaagttcgcaacaaagatatgagttggcctgaggagatgtcttttatagcaaatagtagtaaaatagatagacacaaggttcccacagaaaagggagccacaggtctaagcaatctgggaaacacatgcttcatgaactcaagcatccagtgtgttagtaacacacagccactgacacagtattttatctcagggagacatctttatgaactcaacaggacaaatcccattggtatgaaggggcatatggctaaatgctatggtgatttagtgcaggaactttggagtggaactcagaagaatgttgccccattaaagcttcggtggaccatagcaaaatatgctcccaggtttaatgggtttcagcaacaggactcccaagaacttctggcttttctcttggatggtcttcatgaagatcttaatcgagtccatgaaaagccatatgtggaactgaaggacagtgatgggcgaccagactgggaagtagctgcagaggcctgggacaaccatctaagaagaaatagatcaattgttgtggatttgttccatgggcagctaagatctcaagtaaaatgcaagacatgtgggcatataagtgtccgatttgaccctttcaattttttgtctttgccactaccaatggacagttatatgcacttagaaataacagtgattaagttagatggtactacccctgtacggtatggactaagactgaatatggatgaaaagtacacaggtttaaaaaaacagctgagtgatctctgtggacttaattcagaacaaatccttctagcagaagtacatggttccaacataaagaactttcctcaggacaaccaaaaagtacgactctcagtgagtggatttttgtgtgcatttgaaattcctgtccctgtgtctccaatttcagcttctagtccaacacagacagatttctcctcttcgccatctacaaatgaaatgttcaccctaactaccaatggggacctaccccgaccaatattcatccccaatggaatgccaaacactgttgtgccatgtggaactgagaagaacttcacaaatggaatggttaatggtcacatgccatctcttcctgacagcccctttacaggttacatcattgcagtccaccgaaaaatgatgaggacagaactgtatttcctgtcatctcagaagaatcgccccagcctctttggaatgccattgattgttccatgtactgtgcatacccggaagaaagacctatatgatgcggtttggattcaagtatcccggttagcgagcccactcccacctcaggaagctagtaatcatgcccaggattgtgacgacagtatgggctatcaatatccattcactctacgagttgtgcagaaagatgggaactcctgtgcttggtgcccatggtatagattttgcagaggctgtaaaattgattgtggggaagacagagctttcattggaaatgcctatatcgctgtggattgggatcccacagcccttcaccttcgctatcaaacatcccaggaaagggttgtagatgagcatgagagtgtggagcagagtcggcgagcgcaagccgagcccatcaacctggacagctgtctccgtgctttcaccagtgaggaagagctaggggaaaatgagatgtactactgttccaagtgtaagacccactgcttagcaacaaagaagctggatctctggaggcttccacccatcctgattattcaccttaagcgatttcaatttgtaaatggtcggtggataaaatcacagaaaattgtcaaatttcctcgggaaagttttgatccaagtgcttttttggtaccaagagacccggctctctgccagcataaaccactcacaccccagggggatgagctctctgagcccaggattctggcaagggaggtgaagaaagtggatgcgcagagttcggctggggaagaggacgtgctcctgagcaaaagcccatcctcactcagcgctaacatcatcagcagcccgaaaggttctccttcttcatcaagaaaaagtggaaccagctgtccctccagcaaaaacagcagccctaatagcagcccacggactttggggaggagcaaagggaggctccggctgccccagattggcagcaaaaataaactgtcaagtagtaaagagaacttggatgccagcaaagaaaatggggctgggcagatatgtgagctggctgacgccttgagtcgagggcatgtgctggggggcagccaaccagagttggtcactcctcaggaccatgaggtagctttggccaatggattcctttatgagcatgaagcatgtggcaatggctacagcaatggtcagcttggaaaccacagtgaagaagacagcactgatgaccaaagagaagatactcgtattaagcctatttataatctatatgcaatttcgtcccattggcacagcggggcctcccggtcagtcccaggctgcagctgtccaatgacaacaggaccctcactctactcagtgtcacaaggaatgatgtaggaccctatgagtgtggaatccagaacgaattaagtgttgaccacagcagacccagtcatcctgaatgtcctcatatgcccagacgaccccaccatttccccctcatacacctagcgtaccaggggtgaacctcagcctctcc

SEQ ID NO: 736108 - DNA, 4040 bp, Homo sapiens
gattggcgggaagatgggacgatgcgttacgtgcggagatgcgtccccctccccggcgctcctgcgcgcgttacagatgtagagctaaaacgactgaaggatgctttcaagaggacctgtggactctcatattacatgggccagcactgcttcatccgggaagtgcttggggatggagtgcctccaaaggttgctgaggtgatttactgttcttttggtggaacatccaaagggctgcacttcaataatttaatagttggacttgtcctccttacaagaggcaaagatgaagagaaagcaaaatacatttttagtcttttttcaagtgaatctgggaactatgttatacgggaagaaatggaaagaatgctccacgtggtggatggtaaagtcccagatacactcaggaagtgtttctcagagggtgaaaaggtaaactatgaaaagtttagaaattggctttttctaaacaaagatgcttttactttctctcgatggcttctatctggaggtgtgtatgttaccctcactgatgatagtgatactcctactttctaccaaactctggctggagtcacacatttggaggaatcagacatcattgatcttgagaaacgctattggttattgaaggctcaatcccggactggacgatttgatttagagacatttggcccattggtttcaccacctattcgtccatctctaagtgaaggtttgtttaatgcttttgatgaaaatcgtgacaatcacatagattttaaggagatatcctgtgggttatcagcctgttgcaggggacccctggctgaaagacaaaaattttgcttcaaggtatttgatgttgaccgtgatggagttctctccagggttgaactgagagacatggtggttgcacttttagaagtctggaaggacaaccgcactgatgatattcctgaattacatatggatctctctgatattgtagaaggcatactgaatgcacatgacaccacaaagatgggtcatcttactctggaagactatcagatctggagtgtgaaaaatgttcttgccaatgagtttttgaacctccttttccaggtgtgtcacatagttctggggttaagaccagctactccggaagaagaaggacaaattattagaggatggttagaacgagagagcaggtatggtctgcaagcaggacacaactggtttatcatctccatgcagtggtggcaacagtggaaagaatatgtcaaatacgatgccaaccctgtggtaattgagccatcatctgttttgaatggaggaaaatactcatttggaactgcagcccatcctatggagcaggtcgaagatagaattggaagcagcctcagttacgtgaatactacagaagagaaattttcagacaacatttctactgcatctgaagcctcagaaactgctggcagcggctttctgtattctgccacaccaggggcagatgtttgctttgctcgacaacataacacttctgacaataacaaccagtgtttgctgggagccaatgggaatattttgttgcaccttaaccctcagaaaccaggggctattgataatcagccattagtaactcaagaaccagtaaaggctacatcattaacactagaaggaggacgattaaaacgaactccacagctgattcatggaagagactatgaaatggtcccagaacctgtgtggagagcactttatcactggtatggagcaaacctggccttacctagaccagttatcaagaacagcaagacagacatcccagagctggaattatttccccgctatcttctcttcctgagacagcagcctgccactcggacacagcagtctaacatctgggtgaatatgggaaatgtaccttctccgaatgcacctttaaagcgggtattagcctatacaggctgttttagtcgaatgcagaccatcaaggaaattcacgaatatctatctcaaaggctgcgcattaaagaggaagatatgcgcctgtggctatacaacagtgagaactaccttactcttctggatgatgaggatcataaattggaatatttgaaaatccaggatgaacaacacctggtaattgaagttcgcaacaaagatatgagttggcctgaggagatgtcttttatagcaaatagtagtaaaatagatagacacaaggttcccacagaaaagggagccacaggtctaagcaatctgggaaacacatgcttcatgaactcaagcatccagtgtgttagtaacacacagccactgacacagtattttatctcagggagacatctttatgaactcaacaggacaaatcccattggtatgaaggggcatatggctaaatgctatggtgatttagtgcaggaactttggagtggaactcagaagaatgttgccccattaaagcttcggtggaccatagcaaaatatgctcccaggtttaatgggtttcagcaacaggactcccaagaacttctggcttttctcttggatggtcttcatgaagatcttaatcgagtccatgaaaagccatatgtggaactgaaggacagtgatgggcgaccagactgggaagtagctgcagaggcctgggacaaccatctaagaagaaatagatcaattgttgtggatttgttccatgggcagctaagatctcaagtaaaatgcaagacatgtgggcatataagtgtccgatttgaccctttcaattttttgtctttgccactaccaatggacagttatatgcacttagaaataacagtgattaagttagatggtactacccctgtacggtatggactaagactgaatatggatgaaaagtacacaggtttaaaaaaacagctgagtgatctctgtggacttaattcagaacaaatccttctagcagaagtacatggttccaacataaagaactttcctcaggacaaccaaaaagtacgactctcagtgagtggatttttgtgtgcatttgaaattcctgtccctgtgtctccaatttcagcttctagtccaacacagacagatttctcctcttcgccatctacaaatgaaatgttcaccctaactaccaatggggacctaccccgaccaatattcatccccaatggaatgccaaacactgttgtgccatgtggaactgagaagaacttcacaaatggaatggttaatggtcacatgccatctcttcctgacagcccctttacaggttacatcattgcagtccaccgaaaaatgatgaggacagaactgtatttcctgtcatctcagaagaatcgccccagcctctttggaatgccattgattgttccatgtactgtgcatacccggaagaaagacctatatgatgcggtttggattcaagtatcccggttagcgagcccactcccacctcaggaagctagtaatcatgcccaggattgtgacgacagtatgggctatcaatatccattcactctacgagttgtgcagaaagatgggaactcctgtgcttggtgcccatggtatagattttgcagaggctgtaaaattgattgtggggaagacagagctttcattggaaatgcctatatcgctgtggattgggatcccacagcccttcaccttcgctatcaaacatcccaggaaagggttgtagatgagcatgagagtgtggagcagagtcggcgagcgcaagccgagcccatcaacctggacagctgtctccgtgctttcaccagtgaggaagagctaggggaaaatgagatgtactactgttccaagtgtaagacccactgcttagcaacaaagaagctggatctctggaggcttccacccatcctgattattcaccttaagcgatttcaatttgtaaatggtcggtggataaaatcacagaaaattgtcaaatttcctcgggaaagttttgatccaagtgcttttttggtaccaagagacccggctctctgcgcatccactttcttcacctcccttgccagaatcctgggctcagagagctcatccccctggggtgtgag

SEQ ID NO: 736109 - DNA, 3940 bp, Homo sapiens
gattggcgggaagatgggacgatgcgttacgtgcggagatgcgtccccctccccggcgctcctgcgcgcgttacagatgtagagctaaaacgactgaaggatgctttcaagaggacctgtggactctcatattacatgggccagcactgcttcatccgggaagtgcttggggatggagtgcctccaaaggttgctgaggtgatttactgttcttttggtggaacatccaaagggctgcacttcaataatttaatagttggacttgtcctccttacaagaggcaaagatgaagagaaagcaaaatacatttttagtcttttttcaagtgaatctgggaactatgttatacgggaagaaatggaaagaatgctccacgtggtggatggtaaagtcccagatacactcaggaagtgtttctcagagggtgaaaaggtaaactatgaaaagtttagaaattggctttttctaaacaaagatgcttttactttctctcgatggcttctatctggaggtgtgtatgttaccctcactgatgatagtgatactcctactttctaccaaactctggctggagtcacacatttggaggaatcagacatcattgatcttgagaaacgctattggttattgaaggctcaatcccggactggacgatttgatttagagacatttggcccattggtttcaccacctattcgtccatctctaagtgaaggtttgtttaatgcttttgatgaaaatcgtgacaatcacatagattttaaggagatatcctgtgggttatcagcctgttgcaggggacccctggctgaaagacaaaaattttgcttcaaggtatttgatgttgaccgtgatggagttctctccagggttgaactgagagacatggtggttgcacttttagaagtctggaaggacaaccgcactgatgatattcctgaattacatatggatctctctgatattgtagaaggcatactgaatgcacatgacaccacaaagatgggtcatcttactctggaagactatcagatctggagtgtgaaaaatgttcttgccaatgagtttttgaacctccttttccaggtgtgtcacatagttctggggttaagaccagctactccggaagaagaaggacaaattattagaggatggttagaacgagagagcaggtatggtctgcaagcaggacacaactggtttatcatctccatgcagtggtggcaacagtggaaagaatatgtcaaatacgatgccaaccctgtggtaattgagccatcatctgttttgaatggaggaaaatactcatttggaactgcagcccatcctatggagcaggtcgaagatagaattggaagcagcctcagttacgtgaatactacagaagagaaattttcagacaacatttctactgcatctgaagcctcagaaactgctggcagcggctttctgtattctgccacaccaggggcagatgtttgctttgctcgacaacataacacttctgacaataacaaccagtgtttgctgggagccaatgggaatattttgttgcaccttaaccctcagaaaccaggggctattgataatcagccattagtaactcaagaaccagtaaaggctacatcattaacactagaaggaggacgattaaaacgaactccacagctgattcatggaagagactatgaaatggtcccagaacctgtgtggagagcactttatcactggtatggagcaaacctggccttacctagaccagttatcaagaacagcaagacagacatcccagagctggaattatttccccgctatcttctcttcctgagacagcagcctgccactcggacacagcagtctaacatctgggtgaatatgggaaatgtaccttctccgaatgcacctttaaagcgggtattagcctatacaggctgttttagtcgaatgcagaccatcaaggaaattcacgaatatctatctcaaaggctgcgcattaaagaggaagatatgcgcctgtggctatacaacagtgagaactaccttactcttctggatgatgaggatcataaattggaatatttgaaaatccaggatgaacaacacctggtaattgaagttcgcaacaaagatatgagttggcctgaggagatgtcttttatagcaaatagtagtaaaatagatagacacaaggttcccacagaaaagggagccacaggtctaagcaatctgggaaacacatgcttcatgaactcaagcatccagtgtgttagtaacacacagccactgacacagtattttatctcagggagacatctttatgaactcaacaggacaaatcccattggtatgaaggggcatatggctaaatgctatggtgatttagtgcaggaactttggagtggaactcagaagaatgttgccccattaaagcttcggtggaccatagcaaaatatgctcccaggtttaatgggtttcagcaacaggactcccaagaacttctggcttttctcttggatggtcttcatgaagatcttaatcgagtccatgaaaagccatatgtggaactgaaggacagtgatgggcgaccagactgggaagtagctgcagaggcctgggacaaccatctaagaagaaatagatcaattgttgtggatttgttccatgggcagctaagatctcaagtaaaatgcaagacatgtgggcatataagtgtccgatttgaccctttcaattttttgtctttgccactaccaatggacagttatatgcacttagaaataacagtgattaagttagatggtactacccctgtacggtatggactaagactgaatatggatgaaaagtacacaggtttaaaaaaacagctgagtgatctctgtggacttaattcagaacaaatccttctagcagaagtacatggttccaacataaagaactttcctcaggacaaccaaaaagtacgactctcagtgagtggatttttgtgtgcatttgaaattcctgtccctgtgtctccaatttcagcttctagtccaacacagacagatttctcctcttcgccatctacaaatgaaatgttcaccctaactaccaatggggacctaccccgaccaatattcatccccaatggaatgccaaacactgttgtgccatgtggaactgagaagaacttcacaaatggaatggttaatggtcacatgccatctcttcctgacagcccctttacaggttacatcattgcagtccaccgaaaaatgatgaggacagaactgtatttcctgtcatctcagaagaatcgccccagcctctttggaatgccattgattgttccatgtactgtgcatacccggaagaaagacctatatgatgcggtttggattcaagtatcccggttagcgagcccactcccacctcaggaagctagtaatcatgcccaggattgtgacgacagtatgggctatcaatatccattcactctacgagttgtgcagaaagatgggaactcctgtgcttggtgcccatggtatagattttgcagaggctgtaaaattgattgtggggaagacagagctttcattggaaatgcctatatcgctgtggattgggatcccacagcccttcaccttcgctatcaaacatcccaggaaagggttgtagatgagcatgagagtgtggagcagagtcggcgagcgcaagccgagcccatcaacctggacagctgtctccgtgctttcaccagtgaggaagagctaggggaaaatgagatgtactactgttccaagtgtaagacccactgcttagcaacaaagaagctggatctctggaggcttccacccatcctgattattcaccttaagcgatttcaatttgtaaatggtcggtggataaaactttcccgaggcaatttgacaattttctgtgattttatcgtcgacc

SEQ ID NO: 736110 - DNA, 3805 bp, Homo sapiens
gattggcgggaagatgggacgatgcgttacgtgcggagatgcgtccccctccccggcgctcctgcgcgcgttacagatgtagagctaaaacgactgaaggatgctttcaagaggacctgtggactctcatattacatgggccagcactgcttcatccgggaagtgcttggggatggagtgcctccaaaggttgctgaggtgatttactgttcttttggtggaacatccaaagggctgcacttcaataatttaatagttggacttgtcctccttacaagaggcaaagatgaagagaaagcaaaatacatttttagtcttttttcaagtgaatctgggaactatgttatacgggaagaaatggaaagaatgctccacgtggtggatggtaaagtcccagatacactcaggaagtgtttctcagagggtgaaaaggtaaactatgaaaagtttagaaattggctttttctaaacaaagatgcttttactttctctcgatggcttctatctggaggtgtgtatgttaccctcactgatgatagtgatactcctactttctaccaaactctggctggagtcacacatttggaggaatcagacatcattgatcttgagaaacgctattggttattgaaggctcaatcccggactggacgatttgatttagagacatttggcccattggtttcaccacctattcgtccatctctaagtgaaggtttgtttaatgcttttgatgaaaatcgtgacaatcacatagattttaaggagatatcctgtgggttatcagcctgttgcaggggacccctggctgaaagacaaaaattttgcttcaaggtatttgatgttgaccgtgatggagttctctccagggttgaactgagagacatggtggttgcacttttagaagtctggaaggacaaccgcactgatgatattcctgaattacatatggatctctctgatattgtagaaggcatactgaatgcacatgacaccacaaagatgggtcatcttactctggaagactatcagatctggagtgtgaaaaatgttcttgccaatgagtttttgaacctccttttccaggtgtgtcacatagttctggggttaagaccagctactccggaagaagaaggacaaattattagaggatggttagaacgagagagcaggtatggtctgcaagcaggacacaactggtttatcatctccatgcagtggtggcaacagtggaaagaatatgtcaaatacgatgccaaccctgtggtaattgagccatcatctgttttgaatggaggaaaatactcatttggaactgcagcccatcctatggagcaggtcgaagatagaattggaagcagcctcagttacgtgaatactacagaagagaaattttcagacaacatttctactgcatctgaagcctcagaaactgctggcagcggctttctgtattctgccacaccaggggcagatgtttgctttgctcgacaacataacacttctgacaataacaaccagtgtttgctgggagccaatgggaatattttgttgcaccttaaccctcagaaaccaggggctattgataatcagccattagtaactcaagaaccagtaaaggctacatcattaacactagaaggaggacgattaaaacgaactccacagctgattcatggaagagactatgaaatggtcccagaacctgtgtggagagcactttatcactggtatggagcaaacctggccttacctagaccagttatcaagaacagcaagacagacatcccagagctggaattatttccccgctatcttctcttcctgagacagcagcctgccactcggacacagcagtctaacatctgggtgaatatgggaaatgtaccttctccgaatgcacctttaaagcgggtattagcctatacaggctgttttagtcgaatgcagaccatcaaggaaattcacgaatatctatctcaaaggctgcgcattaaagaggaagatatgcgcctgtggctatacaacagtgagaactaccttactcttctggatgatgaggatcataaattggaatatttgaaaatccaggatgaacaacacctggtaattgaagttcgcaacaaagatatgagttggcctgaggagatgtcttttatagcaaatagtagtaaaatagatagacacaaggttcccacagaaaagggagccacaggtctaagcaatctgggaaacacatgcttcatgaactcaagcatccagtgtgttagtaacacacagccactgacacagtattttatctcagggagacatctttatgaactcaacaggacaaatcccattggtatgaaggggcatatggctaaatgctatggtgatttagtgcaggaactttggagtggaactcagaagaatgttgccccattaaagcttcggtggaccatagcaaaatatgctcccaggtttaatgggtttcagcaacaggactcccaagaacttctggcttttctcttggatggtcttcatgaagatcttaatcgagtccatgaaaagccatatgtggaactgaaggacagtgatgggcgaccagactgggaagtagctgcagaggcctgggacaaccatctaagaagaaatagatcaattgttgtggatttgttccatgggcagctaagatctcaagtaaaatgcaagacatgtgggcatataagtgtccgatttgaccctttcaattttttgtctttgccactaccaatggacagttatatgcacttagaaataacagtgattaagttagatggtactacccctgtacggtatggactaagactgaatatggatgaaaagtacacaggtttaaaaaaacagctgagtgatctctgtggacttaattcagaacaaatccttctagcagaagtacatggttccaacataaagaactttcctcaggacaaccaaaaagtacgactctcagtgagtggatttttgtgtgcatttgaaattcctgtccctgtgtctccaatttcagcttctagtccaacacagacagatttctcctcttcgccatctacaaatgaaatgttcaccctaactaccaatggggacctaccccgaccaatattcatccccaatggaatgccaaacactgttgtgccatgtggaactgagaagaacttcacaaatggaatggttaatggtcacatgccatctcttcctgacagcccctttacaggttacatcattgcagtccaccgaaaaatgatgaggacagaactgtatttcctgtcatctcagaagaatcgccccagcctctttggaatgccattgattgttccatgtactgtgcatacccggaagaaagacctatatgatgcggtttggattcaagtatcccggttagcgagcccactcccacctcaggaagctagtaatcatgcccaggattgtgacgacagtatgggctatcaatatccattcacttctgcctacattcttttctatgagcagcaggggatagactatgcacaatttctgccaaagactgatggcaaaaagatggcagacacaagcagtatggatgaagactttgagtctgattacaaaaagtactgtgtgttacagtaaagctaccactctggctgctagacagcttggcggtgagggagatgactccttgtagctgacatttggcaaaagcgtcactgaaaggcaagctaaatgtagttattttatcctgtggccctgaagcacaaaataaaaattctaattaaaatagttaactttaaaaatagtaatcattttattt

SEQ ID NO: 736111 - DNA, 741 bp, Homo sapiens; identical to SEQ ID NO: 449292

SEQ ID NO: 736112 - DNA, 1235 bp, Homo sapiens
ggagcggggtaagagggcgtgaggagggaaggagagggaggagagagaggagagagaagggcggagtaggaggcaggggaagggggcggggcggaagagtcacgtgatccggcatggaggcggtggcggcgaccgggaggagccgccggggcagaagccgcacttgttagtgtggggggaggtgggggcgggggacgccgacaccgtcaccgtcacccagggacgccgaggagaaggcgggaggggggtgggggcgagatcaggctccgaccccccgccgaggggatgaggggagcatgggtgccaaggagtcacggatcggattcctcagctacgaggaggcgctgaggagagttacagatgtagagctaaaacgactgaaggatgctttcaagaggacctgtggactctcatattacatgggccagcactgcttcatccgggaagtgcttggggatggagtgcctccaaaggttgctgaggtgatttactgttcttttggtggaacatccaaagggctgcacttcaataatttaatagttggacttgtcctccttacaagaggcaaagatgaagagaaagcaaaatacatttttagtcttttttcaagtgaatctgggaactatgttatacgggaagaaatggaaagaatgctccacgtggtggatggtaaagtcccagatacactcaggaagtgtttctcagagggtgaaaaggtaaactatgaaaagtttagaaattggctttttctaaacaaagatgcttttactttctctcgatggcttctatctggaggtgtgtatgttaccctcactgatgatagtgatactcctactttctaccaaactctggctggagtcacacattgtaagtaatgacatttcattgttttctgtttgcctttttttatatatataattggctggtaatatgagaatatgcttataaaggagaaatttatttaaattctgtcccaggctggagtgcagtggcaccatcgtggcttacggcagtctcaacttcctgggctcaagcagtcctctcacctcatcctgcctcagcctcccgagtagctgggactacaggcgcccaccaccatgcctggctaatttttttgtatttttagtagagtcagggtttcaccatgttagccaggatggtctcgatttcctgacctcgtgatccacacgcctcggcctcccgaagtgctggaattataggcgtgagccaccatg

SEQ ID NO: 736113 - DNA, 2248 bp, Homo sapiens
ggagcggggtaagagggcgtgaggagggaaggagagggaggagagagaggagagagaagggcggagtaggaggcaggggaagggggcggggcggaagagtcacgtgatccggcatggaggcggtggcggcgaccgggaggagccgccggggcagaagccgcacttgttagtgtggggggaggtgggggcgggggacgccgacaccgtcaccgtcacccagggacgccgaggagaaggcgggaggggggtgggggcgagatcaggctccgaccccccgccgaggggatgaggggagcatgggtgccaaggagtcacggatcggattcctcagctacgaggaggcgctgaggagagttacagatgtagagctaaaacgactgaaggatgctttcaagaggacctgtggactctcatattacatgggccagcactgcttcatccgggaagtgcttggggatggagtgcctccaaaggttgctgaggtgatttactgttcttttggtggaacatccaaagggctgcacttcaataatttaatagttggacttgtcctccttacaagaggcaaagatgaagagaaagcaaaatacatttttagtcttttttcaagtgaatctgggaactatgttatacgggaagaaatggaaagaatgctccacgtggtggatggtaaagtcccagatacactcaggaagtgtttctcagagggtgaaaaggtaaactatgaaaagtttagaaattggctttttctaaacaaagatgcttttactttctctcgatggcttctatctggaggtgtgtatgttaccctcactgatgatagtgatactcctactttctaccaaactctggctggagtcacacatttggaggaatcagacatcattgatcttgagaaacgctattggttattgaaggctcaatcccggactggacgatttgatttagagacatttggcccattggtttcaccacctattcgtccatctctaagtgaaggtttgtttaatgcttttgatgaaaatcgtgacaatcacatagattttaaggagatatcctgtgggttatcagcctgttgcaggggacccctggctgaaagacaaaaattttgcttcaaggtatttgatgttgaccgtgatggagttctctccagggttgaactgagagacatggtggttgcacttttagaagtctggaaggacaaccgcactgatgatattcctgaattacatatggatctctctgatattgtagaaggcatactgaatgcacatgacaccacaaagatgggtcatcttactctggaagactatcagatctggagtgtgaaaaatgttcttgccaatgagtttttgaacctccttttccaggtgtgtcacatagttctggggttaagaccagctactccggaagaagaaggacaaattattagaggatggttagaacgagagagcaggtatggtctgcaagcaggacacaactggtttatcatctccatgcagtggtggcaacagtggaaagaatatgtcaaatacgtgagttagattcctgtctatttacatttttcacaggattttcagctgcgtgagacttccagccaataataaaatgctatgactaccagccaataataaaatgctccaacttaaataaagattcgaagggaaaggaaatgagtgtttatatgatacttgctatggtctaggctttgtgattacacttccacatacatttctttccttgcaacaaccctaaaaaaagataatattgggtacgggggtacctgcatatgtcacatacatcacatctcatttatttctcgcaccacccttgtgaggaagataatattatacccattttacctgtggggaacctggtgctgaaagaaaaagtaacctgaatgtcatgatcagggtggaagatctgggatcaaaccgaaggactgactttaaagcttatattctctcaactacatcatttacattgtcctttattttaccttttccattaaaatggaatttttttcagaactagaaaattgaaaagagtaatgccaagaatcaagtatttgccttcttggagagccaactgatatatacactcattgccaaatgatcactaacgaaaattctaatcatttgattcctatttgcctgtatttcctctgtcactgcttattatcagaatattggtagttacatactttttacattatctatctcatcattctttctcatcctttttccat

SEQ ID NO: 736114 - DNA, 2621 bp, Homo sapiens
ggagcggggtaagagggcgtgaggagggaaggagagggaggagagagaggagagagaagggcggagtaggaggcaggggaagggggcggggcggaagagtcacgtgatccggcatggaggcggtggcggcgaccgggaggagccgccggggcagaagccgcacttgttagtgtggggggaggtgggggcgggggacgccgacaccgtcaccgtcacccagggacgccgaggagaaggcgggaggggggtgggggcgagatcaggctccgaccccccgccgaggggatgaggggagcatgggtgccaaggagtcacggatcggattcctcagctacgaggaggcgctgaggagagttacagatgtagagctaaaacgactgaaggatgctttcaagaggacctgtggactctcatattacatgggccagcactgcttcatccgggaagtgcttggggatggagtgcctccaaaggttgctgaggtgatttactgttcttttggtggaacatccaaagggctgcacttcaataatttaatagttggacttgtcctccttacaagaggcaaagatgaagagaaagcaaaatacatttttagtcttttttcaagtgaatctgggaactatgttatacgggaagaaatggaaagaatgctccacgtggtggatggtaaagtcccagatacactcaggaagtgtttctcagagggtgaaaaggtaaactatgaaaagtttagaaattggctttttctaaacaaagatgcttttactttctctcgatggcttctatctggaggtgtgtatgttaccctcactgatgatagtgatactcctactttctaccaaactctggctggagtcacacatttggaggaatcagacatcattgatcttgagaaacgctattggttattgaaggctcaatcccggactggacgatttgatttagagacatttggcccattggtttcaccacctattcgtccatctctaagtgaaggtttgtttaatgcttttgatgaaaatcgtgacaatcacatagattttaaggagatatcctgtgggttatcagcctgttgcaggggacccctggctgaaagacaaaaattttgcttcaaggtatttgatgttgaccgtgatggagttctctccagggttgaactgagagacatggtggttgcacttttagaagtctggaaggacaaccgcactgatgatattcctgaattacatatggatctctctgatattgtagaaggcatactgaatgcacatgacaccacaaagatgggtcatcttactctggaagactatcagatctggagtgtgaaaaatgttcttgccaatgagtttttgaacctccttttccaggtgtgtcacatagttctggggttaagaccagctactccggaagaagaaggacaaattattagaggatggttagaacgagagagcaggtatggtctgcaagcaggacacaactggtttatcatctccatgcagtggtggcaacagtggaaagaatatgtcaaatacgatgccaaccctgtggtaattgagccatcatctgttttgaatggaggaaaatactcatttggaactgcagcccatcctatggagcaggtcgaagatagaattggaagcagcctcagttacgtgaatactacagaagagaaattttcagacaacatttctactgcatctgaagcctcagaaactgctggcagcggctttctgtattctgccacaccaggggcagatgtttgctttgctcgacaacataacacttctgacaataacaaccagtgtttgctgggagccaatgggaatattttgttgcaccttaaccctcagaaaccaggggctattgataatcagccattagtaactcaagaaccagtaaaggctacatcattaacactagaaggaggacgattaaaacgaactccacagctgattcatggaagagactatgaaatggtcccagaacctgtgtggagagcactttatcactggtatggagcaaacctggccttacctagaccagttatcaagaacagcaagacagacatcccagagctggaattatttccccgctatcttctcttcctgagacagcagcctgccactcggacacagcagtctaacatctgggtgaatatgggtatgatgagcctgagaatgtttcctcagcatttaccgagaggtaacttaagaatgcagcaagaataccatgcatttccttaaaaaaaaaaaaaaaaaaaaaaaaaaggtgaaaactacgttgctcgaagtctggtgccactgtattgatacacattcccatcagctttcctacagactcagtaattaatttttacagggcttagaactatggtcatgcacaagactagatgaggggttgaagcaaacattccaacagcaaactgagatgggatgtttccttttctacttacaaagaaaataaatagaaatagattttacatgctttatttctttgagacaagccattgtaaattgttactagactaagtagtagtataccagtcattgactggtcttttcaactccactcaaatttgtaaaaagcaattcctcttatactatcatcttttttgtttt

SEQ ID NO: 736115 - DNA, 5292 bp, Homo sapiens
ggagcggggtaagagggcgtgaggagggaaggagagggaggagagagaggagagagaagggcggagtaggaggcaggggaagggggcggggcggaagagtcacgtgatccggcatggaggcggtggcggcgaccgggaggagccgccggggcagaagccgcacttgttagtgtggggggaggtgggggcgggggacgccgacaccgtcaccgtcacccagggacgccgaggagaaggcgggaggggggtgggggcgagatcaggctccgaccccccgccgaggggatgaggggagcatgggtgccaaggagtcacggatcggattcctcagctacgaggaggcgctgaggagagttacagatgtagagctaaaacgactgaaggatgctttcaagaggacctgtggactctcatattacatgggccagcactgcttcatccgggaagtgcttggggatggagtgcctccaaaggttgctgaggtgatttactgttcttttggtggaacatccaaagggctgcacttcaataatttaatagttggacttgtcctccttacaagaggcaaagatgaagagaaagcaaaatacatttttagtcttttttcaagtgaatctgggaactatgttatacgggaagaaatggaaagaatgctccacgtggtggatggtaaagtcccagatacactcaggaagtgtttctcagagggtgaaaaggtaaactatgaaaagtttagaaattggctttttctaaacaaagatgcttttactttctctcgatggcttctatctggaggtgtgtatgttaccctcactgatgatagtgatactcctactttctaccaaactctggctggagtcacacatttggaggaatcagacatcattgatcttgagaaacgctattggttattgaaggctcaatcccggactggacgatttgatttagagacatttggcccattggtttcaccacctattcgtccatctctaagtgaaggtttgtttaatgcttttgatgaaaatcgtgacaatcacatagattttaaggagatatcctgtgggttatcagcctgttgcaggggacccctggctgaaagacaaaaattttgcttcaaggtatttgatgttgaccgtgatggagttctctccagggttgaactgagagacatggtggttgcacttttagaagtctggaaggacaaccgcactgatgatattcctgaattacatatggatctctctgatattgtagaaggcatactgaatgcacatgacaccacaaagatgggtcatcttactctggaagactatcagatctggagtgtgaaaaatgttcttgccaatgagtttttgaacctccttttccaggtgtgtcacatagttctggggttaagaccagctactccggaagaagaaggacaaattattagaggatggttagaacgagagagcaggtatggtctgcaagcaggacacaactggtttatcatctccatgcagtggtggcaacagtggaaagaatatgtcaaatacgatgccaaccctgtggtaattgagccatcatctgttttgaatggaggaaaatactcatttggaactgcagcccatcctatggagcaggtcgaagatagaattggaagcagcctcagttacgtgaatactacagaagagaaattttcagacaacatttctactgcatctgaagcctcagaaactgctggcagcggctttctgtattctgccacaccaggggcagatgtttgctttgctcgacaacataacacttctgacaataacaaccagtgtttgctgggagccaatgggaatattttgttgcaccttaaccctcagaaaccaggggctattgataatcagccattagtaactcaagaaccagtaaaggctacatcattaacactagaaggaggacgattaaaacgaactccacagctgattcatggaagagactatgaaatggtcccagaacctgtgtggagagcactttatcactggtatggagcaaacctggccttacctagaccagttatcaagaacagcaagacagacatcccagagctggaattatttccccgctatcttctcttcctgagacagcagcctgccactcggacacagcagtctaacatctgggtgaatatgggaaatgtaccttctccgaatgcacctttaaagcgggtattagcctatacaggctgttttagtcgaatgcagaccatcaaggaaattcacgaatatctatctcaaaggctgcgcattaaagaggaagatatgcgcctgtggctatacaacagtgagaactaccttactcttctggatgatgaggatcataaattggaatatttgaaaatccaggatgaacaacacctggtaattgaagttcgcaacaaagatatgagttggcctgaggagatgtcttttatagcaaatagtagtaaaatagatagacacaaggttcccacagaaaagggagccacaggtctaagcaatctgggaaacacatgcttcatgaactcaagcatccagtgtgttagtaacacacagccactgacacagtattttatctcagggagacatctttatgaactcaacaggacaaatcccattggtatgaaggggcatatggctaaatgctatggtgatttagtgcaggaactttggagtggaactcagaagaatgttgccccattaaagcttcggtggaccatagcaaaatatgctcccaggtttaatgggtttcagcaacaggactcccaagaacttctggcttttctcttggatggtcttcatgaagatcttaatcgagtccatgaaaagccatatgtggaactgaaggacagtgatgggcgaccagactgggaagtagctgcagaggcctgggacaaccatctaagaagaaatagatcaattgttgtggatttgttccatgggcagctaagatctcaagtaaaatgcaagacatgtgggcatataagtgtccgatttgaccctttcaattttttgtctttgccactaccaatggacagttatatgcacttagaaataacagtgattaagttagatggtactacccctgtacggtatggactaagactgaatatggatgaaaagtacacaggtttaaaaaaacagctgagtgatctctgtggacttaattcagaacaaatccttctagcagaagtacatggttccaacataaagaactttcctcaggacaaccaaaaagtacgactctcagtgagtggatttttgtgtgcatttgaaattcctgtccctgtgtctccaatttcagcttctagtccaacacagacagatttctcctcttcgccatctacaaatgaaatgttcaccctaactaccaatggggacctaccccgaccaatattcatccccaatggaatgccaaacactgttgtgccatgtggaactgagaagaacttcacaaatggaatggttaatggtcacatgccatctcttcctgacagcccctttacaggttacatcattgcagtccaccgaaaaatgatgaggacagaactgtatttcctgtcatctcagaagaatcgccccagcctctttggaatgccattgattgttccatgtactgtgcatacccggaagaaagacctatatgatgcggtttggattcaagtatcccggttagcgagcccactcccacctcaggaagctagtaatcatgcccaggattgtgacgacagtatgggctatcaatatccattcactctacgagttgtgcagaaagatgggaactcctgtgcttggtgcccatggtatagattttgcagaggctgtaaaattgattgtggggaagacagagctttcattggaaatgcctatatcgctgtggattgggatcccacagcccttcaccttcgctatcaaacatcccaggaaagggttgtagatgagcatgagagtgtggagcagagtcggcgagcgcaagccgagcccatcaacctggacagctgtctccgtgctttcaccagtgaggaagagctaggggaaaatgagatgtactactgttccaagtgtaagacccactgcttagcaacaaagaagctggatctctggaggcttccacccatcctgattattcaccttaagcgatttcaatttgtaaatggtcggtggataaaatcacagaaaattgtcaaatttcctcgggaaagttttgatccaagtgcttttttggtaccaagagacccggctctctgccagcataaaccactcacaccccagggggatgagctctctgagcccaggattctggcaagggaggtgaagaaagtggatgcgcagagttcggctggggaagaggacgtgctcctgagcaaaagcccatcctcactcagcgctaacatcatcagcagcccgaaaggttctccttcttcatcaagaaaaagtggaaccagctgtccctccagcaaaaacagcagccctaatagcagcccacggactttggggaggagcaaagggaggctccggctgccccagattggcagcaaaaataaactgtcaagtagtaaagagaacttggatgccagcaaagaaaatggggctgggcagatatgtgagctggctgacgccttgagtcgagggcatgtgctggggggcagccaaccagagttggtcactcctcaggaccatgaggtagctttggccaatggattcctttatgagcatgaagcatgtggcaatggctacagcaatggtcagcttggaaaccacagtgaagaagacagcactgatgaccaaagagaagatactcgtattaagcctatttataatctatatgcaatttcgtgccattcaggaattctgggtgggggccattacgtcacttatgccaaaaacccaaactgcaagtggtactgttacaatgacagcagctgtaaggaacttcacccggatgaaattgacaccgactctgcctacattcttttctatgagcagcaggggatagactatgcacaatttctgccaaagactgatggcaaaaagatggcagacacaagcagtatggatgaagactttgagtctgattacaaaaagtactgtgtgttacagtaaagctaccactctggctgctagacagcttggcggtgagggagatgactccttgtagctgacatttggcaaaagcgtcactgaaaggcaagctaaatgtagttattttatcctgtggccctgaagcacaaaataaaaattctaattaaaatagttaactttaaaaatagtaatcattttattt

SEQ ID NO: 736116 - DNA, 2445 bp, Homo sapiens
ggagcggggtaagagggcgtgaggagggaaggagagggaggagagagaggagagagaagggcggagtaggaggcaggggaagggggcggggcggaagagtcacgtgatccggcatggaggcggtggcggcgaccgggaggagccgccggggcagaagccgcacttgttagtgtggggggaggtgggggcgggggacgccgacaccgtcaccgtcacccagggacgccgaggagaaggcgggaggggggtgggggcgagatcaggctccgaccccccgccgaggggatgaggggagcatgggtgccaaggagtcacggatcggattcctcagctacgaggaggcgctgaggagagttacagatgtagagctaaaacgactgaaggatgctttcaagaggacctgtggactctcatattacatgggccagcactgcttcatccgggaagtgcttggggatggagtgcctccaaaggttgctgaggtgatttactgttcttttggtggaacatccaaagggctgcacttcaataatttaatagttggacttgtcctccttacaagaggcaaagatgaagagaaagcaaaatacatttttagtcttttttcaagtgaatctgggaactatgttatacgggaagaaatggaaagaatgctccacgtggtggatggtaaagtcccagatacactcaggaagtgtttctcagagggtgaaaaggtaaactatgaaaagtttagaaattggctttttctaaacaaagatgcttttactttctctcgatggcttctatctggaggtgtgtatgttaccctcactgatgatagtgatactcctactttctaccaaactctggctggagtcacacatttggaggaatcagacatcattgatcttgagaaacgctattggttattgaaggctcaatcccggactggacgatttgatttagagacatttggcccattggtttcaccacctattcgtccatctctaagtgaaggtttgtttaatgcttttgatgaaaatcgtgacaatcacatagattttaaggagatatcctgtgggttatcagcctgttgcaggggacccctggctgaaagacaaaaattttgcttcaaggtatttgatgttgaccgtgatggagttctctccagggttgaactgagagacatggtggttgcacttttagaagtctggaaggacaaccgcactgatgatattcctgaattacatatggatctctctgatattgtagaaggcatactgaatgcacatgacaccacaaagatgggtcatcttactctggaagactatcagatctggagtgtgaaaaatgttcttgccaatgagtttttgaacctccttttccaggtgtgtcacatagttctggggttaagaccagctactccggaagaagaaggacaaattattagaggatggttagaacgagagagcaggtatggtctgcaagcaggacacaactggtttatcatctccatgcagtggtggcaacagtggaaagaatatgtcaaatacgatgccaaccctgtggtaattgagccatcatctgttttgaatggaggaaaatactcatttggaactgcagcccatcctatggagcaggtcgaagatagaattggaagcagcctcagttacgtgaatactacagaagagaaattttcagacaacatttctactgcatctgaagcctcagaaactgctggcagcggctacatcattaacactagaaggaggacgattaaaacgaactccacagctgattcatggaagagactatgaaatggtcccagaacctgtgtggagagcactttatcactggtatggagcaaacctggccttacctagaccagttatcaagaacagcaagacagacatcccagagctggaattatttccccgctatcttctcttcctgagacagcagcctgccactcggacacagcagtctaacatctgggtgaatatgggtatgatgagcctgagaatgtttcctcagcatttaccgagaggtaacttaagaatgcagcaagaataccatgcatttccttaaaaaaaaaaaaaaaaaaaaaaaaaaggtgaaaactacgttgctcgaagtctggtgccactgtattgatacacattcccatcagctttcctacagactcagtaattaatttttacagggcttagaactatggtcatgcacaagactagatgaggggttgaagcaaacattccaacagcaaactgagatgggatgtttccttttctacttacaaagaaaataaatagaaatagattttacatgctttatttctttgagacaagccattgtaaattgttactagactaagtagtagtataccagtcattgactggtcttttcaactccactcaaatttgtaaaaagcaattcctcttatactatcatcttttttgtttt

SEQ ID NO: 736117 - DNA, 4404 bp, Homo sapiens
ggagcggggtaagagggcgtgaggagggaaggagagggaggagagagaggagagagaagggcggagtaggaggcaggggaagggggcggggcggaagagtcacgtgatccggcatggaggcggtggcggcgaccgggaggagccgccggggcagaagccgcacttgttagtgtggggggaggtgggggcgggggacgccgacaccgtcaccgtcacccagggacgccgaggagaaggcgggaggggggtgggggcgagatcaggctccgaccccccgccgaggggatgaggggagcatgggtgccaaggagtcacggatcggattcctcagctacgaggaggcgctgaggagagttacagatgtagagctaaaacgactgaaggatgctttcaagaggacctgtggactctcatattacatgggccagcactgcttcatccgggaagtgcttggggatggagtgcctccaaaggttgctgaggtgtgtcacatagttctggggttaagaccagctactccggaagaagaaggacaaattattagaggatggttagaacgagagagcaggtatggtctgcaagcaggacacaactggtttatcatctccatgcagtggtggcaacagtggaaagaatatgtcaaatacgatgccaaccctgtggtaattgagccatcatctgttttgaatggaggaaaatactcatttggaactgcagcccatcctatggagcaggtcgaagatagaattggaagcagcctcagttacgtgaatactacagaagagaaattttcagacaacatttctactgcatctgaagcctcagaaactgctggcagcggctttctgtattctgccacaccaggggcagatgtttgctttgctcgacaacataacacttctgacaataacaaccagtgtttgctgggagccaatgggaatattttgttgcaccttaaccctcagaaaccaggggctattgataatcagccattagtaactcaagaaccagtaaaggctacatcattaacactagaaggaggacgattaaaacgaactccacagctgattcatggaagagactatgaaatggtcccagaacctgtgtggagagcactttatcactggtatggagcaaacctggccttacctagaccagttatcaagaacagcaagacagacatcccagagctggaattatttccccgctatcttctcttcctgagacagcagcctgccactcggacacagcagtctaacatctgggtgaatatgggaaatgtaccttctccgaatgcacctttaaagcgggtattagcctatacaggctgttttagtcgaatgcagaccatcaaggaaattcacgaatatctatctcaaaggctgcgcattaaagaggaagatatgcgcctgtggctatacaacagtgagaactaccttactcttctggatgatgaggatcataaattggaatatttgaaaatccaggatgaacaacacctggtaattgaagttcgcaacaaagatatgagttggcctgaggagatgtcttttatagcaaatagtagtaaaatagatagacacaaggttcccacagaaaagggagccacaggtctaagcaatctgggaaacacatgcttcatgaactcaagcatccagtgtgttagtaacacacagccactgacacagtattttatctcagggagacatctttatgaactcaacaggacaaatcccattggtatgaaggggcatatggctaaatgctatggtgatttagtgcaggaactttggagtggaactcagaagaatgttgccccattaaagcttcggtggaccatagcaaaatatgctcccaggtttaatgggtttcagcaacaggactcccaagaacttctggcttttctcttggatggtcttcatgaagatcttaatcgagtccatgaaaagccatatgtggaactgaaggacagtgatgggcgaccagactgggaagtagctgcagaggcctgggacaaccatctaagaagaaatagatcaattgttgtggatttgttccatgggcagctaagatctcaagtaaaatgcaagacatgtgggcatataagtgtccgatttgaccctttcaattttttgtctttgccactaccaatggacagttatatgcacttagaaataacagtgattaagttagatggtactacccctgtacggtatggactaagactgaatatggatgaaaagtacacaggtttaaaaaaacagctgagtgatctctgtggacttaattcagaacaaatccttctagcagaagtacatggttccaacataaagaactttcctcaggacaaccaaaaagtacgactctcagtgagtggatttttgtgtgcatttgaaattcctgtccctgtgtctccaatttcagcttctagtccaacacagacagatttctcctcttcgccatctacaaatgaaatgttcaccctaactaccaatggggacctaccccgaccaatattcatccccaatggaatgccaaacactgttgtgccatgtggaactgagaagaacttcacaaatggaatggttaatggtcacatgccatctcttcctgacagcccctttacaggttacatcattgcagtccaccgaaaaatgatgaggacagaactgtatttcctgtcatctcagaagaatcgccccagcctctttggaatgccattgattgttccatgtactgtgcatacccggaagaaagacctatatgatgcggtttggattcaagtatcccggttagcgagcccactcccacctcaggaagctagtaatcatgcccaggattgtgacgacagtatgggctatcaatatccattcactctacgagttgtgcagaaagatgggaactcctgtgcttggtgcccatggtatagattttgcagaggctgtaaaattgattgtggggaagacagagctttcattggaaatgcctatatcgctgtggattgggatcccacagcccttcaccttcgctatcaaacatcccaggaaagggttgtagatgagcatgagagtgtggagcagagtcggcgagcgcaagccgagcccatcaacctggacagctgtctccgtgctttcaccagtgaggaagagctaggggaaaatgagatgtactactgttccaagtgtaagacccactgcttagcaacaaagaagctggatctctggaggcttccacccatcctgattattcaccttaagcgatttcaatttgtaaatggtcggtggataaaatcacagaaaattgtcaaatttcctcgggaaagttttgatccaagtgcttttttggtaccaagagacccggctctctgccagcataaaccactcacaccccagggggatgagctctctgagcccaggattctggcaagggaggtgaagaaagtggatgcgcagagttcggctggggaagaggacgtgctcctgagcaaaagcccatcctcactcagcgctaacatcatcagcagcccgaaaggttctccttcttcatcaagaaaaagtggaaccagctgtccctccagcaaaaacagcagccctaatagcagcccacggactttggggaggagcaaagggaggctccggctgccccagattggcagcaaaaataaactgtcaagtagtaaagagaacttggatgccagcaaagaaaatggggctgggcagatatgtgagctggctgacgccttgagtcgagggcatgtgctggggggcagccaaccagagttggtcactcctcaggaccatgaggtagctttggccaatggattcctttatgagcatgaagcatgtggcaatggctacagcaatggtcagcttggaaaccacagtgaagaagacagcactgatgaccaaagagaagatactcgtattaagcctatttataatctatatgcaatttcgtgccattcaggaattctgggtgggggccattacgtcacttatgccaaaaacccaaactgcaagtggtactgttacaatgacagcagctgtaaggaacttcacccggatgaaattgacaccgactctgcctacattcttttctatgagcagcaggggatagactatgcacaatttctgccaaagactgatggcaaaaagatggcagacacaagcagtatggatgaagactttgagtctgattacaaaaagtactgtgtgttacagtaaagctaccactctggctgctagacagcttggcggtgagggagatgactccttgtagctgacatttggcaaaagcgtcactgaaaggcaagctaaatgtagttattttatcctgtggccctgaagcacaaaataaaaattctaattaaaatagttaactttaaaaatagtaatcattttattt

SEQ ID NO: 736118 - DNA, 6271 bp, Homo sapiens
  misc_feature (2018)..(2018): n is a, c, g, or t
  misc_feature (4691)..(4692): n is a, c, g, or t
cgtttatagataccaaggatgaggatgtggatacctttcggagctattatttagtctcccacactctcccgaagacatgtcccaattcttgtttaggatgaaaactaaaggactcattgccttcccccaggaaagctaggagacaagacaagagaacaaaatccttacattgaacttgcttcttcccatcagcgctggcatggaggagccctcttgcaccaggtagaagttggcagcctgagctctggagccagacttctggggctaaatcctggctctgcccttcctggtagaggaacataggcaggctcccccactcctgccggcttcctcatctggaatgtgggaatggcagtggtgcctagcgttgtggttgttctgaggatgaaaggaatccgcatgtttggattccctgaaaagcggagcctgtgacgtgcacttgagaacaggtgctttatttggggaatgatctctggaggcagaatgagggagtgagcagcaagacaggacacattttggaaaaccagcaggaggtgcatcattgagctagctcgcatggtgggcaacttctgtgaagtcccatcgagcccctctagggaattctgcaggacaggcctcagaatccacccctgtgcctcgtcgagcccctctagggaactctgcaggacgggcctcagaatccaccccgtgcctgcaggggaaagtggtctgcacatgccctgttgaggacgttctcaggatacacccgcatgggagtgaagacagtagaaggggaagaagaggggctaagcaaggtcaggtccaggtgcagcacagccagctccttgaggagctcttaagaatgagctgtgctgtgcatgggtccctccttgaggcaaacagcctgggcttctcaccccaccaggtagtcactgggcagagaagcggggtgagcaggacataactcccgggtaactctgagggacacagctccactcacctaagggcagtcttctacggaagatgtggcaggagctgtcggcaacacacgcagcccctggggaggagtccaccaacctagccacagggaccccaggaagcctgggtactcagagagcacctttcataacagcgtctgctattattactcaaaagcaacacccaatgtctgctccataccaggacctcctcccccatagtaaggggaggaaagggaagcacctccaccagccagggcacttccctttcctcctccttgggccatgcaacgggatgaaagctcacctttccctccccttttctctctcacctcttcacaggtttctgacagatgtgactacgtctttgtcaatgggaaagaaatgaaaggcaaggtcaacgtggtggtgaacttcacctaccagcacctgagcagccccctggagatgacggtgtgggtgccccggcttccgctgcagatcgaggtctccgacaccgagctcaatcagatcaagggttggagagtgcccatcgtctccagcaggaggcctgccggggacagtgaagaggaggaggatgatgagcggaggggccgcggctgcaccctgcagtaccagcacgccatggtgcgggtcctgacgcagtttgtggctgaggcggccggccctgggggacacctggcccacctgctgggctcagactggcaagtggacatcacggagctgataaatgacttcatgcaggtggaggagcccaggatcgccaagctgcaaggcggacagatcctgatggggcaggagcttgggatgaccaccattcagatcctgtctcctctgtcagacaccatcctcgctgaaaagaccatcactgtgctggacgagaaggtgaccatcacagacctcggggtgcagctggtgacagggctgtcactctccttgcagctcagcccaggaagcaacagggccatctttgccactgcagtggctcaggaacttctgcagaggccaaaacaggaagcagccatcagttgctgggtccagttcagtgatggctcagtcacncccttggatatttacgatgggaaagacttctccttgatggccacatctttggatgagaaggtagtctccatccaccaagaccccaaattcaagtggcctatcattgctgcggaaacagaaggacaaggcaccctggtcaaggtggaaatggttattagtgaatcctgccagaaatccaagcggaagagtgtgttagctgttggaacggcaaacatcaaagttaaatttggccaaaacgatgctaaccccaacaccagtgacagcagacacacaggggcaggggttcacatggaaaacaatgtcagtgacagaaggcccaaaaaaccctcgcaggaatgggggagtcaggaaggacagtactatggcagttcttctatgggactcatggagggacggggcaccacgacagacaggtccatcctgcagaagaagaaaggccaggaaagccttttagatgacaacagccacttgcagaccatccccagcgacctcaccagcttcccagcccaggtggacctccccagaagcaatggggaaatggatgggaatgaccttatgcaggcatccaaagggctgagcgacttagaaattgggatgtatgctttgttgggagtcttctgtttggccattttggtcttcttgataaactgtgtgacctttgcattaaaatacagacacaaacaggttcccttcgaggagcaggaagggatgagtcactctcatgactgggttgggttaagcaaccggacagagctgttggagaatcacatcaactttgcctcctcgcaagatgagcaaatcactgccattgacaggggcatggatttcgaggaaagtaaatatctcctcagcacaaactcccaaaaaagcatcaatgggcagctgttcaaacctttgggacccatcatcattgatgggaaagatcagaaaagtgagcccccaacatcccctacctcaaaaaggaaaagggtaaaatttaccaccttcaccgccgtctcctcagacgacgagtaccccaccaggaactccatcgtgatgagtagcgaggatgacattaagtgggtctgccaggatctggaccctggggactgcaaagagctgcacaactacatggagaggttacatgaaaatgtgtaagccagacacacacagacattggttctcactcacctttcagcctttaattccaggatgtgtagcaacggtgcccccggaagagaaacaaagcagcaggacaaaataaggatgacactatccatacagcctcagccaatgaccccggctcggcggcgaggcctggagtccgcatcgacgcacacattccagagtacagtgtcttgcttaagaggtttatcatgcatggcaagatttttaagacttgaaacaaaaacgagttctgaatcactgagcgtctgagagcgtccaggaaagaacagcctctctctctcgaatcaaagcaatttggatattgtaaaatccacatggctccaatattcaatattgcagactatggaagaaaagtacaactcaggtggagcatccatggatcgcatccatggatcaatgggaggaagcgtgtcatcgaaactggagcagcacatcttgctgtgagcgcgatcacaggcagtccagtgccgccgtcagctgtgggaggcatgattgtgagtcattgtctctcaaaggctgggccagagctgtctcagatcatggacaggccaaggaagtggctgacaaggactgaaagggaacatgtgggctaacaggccacaaatacctttgtaactacatgccaaggacaaacacatggacgcaaatcctctgagcccttcagggtacttctttatttgtaaactaaggatactgggcatagaatttgaatcaggttcaaagaaccacgctcttttgattcatatcaagttcacaatgtatccatttctattcctccactgcattgccatcctccccaaagccgttggtcacctgtgggtgggggagggagagggcagtttgtagtatttgctgggtcttttttctccccctgggttttgtgtcaactcccaagtgacattctgtagagaagctccccccgcaacctgggcatatgtcccacgccgtccgtctttgaagaggctggtctctagggcatgggcggtagtcacggtgaattccataccaggggatatacattcccttgctttactagaaagaaaacagggccacttgggatgggtctttcactgttcatggcagatctcctgtccaaagatgtggcctcgaggctgttgagacaaatcggggtgcctgtgtggaacgtgcagggcgtgtggagttgggggggttctgggtgtgaaagtggtggatccagcaggaagcccagcctcacacacaccggacagcacagaaaccttcttcatcttggaggtgcgaagggataaggggcatcagtgcatgtggtgaagatgcaggtttgcaagcacttggtcctgcagtcagccccgaaaggttcagcattgcttaagaccagccatgactctggatatccctgaatcccttcacttatgaagcctatgaagatgggggcaaggatacatcagagaattcctgcctcatctcacgctcactccaaggtagagaatggtgtgttgggtgattgccagccagataggatcctgnnaaagatggtcgggggcagcgggtggtgggcagaagaggccgtgctgttgaattgatcttctatttttccctctggtcattttctctctctctctgctcttcagttgtctgttttccagtctctctgtgtgtctgtctctgtatctctctcctcctttgaacctatcttctccctgcttcctctccatctcatctctgtaattttgagtgtgtgtctttactccttcttcctctccatagaattgaattctctttagatcatgtgtgtgtaaatttcaccagtttaccctcccaaccttagccctctcccctgcaactgtggtgctcttgagactgaggtttctgcagccagtaagtcacctgctcctgtccgcaagcttacctaccttgtttggttgggtgattaagctgtcaccccttttcaatgagaatcctttgctttcagtaacgtcctcatatttctttccattcttacctgtgtcatgttctgttgaatactgcagccgctgcccgcttccaaatccatctgcgtgtagaatgtactgtagattgtaagaatgtaatatatatttataaacttactgactgtaaatataaagtttgcattcagtggctttatggctgtcctttgtcttctacacgctgaccccctccaaggggctggcatcaattgcaaatggctctgcaaatgctgcagctctaaatgaaatgctgattgaaggatcccagcacaatccagttccacctttacatcgtgtagtgctgctccctgcattgaggggatgttgacacgtgatgacaaagtgcattgtgtaccaagtatctctcctccaggacctgaaaggatttgcaaataaatcacacgtgcaattctctcctaaaagcctgctgactgatggtggtaagtaagtggaaactgtggcaggcaagcatgcattccagcctccttttgggctgaggtgaggaaaattctctgtccttcctttgggtctcgagtgtacatacaacaactctggactgggttaaaaagttgattgtagattcctttatcaactgcagccccaagacaattcttagaaatctagatttctagcatcgcttaagaattcagacactggcaaaatggggcttccaatctgacttggcctcgatggggcagagtggcactgaggtttcgagtcctctccacccacgatgtcttctggacccagagttgaccaactccatttatgctccctctcaccactcttctaatacagaagtgtttctcccaagtcacagctctacccaaaagtgggggaaacagagagggaaggagccgtgtgttttcaagatcattcagaaagagctcattgctttacaaaagggaagaaaaatcctgtgtgtctcctaggcaaatatagaatgtcatgtctaaagaacacaactgaagacgccattatgatgcaaaccgtcatgcgatctatgtgcccagaatctgagaaagaactgataggaaagtcttaactgaaatgtccacgaggtgtcttttcgagtgtgaataaataagtgatgcggcttggtttctcttgcacctggct

SEQ ID NO: 736119 - DNA, 1817 bp, Homo sapiens
tgttccaaggaaccagtaattaatgcatggttataggtatacctggcttcaaaaaaaagaagtagccgtggaaagctatatgagaaaatcacaattttctgaatcaaatatttgtaaaaccatttggctatttaaagactcttagggtaaatactccctggaaaagcaagcaatccagacttatctggtctgcaaaccttgatttcagcttaatatcctttcctgaatctaattcattttcacccactaaggtcatttcatttaagatccattgtttttgaaattttgaagtagcccagtttggcagctctcagcacctgcctctgccctctcctatacttcaactatattgaactctagcttcaatctagttcctactaatccatgcaaaagttattaactgataagcccaatcttgttcaggcacgttcttctaaatgcctggacctaaataacttctgcttgggttaacttgtgtttcattctcaccttaggcctcagtgtggaaaggtaacacttaccttctgtgcaattgtcctttgtacaactgaagactgttaataaattcaggtctcacctccatgtctgaaaaggctatagtagctattcatggagatgggaatttgtctaattacctagccagagtttgcatatttaaggtaatatattcagctaccgtatcttttattcatagtgcctgttttccagcctttgatcagttttgtagttcccgtggataaactccaagatctaaagatcctctttcagtagcatatactaaaattaagtttagtgctcaaaaccctggtaacctacactggcccaaggttacagtaggtaattcaccgtctcacattagacaggccaatgcatcccttaggagctgccccactctcctctcacctaccaaaggattttctcaggtgtggttccaagcgataaagttctactgtcctcggccttccctgctggtaattcgcctttcagattagccaataacactgagctgatctctagggttaagaagagaacattgaactcattttgtccccatgtaccccacaggcttgaaacagaaaatgatgtaaacttttgtggcatacattcacccattttcccaccatatctttactatcctgtgttgatttttttttcaaattacaaagacaatacatgttctttgtgggaaatctgaaaaatactaccaaatagaaaataaaaatcacctgaattcaccacgaccacattgtttaaaaccacatttctgggttttaaatcagtcagtggctgggcccaaaggcacttttgggtaagataagtgaagaaatgcccacaaggccaaggtgtcacttaaaaaaacaaacaaaaaaaacaagccaaaaaaaaaaattctgtccgctaatgttttgcacgcatctaggagcagactcactgcaaacctctggttatgccattattcaggggtataaagaaagctttagaagtagcatagtcctgatgcctcctctaatgagttaaagctcttgggggaaattctaaaattgccagaccattttgtttctctgtgctcctacgaaaccagtcgggatactgagtgtttggcaatactgccacctactgaaagctgagcttcagagtgaggtgaaataaagacagaatgtaaaagcatctactttgttttaaacagcaaacaaatggaccagattaacaatgatcccatctggaatttaaaactctgaaagtgtcaacattgaaaggattaagcatatcatccggtcaaacttcccaccctacccacatacccaggcaacgtctat

SEQ ID NO: 736120 - DNA, 2334 bp, Homo sapiens
gagccgaggcgagcatctcccaccgccgccgccccgcgccccaggcgcccgccccccacccgctccagcgccctgccgcgggccaaacctccccaccatgccccgcaccccgcccgctcctgcgaccccccagccccgctcagtcccgagcgcccgcagtcgtcgcgccgccgcgccaagcatgcagtaaaggctgaaaatctgggtcacagctgaggaagacctcagacatggagtccaggatgtggcctgcgctgctgctgtcccacctcctccctctctggccactgctgttgctgcccctcccaccgcctgctcagggctcttcatcctcccctcgaaccccaccagccccagcccgccccccgtgtgccaggggaggcccctcggccccacgtcatgtgtgcgtgtgggagcgagcacctccaccaagccgatctcctcgggtcccaagatcacgtcggcaagtcctgcctggcactgcacccccagccaccccatcaggctttgaggaggggccgccctcatcccaatacccctgggctatcgtgtggggtcccaccgtgtctcgagaggatggaggggaccccaactctgccaatcccggatttctggactatggttttgcagcccctcatgggctcgcaaccccacaccccaactcagactccatgcgaggtgatggagatgggcttatccttggagaggcacctgccaccctgcggccattcctgttcgggggccgtggggaaggtgtggacccccagctctatgtcacaattaccatctccatcatcattgttctcgtggccactggcatcatcttcaagttctgctgggaccgcagccagaagcgacgcagaccctcagggcagcaaggtgccctgaggcaggaggagagccagcagccactgacagacctgtccccggctggagtcactgtgctgggggccttcggggactcacctacccccacccctgaccatgaggagccccgagggggaccccggcctgggatgccccaccccaagggggctccagccttccagttgaaccggattcccctggtgaatctgtgatgcccccaatgttggggtgcagccaagcaggaggccaaggggccggcacagcccccatcccactgagggtggggcagctgtggggagctggggccacaggggctcctggctcctgccccttgcacaccacccggaacactccccagccccacgggcaatcctatctgctcgccctcctgcaggtgggggcctcacatatctgtgacttcgggtccctgtccccacccttgtgcactcacatgaaagccttgcacactcacctccaccttcacaggccatttgcacacgctcctgcaccctctccccgtccataccgctccgctcagctgactctcatgttctctcgtctcacatttgcactctctccttcccacattctgtgctcagctcactcagtggtcagcgtttcctgcacactttacctctcatgtgcgtttcccggcctgatgttgtggtggtgtgcggcgtgctcactctctccctcatgaacacccacccacctcgtttccgcagcccctgcgtgctgctccagaggtgggtgggaggtgagctgggggctccttgggccctcatcggtcatggtctcgtcccattccacaccatttgtttctctgtctccccatcctactccaaggatgccggcatcaccctgagggctcccccttgggaatggggtagtgaggccccagacttcacccccagcccactgctaaaatctgttttctgacagatgggttttggggagtcgcctgctgcactacatgagaaagggactcccatttgcccttccctttctcctacagtcccttttgtcttgtctgtcctggctgtctgtgtgtgtgccattctctggacttcagagccccctgagccagtcctcccttcccagcctccctttgggcctccctaactccacctaggctgccagggaccggagtcagctggttcaaggccatcgggagctctgcctccaagtctacccttcccttcccggactccctcctgtcccctcctttcctccctccttccttccactctccttccttttgcttccctgccctttccccctcctcaggttcttccctccttctcactggtttttccaccttcctccttcccttcttccctggctcctaggctgtgatatatatttttgtattatctctttcttcttcttgtggtgatcatcttgaattactgtgggatgtaagtttcaaaattttcaaataaagcctttgcaagataaaaaaaaaaa

SEQ ID NO: 736121 - DNA, 2706 bp, Homo sapiens
gagccgaggcgagcatctcccaccgccgccgccccgcgccccaggcgcccgccccccacccgctccagcgccctgccgcgggccaaacctccccaccatgccccgcaccccgcccgctcctgcgaccccccagccccgctcagtcccgagcgcccgcagtcgtcgcgccgccgcgccaagcatgcagtaaaggctgaaaatctgggtcacagctgaggaagacctcagacatggagtccaggatgtggcctgcgctgctgctgtcccacctcctccctctctggccactgctgttgctgcccctcccaccgcctgctcagggctcttcatcctcccctcgaaccccaccagccccagcccgccccccgtgtgccaggggaggcccctcggccccacgtcatgtgtgcgtgtgggagcgagcacctccaccaagccgatctcctcgggtcccaagatcacgtcggcaagtcctgcctggcactgcacccccagccaccccatcaggctttgaggaggggccgccctcatcccaatacccctgggctatcgtgtggggtcccaccgtgtctcgagaggatggaggggaccccaactctgccaatcccggatttctggactatggttttgcagcccctcatgggctcgcaaccccacaccccaactcagactccatgcgaggtgatggagatgggcttatccttggagaggcacctgccaccctgcggccattcctgttcgggggccgtggggaaggtgtggacccccagctctatgtcacaattaccatctccatcatcattgttctcgtggccactggcatcatcttcaagttctgctgggaccgcagccagaagcgacgcagaccctcagggcagcaaggtgccctgaggcaggaggagagccagcagccactgacagacctgtccccggctggagtcactgtgctgggggccttcggggactcacctacccccacccctgaccatgaggagccccgagggggaccccggcctgggatgccccaccccaagggggctccagccttccagttgaaccggtgagggcaggggcaatgggatgggagggcaaagagggaaggcaacttaggtcttcagagctggggtgggggtgccctctggatgggtagtgaggaggcaggcgtggcctcccacagcccctggccctcccaagggggctggaccagctcctctctgggaggcacccttccttctcccagtctctcaggatctgtgtcctattctctgctgcccataactccaactctgccctctttggttttttctcatgccaccttgtctaagacaactctgccctcttaaccttgattccccctctttgtcttgaacttccccttctattctggcctaccccttggttcctgactgtgccctttccctcttcctctcaggattcccctggtgaatctgtgatgcccccaatgttggggtgcagccaagcaggaggccaaggggccggcacagcccccatcccactgagggtggggcagctgtggggagctggggccacaggggctcctggctcctgccccttgcacaccacccggaacactccccagccccacgggcaatcctatctgctcgccctcctgcaggtgggggcctcacatatctgtgacttcgggtccctgtccccacccttgtgcactcacatgaaagccttgcacactcacctccaccttcacaggccatttgcacacgctcctgcaccctctccccgtccataccgctccgctcagctgactctcatgttctctcgtctcacatttgcactctctccttcccacattctgtgctcagctcactcagtggtcagcgtttcctgcacactttacctctcatgtgcgtttcccggcctgatgttgtggtggtgtgcggcgtgctcactctctccctcatgaacacccacccacctcgtttccgcagcccctgcgtgctgctccagaggtgggtgggaggtgagctgggggctccttgggccctcatcggtcatggtctcgtcccattccacaccatttgtttctctgtctccccatcctactccaaggatgccggcatcaccctgagggctcccccttgggaatggggtagtgaggccccagacttcacccccagcccactgctaaaatctgttttctgacagatgggttttggggagtcgcctgctgcactacatgagaaagggactcccatttgcccttccctttctcctacagtcccttttgtcttgtctgtcctggctgtctgtgtgtgtgccattctctggacttcagagccccctgagccagtcctcccttcccagcctccctttgggcctccctaactccacctaggctgccagggaccggagtcagctggttcaaggccatcgggagctctgcctccaagtctacccttcccttcccggactccctcctgtcccctcctttcctccctccttccttccactctccttccttttgcttccctgccctttccccctcctcaggttcttccctccttctcactggtttttccaccttcctccttcccttcttccctggctcctaggctgtgatatatatttttgtattatctctttcttcttcttgtggtgatcatcttgaattactgtgggatgtaagtttcaaaattttcaaataaagcctttgcaagataaaaaaaaaaa

SEQ ID NO: 736122 - DNA, 2243 bp, Homo sapiens
  misc_feature (2079)..(2080): n is a, c, g, or t
  misc_feature (2084)..(2084): n is a, c, g, or t
gagccgaggcgagcatctcccaccgccgccgccccgcgccccaggcgcccgccccccacccgctccagcgccctgccgcgggccaaacctccccaccatgccccgcaccccgcccgctcctgcgaccccccagccccgctcagtcccgagcgcccgcagtcgtcgcgccgccgcgccaagcatgcagtaaaggctgaaaatctgggtcacagctgaggaagacctcagacatggagtccaggatgtggcctgcgctgctgctgtcccacctcctccctctctggccactgctgttgctgcccctcccaccgcctgctcagggctcttcatcctcccctcgaaccccaccagccccagcccgccccccgtgtgccaggggaggcccctcggccccacgtcatgtgtgcgtgtgggagcgagcacctccaccaagccgatctcctcgggtcccaagatcacgtcggcaagtcctgcctggcactgcacccccagccaccccatcaggctttgaggaggggccgccctcatcccaatacccctgggctatcgtgtggggtcccaccgtgtctcgagaggatggaggggaccccaactctgccaatcccggatttctggactatggttttgcagcccctcatgggctcgcaaccccacaccccaactcagactccatgcgaggtgatggagatgggcttatccttggagaggcacctgccaccctgcggccattcctgttcgggggccgtggggaaggtgtggacccccagctctatgtcacaattaccatctccatcatcattgttctcgtggccactggcatcatcttcaagttctgctgggaccgcagccagaagcgacgcagaccctcagggcagcaaggtgccctgaggcaggaggagagccagcagccactgacagacctgtccccggctggagtcactgtgctgggggccttcggggactcacctacccccacccctgaccatgaggagccccgagggggaccccggcctgggatgccccaccccaagggggctccagccttccagttgaaccggtgagggcaggggcaatgggatgggagggcaaagagggaaggcaacttaggtcttcagagctggggtgggggtgccctctggatgggtagtgaggaggcaggcgtggcctcccacagcccctggccctcccaagggggctggaccagctcctctctgggaggcacccttccttctcccagtctctcaggatctgtgtcctattctctgctgcccataactccaactctgccctctttggttttttctcatgccaccttgtctaagacaactctgccctcttaaccttgattccccctctttgtcttgaacttccccttctattctggcctaccccttggttcctgactgtgccctttccctcttcctctcaggattcccctggtgaatctgtgatgcccccaatgttggggtgcagccaagcaggaggccaaggggccggcacagcccccatcccactgagggtggggcagctgtggggagctggggccacaggggctcctggctcctgccccttgcacaccacccggaacactccccagccccacgggcaatcctatctgctcgccctcctgcaggtgggggcctcacatatctgtgacttcgggtccctgtccccacccttgtgcactcacatgaaagccttgcacactcacctccaccttcacaggccatttgcacacgctcctgcaccctctccccgtccataccgctccgctcagctgactctcatgttctctcgtctcacatttgcactctctccttcccacattctgtgctcagctcactcagtggtcagcgtttcctgcacactttacctctcatgtgcgtttcccggcctgatgttgtggtggtgtgcggcgtgctcactctctccctcatgaacacccacccacctcgtttccgcagcccctgcgtgctgctccagaggtgggtgggaggtgagctgggggctccttgggccctcatcggtcatggtctcgtcccattccacaccatttgtttctctgtctcccctctatcnnggtncggtccctgggttccttggattgttgttgggcccatttccccgccgtgacatttgtttccaaggttggggccccgcatgaaggcgcggcgctcttccgccttgttgcggcggtgtgtctacacacgcctctccttttaccaggggcagaggctctcttg

SEQ ID NO: 736123 - DNA, 2103 bp, Homo sapiens
gagccgaggcgagcatctcccaccgccgccgccccgcgccccaggcgcccgccccccacccgctccagcgccctgccgcgggccaaacctccccaccatgccccgcaccccgcccgctcctgcgaccccccagccccgctcagtcccgagcgcccgcagtcgtcgcgccgccgcgccaagcatgcagtaaaggctgaaaatctgggtcacagctgaggaagacctcagacatggagtccaggatgtggcctgcgctgctgctgtcccacctcctccctctctggccactgctgttgctgcccctcccaccgcctgctcagggctcttcatcctcccctcgaaccccaccagccccagcccgccccccgtgtgccaggggaggcccctcggccccacgtcatgtgtgcgtgtgggagcgagcacctccaccaagccgatctcctcgggtcccaagatcacgtcggcaagtcctgcctggcactgcacccccagccaccccatcaggctttgaggaggggccgccctcatcccaatacccctgggctatcgtgtggggtcccaccgtgtctcgagaggatggaggggaccccaactctgccaatcccggatttctggactatggttttgcagcccctcatgggctcgcaaccccacaccccaactcagactccatgcgaggtgatggagatgggcttatccttggagaggcacctgccaccctgcggccattcctgttcgggggccgtggggaaggtgtggacccccagctctatgtcacaattaccatctccatcatcattgttctcgtggccactggcatcatcttcaagttctgctgggaccgcagccagaagcgacgcagaccctcagggcagcaaggtgccctgaggcaggaggagagccagcagccactgacagacctgtccccggctggagtcactgtgctgggggccttcggggactcacctacccccacccctgaccatgaggagccccgagggggaccccggcctgggatgccccaccccaagggggctccagccttccagttgaaccggattcccctggtgaatctgtgatgcccccaatgttggggtgcagccaagcaggaggccaaggggccggcacagcccccatcccactgagggtggggcagctgtggggagctggggccacaggggctcctggctcctgccccttgcacaccacccggaacactccccagccccacgggcaatcctatctgctcgccctcctgcaggtgggggcctcacatatctgtgacttcgggtccctgtccccacccttgtgcactcacatgaaagccttgcacactcacctccaccttcacaggccatttgcacacgctcctgcaccctctccccgtccataccgctccgctcagctgactctcatgttctctcgtctcacatttgcactctctccttcccacattctgtgctcagctcactcagtggtcagcgtttcctgcacactttacctctcatgtgcgtttcccggcctgatgttgtggtggtgtgcggcgtgctcactctctccctcatgaacacccacccacctcgtttccgcagcccctgcgtgctgctccagaggtgggtgggaggtgagctgggggctccttgggccctcatcggtcatggtctcgtcccattccacaccatttgtttctctgtctccccatcctactccaaggatgccggcatcaccctgagggctcccccttgggaatggggtagtgaggccccagacttcacccccagcccactgctaaaatctgttttctgacagatgggttttggggagtcgcctgctgcactacatgagaaagggactcccatttgcccttccctttctcctacagtcccttttgtcttgtctgtcctggctgtctgtgtgtgtgccattctctggacttcagagccccctgagccagtcctcccttcccagccttccctggctcctaggctgtgatatatatttttgtattatctctttcttcttcttgtggtgatcatcttgaattactgtgggatgtaagtttcaaaattttcaaataaagcctttgcaagataaaaaaaaaaa

SEQ ID NO: 736124 - DNA, 2523 bp, Homo sapiens; identical to SEQ ID NO: 67715

SEQ ID NO: 736125 - DNA, 1917 bp, Homo sapiens; identical to SEQ ID NO: 67718

SEQ ID NO: 736126 - DNA, 421 bp, Homo sapiens; identical to SEQ ID NO: 57105

SEQ ID NO: 736127 - DNA, 1414 bp, Homo sapiens
ctaaaggatccccactaagggctgttcacctgccccagggactcagaacacacatgactctccccacttgagctcaggatcccggcattacacggggcgcgctgagccccagatgtccctaacccctttccagcaccctccagccttgcagaagcagccaccatgccagtctctaagtgcccaaaaaagtcggagtccctgtggaaggggtgggaccggaaggcccagaggaacggcctgcggagccaggtatacgctgtgaatggcgactactatgtgggcgagtggaaggacaacgtgaaacacgggaaaggaacacaggtctggaagaagaaaggagccatctatgagggggactggaagtttgggaagcgagacggctacggcaccctcagccttcctgaccaacagacaggaaagtgcaggagagtctactcaggctggtggaaaggtgataagaaatcgggttatgggatccagtttttcggacccaaggagtattatgagggtgactggtgtggcagccagcgcagcgggtggggccgcatgtattacagcaacggcgacatctacgagggacagtgggagaacgacaagcccaacggggagggcatgctgcgcctgaagaacgggaaccgctacgagggctgctgggagagaggcatgaagaacggggcggggcgtttcttccatctggaccacggccagctgtttgaaggcttctgggtggacaatatggccaaatgcgggacgatgatcgactttggccgtgacgaggcccctgagcccactcagttccccattcctgaggtcaaaatcctagaccctgatggtgtgctggcggagccttggccatgttcaggaagacagaggaaggagattgatgccagagaacacaaacgcttcaggagaaattcaagcctgtgtcacccgatcgctcagaccagtgcggctctggctggaggagtcagcagcagctccaggcatgaccccggcaccctcatagggcccctcactacccccagcactgggtcatttcttgccaataggaaggctggtgcttctctcccaggctgtcctcgggaccctcttcattctctgatctcatcctggaatgcatgagaataaagaataaccaagtggtataaacctgggcctatgggataaggatggggcactcgagggggctcagcagggctttcaggtttagaagagggaagacctgccttggctgggctgcctgggtttagcttgggggagtaagggcaggtcttaggccgggtgcagtggctcattcctgtaatcccagaacttgggaggccaaggtaagaggactgcctgaggccaggagttcgagaccagcttaggcaacatagcaagaccctgactctacaaaaaaaaattttaaaatata

SEQ ID NO: 736128 - DNA, 1229 bp, Homo sapiens
ctaaaggatccccactaagggctgttcacctgccccagggactcagaacacacatgactctccccacttgagctcaggatcccggcattacacggggcgcgctgagccccagatgtccctaacccctttccagcaccctccagccttgcagaagcagccaccatgccagtctctaagtgcccaaaaaagtcggagtccctgtggaaggggtgggaccggaaggcccagaggaacggcctgcggagccaggtatacgctgtgaatggcgactactatgtgggcgagtggaaggacaacgtgaaacacgggaaaggaacacaggtctggaagaagaaaggagccatctatgagggggactggaagtttgggaagcgagacggctacggcaccctcagccttcctgaccaacagacaggaaagtgcaggagagtctactcaggctggtggaaaggtgataagaaatcgggttatgggatccagtttttcggacccaaggagtattatgagggtgactggtgtggcagccagcgcagcgggtggggccgcatgtattacagcaacggcgacatctacgagggacagtgggagaacgacaagcccaacggggagggcatgctgcgcctgagtcaaaatcctagaccctgatggtgtgctggcggagccttggccatgttcaggaagacagaggaaggagattgatgccagagaacacaaacgcttcaggagaaattcaagcctgtgtcacccgatcgctcagaccagtgcggctctggctggaggagtcagcagcagctccaggcatgaccccggcaccctcatagggcccctcactacccccagcactgggtcatttcttgccaataggaaggctggtgcttctctcccaggctgtcctcgggaccctcttcattctctgatctcatcctggaatgcatgagaataaagaataaccaagtggtataaacctgggcctatgggataaggatggggcactcgagggggctcagcagggctttcaggtttagaagagggaagacctgccttggctgggctgcctgggtttagcttgggggagtaagggcaggtcttaggccgggtgcagtggctcattcctgtaatcccagaacttgggaggccaaggtaagaggactgcctgaggccaggagttcgagaccagcttaggcaacatagcaagaccctgactctacaaaaaaaaattttaaaatata

SEQ ID NO: 736129 - DNA, 2406 bp, Homo sapiens
tcacattacaagactcgttgaggctaataagcagcggtatctttttctcaagaaggtgaaaaaaatagatatgattctttccttgccttcctcctatgtgaggaatgtgcgtcgcttgggtacatgtggacacttgaaagatatttgatagaattctgggaaaacggaagcagtcagttcctctgagtcaaataagaaacgacacacgtggctctcatcatgtttctattggacagcgctgccctggagcctcggcaagtcatttggcttcttcgcgtctttcatgtgtcttctccagactgtaagcttcctgtggacaaggcctgctccgttcaaggctcaatctccagctcctgacacaccatgcgctaggtgctcagtcactaatggtctcgcgaaggagtgatcagtgagtgaagcaggggctgctgcatgggaaaggtgagcgggctggaaatgggtagtccccgcggcgtctcccagtcgggctcctcccgaggaggaaggaaggagagaccccaggtgtagtcgaggggccgggagggaggaggggagggtcgctccaccctggagcgggaatgctgcagggcagctccgggtcgccaggcggcggtttccaggcaacgaccgaacacagacgcgggctagacgctggcgctgagcaacctgaggcctgcagactccgactgggcccctgggcgggcgggacggaccgcggccaaggcgggggcgctggacggtggcggcatggaggacgacgaggaggagaccaccgcgtccacgctgcggggcaagcccaggccgccgcccgtctcggcgcagtccgccttcagctacatcccgccgcggcgcctggaccccaaagagcacagctactactaccgcccggcgcggacaggaattatttccctctatgattgtatttttaagaggcgcctagattatgatcagaagttgcaccgagatgacagagaacatgcaaaaagcctgggacttcatgttaacgaagaggaacaggagaggccggttggagtgctgacgtcttctgtctatgggaagcgcatcaatcagcccattgagcccctaaaccgggactttggccgtgccaaccatgtgcaggctgacttctacaggaagaacgacatccccagcctcaaggaacccggctttgggcacattgctccatcctgaagcatccccgtggcccacagggcatgtccgataccctgtggcctggcaagtttgcacagcgagaaggtggcatctggagcctcctttccccttctcatgacgcctaggagcttggctatgcctgtgttgcatctctacagtgggacacatgaacacgttagcagcccccctcaggttgctgggttaggagcctgaccaacaacacctttagtacatgtgaagagtctctgatgtgatgattttcagctggaattatttttgatcaaatgaatctggagaccgattcattgtgagcacctgaataaaatgaaaactttgtttccccttggtaactgttgggttggtttctgttcactggctctctacatttgccaggattctttggggaggcagtcacaggagtgaggtgcagttgcttttcccacgagttaggggaactcctgctgcctgaacacaaacaaccctgacatgttcccttctccaagaggagatgtgatgacaattgtcttttggcacaattgaactctagaaactccatttttgtttttccagaggtctgaatcccaaataacagaattttgtgcagtagggaccaggagccctagtaaggatgggtggccctggtggccagcaatgctcactattactgctcagagagagggggccagtcatgggaagaggctagatttcggtgttcaacaaacttgggtaaaattctggttgctgcattttctagatttgtgttctagggcaagtcatatcatctacatgagcagacatttcctcatatttaaagtggaatttccaaacctagaagagttcatgcgggaggcaatgagctgctggagcacaggcataacacaggtacccagtgtgtgccccacccagtgccccgtcatcacagcaatgacttgactttaaacagtcttctttttggaagcagtcgcttgtaacctaagttggaaatacttactttggagataatttgaaacttacccaagtattaaagtatcatcagctacatttttaatgaatggatcccttggaagaaatcatctctcatctaccatgattaaatttcccacagtttagcagtgaatgggcaggtggcctaattaatttcaatactgatcgctccatcactggttttattgttttgaatatggaaaaaggattctctaaaaataaatgacactgaattccggcaatttcaag

SEQ ID NO: 736130 - DNA, 2657 bp, Homo sapiens
tatatttgataatatttttaataattgcataacctttctatatttgttttcaaaagtaaagcaaagcaagaaaaatgaatgaaaaaaaattgttttacttgctagcacaacccctgcagcaacagtgatagtctttgggcctatcaatagggggcagcaaagttcaggactttgggctgcagcagttgaaactagaggatctctggaggagagagtggatcctctctgagtgtgtgttgtgagtgtgtgtgtagatggcaggcaggcaggagctgtggaagagtgtggtgacagttctgcctgaacaacacaggcagtcttctttacctttccttgccttcctcctatgtgaggaatgtgcgtcgcttgggtacatgtggacacttgaaagatatttgatagaattctgggaaaacggaagcagtcagttcctctgagtcaaataagaaacgacacacgtggctctcatcatgtttctattggacagcgctgccctggagcctcggcaagtcatttggcttcttcgcgtctttcatgtgtcttctccagactgtaagcttcctgtggacaaggcctgctccgttcaaggctcaatctccagctcctgacacaccatgcgctaggtgctcagtcactaatggtctcgcgaaggagtgatcagtgagtgaagcaggggctgctgcatgggaaaggtgagcgggctggaaatgggtagtccccgcggcgtctcccagtcgggctcctcccgaggaggaaggaaggagagaccccaggtgtagtcgaggggccgggagggaggaggggagggtcgctccaccctggagcgggaatgctgcagggcagctccgggtcgccaggcggcggtttccaggcaacgaccgaacacagacgcgggctagacgctggcgctgagcaacctgaggcctgcagactccgactgggcccctgggcgggcgggacggaccgcggccaaggcgggggcgctggacggtggcggcatggaggacgacgaggaggagaccaccgcgtccacgctgcggggcaagcccaggccgccgcccgtctcggcgcagtccgccttcagctacatcccgccgcggcgcctggaccccaaagagcacagctactactaccgcccggcgcggacaggaattatttccctctatgattgtatttttaagaggcgcctagattatgatcagaagttgcaccgagatgacagagaacatgcaaaaagcctgggacttcatgttaacgaagaggaacaggagaggccggttggagtgctgacgtcttctgtctatgggaagcgcatcaatcagcccattgagcccctaaaccgggactttggccgtgccaaccatgtgcaggctgacttctacaggaagaacgacatccccagcctcaaggaacccggctttgggcacattgctccatcctgaagcatccccgtggcccacagggcatgtccgataccctgtggcctggcaagtttgcacagcgagaaggtggcatctggagcctcctttccccttctcatgacgcctaggagcttggctatgcctgtgttgcatctctacagtgggacacatgaacacgttagcagcccccctcaggttgctgggttaggagcctgaccaacaacacctttagtacatgtgaagagtctctgatgtgatgattttcagctggaattatttttgatcaaatgaatctggagaccgattcattgtgagcacctgaataaaatgaaaactttgtttccccttggtaactgttgggttggtttctgttcactggctctctacatttgccaggattctttggggaggcagtcacaggagtgaggtgcagttgcttttcccacgagttaggggaactcctgctgcctgaacacaaacaaccctgacatgttcccttctccaagaggagatgtgatgacaattgtcttttggcacaattgaactctagaaactccatttttgtttttccagaggtctgaatcccaaataacagaattttgtgcagtagggaccaggagccctagtaaggatgggtggccctggtggccagcaatgctcactattactgctcagagagagggggccagtcatgggaagaggctagatttcggtgttcaacaaacttgggtaaaattctggttgctgcattttctagatttgtgttctagggcaagtcatatcatctacatgagcagacatttcctcatatttaaagtggaatttccaaacctagaagagttcatgcgggaggcaatgagctgctggagcacaggcataacacaggtacccagtgtgtgccccacccagtgccccgtcatcacagcaatgacttgactttaaacagtcttctttttggaagcagtcgcttgtaacctaagttggaaatacttactttggagataatttgaaacttacccaagtattaaagtatcatcagctacatttttaatgaatggatcccttggaagaaatcatctctcatctaccatgattaaatttcccacagtttagcagtgaatgggcaggtggcctaattaatttcaatactgatcgctccatcactggttttattgttttgaatatggaaaaaggattctctaaaaataaatgacactgaattccggcaatttcaag

SEQ ID NO: 736131 - DNA, 2510 bp, Homo sapiens
aacttttcttggctgtacacccaccaatcacgagtatacagcttaacacattttcaacaaacggaacgcaggtattgacccagcattcagatcaagggccaacgtaaacacactggcaaaggattgcaagagccctgtccacagcagctgagttctgccagattctgtaaattcatgcagccttacacctgcactggccaatactgtaactgctagccacacgtggccaccgagagcttgaaaggcagctagtgccatttgttgaaatgataacgttttggacttactgagtcaaataagaaacgacacacgtggctctcatcatgtttctattggacagcgctgccctggagcctcggcaagtcatttggcttcttcgcgtctttcatgtgtcttctccagactgtaagcttcctgtggacaaggcctgctccgttcaaggctcaatctccagctcctgacacaccatgcgctaggtgctcagtcactaatggtctcgcgaaggagtgatcagtgagtgaagcaggggctgctgcatgggaaaggtgagcgggctggaaatgggtagtccccgcggcgtctcccagtcgggctcctcccgaggaggaaggaaggagagaccccaggtgtagtcgaggggccgggagggaggaggggagggtcgctccaccctggagcgggaatgctgcagggcagctccgggtcgccaggcggcggtttccaggcaacgaccgaacacagacgcgggctagacgctggcgctgagcaacctgaggcctgcagactccgactgggcccctgggcgggcgggacggaccgcggccaaggcgggggcgctggacggtggcggcatggaggacgacgaggaggagaccaccgcgtccacgctgcggggcaagcccaggccgccgcccgtctcggcgcagtccgccttcagctacatcccgccgcggcgcctggaccccaaagagcacagctactactaccgcccggcgcggacaggaattatttccctctatgattgtatttttaagaggcgcctagattatgatcagaagttgcaccgagatgacagagaacatgcaaaaagcctgggacttcatgttaacgaagaggaacaggagaggccggttggagtgctgacgtcttctgtctatgggaagcgcatcaatcagcccattgagcccctaaaccgggactttggccgtgccaaccatgtgcaggctgacttctacaggaagaacgacatccccagcctcaaggaacccggctttgggcacattgctccatcctgaagcatccccgtggcccacagggcatgtccgataccctgtggcctggcaagtttgcacagcgagaaggtggcatctggagcctcctttccccttctcatgacgcctaggagcttggctatgcctgtgttgcatctctacagtgggacacatgaacacgttagcagcccccctcaggttgctgggttaggagcctgaccaacaacacctttagtacatgtgaagagtctctgatgtgatgattttcagctggaattatttttgatcaaatgaatctggagaccgattcattgtgagcacctgaataaaatgaaaactttgtttccccttggtaactgttgggttggtttctgttcactggctctctacatttgccaggattctttggggaggcagtcacaggagtgaggtgcagttgcttttcccacgagttaggggaactcctgctgcctgaacacaaacaaccctgacatgttcccttctccaagaggagatgtgatgacaattgtcttttggcacaattgaactctagaaactccatttttgtttttccagaggtctgaatcccaaataacagaattttgtgcagtagggaccaggagccctagtaaggatgggtggccctggtggccagcaatgctcactattactgctcagagagagggggccagtcatgggaagaggctagatttcggtgttcaacaaacttgggtaaaattctggttgctgcattttctagatttgtgttctagggcaagtcatatcatctacatgagcagacatttcctcatatttaaagtggaatttccaaacctagaagagttcatgcgggaggcaatgagctgctggagcacaggcataacacaggtacccagtgtgtgccccacccagtgccccgtcatcacagcaatgacttgactttaaacagtcttctttttggaagcagtcgcttgtaacctaagttggaaatacttactttggagataatttgaaacttacccaagtattaaagtatcatcagctacatttttaatgaatggatcccttggaagaaatcatctctcatctaccatgattaaatttcccacagtttagcagtgaatgggcaggtggcctaattaatttcaatactgatcgctccatcactggttttattgttttgaatatggaaaaaggattctctaaaaataaatgacactgaattccggcaatttcaag

SEQ ID NO: 736132 - DNA, 880 bp, Homo sapiens
  misc_feature (22)..(22): n is a, c, g, or t
  misc_feature (31)..(31): n is a, c, g, or t
  misc_feature (39)..(39): n is a, c, g, or t
ccttccttcaacagtctgggantgaaagganctctgccnacctttccttgccttcctcctatgtgaggaatgtgcgtcgcttgggtacatgtggacacttgaaagatatttgatagaattctgggaaaacggaagcagtcagttcctctgagtcaaataagaaacgacacacgtggctctcatcatgtttctattggacagcgctgccctggagcctcggcaagtcatttggcttcttcgcgtctttcatgtgtcttctccagactgtaagcttcctgtggacaaggcctgctccgttcaaggctcaatctccagctcctgacacaccatgcgctaggtgctcagtcactaatggtctcgcgaaggagtgatcagtgagtgaagcaggggctgctgcatgggaaaggtgagcgggctggaaatgggtagtccccgcggcgtctcccagtcgggctcctcccgaggaggaaggaaggagagaccccaggtgtagtcgaggggccgggagggaggaggggagggtcgctccaccctggagcgggaatgctgcagggcagctccgggtcgccaggcggcggtttccaggcaacgaccgaacacagacgcgggctagacgctggcgctgagcaacctgaggcctgcagactccgactgggcccctgggcgggcgggacggaccgcggccaaggcgggggcgctggacggtggcggcatggaggacgacgaggaggagaccaccgcgtccacgctgcggggcaagcccaggccgccgcccgtctcggcgcagtccgccttcagctacatcccgccgcggcgcctggaccccaaagagcacagctactactaccgcccggcgcgggtgaggaccgcggactccgct

SEQ ID NO: 736133 - DNA, 2371 bp, Homo sapiens
  misc_feature (22)..(22): n is a, c, g, or t
  misc_feature (31)..(31): n is a, c, g, or t
  misc_feature (39)..(39): n is a, c, g, or t
ccttccttcaacagtctgggantgaaagganctctgccnacctttccttgccttcctcctatgtgaggaatgtgcgtcgcttgggtacatgtggacacttgaaagatatttgatagaattctgggaaaacggaagcagtcagttcctctgagtcaaataagaaacgacacacgtggctctcatcatgtttctattggacagcgctgccctggagcctcggcaagtcatttggcttcttcgcgtctttcatgtgtcttctccagactgtaagcttcctgtggacaaggcctgctccgttcaaggctcaatctccagctcctgacacaccatgcgctaggtgctcagtcactaatggtctcgcgaaggagtgatcagtgagtgaagcaggggctgctgcatgggaaaggtgagcgggctggaaatgggtagtccccgcggcgtctcccagtcgggctcctcccgaggaggaaggaaggagagaccccaggtgtagtcgaggggccgggagggaggaggggagggtcgctccaccctggagcgggaatgctgcagggcagctccgggtcgccaggcggcggtttccaggcaacgaccgaacacagacgcgggctagacgctggcgctgagcaacctgaggcctgcagactccgactgggcccctgggcgggcgggacggaccgcggccaaggcgggggcgctggacggtggcggcatggaggacgacgaggaggagaccaccgcgtccacgctgcggggcaagcccaggccgccgcccgtctcggcgcagtccgccttcagctacatcccgccgcggcgcctggaccccaaagagcacagctactactaccgcccggcgcggacaggaattatttccctctatgattgtatttttaagaggcgcctagattatgatcagaagttgcaccgagatgacagagaacatgcaaaaagcctgggacttcatgttaacgaagaggaacaggagaggccggttggagtgctgacgtcttctgtctatgggaagcgcatcaatcagcccattgagcccctaaaccgggactttggccgtgccaaccatgtgcaggctgacttctacaggaagaacgacatccccagcctcaaggaacccggctttgggcacattgctccatcctgaagcatccccgtggcccacagggcatgtccgataccctgtggcctggcaagtttgcacagcgagaaggtggcatctggagcctcctttccccttctcatgacgcctaggagcttggctatgcctgtgttgcatctctacagtgggacacatgaacacgttagcagcccccctcaggttgctgggttaggagcctgaccaacaacacctttagtacatgtgaagagtctctgatgtgatgattttcagctggaattatttttgatcaaatgaatctggagaccgattcattgtgagcacctgaataaaatgaaaactttgtttccccttggtaactgttgggttggtttctgttcactggctctctacatttgccaggattctttggggaggcagtcacaggagtgaggtgcagttgcttttcccacgagttaggggaactcctgctgcctgaacacaaacaaccctgacatgttcccttctccaagaggagatgtgatgacaattgtcttttggcacaattgaactctagaaactccatttttgtttttccagaggtctgaatcccaaataacagaattttgtgcagtagggaccaggagccctagtaaggatgggtggccctggtggccagcaatgctcactattactgctcagagagagggggccagtcatgggaagaggctagatttcggtgttcaacaaacttgggtaaaattctggttgctgcattttctagatttgtgttctagggcaagtcatatcatctacatgagcagacatttcctcatatttaaagtggaatttccaaacctagaagagttcatgcgggaggcaatgagctgctggagcacaggcataacacaggtacccagtgtgtgccccacccagtgccccgtcatcacagcaatgacttgactttaaacagtcttctttttggaagcagtcgcttgtaacctaagttggaaatacttactttggagataatttgaaacttacccaagtattaaagtatcatcagctacatttttaatgaatggatcccttggaagaaatcatctctcatctaccatgattaaatttcccacagtttagcagtgaatgggcaggtggcctaattaatttcaatactgatcgctccatcactggttttattgttttgaatatggaaaaaggattctctaaaaataaatgacactgaattccggcaatttcaag

SEQ ID NO: 736134 - DNA, 760 bp, Homo sapiens
  misc_feature (742)..(742): n is a, c, g, or t
ggctaccaaagcattcactgacttctcaaagccatttctactcagaaaagttaaggccactgacatattgaaatcctttgttttatagatgagaaaacttgctcccatggaaagcgggagacctctccagagcgatcaagccagtcagggacccatgcatgggccaggccactgtcccaaagactttgtgcacagcccctcagtgctctctcaagacaaccctactgaggcagccacagtcatcacctctcttgtacagaagagcatgctgacgcccagaggtttcagttacttcaggaatcatgttgcctcatctccagggctatttgcactacactgtgttgtccctacacaaaaataaaaccctgggctgtgctgtggtggtgaagaccatgggcttgccacagccccacacacactcatttcataatggttcattctcttcttcaggcccctcatacattcccccagatgctagtttacccctcctttgtgccaaagaaactttctgccaattgcagcggagctggcctgcctggctcttgtgctggctggacaccctctgctggcagcatcttcatgggcagcagctgggtgacctaagagtgcagtgaagccacacttggacctcacgagagagtgtttctatgctcgaattcttcccacacttagcagacctgtgtttagaatcctggcgttacatttacttattcaaccactttttggtttgtttctttagggntatgttttgtttttaata

SEQ ID NO: 736135 - DNA, 634 bp, Homo sapiens
  misc_feature (6)..(6): n is a, c, g, or t
  misc_feature (23)..(23): n is a, c, g, or t
  misc_feature (71)..(71): n is a, c, g, or t
  misc_feature (78)..(78): n is a, c, g, or t
taccancatagcgtatataagcncatatgtatatattccccctcttttaaaaaaagcacagttggaagctnctatatncacacttctctacatggtgcctgaaatcattatatttggtgattagttttcatatgaccctagactgacctgtctcctttttacatagctacattgtattccattatgtagatatattttatttaacaaatcctctatggatgaatttttagattatttcatctttggctatataaacaatgcttcagtgaatagccttgaatttatttatttgtatatgtgtgggtatctatagaataaattttccaaaaaatattttgcctgactgaaatttgaaatttgacagctactgcccaaattgtcccctaaagtgcatgcacccaattgatccttcccacaaaaggcataagagaatgcctgttttcctgcatccttcccaaccctgcaatattataggattgtaggccctctgtgtccaatcatttgtcctgtgcacagagcaaataggaataatgactggtaaaaaacccttaacctcacaaagcataagggacacagacataaaaacagaaattatagtgcaatgtgggaagtgttctgctaggaaaaaaaaaaa

SEQ ID NO: 736136 - DNA, 907 bp, Homo sapiens
cttcaaaggaacataaagttgataaaaatgaggctttttcttcagaggattctcttggtgagaataagacaatttctcctaagtccactgtctatccaatcttcagtgcatcttcagtcaattcaaaaagatctttaggtgaagaacagttttctgtgggatctgtcaacttcatgaaacagaccaatatccagaaaaatactaataccagagatacaagtaaaaaaacaaaagaccagctcatcatcgacgctggtcagaaacattttggggctactgtgtgcaagtcttgtggtatgatatatactgcttccaaccctgaagatgaaatgcagcatgtacagcatcaccacaggtttctggaaggaatcaaatatgtgggttggaagaaagaacgtgtagtagcagagttttgggatgggaaaatcgtgttggttctgccacatgatccaagctttgctatcaaaaaggtagaagatgtccaagaacttgttgataatgaattgggcttccagcaagttgttcctaaatgtccaaacaaaataaaaacttttctttttatatctgatgaaaagagagtagttgggtgtttaattgcagaacccatcaaacaggcatttcgtgtcctgtctgaaccaattggtccagaatccccaagctctacggaatgtcctagggcttggcaatgttcagatgtaccagaacctgcagtctgtgggataagtagaatctgggttttcagactgaagagaagaaagcgcattgcaagacgactggttgataccctcaggaattgcttcatgtttggctgttttctcagcactgatgaaatagcattttctgacccaacaccagatggcaagttatttgcaaccaagcccacgcgtccgactagttctagatcgcg

SEQ ID NO: 736137 - DNA, 1876 bp, Homo sapiens
cttcaaaggaacataaagttgataaaaatgaggctttttcttcagaggattctcttggtgagaataagacaatttctcctaagtccactgtctatccaatcttcagtgcatcttcagtcaattcaaaaagatctttaggtgaagaacagttttctgtgggatctgtcaacttcatgaaacagaccaatatccagaaaaatactaataccagagatacaagtaaaaaaacaaaagaccagctcatcatcgacgctggtcagaaacattttggggctactgtgtgcaagtcttgtggtatgatatatactgcttccaaccctgaagatgaaatgcagcatgtacagcatcaccacaggtttctggaaggaatcaaatatgtgggttggaagaaagaacgtgtagtagcagagttttgggatgggaaaatcgtgttggttctgccacatgatccaagctttgctatcaaaaaggtagaagatgtccaagaacttgttgataatgaattgggcttccagcaagttgttcctaaatgtccaaacaaaataaaaacttttctttttatatctgatgaaaagagagtagttgggtgtttaattgcagaacccatcaaacaggcatttcgtgtcctgtctgaaccaattggtccagaatccccaagctctacggaatgtcctagggcttggcaatgttcagatgtaccagaacctgcagtctgtgggataagtagaatctgggttttcagactgaagagaagaaagcgcattgcaagacgactggttgataccctcaggaattgcttcatgtttggctgttttctcagcactgatgaaatagcattttctgacccaacaccagatggcaagttatttgcaaccaagtactgcaacacccctaatttcctcgtatataattttaatagttaaagctgatttcagttataaaggagttactatctggataagttcaaagagctccttattataaaatacaaactatttaatatcaaaataaaaaataccgagactcacactcatacacacacacacacacacacacacacacacacatatcacagttgtgttccttatgagttgaaaagtcaggaataaatttgttgaaaattatctggggattcaaaggaaaaatctttgggtgattccctgattagcactctgaatgtttaattatgaaactttgtagctataactggaaaattacctgactctttgtaagagtattaaatacaaagtgatttttctctagaaatgtgacctggtcttttataaagcccactcttagaccaggattatctaatgccacatcagaagcaaacaggcaaatttaaacttgggcaagtaatttctgtgcccaatttgtaaagggaattcctgaattttttttttttttaatagaggcatgggtctcactgtgttgcccaggctggtctgaaacttttgggctcaagcgatcctcccaaaacgctgggattacagtcatgagccaccgtgcccagcctaattcctgacttctctatacagagtcttcacttgataggcactcgtctgtagtaactcagtttgaatatctttagaaaatgtttagaatttatttgtaacaagatggtaaggaataagattatcccatatgcatttctgtagagcagaatttgatagcttagtgttcaatctttttgaaaataaatgtttacctgtcatcagatttaattaaaattatacttagtaattgcactattacttagttaattttggttgtatggaaatatgggtagtactacttgtgggaacctgttactgacaattgatgtcattaacaaaatgcctagttggattagatgttttcattttctaattttttg

SEQ ID NO: 736138 - DNA, 1732 bp, Homo sapiens
cttcaaaggaacataaagttgataaaaatgaggctttttcttcagaggattctcttggtgagaataagacaatttctcctaagtccactgtctatccaatcttcagtgcatcttcagtcaattcaaaaagatctttaggtgaagaacagttttctgtgggatctgtcaacttcatgaaacagaccaatatccagaaaaatactaataccagagatacaagtaaaaaaacaaaagaccagctcatcatcgacgctggtcagaaacattttggggctactgtgtgcaagtcttgtggtatgatatatactgcttccaaccctgaagatgaaatgcagcatgtacagcatcaccacaggtttctggaaggaatcaaatatgtgggttggaagaaagaacgtgtagtagcagagttttgggatgggaaaatcgtgttggttctgccacatgatccaagctttgctatcaaaaaggcatttcgtgtcctgtctgaaccaattggtccagaatccccaagctctacggaatgtcctagggcttggcaatgttcagatgtaccagaacctgcagtctgtgggataagtagaatctgggttttcagactgaagagaagaaagcgcattgcaagacgactggttgataccctcaggaattgcttcatgtttggctgttttctcagcactgatgaaatagcattttctgacccaacaccagatggcaagttatttgcaaccaagtactgcaacacccctaatttcctcgtatataattttaatagttaaagctgatttcagttataaaggagttactatctggataagttcaaagagctccttattataaaatacaaactatttaatatcaaaataaaaaataccgagactcacactcatacacacacacacacacacacacacacacacacatatcacagttgtgttccttatgagttgaaaagtcaggaataaatttgttgaaaattatctggggattcaaaggaaaaatctttgggtgattccctgattagcactctgaatgtttaattatgaaactttgtagctataactggaaaattacctgactctttgtaagagtattaaatacaaagtgatttttctctagaaatgtgacctggtcttttataaagcccactcttagaccaggattatctaatgccacatcagaagcaaacaggcaaatttaaacttgggcaagtaatttctgtgcccaatttgtaaagggaattcctgaattttttttttttttaatagaggcatgggtctcactgtgttgcccaggctggtctgaaacttttgggctcaagcgatcctcccaaaacgctgggattacagtcatgagccaccgtgcccagcctaattcctgacttctctatacagagtcttcacttgataggcactcgtctgtagtaactcagtttgaatatctttagaaaatgtttagaatttatttgtaacaagatggtaaggaataagattatcccatatgcatttctgtagagcagaatttgatagcttagtgttcaatctttttgaaaataaatgtttacctgtcatcagatttaattaaaattatacttagtaattgcactattacttagttaattttggttgtatggaaatatgggtagtactacttgtgggaacctgttactgacaattgatgtcattaacaaaatgcctagttggattagatgttttcattttctaattttttg

SEQ ID NO: 736139 - DNA, 5655 bp, Homo sapiens
ctgtcctggccgcgcccctgtcccgccgcctcccgctcctcgcctggcggatgtaggttgttggcctgaggggagctacgtagccgaggtttgcgctgccgccgccaggcccggtccggttccagcctctgcccggacgctagccggcctggccatggctgaccgcgggtgcccgctggaggcggcgccgctgcctgccgaggtgcgggagagcctggctgagctggagctggagctgtcggaaggtgacatcactcaaaaaggatatgaaaagaaaagggcaaagctgcttgcacgttatataccgcttattcaaggaatagacccatctctgcaagcagagaatagaattcctgggccctcacaaaccacggccgctgcacccaagcagcagaagtctcggcccaccgcctcgagggatgagcgcttccggtcagatgtccacactgaagccgtgcaagcagctttggccaaatacaaagagaggaagatgcctatgccttcgaagagacgttctgtccttgtgcattcgtctgtggaaacctacacccctccagacacgtcgtctgcctcagaagatgagggctctttacggcgacccgggcgactcacctccactccgctccagagccattccagcgtcgagccctggctcgaccgggtcattcagggctcgtccacctcatcctctgcatcctccacctcatctcacccgggagggagacccaccactgctcccagtgctgcagccacgccgggggccgccgctaccactgcactcgcaggcctcgaggcccacacccacatagatctgcattctgcccctcctgatgtcaccacgggcctcgtggagcattcgtactttgagcgtccacaggtggcttctgtgagaagtgttcctcgggggtgcagcgggagcatgctggaaacagcagatggtgtccctgtgaacagcagagtgtcctccaaaatccagcagcttctgaacaccctgaagaggccaaagcgccctccactgaaggagttctttgtggatgattttgaggaattgttggaagttcagcaaccagatccaaatcagccaaagcctgagggaagcgagacgagtgtgctgagaggggagcctctcactgcaggtgtcccccgaccgccgtcgctgttggccaccttgcagcgctggggcacaacacagcccaaatccccctgtctgactgccttggatacaactgggaaagccgtctacactctcacctatggtaaactttggagtcggagtttaaaactagcttatactctacttaataaactgacaagtaagaatgaacctctacttaaacctggagacagagtggcgctcgtgtttccgaatagtgaccctgtgatgttcatggttgcattttatgggtgtctcctggcagagctggttcctgtccccatagaagtgccattaacaagaaaggatgcaggcagccagcaggttgggtttctgctgggcagctgtggagtcttcttggccctgaccacagacgcttgtcagaaaggcctccccaaggcacagacaggagaggtggcagctttcaaaggttggcccccgctctcctggctagtgattgatgggaagcatctagccaagcccccaaaggactggcaccctctggcccaggacacagggactgggactgcctacattgagtataaaaccagcaaagaaggcagtacggtgggggtcacagtgtcccacgcatccctgctggcacagtgccgggctctgacccaggcgtgcgggtactcagaagctgaaacattaacaaacgtgctggatttcaaaagggatgctggtctgtggcatggcgtgttaacaagcgtcatgaacaggatgcacgtggtcagcgtcccctacgcgctgatgaaggcgaacccactctcctggatccagaaagtgtgcttctataaagctcgggccgcgctggtgaagtcgcgagacatgcactggtctctcctagctcagcggggccagagggacgtcagcctcagctcactgcgcatgctgattgtggccgatggtgccaacccgtggtcgatctcctcctgtgacgccttcctcaacgtcttccagtccagaggtctgaggccagaggtcatctgtccttgtgcaagttctcctgaggcgctgactgtcgccatccgcaggccacctgatctgggaggaccacctccaagaaaagcagtcctgtcgatgaacggtctaagttatggtgttatcagagtggatactgaagaaaagttgtcagtccttactgttcaggacgttggtcaggtgatgcctggagctaatgtatgtgttgtgaagttagaaggtaccccttatctttgtaaaactgatgaagtgggagaaatatgcgtcagttccagtgcaactggcacagcgtactatggattgcttggaatcacgaagaatgtgtttgaggcagttccggtcaccacaggaggagcacccatctttgacaggccattcaccaggacaggcctgctgggcttcatcgggcctgacaacctggtcttcatcgtgggcaaactggacgggctgatggtcactggagttcgcagacacaatgcagatgacgttgtggccaccgcactggccgtggagcccatgaagtttgtctacagaggcaggatcgctgtgttctctgtgaccgtgctgcacgacgaccggattgtcctggtggctgagcagcggccggatgcctcggaggaggacagcttccagtggatgagccgtgtgctgcaggccattgatagcatccaccaggtgggcgtgtactgtctggccctggttcctgccaacaccttgcccaaggctcctctcggagggattcacatttctgaaaccaaacagcgctttctggaagggacgctgcacccgtgtaatgtgctgatgtgccctcacacctgtgttaccaacctccccaaacctcgtcagaaacaaccagaggttggaccagcctcaatgatcgtggggaacctggttgctgggaagagaatcgctcaggcttccgggagagagctcgcccacctggaggacagcgaccaggcacggaagttcctgttcctggctgacgtgctgcagtggcgtgcccacaccactcctgaccacccgctgttcttgctgctgaacgccaagggcaccgtcacaagcactgcaacctgtgtccagctgcacaaaagggctgagagagtggccgcggctctgatggagaagggaagactgagtgttggggaccatgtggctctggtctacccaccaggggtggacctcattgccgcgttctatggctgcttgtactgtggctgcgtgcctgtcaccgtgcggcccccgcaccctcagaacctcggcaccacactgcccaccgtcaagatgatcgtggaggtcagcaagtctgcatgcgtcctcaccacgcaggctgtcacacggctgctcaggtccaaggaggctgctgctgccgtggacatcaggacctggcccaccatcctagacacagatgacatcccaaaaaagaagatagcaagcgttttcaggcccccctcccccgatgtcctcgcatacttggacttcagcgtgtcaaccactgggatattagcgggagtgaagatgtcgcacgcggccacaagcgccttatgccgctccataaagctgcagtgtgagctgtacccctcgcggcagatcgccatctgcctcgacccctactgtggccttggttttgccctgtggtgtctgtgcagtgtctactcgggacaccaatcagtgctggtgcccccgctggagctggagagcaacgtgtccctgtggctgtcggccgtcagccagtacaaggcccgcgtcaccttctgctcctactctgtgatggagatgtgcaccaagggcctaggcgcacagacgggtgtcctcaggatgaagggggtgaacctgtcatgtgtgcgcacgtgcatggtggtcgccgaggagcggcccaggattgcgctgacccagtccttctccaagctcttcaaggacctgggcctgccggcccgcgccgtaagcaccacgttcgggtgcagggtcaacgtggccatctgcctccagggcacagctggcccggaccccacaaccgtctacgtggacatgcgggcactgcgccatgacagggttcgtttggtagaacggggttctccgcacagcctgccattgatggagtctggaaagatcctccccggcgtgaaggtcatcatcgcacacaccgagaccaaaggacccttgggagactcacacctgggagagatctgggtaagcagcccccacaatgccaccgggtactacaccgtttacggggaggaggcgcttcatgccgaccacttcagtgcccggctgagttttggagacacacagaccatctgggcaaggaccggctaccttggcttccttcggcgaacagagctcactgatgccagtggagggcggcacgatgcactgtatgtggttgggtctctggatgaaactctggagctcagaggcatgcggtaccaccccatcgacattgagacctctgtcatccgagcacacaggagcatcgctgagtgtgccgtattcacctggaccaacctgctggtggtggtggtggagctggatgggctagagcaggatgccctggacctggtggccctggtgaccaacgtggtgctggaggagcactacctggtcgtgggagtggtggtcatcgtggacccaggggtgatccctatcaactctcggggtgagaagcagcgcatgcacctgcgggacggcttcctggctgaccagctggaccccatctatgtcgcctacaacatgtgagcgcagcacaccggcccaggtgccggagatgaatgagccccagcagtccaaggtgtgatgtgggaagacaccgcagagctcactcaccgggactcgcccttcctgtgctcttacagatccctctcaacaatccccgcatctccttttagaaagcacttcctgaattatttaaagaaatattttgaatctgccaagtacatttacaaaaacacggatgctggtattttaacagatggagagacaaggaaaggaaaggaaaggcctggcatgggcattgtgaggaatcacaggcaccgaggttgttctctgctgtactgcaagtttgcactttctttaggctaaaaatatagttcctgatttttaaaattcagttatttattcccacttcaaatgacaagttcatatatagaatttacgggagaaacttgagaccatttacggggagaaacttgattctgggaagatagcagagtacaaaccagctgcctcacttctgtttcacagggaggctgatggaaaaaggaagcaagctggacccatcctccctgctcacagagggcactgtggtcacacacagtgcctcctctgccagttcctttattgaaagaggtgtgctggctggccacggtggcttacacctgtaatcccagcactttgggaggccgaggcgagcagatcacgaggatggtctcgatctcctgacctcatgatccacccgcctcggcctcccaaagtgctgggattacaggcatgagccactgcgcccagcctcacaaaatattctt

SEQ ID NO: 736140 - DNA, 3035 bp, Homo sapiens
ctgtcctggccgcgcccctgtcccgccgcctcccgctcctcgcctggcggatgtaggttgttggcctgaggggagctacgtagccgaggtttgcgctgccgccgccaggcccggtccggttccagcctctgcccggacgctagccggcctggccatggctgaccgcgggtgcccgctggaggcggcgccgctgcctgccgaggtgcgggagagcctggctgagctggagctggagctgtcggaaggtgacatcactcaaaaaggatatgaaaagaaaagggcaaagctgcttgcacgttatataccgcttattcaaggaatagacccatctctgcaagcagagaatagaattcctgggccctcacaaaccacggccgctgcacccaagcagcagaagtctcggcccaccgcctcgagggatgagcgcttccggtcagatgtccacactgaagccgtgcaagcagctttggccaaatacaaagagaggaagatgcctatgccttcgaagagacgttctgtccttgtgcattcgtctgtggaaacctacacccctccagacacgtcgtctgcctcagaagatgagggctctttacggcgacccgggcgactcacctccactccgctccagagccattccagcgtcgagccctggctcgaccgggtcattcagggctcgtccacctcatcctctgcatcctccacctcatctcacccgggagggagacccaccactgctcccagtgctgcagccacgccgggggccgccgctaccactgcactcgcaggcctcgaggcccacacccacatagatctgcattctgcccctcctgatgtcaccacgggcctcgtggagcattcgtactttgagcgtccacaggtggcttctgtgagaagtgttcctcgggggtgcagcgggagcatgctggaaacagcagatggtgtccctgtgaacagcagagtgtcctccaaaatccagcagcttctgaacaccctgaagaggccaaagcgccctccactgaaggagttctttgtggatgattttgaggaattgttggaagttcagcaaccagatccaaatcagccaaagcctgagggaagcgagacgagtgtgctgagaggggagcctctcactgcaggtgtcccccgaccgccgtcgctgttggccaccttgcagcgctggggcacaacacagcccaaatccccctgtctgactgccttggatacaactgggaaagccgtctacactctcacctatggtaaactttggagtcggagtttaaaactagcttatactctacttaataaactgacaagtaagaatgaacctctacttaaacctggagacagagtggcgctcgtgtttccgaatagtgaccctgtgatgttcatggttgcattttatgggtgtctcctggcagagctggttcctgtccccatagaagtgccattaacaagaaaggatgcaggcagccagcaggttgggtttctgctgggcagctgtggagtcttcttggccctgaccacagacgcttgtcagaaaggcctccccaaggcacagacaggagaggtggcagctttcaaaggttggcccccgctctcctggctagtgattgatgggaagcatctagccaagcccccaaaggactggcaccctctggcccaggacacagggactgggactgcctacattgagtataaaaccagcaaagaaggcagtacggtgggggtcacagtgtcccacgcatccctgctggcacagtgccgggctctgacccaggcgtgcgggtactcagaagctgaaacattaacaaacgtgctggatttcaaaagggatgctggtctgtggcatggcgtgttaacaagcgtcatgaacaggatgcacgtggtcagcgtcccctacgcgctgatgaaggcgaacccactctcctggatccagaaagtgtgcttctataaagctcgggccgcgctggtgaagtcgcgagacatgcactggtctctcctagctcagcggggccagagggacgtcagcctcagctcactgcgcatgctgattgtggccgatggtgccaacccgtggtcgatctcctcctgtgacgccttcctcaacgtcttccagtccagaggtctgaggccagaggtcatctgtccttgtgcaagttctcctgaggcgctgactgtcgccatccgcaggccacctgatctgggaggaccacctccaagaaaagcagtcctgtcgatgaacggtctaagttatggtgttatcagagtggatactgaagaaaagttgtcagtccttactgttcaggacgttggtcaggtgatgcctggagctaatgtatgtgttgtgaagttagaaggtaccccttatctttgtaaaactgatgaagtgggagaaatatgcgtcagttccagtgcaactggcacagcgtactatggattgcttggaatcacgaagaatgtgtttgaggcagttccggtcaccacaggaggagcacccatctttgacaggccattcaccaggacaggcctgctgggcttcatcgggcctgacaacctggtcttcatcgtgggcaaactggacgggctgatggtcactggagttcgcagacacaatgcagatgacgttgtggccaccgcactggccgtggagcccatgaagtttgtctacagaggcaggtgatgcgctgcggacccccacgccgggagtagattccttcatttgcagctcgggaagtctttgtgcagtagatggaaagcccagcaaacttgaattcacaaagcctaaaaattgttgtacatcagaaaactcctaaagtaaaaggaaaatatttgcagcaatgataccagagttaatatccttactgtccaaagagttccttggattccttaagaaaataaggttttgatgtaaaatttggggcaaaggctcaaggggacaaatcagggagggaagaattgagtaaagcaaaggagaaatgggtctaagttcctaataaccttggaatgtgaattaaaacagaaaagtgccattttct

SEQ ID NO: 736141 - DNA, 611 bp, Homo sapiens
gctggtacggcctggaattatgggatgctcgggccgcgctggtgaagtcgcgagacatgcactggtctctcctagctcagcggggccagagggacgtcagcctcagctcactgcgcatgctgattgtggccgatggtgccaacccgtgtgagtgagcctgtgtgcccggcgcataccccacacagtgtcccctcctgcaaaccaaagtagaatacactgagaagcaaaatggaggcattttcactgccattgtcatatagatacacatgtcccatcgtttctatgacacggaacatcttggtgattcactggtttatcccatgcatgtttattaggccactaaatttaaaagcaattttaatatgcttgatgaaaggtacatgccttaatgagagtcatctttcttaagaaattaccagattgtgctgtggcctggggttcctgtttctctttaggcctcatccccaccctcctgccctttgtcctggtgcccccacgtctctggcttctggcttcacttctcccaccaggacccaaccattctccctcctggtttgcctgggtgtcccccacatcctcccaggaggagctccctatggctgctgcctgac

SEQ ID NO: 736142 - DNA, 3122 bp, Homo sapiens; identical to SEQ ID NO: 75374

SEQ ID NO: 736143 - DNA, 766 bp, Homo sapiens
tgctttctgtgcctgtaatttaacttagttcataaaataagagacaatgaatattatccgccccgacttcgttcagtgttttctggagcattattcttggccagtggatgtctcgtgacagaatctgaactcggtggttggtaacacatcacattcttgtcctctgggcccaccagatctgggtaagcagcccccacaatgccaccgggtactacaccgtttacggggaggaggcgcttcatgccgaccacttcagtgcccggctgagttttggagacacacagaccatctgggcaaggaccggctaccttggcttccttcggcgaacagagctcactgatgccagtggaggtgaggggttgtggtgaagccctgcgtgagtgctgtgcggggaggacctgggctccccaagagcttagtcacctgctagcacacctcactccttgctgtggtctggtattgctccttgtggggggaagatgttctgacagcagttttctctgaaaatactgttttccctccatgactgcccctcactgtccttgggcccttggcctctgctgagggcgtgggggacggtgttggtgataaggctaccaggcttctccccgaggccagaccggtctctctgccgctgtgtctttaccagtggcttccccatgcacaacccatttaaggttgtggtcaatgtccagaggactctgtgcagccaccacaagctggccagataaggcagaacttttggtagctcctatagatggtgtcc

SEQ ID NO: 736144 - DNA, 1479 bp, Homo sapiens
cgagctcggtacccccctcacggattacctcaataagtgccattttggactgtcaaatttagatgctttgtttcagaaagataagccagcatttagttttaaatcactttcctggtttgtaacttgatgctgtttagttaaattgctagttttcctaacactacaatattaattcttctcgtggaagtgtactgatttattatttttattccaagtcagcagatttggaagcattgtggtaaagtctaaggttttcatatccatagtgctgtttggtgagtaccggcagtacagttgaggggagcagggaacagcattgccccgtattgaaggtggagatggttacattcttcactgctttttgcattttgagttgtgtgcctataaaatttggccaaaccattttattattttgttcaaacttgactaagctgagtgatctaaaattatacagaacctaaatcaaagaagagaatgtaaagtcctttagttacttctaagaatttgaagtcaagcacgaatctaagacatagattatttttatatagctaatgaagagtatgttacgaaattgttgggtttttggggtattgagggtggcaaattttgtgaatcatgcatgcttcacagaaacaaccaggtttttccagaattagtctggatcagtgcctaacaaagctgttattaattctccacacatgagtctggctaactgggccagctctcatgttttactcctgtctggctacaaatagcactgtgcatagtagccctgtttccccatggtgttggactgtggtaaagtatgttgtgacatactggaattctaataatcctgttgtaagtatgtacagaatctatgtaacttattgttgacatacagaggtttgggaagtagtctaatggacattccttacaatagaatggctgggaagggaaagaaaaaaaaaaaaaaactacctaactccaatcttaatgttgtagttttatagcaaacaaaaattgtcagctttttgtattgaaaggtcagtggtggtaagacaaggtgtcttgtaaattaagattttaagaagtgcattaaaatgttttagaattactctgggaattctgtatatcacactaaaatttttatatcattatgttaataaaagttattgactttgtaattctgcattttgaaatgtgtgaaaagggtctttaaattaccccgaataggttgtatcttattttgctttttttctgactataaaagcagttatgcttatagcataaaatctagaaagcacattaaagtataaagaaaattaaaatttcttataattctacctctgagtaaacagcagcattcgtatgtaacataaaccctctcagggatttattttttctttttaaaaattttttacaaaattaggatcaagtgcttttttaaataatttgcttttgtacttaataaattatagactttaaaatctattacat

SEQ ID NO: 736145 - DNA, 982 bp, Homo sapiens
tctgagggtacctgtgaaggggccccttccttctgctgatgcagccctgtggttccgatggccgcaggctgcgctaacttgagcatgtccagccaccccttccctgctggccccccagttagtgctggcgttccactcttgttgctctgtgcagggtcgatctcctcctgtgacgccttcctcaacgtcttccagtccagaggtctgaggccagaggtcatctgtccttgtgcaagttctcctgaggcgctgactgtcgccatccgcaggccacctgatctgggaggaccacctccaagaaaagcagtcctgtcgatgaacggtctaagttatggtgttatcagagtggatactgaagaaaagttgtcagtccttactgttcaggacgttggtcaggtgatgcctggagctaatgtatgtgttgtgaagttagaaggtaccccttatctttgtaaaactgatgaagtgggagaaatatgcgtcagttccagtgcaactggcacagcgtactatggattgcttggaatcacgaagaatgtgtttgaggcagttccggtcaccacaggaggagcacccatctttgacaggccattcaccaggacaggcctgctgggcttcatcgggcctgtgagtatgtcctcctgtaccagcactggcagtcagagaaggtagggggtgtggctaagggacacctcgttgcagccccacccttgtcctggccgttcctgacctcccatgtggccttggtcggtggcgctgacctccctgcccatcaccctacctgtgtgcagggccatccacacctccgagactggtgcacagtcctgcacacaggcctgagtcgggggtccccggggtggatgaggatgttttgctttttatatggagtggcaggtttgtgagtattcattatatcattctttaccattttggatgtctaaactattcaaaaataaatgcttctatttgtaacatcttggcc

SEQ ID NO: 736146 - DNA, 2903 bp, Homo sapiens
ctgtcctggccgcgcccctgtcccgccgcctcccgctcctcgcctggcggatgtaggttgttggcctgaggggagctacgtagccgaggtttgcgctgccgccgccaggcccggtccggttccagcctctgcccggacgctagccggcctggccatggctgaccgcgggtgcccgctggaggcggcgccgctgcctgccgaggtgcgggagagcctggctgagctggagctggagctgtcggaaggtgacatcactcaaaaaggatatgaaaagaaaagggcaaagctgcttgcacgttatataccgcttattcaaggaatagacccatctctgcaagcagagaatagaattcctgggccctcacaaaccacggccgctgcacccaagcagcagaagtctcggcccaccgcctcgagggatgagcgcttccggtcagatgtccacactgaagccgtgcaagcagctttggccaaatacaaagagaggaagatgcctatgccttcgaagagacgttctgtccttgtgcattcgtctgtggaaacctacacccctccagacacgtcgtctgcctcagaagatgagggctctttacggcgacccgggcgactcacctccactccgctccagagccattccagcgtcgagccctggctcgaccgggtcattcagggctcgtccacctcatcctctgcatcctccacctcatctcacccgggagggagacccaccactgctcccagtgctgcagccacgccgggggccgccgctaccactgcactcgcaggcctcgaggcccacacccacatagatctgcattctgcccctcctgatgtcaccacgggcctcgtggagcattcgtactttgagcgtccacaggtggcttctgtgagaagtgttcctcgggggtgcagcgggagcatgctggaaacagcagatggtgtccctgtgaacagcagagtgtcctccaaaatccagcagcttctgaacaccctgaagaggccaaagcgccctccactgaaggagttctttgtggatgattttgaggaattgttggaagttcagcaaccagatccaaatcagccaaagcctgagggaagcgagacgagtgtgctgagaggggagcctctcactgcaggtgtcccccgaccgccgtcgctgttggccaccttgcagcgctggggcacaacacagcccaaatccccctgtctgactgccttggatacaactgggaaagccgtctacactctcacctatggtaaactttggagtcggagtttaaaactagcttatactctacttaataaactgacaagtaagaatgaacctctacttaaacctggagacagagtggcgctcgtgtttccgaatagtgaccctgtgatgttcatggttgcattttatgggtgtctcctggcagagctggttcctgtccccatagaagtgccattaacaagaaaggatgcaggcagccagcaggttgggtttctgctgggcagctgtggagtcttcttggccctgaccacagacgcttgtcagaaaggcctccccaaggcacagacaggagaggtggcagctttcaaaggttggcccccgctctcctggctagtgattgatgggaagcatctagccaagcccccaaaggactggcaccctctggcccaggacacagggactgggactgcctacattgagtataaaaccagcaaagaaggcagtacggtgggggtcacagtgtcccacgcatccctgctggcacagtgccgggctctgacccaggcgtgcgggtactcagaagctgaaacattaacaaacgtgctggatttcaaaagggatgctggtctgtggcatggcgtgttaacaagcgtcatgaacaggatgcacgtggtcagcgtcccctacgcgctgatgaaggcgaacccactctcctggatccagaaagtgtgcttctataaagctcgggccgcgctggtgaagtcgcgagacatgcactggtctctcctagctcagcggggccagagggacgtcagcctcagctcactgcgcatgctgattgtggccgatggtgccaacccgtggtcgatctcctcctgtgacgccttcctcaacgtcttccagtccagaggtctgaggccagaggtcatctgtccttgtgcaagttctcctgaggcgctgactgtcgccatccgcaggccacctgatctgggaggaccacctccaagaaaagcagtcctgtcgatgaacggtctaagttatggtgttatcagagtggatactgaagaaaagttgtcagtccttactgttcaggacgttggtcaggtgatgcctggagctaatgtatgtgttgtgaagttagaaggtaccccttatctttgtaaaactgatgaagtgggagaaatatgcgtcagttccagtgcaactggcacagcgtactatggattgcttggaatcacgaagaatgtgtttgaggcagttccggtcaccacaggaggagcacccatctttgacaggccattcaccaggacaggcctgctgggcttcatcgggcctgtgagtatgtcctcctgtaccagcactggcagtcagagaaggtagggggtgtggctaagggacacctcgttgcagccccacccttgtcctggccgttcctgacctcccatgtggccttggtcggtggcgctgacctccctgcccatcaccctacctgtgtgcagggccatccacacctccgagactggtgcacagtcctgcacacaggcctgagtcgggggtccccggggtggatgaggatgttttgctttttatatggagtggcaggtttgtgagtattcattatatcattctttaccattttggatgtctaaactattcaaaaataaatgcttctatttgtaacatcttggcc

SEQ ID NO: 736147 - DNA, 2797 bp, Homo sapiens
ctgtcctggccgcgcccctgtcccgccgcctcccgctcctcgcctggcggatgtaggttgttggcctgaggggagctacgtagccgaggtttgcgctgccgccgccaggcccggtccggttccagcctctgcccggacgctagccggcctggccatggctgaccgcgggtgcccgctggaggcggcgccgctgcctgccgaggtgcgggagagcctggctgagctggagctggagctgtcggaaggtgacatcactcaaaaaggatatgaaaagaaaagggcaaagctgcttgcacgttatataccgcttattcaaggaatagacccatctctgcaagcagagaatagaattcctgggccctcacaaaccacggccgctgcacccaagcagcagaagtctcggcccaccgcctcgagggatgagcgcttccggtcagatgtccacactgaagccgtgcaagcagctttggccaaatacaaagagaggaagatgcctatgccttcgaagagacgttctgtccttgtgcattcgtctgtggaaacctacacccctccagacacgtcgtctgcctcagaagatgagggctctttacggcgacccgggcgactcacctccactccgctccagagccattccagcgtcgagccctggctcgaccgggtcattcagggctcgtccacctcatcctctgcatcctccacctcatctcacccgggagggagacccaccactgctcccagtgctgcagccacgccgggggccgccgctaccactgcactcgcaggcctcgaggcccacacccacatagatctgcattctgcccctcctgatgtcaccacgggcctcgtggagcattcgtactttgagcgtccacaggtggcttctgtgagaagtgttcctcgggggtgcagcgggagcatgctggaaacagcagatggtgtccctgtgaacagcagagtgtcctccaaaatccagcagcttctgaacaccctgaagaggccaaagcgccctccactgaaggagttctttgtggatgattttgaggaattgttggaagttcagcaaccagatccaaatcagccaaagcctgagggaagcgagacgagtgtgctgagaggggagcctctcactgcaggtgtcccccgaccgccgtcgctgttggccaccttgcagcgctggggcacaacacagcccaaatccccctgtctgactgccttggatacaactgggaaagccgtctacactctcacctatggtaaactttggagtcggagtttaaaactagcttatactctacttaataaactgacaagtaagaatgaacctctacttaaacctggagacagagtggcgctcgtgtttccgaatagtgaccctgtgatgttcatggttgcattttatgggtgtctcctggcagagctggttcctgtccccatagaagtgccattaacaagaaaggatgcaggcagccagcaggttgggtttctgctgggcagctgtggagtcttcttggccctgaccacagacgcttgtcagaaaggcctccccaaggcacagacaggagaggtggcagctttcaaaggttggcccccgctctcctggctagtgattgatgggaagcatctagccaagcccccaaaggactggcaccctctggcccaggacacagggactgggactgcctacattgagtataaaaccagcaaagaaggcagtacggtgggggtcacagtgtcccacgcatccctgctggcacagtgccgggctctgacccaggcgtgcgggtactcagaagctgaaacattaacaaacgtgctggatttcaaaagggatgctggtctgtggcatggcgtgttaacaagcgtcatgaacaggatgcacgtggtcagcgtcccctacgcgctgatgaaggcgaacccactctcctggatccagaaagtgtgcttctataaagctcgggccgcgctggtgaagtcgcgagacatgcactggtctctcctagctcagcggggccagagggacgtcagcctcagctcactgcgcatgctgattgtggccgatggtgccaacccgtggtcgatctcctcctgtgacgccttcctcaacgtcttccagtccagaggtctgaggccagaggtcatctgtccttgtgcaagttctcctgaggcgctgactgtcgccatccgcaggccacctgatctgggaggaccacctccaagaaaagcagtcctgtcgatgaacggtctaagttatggtgttatcagagtggatactgaagaaaagttgtcagtccttactgttcaggacgttggtcaggtgatgcctggagctaatgtatgtgttgtgaagttagaaggtaccccttatctttgtaaaactgatgaagtgggagaaatatgcgtcagttccagtgcaactggcacagcgtactatggattgcttggaatcacgaagaatgtgtttgaggcagttccggtcaccacaggaggagcacccatctttgacaggccattcaccaggacaggcctgctgggcttcatcgggcctgtgagtatgtcctcctgtaccagcactggcagtcagagaaggtagggggtgtggctaagggacacctcgttgcagccccacccttgtcctggccgttcctgacctcccatgtggccttggtcggtggcgctgacctccctgcccatcaccctacctgtgtgcagggccatccacacctccgagactggtgcacagtcctgcacacaggcctgagtcgggggtccccgactcgtcgacgcggccgcgaat

SEQ ID NO: 736148 - DNA, 6270 bp, Homo sapiens
ctgtcctggccgcgcccctgtcccgccgcctcccgctcctcgcctggcggatgtaggttgttggcctgaggggagctacgtagccgaggtttgcgctgccgccgccaggcccggtccggttccagcctctgcccggacgctagccggcctggccatggctgaccgcgggtgcccgctggaggcggcgccgctgcctgccgaggtgcgggagagcctggctgagctggagctggagctgtcggaaggtgacatcactcaaaaaggatatgaaaagaaaagggcaaagctgcttgcacgttatataccgcttattcaaggaatagacccatctctgcaagcagagaatagaattcctgggccctcacaaaccacggccgctgcacccaagcagcagaagtctcggcccaccgcctcgagggatgagcgcttccggtcagatgtccacactgaagccgtgcaagcagctttggccaaatacaaagagaggaagatgcctatgccttcgaagagacgttctgtccttgtgcattcgtctgtggaaacctacacccctccagacacgtcgtctgcctcagaagatgagggctctttacggcgacccgggcgactcacctccactccgctccagagccattccagcgtcgagccctggctcgaccgggtcattcagggctcgtccacctcatcctctgcatcctccacctcatctcacccgggagggagacccaccactgctcccagtgctgcagccacgccgggggccgccgctaccactgcactcgcaggcctcgaggcccacacccacatagatctgcattctgcccctcctgatgtcaccacgggcctcgtggagcattcgtactttgagcgtccacaggtggcttctgtgagaagtgttcctcgggggtgcagcgggagcatgctggaaacagcagatggtgtccctgtgaacagcagagtgtcctccaaaatccagcagcttctgaacaccctgaagaggccaaagcgccctccactgaaggagttctttgtggatgattttgaggaattgttggaagttcagcaaccagatccaaatcagccaaagcctgagggaagcgagacgagtgtgctgagaggggagcctctcactgcaggtgtcccccgaccgccgtcgctgttggccaccttgcagcgctggggcacaacacagcccaaatccccctgtctgactgccttggatacaactgggaaagccgtctacactctcacctatggtaaactttggagtcggagtttaaaactagcttatactctacttaataaactgacaagtaagaatgaacctctacttaaacctggagacagagtggcgctcgtgtttccgaatagtgaccctgtgatgttcatggttgcattttatgggtgtctcctggcagagctggttcctgtccccatagaagtgccattaacaagaaaggatgcaggcagccagcaggttgggtttctgctgggcagctgtggagtcttcttggccctgaccacagacgcttgtcagaaaggcctccccaaggcacagacaggagaggtggcagctttcaaaggttggcccccgctctcctggctagtgattgatgggaagcatctagccaagcccccaaaggactggcaccctctggcccaggacacagggactgggactgcctacattgagtataaaaccagcaaagaaggcagtacggtgggggtcacagtgtcccacgcatccctgctggcacagtgccgggctctgacccaggcgtgcgggtactcagaagctgaaacattaacaaacgtgctggatttcaaaagggatgctggtctgtggcatggcgtgttaacaagcgtcatgaacaggatgcacgtggtcagcgtcccctacgcgctgatgaaggcgaacccactctcctggatccagaaagtgtgcttctataaagctcgggccgcgctggtgaagtcgcgagacatgcactggtctctcctagctcagcggggccagagggacgtcagcctcagctcactgcgcatgctgattgtggccgatggtgccaacccgtggtcgatctcctcctgtgacgccttcctcaacgtcttccagtccagaggtctgaggccagaggtcatctgtccttgtgcaagttctcctgaggcgctgactgtcgccatccgcaggccacctgatctgggaggaccacctccaagaaaagcagtcctgtcgatgaacggtctaagttatggtgttatcagagtggatactgaagaaaagttgtcagtccttactgttcaggacgttggtcaggtgatgcctggagctaatgtatgtgttgtgaagttagaaggtaccccttatctttgtaaaactgatgaagtgggagaaatatgcgtcagttccagtgcaactggcacagcgtactatggattgcttggaatcacgaagaatgtgtttgaggcagttccggtcaccacaggaggagcacccatctttgacaggccattcaccaggacaggcctgctgggcttcatcgggcctgacaacctggtcttcatcgtgggcaaactggacgggctgatggtcactggagttcgcagacacaatgcagatgacgttgtggccaccgcactggccgtggagcccatgaagtttgtctacagaggcaggatcgctgtgttctctgtgaccgtgctgcacgacgaccggattgtcctggtggctgagcagcggccggatgcctcggaggaggacagcttccagtggatgagccgtgtgctgcaggccattgatagcatccaccaggtgggcgtgtactgtctggccctggttcctgccaacaccttgcccaaggctcctctcggagggattcacatttctgaaaccaaacagcgctttctggaagggacgctgcacccgtgtaatgtgctgatgtgccctcacacctgtgttaccaacctccccaaacctcgtcagaaacaaccagaggttggaccagcctcaatgatcgtggggaacctggttgctgggaagagaatcgctcaggcttccgggagagagctcgcccacctggaggacagcgaccaggcacggaagttcctgttcctggctgacgtgctgcagtggcgtgcccacaccactcctgaccacccgctgttcttgctgctgaacgccaagggcaccgtcacaagcactgcaacctgtgtccagctgcacaaaagggctgagagagtggccgcggctctgatggagaagggaagactgagtgttggggaccatgtggctctggtctacccaccaggggtggacctcattgccgcgttctatggctgcttgtactgtggctgcgtgcctgtcaccgtgcggcccccgcaccctcagaacctcggcaccacactgcccaccgtcaagatgatcgtggaggtcagcaagtctgcatgcgtcctcaccacgcaggctgtcacacggctgctcaggtccaaggaggctgctgctgccgtggacatcaggacctggcccaccatcctagacacagatgacatcccaaaaaagaagatagcaagcgttttcaggcccccctcccccgatgtcctcgcatacttggacttcagcgtgtcaaccactgggatattagcgggagtgaaggtaggtcctctgaaatcttgtttgcttcagcccctagaaatcaggaggagtggacagaaaggatgtcagatgcagatttaaactgacaggtccttcttatgcaaagcacaaagcaacaattttgcttcttaagatttgtgttaaataccaataaatgctaagatgtgattagcctgagagtaatgcgttttctgatgcattatggttatgtctaaactttctgatttatgactgtctagcttacaggaactggtggctttgaagaatctcttaccttgctgggagtcaatagctcaattaaaatttttcaggcggggcgtggtggctcacgcctgtaatcccagcacttcgggaggccgaggcgggtggatcacaagatcaagagatggagaccatcctggccaacgtggtgaaaccccgtctctactaaaaatacaaaaaattagctgggcatggtggcaggtgcctctaatcccagatactcaggaggctgaggcaggagaattgcttgaacccgggaggcagaggttgcagtgagccgagattgtgccattgcactccagcctgggcgacagagcaagactctgcctcaaaaaaaaaaaaaagaaaaaaattttaaaaattcattaccctgaaattttgtttcaaagatttttagtgtaccatttcttgggtattatttaggttatatggggatttgagccaaccgtcttttaaggaaataaatatgatgtttggtagttcggagctatggtctagccatgtgaacagcggacactgccatccaccctctcccctcctgaatttcatttcactttttttttttgaactttattttactcttaagatgtcgcacgcggccacaagcgccttatgccgctccataaagctgcagtgtgagctgtacccctcgcggcagatcgccatctgcctcgacccctactgtggccttggttttgccctgtggtgtctgtgcaggtgagtgcagggcccctgctgcctgccaggtgggagcagctcgtgtggctcttaggaaccttggccttctaaggcaccttttctgggtgctcaggaagccgatgagatgtgtgtgagtgggtttgtttggggatgaagtgggttggagtctgagtctgaaattgagtgaaaatacatttttcattaaatacactgtccgttatcagtacttgggaagaatctgcttgattccttcaaacactagaaagtggcgatccgtctctagaagtgaatgcctctggagtggtgtccccggatcctctccaagtgttcggagcagagctcagaaccccgtgcctgccatcccccaaccttcaccctgtggcatgttttccaccaaacccccccacttggcgtcagaacagaaatcatgcccctgttgtggctggaaaagaagtgttcttgaggaagggaagagtggagtgcccagggtgctgggtgggcgggcggagcctcacgagccttccctctcgcagtgtctactcgggacaccaatcagtgctggtgcccccgctggagctggagagcaacgtgtccctgtggctgtcggccgtcagccagtacaaggcccgcgtcaccttctgctcctactctgtgatggagatgtgcaccaagggcctaggcgcacagacgggtgtcctcaggatgaagggggtgaacctgtcatgtgtgcgcacgtgcatggtggtcgccgaggagcggcccaggattgcgctgacccagtccttctccaagctcttcaaggacctgggcctgccggcccgcgccgtaagcaccacgttcgggtgcagggtcaacgtggccatctgcctccagggcacagctggcccggaccccacaaccgtctacgtggacatgcgggcactgcgccatgacagggttcgtttggtagaacggggttctccgcacagcctgccattgatggagtctggaaagatcctccccggcgtgaaggtcatcatcgcacacaccgagaccaaaggacccttgggagactcacacctgggagagatctgggtaagcagcccccacaatgccaccgggtactacaccgtttacggggaggaggcgcttcatgccgaccacttcagtgcccggctgagttttggagacacacagaccatctgggcaaggaccggctaccttggcttccttcggcgaacagagctcactgatgccagtggaggtgaggggttgtggtgaagccctgcgtgagtgctgtgcggggaggacctgggctccccaagagcttagtcacctgctagcacacctcactccttgctgtggtctggtattgctccttgtggggggaagatgttctgacagcagttttctctgaaaatactgttttccctccatgactgcccctcactgtccttgggcccttggcctctgctgagggcgtgggggacggtgttggtgataaggctaccaggcttctccccgaggccagaccggtctctctgccgctgtgtctttaccagtggcttccccatgcacaacccatttaaggttgtggtcaatgtccagaggactctgtgcagccaccacaagctggccagataaggcagaacttttggtagctcctatagatggtgtcc

SEQ ID NO: 736149 - DNA, 7803 bp, Homo sapiens
ctgtcctggccgcgcccctgtcccgccgcctcccgctcctcgcctggcggatgtaggttgttggcctgaggggagctacgtagccgaggtttgcgctgccgccgccaggcccggtccggttccagcctctgcccggacgctagccggcctggccatggctgaccgcgggtgcccgctggaggcggcgccgctgcctgccgaggtgcgggagagcctggctgagctggagctggagctgtcggaaggtgacatcactcaaaaaggatatgaaaagaaaagggcaaagctgcttgcacgttatataccgcttattcaaggaatagacccatctctgcaagcagagaatagaattcctgggccctcacaaaccacggccgctgcacccaagcagcagaagtctcggcccaccgcctcgagggatgagcgcttccggtcagatgtccacactgaagccgtgcaagcagctttggccaaatacaaagagaggaagatgcctatgccttcgaagagacgttctgtccttgtgcattcgtctgtggaaacctacacccctccagacacgtcgtctgcctcagaagatgagggctctttacggcgacccgggcgactcacctccactccgctccagagccattccagcgtcgagccctggctcgaccgggtcattcagggctcgtccacctcatcctctgcatcctccacctcatctcacccgggagggagacccaccactgctcccagtgctgcagccacgccgggggccgccgctaccactgcactcgcaggcctcgaggcccacacccacatagatctgcattctgcccctcctgatgtcaccacgggcctcgtggagcattcgtactttgagcgtccacaggtggcttctgtgagaagtgttcctcgggggtgcagcgggagcatgctggaaacagcagatggtgtccctgtgaacagcagagtgtcctccaaaatccagcagcttctgaacaccctgaagaggccaaagcgccctccactgaaggagttctttgtggatgattttgaggaattgttggaagttcagcaaccagatccaaatcagccaaagcctgagggaagcgagacgagtgtgctgagaggggagcctctcactgcaggtgtcccccgaccgccgtcgctgttggccaccttgcagcgctggggcacaacacagcccaaatccccctgtctgactgccttggatacaactgggaaagccgtctacactctcacctatggtaaactttggagtcggagtttaaaactagcttatactctacttaataaactgacaagtaagaatgaacctctacttaaacctggagacagagtggcgctcgtgtttccgaatagtgaccctgtgatgttcatggttgcattttatgggtgtctcctggcagagctggttcctgtccccatagaagtgccattaacaagaaaggatgcaggcagccagcaggttgggtttctgctgggcagctgtggagtcttcttggccctgaccacagacgcttgtcagaaaggcctccccaaggcacagacaggagaggtggcagctttcaaaggttggcccccgctctcctggctagtgattgatgggaagcatctagccaagcccccaaaggactggcaccctctggcccaggacacagggactgggactgcctacattgagtataaaaccagcaaagaaggcagtacggtgggggtcacagtgtcccacgcatccctgctggcacagtgccgggctctgacccaggcgtgcgggtactcagaagctgaaacattaacaaacgtgctggatttcaaaagggatgctggtctgtggcatggcgtgttaacaagcgtcatgaacaggatgcacgtggtcagcgtcccctacgcgctgatgaaggcgaacccactctcctggatccagaaagtgtgcttctataaagctcgggccgcgctggtgaagtcgcgagacatgcactggtctctcctagctcagcggggccagagggacgtcagcctcagctcactgcgcatgctgattgtggccgatggtgccaacccgtggtcgatctcctcctgtgacgccttcctcaacgtcttccagtccagaggtctgaggccagaggtcatctgtccttgtgcaagttctcctgaggcgctgactgtcgccatccgcaggccacctgatctgggaggaccacctccaagaaaagcagtcctgtcgatgaacggtctaagttatggtgttatcagagtggatactgaagaaaagttgtcagtccttactgttcaggacgttggtcaggtgatgcctggagctaatgtatgtgttgtgaagttagaaggtaccccttatctttgtaaaactgatgaagtgggagaaatatgcgtcagttccagtgcaactggcacagcgtactatggattgcttggaatcacgaagaatgtgtttgaggcagttccggtcaccacaggaggagcacccatctttgacaggccattcaccaggacaggcctgctgggcttcatcgggcctgacaacctggtcttcatcgtgggcaaactggacgggctgatggtcactggagttcgcagacacaatgcagatgacgttgtggccaccgcactggccgtggagcccatgaagtttgtctacagaggcaggatcgctgtgttctctgtgaccgtgctgcacgacgaccggattgtcctggtggctgagcagcggccggatgcctcggaggaggacagcttccagtggatgagccgtgtgctgcaggccattgatagcatccaccaggtgggcgtgtactgtctggccctggttcctgccaacaccttgcccaaggctcctctcggagggattcacatttctgaaaccaaacagcgctttctggaagggacgctgcacccgtgtaatgtgctgatgtgccctcacacctgtgttaccaacctccccaaacctcgtcagaaacaaccagaggttggaccagcctcaatgatcgtggggaacctggttgctgggaagagaatcgctcaggcttccgggagagagctcgcccacctggaggacagcgaccaggcacggaagttcctgttcctggctgacgtgctgcagtggcgtgcccacaccactcctgaccacccgctgttcttgctgctgaacgccaagggcaccgtcacaagcactgcaacctgtgtccagctgcacaaaagggctgagagagtggccgcggctctgatggagaagggaagactgagtgttggggaccatgtggctctggtctacccaccaggggtggacctcattgccgcgttctatggctgcttgtactgtggctgcgtgcctgtcaccgtgcggcccccgcaccctcagaacctcggcaccacactgcccaccgtcaagatgatcgtggaggtcagcaagtctgcatgcgtcctcaccacgcaggctgtcacacggctgctcaggtccaaggaggctgctgctgccgtggacatcaggacctggcccaccatcctagacacagatgacatcccaaaaaagaagatagcaagcgttttcaggcccccctcccccgatgtcctcgcatacttggacttcagcgtgtcaaccactgggatattagcgggagtgaaggtaggtcctctgaaatcttgtttgcttcagcccctagaaatcaggaggagtggacagaaaggatgtcagatgcagatttaaactgacaggtccttcttatgcaaagcacaaagcaacaattttgcttcttaagatttgtgttaaataccaataaatgctaagatgtgattagcctgagagtaatgcgttttctgatgcattatggttatgtctaaactttctgatttatgactgtctagcttacaggaactggtggctttgaagaatctcttaccttgctgggagtcaatagctcaattaaaatttttcaggcggggcgtggtggctcacgcctgtaatcccagcacttcgggaggccgaggcgggtggatcacaagatcaagagatggagaccatcctggccaacgtggtgaaaccccgtctctactaaaaatacaaaaaattagctgggcatggtggcaggtgcctctaatcccagatactcaggaggctgaggcaggagaattgcttgaacccgggaggcagaggttgcagtgagccgagattgtgccattgcactccagcctgggcgacagagcaagactctgcctcaaaaaaaaaaaaaagaaaaaaattttaaaaattcattaccctgaaattttgtttcaaagatttttagtgtaccatttcttgggtattatttaggttatatggggatttgagccaaccgtcttttaaggaaataaatatgatgtttggtagttcggagctatggtctagccatgtgaacagcggacactgccatccaccctctcccctcctgaatttcatttcactttttttttttgaactttattttactcttaagatgtcgcacgcggccacaagcgccttatgccgctccataaagctgcagtgtgagctgtacccctcgcggcagatcgccatctgcctcgacccctactgtggccttggttttgccctgtggtgtctgtgcaggtgagtgcagggcccctgctgcctgccaggtgggagcagctcgtgtggctcttaggaaccttggccttctaaggcaccttttctgggtgctcaggaagccgatgagatgtgtgtgagtgggtttgtttggggatgaagtgggttggagtctgagtctgaaattgagtgaaaatacatttttcattaaatacactgtccgttatcagtacttgggaagaatctgcttgattccttcaaacactagaaagtggcgatccgtctctagaagtgaatgcctctggagtggtgtccccggatcctctccaagtgttcggagcagagctcagaaccccgtgcctgccatcccccaaccttcaccctgtggcatgttttccaccaaacccccccacttggcgtcagaacagaaatcatgcccctgttgtggctggaaaagaagtgttcttgaggaagggaagagtggagtgcccagggtgctgggtgggcgggcggagcctcacgagccttccctctcgcagtgtctactcgggacaccaatcagtgctggtgcccccgctggagctggagagcaacgtgtccctgtggctgtcggccgtcagccagtacaaggcccgcgtcaccttctgctcctactctgtgatggagatgtgcaccaagggcctaggcgcacagacgggtgtcctcaggatgaagggggtgaacctgtcatgtgtgcgcacgtgcatggtggtcgccgaggagcggcccaggattgcgctgacccagtccttctccaagctcttcaaggacctgggcctgccggcccgcgccgtaagcaccacgttcgggtgcagggtcaacgtggccatctgcctccagggcacagctggcccggaccccacaaccgtctacgtggacatgcgggcactgcgccatgacagggttcgtttggtagaacggggttctccgcacagcctgccattgatggagtctggaaagatcctccccggcgtgaaggtcatcatcgcacacaccgagaccaaaggacccttgggagactcacacctgggagagatctgggtaagcagcccccacaatgccaccgggtactacaccgtttacggggaggaggcgcttcatgccgaccacttcagtgcccggctgagttttggagacacacagaccatctgggcaaggaccggctaccttggcttccttcggcgaacagagctcactgatgccagtggagggcggcacgatgcactgtatgtggttgggtctctggatgaaactctggagctcagaggcatgcggtaccaccccatcgacattgagacctctgtcatccgagcacacaggagcatcgctgagtgtgccgtattcacctggaccaacctgctggtggtggtggtggagctggatgggctagagcaggatgccctggacctggtggccctggtgaccaacgtggtgctggaggagcactacctggtcgtgggagtggtggtcatcgtggacccaggggtgatccctatcaactctcggggtgagaagcagcgcatgcacctgcgggacggcttcctggctgaccagctggaccccatctatgtcgcctacaacatgtgagcgcagcacaccggcccaggtgccggagatgaatgagccccagcagtccaaggtgtgatgtgggaagacaccgcagagctcactcaccgggactcgcccttcctgtgctcttacagatccctctcaacaatccccgcatctccttttagaaagcacttcctgaattatttaaagaaatattttgaatctgccaagtacatttacaaaaacacggatgctggtattttaacagatggagagacaaggaaaggaaaggaaaggcctggcatgggcattgtgaggaatcacaggcaccgaggttgttctctgctgtactgcaagtttgcactttctttaggctaaaaatatagttcctgatttttaaaattcagttatttattcccacttcaaatgacaagttcatatatagaatttacgggagaaacttgagaccatttacggggagaaacttgattctgggaagatagcagagtacaaaccagctgcctcacttctgtttcacagggaggctgatggaaaaaggaagcaagctggacccatcctccctgctcacagagggcactgtggtcacacacagtgcctcctctgccagttcctttattgaaagaggtgtgctggctggccacggtggcttacacctgtaatcccagcactttgggaggccgaggcgagcagatcacgaggtcaggagaccgagaccatcctggctaacatggtgaaaccctgtctctactaaaaatacaaaaaattagccgggtgtggtggtgggcgcctgtagtcccagctacttgggaggctgaggcaggagaatggtatgaaccagggaggcggagcttgcagtgagccgagatcacgctactgcactccagcctgggtgacagcacgagatgccgtcttaaaaaaacaaaaaagaggtgtgctgcttgtcagcatgtattgtcacggacactcaataagtgccattttggactgtcaaatttagatgctttgtttcagaaagataagccagcatttagttttaaatcactttcctggtttgtaacttgatgctgtttagttaaattgctagttttcctaacactacaatattaattcttctcgtggaagtgtactgatttattatttttattccaagtcagcagatttggaagcattgtggtaaagtctaaggttttcatatccatagtgctgtttggtgagtaccggcagtacagttgaggggagcagggaacagcattgccccgtattgaaggtggagatggttacattcttcactgctttttgcattttgagttgtgtgcctataaaatttggccaaaccattttattattttgttcaaacttgactaagctgagtgatctaaaattatacagaacctaaatcaaagaagagaatgtaaagtcctttagttacttctaagaatttgaagtcaagcacgaatctaagacatagattatttttatatagctaatgaagagtatgttacgaaatattatgcttgcggttattgtgatcattatacctgttccacactatttgacaaggacagtgatgcatgcacaccccgcgg

SEQ ID NO: 736150 - DNA, 7870 bp, Homo sapiens
atttgacttaacagccactttcattttgggtgtgtttttcaaaagcagatctgcattctgcccctcctgatgtcaccacgggcctcgtggagcattcgtactttgagcgtccacaggtggcttctgtgagaagtgttcctcgggggtgcagcgggagcatgctggaaacagcagatggtgtccctgtgaacagcagagtgtcctccaaaatccagcagcttctgaacaccctgaagaggccaaagcgccctccactgaaggagttctttgtggatgattttgaggaattgttggaagttcagcaaccagatccaaatcagccaaagcctgagggaagcgagacgagtgtgctgagaggggagcctctcactgcaggtgtcccccgaccgccgtcgctgttggccaccttgcagcgctggggcacaacacagcccaaatccccctgtctgactgccttggatacaactgggaaagccgtctacactctcacctatggtaaactttggagtcggagtttaaaactagcttatactctacttaataaactgacaagtaagaatgaacctctacttaaacctggagacagagtggcgctcgtgtttccgaatagtgaccctgtgatgttcatggttgcattttatgggtgtctcctggcagagctggttcctgtccccatagaagtgccattaacaagaaaggatgcaggcagccagcaggttgggtttctgctgggcagctgtggagtcttcttggccctgaccacagacgcttgtcagaaaggcctccccaaggcacagacaggagaggtggcagctttcaaaggttggcccccgctctcctggctagtgattgatgggaagcatctagccaagcccccaaaggactggcaccctctggcccaggacacagggactgggactgcctacattgagtataaaaccagcaaagaaggcagtacggtgggggtcacagtgtcccacgcatccctgctggcacagtgccgggctctgacccaggcgtgcgggtactcagaagctgaaacattaacaaacgtgctggatttcaaaagggatgctggtctgtggcatggcgtgttaacaagcgtcatgaacaggatgcacgtggtcagcgtcccctacgcgctgatgaaggcgaacccactctcctggatccagaaagtgtgcttctataaagctcgggccgcgctggtgaagtcgcgagacatgcactggtctctcctagctcagcggggccagagggacgtcagcctcagctcactgcgcatgctgattgtggccgatggtgccaacccgtggtcgatctcctcctgtgacgccttcctcaacgtcttccagtccagaggtctgaggccagaggtcatctgtccttgtgcaagttctcctgaggcgctgactgtcgccatccgcaggccacctgatctgggaggaccacctccaagaaaagcagtcctgtcgatgaacggtctaagttatggtgttatcagagtggatactgaagaaaagttgtcagtccttactgttcaggacgttggtcaggtgatgcctggagctaatgtatgtgttgtgaagttagaaggtaccccttatctttgtaaaactgatgaagtgggagaaatatgcgtcagttccagtgcaactggcacagcgtactatggattgcttggaatcacgaagaatgtgtttgaggcagttccggtcaccacaggaggagcacccatctttgacaggccattcaccaggacaggcctgctgggcttcatcgggcctgacaacctggtcttcatcgtgggcaaactggacgggctgatggtcactggagttcgcagacacaatgcagatgacgttgtggccaccgcactggccgtggagcccatgaagtttgtctacagaggcaggatcgctgtgttctctgtgaccgtgctgcacgacgaccggattgtcctggtggctgagcagcggccggatgcctcggaggaggacagcttccagtggatgagccgtgtgctgcaggccattgatagcatccaccaggtgggcgtgtactgtctggccctggttcctgccaacaccttgcccaaggctcctctcggagggattcacatttctgaaaccaaacagcgctttctggaagggacgctgcacccgtgtaatgtgctgatgtgccctcacacctgtgttaccaacctccccaaacctcgtcagaaacaaccagaggttggaccagcctcaatgatcgtggggaacctggttgctgggaagagaatcgctcaggcttccgggagagagctcgcccacctggaggacagcgaccaggcacggaagttcctgttcctggctgacgtgctgcagtggcgtgcccacaccactcctgaccacccgctgttcttgctgctgaacgccaagggcaccgtcacaagcactgcaacctgtgtccagctgcacaaaagggctgagagagtggccgcggctctgatggagaagggaagactgagtgttggggaccatgtggctctggtctacccaccaggggtggacctcattgccgcgttctatggctgcttgtactgtggctgcgtgcctgtcaccgtgcggcccccgcaccctcagaacctcggcaccacactgcccaccgtcaagatgatcgtggaggtcagcaagtctgcatgcgtcctcaccacgcaggctgtcacacggctgctcaggtccaaggaggctgctgctgccgtggacatcaggacctggcccaccatcctagacacagatgacatcccaaaaaagaagatagcaagcgttttcaggcccccctcccccgatgtcctcgcatacttggacttcagcgtgtcaaccactgggatattagcgggagtgaaggtaggtcctctgaaatcttgtttgcttcagcccctagaaatcaggaggagtggacagaaaggatgtcagatgcagatttaaactgacaggtccttcttatgcaaagcacaaagcaacaattttgcttcttaagatttgtgttaaataccaataaatgctaagatgtgattagcctgagagtaatgcgttttctgatgcattatggttatgtctaaactttctgatttatgactgtctagcttacaggaactggtggctttgaagaatctcttaccttgctgggagtcaatagctcaattaaaatttttcaggcggggcgtggtggctcacgcctgtaatcccagcacttcgggaggccgaggcgggtggatcacaagatcaagagatggagaccatcctggccaacgtggtgaaaccccgtctctactaaaaatacaaaaaattagctgggcatggtggcaggtgcctctaatcccagatactcaggaggctgaggcaggagaattgcttgaacccgggaggcagaggttgcagtgagccgagattgtgccattgcactccagcctgggcgacagagcaagactctgcctcaaaaaaaaaaaaaagaaaaaaattttaaaaattcattaccctgaaattttgtttcaaagatttttagtgtaccatttcttgggtattatttaggttatatggggatttgagccaaccgtcttttaaggaaataaatatgatgtttggtagttcggagctatggtctagccatgtgaacagcggacactgccatccaccctctcccctcctgaatttcatttcactttttttttttgaactttattttactcttaagatgtcgcacgcggccacaagcgccttatgccgctccataaagctgcagtgtgagctgtacccctcgcggcagatcgccatctgcctcgacccctactgtggccttggttttgccctgtggtgtctgtgcaggtgagtgcagggcccctgctgcctgccaggtgggagcagctcgtgtggctcttaggaaccttggccttctaaggcaccttttctgggtgctcaggaagccgatgagatgtgtgtgagtgggtttgtttggggatgaagtgggttggagtctgagtctgaaattgagtgaaaatacatttttcattaaatacactgtccgttatcagtacttgggaagaatctgcttgattccttcaaacactagaaagtggcgatccgtctctagaagtgaatgcctctggagtggtgtccccggatcctctccaagtgttcggagcagagctcagaaccccgtgcctgccatcccccaaccttcaccctgtggcatgttttccaccaaacccccccacttggcgtcagaacagaaatcatgcccctgttgtggctggaaaagaagtgttcttgaggaagggaagagtggagtgcccagggtgctgggtgggcgggcggagcctcacgagccttccctctcgcagtgtctactcgggacaccaatcagtgctggtgcccccgctggagctggagagcaacgtgtccctgtggctgtcggccgtcagccagtacaaggcccgcgtcaccttctgctcctactctgtgatggagatgtgcaccaagggcctaggcgcacagacgggtgtcctcaggatgaagggggtgaacctgtcatgtgtgcgcacgtgcatggtggtcgccgaggagcggcccaggattgcgctgacccagtccttctccaagctcttcaaggacctgggcctgccggcccgcgccgtaagcaccacgttcgggtgcagggtcaacgtggccatctgcctccagggcacagctggcccggaccccacaaccgtctacgtggacatgcgggcactgcgccatgacagggttcgtttggtagaacggggttctccgcacagcctgccattgatggagtctggaaagatcctccccggcgtgaaggtcatcatcgcacacaccgagaccaaaggacccttgggagactcacacctgggagagatctgggtaagcagcccccacaatgccaccgggtactacaccgtttacggggaggaggcgcttcatgccgaccacttcagtgcccggctgagttttggagacacacagaccatctgggcaaggaccggctaccttggcttccttcggcgaacagagctcactgatgccagtggagggcggcacgatgcactgtatgtggttgggtctctggatgaaactctggagctcagaggcatgcggtaccaccccatcgacattgagacctctgtcatccgagcacacaggagcatcgctgagtgtgccgtattcacctggaccaacctgctggtggtggtggtggagctggatgggctagagcaggatgccctggacctggtggccctggtgaccaacgtggtgctggaggagcactacctggtcgtgggagtggtggtcatcgtggacccaggggtgatccctatcaactctcggggtgagaagcagcgcatgcacctgcgggacggcttcctggctgaccagctggaccccatctatgtcgcctacaacatgtgagcgcagcacaccggcccaggtgccggagatgaatgagccccagcagtccaaggtgtgatgtgggaagacaccgcagagctcactcaccgggactcgcccttcctgtgctcttacagatccctctcaacaatccccgcatctccttttagaaagcacttcctgaattatttaaagaaatattttgaatctgccaagtacatttacaaaaacacggatgctggtattttaacagatggagagacaaggaaaggaaaggaaaggcctggcatgggcattgtgaggaatcacaggcaccgaggttgttctctgctgtactgcaagtttgcactttctttaggctaaaaatatagttcctgatttttaaaattcagttatttattcccacttcaaatgacaagttcatatatagaatttacgggagaaacttgagaccatttacggggagaaacttgattctgggaagatagcagagtacaaaccagctgcctcacttctgtttcacagggaggctgatggaaaaaggaagcaagctggacccatcctccctgctcacagagggcactgtggtcacacacagtgcctcctctgccagttcctttattgaaagaggtgtgctggctggccacggtggcttacacctgtaatcccagcactttgggaggccgaggcgagcagatcacgaggtcaggagaccgagaccatcctggctaacatggtgaaaccctgtctctactaaaaatacaaaaaattagccgggtgtggtggtgggcgcctgtagtcccagctacttgggaggctgaggcaggagaatggtatgaaccagggaggcggagcttgcagtgagccgagatcacgctactgcactccagcctgggtgacagcacgagatgccgtcttaaaaaaacaaaaaagaggtgtgctgcttgtcagcatgtattgtcacggacactcaataagtgccattttggactgtcaaatttagatgctttgtttcagaaagataagccagcatttagttttaaatcactttcctggtttgtaacttgatgctgtttagttaaattgctagttttcctaacactacaatattaattcttctcgtggaagtgtactgatttattatttttattccaagtcagcagatttggaagcattgtggtaaagtctaaggttttcatatccatagtgctgtttggtgagtaccggcagtacagttgaggggagcagggaacagcattgccccgtattgaaggtggagatggttacattcttcactgctttttgcattttgagttgtgtgcctataaaatttggccaaaccattttattattttgttcaaacttgactaagctgagtgatctaaaattatacagaacctaaatcaaagaagagaatgtaaagtcctttagttacttctaagaatttgaagtcaagcacgaatctaagacatagattatttttatatagctaatgaagagtatgttacgaaattgttgggtttttggggtattgagggtggcaaattttgtgaatcatgcatgcttcacagaaacaaccaggtttttccagaattagtctggatcagtgcctaacaaagctgttattaattctccacacatgagtctggctaactgggccagctctcatgttttactcctgtctggctacaaatagcactgtgcatagtagccctgtttccccatggtgttggactgtggtaaagtatgttgtgacatactggaattctaataatcctgttgtaagtatgtacagaatctatgtaacttattgttgacatacagaggtttgggaagtagtctaatggacattccttacaatagaatggctgggaagggaaagaaaaaaaaaaaaaaactacctaactccaatcttaatgttgtagttttatagcaaacaaaaattgtcagctttttgtattgaaaggtcagtggtggtaagacaaggtgtcttgtaaattaagattttaagaagtgcattaaaatgttttagaattactctgggaattctgtatatcacactaaaatttttatatcattatgttaataaaagttattgactttgtaattctgcattttgaaatgtgtgaaaagggtctttaaattaccccgaataggttgtatcttattttgctttttttctgactataaaagcagttatgcttatagcataaaatctagaaagcacattaaagtataaagaaaattaaaatttcttataattctacctctgagtaaacagcagcattcgtatgtaacataaaccctctcagggatttattttttctttttaaaaattttttacaaaattaggatcaagtgcttttttaaataatttgcttttgtacttaataaattatagactttaaaatctattacat

SEQ ID NO: 736151 - DNA, 3752 bp, Homo sapiens
tcacacaaccaggaagaataagagtggcccctgtgacatttggttctttagagggacagggacagagagaagacaagtaacccatctactggcaagaacgtttcttacccgatgacccatgtgacatttggtttttagagggatagggacagatagaagacaagttatccatctactggcagaacgtttcttacctgatgctgtcataggatctgacttagtttcatcttgatgaacgatggtggtgcatacagtgtgtgcttgctggtctgtggtcagatgtgtatcagggcccctcccagctttgaagctcagatcccagtcctggattctcaagtatggccacactgtagcttgatgtaaacactaggtttagcttactgggtgccaggggcttgctgggttcagggaggacctaaacgaaatgtagagtgagctgctgtgagcacatggggtgggtggcgagtgcatgcgggtggcggcacttgggaccgcagcgtggttggggtgtccctgccattcatggcaggtgtgctgtggaaaggttgacatcctgactgttgtcaacagaccctcagagtgatcatttccaacgtcatgatctgccctttcagacattactacctgtgtagtaaattttgtactgaaattgttcccttaatttttagggttcgtttggtagaacggggttctccgcacagcctgccattgatggagtctggaaagatcctccccggcgtgaaggtcatcatcgcacacaccgagaccaaaggacccttgggagactcacacctgggagagatctgggtaagcagcccccacaatgccaccgggtactacaccgtttacggggaggaggcgcttcatgccgaccacttcagtgcccggctgagttttggagacacacagaccatctgggcaaggaccggctaccttggcttccttcggcgaacagagctcactgatgccagtggagggcggcacgatgcactgtatgtggttgggtctctggatgaaactctggagctcagaggcatgcggtaccaccccatcgacattgagacctctgtcatccgagcacacaggagcatcgctgagtgtgccgtattcacctggaccaacctgctggtggtggtggtggagctggatgggctagagcaggatgccctggacctggtggccctggtgaccaacgtggtgctggaggagcactacctggtcgtgggagtggtggtcatcgtggacccaggggtgatccctatcaactctcggggtgagaagcagcgcatgcacctgcgggacggcttcctggctgaccagctggaccccatctatgtcgcctacaacatgtgagcgcagcacaccggcccaggtgccggagatgaatgagccccagcagtccaaggtgtgatgtgggaagacaccgcagagctcactcaccgggactcgcccttcctgtgctcttacagatccctctcaacaatccccgcatctccttttagaaagcacttcctgaattatttaaagaaatattttgaatctgccaagtacatttacaaaaacacggatgctggtattttaacagatggagagacaaggaaaggaaaggaaaggcctggcatgggcattgtgaggaatcacaggcaccgaggttgttctctgctgtactgcaagtttgcactttctttaggctaaaaatatagttcctgatttttaaaattcagttatttattcccacttcaaatgacaagttcatatatagaatttacgggagaaacttgagaccatttacggggagaaacttgattctgggaagatagcagagtacaaaccagctgcctcacttctgtttcacagggaggctgatggaaaaaggaagcaagctggacccatcctccctgctcacagagggcactgtggtcacacacagtgcctcctctgccagttcctttattgaaagaggtgtgctggctggccacggtggcttacacctgtaatcccagcactttgggaggccgaggcgagcagatcacgaggtcaggagaccgagaccatcctggctaacatggtgaaaccctgtctctactaaaaatacaaaaaattagccgggtgtggtggtgggcgcctgtagtcccagctacttgggaggctgaggcaggagaatggtatgaaccagggaggcggagcttgcagtgagccgagatcacgctactgcactccagcctgggtgacagcacgagatgccgtcttaaaaaaacaaaaaagaggtgtgctgcttgtcagcatgtattgtcacggacactcaataagtgccattttggactgtcaaatttagatgctttgtttcagaaagataagccagcatttagttttaaatcactttcctggtttgtaacttgatgctgtttagttaaattgctagttttcctaacactacaatattaattcttctcgtggaagtgtactgatttattatttttattccaagtcagcagatttggaagcattgtggtaaagtctaaggttttcatatccatagtgctgtttggtgagtaccggcagtacagttgaggggagcagggaacagcattgccccgtattgaaggtggagatggttacattcttcactgctttttgcattttgagttgtgtgcctataaaatttggccaaaccattttattattttgttcaaacttgactaagctgagtgatctaaaattatacagaacctaaatcaaagaagagaatgtaaagtcctttagttacttctaagaatttgaagtcaagcacgaatctaagacatagattatttttatatagctaatgaagagtatgttacgaaattgttgggtttttggggtattgagggtggcaaattttgtgaatcatgcatgcttcacagaaacaaccaggtttttccagaattagtctggatcagtgcctaacaaagctgttattaattctccacacatgagtctggctaactgggccagctctcatgttttactcctgtctggctacaaatagcactgtgcatagtagccctgtttccccatggtgttggactgtggtaaagtatgttgtgacatactggaattctaataatcctgttgtaagtatgtacagaatctatgtaacttattgttgacatacagaggtttgggaagtagtctaatggacattccttacaatagaatggctgggaagggaaagaaaaaaaaaaaaaaactacctaactccaatcttaatgttgtagttttatagcaaacaaaaattgtcagctttttgtattgaaaggtcagtggtggtaagacaaggtgtcttgtaaattaagattttaagaagtgcattaaaatgttttagaattactctgggaattctgtatatcacactaaaatttttatatcattatgttaataaaagttattgactttgtaattctgcattttgaaatgtgtgaaaagggtctttaaattaccccgaataggttgtatcttattttgctttttttctgactataaaagcagttatgcttatagcataaaatctagaaagcacattaaagtataaagaaaattaaaatttcttataattctacctctgagtaaacagcagcattcgtatgtaacataaaccctctcagggatttattttttctttttaaaaattttttacaaaattaggatcaagtgcttttttaaataatttgcttttgtacttaataaattatagactttaaaatctattacat

SEQ ID NO: 736152 - DNA, 3107 bp, Homo sapiens
gacgttattttaatgtcactgaatcaagagagtctcgtgtcatgttttctttaacaagggacatagctctcctccttccagatcctccccggcgtgaaggtcatcatcgcacacaccgagaccaaaggacccttgggagactcacacctgggagagatctgggtaagcagcccccacaatgccaccgggtactacaccgtttacggggaggaggcgcttcatgccgaccacttcagtgcccggctgagttttggagacacacagaccatctgggcaaggaccggctaccttggcttccttcggcgaacagagctcactgatgccagtggagggcggcacgatgcactgtatgtggttgggtctctggatgaaactctggagctcagaggcatgcggtaccaccccatcgacattgagacctctgtcatccgagcacacaggagcatcgctgagtgtgccgtattcacctggaccaacctgctggtggtggtggtggagctggatgggctagagcaggatgccctggacctggtggccctggtgaccaacgtggtgctggaggagcactacctggtcgtgggagtggtggtcatcgtggacccaggggtgatccctatcaactctcggggtgagaagcagcgcatgcacctgcgggacggcttcctggctgaccagctggaccccatctatgtcgcctacaacatgtgagcgcagcacaccggcccaggtgccggagatgaatgagccccagcagtccaaggtgtgatgtgggaagacaccgcagagctcactcaccgggactcgcccttcctgtgctcttacagatccctctcaacaatccccgcatctccttttagaaagcacttcctgaattatttaaagaaatattttgaatctgccaagtacatttacaaaaacacggatgctggtattttaacagatggagagacaaggaaaggaaaggaaaggcctggcatgggcattgtgaggaatcacaggcaccgaggttgttctctgctgtactgcaagtttgcactttctttaggctaaaaatatagttcctgatttttaaaattcagttatttattcccacttcaaatgacaagttcatatatagaatttacgggagaaacttgagaccatttacggggagaaacttgattctgggaagatagcagagtacaaaccagctgcctcacttctgtttcacagggaggctgatggaaaaaggaagcaagctggacccatcctccctgctcacagagggcactgtggtcacacacagtgcctcctctgccagttcctttattgaaagaggtgtgctggctggccacggtggcttacacctgtaatcccagcactttgggaggccgaggcgagcagatcacgaggtcaggagaccgagaccatcctggctaacatggtgaaaccctgtctctactaaaaatacaaaaaattagccgggtgtggtggtgggcgcctgtagtcccagctacttgggaggctgaggcaggagaatggtatgaaccagggaggcggagcttgcagtgagccgagatcacgctactgcactccagcctgggtgacagcacgagatgccgtcttaaaaaaacaaaaaagaggtgtgctgcttgtcagcatgtattgtcacggacactcaataagtgccattttggactgtcaaatttagatgctttgtttcagaaagataagccagcatttagttttaaatcactttcctggtttgtaacttgatgctgtttagttaaattgctagttttcctaacactacaatattaattcttctcgtggaagtgtactgatttattatttttattccaagtcagcagatttggaagcattgtggtaaagtctaaggttttcatatccatagtgctgtttggtgagtaccggcagtacagttgaggggagcagggaacagcattgccccgtattgaaggtggagatggttacattcttcactgctttttgcattttgagttgtgtgcctataaaatttggccaaaccattttattattttgttcaaacttgactaagctgagtgatctaaaattatacagaacctaaatcaaagaagagaatgtaaagtcctttagttacttctaagaatttgaagtcaagcacgaatctaagacatagattatttttatatagctaatgaagagtatgttacgaaattgttgggtttttggggtattgagggtggcaaattttgtgaatcatgcatgcttcacagaaacaaccaggtttttccagaattagtctggatcagtgcctaacaaagctgttattaattctccacacatgagtctggctaactgggccagctctcatgttttactcctgtctggctacaaatagcactgtgcatagtagccctgtttccccatggtgttggactgtggtaaagtatgttgtgacatactggaattctaataatcctgttgtaagtatgtacagaatctatgtaacttattgttgacatacagaggtttgggaagtagtctaatggacattccttacaatagaatggctgggaagggaaagaaaaaaaaaaaaaaactacctaactccaatcttaatgttgtagttttatagcaaacaaaaattgtcagctttttgtattgaaaggtcagtggtggtaagacaaggtgtcttgtaaattaagattttaagaagtgcattaaaatgttttagaattactctgggaattctgtatatcacactaaaatttttatatcattatgttaataaaagttattgactttgtaattctgcattttgaaatgtgtgaaaagggtctttaaattaccccgaataggttgtatcttattttgctttttttctgactataaaagcagttatgcttatagcataaaatctagaaagcacattaaagtataaagaaaattaaaatttcttataattctacctctgagtaaacagcagcattcgtatgtaacataaaccctctcagggatttattttttctttttaaaaattttttacaaaattaggatcaagtgcttttttaaataatttgcttttgtacttaataaattatagactttaaaatctattacat

SEQ ID NO: 736153 - DNA, 550 bp, Homo sapiens
acattttgatagtgcaaaaatgaatttataaatagatgcaaaacgggtcagtatctgcagagcaatagccatatttatattctacaggataaaatttgcatttatttgcatttctttggaaaagaaatttgcattactcaaagtgcactactataagatttctacaatttacagagataagtagcccaaagacgatggaaagcgcgggtccctatcgaatcagataaccctgaagggcgctagatgagacactcagtaatcctttttatggcacactgcaaagtctttcacaattcttacctgacagtctccctccacaggatcataataatctcaaagaaagatcatttttgatcataatcgataagcattttagagagtgggccaaatgctttcattattcaacagaattctcagcctggtcacagggtccccactgtcaagccatcaagaatccctgcactctctcaatgcagggatcccccaggcttccctcatccgccacctggcctgaccctctgccctcctcaatccaccaggtgggtgcctt

SEQ ID NO: 736154 - DNA, 392 bp, Homo sapiens; identical to SEQ ID NO: 466553

SEQ ID NO: 736155 - DNA, 754 bp, Homo sapiens
cctggcatgatctgatcgcctttgaagcagtcgcagctgttttccagacgccttgctcctcaggtcggggagtgatctgatggcccaggttcgagaaacttctttgccctccggctctggggtccgctggatctccggaggtgggggaggagcctctcctgaggaggcggttgagaaggcggggaaaatggaggaggcggcggcgggggctacgaaggcgtcttcgagacgtgaagccgaggagatgaagctggagccattacaagagcgtgagcccgcgccggaggagaacttgacgtggagcagcagcggcggcgacgagaagtttatgacatcagggtttgaagacaagcaatcaacctgtgagacaaaggaacaggagccaaaattggtgaaacccaagaaaaagagaagaaaaaagtcagtctatactgtaggcctgagagggctaatcaatcttgggaacacttgttttatgaattgtattgtccaggcacttacccatattcctctactgaaagatttcttcctctctgacaagcacaaatgtataatgacaagccccagcttgtgtctggtctgtgaaatgtcttcgctttttcatgctatgtactctgggagccgaactcctcacattccctataagttactgcatctgatatggatccatgcagaacatttagcagggtacaggcagcaggatgcccatgagttccttattgcaatattagacgtgctacatagacacagcaaa

SEQ ID NO: 736156 - DNA, 1002 bp, Homo sapiens
ccgccgccacccccgcccccacccgcaccgcggcccagggcctggcgtggatcccggcgcagatcccggcctgggtccaggcctcagacacggagaagctgctctggtgacctagacgggtcgggggatcctggcggcttaggggactggttgctggaagtcgagtttggtcagggtcccacaggctgctctcatgtggagagctttaaagtaggtaagaactggcagaagaacctgaggttgatctaccagcgtttcgtttggagtgggaccccagagactaggaaacgtaaagcaaagtcatgcatctgtcacgtatgtagtacccatatgaacagactccactcttgtctctcctgtgtcttttttggctgcttcactgagaaacatattcacaaacatgcagaaacaaagcagcaccatttagctgtagacctttatcatggggtcatatattgcttcatgtgtaaggattatgtatatgacaaagacatagaacagattgccaaagaaacaaaagaaaaaattttgagattattaacttccacctcaacagatgtttctcatcaacagtttatgacatcagggtttgaagacaagcaatcaacctgtgagacaaaggaacaggagccaaaattggtgaaacccaagaaaaagagaagaaaaaagtcagtctatactgtaggcctgagagggctaatcaatcttgggaacacttgttttatgaattgtattgtccaggcacttacccatattcctctactgaaagatttcttcctctctgacaagcacaaatgtataatgacaagccccagcttgtgtctggtctgtgaaatgtcttcgctttttcatgctatgtactctgggagccgaactcctcacattccctataagttactgcatctgatatggatccatgcagaacatttagcagggtacaggcagcaggatgcccatgagttccttattgcaatattagacgtgctacatagacacagcaaa

SEQ ID NO: 736157 - DNA, 1249 bp, Homo sapiens
agtattttcttcctttttttggtaaactttcatttttaaccttgttccttaatttattttacatttttaaactttaagaatttaattttctttgcttttaatttttaaaattctgaaacttctttaaattaaaaaattatttttaacttttaaaatatttcttttaaaaataacaacttaaatttttttcaacatttaaaagtttttttcttttaaaatcttaaaaatgattttttcctttttaaatgtttttcttttaaagctctttaaactttattttaaaatattatttttctttcaaactatttagctggtcagccacagctggaacaccaattgtgaagtttttgctgataaaggaatactccctgacttcacaagatatttctgtaaaaacaaatgacatagagtagcatcagaacacttctactcccgttgtccccacctaaagcattcttttcatttcattatgctttatgtgaccattttcaacctcttctccctctccccatttcttaaggttgaatggtcactggttagtattcatttttttcttccgacagacccatgggccatgctaaaataggttctttatatcaagatactagctgtcacataggtgttactgtcattgtccattccaagtaggtctgtgtgtcacttcaaaatccttgcctaatcatttacttttttttcagtaagtggtctggtaagactagtctttctctagaccctgtttgtgatagaacagtaaatacccttcactgtagagtaagtcctcaatggtagccttggtgatgatggcatcatcacagctgaaccactggtccttttgttgccggatgaagctggtatagtggccactttccaaagttccatggtgattaatcactgcaaacaaggaatacttattctcattgggcacacaatctgttggtggctggccttctttcattctgctctctttagtagaggccaaaaacggagtcatgtccagctccaagggaaaggagataaaggtattaatctttcgcctctgtttgcctacatgctcaaaccgcttgagatgaaaacaagccacaatgggtaattttttcattgtgagctgtttagtagactcctggtagctttggcaactattgcatttgattttggcactgcttcctaggtgctctggccttgtaaaccactgtagacagtctgtaagtgaggggattcctggtatgtggtcatccctgctcactgtgct

SEQ ID NO: 736158 - DNA, 683 bp, Homo sapiens
agtattttcttcctttttttggtaaactttcatttttaaccttgttccttaatttattttacatttttaaactttaagaatttaattttctttgcttttaatttttaaaattctgaaacttctttaaattaaaaaattatttttaacttttaaaatatttcttttaaaaataacaacttaaatttttttcaacatttaaaagtttttttcttttaaaatcttaaaaatgattttttcctttttaaatgtttttcttttaaagctctttaaactttattttaaaatattatttttctttcaaactatttagctggtcagccacagctggaacaccaattgtgaagtttttgctgataaaggaatactccctgacttcacaagatatttctgtaaaaacaaatgacatagagtagcatcagaacacttctactcccgttgtccccacctaaagcattcttttcatttcattatgctttatgtgaccattttcaacctcttctccctctccccatttcttaaggttgaatggtcactggttagtattcatttttttcttccgacagacccatgggccatgctaaaataggttctttatatcaagatactagctgtcacataggtgttactgtcattgtccattccaagtaggtctgtgtgtcaccgacggcgcgggtcgacgatat

SEQ ID NO: 736159 - DNA, 1357 bp, Homo sapiens
ctaaactatttaaatcctatccattcttcaagaaatgtttcatgacgcttccttaactgctaaggacccgcagattctcttcctcttgggactcacacactgactcatctcccgatcttttggtgctcagcaaagtggaggcctctgttttggacttagagtcaagaccattaaataagactatgctctaaaaagtacacctccgtggcccggaacgagtgaattaacatctatgagtttccatttccttgtctataaaattgtgaaattgcaacttaagattagttctgaagattaaatgaggtaacataggtgaaaatgctacatttatgtaagaaattactctttcataaggatgtcaatgtttaaatacgcattttctcaattttgttaatgaaatactttgaaattcttttttctaatgaaacctgctgaatgtaaaagagacccgtactaaagaaagataccacatgaagcaccaagggtctctttctggatctatcatgactcttgtgactgtttcagcagcacagaaattaaaggcgattgttattctggaggaagacaatgagtctcatctatatcttgtttgggttgattttgtaaacagaacattccaaagatcattcttgccttttgtttccactgagaactagaataaagtaaaacaaactatcaatttaaggaaagcctcgaaattgttagcaatttcttcagtaactttcatccatcaactgattttatgaacacaaatttgcagaaatgggcaagaaaaactacttaactcattggtgggaagcagtgggctctctaaggagggagagatagcagtgatttcaccaccggaccgtggaacacaaagagcctggaagagtctatcactttcaactgaaaccgcaagaagaactaagtaggttaagccctaagaatgttcctaggtaacctacttgagttgaaatttgactaaaaatccttacaccctacctaagagaggtaacgcctattaggatcggaagtgattggaagctttgtttcagatctcgtcccaaaagggagaacggtcaatgacaaagctgctgtgaatagtattctgggggcgtggtggaaccccgattcactgctatctcccgaatcagcaacttgacagagcgcgcctcccgggccttggaagccttccattccgagctggctgggtgggactcaggttttacggtatgctggactttttccccgtgagttaaaacacatttatagtaactaagtggttaatgatgagaaaaaaccccaaactactgtactaataatcaacctctgctatttggtttgtaaaaaacaaaaatacatctataaaaaggga

SEQ ID NO: 736160 - DNA, 2110 bp, Homo sapiens
cccatggcaacagcctgctatgagtagccagccagggcagaggccgggctgcaggtggaggcggggaagcgattccggccacctttgtgatgggcgtctcactacctacaaagtcagcccaatgatttcaagacagccctggagacagtgcttcctgccctcctgtcagcttctgcctccctgtaatgtgttctgggtggtctagctcagtcatctggagacacacacagtttgctgtggaacgttgtggcttctgtggctcctcaggcccgggggcgccccttgaaccctccactcttggctccaagcaccttccctgggaagctgtatctgctgggttcgcagacaggaacagaaacatggatggagccatgtggctgagcctctgtcctgataacgaagacctgctttggaggaaaaagcacaaattgctacaagcccggggcaaaggcgatctcgctctgcagagaagagcggatgccaagctgtggaaaaactaccagctccagcgcttggctgaggagttgaggagagggtatcaggaggcacagcacctgcacgtcggtggcctggacaggctgcagtcagcacgtctgttgggctggggaggaggacgggccagggaaaatgagcctgactcgcaggggcccatccagcgaagatcagccaggcccccgagggccaaggagaagcatagagcagcccttagtgaagagaggagttgcagggaagagttgggccagcaacaccccaggcactccaggccccggaagacagcagcgagtccagagaaaccacagactacaaaagccacgggtcggatgaattctcacctggccccgcctgagaagagaaagggaaggccagaaccttcgaccaagtctgggggtggccgctgtgccatccatcctcggaggagcaaaggggcggacctagaaaggtcaaacccactcgtggctgctgtgggagaaatcgggcttgtggaggaaaaagagaaaggaacagctcgggcggggaggaggcaactgggaaagggggcagtttgctttgttccagccctgaccagtcgctctcagggacagagtctggaggggaagctgagagactcgggcagctgtggccagctgattccagctgcagaagggaagccgtgtccccagcatctcagtgcacgctccgggagaagaacaagtggcagaaagagctggagttggcctttgaagagttgtttaatataaacagaaagctgaaaaaacacctgtgcttgtacctggcactgaagcccaggatggaccagagacctggggaagggcatgccttctcagagatgcaagagtgtggcgctgggaccccaagagggaagaaaatggcagacccagagatgctgcctgccggggaacccaggagcccagcagaggaggaggcgcagcaggcagcgtccaagaccgacttgaaaacgttcatgggcaaggcccagaaccaaaaatatcagggcacggtcaagcccacgtttagaaatggaagtcaaacattgtctcccgaggcaggtatatttatcaacaaagaggactcattattgtatagcactgaatctggacaagagacccccaaactgggcacgctggcagagggctcccttcagctccaccttcaagaccaggcagacagagtgggctcgacggcatccaggcaaaggcagaaagcagagatggagcagagaagacaaaaacaactggaatcgcttgaacaaatggaacacccagatatgagcttggaaatccactacaaagctgagctagaaaaagagaggagggagcaaagaagagctcgactggcccatctgaagtcctcctccacgagagcccaggaaagggagagaggatctgagctcagcaccacttccccatcgggcaccagcctcgccgacgacgaccggcacagtcagatgatccgagaccagcagcagcagatcttacagcaaaacaggttgcacaagcagtttcttgaagaagcccggaaatgcttgcgggagtttcagaacatatgctaaatgcgagaggcccacccggggtaaatacatcactgataatggtgctgccagcactggtaa

SEQ ID NO: 736161 - DNA, 668 bp, Homo sapiens
gccggatctgccgctccttctcctgctcctgcaggcgctggatggcagctgcctctgcacctccaggtactcctgcttcttctgccgcattgtctcccgaggcaggtatatttatcaacaaagaggactcattattgtatagcactgaatctggacaagagacccccaaactgggcacgctggcagagggctcccttcagctccaccttcaagaccaggcagacagagtgggctcgacggcatccaggcaaaggcagaaagcagagatggagcagagaagacaaaaacaactggaatcgcttgaacaaatggaacacccagatatgagcttggaaatccactacaaagctgagctagaaaaagagaggagggagcaaagaagagctcgactggcccatctgaagtcctcctccacgagagcccaggaaagggagagaggatctgagctcagcaccacttccccatcgggcaccagcctcgccgacgacgaccggcacagtcagatgatccgagaccagcagcagcagatcttacagcaaaacaggttgcacaagcagtttcttgaagaagcccggaaatgcttgcgggagtttcagaacatatgctaaatgcgagaggcccacccggggtaaatacatcactgataatggtgctgccagcactggtaa

SEQ ID NO: 736162 - DNA, 532 bp, Homo sapiens
ctcggctctaccttgtctgagacaaggtcttactctgcactctagcctggacgacagagtgagactccgtctgaaaaaaaaaaaaaattaaccgggcgtggtgacagacgcctgtaatcccagctacttgagaggctgaggcaggagaatcacttgaacctgggagatagaggttgcagtgagccaaaacggtgccactgcactccagcctgggcaacagcgcgagactccatctcaacaacaacaacaacaaaaattactcatagaacattttccaggtcaggaaagatgagaagagctggatagacctttccagatgtaagacccccaaagctaaatatgccgggtacgtttaaggcccctttaaggtggataactccccctctgccctcagcccagaaaagcttgtttccaataggccgtggctggagggtggggaaatgtcccatccttcgcggaatgtgtgggattgtgggtcagttccatggggtacctgcttgccccagccaccagtgagtacccactggagaga

SEQ ID NO: 736163 - DNA, 549 bp, Homo sapiens
cccatggcaacagcctgctatgagtagccagccagggcagaggccgggctgcaggtggaggcggggaagcgattccggccacctttgtgatgggcgtctcactacctacaaagtcagcccaatgatttcaagacagccctggagacagtgcttcctgccctcctgtcagcttctgcctccctgtaatgtgttctgggtggtctagctcagtcatctggagacacacacagtaagtaccacccctcttccccaagcatttcaggtgcttctcgtggtgacaagcactggcatctctgtagatgggtgctgctgttgttatcatccccatcctaaagagcaaactgaggcacccagagtgaagtcgcttggcctaggtcacatagtactcttaagcaccatactctgccattctagacttttctatcctttgcaaacacccttgccccacctcacctcctttggcttttcttcctaggacctttggtcagtgggcccctcctgaccaaaggagttcattctcctcctggactccaagcctgcggcctcttc

SEQ ID NO: 736164 - DNA, 2221 bp, Homo sapiens
  misc_feature (831)..(831): n is a, c, g, or t
cccatggcaacagcctgctatgagtagccagccagggcagaggccgggctgcaggtggaggcggggaagcgattccggccacctttgtgatgggcgtctcactacctacaaagtcagcccaatgatttcaagacagccctggagacagtgcttcctgccctcctgtcagcttctgcctccctgtaatgtgttctgggtggtctagctcagtcatctggagacacacacatgatcagggccaaagcggtcagtgagaaggaagtggactctggaaacgacatttatggcaaccctatcaagaggatccagtatgagatcaagcagataaagatgttcaaagggcctgagaaggatatagagtttatctacacggccccctcctcggcagtgtgtggggtctcgctggacgttggaggaaagaaggaatatctcattgcaggaaaggccgagggggacggcaagatgcacatcaccctctgtgacttcatcgtgccctgggacaccctgagcaccacccagaagaagagcctgaaccacaggtaccagatgggctgcgagtgcaaggtaagcaggtcctgcctctgctggagcatcgcctcctcccagtgtctccagatggacggcagggattttgatccctggctttccaggacccgttaatccccggctcctgatctaagaccaggctctgggaaggtagagtcatcccaagagtaaggctgtctggctggggacagagcctttgacccctggtccctggagagccctgaggcacatctctgacaggggatgtctggaggccgggcgctgcggctcacgcctgtaatcccngcactttgggaggccgagataggtgggtcacttgaggtcgggagttggaaatcagcctcaccaacatggcgaaaccctgtctctacaaaaatacaaaaattagccaggtgaggtggtgcacgcctgtgatcccagcaacttgggaggatgaggcttaagaattgcttgaatgtgggaggtggaggttgcagtgagttgagatcacaccactgcaccccagcctgggttgacagagtgagactctgtcccaaaaaaaaaagagggagatgtctggaaggctaggagatttgagagtaagagcatgaattcagctctgttacctgtagcttccagaaaaaggagctgtatggggagagagaatatggtcccatggagaattttctacaaatgtgcaagtgcaaacgcctgtgtggcttatgagaaggcactgcaggccttacgctgtttccaacattcccgacattttcacacctgggttggtgtctatgtggggtctgtgtgttgagaacacctgaacacctgctcctcttaaaatgagcccggaggttgtgccaggcacagctggagcagtgcagcgcctagatgtggctgtggaaggtgagattaccgcctccagggctcccaggctggctcctaccctgtgggctcctagcaccctatccccaccctccctgcaggaagcatggctgagtgctgggcacctcccaccctgggtcactcccagtgagtctgggaccaggagactctggtgaggctgtggggattggccttccctggggagctgcctggggctgccctccctcctgacggcccccagccccttctccgcatgttcaaaacaggaattctgaactcatagtctccagccacacgtatgttaagcgaaactcctctgtgcccagcatgaaatcaaaagcaagtttttcctttttctttccacggtggtgaaggcggtcatcctcttgtagcctagggttccttggccaaattgctagttgccgatgacctcggggctcggcttgcgagcaacactgggctggaatctgtctccaggaaacccaggcccttttattgttgctgtgtcccccagagggcagggccaagctgaggccattctgtcatgctcaggaaggtagaagatggcccaaagggaagcacacctgcagtaggagggggggcagcggtgggcagggcacagcttccctgcaggttagaccccctcgcaggccagctgcctgcccctgcaggaaccgtgggtctcgggagaggctgccatccctgcacatgacaggtaggcacattgccgggttctggacatgcccccagagcagcctctgcccaccccttcctgggtccctgactccgtccccctccgtgtgcccctccccag

SEQ ID NO: 736165 - DNA, 5337 bp, Homo sapiens
  misc_feature (831)..(831): n is a, c, g, or t
  misc_feature (5241)..(5241): n is a, c, g, or t
  misc_feature (5243)..(5244): n is a, c, g, or t
  misc_feature (5259)..(5259): n is a, c, g, or t
  misc_feature (5269)..(5269): n is a, c, g, or t
  misc_feature (5274)..(5274): n is a, c, g, or t
  misc_feature (5283)..(5283): n is a, c, g, or t
  misc_feature (5300)..(5300): n is a, c, g, or t
  misc_feature (5303)..(5303): n is a, c, g, or t
  misc_feature (5309)..(5309): n is a, c, g, or t
  misc_feature (5337)..(5337): n is a, c, g, or t
cccatggcaacagcctgctatgagtagccagccagggcagaggccgggctgcaggtggaggcggggaagcgattccggccacctttgtgatgggcgtctcactacctacaaagtcagcccaatgatttcaagacagccctggagacagtgcttcctgccctcctgtcagcttctgcctccctgtaatgtgttctgggtggtctagctcagtcatctggagacacacacatgatcagggccaaagcggtcagtgagaaggaagtggactctggaaacgacatttatggcaaccctatcaagaggatccagtatgagatcaagcagataaagatgttcaaagggcctgagaaggatatagagtttatctacacggccccctcctcggcagtgtgtggggtctcgctggacgttggaggaaagaaggaatatctcattgcaggaaaggccgagggggacggcaagatgcacatcaccctctgtgacttcatcgtgccctgggacaccctgagcaccacccagaagaagagcctgaaccacaggtaccagatgggctgcgagtgcaaggtaagcaggtcctgcctctgctggagcatcgcctcctcccagtgtctccagatggacggcagggattttgatccctggctttccaggacccgttaatccccggctcctgatctaagaccaggctctgggaaggtagagtcatcccaagagtaaggctgtctggctggggacagagcctttgacccctggtccctggagagccctgaggcacatctctgacaggggatgtctggaggccgggcgctgcggctcacgcctgtaatcccngcactttgggaggccgagataggtgggtcacttgaggtcgggagttggaaatcagcctcaccaacatggcgaaaccctgtctctacaaaaatacaaaaattagccaggtgaggtggtgcacgcctgtgatcccagcaacttgggaggatgaggcttaagaattgcttgaatgtgggaggtggaggttgcagtgagttgagatcacaccactgcaccccagcctgggttgacagagtgagactctgtcccaaaaaaaaaagagggagatgtctggaaggctaggagatttgagagtaagagcatgaattcagctctgttacctgtagcttccagaaaaaggagctgtatggggagagagaatatggtcccatggagaattttctacaaatgtgcaagtgcaaacgcctgtgtggcttatgagaaggcactgcaggccttacgctgtttccaacattcccgacattttcacacctgggttggtgtctatgtggggtctgtgtgttgagaacacctgaacacctgctcctcttaaaatgagcccggaggttgtgccaggcacagctggagcagtgcagcgcctagatgtggctgtggaaggtgagattaccgcctccagggctcccaggctggctcctaccctgtgggctcctagcaccctatccccaccctccctgcaggaagcatggctgagtgctgggcacctcccaccctgggtcactcccagtgagtctgggaccaggagactctggtgaggctgtggggattggccttccctggggagctgcctggggctgccctccctcctgacggcccccagccccttctccgcatgttcaaaacaggaattctgaactcatagtctccagccacacgtatgttaagcgaaactcctctgtgcccagcatgaaatcaaaagcaagtttttcctttttctttccacggtggtgaaggcggtcatcctcttgtagcctagggttccttggccaaattgctagttgccgatgacctcggggctcggcttgcgagcaacactgggctggaatctgtctccaggaaacccaggcccttttattgttgctgtgtcccccagagggcagggccaagctgaggccattctgtcatgctcaggaaggtagaagatggcccaaagggaagcacacctgcagtaggagggggggcagcggtgggcagggcacagcttccctgcaggttagaccccctcgcaggccagctgcctgcccctgcaggaaccgtgggtctcgggagaggctgccatccctgcacatgacagatcacgcgctgccccatgatcccgtgctacatctcctccccggacgagtgcctctggatggactgggtcacagagaagaacatcaacgggcaccaggccaagttcttcgcctgcatcaagagaagtgacggctcctgtgcgtggtaccgcggcgcggcgccccccaagcaggagtttctcgacatcgaggacccataagcaggcctccaacgcccctgtggccaactgcaaaaaaagcctccaagggtttcgactggtccagctctgacatcccttcctggaaacagcatgaataaaacactcatcccatgggtccaaattaatatgattctgctccccccttctccttttagacatggttgtgggtctggagggagacgtgggtccaaggtcctcatcccatcctccctctgccaggcactatgtgtctggggcttcgatccttgggtgcaggcagggctgggacacgcggcttccctcccagtccctgccttggcaccgtcacagatgccaagcaggcagcacttagggatctcccagctgggttagggcagggcctggaaatgtgcattttgcagaaacttttgagggtcgttgcaagactgtgtagcaggcctaccaggtccctttcatcttgagagggacatggcccttgttttctgcagcttccacgcctctgcactccctgcccctggcaagtgctcccatcgccccggtgcccaccatgagctcccagcacctgactccccccacatccaagggcagcctggaaccagtggctagttcttgaaggagccccatcaatcctattaatcctcagaattccagtgggagcctccctctgagccttgtagaaatgggagcgagaaaccccagctgagctgcgttccagcctcagctgagtctttttggtctgcacccacccccccaccccccccccccgcccacatgctccccagcttgcaggaggaatcggtgaggtcctgtcctgaggctgctgtccggggccggtggctgccctcaaggtcccttccctagctgctgcggttgccattgcttcttgcctgttctggcatcaggcacctggattgagttgcacagctttgctttatccgggcttgtgtgcagggcccggctgggctccccatctgcacatcctgaggacagaaaaagctgggtcttgctgtgccctcccaggcttagtgttccctccctcaaagactgacagccatcgttctgcacggggctttctgcatgtgacgccagctaagcatagtaagaagtccagcctaggaagggaaggattttggaggtaggtggctttggtgacacactcacttctttctcagcctccaggacactatggcctgttttaagagacatcttatttttctaaaggtgaattctcagatgataggtgaacctgagttgcagatataccaacttctgcttgtatttcttaaatgacaaagattacctagctaagaaacttcctagggaactagggaacctatgtgttccctcagtgtggtttcctgaagccagtgatatgggggttaggataggaagaactttctcggtaatgataaggagaatctcttgtttcctcccacctgtgttgtaaagataaactgacgatatacaggcacattatgtaaacatacacacgcaatgaaaccgaagcttggcggcctgggcgtggtcttgcaaaatgcttccaaagccaccttagcctgttctattcagcggcaaccccaaagcacctgttaagactcctgacccccaagtggcatgcagcccccatgcccaccgggacctggtcagcacagatcttgatgacttccctttctagggcagactgggagggtatccaggaatcggcccctgccccacgggcgttttcatgctgtacagtgacctaaagttggtaagatgtcataatggaccagtccatgtgatttcagtatatacaactccaccagacccctccaacccatataacaccccacccctgttcgcttcctgtatggtgatatcatatgtaacatttactcctgtttctgctgattgtttttttaatgttttggtttgtttttgacatcagctgtaatcattcctgtgctgtgttttttattacccttggtaggtattagacttgcacttttttaaaaaaaggtttctgcatcgtggaagcatttgacccagagtggaacgcgtggcctatgcaggtggattccttcaggtctttcctttggttctttgagcatctttgctttcattcgtctcccgtctttggttctccagttcaaattattgcaaagtaaaggatctttgagtaggttcggtctgaaaggtgtggcctttatatttgatccacacacgttggtcttttaaccgtgctgagcagaaaacaaaacaggttaagaagagccgggtggcagctgacagaggaagccgctcaaataccttcacaataaatagtggcaatatatatatagtttaagaaggctctccatttggcatcgtttaatttatatgttatgttctaagcacagctctcttctcctattttcatcctgcaagcaactcaaaatatttaaaataaagtttacattgtagttattttcaaatctttgcttgataagtattaagaaatattggacttgctgccgtaatttaaagctctgttgattttgtttccgtttggatttttgggggaggggagcactgtgtttatgctggaatatgaagtctgagaccttccggtgctgggaacacacaagagttgttgaaagttgacaagcagactgcgcatgtctctgatgctttgtatcattcttgagcaatcgctcggtccgtggacaataaacagtattatcaaagagaaaaaaaaaaaaaaaaaaaaaaaaaaaaaaactgtggtgcggcgcggccctgggcccctcgaaaaaagtttttaaaaccaatcgcgtgtggggcggcgcggggcgcccaagagggtaaggggagaacgtggcgccaaaagcgtggtcccaagagagaaacccggggccaaagacaaagggcgcgggggtttccacccacaataaaaaaaaacgccgcggggggaacaccgcgcngnnctggaacaatcccanagggggccgngggcnatccgggcntacaccggggtccaagnggncgatanaatagccgcccgagagagaaaaaaacgn

SEQ ID NO: 736166 - DNA, 3499 bp, Homo sapiens
cccatggcaacagcctgctatgagtagccagccagggcagaggccgggctgcaggtggaggcggggaagcgattccggccacctttgtgatgggcgtctcactacctacaaagtcagcccaatgatttcaagacagccctggagacagtgcttcctgccctcctgtcagcttctgcctccctgtaatgtgttctgggtggtctagctcagtcatctggagacacacacatgatcagggccaaagcggtcagtgagaaggaagtggactctggaaacgacatttatggcaaccctatcaagaggatccagtatgagatcaagcagataaagatgttcaaagggcctgagaaggatatagagtttatctacacggccccctcctcggcagtgtgtggggtctcgctggacgttggaggaaagaaggaatatctcattgcaggaaaggccgagggggacggcaagatgcacatcaccctctgtgacttcatcgtgccctgggacaccctgagcaccacccagaagaagagcctgaaccacaggtaccagatgggctgcgagtgcaagatcacgcgctgccccatgatcccgtgctacatctcctccccggacgagtgcctctggatggactgggtcacagagaagaacatcaacgggcaccaggccaagttcttcgcctgcatcaagagaagtgacggctcctgtgcgtggtaccgcggcgcggcgccccccaagcaggagtttctcgacatcgaggacccataagcaggcctccaacgcccctgtggccaactgcaaaaaaagcctccaagggtttcgactggtccagctctgacatcccttcctggaaacagcatgaataaaacactcatcccatgggtccaaattaatatgattctgctccccccttctccttttagacatggttgtgggtctggagggagacgtgggtccaaggtcctcatcccatcctccctctgccaggcactatgtgtctggggcttcgatccttgggtgcaggcagggctgggacacgcggcttccctcccagtccctgccttggcaccgtcacagatgccaagcaggcagcacttagggatctcccagctgggttagggcagggcctggaaatgtgcattttgcagaaacttttgagggtcgttgcaagactgtgtagcaggcctaccaggtccctttcatcttgagagggacatggcccttgttttctgcagcttccacgcctctgcactccctgcccctggcaagtgctcccatcgccccggtgcccaccatgagctcccagcacctgactccccccacatccaagggcagcctggaaccagtggctagttcttgaaggagccccatcaatcctattaatcctcagaattccagtgggagcctccctctgagccttgtagaaatgggagcgagaaaccccagctgagctgcgttccagcctcagctgagtctttttggtctgcacccacccccccaccccccccccccgcccacatgctccccagcttgcaggaggaatcggtgaggtcctgtcctgaggctgctgtccggggccggtggctgccctcaaggtcccttccctagctgctgcggttgccattgcttcttgcctgttctggcatcaggcacctggattgagttgcacagctttgctttatccgggcttgtgtgcagggcccggctgggctccccatctgcacatcctgaggacagaaaaagctgggtcttgctgtgccctcccaggcttagtgttccctccctcaaagactgacagccatcgttctgcacggggctttctgcatgtgacgccagctaagcatagtaagaagtccagcctaggaagggaaggattttggaggtaggtggctttggtgacacactcacttctttctcagcctccaggacactatggcctgttttaagagacatcttatttttctaaaggtgaattctcagatgataggtgaacctgagttgcagatataccaacttctgcttgtatttcttaaatgacaaagattacctagctaagaaacttcctagggaactagggaacctatgtgttccctcagtgtggtttcctgaagccagtgatatgggggttaggataggaagaactttctcggtaatgataaggagaatctcttgtttcctcccacctgtgttgtaaagataaactgacgatatacaggcacattatgtaaacatacacacgcaatgaaaccgaagcttggcggcctgggcgtggtcttgcaaaatgcttccaaagccaccttagcctgttctattcagcggcaaccccaaagcacctgttaagactcctgacccccaagtggcatgcagcccccatgcccaccgggacctggtcagcacagatcttgatgacttccctttctagggcagactgggagggtatccaggaatcggcccctgccccacgggcgttttcatgctgtacagtgacctaaagttggtaagatgtcataatggaccagtccatgtgatttcagtatatacaactccaccagacccctccaacccatataacaccccacccctgttcgcttcctgtatggtgatatcatatgtaacatttactcctgtttctgctgattgtttttttaatgttttggtttgtttttgacatcagctgtaatcattcctgtgctgtgttttttattacccttggtaggtattagacttgcacttttttaaaaaaaggtttctgcatcgtggaagcatttgacccagagtggaacgcgtggcctatgcaggtggattccttcaggtctttcctttggttctttgagcatctttgctttcattcgtctcccgtctttggttctccagttcaaattattgcaaagtaaaggatctttgagtaggttcggtctgaaaggtgtggcctttatatttgatccacacacgttggtcttttaaccgtgctgagcagaaaacaaaacaggttaagaagagccgggtggcagctgacagaggaagccgctcaaataccttcacaataaatagtggcaatatatatatagtttaagaaggctctccatttggcatcgtttaatttatatgttatgttctaagcacagctctcttctcctattttcatcctgcaagcaactcaaaatatttaaaataaagtttacattgtagttattttcaaatctttgcttgataagtattaagaaatattggacttgctgccgtaatttaaagctctgttgattttgtttccgtttggatttttgggggaggggagcactgtgtttatgctggaatatgaagtctgagaccttccggtgctgggaacacacaagagttgttgaaagttgacaagcagactgcgcatgtctctgatgctttgtatcattcttgagcaatcgctcggtccgtggacaataaacagtattatcaaagagaaccaagaacgaaaaccccccaaacccacacactccccccaaccacctag

SEQ ID NO: 736167 - DNA, 3779 bp, Homo sapiens
  misc_feature (3683)..(3683): n is a, c, g, or t
  misc_feature (3685)..(3686): n is a, c, g, or t
  misc_feature (3701)..(3701): n is a, c, g, or t
  misc_feature (3711)..(3711): n is a, c, g, or t
  misc_feature (3716)..(3716): n is a, c, g, or t
  misc_feature (3725)..(3725): n is a, c, g, or t
  misc_feature (3742)..(3742): n is a, c, g, or t
  misc_feature (3745)..(3745): n is a, c, g, or t
  misc_feature (3751)..(3751): n is a, c, g, or t
  misc_feature (3779)..(3779): n is a, c, g, or t
cccatggcaacagcctgctatgagtagccagccagggcagaggccgggctgcaggtggaggcggggaagcgattccggccacctttgtgatgggcgtctcactacctacaaagtcagcccaatgatttcaagacagccctggagacagtgcttcctgccctcctgtcagcttctgcctccctgtaatgtgttctgggtggtctagctcagtcatctggagacacacacatgatcagggccaaagcggtcagtgagaaggaagtggactctggaaacgacatttatggcaaccctatcaagaggatccagtatgagatcaagcagataaagatgttcaaagggcctgagaaggatatagagtttatctacacggccccctcctcggcagtgtgtggggtctcgctggacgttggaggaaagaaggaatatctcattgcaggaaaggccgagggggacggcaagatgcacatcaccctctgtgacttcatcgtgccctgggacaccctgagcaccacccagaagaagagcctgaaccacaggtaccagatgggctgcgagtgcaagatcacgcgctgccccatgatcccgtgctacatctcctccccggacgagtgcctctggatggactgggtcacagagaagaacatcaacgggcaccaggccaagttcttcgcctgcatcaagagaagtgacggctcctgtgcgtggtaccgcggcgcggcgccccccaagcaggagtttctcgacatcgaggacccataagcaggcctccaacgcccctgtggccaactgcaaaaaaagcctccaagggtttcgactggtccagctctgacatcccttcctggaaacagcatgaataaaacactcatcccatgggtccaaattaatatgattctgctccccccttctccttttagacatggttgtgggtctggagggagacgtgggtccaaggtcctcatcccatcctccctctgccaggcactatgtgtctggggcttcgatccttgggtgcaggcagggctgggacacgcggcttccctcccagtccctgccttggcaccgtcacagatgccaagcaggcagcacttagggatctcccagctgggttagggcagggcctggaaatgtgcattttgcagaaacttttgagggtcgttgcaagactgtgtagcaggcctaccaggtccctttcatcttgagagggacatggcccttgttttctgcagcttccacgcctctgcactccctgcccctggcaagtgctcccatcgccccggtgcccaccatgagctcccagcacctgactccccccacatccaagggcagcctggaaccagtggctagttcttgaaggagccccatcaatcctattaatcctcagaattccagtgggagcctccctctgagccttgtagaaatgggagcgagaaaccccagctgagctgcgttccagcctcagctgagtctttttggtctgcacccacccccccaccccccccccccgcccacatgctccccagcttgcaggaggaatcggtgaggtcctgtcctgaggctgctgtccggggccggtggctgccctcaaggtcccttccctagctgctgcggttgccattgcttcttgcctgttctggcatcaggcacctggattgagttgcacagctttgctttatccgggcttgtgtgcagggcccggctgggctccccatctgcacatcctgaggacagaaaaagctgggtcttgctgtgccctcccaggcttagtgttccctccctcaaagactgacagccatcgttctgcacggggctttctgcatgtgacgccagctaagcatagtaagaagtccagcctaggaagggaaggattttggaggtaggtggctttggtgacacactcacttctttctcagcctccaggacactatggcctgttttaagagacatcttatttttctaaaggtgaattctcagatgataggtgaacctgagttgcagatataccaacttctgcttgtatttcttaaatgacaaagattacctagctaagaaacttcctagggaactagggaacctatgtgttccctcagtgtggtttcctgaagccagtgatatgggggttaggataggaagaactttctcggtaatgataaggagaatctcttgtttcctcccacctgtgttgtaaagataaactgacgatatacaggcacattatgtaaacatacacacgcaatgaaaccgaagcttggcggcctgggcgtggtcttgcaaaatgcttccaaagccaccttagcctgttctattcagcggcaaccccaaagcacctgttaagactcctgacccccaagtggcatgcagcccccatgcccaccgggacctggtcagcacagatcttgatgacttccctttctagggcagactgggagggtatccaggaatcggcccctgccccacgggcgttttcatgctgtacagtgacctaaagttggtaagatgtcataatggaccagtccatgtgatttcagtatatacaactccaccagacccctccaacccatataacaccccacccctgttcgcttcctgtatggtgatatcatatgtaacatttactcctgtttctgctgattgtttttttaatgttttggtttgtttttgacatcagctgtaatcattcctgtgctgtgttttttattacccttggtaggtattagacttgcacttttttaaaaaaaggtttctgcatcgtggaagcatttgacccagagtggaacgcgtggcctatgcaggtggattccttcaggtctttcctttggttctttgagcatctttgctttcattcgtctcccgtctttggttctccagttcaaattattgcaaagtaaaggatctttgagtaggttcggtctgaaaggtgtggcctttatatttgatccacacacgttggtcttttaaccgtgctgagcagaaaacaaaacaggttaagaagagccgggtggcagctgacagaggaagccgctcaaataccttcacaataaatagtggcaatatatatatagtttaagaaggctctccatttggcatcgtttaatttatatgttatgttctaagcacagctctcttctcctattttcatcctgcaagcaactcaaaatatttaaaataaagtttacattgtagttattttcaaatctttgcttgataagtattaagaaatattggacttgctgccgtaatttaaagctctgttgattttgtttccgtttggatttttgggggaggggagcactgtgtttatgctggaatatgaagtctgagaccttccggtgctgggaacacacaagagttgttgaaagttgacaagcagactgcgcatgtctctgatgctttgtatcattcttgagcaatcgctcggtccgtggacaataaacagtattatcaaagagaaaaaaaaaaaaaaaaaaaaaaaaaaaaaaactgtggtgcggcgcggccctgggcccctcgaaaaaagtttttaaaaccaatcgcgtgtggggcggcgcggggcgcccaagagggtaaggggagaacgtggcgccaaaagcgtggtcccaagagagaaacccggggccaaagacaaagggcgcgggggtttccacccacaataaaaaaaaacgccgcggggggaacaccgcgcngnnctggaacaatcccanagggggccgngggcnatccgggcntacaccggggtccaagnggncgatanaatagccgcccgagagagaaaaaaacgn

SEQ ID NO: 736168 - DNA, 3798 bp, Homo sapiens
  misc_feature (3702)..(3702): n is a, c, g, or t
  misc_feature (3704)..(3705): n is a, c, g, or t
  misc_feature (3720)..(3720): n is a, c, g, or t
  misc_feature (3730)..(3730): n is a, c, g, or t
  misc_feature (3735)..(3735): n is a, c, g, or t
  misc_feature (3744)..(3744): n is a, c, g, or t
  misc_feature (3761)..(3761): n is a, c, g, or t
  misc_feature (3764)..(3764): n is a, c, g, or t
  misc_feature (3770)..(3770): n is a, c, g, or t
  misc_feature (3798)..(3798): n is a, c, g, or t
cccatggcaacagcctgctatgagtagccagccagggcagaggccgggctgcaggtggaggcggggaagcgattccggccacctttgtgatgggcgtctcactacctacaaagtcagcccaatgatttcaagacagccctggagacagtgcttcctgccctcctgtcagcttctgcctccctgtaatgtgttctgggtggtctagctcagtcatctggagacacacacatgatcagggccaaagcggtcagtgagaaggaagtggactctggaaacgacatttatggcaaccctatcaagaggatccagtatgagatcaagcagataaagatgttcaaagggcctgagaaggatatagagtttatctacacggccccctcctcggcagtgtgtggggtctcgctggacgttggaggaaagaaggaatatctcattgcaggaaaggccgagggggacggcaagatgcacatcaccctctgtgacttcatcgtgccctgggacaccctgagcaccacccagaagaagagcctgaaccacaggtaccagatgggctgcgagtgcaagatcacgcgctgccccatgatcccgtgctacatctcctccccggacgagtgcctctggatggactgggtcacagagaagaacatcaacgggcaccaggccaagttcttcgcctgcatcaagagaagtgacggctcctgtgcgtggtaccgcggcgcggcgccccccaagcaggagtttctcgacatcgaggacccataagcaggcctccaacgcccctgtggccaactgcaaaaaaagcctccaagggtttcgactggtccagctctgacatcccttcctggaaacagcatgaataaaacactcatcccatgggtccaaattaatatgattctgctccccccttctccttttagacatggttgtgggtctggagggagacgtgggtccaaggtcctcatcccatcctccctctgccaggcactatgtgtctggggcttcgatccttgggtgcaggcagggctgggacacgcggcttccctcccagtccctgccttggcaccgtcacagatgccaagcaggcagcacttagggatctcccagctgggttagggcagggcctggaaatgtgcattttgcagaaacttttgagggtcgttgcaagactgtgtagcaggcctaccaggtccctttcatcttgagagggacatggcccttgttttctgcagcttccacgcctctgcactccctgcccctggcaagtgctcccatcgccccggtgcccaccatgagctcccagcacctgactccccccacatccaagggcagcctggaaccagtggctagttcttgaaggagccccatcaatcctattaatcctcagaattccagtgggagcctccctctgagccttgtagaaatgggagcgagaaaccccagctgagctgcgttccagcctcagctgagtctttttggtctgcacccacccccccaccccccccccccgcccacatgctccccagcttgcaggaggaatcggtgaggtcctgtcctgaggctgctgtccggggccggtggctgccctcaaggtcccttccctagctgctgcggttgccattgcttcttgcctgttctggcatcaggcacctggattgagttgcacagctttgctttatccgggcttgtgtgcagggcccggctgggctccccatctgcacatcctgaggacagaaaaagctgggtcttgctgtgccctcccaggcttagtgttccctccctcaaagactgacagccatcgttctgcacggggctttctgcatgtgacgccagctaagcatagtaagaagtccagcctaggaagggaaggattttggaggtaggtggctttggtgacacactcacttctttctcagcctccaggacactatggcctgttttaagagacatcttatttttctaaaggtgaattctcagatgataggtgaacctgagttgcagatataccaacttctgcttgtatttcttaaatgacaaagattacctagctaagaaacttcctagggaactagggaacctatgtgttccctcagtgtggtttcctgaagccagtgatatgggggttaggataggaagaactttctcggtaatgataaggagaatctcttgtttcctcccacctgtgttgtaaagataaactgacgatatacaggcacattatgtaaacatacacacgcaatgaaaccgaagcttggcggcctgggcgtggtcttgcaaaatgcttccaaagccaccttagcctgttctattcagcggcaaccccaaagcacctgttaagactcctgacccccaagtggcatgcagcccccatgcccaccgggacctggtcagcacagatcttgatgacttccctttctagggcagactgggagggtatccaggaatcggcccctgccccacgggcgttttcatgctgtacagtgacctaaagttggtaagatgtcataatggaccagtccatgtgatttcagtatatacaactccaccagacccctccaacccatataacaccccacccctgttcgcttcctgtatggtgatatcatatgtaacatttactcctgtttctgctgattgtttttttaatgttttggtttgtttttgacatcagctgtaatcattcctgtgctgtgttttttattacccttggtaggtattagacttgcacttttttaaaaaaaggtttctgcatcgtggaagcatttgacccagagtggaacgcgtggcctatgcaggtggattccttcaggtctttcctttggttctttgagcatctttgctttcattcgtctcccgtctttggttctccagttcaaattattgcaaagtaaaggatctttgagtaggttcggtctgaaaggtgtggcctttatatttgatccacacacgttggtcttttaaccgtgctgagcagaaaacaaaacaggttaagaagagccgggtggcagctgacagaggaagccgctcaaataccttcacaataaatagtggcaatatatatatagtttaagaaggctctccatttggcatcgtttaatttatatgttatgttctaagcacagctctcttctcctattttcatcctgcaagcaactcaaaatatttaaaataaagtttacattgtagttattttcaaatctttgcttgataagtattaagaaatattggacttgctgccgtaatttaaagctctgttgattttgtttccgtttggatttttgggggaggggagcactgtgtttatgctggaatatgaagtctgagaccttccggtgctgggaacacacaagagttgttgaaagttgacaagcagactgcgcatgtctctgatgctttgtatcattcttgagcaatcgctcggtccgtggacaataaacagtattatcaaagagaaaaaaaaaaaaaaaaaaaaaaaaaaaaaaaaaaaaaaaaaaaaaaaaagctgtggtgcggcgcggccctgggcccctcgaaaaaagtttttaaaaccaatcgcgtgtggggcggcgcggggcgcccaagagggtaaggggagaacgtggcgccaaaagcgtggtcccaagagagaaacccggggccaaagacaaagggcgcgggggtttccacccacaataaaaaaaaacgccgcggggggaacaccgcgcngnnctggaacaatcccanagggggccgngggcnatccgggcntacaccggggtccaagnggncgatanaatagccgcccgagagagaaaaaaacgn

SEQ ID NO: 736169 - DNA, 3742 bp, Homo sapiens
cccatggcaacagcctgctatgagtagccagccagggcagaggccgggctgcaggtggaggcggggaagcgattccggccacctttgtgatgggcgtctcactacctacaaagtcagcccaatgatttcaagacagccctggagacagtgcttcctgccctcctgtcagcttctgcctccctgtaatgtgttctgggtggtctagctcagtcatctggagacacacacatgatcagggccaaagcggtcagtgagaaggaagtggactctggaaacgacatttatggcaaccctatcaagaggatccagtatgagatcaagcagataaagatgttcaaagggcctgagaaggatatagagtttatctacacggccccctcctcggcagtgtgtggggtctcgctggacgttggaggaaagaaggaatatctcattgcaggaaaggccgagggggacggcaagatgcacatcaccctctgtgacttcatcgtgccctgggacaccctgagcaccacccagaagaagagcctgaaccacaggtaccagatgggctgcgagtgcaagatcacgcgctgccccatgatcccgtgctacatctcctccccggacgagtgcctctggatggactgggtcacagagaagaacatcaacgggcaccaggccaagttcttcgcctgcatcaagagaagtgacggctcctgtgcgtggtaccgcggcgcggcgccccccaagcaggagtttctcgacatcgaggacccataagcaggcctccaacgcccctgtggccaactgcaaaaaaagcctccaagggtttcgactggtccagctctgacatcccttcctggaaacagcatgaataaaacactcatcccatgggtccaaattaatatgattctgctccccccttctccttttagacatggttgtgggtctggagggagacgtgggtccaaggtcctcatcccatcctccctctgccaggcactatgtgtctggggcttcgatccttgggtgcaggcagggctgggacacgcggcttccctcccagtccctgccttggcaccgtcacagatgccaagcaggcagcacttagggatctcccagctgggttagggcagggcctggaaatgtgcattttgcagaaacttttgagggtcgttgcaagactgtgtagcaggcctaccaggtccctttcatcttgagagggacatggcccttgttttctgcagcttccacgcctctgcactccctgcccctggcaagtgctcccatcgccccggtgcccaccatgagctcccagcacctgactccccccacatccaagggcagcctggaaccagtggctagttcttgaaggagccccatcaatcctattaatcctcagaattccagtgggagcctccctctgagccttgtagaaatgggagcgagaaaccccagctgagctgcgttccagcctcagctgagtctttttggtctgcacccacccccccaccccccccccccgcccacatgctccccagcttgcaggaggaatcggtgaggtcctgtcctgaggctgctgtccggggccggtggctgccctcaaggtcccttccctagctgctgcggttgccattgcttcttgcctgttctggcatcaggcacctggattgagttgcacagctttgctttatccgggcttgtgtgcagggcccggctgggctccccatctgcacatcctgaggacagaaaaagctgggtcttgctgtgccctcccaggcttagtgttccctccctcaaagactgacagccatcgttctgcacggggctttctgcatgtgacgccagctaagcatagtaagaagtccagcctaggaagggaaggattttggaggtaggtggctttggtgacacactcacttctttctcagcctccaggacactatggcctgttttaagagacatcttatttttctaaaggtgaattctcagatgataggtgaacctgagttgcagatataccaacttctgcttgtatttcttaaatgacaaagattacctagctaagaaacttcctagggaactagggaacctatgtgttccctcagtgtggtttcctgaagccagtgatatgggggttaggataggaagaactttctcggtaatgataaggagaatctcttgtttcctcccacctgtgttgtaaagataaactgacgatatacaggcacattatgtaaacatacacacgcaatgaaaccgaagcttggcggcctgggcgtggtcttgcaaaatgcttccaaagccaccttagcctgttctattcagcggcaaccccaaagcacctgttaagactcctgacccccaagtggcatgcagcccccatgcccaccgggacctggtcagcacagatcttgatgacttccctttctagggcagactgggagggtatccaggaatcggcccctgccccacgggcgttttcatgctgtacagtgacctaaagttggtaagatgtcataatggaccagtccatgtgatttcagtatatacaactccaccagacccctccaacccatataacaccccacccctgttcgcttcctgtatggtgatatcatatgtaacatttactcctgtttctgctgattgtttttttaatgttttggtttgtttttgacatcagctgtaatcattcctgtgctgtgttttttattacccttggtaggtattagacttgcacttttttaaaaaaaggtttctgcatcgtggaagcatttgacccagagtggaacgcgtggcctatgcaggtggattccttcaggtctttcctttggttctttgagcatctttgctttcattcgtctcccgtctttggttctccagttcaaattattgcaaagtaaaggatctttgagtaggttcggtctgaaaggtgtggcctttatatttgatccacacacgttggtcttttaaccgtgctgagcagaaaacaaaacaggttaagaagagccgggtggcagctgacagaggaagccgctcaaataccttcacaataaatagtggcaatatatatatagtttaagaaggctctccatttggcatcgtttaatttatatgttatgttctaagcacagctctcttctcctattttcatcctgcaagcaactcaaaatatttaaaataaagtttacattgtagttattttcaaatctttgcttgataagtattaagaaatattggacttgctgccgtaatttaaagctctgttgattttgtttccgtttggatttttgggggaggggagcactgtgtttatgctggaatatgaagtctgagaccttccggtgctgggaacacacaagagttgttgaaagttgacaagcagactgcgcatgtctctgatgctttgtatcattcttgagcaatcgctcggtccgtggacaataaacagtattatcaaagagaaaaaaaaaaaaaaaaaaaaaaaaaaaaaaatcgatgtcgactcgagtcaggctgcggatccgatgtttgggcatatggcttaggattgacttggcgatgtcgactcgagtcagtgcggatccgacgtttgggcgttcgggcggagcgaattcgatgtgtgggcgtacggcttaggattgacttggcgatgtcgactcggtcagtgcggatccgatgtctgggcatacggggcgatgtcgactcgagtcagtgcgaattcgatgtctgggcatatggggcgatgtcgactcga

SEQ ID NO: 736170 - DNA, 3779 bp, Homo sapiens
cccatggcaacagcctgctatgagtagccagccagggcagaggccgggctgcaggtggaggcggggaagcgattccggccacctttgtgatgggcgtctcactacctacaaagtcagcccaatgatttcaagacagccctggagacagtgcttcctgccctcctgtcagcttctgcctccctgtaatgtgttctgggtggtctagctcagtcatctggagacacacacatgatcagggccaaagcggtcagtgagaaggaagtggactctggaaacgacatttatggcaaccctatcaagaggatccagtatgagatcaagcagataaagatgttcaaagggcctgagaaggatatagagtttatctacacggccccctcctcggcagtgtgtggggtctcgctggacgttggaggaaagaaggaatatctcattgcaggaaaggccgagggggacggcaagatgcacatcaccctctgtgacttcatcgtgccctgggacaccctgagcaccacccagaagaagagcctgaaccacaggtaccagatgggctgcgagtgcaagatcacgcgctgccccatgatcccgtgctacatctcctccccggacgagtgcctctggatggactgggtcacagagaagaacatcaacgggcaccaggccaagttcttcgcctgcatcaagagaagtgacggctcctgtgcgtggtaccgcggcgcggcgccccccaagcaggagtttctcgacatcgaggacccataagcaggcctccaacgcccctgtggccaactgcaaaaaaagcctccaagggtttcgactggtccagctctgacatcccttcctggaaacagcatgaataaaacactcatcccatgggtccaaattaatatgattctgctccccccttctccttttagacatggttgtgggtctggagggagacgtgggtccaaggtcctcatcccatcctccctctgccaggcactatgtgtctggggcttcgatccttgggtgcaggcagggctgggacacgcggcttccctcccagtccctgccttggcaccgtcacagatgccaagcaggcagcacttagggatctcccagctgggttagggcagggcctggaaatgtgcattttgcagaaacttttgagggtcgttgcaagactgtgtagcaggcctaccaggtccctttcatcttgagagggacatggcccttgttttctgcagcttccacgcctctgcactccctgcccctggcaagtgctcccatcgccccggtgcccaccatgagctcccagcacctgactccccccacatccaagggcagcctggaaccagtggctagttcttgaaggagccccatcaatcctattaatcctcagaattccagtgggagcctccctctgagccttgtagaaatgggagcgagaaaccccagctgagctgcgttccagcctcagctgagtctttttggtctgcacccacccccccaccccccccccccgcccacatgctccccagcttgcaggaggaatcggtgaggtcctgtcctgaggctgctgtccggggccggtggctgccctcaaggtcccttccctagctgctgcggttgccattgcttcttgcctgttctggcatcaggcacctggattgagttgcacagctttgctttatccgggcttgtgtgcagggcccggctgggctccccatctgcacatcctgaggacagaaaaagctgggtcttgctgtgccctcccaggcttagtgttccctccctcaaagactgacagccatcgttctgcacggggctttctgcatgtgacgccagctaagcatagtaagaagtccagcctaggaagggaaggattttggaggtaggtggctttggtgacacactcacttctttctcagcctccaggacactatggcctgttttaagagacatcttatttttctaaaggtgaattctcagatgataggtgaacctgagttgcagatataccaacttctgcttgtatttcttaaatgacaaagattacctagctaagaaacttcctagggaactagggaacctatgtgttccctcagtgtggtttcctgaagccagtgatatgggggttaggataggaagaactttctcggtaatgataaggagaatctcttgtttcctcccacctgtgttgtaaagataaactgacgatatacaggcacattatgtaaacatacacacgcaatgaaaccgaagcttggcggcctgggcgtggtcttgcaaaatgcttccaaagccaccttagcctgttctattcagcggcaaccccaaagcacctgttaagactcctgacccccaagtggcatgcagcccccatgcccaccgggacctggtcagcacagatcttgatgacttccctttctagggcagactgggagggtatccaggaatcggcccctgccccacgggcgttttcatgctgtacagtgacctaaagttggtaagatgtcataatggaccagtccatgtgatttcagtatatacaactccaccagacccctccaacccatataacaccccacccctgttcgcttcctgtatggtgatatcatatgtaacatttactcctgtttctgctgattgtttttttaatgttttggtttgtttttgacatcagctgtaatcattcctgtgctgtgttttttattacccttggtaggtattagacttgcacttttttaaaaaaaggtttctgcatcgtggaagcatttgacccagagtggaacgcgtggcctatgcaggtggattccttcaggtctttcctttggttctttgagcatctttgctttcattcgtctcccgtctttggttctccagttcaaattattgcaaagtaaaggatctttgagtaggttcggtctgaaaggtgtggcctttatatttgatccacacacgttggtcttttaaccgtgctgagcagaaaacaaaacaggttaagaagagccgggtggcagctgacagaggaagccgctcaaataccttcacaataaatagtggcaatatatatatagtttaagaaggctctccatttggcatcgtttaatttatatgttatgttctaagcacagctctcttctcctattttcatcctgcaagcaactcaaaatatttaaaataaagtttacattgtagttattttcaaatctttgcttgataagtattaagaaatattggacttgctgccgtaatttaaagctctgttgattttgtttccgtttggatttttgggggaggggagcactgtgtttatgctggaatatgaagtctgagaccttccggtgctgggaacacacaagagttgttgaaagttgacaagcagactgcgcatgtctctgatgctttgtatcattcttgagcaatcgctcggtccgtggacaataaacagtattatcaaagagaaaaaaaaaacacaacacaacaccacaacaaaaaattggtgtgggccggccgtggcgacacagaaagaaagggcctttataaacaccactccggtgtgtgggcgcgcgcgggcaccccagagagggtaaggctgacagtgggcaacaggggggccccaagagaacactggggccacgacacacgtgggcgttgttccccccaaaaaaaacgcgccggggggcacaccggcgcgttgggacacaacaccaagatgaggtcggaagggcgacagcgggccatacaaaggggagcaaaagggacccgaatataaattaccgagcgcgtaggac

SEQ ID NO: 736171 - DNA, 3769 bp, Homo sapiens
  misc_feature (3673)..(3673): n is a, c, g, or t
  misc_feature (3675)..(3676): n is a, c, g, or t
  misc_feature (3691)..(3691): n is a, c, g, or t
  misc_feature (3701)..(3701): n is a, c, g, or t
  misc_feature (3706)..(3706): n is a, c, g, or t
  misc_feature (3715)..(3715): n is a, c, g, or t
  misc_feature (3732)..(3732): n is a, c, g, or t
  misc_feature (3735)..(3735): n is a, c, g, or t
  misc_feature (3741)..(3741): n is a, c, g, or t
  misc_feature (3769)..(3769): n is a, c, g, or t
cccatggcaacagcctgctatgagtagccagccagggcagaggccgggctgcaggtggaggcggggaagcgattccggccacctttgtgatgggcgtctcactacctacaaagtcagcccaatgatttcaagacagccctggagacagtgcttcctgccctcctgtcagcttctgcctccctgtaatgtgttctgggtggtctagctcagtcatctggagacacacacatgatcagggccaaagcggtcagtgagaaggaagtggactctggaaacgacatttatggcaaccctatcaagaggatccagtatgagatcaagcagataaagatgttcaaagggcctgagaaggatatagagtttatctacacggccccctcctcggcagtgtgtggggtctcgctggacgttggaggaaagaaggaatatctcattgcaggaaaggccgagggggacggcaagatgcacatcaccctctgtgacttcatcgtgccctgggacaccctgagcaccacccagaagaagagcctgaaccacaggtaccagatgggctgcgagtgcaagatcacgcgctgccccatgatcccgtgctacatctcctccccggacgagtgcctctggatggactgggtcacagagaagaacatcaacgggcaccaggccaagttcttcgcctgcatcaagagaagtgacggctcctgtgcgtggtaccgcggcgcggcgccccccaagcaggagtttctcgacatcgaggacccataagcaggcctccaacgcccctgtggccaactgcaaaaaaagcctccaagggtttcgactggtccagctctgacatcccttcctggaaacagcatgaataaaacactcatcccatgggtccaaattaatatgattctgctccccccttctccttttagacatggttgtgggtctggagggagacgtgggtccaaggtcctcatcccatcctccctctgccaggcactatgtgtctggggcttcgatccttgggtgcaggcagggctgggacacgcggcttccctcccagtccctgccttggcaccgtcacagatgccaagcaggcagcacttagggatctcccagctgggttagggcagggcctggaaatgtgcattttgcagaaacttttgagggtcgttgcaagactgtgtagcaggcctaccaggtccctttcatcttgagagggacatggcccttgttttctgcagcttccacgcctctgcactccctgcccctggcaagtgctcccatcgccccggtgcccaccatgagctcccagcacctgactccccccacatccaagggcagcctggaaccagtggctagttcttgaaggagccccatcaatcctattaatcctcagaattccagtgggagcctccctctgagccttgtagaaatgggagcgagaaaccccagctgagctgcgttccagcctcagctgagtctttttggtctgcacccacccccccaccccccccccccgcccacatgctccccagcttgcaggaggaatcggtgaggtcctgtcctgaggctgctgtccggggccggtggctgccctcaaggtcccttccctagctgctgcggttgccattgcttcttgcctgttctggcatcaggcacctggattgagttgcacagctttgctttatccgggcttgtgtgcagggcccggctgggctccccatctgcacatcctgaggacagaaaaagctgggtcttgctgtgccctcccaggcttagtgttccctccctcaaagactgacagccatcgttctgcacggggctttctgcatgtgacgccagctaagcatagtaagaagtccagcctaggaagggaaggattttggaggtaggtggctttggtgacacactcacttctttctcagcctccaggacactatggcctgttttaagagacatcttatttttctaaaggtgaattctcagatgataggtgaacctgagttgcagatataccaacttctgcttgtatttcttaaatgacaaagattacctagctaagaaacttcctagggaactagggaacctatgtgttccctcagtgtggtttcctgaagccagtgatatgggggttaggataggaagaactttctcggtaatgataaggagaatctcttgtttcctcccacctgtgttgtaaagataaactgacgatatacaggcacattatgtaaacatacacacgcaatgaaaccgaagcttggcggcctgggcgtggtcttgcaaaatgcttccaaagccaccttagcctgttctattcagcggcaaccccaaagcacctgttaagactcctgacccccaagtggcatgcagcccccatgcccaccgggacctggtcagcacagatcttgatgacttccctttctagggcagactgggagggtatccaggaatcggcccctgccccacgggcgttttcatgctgtacagtgacctaaagttggtaagatgtcataatggaccagtccatgtgatttcagtatatacaactccaccagacccctccaacccatataacaccccacccctgttcgcttcctgtatggtgatatcatatgtaacatttactcctgtttctgctgattgtttttttaatgttttggtttgtttttgacatcagctgtaatcattcctgtgctgtgttttttattacccttggtaggtattagacttgcacttttttaaaaaaaggtttctgcatcgtggaagcatttgacccagagtggaacgcgtggcctatgcaggtggattccttcaggtctttcctttggttctttgagcatctttgctttcattcgtctcccgtctttggttctccagttcaaattattgcaaagtaaaggatctttgagtaggttcggtctgaaaggtgtggcctttatatttgatccacacacgttggtcttttaaccgtgctgagcagaaaacaaaacaggttaagaagagccgggtggcagctgacagaggaagccgctcaaataccttcacaataaatagtggcaatatatatatagtttaagaaggctctccatttggcatcgtttaatttatatgttatgttctaagcacagctctcttctcctattttcatcctgcaagcaactcaaaatatttaaaataaagtttacattgtagttattttcaaatctttgcttgataagtattaagaaatattggacttgctgccgtaatttaaagctctgttgattttgtttccgtttggatttttgggggaggggagcactgtgtttatgctggaatatgaagtctgagaccttccggtgctgggaacacacaagagttgttgaaagttgacaagcagactgcgcatgtctctgatgctttgtatcattcttgagcaatcgctcggtccgtggacaataaacagtattatcaaagagaaaaaaaaaaaaaaaaaaaagctgtggtgcggcgcggccctgggcccctcgaaaaaagtttttaaaaccaatcgcgtgtggggcggcgcggggcgcccaagagggtaaggggagaacgtggcgccaaaagcgtggtcccaagagagaaacccggggccaaagacaaagggcgcgggggtttccacccacaataaaaaaaaacgccgcggggggaacaccgcgcngnnctggaacaatcccanagggggccgngggcnatccgggcntacaccggggtccaagnggncgatanaatagccgcccgagagagaaaaaaacgn

SEQ ID NO: 736172 - DNA, 3374 bp, Homo sapiens
cccatggcaacagcctgctatgagtagccagccagggcagaggccgggctgcaggtggaggcggggaagcgattccggccacctttgtgatgggcgtctcactacctacaaagtcagcccaatgatttcaagacagccctggagacagtgcttcctgccctcctgtcagcttctgcctccctgtaatgtgttctgggtggtctagctcagtcatctggagacacacacatgatcagggccaaagcggtcagtgagaaggaagtggactctggaaacgacatttatggcaaccctatcaagaggatccagtatgagatcaagcagataaagatgttcaaagggcctgagaaggatatagagtttatctacacggccccctcctcggcagtgtgtggggtctcgctggacgttggaggaaagaaggaatatctcattgcaggaaaggccgagggggacggcaagatgcacatcaccctctgtgacttcatcgtgccctgggacaccctgagcaccacccagaagaagagcctgaaccacaggtaccagatgggctgcgagtgcaagatcacgcgctgccccatgatcccgtgctacatctcctccccggacgagtgcctctggatggactgggtcacagagaagaacatcaacgggcaccaggccaagttcttcgcctgcatcaagagaagtgacggctcctgtgcgtggtaccgcggcgcggcgccccccaagcaggagtttctcgacatcgaggacccataagcaggcctccaacgcccctgtggccaactgcaaaaaaagcctccaagggtttcgactggtccagctctgacatcccttcctggaaacagcatgaataaaacactcatcccatgggtccaaattaatatgattctgctccccccttctccttttagacatggttgtgggtctggagggagacgtgggtccaaggtcctcatcccatcctccctctgccaggcactatgtgtctggggcttcgatccttgggtgcaggcagggctgggacacgcggcttccctcccagtccctgccttggcaccgtcacagatgccaagcaggcagcacttagggatctcccagctgggttagggcagggcctggaaatgtgcattttgcagaaacttttgagggtcgttgcaagactgtgtagcaggcctaccaggtccctttcatcttgagagggacatggcccttgttttctgcagcttccacgcctctgcactccctgcccctggcaagtgctcccatcgccccggtgcccaccatgagctcccagcacctgactccccccacatccaagggcagcctggaaccagtggctagttcttgaaggagccccatcaatcctattaatcctcagaattccagtgggagcctccctctgagccttgtagaaatgggagcgagaaaccccagctgagctgcgttccagcctcagctgagtctttttggtctgcacccacccccccaccccccccccccgcccacatgctccccagcttgcaggaggaatcggtgaggtcctgtcctgaggctgctgtccggggccggtggctgccctcaaggtcccttccctagctgctgcggttgccattgcttcttgcctgttctggcatcaggcacctggattgagttgcacagctttgctttatccgggcttgtgtgcagggcccggctgggctccccatctgcacatcctgaggacagaaaaagctgggtcttgctgtgccctcccaggcttagtgttccctccctcaaagactgacagccatcgttctgcacggggctttctgcatgtgacgccagctaagcatagtaagaagtccagcctaggaagggaaggattttggaggtaggtggctttggtgacacactcacttctttctcagcctccaggacactatggcctgttttaagagacatcttatttttctaaaggtgaattctcagatgataggtgaacctgagttgcagatataccaacttctgcttgtatttcttaaatgacaaagattacctagctaagaaacttcctagggaactagggaacctatgtgttccctcagtgtggtttcctgaagccagtgatatgggggttaggataggaagaactttctcggtaatgataaggagaatctcttgtttcctcccacctgtgttgtaaagataaactgacgatatacaggcacattatgtaaacatacacacgcaatgaaaccgaagcttggcggcctgggcgtggtcttgcaaaatgcttccaaagccaccttagcctgttctattcagcggcaaccccaaagcacctgttaagactcctgacccccaagtggcatgcagcccccatgcccaccgggacctggtcagcacagatcttgatgacttccctttctagggcagactgggagggtatccaggaatcggcccctgccccacgggcgttttcatgctgtacagtgacctaaagttggtaagatgtcataatggaccagtccatgtgatttcagtatatacaactccaccagacccctccaacccatataacaccccacccctgttcgcttcctgtatggtgatatcatatgtaacatttactcctgtttctgctgattgtttttttaatgttttggtttgtttttgacatcagctgtaatcattcctgtgctgtgttttttattacccttggtaggtattagacttgcacttttttaaaaaaaggtttctgcatcgtggaagcatttgacccagagtggaacgcgtggcctatgcaggtggattccttcaggtctttcctttggttctttgagcatctttgctttcattcgtctcccgtctttggttctccagttcaaattattgcaaagtaaaggatctttgagtaggttcggtctgaaaggtgtggcctttatatttgatccacacacgttggtcttttaaccgtgctgagcagaaaacaaaacaggttaagaagagccgggtggcagctgacagaggaagccgctcaaataccttcacaataaatagtggcaatatatatatagtttaagaaggctctccatttggcatcgtttaatttatatgttatgttctaagcacagctctcttctcctattttcatcctgcaagcaactcaaaatatttaaaataaagtttacattgtagttattttcaaatctttgcttgataagtattaagaaatattggacttgctgccgtaatttaaagctctgttgattttgtttccgtttggatttttgggggaggggagcactgtgtttatgctggaatatgaagtctgagaccttccggtgcatgaactcgccgcgggtggatactctagagtcggccatgac

SEQ ID NO: 736173 - DNA, 3434 bp, Homo sapiens
cccatggcaacagcctgctatgagtagccagccagggcagaggccgggctgcaggtggaggcggggaagcgattccggccacctttgtgatgggcgtctcactacctacaaagtcagcccaatgatttcaagacagccctggagacagtgcttcctgccctcctgtcagcttctgcctccctgtaatgtgttctgggtggtctagctcagtcatctggagacacacacatgatcagggccaaagcggtcagtgagaaggaagtggactctggaaacgacatttatggcaaccctatcaagaggatccagtatgagatcaagcagataaagatgttcaaagggcctgagaaggatatagagtttatctacacggccccctcctcggcagtgtgtggggtctcgctggacgttggaggaaagaaggaatatctcattgcaggaaaggccgagggggacggcaagatgcacatcaccctctgtgacttcatcgtgccctgggacaccctgagcaccacccagaagaagagcctgaaccacaggtaccagatgggctgcgagtgcaagatcacgcgctgccccatgatcccgtgctacatctcctccccggacgagtgcctctggatggactgggtcacagagaagaacatcaacgggcaccaggccaagttcttcgcctgcatcaagagaagtgacggctcctgtgcgtggtaccgcggcgcggcgccccccaagcaggagtttctcgacatcgaggacccataagcaggcctccaacgcccctgtggccaactgcaaaaaaagcctccaagggtttcgactggtccagctctgacatcccttcctggaaacagcatgaataaaacactcatcccatgggtccaaattaatatgattctgctccccccttctccttttagacatggttgtgggtctggagggagacgtgggtccaaggtcctcatcccatcctccctctgccaggcactatgtgtctggggcttcgatccttgggtgcaggcagggctgggacacgcggcttccctcccagtccctgccttggcaccgtcacagatgccaagcaggcagcacttagggatctcccagctgggttagggcagggcctggaaatgtgcattttgcagaaacttttgagggtcgttgcaagactgtgtagcaggcctaccaggtccctttcatcttgagagggacatggcccttgttttctgcagcttccacgcctctgcactccctgcccctggcaagtgctcccatcgccccggtgcccaccatgagctcccagcacctgactccccccacatccaagggcagcctggaaccagtggctagttcttgaaggagccccatcaatcctattaatcctcagaattccagtgggagcctccctctgagccttgtagaaatgggagcgagaaaccccagctgagctgcgttccagcctcagctgagtctttttggtctgcacccacccccccaccccccccccccgcccacatgctccccagcttgcaggaggaatcggtgaggtcctgtcctgaggctgctgtccggggccggtggctgccctcaaggtcccttccctagctgctgcggttgccattgcttcttgcctgttctggcatcaggcacctggattgagttgcacagctttgctttatccgggcttgtgtgcagggcccggctgggctccccatctgcacatcctgaggacagaaaaagctgggtcttgctgtgccctcccaggcttagtgttccctccctcaaagactgacagccatcgttctgcacggggctttctgcatgtgacgccagctaagcatagtaagaagtccagcctaggaagggaaggattttggaggtaggtggctttggtgacacactcacttctttctcagcctccaggacactatggcctgttttaagagacatcttatttttctaaaggtgaattctcagatgataggtgaacctgagttgcagatataccaacttctgcttgtatttcttaaatgacaaagattacctagctaagaaacttcctagggaactagggaacctatgtgttccctcagtgtggtttcctgaagccagtgatatgggggttaggataggaagaactttctcggtaatgataaggagaatctcttgtttcctcccacctgtgttgtaaagataaactgacgatatacaggcacattatgtaaacatacacacgcaatgaaaccgaagcttggcggcctgggcgtggtcttgcaaaatgcttccaaagccaccttagcctgttctattcagcggcaaccccaaagcacctgttaagactcctgacccccaagtggcatgcagcccccatgcccaccgggacctggtcagcacagatcttgatgacttccctttctagggcagactgggagggtatccaggaatcggcccctgccccacgggcgttttcatgctgtacagtgacctaaagttggtaagatgtcataatggaccagtccatgtgatttcagtatatacaactccaccagacccctccaacccatataacaccccacccctgttcgcttcctgtatggtgatatcatatgtaacatttactcctgtttctgctgattgtttttttaatgttttggtttgtttttgacatcagctgtaatcattcctgtgctgtgttttttattacccttggtaggtattagacttgcacttttttaaaaaaaggtttctgcatcgtggaagcatttgacccagagtggaacgcgtggcctatgcaggtggattccttcaggtctttcctttggttctttgagcatctttgctttcattcgtctcccgtctttggttctccagttcaaattattgcaaagtaaaggatctttgagtaggttcggtctgaaaggtgtggcctttatatttgatccacacacgttggtcttttaaccgtgctgagcagaaaacaaaacaggttaagaagagccgggtggcagctgacagaggaagccgctcaaataccttcacaataaatagtggcaatatatatatagtttaagaaggctctccatttggcatcgtttaatttatatgttatgttctaagcacagctctcttctcctattttcatcctgcaagcaactcaaaatatttaaaataaagtttacattgtagttattttcaaatctttgcttgataagtattaagaaatattggacttgctgccgtaatttaaagctctgttgattttgtttccgtttggatttttgggggaggggagcactgtgtttattgtccacggaccgagcgattgctcaagaatgatacaaagcatcagagacatgcgcagtctgcttgtcaactttcaacaactcttgtgtgttcccagcaccggaaggtctcagacttcatattccactcgtgcc

SEQ ID NO: 736174 - DNA, 3311 bp, Homo sapiens
cccatggcaacagcctgctatgagtagccagccagggcagaggccgggctgcaggtggaggcggggaagcgattccggccacctttgtgatgggcgtctcactacctacaaagtcagcccaatgatttcaagacagccctggagacagtgcttcctgccctcctgtcagcttctgcctccctgtaatgtgttctgggtggtctagctcagtcatctggagacacacacatgatcagggccaaagcggtcagtgagaaggaagtggactctggaaacgacatttatggcaaccctatcaagaggatccagtatgagatcaagcagataaagatgttcaaagggcctgagaaggatatagagtttatctacacggccccctcctcggcagtgtgtggggtctcgctggacgttggaggaaagaaggaatatctcattgcaggaaaggccgagggggacggcaagatgcacatcaccctctgtgacttcatcgtgccctgggacaccctgagcaccacccagaagaagagcctgaaccacaggtaccagatgggctgcgagtgcaagatcacgcgctgccccatgatcccgtgctacatctcctccccggacgagtgcctctggatggactgggtcacagagaagaacatcaacgggcaccaggccaagttcttcgcctgcatcaagagaagtgacggctcctgtgcgtggtaccgcggcgcggcgccccccaagcaggagtttctcgacatcgaggacccataagcaggcctccaacgcccctgtggccaactgcaaaaaaagcctccaagggtttcgactggtccagctctgacatcccttcctggaaacagcatgaataaaacactcatcccatgggtccaaattaatatgattctgctccccccttctccttttagacatggttgtgggtctggagggagacgtgggtccaaggtcctcatcccatcctccctctgccaggcactatgtgtctggggcttcgatccttgggtgcaggcagggctgggacacgcggcttccctcccagtccctgccttggcaccgtcacagatgccaagcaggcagcacttagggatctcccagctgggttagggcagggcctggaaatgtgcattttgcagaaacttttgagggtcgttgcaagactgtgtagcaggcctaccaggtccctttcatcttgagagggacatggcccttgttttctgcagcttccacgcctctgcactccctgcccctggcaagtgctcccatcgccccggtgcccaccatgagctcccagcacctgactccccccacatccaagggcagcctggaaccagtggctagttcttgaaggagccccatcaatcctattaatcctcagaattccagtgggagcctccctctgagccttgtagaaatgggagcgagaaaccccagctgagctgcgttccagcctcagctgagtctttttggtctgcacccacccccccaccccccccccccgcccacatgctccccagcttgcaggaggaatcggtgaggtcctgtcctgaggctgctgtccggggccggtggctgccctcaaggtcccttccctagctgctgcggttgccattgcttcttgcctgttctggcatcaggcacctggattgagttgcacagctttgctttatccgggcttgtgtgcagggcccggctgggctccccatctgcacatcctgaggacagaaaaagctgggtcttgctgtgccctcccaggcttagtgttccctccctcaaagactgacagccatcgttctgcacggggctttctgcatgtgacgccagctaagcatagtaagaagtccagcctaggaagggaaggattttggaggtaggtggctttggtgacacactcacttctttctcagcctccaggacactatggcctgttttaagagacatcttatttttctaaaggtgaattctcagatgataggtgaacctgagttgcagatataccaacttctgcttgtatttcttaaatgacaaagattacctagctaagaaacttcctagggaactagggaacctatgtgttccctcagtgtggtttcctgaagccagtgatatgggggttaggataggaagaactttctcggtaatgataaggagaatctcttgtttcctcccacctgtgttgtaaagataaactgacgatatacaggcacattatgtaaacatacacacgcaatgaaaccgaagcttggcggcctgggcgtggtcttgcaaaatgcttccaaagccaccttagcctgttctattcagcggcaaccccaaagcacctgttaagactcctgacccccaagtggcatgcagcccccatgcccaccgggacctggtcagcacagatcttgatgacttccctttctagggcagactgggagggtatccaggaatcggcccctgccccacgggcgttttcatgctgtacagtgacctaaagttggtaagatgtcataatggaccagtccatgtgatttcagtatatacaactccaccagacccctccaacccatataacaccccacccctgttcgcttcctgtatggtgatatcatatgtaacatttactcctgtttctgctgattgtttttttaatgttttggtttgtttttgacatcagctgtaatcattcctgtgctgtgttttttattacccttggtaggtattagacttgcacttttttaaaaaaaggtttctgcatcgtggaagcatttgacccagagtggaacgcgtggcctatgcaggtggattccttcaggtctttcctttggttctttgagcatctttgctttcattcgtctcccgtctttggttctccagttcaaattattgcaaagtaaaggatctttgagtaggttcggtctgaaaggtgtggcctttatatttgatccacacacgttggtcttttaaccgtgctgagcagaaaacaaaacaggttaagaagagccgggtggcagctgacagaggaagccgctcaaataccttcacaataaatagtggcaatatatatatagtttaagaaggctctccatttggcatcgtttaatttatatgttatgttctaagcacagctctcttctcctattttcatcctgcaagcaactcaaaatatttaaaataaagtttacattgtagttattttcaaatctttgcttgataagtattaagaaatattggacttgctgccgtaatttaaagctctgttgattttgtttccgtttggatcccatgcggtggtttatcctcaagagtcagccacacat

SEQ ID NO: 736175 - DNA, 3144 bp, Homo sapiens
cccatggcaacagcctgctatgagtagccagccagggcagaggccgggctgcaggtggaggcggggaagcgattccggccacctttgtgatgggcgtctcactacctacaaagtcagcccaatgatttcaagacagccctggagacagtgcttcctgccctcctgtcagcttctgcctccctgtaatgtgttctgggtggtctagctcagtcatctggagacacacacatgatcagggccaaagcggtcagtgagaaggaagtggactctggaaacgacatttatggcaaccctatcaagaggatccagtatgagatcaagcagataaagatgttcaaagggcctgagaaggatatagagtttatctacacggccccctcctcggcagtgtgtggggtctcgctggacgttggaggaaagaaggaatatctcattgcaggaaaggccgagggggacggcaagatgcacatcaccctctgtgacttcatcgtgccctgggacaccctgagcaccacccagaagaagagcctgaaccacaggtaccagatgggctgcgagtgcaagatcacgcgctgccccatgatcccgtgctacatctcctccccggacgagtgcctctggatggactgggtcacagagaagaacatcaacgggcaccaggccaagttcttcgcctgcatcaagagaagtgacggctcctgtgcgtggtaccgcggcgcggcgccccccaagcaggagtttctcgacatcgaggacccataagcaggcctccaacgcccctgtggccaactgcaaaaaaagcctccaagggtttcgactggtccagctctgacatcccttcctggaaacagcatgaataaaacactcatcccatgggtccaaattaatatgattctgctccccccttctccttttagacatggttgtgggtctggagggagacgtgggtccaaggtcctcatcccatcctccctctgccaggcactatgtgtctggggcttcgatccttgggtgcaggcagggctgggacacgcggcttccctcccagtccctgccttggcaccgtcacagatgccaagcaggcagcacttagggatctcccagctgggttagggcagggcctggaaatgtgcattttgcagaaacttttgagggtcgttgcaagactgtgtagcaggcctaccaggtccctttcatcttgagagggacatggcccttgttttctgcagcttccacgcctctgcactccctgcccctggcaagtgctcccatcgccccggtgcccaccatgagctcccagcacctgactccccccacatccaagggcagcctggaaccagtggctagttcttgaaggagccccatcaatcctattaatcctcagaattccagtgggagcctccctctgagccttgtagaaatgggagcgagaaaccccagctgagctgcgttccagcctcagctgagtctttttggtctgcacccacccccccaccccccccccccgcccacatgctccccagcttgcaggaggaatcggtgaggtcctgtcctgaggctgctgtccggggccggtggctgccctcaaggtcccttccctagctgctgcggttgccattgcttcttgcctgttctggcatcaggcacctggattgagttgcacagctttgctttatccgggcttgtgtgcagggcccggctgggctccccatctgcacatcctgaggacagaaaaagctgggtcttgctgtgccctcccaggcttagtgttccctccctcaaagactgacagccatcgttctgcacggggctttctgcatgtgacgccagctaagcatagtaagaagtccagcctaggaagggaaggattttggaggtaggtggctttggtgacacactcacttctttctcagcctccaggacactatggcctgttttaagagacatcttatttttctaaaggtgaattctcagatgataggtgaacctgagttgcagatataccaacttctgcttgtatttcttaaatgacaaagattacctagctaagaaacttcctagggaactagggaacctatgtgttccctcagtgtggtttcctgaagccagtgatatgggggttaggataggaagaactttctcggtaatgataaggagaatctcttgtttcctcccacctgtgttgtaaagataaactgacgatatacaggcacattatgtaaacatacacacgcaatgaaaccgaagcttggcggcctgggcgtggtcttgcaaaatgcttccaaagccaccttagcctgttctattcagcggcaaccccaaagcacctgttaagactcctgacccccaagtggcatgcagcccccatgcccaccgggacctggtcagcacagatcttgatgacttccctttctagggcagactgggagggtatccaggaatcggcccctgccccacgggcgttttcatgctgtacagtgacctaaagttggtaagatgtcataatggaccagtccatgtgatttcagtatatacaactccaccagacccctccaacccatataacaccccacccctgttcgcttcctgtatggtgatatcatatgtaacatttactcctgtttctgctgattgtttttttaatgttttggtttgtttttgacatcagctgtaatcattcctgtgctgtgttttttattacccttggtaggtattagacttgcacttttttaaaaaaaggtttctgcatcgtggaagcatttgacccagagtggaacgcgtggcctatgcaggtggattccttcaggtctttcctttggttctttgagcatctttgctttcattcgtctcccgtctttggttctccagttcaaattattgcaaagtaaaggatctttgagtaggttcggtctgaaaggtgtggcctttatatttgatccacacacgttggtcttttaaccgtgctgagcagaaaacaaaacaggttaagaagagccgggtggcagctgacagaggaagccgctcaaataccttcacaataaatagtggcaatatatatatagtttaagaaggctctccatttggcatcgtttaatttatatgttatgttctaagccagcagcaccagcacgaagcccagccgat

SEQ ID NO: 736176 - DNA, 3229 bp, Homo sapiens
  misc_feature (3133)..(3133): n is a, c, g, or t
  misc_feature (3135)..(3136): n is a, c, g, or t
  misc_feature (3151)..(3151): n is a, c, g, or t
  misc_feature (3161)..(3161): n is a, c, g, or t
  misc_feature (3166)..(3166): n is a, c, g, or t
  misc_feature (3175)..(3175): n is a, c, g, or t
  misc_feature (3192)..(3192): n is a, c, g, or t
  misc_feature (3195)..(3195): n is a, c, g, or t
  misc_feature (3201)..(3201): n is a, c, g, or t
  misc_feature (3229)..(3229): n is a, c, g, or t
cccatggcaacagcctgctatgagtagccagccagggcagaggccgggctgcaggtggaggcggggaagcgattccggccacctttgtgatgggcgtctcactacctacaaagtcagcccaatgatttcaagacagccctggagacagtgcttcctgccctcctgtcagcttctgcctccctgtaatgtgttctgggtggtctagctcagtcatctggagacacacacatgatcagggccaaagcggtcagtgagaaggaagtggactctggaaacgacatttatggcaaccctatcaagaggatccagtatgagatcaagcagataaagatgttcaaagggcctgagaaggatatagagtttatctacacggccccctcctcggcagtgtgtggggtctcgctggacgttggaggaaagaaggaatatctcattgcaggaaaggccgagggggacggcaagatgcacatcaccctctgtgacttcatcgtgccctgggacaccctgagcaccacccagaagaagagcctgaaccacaggtaccagatgggctgcgagtgcaagatcacgcgctgccccatgatcccgtgctacatctcctccccggacgagtgcctctggatggactgggtcacagagaagaacatcaacgggcaccaggccaagttcttcgcctgcatcaagagaagtgacggctcctgtgcgtggtaccgcggcgcggcgccccccaagcaggagtttctcgacatcgaggacccataagcaggcctccaacgcccctgtggccaactgcaaaaaaagcctccaagggtttcgactggtccagctctgacatcccttcctggaaacagcatgaataaaacactcatcccatgggtccaaattaatatgattctgctccccccttctccttttagacatggttgtgggtctggagggagacgtgggtccaaggtcctcatcccatcctccctctgccaggcactatgtgtctggggcttcgatccttgggtgcaggcagggctgggacacgcggcttccctcccagtccctgccttggcaccgtcacagatgccaagcaggcagcacttagggatctcccagctgggttagggcagggcctggaaatgtgcattttgcagaaacttttgagggtcgttgcaagactgtgtagcaggcctaccaggtccctttcatcttgagagggacatggcccttgttttctgcagcttccacgcctctgcactccctgcccctggcaagtgctcccatcgccccggtgcccaccatgagctcccagcacctgactccccccacatccaagggcagcctggaaccagtggctagttcttgaaggagccccatcaatcctattaatcctcagaattccagtgggagcctccctctgagccttgtagaaatgggagcgagaaaccccagctgagctgcgttccagcctcagctgagtctttttggtctgcacccacccccccaccccccccccccgcccacatgctccccagcttgcaggaggaatcggtgaggtcctgtcctgaggctgctgtccggggccggtggctgccctcaaggtcccttccctagctgctgcggttgccattgcttcttgcctgttctggcatcaggcacctggattgagttgcacagctttgctttatccgggcttgtgtgcagggcccggctgggctccccatctgcacatcctgaggacagaaaaagctgggtcttgctgtgccctcccaggcttagtgttccctccctcaaagactgacagccatcgttctgcacggggctttctgcatgtgacgccagctaagcatagtaagaagtccagcctaggaagggaaggattttggaggtaggtggctttggtgacacactcacttctttctcagcctccaggacactatggcctgttttaagagacatcttatttttctaaaggtgaattctcagatgataggtgaacctgagttgcagatataccaacttctgcttgtatttcttaaatgacaaagattacctagctaagaaacttcctagggaactagggaacctatgtgttccctcagtgtggtttcctgaagccagtgatatgggggttaggataggaagaactttctcggtaatgataaggagaatctcttgtttcctcccacctgtgttgtaaagataaactgacgatatacaggcacattatgtaaacatacacacgcaatgaaaccgaagcttggcggcctgggcgtggtcttgcaaaatgcttccaaagccaccttagcctgttctattcagcggcaaccccaaagcacctgttaagactcctgacccccaagtggcatgcagcccccatgcccaccgggacctggtcagcacagatcttgatgacttccctttctagggcagactgggagggtatccaggaatcggcccctgccccacgggcgttttcatgctgtacagtgacctaaagttggtaagatgtcataatggaccagtccatgtgatttcagtatatacaactccaccagacccctccaacccatataacaccccacccctgttcgcttcctgtatggtgatatcatatgtaacatttactcctgtttctgctgattgtttttttaatgttttggtttgtttttgacatcagctgtaatcattcctgtgctgtgttttttattacccttggtaggtattagacttgcacttttttaaaaaaaggtttctgcatcggctggaatatgaagtctgagaccttccggtgctgggaacacacaagagttgttgaaagttgacaagcagactgcgcatgtctctgatgctttgtatcattcttgagcaatcgctcggtccgtggacaataaacagtattatcaaagagaaaaaaaaaaaaaaaaaaaaaaaaaaaaaaactgtggtgcggcgcggccctgggcccctcgaaaaaagtttttaaaaccaatcgcgtgtggggcggcgcggggcgcccaagagggtaaggggagaacgtggcgccaaaagcgtggtcccaagagagaaacccggggccaaagacaaagggcgcgggggtttccacccacaataaaaaaaaacgccgcggggggaacaccgcgcngnnctggaacaatcccanagggggccgngggcnatccgggcntacaccggggtccaagnggncgatanaatagccgcccgagagagaaaaaaacgn

SEQ ID NO: 736177 - DNA, 2721 bp, Homo sapiens
cccatggcaacagcctgctatgagtagccagccagggcagaggccgggctgcaggtggaggcggggaagcgattccggccacctttgtgatgggcgtctcactacctacaaagtcagcccaatgatttcaagacagccctggagacagtgcttcctgccctcctgtcagcttctgcctccctgtaatgtgttctgggtggtctagctcagtcatctggagacacacacatgatcagggccaaagcggtcagtgagaaggaagtggactctggaaacgacatttatggcaaccctatcaagaggatccagtatgagatcaagcagataaagatgttcaaagggcctgagaaggatatagagtttatctacacggccccctcctcggcagtgtgtggggtctcgctggacgttggaggaaagaaggaatatctcattgcaggaaaggccgagggggacggcaagatgcacatcaccctctgtgacttcatcgtgccctgggacaccctgagcaccacccagaagaagagcctgaaccacaggtaccagatgggctgcgagtgcaagatcacgcgctgccccatgatcccgtgctacatctcctccccggacgagtgcctctggatggactgggtcacagagaagaacatcaacgggcaccaggccaagttcttcgcctgcatcaagagaagtgacggctcctgtgcgtggtaccgcggcgcggcgccccccaagcaggagtttctcgacatcgaggacccataagcaggcctccaacgcccctgtggccaactgcaaaaaaagcctccaagggtttcgactggtccagctctgacatcccttcctggaaacagcatgaataaaacactcatcccatgggtccaaattaatatgattctgctccccccttctccttttagacatggttgtgggtctggagggagacgtgggtccaaggtcctcatcccatcctccctctgccaggcactatgtgtctggggcttcgatccttgggtgcaggcagggctgggacacgcggcttccctcccagtccctgccttggcaccgtcacagatgccaagcaggcagcacttagggatctcccagctgggttagggcagggcctggaaatgtgcattttgcagaaacttttgagggtcgttgcaagactgtgtagcaggcctaccaggtccctttcatcttgagagggacatggcccttgttttctgcagcttccacgcctctgcactccctgcccctggcaagtgctcccatcgccccggtgcccaccatgagctcccagcacctgactccccccacatccaagggcagcctggaaccagtggctagttcttgaaggagccccatcaatcctattaatcctcagaattccagtgggagcctccctctgagccttgtagaaatgggagcgagaaaccccagctgagctgcgttccagcctcagctgagtctttttggtctgcacccacccccccaccccccccccccgcccacatgctccccagcttgcaggaggaatcggtgaggtcctgtcctgaggctgctgtccggggccggtggctgccctcaaggtcccttccctagctgctgcggttgccattgcttcttgcctgttctggcatcaggcacctggattgagttgcacagctttgctttatccgggcttgtgtgcagggcccggctgggctccccatctgcacatcctgaggacagaaaaagctgggtcttgctgtgccctcccaggcttagtgttccctccctcaaagactgacagccatcgttctgcacggggctttctgcatgtgacgccagctaagcatagtaagaagtccagcctaggaagggaaggattttggaggtaggtggctttggtgacacactcacttctttctcagcctccaggacactatggcctgttttaagagacatcttatttttctaaaggtgaattctcagatgataggtgaacctgagttgcagatataccaacttctgcttgtatttcttaaatgacaaagattacctagctaagaaacttcctagggaactagggaacctatgtgttccctcagtgtggtttcctgaagccagtgatatgggggttaggataggaagaactttctcggtaatgataaggagaatctcttgtttcctcccacctgtgttgtaaagataaactgacgatatacaggcacattatgtaaacatacacacgcaatgaaaccgaagcttggcggcctgggcgtggtcttgcaaaatgcttccaaagccaccttagcctgttctattcagcggcaaccccaaagcacctgttaagactcctgacccccaagtggcatgcagcccccatgcccaccgggacctggtcagcacagatcttgatgacttccctttctagggcagactgggagggtatccaggaatcggcccctgccccacgggcgttttcatgctgtacagtgacctaaagttggtaagatgtcataatggaccagtccatgtgatttcagtatatacaactccaccagacccctccaacccatataacaccccacccctgttcgcttcctgtatggtgatatcatatgtaacatttactcctgtttctgctgattgtttttttaatgttttggtttgtttttgacatcagctgtaatcattcctgtgctgtgtttatttcacagggatcctctagatcacctc

SEQ ID NO: 736178 - DNA, 2901 bp, Homo sapiens
cccatggcaacagcctgctatgagtagccagccagggcagaggccgggctgcaggtggaggcggggaagcgattccggccacctttgtgatgggcgtctcactacctacaaagtcagcccaatgatttcaagacagccctggagacagtgcttcctgccctcctgtcagcttctgcctccctgtaatgtgttctgggtggtctagctcagtcatctggagacacacacatgatcagggccaaagcggtcagtgagaaggaagtggactctggaaacgacatttatggcaaccctatcaagaggatccagtatgagatcaagcagataaagatgttcaaagggcctgagaaggatatagagtttatctacacggccccctcctcggcagtgtgtggggtctcgctggacgttggaggaaagaaggaatatctcattgcaggaaaggccgagggggacggcaagatgcacatcaccctctgtgacttcatcgtgccctgggacaccctgagcaccacccagaagaagagcctgaaccacaggtaccagatgggctgcgagtgcaagatcacgcgctgccccatgatcccgtgctacatctcctccccggacgagtgcctctggatggactgggtcacagagaagaacatcaacgggcaccaggccaagttcttcgcctgcatcaagagaagtgacggctcctgtgcgtggtaccgcggcgcggcgccccccaagcaggagtttctcgacatcgaggacccataagcaggcctccaacgcccctgtggccaactgcaaaaaaagcctccaagggtttcgactggtccagctctgacatcccttcctggaaacagcatgaataaaacactcatcccatgggtccaaattaatatgattctgctccccccttctccttttagacatggttgtgggtctggagggagacgtgggtccaaggtcctcatcccatcctccctctgccaggcactatgtgtctggggcttcgatccttgggtgcaggcagggctgggacacgcggcttccctcccagtccctgccttggcaccgtcacagatgccaagcaggcagcacttagggatctcccagctgggttagggcagggcctggaaatgtgcattttgcagaaacttttgagggtcgttgcaagactgtgtagcaggcctaccaggtccctttcatcttgagagggacatggcccttgttttctgcagcttccacgcctctgcactccctgcccctggcaagtgctcccatcgccccggtgcccaccatgagctcccagcacctgactccccccacatccaagggcagcctggaaccagtggctagttcttgaaggagccccatcaatcctattaatcctcagaattccagtgggagcctccctctgagccttgtagaaatgggagcgagaaaccccagctgagctgcgttccagcctcagctgagtctttttggtctgcacccacccccccaccccccccccccgcccacatgctccccagcttgcaggaggaatcggtgaggtcctgtcctgaggctgctgtccggggccggtggctgccctcaaggtcccttccctagctgctgcggttgccattgcttcttgcctgttctggcatcaggcacctggattgagttgcacagctttgctttatccgggcttgtgtgcagggcccggctgggctccccatctgcacatcctgaggacagaaaaagctgggtcttgctgtgccctcccaggcttagtgttccctccctcaaagactgacagccatcgttctgcacggggctttctgcatgtgacgccagctaagcatagtaagaagtccagcctaggaagggaaggattttggaggtaggtggctttggtgacacactcacttctttctcagcctccaggacactatggcctgttttaagagacatcttatttttctaaaggtgaattctcagatgataggtgaacctgagttgcagatataccaacttctgcttgtatttcttaaatgacaaagattacctagctaagaaacttcctagggaactagggaacctatgtgttccctcagtgtggtttcctgaagccagtgatatgggggttaggataggaagaactttctcggtaatgataaggagaatctcttgtttcctcccacctgtgttgtaaagataaactgacgatatacaggcacattatgtaaacatacacacgcaatgaaaccgaagcttggcggcctgggcgtggtcttgcaaaatgcttccaaagccaccttagcctgttctattcagcggcaaccccaaagcacctgttaagactcctgacccccaagtggcatgcagcccccatgcccaccgggacctggtcagcacagatcttgatgacttccctttctagggcagactgggagggtatccaggaatcggcccctgccccacgggcgttttcatgctgtacagtgacctaaagttggtaagatgtcataatggaccagtccatgtgatttcagtatatacaactccaccagacccctccaacccatataacaccccacccctgttcgcttcctgtatggtgatatcatatgtaacatttactcctgtttctgctgattgtttttttaatgttttggtttgtttttgacatcagctgtaatcattcctgtgctgtgttgcttgcttttttgtttttttagagatggggtcttgctatgttgcccaggctggtcttgaactcctgggctcaagtgatgctcccacctcaacctcccaaagcgctgggagtacaggcatgggccactgctcccaacctaccctgctttttttttcttttttttttttaataaagaatgtggtttatacccagttgatgaggaaaaactc

SEQ ID NO: 736179 - DNA, 2592 bp, Homo sapiens
cccatggcaacagcctgctatgagtagccagccagggcagaggccgggctgcaggtggaggcggggaagcgattccggccacctttgtgatgggcgtctcactacctacaaagtcagcccaatgatttcaagacagccctggagacagtgcttcctgccctcctgtcagcttctgcctccctgtaatgtgttctgggtggtctagctcagtcatctggagacacacacatgatcagggccaaagcggtcagtgagaaggaagtggactctggaaacgacatttatggcaaccctatcaagaggatccagtatgagatcaagcagataaagatgttcaaagggcctgagaaggatatagagtttatctacacggccccctcctcggcagtgtgtggggtctcgctggacgttggaggaaagaaggaatatctcattgcaggaaaggccgagggggacggcaagatgcacatcaccctctgtgacttcatcgtgccctgggacaccctgagcaccacccagaagaagagcctgaaccacaggtaccagatgggctgcgagtgcaagatcacgcgctgccccatgatcccgtgctacatctcctccccggacgagtgcctctggatggactgggtcacagagaagaacatcaacgggcaccaggccaagttcttcgcctgcatcaagagaagtgacggctcctgtgcgtggtaccgcggcgcggcgccccccaagcaggagtttctcgacatcgaggacccataagcaggcctccaacgcccctgtggccaactgcaaaaaaagcctccaagggtttcgactggtccagctctgacatcccttcctggaaacagcatgaataaaacactcatcccatgggtccaaattaatatgattctgctccccccttctccttttagacatggttgtgggtctggagggagacgtgggtccaaggtcctcatcccatcctccctctgccaggcactatgtgtctggggcttcgatccttgggtgcaggcagggctgggacacgcggcttccctcccagtccctgccttggcaccgtcacagatgccaagcaggcagcacttagggatctcccagctgggttagggcagggcctggaaatgtgcattttgcagaaacttttgagggtcgttgcaagactgtgtagcaggcctaccaggtccctttcatcttgagagggacatggcccttgttttctgcagcttccacgcctctgcactccctgcccctggcaagtgctcccatcgccccggtgcccaccatgagctcccagcacctgactccccccacatccaagggcagcctggaaccagtggctagttcttgaaggagccccatcaatcctattaatcctcagaattccagtgggagcctccctctgagccttgtagaaatgggagcgagaaaccccagctgagctgcgttccagcctcagctgagtctttttggtctgcacccacccccccaccccccccccccgcccacatgctccccagcttgcaggaggaatcggtgaggtcctgtcctgaggctgctgtccggggccggtggctgccctcaaggtcccttccctagctgctgcggttgccattgcttcttgcctgttctggcatcaggcacctggattgagttgcacagctttgctttatccgggcttgtgtgcagggcccggctgggctccccatctgcacatcctgaggacagaaaaagctgggtcttgctgtgccctcccaggcttagtgttccctccctcaaagactgacagccatcgttctgcacggggctttctgcatgtgacgccagctaagcatagtaagaagtccagcctaggaagggaaggattttggaggtaggtggctttggtgacacactcacttctttctcagcctccaggacactatggcctgttttaagagacatcttatttttctaaaggtgaattctcagatgataggtgaacctgagttgcagatataccaacttctgcttgtatttcttaaatgacaaagattacctagctaagaaacttcctagggaactagggaacctatgtgttccctcagtgtggtttcctgaagccagtgatatgggggttaggataggaagaactttctcggtaatgataaggagaatctcttgtttcctcccacctgtgttgtaaagataaactgacgatatacaggcacattatgtaaacatacacacgcaatgaaaccgaagcttggcggcctgggcgtggtcttgcaaaatgcttccaaagccaccttagcctgttctattcagcggcaaccccaaagcacctgttaagactcctgacccccaagtggcatgcagcccccatgcccaccgggacctggtcagcacagatcttgatgacttccctttctagggcagactgggagggtatccaggaatcggcccctgccccacgggcgttttcatgctgtacagtgacctaaagttggtaagatgtcataatggaccagtccatgtgatttcagtatatacaactccaccagacccctccaacccatataacagcatcacccgttcgggatcctcatg

SEQ ID NO: 736180 - DNA, 2615 bp, Homo sapiens
cccatggcaacagcctgctatgagtagccagccagggcagaggccgggctgcaggtggaggcggggaagcgattccggccacctttgtgatgggcgtctcactacctacaaagtcagcccaatgatttcaagacagccctggagacagtgcttcctgccctcctgtcagcttctgcctccctgtaatgtgttctgggtggtctagctcagtcatctggagacacacacatgatcagggccaaagcggtcagtgagaaggaagtggactctggaaacgacatttatggcaaccctatcaagaggatccagtatgagatcaagcagataaagatgttcaaagggcctgagaaggatatagagtttatctacacggccccctcctcggcagtgtgtggggtctcgctggacgttggaggaaagaaggaatatctcattgcaggaaaggccgagggggacggcaagatgcacatcaccctctgtgacttcatcgtgccctgggacaccctgagcaccacccagaagaagagcctgaaccacaggtaccagatgggctgcgagtgcaagatcacgcgctgccccatgatcccgtgctacatctcctccccggacgagtgcctctggatggactgggtcacagagaagaacatcaacgggcaccaggccaagttcttcgcctgcatcaagagaagtgacggctcctgtgcgtggtaccgcggcgcggcgccccccaagcaggagtttctcgacatcgaggacccataagcaggcctccaacgcccctgtggccaactgcaaaaaaagcctccaagggtttcgactggtccagctctgacatcccttcctggaaacagcatgaataaaacactcatcccatgggtccaaattaatatgattctgctccccccttctccttttagacatggttgtgggtctggagggagacgtgggtccaaggtcctcatcccatcctccctctgccaggcactatgtgtctggggcttcgatccttgggtgcaggcagggctgggacacgcggcttccctcccagtccctgccttggcaccgtcacagatgccaagcaggcagcacttagggatctcccagctgggttagggcagggcctggaaatgtgcattttgcagaaacttttgagggtcgttgcaagactgtgtagcaggcctaccaggtccctttcatcttgagagggacatggcccttgttttctgcagcttccacgcctctgcactccctgcccctggcaagtgctcccatcgccccggtgcccaccatgagctcccagcacctgactccccccacatccaagggcagcctggaaccagtggctagttcttgaaggagccccatcaatcctattaatcctcagaattccagtgggagcctccctctgagccttgtagaaatgggagcgagaaaccccagctgagctgcgttccagcctcagctgagtctttttggtctgcacccacccccccaccccccccccccgcccacatgctccccagcttgcaggaggaatcggtgaggtcctgtcctgaggctgctgtccggggccggtggctgccctcaaggtcccttccctagctgctgcggttgccattgcttcttgcctgttctggcatcaggcacctggattgagttgcacagctttgctttatccgggcttgtgtgcagggcccggctgggctccccatctgcacatcctgaggacagaaaaagctgggtcttgctgtgccctcccaggcttagtgttccctccctcaaagactgacagccatcgttctgcacggggctttctgcatgtgacgccagctaagcatagtaagaagtccagcctaggaagggaaggattttggaggtaggtggctttggtgacacactcacttctttctcagcctccaggacactatggcctgttttaagagacatcttatttttctaaaggtgaattctcagatgataggtgaacctgagttgcagatataccaacttctgcttgtatttcttaaatgacaaagattacctagctaagaaacttcctagggaactagggaacctatgtgttccctcagtgtggtttcctgaagccagtgatatgggggttaggataggaagaactttctcggtaatgataaggagaatctcttgtttcctcccacctgtgttgtaaagataaactgacgatatacaggcacattatgtaaacatacacacgcaatgaaaccgaagcttggcggcctgggcgtggtcttgcaaaatgcttccaaagccaccttagcctgttctattcagcggcaaccccaaagcacctgttaagactcctgacccccaagtggcatgcagcccccatgcccaccgggacctggtcagcacagatcttgatgacttccctttctagggcagactgggagggtatccaggaatcggcccctgccccacgggcgttttcatgctgtacagtgacctaaagttggtaagatgtcataatggaccagtccatgtgatttcagtatatacaactccaccagacccctccaacccatataacagccatggaattcttccatcaccaccaggatcttccgggatcctctgat

SEQ ID NO: 736181 - DNA, 2594 bp, Homo sapiens
cccatggcaacagcctgctatgagtagccagccagggcagaggccgggctgcaggtggaggcggggaagcgattccggccacctttgtgatgggcgtctcactacctacaaagtcagcccaatgatttcaagacagccctggagacagtgcttcctgccctcctgtcagcttctgcctccctgtaatgtgttctgggtggtctagctcagtcatctggagacacacacatgatcagggccaaagcggtcagtgagaaggaagtggactctggaaacgacatttatggcaaccctatcaagaggatccagtatgagatcaagcagataaagatgttcaaagggcctgagaaggatatagagtttatctacacggccccctcctcggcagtgtgtggggtctcgctggacgttggaggaaagaaggaatatctcattgcaggaaaggccgagggggacggcaagatgcacatcaccctctgtgacttcatcgtgccctgggacaccctgagcaccacccagaagaagagcctgaaccacaggtaccagatgggctgcgagtgcaagatcacgcgctgccccatgatcccgtgctacatctcctccccggacgagtgcctctggatggactgggtcacagagaagaacatcaacgggcaccaggccaagttcttcgcctgcatcaagagaagtgacggctcctgtgcgtggtaccgcggcgcggcgccccccaagcaggagtttctcgacatcgaggacccataagcaggcctccaacgcccctgtggccaactgcaaaaaaagcctccaagggtttcgactggtccagctctgacatcccttcctggaaacagcatgaataaaacactcatcccatgggtccaaattaatatgattctgctccccccttctccttttagacatggttgtgggtctggagggagacgtgggtccaaggtcctcatcccatcctccctctgccaggcactatgtgtctggggcttcgatccttgggtgcaggcagggctgggacacgcggcttccctcccagtccctgccttggcaccgtcacagatgccaagcaggcagcacttagggatctcccagctgggttagggcagggcctggaaatgtgcattttgcagaaacttttgagggtcgttgcaagactgtgtagcaggcctaccaggtccctttcatcttgagagggacatggcccttgttttctgcagcttccacgcctctgcactccctgcccctggcaagtgctcccatcgccccggtgcccaccatgagctcccagcacctgactccccccacatccaagggcagcctggaaccagtggctagttcttgaaggagccccatcaatcctattaatcctcagaattccagtgggagcctccctctgagccttgtagaaatgggagcgagaaaccccagctgagctgcgttccagcctcagctgagtctttttggtctgcacccacccccccaccccccccccccgcccacatgctccccagcttgcaggaggaatcggtgaggtcctgtcctgaggctgctgtccggggccggtggctgccctcaaggtcccttccctagctgctgcggttgccattgcttcttgcctgttctggcatcaggcacctggattgagttgcacagctttgctttatccgggcttgtgtgcagggcccggctgggctccccatctgcacatcctgaggacagaaaaagctgggtcttgctgtgccctcccaggcttagtgttccctccctcaaagactgacagccatcgttctgcacggggctttctgcatgtgacgccagctaagcatagtaagaagtccagcctaggaagggaaggattttggaggtaggtggctttggtgacacactcacttctttctcagcctccaggacactatggcctgttttaagagacatcttatttttctaaaggtgaattctcagatgataggtgaacctgagttgcagatataccaacttctgcttgtatttcttaaatgacaaagattacctagctaagaaacttcctagggaactagggaacctatgtgttccctcagtgtggtttcctgaagccagtgatatgggggttaggataggaagaactttctcggtaatgataaggagaatctcttgtttcctcccacctgtgttgtaaagataaactgacgatatacaggcacattatgtaaacatacacacgcaatgaaaccgaagcttggcggcctgggcgtggtcttgcaaaatgcttccaaagccaccttagcctgttctattcagcggcaaccccaaagcacctgttaagactcctgacccccaagtggcatgcagcccccatgcccaccgggacctggtcagcacagatcttgatgacttccctttctagggcagactgggagggtatccaggaatcggcccctgccccacgggcgttttcatgctgtacagtgacctaaagttggtaagatgtcataatggaccagtccatgtgatttcagtatatacaactccaccagacccctccaacccatataacaaccagattcatcaccaggaatgcttac

SEQ ID NO: 736182 - DNA, 3033 bp, Homo sapiens
cccatggcaacagcctgctatgagtagccagccagggcagaggccgggctgcaggtggaggcggggaagcgattccggccacctttgtgatgggcgtctcactacctacaaagtcagcccaatgatttcaagacagccctggagacagtgcttcctgccctcctgtcagcttctgcctccctgtaatgtgttctgggtggtctagctcagtcatctggagacacacacatgatcagggccaaagcggtcagtgagaaggaagtggactctggaaacgacatttatggcaaccctatcaagaggatccagtatgagatcaagcagataaagatgttcaaagggcctgagaaggatatagagtttatctacacggccccctcctcggcagtgtgtggggtctcgctggacgttggaggaaagaaggaatatctcattgcaggaaaggccgagggggacggcaagatgcacatcaccctctgtgacttcatcgtgccctgggacaccctgagcaccacccagaagaagagcctgaaccacaggtaccagatgggctgcgagtgcaagatcacgcgctgccccatgatcccgtgctacatctcctccccggacgagtgcctctggatggactgggtcacagagaagaacatcaacgggcaccaggccaagttcttcgcctgcatcaagagaagtgacggctcctgtgcgtggtaccgcggcgcggcgccccccaagcaggagtttctcgacatcgaggacccataagcaggcctccaacgcccctgtggccaactgcaaaaaaagcctccaagggtttcgactggtccagctctgacatcccttcctggaaacagcatgaataaaacactcatcccatgggtccaaattaatatgattctgctccccccttctccttttagacatggttgtgggtctggagggagacgtgggtccaaggtcctcatcccatcctccctctgccaggcactatgtgtctggggcttcgatccttgggtgcaggcagggctgggacacgcggcttccctcccagtccctgccttggcaccgtcacagatgccaagcaggcagcacttagggatctcccagctgggttagggcagggcctggaaatgtgcattttgcagaaacttttgagggtcgttgcaagactgtgtagcaggcctaccaggtccctttcatcttgagagggacatggcccttgttttctgcagcttccacgcctctgcactccctgcccctggcaagtgctcccatcgccccggtgcccaccatgagctcccagcacctgactccccccacatccaagggcagcctggaaccagtggctagttcttgaaggagccccatcaatcctattaatcctcagaattccagtgggagcctccctctgagccttgtagaaatgggagcgagaaaccccagctgagctgcgttccagcctcagctgagtctttttggtctgcacccacccccccaccccccccccccgcccacatgctccccagcttgcaggaggaatcggtgaggtcctgtcctgaggctgctgtccggggccggtggctgccctcaaggtcccttccctagctgctgcggttgccattgcttcttgcctgttctggcatcaggcacctggattgagttgcacagctttgctttatccgggcttgtgtgcagggcccggctgggctccccatctgcacatcctgaggacagaaaaagctgggtcttgctgtgccctcccaggcttagtgttccctccctcaaagactgacagccatcgttctgcacggggctttctgcatgtgacgccagctaagcatagtaagaagtccagcctaggaagggaaggattttggaggtaggtggctttggtgacacactcacttctttctcagcctccaggacactatggcctgttttaagagacatcttatttttctaaaggtgaattctcagatgataggtgaacctgagttgcagatataccaacttctgcttgtatttcttaaatgacaaagattacctagctaagaaacttcctagggaactagggaacctatgtgttccctcagtgtggtttcctgaagccagtgatatgggggttaggataggaagaactttctcggtaatgataaggagaatctcttgtttcctcccacctgtgttgtaaagataaactgacgatatacaggcacattatgtaaacatacacacgcaatgaaaccgaagcttggcggcctgggcgtggtcttgcaaaatgcttccaaagccaccttagcctgttctattcagcggctagttcttgaaggagccccatcaatcctattaatcctcagaattccagtgggagcctccctctgagccttgtagaaatgggagcgagaaaccccagctgagctgcgttccagcctcagctgagtctttttggtctgcacccatgtcaagaggcgagctcctgttcacccaggccatcatgttgtcactatcgcaccaaccattcgccgtagccggagtaaatcccctgagcttcgcacgtctgatgtttcatacgctctaacaccttgaccctcgatctcttcttcgcttcttggcactctctaatctacctctaatcgctctcacaaaccttcgatcatattcactccataggctctcacacctacatccgccccacacaaataaaatcacacataacccctaacacacgcacaccacaataatacacttatctcactaacatcttatactaacctacccctacttcaatctcatcaaatataacacccacagcaacaccgaaacaccatacactccacgcaacaacatatcttatctccgcatcaacaaagacacaaatgccaacaacccaacaccctaacactaataaaatacttataccaaatgtatacataccactctactcaaccaaccagatctcactccacacaccctctctccatactccactcatataaactccactacaacatccatcctaccaactatcacataata

SEQ ID NO: 736183 - DNA, 2246 bp, Homo sapiens
cccatggcaacagcctgctatgagtagccagccagggcagaggccgggctgcaggtggaggcggggaagcgattccggccacctttgtgatgggcgtctcactacctacaaagtcagcccaatgatttcaagacagccctggagacagtgcttcctgccctcctgtcagcttctgcctccctgtaatgtgttctgggtggtctagctcagtcatctggagacacacacatgatcagggccaaagcggtcagtgagaaggaagtggactctggaaacgacatttatggcaaccctatcaagaggatccagtatgagatcaagcagataaagatgttcaaagggcctgagaaggatatagagtttatctacacggccccctcctcggcagtgtgtggggtctcgctggacgttggaggaaagaaggaatatctcattgcaggaaaggccgagggggacggcaagatgcacatcaccctctgtgacttcatcgtgccctgggacaccctgagcaccacccagaagaagagcctgaaccacaggtaccagatgggctgcgagtgcaagatcacgcgctgccccatgatcccgtgctacatctcctccccggacgagtgcctctggatggactgggtcacagagaagaacatcaacgggcaccaggccaagttcttcgcctgcatcaagagaagtgacggctcctgtgcgtggtaccgcggcgcggcgccccccaagcaggagtttctcgacatcgaggacccataagcaggcctccaacgcccctgtggccaactgcaaaaaaagcctccaagggtttcgactggtccagctctgacatcccttcctggaaacagcatgaataaaacactcatcccatgggtccaaattaatatgattctgctccccccttctccttttagacatggttgtgggtctggagggagacgtgggtccaaggtcctcatcccatcctccctctgccaggcactatgtgtctggggcttcgatccttgggtgcaggcagggctgggacacgcggcttccctcccagtccctgccttggcaccgtcacagatgccaagcaggcagcacttagggatctcccagctgggttagggcagggcctggaaatgtgcattttgcagaaacttttgagggtcgttgcaagactgtgtagcaggcctaccaggtccctttcatcttgagagggacatggcccttgttttctgcagcttccacgcctctgcactccctgcccctggcaagtgctcccatcgccccggtgcccaccatgagctcccagcacctgactccccccacatccaagggcagcctggaaccagtggctagttcttgaaggagccccatcaatcctattaatcctcagaattccagtgggagcctccctctgagccttgtagaaatgggagcgagaaaccccagctgagctgcgttccagcctcagctgagtctttttggtctgcacccacccccccaccccccccccccgcccacatgctccccagcttgcaggaggaatcggtgaggtcctgtcctgaggctgctgtccggggccggtggctgccctcaaggtcccttccctagctgctgcggttgccattgcttcttgcctgttctggcatcaggcacctggattgagttgcacagctttgctttatccgggcttgtgtgcagggcccggctgggctccccatctgcacatcctgaggacagaaaaagctgggtcttgctgtgccctcccaggcttagtgttccctccctcaaagactgacagccatcgttctgcacggggctttctgcatgtgacgccagctaagcatagtaagaagtccagcctaggaagggaaggattttggaggtaggtggctttggtgacacactcacttctttctcagcctccaggacactatggcctgttttaagagacatcttatttttctaaaggtgaattctcagatgataggtgaacctgagttgcagatataccaacttctgcttgtatttcttaaatgacaaagattacctagctaagaaacttcctagggaactagggaacctatgtgttccctcagtgtggtttcctgaagccagtgatatgggggttaggataggaagaactttctcggtaatgagtaggtcgtagcggaatcgggggtatgatgttcgaattcataagaacaggaaggttaaaagtagggtcttggtgacaaaatatgtagtgtagagtt

SEQ ID NO: 736184 - DNA, 2155 bp, Homo sapiens
cccatggcaacagcctgctatgagtagccagccagggcagaggccgggctgcaggtggaggcggggaagcgattccggccacctttgtgatgggcgtctcactacctacaaagtcagcccaatgatttcaagacagccctggagacagtgcttcctgccctcctgtcagcttctgcctccctgtaatgtgttctgggtggtctagctcagtcatctggagacacacacatgatcagggccaaagcggtcagtgagaaggaagtggactctggaaacgacatttatggcaaccctatcaagaggatccagtatgagatcaagcagataaagatgttcaaagggcctgagaaggatatagagtttatctacacggccccctcctcggcagtgtgtggggtctcgctggacgttggaggaaagaaggaatatctcattgcaggaaaggccgagggggacggcaagatgcacatcaccctctgtgacttcatcgtgccctgggacaccctgagcaccacccagaagaagagcctgaaccacaggtaccagatgggctgcgagtgcaagatcacgcgctgccccatgatcccgtgctacatctcctccccggacgagtgcctctggatggactgggtcacagagaagaacatcaacgggcaccaggccaagttcttcgcctgcatcaagagaagtgacggctcctgtgcgtggtaccgcggcgcggcgccccccaagcaggagtttctcgacatcgaggacccataagcaggcctccaacgcccctgtggccaactgcaaaaaaagcctccaagggtttcgactggtccagctctgacatcccttcctggaaacagcatgaataaaacactcatcccatgggtccaaattaatatgattctgctccccccttctccttttagacatggttgtgggtctggagggagacgtgggtccaaggtcctcatcccatcctccctctgccaggcactatgtgtctggggcttcgatccttgggtgcaggcagggctgggacacgcggcttccctcccagtccctgccttggcaccgtcacagatgccaagcaggcagcacttagggatctcccagctgggttagggcagggcctggaaatgtgcattttgcagaaacttttgagggtcgttgcaagactgtgtagcaggcctaccaggtccctttcatcttgagagggacatggcccttgttttctgcagcttccacgcctctgcactccctgcccctggcaagtgctcccatcgccccggtgcccaccatgagctcccagcacctgactccccccacatccaagggcagcctggaaccagtggctagttcttgaaggagccccatcaatcctattaatcctcagaattccagtgggagcctccctctgagccttgtagaaatgggagcgagaaaccccagctgagctgcgttccagcctcagctgagtctttttggtctgcacccacccccccaccccccccccccgcccacatgctccccagcttgcaggaggaatcggtgaggtcctgtcctgaggctgctgtccggggccggtggctgccctcaaggtcccttccctagctgctgcggttgccattgcttcttgcctgttctggcatcaggcacctggattgagttgcacagctttgctttatccgggcttgtgtgcagggcccggctgggctccccatctgcacatcctgaggacagaaaaagctgggtcttgctgtgccctcccaggcttagtgttccctccctcaaagactgacagccatcgttctgcacggggctttctgcatgtgacgccagctaagcatagtaagaagtccagcctaggaagggaaggattttggaggtaggtggctttggtgacacactcacttctttctcagcctccaggacactatggcctgttttaagagacatcttatttttctaaaggtgaattctcagatgataggtgaacctgagttgcagatataccaacttctgcttgtatttcttaaatgacaaagattacctagctaagaaacttcctagggaactagggaacctatgtgttccctcagtgtggtttcctgaagccacggtcaacccacaagccacggcaacccacaagccacggtcaacccac

SEQ ID NO: 736185 - DNA, 1860 bp, Homo sapiens
cccatggcaacagcctgctatgagtagccagccagggcagaggccgggctgcaggtggaggcggggaagcgattccggccacctttgtgatgggcgtctcactacctacaaagtcagcccaatgatttcaagacagccctggagacagtgcttcctgccctcctgtcagcttctgcctccctgtaatgtgttctgggtggtctagctcagtcatctggagacacacacatgatcagggccaaagcggtcagtgagaaggaagtggactctggaaacgacatttatggcaaccctatcaagaggatccagtatgagatcaagcagataaagatgttcaaagggcctgagaaggatatagagtttatctacacggccccctcctcggcagtgtgtggggtctcgctggacgttggaggaaagaaggaatatctcattgcaggaaaggccgagggggacggcaagatgcacatcaccctctgtgacttcatcgtgccctgggacaccctgagcaccacccagaagaagagcctgaaccacaggtaccagatgggctgcgagtgcaagatcacgcgctgccccatgatcccgtgctacatctcctccccggacgagtgcctctggatggactgggtcacagagaagaacatcaacgggcaccaggccaagttcttcgcctgcatcaagagaagtgacggctcctgtgcgtggtaccgcggcgcggcgccccccaagcaggagtttctcgacatcgaggacccataagcaggcctccaacgcccctgtggccaactgcaaaaaaagcctccaagggtttcgactggtccagctctgacatcccttcctggaaacagcatgaataaaacactcatcccatgggtccaaattaatatgattctgctccccccttctccttttagacatggttgtgggtctggagggagacgtgggtccaaggtcctcatcccatcctccctctgccaggcactatgtgtctggggcttcgatccttgggtgcaggcagggctgggacacgcggcttccctcccagtccctgccttggcaccgtcacagatgccaagcaggcagcacttagggatctcccagctgggttagggcagggcctggaaatgtgcattttgcagaaacttttgagggtcgttgcaagactgtgtagcaggcctaccaggtccctttcatcttgagagggacatggcccttgttttctgcagcttccacgcctctgcactccctgcccctggcaagtgctcccatcgccccggtgcccaccatgagctcccagcacctgactccccccacatccaagggcagcctggaaccagtggctagttcttgaaggagccccatcaatcctattaatcctcagaattccagtgggagcctccctctgagccttgtagaaatgggagcgagaaaccccagctgagctgcgttccagcctcagctgagtctttttggtctgcacccacccccccaccccccccccccgcccacatgctccccagcttgcaggaggaatcggtgaggtcctgtcctgaggctgctgtccggggccggtggctgccctcaaggtcccttccctagctgctgcggttgccattgcttcttgcctgttctggcatcaggcacctggattgagttgcacagctttgctttatccgggcttgtgtgcagggcccggctgggctccccatctgcacatcctgaggacagaaaaagctgggtcttgctgtgccctcccaggcttagtgttccctccctccaaaatccttcccttcctaggctggacttcttactatgcttagctggcgtcacatgcagaaagccccgtgcagagatggc

SEQ ID NO: 736186 - DNA, 1535 bp, Homo sapiens
cccatggcaacagcctgctatgagtagccagccagggcagaggccgggctgcaggtggaggcggggaagcgattccggccacctttgtgatgggcgtctcactacctacaaagtcagcccaatgatttcaagacagccctggagacagtgcttcctgccctcctgtcagcttctgcctccctgtaatgtgttctgggtggtctagctcagtcatctggagacacacacatgatcagggccaaagcggtcagtgagaaggaagtggactctggaaacgacatttatggcaaccctatcaagaggatccagtatgagatcaagcagataaagatgttcaaagggcctgagaaggatatagagtttatctacacggccccctcctcggcagtgtgtggggtctcgctggacgttggaggaaagaaggaatatctcattgcaggaaaggccgagggggacggcaagatgcacatcaccctctgtgacttcatcgtgccctgggacaccctgagcaccacccagaagaagagcctgaaccacaggtaccagatgggctgcgagtgcaagatcacgcgctgccccatgatcccgtgctacatctcctccccggacgagtgcctctggatggactgggtcacagagaagaacatcaacgggcaccaggccaagttcttcgcctgcatcaagagaagtgacggctcctgtgcgtggtaccgcggcgcggcgccccccaagcaggagtttctcgacatcgaggacccataagcaggcctccaacgcccctgtggccaactgcaaaaaaagcctccaagggtttcgactggtccagctctgacatcccttcctggaaacagcatgaataaaacactcatcccatgggtccaaattaatatgattctgctccccccttctccttttagacatggttgtgggtctggagggagacgtgggtccaaggtcctcatcccatcctccctctgccaggcactatgtgtctggggcttcgatccttgggtgcaggcagggctgggacacgcggcttccctcccagtccctgccttggcaccgtcacagatgccaagcaggcagcacttagggatctcccagctgggttagggcagggcctggaaatgtgcattttgcagaaacttttgagggtcgttgcaagactgtgtagcaggcctaccaggtccctttcatcttgagagggacatggcccttgttttctgcagcttccacgcctctgcactccctgcccctggcaagtgctcccatcgccccggtgcccaccatgagctcccagcacctgactccccccacatccaagggcagcctggaaccagtggctagttcttgaaggagccccatcaatcctattaatcctcagaattccagtgggagcctccctctgagccttgtagaaatgggagcgagaaaccccagctgagctgcgttccagcctcagctgagtctttttggtctgcacccaccccccacagagcgagctcgggatcctctagatcaccatcagcacacca

SEQ ID NO: 736187 - DNA, 858 bp, Homo sapiens
cccatggcaacagcctgctatgagtagccagccagggcagaggccgggctgcaggtggaggcggggaagcgattccggccacctttgtgatgggcgtctcactacctacaaagtcagcccaatgatttcaagacagccctggagacagtgcttcctgccctcctgtcagcttctgcctccctgtaatgtgttctgggtggtctagctcagtcatctggagacacacacatgatcagggccaaagcggtcagtgagaaggaagtggactctggaaacgacatttatggcaaccctatcaagaggatccagtatgagatcaagcagataaagatgttcaaagggcctgagaaggatatagagtttatctacacggccccctcctcggcagtgtgtggggtctcgctggacgttggaggaaagaaggaatatctcattgcaggaaaggccgagggggacggcaagatgcacatcaccctctgtgacttcatcgtgccctgggacaccctgagcaccacccagaagaagagcctgaaccacaggtaccagatgggctgcgagtgcaagatcacgcgctgccccatgatcccgtgctacatctcctccccggacgagtgcctctggatggactgggtcacagagaagaacatcaacgggcaccaggccaagttcttcgcctgcatcaagagaagtgacggctcctgtgcgtggtaccgcggcgcggcgccccccaagcaggagtttctcgacatcgaggacccataagcaggcctccaacgcccctgtggccaactgcaaaaaaagccttttaacacatgaacagctactgacatacccatcctgaagacggactgggtacca

SEQ ID NO: 736188 - DNA, 3756 bp, Homo sapiens
  misc_feature (3660)..(3660): n is a, c, g, or t
  misc_feature (3662)..(3663): n is a, c, g, or t
  misc_feature (3678)..(3678): n is a, c, g, or t
  misc_feature (3688)..(3688): n is a, c, g, or t
  misc_feature (3693)..(3693): n is a, c, g, or t
  misc_feature (3702)..(3702): n is a, c, g, or t
  misc_feature (3719)..(3719): n is a, c, g, or t
  misc_feature (3722)..(3722): n is a, c, g, or t
  misc_feature (3728)..(3728): n is a, c, g, or t
  misc_feature (3756)..(3756): n is a, c, g, or t
cccatggcaacagcctgctatgagtagccagccagggcagaggccgggctgcaggtggaggcggggaagcgattccggccacctttgtgatgggcgtctcactacctacaaagtcagcccaatgatttcaagacagccctggagacagtgcttcctgccctcctgtcagcttctgcctccctgtaatgtgttctgggtggtctagctcagtcatctggagacacacacatgatcagggccaaagcggtcagtgagaaggaagtggactctggaaacgacatttatggcaaccctatcaagaggatccagtatgagatcaagcagataaagatgttcaaagggcctgagaaggatatagagtttatctacacggccccctcctcggcagtgtgtggggtctcgctggacgttggaggaaagaaggaatatctcattgcagatgcacatcaccctctgtgacttcatcgtgccctgggacaccctgagcaccacccagaagaagagcctgaaccacaggtaccagatgggctgcgagtgcaagatcacgcgctgccccatgatcccgtgctacatctcctccccggacgagtgcctctggatggactgggtcacagagaagaacatcaacgggcaccaggccaagttcttcgcctgcatcaagagaagtgacggctcctgtgcgtggtaccgcggcgcggcgccccccaagcaggagtttctcgacatcgaggacccataagcaggcctccaacgcccctgtggccaactgcaaaaaaagcctccaagggtttcgactggtccagctctgacatcccttcctggaaacagcatgaataaaacactcatcccatgggtccaaattaatatgattctgctccccccttctccttttagacatggttgtgggtctggagggagacgtgggtccaaggtcctcatcccatcctccctctgccaggcactatgtgtctggggcttcgatccttgggtgcaggcagggctgggacacgcggcttccctcccagtccctgccttggcaccgtcacagatgccaagcaggcagcacttagggatctcccagctgggttagggcagggcctggaaatgtgcattttgcagaaacttttgagggtcgttgcaagactgtgtagcaggcctaccaggtccctttcatcttgagagggacatggcccttgttttctgcagcttccacgcctctgcactccctgcccctggcaagtgctcccatcgccccggtgcccaccatgagctcccagcacctgactccccccacatccaagggcagcctggaaccagtggctagttcttgaaggagccccatcaatcctattaatcctcagaattccagtgggagcctccctctgagccttgtagaaatgggagcgagaaaccccagctgagctgcgttccagcctcagctgagtctttttggtctgcacccacccccccaccccccccccccgcccacatgctccccagcttgcaggaggaatcggtgaggtcctgtcctgaggctgctgtccggggccggtggctgccctcaaggtcccttccctagctgctgcggttgccattgcttcttgcctgttctggcatcaggcacctggattgagttgcacagctttgctttatccgggcttgtgtgcagggcccggctgggctccccatctgcacatcctgaggacagaaaaagctgggtcttgctgtgccctcccaggcttagtgttccctccctcaaagactgacagccatcgttctgcacggggctttctgcatgtgacgccagctaagcatagtaagaagtccagcctaggaagggaaggattttggaggtaggtggctttggtgacacactcacttctttctcagcctccaggacactatggcctgttttaagagacatcttatttttctaaaggtgaattctcagatgataggtgaacctgagttgcagatataccaacttctgcttgtatttcttaaatgacaaagattacctagctaagaaacttcctagggaactagggaacctatgtgttccctcagtgtggtttcctgaagccagtgatatgggggttaggataggaagaactttctcggtaatgataaggagaatctcttgtttcctcccacctgtgttgtaaagataaactgacgatatacaggcacattatgtaaacatacacacgcaatgaaaccgaagcttggcggcctgggcgtggtcttgcaaaatgcttccaaagccaccttagcctgttctattcagcggcaaccccaaagcacctgttaagactcctgacccccaagtggcatgcagcccccatgcccaccgggacctggtcagcacagatcttgatgacttccctttctagggcagactgggagggtatccaggaatcggcccctgccccacgggcgttttcatgctgtacagtgacctaaagttggtaagatgtcataatggaccagtccatgtgatttcagtatatacaactccaccagacccctccaacccatataacaccccacccctgttcgcttcctgtatggtgatatcatatgtaacatttactcctgtttctgctgattgtttttttaatgttttggtttgtttttgacatcagctgtaatcattcctgtgctgtgttttttattacccttggtaggtattagacttgcacttttttaaaaaaaggtttctgcatcgtggaagcatttgacccagagtggaacgcgtggcctatgcaggtggattccttcaggtctttcctttggttctttgagcatctttgctttcattcgtctcccgtctttggttctccagttcaaattattgcaaagtaaaggatctttgagtaggttcggtctgaaaggtgtggcctttatatttgatccacacacgttggtcttttaaccgtgctgagcagaaaacaaaacaggttaagaagagccgggtggcagctgacagaggaagccgctcaaataccttcacaataaatagtggcaatatatatatagtttaagaaggctctccatttggcatcgtttaatttatatgttatgttctaagcacagctctcttctcctattttcatcctgcaagcaactcaaaatatttaaaataaagtttacattgtagttattttcaaatctttgcttgataagtattaagaaatattggacttgctgccgtaatttaaagctctgttgattttgtttccgtttggatttttgggggaggggagcactgtgtttatgctggaatatgaagtctgagaccttccggtgctgggaacacacaagagttgttgaaagttgacaagcagactgcgcatgtctctgatgctttgtatcattcttgagcaatcgctcggtccgtggacaataaacagtattatcaaagagaaaaaaaaaaaaaaaaaaaaaaaaaaaaaaactgtggtgcggcgcggccctgggcccctcgaaaaaagtttttaaaaccaatcgcgtgtggggcggcgcggggcgcccaagagggtaaggggagaacgtggcgccaaaagcgtggtcccaagagagaaacccggggccaaagacaaagggcgcgggggtttccacccacaataaaaaaaaacgccgcggggggaacaccgcgcngnnctggaacaatcccanagggggccgngggcnatccgggcntacaccggggtccaagnggncgatanaatagccgcccgagagagaaaaaaacgn

SEQ ID NO: 736189 - DNA, 1294 bp, Homo sapiens
cgcgcagaccgagcagactgccgcagcgactcatcctatcgataaggttcagttagccaaggtggaggatgggaaaagaatggaactgtcccagctactcaatgagatcagggcaaactatgaaaagatcctcaccagaaatcagatagagacggtgctctcaacaaggatccaggtaatgatttcatacagacaggcaccttccagaataaggagacagtccatgtctacccaattcctgtcccggcctctctgagctagaagaagacataagcaaaaaaatggacaaagatgaagaggctttgaaggcagctcaagcagaactcaaggaggcccgacgccagtggcaccacctgcaagtggaaattgaatctctccatgctgtggaaaggggccttgaaaactccctacatgccagcgagcagcattaccagatgcagctgcaagacctagagactgtgattgaaggactagaaaaagagctacaggaagtaaggcgcggcatcgaaaagcagcttcaagagcacgagatgcttctcaacacgaagatgaggctggaacaagaaatagcaacttatcgccacctcctagaaaaagaagaaatcagatattatggttgtatccaaggtgggaaaaaagacaaaaagcctaccacaagtagagttggttttgttttaccatcagccattataaatgaaatatcttttactacaaaagtcccacaaaagtatgagaatgaaaatgtagaaacagtaaccaaacaggcaatcttaaatgggagtatcgttaaggagagcactgaagctcatggcactattcagacagagaaagtggatgaagttattaaagaatgggaaggttctttctttaaagataaccctcgattgaggaaaaagtctgtttctcttcgatttgatcttcatttagcagccactgatgaagggtgtttagagactaagcaggataatctaccagatatagaagtcaggcttatcatgagaagatcatgcagtattccctctatcaaacctccatcaacagctaattaatccaaagatagtatttgacttgattggaaaatgttaggatggaccaaggtgggccataccaactccctctgtcccaaaatgtaagttattacgtatgtatggaaaatgttatgatcaatatgtggttctcttcagaagaaaaaaacaataaaggacatttctctgaatctaattatggagatagacatatatatatatatatgaatgagagggagtagcttaaaaataaaatcacaaatccagta

SEQ ID NO: 736190 - DNA, 1212 bp, Homo sapiens
cgcgcagaccgagcagactgccgcagcgactcatcctatcgataaggttcagttagccaaggtggaggatgggaaaagaatggaactgtcccagctactcaatgagatcagggcaaactatgaaaagatcctcaccagaaatcagatagagacggtgctctcaacaaggatccagctagaagaagacataagcaaaaaaatggacaaagatgaagaggctttgaaggcagctcaagcagaactcaaggaggcccgacgccagtggcaccacctgcaagtggaaattgaatctctccatgctgtggaaaggggccttgaaaactccctacatgccagcgagcagcattaccagatgcagctgcaagacctagagactgtgattgaaggactagaaaaagagctacaggaagtaaggcgcggcatcgaaaagcagcttcaagagcacgagatgcttctcaacacgaagatgaggctggaacaagaaatagcaacttatcgccacctcctagaaaaagaagaaatcagatattatggttgtatccaaggtgggaaaaaagacaaaaagcctaccacaagtagagttggttttgttttaccatcagccattataaatgaaatatcttttactacaaaagtcccacaaaagtatgagaatgaaaatgtagaaacagtaaccaaacaggcaatcttaaatgggagtatcgttaaggagagcactgaagctcatggcactattcagacagagaaagtggatgaagttattaaagaatgggaaggttctttctttaaagataaccctcgattgaggaaaaagtctgtttctcttcgatttgatcttcatttagcagccactgatgaagggtgtttagagactaagcaggataatctaccagatatagaagtcaggcttatcatgagaagatcatgcagtattccctctatcaaacctccatcaacagctaattaatccaaagatagtatttgacttgattggaaaatgttaggatggaccaaggtgggccataccaactccctctgtcccaaaatgtaagttattacgtatgtatggaaaatgttatgatcaatatgtggttctcttcagaagaaaaaaacaataaaggacatttctctgaatctaattatggagatagacatatatatatatatatgaatgagagggagtagcttaaaaataaaatcacaaatccagta

SEQ ID NO: 736191 - DNA, 2279 bp, Homo sapiens
cacctcatgctttaatataaaggggaggaaccggaatcacgatccccaccaacggcccggaattttgggttgcctgtgggcctggcacccacttcggtggtgagctcggccagtgtgtgtcatgtatgccaggaacataccaggacatggaaggccagctcagttgcacaccgtgccccagcagcgacgggcttggtctgcctggtgcccgcaacgtgtcggaatgtggaggccagtgttctccaggcttcttctcggccgatggcttcaagccctgccaggcctgccccgtgggcacgtaccagcctgagcccgggcgcaccggctgcttcccctgtggagggggtttgctcaccaaacacgaaggcaccacctccttccaggactgcgaggctaaagtgcactgctcccccggccaccactacaacaccaccacccaccgctgcatccgctgccccgtcggcacctaccagcccgagtttggccagaaccactgcatcacctgtccgggcaacaccagcacagacttcgatggctccaccaacgtcacacactgcaaaaaccagcactgcggcggcgagcttggtgactacaccggctacatcgagtcccccaactaccctggcgactacccagccaacgctgaatgcgtctggcacatcgcgcctcccccaaagcgcaggatcctcatcgtggtccctgagatcttcctgcccatcgaggatgagtgcggcgatgttctggtcatgaggaagagtgcctctcccacgtccatcaccacctatgagacctgccagacctacgagaggcccatcgccttcacctcccgctcccgcaagctctggatccagttcaaatccaatgaaggcaacagcggcaaaggcttccaagtgccctatgtcacctacgatgaggactaccagcaactcatagaggacatcgtgcgcgatgggcgcctgtacgcctcggagaaccaccaggaaattttgaaagacaagaagctgatcaaggccctcttcgacgtgctggcgcatccccagaactacttcaagtacacagcccaggaatccaaggagatgttcccacggtccttcatcaaactgctgcgctccaaagtgtctcggttcctgcggccctacaaataaccggggggagcggccctgcctgggggtggcctggtccgcggagggtgcacctgccctccacagtgggagctgcatgggcctccacaccaccttgggaaccccatggcactgcccttcagggaagccgaccagcccatggagaccgagcccaggcacccttcggacccgctgcccctgtgggagcaccctgcttcaggaagcctccctccctccctctgcctcccttccccaggacaccaagagcgccctctcctgagccctggcagaccgactgcaggtagcaggattgcaggaccctctgcctggcctggcgtttcaggagagaggggaagtggggcctgtgctctgggaggcgtggtcatccgagacaggagtccaggggagagaggaggggacaaaggcgccgtctgggggaggtcgatgagcctgtgctggcatccgcgggccccacgctttgccaactcctccagccacaggcaaggccacggctccgggctgttgcgctctaagggttctgtgattggatggaacagagctgctggggaggagactggaagtttctgcattccttcaacagaacatttaatgaagtactctatatatatatataaatatatatataaatatatatatatacttctatttgtgggtactttaggaaaatgccctttggtcactgtaaatatgaattgtgaccccatcccttcccgcatgagcccagtgagtcccagcagctatcagcctccctgaacgattaaacagctcctcccagcatttgcatttgcccttctgtttctgtgaggccggcagcccttggggctggggagagcacagcttgccttggacttgcttctgaacacgaattcttcgagaactaggctcagatgctctgctggagtgttggcctcaccccagtccccttgccagcaacatcactgcccttggacgagactcagtggaagacacttcccctcggacccgttcccaggaggtgcaggggcccagcaataaacggcgaaaggggccttggctcttgccctgtggcagtgaccttggggtccgtactatgcccaggtgtcagcaggaaacaaggccttgctcacaggagcacaggctgtaccaccacaaggagcc

SEQ ID NO: 736192 - DNA, 1005 bp, Homo sapiens
tctttccacggaaggggaaagccagtggcttctgtccaaggaaactgaggtctctgtctctttccctccccagagacgtgcgcagtcaataacggaggctgcgaccggacatgcaaggacacagccactggcgtgcgatgcagctgccccgttggattcacactgcagccggacgggaagacatgcaaaggtcagcatgtggagctgtgtgggtgcccctgcctgtactggcctggccaagagcctccgtgtgcttgcatagccgggcccagggctgggctgaacgggggccacgtgtagctgtgggaaaggacacgtggcaatcatttgctttgctgttggagaggccaggaagagggagggctggccagcagcagggtccccagcagagttcgagagaacacaggtcccacggcacatcagcaggttccttctgtacagagcggtgccagtgacactggacagggcccttcaggtacctggctcagcaaccatgcccaggacgggctctgcagatgctggaatctgcgtctggcaggtctgctgagacgtggctggtgaccaacaagagctgatcttcccattgtcctccttggaagggcctcttccgctacctcctttttgcttcttttgaagcctcttgaaccaggtgctttccctctctaagcctcagtctactcctcaaacagaggcaaaaacacctactttttgaaaaaagtttcttgagcgctgaccaagcaccggcaccgtggaagtgttttttcacctagtcctcgtgatatccttcaaaatgggtgcacttcctgtcctcgctctgcaagcaggagaccaaggctcaggggtccgggagcttgccgaggtcaccagaagtggtgcctgcctgctccagcctccctgctggccaggcggcctccctgaacctgcagaagagaggacatgggagagtcgctgtccctgctttcttgccgggcacagcagccatcagttcctctctactcaatgtct

SEQ ID NO: 736193 - DNA, 3693 bp, Homo sapiens
atgaacaaagaccatggctgtgcccacatctgccgggagacgcccaaaggtggggtggcctgcgactgcaggcccggctttgaccttgcccaaaaccagaaggactgcacactaacctgtaattatggaaacggaggctgccagcacagctgtgaggacacagacacaggccccacgtgtggttgccaccagaagtacgccctccactcagacggtcgcacgtgcatcgagaaggatgaggctgcaattgagcgctctcagttcaatgccacgtcagtagctgatgtggacaagcgggtgaaacggcggctactcatggagacgtgcgcagtcaataacggaggctgcgaccggacatgcaaggacacagccactggcgtgcgatgcagctgccccgttggattcacactgcagccggacgggaagacatgcaaagacatcaacgagtgcctggtcaacaacggaggctgcgaccacttctgccgcaacaccgtgggcagcttcgagtgcggctgccggaagggctacaagctgctcaccgacgagcgcacctgccaggacatcgacgagtgctccttcgagcggacctgtgaccacatctgcatcaactccccgggcagcttccagtgcctgtgtcaccgcggctacatcctctacgggacaacccactgcggagatgtggacgagtgcagcatgagcaacgggagctgtgaccagggctgcgtcaacaccaagggcagctacgagtgcgtctgtcccccggggaggcggctccactggaacgggaaggattgcgtggagacaggcaagtgtctttctcgcgccaagacctccccccgggcccagctgtcctgcagcaaggcaggcggtgtggagagctgcttcctttcctgcccggctcacacactcttcgtgccagactcggaaaatagctacgtcctgagctgcggagttccagggccgcagggcaaggcgctgcagaaacgcaacggcaccagctctggcctcgggcccagctgctcagatgcccccaccacccccatcaaacagaaggcccgcttcaagatccgagatgccaagtgccacctccggccccacagccaggcacgagcaaaggagaccgccaggcagccgctgctggaccactgccatgtgactttcgtgaccctcaagtgtgactcctccaagaagaggcgccgtggccgcaagtccccatccaaggaggtgtcccacatcacagcagagtttgagatcgagacaaagatggaagaggcctcagacacatgcgaagcggactgcttgcggaagcgagcagaacagagcctgcaggccgccatcaagaccctgcgcaagtccatcggccggcagcagttctatgtccaggtctcaggcactgagtacgaggtagcccagaggccagccaaggcgctggaggggcagggggcatgtggcgcaggccaggtgctacaggacagcaaatgcgttgcctgtgggcctggcacccacttcggtggtgagctcggccagtgtgtgtcatgtatgccaggaacataccaggacatggaaggccagctcagttgcacaccgtgccccagcagcgacgggcttggtctgcctggtgcccgcaacgtgtcggaatgtggaggccagtgttctccaggcttcttctcggccgatggcttcaagccctgccaggcctgccccgtgggcacgtaccagcctgagcccgggcgcaccggctgcttcccctgtggagggggtttgctcaccaaacacgaaggcaccacctccttccaggactgcgaggctaaagtgcactgctcccccggccaccactacaacaccaccacccaccgctgcatccgctgccccgtcggcacctaccagcccgagtttggccagaaccactgcatcacctgtccgggcaacaccagcacagacttcgatggctccaccaacgtcacacactgcaaaaaccagcactgcggcggcgagcttggtgactacaccggctacatcgagtcccccaactaccctggcgactacccagccaacgctgaatgcgtctggcacatcgcgcctcccccaaagcgcaggatcctcatcgtggtccctgagatcttcctgcccatcgaggatgagtgcggcgatgttctggtcatgaggaagagtgcctctcccacgtccatcaccacctatgagacctgccagacctacgagaggcccatcgccttcacctcccgctcccgcaagctctggatccagttcaaatccaatgaaggcaacagcggcaaaggcttccaagtgccctatgtcacctacgatgaggactaccagcaactcatagaggacatcgtgcgcgatgggcgcctgtacgcctcggagaaccaccaggaaattttgaaagacaagaagctgatcaaggccctcttcgacgtgctggcgcatccccagaactacttcaagtacacagcccaggaatccaaggagatgttcccacggtccttcatcaaactgctgcgctccaaagtgtctcggttcctgcggccctacaaataaccggggggagcggccctgcctgggggtggcctggtccgcggagggtgcacctgccctccacagtgggagctgcatgggcctccacaccaccttgggaaccccatggcactgcccttcagggaagccgaccagcccatggagaccgagcccaggcacccttcggacccgctgcccctgtgggagcaccctgcttcaggaagcctccctccctccctctgcctcccttccccaggacaccaagagcgccctctcctgagccctggcagaccgactgcaggtagcaggattgcaggaccctctgcctggcctggcgtttcaggagagaggggaagtggggcctgtgctctgggaggcgtggtcatccgagacaggagtccaggggagagaggaggggacaaaggcgccgtctgggggaggtcgatgagcctgtgctggcatccgcgggccccacgctttgccaactcctccagccacaggcaaggccacggctccgggctgttgcgctctaagggttctgtgattggatggaacagagctgctggggaggagactggaagtttctgcattccttcaacagaacatttaatgaagtactctatatatatatataaatatatatataaatatatatatatacttctatttgtgggtactttaggaaaatgccctttggtcactgtaaatatgaattgtgaccccatcccttcccgcatgagcccagtgagtcccagcagctatcagcctccctgaacgattaaacagctcctcccagcatttgcatttgcccttctgtttctgtgaggccggcagcccttggggctggggagagcacagcttgccttggacttgcttctgaacacgaattcttcgagaactaggctcagatgctctgctggagtgttggcctcaccccagtccccttgccagcaacatcactgcccttggacgagactcagtggaagacacttcccctcggacccgttcccaggaggtgcaggggcccagcaataaacggcgaaaggggccttggctcttgccctgtggcagtgaccttggggtccgtactatgcccaggtgtcagcaggaaacaaggccttgctcacaggagcacaggctgtaccaccacaaggagcc

SEQ ID NO: 736194 - DNA, 737 bp, Homo sapiens; identical to SEQ ID NO: 224208

SEQ ID NO: 736195 - DNA, 1866 bp, Homo sapiens
aaagccttgagagagcgttttcaaggatcaggagagggcttagaaagaaaaggactctgagtggggctgcatgaaaagggggtaagtgaggactcttggggagggtctgaaaaaaacaagtagtttggcaaggagagcagaaaaataaaattccactgtgtaggcatttggagatttagcaagagcaacctagagtctgcccccagagacactgcacgttgtttctgacacagaggatgcactaattctatttcctgtgccacctgaaaaaatcataatttgagaagagaaactgttaggccatttctagtgaactatttttccaaaccctcacggaaccctgaacagggtgtgaatgagatcacaactactgctgctgctggttcagcctctctgtccactaataaaggcaaacccttcagcatggtcatatcctgccagccgttttcccccaaaagattaaattatgttcatcttggctcatctaacgccacatcttgagttcttaaggtatcacagccaactcagtcataccttactttatgcactgagtacgcattaaactctatttaggaaggaagagggaagcaaaggaagccagggatggttttgtcatgacctctctttgctttctgacctcccggaatccactctttggaagatgtgcagaaaacaatgtgacttccatttaccctgcctcagatctcccctccttcagactggctcccacccctggttaatggggtaacctgggtacgcctatttgttaaaggaatttgtgggaagtgaggggcaaaattgttggagcagagggaatagatttatgggagctttgttacccagtgactatcccagcattaatacttcagagtagccctgacgcttgtggaaacatttcaagggagctagaggcaatgttacagtggagatcagagaagggatggggcagtgagctcttgtccctaggggaaatctcttttcctccacgtgacaggagccagtgctccaacagcatcagaattacacttagccacaatgactgatgcgtgtgtgtgcctgtgcacatgtgtgtgagcgtgtgtgtgagcgcacgtgtgtaagggggtgatgatggaaacatgatatgcatccactatggggttgcgttgcaaattcacagctgcacccctcccaaagtcacatggcagaggggaaatggtcatagctttcctgtgtgatgtcctctccagggagcaccgacgactcaggcttgcctcagctctgcgaggcccagactccacactcctccctggggccggctctccttcctcttgactctcagatccccagcccatccacctccaagttctttttttgtttatttgttttgcttctgttttctgtaaatatctatttcttattttggacatgcagggatcaattgagattctggagtggggggaggggcggatgactgggtctttttattttttcctttctctcttggattttggtgtttgaacttgaaaaaaataattacaagtatatatataagcaaatgacttacctttaaacaaaagaaataagttgatttcattcttttgatttatcttgtttctcattggggtcgggtgggggtggggggtcttttgggtggagggcttttttgtgagctgtatagatttccagtttggacttgttcaaatgatgcaggaacaaaaattaaaacgaattaaaaaaaagacaacataaaaaaacaagaaaaactttgtgatgtataaaagctgtaaatagtcaaagattctttctcttttctaatggcaaattatttctgtcactttatattcaaaaaataaagaaacctaccacaaattatcagggttaaaa

SEQ ID NO: 736196 - DNA, 1762 bp, Homo sapiens
  misc_feature (1561)..(1561): n is a, c, g, or t
  misc_feature (1563)..(1563): n is a, c, g, or t
aaagccttgagagagcgttttcaaggatcaggagagggcttagaaagaaaaggactctgagtggggctgcatgaaaagggggtaagtgaggactcttggggagggtctgaaaaaaacaagtagtttggcaaggagagcagaaaaataaaattccactgtgtaggcatttggagatttagcaagagcaacctagagtctgcccccagagacactgcacgttgtttctgacacagaggatgcactaattctatttcctgtgccacctgaaaaaatcataatttgagaagagaaactgttaggccatttctagtgaactatttttccaaaccctcacggaaccctgaacagggtgtgaatgagatcacaactactgctgctgctggttcagcctctctgtccactaataaaggcaaacccttcagcatggtcatatcctgccagccgttttcccccaaaagattaaattatgttcatcttggctcatctaacgccacatcttgagttcttaaggtatcacagccaactcagtcataccttactttatgcactgagtacgcattaaactctatttaggaaggaagagggaagcaaaggaagccagggatggttttgtcatgacctctctttgctttctgacctcccggaatccactctttggaagatgtgcagaaaacaatgtgacttccatttaccctgcctcagatctcccctccttcagactggctcccacccctggttaatggggtaacctgggtacgcctatttgttaaaggaatttgtgggaagtgaggggcaaaattgttggagcagagggaatagatttatgggagctttgttacccagtgactatcccagcattaatacttcagagtagccctgacgcttgtggaaacatttcaagggagctagaggcaatgttacagtggagatcagagaagggatggggcagtgagctcttgtccctaggggaaatctcttttcctccacgtgacaggagccagtgctccaacagcatcagaattacacttagccacaatgactgatgcgtgtgtgtgcctgtgcacatgtgtgtgagcgtgtgtgtgagcgcacgtgtgtaagggggtgatgatggaaacatgatatgcatccactatggggttgcgttgcaaattcacagctgcacccctcccaaagtcacatggcagaggggaaatggtcatagctttcctgtgtgatgtcctctccagggagcaccgacgactcaggcttgcctcagctctgcgaggcccagactccacactcctccctggggccggctctccttcctcttgactctcagatccccagcccatccacctccaagttctttttttgtttatttgttttgcttctgttttctgtaaatatctatttcttattttggacatgcagggatcaattgagattctggagtggggggaggggcggatgactgggtctttttattttttcctttctctcttggattttggtgtttgaacttgaaaaaaataattacaagtatatatataagcaaatgacttacctttaaacgcgtgtncncatctttctactttgctccttctcttctcttccttttcttctttcttttttagtttcctgttctctcttttttatgctttctttagctctatactcctttacttttttttctcttttctctgttctctacctcttcatcttctattcttttataactatcgtccttattcttctctccctcctgctctccttttcgtcc

SEQ ID NO: 736197 - DNA, 1425 bp, Homo sapiens
aatagaatggtattatcacttatactatgttaaaaggagacaagaatattctttgtcttctatggcagcagggaaaggaaaaagagaaactagatcttcagagcaccttgatttctaacacagatttcagcaacctccactgctaaacgctagtccatgtgccactctctccttgcaaacagatttttctggtcacctgtttatggcaagcctgatctcaggaagctagaaaagttcagttctcctctagaacaagcccttgctcacttacaaggttcccactgagcccagaaaggctgacaatgtcttccccacattgcctttcacagcttgctgggataaagaattcgctaaatctgaaaatgagccaggcttggactaaccaaagtgtcttaaagctcccccaacctgcccgcctttttttttatggtaaccagcaaaactcaacagagtttgactcaacagggccaaaactcagttacatttgtatgactctgcaaagagaagtcagctatagtagggagaaaaggaagaaggcaagaaaaggagactcgagatgagtttacatccaagagaagcacagatgtttgtaatctacctagaataatgtgaagtacctgtccagcatgtatgctcagatcctccattcattagcacaagctgaaaacatgaactgcaaattctacaccagcatcctttgcttcctccatggcagtgggaggtagcaaggggagtccaacacttctccatgacgtaagaaaggcaggaaaaatactgatgagaatcaaactgtgtgccaaaaacagctattggggtatttgctgtcctcatcatgttaaatcatacaaagttcttcccagttgatgcagatatgtttctttcttcacattaaagccaaaaaactgataggcattggtggttcacacctgtaactccaacactttgggaggctaaggtgggaggatcgcttgaagccaggaatttgagatcagcatgggcaacatagcaaaactccatctctacaaaaaattttaaaaaaattaactgggcatggtgccatacacctgtagtcctagctacttgggaggctgaggcaggagggttgcttgaatccaggagtttgagtgtgcaatgagctatgattgtgctcctgcactccagcctgaacaacagagtgagactgtctctaaaaaacaaaacaaacaaaacaaccaaaaaaacttgcatatcttgcagaagtcgctccagggttcatagcacagaattaaagcactaaaatagatcaatgcagcataaaggcaattaaagtaaaaccatatgagaaatgggaagctgttatggatggttctctccaagtataaacactgatgaatgtgctcacaccctgcatgaaaaatcaagtaggtccccacgtcaagacgagga

SEQ ID NO: 736198 - DNA, 3367 bp, Homo sapiens
agggggtcaaagtggtcgagtgtcgggaggaaggactgcttgtgtgcggggtgggggggggtggtggagagcgggggcggggattcagcgcgtgtatgtaaaggtgcagcccgtgtgctaggcgctgggtgcgcgcgcggtgtctgctcgggtgcgcgcgcgcgccgctgcccgcctgcccgccggcccgcctgctcgcctgctggggctgctccgtgggtttgacgggcgagcgggcgcggaggagctctgtccggaatcacatagataccatcgtggaaacagcagcgcaggtcacggcgccgcgggccctgcaccagacgctgggctctagagattatttctctttattcagaagcatacagttgtttgctgattgcaagaagatgtttctgtggctgtttctgattttgtcagccctgatttcttcgacaaatgcagattctgacatatcggtggaaatttgcaatgtgtgttcctgcgtgtcagttgagaatgtgctctatgtcaactgtgagaaggtttcagtctacagaccaaatcagctgaaaccaccttggtctaatttttatcacctcaatttccaaaataattttttaaatattctgtatccaaatacattcttgaatttttcacatgcagtctccctgcatctggggaataataaactgcagaacattgagggaggagcctttcttgggctcagtgcattaaagcagttgcacttgaacaacaatgaattaaagattctccgagctgacactttccttggcatagagaacttggagtatctccaggctgactacaatttaatcaagtatattgaacgaggagccttcaataagctccacaaactgaaagttctcattcttaatgacaatctgatttcattccttcctgataatattttccgattcgcatctttgacccatctggatatacgagggaacagaatccagaagctcccttatatcggggttctggaacacattggccgtgtcgttgaattgcaactggaagataacccttggaactgtagctgtgatttattgcccttaaaagcttggctggagaacatgccatataacatttacataggagaagctatctgtgaaactcccagtgacttatatggaaggcttttaaaagaaaccaacaaacaagagctatgtcccatgggcaccggcagtgattttgacgtgcgcatcctgcctccatctcagctggaaaatggctacaccactcccaatggtcacactacccaaacatctttacacagattagtaactaaaccaccaaaaacaacaaatccttccaagatctctggaatcgttgcaggcaaagccctctccaaccgcaatctcagtcagattgtgtcttaccaaacaagggtgcctcctctaacaccttgcccggcaccttgcttctgcaaaacacacccttcagatttgggactaagtgtgaactgccaagagaaaaatatacagtctatgtctgaactgataccgaaacctttaaatgcgaagaagctgcacgtcaatggcaatagcatcaaggatgtggacgtatcagacttcactgactttgaaggactggatttgcttcatttaggcagcaatcaaattacagtgattaagggagacgtatttcacaatctcactaatttacgcaggctatatctcaatggcaatcaaattgagagactctatcctgaaatattttcaggtcttcataacctgcagtatctgtatttggaatacaatttgattaaggaaatctcagcaggcacctttgactccatgccaaatttgcagttactgtacttaaacaataatctcctaaagagcctgcctgtttacatcttttccggagcacccttagctagactgaacctgaggaacaacaaattcatgtacctgcctgtcagtggggtccttgatcagttgcaatctcttacacagattgacttggagggcaacccatgggactgtacttgtgacttggtggcattaaagctgtgggtggagaagttgagcgacgggattgttgtgaaagaactgaaatgtgagacgcctgttcagtttgccaacattgaactgaagtccctcaaaaatgaaatcttatgtcccaaacttttaaataagccgtctgcaccattcacaagccctgcacctgccattacattcaccactcctttgggtcccattcgaagtcctcctggtgggccagtgcctctgtctattttaatcttaagtatcttagtggtcctcattttaacggtgtttgttgctttttgccttcttgtttttgtcctgcgacgcaacaagaaacccacagtgaagcacgaaggcctggggaatcctgactgtggctccatgcagctgcagctaaggaagcatgaccacaaaaccaataaaaaagatggactgagcacagaagctttcattccacaaactatagaacagatgagcaagagccacacttgtggcttgaaagagtcagaaactgggttcatgttttcagatcctccaggacagaaagttgttatgagaaatgtggccgacaaggagaaagatttattacatgtagataccaggaagagactgagcacaattgatgagctggatgaattattccctagcagggattccaatgtgtttattcagaattttcttgaaagcaaaaaggagtataatagcataggtgtcagtggctttgagatccgctatccagaaaaacaaccagacaaaaaaagtaagaagtcactgataggtggcaaccacagtaaaattgttgtggaacaaaggaagagtgagtattttgaactgaaggcgaaactgcagagttcccctgactacctacaggtccttgaggagcaaacagctttgaacaagatctaggtcatgtaatcttacttcatacagaggacatttatttaatgatgaaagtgccttttgttgacttctaacttccaaatactatattatcaataggcatggaggcaggtgtttccaagggtgtctcattaactgtagctgcaaagatgtgtcaagtagaagagaatttgtttaatagattttactacataaaacctatactgtggagtcctgtggggatactgcaaactctattgccaaagggatgctttatacacataatactgaatttaacctcaagaggcaaatctgttttgtaccccaatgcaaaaccttcgtctctttgtgctttgtaaagcaaactcaagaaaactggtacacctgtaccagctgggtcctttatcttgcacgtagattaagttggtggaactggaataatccttttgatttgtggcattgtaacaactccgtgtaaagattatctgaaaagt

SEQ ID NO: 736199 - DNA, 2355 bp, Homo sapiens
aggagtttggctcaaggctggggctagtttctttcagtattttagacaacaacctaaacacctctatcagtgcctgggaatgttcaaggccctggcttggggtcaagcctgcaggttgggaggtggctggagatcatatccagagtggggctggaggttctgacaatgattacctgatcttaaacttgcatatcccaggatttaaaccaccaacatctatgactggagccacgggttctgaactaggaagaataacatttgtctttgagaccctctgttcagctgactgtgttttgtacttcatggtggatattaatagaaaaagtacaaatgtggtagaatcgtggggtggaaccaaagaaaaacaagcttacacccatatcatcttcaagaatgcaacttttacatttacatgggcattccagagaactaatcagggtcaagataatagacggttcatcaatgacatggtgaagatttattctatcacagccactaatgcagttgatggggtggcgtcctcatgccgtgcctgtgccctcggttctgaacagtcgggttcatcgtgtgtcccctgccctccaggccactacattgagaaagaaaccaaccagtgcaaggaatgtccacctgacacctacctgtccatacatcaggtctatggcaaagaggcttgtattccatgcgggcctgggagtaaaaacaatcaggaccattcggtttgctatagtgactgctttttctaccatgaaaaagaaaatcagagtttgcactatgactttagcaacctcagcagtgtgggctcattaatgaatggccccagcttcacctccaaaggaacaaaatacttccatttcttcaatatcagtttatgtgggcatgaggggaagaagatggctctctgtaccaacaatataacagactttacagtaaaagaaatagtggcagggtcagatgattacacaaatttggtaggggcatttgtatgccagtcaacaattattccttctgaaagtaagggtttccgagcagccttatcatcacaatccatcattctggcagatacattcataggagtcacagttgaaaccacattgaaaaatattaatataaaagaagatatgttcccagttccaacaagccaaataccagatgtgcatttcttttataagtcttctacagcaacaacatcttgtattaatggccgatcaactgctgtgaaaatgaggtgtaatcctactaaatctggagcaggagtgatttcagtccccagcaagtgcccagcaggtacctgtgatgggtgtacgttctatttcctgtgggagagtgctgaagcttgccctctgtgtacggagcatgacttccatgagattgagggagcctgcaagagaggatttcaggaaaccttgtatgtgtggaatgaacctaaatggtgcattaaaggaatttctttgcctgagaaaaagttggcaacctgtgaaacggttgacttttggctgaaggtgggagccggtgtgggagcttttactgccgttttgctggtggctctgacctgctacttctggaaaaagaatcaaaaactggaatacaaatattccaagttagtaatgacgactaactcaaaagagtgtgaactcccggctgcagacagttgtgctatcatggaaggagaagataatgaagaggaagttgtatattccaataaacagtcactactaggaaaactcaaatctttggcaaccaaggaaaaagaagaccattttgaatctgttcaactgaaaacctcaagatccccaaatatatgaagagacagtgctgtagccttgagactaatgaacaaagaaacctgctctagttttacaggaccatattttagggtctgtcctcatacctgtcacattggtgatctcacagaggagggccatgccgctgaaaagggaaggagattgaaacatttgattgccttatcacatggtcaagtaccttgccaaataaaggaaagcaaatgatttgggtctcaactgaagatgaagctcaactcaggaagagatttatctgtatatacacataactgaaaaccaagtttaagcccaccaatgcactgctgatgcatgccatataattaatgggtaacttttattctttatgatgtctacataacaagtgtgatttggaaggcacatgtgagcatatgcattatgatccaatttatgttttttctttgtttatattttggggaaaattaaaatttttttaaggtatatttttcccattatttattttcctgaccttaaaacagcttttctactaaaaaatggtgagcaatgaagacaataaatttttcatttttccata

SEQ ID NO: 736200 - DNA, 3281 bp, Homo sapiens
ctgggcaatggcgggcgcctctcccccagcctcgctgccgccttgcagtttgatctcagactgctgtgctagcaatcagcgagactccgtgggcgtaggaccctccgagccagctcttcttggatccctcgtggaaactacatagaatctaatcgtgatgactgcacggtgtctttgatctatgctgtgcaccttaagaagtcaggctatgtcttctttgagtaccagtatgtcgacaacaacatcttctttgagttctttattcaaaatgatcagtgccaggagatggacaccaccactgacaagtgggtaaaacttacagacaatggagaatggggctctcattctgacagctccttaaatgcttgaaggcaattaccaggtaatgctgaaatcaggcacaaacatactctactggagaactacaggcatccttatgggttctaaggcggtcaagcctgtgctggtaaaaaatatcacaattgaaggggtggcgtacacatcagaatgttttccttgcaagccaggcacattcagcaacaaaccaggttcattcaactgccaggtgtgtcccagaaacacctattctgagaaaggagccaaagaatgtataaggtgtaaagacgactctcaattttcagaggaaggatccagtgagtgtacagagcgccctccctgtaccacaaaagactatttccagatccatactccatgtgatgaagaaggaaagacacagataatgtacaagtggatagagcccaaaatctgccgggaggatctcacagatgctattagattgcccccttctggagagaagaaggattgtccgccttgcaaccctggattttataacaatggatcatcttcttgccatccctgtcctcctggaacattttcagatggaaccaaagaatgtagaccatgtccagcaggaacggagcctgcacttggctttgaatataaatggtggaatgtccttcctggcaacatgaaaacttcctgcttcaatgttgggaattcaaagtgcgatggaatgaatggttgggaggtggctggagatcatatccagagtggggctggaggttctgacaatgattacctgatcttaaacttgcatatcccaggatttaaaccaccaacatctatgactggagccacgggttctgaactaggaagaataacatttgtctttgagaccctctgttcagctgactgtgttttgtacttcatggtggatattaatagaaaaagtacaaatgtggtagaatcgtggggtggaaccaaagaaaaacaagcttacacccatatcatcttcaagaatgcaacttttacatttacatgggcattccagagaactaatcagggtcaagataatagacggttcatcaatgacatggtgaagatttattctatcacagccactaatgcagttgatggggtggcgtcctcatgccgtgcctgtgccctcggttctgaacagtcgggttcatcgtgtgtcccctgccctccaggccactacattgagaaagaaaccaaccagtgcaaggaatgtccacctgacacctacctgtccatacatcaggtctatggcaaagaggcttgtattccatgcgggcctgggagtaaaaacaatcaggaccattcggtttgctatagtgactgctttttctaccatgaaaaagaaaatcagagtttgcactatgactttagcaacctcagcagtgtgggctcattaatgaatggccccagcttcacctccaaaggaacaaaatacttccatttcttcaatatcagtttatgtgggcatgaggggaagaagatggctctctgtaccaacaatataacagactttacagtaaaagaaatagtggcagggtcagatgattacacaaatttggtaggggcatttgtatgccagtcaacaattattccttctgaaagtaagggtttccgagcagccttatcatcacaatccatcattctggcagatacattcataggagtcacagttgaaaccacattgaaaaatattaatataaaagaagatatgttcccagttccaacaagccaaataccagatgtgcatttcttttataagtcttctacagcaacaacatcttgtattaatggccgatcaactgctgtgaaaatgaggtgtaatcctactaaatctggagcaggagtgatttcagtccccagcaagtgcccagcaggtacctgtgatgggtgtacgttctatttcctgtgggagagtgctgaagcttgccctctgtgtacggagcatgacttccatgagattgagggagcctgcaagagaggatttcaggaaaccttgtatgtgtggaatgaacctaaatggtgcattaaaggaatttctttgcctgagaaaaagttggcaacctgtgaaacggttgacttttggctgaaggtgggagccggtgtgggagcttttactgccgttttgctggtggctctgacctgctacttctggaaaaagaatcaaaaactggaatacaaatattccaagttagtaatgacgactaactcaaaagagtgtgaactcccggctgcagacagttgtgctatcatggaaggagaagataatgaagaggaagttgtatattccaataaacagtcactactaggaaaactcaaatctttggcaaccaaggaaaaagaagaccattttgaatctgttcaactgaaaacctcaagatccccaaatatatgaagagacagtgctgtagccttgagactaatgaacaaagaaacctgctctagttttacaggaccatattttagggtctgtcctcatacctgtcacattggtgatctcacagaggagggccatgccgctgaaaagggaaggagattgaaacatttgattgccttatcacatggtcaagtaccttgccaaataaaggaaagcaaatgatttgggtctcaactgaagatgaagctcaactcaggaagagatttatctgtatatacacataactgaaaaccaagtttaagcccaccaatgcactgctgatgcatgccatataattaatgggtaacttttattctttatgatgtctacataacaagtgtgatttggaaggcacatgtgagcatatgcattatgatccaatttatgttttttctttgtttatattttggggaaaattaaaatttttttaaggtatatttttcccattatttattttcctgaccttaaaacagcttttctactaaaaaatggtgagcaatgaagacaataaatttttcatttttccata

SEQ ID NO: 736201 - DNA, 3439 bp, Homo sapiens
ctgggcaatggcgggcgcctctcccccagcctcgctgccgccttgcagtttgatctcagactgctgtgctagcaatcagcgagactccgtgggcgtaggaccctccgagccagctcttcttggatccctcgtggaaactacatagaatctaatcgtgatgactgcacggtgtctttgatctatgctgtgcaccttaagaagtcaggctatgtcttctttgagtaccagtatgtcgacaacaacatcttctttgagttctttattcaaaatgatcagtgccaggagatggacaccaccactgacaagtgggtaaaacttacagacaatggagaatggggctctcattctgacagctccttaaatgcttgaaggcaattaccaggtaatgctgaaatcaggcacaaacatactctactggagaactacaggcatccttatgggttctaaggcggtcaagcctgtgctggtaaaaaatatcacaattgaaggggtggcgtacacatcagaatgttttccttgcaagccaggcacattcagcaacaaaccaggttcattcaactgccaggtgtgtcccagaaacacctattctgagaaaggagccaaagaatgtataaggtgtaaagacgactctcaattttcagaggaaggatccagtgagtgtacagagcgccctccctgtaccacaaaagactatttccagatccatactccatgtgatgaagaaggaaagacacagataatgtacaagtggatagagcccaaaatctgccgggaggatctcacagatgctattagattgcccccttctggagagaagaaggattgtccgccttgcaaccctggattttataacaatggatcatcttcttgccatccctgtcctcctggaacattttcagatggaaccaaagaatgtagaccatgtccagcaggaacggagcctgcacttggctttgaatataaatggtggaatgtccttcctggcaacatgaaaacttcctgcttcaatgttgggaattcaaagtgcgatggaatgaatggttgggaggtggctggagatcatatccagagtggggctggaggttctgacaatgattacctgatcttaaacttgcatatcccaggatttaaaccaccaacatctatgactggagccacgggttctgaactaggaagaataacatttgtctttgagaccctctgttcagctgactgtgttttgtacttcatggtggatattaatagaaaaagtacaaatgtggtagaatcgtggggtggaaccaaagaaaaacaagcttacacccatatcatcttcaagaatgcaacttttacatttacatgggcattccagagaactaatcagggtcaagataatagacggttcatcaatgacatggtgaagatttattctatcacagccactaatgcagttgatggggtggcgtcctcatgccgtgcctgtgccctcggttctgaacagtcgggttcatcgtgtgtcccctgccctccaggccactacattgagaaagaaaccaaccagtgcaaggaatgtccacctgacacctacctgtccatacatcaggtctatggcaaagaggcttgtattccatgcgggcctgggagtaaaaacaatcaggaccattcggtttgctatagtgactgctttttctaccatgaaaaagaaaatcagagtttgcactatgactttagcaacctcagcagtgtgggctcattaatgaatggccccagcttcacctccaaaggaacaaaatacttccatttcttcaatatcagtttatgtgggcatgaggggaagaagatggctctctgtaccaacaatataacagactttacagtaaaagaaatagtggcagggtcagatgattacacaaatttggtaggggcatttgtatgccagtcaacaattattccttctgaaagtaagggtttccgagcagccttatcatcacaatccatcattctggcagatacattcataggagtcacagttgaaaccacattgaaaaatattaatataaaagaagatatgttcccagttccaacaagccaaataccagatgtgcatttcttttataagtcttctacagcaacaacatcttgtattaatggccgatcaactgctgtgaaaatgaggtgtaatcctactaaatctggagcaggagtgatttcagtccccagcaagtgcccagcaggtacctgtgatgggtgtacgttctatttcctgtgggagagtgctgaagcttgccctctgtgtacggagcatgacttccatgagattgagggagcctgcaagagaggatttcaggaaaccttgtatgtgtggaatgaacctaaatggtgcattaaaggaatttctttgcctgagaaaaagttggcaacctgtgaaacggttgacttttggctgaaggtgggagccggtgtgggagcttttactgccgttttgctggtggctctgacctgctacttctggaaaaagaatcaaaaactggaatacaaatattccaagttagtaatgacgactaactcaaaagagtgtgaactcccggctgcagacagttgtgctatcatggaaggagaagataatgaagaggaagttgtatattccaataaacagtcactactaggaaaactcaaatctttggcaaccaaggaaaaagaagaccattttgaatctgttcaactgaaaacctcaagatccccaaatatatgaagagacagtgctgtagccttgagactaatgaacaaagaaacctgctctagttttacaggaccatattttagggtctgtcctcatacctgtcacattggtgatctcacagaggagggccatgccgctgaaaagggaaggagattgaaacatttgattgccttatcacatggtcaagtaccttgccaaataaaggaaagcaaatgatttgggtctcaactgaagatgaagctcaactcaggaagagatttatctgtatatacacataactgaaaaccaagtttaagcccaccaatgcactgctgatgcatgccatataattaatgggtaacttttattctttatgatgtctacataacaagtgtgatttggaaggcacatgtgagcatatgcattatgatccaatttatgttttttctttgtttatattttggggaaaattaaaatttttttaaggtatatttttcccattatttattttcctgaccttaaaacagcttttctactaaaaaatggtgagcaatgaagacataattctcatttccataaaaaaaagaagggggggctagagatctggagggccaagttagggtccgttttgtaaggggccaagggggtttaaagaagggggggtaaagtggggaaaggggactggagacttcggggggcatggacccaataggcgaaaatggatggagatgggaaggatac

SEQ ID NO: 736202 - DNA, 2056 bp, Homo sapiens
ctgggcaatggcgggcgcctctcccccagcctcgctgccgccttgcagtttgatctcagactgctgtgctagcaatcagcgagactccgtgggcgtaggaccctccgagccagctcttcttggatccctcgtggaaactacatagaatctaatcgtgatgactgcacggtgtctttgatctatgctgtgcaccttaagaagtcaggctatgtcttctttgagtaccagtatgtcgacaacaacatcttctttgagttctttattcaaaatgatcagtgccaggagatggacaccaccactgacaagtgggtaaaacttacagacaatggagaatggggctctcattctgacagctccttaaatgcttgaaggcaattaccaggtaatgctgaaatcaggcacaaacatactctactggagaactacaggcatccttatgggttctaaggcggtcaagcctgtgctggtaaaaaatatcacaattgaaggggtggcgtacacatcagaatgttttccttgcaagccaggcacattcagcaacaaaccaggttcattcaactgccaggtgtgtcccagaaacacctattctgagaaaggagccaaagaatgtataaggtgtaaagacgactctcaattttcagaggaaggatccagtgagtgtacagagcgccctccctgtaccacaaaagactatttccagatccatactccatgtgatgaagaaggaaagacacagataatgtacaagtggatagagcccaaaatctgccgggaggatctcacagatgctattagattgcccccttctggagagaagaaggattgtccgccttgcaaccctggattttataacaatggatcatcttcttgccatccctgtcctcctggaacattttcagatggaaccaaagaatgtagaccatgtccagcaggaacggagcctgcacttggctttgaatataaatggtggaatgtccttcctggcaacatgaaaacttcctgcttcaatgttgggaattcaaagtgcgatggaatgaatggttgggaggtggctggagatcatatccagagtggggctggaggttctgacaatgattacctgatcttaaacttgcatatcccaggatttaaaccaccaacatctatgactggagccacgggttctgaactaggaagaataacatttgtctttgagaccctctgttcagctgactgtgttttgtacttcatggtggatattaatagaaaaagtacaaatgtggtagaatcgtggggtggaaccaaagaaaaacaagcttacacccatatcatcttcaagaatgcaacttttacatttacatgggcattccagagaactaatcagggtcaagataatagacggttcatcaatgacatggtgaagatttattctatcacagccactaatgcagttgatggggtggcgtcctcatgccgtgcctgtgccctcggttctgaacagtcgggttcatcgtgtgtcccctgccctccaggccactacattgagaaagaaaccaaccagtgcaaggaatgtccacctgacacctacctgtccatacatcaggtctatggcaaagaggcttgtattccatgcgggcctgggagtaaaaacaatcaggaccattcggtttgctatagtgactgctttttctaccatgaaaaagaaaatcagagtttgcactatgactttagcaacctcagcagtgtgggctcattaatgaatggccccagcttcacctccaaaggaacaaaatattgacacatatttaccaaccagtgccacgcctgacccagaaccttctcacttgaacaccaggaatggacttaaaggctttatggcgttcaggcttagactgctaaggtacgagttcaacctgattcatcagattaagctaaatacatacagccttgggtgtaggtggtatttacattaggactcctccctctcctatagaaactgtttctcaagcccaacttagggagagagcagcaggcaggaacaggacgatcacaaccttcatttctcattagtttctac

SEQ ID NO: 736203 - DNA, 2071 bp, Homo sapiens
gttttctcagacaggatcctaggatgtgtctggaagcctgcggagtgaaggtagacatgcaggtgtgatgttctgcctgatagtgcctctctccaggcattaactacaaggctgggtgggggcttacggtaaggcatcgagtccctaagcatttatacagtcccaattgtgcatcagtgcagtgctggttataacagggaagaatttgtggaggggagggcacaggctgaaattggcccattcctacacatgctcttgacctagacctagagtaagtgacattgaccccaaccgtccccctacccacctccagcttgtgccagacatcactaatcagtcacagcgcttctttccagctgaatccagactcagaatcctcattagagctcattgttagcacgtcttcctgaagtgcaacccatttgccattccttccctggacgaaacccaccccaaataactgggaaacccttcaaggcagtttttaatcaacacttcaattgtggaactgcatgaatccaagaaggccagctgagaagctcggaggagtcaggaaggaagaaaactaaatatccaacacccaactcttcaaagagttcaacttcctgttcaaaacagggtcagaccaggggattcttagtgaggccagtgatgagcactgtaactttaaatgcagccctgaaccccagacctgaaggcctgccagtgtcttaccctacaggccagaccgggacctacttgcccaagctgtcctactggttctgtcaaccgggggctctcaaataacagagtagaacaccacatggatatgattcctggaaaccacagaactaggtgagactcctacctctgactgcctgggtgtccttgggcaagtcagctgaccgggccatttccctcagttgtcaagtagggattagaggtgtatgtgctcctactgtgttctctgctccaaggaatcatggcgcagtgctcccagaggtgggttgtgtgttaccatgtttttaacaacgggaagcaaaaactttatttgaactttcattctgatgcttcactgatgacaccggaaatgaagataatttgttttgtgattgttttattgtgttttcaagttttaattcatgaattttcctgtactaaaacaaagagcaaagttggttaaagcctgcatgtaaataaagtccagtgggatttttgacacctgcttgacgtttctatgtctacaaacagtgttgtaatgaatacggcctttcatcattaaacattcgattttttaaaaatgaaaaaaaaaaaaaaaaaaaaaaaaaaaaaaaaaaaaaaaaaaaaaaaaaaaaaaaaaaaaaaaaaaaaaaaggggggacaaaaggggggcctcccttaaaagtttccctagggggccccaccttttttttacccacattttttgcaaaaaaggggcccctatttaaacctaatttaaagcttggcatttgcccccggttaacccgcaacgggggggaaaacttttttttggaaaatttttggaagggaccttttttcctgggggggcaacttgtggacaaaattttttcggcaaattaaaacttttaaagtatataacgaatttttgggggcaaaaaggggcaaaccattcgccaattggcaggtttgttaaaaatttttttttttgggaatattttttgccaaaagttttttccccaggccccctggggcctccaaatttttaggggcccttttaaattgccatgctccaagggccttttttagggcccccgatggtcccagagggtgggttatgaccttatttacaggcgaaacctttttttttggagtttaaaaaatcgcctaaaaaaatcccccccaaaactttccccctgtgaaatcgaaacccaagtgggagggcgaaccgcttggggagtaaaccctttttttttatggccccccttatatatgggtacacaacaatcttcccctatcttgcccacataatattcttcccatatataagcccttttttttccaccgggtggtttacacgcggagggcttgtttccaaaaacttctttttggg

SEQ ID NO: 736204 - DNA, 1181 bp, Homo sapiens; identical to SEQ ID NO: 225361

SEQ ID NO: 736205 - DNA, 939 bp, Homo sapiens
gttttttttttctgggtggcgtttcacaggatctacctgggttttattgagctgctcagatcctggggtgaggtacgggctcctgaagcgttctggagccctggctgggcaccggtgcggcccctgcagtccccactttgagtgggtccgtggcccagcctggaagctcagggctgggagtgctgtgagtcttcctttgcccagagcctgtgttttcttctagattctttccaccatggccagacgcccccggaacagcagggcctggcacttcgtcctgagtgcagcccgccgagacgcagatgcccgggccgtggctctagcaggctccactaactggggctacgactctgatgggcaggtaggttccagcgggcgaggcggacgtggctggcctaaggtgtggagatgccctaggcaggcaggcagacattacctgaacacggaatcagtcggagaaaaagatgcttctgaggctagaggaccagtccaaacctgggcctgtctcctggatgcaccgcattcagtaagactctttaatttggcaaaggacacacacagcctcaggggtgacaggacctcagaacacactgcattcttcactgtgctttctcctctgaaacacatggtgcatggagaggttggcagttgcttttggttcattcaacagaaattctccactacggggctgggcactgtggctcacacctataatcctagcactttgggaggctgaagctggaggaccacttgagcccaggagtttgagacctgcctgggcaacatggtgaaacactgtctctacaaaaatttaaaaaatgtgtcaggcgatccggataattccggaccgtaccagcttttttgcaacgggggggcgaggggcgtaggtggtccgggaaagacggggccgagggggaagaggaggcacaaggaggagag

SEQ ID NO: 736206 - DNA, 6687 bp, Homo sapiens
  misc_feature (5303)..(5303): n is a, c, g, or t
cgccggagccaatgggcgcagggggcggggatttgtttacgtctcgctccggggcggaaagtgggtcagggccgggccggcggagcgcgcagcgggggctgcagattctttccaccatggccagacgcccccggaacagcagggcctggcacttcgtcctgagtgcagcccgccgagacgcagatgcccgggccgtggctctagcaggctccactaactggggctacgactctgatgggcaggtaggttccagcgggcgaggcggacgtggctggcctaaggtgtggagatgccctaggcaggcaggcagacattacctgaacacggaatcagtcggagaaaaagatgcttctgaggctagaggaccagtccaaacctgggcctgtctcctggatgcaccgcattcagtaagactctttaatttggcaaaggacacacacagcctcaggggtgacaggacctcagaacacactgcattcttcactgtgctttctcctctgaaacacatggtgcatggagaggttggcagttgcttttggttcattcaacagaaattctccactacggggctgggcactgtggctcacacctataatcctagcactttgggaggctgaagctggaggaccacttgagcccaggagtttgagacctgcctgggcaacatggtgaaacactgtctctacaaaaatttaaaaaatgtgtcaggcgtggtggcacgtgcctgtagtcccaacgactcaggaggctgagctgggaggattgcttgagccagggaggtcaaggctgcagtgagccgtgatcacaccagtgcgttccagcctgggtgacagagctagaccctgactcaaaaaaaacaaaaacaaaaaaattctttggtttacccagcccatttctggaggtgaccattgttaacttgctggttgtcttaccagacgcttcttctgccagtacaaacgcatactctttgttcacatatgtgtgtgttaaaaaacaaacaaacagaaaaaccctgatccttgaaggtaaaaatttctgcacttgctcagggaggccaggaacctgaaggtattcagaacagctcaggtgtttgtctgtctgcagcccaggtgatctgacatgcttgtgggctttgcaggcagagctacctgcccccatggcccttgacccccaccttggcagaccctgagggcagctgcctggcctgacggggcgcagtgaggctgggaggggtgggggtccctgtggggggtgatttcccagtcggtttcctgagatctccctcggaccagagcaggagtgtggctgcgcctccctgccccacttccagctaccacaggtcatgtgccctggagcagtctctcctggcctcgcagggtcatggctgtgggacgcgggcgtgtccacaggccaggccagtgtctgacacacgcatgctgcttgtcctctgtcaccatgggccgtgtccttccggggcggctgcttgtgtgacctggtgctgctctctgctgtcacagctcccctgcgctgctgttccggctcagccaggtgtcctgggaggggtgggctcctctcctctgagtgaggactccctaagcccggtgggtccattaggccttgggggcaaattgggaaacagggtccttacccaccgggtgggggccgtcctgaggtctcctggagctccctgctccagccagggagaggcccccacctgccttcccgcccgcctccagctcctgcaggtcacatgcctgagcctcacaggctcgtggctgtgggatgcaggcgtgcctgcgggctcggcagtgttcgacacatgtgctgcttgtcctgtgtcaccaaatgggcctgcagtctgttgtgggcaggaggtaggcagtggcttcagtctttctccttctccagggaacccggccctgggcctgcagtgcaggtgctcagttctgtgcccgggctcctgactcagggggtctaccctggctctggggacccgcacttctaggcagtggggtagagttgtctgggcctgccttgtctgtggggtggggccatcccctccagaaaggacagtgtcctgccctgaagctggctttcgataggtccacgttcacctggaagctggtggcgcccatgtcatggtcccctgtggcttctcctggggatcacatcatctctctggaccagccctcaaccctcactgtcacaaggcctctgccacaggccccccgccaccacttagcactctccctgctgaccccctggtccattcagcccctgggtggcccccacacagtctgtgacagggaggaggctgggaggggcactgcctcccacaaggagctcacgttctggtgggaggaggccaagaatcaggaccaaggagaacttcagtgaagcaaaagaagaaaaatggaacaggggtgaaggggctggagaagcctcagggaggtgacagctgaaacctgcaccaggaggggcggggcctgtagtgggcactgggcagtaggaccctgtggtgagccaggtctgctcaggtaacaggaaggtcgttgggccacagtgtggtggggactgccctgaggccgggtggctgcagctgggcctggtgtgggggtggtggccttgcctgggggcccctgcagggctggcctagcagggaaggtgtccacaccatctcagctctgggcaggtggggtggacctggggcttatccaccgtctagaaaccacttggaggccaggcagccttggctactgctctgtggctgggcctccagggccctcctggtcatgcagaatggggcagagccggagcccgttgggagggagcctgggctgtgcgctcggggtactgtgaagtccctggaggcctggacccccatcctttcctgggtgggtcagggacagggtgggacagggacagagggcaagggtgagagggtagagagcgggcaacaggtagtaacagccggcccttctctcccagcacagcgactcggactccgaccccgagtactccacgctgccgccatccatccccagtgcggtgcccgtgaccggcgagtccttctgtgactgtgctgggcagagcgaggcctccttctgtagcagcctgcactcggcccaccggggcagggactgccgctgcggagaggaagacgagtgtgagcgtggggcccagcccctgctgggactgcactgcgggcgggcctgggggtgggcagggcagagccccatggagctctcagggctgccccagcctgggcctctcttgcagatttcgactgggtctgggatgacttaaataagtcatcagccaccctgctgagctgtgacaaccgtaaggtcagcttccacatggagtacagctgcggcacagcggccatccggggcaccaaggagctgggggagggccagcacttctgggagatcaagatgacctctcccgtctacggcaccgacatggtaagttgcttcggcccagggtgcttctggggaacctggctccggcagcccagccccgcgccctctgcctggcccctgttcctagatggtgggcatcgggacgtcggatgtggacctggacaaataccgccacacgttctgcagcctgctgggcagggatgaggacagctggggcctctcctacacgggtgcgtgaggcccagggtggggcggggccgagcctggagctcccgggctcactgcgaccctggctgcccccaggcctcctccaccacaagggcgacaagaccagcttctcgtcgcggttcggccagggctccatcattggcgtgcacctggacacctggcacggcacactcacctttttcaagaacaggaagtgtataggtgaggccgtcacaggacttgagctcctctcagctgtcaccccgagggaggcagccaccccgccccagcccaggggacactgaggttttctgaaagggttcctcccagaagcctgaggccccagggtcccagggggtgggacagtgaggccaggctggagtggcagggccagcgcgtgcaccctgccttgcctcagctgtgccagctgcccacccgggtgactgtagcgtgaggtctgaggggctgcgcccagtagctggccccttccctgcctggggttcaggctgggcccctcccttccaggtgtggcagccaccaagctgcagaacaagagattctacccgatggtgtgctccacggcggcccggagcagcatgaaggtcacccgctcctgtgccagcgccacttccctccagtacctgtgctgccaccgcctgcgccagctgcggccagactcgggagacacgctggagggtctgccgctgccgccgggcctcaagcaggtgctacacaacaagctgggctgggtcctgagcatgagttgcagccgccgcaaggctccagtgtccgatccccaggcagcgacctccgcccaccccagcagtcgcgagcctcggccctgccagaggaagcgctgccgccggacctgactgacttcccagtggaactgccttcttgggctgggacagcccctttcctctgtcccttctttctctgtcccttccttccagccacactccagggcggagttggatgaggcccgtccggagggagccatctcttgctcccgaggctgggacagtcctttctgtgggggctctagggcccctctgctgctgtgctgggtggggaagcggctgccctgagccccaggtcttgtgggaggctgcgaggacgagagcctggctggagcccgcgttgctgttcccacagggcctcggtttttcctaacttgctctgcatgctgtcagcggctgccccgccgtcatagacttaaaggactgcaataaatgtagagttgatgtctaacacccacatggcgtgagctgaaacgtatccgtgcagaggccgggcttgcgagcagcctgggccttctcccaggcctcactgcccctccacatccttgggagtcccctactgcttctggctgagggtgccacaccccaagcctccaggtggcagtggggccctggagctgccttctggtccctgccgagtgtgtgtgtgtgttgggggggcacagccctgctgctgaggcctcccctggggcctacgtgttcaggactcagcacaggaaccgccagccatctgccagccagaagcccctcttctcctcccagctacctaaaacttcccctgcaaccacccaccctccccctgaggtcagacctgctcagccagagaacccacccaggctgagggtccacatgtggctgggggtcctccccnaccgcccagggtgtctggtctgtccccaaggctgcatgctgtcctggtggtcccacgtgtggtcaggagcccaggtccagcaggagatcagggttggctgtggtcaggaagaggcagatgcggcgggagaggtcaggccccaccctgcggggacgcccgccttcactgggcggcacaggaaggtcggccaggaggcccatgcgctcccgctccgtgctgcaggcctccagcgcctgctgcagaaggcggggggaggggaaggctgtgacaactgcatcagccacggctgggctgacccgactgaactgcctgatctgcctccgccaggccgcctgcagccctgcgccgtctcttgccactggctcgccggctgcccagcgccctgctgtgcagaaggagaaggcctgggattcccggtactgcttgaggggatactgggcgagagccttggtaacggcgcacacgtgccgactcagctcctgccaagaggccaccagtagcacgtccaggtttgcccagagctgcaggagtaccagggcctcttccacctccggccagctgacggccacctcggcaccggccaccttcgggctctctggctgctgtgtcccccgggaaacgtgctggcgagacctgagcagaggtgaccattcctccccgctccccatggggcctgccctgcccgagcttggcctctgccagagcccacctggagaagtgggatcagctgtgccacagcaaccccagaagtgtgcccacctcccctgaacccccgtcccagccagccctgctgtgggcatgagagtgagcggtaccacaggtaggcatccagcccgatgacagccaggtggggccgggcggtggtctcgggggagatccagggcacccagtgggttgggccagagatctgggtcagtgtggcgacgccctgcagaaactcctcgggctccagcagcagcagcaattcctgttcacctgcagcccacacttcaggaggcaggctgcgggggcaggggtcgggactcgctcgggtccaccgcaggctgcgggccgggcgctggggctcgatgcggcactcgcagcccagggcctccagggcctccatcaggacgtcggcaccggcgtcttccaggatggctgtgtccacgcacaccgcgaggcgcttcagcacctgctccggccgcagcagccgcaacgcctcggcagccgccctgcgctcacccgctgggtcccgggctctcgcggcggcctccgagccggcggagtcctcagcgtcggagtctgagatctcccaggttggaggtcgccgctgaccgctcccgccccgtccccggccccggccctggcaagagacccccgccctcccgggtccaacccgcgccat

SEQ ID NO: 736207 - DNA, 4930 bp, Homo sapiens
cgccggagccaatgggcgcagggggcggggatttgtttacgtctcgctccggggcggaaagtgggtcagggccgggccggcggagcgcgcagcgggggctgcagattctttccaccatggccagacgcccccggaacagcagggcctggcacttcgtcctgagtgcagcccgccgagacgcagatgcccgggccgtggctctagcaggctccactaactggggctacgactctgatgggcaggtaggttccagcgggcgaggcggacgtggctggcctaaggtgtggagatgccctaggcaggcaggcagacattacctgaacacggaatcagtcggagaaaaagatgcttctgaggctagaggaccagtccaaacctgggcctgtctcctggatgcaccgcattcagtaagactctttaatttggcaaaggacacacacagcctcaggggtgacaggacctcagaacacactgcattcttcactgtgctttctcctctgaaacacatggtgcatggagaggttggcagttgcttttggttcattcaacagaaattctccactacggggctgggcactgtggctcacacctataatcctagcactttgggaggctgaagctggaggaccacttgagcccaggagtttgagacctgcctgggcaacatggtgaaacactgtctctacaaaaatttaaaaaatgtgtcaggcgtggtggcacgtgcctgtagtcccaacgactcaggaggctgagctgggaggattgcttgagccagggaggtcaaggctgcagtgagccgtgatcacaccagtgcgttccagcctgggtgacagagctagaccctgactcaaaaaaaacaaaaacaaaaaaattctttggtttacccagcccatttctggaggtgaccattgttaacttgctggttgtcttaccagacgcttcttctgccagtacaaacgcatactctttgttcacatatgtgtgtgttaaaaaacaaacaaacagaaaaaccctgatccttgaaggtaaaaatttctgcacttgctcagggaggccaggaacctgaaggtattcagaacagctcaggtgtttgtctgtctgcagcccaggtgatctgacatgcttgtgggctttgcaggcagagctacctgcccccatggcccttgacccccaccttggcagaccctgagggcagctgcctggcctgacggggcgcagtgaggctgggaggggtgggggtccctgtggggggtgatttcccagtcggtttcctgagatctccctcggaccagagcaggagtgtggctgcgcctccctgccccacttccagctaccacaggtcatgtgccctggagcagtctctcctggcctcgcagggtcatggctgtgggacgcgggcgtgtccacaggccaggccagtgtctgacacacgcatgctgcttgtcctctgtcaccatgggccgtgtccttccggggcggctgcttgtgtgacctggtgctgctctctgctgtcacagctcccctgcgctgctgttccggctcagccaggtgtcctgggaggggtgggctcctctcctctgagtgaggactccctaagcccggtgggtccattaggccttgggggcaaattgggaaacagggtccttacccaccgggtgggggccgtcctgaggtctcctggagctccctgctccagccagggagaggcccccacctgccttcccgcccgcctccagctcctgcaggtcacatgcctgagcctcacaggctcgtggctgtgggatgcaggcgtgcctgcgggctcggcagtgttcgacacatgtgctgcttgtcctgtgtcaccaaatgggcctgcagtctgttgtgggcaggaggtaggcagtggcttcagtctttctccttctccagggaacccggccctgggcctgcagtgcaggtgctcagttctgtgcccgggctcctgactcagggggtctaccctggctctggggacccgcacttctaggcagtggggtagagttgtctgggcctgccttgtctgtggggtggggccatcccctccagaaaggacagtgtcctgccctgaagctggctttcgataggtccacgttcacctggaagctggtggcgcccatgtcatggtcccctgtggcttctcctggggatcacatcatctctctggaccagccctcaaccctcactgtcacaaggcctctgccacaggccccccgccaccacttagcactctccctgctgaccccctggtccattcagcccctgggtggcccccacacagtctgtgacagggaggaggctgggaggggcactgcctcccacaaggagctcacgttctggtgggaggaggccaagaatcaggaccaaggagaacttcagtgaagcaaaagaagaaaaatggaacaggggtgaaggggctggagaagcctcagggaggtgacagctgaaacctgcaccaggaggggcggggcctgtagtgggcactgggcagtaggaccctgtggtgagccaggtctgctcaggtaacaggaaggtcgttgggccacagtgtggtggggactgccctgaggccgggtggctgcagctgggcctggtgtgggggtggtggccttgcctgggggcccctgcagggctggcctagcagggaaggtgtccacaccatctcagctctgggcaggtggggtggacctggggcttatccaccgtctagaaaccacttggaggccaggcagccttggctactgctctgtggctgggcctccagggccctcctggtcatgcagaatggggcagagccggagcccgttgggagggagcctgggctgtgcgctcggggtactgtgaagtccctggaggcctggacccccatcctttcctgggtgggtcagggacagggtgggacagggacagagggcaagggtgagagggtagagagcgggcaacaggtagtaacagccggcccttctctcccagcacagcgactcggactccgaccccgagtactccacgctgccgccatccatccccagtgcggtgcccgtgaccggcgagtccttctgtgactgtgctgggcagagcgaggcctccttctgtagcagcctgcactcggcccaccggggcagggactgccgctgcggagaggaagacgagtgtgagcgtggggcccagcccctgctgggactgcactgcgggcgggcctgggggtgggcagggcagagccccatggagctctcagggctgccccagcctgggcctctcttgcagatttcgactgggtctgggatgacttaaataagtcatcagccaccctgctgagctgtgacaaccgtaaggtcagcttccacatggagtacagctgcggcacagcggccatccggggcaccaaggagctgggggagggccagcacttctgggagatcaagatgacctctcccgtctacggcaccgacatggtaagttgcttcggcccagggtgcttctggggaacctggctccggcagcccagccccgcgccctctgcctggcccctgttcctagatggtgggcatcgggacgtcggatgtggacctggacaaataccgccacacgttctgcagcctgctgggcagggatgaggacagctggggcctctcctacacgggtgcgtgaggcccagggtggggcggggccgagcctggagctcccgggctcactgcgaccctggctgcccccaggcctcctccaccacaagggcgacaagaccagcttctcgtcgcggttcggccagggctccatcattggcgtgcacctggacacctggcacggcacactcacctttttcaagaacaggaagtgtataggtgtggcagccaccaagctgcagaacaagagattctacccgatggtgtgctccacggcggcccggagcagcatgaaggtcacccgctcctgtgccagcgccacttccctccagtacctgtgctgccaccgcctgcgccagctgcggccagactcgggagacacgctggagggtctgccgctgccgccgggcctcaagcaggtgctacacaacaagctgggctgggtcctgagcatgagttgcagccgccgcaaggctccagtgtccgatccccaggcagcgacctccgcccaccccagcagtcgcgagcctcggccctgccagaggaagcgctgccgccggacctgactgacttcccagtggaactgccttcttgggctgggacagcccctttcctctgtcccttctttctctgtcccttccttccagccacactccagggcggagttggatgaggcccgtccggagggagccatctcttgctcccgaggctgggacagtcctttctgtgggggctctagggcccctctgctgctgtgctgggtggggaagcggctgccctgagccccaggtcttgtgggaggctgcgaggacgagagcctggctggagcccgcgttgctgttcccacagggcctcggtttttcctaacttgctctgcatgctgtcagcggctgccccgccgtcatagacttaaaggactgcaataaatgtagagttgatgtctaacacccaaaaaaaaaaaaaaaacactcgaaggcatttatgtccgggtggcggaaaaaaaaggaaatgaaagggccccctggttcctaagcttgtttccccggacccaagcttccattggaacaaaggggggtaaaaactgacccgattttcccataaagtggaagcgccgatcatctttcccgaaaaacgccaggtgtaacccggccctttaataggaatcgccctctacaatcacccgggggaattctatctcccgccctttaagtagcgcggtgtctgtttctttttttagcaactcaaaaggcaatctcttcctggaagatacctatacctgactatggagaaaaaag

SEQ ID NO: 736208 - DNA, 4575 bp, Homo sapiens
cgccggagccaatgggcgcagggggcggggatttgtttacgtctcgctccggggcggaaagtgggtcagggccgggccggcggagcgcgcagcgggggctgcagattctttccaccatggccagacgcccccggaacagcagggcctggcacttcgtcctgagtgcagcccgccgagacgcagatgcccgggccgtggctctagcaggctccactaactggggctacgactctgatgggcaggtaggttccagcgggcgaggcggacgtggctggcctaaggtgtggagatgccctaggcaggcaggcagacattacctgaacacggaatcagtcggagaaaaagatgcttctgaggctagaggaccagtccaaacctgggcctgtctcctggatgcaccgcattcagtaagactctttaatttggcaaaggacacacacagcctcaggggtgacaggacctcagaacacactgcattcttcactgtgctttctcctctgaaacacatggtgcatggagaggttggcagttgcttttggttcattcaacagaaattctccactacggggctgggcactgtggctcacacctataatcctagcactttgggaggctgaagctggaggaccacttgagcccaggagtttgagacctgcctgggcaacatggtgaaacactgtctctacaaaaatttaaaaaatgtgtcaggcgtggtggcacgtgcctgtagtcccaacgactcaggaggctgagctgggaggattgcttgagccagggaggtcaaggctgcagtgagccgtgatcacaccagtgcgttccagcctgggtgacagagctagaccctgactcaaaaaaaacaaaaacaaaaaaattctttggtttacccagcccatttctggaggtgaccattgttaacttgctggttgtcttaccagacgcttcttctgccagtacaaacgcatactctttgttcacatatgtgtgtgttaaaaaacaaacaaacagaaaaaccctgatccttgaaggtaaaaatttctgcacttgctcagggaggccaggaacctgaaggtattcagaacagctcaggtgtttgtctgtctgcagcccaggtgatctgacatgcttgtgggctttgcaggcagagctacctgcccccatggcccttgacccccaccttggcagaccctgagggcagctgcctggcctgacggggcgcagtgaggctgggaggggtgggggtccctgtggggggtgatttcccagtcggtttcctgagatctccctcggaccagagcaggagtgtggctgcgcctccctgccccacttccagctaccacaggtcatgtgccctggagcagtctctcctggcctcgcagggtcatggctgtgggacgcgggcgtgtccacaggccaggccagtgtctgacacacgcatgctgcttgtcctctgtcaccatgggccgtgtccttccggggcggctgcttgtgtgacctggtgctgctctctgctgtcacagctcccctgcgctgctgttccggctcagccaggtgtcctgggaggggtgggctcctctcctctgagtgaggactccctaagcccggtgggtccattaggccttgggggcaaattgggaaacagggtccttacccaccgggtgggggccgtcctgaggtctcctggagctccctgctccagccagggagaggcccccacctgccttcccgcccgcctccagctcctgcaggtcacatgcctgagcctcacaggctcgtggctgtgggatgcaggcgtgcctgcgggctcggcagtgttcgacacatgtgctgcttgtcctgtgtcaccaaatgggcctgcagtctgttgtgggcaggaggtaggcagtggcttcagtctttctccttctccagggaacccggccctgggcctgcagtgcaggtgctcagttctgtgcccgggctcctgactcagggggtctaccctggctctggggacccgcacttctaggcagtggggtagagttgtctgggcctgccttgtctgtggggtggggccatcccctccagaaaggacagtgtcctgccctgaagctggctttcgataggtccacgttcacctggaagctggtggcgcccatgtcatggtcccctgtggcttctcctggggatcacatcatctctctggaccagccctcaaccctcactgtcacaaggcctctgccacaggccccccgccaccacttagcactctccctgctgaccccctggtccattcagcccctgggtggcccccacacagtctgtgacagggaggaggctgggaggggcactgcctcccacaaggagctcacgttctggtgggaggaggccaagaatcaggaccaaggagaacttcagtgaagcaaaagaagaaaaatggaacaggggtgaaggggctggagaagcctcagggaggtgacagctgaaacctgcaccaggaggggcggggcctgtagtgggcactgggcagtaggaccctgtggtgagccaggtctgctcaggtaacaggaaggtcgttgggccacagtgtggtggggactgccctgaggccgggtggctgcagctgggcctggtgtgggggtggtggccttgcctgggggcccctgcagggctggcctagcagggaaggtgtccacaccatctcagctctgggcaggtggggtggacctggggcttatccaccgtctagaaaccacttggaggccaggcagccttggctactgctctgtggctgggcctccagggccctcctggtcatgcagaatggggcagagccggagcccgttgggagggagcctgggctgtgcgctcggggtactgtgaagtccctggaggcctggacccccatcctttcctgggtgggtcagggacagggtgggacagggacagagggcaagggtgagagggtagagagcgggcaacaggtagtaacagccggcccttctctcccagcacagcgactcggactccgaccccgagtactccacgctgccgccatccatccccagtgcggtgcccgtgaccggcgagtccttctgtgactgtgctgggcagagcgaggcctccttctgtagcagcctgcactcggcccaccggggcagggactgccgctgcggagaggaagacgagtgtgagcgtggggcccagcccctgctgggactgcactgcgggcgggcctgggggtgggcagggcagagccccatggagctctcagggctgccccagcctgggcctctcttgcagatttcgactgggtctgggatgacttaaataagtcatcagccaccctgctgagctgtgacaaccgtaaggtcagcttccacatggagtacagctgcggcacagcggccatccggggcaccaaggagctgggggagggccagcacttctgggagatcaagatgacctctcccgtctacggcaccgacatggtaagttgcttcggcccagggtgcttctggggaacctggctccggcagcccagccccgcgccctctgcctggcccctgttcctagatggtgggcatcgggacgtcggatgtggacctggacaaataccgccacacgttctgcagcctgctgggcagggatgaggacagctggggcctctcctacacgggtgcgtgaggcccagggtggggcggggccgagcctggagctcccgggctcactgcgaccctggctgcccccaggcctcctccaccacaagggcgacaagaccagcttctcgtcgcggttcggccagggctccatcattggcgtgcacctggacacctggcacggcacactcacctttttcaagaacaggaagtgtataggtgtggcagccaccaagctgcagaacaagagattctacccgatggtgtgctccacggcggcccggagcagcatgaaggtcacccgctcctgtgccagcgccacttccctccagtacctgtgctgccaccgcctgcgccagctgcggccagactcgggagacacgctggagggtctgccgctgccgccgggcctcaagcaggtgctacacaacaagctgggctgggtcctgagcatgagttgcagccgccgcaaggctccagtgtccgatccccaggcagcgacctccgcccaccccagcagtcgcgagcctcggccctgccagaggaagcgctgccgccggacctgactgacttcccagtggaactgccttcttgggctgggacagcccctttcctctgtcccttctttctctgtcccttccttccagccacactccagggcggagttggatgaggcccgtccggagggagccatctcttgctcccgaggctgggacagtcctttctgtgggggctctagggcccctctgctgctgtgctgggtggggaagcggctgccctgagccccaggtcttgtgggaggctgcgaggacgagagcctggctggagcccgcgttgctgttcccacagggcctcggtttttcctaacttgctctgcatgctcatacgcgatcctctctgctaacatgctgccctcacgtagttatctcgatgtcatgtg

SEQ ID NO: 736209 - DNA, 6254 bp, Homo sapiens
  misc_feature (4857)..(4857): n is a, c, g, or t
cgccggagccaatgggcgcagggggcggggatttgtttacgtctcgctccggggcggaaagtgggtcagggccgggccggcggagcgcgcagcgggggctgcagattctttccaccatggccagacgcccccggaacagcagggcctggcacttcgtcctgagtgcagcccgccgagacgcagatgcccgggccgtggctctagcaggctccactaactggggctacgactctgatgggcaggtaggttccagcgggcgaggcggacgtggctggcctaaggtgtggagatgccctaggcaggcaggcagacattacctgaacacggaatcagtcggagaaaaagatgcttctgaggctagaggaccagtccaaacctgggcctgtctcctggatgcaccgcattcagtaagactctttaatttggcaaaggacacacacagcctcaggggtgacaggacctcagaacacactgcattcttcactgtgctttctcctctgaaacacatggtgcatggagaggttggcagttgcttttggttcattcaacagaaattctccactacggggctgggcactgtggctcacacctataatcctagcactttgggaggctgaagctggaggaccacttgagcccaggagtttgagacctgcctgggcaacatggtgaaacactgtctctacaaaaatttaaaaaatgtgtcaggcgtggtggcacgtgcctgtagtcccaacgactcaggaggctgagctgggaggattgcttgagccagggaggtcaaggctgcagtgagccgtgatcacaccagtgcgttccagcctgggtgacagagctagaccctgactcaaaaaaaacaaaaacaaaaaaattctttggtttacccagcccatttctggaggtgaccattgttaacttgctggttgtcttaccagacgcttcttctgccagtacaaacgcatactctttgttcacatatgtgtgtgttaaaaaacaaacaaacagaaaaaccctgatccttgaaggtaaaaatttctgcacttgctcagggaggccaggaacctgaaggtattcagaacagctcaggtgtttgtctgtctgcagcccaggtgatctgacatgcttgtgggctttgcaggcagagctacctgcccccatggcccttgacccccaccttggcagaccctgagggcagctgcctggcctgacggggcgcagtgaggctgggaggggtgggggtccctgtggggggtgatttcccagtcggtttcctgagatctccctcggaccagagcaggagtgtggctgcgcctccctgccccacttccagctaccacaggtcatgtgccctggagcagtctctcctggcctcgcagggtcatggctgtgggacgcgggcgtgtccacaggccaggccagtgtctgacacacgcatgctgcttgtcctctgtcaccatgggccgtgtccttccggggcggctgcttgtgtgacctggtgctgctctctgctgtcacagctcccctgcgctgctgttccggctcagccaggtgtcctgggaggggtgggctcctctcctctgagtgaggactccctaagcccggtgggtccattaggccttgggggcaaattgggaaacagggtccttacccaccgggtgggggccgtcctgaggtctcctggagctccctgctccagccagggagaggcccccacctgccttcccgcccgcctccagctcctgcaggtcacatgcctgagcctcacaggctcgtggctgtgggatgcaggcgtgcctgcgggctcggcagtgttcgacacatgtgctgcttgtcctgtgtcaccaaatgggcctgcagtctgttgtgggcaggaggtaggcagtggcttcagtctttctccttctccagggaacccggccctgggcctgcagtgcaggtgctcagttctgtgcccgggctcctgactcagggggtctaccctggctctggggacccgcacttctaggcagtggggtagagttgtctgggcctgccttgtctgtggggtggggccatcccctccagaaaggacagtgtcctgccctgaagctggctttcgataggtccacgttcacctggaagctggtggcgcccatgtcatggtcccctgtggcttctcctggggatcacatcatctctctggaccagccctcaaccctcactgtcacaaggcctctgccacaggccccccgccaccacttagcactctccctgctgaccccctggtccattcagcccctgggtggcccccacacagtctgtgacagggaggaggctgggaggggcactgcctcccacaaggagctcacgttctggtgggaggaggccaagaatcaggaccaaggagaacttcagtgaagcaaaagaagaaaaatggaacaggggtgaaggggctggagaagcctcagggaggtgacagctgaaacctgcaccaggaggggcggggcctgtagtgggcactgggcagtaggaccctgtggtgagccaggtctgctcaggtaacaggaaggtcgttgggccacagtgtggtggggactgccctgaggccgggtggctgcagctgggcctggtgtgggggtggtggccttgcctgggggcccctgcagggctggcctagcagggaaggtgtccacaccatctcagctctgggcaggtggggtggacctggggcttatccaccgtctagaaaccacttggaggccaggcagccttggctactgctctgtggctgggcctccagggccctcctggtcatgcagaatggggcagagccggagcccgttgggagggagcctgggctgtgcgctcggggtactgtgaagtccctggaggcctggacccccatcctttcctgggtgggtcagggacagggtgggacagggacagagggcaagggtgagagggtagagagcgggcaacaggtagtaacagccggcccttctctcccagcacagcgactcggactccgaccccgagtactccacgctgccgccatccatccccagtgcggtgcccgtgaccggcgagtccttctgtgactgtgctgggcagagcgaggcctccttctgtagcagcctgcactcggcccaccggggcagggactgccgctgcggagaggaagacgagtgtgagcgtggggcccagcccctgctgggactgcactgcgggcgggcctgggggtgggcagggcagagccccatggagctctcagggctgccccagcctgggcctctcttgcagatttcgactgggtctgggatgacttaaataagtcatcagccaccctgctgagctgtgacaaccgtaaggtcagcttccacatggagtacagctgcggcacagcggccatccggggcaccaaggagctgggggagggccagcacttctgggagatcaagatgacctctcccgtctacggcaccgacatggtaagttgcttcggcccagggtgcttctggggaacctggctccggcagcccagccccgcgccctctgcctggcccctgttcctagatggtgggcatcgggacgtcggatgtggacctggacaaataccgccacacgttctgcagcctgctgggcagggatgaggacagctggggcctctcctacacgggtgcgtgaggcccagggtggggcggggccgagcctggagctcccgggctcactgcgaccctggctgcccccaggcctcctccaccacaagggcgacaagaccagcttctcgtcgcggttcggccagggctccatcattggcgtgcacctggacacctggcacggcacactcacctttttcaagaacaggaagtgtataggtgtggcagccaccaagctgcagaacaagagattctacccgatggtgtgctccacggcggcccggagcagcatgaaggtcacccgctcctgtgccagcgccacttccctccagtacctgtgctgccaccgcctgcgccagctgcggccagactcgggagacacgctggagggtctgccgctgccgccgggcctcaagcaggtgctacacaacaagctgggctgggtcctgagcatgagttgcacccctttcctctgtcccttctttctctgtcccttccttccagccacactccagggcggagttggatgaggcccgtccggagggagccatctcttgctcccgaggctgggacagtcctttctgtgggggctctagggcccctctgctgctgtgctgggtggggaagcggctgccctgagccccaggtcttgtgggaggctgcgaggacgagagcctggctggagcccgcgttgctgttcccacagggcctcggtttttcctaacttgctctgcatgctgtcagcggctgccccgccgtcatagacttaaaggactgcaataaatgtagagttgatgtctaacacccacatggcgtgagctgaaacgtatccgtgcagaggccgggcttgcgagcagcctgggccttctcccaggcctcactgcccctccacatccttgggagtcccctactgcttctggctgagggtgccacaccccaagcctccaggtggcagtggggccctggagctgccttctggtccctgccgagtgtgtgtgtgtgttgggggggcacagccctgctgctgaggcctcccctggggcctacgtgttcaggactcagcacaggaaccgccagccatctgccagccagaagcccctcttctcctcccagctacctaaaacttcccctgcaaccacccaccctccccctgaggtcagacctgctcagccagagaacccacccaggctgagggtccacatgtggctgggggtcctccccnaccgcccagggtgtctggtctgtccccaaggctgcatgctgtcctggtggtcccacgtgtggtcaggagcccaggtccagcaggagatcagggttggctgtggtcaggaagaggcagatgcggcgggagaggtcaggccccaccctgcggggacgcccgccttcactgggcggcacaggaaggtcggccaggaggcccatgcgctcccgctccgtgctgcaggcctccagcgcctgctgcagaaggcggggggaggggaaggctgtgacaactgcatcagccacggctgggctgacccgactgaactgcctgatctgcctccgccaggccgcctgcagccctgcgccgtctcttgccactggctcgccggctgcccagcgccctgctgtgcagaaggagaaggcctgggattcccggtactgccttgaggtgatcctgccccccttcagccttggcatcacgcacttgaggggatactgggcgagagccttggtaacggcgcacacgtgccgactcagctcctgccaagaggccaccagtagcacgtccaggtttgcccagagctgcaggagtaccagggcccagctcagacaggccctcacctcttccacctccggccagctgacggccacctcggcaccggccaccttcgggctctctggctgctgtgtcccccgggaaacgtgctggcgagacctgagcagaggtgaccattcctccccgctccccatggggcctgccctgcccgagcttggcctctgccagagcccacctcccctgaacccccgtcccagccagccctgctgtgggcatgagagtgagcggtaccacaggtaggcatccagcccgatgacagccaggtggggccgggcggtggtctcgggggagatccagggcacccagtgggttgggccagagatctgggtcagtgtggcgacgccctgcagaaactcctcgggctccagcagcagcagcaattcctgttcacctgcagcccacacttcaggaggcaggctgcgggggcaggggtcgggactcgctcgggtccaccgcaggctgcgggccgggcgctggggctcgatgcggcactcgcagcccagggcctccagggcctccatcaggacgtcggcaccggcgtcttccaggatggctgtgtccacgcacaccgcgaggcgcttcagcacctgctccggccgcagcagccgcaacgcctcggcagccgccctgcgctcacccgctgggtcccgggctctcgcggcggcctccgagccggcggagtcctcagcgtcggagtctgagatctcccaggttggaggtcgccgctgaccgctcccgccccgtccccggccccggccctggcaagagacccccgccctcccgggtccaacccgcgccat

SEQ ID NO: 736210 - DNA, 5871 bp, Homo sapiens
  misc_feature (4474)..(4474): n is a, c, g, or t
cgccggagccaatgggcgcagggggcggggatttgtttacgtctcgctccggggcggaaagtgggtcagggccgggccggcggagcgcgcagcgggggctgcagattctttccaccatggccagacgcccccggaacagcagggcctggcacttcgtcctgagtgcagcccgccgagacgcagatgcccgggccgtggctctagcaggctccactaactggggctacgactctgatgggcaggtaggttccagcgggcgaggcggacgtggctggcctaaggtgtggagatgccctaggcaggcaggcagacattacctgaacacggaatcagtcggagaaaaagatgcttctgaggctagaggaccagtccaaacctgggcctgtctcctggatgcaccgcattcagtaagactctttaatttggcaaaggacacacacagcctcaggggtgacaggacctcagaacacactgcattcttcactgtgctttctcctctgaaacacatggtgcatggagaggttggcagttgcttttggttcattcaacagaaattctccactacggggctgggcactgtggctcacacctataatcctagcactttgggaggctgaagctggaggaccacttgagcccaggagtttgagacctgcctgggcaacatggtgaaacactgtctctacaaaaatttaaaaaatgtgtcaggcgtggtggcacgtgcctgtagtcccaacgactcaggaggctgagctgggaggattgcttgagccagggaggtcaaggctgcagtgagccgtgatcacaccagtgcgttccagcctgggtgacagagctagaccctgactcaaaaaaaacaaaaacaaaaaaattctttggtttacccagcccatttctggaggtgaccattgttaacttgctggttgtcttaccagacgcttcttctgccagtacaaacgcatactctttgttcacatatgtgtgtgttaaaaaacaaacaaacagaaaaaccctgatccttgaaggtaaaaatttctgcacttgctcagggaggccaggaacctgaaggtattcagaacagctcaggtgtttgtctgtctgcagcccaggtgatctgacatgcttgtgggctttgcaggcagagctacctgcccccatggcccttgacccccaccttggcagaccctgagggcagctgcctggcctgacggggcgcagtgaggctgggaggggtgggggtccctgtggggggtgatttcccagtcggtttcctgagatctccctcggaccagagcaggagtgtggctgcgcctccctgccccacttccagctaccacaggtcatgtgccctggagcagtctctcctggcctcgcagggtcatggctgtgggacgcgggcgtgtccacaggccaggccagtgtctgacacacgcatgctgcttgtcctctgtcaccatgggccgtgtccttccggggcggctgcttgtgtgacctggtgctgctctctgctgtcacagctcccctgcgctgctgttccggctcagccaggtgtcctgggaggggtgggctcctctcctctgagtgaggactccctaagcccggtgggtccattaggccttgggggcaaattgggaaacagggtccttacccaccgggtgggggccgtcctgaggtctcctggagctccctgctccagccagggagaggcccccacctgccttcccgcccgcctccagctcctgcaggtcacatgcctgagcctcacaggctcgtggctgtgggatgcaggcgtgcctgcgggctcggcagtgttcgacacatgtgctgcttgtcctgtgtcaccaaatgggcctgcagtctgttgtgggcaggaggtaggcagtggcttcagtctttctccttctccagggaacccggccctgggcctgcagtgcaggtgctcagttctgtgcccgggctcctgactcagggggtctaccctggctctggggacccgcacttctaggcagtggggtagagttgtctgggcctgccttgtctgtggggtggggccatcccctccagaaaggacagtgtcctgccctgaagctggctttcgataggtccacgttcacctggaagctggtggcgcccatgtcatggtcccctgtggcttctcctggggatcacatcatctctctggaccagccctcaaccctcactgtcacaaggcctctgccacaggccccccgccaccacttagcactctccctgctgaccccctggtccattcagcccctgggtggcccccacacagtctgtgacagggaggaggctgggaggggcactgcctcccacaaggagctcacgttctggtgggaggaggccaagaatcaggaccaaggagaacttcagtgaagcaaaagaagaaaaatggaacaggggtgaaggggctggagaagcctcagggaggtgacagctgaaacctgcaccaggaggggcggggcctgtagtgggcactgggcagtaggaccctgtggtgagccaggtctgctcaggtaacaggaaggtcgttgggccacagtgtggtggggactgccctgaggccgggtggctgcagctgggcctggtgtgggggtggtggccttgcctgggggcccctgcagggctggcctagcagggaaggtgtccacaccatctcagctctgggcaggtggggtggacctggggcttatccaccgtctagaaaccacttggaggccaggcagccttggctactgctctgtggctgggcctccagggccctcctggtcatgcagaatggggcagagccggagcccgttgggagggagcctgggctgtgcgctcggggtactgtgaagtccctggaggcctggacccccatcctttcctgggtgggtcagggacagggtgggacagggacagagggcaagggtgagagggtagagagcgggcaacaggtagtaacagccggcccttctctcccagcacagcgactcggactccgaccccgagtactccacgctgccgccatccatccccagtgcggtgcccgtgaccggcgagtccttctgtgactgtgctgggcagagcgaggcctccttctgtagcagcctgcactcggcccaccggggcagggactgccgctgcggagaggaagacgagtgtgagcgtggggcccagcccctgctgggactgcactgcgggcgggcctgggggtgggcagggcagagccccatggagctctcagggctgccccagcctgggcctctcttgcagatttcgactgggtctgggatgacttaaataagtcatcagccaccctgctgagctgtgacaaccgtaaggtcagcttccacatggagtacagctgcggcacagcggccatccggggcaccaaggagctgggggagggccagcacttctgggagatcaagatgacctctcccgtctacggcaccgacatggtaagttgcttcggcccagggtgcttctggggaacctggctccggcagcccagccccgcgccctctgcctggcccctgttcctagatggtgggcatcgggacgtcggatgtggacctggacaaataccgccacacgttctgcagcctgctgggcagggatgaggacagctggggcctctcctacacgggtgcgtgaggcccagggtggggcggggccgagcctggagctcccgggctcactgcgaccctggctgcccccaggcctcctccaccacaagggcgacaagaccagcttctcgtcgcggttcggccagggctccatcattggcgtgcacctggacacctggcacggcacactcacctttttcaagaacaggaagtgtataggtgtggcagccaccaagctgcagaacaagagattctacccgatggtcttgtgggaggctgcgaggacgagagcctggctggagcccgcgttgctgttcccacagggcctcggtttttcctaacttgctctgcatgctgtcagcggctgccccgccgtcatagacttaaaggactgcaataaatgtagagttgatgtctaacacccacatggcgtgagctgaaacgtatccgtgcagaggccgggcttgcgagcagcctgggccttctcccaggcctcactgcccctccacatccttgggagtcccctactgcttctggctgagggtgccacaccccaagcctccaggtggcagtggggccctggagctgccttctggtccctgccgagtgtgtgtgtgtgttgggggggcacagccctgctgctgaggcctcccctggggcctacgtgttcaggactcagcacaggaaccgccagccatctgccagccagaagcccctcttctcctcccagctacctaaaacttcccctgcaaccacccaccctccccctgaggtcagacctgctcagccagagaacccacccaggctgagggtccacatgtggctgggggtcctccccnaccgcccagggtgtctggtctgtccccaaggctgcatgctgtcctggtggtcccacgtgtggtcaggagcccaggtccagcaggagatcagggttggctgtggtcaggaagaggcagatgcggcgggagaggtcaggccccaccctgcggggacgcccgccttcactgggcggcacaggaaggtcggccaggaggcccatgcgctcccgctccgtgctgcaggcctccagcgcctgctgcagaaggcggggggaggggaaggctgtgacaactgcatcagccacggctgggctgacccgactgaactgcctgatctgcctccgccaggccgcctgcagccctgcgccgtctcttgccactggctcgccggctgcccagcgccctgctgtgcagaaggagaaggcctgggattcccggtactgccttgaggtgatcctgccccccttcagccttggcatcacgcacttgaggggatactgggcgagagccttggtaacggcgcacacgtgccgactcagctcctgccaagaggccaccagtagcacgtccaggtttgcccagagctgcaggagtaccagggcccagctcagacaggccctcacctcttccacctccggccagctgacggccacctcggcaccggccaccttcgggctctctggctgctgtgtcccccgggaaacgtgctggcgagacctgagcagaggtgaccattcctccccgctccccatggggcctgccctgcccgagcttggcctctgccagagcccacctcccctgaacccccgtcccagccagccctgctgtgggcatgagagtgagcggtaccacaggtaggcatccagcccgatgacagccaggtggggccgggcggtggtctcgggggagatccagggcacccagtgggttgggccagagatctgggtcagtgtggcgacgccctgcagaaactcctcgggctccagcagcagcagcaattcctgttcacctgcagcccacacttcaggaggcaggctgcgggggcaggggtcgggactcgctcgggtccaccgcaggctgcgggccgggcgctggggctcgatgcggcactcgcagcccagggcctccagggcctccatcaggacgtcggcaccggcgtcttccaggatggctgtgtccacgcacaccgcgaggcgcttcagcacctgctccggccgcagcagccgcaacgcctcggcagccgccctgcgctcacccgctgggtcccgggctctcgcggcggcctccgagccggcggagtcctcagcgtcggagtctgagatctcccaggttggaggtcgccgctgaccgctcccgccccgtccccggccccggccctggcaagagacccccgccctcccgggtccaacccgcgccat

SEQ ID NO: 736211 - DNA, 6324 bp, Homo sapiens
  misc_feature (4927)..(4927): n is a, c, g, or t
cgccggagccaatgggcgcagggggcggggatttgtttacgtctcgctccggggcggaaagtgggtcagggccgggccggcggagcgcgcagcgggggctgcagattctttccaccatggccagacgcccccggaacagcagggcctggcacttcgtcctgagtgcagcccgccgagacgcagatgcccgggccgtggctctagcaggctccactaactggggctacgactctgatgggcaggtaggttccagcgggcgaggcggacgtggctggcctaaggtgtggagatgccctaggcaggcaggcagacattacctgaacacggaatcagtcggagaaaaagatgcttctgaggctagaggaccagtccaaacctgggcctgtctcctggatgcaccgcattcagtaagactctttaatttggcaaaggacacacacagcctcaggggtgacaggacctcagaacacactgcattcttcactgtgctttctcctctgaaacacatggtgcatggagaggttggcagttgcttttggttcattcaacagaaattctccactacggggctgggcactgtggctcacacctataatcctagcactttgggaggctgaagctggaggaccacttgagcccaggagtttgagacctgcctgggcaacatggtgaaacactgtctctacaaaaatttaaaaaatgtgtcaggcgtggtggcacgtgcctgtagtcccaacgactcaggaggctgagctgggaggattgcttgagccagggaggtcaaggctgcagtgagccgtgatcacaccagtgcgttccagcctgggtgacagagctagaccctgactcaaaaaaaacaaaaacaaaaaaattctttggtttacccagcccatttctggaggtgaccattgttaacttgctggttgtcttaccagacgcttcttctgccagtacaaacgcatactctttgttcacatatgtgtgtgttaaaaaacaaacaaacagaaaaaccctgatccttgaaggtaaaaatttctgcacttgctcagggaggccaggaacctgaaggtattcagaacagctcaggtgtttgtctgtctgcagcccaggtgatctgacatgcttgtgggctttgcaggcagagctacctgcccccatggcccttgacccccaccttggcagaccctgagggcagctgcctggcctgacggggcgcagtgaggctgggaggggtgggggtccctgtggggggtgatttcccagtcggtttcctgagatctccctcggaccagagcaggagtgtggctgcgcctccctgccccacttccagctaccacaggtcatgtgccctggagcagtctctcctggcctcgcagggtcatggctgtgggacgcgggcgtgtccacaggccaggccagtgtctgacacacgcatgctgcttgtcctctgtcaccatgggccgtgtccttccggggcggctgcttgtgtgacctggtgctgctctctgctgtcacagctcccctgcgctgctgttccggctcagccaggtgtcctgggaggggtgggctcctctcctctgagtgaggactccctaagcccggtgggtccattaggccttgggggcaaattgggaaacagggtccttacccaccgggtgggggccgtcctgaggtctcctggagctccctgctccagccagggagaggcccccacctgccttcccgcccgcctccagctcctgcaggtcacatgcctgagcctcacaggctcgtggctgtgggatgcaggcgtgcctgcgggctcggcagtgttcgacacatgtgctgcttgtcctgtgtcaccaaatgggcctgcagtctgttgtgggcaggaggtaggcagtggcttcagtctttctccttctccagggaacccggccctgggcctgcagtgcaggtgctcagttctgtgcccgggctcctgactcagggggtctaccctggctctggggacccgcacttctaggcagtggggtagagttgtctgggcctgccttgtctgtggggtggggccatcccctccagaaaggacagtgtcctgccctgaagctggctttcgataggtccacgttcacctggaagctggtggcgcccatgtcatggtcccctgtggcttctcctggggatcacatcatctctctggaccagccctcaaccctcactgtcacaaggcctctgccacaggccccccgccaccacttagcactctccctgctgaccccctggtccattcagcccctgggtggcccccacacagtctgtgacagggaggaggctgggaggggcactgcctcccacaaggagctcacgttctggtgggaggaggccaagaatcaggaccaaggagaacttcagtgaagcaaaagaagaaaaatggaacaggggtgaaggggctggagaagcctcagggaggtgacagctgaaacctgcaccaggaggggcggggcctgtagtgggcactgggcagtaggaccctgtggtgagccaggtctgctcaggtaacaggaaggtcgttgggccacagtgtggtggggactgccctgaggccgggtggctgcagctgggcctggtgtgggggtggtggccttgcctgggggcccctgcagggctggcctagcagggaaggtgtccacaccatctcagctctgggcaggtggggtggacctggggcttatccaccgtctagaaaccacttggaggccaggcagccttggctactgctctgtggctgggcctccagggccctcctggtcatgcagaatggggcagagccggagcccgttgggagggagcctgggctgtgcgctcggggtactgtgaagtccctggaggcctggacccccatcctttcctgggtgggtcagggacagggtgggacagggacagagggcaagggtgagagggtagagagcgggcaacaggtagtaacagccggcccttctctcccagcacagcgactcggactccgaccccgagtactccacgctgccgccatccatccccagtgcggtgcccgtgaccggcgagtccttctgtgactgtgctgggcagagcgaggcctccttctgtagcagcctgcactcggcccaccggggcagggactgccgctgcggagaggaagacgagtgtgagcgtggggcccagcccctgctgggactgcactgcgggcgggcctgggggtgggcagggcagagccccatggagctctcagggctgccccagcctgggcctctcttgcagatttcgactgggtctgggatgacttaaataagtcatcagccaccctgctgagctgtgacaaccgtaaggtcagcttccacatggagtacagctgcggcacagcggccatccggggcaccaaggagctgggggagggccagcacttctgggagatcaagatgacctctcccgtctacggcaccgacatggtaagttgcttcggcccagggtgcttctggggaacctggctccggcagcccagccccgcgccctctgcctggcccctgttcctagatggtgggcatcgggacgtcggatgtggacctggacaaataccgccacacgttctgcagcctgctgggcagggatgaggacagctggggcctctcctacacgggcctcctccaccacaagggcgacaagaccagcttctcgtcgcggttcggccagggctccatcattggcgtgcacctggacacctggcacggcacactcacctttttcaagaacaggaagtgtataggtgtggcagccaccaagctgcagaacaagagattctacccgatggtgtgctccacggcggcccggagcagcatgaaggtcacccgctcctgtgccagcgccacttccctccagtacctgtgctgccaccgcctgcgccagctgcggccagactcgggagacacgctggagggtctgccgctgccgccgggcctcaagcaggtgctacacaacaagctgggctgggtcctgagcatgagttgcagccgccgcaaggctccagtgtccgatccccaggcagcgacctccgcccaccccagcagtcgcgagcctcggccctgccagaggaagcgctgccgccggacctgactgacttcccagtggaactgccttcttgggctgggacagcccctttcctctgtcccttctttctctgtcccttccttccagccacactccagggcggagttggatgaggcccgtccggagggagccatctcttgctcccgaggctgggacagtcctttctgtgggggctctagggcccctctgctgctgtgctgggtggggaagcggctgccctgagccccaggtcttgtgggaggctgcgaggacgagagcctggctggagcccgcgttgctgttcccacagggcctcggtttttcctaacttgctctgcatgctgtcagcggctgccccgccgtcatagacttaaaggactgcaataaatgtagagttgatgtctaacacccacatggcgtgagctgaaacgtatccgtgcagaggccgggcttgcgagcagcctgggccttctcccaggcctcactgcccctccacatccttgggagtcccctactgcttctggctgagggtgccacaccccaagcctccaggtggcagtggggccctggagctgccttctggtccctgccgagtgtgtgtgtgtgttgggggggcacagccctgctgctgaggcctcccctggggcctacgtgttcaggactcagcacaggaaccgccagccatctgccagccagaagcccctcttctcctcccagctacctaaaacttcccctgcaaccacccaccctccccctgaggtcagacctgctcagccagagaacccacccaggctgagggtccacatgtggctgggggtcctccccnaccgcccagggtgtctggtctgtccccaaggctgcatgctgtcctggtggtcccacgtgtggtcaggagcccaggtccagcaggagatcagggttggctgtggtcaggaagaggcagatgcggcgggagaggtcaggccccaccctgcggggacgcccgccttcactgggcggcacaggaaggtcggccaggaggcccatgcgctcccgctccgtgctgcaggcctccagcgcctgctgcagaaggcggggggaggggaaggctgtgacaactgcatcagccacggctgggctgacccgactgaactgcctgatctgcctccgccaggccgcctgcagccctgcgccgtctcttgccactggctcgccggctgcccagcgccctgctgtgcagaaggagaaggcctgggattcccggtactgccttgaggtgatcctgccccccttcagccttggcatcacgcacttgaggggatactgggcgagagccttggtaacggcgcacacgtgccgactcagctcctgccaagaggccaccagtagcacgtccaggtttgcccagagctgcaggagtaccagggcccagctcagacaggccctcacctcttccacctccggccagctgacggccacctcggcaccggccaccttcgggctctctggctgctgtgtcccccgggaaacgtgctggcgagacctgagcagaggtgaccattcctccccgctccccatggggcctgccctgcccgagcttggcctctgccagagcccacctcccctgaacccccgtcccagccagccctgctgtgggcatgagagtgagcggtaccacaggtaggcatccagcccgatgacagccaggtggggccgggcggtggtctcgggggagatccagggcacccagtgggttgggccagagatctgggtcagtgtggcgacgccctgcagaaactcctcgggctccagcagcagcagcaattcctgttcacctgcagcccacacttcaggaggcaggctgcgggggcaggggtcgggactcgctcgggtccaccgcaggctgcgggccgggcgctggggctcgatgcggcactcgcagcccagggcctccagggcctccatcaggacgtcggcaccggcgtcttccaggatggctgtgtccacgcacaccgcgaggcgcttcagcacctgctccggccgcagcagccgcaacgcctcggcagccgccctgcgctcacccgctgggtcccgggctctcgcggcggcctccgagccggcggagtcctcagcgtcggagtctgagatctcccaggttggaggtcgccgctgaccgctcccgccccgtccccggccccggccctggcaagagacccccgccctcccgggtccaacccgcgccat

SEQ ID NO: 736212 - DNA, 4857 bp, Homo sapiens
cgccggagccaatgggcgcagggggcggggatttgtttacgtctcgctccggggcggaaagtgggtcagggccgggccggcggagcgcgcagcgggggctgcagattctttccaccatggccagacgcccccggaacagcagggcctggcacttcgtcctgagtgcagcccgccgagacgcagatgcccgggccgtggctctagcaggctccactaactggggctacgactctgatgggcaggtaggttccagcgggcgaggcggacgtggctggcctaaggtgtggagatgccctaggcaggcaggcagacattacctgaacacggaatcagtcggagaaaaagatgcttctgaggctagaggaccagtccaaacctgggcctgtctcctggatgcaccgcattcagtaagactctttaatttggcaaaggacacacacagcctcaggggtgacaggacctcagaacacactgcattcttcactgtgctttctcctctgaaacacatggtgcatggagaggttggcagttgcttttggttcattcaacagaaattctccactacggggctgggcactgtggctcacacctataatcctagcactttgggaggctgaagctggaggaccacttgagcccaggagtttgagacctgcctgggcaacatggtgaaacactgtctctacaaaaatttaaaaaatgtgtcaggcgtggtggcacgtgcctgtagtcccaacgactcaggaggctgagctgggaggattgcttgagccagggaggtcaaggctgcagtgagccgtgatcacaccagtgcgttccagcctgggtgacagagctagaccctgactcaaaaaaaacaaaaacaaaaaaattctttggtttacccagcccatttctggaggtgaccattgttaacttgctggttgtcttaccagacgcttcttctgccagtacaaacgcatactctttgttcacatatgtgtgtgttaaaaaacaaacaaacagaaaaaccctgatccttgaaggtaaaaatttctgcacttgctcagggaggccaggaacctgaaggtattcagaacagctcaggtgtttgtctgtctgcagcccaggtgatctgacatgcttgtgggctttgcaggcagagctacctgcccccatggcccttgacccccaccttggcagaccctgagggcagctgcctggcctgacggggcgcagtgaggctgggaggggtgggggtccctgtggggggtgatttcccagtcggtttcctgagatctccctcggaccagagcaggagtgtggctgcgcctccctgccccacttccagctaccacaggtcatgtgccctggagcagtctctcctggcctcgcagggtcatggctgtgggacgcgggcgtgtccacaggccaggccagtgtctgacacacgcatgctgcttgtcctctgtcaccatgggccgtgtccttccggggcggctgcttgtgtgacctggtgctgctctctgctgtcacagctcccctgcgctgctgttccggctcagccaggtgtcctgggaggggtgggctcctctcctctgagtgaggactccctaagcccggtgggtccattaggccttgggggcaaattgggaaacagggtccttacccaccgggtgggggccgtcctgaggtctcctggagctccctgctccagccagggagaggcccccacctgccttcccgcccgcctccagctcctgcaggtcacatgcctgagcctcacaggctcgtggctgtgggatgcaggcgtgcctgcgggctcggcagtgttcgacacatgtgctgcttgtcctgtgtcaccaaatgggcctgcagtctgttgtgggcaggaggtaggcagtggcttcagtctttctccttctccagggaacccggccctgggcctgcagtgcaggtgctcagttctgtgcccgggctcctgactcagggggtctaccctggctctggggacccgcacttctaggcagtggggtagagttgtctgggcctgccttgtctgtggggtggggccatcccctccagaaaggacagtgtcctgccctgaagctggctttcgataggtccacgttcacctggaagctggtggcgcccatgtcatggtcccctgtggcttctcctggggatcacatcatctctctggaccagccctcaaccctcactgtcacaaggcctctgccacaggccccccgccaccacttagcactctccctgctgaccccctggtccattcagcccctgggtggcccccacacagtctgtgacagggaggaggctgggaggggcactgcctcccacaaggagctcacgttctggtgggaggaggccaagaatcaggaccaaggagaacttcagtgaagcaaaagaagaaaaatggaacaggggtgaaggggctggagaagcctcagggaggtgacagctgaaacctgcaccaggaggggcggggcctgtagtgggcactgggcagtaggaccctgtggtgagccaggtctgctcaggtaacaggaaggtcgttgggccacagtgtggtggggactgccctgaggccgggtggctgcagctgggcctggtgtgggggtggtggccttgcctgggggcccctgcagggctggcctagcagggaaggtgtccacaccatctcagctctgggcaggtggggtggacctggggcttatccaccgtctagaaaccacttggaggccaggcagccttggctactgctctgtggctgggcctccagggccctcctggtcatgcagaatggggcagagccggagcccgttgggagggagcctgggctgtgcgctcggggtactgtgaagtccctggaggcctggacccccatcctttcctgggtgggtcagggacagggtgggacagggacagagggcaagggtgagagggtagagagcgggcaacaggtagtaacagccggcccttctctcccagcacagcgactcggactccgaccccgagtactccacgctgccgccatccatccccagtgcggtgcccgtgaccggcgagtccttctgtgactgtgctgggcagagcgaggcctccttctgtagcagcctgcactcggcccaccggggcagggactgccgctgcggagaggaagacgagtgtgagcgtggggcccagcccctgctgggactgcactgcgggcgggcctgggggtgggcagggcagagccccatggagctctcagggctgccccagcctgggcctctcttgcagatttcgactgggtctgggatgacttaaataagtcatcagccaccctgctgagctgtgacaaccgtaaggtcagcttccacatggagtacagctgcggcacagcggccatccggggcaccaaggagctgggggagggccagcacttctgggagatcaagatgacctctcccgtctacggcaccgacatggtaagttgcttcggcccagggtgcttctggggaacctggctccggcagcccagccccgcgccctctgcctggcccctgttcctagatggtgggcatcgggacgtcggatgtggacctggacaaataccgccacacgttctgcagcctgctgggcagggatgaggacagctggggcctctcctacacgggcctcctccaccacaagggcgacaagaccagcttctcgtcgcggttcggccagggctccatcattggcgtgcacctggacacctggcacggcacactcacctttttcaagaacaggaagtgtataggtgtggcagccaccaagctgcagaacaagagattctacccgatggtgtgctccacggcggcccggagcagcatgaaggtcacccgctcctgtgccagcgccacttccctccagtacctgtgctgccaccgcctgcgccagctgcggccagactcgggagacacgctggagggtctgccgctgccgccgggcctcaagcaggtgctacacaacaagctgggctgggtcctgagcatgagttgcagccgccgcaaggctccagtgtccgatccccaggcagcgacctccgcccaccccagcagtcgcgagcctcggccctgccagaggaagcgctgccgccggacctgactgacttcccagtggaactgccttcttgggctgggacagcccctttcctctgtcccttctttctctgtcccttccttccagccacactccagggcggagttggatgaggcccgtccggagggagccatctcttgctcccgaggctgggacagtcctttctgtgggggctctagggcccctctgctgctgtgctgggtggggaagcggctgccctgagccccaggtcttgtgggaggctgcgaggacgagagcctggctggagcccgcgttgctgttcccacagggcctcggtttttcctaacttgctctgcatgctgtcagcggctgccccgccgtcatagacttaaaggactgcaataaatgtagagttgatgtctaacacccaaaaaaaaaaaaaaaacactcgaaggcatttatgtccgggtggcggaaaaaaaaggaaatgaaagggccccctggttcctaagcttgtttccccggacccaagcttccattggaacaaaggggggtaaaaactgacccgattttcccataaagtggaagcgccgatcatctttcccgaaaaacgccaggtgtaacccggccctttaataggaatcgccctctacaatcacccgggggaattctatctcccgccctttaagtagcgcggtgtctgtttctttttttagcaactcaaaaggcaatctcttcctggaagatacctatacctgactatggagaaaaaag

SEQ ID NO: 736213 - DNA, 3689 bp, Homo sapiens
  misc_feature (7)..(7): n is a, c, g, or t
gtaccgngtccggaattcccgggataaataaacaaaaaaaatccattcatttactcatgcaataaattctcctgcaagcttttatgggcactcagtaagtactcaggattggctttatcagccttgccactgagcagctcatggtcctatggaacctgagccaggcctcagtctctccatgattggctcagctaactctcagttcagagtggagagtatcaatcttgtgtttttgcccttaggcagcactatatgagacatggggcctgtggtccttccttctggtgtcccccgtgttaaaagataaaaaacaccccaagggccgggcgcggtggctcatgcctgtaatcccagcactttgggaggctgaggcgggtggatcacgaggtcaggtgatcgaaaccatcctggctaagacggtgaaaccccgtctctactaaaaatacaaaaaattagctgggtgtggtggtgggcgcctgtagtcccagctgctcgggaggctgaggcaggagaatggcgtgaacccgggaggcggagcttgcagtgagcagagatcacgccactgcactccagcctgggtgacagtgcaagactctgtctcaaaaaaaaaaaaaaacactccaagggccatccgtgctctctgcccctcctgtggggaccaagtggggttaggaatggctcagtggggaaggagagcactcttgtccccagtcccttgccaccctgtcccttagatagggaggtgggctgcagagattggtgccagaagagggtgggtttgggaattggagctcctccaaggagctcctcctaagattgagtgctgcagctgtagtggctgctggttgggagagtaagtgccatcactaatttaaaagtccttgccatctggaatcaggctttgtcaacagcagctgagaaaagcagcctgtgcctctgctggccaggcctaggccctcgtcagagcgtgcctctccacaaggcacttgggcctgggtgattgttgcgcctctggctttggcgtttcctctttgcagcactttgcctacctcccccaagccctgagccactgcctgctggggctcctactgaggttctggaaacacctctgcacctgccgcccctgggaggaaagagggccacacaggaagtgtctgcagggagaggtggcactcggcagcctgagttcaggagaggtgcttggagcttcaggcagaggggccttcagaggagggaaacggagcaatgtgtcacaggcaggcaggggcaggactgccaccccaggccccgtgggaggcctgctgagggcacagagctgctcggtgcagccttcatgctttgatctggaaagagcagctgtccgcaggcctctgtctccaagaggcctgtcacacaggaggaccgctggaaacataccaacacgtgcagtctcccctccaagctattcatgctgtttgtggaatctctctcaaacataagtgtcaggtgtgtgtcgtcccaacgggtcctgtgctgtgaatagatccatgtgcagcacaaagggaatgtggcacgtggccccaggaagagttcacccggccagggggcagttgttcagttgcctggggctgacactgaccactggcctctggggtgtcctgcagcccaaatgcccaccttgccctcctcacatctcagtcaggggaggccatgcccaagccaatgtgctgtcacagcctgcagcgggggcagcacttcctcggagggcctgggaggtgctggggatgccccagcgcttctcttcctgcctcgccctggcatggcccagcgcctctaggatcaacttacgatccgtggagcagccccgggaaacccaaatctggctcaggacagcgtacgggcaggagggctgtaaatcatcccaggctaagcctccgtgggcactggctcctgccgcagcctggctatggactcagttagaaccaggtagaaagtcagcgacaccccacagaaggccactgcggctaggtaaacacctgagaaagaaactgctccagaagagatgacgtgggcttccaggagcatggaggaggtggcacttgaacttttaggaaactccttagatgagataaagtgggggttggaggtggcgaaaagagggtaaccctgggaaagtcagtcagaacccatggcagaagactgcaggagaggcaggggaggggcttcggggaccactgtggacagagctctgaaagcaccctggccaaagcccctcctgaggtgacagagcgtgggaggaggctgcactgggcctgcgtgccatcctcacccctgttccccgctggcgccaggccctgccttcttggtacctgtgccaacaggagagccctcaccagccgatcttgtcactctccgtggtgacagtgtcttggccagctgtggcccctagtttctagcagcgtttctcagtgtccttggcccttctgagaaggcaggcgggaggcacacggtgccctgtttcttccccgtttgtccagttgcttgcaaagcagagaatgagtaggagtgaacccgagtgacttcacccgccctgtcccccacgtcaggacaggcttgaggcctctctgggcgtgagcgaggaaaccaggctgctctaacttctgaagagtgggctctggctcaagactccaatcggccagaagcccacagagatcaaagcactagcaagttcagctgtcctggccctcgggtagaacccacgggcgtgcctgggtgcggctccacccacatgccccactgtcagcccaggcaggagccttcctggccgggctcaggatctgcctgcagcccagccaggccatcacccagccccgatgcatcctggcactgcacgcttactcttcacaagcacttatacgcggatggcctccgagaccctgcctccctggtctgctgaggtcaggccaggtctcccacggagccgggcagctccacaccccaccacctggcaccgttaggtttcagatctcccgtgtggtgtttgatgtcggcttttgttcctaccttgggagtttggattgtttcctctggtgtctttgtttaccttcctcactgttctacctcctggccaggtctcagcttagcttccctggtgtggggtgtttttcaagccttccagccacagctgtctcccctcaggctggacggctccggggtgacagggcttcaccctctgcctgcagacccctggtgggcacatctcacaggcttccgtcttgctgagttgggtacggaggcagaagtggggtgtggaggaaagtcagagggaaatctgcttcagaaaggaagggtctttagacacaaagactggaggcccttccccgcccgcacgggagctgccatcgtgggtctcatgcacgtcaagaccttcccacatccaaactcagcttccagcagggattttgactttggatgacaaggctttatttgtaaatatgctcttaatatgcaactttgagaataaaatagaaacatcatgtattttaaaatataagatgaagtgtgacgcactgtatacaatttaatatatatttttagggttttgttatttaagaaaatggaatgtaatggtacttttacaaaagagaaaaaatgttatttttactttctggaaaaaataaatattctcattgttgtagaaagaaaaaaag

SEQ ID NO: 736214 - DNA, 1750 bp, Homo sapiens
tttcgggagccttaaccctccgggagccgtaccctcagcgacaccccacagaaggccactgcggctaggtaaacacctgagaaagaaactgctccagaagagatgacgtgggcttccaggagcatggaggaggtggcacttgaacttttaggaaactccttagatgagataaagtgggggttggaggtggcgaaaagagggtaaccctgggaaagtcagtcagaacccatggcagaagactgcaggagaggcaggggaggggcttcggggaccactgtggacagagctctgaaagcaccctggccaaagcccctcctgaggtgacagagcgtgggaggaggctgcactgggcctgcgtgccatcctcacccctgttccccgctggcgccaggccctgccttcttggtacctgtgccaacaggagagccctcaccagccgatcttgtcactctccgtggtgacagtgtcttggccagctgtggcccctagtttctagcagcgtttctcagtgtccttggcccttctgagaaggcaggcgggaggcacacggtgccctgtttcttccccgtttgtccagttgcttgcaaagcagagaatgagtaggagtgaacccgagtgacttcacccgccctgtcccccacgtcaggacaggcttgaggcctctctgggcgtgagcgaggaaaccaggctgctctaacttctgaagagtgggctctggctcaagactccaatcggccagaagcccacagagatcaaagcactagcaagttcagctgtcctggccctcgggtagaacccacgggcgtgcctgggtgcggctccacccacatgccccactgtcagcccaggcaggagccttcctggccgggctcaggatctgcctgcagcccagccaggccatcacccagccccgatgcatcctggcactgcacgcttactcttcacaagcacttatacgcggatggcctccgagaccctgcctccctggtctgctgaggtcaggccaggtctcccacggagccgggcagctccacaccccaccacctggcaccgttaggtttcagatctcccgtgtggtgtttgatgtcggcttttgttcctaccttgggagtttggattgtttcctctggtgtctttgtttaccttcctcactgttctacctcctggccaggtctcagcttagcttccctggtgtggggtgtttttcaagccttccagccacagctgtctcccctcaggctggacggctccggggtgacagggcttcaccctctgcctgcagacccctggtgggcacatctcacaggcttccgtcttgctgagttgggtacggaggcagaagtggggtgtggaggaaagtcagagggaaatctgcttcagaaaggaagggtctttagacacaaagactggaggcccttccccgcccgcacgggagctgccatcgtgggtctcatgcacgtcaagaccttcccacatccaaactcagcttccagcagggattttgactttggatgacaaggctttatttgtaaatatgctcttaatatgcaactttgagaataaaatagaaacatcatgtattttaaaatataagatgaagtgtgacgcactgtatacaatttaatatatatttttagggttttgttatttaagaaaatggaatgtaatggtacttttacaaaagagaaaaaatgttatttttactttctggaaaaaataaatattctcattgttgtagaaagaaaaaaag

SEQ ID NO: 736215 - DNA, 998 bp, Homo sapiens
cagtggagtagcatgaatgactccatgtgacagtctcctttaatgattgatattatttttgagtcaggcataggattgcttttggttattcacaccacttctctattatcttcacacagataataaaacattgattcagatagctgctttaaactataaaattctaggcccatggcttggccatgtcttgtagtcctagcacctaggacagggcctgacttccagtgggttttcggtcatgtttgttggctggaacagaaccaccctaagatgatatgttattggttaagagcctacaagtggactgcttaatttttaagctgggttaatatgatctaaacaatattttttttggcatgcatgtaatgtaagaaaaaagattgttattattttgaaaacaaactgaaaactgaaaaccattaaacagatgtagttttgctccagacacattgccaaaaataatgtaaatagtgtaaattgtgctgaaatgggaaggaaaggaaacaaaatctaaagggagagaaacattacagctagaaagcaaagttattttttagaactattatttctgttgtgaccttttcttcaagttaactgataatacacagtgagttgctttttctaatacagaaacccgtggcattctaggagcttatttataaccccctgcgaggagcaggcagtaaggaagaaagcttcattatgcattttaaacactgtgcttcgtgtggtcagatgaaatgttattctgcttgcactgtggtatcttttacgtctgagcaaacatacctggcttactttccccaacttccccctctcttttttctctgttcaggaaatcaatttggttgaatttcttgtgtagggtgaaatccatggactcgtacagagttggtgagtgggccatcaatgggatctctgttagctcatttttcatcagggagatacatttctttcccaaagctgtgatctaggagagttgccaagcagctagagtt

SEQ ID NO: 736216 - DNA, 819 bp, Homo sapiens
  misc_feature (13)..(13): n is a, c, g, or t
  misc_feature (16)..(16): n is a, c, g, or t
  misc_feature (20)..(20): n is a, c, g, or t
gagcttctgagtntgntgantggtaccgacagggcctgacttccagtgggttttcggtcatgtttgttggctggaacagaaccaccctaagatgatatgttattggttaagagcctacaagtggactgcttaatttttaagctgggttaatatgatctaaacaatattttttttggcatgcatgtaatgtaagaaaaaagattgttattattttgaaaacaaactgaaaactgaaaaccattaaacagatgtagttttgctccagacacattgccaaaaataatgtaaatagtgtaaattgtgctgaaatgggaaggaaaggaaacaaaatctaaagggagagaaacattacagctagaaagcaaagttattttttagaactattatttctgttgtgaccttttcttcaagttaactgataatacacagtgagttgctttttctaatacagaaacccgtggcattctaggagcttatttataaccccctgcgaggagcaggcagtaaggaagaaagcttcattatgcattttaaacactgtgcttcgtgtggtcagatgaaatgttattctgcttgcactgtggtatcttttacgtctgagcaaacatacctggcttactttccccaacttccccctctcttttttctctgttcaggaaatcaatttggttgaatttcttgtgtagggtgaaatccatggactcgtacagagttggtgagtgggccatcaatgggatctctgttagctcatttttcatcagggagatacatttctttcccaaagctgtgatctaggagagttgccaagcagctagagtt

SEQ ID NO: 736217 - DNA, 1200 bp, Homo sapiens
aattcatgcttcagattggttcataataccatttccagaaatgtattccatggggattacaaagaatctaggtgtgtgttggggggcacctacagtcaaacaaattcagaaaattgtggattaaataaagcaaaatagtattctgtaggactactgaatactatggtatattgggactctccattgggaggtaattttatacagcatctcctcaacttatatgacaaaataactcactttctgaagcatcttaacagacatttcagtgaataacacattggaaaatggtgatcttttgtgctttctgtcaggttttgatatcatggttatgctggcctcaggaatgatgaaactattagaaatctgtcttcttctatacactagaatattttaaataacgtgggggtggtctgtttattgaaggtttgatagaattcactcataagagctttttggtccagcattcctttttttgtgtgcgtggaaaggggtatagatctttgacaatctttccatttatttcatggtaatggttagattcagttttcaaccataatattgaccgttttcataatattgaccgttttcatatatgttcattgcccttccctgaaacaggattatatttccctctcatgatgtaggtttggccatgtgactggcaatgtcccagctaggggcttttctattagcttggattcaggagtaaagtaaacatggagcagagcaatccttgacctataatggacatgtagcccccaggactgggaatgactaccacagcaagtcatagccaatctagattaacacgtacatctggctgggcgtggtggctcaaacctgtaatctcagcactttgggaggccaaggcaggaggatagcttgaggctgggagttcgagaccagcctgggcaacatagtgagaccctgtctctacaaacaaaaacaaaaacaaaaacactgcatacatcctcatgagtaaattttggtaatttgtgttttccctgaaaattatctatttcaggtagatttccaaatgcattggtgtacagttgtacttagcataatttaaaaatttctgtaatggtggatagaaacctctctctcatttgtagtcttgtgtgttttctcttcttattacttatttttatcggtattttcaaataaacagcacttggttttatcaattttacttcctct

SEQ ID NO: 736218 - DNA, 1588 bp, Homo sapiens
cacaaaacagaagatgagagaatgggtggctgtatgcacagtacccaggacaaatctctccacttggaaggagatcccaatccttctgcagccccaacatccacctgcgcacctaggaaaatgcccaaaaggatttcaatatccaaacaactggcttcagtgaaagctctgaggaagtgctcagatctggaaaaagctattgccaccactgctctgattttcagaaattcttctgactctgatggtaaacttgaaaaagctattgccaaagatctgctgcaaacccaatttaggaatttcgcagagggacaagaaaccaagccaaaatacagagagatcctttctgaacttgatgagcacacagaaaataagctagattttgaagacttcatgatcttgctcttaagcatcactgtcatgtcagatctgctacaaaatatacggaatgtaaaaattatgaaatgaacagttttaaatatgctgtataaaataatggcaaaagacagtgttattaaaatgtttccatcttatttttgattaattgaatatatctatcatgcatctgaaattgcctaggatggttctgattgctggtattcagatccaatgtaactccaaatatttacccatacacttcaagaatgtttgaatgataaggtctctgtgtgctttacaataggatagatttgataccactgaataataaatggcttttgctgagtcagtagcgacctagagcactctacttatagtcattgagtcactcatttattcactaaacatttgttgagcatctacttgatggaactgctgaggatacagtaatgaattggccaggcaattccttccttcagacatgtttgcagaagtctagcagaagagatagacattgaacaatttttaaataattgcatacacagtataattagaattgaaataagggctataggatgctaaaagagattatcacctgatcggagttcaaaggtcagaaaagctttactgacattctataaaaagcaaaaaaaaaaaaattggtccatggatgccagggatatgggtgggaaatggggctgtccacaaatggcacaaggggagttttttattttattttattttattttattttattttattttgagacagagttttgctcttgttgcccaggctggagtgcaatggcacgatctcagcttactgcaacctcgatctcccaggttcaagtgattctcctgcctcagcctcctgagtagctgggattacaggcgtgtgccacgatgccaggctaattttttttgtatttttagtggagacggggtttcgccatgtcggccaggctggtctcgaactcctgacctcaggtggtccgcccacagcctcccaaagtgctgggattacaggcttgagccaccaagtctggccaaggggacttttaagggggctggaaatggtctccattttgattgtgaggtggtggctacaagattgcatgcatttgtcaaactcatagaactgcacactgaaaagagtgaattgtactgtatgtcaattatacctaaataaatctgacttaacaaaaaaataaaac

SEQ ID NO: 736219 - DNA, 1483 bp, Homo sapiens
  misc_feature (121)..(122): n is a, c, g, or t
  misc_feature (233)..(236): n is a, c, g, or t
  misc_feature (406)..(406): n is a, c, g, or t
  misc_feature (683)..(683): n is a, c, g, or t
  misc_feature (948)..(948): n is a, c, g, or t
  misc_feature (977)..(977): n is a, c, g, or t
  misc_feature (1042)..(1042): n is a, c, g, or t
  misc_feature (1067)..(1067): n is a, c, g, or t
  misc_feature (1271)..(1271): n is a, c, g, or t
  misc_feature (1320)..(1321): n is a, c, g, or t
cactcgctggcttcccctcactccatctctgtgcccagagaaacaggggtactccaggggaatcctgtcctctgactgttcccagtagaaggcgggagcagaattttttcttttctctctnncccttctggttccccttcctctctgtgcccctcatcctttggattactcatcaaatgagcagcaacaacacccctagaccagctggtcctgtcctgggtcatctcgttgtnnnnagtttctagctggtataaggttaaagataccctttccagccccagcaaagccttaggcatttctgggattgctcctgactctgatgggcatcctcactcctcagacatttccaatctcccccacttcactgcagctttgcttccccttccccactggaagaaggaaacantcgctctcctttcccgttcacatgtctgatatttgctatgatattgaccttcacacacatcttagaggttctgtattttcctctcttttgacttctccctatcactactctactcaggcatagattcagtctagagctcttcaacagcaatgaaacggtaaacgaggggtaaacaaaacccagagatgtcatcaggtgcctgctaggagtcccacccgttcccctctagccctggcctgcccctccctaccagagtcttgattctccttcaaaactntggagaggttacatctggcagggtttggggacacctcttgcctccatctcaaacttccgctgcctccgagccacctttgactcctcctgggccccccttccaggtgcctcaagtgcagaggtcagccttcggttcaaattctatttctgggcttcagtgtccctgcaacctctataatagaaggaacagagtggtctatgtttctttctttctctgggagattggatgtagactcgggagacctgagttctggctctgtcttatnaattcaaattgtttaatctctctgagccncagtttacccacttggaaaagaagagttaggccacatggtctctgtcatcctgggattctgagtnaactgctccccttcagccagatccnaggggcatatccccccaacctgggacccaggcccccttcccttgcagcctctctcagttgtgagtgcacaggccagagggggttgagaggagccaagggggggcatgccgtgggacaaacgggctgtctagggccagtggctaaaggggcgggaggggaggagtcctcagggatcctgtttcaacaaacgtttctttcggaggnggggaaggcgggggagagggggagaaggacctatttaaagctaccctgnngctttggctttctctgtctgccagggtctccgactgtcccagacgggctggtgtgggcttgggatcctcctggtgacctctcccgctaaggtccctcagccactctgccccaagatgggccgtggggtgagtatccctaaagagcaggggtcgcagtctaga

SEQ ID NO: 736220 - DNA, 1844 bp, Homo sapiens
  misc_feature (121)..(122): n is a, c, g, or t
  misc_feature (233)..(236): n is a, c, g, or t
  misc_feature (406)..(406): n is a, c, g, or t
  misc_feature (683)..(683): n is a, c, g, or t
  misc_feature (948)..(948): n is a, c, g, or t
  misc_feature (977)..(977): n is a, c, g, or t
  misc_feature (1042)..(1042): n is a, c, g, or t
  misc_feature (1067)..(1067): n is a, c, g, or t
  misc_feature (1271)..(1271): n is a, c, g, or t
  misc_feature (1320)..(1321): n is a, c, g, or t
cactcgctggcttcccctcactccatctctgtgcccagagaaacaggggtactccaggggaatcctgtcctctgactgttcccagtagaaggcgggagcagaattttttcttttctctctnncccttctggttccccttcctctctgtgcccctcatcctttggattactcatcaaatgagcagcaacaacacccctagaccagctggtcctgtcctgggtcatctcgttgtnnnnagtttctagctggtataaggttaaagataccctttccagccccagcaaagccttaggcatttctgggattgctcctgactctgatgggcatcctcactcctcagacatttccaatctcccccacttcactgcagctttgcttccccttccccactggaagaaggaaacantcgctctcctttcccgttcacatgtctgatatttgctatgatattgaccttcacacacatcttagaggttctgtattttcctctcttttgacttctccctatcactactctactcaggcatagattcagtctagagctcttcaacagcaatgaaacggtaaacgaggggtaaacaaaacccagagatgtcatcaggtgcctgctaggagtcccacccgttcccctctagccctggcctgcccctccctaccagagtcttgattctccttcaaaactntggagaggttacatctggcagggtttggggacacctcttgcctccatctcaaacttccgctgcctccgagccacctttgactcctcctgggccccccttccaggtgcctcaagtgcagaggtcagccttcggttcaaattctatttctgggcttcagtgtccctgcaacctctataatagaaggaacagagtggtctatgtttctttctttctctgggagattggatgtagactcgggagacctgagttctggctctgtcttatnaattcaaattgtttaatctctctgagccncagtttacccacttggaaaagaagagttaggccacatggtctctgtcatcctgggattctgagtnaactgctccccttcagccagatccnaggggcatatccccccaacctgggacccaggcccccttcccttgcagcctctctcagttgtgagtgcacaggccagagggggttgagaggagccaagggggggcatgccgtgggacaaacgggctgtctagggccagtggctaaaggggcgggaggggaggagtcctcagggatcctgtttcaacaaacgtttctttcggaggnggggaaggcgggggagagggggagaaggacctatttaaagctaccctgnngctttggctttctctgtctgccagggtctccgactgtcccagacgggctggtgtgggcttgggatcctcctggtgacctctcccgctaaggtccctcagccactctgccccaagatgggccgtggggctggccgtgagtactcacctgccgccaccacggcagagaatgggggcggcaagaagaaacagaaggagaaggaactggatgagctgaagaaggaggtggcaatggatgaccacaagctgtccttggatgagctgggccgcaaataccaagtggacctgtccaaggtgagtggaggggcttctagggaaggaacaaaagaggcaagaaaaccatgcagcatcaaggtggcaggagccttaaaactgtaatccagccttctttacagatgaggaaactgaggcccagaaacaaggactggcccaaggacatgcagctagttggtggcacagccagaactagaatttggatcccctgcatcctagcccaaagctctctccctgtataccctagaagcca

SEQ ID NO: 736221 - DNA, 727 bp, Homo sapiens
  misc_feature (6)..(6): n is a, c, g, or t
  misc_feature (609)..(609): n is a, c, g, or t
  misc_feature (624)..(625): n is a, c, g, or t
  misc_feature (722)..(722): n is a, c, g, or t
ctcggnctctaccttgtctgctgaggaaaatggaagacctaaggcagacaggaaggaagcacaaaagacaagcattgggtcagacccataaaccacctcccaaaggctgtcatttcattgcactggaattttgctttatcagaagcaaggaagtaagggagtcattgccttgggcctgggaatctaagtgggagacaatattaatttggatccgattaattggagattactaactgtggacaaaagtttatctttgcacaatcaataaaaatggcatttttttagtaaattaagagcataaacaatattgctagaggtggcatgtttagtctaccaaaaacaatacttttcaggcactttagaaatatccttttagaagcagcgagtgcatgggctaattatcatcaatctttatgtatttgttaaagaaacatctacaggatctttattggtgaccttttgtaagacattagtttgaggtactacctatgtacttgaaaataataaagtggcatttctttatgaaaaaaaaaaaaaaactgagttttacccatctttataaatgatgctacactactaaactgtgatgcatttgacatctgtcattcntctgtggctgaccanncatgcaacattctttatattttgggcacttcattactgtgagaagcttaagaccttctttccacccgtgaacataagggggccacatacttggtttnccaat

SEQ ID NO: 736222 - DNA, 3566 bp, Homo sapiens
  misc_feature (121)..(122): n is a, c, g, or t
  misc_feature (233)..(236): n is a, c, g, or t
  misc_feature (406)..(406): n is a, c, g, or t
  misc_feature (683)..(683): n is a, c, g, or t
  misc_feature (948)..(948): n is a, c, g, or t
  misc_feature (977)..(977): n is a, c, g, or t
  misc_feature (1042)..(1042): n is a, c, g, or t
  misc_feature (1067)..(1067): n is a, c, g, or t
  misc_feature (1271)..(1271): n is a, c, g, or t
  misc_feature (1320)..(1321): n is a, c, g, or t
cactcgctggcttcccctcactccatctctgtgcccagagaaacaggggtactccaggggaatcctgtcctctgactgttcccagtagaaggcgggagcagaattttttcttttctctctnncccttctggttccccttcctctctgtgcccctcatcctttggattactcatcaaatgagcagcaacaacacccctagaccagctggtcctgtcctgggtcatctcgttgtnnnnagtttctagctggtataaggttaaagataccctttccagccccagcaaagccttaggcatttctgggattgctcctgactctgatgggcatcctcactcctcagacatttccaatctcccccacttcactgcagctttgcttccccttccccactggaagaaggaaacantcgctctcctttcccgttcacatgtctgatatttgctatgatattgaccttcacacacatcttagaggttctgtattttcctctcttttgacttctccctatcactactctactcaggcatagattcagtctagagctcttcaacagcaatgaaacggtaaacgaggggtaaacaaaacccagagatgtcatcaggtgcctgctaggagtcccacccgttcccctctagccctggcctgcccctccctaccagagtcttgattctccttcaaaactntggagaggttacatctggcagggtttggggacacctcttgcctccatctcaaacttccgctgcctccgagccacctttgactcctcctgggccccccttccaggtgcctcaagtgcagaggtcagccttcggttcaaattctatttctgggcttcagtgtccctgcaacctctataatagaaggaacagagtggtctatgtttctttctttctctgggagattggatgtagactcgggagacctgagttctggctctgtcttatnaattcaaattgtttaatctctctgagccncagtttacccacttggaaaagaagagttaggccacatggtctctgtcatcctgggattctgagtnaactgctccccttcagccagatccnaggggcatatccccccaacctgggacccaggcccccttcccttgcagcctctctcagttgtgagtgcacaggccagagggggttgagaggagccaagggggggcatgccgtgggacaaacgggctgtctagggccagtggctaaaggggcgggaggggaggagtcctcagggatcctgtttcaacaaacgtttctttcggaggnggggaaggcgggggagagggggagaaggacctatttaaagctaccctgnngctttggctttctctgtctgccagggtctccgactgtcccagacgggctggtgtgggcttgggatcctcctggtgacctctcccgctaaggtccctcagccactctgccccaagatgggccgtggggctggccgtgagtactcacctgccgccaccacggcagagaatgggggcggcaagaagaaacagaaggagaaggaactggatgagctgaagaaggaggtggcaatggatgaccacaagctgtccttggatgagctgggccgcaaataccaagtggacctgtccaagggcctcaccaaccagcgggctcaggacgttctggctcgagatgggcccaacgccctcacaccacctcccacaacccctgagtgggtcaagttctgccgtcagcttttcggggggttctccatcctgctgtggattggggctatcctctgcttcctggcctacggcatccaggctgccatggaggatgaaccatccaacgacaatctatatctgggtgtggtgctggcagctgtggtcattgtcactggctgcttctcctactaccaggaggccaagagctccaagatcatggattccttcaagaacatggtacctcagcaagcccttgtgatccgggagggagagaagatgcagatcaacgcagaggaagtggtggtgggagacctggtggaggtgaagggtggagaccgcgtccctgctgacctccggatcatctcttctcatggctgtaaggtggataactcatccttaacaggagagtcggagccccagacccgctcccccgagttcacccatgagaaccccctggagacccgcaatatctgtttcttctccaccaactgtgttgaaggcactgccaggggcattgtgattgccacaggagaccggacggtgatgggccgcatagctactctcgcctcaggcctggaggttgggcggacacccatagcaatggagattgaacacttcatccagctgatcacaggggtcgctgtattcctgggggtctccttcttcgtgctctccctcatcctgggctacagctggctggaggcagtcatcttcctcatcggcatcatagtggccaacgtgcctgaggggcttctggccactgtcactgtgtgcctgaccctgacagccaagcgcatggcacggaagaactgcctggtgaagaacctggaggcggtggagacgctgggctccacgtccaccatctgctcggacaagacgggcaccctcacccagaaccgcatgaccgtcgcccacatgtggttcgacaaccaaatccatgaggctgacaccaccgaagatcagtctggggccacttttgacaaacgatcccctacgtggacggccctgtctcgaattgctggtctctgcaaccgcgccgtcttcaaggcaggacaggagaacatctccgtgtctaagcgggacacagctggtgatgcctctgagtcagctctgctcaagtgcattgagctctcctgtggctcagtgaggaaaatgagagacagaaaccccaaggtggcagagattcctttcaactctaccaacaagtaccagctgtctatccacgagcgagaagacagcccccagagccacgtgctggtgatgaagggggccccagagcgcattctggaccggtgctccaccatcctggtgcagggcaaggagatcccgctcgacaaggagatgcaagatgcctttcaaaatgcctacatggagctggggggacttggggagcgtgtgctgggattctgtcaactgaatctgccatctggaaagtttcctcggggcttcaaattcgacacggatgagctgaactttcccacggagaagctttgctttgtggggctcatgtctatgattgaccctccccgggctgctgtgccagatgctgtgggcaagtgccgaagcgcaggcatcaaggtactggcctcccatcctcccctccattctagcctcccccatgccagagttcaaggagctgcagtggctgctgccctggaaaggcccaggccacggtggcctccttcccactgactcagagaagaagctgtccatctgcaaggaaaggcccacccctgccttggggcactcacccttatcccttttgctcagagaggccagtgtcccatgcccctcctctccctccctggcacagctctttgtcccatctgcatgtgtacccttccattctgatttgaagcataatctggcactcctatcttga

SEQ ID NO: 736223 - DNA, 4708 bp, Homo sapiens
  misc_feature (121)..(122): n is a, c, g, or t
  misc_feature (233)..(236): n is a, c, g, or t
  misc_feature (406)..(406): n is a, c, g, or t
  misc_feature (683)..(683): n is a, c, g, or t
  misc_feature (948)..(948): n is a, c, g, or t
  misc_feature (977)..(977): n is a, c, g, or t
  misc_feature (1042)..(1042): n is a, c, g, or t
  misc_feature (1067)..(1067): n is a, c, g, or t
  misc_feature (1271)..(1271): n is a, c, g, or t
  misc_feature (1320)..(1321): n is a, c, g, or t
cactcgctggcttcccctcactccatctctgtgcccagagaaacaggggtactccaggggaatcctgtcctctgactgttcccagtagaaggcgggagcagaattttttcttttctctctnncccttctggttccccttcctctctgtgcccctcatcctttggattactcatcaaatgagcagcaacaacacccctagaccagctggtcctgtcctgggtcatctcgttgtnnnnagtttctagctggtataaggttaaagataccctttccagccccagcaaagccttaggcatttctgggattgctcctgactctgatgggcatcctcactcctcagacatttccaatctcccccacttcactgcagctttgcttccccttccccactggaagaaggaaacantcgctctcctttcccgttcacatgtctgatatttgctatgatattgaccttcacacacatcttagaggttctgtattttcctctcttttgacttctccctatcactactctactcaggcatagattcagtctagagctcttcaacagcaatgaaacggtaaacgaggggtaaacaaaacccagagatgtcatcaggtgcctgctaggagtcccacccgttcccctctagccctggcctgcccctccctaccagagtcttgattctccttcaaaactntggagaggttacatctggcagggtttggggacacctcttgcctccatctcaaacttccgctgcctccgagccacctttgactcctcctgggccccccttccaggtgcctcaagtgcagaggtcagccttcggttcaaattctatttctgggcttcagtgtccctgcaacctctataatagaaggaacagagtggtctatgtttctttctttctctgggagattggatgtagactcgggagacctgagttctggctctgtcttatnaattcaaattgtttaatctctctgagccncagtttacccacttggaaaagaagagttaggccacatggtctctgtcatcctgggattctgagtnaactgctccccttcagccagatccnaggggcatatccccccaacctgggacccaggcccccttcccttgcagcctctctcagttgtgagtgcacaggccagagggggttgagaggagccaagggggggcatgccgtgggacaaacgggctgtctagggccagtggctaaaggggcgggaggggaggagtcctcagggatcctgtttcaacaaacgtttctttcggaggnggggaaggcgggggagagggggagaaggacctatttaaagctaccctgnngctttggctttctctgtctgccagggtctccgactgtcccagacgggctggtgtgggcttgggatcctcctggtgacctctcccgctaaggtccctcagccactctgccccaagatgggccgtggggctggccgtgagtactcacctgccgccaccacggcagagaatgggggcggcaagaagaaacagaaggagaaggaactggatgagctgaagaaggaggtggcaatggatgaccacaagctgtccttggatgagctgggccgcaaataccaagtggacctgtccaagggcctcaccaaccagcgggctcaggacgttctggctcgagatgggcccaacgccctcacaccacctcccacaacccctgagtgggtcaagttctgccgtcagcttttcggggggttctccatcctgctgtggattggggctatcctctgcttcctggcctacggcatccaggctgccatggaggatgaaccatccaacgacaatctatatctgggtgtggtgctggcagctgtggtcattgtcactggctgcttctcctactaccaggaggccaagagctccaagatcatggattccttcaagaacatggtacctcagcaagcccttgtgatccgggagggagagaagatgcagatcaacgcagaggaagtggtggtgggagacctggtggaggtgaagggtggagaccgcgtccctgctgacctccggatcatctcttctcatggctgtaaggtggataactcatccttaacaggagagtcggagccccagacccgctcccccgagttcacccatgagaaccccctggagacccgcaatatctgtttcttctccaccaactgtgttgaaggcactgccaggggcattgtgattgccacaggagaccggacggtgatgggccgcatagctactctcgcctcaggcctggaggttgggcggacacccatagcaatggagattgaacacttcatccagctgatcacaggggtcgctgtattcctgggggtctccttcttcgtgctctccctcatcctgggctacagctggctggaggcagtcatcttcctcatcggcatcatagtggccaacgtgcctgaggggcttctggccactgtcactgtgtgcctgaccctgacagccaagcgcatggcacggaagaactgcctggtgaagaacctggaggcggtggagacgctgggctccacgtccaccatctgctcggacaagacgggcaccctcacccagaaccgcatgaccgtcgcccacatgtggttcgacaaccaaatccatgaggctgacaccaccgaagatcagtctggggccacttttgacaaacgatcccctacgtggacggccctgtctcgaattgctggtctctgcaaccgcgccgtcttcaaggcaggacaggagaacatctccgtgtctaagcgggacacagctggtgatgcctctgagtcagctctgctcaagtgcattgagctctcctgtggctcagtgaggaaaatgagagacagaaaccccaaggtggcagagattcctttcaactctaccaacaagtaccagctgtctatccacgagcgagaagacagcccccagagccacgtgctggtgatgaagggggccccagagcgcattctggaccggtgctccaccatcctggtgcagggcaaggagatcccgctcgacaaggagatgcaagatgcctttcaaaatgcctacatggagctggggggacttggggagcgtgtgctgggattctgtcaactgaatctgccatctggaaagtttcctcggggcttcaaattcgacacggatgagctgaactttcccacggagaagctttgctttgtggggctcatgtctatgattgaccctccccgggctgctgtgccagatgctgtgggcaagtgccgaagcgcaggcatcaaggtgatcatggtaaccggggatcaccctatcacagccaaggccattgccaaaggcgtgggcatcatatcagagggtaacgagactgtggaggacattgcagcccggctcaacattcccatgagtcaagtcaaccccagagaagccaaggcatgcgtggtgcacggctctgacctgaaggacatgacatcggagcagctcgatgagatcctcaagaaccacacagagatcgtctttgctcgaacgtctccccagcagaagctcatcattgtggagggatgtcagaggcagggagccattgtggccgtgacgggtgacggggtgaacgactcccctgcattgaagaaggctgacattggcattgccatgggcatctctggctctgacgtctctaagcaggcagccgacatgatcctgctggatgacaactttgcctccatcgtcacgggggtggaggagggccgcctgatctttgacaacttgaagaaatccatcgcctacaccctgaccagcaacatccccgagatcacccccttcctgctgttcatcattgccaacatccccctacctctgggcactgtgaccatcctttgcattgacctgggcacagatatggtccctgccatctccttggcctatgaggcagctgagagtgatatcatgaagcggcagccacgaaactcccagacggacaagctggtgaatgagaggctcatcagcatggcctacggacagatcgggatgatccaggcactgggtggcttcttcacctactttgtgatcctggcagagaacggtttcctgccatcacggctactgggaatccgcctcgactgggatgaccggaccatgaatgatctggaggacagctatggacaggagtggacctatgagcagcggaaggtggtggagttcacgtgccacacggcattctttgccagcatcgtggtggtgcagtgggctgacctcatcatctgcaagacccgccgcaactcagtcttccagcagggcatgaagaacaagatcctgatttttgggctcctggaggagacggcgttggctgcctttctctcttactgcccaggcatgggtgtagccctccgcatgtacccgctcaaagtcacctggtggttctgcgccttcccctacagcctcctcatcttcatctatgatgaggtccgaaagctcatcctgcggcggtatcctggtggtaagcccctccacattccccccagcaaagtgcaagccccaccaccagctcctccctccaggaccacacgcagactccactcccactactggttcctgcttctgttcctcaacaccctcagatcctggggtcccaggtcccaggagccctgactctttcgaacctgttgtctctgccctcttcccatcagattctaaaccccgcctaactcacagttggtctccgaggccctccacctt

SEQ ID NO: 736224 - DNA, 6961 bp, Homo sapiens
  misc_feature (121)..(122): n is a, c, g, or t
  misc_feature (233)..(236): n is a, c, g, or t
  misc_feature (406)..(406): n is a, c, g, or t
  misc_feature (683)..(683): n is a, c, g, or t
  misc_feature (948)..(948): n is a, c, g, or t
  misc_feature (977)..(977): n is a, c, g, or t
  misc_feature (1042)..(1042): n is a, c, g, or t
  misc_feature (1067)..(1067): n is a, c, g, or t
  misc_feature (1271)..(1271): n is a, c, g, or t
  misc_feature (1320)..(1321): n is a, c, g, or t
  misc_feature (6843)..(6843): n is a, c, g, or t
  misc_feature (6858)..(6859): n is a, c, g, or t
  misc_feature (6956)..(6956): n is a, c, g, or t
cactcgctggcttcccctcactccatctctgtgcccagagaaacaggggtactccaggggaatcctgtcctctgactgttcccagtagaaggcgggagcagaattttttcttttctctctnncccttctggttccccttcctctctgtgcccctcatcctttggattactcatcaaatgagcagcaacaacacccctagaccagctggtcctgtcctgggtcatctcgttgtnnnnagtttctagctggtataaggttaaagataccctttccagccccagcaaagccttaggcatttctgggattgctcctgactctgatgggcatcctcactcctcagacatttccaatctcccccacttcactgcagctttgcttccccttccccactggaagaaggaaacantcgctctcctttcccgttcacatgtctgatatttgctatgatattgaccttcacacacatcttagaggttctgtattttcctctcttttgacttctccctatcactactctactcaggcatagattcagtctagagctcttcaacagcaatgaaacggtaaacgaggggtaaacaaaacccagagatgtcatcaggtgcctgctaggagtcccacccgttcccctctagccctggcctgcccctccctaccagagtcttgattctccttcaaaactntggagaggttacatctggcagggtttggggacacctcttgcctccatctcaaacttccgctgcctccgagccacctttgactcctcctgggccccccttccaggtgcctcaagtgcagaggtcagccttcggttcaaattctatttctgggcttcagtgtccctgcaacctctataatagaaggaacagagtggtctatgtttctttctttctctgggagattggatgtagactcgggagacctgagttctggctctgtcttatnaattcaaattgtttaatctctctgagccncagtttacccacttggaaaagaagagttaggccacatggtctctgtcatcctgggattctgagtnaactgctccccttcagccagatccnaggggcatatccccccaacctgggacccaggcccccttcccttgcagcctctctcagttgtgagtgcacaggccagagggggttgagaggagccaagggggggcatgccgtgggacaaacgggctgtctagggccagtggctaaaggggcgggaggggaggagtcctcagggatcctgtttcaacaaacgtttctttcggaggnggggaaggcgggggagagggggagaaggacctatttaaagctaccctgnngctttggctttctctgtctgccagggtctccgactgtcccagacgggctggtgtgggcttgggatcctcctggtgacctctcccgctaaggtccctcagccactctgccccaagatgggccgtggggctggccgtgagtactcacctgccgccaccacggcagagaatgggggcggcaagaagaaacagaaggagaaggaactggatgagctgaagaaggaggtggcaatggatgaccacaagctgtccttggatgagctgggccgcaaataccaagtggacctgtccaagggcctcaccaaccagcgggctcaggacgttctggctcgagatgggcccaacgccctcacaccacctcccacaacccctgagtgggtcaagttctgccgtcagcttttcggggggttctccatcctgctgtggattggggctatcctctgcttcctggcctacggcatccaggctgccatggaggatgaaccatccaacgacaatctatatctgggtgtggtgctggcagctgtggtcattgtcactggctgcttctcctactaccaggaggccaagagctccaagatcatggattccttcaagaacatggtacctcagcaagcccttgtgatccgggagggagagaagatgcagatcaacgcagaggaagtggtggtgggagacctggtggaggtgaagggtggagaccgcgtccctgctgacctccggatcatctcttctcatggctgtaaggtggataactcatccttaacaggagagtcggagccccagacccgctcccccgagttcacccatgagaaccccctggagacccgcaatatctgtttcttctccaccaactgtgttgaaggcactgccaggggcattgtgattgccacaggagaccggacggtgatgggccgcatagctactctcgcctcaggcctggaggttgggcggacacccatagcaatggagattgaacacttcatccagctgatcacaggggtcgctgtattcctgggggtctccttcttcgtgctctccctcatcctgggctacagctggctggaggcagtcatcttcctcatcggcatcatagtggccaacgtgcctgaggggcttctggccactgtcactgtgtgcctgaccctgacagccaagcgcatggcacggaagaactgcctggtgaagaacctggaggcggtggagacgctgggctccacgtccaccatctgctcggacaagacgggcaccctcacccagaaccgcatgaccgtcgcccacatgtggttcgacaaccaaatccatgaggctgacaccaccgaagatcagtctggggccacttttgacaaacgatcccctacgtggacggccctgtctcgaattgctggtctctgcaaccgcgccgtcttcaaggcaggacaggagaacatctccgtgtctaagcgggacacagctggtgatgcctctgagtcagctctgctcaagtgcattgagctctcctgtggctcagtgaggaaaatgagagacagaaaccccaaggtggcagagattcctttcaactctaccaacaagtaccagctgtctatccacgagcgagaagacagcccccagagccacgtgctggtgatgaagggggccccagagcgcattctggaccggtgctccaccatcctggtgcagggcaaggagatcccgctcgacaaggagatgcaagatgcctttcaaaatgcctacatggagctggggggacttggggagcgtgtgctgggattctgtcaactgaatctgccatctggaaagtttcctcggggcttcaaattcgacacggatgagctgaactttcccacggagaagctttgctttgtggggctcatgtctatgattgaccctccccgggctgctgtgccagatgctgtgggcaagtgccgaagcgcaggcatcaaggtgatcatggtaaccggggatcaccctatcacagccaaggccattgccaaaggcgtgggcatcatatcagagggtaacgagactgtggaggacattgcagcccggctcaacattcccatgagtcaagtcaaccccagagaagccaaggcatgcgtggtgcacggctctgacctgaaggacatgacatcggagcagctcgatgagatcctcaagaaccacacagagatcgtctttgctcgaacgtctccccagcagaagctcatcattgtggagggatgtcagaggcagggagccattgtggccgtgacgggtgacggggtgaacgactcccctgcattgaagaaggctgacattggcattgccatgggcatctctggctctgacgtctctaagcaggcagccgacatgatcctgctggatgacaactttgcctccatcgtcacgggggtggaggagggccgcctgatctttgacaacttgaagaaatccatcgcctacaccctgaccagcaacatccccgagatcacccccttcctgctgttcatcattgccaacatccccctacctctgggcactgtgaccatcctttgcattgacctgggcacagatatggtccctgccatctccttggcctatgaggcagctgagagtgatatcatgaagcggcagccacgaaactcccagacggacaagctggtgaatgagaggctcatcagcatggcctacggacagatcgggatgatccaggcactgggtggcttcttcacctactttgtgatcctggcagagaacggtttcctgccatcacggctactgggaatccgcctcgactgggatgaccggaccatgaatgatctggaggacagctatggacaggagtggacctatgagcagcggaaggtggtggagttcacgtgccacacggcattctttgccagcatcgtggtggtgcagtgggctgacctcatcatctgcaagacccgccgcaactcagtcttccagcagggcatgaagaacaagatcctgatttttgggctcctggaggagacggcgttggctgcctttctctcttactgcccaggcatgggtgtagccctccgcatgtacccgctcaaagtcacctggtggttctgcgccttcccctacagcctcctcatcttcatctatgatgaggtccgaaagctcatcctgcggcggtatcctggtggctgggtggagaaggagacatactactgaccccattggaagaagaaccaggcatggaaagatggggagctctggaggtgttgtggggatggtgatggagagggatggaaataacgggtggcattgggtggcaacatttggggagagataatgaggcaactcagcaggctaagttgcggggtatataaattggggtgatgaccccatagacctaactgtgaacaatcagattagacactatgtgttagagtccccccgaccagatccttttccatcccactccactatgttgtctattttttctgaggaattaagggttaccccaccctgcccactcccatcccttcaaccccacttcctactgtaatagatcagcatccaaaagcaggaacccatctaaaccagaaggaagccctctcagatcaccccagcctcactccatttcccacttccacccccgttagcttcctgcaggactctatccctggcttccccttcagaccttgcaatcacaaaaggttcttctggtgagtgcaagagcctgagactggaaaaggtggacttgtctcccagtcgaggctggtaagggaccttcagggagagctgggcagacaggtgggagatggaggtagggctggctggaggaaggaaacaacaaaggaagtgaggtagtgccaatgacaggacatttgacatgagtctccagatagatgtcgtggactccagctctacgtcccacattttagaataccccaccagcagaacaaactcagatctcatcagggtagcagcagaggcaggaccagaaggcaatcaagagcttccagaaatgccacacttgtgtgccacagagttccccgctgacccttggttaggggtcctcttagtccacaaggtccggatgtcactcatgtacttaataacacttcaccttctgtaatactaagtcctcagagctccatgctgttctgaaagggatggccacaagttctttcccagcctcttccattccctttcttttcatgcccatcccgatgaacctgcatcattccccgacactgccaagccaaccctggaaaaggagttcgctggccattggctagaatcagggtggagaagttccctgaaccttcctgtctcccagggacatgtatgcttccagggacaagcttaggtcatgaacatggtcagaacctttggacaagaggaaaaatactaagagatttgctttttctgggtgcggtggctcatgcctgtaatcccagcactttgggaggccgaggcaggtggatcatgaggtcaggagttcgaggcgagcctggccaacatggtgaaaccctgtctctactaaaagtacaaaaaattagccagtcatggtggcacacgcctgtaatctcagctactcaggaggctgaggcaggagaattgcttgaacctgtgaggaagaggttgcagtgagctgagatcgtgccattacactccagcctgggcgaaagggtgagactccatctcaaaaaaaaaaaaaatgatttgcttttgacgtcttaggtggcagggctgttccctccaggcaaatgcccttcaaaccgacgatcattgtgcccacttaccctgggctggagagttggtttcaggttcctacaggagatagctttctttcccttactccctatctaacacttttgctctgcaggcagccttgcccattctctaagcctggcttagaaggcactgggaatgtcctgtagagagagacctagataggtcatgcaagtgagaaagacatctgaggaaaatggaagacctaaggcagacaggaaggaagcacaaaagacaagcattgggtcagacccataaaccacctcccaaaggctgtcatttcattgcactggaattttgctttatcagaagcaaggaagtaagggagtcattgccttgggcctgggaatctaagtgggagacaatattaatttggatccgattaattggagattactaactgtggacaaaagtttatctttgcacaatcaataaaaatggcatttttttagtaaattaagagcataaacaatattgctagaggtggcatgtttagtctaccaaaaacaatacttttcaggcactttagaaatatccttttagaagcagcgagtgcatgggctaattatcatcaatctttatgtatttgttaaagaaacatctacaggatctttattggtgaccttttgtaagacattagtttgaggtactacctatgtacttgaaaataataaagtggcatttctttatgaaaaaaaaaaaaaaactgagttttacccatctttataaatgatgctacactactaaactgtgatgcatttgacatctgtcattcntctgtggctgaccanncatgcaacattctttatattttgggcacttcattactgtgagaagcttaagaccttctttccacccgtgaacataagggggccacatacttggtttnccaat

SEQ ID NO: 736225 - DNA, 6643 bp, Homo sapiens
  misc_feature (121)..(122): n is a, c, g, or t
  misc_feature (233)..(236): n is a, c, g, or t
  misc_feature (406)..(406): n is a, c, g, or t
  misc_feature (683)..(683): n is a, c, g, or t
  misc_feature (948)..(948): n is a, c, g, or t
  misc_feature (977)..(977): n is a, c, g, or t
  misc_feature (1042)..(1042): n is a, c, g, or t
  misc_feature (1067)..(1067): n is a, c, g, or t
  misc_feature (1271)..(1271): n is a, c, g, or t
  misc_feature (1320)..(1321): n is a, c, g, or t
cactcgctggcttcccctcactccatctctgtgcccagagaaacaggggtactccaggggaatcctgtcctctgactgttcccagtagaaggcgggagcagaattttttcttttctctctnncccttctggttccccttcctctctgtgcccctcatcctttggattactcatcaaatgagcagcaacaacacccctagaccagctggtcctgtcctgggtcatctcgttgtnnnnagtttctagctggtataaggttaaagataccctttccagccccagcaaagccttaggcatttctgggattgctcctgactctgatgggcatcctcactcctcagacatttccaatctcccccacttcactgcagctttgcttccccttccccactggaagaaggaaacantcgctctcctttcccgttcacatgtctgatatttgctatgatattgaccttcacacacatcttagaggttctgtattttcctctcttttgacttctccctatcactactctactcaggcatagattcagtctagagctcttcaacagcaatgaaacggtaaacgaggggtaaacaaaacccagagatgtcatcaggtgcctgctaggagtcccacccgttcccctctagccctggcctgcccctccctaccagagtcttgattctccttcaaaactntggagaggttacatctggcagggtttggggacacctcttgcctccatctcaaacttccgctgcctccgagccacctttgactcctcctgggccccccttccaggtgcctcaagtgcagaggtcagccttcggttcaaattctatttctgggcttcagtgtccctgcaacctctataatagaaggaacagagtggtctatgtttctttctttctctgggagattggatgtagactcgggagacctgagttctggctctgtcttatnaattcaaattgtttaatctctctgagccncagtttacccacttggaaaagaagagttaggccacatggtctctgtcatcctgggattctgagtnaactgctccccttcagccagatccnaggggcatatccccccaacctgggacccaggcccccttcccttgcagcctctctcagttgtgagtgcacaggccagagggggttgagaggagccaagggggggcatgccgtgggacaaacgggctgtctagggccagtggctaaaggggcgggaggggaggagtcctcagggatcctgtttcaacaaacgtttctttcggaggnggggaaggcgggggagagggggagaaggacctatttaaagctaccctgnngctttggctttctctgtctgccagggtctccgactgtcccagacgggctggtgtgggcttgggatcctcctggtgacctctcccgctaaggtccctcagccactctgccccaagatgggccgtggggctggccgtgagtactcacctgccgccaccacggcagagaatgggggcggcaagaagaaacagaaggagaaggaactggatgagctgaagaaggaggtggcaatggatgaccacaagctgtccttggatgagctgggccgcaaataccaagtggacctgtccaagggcctcaccaaccagcgggctcaggacgttctggctcgagatgggcccaacgccctcacaccacctcccacaacccctgagtgggtcaagttctgccgtcagcttttcggggggttctccatcctgctgtggattggggctatcctctgcttcctggcctacggcatccaggctgccatggaggatgaaccatccaacgacaatctatatctgggtgtggtgctggcagctgtggtcattgtcactggctgcttctcctactaccaggaggccaagagctccaagatcatggattccttcaagaacatggtacctcagcaagcccttgtgatccgggagggagagaagatgcagatcaacgcagaggaagtggtggtgggagacctggtggaggtgaagggtggagaccgcgtccctgctgacctccggatcatctcttctcatggctgtaaggtggataactcatccttaacaggagagtcggagccccagacccgctcccccgagttcacccatgagaaccccctggagacccgcaatatctgtttcttctccaccaactgtgttgaaggcactgccaggggcattgtgattgccacaggagaccggacggtgatgggccgcatagctactctcgcctcaggcctggaggttgggcggacacccatagcaatggagattgaacacttcatccagctgatcacaggggtcgctgtattcctgggggtctccttcttcgtgctctccctcatcctgggctacagctggctggaggcagtcatcttcctcatcggcatcatagtggccaacgtgcctgaggggcttctggccactgtcactgtgtgcctgaccctgacagccaagcgcatggcacggaagaactgcctggtgaagaacctggaggcggtggagacgctgggctccacgtccaccatctgctcggacaagacgggcaccctcacccagaaccgcatgaccgtcgcccacatgtggttcgacaaccaaatccatgaggctgacaccaccgaagatcagtctggggccacttttgacaaacgatcccctacgtggacggccctgtctcgaattgctggtctctgcaaccgcgccgtcttcaaggcaggacaggagaacatctccgtgtctaagcgggacacagctggtgatgcctctgagtcagctctgctcaagtgcattgagctctcctgtggctcagtgaggaaaatgagagacagaaaccccaaggtggcagagattcctttcaactctaccaacaagtaccagctgtctatccacgagcgagaagacagcccccagagccacgtgctggtgatgaagggggccccagagcgcattctggaccggtgctccaccatcctggtgcagggcaaggagatcccgctcgacaaggagatgcaagatgcctttcaaaatgcctacatggagctggggggacttggggagcgtgtgctgggattctgtcaactgaatctgccatctggaaagtttcctcggggcttcaaattcgacacggatgagctgaactttcccacggagaagctttgctttgtggggctcatgtctatgattgaccctccccgggctgctgtgccagatgctgtgggcaagtgccgaagcgcaggcatcaaggtgatcatggtaaccggggatcaccctatcacagccaaggccattgccaaaggcgtgggcatcatatcagagggtaacgagactgtggaggacattgcagcccggctcaacattcccatgagtcaagtcaaccccagagaagccaaggcatgcgtggtgcacggctctgacctgaaggacatgacatcggagcagctcgatgagatcctcaagaaccacacagagatcgtctttgctcgaacgtctccccagcagaagctcatcattgtggagggatgtcagaggcagggagccattgtggccgtgacgggtgacggggtgaacgactcccctgcattgaagaaggctgacattggcattgccatgggcatctctggctctgacgtctctaagcaggcagccgacatgatcctgctggatgacaactttgcctccatcgtcacgggggtggaggagggccgcctgatctttgacaacttgaagaaatccatcgcctacaccctgaccagcaacatccccgagatcacccccttcctgctgttcatcattgccaacatccccctacctctgggcactgtgaccatcctttgcattgacctgggcacagatatggtccctgccatctccttggcctatgaggcagctgagagtgatatcatgaagcggcagccacgaaactcccagacggacaagctggtgaatgagaggctcatcagcatggcctacggacagatcgggatgatccaggcactgggtggcttcttcacctactttgtgatcctggcagagaacggtttcctgccatcacggctactgggaatccgcctcgactgggatgaccggaccatgaatgatctggaggacagctatggacaggagtggacctatgagcagcggaaggtggtggagttcacgtgccacacggcattctttgccagcatcgtggtggtgcagtgggctgacctcatcatctgcaagacccgccgcaactcagtcttccagcagggcatgaagaacaagatcctgatttttgggctcctggaggagacggcgttggctgcctttctctcttactgcccaggcatgggtgtagccctccgcatgtacccgctcaaagtcacctggtggttctgcgccttcccctacagcctcctcatcttcatctatgatgaggtccgaaagctcatcctgcggcggtatcctggtggctgggtggagaaggagacatactactgaccccattggaagaagaaccaggcatggaaagatggggagctctggaggtgttgtggggatggtgatggagagggatggaaataacgggtggcattgggtggcaacatttggggagagataatgaggcaactcagcaggctaagttgcggggtatataaattggggtgatgaccccatagacctaactgtgaacaatcagattagacactatgtgttagagtccccccgaccagatccttttccatcccactccactatgttgtctattttttctgaggaattaagggttaccccaccctgcccactcccatcccttcaaccccacttcctactgtaatagatcagcatccaaaagcaggaacccatctaaaccagaaggaagccctctcagatcaccccagcctcactccatttcccacttccacccccgttagcttcctgcaggactctatccctggcttccccttcagaccttgcaatcacaaaaggttcttctggtgagtgcaagagcctgagactggaaaaggtggacttgtctcccagtcgaggctggtaagggaccttcagggagagctgggcagacaggtgggagatggaggtagggctggctggaggaaggaaacaacaaaggaagtgaggtagtgccaatgacaggacatttgacatgagtctccagatagatgtcgtggactccagctctacgtcccacattttagaataccccaccagcagaacaaactcagatctcatcagggtagcagcagaggcaggaccagaaggcaatcaagagcttccagaaatgccacacttgtgtgccacagagttccccgctgacccttggttaggggtcctcttagtccacaaggtccggatgtcactcatgtacttaataacacttcaccttctgtaatactaagtcctcagagctccatgctgttctgaaagggatggccacaagttctttcccagcctcttccattccctttcttttcatgcccatcccgatgaacctgcatcattccccgacactgccaagccaaccctggaaaaggagttcgctggccattggctagaatcagggtggagaagttccctgaaccttcctgtctcccagggacatgtatgcttccagggacaagcttaggtcatgaacatggtcagaacctttggacaagaggaaaaatactaagagatttgctttttctgggtgcggtggctcatgcctgtaatcccagcactttgggaggccgaggcaggtggatcatgaggtcaggagttcgaggcgagcctggccaacatggtgaaaccctgtctctactaaaagtacaaaaaattagccagtcatggtggcacacgcctgtaatctcagctactcaggaggctgaggcaggagaattgcttgaacctgtgaggaagaggttgcagtgagctgagatcgtgccattacactccagcctgggcgaaagggtgagactccatctcaaaaaaaaaaaaaatgatttgcttttgacgtcttaggtggcagggctgttccctccaggcaaatgcccttcaaaccgacgatcattgtgcccacttaccctgggctggagagttggtttcaggttcctacaggagatagctttctttcccttactccctatctaacacttttgctctgcaggcagccttgcccattctctaagcctggcttagaaggcactgggaatgtcctgtagagagagacctagataggtcatgcaagtgagaaagacatctgaggaaaatggaagacctaaggcagacaggaaggaagcacaaaagacaagcattgggtcagacccataaaccacctcccaaaggctgtcatttcattgcactggaattttgctttatcagaagcaaggaagtaagggagtcattgccttgggcctgggaatctaagtgggagacaatattaatttggatccgattaattggagattactaactgtggacaaaagtttatctttgcacaatcaataaaaatggcatttttttagtaaattaagagcataaacaatatttgtttagagggtgggcattgttttaggttttaccccaaaaaacaaattctttttttcaggccaacttttaggaaaaatatttcttttttaaaaaaaacca

SEQ ID NO: 736226 - DNA, 6192 bp, Homo sapiens
  misc_feature (121)..(122): n is a, c, g, or t
  misc_feature (233)..(236): n is a, c, g, or t
  misc_feature (406)..(406): n is a, c, g, or t
  misc_feature (683)..(683): n is a, c, g, or t
  misc_feature (948)..(948): n is a, c, g, or t
  misc_feature (977)..(977): n is a, c, g, or t
  misc_feature (1042)..(1042): n is a, c, g, or t
  misc_feature (1067)..(1067): n is a, c, g, or t
  misc_feature (1271)..(1271): n is a, c, g, or t
  misc_feature (1320)..(1321): n is a, c, g, or t
cactcgctggcttcccctcactccatctctgtgcccagagaaacaggggtactccaggggaatcctgtcctctgactgttcccagtagaaggcgggagcagaattttttcttttctctctnncccttctggttccccttcctctctgtgcccctcatcctttggattactcatcaaatgagcagcaacaacacccctagaccagctggtcctgtcctgggtcatctcgttgtnnnnagtttctagctggtataaggttaaagataccctttccagccccagcaaagccttaggcatttctgggattgctcctgactctgatgggcatcctcactcctcagacatttccaatctcccccacttcactgcagctttgcttccccttccccactggaagaaggaaacantcgctctcctttcccgttcacatgtctgatatttgctatgatattgaccttcacacacatcttagaggttctgtattttcctctcttttgacttctccctatcactactctactcaggcatagattcagtctagagctcttcaacagcaatgaaacggtaaacgaggggtaaacaaaacccagagatgtcatcaggtgcctgctaggagtcccacccgttcccctctagccctggcctgcccctccctaccagagtcttgattctccttcaaaactntggagaggttacatctggcagggtttggggacacctcttgcctccatctcaaacttccgctgcctccgagccacctttgactcctcctgggccccccttccaggtgcctcaagtgcagaggtcagccttcggttcaaattctatttctgggcttcagtgtccctgcaacctctataatagaaggaacagagtggtctatgtttctttctttctctgggagattggatgtagactcgggagacctgagttctggctctgtcttatnaattcaaattgtttaatctctctgagccncagtttacccacttggaaaagaagagttaggccacatggtctctgtcatcctgggattctgagtnaactgctccccttcagccagatccnaggggcatatccccccaacctgggacccaggcccccttcccttgcagcctctctcagttgtgagtgcacaggccagagggggttgagaggagccaagggggggcatgccgtgggacaaacgggctgtctagggccagtggctaaaggggcgggaggggaggagtcctcagggatcctgtttcaacaaacgtttctttcggaggnggggaaggcgggggagagggggagaaggacctatttaaagctaccctgnngctttggctttctctgtctgccagggtctccgactgtcccagacgggctggtgtgggcttgggatcctcctggtgacctctcccgctaaggtccctcagccactctgccccaagatgggccgtggggctggccgtgagtactcacctgccgccaccacggcagagaatgggggcggcaagaagaaacagaaggagaaggaactggatgagctgaagaaggaggtggcaatggatgaccacaagctgtccttggatgagctgggccgcaaataccaagtggacctgtccaagggcctcaccaaccagcgggctcaggacgttctggctcgagatgggcccaacgccctcacaccacctcccacaacccctgagtgggtcaagttctgccgtcagcttttcggggggttctccatcctgctgtggattggggctatcctctgcttcctggcctacggcatccaggctgccatggaggatgaaccatccaacgacaatctatatctgggtgtggtgctggcagctgtggtcattgtcactggctgcttctcctactaccaggaggccaagagctccaagatcatggattccttcaagaacatggtacctcagcaagcccttgtgatccgggagggagagaagatgcagatcaacgcagaggaagtggtggtgggagacctggtggaggtgaagggtggagaccgcgtccctgctgacctccggatcatctcttctcatggctgtaaggtggataactcatccttaacaggagagtcggagccccagacccgctcccccgagttcacccatgagaaccccctggagacccgcaatatctgtttcttctccaccaactgtgttgaaggcactgccaggggcattgtgattgccacaggagaccggacggtgatgggccgcatagctactctcgcctcaggcctggaggttgggcggacacccatagcaatggagattgaacacttcatccagctgatcacaggggtcgctgtattcctgggggtctccttcttcgtgctctccctcatcctgggctacagctggctggaggcagtcatcttcctcatcggcatcatagtggccaacgtgcctgaggggcttctggccactgtcactgtgtgcctgaccctgacagccaagcgcatggcacggaagaactgcctggtgaagaacctggaggcggtggagacgctgggctccacgtccaccatctgctcggacaagacgggcaccctcacccagaaccgcatgaccgtcgcccacatgtggttcgacaaccaaatccatgaggctgacaccaccgaagatcagtctggggccacttttgacaaacgatcccctacgtggacggccctgtctcgaattgctggtctctgcaaccgcgccgtcttcaaggcaggacaggagaacatctccgtgtctaagcgggacacagctggtgatgcctctgagtcagctctgctcaagtgcattgagctctcctgtggctcagtgaggaaaatgagagacagaaaccccaaggtggcagagattcctttcaactctaccaacaagtaccagctgtctatccacgagcgagaagacagcccccagagccacgtgctggtgatgaagggggccccagagcgcattctggaccggtgctccaccatcctggtgcagggcaaggagatcccgctcgacaaggagatgcaagatgcctttcaaaatgcctacatggagctggggggacttggggagcgtgtgctgggattctgtcaactgaatctgccatctggaaagtttcctcggggcttcaaattcgacacggatgagctgaactttcccacggagaagctttgctttgtggggctcatgtctatgattgaccctccccgggctgctgtgccagatgctgtgggcaagtgccgaagcgcaggcatcaaggtgatcatggtaaccggggatcaccctatcacagccaaggccattgccaaaggcgtgggcatcatatcagagggtaacgagactgtggaggacattgcagcccggctcaacattcccatgagtcaagtcaaccccagagaagccaaggcatgcgtggtgcacggctctgacctgaaggacatgacatcggagcagctcgatgagatcctcaagaaccacacagagatcgtctttgctcgaacgtctccccagcagaagctcatcattgtggagggatgtcagaggcagggagccattgtggccgtgacgggtgacggggtgaacgactcccctgcattgaagaaggctgacattggcattgccatgggcatctctggctctgacgtctctaagcaggcagccgacatgatcctgctggatgacaactttgcctccatcgtcacgggggtggaggagggccgcctgatctttgacaacttgaagaaatccatcgcctacaccctgaccagcaacatccccgagatcacccccttcctgctgttcatcattgccaacatccccctacctctgggcactgtgaccatcctttgcattgacctgggcacagatatggtccctgccatctccttggcctatgaggcagctgagagtgatatcatgaagcggcagccacgaaactcccagacggacaagctggtgaatgagaggctcatcagcatggcctacggacagatcgggatgatccaggcactgggtggcttcttcacctactttgtgatcctggcagagaacggtttcctgccatcacggctactgggaatccgcctcgactgggatgaccggaccatgaatgatctggaggacagctatggacaggagtggacctatgagcagcggaaggtggtggagttcacgtgccacacggcattctttgccagcatcgtggtggtgcagtgggctgacctcatcatctgcaagacccgccgcaactcagtcttccagcagggcatgaagaacaagatcctgatttttgggctcctggaggagacggcgttggctgcctttctctcttactgcccaggcatgggtgtagccctccgcatgtacccgctcaaagtcacctggtggttctgcgccttcccctacagcctcctcatcttcatctatgatgaggtccgaaagctcatcctgcggcggtatcctggtggctgggtggagaaggagacatactactgaccccattggaagaagaaccaggcatggaaagatggggagctctggaggtgttgtggggatggtgatggagagggatggaaataacgggtggcattgggtggcaacatttggggagagataatgaggcaactcagcaggctaagttgcggggtatataaattggggtgatgaccccatagacctaactgtgaacaatcagattagacactatgtgttagagtccccccgaccagatccttttccatcccactccactatgttgtctattttttctgaggaattaagggttaccccaccctgcccactcccatcccttcaaccccacttcctactgtaatagatcagcatccaaaagcaggaacccatctaaaccagaaggaagccctctcagatcaccccagcctcactccatttcccacttccacccccgttagcttcctgcaggactctatccctggcttccccttcagaccttgcaatcacaaaaggttcttctggtgagtgcaagagcctgagactggaaaaggtggacttgtctcccagtcgaggctggtaagggaccttcagggagagctgggcagacaggtgggagatggaggtagggctggctggaggaaggaaacaacaaaggaagtgaggtagtgccaatgacaggacatttgacatgagtctccagatagatgtcgtggactccagctctacgtcccacattttagaataccccaccagcagaacaaactcagatctcatcagggtagcagcagaggcaggaccagaaggcaatcaagagcttccagaaatgccacacttgtgtgccacagagttccccgctgacccttggttaggggtcctcttagtccacaaggtccggatgtcactcatgtacttaataacacttcaccttctgtaatactaagtcctcagagctccatgctgttctgaaagggatggccacaagttctttcccagcctcttccattccctttcttttcatgcccatcccgatgaacctgcatcattccccgacactgccaagccaaccctggaaaaggagttcgctggccattggctagaatcagggtggagaagttccctgaaccttcctgtctcccagggacatgtatgcttccagggacaagcttaggtcatgaacatggtcagaacctttggacaagaggaaaaatactaagagatttgctttttctgggtgcggtggctcatgcctgtaatcccagcactttgggaggccgaggcaggtggatcatgaggtcaggagttcgaggcgagcctggccaacatggtgaaaccctgtctctactaaaagtacaaaaaattagccagtcatggtggcacacgcctgtaatctcagctactcaggaggctgaggcaggagaattgcttgaacctgtgaggaagaggttgcagtgagctgagatcgtgccattacactccagcctgggcgaaagggtgagactccatctcaaaaaaaaaaaaaatgatttgcttttgacgtcttaggtggcagggctgttccctccaggcaaatgcccttcaaaccgacgatcattgtgcccacttaccctgggctggagagttggtttcaggttcctacaggagatagctttctcaacgctgcatgacctatctaggtcgctctctacagacattcccagtgccttctaagccaagacatg

SEQ ID NO: 736227 - DNA, 6135 bp, Homo sapiens
  misc_feature (121)..(122): n is a, c, g, or t
  misc_feature (233)..(236): n is a, c, g, or t
  misc_feature (406)..(406): n is a, c, g, or t
  misc_feature (683)..(683): n is a, c, g, or t
  misc_feature (948)..(948): n is a, c, g, or t
  misc_feature (977)..(977): n is a, c, g, or t
  misc_feature (1042)..(1042): n is a, c, g, or t
  misc_feature (1067)..(1067): n is a, c, g, or t
  misc_feature (1271)..(1271): n is a, c, g, or t
  misc_feature (1320)..(1321): n is a, c, g, or t
cactcgctggcttcccctcactccatctctgtgcccagagaaacaggggtactccaggggaatcctgtcctctgactgttcccagtagaaggcgggagcagaattttttcttttctctctnncccttctggttccccttcctctctgtgcccctcatcctttggattactcatcaaatgagcagcaacaacacccctagaccagctggtcctgtcctgggtcatctcgttgtnnnnagtttctagctggtataaggttaaagataccctttccagccccagcaaagccttaggcatttctgggattgctcctgactctgatgggcatcctcactcctcagacatttccaatctcccccacttcactgcagctttgcttccccttccccactggaagaaggaaacantcgctctcctttcccgttcacatgtctgatatttgctatgatattgaccttcacacacatcttagaggttctgtattttcctctcttttgacttctccctatcactactctactcaggcatagattcagtctagagctcttcaacagcaatgaaacggtaaacgaggggtaaacaaaacccagagatgtcatcaggtgcctgctaggagtcccacccgttcccctctagccctggcctgcccctccctaccagagtcttgattctccttcaaaactntggagaggttacatctggcagggtttggggacacctcttgcctccatctcaaacttccgctgcctccgagccacctttgactcctcctgggccccccttccaggtgcctcaagtgcagaggtcagccttcggttcaaattctatttctgggcttcagtgtccctgcaacctctataatagaaggaacagagtggtctatgtttctttctttctctgggagattggatgtagactcgggagacctgagttctggctctgtcttatnaattcaaattgtttaatctctctgagccncagtttacccacttggaaaagaagagttaggccacatggtctctgtcatcctgggattctgagtnaactgctccccttcagccagatccnaggggcatatccccccaacctgggacccaggcccccttcccttgcagcctctctcagttgtgagtgcacaggccagagggggttgagaggagccaagggggggcatgccgtgggacaaacgggctgtctagggccagtggctaaaggggcgggaggggaggagtcctcagggatcctgtttcaacaaacgtttctttcggaggnggggaaggcgggggagagggggagaaggacctatttaaagctaccctgnngctttggctttctctgtctgccagggtctccgactgtcccagacgggctggtgtgggcttgggatcctcctggtgacctctcccgctaaggtccctcagccactctgccccaagatgggccgtggggctggccgtgagtactcacctgccgccaccacggcagagaatgggggcggcaagaagaaacagaaggagaaggaactggatgagctgaagaaggaggtggcaatggatgaccacaagctgtccttggatgagctgggccgcaaataccaagtggacctgtccaagggcctcaccaaccagcgggctcaggacgttctggctcgagatgggcccaacgccctcacaccacctcccacaacccctgagtgggtcaagttctgccgtcagcttttcggggggttctccatcctgctgtggattggggctatcctctgcttcctggcctacggcatccaggctgccatggaggatgaaccatccaacgacaatctatatctgggtgtggtgctggcagctgtggtcattgtcactggctgcttctcctactaccaggaggccaagagctccaagatcatggattccttcaagaacatggtacctcagcaagcccttgtgatccgggagggagagaagatgcagatcaacgcagaggaagtggtggtgggagacctggtggaggtgaagggtggagaccgcgtccctgctgacctccggatcatctcttctcatggctgtaaggtggataactcatccttaacaggagagtcggagccccagacccgctcccccgagttcacccatgagaaccccctggagacccgcaatatctgtttcttctccaccaactgtgttgaaggcactgccaggggcattgtgattgccacaggagaccggacggtgatgggccgcatagctactctcgcctcaggcctggaggttgggcggacacccatagcaatggagattgaacacttcatccagctgatcacaggggtcgctgtattcctgggggtctccttcttcgtgctctccctcatcctgggctacagctggctggaggcagtcatcttcctcatcggcatcatagtggccaacgtgcctgaggggcttctggccactgtcactgtgtgcctgaccctgacagccaagcgcatggcacggaagaactgcctggtgaagaacctggaggcggtggagacgctgggctccacgtccaccatctgctcggacaagacgggcaccctcacccagaaccgcatgaccgtcgcccacatgtggttcgacaaccaaatccatgaggctgacaccaccgaagatcagtctggggccacttttgacaaacgatcccctacgtggacggccctgtctcgaattgctggtctctgcaaccgcgccgtcttcaaggcaggacaggagaacatctccgtgtctaagcgggacacagctggtgatgcctctgagtcagctctgctcaagtgcattgagctctcctgtggctcagtgaggaaaatgagagacagaaaccccaaggtggcagagattcctttcaactctaccaacaagtaccagctgtctatccacgagcgagaagacagcccccagagccacgtgctggtgatgaagggggccccagagcgcattctggaccggtgctccaccatcctggtgcagggcaaggagatcccgctcgacaaggagatgcaagatgcctttcaaaatgcctacatggagctggggggacttggggagcgtgtgctgggattctgtcaactgaatctgccatctggaaagtttcctcggggcttcaaattcgacacggatgagctgaactttcccacggagaagctttgctttgtggggctcatgtctatgattgaccctccccgggctgctgtgccagatgctgtgggcaagtgccgaagcgcaggcatcaaggtgatcatggtaaccggggatcaccctatcacagccaaggccattgccaaaggcgtgggcatcatatcagagggtaacgagactgtggaggacattgcagcccggctcaacattcccatgagtcaagtcaaccccagagaagccaaggcatgcgtggtgcacggctctgacctgaaggacatgacatcggagcagctcgatgagatcctcaagaaccacacagagatcgtctttgctcgaacgtctccccagcagaagctcatcattgtggagggatgtcagaggcagggagccattgtggccgtgacgggtgacggggtgaacgactcccctgcattgaagaaggctgacattggcattgccatgggcatctctggctctgacgtctctaagcaggcagccgacatgatcctgctggatgacaactttgcctccatcgtcacgggggtggaggagggccgcctgatctttgacaacttgaagaaatccatcgcctacaccctgaccagcaacatccccgagatcacccccttcctgctgttcatcattgccaacatccccctacctctgggcactgtgaccatcctttgcattgacctgggcacagatatggtccctgccatctccttggcctatgaggcagctgagagtgatatcatgaagcggcagccacgaaactcccagacggacaagctggtgaatgagaggctcatcagcatggcctacggacagatcgggatgatccaggcactgggtggcttcttcacctactttgtgatcctggcagagaacggtttcctgccatcacggctactgggaatccgcctcgactgggatgaccggaccatgaatgatctggaggacagctatggacaggagtggacctatgagcagcggaaggtggtggagttcacgtgccacacggcattctttgccagcatcgtggtggtgcagtgggctgacctcatcatctgcaagacccgccgcaactcagtcttccagcagggcatgaagaacaagatcctgatttttgggctcctggaggagacggcgttggctgcctttctctcttactgcccaggcatgggtgtagccctccgcatgtacccgctcaaagtcacctggtggttctgcgccttcccctacagcctcctcatcttcatctatgatgaggtccgaaagctcatcctgcggcggtatcctggtggctgggtggagaaggagacatactactgaccccattggaagaagaaccaggcatggaaagatggggagctctggaggtgttgtggggatggtgatggagagggatggaaataacgggtggcattgggtggcaacatttggggagagataatgaggcaactcagcaggctaagttgcggggtatataaattggggtgatgaccccatagacctaactgtgaacaatcagattagacactatgtgttagagtccccccgaccagatccttttccatcccactccactatgttgtctattttttctgaggaattaagggttaccccaccctgcccactcccatcccttcaaccccacttcctactgtaatagatcagcatccaaaagcaggaacccatctaaaccagaaggaagccctctcagatcaccccagcctcactccatttcccacttccacccccgttagcttcctgcaggactctatccctggcttccccttcagaccttgcaatcacaaaaggttcttctggtgagtgcaagagcctgagactggaaaaggtggacttgtctcccagtcgaggctggtaagggaccttcagggagagctgggcagacaggtgggagatggaggtagggctggctggaggaaggaaacaacaaaggaagtgaggtagtgccaatgacaggacatttgacatgagtctccagatagatgtcgtggactccagctctacgtcccacattttagaataccccaccagcagaacaaactcagatctcatcagggtagcagcagaggcaggaccagaaggcaatcaagagcttccagaaatgccacacttgtgtgccacagagttccccgctgacccttggttaggggtcctcttagtccacaaggtccggatgtcactcatgtacttaataacacttcaccttctgtaatactaagtcctcagagctccatgctgttctgaaagggatggccacaagttctttcccagcctcttccattccctttcttttcatgcccatcccgatgaacctgcatcattccccgacactgccaagccaaccctggaaaaggagttcgctggccattggctagaatcagggtggagaagttccctgaaccttcctgtctcccagggacatgtatgcttccagggacaagcttaggtcatgaacatggtcagaacctttggacaagaggaaaaatactaagagatttgctttttctgggtgcggtggctcatgcctgtaatcccagcactttgggaggccgaggcaggtggatcatgaggtcaggagttcgaggcgagcctggccaacatggtgaaaccctgtctctactaaaagtacaaaaaattagccagtcatggtggcacacgcctgtaatctcagctactcaggaggctgaggcaggagaattgcttgaacctgtgaggaagaggttgcagtgagctgagatcgtgccattacactccagcctgggcgaaagggtgagactccatctcaaaaaaacacaacacaccggcgttggcttggagagctccacaagggggcgaggggggtcccctccagggaaatgccttgaaaacgggagacatgtggcacctttacccggcgcggaaacgatggtcaaggtccacaacggagaaagtttttccca

SEQ ID NO: 736228 - DNA, 5852 bp, Homo sapiens
  misc_feature (121)..(122): n is a, c, g, or t
  misc_feature (233)..(236): n is a, c, g, or t
  misc_feature (406)..(406): n is a, c, g, or t
  misc_feature (683)..(683): n is a, c, g, or t
  misc_feature (948)..(948): n is a, c, g, or t
  misc_feature (977)..(977): n is a, c, g, or t
  misc_feature (1042)..(1042): n is a, c, g, or t
  misc_feature (1067)..(1067): n is a, c, g, or t
  misc_feature (1271)..(1271): n is a, c, g, or t
  misc_feature (1320)..(1321): n is a, c, g, or t
cactcgctggcttcccctcactccatctctgtgcccagagaaacaggggtactccaggggaatcctgtcctctgactgttcccagtagaaggcgggagcagaattttttcttttctctctnncccttctggttccccttcctctctgtgcccctcatcctttggattactcatcaaatgagcagcaacaacacccctagaccagctggtcctgtcctgggtcatctcgttgtnnnnagtttctagctggtataaggttaaagataccctttccagccccagcaaagccttaggcatttctgggattgctcctgactctgatgggcatcctcactcctcagacatttccaatctcccccacttcactgcagctttgcttccccttccccactggaagaaggaaacantcgctctcctttcccgttcacatgtctgatatttgctatgatattgaccttcacacacatcttagaggttctgtattttcctctcttttgacttctccctatcactactctactcaggcatagattcagtctagagctcttcaacagcaatgaaacggtaaacgaggggtaaacaaaacccagagatgtcatcaggtgcctgctaggagtcccacccgttcccctctagccctggcctgcccctccctaccagagtcttgattctccttcaaaactntggagaggttacatctggcagggtttggggacacctcttgcctccatctcaaacttccgctgcctccgagccacctttgactcctcctgggccccccttccaggtgcctcaagtgcagaggtcagccttcggttcaaattctatttctgggcttcagtgtccctgcaacctctataatagaaggaacagagtggtctatgtttctttctttctctgggagattggatgtagactcgggagacctgagttctggctctgtcttatnaattcaaattgtttaatctctctgagccncagtttacccacttggaaaagaagagttaggccacatggtctctgtcatcctgggattctgagtnaactgctccccttcagccagatccnaggggcatatccccccaacctgggacccaggcccccttcccttgcagcctctctcagttgtgagtgcacaggccagagggggttgagaggagccaagggggggcatgccgtgggacaaacgggctgtctagggccagtggctaaaggggcgggaggggaggagtcctcagggatcctgtttcaacaaacgtttctttcggaggnggggaaggcgggggagagggggagaaggacctatttaaagctaccctgnngctttggctttctctgtctgccagggtctccgactgtcccagacgggctggtgtgggcttgggatcctcctggtgacctctcccgctaaggtccctcagccactctgccccaagatgggccgtggggctggccgtgagtactcacctgccgccaccacggcagagaatgggggcggcaagaagaaacagaaggagaaggaactggatgagctgaagaaggaggtggcaatggatgaccacaagctgtccttggatgagctgggccgcaaataccaagtggacctgtccaagggcctcaccaaccagcgggctcaggacgttctggctcgagatgggcccaacgccctcacaccacctcccacaacccctgagtgggtcaagttctgccgtcagcttttcggggggttctccatcctgctgtggattggggctatcctctgcttcctggcctacggcatccaggctgccatggaggatgaaccatccaacgacaatctatatctgggtgtggtgctggcagctgtggtcattgtcactggctgcttctcctactaccaggaggccaagagctccaagatcatggattccttcaagaacatggtacctcagcaagcccttgtgatccgggagggagagaagatgcagatcaacgcagaggaagtggtggtgggagacctggtggaggtgaagggtggagaccgcgtccctgctgacctccggatcatctcttctcatggctgtaaggtggataactcatccttaacaggagagtcggagccccagacccgctcccccgagttcacccatgagaaccccctggagacccgcaatatctgtttcttctccaccaactgtgttgaaggcactgccaggggcattgtgattgccacaggagaccggacggtgatgggccgcatagctactctcgcctcaggcctggaggttgggcggacacccatagcaatggagattgaacacttcatccagctgatcacaggggtcgctgtattcctgggggtctccttcttcgtgctctccctcatcctgggctacagctggctggaggcagtcatcttcctcatcggcatcatagtggccaacgtgcctgaggggcttctggccactgtcactgtgtgcctgaccctgacagccaagcgcatggcacggaagaactgcctggtgaagaacctggaggcggtggagacgctgggctccacgtccaccatctgctcggacaagacgggcaccctcacccagaaccgcatgaccgtcgcccacatgtggttcgacaaccaaatccatgaggctgacaccaccgaagatcagtctggggccacttttgacaaacgatcccctacgtggacggccctgtctcgaattgctggtctctgcaaccgcgccgtcttcaaggcaggacaggagaacatctccgtgtctaagcgggacacagctggtgatgcctctgagtcagctctgctcaagtgcattgagctctcctgtggctcagtgaggaaaatgagagacagaaaccccaaggtggcagagattcctttcaactctaccaacaagtaccagctgtctatccacgagcgagaagacagcccccagagccacgtgctggtgatgaagggggccccagagcgcattctggaccggtgctccaccatcctggtgcagggcaaggagatcccgctcgacaaggagatgcaagatgcctttcaaaatgcctacatggagctggggggacttggggagcgtgtgctgggattctgtcaactgaatctgccatctggaaagtttcctcggggcttcaaattcgacacggatgagctgaactttcccacggagaagctttgctttgtggggctcatgtctatgattgaccctccccgggctgctgtgccagatgctgtgggcaagtgccgaagcgcaggcatcaaggtgatcatggtaaccggggatcaccctatcacagccaaggccattgccaaaggcgtgggcatcatatcagagggtaacgagactgtggaggacattgcagcccggctcaacattcccatgagtcaagtcaaccccagagaagccaaggcatgcgtggtgcacggctctgacctgaaggacatgacatcggagcagctcgatgagatcctcaagaaccacacagagatcgtctttgctcgaacgtctccccagcagaagctcatcattgtggagggatgtcagaggcagggagccattgtggccgtgacgggtgacggggtgaacgactcccctgcattgaagaaggctgacattggcattgccatgggcatctctggctctgacgtctctaagcaggcagccgacatgatcctgctggatgacaactttgcctccatcgtcacgggggtggaggagggccgcctgatctttgacaacttgaagaaatccatcgcctacaccctgaccagcaacatccccgagatcacccccttcctgctgttcatcattgccaacatccccctacctctgggcactgtgaccatcctttgcattgacctgggcacagatatggtccctgccatctccttggcctatgaggcagctgagagtgatatcatgaagcggcagccacgaaactcccagacggacaagctggtgaatgagaggctcatcagcatggcctacggacagatcgggatgatccaggcactgggtggcttcttcacctactttgtgatcctggcagagaacggtttcctgccatcacggctactgggaatccgcctcgactgggatgaccggaccatgaatgatctggaggacagctatggacaggagtggacctatgagcagcggaaggtggtggagttcacgtgccacacggcattctttgccagcatcgtggtggtgcagtgggctgacctcatcatctgcaagacccgccgcaactcagtcttccagcagggcatgaagaacaagatcctgatttttgggctcctggaggagacggcgttggctgcctttctctcttactgcccaggcatgggtgtagccctccgcatgtacccgctcaaagtcacctggtggttctgcgccttcccctacagcctcctcatcttcatctatgatgaggtccgaaagctcatcctgcggcggtatcctggtggctgggtggagaaggagacatactactgaccccattggaagaagaaccaggcatggaaagatggggagctctggaggtgttgtggggatggtgatggagagggatggaaataacgggtggcattgggtggcaacatttggggagagataatgaggcaactcagcaggctaagttgcggggtatataaattggggtgatgaccccatagacctaactgtgaacaatcagattagacactatgtgttagagtccccccgaccagatccttttccatcccactccactatgttgtctattttttctgaggaattaagggttaccccaccctgcccactcccatcccttcaaccccacttcctactgtaatagatcagcatccaaaagcaggaacccatctaaaccagaaggaagccctctcagatcaccccagcctcactccatttcccacttccacccccgttagcttcctgcaggactctatccctggcttccccttcagaccttgcaatcacaaaaggttcttctggtgagtgcaagagcctgagactggaaaaggtggacttgtctcccagtcgaggctggtaagggaccttcagggagagctgggcagacaggtgggagatggaggtagggctggctggaggaaggaaacaacaaaggaagtgaggtagtgccaatgacaggacatttgacatgagtctccagatagatgtcgtggactccagctctacgtcccacattttagaataccccaccagcagaacaaactcagatctcatcagggtagcagcagaggcaggaccagaaggcaatcaagagcttccagaaatgccacacttgtgtgccacagagttccccgctgacccttggttaggggtcctcttagtccacaaggtccggatgtcactcatgtacttaataacacttcaccttctgtaatactaagtcctcagagctccatgctgttctgaaagggatggccacaagttctttcccagcctcttccattccctttcttttcatgcccatcccgatgaacctgcatcattccccgacactgccaagccaaccctggaaaaggagttcgctggccattggctagaatcagggtggagaagttccctgaaccttcctgtctcccagggacatgtatgcttccagggacaagcttaggtcatgaacatggtcagaacctttggacaagaggaaaaatactaagagatttgctttttctgggtgcggtggctcatgcctgtaatcccagcactttgggaggccgaggcaggtggatcatgaggtcaggagttcgaggcgagcctggccaacatggtgaaaccctgcttactgtcattgcccgcttgttgaccagccggaattgtcctg

SEQ ID NO: 736229 - DNA, 7023 bp, Homo sapiens
  misc_feature (121)..(122): n is a, c, g, or t
  misc_feature (233)..(236): n is a, c, g, or t
  misc_feature (406)..(406): n is a, c, g, or t
  misc_feature (683)..(683): n is a, c, g, or t
  misc_feature (948)..(948): n is a, c, g, or t
  misc_feature (977)..(977): n is a, c, g, or t
  misc_feature (1042)..(1042): n is a, c, g, or t
  misc_feature (1067)..(1067): n is a, c, g, or t
  misc_feature (1271)..(1271): n is a, c, g, or t
  misc_feature (1320)..(1321): n is a, c, g, or t
  misc_feature (5627)..(5627): n is a, c, g, or t
  misc_feature (5634)..(5634): n is a, c, g, or t
  misc_feature (6905)..(6905): n is a, c, g, or t
  misc_feature (6920)..(6921): n is a, c, g, or t
  misc_feature (7018)..(7018): n is a, c, g, or t
cactcgctggcttcccctcactccatctctgtgcccagagaaacaggggtactccaggggaatcctgtcctctgactgttcccagtagaaggcgggagcagaattttttcttttctctctnncccttctggttccccttcctctctgtgcccctcatcctttggattactcatcaaatgagcagcaacaacacccctagaccagctggtcctgtcctgggtcatctcgttgtnnnnagtttctagctggtataaggttaaagataccctttccagccccagcaaagccttaggcatttctgggattgctcctgactctgatgggcatcctcactcctcagacatttccaatctcccccacttcactgcagctttgcttccccttccccactggaagaaggaaacantcgctctcctttcccgttcacatgtctgatatttgctatgatattgaccttcacacacatcttagaggttctgtattttcctctcttttgacttctccctatcactactctactcaggcatagattcagtctagagctcttcaacagcaatgaaacggtaaacgaggggtaaacaaaacccagagatgtcatcaggtgcctgctaggagtcccacccgttcccctctagccctggcctgcccctccctaccagagtcttgattctccttcaaaactntggagaggttacatctggcagggtttggggacacctcttgcctccatctcaaacttccgctgcctccgagccacctttgactcctcctgggccccccttccaggtgcctcaagtgcagaggtcagccttcggttcaaattctatttctgggcttcagtgtccctgcaacctctataatagaaggaacagagtggtctatgtttctttctttctctgggagattggatgtagactcgggagacctgagttctggctctgtcttatnaattcaaattgtttaatctctctgagccncagtttacccacttggaaaagaagagttaggccacatggtctctgtcatcctgggattctgagtnaactgctccccttcagccagatccnaggggcatatccccccaacctgggacccaggcccccttcccttgcagcctctctcagttgtgagtgcacaggccagagggggttgagaggagccaagggggggcatgccgtgggacaaacgggctgtctagggccagtggctaaaggggcgggaggggaggagtcctcagggatcctgtttcaacaaacgtttctttcggaggnggggaaggcgggggagagggggagaaggacctatttaaagctaccctgnngctttggctttctctgtctgccagggtctccgactgtcccagacgggctggtgtgggcttgggatcctcctggtgacctctcccgctaaggtccctcagccactctgccccaagatgggccgtggggctggccgtgagtactcacctgccgccaccacggcagagaatgggggcggcaagaagaaacagaaggagaaggaactggatgagctgaagaaggaggtggcaatggatgaccacaagctgtccttggatgagctgggccgcaaataccaagtggacctgtccaagggcctcaccaaccagcgggctcaggacgttctggctcgagatgggcccaacgccctcacaccacctcccacaacccctgagtgggtcaagttctgccgtcagcttttcggggggttctccatcctgctgtggattggggctatcctctgcttcctggcctacggcatccaggctgccatggaggatgaaccatccaacgacaatctatatctgggtgtggtgctggcagctgtggtcattgtcactggctgcttctcctactaccaggaggccaagagctccaagatcatggattccttcaagaacatggtacctcagcaagcccttgtgatccgggagggagagaagatgcagatcaacgcagaggaagtggtggtgggagacctggtggaggtgaagggtggagaccgcgtccctgctgacctccggatcatctcttctcatggctgtaaggtggataactcatccttaacaggagagtcggagccccagacccgctcccccgagttcacccatgagaaccccctggagacccgcaatatctgtttcttctccaccaactgtgttgaaggcactgccaggggcattgtgattgccacaggagaccggacggtgatgggccgcatagctactctcgcctcaggcctggaggttgggcggacacccatagcaatggagattgaacacttcatccagctgatcacaggggtcgctgtattcctgggggtctccttcttcgtgctctccctcatcctgggctacagctggctggaggcagtcatcttcctcatcggcatcatagtggccaacgtgcctgaggggcttctggccactgtcactgtgtgcctgaccctgacagccaagcgcatggcacggaagaactgcctggtgaagaacctggaggcggtggagacgctgggctccacgtccaccatctgctcggacaagacgggcaccctcacccagaaccgcatgaccgtcgcccacatgtggttcgacaaccaaatccatgaggctgacaccaccgaagatcagtctggggccacttttgacaaacgatcccctacgtggacggccctgtctcgaattgctggtctctgcaaccgcgccgtcttcaaggcaggacaggagaacatctccgtgtctaagcgggacacagctggtgatgcctctgagtcagctctgctcaagtgcattgagctctcctgtggctcagtgaggaaaatgagagacagaaaccccaaggtggcagagattcctttcaactctaccaacaagtaccagctgtctatccacgagcgagaagacagcccccagagccacgtgctggtgatgaagggggccccagagcgcattctggaccggtgctccaccatcctggtgcagggcaaggagatcccgctcgacaaggagatgcaagatgcctttcaaaatgcctacatggagctggggggacttggggagcgtgtgctgggattctgtcaactgaatctgccatctggaaagtttcctcggggcttcaaattcgacacggatgagctgaactttcccacggagaagctttgctttgtggggctcatgtctatgattgaccctccccgggctgctgtgccagatgctgtgggcaagtgccgaagcgcaggcatcaaggtgatcatggtaaccggggatcaccctatcacagccaaggccattgccaaaggcgtgggcatcatatcagagggtaacgagactgtggaggacattgcagcccggctcaacattcccatgagtcaagtcaaccccagagaagccaaggcatgcgtggtgcacggctctgacctgaaggacatgacatcggagcagctcgatgagatcctcaagaaccacacagagatcgtctttgctcgaacgtctccccagcagaagctcatcattgtggagggatgtcagaggcagggagccattgtggccgtgacgggtgacggggtgaacgactcccctgcattgaagaaggctgacattggcattgccatgggcatctctggctctgacgtctctaagcaggcagccgacatgatcctgctggatgacaactttgcctccatcgtcacgggggtggaggagggccgcctgatctttgacaacttgaagaaatccatcgcctacaccctgaccagcaacatccccgagatcacccccttcctgctgttcatcattgccaacatccccctacctctgggcactgtgaccatcctttgcattgacctgggcacagatatggtccctgccatctccttggcctatgaggcagctgagagtgatatcatgaagcggcagccacgaaactcccagacggacaagctggtgaatgagaggctcatcagcatggcctacggacagatcgggatgatccaggcactgggtggcttcttcacctactttgtgatcctggcagagaacggtttcctgccatcacggctactgggaatccgcctcgactgggatgaccggaccatgaatgatctggaggacagctatggacaggagtggacctatgagcagcggaaggtggtggagttcacgtgccacacggcattctttgccagcatcgtggtggtgcagtgggctgacctcatcatctgcaagacccgccgcaactcagtcttccagcagggcatgaagaacaagatcctgatttttgggctcctggaggagacggcgttggctgcctttctctcttactgcccaggcatgggtgtagccctccgcatgtacccgctcaaagtcacctggtggttctgcgccttcccctacagcctcctcatcttcatctatgatgaggtccgaaagctcatcctgcggcggtatcctggtggctgggtggagaaggagacatactactgaccccattggaagaagaaccaggcatggaaagatggggagctctggaggtgttgtggggatggtgatggagagggatggaaataacgggtggcattgggtggcaacatttggggagagataatgaggcaactcagcaggctaagttgcggggtatataaattggggtgatgaccccatagacctaactgtgaacaatcagattagacactatgtgttagagtccccccgaccagatccttttccatcccactccactatgttgtctattttttctgaggaattaagggttaccccaccctgcccactcccatcccttcaaccccacttcctactgtaatagatcagcatccaaaagcaggaacccatctaaaccagaaggaagccctctcagatcaccccagcctcactccatttcccacttccacccccgttagcttcctgcaggactctatccctggcttccccttcagaccttgcaatcacaaaaggttcttctggtgagtgcaagagcctgagactggaaaaggtggacttgtctcccagtcgaggctggtaagggaccttcagggagagctgggcagacaggtgggagatggaggtagggctggctggaggaaggaaacaacaaaggaagtgaggtagtgccaatgacaggacatttgacatgagtctccagatagatgtcgtggactccagctctacgtcccacattttagaataccccaccagcagaacaaactcagatctcatcagggtagcagcagaggcaggaccagaaggcaatcaagagcttccagaaatgccacacttgtgtgccacagagttccccgctgacccttggttaggggtcctcttagtccacaaggtccggatgtcactcatgtacttaataacacttcaccttctgtaatactaagtcctcagagctccatgctgttctgaaagggatggccacaagttctttcccagcctcttccattccctttcttttcatgcccatcccgatgaacctgcatcattccccgacactgccaagccaaccctggaaaaggagttcgctggccattggctagaatcaggggggggggggggtttttgggggggaaaaaaggaaaaaaaagggtttttnccccccnccttttgggaaaaaaaaaacccccccttcctgtctcccagggacatgtatgcttccagggacaagcttaggtcatgaacatggtcagaacctttggacaagaggaaaaatactaagagatttgctttttctgggtgcggtggctcatgcctgtaatcccagcactttgggaggccgaggcaggtggatcatgaggtcaggagttcgaggcgagcctggccaacatggtgaaaccctgtctctactaaaagtacaaaaaattagccagtcatggtggcacacgcctgtaatctcagctactcaggaggctgaggcaggagaattgcttgaacctgtgaggaagaggttgcagtgagctgagatcgtgccattacactccagcctgggcgaaagggtgagactccatctcaaaaaaaaaaaaaatgatttgcttttgacgtcttaggtggcagggctgttccctccaggcaaatgcccttcaaaccgacgatcattgtgcccacttaccctgggctggagagttggtttcaggttcctacaggagatagctttctttcccttactccctatctaacacttttgctctgcaggcagccttgcccattctctaagcctggcttagaaggcactgggaatgtcctgtagagagagacctagataggtcatgcaagtgagaaagacatctgaggaaaatggaagacctaaggcagacaggaaggaagcacaaaagacaagcattgggtcagacccataaaccacctcccaaaggctgtcatttcattgcactggaattttgctttatcagaagcaaggaagtaagggagtcattgccttgggcctgggaatctaagtgggagacaatattaatttggatccgattaattggagattactaactgtggacaaaagtttatctttgcacaatcaataaaaatggcatttttttagtaaattaagagcataaacaatattgctagaggtggcatgtttagtctaccaaaaacaatacttttcaggcactttagaaatatccttttagaagcagcgagtgcatgggctaattatcatcaatctttatgtatttgttaaagaaacatctacaggatctttattggtgaccttttgtaagacattagtttgaggtactacctatgtacttgaaaataataaagtggcatttctttatgaaaaaaaaaaaaaaactgagttttacccatctttataaatgatgctacactactaaactgtgatgcatttgacatctgtcattcntctgtggctgaccanncatgcaacattctttatattttgggcacttcattactgtgagaagcttaagaccttctttccacccgtgaacataagggggccacatacttggtttnccaat

SEQ ID NO: 736230 - DNA, 6905 bp, Homo sapiens
  misc_feature (121)..(122): n is a, c, g, or t
  misc_feature (233)..(236): n is a, c, g, or t
  misc_feature (406)..(406): n is a, c, g, or t
  misc_feature (683)..(683): n is a, c, g, or t
  misc_feature (948)..(948): n is a, c, g, or t
  misc_feature (977)..(977): n is a, c, g, or t
  misc_feature (1042)..(1042): n is a, c, g, or t
  misc_feature (1067)..(1067): n is a, c, g, or t
  misc_feature (1271)..(1271): n is a, c, g, or t
  misc_feature (1320)..(1321): n is a, c, g, or t
  misc_feature (6787)..(6787): n is a, c, g, or t
  misc_feature (6802)..(6803): n is a, c, g, or t
  misc_feature (6900)..(6900): n is a, c, g, or t
cactcgctggcttcccctcactccatctctgtgcccagagaaacaggggtactccaggggaatcctgtcctctgactgttcccagtagaaggcgggagcagaattttttcttttctctctnncccttctggttccccttcctctctgtgcccctcatcctttggattactcatcaaatgagcagcaacaacacccctagaccagctggtcctgtcctgggtcatctcgttgtnnnnagtttctagctggtataaggttaaagataccctttccagccccagcaaagccttaggcatttctgggattgctcctgactctgatgggcatcctcactcctcagacatttccaatctcccccacttcactgcagctttgcttccccttccccactggaagaaggaaacantcgctctcctttcccgttcacatgtctgatatttgctatgatattgaccttcacacacatcttagaggttctgtattttcctctcttttgacttctccctatcactactctactcaggcatagattcagtctagagctcttcaacagcaatgaaacggtaaacgaggggtaaacaaaacccagagatgtcatcaggtgcctgctaggagtcccacccgttcccctctagccctggcctgcccctccctaccagagtcttgattctccttcaaaactntggagaggttacatctggcagggtttggggacacctcttgcctccatctcaaacttccgctgcctccgagccacctttgactcctcctgggccccccttccaggtgcctcaagtgcagaggtcagccttcggttcaaattctatttctgggcttcagtgtccctgcaacctctataatagaaggaacagagtggtctatgtttctttctttctctgggagattggatgtagactcgggagacctgagttctggctctgtcttatnaattcaaattgtttaatctctctgagccncagtttacccacttggaaaagaagagttaggccacatggtctctgtcatcctgggattctgagtnaactgctccccttcagccagatccnaggggcatatccccccaacctgggacccaggcccccttcccttgcagcctctctcagttgtgagtgcacaggccagagggggttgagaggagccaagggggggcatgccgtgggacaaacgggctgtctagggccagtggctaaaggggcgggaggggaggagtcctcagggatcctgtttcaacaaacgtttctttcggaggnggggaaggcgggggagagggggagaaggacctatttaaagctaccctgnngctttggctttctctgtctgccagggtctccgactgtcccagacgggctggtgtgggcttgggatcctcctggtgacctctcccgctaaggtccctcagccactctgccccaagatgggccgtggggctggccgtgagtactcacctgccgccaccacggcagagaatgggggcggcaagaagaaacagaaggagaaggaactggatgagctgaagaaggaggtggcaatggatgaccacaagctgtccttggatgagctgggccgcaaataccaagtggacctgtccaagggcctcaccaaccagcgggctcaggacgttctggctcgagatgggcccaacgccctcacaccacctcccacaacccctgagtgggtcaagttctgccgtcagcttttcggggggttctccatcctgctgtggattggggctatcctctgcttcctggcctacggcatccaggctgccatggaggatgaaccatccaacgacaatctatatctgggtgtggtgctggcagctgtggtcattgtcactggctgcttctcctactaccaggaggccaagagctccaagatcatggattccttcaagaacatggtacctcagcaagcccttgtgatccgggagggagagaagatgcagatcaacgcagaggaagtggtggtgggagacctggtggaggtgaagggtggagaccgcgtccctgctgacctccggatcatctcttctcatggctgtaaggtggataactcatccttaacaggagagtcggagccccagacccgctcccccgagttcacccatgagaaccccctggagacccgcaatatctgtttcttctccaccaactgtgttgaaggcactgccaggggcattgtgattgccacaggagaccggacggtgatgggccgcatagctactctcgcctcaggcctggaggttgggcggacacccatagcaatggagattgaacacttcatccagctgatcacaggggtcgctgtattcctgggggtctccttcttcgtgctctccctcatcctgggctacagctggctggaggcagtcatcttcctcatcggcatcatagtggccaacgtgcctgaggggcttctggccactgtcactgtgtgcctgaccctgacagccaagcgcatggcacggaagaactgcctggtgaagaacctggaggcggtggagacgctgggctccacgtccaccatctgctcggacaagacgggcaccctcacccagaaccgcatgaccgtcgcccacatgtggttcgacaaccaaatccatgaggctgacaccaccgaagatcagtctggggccacttttgacaaacgatcccctacgtggacggccctgtctcgaattgctggtctctgcaaccgcgccgtcttcaaggcaggacaggagaacatctccgtgtctaagcgggacacagctggtgatgcctctgagtcagctctgctcaagtgcattgagctctcctgtggctcagtgaggaaaatgagagacagaaaccccaaggtggcagagattcctttcaactctaccaacaagtaccagctgtctatccacgagcgagaagacagcccccagagccacgtgctggtgatgaagggggccccagagcgcattctggaccggtgctccaccatcctggtgcagggcaaggagatcccgctcgacaaggagatgcaagatgcctttcaaaatgcctacatggagctggggggacttggggagcgtgtgctgggattctgtcaactgaatctgccatctggaaagtttcctcggggcttcaaattcgacacggatgagctgaactttcccacggagaagctttgctttgtggggctcatgtctatgattgaccctccccgggctgctgtgccagatgctgtgggcaagtgccgaagcgcaggcatcaaggtgatcatggtaaccggggatcaccctatcacagccaaggccattgccaaaggcgtgggcatcatatcagagggtaacgagactgtggaggacattgcagcccggctcaacattcccatgagtcaagtcaaccccagagaagccaaggcatgcgtggtgcacggctctgacctgaaggacatgacatcggagcagctcgatgagatcctcaagaaccacacagagatcgtctttgctcgaacgtctccccagcagaagctcatcattgtggagggatgtcagaggcagggagccattgtggccgtgacgggtgacggggtgaacgactcccctgcattgaagaaggctgacattggcattgccatgggcatctctggctctgacgtctctaagcaggcagccgacatgatcctgctggatgacaactttgcctccatcgtcacgggggtggaggagggccgcctgatctttgacaacttgaagaaatccatcgcctacaccctgaccagcaacatccccgagatcacccccttcctgctgttcatcattgccaacatccccctacctctgggcactgtgaccatcctttgcattgacctgggcacagatatggtccctgccatctccttggcctatgaggcagctgagagtgatatcatgaagcggcagccacgaaactcccagacggacaagctggtgaatgagaggctcatcagcatggcctacggacagatcgggatgatccaggcactgggtggcttcttcacctactttgtgatcctggcagagaacggtttcctgccatcacggctactgggaatccgcctcgactgggatgaccggaccatgaatgatctggaggacagctatggacaggagtggacctatgagcagcggaaggtggtggagttcacgtgccacacggcattctttgccagcatcgtggtggtgcagtgggctgacctcatcatctgcaagacccgccgcaactcagtcttccagcagggcatgaagaacaagatcctgatttttgggctcctggaggagacggcgttggctgcctttctctcttactgcccaggcatgggtgtagccctccgcatgtacccgctcaaagtcacctggtggttctgcgccttcccctacagcctcctcatcttcatctatgatgaggtccgaaagctcatcctgcggcggtatcctggtggctgggtggagaaggagacatactactgaccccattggaagaagaaccaggcatggaaagatggggagctctggaggtgttgtggggatggtgatggagagggatggaaataacgggtggcattgggtggcaacatttggggagagataatgaggcaactcagcaggctaagttgcggggtatataaattggggtgatgaccccatagacctaactgtgaacaatcagattagacactatgtgttagagtccccccgaccagatccttttccatcccatcccatcccttcaaccccacttcctactgtaatagatcagcatccaaaagcaggaacccatctaaaccagaaggaagccctctcagatcaccccagcctcactccatttcccacttccacccccgttagcttcctgcaggactctatccctggcttccccttcagaccttgcaatcacaaaaggttcttctggtgagtgcaagagcctgagactggaaaaggtggacttgtctcccagtcgaggctggtaagggaccttcagggagagctgggcagacaggtgggagatggaggtagggctggctggaggaaggaaacaacaaaggaagtgaggtagtgccaatgacaggacatttgacatgagtctccagatagatgtcgtggactccagctctacgtcccacattttagaataccccaccagcagaacaaactcagatctcatcagggtagcagcagaggcaggaccagaaggcaatcaagagcttccagaaatgccacacttgtgtgccacagagttccccgctgacccttggttaggggtcctcttagtccacaaggtccggatgtcactcatgtacttaataacacttcaccttctgtaatactaagtcctcagagctccatgctgttctgaaagggatggccacaagttctttcccagcctcttccattccctttcttttcatgcccatcccgatgaacctgcatcattccccgacactgccaagccaaccctggaaaaggagttcgctggccattggctagaatcagggtggagaagttccctgaaccttcctgtctcccagggacatgtatgcttccagggacaagcttaggtcatgaacatggtcagaacctttggacaagaggaaaaatactaagagatttgctttttctgggtgcggtggctcatgcctgtaatcccagcactttgggaggccgaggcaggtggatcatgaggtcaggagttcgaggcgagcctggccaacatggtgaaaccctgtctctactaaaagtacaaaaaattagccagtcatggtggcacacgcctgtaatctcagctactcaggaggctgaggcaggagaattgcttgaacctgtgaggaagaggttgcagtgagctgagatcgtgccattacactccagcctgggcgaaagggtgagactccatctcaaaaaaaaaaaaaatgatttgcttttgacgtcttaggtggcagggctgttccctccaggcaaatgcccttcaaaccgacgatcattgtgcccacttaccctgggctggagagttggtttcaggttcctacaggagatagctttctttcccttactccctatctaacacttttgctctgcaggcagccttgcccattctctaagcctggcttagaaggcactgggaatgtcctgtagagagagacctagataggtcatgcaagtgagaaagacatctgaggaaaatggaagacctaaggcagacaggaaggaagcacaaaagacaagcattgggtcagacccataaaccacctcccaaaggctgtcatttcattgcactggaattttgctttatcagaagcaaggaagtaagggagtcattgccttgggcctgggaatctaagtgggagacaatattaatttggatccgattaattggagattactaactgtggacaaaagtttatctttgcacaatcaataaaaatggcatttttttagtaaattaagagcataaacaatattgctagaggtggcatgtttagtctaccaaaaacaatacttttcaggcactttagaaatatccttttagaagcagcgagtgcatgggctaattatcatcaatctttatgtatttgttaaagaaacatctacaggatctttattggtgaccttttgtaagacattagtttgaggtactacctatgtacttgaaaataataaagtggcatttctttatgaaaaaaaaaaaaaaactgagttttacccatctttataaatgatgctacactactaaactgtgatgcatttgacatctgtcattcntctgtggctgaccanncatgcaacattctttatattttgggcacttcattactgtgagaagcttaagaccttctttccacccgtgaacataagggggccacatacttggtttnccaat

SEQ ID NO: 736231 - DNA, 6910 bp, Homo sapiens
  misc_feature (121)..(122): n is a, c, g, or t
  misc_feature (233)..(236): n is a, c, g, or t
  misc_feature (406)..(406): n is a, c, g, or t
  misc_feature (683)..(683): n is a, c, g, or t
  misc_feature (948)..(948): n is a, c, g, or t
  misc_feature (977)..(977): n is a, c, g, or t
  misc_feature (1042)..(1042): n is a, c, g, or t
  misc_feature (1067)..(1067): n is a, c, g, or t
  misc_feature (1271)..(1271): n is a, c, g, or t
  misc_feature (1320)..(1321): n is a, c, g, or t
  misc_feature (6792)..(6792): n is a, c, g, or t
  misc_feature (6807)..(6808): n is a, c, g, or t
  misc_feature (6905)..(6905): n is a, c, g, or t
cactcgctggcttcccctcactccatctctgtgcccagagaaacaggggtactccaggggaatcctgtcctctgactgttcccagtagaaggcgggagcagaattttttcttttctctctnncccttctggttccccttcctctctgtgcccctcatcctttggattactcatcaaatgagcagcaacaacacccctagaccagctggtcctgtcctgggtcatctcgttgtnnnnagtttctagctggtataaggttaaagataccctttccagccccagcaaagccttaggcatttctgggattgctcctgactctgatgggcatcctcactcctcagacatttccaatctcccccacttcactgcagctttgcttccccttccccactggaagaaggaaacantcgctctcctttcccgttcacatgtctgatatttgctatgatattgaccttcacacacatcttagaggttctgtattttcctctcttttgacttctccctatcactactctactcaggcatagattcagtctagagctcttcaacagcaatgaaacggtaaacgaggggtaaacaaaacccagagatgtcatcaggtgcctgctaggagtcccacccgttcccctctagccctggcctgcccctccctaccagagtcttgattctccttcaaaactntggagaggttacatctggcagggtttggggacacctcttgcctccatctcaaacttccgctgcctccgagccacctttgactcctcctgggccccccttccaggtgcctcaagtgcagaggtcagccttcggttcaaattctatttctgggcttcagtgtccctgcaacctctataatagaaggaacagagtggtctatgtttctttctttctctgggagattggatgtagactcgggagacctgagttctggctctgtcttatnaattcaaattgtttaatctctctgagccncagtttacccacttggaaaagaagagttaggccacatggtctctgtcatcctgggattctgagtnaactgctccccttcagccagatccnaggggcatatccccccaacctgggacccaggcccccttcccttgcagcctctctcagttgtgagtgcacaggccagagggggttgagaggagccaagggggggcatgccgtgggacaaacgggctgtctagggccagtggctaaaggggcgggaggggaggagtcctcagggatcctgtttcaacaaacgtttctttcggaggnggggaaggcgggggagagggggagaaggacctatttaaagctaccctgnngctttggctttctctgtctgccagggtctccgactgtcccagacgggctggtgtgggcttgggatcctcctggtgacctctcccgctaaggtccctcagccactctgccccaagatgggccgtggggctggccgtgagtactcacctgccgccaccacggcagagaatgggggcggcaagaagaaacagaaggagaaggaactggatgagctgaagaaggaggtggcaatggatgaccacaagctgtccttggatgagctgggccgcaaataccaagtggacctgtccaagggcctcaccaaccagcgggctcaggacgttctggctcgagatgggcccaacgccctcacaccacctcccacaacccctgagtgggtcaagttctgccgtcagcttttcggggggttctccatcctgctgtggattggggctatcctctgcttcctggcctacggcatccaggctgccatggaggatgaaccatccaacgacaatctatatctgggtgtggtgctggcagctgtggtcattgtcactggctgcttctcctactaccaggaggccaagagctccaagatcatggattccttcaagaacatggtacctcagcaagcccttgtgatccgggagggagagaagatgcagatcaacgcagaggaagtggtggtgggagacctggtggaggtgaagggtggagaccgcgtccctgctgacctccggatcatctcttctcatggctgtaaggtggataactcatccttaacaggagagtcggagccccagacccgctcccccgagttcacccatgagaaccccctggagacccgcaatatctgtttcttctccaccaactgtgttgaaggcactgccaggggcattgtgattgccacaggagaccggacggtgatgggccgcatagctactctcgcctcaggcctggaggttgggcggacacccatagcaatggagattgaacacttcatccagctgatcacaggggtcgctgtattcctgggggtctccttcttcgtgctctccctcatcctgggctacagctggctggaggcagtcatcttcctcatcggcatcatagtggccaacgtgcctgaggggcttctggccactgtcactgtgtgcctgaccctgacagccaagcgcatggcacggaagaactgcctggtgaagaacctggaggcggtggagacgctgggctccacgtccaccatctgctcggacaagacgggcaccctcacccagaaccgcatgaccgtcgcccacatgtggttcgacaaccaaatccatgaggctgacaccaccgaagatcagtctggggccacttttgacaaacgatcccctacgtggacggccctgtctcgaattgctggtctctgcaaccgcgccgtcttcaaggcaggacaggagaacatctccgtgtctaagcgggacacagctggtgatgcctctgagtcagctctgctcaagtgcattgagctctcctgtggctcagtgaggaaaatgagagacagaaaccccaaggtggcagagattcctttcaactctaccaacaagtaccagctgtctatccacgagcgagaagacagcccccagagccacgtgctggtgatgaagggggccccagagcgcattctggaccggtgctccaccatcctggtgcagggcaaggagatcccgctcgacaaggagatgcaagatgcctttcaaaatgcctacatggagctggggggacttggggagcgtgtgctgggattctgtcaactgaatctgccatctggaaagtttcctcggggcttcaaattcgacacggatgagctgaactttcccacggagaagctttgctttgtggggctcatgtctatgattgaccctccccgggctgctgtgccagatgctgtgggcaagtgccgaagcgcaggcatcaaggtgatcatggtaaccggggatcaccctatcacagccaaggccattgccaaaggcgtgggcatcatatcagagggtaacgagactgtggaggacattgcagcccggctcaacattcccatgagtcaagtcaaccccagagaagccaaggcatgcgtggtgcacggctctgacctgaaggacatgacatcggagcagctcgatgagatcctcaagaaccacacagagatcgtctttgctcgaacgtctccccagcagaagctcatcattgtggagggatgtcagaggcagggagccattgtggccgtgacgggtgacggggtgaacgactcccctgcattgaagaaggctgacattggcattgccatgggcatctctggctctgacgtctctaagcaggcagccgacatgatcctgctggatgacaactttgcctccatcgtcacgggggtggaggagggccgcctgatctttgacaacttgaagaaatccatcgcctacaccctgaccagcaacatccccgagatcacccccttcctgctgttcatcattgccaacatccccctacctctgggcactgtgaccatcctttgcattgacctgggcacagatatggtccctgccatctccttggcctatgaggcagctgagagtgatatcatgaagcggcagccacgaaactcccagacggacaagctggtgaatgagaggctcatcagcatggcctacggacagatcgagaacggtttcctgccatcacggctactgggaatccgcctcgactgggatgaccggaccatgaatgatctggaggacagctatggacaggagtggacctatgagcagcggaaggtggtggagttcacgtgccacacggcattctttgccagcatcgtggtggtgcagtgggctgacctcatcatctgcaagacccgccgcaactcagtcttccagcagggcatgaagaacaagatcctgatttttgggctcctggaggagacggcgttggctgcctttctctcttactgcccaggcatgggtgtagccctccgcatgtacccgctcaaagtcacctggtggttctgcgccttcccctacagcctcctcatcttcatctatgatgaggtccgaaagctcatcctgcggcggtatcctggtggctgggtggagaaggagacatactactgaccccattggaagaagaaccaggcatggaaagatggggagctctggaggtgttgtggggatggtgatggagagggatggaaataacgggtggcattgggtggcaacatttggggagagataatgaggcaactcagcaggctaagttgcggggtatataaattggggtgatgaccccatagacctaactgtgaacaatcagattagacactatgtgttagagtccccccgaccagatccttttccatcccactccactatgttgtctattttttctgaggaattaagggttaccccaccctgcccactcccatcccttcaaccccacttcctactgtaatagatcagcatccaaaagcaggaacccatctaaaccagaaggaagccctctcagatcaccccagcctcactccatttcccacttccacccccgttagcttcctgcaggactctatccctggcttccccttcagaccttgcaatcacaaaaggttcttctggtgagtgcaagagcctgagactggaaaaggtggacttgtctcccagtcgaggctggtaagggaccttcagggagagctgggcagacaggtgggagatggaggtagggctggctggaggaaggaaacaacaaaggaagtgaggtagtgccaatgacaggacatttgacatgagtctccagatagatgtcgtggactccagctctacgtcccacattttagaataccccaccagcagaacaaactcagatctcatcagggtagcagcagaggcaggaccagaaggcaatcaagagcttccagaaatgccacacttgtgtgccacagagttccccgctgacccttggttaggggtcctcttagtccacaaggtccggatgtcactcatgtacttaataacacttcaccttctgtaatactaagtcctcagagctccatgctgttctgaaagggatggccacaagttctttcccagcctcttccattccctttcttttcatgcccatcccgatgaacctgcatcattccccgacactgccaagccaaccctggaaaaggagttcgctggccattggctagaatcagggtggagaagttccctgaaccttcctgtctcccagggacatgtatgcttccagggacaagcttaggtcatgaacatggtcagaacctttggacaagaggaaaaatactaagagatttgctttttctgggtgcggtggctcatgcctgtaatcccagcactttgggaggccgaggcaggtggatcatgaggtcaggagttcgaggcgagcctggccaacatggtgaaaccctgtctctactaaaagtacaaaaaattagccagtcatggtggcacacgcctgtaatctcagctactcaggaggctgaggcaggagaattgcttgaacctgtgaggaagaggttgcagtgagctgagatcgtgccattacactccagcctgggcgaaagggtgagactccatctcaaaaaaaaaaaaaatgatttgcttttgacgtcttaggtggcagggctgttccctccaggcaaatgcccttcaaaccgacgatcattgtgcccacttaccctgggctggagagttggtttcaggttcctacaggagatagctttctttcccttactccctatctaacacttttgctctgcaggcagccttgcccattctctaagcctggcttagaaggcactgggaatgtcctgtagagagagacctagataggtcatgcaagtgagaaagacatctgaggaaaatggaagacctaaggcagacaggaaggaagcacaaaagacaagcattgggtcagacccataaaccacctcccaaaggctgtcatttcattgcactggaattttgctttatcagaagcaaggaagtaagggagtcattgccttgggcctgggaatctaagtgggagacaatattaatttggatccgattaattggagattactaactgtggacaaaagtttatctttgcacaatcaataaaaatggcatttttttagtaaattaagagcataaacaatattgctagaggtggcatgtttagtctaccaaaaacaatacttttcaggcactttagaaatatccttttagaagcagcgagtgcatgggctaattatcatcaatctttatgtatttgttaaagaaacatctacaggatctttattggtgaccttttgtaagacattagtttgaggtactacctatgtacttgaaaataataaagtggcatttctttatgaaaaaaaaaaaaaaactgagttttacccatctttataaatgatgctacactactaaactgtgatgcatttgacatctgtcattcntctgtggctgaccanncatgcaacattctttatattttgggcacttcattactgtgagaagcttaagaccttctttccacccgtgaacataagggggccacatacttggtttnccaat

SEQ ID NO: 736232 - DNA, 5734 bp, Homo sapiens
  misc_feature (5616)..(5616): n is a, c, g, or t
  misc_feature (5631)..(5632): n is a, c, g, or t
  misc_feature (5729)..(5729): n is a, c, g, or t
aaaaatctaggactctcctagaatccttgataaaataatctgaaggaagagagatggggaaaaaacagttgaggtgtctttccagggagcttatccagactgcctccaggggagatgttatggccctaaccataggtgttgtctcaatccaatataattaggggtcaagcccagtcaaacccttctcagccctcaagccctccaagttgcatcacaaatgccacctcctccatgtggtctctcctgatggtcccccaccccttccaaccaggtgggactttccttctgggcattcttcccatgcccgggagctgaagggatgggcatggtgactggctgggttggctccggatgcgtgcccctacgcctctccttgctccctcagggcctcaccaaccagcgggctcaggacgttctggctcgagatgggcccaacgccctcacaccacctcccacaacccctgagtgggtcaagttctgccgtcagcttttcggggggttctccatcctgctgtggattggggctatcctctgcttcctggcctacggcatccaggctgccatggaggatgaaccatccaacgacaatctatatctgggtgtggtgctggcagctgtggtcattgtcactggctgcttctcctactaccaggaggccaagagctccaagatcatggattccttcaagaacatggtacctcagcaagcccttgtgatccgggagggagagaagatgcagatcaacgcagaggaagtggtggtgggagacctggtggaggtgaagggtggagaccgcgtccctgctgacctccggatcatctcttctcatggctgtaaggtggataactcatccttaacaggagagtcggagccccagacccgctcccccgagttcacccatgagaaccccctggagacccgcaatatctgtttcttctccaccaactgtgttgaaggcactgccaggggcattgtgattgccacaggagaccggacggtgatgggccgcatagctactctcgcctcaggcctggaggttgggcggacacccatagcaatggagattgaacacttcatccagctgatcacaggggtcgctgtattcctgggggtctccttcttcgtgctctccctcatcctgggctacagctggctggaggcagtcatcttcctcatcggcatcatagtggccaacgtgcctgaggggcttctggccactgtcactgtgtgcctgaccctgacagccaagcgcatggcacggaagaactgcctggtgaagaacctggaggcggtggagacgctgggctccacgtccaccatctgctcggacaagacgggcaccctcacccagaaccgcatgaccgtcgcccacatgtggttcgacaaccaaatccatgaggctgacaccaccgaagatcagtctggggccacttttgacaaacgatcccctacgtggacggccctgtctcgaattgctggtctctgcaaccgcgccgtcttcaaggcaggacaggagaacatctccgtgtctaagcgggacacagctggtgatgcctctgagtcagctctgctcaagtgcattgagctctcctgtggctcagtgaggaaaatgagagacagaaaccccaaggtggcagagattcctttcaactctaccaacaagtaccagctgtctatccacgagcgagaagacagcccccagagccacgtgctggtgatgaagggggccccagagcgcattctggaccggtgctccaccatcctggtgcagggcaaggagatcccgctcgacaaggagatgcaagatgcctttcaaaatgcctacatggagctggggggacttggggagcgtgtgctgggattctgtcaactgaatctgccatctggaaagtttcctcggggcttcaaattcgacacggatgagctgaactttcccacggagaagctttgctttgtggggctcatgtctatgattgaccctccccgggctgctgtgccagatgctgtgggcaagtgccgaagcgcaggcatcaaggtgatcatggtaaccggggatcaccctatcacagccaaggccattgccaaaggcgtgggcatcatatcagagggtaacgagactgtggaggacattgcagcccggctcaacattcccatgagtcaagtcaaccccagagaagccaaggcatgcgtggtgcacggctctgacctgaaggacatgacatcggagcagctcgatgagatcctcaagaaccacacagagatcgtctttgctcgaacgtctccccagcagaagctcatcattgtggagggatgtcagaggcagggagccattgtggccgtgacgggtgacggggtgaacgactcccctgcattgaagaaggctgacattggcattgccatgggcatctctggctctgacgtctctaagcaggcagccgacatgatcctgctggatgacaactttgcctccatcgtcacgggggtggaggagggccgcctgatctttgacaacttgaagaaatccatcgcctacaccctgaccagcaacatccccgagatcacccccttcctgctgttcatcattgccaacatccccctacctctgggcactgtgaccatcctttgcattgacctgggcacagatatggtccctgccatctccttggcctatgaggcagctgagagtgatatcatgaagcggcagccacgaaactcccagacggacaagctggtgaatgagaggctcatcagcatggcctacggacagatcgggatgatccaggcactgggtggcttcttcacctactttgtgatcctggcagagaacggtttcctgccatcacggctactgggaatccgcctcgactgggatgaccggaccatgaatgatctggaggacagctatggacaggagtggacctatgagcagcggaaggtggtggagttcacgtgccacacggcattctttgccagcatcgtggtggtgcagtgggctgacctcatcatctgcaagacccgccgcaactcagtcttccagcagggcatgaagaacaagatcctgatttttgggctcctggaggagacggcgttggctgcctttctctcttactgcccaggcatgggtgtagccctccgcatgtacccgctcaaagtcacctggtggttctgcgccttcccctacagcctcctcatcttcatctatgatgaggtccgaaagctcatcctgcggcggtatcctggtggctgggtggagaaggagacatactactgaccccattggaagaagaaccaggcatggaaagatggggagctctggaggtgttgtggggatggtgatggagagggatggaaataacgggtggcattgggtggcaacatttggggagagataatgaggcaactcagcaggctaagttgcggggtatataaattggggtgatgaccccatagacctaactgtgaacaatcagattagacactatgtgttagagtccccccgaccagatccttttccatcccactccactatgttgtctattttttctgaggaattaagggttaccccaccctgcccactcccatcccttcaaccccacttcctactgtaatagatcagcatccaaaagcaggaacccatctaaaccagaaggaagccctctcagatcaccccagcctcactccatttcccacttccacccccgttagcttcctgcaggactctatccctggcttccccttcagaccttgcaatcacaaaaggttcttctggtgagtgcaagagcctgagactggaaaaggtggacttgtctcccagtcgaggctggtaagggaccttcagggagagctgggcagacaggtgggagatggaggtagggctggctggaggaaggaaacaacaaaggaagtgaggtagtgccaatgacaggacatttgacatgagtctccagatagatgtcgtggactccagctctacgtcccacattttagaataccccaccagcagaacaaactcagatctcatcagggtagcagcagaggcaggaccagaaggcaatcaagagcttccagaaatgccacacttgtgtgccacagagttccccgctgacccttggttaggggtcctcttagtccacaaggtccggatgtcactcatgtacttaataacacttcaccttctgtaatactaagtcctcagagctccatgctgttctgaaagggatggccacaagttctttcccagcctcttccattccctttcttttcatgcccatcccgatgaacctgcatcattccccgacactgccaagccaaccctggaaaaggagttcgctggccattggctagaatcagggtggagaagttccctgaaccttcctgtctcccagggacatgtatgcttccagggacaagcttaggtcatgaacatggtcagaacctttggacaagaggaaaaatactaagagatttgctttttctgggtgcggtggctcatgcctgtaatcccagcactttgggaggccgaggcaggtggatcatgaggtcaggagttcgaggcgagcctggccaacatggtgaaaccctgtctctactaaaagtacaaaaaattagccagtcatggtggcacacgcctgtaatctcagctactcaggaggctgaggcaggagaattgcttgaacctgtgaggaagaggttgcagtgagctgagatcgtgccattacactccagcctgggcgaaagggtgagactccatctcaaaaaaaaaaaaaatgatttgcttttgacgtcttaggtggcagggctgttccctccaggcaaatgcccttcaaaccgacgatcattgtgcccacttaccctgggctggagagttggtttcaggttcctacaggagatagctttctttcccttactccctatctaacacttttgctctgcaggcagccttgcccattctctaagcctggcttagaaggcactgggaatgtcctgtagagagagacctagataggtcatgcaagtgagaaagacatctgaggaaaatggaagacctaaggcagacaggaaggaagcacaaaagacaagcattgggtcagacccataaaccacctcccaaaggctgtcatttcattgcactggaattttgctttatcagaagcaaggaagtaagggagtcattgccttgggcctgggaatctaagtgggagacaatattaatttggatccgattaattggagattactaactgtggacaaaagtttatctttgcacaatcaataaaaatggcatttttttagtaaattaagagcataaacaatattgctagaggtggcatgtttagtctaccaaaaacaatacttttcaggcactttagaaatatccttttagaagcagcgagtgcatgggctaattatcatcaatctttatgtatttgttaaagaaacatctacaggatctttattggtgaccttttgtaagacattagtttgaggtactacctatgtacttgaaaataataaagtggcatttctttatgaaaaaaaaaaaaaaactgagttttacccatctttataaatgatgctacactactaaactgtgatgcatttgacatctgtcattcntctgtggctgaccanncatgcaacattctttatattttgggcacttcattactgtgagaagcttaagaccttctttccacccgtgaacataagggggccacatacttggtttnccaat

SEQ ID NO: 736233 - DNA, 3932 bp, Homo sapiens
  misc_feature (3814)..(3814): n is a, c, g, or t
  misc_feature (3829)..(3830): n is a, c, g, or t
  misc_feature (3927)..(3927): n is a, c, g, or t
gtatccaggctgtgccactgaatacccatgtaaccttggagatgtcacattcccttcctgagcctccattttctcaccacaaaattaggatgccatctccactgctgtaggagtgggatgtgagtaaagaaactagcccagggcctagcaaactgcacttacaactgcgatgatcccatggtgaggatttagactcacattctcaaggagaaatgggggaagtgagtactgaggagaggagaactgaagcaacaggggaagcaggctcagcagggagcctgcaggctgcggtggtgaagagaggcagggggcaggaggggctggtacaggtgccaggggtcagctgtctctgtccccacccaccctccagagaagccaaggcatgcgtggtgcacggctctgacctgaaggacatgacatcggagcagctcgatgagatcctcaagaaccacacagagatcgtctttgctcgaacgtctccccagcagaagctcatcattgtggagggatgtcagaggcagggagccattgtggccgtgacgggtgacggggtgaacgactcccctgcattgaagaaggctgacattggcattgccatgggcatctctggctctgacgtctctaagcaggcagccgacatgatcctgctggatgacaactttgcctccatcgtcacgggggtggaggagggccgcctgatctttgacaacttgaagaaatccatcgcctacaccctgaccagcaacatccccgagatcacccccttcctgctgttcatcattgccaacatccccctacctctgggcactgtgaccatcctttgcattgacctgggcacagatatggtccctgccatctccttggcctatgaggcagctgagagtgatatcatgaagcggcagccacgaaactcccagacggacaagctggtgaatgagaggctcatcagcatggcctacggacagatcgggatgatccaggcactgggtggcttcttcacctactttgtgatcctggcagagaacggtttcctgccatcacggctactgggaatccgcctcgactgggatgaccggaccatgaatgatctggaggacagctatggacaggagtggacctatgagcagcggaaggtggtggagttcacgtgccacacggcattctttgccagcatcgtggtggtgcagtgggctgacctcatcatctgcaagacccgccgcaactcagtcttccagcagggcatgaagaacaagatcctgatttttgggctcctggaggagacggcgttggctgcctttctctcttactgcccaggcatgggtgtagccctccgcatgtacccgctcaaagtcacctggtggttctgcgccttcccctacagcctcctcatcttcatctatgatgaggtccgaaagctcatcctgcggcggtatcctggtggctgggtggagaaggagacatactactgaccccattggaagaagaaccaggcatggaaagatggggagctctggaggtgttgtggggatggtgatggagagggatggaaataacgggtggcattgggtggcaacatttggggagagataatgaggcaactcagcaggctaagttgcggggtatataaattggggtgatgaccccatagacctaactgtgaacaatcagattagacactatgtgttagagtccccccgaccagatccttttccatcccactccactatgttgtctattttttctgaggaattaagggttaccccaccctgcccactcccatcccttcaaccccacttcctactgtaatagatcagcatccaaaagcaggaacccatctaaaccagaaggaagccctctcagatcaccccagcctcactccatttcccacttccacccccgttagcttcctgcaggactctatccctggcttccccttcagaccttgcaatcacaaaaggttcttctggtgagtgcaagagcctgagactggaaaaggtggacttgtctcccagtcgaggctggtaagggaccttcagggagagctgggcagacaggtgggagatggaggtagggctggctggaggaaggaaacaacaaaggaagtgaggtagtgccaatgacaggacatttgacatgagtctccagatagatgtcgtggactccagctctacgtcccacattttagaataccccaccagcagaacaaactcagatctcatcagggtagcagcagaggcaggaccagaaggcaatcaagagcttccagaaatgccacacttgtgtgccacagagttccccgctgacccttggttaggggtcctcttagtccacaaggtccggatgtcactcatgtacttaataacacttcaccttctgtaatactaagtcctcagagctccatgctgttctgaaagggatggccacaagttctttcccagcctcttccattccctttcttttcatgcccatcccgatgaacctgcatcattccccgacactgccaagccaaccctggaaaaggagttcgctggccattggctagaatcagggtggagaagttccctgaaccttcctgtctcccagggacatgtatgcttccagggacaagcttaggtcatgaacatggtcagaacctttggacaagaggaaaaatactaagagatttgctttttctgggtgcggtggctcatgcctgtaatcccagcactttgggaggccgaggcaggtggatcatgaggtcaggagttcgaggcgagcctggccaacatggtgaaaccctgtctctactaaaagtacaaaaaattagccagtcatggtggcacacgcctgtaatctcagctactcaggaggctgaggcaggagaattgcttgaacctgtgaggaagaggttgcagtgagctgagatcgtgccattacactccagcctgggcgaaagggtgagactccatctcaaaaaaaaaaaaaatgatttgcttttgacgtcttaggtggcagggctgttccctccaggcaaatgcccttcaaaccgacgatcattgtgcccacttaccctgggctggagagttggtttcaggttcctacaggagatagctttctttcccttactccctatctaacacttttgctctgcaggcagccttgcccattctctaagcctggcttagaaggcactgggaatgtcctgtagagagagacctagataggtcatgcaagtgagaaagacatctgaggaaaatggaagacctaaggcagacaggaaggaagcacaaaagacaagcattgggtcagacccataaaccacctcccaaaggctgtcatttcattgcactggaattttgctttatcagaagcaaggaagtaagggagtcattgccttgggcctgggaatctaagtgggagacaatattaatttggatccgattaattggagattactaactgtggacaaaagtttatctttgcacaatcaataaaaatggcatttttttagtaaattaagagcataaacaatattgctagaggtggcatgtttagtctaccaaaaacaatacttttcaggcactttagaaatatccttttagaagcagcgagtgcatgggctaattatcatcaatctttatgtatttgttaaagaaacatctacaggatctttattggtgaccttttgtaagacattagtttgaggtactacctatgtacttgaaaataataaagtggcatttctttatgaaaaaaaaaaaaaaactgagttttacccatctttataaatgatgctacactactaaactgtgatgcatttgacatctgtcattcntctgtggctgaccanncatgcaacattctttatattttgggcacttcattactgtgagaagcttaagaccttctttccacccgtgaacataagggggccacatacttggtttnccaat

SEQ ID NO: 736234 - DNA, 1463 bp, Homo sapiens
cttgtgaagaacaacaaaactgtcaacttttaattttgccaaactagagcatttaataaaatagccatttattatcagcatcagctctcaaatacattgtaacactaaaatgagggcacaccatctccaaataagacgatctttaaatgagcttttatacaaaactcactatgctgtcctttttggtcatttttccttggactaatgataactttggcctgagctggctaggcttccaattatgaatgtggctattctagtgagaaggaatgagatgggggaagagtatcaagttgacctgaaggctatgctgtttctttctgctccagtgatgccttctagctctaaatccttcaatttttcaactgccatctctcttattaaatgggtttaataataaaagataacctgagatccatggagcactgggtacagtgctgaaaatgttcatcagaccgtgatgctgctgatccctgccctcatgactatgggtaaattaacattgaactttggacatgaagatgactaatttttggagggagataaccctatatcaaattgttattgtcatagaacatggatttagttgcttatgaaaatataaaaacatgtatttaagctgttgagttacaattttaaagaaaaccaacaccctaaaatattttttttcacatatagagaactcactttgaaaatgtttttgtatcttaactgggagtttgtgataatctagattgttcacaatgactgtgacaccttgtcccatttcttagcatctttttcatattttccatctatccctgaaactaatgtcctgcatttttcaacaggacctcaggaatctgtaactaagcaccatggaactccaaaatgcttttggtcctggaaaggtgaagaccttgatcctagctatttagcatgaattacacactatccttaatctcaacagatttgtgaaaagacacaaaaagtaatgaggaccaaaaaaaaaattctttcactgttatattgcttcatatgacatcattttgttatcttccttctttattttttaaaaagatttattaagtgagcaggaaaatacatgattgaacaaatggaaactacagggtgtgccctttacaagactgagtgaaacaacagattaatcagaaggcatgtgtcaattttctacaatgaaacttcatgcaacattcagtggagctgaatatatacagatgttagaggcttcccagggaggcagaattgttgtccttggaagattgttaagacccaaatgtcattaggctgtcttcaagctgcatttggcaggaggatactttcactgttgtttatttcttgtttcagaaaaaaaaaattgtttttttaaacatttagaccagaaaacaaaattcagaatccccacccacatccaataactgcatttattgcaatgccaatagcttaaaatggatcattatctg

SEQ ID NO: 736235 - DNA, 770 bp, Homo sapiens
  misc_feature (697)..(697): n is a, c, g, or t
caacacgcctgaagtgatgtttaattaatgatgataatggacggggatttgagaaatcttttcattttcgcttgctaataataattttagtcagagttacaagtagggttcttgaaaaaaaaacatatctgacgtataaagacaatggattcagggatacttgatcaaattgtttctgatgaatgaggacccacactctctgctgtcacaaacaggaggtggggcccaagaaacagtggtgaaagatgtttcaggttgatctgcaatggattattcacagcaacaatgaggatgatacagtttcagctttttcctccagcaaggccttactgacaacctactgtctgcccaatagtagggcttgcaaagattcttctaattataaatggagcaaaaaattctgaccttcaatttgaaaatcatatacttacaccttcttttgttagcaattgcacttcatcgatataaggctttagaagacaaaatcctagacatcatttgatttttagaaaatccttctgaggagataaatatctggtttcatcacccaggaggctcattattcacctcatggaggtgtgatgtcttcaagacattaacaatgtcattcagttcatccactttgattcatacatgcccatttcagaaacatatctcttgtatataaaactgaatttccttgaatgttttcaattgnttatttggcatgctcataaatgctgtgagacactggttattgtcagtcaaacactttcagattgtagatgctt

SEQ ID NO: 736236 - DNA, 548 bp, Homo sapiens
attttgtaatgcactttaaaatatttgtgccatttaaataatgacaaagcaatcaatgcatacatttcaatggagacagtatacaaagttaaagcaactgatacatatatttcagtggagacagtaggataacagtgttagcaaatatgtgtcatctctttaaatttgggaggaatcagaagctaaagatttaaaacaaataaaacatacctgaagaaaagtagcaatttctgaaattgtagtaatcttggaatggttatcaaacctagcaaataatacttaataagtgttacctaatatacctaattggaatgtttgtttaaaatattaaattaatttatactgaaagttttaactgcaatttcataattcatgaattctataaaagaaatctccctcactaaaaatatgatcaatcaaaactaccagttttgcacaccaatcccaagtttaagcatattttgtatttaaagttataatttaattatgatactgtccccctaatatggaaaataagttacaaaattctttttttttttttttttttt

SEQ ID NO: 736237 - DNA, 759 bp, Homo sapiens; identical to SEQ ID NO: 87106

SEQ ID NO: 736238 - DNA, 2115 bp, Homo sapiens
ctcgacacccaaacctcaacataaatcaaacactttcccgggcagagaatgtctgtgtcaggcaagaattagagacaagcggtcagcagagcctcagtgctgatcgtcggagcttgggagcaggaagatgtcgaatgaacttgatttcaggtctgtgcggctgctaaagaacgacccagtcaacttgcagaaattctcttacactagtgaggatgaggcctggaagacgtacctagaaaacccgttgacagctgccacaaaggccatgatgagagtcaatggagatgatgacagtgttgcggccttgagcttcctctatgattactacatgggtcccaaggagaagcggatattgtcctccagcactgggggcaggaatgaccaaggaaagaggtactaccatggcatggaatatgagacggacctcactccccttgaaagccccacacacctcatgaaattcctgacagagaacgtgtctggaaccccagagtacccagatttgctcaagaagaataacctgatgagcttggagggggccttgcccacccctggcaaggcagctcccctccctgcaggccccagcaagctggaggccggctctgtggacagctacctgttacccaccactgatatgtatgataatggctccctcaactccttgtttgagagcattcatggggtgccgcccacacagcgctggcagccagacagcaccttcaaagatgacccacaggagtcgatgctcttcccagatatcctgaaaacctccccggaacccccatgtccagaggactaccccagcctcaaaagtgactttgaatacaccctgggctcccccaaagccatccacatcaagtcaggcgagtcacccatggcctacctcaacaaaggccagttctaccccgtcaccctgcggaccccagcaggtggcaaaggccttgccttgtcctccaacaaagtcaagagtgtggtgatggttgtcttcgacaatgagaaggtcccagtagagcagctgcgcttctggaagcactggcattcccggcaacccactgccaagcagcgggtcattgacgtggctgactgcaaagaaaacttcaacactgtggagcacattgaggaggtggcctataatgcactgtcctttgtgtggaacgtgaatgaagaggccaaggtgttcatcggcgtaaactgtctgagcacagacttttcctcacaaaagggggtgaagggtgtccccctgaacctgcagattgacacctatgactgtggcttgggcactgagcgcctggtacaccgtgctgtctgccagatcaagatcttctgtgacaagggagctgagaggaagatgcgcgatgacgagcggaagcagttccggaggaaggtcaagtgccctgactccagcaacagtggcgtcaagggctgcctgctgtcgggcttcaggggcaatgagacgacctaccttcggccagagactgacctggagacgccacccgtgctgttcatccccaatgtgcacttctccagcctgcagcgctctggaggggcagccccctcggcaggacccagcagctccaacaggctgcctctgaagcgtacctgctcgcccttcactgaggagtttgagcctctgccctccaagcaggccaaggaaggcgaccttcagagagttctgctgtatgtgcggagggagactgaggaggtgtttgacgcgctcatgttgaagaccccagacctgaaggggctgaggaatgcgatctctgagaagtatgggttccctgaagagaacatttacaaagtctacaagaaatgcaagcgaggggaaacttctctcctccacccacgcctgtctcgccaccccccacctgactgtcttgaatgttcccatcctgtgactcaagtgaggaacatgggttttggagatggattttggaggcagagggacctggattcaaatcccagccccaccaccgtcaacagcctgcacttcactgtaaactcggaatgacacacccacctggaggagaggtggaaggacgacggcaggtcacatctgagagctctcagctcagagtatgtggcccctgaatacattctggctattactttgcattt

SEQ ID NO: 736239 - DNA, 1836 bp, Homo sapiens
gtgagtaaacatcggtggatacctgccgctctcagagcgtggaggctggatggggtttcctggagggggaagagcggggaggccggcaccgggattcacagagcaatttgtaagggtaaatgaatgggctgacgatcttactttggcgtgtcaaggcaagccccagtctcaagctagagtttcaggtctgtgcggctgctaaagaacgacccagtcaacttgcagaaattctcttacactagtgaggatgaggcctggaagacgtacctagaaaacccgttgacagctgccacaaaggccatgatgagagtcaatggagatgatgacagtgttgcggccttgagcttcctctatgattactacatgggtcccaaggagaagcggatattgtcctccagcactgggggcaggaatgaccaaggaaagaggtactaccatggcatggaatatgagacggacctcactccccttgaaagccccacacacctcatgaaattcctgacagagaacgtgtctggaaccccagagtacccagatttgctcaagaagaataacctgatgagcttggagggggccttgcccacccctggcaaggcagctcccctccctgcaggccccagcaagctggaggccggctctgtggacagctacctgttacccaccactgatatgtatgataatggctccctcaactccttgtttgagagcattcatggggtgccgcccacacagcgctggcagccagacagcaccttcaaagatgacccacaggagtcgatgctcttcccagatatcctgaaaacctccccggaacccccatgtccagaggactaccccagcctcaaaagtgactttgaatacaccctgggctcccccaaagccatccacatcaagtcaggcgagtcacccatggcctacctcaacaaaggccagttctaccccgtcaccctgcggaccccagcaggtggcaaaggccttgccttgtcctccaacaaagtcaagagtgtggtgatggttgtcttcgacaatgagaaggtcccagtagagcagctgcgcttctggaagcactggcattcccggcaacccactgccaagcagcgggtcattgacgtggctgactgcaaagaaaacttcaacactgtggagcacattgaggaggtggcctataatgcactgtcctttgtgtggaacgtgaatgaagaggccaaggtgttcatcggcgtaaactgtctgagcacagacttttcctcacaaaagggggtgaagggtgtccccctgaacctgcagattgacacctatgactgtggcttgggcactgagcgcctggtacaccgtgctgtctgccagatcaagatcttctgtgacaagggagctgagaggaagatgcgcgatgacgagcggaagcagttccggaggaaggtcaagtgccctgactccagcaacagtggcgtcaagggctgcctgctgtcgggcttcaggggcaatgagacgacctaccttcggccagagactgacctggagacgccacccgtgctgttcatccccaatgtgcacttctccagcctgcagcgctctggaggggtgaggccagggctggggtctcgggaaggagccgagagagggtcctggctcctaggtggggcctgccttagcacagaccagtggggagcagcctgcccctcagccagtttcaagacctttattgaatcataggggtttaaacatgtatatatggtcctatagcttcagtgacctattgtattgaagagaagaatgttatgaagaaacagatttcgtaaccattaaaacgttcatgcttagggcacacaaagagga

SEQ ID NO: 736240 - DNA, 2801 bp, Homo sapiens
gtgagtaaacatcggtggatacctgccgctctcagagcgtggaggctggatggggtttcctggagggggaagagcggggaggccggcaccgggattcacagagcaatttgtaagggtaaatgaatgggctgacgatcttactttggcgtgtcaaggcaagccccagtctcaagctagagtttcaggtctgtgcggctgctaaagaacgacccagtcaacttgcagaaattctcttacactagtgaggatgaggcctggaagacgtacctagaaaacccgttgacagctgccacaaaggccatgatgagagtcaatggagatgatgacagtgttgcggccttgagcttcctctatgattactacatgggtcccaaggagaagcggatattgtcctccagcactgggggcaggaatgaccaaggaaagaggtactaccatggcatggaatatgagacggacctcactccccttgaaagccccacacacctcatgaaattcctgacagagaacgtgtctggaaccccagagtacccagatttgctcaagaagaataacctgatgagcttggagggggccttgcccacccctggcaaggcagctcccctccctgcaggccccagcaagctggaggccggctctgtggacagctacctgttacccaccactgatatgtatgataatggctccctcaactccttgtttgagagcattcatggggtgccgcccacacagcgctggcagccagacagcaccttcaaagatgacccacaggagtcgatgctcttcccagatatcctgaaaacctccccggaacccccatgtccagaggactaccccagcctcaaaagtgactttgaatacaccctgggctcccccaaagccatccacatcaagtcaggcgagtcacccatggcctacctcaacaaaggccagttctaccccgtcaccctgcggaccccagcaggtggcaaaggccttgccttgtcctccaacaaagtcaagagtgtggtgatggttgtcttcgacaatgagaaggtcccagtagagcagctgcgcttctggaagcactggcattcccggcaacccactgccaagcagcgggtcattgacgtggctgactgcaaagaaaacttcaacactgtggagcacattgaggaggtggcctataatgcactgtcctttgtgtggaacgtgaatgaagaggccaaggtgttcatcggcgtaaactgtctgagcacagacttttcctcacaaaagggggtgaagggtgtccccctgaacctgcagattgacacctatgactgtggcttgggcactgagcgcctggtacaccgtgctgtctgccagatcaagatcttctgtgacaagggagctgagaggaagatgcgcgatgacgagcggaagcagttccggaggaaggtcaagtgccctgactccagcaacagtggcgtcaagggctgcctgctgtcgggcttcaggggcaatgagacgacctaccttcggccagagactgacctggagacgccacccgtgctgttcatccccaatgtgcacttctccagcctgcagcgctctggaggggcagccccctcggcaggacccagcagctccaacaggctgcctctgaagcgtacctgctcgcccttcactgaggagtttgagcctctgccctccaagcaggccaaggaaggcgaccttcagagagttctgctgtatgtgcggagggagactgaggaggtgtttgacgcgctcatgttgaagaccccagacctgaaggggctgaggaatgcgatctctgagaagtatgggttccctgaagagaacatttacaaagtctacaagaaatgcaagcgaggaatcttagtcaacatggacaacaacatcattcagcattacagcaaccacgtcgccttcctgctggacatgggggagctggacggcaaaattcagatcatccttaaggagctgtaaggcctctcgagcatccaaaccctcacgacctgcaaggggccagcagggacgtggccccacgccacacacaacctctccacatgcctcagcgctgttacttgaatgccttccctgagggaagaggcccttgagtcacagacccacagacgtcagggccagggagagacctagggggtcccctggcctggatccccatggtatgcttgaatctgctccctgaacttcctgccagtgcctccccgtaccccaaaacaatgtcaccatggttaccacctacccagaagactgttccctcctcccaagacccttgtctgcagtggtgctcctgcaggctgcccgttaagatggtggcggcacacgctccctcccgcagcaccacgccagctggtgcggcccccactctctgtcttccttcaacttcagacaaaggatttctcaacctttggtcagttaacttgaaaactcttgattttcagtgcaaatgacttttaaaagacactatattggagtctctttctcagacttcctcagcgcaggatgtaaatagcactaacgatcgactggaacaaagtgaccgctgtgtaaaactactgccttgccactcactgttgtatacatttcttatttacgattttcatttgttatatatatatataaatatactgtatatatatgcaacattttatatttttcatggatatgtttttatcatttcaaaaaatgtgtatttcacatttcttggactttttttagctgttattcagtgatgcattttgtatactcacgtggtatttagtaataaaaatctatctatgtattacgtcacatta

SEQ ID NO: 736241 - DNA, 1787 bp, Homo sapiens
aaagttgccccacctctctgagcattggcttccccatctgtgaaagaggagtgctgatgtttgccttctaggggcctagtgaggcttaagggtgagcagcaggcacacagaaagctagaaatacaggatcactgtgggacggtggggctggccacctgggcaggccacttacccagcggccccctctgtctccaggtgttcatcggcgtaaactgtctgagcacagacttttcctcacaaaagggggtgaagggtgtccccctgaacctgcagattgacacctatgactgtggcttgggcactgagcgcctggtacaccgtgctgtctgccagatcaagatcttctgtgacaagggagctgagaggaagatgcgcgatgacgagcggaagcagttccggaggaaggtcaagtgccctgactccagcaacagtggcgtcaagggctgcctgctgtcgggcttcaggggcaatgagacgacctaccttcggccagagactgacctggagacgccacccgtgctgttcatccccaatgtgcacttctccagcctgcagcgctctggaggggcagccccctcggcaggacccagcagctccaacaggctgcctctgaagcgtacctgctcgcccttcactgaggagtttgagcctctgccctccaagcaggccaaggaaggcgaccttcagagagttctgctgtatgtgcggagggagactgaggaggtgtttgacgcgctcatgttgaagaccccagacctgaaggggctgaggaatgcgatctctgagaagtatgggttccctgaagagaacatttacaaagtctacaagaaatgcaagcgaggaatcttagtcaacatggacaacaacatcattcagcattacagcaaccacgtcgccttcctgctggacatgggggagctggacggcaaaattcagatcatccttaaggagctgtaaggcctctcgagcatccaaaccctcacgacctgcaaggggccagcagggacgtggccccacgccacacacaacctctccacatgcctcagcgctgttacttgaatgccttccctgagggaagaggcccttgagtcacagacccacagacgtcagggccagggagagacctagggggtcccctggcctggatccccatggtatgcttgaatctgctccctgaacttcctgccagtgcctccccgtaccccaaaacaatgtcaccatggttaccacctacccagaagactgttccctcctcccaagacccttgtctgcagtggtgctcctgcaggctgcccgttaagatggtggcggcacacgctccctcccgcagcaccacgccagctggtgcggcccccactctctgtcttccttcaacttcagacaaaggatttctcaacctttggtcagttaacttgaaaactcttgattttcagtgcaaatgacttttaaaagacactatattggagtctctttctcagacttcctcagcgcaggatgtaaatagcactaacgatcgactggaacaaagtgaccgctgtgtaaaactactgccttgccactcactgttgtatacatttcttatttacgattttcatttgttatatatatatataaatatactgtatatatatgcaacattttatatttttcatggatatgtttttatcatttcaaaaaatgtgtatttcacatttcttggactttttttagctgttattcagtgatgcattttgtatactcacgtggtatttagtaataaaaatctatctatgtattacgtcacatta

SEQ ID NO: 736242 - DNA, 1924 bp, Homo sapiens
gctggcgtggacgtttgtggtggggcgtgttggtccgcgctctcagaactgtgctgggaaggatggtagggcgactggggctcacctccgcaccgttgtaggacccggggtagggttttgagcccgtgggagctgccccacgcggcctcgtcctgccaacggtcggatggcggagacgaaggacgcagcgcagatgttggtgaccttcaaggatgtggctgtgacctttacccgggaggagtggagacagctggacctggcccagaggaccctgtaccgagaggtgatgctggagacctgtgggcttctggtttcactagggcatcgggttcccaaaccagagttggtccacctgctagagcatgggcaggagctgtggatagtgaagagaggcctctcacatgctacctgtgcaggtgacagagcacaagttcataccagagagccaaccacttacccgccagtcttatctgagcgggcctttctccggggaagcctgactctggaatcttcaacctcaagtgattcgaggttggggagagctagggatgaggaagggcttttggaaatgcagaaaggtaaagtgacaccggagacagacctccacaaggagacccatcttgggaaagtgagccttgaaggtgaaggtttggggacagatgatggtctgcactccagggcattacaagagtggttatcagcagatgttctccatgaatgtgactcacagcaaccagggaaagacgccttgattcatgcagggacaaacccctacaaatgcaagcagtgtgggaaaggttttaacaggaagtggtatctcgttcgacatcagagggttcacactggaatgaaaccctatgaatgcaatgcatgtgggaaagcctttagccagagctcaactctcattcggcactacctcatccacaccggggagaaaccatacaagtgccttgagtgtgggaaggccttcaaacgcaggtcgtacctcatgcagcaccatccaatccacactggagagaaaccctatgagtgtagtcaatgtcgaaaggccttcacccaccggtctacttttattcgccataataggacccacactggagaaaagccctttgagtgcaaagaatgtgagaaagcctttagcaatagagcccacctaattcaacattacatcatccacactggagagaagccctatgattgcatggcatgtggaaaggccttcagatgcagctcagaactcatacagcaccagcggattcacactggggagaagccctatgaatgcacccagtgtgggaaagcctttcaccggagcacgtacctcattcagcactctgtcatccacactggggagatgccctacaagtgtatcgagtgtgggaaggccttcaaacgcaggtcacaccttctgcagcaccaaagggtccatacatgagagaaccctattgctgcaatgaatacagcaaggcctttacccactgttattttatcattcataatgggacccacactgtaggaagaagtccttcgagtgcaaagaatgtcaggaaacttttcattttttttgtcagctctttcttaactaacacatgagcagtcactttggagagaagccctgtgaatacagtgaatgtaaggatcccttcagtcaccactcagttctcactcattgcagaaggattcataccagggggaaatgtggaaggcattccatcaacatcagagaactcatgctggagaaagacattccaaatataactattaaggacagtctttggccagagcagaaatcttactatctgagaatcataatgaaaagttactacataattgttattgatgtgagaaaactttgtgaccaggttgtcacttgcttgtcctataaagagccatgctggaatttgacccaccttgggattttctc

SEQ ID NO: 736243 - DNA, 1799 bp, Homo sapiens
gcagtatctgcctcccctttgagccctgcacggaagtcagcccaaaggagacctagttgattcagacctggatctctctgcacattgactagagactgagtgacaggttctgatcctatgcgacaacacaaggccaatagcattacttctgtttgactttccagatgttggtgaccttcaaggatgtggctgtgacctttacccgggaggagtggagacagctggacctggcccagaggaccctgtaccgagaggtgatgctggagacctgtgggcttctggtttcactaggtgacagagcacaagttcataccagagagccaaccacttacccgccagtcttatctgagcgggcctttctccggggaagcctgactctggaatcttcaacctcaagtgattcgaggttggggagagctagggatgaggaagggcttttggaaatgcagaaaggtaaagtgacaccggagacagacctccacaaggagacccatcttgggaaagtgagccttgaaggtgaaggtttggggacagatgatggtctgcactccagggcattacaagagtggttatcagcagatgttctccatgaatgtgactcacagcaaccagggaaagacgccttgattcatgcagggacaaacccctacaaatgcaagcagtgtgggaaaggttttaacaggaagtggtatctcgttcgacatcagagggttcacactggaatgaaaccctatgaatgcaatgcatgtgggaaagcctttagccagagctcaactctcattcggcactacctcatccacaccggggagaaaccatacaagtgccttgagtgtgggaaggccttcaaacgcaggtcgtacctcatgcagcaccatccaatccacactggagagaaaccctatgagtgtagtcaatgtcgaaaggccttcacccaccggtctacttttattcgccataataggacccacactggagaaaagccctttgagtgcaaagaatgtgagaaagcctttagcaatagagcccacctaattcaacattacatcatccacactggagagaagccctatgattgcatggcatgtggaaaggccttcagatgcagctcagaactcatacagcaccagcggattcacactggggagaagccctatgaatgcacccagtgtgggaaagcctttcaccggagcacgtacctcattcagcactctgtcatccacactggggagatgccctacaagtgtatcgagtgtgggaaggccttcaaacgcaggtcacaccttctgcagcaccaaagggtccatacatgagagaaccctattgctgcaatgaatacagcaaggcctttacccactgttattttatcattcataatgggacccacactgtaggaagaagtccttcgagtgcaaagaatgtcaggaaacttttcattttttttgtcagctctttcttaactaacacatgagcagtcactttggagagaagccctgtgaatacagtgaatgtaaggatcccttcagtcaccactcagttctcactcattgcagaaggattcataccagggggaaatgtggaaggcattccatcaacatcagagaactcatgctggagaaagacattccaaatataactattaaggacagtctttggccagagcagaaatcttactatctgagaatcataatgaaaagttactacataattgttattgatgtgagaaaactttgtgaccaggttgtcacttgcttgtcctataaagagccatgctggaatttgacccaccttgggattttctc

SEQ ID NO: 736244 - DNA, 1048 bp, Homo sapiens
tgtcagtgactcagtacttgttatgtgccagacacccttcccaatcattctgatgaatgaatttttcttatctttaaggcctggggaattggcccaatgttacatacctaataagcagtcacatcaggtcataacaacagtagcaaggacttactatgtgccaagtactgtgctttgcaggttacagattatatcataaaaccttcaaccaaaataacatgaggaaagagcttttgttattccattcagagagatgagcaacttgcccaaggccacacagccggtgctaagaggttagtgcctggtgatgaatccacatctctattgtaccaggaacagggcaaggacattgccttgttcatgtctgcaccccattcctgcagagcctacttcattgttggcacatggtaggcacccacatgtgtttgtttagaaaaaaaataggttccttgagatgacaagctgatcaaaggaagacagtaactgtcaaagattgctctgagatgtctgtttcttcatggcatctcctgttccctcagtgccattaggcacaccagtcatgcttgctttcttggcccccagatcgccaacctgaagatccagctggccaagcttgacagtgaggcctggcctggggtgctggactcagagagggaccggctgatccttatcaacgagaaggaggagctgctgaaggagatgcgcttcatcagcccccgcaagtggacccagggggaggtggagcagctggagatggcccggaagcggctggaaaaggacctgcaggcagcccgggacacccagagcaaggcgctgacggagaggtggggctggggccccagggtgtgtaggacccttctctcactggcagtctgtcctcagcccccagatgggggaagaatgagggggctccgggcccctgggctccaccctgagcacgctcagttcagagatctctcaggttgccgacataggaaatcaggaaagatggtttgccatccagtgcgccagctaccctggaattttgcatggtgaatcatgctaccaa

SEQ ID NO: 736245 - DNA, 586 bp, Homo sapiens
tctagagcggccgcctactactactaaattcgcggccgcgtcgacgcttcatgggggcaatgggattaggaaaatgaggtcaacctgcaaaggaaagcagatgcaagagatggagacagaatgggggtgtcctggggatcttggagcctgaattcattggcacaaaaggcagcagcatcctcactgtatctgcagtccatttggactcaataaaaactttgaaagtcacatgtgttatggaattccttctcagtgacacattcatctgtgctcagttgtcccagcaagggtcagcccctcatacccctgcagcatccgctgctatgaagcagagctgtaaacgccctccctgtgtataggaaaagctacatggagcaaatcctcctgcctgaagaagtgcatctcagcatcacttcagctgtcggggcatttgtggggagaaccagaccacctctgcggaaggcagcagaccctcttccagccatggatggagttgaattctctataaacggttcaccagcaaaccaccaatacattccattgtttgcctagagagaaatttaaaaataaataaatgttcacttat

SEQ ID NO: 736246 - DNA, 1348 bp, Homo sapiens
acaccgcaatttgagagccccactggtataaagtgagtgaaacccaggcagagacaggcaaaatggtgaggcccgcatcctattggtgagtcacacagggaacgctgaaattcatggccttctccaggctactgggaacccatgggcggtgatggagggagtggtgccaccttcacttgctgctgaggctcttccccctctccccagcatactccttacctggctgtctctcctcatgtataaggaacctatagtggtgtagaatctactcttcttccccctgtggcttccaggcccccctgtatagctgctatccagcccgatttctcaccactggcccagggcttcctcctgccccgtggcttcacgtctctgaacacatcaatctctgatgttctctctccttccattgaattccaccagacacattcagggtttacttcgtaatgtcttcatatgagtatcaatcaacaccttccccaactcaattgtactaggttgtagagcacaaggatggtctcgtgctgctctgtggcacctgtgcctacactcctctgagctttgaggaggctgctctctttgctgaccccatgatcttttctgcccttctgttaagggcattggccacagcaacggggcaaatgccccaagctggctgtaagtgacccatccctttggctcccatgattagaccaaggagaggcatggggtccagctgagccattcagaaccattccttagcattttccactcaaaggttagagatgagattttctcttcccaaggctacctctggccatggttccagcttcatgggggcaatgggattaggaaaatgaggtcaacctgcaaaggaaagcagatgcaagagatggagacagaatgggggtgtcctggggatcttggagcctgaattcattggcacaaaaggcagcagcatcctcactgtatctgcagtccatttggactcaataaaaactttgaaagtcacatgtgttatggaattccttctcagtgacacattcatctgtgctcagttgtcccagcaagggtcagcccctcatacccctgcagcatccgctgctatgaagcagagctgtaaacgccctccctgtgtataggaaaagctacatggagcaaatcctcctgcctgaagaagtgcatctcagcatcacttcagctgtcggggcatttgtggggagaaccagaccacctctgcggaaggcagcagaccctcttccagccatggatggagttgaattctctataaacggttcaccagcaaaccaccaatacattccattgtttgcctagagagaaatttaaaaataaataaatgttcacttat

SEQ ID NO: 736247 - DNA, 3552 bp, Homo sapiens
aaatgtctgatgctcagggcagctacaaactggatgaagctcaggctgtcttgagagaaacaaaagccatcaaaaaggctattacctgtggggaaaaggaaaagcaagatctcattaagagccttgccatgttgaaggacggcttccgcactgacagggggtctcactcagacctgtggtccagcagcagctctctggagagttcgagtttcccgctaccgaaacagtacctggatgtgagctcccagacagacatctcgggaagcttcggcatcaacagcaacaatcagttggcagagaaggtcagattgcgccttcgatatgaagaggctaagagaaggatcgccaacctgaagatccagctggccaagcttgacagtgaggcctggcctggggtgctggactcagagagggaccggctgatccttatcaacgagaaggaggagctgctgaaggagatgcgcttcatcagcccccgcaagtggacccagggggaggtggagcagctggagatggcccggaagcggctggaaaaggacctgcaggcagcccgggacacccagagcaaggcgctgacggagaggttaaagttaaacagtaagaggaaccagcttgtgagagaactggaggaagccacccggcaggtggcaactctgcactcccagctgaaaagtctctcaagcagcatgcagtccctgtcctcaggcagcagccccggatccctcacgtccagccggggctccctggttgcatccagcctggactcctccacttcagccagcttcactgacctctactatgacccctttgagcagctggactcagagctgcagagcaaggtggagttcctgctcctggagggggccaccggcttccggccctcaggctgcatcaccaccatccacgaggatgaggtggccaagacccagaaggcagagggaggtggccgcctgcaggctctgcgttccctgtctggcaccccaaagtccatgacctccctatccccacgttcctctctctcctccccctccccaccctgttcccctctcatggctgaccccctcctggctggtgatgccttcctcaactccttggagtttgaagacccggagctgagtgccactctttgtgaactgagccttggtaacagcgcccaggaaagataccggctggaggaaccaggaacggagggcaagcagctgggccaagctgtgaatacggcccaggggtgtggcctgaaagtggcctgtgtctcagccgccgtatcggacgagtcagtggctggagacagtggtgtgtacgaggcttccgtgcagagactgggtgcttcagaagctgctgcatttgacagtgacgaatcggaagcagtgggtgcgacccgaattcagattgccctgaagtatgatgagaagaataagcaatttgcaatattaatcatccagctgagtaacctttctgctctgttgcagcaacaagaccagaaagtgaatatccgcgtggctgtccttccttgctctgaaagcacaacctgcctgttccggacccggcctctggacgcctcagacactctagtgttcaatgaggtgttctgggtatccatgtcctatccagcccttcaccagaagaccttaagagtcgatgtctgtaccaccgacaggagccatctggaagagtgcctgggaggcgcccagatcagcctggcggaggtctgccggtctggggagaggtcgactcgctggtacaaccttctcagctacaaatacttgaagaaacagagcagggagctcaagccagtgggagtcatggcccctgcctcagggcctgccagcacggacgctgtgtctgctctgttggaacagacagcagtggagctggagaagaggcaggagggcaggagcagcacacagacactggaagacagctggaggtatgaggagaccagtgagaatgaggcagtagccgaggaagaggaggaggaggtggaggaggaggagggagaagaggatgttttcaccgagaaagcctcacctgatatggatgggtacccagcattaaaggtggacaaagagaccaacacggagaccccggccccatcccccacagtggtgcgacctaaggaccggagagtgggcaccccgtcccaggggccatttcttcgagggagcaccatcatccgctctaagaccttctccccaggaccccagagccagtacgtgtgccggctgaatcggagtgatagtgacagctccactctgtccaaaaagccaccttttgttcgaaactccctggagcgacgcagcgtccggatgaagcggccttcctcggtcaagtcgctgcgctccgagcgtctgatccgtacctcgctggacctggagttagacctgcaggcgacaagaacctggcacagccaattgacccaggagatctcggtgctgaaggagctcaaggagcagctggaacaagccaagagccacggggagaaggagctgccacagtggttgcgtgaggacgagcgtttccgcctgctgctgaggatgctggagaagcggatggaccgagcggagcacaagggtgagcttcagacagacaagatgatgagggcagctgccaaggatgtgcacaggctccgaggccagagctgtaaggaacccccagaagttcagtctttcagggagaagatggcatttttcacccggcctcggatgaatatcccagctctctctgcagatgacgtctaatcgccagaaaagtatttcctttgttccactgaccaggctgtgaacattgactgtggctaaagttatttatgtggtgttatatgaaggtactgagtcacaagtcctctagtgctcttgttggtttgaagatgaaccgactttttagtttgggtcctactgttgttattaaaaacagaacaaaaacaaaacacacacacacacaaaaacagaaacaaaaaaaaccagcattaaaataataagattgtatagtttgtatatttaggagtgtatttttgggaaagaaaatttaaatgaactaaagcagtattgagttgctgctcttcttaaaatcgtttagattttttttggtttgtacagctccaccttttagaggtcttactgcaataagaagtaatgcctgggggacggtaatcctaataggacgtcccgcacttgtcacagtacagctaatttttcctagttaacatattttgtacaatattaaaaaaatgcacagaaaccattgggggggattcagaggtgcatccacggatcttcttgagctgtgacgtgtttttatgtggctgcccaacgtggagcgggcagtgtgataggctgggtgggctaagcagcctagtctatgtgggtgacaggccacgctggtctcagatgcccagtgaagccactaacatgagtgaggggagggctgtggggaactccattcagttttatctccatcaataaagtggcctttcaaaaagaatcttcctcttgctctctttttctttcctacccctcacttcatctgtttccctgatttttgactctccccttt

SEQ ID NO: 736248 - DNA, 2981 bp, Homo sapiens
aaatgtctgatgctcagggcagctacaaactggatgaagctcaggctgtcttgagagaaacaaaagccatcaaaaaggctattacctgtggggaaaaggaaaagcaagatctcattaagagccttgccatgttgaaggacggcttccgcactgacagggggtctcactcagacctgtggtccagcagcagctctctggagagttcgagtttcccgctaccgaaacagtacctggatgtgagctcccagacagacatctcgggaagcttcggcatcaacagcaacaatcagttggcagagaaggtcagattgcgccttcgatatgaagaggctaagagaaggatcgccaacctgaagatccagctggccaagcttgacagtgaggcctggcctggggtgctggactcagagagggaccggctgatccttatcaacgagaaggaggagctgctgaaggagatgcgcttcatcagcccccgcaagtggaccccctcctggctggtgatgccttcctcaactccttggagtttgaagacccggagctgagtgccactctttgtgaactgagccttggtaacagcgcccaggaaagataccggctggaggaaccaggaacggagggcaagcagctgggccaagctgtgaatacggcccaggggtgtggcctgaaagtggcctgtgtctcagccgccgtatcggacgagtcagtggctggagacagtggtgtgtacgaggcttccgtgcagagactgggtgcttcagaagctgctgcatttgacagtgacgaatcggaagcagtgggtgcgacccgaattcagattgccctgaagtatgatgagaagaataagcaatttgcaatattaatcatccagctgagtaacctttctgctctgttgcagcaacaagaccagaaagtgaatatccgcgtggctgtccttccttgctctgaaagcacaacctgcctgttccggacccggcctctggacgcctcagacactctagtgttcaatgaggtgttctgggtatccatgtcctatccagcccttcaccagaagaccttaagagtcgatgtctgtaccaccgacaggagccatctggaagagtgcctgggaggcgcccagatcagcctggcggaggtctgccggtctggggagaggtcgactcgctggtacaaccttctcagctacaaatacttgaagaaacagagcagggagctcaagccagtgggagtcatggcccctgcctcagggcctgccagcacggacgctgtgtctgctctgttggaacagacagcagtggagctggagaagaggcaggagggcaggagcagcacacagacactggaagacagctggaggtatgaggagaccagtgagaatgaggcagtagccgaggaagaggaggaggaggtggaggaggaggagggagaagaggatgttttcaccgagaaagcctcacctgatatggatgggtacccagcattaaaggtggacaaagagaccaacacggagaccccggccccatcccccacagtggtgcgacctaaggaccggagagtgggcaccccgtcccaggggccatttcttcgagggagcaccatcatccgctctaagaccttctccccaggaccccagagccagtacgtgtgccggctgaatcggagtgatagtgacagctccactctgtccaaaaagccaccttttgttcgaaactccctggagcgacgcagcgtccggatgaagcggccttcctcggtcaagtcgctgcgctccgagcgtctgatccgtacctcgctggacctggagttagacctgcaggcgacaagaacctggcacagccaattgacccaggagatctcggtgctgaaggagctcaaggagcagctggaacaagccaagagccacggggagaaggagctgccacagtggttgcgtgaggacgagcgtttccgcctgctgctgaggatgctggagaagcggatggaccgagcggagcacaagggtgagcttcagacagacaagatgatgagggcagctgccaaggatgtgcacaggctccgaggccagagctgtaaggaacccccagaagttcagtctttcagggagaagatggcatttttcacccggcctcggatgaatatcccagctctctctgcagatgacgtctaatcgccagaaaagtatttcctttgttccactgaccaggctgtgaacattgactgtggctaaagttatttatgtggtgttatatgaaggtactgagtcacaagtcctctagtgctcttgttggtttgaagatgaaccgactttttagtttgggtcctactgttgttattaaaaacagaacaaaaacaaaacacacacacacacaaaaacagaaacaaaaaaaaccagcattaaaataataagattgtatagtttgtatatttaggagtgtatttttgggaaagaaaatttaaatgaactaaagcagtattgagttgctgctcttcttaaaatcgtttagattttttttggtttgtacagctccaccttttagaggtcttactgcaataagaagtaatgcctgggggacggtaatcctaataggacgtcccgcacttgtcacagtacagctaatttttcctagttaacatattttgtacaatattaaaaaaatgcacagaaaccattgggggggattcagaggtgcatccacggatcttcttgagctgtgacgtgtttttatgtggctgcccaacgtggagcgggcagtgtgataggctgggtgggctaagcagcctagtctatgtgggtgacaggccacgctggtctcagatgcccagtgaagccactaacatgagtgaggggagggctgtggggaactccattcagttttatctccatcaataaagtggcctttcaaaaagaatcttcctcttgctctctttttctttcctacccctcacttcatctgtttccctgatttttgactctccccttt

SEQ ID NO: 736249 - DNA, 1153 bp, Homo sapiens
ttatcgttctgaatgaagtggatcccacatggagcaagagtgagggtgccgtccctacagtagccccctctgttgtgatagcgagttctccttgcccctttctggaggccccctccactgactcagggccttgcttgctttgcccagcagatggaccgagcggagcacaagggtgagcttcagacagacaagatgatgagggcagctgccaaggatgtgcacaggctccgaggccagagctgtaaggaacccccagaagttcagtctttcagggagaagatggcatttttcacccggcctcggatgaatatcccagctctctctgcagatgacgtctaatcgccagaaaagtatttcctttgttccactgaccaggctgtgaacattgactgtggctaaagttatttatgtggtgttatatgaaggtactgagtcacaagtcctctagtgctcttgttggtttgaagatgaaccgactttttagtttgggtcctactgttgttattaaaaacagaacaaaaacaaaacacacacacacacaaaaacagaaacaaaaaaaaccagcattaaaataataagattgtatagtttgtatatttaggagtgtatttttgggaaagaaaatttaaatgaactaaagcagtattgagttgctgctcttcttaaaatcgtttagattttttttggtttgtacagctccaccttttagaggtcttactgcaataagaagtaatgcctgggggacggtaatcctaataggacgtcccgcacttgtcacagtacagctaatttttcctagttaacatattttgtacaatattaaaaaaatgcacagaaaccattgggggggattcagaggtgcatccacggatcttcttgagctgtgacgtgtttttatgtggctgcccaacgtggagcgggcagtgtgataggctgggtgggctaagcagcctagtctatgtgggtgacaggccacgctggtctcagatgcccagtgaagccactaacatgagtgaggggagggctgtggggaactccattcagttttatctccatcaataaagtggcctttcaaaaagaatcttcctcttgctctctttttctttcctacccctcacttcatctgtttccctgatttttgactctccccttt

SEQ ID NO: 736250 - DNA, 1595 bp, Homo sapiens
tagggcaacgcgaccacgcgtcgccacgcgtcggtccaccgagaaagcctcacctgatatggatgggtacccagcattaaaggtggacaaagagaccaacacggagaccccggccccatcccccacagtggtgcgacctaaggaccggagagtgggcaccccgtcccaggggccatttcttcgagggagcaccatcatccgctctaagaccttctccccaggaccccagagccagtacgtgtgccggctgaatcggagtgatagtgacagctccactctgtccaaaaagccaccttttgttcgaaactccctggagcgacgcagcgtccggatgaagcggccgtccccacccccacagccttcctcggtcaagtcgctgcgctccgagcgtctgatccgtacctcgctggacctggagttagacctgcaggcgacaagaacctggcacagccaattgacccaggagatctcggtgctgaaggagctcaaggagcagctggaacaagccaagagccacggggagaaggagctgccacagtggttgcgtgaggacgagcgtttccgcctgctgctgaggatgctggagaagcggatggaccgagcggagcacaagggtgagcttcagacagacaagatgatgagggcagctgccaaggatgtgcacaggctccgaggccagagctgtaaggaacccccagaagttcagtctttcagggagaagatggcatttttcacccggcctcggatgaatatcccagctctctctgcagatgacgtctaatcgccagaaaagtatttcctttgttccactgaccaggctgtgaacattgactgtggctaaagttatttatgtggtgttatatgaaggtactgagtcacaagtcctctagtgctcttgttggtttgaagatgaaccgactttttagtttgggtcctactgttgttattaaaaacagaacaaaaacaaaacacacacacacacaaaaacagaaacaaaaaaaaccagcattaaaataataagattgtatagtttgtatatttaggagtgtatttttgggaaagaaaatttaaatgaactaaagcagtattgagttgctgctcttcttaaaatcgtttagattttttttggtttgtacagctccaccttttagaggtcttactgcaataagaagtaatgcctgggggacggtaatcctaataggacgtcccgcacttgtcacagtacagctaatttttcctagttaacatattttgtacaatattaaaaaaatgcacagaaaccattgggggggattcagaggtgcatccacggatcttcttgagctgtgacgtgtttttatgtggctgcccaacgtggagcgggcagtgtgataggctgggtgggctaagcagcctagtctatgtgggtgacaggccacgctggtctcagatgcccagtgaagccactaacatgagtgaggggagggctgtggggaactccattcagttttatctccatcaataaagtggcctttcaaaaagaatcttcctcttgctctctttttctttcctacccctcacttcatctgtttccctgatttttgactctccccttt

SEQ ID NO: 736251 - DNA, 824 bp, Homo sapiens
ttcttttttagtagagatggggttttaccatgttggccaggctggtcttgaactcattgactgtggctaaagttatttatgtggtgttatatgaaggtactgagtcacaagtcctctagtgctcttgttggtttgaagatgaaccgactttttagtttgggtcctactgttgttattaaaaacagaacaaaaacaaaacacacacacacacaaaaacagaaacaaaaaaaaccagcattaaaataataagattgtatagtttgtatatttaggagtgtatttttgggaaagaaaatttaaatgaactaaagcagtattgagttgctgctcttcttaaaatcgtttagattttttttggtttgtacagctccaccttttagaggtcttactgcaataagaagtaatgcctgggggacggtaatcctaataggacgtcccgcacttgtcacagtacagctaatttttcctagttaacatattttgtacaatattaaaaaaatgcacagaaaccattgggggggattcagaggtgcatccacggatcttcttgagctgtgacgtgtttttatgtggctgcccaacgtggagcgggcagtgtgataggctgggtgggctaagcagcctagtctatgtgggtgacaggccacgctggtctcagatgcccagtgaagccactaacatgagtgaggggagggctgtggggaactccattcagttttatctccatcaataaagtggcctttcaaaaagaatcttcctcttgctctctttttctttcctacccctcacttcatctgtttccctgatttttgactctccccttt

SEQ ID NO: 736252 - DNA, 464 bp, Homo sapiens; identical to SEQ ID NO: 429781

SEQ ID NO: 736253 - DNA, 3753 bp, Homo sapiens
aaatgtctgatgctcagggcagctacaaactggatgaagctcaggctgtcttgagagaaacaaaagccatcaaaaaggctattacctgtggggaaaaggaaaagcaagatctcattaagagccttgccatgttgaaggacggcttccgcactgacagggggtctcactcagacctgtggtccagcagcagctctctggagagttcgagtttcccgctaccgaaacagtacctggatgtgagctcccagacagacatctcgggaagcttcggcatcaacagcaacaatcagttggcagagaaggtcagattgcgccttcgatatgaagaggctaagagaagactttcctgtcaatgtggccaggcaactcccagcaattcggagcttacacactaccagctcccccaggcgtccagcaaaacagcaagacatctgtatttggacagccacttcttgttctctctgaagaggaccactctgaaccttggatctgttccatcctgcaggaatgcctgtcttagatggatcgccaacctgaagatccagctggccaagcttgacagtgaggcctggcctggggtgctggactcagagagggaccggctgatccttatcaacgagaaggaggagctgctgaaggagatgcgcttcatcagcccccgcaagtggacccagggggaggtggagcagctggagatggcccggaagcggctggaaaaggacctgcaggcagcccgggacacccagagcaaggcgctgacggagaggttaaagttaaacagtaagaggaaccagcttgtgagagaactggaggaagccacccggcaggtggcaactctgcactcccagctgaaaagtctctcaagcagcatgcagtccctgtcctcaggcagcagccccggatccctcacgtccagccggggctccctggttgcatccagcctggactcctccacttcagccagcttcactgacctctactatgacccctttgagcagctggactcagagctgcagagcaaggtggagttcctgctcctggagggggccaccggcttccggccctcaggctgcatcaccaccatccacgaggatgaggtggccaagacccagaaggcagagggaggtggccgcctgcaggctctgcgttccctgtctggcaccccaaagtccatgacctccctatccccacgttcctctctctcctccccctccccaccctgttcccctctcatggctgaccccctcctggctggtgatgccttcctcaactccttggagtttgaagacccggagctgagtgccactctttgtgaactgagccttggtaacagcgcccaggaaagataccggctggaggaaccaggaacggagggcaagcagctgggccaagctgtgaatacggcccaggggtgtggcctgaaagtggcctgtgtctcagccgccgtatcggacgagtcagtggctggagacagtggtgtgtacgaggcttccgtgcagagactgggtgcttcagaagctgctgcatttgacagtgacgaatcggaagcagtgggtgcgacccgaattcagattgccctgaagtatgatgagaagaataagcaatttgcaatattaatcatccagctgagtaacctttctgctctgttgcagcaacaagaccagaaagtgaatatccgcgtggctgtccttccttgctctgaaagcacaacctgcctgttccggacccggcctctggacgcctcagacactctagtgttcaatgaggtgttctgggtatccatgtcctatccagcccttcaccagaagaccttaagagtcgatgtctgtaccaccgacaggagccatctggaagagtgcctgggaggcgcccagatcagcctggcggaggtctgccggtctggggagaggtcgactcgctggtacaaccttctcagctacaaatacttgaagaaacagagcagggagctcaagccagtgggagtcatggcccctgcctcagggcctgccagcacggacgctgtgtctgctctgttggaacagacagcagtggagctggagaagaggcaggagggcaggagcagcacacagacactggaagacagctggaggtatgaggagaccagtgagaatgaggcagtagccgaggaagaggaggaggaggtggaggaggaggagggagaagaggatgttttcaccgagaaagcctcacctgatatggatgggtacccagcattaaaggtggacaaagagaccaacacggagaccccggccccatcccccacagtggtgcgacctaaggaccggagagtgggcaccccgtcccaggggccatttcttcgagggagcaccatcatccgctctaagaccttctccccaggaccccagagccagtacgtgtgccggctgaatcggagtgatagtgacagctccactctgtccaaaaagccaccttttgttcgaaactccctggagcgacgcagcgtccggatgaagcggccgtccccacccccacagccttcctcggtcaagtcgctgcgctccgagcgtctgatccgtacctcgctggacctggagttagacctgcaggcgacaagaacctggcacagccaattgacccaggagatctcggtgctgaaggagctcaaggagcagctggaacaagccaagagccacggggagaaggagctgccacagtggttgcgtgaggacgagcgtttccgcctgctgctgaggatgctggagaagcggatggaccgagcggagcacaagggtgagcttcagacagacaagatgatgagggcagctgccaaggatgtgcacaggctccgaggccagagctgtaaggaacccccagaagttcagtctttcagggagaagatggcatttttcacccggcctcggatgaatatcccagctctctctgcagatgacgtctaatcgccagaaaagtatttcctttgttccactgaccaggctgtgaacattgactgtggctaaagttatttatgtggtgttatatgaaggtactgagtcacaagtcctctagtgctcttgttggtttgaagatgaaccgactttttagtttgggtcctactgttgttattaaaaacagaacaaaaacaaaacacacacacacacaaaaacagaaacaaaaaaaaccagcattaaaataataagattgtatagtttgtatatttaggagtgtatttttgggaaagaaaatttaaatgaactaaagcagtattgagttgctgctcttcttaaaatcgtttagattttttttggtttgtacagctccaccttttagaggtcttactgcaataagaagtaatgcctgggggacggtaatcctaataggacgtcccgcacttgtcacagtacagctaatttttcctagttaacatattttgtacaatattaaaaaaatgcacagaaaccattgggggggattcagaggtgcatccacggatcttcttgagctgtgacgtgtttttatgtggctgcccaacgtggagcgggcagtgtgataggctgggtgggctaagcagcctagtctatgtgggtgacaggccacgctggtctcagatgcccagtgaagccactaacatgagtgaggggagggctgtggggaactccattcagttttatctccatcaataaagtggcctttcaaaaagaatcttcctcttgctctctttttctttcctacccctcacttcatctgtttccctgatttttgactctccccttt

SEQ ID NO: 736254 - DNA, 3540 bp, Homo sapiens
aaatgtctgatgctcagggcagctacaaactggatgaagctcaggctgtcttgagagaaacaaaagccatcaaaaaggctattacctgtggggaaaaggaaaagcaagatctcattaagagccttgccatgttgaaggacggcttccgcactgacagggggtctcactcagacctgtggtccagcagcagctctctggagagttcgagtttcccgctaccgaaacagtacctggatttcggcatcaacagcaacaatcagttggcagagaaggtcagattgcgccttcgatatgaagaggctaagagaaggatcgccaacctgaagatccagctggccaagcttgacagtgaggcctggcctggggtgctggactcagagagggaccggctgatccttatcaacgagaaggaggagctgctgaaggagatgcgcttcatcagcccccgcaagtggacccagggggaggtggagcagctggagatggcccggaagcggctggaaaaggacctgcaggcagcccgggacacccagagcaaggcgctgacggagaggttaaagttaaacagtaagaggaaccagcttgtgagagaactggaggaagccacccggcaggtggcaactctgcactcccagctgaaaagtctctcaagcagcatgcagtccctgtcctcaggcagcagccccggatccctcacgtccagccggggctccctggttgcatccagcctggactcctccacttcagccagcttcactgacctctactatgacccctttgagcagctggactcagagctgcagagcaaggtggagttcctgctcctggagggggccaccggcttccggccctcaggctgcatcaccaccatccacgaggatgaggtggccaagacccagaaggcagagggaggtggccgcctgcaggctctgcgttccctgtctggcaccccaaagtccatgacctccctatccccacgttcctctctctcctccccctccccaccctgttcccctctcatggctgaccccctcctggctggtgatgccttcctcaactccttggagtttgaagacccggagctgagtgccactctttgtgaactgagccttggtaacagcgcccaggaaagataccggctggaggaaccaggaacggagggcaagcagctgggccaagctgtgaatacggcccaggggtgtggcctgaaagtggcctgtgtctcagccgccgtatcggacgagtcagtggctggagacagtggtgtgtacgaggcttccgtgcagagactgggtgcttcagaagctgctgcatttgacagtgacgaatcggaagcagtgggtgcgacccgaattcagattgccctgaagtatgatgagaagaataagcaatttgcaatattaatcatccagctgagtaacctttctgctctgttgcagcaacaagaccagaaagtgaatatccgcgtggctgtccttccttgctctgaaagcacaacctgcctgttccggacccggcctctggacgcctcagacactctagtgttcaatgaggtgttctgggtatccatgtcctatccagcccttcaccagaagaccttaagagtcgatgtctgtaccaccgacaggagccatctggaagagtgcctgggaggcgcccagatcagcctggcggaggtctgccggtctggggagaggtcgactcgctggtacaaccttctcagctacaaatacttgaagaaacagagcagggagctcaagccagtgggagtcatggcccctgcctcagggcctgccagcacggacgctgtgtctgctctgttggaacagacagcagtggagctggagaagaggcaggagggcaggagcagcacacagacactggaagacagctggaggtatgaggagaccagtgagaatgaggcagtagccgaggaagaggaggaggaggtggaggaggaggagggagaagaggatgttttcaccgagaaagcctcacctgatatggatgggtacccagcattaaaggtggacaaagagaccaacacggagaccccggccccatcccccacagtggtgcgacctaaggaccggagagtgggcaccccgtcccaggggccatttcttcgagggagcaccatcatccgctctaagaccttctccccaggaccccagagccagtacgtgtgccggctgaatcggagtgatagtgacagctccactctgtccaaaaagccaccttttgttcgaaactccctggagcgacgcagcgtccggatgaagcggccgtccccacccccacagccttcctcggtcaagtcgctgcgctccgagcgtctgatccgtacctcgctggacctggagttagacctgcaggcgacaagaacctggcacagccaattgacccaggagatctcggtgctgaaggagctcaaggagcagctggaacaagccaagagccacggggagaaggagctgccacagtggttgcgtgaggacgagcgtttccgcctgctgctgaggatgctggagaagcggatggaccgagcggagcacaagggtgagcttcagacagacaagatgatgagggcagctgccaaggatgtgcacaggctccgaggccagagctgtaaggaacccccagaagttcagtctttcagggagaagatggcatttttcacccggcctcggatgaatatcccagctctctctgcagatgacgtctaatcgccagaaaagtatttcctttgttccactgaccaggctgtgaacattgactgtggctaaagttatttatgtggtgttatatgaaggtactgagtcacaagtcctctagtgctcttgttggtttgaagatgaaccgactttttagtttgggtcctactgttgttattaaaaacagaacaaaaacaaaacacacacacacacaaaaacagaaacaaaaaaaaccagcattaaaataataagattgtatagtttgtatatttaggagtgtatttttgggaaagaaaatttaaatgaactaaagcagtattgagttgctgctcttcttaaaatcgtttagattttttttggtttgtacagctccaccttttagaggtcttactgcaataagaagtaatgcctgggggacggtaatcctaataggacgtcccgcacttgtcacagtacagctaatttttcctagttaacatattttgtacaatattaaaaaaatgcacagaaaccattgggggggattcagaggtgcatccacggatcttcttgagctgtgacgtgtttttatgtggctgcccaacgtggagcgggcagtgtgataggctgggtgggctaagcagcctagtctatgtgggtgacaggccacgctggtctcagatgcccagtgaagccactaacatgagtgaggggagggctgtggggaactccattcagttttatctccatcaataaagtggcctttcaaaaagaatcttcctcttgctctctttttctttcctacccctcacttcatctgtttccctgatttttgactctccccttt

SEQ ID NO: 736255 - DNA, 1035 bp, Homo sapiens
tgtcagtgactcagtacttgttatgtgccagacacccttcccaatcattctgatgaatgaatttttcttatctttaaggcctggggaattggcccaatgttacatacctaataagcagtcacatcaggtcataacaacagtagcaaggacttactatgtgccaagtactgtgctttgcaggttacagattatatcataaaaccttcaaccaaaataacatgaggaaagagcttttgttattccattcagagagatgagcaacttgcccaaggccacacagccggtgctaagaggttagtgcctggtgatgaatccacatctctattgtaccaggaacagggcaaggacattgccttgttcatgtctgcaccccattcctgcagagcctacttcattgttggcacatggtaggcacccacatgtgtttgtttagaaaaaaaataggttccttgagatgacaagctgatcaaaggaagacagtaactgtcaaagattgctctgagatgtctgtttcttcatggcatctcctgttccctcagtgccattaggcacaccagtcatgcttgctttcttggcccccagatcgccaacctgaagatccagctggccaagcttgacagtgaggcctggcctggggtgctggactcagagagggaccggctgatccttatcaacgagaaggaggagctgctgaaggagatgcgcttcatcagcccccgcaagtggacccagggggaggtggagcagctggagatggcccggaagcggctggaaaaggacctgcaggcagcccgggacacccagagcaaggcgctgacggagaggttaaagttaaacagtaagaggaaccagcttgtgagagaactggaggaagccacccggcaggtggcaactctgcactcccagctgaaaaggtgagtggtgggcggtgaggccactgctcccctgggcatggccagacatgggtgtccccagtgtcccagcccaggctctacccttcacttgtcctccgtggcttgagagtggatgtttaga

SEQ ID NO: 736256 - DNA, 2678 bp, Homo sapiens
tgtcagtgactcagtacttgttatgtgccagacacccttcccaatcattctgatgaatgaatttttcttatctttaaggcctggggaattggcccaatgttacatacctaataagcagtcacatcaggtcataacaacagtagcaaggacttactatgtgccaagtactgtgctttgcaggttacagattatatcataaaaccttcaaccaaaataacatgaggaaagagcttttgttattccattcagagagatgagcaacttgcccaaggccacacagccggtgctaagaggttagtgcctggtgatgaatccacatctctattgtaccaggaacagggcaaggacattgccttgttcatgtctgcaccccattcctgcagagcctacttcattgttggcacatggtaggcacccacatgtgtttgtttagaaaaaaaataggttccttgagatgacaagctgatcaaaggaagacagtaactgtcaaagattgctctgagatgtctgtttcttcatggcatctcctgttccctcagtgccattaggcacaccagtcatgcttgctttcttggcccccagatcgccaacctgaagatccagctggccaagcttgacagtgaggcctggcctggggtgctggactcagagagggaccggctgatccttatcaacgagaaggaggagctgctgaaggagatgcgcttcatcagcccccgcaagtggacccagggggaggtggagcagctggagatggcccggaagcggctggaaaaggacctgcaggcagcccgggacacccagagcaaggcgctgacggagaggttaaagttaaacagtaagaggaaccagcttgtgagagaactggaggaagccacccggcaggtggcaactctgcactcccagctgaaaagtctctcaagcagcatgcagtccctgtcctcaggcagcagccccggatccctcacgtccagccggggctccctggttgcatccagcctggactcctccacttcagccagcttcactgacctctactatgacccctttgagcagctggactcagagctgcagagcaaggtggagttcctgctcctggagggggccaccggcttccggccctcaggctgcatcaccaccatccacgaggatgaggtggccaagacccagaaggcagagggaggtggccgcctgcaggctctgcgttccctgtctggcaccccaaagtccatgacctccctatccccacgttcctctctctcctccccctccccaccctgttcccctctcatggctgaccccctcctggctggtgatgccttcctcaactccttggagtttgaagacccggagctgagtgccactctttgtgaactgagccttggtaacagcgcccaggaaagataccggctggaggaaccaggaacggagggcaagcagctgggccaagctgtgaatacggcccaggggtgtggcctgaaagtggcctgtgtctcagccgccgtatcggacgagtcagtggctggagacagtggtgtgtacgaggcttccgtgcagagactgggtgcttcagaagctgctgcatttgacagtgacgaatcggaagcagtgggtgcgacccgaattcagattgccctgaagtatgatgagaagaataagcaatttgcaatattaatcatccagctgagtaacctttctgctctgttgcagcaacaagaccagaaagtgaatatccgcgtggctgtccttccttgctctgaaagcacaacctgcctgttccggacccggcctctggacgcctcagacactctagtgttcaatgaggtgttctgggtatccatgtcctatccagcccttcaccagaagaccttaagagtcgatgtctgtaccaccgacaggagccatctggaagagtgcctgggaggcgcccagatcagcctggcggaggtctgccggtctggggagaggtcgactcgctggtacaaccttctcagctacaaatacttgaagaaacagagcagggagctcaagccagtgggagtcatggcccctgcctcagggcctgccagcacggtgagctgggaccaggtgtgccaccttcccacaaggccgcacccggatgttggaagggaaagcctctcccagaactggaggtgatcaggcgtcatgagaggagaacaatggggtggaggaagtaggagaagaagacagggaaggagagatctccactaaggggcaggcggctccctttctgcaacttgttcccttccacatctgtgtttcctccttctgtcctttgccctacctaataccacttggctaacgaaaaccttaattcatgattttttacaaatgaagtggagaagaaggtaaaaaactgtggaaggaaaaagattaacctttcttgggcccctactttgttcaaggtccatactggaggctttgtataagaggcagctagaaatcatgggaagagaatcagagggctaggtcagtcatatcacctctctgagctttcaatttttaatgtctaatatgagccttaaaaggttgttatgaggatgggcacggagcctcatgcctataatcccagccctttgggaggctgaggcaggaggatctcttgaggccaggaattcaagacaagcctgggcaacatggtgaggccttgtctctac

SEQ ID NO: 736257 - DNA, 3811 bp, Homo sapiens
tgtcagtgactcagtacttgttatgtgccagacacccttcccaatcattctgatgaatgaatttttcttatctttaaggcctggggaattggcccaatgttacatacctaataagcagtcacatcaggtcataacaacagtagcaaggacttactatgtgccaagtactgtgctttgcaggttacagattatatcataaaaccttcaaccaaaataacatgaggaaagagcttttgttattccattcagagagatgagcaacttgcccaaggccacacagccggtgctaagaggttagtgcctggtgatgaatccacatctctattgtaccaggaacagggcaaggacattgccttgttcatgtctgcaccccattcctgcagagcctacttcattgttggcacatggtaggcacccacatgtgtttgtttagaaaaaaaataggttccttgagatgacaagctgatcaaaggaagacagtaactgtcaaagattgctctgagatgtctgtttcttcatggcatctcctgttccctcagtgccattaggcacaccagtcatgcttgctttcttggcccccagatcgccaacctgaagatccagctggccaagcttgacagtgaggcctggcctggggtgctggactcagagagggaccggctgatccttatcaacgagaaggaggagctgctgaaggagatgcgcttcatcagcccccgcaagtggacccagggggaggtggagcagctggagatggcccggaagcggctggaaaaggacctgcaggcagcccgggacacccagagcaaggcgctgacggagaggttaaagttaaacagtaagaggaaccagcttgtgagagaactggaggaagccacccggcaggtggcaactctgcactcccagctgaaaagtctctcaagcagcatgcagtccctgtcctcaggcagcagccccggatccctcacgtccagccggggctccctggttgcatccagcctggactcctccacttcagccagcttcactgacctctactatgacccctttgagcagctggactcagagctgcagagcaaggtggagttcctgctcctggagggggccaccggcttccggccctcaggctgcatcaccaccatccacgaggatgaggtggccaagacccagaaggcagagggaggtggccgcctgcaggctctgcgttccctgtctggcaccccaaagtccatgacctccctatccccacgttcctctctctcctccccctccccaccctgttcccctctcatggctgaccccctcctggctggtgatgccttcctcaactccttggagtttgaagacccggagctgagtgccactctttgtgaactgagccttggtaacagcgcccaggaaagataccggctggaggaaccaggaacggagggcaagcagctgggccaagctgtgaatacggcccaggggtgtggcctgaaagtggcctgtgtctcagccgccgtatcggacgagtcagtggctggagacagtggtgtgtacgaggcttccgtgcagagactgggtgcttcagaagctgctgcatttgacagtgacgaatcggaagcagtgggtgcgacccgaattcagattgccctgaagtatgatgagaagaataagcaatttgcaatattaatcatccagctgagtaacctttctgctctgttgcagcaacaagaccagaaagtgaatatccgcgtggctgtccttccttgctctgaaagcacaacctgcctgttccggacccggcctctggacgcctcagacactctagtgttcaatgaggtgttctgggtatccatgtcctatccagcccttcaccagaagaccttaagagtcgatgtctgtaccaccgacaggagccatctggaagagtgcctgggaggcgcccagatcagcctggcggaggtctgccggtctggggagaggtcgactcgctggtacaaccttctcagctacaaatacttgaagaaacagagcagggagctcaagccagtgggagtcatggcccctgcctcagggcctgccagcacggacgctgtgtctgctctgttggaacagacagcagtggagctggagaagaggcaggagggcaggagcagcacacagacactggaagacagctggaggtatgaggagaccagtgagaatgaggcagtagccgaggaagaggaggaggaggtggaggaggaggagggagaagaggatgttttcaccgagaaagcctcacctgatatggatgggtacccagcattaaaggtggacaaagagaccaacacggagaccccggccccatcccccacagtggtgcgacctaaggaccggagagtgggcaccccgtcccaggggccatttcttcgagggagcaccatcatccgctctaagaccttctccccaggaccccagagccagtacgtgtgccggctgaatcggagtgatagtgacagctccactctgtccaaaaagccaccttttgttcgaaactccctggagcgacgcagcgtccggatgaagcggccgtccccacccccacagccttcctcggtcaagtcgctgcgctccgagcgtctgatccgtacctcgctggacctggagttagacctgcaggcgacaagaacctggcacagccaattgacccaggagatctcggtgctgaaggagctcaaggagcagctggaacaagccaagagccacggggagaaggagctgccacagtggttgcgtgaggacgagcgtttccgcctgctgctgaggatgctggagaagcggatggaccgagcggagcacaagggtgagcttcagacagacaagatgatgagggcagctgccaaggatgtgcacaggctccgaggccagagctgtaaggaacccccagaagttcagtctttcagggagaagatggcatttttcacccggcctcggatgaatatcccagctctctctgcagatgacgtctaatcgccagaaaagtatttcctttgttccactgaccaggctgtgaacattgactgtggctaaagttatttatgtggtgttatatgaaggtactgagtcacaagtcctctagtgctcttgttggtttgaagatgaaccgactttttagtttgggtcctactgttgttattaaaaacagaacaaaaacaaaacacacacacacacaaaaacagaaacaaaaaaaaccagcattaaaataataagattgtatagtttgtatatttaggagtgtatttttgggaaagaaaatttaaatgaactaaagcagtattgagttgctgctcttcttaaaatcgtttagattttttttggtttgtacagctccaccttttagaggtcttactgcaataagaagtaatgcctgggggacggtaatcctaataggacgtcccgcacttgtcacagtacagctaatttttcctagttaacatattttgtacaatattaaaaaaatgcacagaaaccattgggggggattcagaggtgcatccacggatcttcttgagctgtgacgtgtttttatgtggctgcccaacgtggagcgggcagtgtgataggctgggtgggctaagcagcctagtctatgtgggtgacaggccacgctggtctcagatgcccagtgaagccactaacatgagtgaggggagggctgtggggaactccattcagttttatctccatcaataaagtggcctttcaaaaagaatcttcctcttgctctctttttctttcctacccctcacttcatctgtttccctgatttttgactctccccttt

SEQ ID NO: 736258 - DNA, 3157 bp, Homo sapiens
tgtcagtgactcagtacttgttatgtgccagacacccttcccaatcattctgatgaatgaatttttcttatctttaaggcctggggaattggcccaatgttacatacctaataagcagtcacatcaggtcataacaacagtagcaaggacttactatgtgccaagtactgtgctttgcaggttacagattatatcataaaaccttcaaccaaaataacatgaggaaagagcttttgttattccattcagagagatgagcaacttgcccaaggccacacagccggtgctaagaggttagtgcctggtgatgaatccacatctctattgtaccaggaacagggcaaggacattgccttgttcatgtctgcaccccattcctgcagagcctacttcattgttggcacatggtaggcacccacatgtgtttgtttagaaaaaaaataggttccttgagatgacaagctgatcaaaggaagacagtaactgtcaaagattgctctgagatgtctgtttcttcatggcatctcctgttccctcagtgccattaggcacaccagtcatgcttgctttcttggcccccagatcgccaacctgaagatccagctggccaagcttgacagtgaggcctggcctggggtgctggactcagagagggaccggctgatccttatcaacgagaaggaggagctgctgaaggagatgcgcttcatcagcccccgcaagtggacccagggggaggtggagcagctggagatggcccggaagcggctggaaaaggacctgcaggcagcccgggacacccagagcaaggcgctgacggagaggttaaagttaaacagtaagaggaaccagcttgtgagagaactggaggaagccacccggcaggtggcaactctgcactcccagctgaaaagtctctcaagcagcatgcagtccctgtcctcaggcagcagccccggatccctcacgtccagccggggctccctggttgcatccagcctggactcctccacttcagccagcttcactgacctctactatgacccctttgagcagctggactcagagctgcagagcaaggtggagttcctgctcctggagggggccaccggcttccggccctcaggctgcatcaccaccatccacgaggatgaggtggccaagacccagaaggcagagggaggtggccgcctgcaggctctgcgttccctgtctggcaccccaaagtccatgacctccctatccccacgttcctctctctcctccccctccccaccctgttcccctctcatggctgaccccctcctggctggtgatgccttcctcaactccttggagtttgaagacccggagctgagtgccactctttgtgaactgagccttggtaacagcgcccaggaaagataccggctggaggaaccaggaacggagggcaagcagctgggccaagctgtgaatacggcccaggggtgtggcctgaaagtggcctgtgtctcagccgccgtatcggacgagtcagtggctggagacagtggtgtgtacgaggcttccgtgcagagactgggtgcttcagaagctgctgcatttgacagtgacgaatcggaagcagtgggtgcgacccgaattcagattgccctgaagtatgatgagaagaataagcaatttgcaatattaatcatccagctgagtaacctttctgctctgttgcagcaacaagaccagaaagtgaatatccgcgtggctgtccttccttgctctgaaagcacaacctgcctgttccggacccggcctctggacgcctcagacactctagtgttcaatgaggtgttctgggtatccatgtcctatccagcccttcaccagaagaccttaagagtcgatgtctgtaccaccgacaggagccatctggaagagtgcctgggaggcgcccagatcagcctggcggaggtctgccggtctggggagaggtcgactcgctggtacaaccttctcagctacaaatacttgaagaaacagagcagggagctcaagccagtgggagtcatggcccctgcctcagggcctgccagcacggacgctgtgtctgctctgttggaacagacagcagtggagctggagaagaggcaggagggcaggagcagcacacagacactggaagacagctggaggtatgaggagaccagtgagaatgaggcagtagccgaggaagaggaggaggaggtggaggaggaggagggagaagaggatgttttcaccgagaaagcctcacctgatatggatgggtacccagcattaaaggtggacaaagagaccaacacggagaccccggccccatcccccacagtggtgcgacctaaggaccggagagtgggcaccccgtcccaggggccatttcttcgagggagcaccatcatccgctctaagaccttctccccaggaccccagagccagtacgtgtgccggctgaatcggagtgatagtgacagctccactctgtccaaaaagccaccttttgttcgaaactccctggagcgacgcagcgtccggatgaagcggccgtccccacccccacagccttcctcggtcaagtcgctgcgctccgagcgtctgatccgtacctcgctggacctggagttagacctgcaggcgacaagaacctggcacagccaattgacccaggagatctcggtgctgaaggagctcaaggagcagctggaacaagccaagagccacggggagaaggagctgccacagtggttgcgtgaggacgagcgtttccgcctgctgctgaggatgctggagaagcggatggaccgagcggagcacaagggtgagcttcagacagacaagatgatgagggcagctgccaaggatgtgcacaggctccgaggccagagctgtaaggaacccccagaagttcagtctttcaggaaaagctacatggagcaaatcctcctgcctgaagaagtgcatctcagcatcacttcagctgtcggggcatttgtggggagaaccagaccacctctgcggaaggcagcagaccctcttccagccatggatggagttgaattctctataaacggttcaccagcaaaccaccaatacattccattgtttgcctagagagaaatttaaaaataaataaatgttcacttat

SEQ ID NO: 736259 - DNA, 2884 bp, Homo sapiens
tgtcagtgactcagtacttgttatgtgccagacacccttcccaatcattctgatgaatgaatttttcttatctttaaggcctggggaattggcccaatgttacatacctaataagcagtcacatcaggtcataacaacagtagcaaggacttactatgtgccaagtactgtgctttgcaggttacagattatatcataaaaccttcaaccaaaataacatgaggaaagagcttttgttattccattcagagagatgagcaacttgcccaaggccacacagccggtgctaagaggttagtgcctggtgatgaatccacatctctattgtaccaggaacagggcaaggacattgccttgttcatgtctgcaccccattcctgcagagcctacttcattgttggcacatggtaggcacccacatgtgtttgtttagaaaaaaaataggttccttgagatgacaagctgatcaaaggaagacagtaactgtcaaagattgctctgagatgtctgtttcttcatggcatctcctgttccctcagtgccattaggcacaccagtcatgcttgctttcttggcccccagatcgccaacctgaagatccagctggccaagcttgacagtgaggcctggcctggggtgctggactcagagagggaccggctgatccttatcaacgagaaggaggagctgctgaaggagatgcgcttcatcagcccccgcaagtggacccagggggaggtggagcagctggagatggcccggaagcggctggaaaaggacctgcaggcagcccgggacacccagagcaaggcgctgacggagaggttaaagttaaacagtaagaggaaccagcttgtgagagaactggaggaagccacccggcaggtggcaactctgcactcccagctgaaaagtctctcaagcagcatgcagtccctgtcctcaggcagcagccccggatccctcacgtccagccggggctccctggttgcatccagcctggactcctccacttcagccagcttcactgacctctactatgacccctttgagcagctggactcagagctgcagagcaaggtggagttcctgctcctggagggggccaccggcttccggccctcaggctgcatcaccaccatccacgaggatgaggtggccaagacccagaaggcagagggaggtggccgcctgcaggctctgcgttccctgtctggcaccccaaagtccatgacctccctatccccacgttcctctctctcctccccctccccaccctgttcccctctcatggctgaccccctcctggctggtgatgccttcctcaactccttggagtttgaagacccggagctgagtgccactctttgtgaactgagccttggtaacagcgcccaggaaagataccggctggaggaaccaggaacggagggcaagcagctgggccaagctgtgaatacggcccaggggtgtggcctgaaagtggcctgtgtctcagccgccgtatcggacgagtcagtggctggagacagtggtgtgtacgaggcttccgtgcagagactgggtgcttcagaagctgctgcatttgacagtgacgaatcggaagcagtgggtgcgacccgaattcagattgccctgaagtatgatgagaagaataagcaatttgcaatattaatcatccagctgagtaacctttctgctctgttgcagcaacaagaccagaaagtgaatatccgcgtggctgtccttccttgctctgaaagcacaacctgcctgttccggacccggcctctggacgcctcagacactctagtgttcaatgaggtgttctgggtatccatgtcctatccagcccttcaccagaagaccttaagagtcgatgtctgtaccaccgacaggagccatctggaagagtgcctgggaggcgcccagatcagcctggcggaggtctgccggtctggggagaggtcgactcgctggtacaaccttctcagctacaaatacttgaagaaacagagcagggagctcaagccagtgggagtcatggcccctgcctcagggcctgccagcacggacgctgtgtctgctctgttggaacagacagcagtggagctggagaagaggcaggagggcaggagcagcacacagacactggaagacagctggaggtatgaggagaccagtgagaatgaggcagtagccgaggaagaggaggaggaggtggaggaggaggagggagaagaggatgttttcaccgagaaagcctcacctgatatggatgggtacccagcattaaaggtggacaaagagaccaacacggagaccccggccccatcccccacagtggtgcgacctaaggaccggagagtgggcaccccgtcccaggggccatttcttcgagggagcaccatcatccgctctaagaccttctccccaggaccccagagccagtacgtgtgccggctgaatcggagtgatagtgacagctccactctgtccaaaaagccaccttttgttcgaaactccctggagcgacgcagcgtccggatgaagcggtttgcagaaccagaagaaaccaggagccagaatgtcagaaagaaaaaaggggccaggcgtggtggctcacgcctgtaatcccagcactttgggaggccgaggcaggtggatcacctgaggtcaggagttcgagaccagcctcagcattgagaaactccgtctctactaaaaatacaaaattagctgggcgtggtggtgcatgcctgtaatcccagctactcgggaggctgaggcaggagaattgcttgaacctgggaggcggaggttgcagtgagccgagatcgcgccgttgcactccagctgggcaacaagagtgaaactacatctc

SEQ ID NO: 736260 - DNA, 1291 bp, Homo sapiens
  misc_feature (222)..(222): n is a, c, g, or t
  misc_feature (1257)..(1257): n is a, c, g, or t
cgccttgttctcggagagggtgagttgaaacgctgcctggaaaggaagtaccaggacttgcacaggagttccaccatcttcctctgaagacgtagccatcttgctccatgaaggtcaggacaatctgacatgcacttgtttcttgcctctatacttgaagagtagtcctcttacattgtgtacatttttttcttaataggggaggcgacccccccccccctntccatccctttatagccccctcatccgccatcttgaccgaaatttatgctccctacccacccaccgctcgcgcgttttggccccgccttgcccccccccccccatgaatcgcgtgccgcccctcttccctctcgccacacactctaccgtcacccgcgccttcctctcccctcctgaggacatcggcgccccacatggccccccccgcccccctcgtcttccccctttccccctgacccctcccccctcctccccctaaatataacacccccttcacaccccttacctcctcaccccccgcattatccccccccccctgtccccccccccccttccccccctttatattctccccccttccatcagcccccccccccccccccccccctacccccctattccccccctcctacctccactcctatttctccccgccccccttttcccccaccgttctcattaggtcccgccccccgccactctccgccctcctcccccgcactccgctcactcccctccgccatccatattctgtcgccggcaccacgcgcatagggcaccatccccgtctggtcattatgccctgtcacgaccccccttattatatcctcccctttcccacccctccccatccacacccacaattctcccccaaaaccatcccgaacgtcattccccatccacccctttaccacgcacgatccatacaccccccccctcactctgacgtacccttgttttccccccgcccaccccctattattcccccgtactatccgagattgctctcgcccacgctacaccccttaactatagacgccgccgtctcccacccccttcgatggagcataaccaccctccgcccacctctccctctgtaacactcacccccacccatcgctccccccgctactcctcctcttcttattctcaccaccccctcatttattaaccccccccgcgcccccgtcaactttcttcgtcttgctcactcccaatcgtcgctgtacaccccccatttactaccccgcatcntcccaatctctcgccacgtctacatgcgtatagc

SEQ ID NO: 736261 - DNA, 1344 bp, Homo sapiens
  misc_feature (275)..(275): n is a, c, g, or t
  misc_feature (1310)..(1310): n is a, c, g, or t
tggtgctggagagacagggagaggggcgaaccggccccccacagccactgcagttaccagaaatcttccgcctctgctgtatggaccttactggcaccaaccccggcagtatgagcaggagttccaccatcttcctctgaagacgtagccatcttgctccatgaaggtcaggacaatctgacatgcacttgtttcttgcctctatacttgaagagtagtcctcttacattgtgtacatttttttcttaataggggaggcgacccccccccccctntccatccctttatagccccctcatccgccatcttgaccgaaatttatgctccctacccacccaccgctcgcgcgttttggccccgccttgcccccccccccccatgaatcgcgtgccgcccctcttccctctcgccacacactctaccgtcacccgcgccttcctctcccctcctgaggacatcggcgccccacatggccccccccgcccccctcgtcttccccctttccccctgacccctcccccctcctccccctaaatataacacccccttcacaccccttacctcctcaccccccgcattatccccccccccctgtccccccccccccttccccccctttatattctccccccttccatcagcccccccccccccccccccccctacccccctattccccccctcctacctccactcctatttctccccgccccccttttcccccaccgttctcattaggtcccgccccccgccactctccgccctcctcccccgcactccgctcactcccctccgccatccatattctgtcgccggcaccacgcgcatagggcaccatccccgtctggtcattatgccctgtcacgaccccccttattatatcctcccctttcccacccctccccatccacacccacaattctcccccaaaaccatcccgaacgtcattccccatccacccctttaccacgcacgatccatacaccccccccctcactctgacgtacccttgttttccccccgcccaccccctattattcccccgtactatccgagattgctctcgcccacgctacaccccttaactatagacgccgccgtctcccacccccttcgatggagcataaccaccctccgcccacctctccctctgtaacactcacccccacccatcgctccccccgctactcctcctcttcttattctcaccaccccctcatttattaaccccccccgcgcccccgtcaactttcttcgtcttgctcactcccaatcgtcgctgtacaccccccatttactaccccgcatcntcccaatctctcgccacgtctacatgcgtatagc

SEQ ID NO: 736262 - DNA, 1069 bp, Homo sapiens
ccattgtctctggtaatacagtgttggccgccaaggtccctgggaaccaggctgctgttcagcgcattgtccagcccagccgaccagtaaagcagctggtcctccagccagttaagggttcagctcctgctggaaaccctggggccacagggcccccactgaagcctgcagttacactgacctctacacctacccagggtgaatcgaaacgcatcaccctggtcctccagcagccacagtctggaggtccccaaggacatcggcatgttgtgctagggagtctaccaggcaagatagtgttacagggcaaccagctggcagccctgactcaagccaagaatgcccaagggcagcctgccaaggtagtaactatccagctgcaggtgcagcagccacagcaaaaaatccagattgtaccacaaccaccatcatcgcagccacagccccagcagccaccctccacccagccagtgactctgtcctctgtacagcaggctcagataatgggaccaggacaaagcccaggacaaagactttcagtaccagtcaaggtggtactgcagccacaggctggctcttcccaaggggcctcttctgggctctctgtagttaaagttctgagtgccagtgaagtggcagctttgtcatcaccagcaagctctgctcctcattcggggggaaagacaggaatggaggaaaaccgcagattggaacaccagaagaagcaagagaaagcaaatcggattgtagcagaggccattgcgagagcccgtgcccgcggtgagcagaacatacctcgagtcttaaatgaggacgagttgcccagcgttcggccagaggaggaaggcgagaagaaacgcaggaagaagagtgctggggagaggctgaaagaggagaagccaaagaagagtaaaacatctggtgcctccaaaacaaagggcaagagcaagctcaacaccatcactcctgtagtgggtaagaagagaaaacgtaatacctcatctgataattcagatgtggaagtcatgcctgcacagtcacctcgagaagataagaaagcagcatcagg

SEQ ID NO: 736263 - DNA, 1203 bp, Homo sapiens
atctagaggatccggtctccacaggttgcctaaggagggatgaattggcccaggttggaaacggagcaggcagcacttcccttgctgatcagcagtagtgttgtgcctgtgaatagccactgcactctagcctgggcaatacagcgagaccctgtctaaaaataacaaaaaagattgcatcaagacagataggatgatgaacaaagtgagttgtactgtgtcttctgacctgtagtttttatgattctagcatgaagaaaactggtgtaaatatttcagagtataccattctttaatgttgtactcttgcaatttcctttcttcactttagggtgaatcgaaacgcatcaccctggtcctccagcagccacagtctggaggtccccaaggacatcggcatgttgtgctagggagtctaccaggcaagatagtgttacagggcaaccagctggcagccctgactcaagccaagaatgcccaagggcagcctgccaaggtagtaactatccagctgcaggtgcagcagccacagcaaaaaatccagattgtaccacaaccaccatcatcgcagccacagccccagcagccaccctccacccagccagtgactctgtcctctgtacagcaggctcagataatgggaccaggacaaagcccaggacaaagactttcagtaccagtcaaggtggtactgcagccacaggctggctcttcccaaggggcctcttctgggctctctgtagttaaagttctgagtgccagtgaagtggcagctttgtcatcaccagcaagctctgctcctcattcggggggaaagacaggaatggaggaaaaccgcagattggaacaccagaagaagcaagagaaagcaaatcggattgtagcagaggccattgcgagagcccgtgcccgcggtgagcagaacatacctcgagtcttaaatgaggacgagttgcccagcgttcggccagaggaggaaggcgagaagaaacgcaggaagaagagtgctggggagaggctgaaagaggagaagccaaagaagagtaaaacatctggtgcctccaaaacaaagggcaagagcaagctcaacaccatcactcctgtagtgggtaagaagagaaaacgtaatacctcatctgataattcagatgtggaagtcatgcctgcacagtcacctcgagaagataagaaagcagcatcagg

SEQ ID NO: 736264 - DNA, 292 bp, Homo sapiens
aaaccctaatatcttctttttttcaaacaccatatttagtagctgtgtgtcctattgactgaagatctaaaaacttctgtctggaagttttgtatgtgatggtttagattaattatgtttttttactcctaaattttctttgctttcactgaaaatgaatttggtttttcctttttagcaccatcactcctgtagtgggtaagaagagaaaacgtaatacctcatctgataattcagatgtggaagtcatgcctgcacagtcacctcgagaagataagaaagcagcatcagg

SEQ ID NO: 736265 - DNA, 985 bp, Homo sapiens
cgccttgttctcggagagggtgagttgaaacgctgcctggaaaggaagtaccaggacttgcacaggagttccaccatcttcctctgaagacgtagccatcttgctccatgaagggtgaatcgaaacgcatcaccctggtcctccagcagccacagtctggaggtccccaaggacatcggcatgttgtgctagggagtctaccaggcaagatagtgttacagggcaaccagctggcagccctgactcaagccaagaatgcccaagggcagcctgccaaggtagtaactatccagctgcaggtgcagcagccacagcaaaaaatccagattgtaccacaaccaccatcatcgcagccacagccccagcagccaccctccacccagccagtgactctgtcctctgtacagcaggctcagataatgggaccaggacaaagcccaggacaaagactttcagtaccagtcaaggtggtactgcagccacaggctggctcttcccaaggggcctcttctgggctctctgtagttaaagttctgagtgccagtgaagtggcagctttgtcatcaccagcaagctctgctcctcattcggggggaaagacaggaatggaggaaaaccgcagattggaacaccagaagaagcaagagaaagcaaatcggattgtagcagaggccattgcgagagcccgtgcccgcggtgagcagaacatacctcgagtcttaaatgaggacgagttgcccagcgttcggccagaggaggaaggcgagaagaaacgcaggaagaagagtgctggggagaggctgaaagaggagaagccaaagaagagtaaaacatctggtgcctccaaaacaaagggcaagagcaagctcaacaccatcactcctgtagtgggtaagaagagaaaacgtaatacctcatctgataattcagatgtggaagtcatgcctgcacagtcacctcgagaagataagaaagcagcatcagg

SEQ ID NO: 736266 - DNA, 1647 bp, Homo sapiens
  misc_feature (376)..(376): n is a, c, g, or t
aggacacggagcagtgtgactgtggttctctatgtcagcatcatgcatgctgtgatgaaaactgtatactgaaggcgaaagcagagtgcagtgatggtccatgttgtcataagtgtaaatttcaccgtaagggatatccttgctgtccttctagtcgttcctgtgatctcccagaattttgcaatggtacatctgcattatgccccaacaacaggcataagcaagatggctcaaaatgtcatacaatttacgagtgccttaaagttcattgtatggaccctaataatcagtgcttacaattatatggatatggtgcaaaatcagcctcacaagagtgttacaattcaatgaacagcaaaggggaccaatttggaanctgtggcatttctaccagtcctgggtcacaatatgttcggtgttcagatggtaatatattttgtgggaaacttatatgttcaggtattacaggcttaccaaaaatcaatctccaacatacaatgattcaggtccctcagggagatggctcatgttggagcatggatgcctatatgagtactgacattcctgatgaaggagatgtgcacaatggcacttactgtgcaccaaacaaagtctgcctgaattccgcctgcacagataaaaccccagtgatttctgcctgcaacccagaaaaaacgtgtaatgggaagggagtttgtaatgatttagggcactgccactgtaatgaagggcatgccccccctgactgtgttactgcaggaagtggaggtagtgtggacagtggccctcctggtaagctaggtgggacaccttcaggagaaggtgaaaatcacaatatgactcattccagacgtgaagaacatgctgtagacatgatgatattatcattcattatactttttataatattattattaagtacaattatttgatctgcttgcttaaaaaatcaccagaggctgccccggcagaagctcctccagcagtggctccaccaccggccccagaaataaagccagaagcagcagaagtggccacagaagaaaaagaagagaaggaggaagaaaaagaagaggaggaggaggaagaagaggaggaagaatcagattcctaaggttagaaatagggagatgaagccaagtatatcaaactcctcaagtactgagtgggaatgagatgtttggtgaagtagaaatagatagctttagtggctctgactcagatatactgatgtagaaggaaggattctttcacttttattatttattttggtaattaaatttacattaatttaatatgttaaatattttagtaccttttgctttttcacatttcatttgaaccattaacatgcatctttggacatcaatgtccttgtctttttggcccaattgttttagtcaccagaaactttttcaggacatgctatcttctatttgtttgacatacagaatcatatgtacctgaatttattactaactctgggattttcattttaagtaacaactacctattatgtgaggacagttgtttatgtgattggttgttctaacttgccctataaatgtgcattcatcaaaggagaagtttttaaatccaaaaacaaataaaacccgattcatattagacaactcttcaggttccaca

SEQ ID NO: 736267 - DNA, 963 bp, Homo sapiens; identical to SEQ ID NO: 26359

SEQ ID NO: 736268 - DNA, 850 bp, Homo sapiens
gctgcagagagaacaagacctgagactaattaatgaaggagatgttccacatttaccagttaatagagcatactctgttaatggtgctctgagaagtccaaacatggacatatcttcttccccaaacatcaggcttcgaagacatagtagtcaaattgaaggtgttagacaaatgcataacaatgctcctcggagccagatggccactgaaagagatctcatggcgtggagcagaagagtggtggtcaatgaactaaataatggggttagtagggtacaggaagaatgtcgaactgcaaaaggtgacatagaaatcagtctttatacagttgaaaagaagaaaaagccatcttacactactcaaaggaatgattatgagcctagctgtgggcgttctttacgcaggacacagcgcaaacgtcagcatacttaccaaacacggtccaacatagagcataattcacaggcatcatgtcaaaattcaggtgtacaggaagactcagacagttcttcagaggaagatgaaactgttggcacaagtgacgcttcggtagaggatcctgttgttgaatggcaaagtgaaagttcttccagtgactcatcaagtgaatattctgattggacagcagatgctggaataaatttacaacccccaaaaagacaaaccagacagacaacacgtaaaatatgcagcagctctgatgaggaaaatttgaagtccctagaagaaaggcagaagaaacctaagcagactagaaagaagaaaggaggactggtttctatagcaggtgagcctaatgaagaatggtttgcccctcagtggatcttggatactataccccgacgttcc

SEQ ID NO: 736269 - DNA, 5981 bp, Homo sapiens
attcacaatgaatgtgaaattaaaagcatgatgtagtagtgacccaaaaggaatgtgaattctcctccagaacatgcagagacccatggatgaactgtgtttctagatttttcctccagctttcctgagagaaacaggtcaaaatgagcaagagacgcatgagcgtgggtcagcaaacatgggctcttctctgcaagaactgtctcaaaaaatggagaatgaaaagacagaccttgttggaatggctcttttcatttcttctggtactgtttctgtacctatttttctccaatttacatcaagttcatgacactcctcaaatgtcttcaatggatctgggacgtgtagatagttttaatgatactaattatgttattgcatttgcacctgaatccaaaactacccaagagataatgaacaaagtggcttcagccccattcctaaaaggaagaacaatcatggggtggcctgatgaaaaaagcatggatgaattggatttgaactattcaatagacgcagtgagagtcatctttactgataccttctcctaccatttgaagttttcttggggacatagaatccccatgatgaaagagcacagagaccattcagctcactgtcaagcagtgaatgaaaaaatgaagtgtgaaggttcagagttctgggagaaaggctttgtagcttttcaagctgccattaatgctgctatcatagaaatcgcaacaaatcattcagtgatggaacagctgatgtcagttactggtgtacatatgaagatattaccttttgttgcccaaggaggagttgcaactgattttttcattttcttttgcattatttctttttctacatttatatactatgtatcagtcaatgttacacaagaaagacaatacattacgtcattgatgacaatgatgggactccgagagtcagcattctggctttcctggggtttgatgtatgctggcttcatccttatcatggccactttaatggctcttattgtaaaatctgcacaaattgtcgtcctgactggttttgtgatggtcttcaccctctttctcctctatggcctgtctttgataactttagctttcctgatgagtgtgttgataaagaaacctttccttacgggcttggttgtgtttctccttattgtcttttgggggatcctgggattcccagcattgtatacacatcttcctgcatttttggaatggactttgtgtcttcttagcccctttgccttcactgttgggatggcccagcttatacatttggactatgatgtgaattctaatgcccacttggattcttcacaaaatccatacctcataatagctactcttttcatgttggtttttgacacccttctgtatttggtattgacattatattttgacaaaattttgcccgctgaatatggacatcgatgttctcccttgtttttcctgaaatcctgtttttggtttcaacacggaagggctaatcatgtggtccttgagaatgaaacagattctgatcctacacctaatgactgttttgaaccagtgtctccagaattctgtgggaaggaagccatcagaatcaaaaatcttaaaaaagaatatgcagggaagtgtgagagagtagaagctttgaaaggtgtggtgtttgacatatatgaaggccagatcactgccctccttggtcacagtggagctggaaaaactaccctgttaaacatacttagtgggttgtcagttccaacatcaggttcagtcactgtctataatcacacactttcaagaatggctgatatagaaaatatcagcaagttcactggattttgtccacaatccaatgtgcaatttggatttctcactgtgaaagaaaacctcaggctgtttgctaaaataaaagggattttgccacatgaagtggagaaagaggtacaacgagttgtacaggaattagaaatggaaaatattcaagacatccttgctcaaaacttaagtggtggacaaaataggaaactaacttttgggattgccattttaggagatcctcaagttttgctattggatgaaccgactgctggattggatcctctttcaaggcaccgaatatggaatctcctgaaagaggggaaatcagacagagtaattctcttcagcacccagtttatagatgaggctgacattctggcggacaggaaggtgttcatatccaatgggaagctgaagtgtgcaggctcttctctgttccttaagaagaaatggggcataggctaccatttaagtttgcatctgaatgaaaggtgtgatccagagagtataacatcactggttaagcagcacatctctgatgccaaattgacagcacaaagtgaagaaaaacttgtatatattttgcctttggaaaggacaaacaaatttccagaactttacagggatcttgatagatgttctaaccaaggcattgaggattatggtgtttccataacaactttgaatgaggtgtttctgaaattagaaggaaaatcaactattgatgaatcagatattggaatttggggacaattacaaactgatggggcaaaagatataggaagccttgttgagctggaacaagttttgtcttccttccacgaaacaaggaaaacaatcagtggcgtggcgctctggaggcagcaggtctgtgcaatagcaaaagttcgcttcctaaagttaaagaaagaaagaaaaagcctgtggactatattattgctttttggtattagctttatccctcaacttttggaacatctattctacgagtcatatcagaaaagttacccgtgggaactgtctccaaatacatacttcctctcaccaggacaacaaccacaggatcctctgacccatttactggtcatcaataagacagggtcaaccattgataactttttacattcactgaggcgacagaacatagctatagaagtggatgcctttggaactagaaatggcacagatgacccatcttacaatggtgctatcattgtgtcaggtgatgaaaaggatcacagattttcaatagcatgtaatacaaaacggctgaattgctttcctgtcctcctggatgtcattagcaatggactacttggaatttttaattcgtcagaacacattcagactgacagaagcacattttttgaagagcatatggattatgagtatgggtaccgaagtaacaccttcttctggataccgatggcagcctctttcactccatacattgcaatgagcagcattggtgactacaaaaaaaaagctcattcccagctacggatttcaggcctctacccttctgcatactggtttggccaagcactggtggatgtttccctgtactttttgatcctcctgctaatgcaaataatggattatatttttagcccagaggagattatatttataattcaaaacctgttaattcaaatcctgtgtagtattggctatgtctcatctcttgttttcttgacatatgtgatttcattcatttttcgcaatgggagaaaaaatagtggcatttggtcatttttcttcttaattgtggtcatcttctcgatagttgctactgatctaaatgaatatggatttctagggctattttttggcaccatgttaatacctcccttcacattgattggctctctattcattttttctgagatttctcctgattccatggattacttaggagcttcagaatctgaaattgtatacctggcactgctaataccttaccttcattttctcatttttcttttcattctgcgatgcctagaaatgaactgcaggaagaaactaatgagaaaggatcctgtgttcagaatttctccaagaagcaacgctatttttccaaacccagaagagcctgaaggagaggaggaagatatccagatggaaagaatgagaacagtgaatgctatggctgtgcgagactttgatgagacacccgtcatcattgccagctgtctacggaaggaatatgcaggcaaaaagaaaaattgcttttctaaaaggaagaaaacaattgccacaagaaatgtctctttttgtgttaaaaaaggtgaagttataggactgttaggacacaatggagctggtaaaagtacaactattaagatgataactggagacacaaaaccaactgcaggacaggtgattttgaaagggagcggtggaggggaacccctgggcttcctggggtactgccctcaggagaatgcgctgtggcccaacctgacagtgaggcagcacctggaggtgtacgctgccgtgaaaggtctcaggaaaggggacgcaatgatcgccatcacacggttagtggatgcgctcaagctgcaggaccagctgaaggctcccgtgaagaccttgtcagagggaataaagcgaaagctgcgctttgtgctgagcatcctggggaacccgtcagtggtgcttctggatgagccgtcgaccgggatggaccccgaggggcagcagcaaatgtggcaggtgattcgggccacctttagaaacacggagaggggcgccctcctgaccacccactacatggcagaggctgaggcggtgtgtgaccgagtggccatcatggtgtcaggaaggctgagatgtattggttccatccaacacctgaaaagcaaatttggcaaagactacctgctggagatgaagctgaagaacctggcacaaatggagcccctccatgcagagatcctgaggcttttcccccaggctgctcagcaggaaaggttctcctccctgatggtctataagttgcctgttgaggatgtgcgacctttatcacaggctttcttcaaattagagatagttaaacagagtttcgacctggaggagtacagcctctcacagtctaccctggagcaggttttcctggagctctccaaggagcaggagctgggtgatcttgaagaggactttgatccctcggtgaagtggaaactcctcctgcaggaagagccttaaagctccaaataccctatatctttctttaatcctgtgactcttttaaagataatattttatagccttaatatgccttatatcagaggtggtacaaaatgcatttgaaactcatgcaataattatcctcagtagtatttcttacagtgagacaacaggcaatgtcagtgagggcgatcgtagggcataagcctaagccataccatgcagcctttgtgccagcaaccaaatcccatgtttcctactgtgttaagtttaaaaatgcatttattatagaattgtctacatttctgaggatgtcatggagaatgcttaattttctttctctgaacttcaaaatattaaatattttcttatttttttgattaaagtataaattaagacaccctattgacttccgggtaaggggagtcaattgattacccagcagcacagtatttgctttttataattccctttttaaatacttgttcttaattgactggttttccttttctgtcatttttcagagtttagattgtgagtccatgttttgtctgttgtgcctataaaggaaatttgaaatctgtatcattctactataaagacacatgcacacgtatgtttattgcagcactgtttacaatagcaaagacttggaaccaaccaaaatacccacaaatgatagaccggataaagaaaacgtgacacatatacaccatggaatactatgcagccatagaaaaggatgagttcatattcttcacagggacatggatgaagctggaaaccatcatcctcagcaaactaacacaggaacagaaaaccaaacaccgcatgttctcactcataagtgggaattgaacaatgagaatacatggacacagggaggggaacaccacaccctggggcctgttggggggatgggggctaggggagggatagcattaggagaaatacctgatgtagatgatgggttgatgggtg

SEQ ID NO: 736270 - DNA, 266 bp, Homo sapiens
attcacaatgaatgtgaaattaaaagcatgatgtagtagtgacccaaaaggaatgtgaattctcctccagaacatgcagagacccatggatgaactgtgtttctagatttttcctccagctttcctgagagtaagttaacctctaaaattgtggttattttgcatatagaaatataacataagactataaataggcatgccagacgtttaggtagaaaccattaaaagcagtaagttattaacgagtcattttgactttttaaatc

SEQ ID NO: 736271 - DNA, 510 bp, Homo sapiens
acttactgctcattttacagatttctcctgattccatggattacttaggagcttcagaatctgaaattgtatacctggcactgctaatagtaagaagactttttttttcaacattcttgcatgagggaacacaacttttgtatgttttgagtttctctgaattgcatcaaattaagaaggtttggacattttaggcatttgaagcaacacacacatgcacatgcatgcatgcgtgcacacacacacacacacgatggcttttaacctggacccccccccttttttttttttgagacagagtttcactcttgttgcccagactggagtgcaatggcgctatctcagctcaccacaacctccacctcccgtgttcaagcaattctcctgcctcagcctcccaagtagctgggattacaggcatgcaccaccatgtgtggctaattttgtatttttagtagagatggggtttctccatgttggtcaggatggtctcgaacttccgacctcatg

SEQ ID NO: 736272 - DNA, 666 bp, Homo sapiens
tcagccttgtaaaaatgaatgctatcaaatcgaatttttatataatcaaactctttaaatcaattccaatattgaaatcattgcatttatagtgatactaattgtgattgtctttctttttccctagccttaccttcattttctcatttttcttttcattctgcgatgcctagaaatgaactgcaggaagaaactaatgagaaaggatcctgtgttcaggttgagaaaatcaaatcgaatttcatgtttcattttgatattcattctttaaggactttttaatgtgctgaattaattaagtaaaagacacttcacaggatggtttttaaagactgtgatatacaaaattcttataacccataatataggaatatatactgagcttacaatctagagagagaaaccatattagcacacacgagacactggaaaattaaggcagaccataattttactatagaggaaagttatgtgtaagaggtggaatctctaaaataatgggtaaatatagataagcattgggaaagttaatccaatccgggaaggaagaatagtttgtgcaataaaaccaaggatgagatgaaggcaccaggagctcctttgtaggcttatgttgggggatgatgaaaaatgaaagtgaggctagatattggaggatcttgaaac

SEQ ID NO: 736273 - DNA, 235 bp, Homo sapiens; identical to SEQ ID NO: 397085

SEQ ID NO: 736274 - DNA, 485 bp, Homo sapiens
agtaaaagacactcaaatcagcaatcttgagttcaatcacggtcatggaattggtagtaaagtctacactacaatggataaccatggaatgtctgccttttaaagtgggcttttaccaccttttccccaaagttaagtgattactgatttgcatttgtgcacttagcacctgtgtgtgtgaagagaagggcatctctgaagtacggcttacatgcatatacatatacgtgacatttgggatagaatctaagaatgaacttattttgcataggtgattttgaaagggagcggtggaggggaacccctgggcttcctggggtactgccctcaggagaatgcgctgtggcccaacctgacagtgaggcagcacctggaggtgtacgctgccgtgaaaggtctcaggaaaggggacgcaatgatcgccatcacacggtacctgggactggggggcactcccctttgctggaggggatgttgtattaata

SEQ ID NO: 736275 - DNA, 1150 bp, Homo sapiens
atttcggaacgaggtgaaaatgtatatgaaattcaaattttgttgtccataaatacattttattgaaacacagccacacatcactaacatattgtttatgactgtgtttgtgctacaatggcaacagaaactgtacagcctgcaaagctgaaaatattcacaatgtggctatttagaaaaaaagtttgctgaaccctgctccattatctacttttttgtccatattatttatacaataaccttactgaaaaacttgtccagagctgagaaatcagcatagatgtcttcccagaaaagctctctctggaaacctctcccagtgacatccattgtatcatccagctttacttattttgcaatttagttatcaattttcctctctacttgtttattgcctaccttcttttatattatgtgatcctgagggtaggagataagttagctattgcattttcttttcctttacccttgataaatggtgagcttcacaaatcatttgctgaataaatgaatcaaggaagtgatgaagtaacaacattctaactgacggctttgtttctctgctaggctttcctggggtttgatgtatgctggcttcatccttatcatggccactttaatggctcttattgtaaaatctgcacaaattgtcgtcctgactggttttgtgatggtcttcaccctctttctcctctatggcctgtctttggtgagttggttaatttcatctaagtcttttattctctttctctctctctactgccaataatttatcactaattctggtctcacctcttttgttctctttgtagtatttgcatgaaacagtgtctaggggtggaaaaatataaaatatacttttataatataaaattccttttttgtgctactgttctcacagaattatataccagctgaagtctttctcttttctcagataactttagctttcctgatgagtgtgttgataaagaaacctttccttacgggcttggttgtgtttctccttattgtcttttgggggatcctgggattcccagcattgtatacacatcttcctgcatttttggaatggactttgtgtcttcttagcccctttgccctcccttcattgtactttatcattaaaaatcaacttccaaaaaaaaaa

SEQ ID NO: 736276 - DNA, 3441 bp, Homo sapiens
attcacaatgaatgtgaaattaaaagcatgatgtagtagtgacccaaaaggaatgtgaattctcctccagaacatgcagagacccatggatgaactgtgtttctagatttttcctccagctttcctgagagaaacaggtcaaaatgagcaagagacgcatgagcgtgggtcagcaaacatgggctcttctctgcaagaactgtctcaaaaaatggagaatgaaaagacagaccttgttggaatggctcttttcatttcttctggtactgtttctgtacctatttttctccaatttacatcaagttcatgacactcctcaaatgtcttcaatggatctgggacgtgtagatagttttaatgatactaattatgttattgcatttgcacctgaatccaaaactacccaagagataatgaacaaagtggcttcagccccattcctaaaaggaagaacaatcatggggtggcctgatgaaaaaagcatggatgaattggatttgaactattcaatagacgcagtgagagtcatctttactgataccttctcctaccatttgaagttttcttggggacatagaatccccatgatgaaagagcacagagaccattcagctcactgtcaagcagtgaatgaaaaaatgaagtgtgaaggttcagagttctgggagaaaggctttgtagcttttcaagctgccattaatgctgctatcatagaaatcgcaacaaatcattcagtgatggaacagctgatgtcagttactggtgtacatatgaagatattaccttttgttgcccaaggaggagttgcaactgattttttcattttcttttgcattatttctttttctacatttatatactatgtatcagtcaatgttacacaagaaagacaatacattacgtcattgatgacaatgatgggactccgagagtcagcattctggctttcctggggtttgatgtatgctggcttcatccttatcatggccactttaatggctcttattgtaaaatctgcacaaattgtcgtcctgactggttttgtgatggtcttcaccctctttctcctctatggcctgtctttgataactttagctttcctgatgagtgtgttgataaagaaacctttccttacgggcttggttgtgtttctccttattgtcttttgggggatcctgggattcccagcattgtatacacatcttcctgcatttttggaatggactttgtgtcttcttagcccctttgccttcactgttgggatggcccagcttatacatttggactatgatgtgaattctaatgcccacttggattcttcacaaaatccatacctcataatagctactcttttcatgttggtttttgacacccttctgtatttggtattgacattatattttgacaaaattttgcccgctgaatatggacatcgatgttctcccttgtttttcctgaaatcctgtttttggtttcaacacggaagggctaatcatgtggtccttgagaatgaaacagattctgatcctacacctaatgactgttttgaaccagtgtctccagaattctgtgggaaggaagccatcagaatcaaaaatcttaaaaaagaatatgcagggaagtgtgagagagtagaagctttgaaaggtgtggtgtttgacatatatgaaggccagatcactgccctccttggtcacagtggagctggaaaaactaccctgttaaacatacttagtgggttgtcagttccaacatcaggttcagtcactgtctataatcacacactttcaagaatggctgatatagaaaatatcagcaagttcactggattttgtccacaatccaatgtgcaatttggatttctcactgtgaaagaaaacctcaggctgtttgctaaaataaaagggattttgccacatgaagtggagaaagaggtacaacgagttgtacaggaattagaaatggaaaatattcaagacatccttgctcaaaacttaagtggtggacaaaataggaaactaacttttgggattgccattttaggagatcctcaagttttgctattggatgaaccgactgctggattggatcctctttcaaggcaccgaatatggaatctcctgaaagaggggaaatcagacagagtaattctcttcagcacccagtttatagatgaggctgacattctggcggacaggaaggtgttcatatccaatgggaagctgaagtgtgcaggctcttctctgttccttaagaagaaatggggcataggctaccatttaagtttgcatctgaatgaaaggtgtgatccagagagtataacatcactggttaagcagcacatctctgatgccaaattgacagcacaaagtgaagaaaaacttgtatatattttgcctttggaaaggacaaacaaatttccagaactttacagggatcttgatagatgttctaaccaaggcattgaggattatggtgtttccataacaactttgaatgaggtgtttctgaaattagaaggaaaatcaactattgatgaatcagatattggaatttggggacaattacaaactgatggggcaaaagatataggaagccttgttgagctggaacaagttttgtcttccttccacgaaacaaggaaaacaatcagtggcgtggcgctctggaggcagcaggtctgtgcaatagcaaaagttcgcttcctaaagttaaagaaagaaagaaaaagcctgtggactatattattgctttttggtattagctttatccctcaacttttggaacatctattctacgagtcatatcagaaaagttacccgtgggaactgtctccaaatacatacttcctctcaccaggacaacaaccacaggatcctctgacccatttactggtcatcaataagacagggtcaaccattgataactttttacattcactgaggcgacagaacatagctatagaagtggatgcctttggaactagaaatggcacagatgacccatcttacaatggtgctatcattgtgtcaggtgatgaaaaggatcacagattttcaatagcatgtaatacaaaacggctgaattgctttcctgtcctcctggatgtcattagcaatggactacttggaatttttaattcgtcagaacacattcagactgacagaagcacattttttgaagagcatatggattatgagtatgggtaccgaagtaacaccttcttctggataccgatggcagcctctttcactccatacattgcaatgagcagcattggtgactacaaagtaagaagagttaaagtcttcacatgttttttatatctagagaacccttcccacacccttacgactataaatttacatgcaagtggtaaatctaatttttgtacttgatgcaatgaataatcaagcactttaataataattgtcaaatatg

SEQ ID NO: 736277 - DNA, 1769 bp, Homo sapiens
  misc_feature (744)..(744): n is a, c, g, or t
gagatagggtctgtctctattgcttaggctggagtgcagtggcacaaccatggcttactgcaaccccaacctcccaggctcaagcaatcctcttgccttagcctcctgagtgactggaactacaggtgcaaatggccatgcctggctaatttttgtattttttatgtagataggctctcactacattgcccaggctggtcttgaactcctgggctcaagcaatcctcctgccttggcctccagaactgttgggattacaagcatgagccaacacacctggccagcatatttttaataaatagcagtctgtgttcccactgcagacaactgaaccagagtttctaaggatggggcaagggcttgggtattttgtaaccatgttgtggttatgcttatatgcagcccaggttgaaaagcatgacgtagttcttgcacatcaaagatttttattttgatttttttctttttgtattcttttcaacattgtattaacatacagtgcacatctaagatttaaagatcttctgagacctgttaccttaaacttttgctccatttagtaaagctccttcttccagccagcttgtttcagaaactacacaaatcatgaattagaacaaaaacatgtatacaaaacctttgattgttagttggatatctttgctatttcattatttactaggcgttgtatggcttttagtgtgctcattttacccttgtgcttatgtctgatcagctatttgncagcagatactcttctagatttgaaatttctttcaatcttttttgtagataagtctagataagtgaagcagtgggaatgcagaaggaacaaagaaatctgtaactggttgtgaggtgtaaacatcactgcactcagaccatagatttgaagtttcttaacctcaaaactctattttagctccaactagtattattttaaaataggtggtttagcaacacatatatccaaaaatggttagattctccagatatccagaatctaaaccatcatcagagtaaaaaggtaagaatatacttcaaagttttctcaagacaatcctggccagaatgcttaagtttgagtagtcaaatacttaacaaaatgaatataaaaaatttagcactagcaactaatcaacaaacatgaatataaatgctttagtatgaagaagccattgatagttgtaataactttgcattgttaattggtatcttacaaattacaacttatgcaaacaaaattatgttggtctataaatattggttaaatgaacatgtttcctgtacatttataaattctccatatgaaaaatactcatctgaaatgctaaaagcaaaaatgttatcagtagaaaagcagctattttatgactttttaaagcaagttatgtctgttatttttcacctgtttcaaaggaatgcataagatgcttttataagtgtttttgttcatgtataacatacttagcacttactacagatgaatgctgtagactacttaatttcaaatgcctacattttcaaaacaatgaagacatattactgaccataaaatggaaatagcaaccattcaaaatagttgaacatttattgtgtcatttactctacggaggcaatctcattattaaagaagttatagccagtttatgtgcatatgtaggtgcaagtatctataatgtacattataatttgtaactatcaaatatgtaagtgtaatgaatatcggtttattttgaatacaagcttatataaaacaaaaaaaaaaa

SEQ ID NO: 736278 - DNA, 10884 bp, Homo sapiens
agccgctgagaggctctgcgtgtgcgtgtgcgcgggtgacgccgtgtgtgtgcgagtgtgtgtgtgtgtgcgcgcgcgcgtgtgagagagagaaagggagagagagagggggactctgtgtgagggaaagaaaacaatttctcctgctctgcagcttctgttcaggatcaatgtgactctaagaacaaatggatgaatgaatatccatatgaagagaaaaacaataaagaatatcaacacctttgagaacagaatgttaatgcttgatgggatgccggcagtcagagtcaaaacagagcttttggaatctgaacaagggtctccaaacgtccacaactatcccgatatggaagccgttcccctgttgctaaataatgtgaaaggggagcccccggaggactcgttatctgtagatcacttccaaacacaaactgagccagtggacttgtcaataaacaaagccaggacgtcccctactgccgtttcatcctccccagtttccatgacagcatctgcctcctcaccttcttcaacttcaacctcttcatcgtcttctagtcgtctagcctcatccccaactgttatcacatcagtatcttcagcgtcatcttcgtcaacagtattaactccagggccccttgtggcctctgcatctggtgttggaggccagcagtttttgcacattatccatcccgtaccgccttcaagtcccatgaatttacagtctaacaaactgagtcatgttcaccgcatccccgtggtggtacagtcggtgcctgttgtctacacagctgtaaggtcacctggaaatgtgaacaacactattgtcgtgccgcttttggaggatgggagaggccatggcaaagcacaaatggacccccgaggcctatctcccagacaaagtaaaagtgacagtgatgatgatgacctgccaaatgtgaccttagatagcgttaatgaaactggatctacggccctttccatagccagagcagtacaagaggtacatccgtccccagtatcaagggtccggggcaatcgaatgaataatcaaaagtttccttgttcaatttcaccatttagtattgagagcacaagacgccagagacggtctgaatccccagactccagaaaacggcgtatccacagatgtgattttgagggatgcaacaaagtgtacacaaaaagttctcacctgaaggctcaccggaggacacatacaggagagaaaccttacaagtgtacctgggaaggctgcacctggaagttcgctcgttcagatgaactgacgaggcattaccgcaaacatacgggagtgaagccattcaagtgcgcggactgtgatcgcagcttttcccggtcagatcatttggccctgcaccgccggaggcatatgttggtgtgaggaatgctacctgtccagctgagcgtaagagctggatctcttagcggcacccaattcagcagggctgaatccccttcacagtgttaacacaaaagggcatcaccatcccacgatgtctgaaaccagagcaggaaaaagaaggcacacttcttttggtctgaaggtaacccccatcatgactagacgagaaccgtctttacgcgggcctgggagctcagtgacataaatgctgaagagacaggcattgttttccgtgctgtgtcctctgccatttaaagatgtttgtagcttgtacattttctgagctgtcagacattttgttattgataccttaaaggtcacctaccacaaattgatggctagagcaagaccttttaaatttggatgaatctcccatcatcccatcccttaacccctttttacagaaattttagttacaatctgagtaagctagaacacacatccaatctgttaccagcaagcagcatgaaagtagaaacgaagaagcagatggagaggtcccattacctgcaaagaaagggcactcaggcagccctttgcaatcgcgatggcagccactagatatcactctcaacttgtcattctgccatgccctgaagaaaaccaacattgaatctttcatttgtttgtcgttgattgtttttgttttgtttcgattctgttttgttcatctgttcgagcagaggggcagttgaagtctcgtcctggtctctgccctggcatggactggcacagaggtgttctgtagttgaataggaagagcctgtctaaaaaactactgccccacttcaaattgcagtgttctgtcacctaggcatcatctcttcctgcccctagtatttgattacaaggaaccaggggaaaaaaactttcttagacacactggcaccaaggtaagaggtggggctgcccaggcaaagtcagtgaacatgaaaactcagacaaagcagagatggaaataatgcgcctcttgaggagaaaagcaataatgaataaaaggactttcctacaataacttcactgaggactcacgttaccaattttcatacttactaaagggattgtaaaaaacaccccagcattttaggtgtcttggttccatttacagcactgaggtaatctttctgctgtttgttgtcctgcttggttgagtaccacaattaaagattatgctccccttttcttgtttgaaaacagttatttggtgactagaaaggcaagggaggcatagccgggaattaactcttcggttaatgggtcagttctccttggaactgaatcagtggaaagagaatgcttcccatagaaagcccgacatggtgctagtttcctctcttggagagccaaggataagtgactctccaataggttcttctataccgatttcattttctaaactgtatcaggacccaggtgtcctgcattggcatctgcagggatattgaacccactcatcctgtgcagaggatgagaggaaggtgttagttccatcagccccataaaattatgaacctttttgcaactaggaacatatacagtaaacaagcaatacatcaccaacgagcattctttcagaaaaattaccatatttttgtccccaccacaagctgggtttttttccagctttctgtggctgaggggctggtgagattttttgttgttattgttgttgttgctagaattttttatagcttagatataaaaggtctccaacaaagacctttgcaatatattttaattaccaaccacttgatttgggaattgcacatattaccctcacaatattactagcctcatttttaaatgtctggacattctgaaataatttccgggttacagaattaccctttttaggatcatcttctaattcagataatcttattctgatgaagcgagaactatgaacgttgaaacaaggacaatttgtgttggatggtattcaaaaggaattttttaaaacattaagcaacagtgtaatgattttcaggtcaaattatggcttcacaaatatgtgctctatattgtctgccaggtctcaaaaattcatcaagcaatttccctccaacaagggctgcagttctagtgataaatagcatctttagctgcacagtctactactcatcaaccagtgggttttttttagcacctggaaagtttttttgtactatatgcaactcctacttcacattgcctgtgaccattcagaatagaaaaaggtctgttgatgcatgccagtgctggttactagtcagtgacagagaacacagagagggacaaacacagccatgaaccccctggcactagtaccagcacctagttggcaagtagtgggtgcatctctcaagtgaagtgtagatttgtatttagtcctgcttgctctcataaaaagagccagttcttttctctgctgaaagatgtcttgagagtattacaggtagacttggtttttagaattcataaaactgacaggcaggggaatcttcctgagtgacagcttggtttaaatttagcacagaactagatgagttgcacttttctaataacataggatggatttggggaagggaacattttccctcatcctctgaaagtggaaaccagactgagatggtaagttaactgataaaacctgtcagcattccatcattttccccttttgacgtatcagtacttctaagaagggatctaagcacaattaagtgaattgagtccctggtctagcctcaggaactgaaacttctttggggcttgtcttgagacgtggcaaattctccttggtgagttttctaaaagtatttccccatggaaaggagaaagtggtttgggacagaaagaaatggaatgtcttcagtcatggaagagcctccatttcatctcatgtccatttctagcctctttcaaaaagcacagtgcatcatgagcaacagaaaagcagtagaatcctaaaggacataacagttgttccgtaactagaagcattctttgattttaaatttgaagctgttcagtttgcagctggggatatgtgcatggttgggaacttatacacatagagccattaactacttaagcagctgcagtagacctgattttctgtttgcagtatagagattgatttcaagggagttacattatttgaaaagttatgactttcagcctttgaggttttaagaatcccttttcatggtctgatcttaagttgtttgaaaaaagattcacgcttctgcatccacctctgccctcattctgtcaattgtgtgtggactctgagaagcctgcttgataacttgtcttaagttctattaaggcagttagactgagatttctaatgacttcaccataaagattatacttctgcctggcgtcgtttctataaaacactataggacatttgttttcaaaagcagttgagtaacagcaacataaaccacattttttaaaaaaatgagcacttttcattcacttgaaagcttaagtgggaaaaaggaagatgattgtcaggggaaaaacttacaaaatgctacagtgtttacaaatgccagttccaggtgattagaaaggccgttttcattatggttcaaatttggaatagcttatgcaaagattgtgttcatttttatacaattctttttaactttaaattgccatctgtgttttaaacataattctgcactttggaatcagttcattagaatgataacatttatatggataaagatgcagtattccttattctgtacttgatttattatacttaccaaagctgcaactgaataaatctggtgaggtgaggccttcaaaatgtattaatacgcctttgttatgttgttatgactgcttagaaatgtagccatgatgttgttctaaagatgtcttaacatttatagtgaggattgacagaaattaagcagtgttaagaataccagcatccatgttacagtctgcgtataagggactgaatgtgaggtaactcttatgaatcataataggcccagaaagccttaatattcatagttcataatccagtctcagattttgctcttcaatgttgcctgtaaacttagcaggtaaatgtattctagtataaaacatcattgaccaaatctcttcctttagtttttctgaggtagtgcatcccattaaaaaagtctcttcaattagatttggctttagtttagaaaggggtttggtaagtcatgtcttccatatgacatttctactcatccccacactgccttccacttaacctgtacagacagccccaacacatgcacatgtgtgtacacaactgtatatgcagcagccagtgggctaacaaatatcagcaaagaacttttttaaaaagaatttgtaataatccgtgctgtctagaaatgtgagttacttaccttattaggaaaccggcttataatactatatatgactctgcctgcattttatagttaagaaatgtacataaaaattgctatattttcacagtttcattataatgtctgtttagtaacccatgtccactgatactttaaatatgctaattactgagcaattgcaatagaaatccagattttcataagaaaatgaaatagaaggatactgcatctttaaaaaatagagtgaagatattttactgtattcgtaacatatgtgatagtggaaaaagtattttcaaactcacaaattttacagaggttgtaaatagtttgatgaagtatgttgggaaagagagcttctagttttcatcacaataaaaagaaaaaacttgttcagatatgccttgtatatcttacacacaatgagtgaaattgccatgggaactctgtccaactttgtcagagcatgctcttcgtgttctgttcaaaatagagtggccacttgtcatggtttagccaggatggtttaaaatataatgaagtcattttaagttgcagacaactgattccaaactagtaatgtcttttcctgaaaagggcaaaacagctgcacaggattttgcttgtactaaagaggagcatcttacaattgttctcttttctcagttatctccctcctcaacagagtgtgaacaaccatacaggtgtttattcttgttttattccaggagactgcttttaggtataactacatgttgaaagattaagtgctgtgcatatggccacgtgttaaaggaatctatactcgcaataggaataagctaatgcccattttcagaaataaattaaatgctgaaagtgcctgtcagtaaaccttatgaccaatgagatattcctatacttttacacagcaataattcttaataagactgggttttttcctgcacatgtgaacacacacacacatacacacagagagagtaaatacatacacatagtaaatcaaatctgttcacatgcccacaaaaaacgcttttatagctttcaaatatacctaatcttgtttacattaacatttcttaatttgatctttctaacttgcagaacgttaagaacacaaatctgaacattaagtttatcttcagtgaacactattgcatatggtaattataatttccagataaaaagttgactgtcatttgccccaaacttatgaaacagtatgtatgattcaaaaagttttgctcagttaaaaacaccaatttatttggcgcaaaagactgaaggatatttgtttgcttgttcattttatccactcatatcaaacgcacaaattcatctttacatttcttcattcccctttcccctaatatttcctattatcatcttaagaatcattttggaatgaatattgacagaatcatttctccccaaaaagtctgttgaagtaccactgacacttagtaagcctagcctttaaccatctttgcagttagtcctaaaaattaccagatgcacattcagaagctcacaggttttttcctgtaattactgtactgctaaaagtggagtcatggatagaaatatacaatgagactatatgaatagacatgaaccctggaaattctccaaccctgccatctcagagcacaaattcacccaaacaagctactgaggctatcagtaaaattatactcatggagagtcacacatcgggtaagggcaattttaaaagtaggactgtgattaaacattcaggctttagacttccatgatggactcagaccacaggcctcaaaaaaacatccactgttttctcctcccaatgttagaaagaagaaaagggagaaggaaatgtaccaggataagggggtaaaataaccaattaagtgtcaaaggaaagctgctgggttccttaatctcactgaagtcaagtcttctgactgggcttctttccatgtgttgtctgaaaaaactaaagtaccttgaaaggttacacattcagcaaaccatgaagataatagctattctttattaaacactgtgtgccaagcaatagactaggcaatttttagatacgttacctgcaacctgtacaacatttctacactttatggatgggaaacggagacatgggaagtgtggctgagttgttcatggatgtagaaatagtaaacggcaaagtaggaaagtgaaaccgcctatctctgacctggaggtctgcctgtatctttcccactccaccacactgcacgtgggtgtcccgaaaccaccttcccagattcctgactctcagtaattttattatggacaacatgcatgagtagtcatcatatttttcaagtgaaatatcgggacatgatataacacatgacttaacaatggtactgaatatttgaaatcaggcctttcccggaaaatcatgcatgaaggatcattataaacaaacaatagcaaccagttgtctccccgaacttgtcacttttctcataaatgtctggcctggagctccaaaatcatccaaatacttagtagcattttagcctgagtacactttctcagttcctcaactctttgtatacctttccaccaatatagacattctagaatctgcttcagatgcatttgaaattttcacccccatggaactagtgattaatatcagagcccactcttgcagttggtaatggggtggcaatcaaacgttcagatgatgataaaggagagataatggataattctttttcagagttctcacttaacagctctgttgtggaatgttttaaatagtcttataaataatttgtttatagtattgttgttagtttaattgaattttatgtaagaagctgtccaacatcagagaaatgaaattcctcccactttctgtgtagaacaaggtctctgacagtattgattcatggaagtactaatggacttagaaaacattaagagaatgtcatttctcatagtgtttctgtttctgaaaatgaatctcctgaattattatctttctccctgttacttggctggggaaagagatagaagctgtataaacaaattctcttccatgctcaaagcaagtgttccatgtgcacaacctgctgcagactggggcccttctcagttaattgggtttcacaagcaataatttctccacaacaaaaaccacaacttgaagtgagttgaaaagagatcaatagtggaaacagtcgcctcagtactttttctttctggatttcatctctagaaatttgaagtgtttgagacagagtccaccctttgtgcaaggcgagaaccaatgaatggactccttgtgtgaattattgcatcttcttccaaagcaggttcatcaagactttcacagagattcatttttgttgagaagtaagggttaataggaggatagaatttggatccaaatctagtgataaaagtgtccaagcaatcaaaaagtaagatattttagggacataccaacatcttccctttctgctaatttcatgctccaaagatatggcaaaaaaaaaaatcataaaaagtgcttttgccctacttgtgttctagttttcccatggcagaattttgtaattacatccagaatatagtgtatattttgttcctcaaactttattacattggatggatattgttgaactggggcactggtgcctatattcaaggctctttcctatcaacgtgtctgtccacgatttgttgtgtttaaagcttcattttgaaaaatcactgtccccctgtggggtagtgactgtattgttttgttcatgtctatgtgggacacattgcatcacatggcaaaccaactctctgtggatgtgagataagtacttataaaaccagcttgaaaacatcgtcttatgtattatgtcatcctgcatcataatgcaattatgtgtatcataacatgctcatttaaaaaaagagaaaccagcaaattcatgtttgtccatagaagaatgtactcagaactttgtgttgtgaaacgatgagaacagaccacctttaagatacccacctgccacttaaaatgacttagttataattagtagtagtctagacgttgttcttggtgtgtgggggtcaattctaacgtcatgttcttttgaataaatctctcagtcatatttgaaaaaaaaatacatgggaataaagaaaaatatcatctttggccaaatcaagcaggcatcttttttcttttccttgacgtttagctcattatacgtggtgattggatcacgagatctgtccgtgtgaaaatacagaaacatcctttagtttacaaaacagttattctaggcttgaagcctctgaacagcaaattgaatagatgggctgcatctgatttgctttatggatgtaattttacaaaacactcttgggtctctgaccccagggagttaagagtgcccagaggaggtcctacacattaaaggataaagccccccagtgatgctggcaagcaaatgtgttgagttcttaaatcttcatttggttttctgttcaggattttaattgcaaatgaatttatttctccagtttatctaaagacctaatttcccaatagtttcctctgcatttatatactctgtagtgtttaggcaaccctgttataagtttattaatattatgtaagtgttgttcttgtatttatgtatagtgtatgtattgtaaatatactcagagcttttttccttttactgtaaaatggtgatttttttgccctatgataatgtaaagggagaccctcctaatgagattctctcagaggatgattattccagtctattctcagagatttaaatgaacaagtgttattgtttttaatggtgtctcagacatattctgttggtgcattgcttttctgtattcaactttcctatgaattgagctgtgaactgaaatagagtttaaacctttaactgtatgcatttgtataattatctgaatgaaggcatgaaggttaaataaagcattttgtatggaacaaaactccctaactgactcagacactttggaaatcatagttattaaccattctaattaaacctttgttatgaaaagttttac

SEQ ID NO: 736279 - DNA, 1586 bp, Homo sapiens; identical to SEQ ID NO: 14329

SEQ ID NO: 736280 - DNA, 538 bp, Homo sapiens
gctgcccctactactactccattagcggccgtcgatttcctctgcatttatatactctgtagtgtttaggcaaccctgttataagtttattaatattatgtaagtgttgttcttgtatttatgtatagtgtatgtattgtaaatatactcagagcttttttccttttactgtaaaatggtgatttttttgccctatgataatgtaaagggagaccctcctaatgagattctctcagaggatgattattccagtctattctcagagatttaaatgaacaagtgttattgtttttaatggtgtctcagacatattctgttggtgcattgcttttctgtattcaactttcctatgaattgagctgtgaactgaaatagagtttaaacctttaactgtatgcatttgtataattatctgaatgaaggcatgaaggttaaataaagcattttgtatggaacaaaactccctaactgactcagacactttggaaatcatagttattaaccattctaattaaacctttgttatgaaaagttttac

SEQ ID NO: 736281 - DNA, 1615 bp, Homo sapiens
  misc_feature (41)..(42): n is a, c, g, or t
ccatatctttggagcatgaaattagcagaaagggaagatgnnggtatgtccctaaaatatcataaaaagtgcttttgccctacttgtgttctagttttcccatggcagaattttgtaattacatccagaatatagtgtatattttgttcctcaaactttattacattggatggatattgttgaactggggcactggtgcctatattcaaggctctttcctatcaacgtgtctgtccacgatttgttgtgtttaaagcttcattttgaaaaatcactgtccccctgtggggtagtgactgtattgttttgttcatgtctatgtgggacacattgcatcacatggcaaaccaactctctgtggatgtgagataagtacttataaaaccagcttgaaaacatcgtcttatgtattatgtcatcctgcatcataatgcaattatgtgtatcataacatgctcatttaaaaaaagagaaaccagcaaattcatgtttgtccatagaagaatgtactcagaactttgtgttgtgaaacgatgagaacagaccacctttaagatacccacctgccacttaaaatgacttagttataattagtagtagtctagacgttgttcttggtgtgtgggggtcaattctaacgtcatgttcttttgaataaatctctcagtcatatttgaaaaaaaaatacatgggaataaagaaaaatatcatctttggccaaatcaagcaggcatcttttttcttttccttgacgtttagctcattatacgtggtgattggatcacgagatctgtccgtgtgaaaatacagaaacatcctttagtttacaaaacagttattctaggcttgaagcctctgaacagcaaattgaatagatgggctgcatctgatttgctttatggatgtaattttacaaaacactcttgggtctctgaccccagggagttaagagtgcccagaggaggtcctacacattaaaggataaagccccccagtgatgctggcaagcaaatgtgttgagttcttaaatcttcatttggttttctgttcaggattttaattgcaaatgaatttatttctccagtttatctaaagacctaatttcccaatagtttcctctgcatttatatactctgtagtgtttaggcaaccctgttataagtttattaatattatgtaagtgttgttcttgtatttatgtatagtgtatgtattgtaaatatactcagagcttttttccttttactgtaaaatggtgatttttttgccctatgataatgtaaagggagaccctcctaatgagattctctcagaggatgattattccagtctattctcagagatttaaatgaacaagtgttattgtttttaatggtgtctcagacatattctgttggtgcattgcttttctgtattcaactttcctatgaattgagctgtgaactgaaatagagtttaaacctttaactgtatgcatttgtataattatctgaatgaaggcatgaaggttaaataaagcattttgtatggaacaaaactccctaactgactcagacactttggaaatcatagttattaaccattctaattaaacctttgttatgaaaagttttac

SEQ ID NO: 736282 - DNA, 10832 bp, Homo sapiens
agccgctgagaggctctgcgtgtgcgtgtgcgcgggtgacgccgtgtgtgtgcgagtgtgtgtgtgtgtgcgcgcgcgcgtgtgagagagagaaagggagagagagagggggactctgtgtgagggaaagaaaacaatttctcctgctctgcagcttctgttcaggatcaatgtgactctaagaacaaatggatgaatgaatatccatatgaagagaaaaacaataaagaatatcaacacctttgagaacagaatgttaatgcttgatgggatgccggcagtcagagtcaaaacagagcttttggaatctgaacaagggtctccaaacgtccacaactatcccgatatggaagccgttcccctgttgctaaataatgtgaaaggggagcccccggaggactcgttatctgtagatcacttccaaacacaaactgagccagtggacttgtcaataaacaaagccaggacgtcccctactgccgtttcatcctccccagtttccatgacagcatctgcctcctcaccttcttcaacttcaacctcttcatcgtcttctagtcgtctagcctcatccccaactgttatcacatcagtatcttcagcgtcatcttcgtcaacagtattaactccagggccccttgtggcctctgcatctggtgttggaggccagcagtttttgcacattatccatcccgtaccgccttcaagtcccatgaatttacagtctaacaaactgagtcatgttcaccgcatccccgtggtggtacagtcggtgcctgttgtctacacagctgtaaggtcacctggaaatgtgaacaacactattgtcgtgccgcttttggaggatgggagaggccatggcaaagcacaaatggacccccgaggcctatctcccagacaaagtaaaagtgacagtgatgatgatgacctgccaaatgtgaccttagatagcgttaatgaaactggatctacggccctttccatagccagagcagtacaagaggtacatccgtccccagtatcaagggtccggggcaatcgaatgaataatcaaaagtttccttgttcaatttcaccatttagtattgagagcacaagacgccagagacggtctgaatccccagactccagaaaacggcgtatccacagatgtgattttgagggatgcaacaaagtgtacacaaaaagttctcacctgaaggctcaccggaggacacatacaggagagaaaccttacaagtgtacctgggaaggctgcacctggaagttcgctcgttcagatgaactgacgaggcattaccgcaaacatacgggagtgaagccattcaagtgcgcggactgtgatcgcagcttttcccggtcagatcatttggccctgcaccgccggaggcatatgttggtgtgaggaatgctacctgtccagctgagcgtaagagctggatctcttagcggcacccaattcagcagggctgaatccccttcacagtgttaacacaaaagggcatcaccatcccacgatgtctgaaaccagagcaggaaaaagaaggcacacttcttttggtctgaaggtaacccccatcatgactagacgagaaccgtctttacgcgggcctgggagctcagtgacataaatgctgaagagacaggcattgttttccgtgctgtgtcctctgccatttaaagatgtttgtagcttgtacattttctgagctgtcagacattttgttattgataccttaaaggtcacctaccacaaattgatggctagagcaagaccttttaaatttggatgaatctcccatcatcccatcccttaacccctttttacagaaattttagttacaatctgagtaagctagaacacacatccaatctgttaccagcaagcagcatgaaagtagaaacgaagaagcagatggagaggtcccattacctgcaaagaaagggcactcaggcagccctttgcaatcgcgatggcagccactagatatcactctcaacttgtcattctgccatgccctgaagaaaaccaacattgaatctttcatttgtttgtcgttgattgtttttgttttgtttcgattctgttttgttcatctgttcgagcagaggggcagttgaagtctcgtcctggtctctgccctggcatggactggcacagaggtgttctgtagttgaataggaagagcctgtctaaaaaactactgccccacttcaaattgcagtgttctgtcacctaggcatcatctcttcctgcccctagtatttgattacaaggaaccaggggaaaaaaactttcttagacacactggcaccaaggtaagaggtggggctgcccaggcaaagtcagtgaacatgaaaactcagacaaagcagagatggaaataatgcgcctcttgaggagaaaagcaataatgaataaaaggactttcctacaataacttcactgaggactcacgttaccaattttcatacttactaaagggattgtaaaaaacaccccagcattttaggtgtcttggttccatttacagcactgaggtaatctttctgctgtttgttgtcctgcttggttgagtaccacaattaaagattatgctccccttttcttgtttgaaaacagttatttggtgactagaaaggcaagggaggcatagccgggaattaactcttcggttaatgggtcagttctccttggaactgaatcagtggaaagagaatgcttcccatagaaagcccgacatggtgctagtttcctctcttggagagccaaggataagtgactctccaataggttcttctataccgatttcattttctaaactgtatcaggacccaggtgtcctgcattggcatctgcagggatattgaacccactcatcctgtgcagaggatgagaggaaggtgttagttccatcagccccataaaattatgaacctttttgcaactaggaacatatacagtaaacaagcaatacatcaccaacgagcattctttcagaaaaattaccatatttttgtccccaccacaagctgggtttttttccagctttctgtggctgaggggctggtgagattttttgttgttattgttgttgttgctagaattttttatagcttagatataaaaggtctccaacaaagacctttgcaatatattttaattaccaaccacttgatttgggaattgcacatattaccctcacaatattactagcctcatttttaaatgtctggacattctgaaataatttccgggttacagaattaccctttttaggatcatcttctaattcagataatcttattctgatgaagcgagaactatgaacgttgaaacaaggacaatttgtgttggatggtattcaaaaggaattttttaaaacattaagcaacagtgtaatgattttcaggtcaaattatggcttcacaaatatgtgctctatattgtctgccaggtctcaaaaattcatcaagcaatttccctccaacaagggctgcagttctagtgataaatagcatctttagctgcacagtctactactcatcaaccagtgggttttttttagcacctggaaagtttttttgtactatatgcaactcctacttcacattgcctgtgaccattcagaatagaaaaaggtctgttgatgcatgccagtgctggttactagtcagtgacagagaacacagagagggacaaacacagccatgaaccccctggcactagtaccagcacctagttggcaagtagtgggtgcatctctcaagtgaagtgtagatttgtatttagtcctgcttgctctcataaaaagagccagttcttttctctgctgaaagatgtcttgagagtattacaggtagacttggtttttagaattcataaaactgacaggcaggggaatcttcctgagtgacagcttggtttaaatttagcacagaactagatgagttgcacttttctaataacataggatggatttggggaagggaacattttccctcatcctctgaaagtggaaaccagactgagatggtaagttaactgataaaacctgtcagcattccatcattttccccttttgacgtatcagtacttctaagaagggatctaagcacaattaagtgaattgagtccctggtctagcctcaggaactgaaacttctttggggcttgtcttgagacgtggcaaattctccttggtgagttttctaaaagtatttccccatggaaaggagaaagtggtttgggacagaaagaaatggaatgtcttcagtcatggaagagcctccatttcatctcatgtccatttctagcctctttcaaaaagcacagtgcatcatgagcaacagaaaagcagtagaatcctaaaggacataacagttgttccgtaactagaagcattctttgattttaaatttgaagctgttcagtttgcagctggggatatgtgcatggttgggaacttatacacatagagccattaactacttaagcagctgcagtagacctgattttctgtttgcagtatagagattgatttcaagggagttacattatttgaaaagttatgactttcagcctttgaggttttaagaatcccttttcatggtctgatcttaagttgtttgaaaaaagattcacgcttctgcatccacctctgccctcattctgtcaattgtgtgtggactctgagaagcctgcttgataacttgtcttaagttctattaaggcagttagactgagatttctaatgacttcaccataaagattatacttctgcctggcgtcgtttctataaaacactataggacatttgttttcaaaagcagttgagtaacagcaacataaaccacattttttaaaaaaatgagcacttttcattcacttgaaagcttaagtgggaaaaaggaagatgattgtcaggggaaaaacttacaaaatgctacagtgtttacaaatgccagttccaggtgattagaaaggccgttttcattatggttcaaatttggaatagcttatgcaaagattgtgttcatttttatacaattctttttaactttaaattgccatctgtgttttaaacataattctgcactttggaatcagttcattagaatgataacatttatatggataaagatgcagtattccttattctgtacttgatttattatacttaccaaagctgcaactgaataaatctggtgaggtgaggccttcaaaatgtattaatacgcctttgttatgttgttatgactgcttagaaatgtagccatgatgttgttctaaagatgtcttaacatttatagtgaggattgacagaaattaagcagtgttaagaataccagcatccatgttacagtctgcgtataagggactgaatgtgaggtaactcttatgaatcataataggcccagaaagccttaatattcatagttcataatccagtctcagattttgctcttcaatgttgcctgtaaacttagcaggtaaatgtattctagtataaaacatcattgaccaaatctcttcctttagtttttctgaggtagtgcatcccattaaaaaagtctcttcaattagatttggctttagtttagaaaggggtttggtaagtcatgtcttccatatgacatttctactcatccccacactgccttccacttaacctgtacagacagccccaacacatgcacatgtgtgtacacaactgtatatgcagcagccagtgggctaacaaatatcagcaaagaacttttttaaaaagaatttgtaataatccgtgctgtctagaaatgtgagttacttaccttattaggaaaccggcttataatactatatatgactctgcctgcattttatagttaagaaatgtacataaaaattgctatattttcacagtttcattataatgtctgtttagtaacccatgtccactgatactttaaatatgctaattactgagcaattgcaatagaaatccagattttcataagaaaatgaaatagaaggatactgcatctttaaaaaatagagtgaagatattttactgtattcgtaacatatgtgatagtggaaaaagtattttcaaactcacaaattttacagaggttgtaaatagtttgatgaagtatgttgggaaagagagcttctagttttcatcacaataaaaagaaaaaacttgttcagatatgccttgtatatcttacacacaatgagtgaaattgccatgggaactctgtccaactttgtcagagcatgctcttcgtgttctgttcaaaatagagtggccacttgtcatggtttagccaggatggtttaaaatataatgaagtcattttaagttgcagacaactgattccaaactagtaatgtcttttcctgaaaagggcaaaacagctgcacaggattttgcttgtactaaagaggagcatcttacaattgttctcttttctcagttatctccctcctcaacagagtgtgaacaaccatacaggtgtttattcttgttttattccaggagactgcttttaggtataactacatgttgaaagattaagtgctgtgcatatggccacgtgttaaaggaatctatactcgcaataggaataagctaatgcccattttcagaaataaattaaatgctgaaagtgcctgtcagtaaaccttatgaccaatgagatattcctatacttttacacagcaataattcttaataagactgggttttttcctgcacatgtgaacacacacacacatacacacagagagagtaaatacatacacatagtaaatcaaatctgttcacatgcccacaaaaaacgcttttatagctttcaaatatacctaatcttgtttacattaacatttcttaatttgatctttctaacttgcagaacgttaagaacacaaatctgaacattaagtttatcttcagtgaacactattgcatatggtaattataatttccagataaaaagttgactgtcatttgccccaaacttatgaaacagtatgtatgattcaaaaagttttgctcagttaaaaacaccaatttatttggcgcaaaagactgaaggatatttgtttgcttgttcattttatccactcatatcaaacgcacaaattcatctttacatttcttcattcccctttcccctaatatttcctattatcatcttaagaatcattttggaatgaatattgacagaatcatttctccccaaaaagtctgttgaagtaccactgacacttagtaagcctagcctttaaccatctttgcagttagtcctaaaaattaccagatgcacattcagaagctcacaggttttttcctgtaattactgtactgctaaaagtggagtcatggatagaaatatacaatgagactatatgaatagacatgaaccctggaaattctccaaccctgccatctcagagcacaaattcacccaaacaagctactgaggctatcagtaaaattatactcatggagagtcacacatcgggtaagggcaattttaaaagtaggactgtgattaaacattcaggctttagacttccatgatggactcagaccacaggcctcaaaaaaacatccactgttttctcctcccaatgttagaaagaagaaaagggagaaggaaatgtaccaggataagggggtaaaataaccaattaagtgtcaaaggaaagctgctgggttccttaatctcactgaagtcaagtcttctgactgggcttctttccatgtgttgtctgaaaaaactaaagtaccttgaaaggttacacattcagcaaaccatgaagataatagctattctttattaaacactgtgtgccaagcaatagactaggcaatttttagatacgttacctgcaacctgtacaacatttctacactttatggatgggaaacggagacatgggaagtgtggctgagttgttcatggatgtagaaatagtaaacggcaaagtaggaaagtgaaaccgcctatctctgacctggaggtctgcctgtatctttcccactccaccacactgcacgtgggtgtcccgaaaccaccttcccagattcctgactctcagtaattttattatggacaacatgcatgagtagtcatcatatttttcaagtgaaatatcgggacatgatataacacatgacttaacaatggtactgaatatttgaaatcaggcctttcccggaaaatcatgcatgaaggatcattataaacaaacaatagcaaccagttgtctccccgaacttgtcacttttctcataaatgtctggcctggagctccaaaatcatccaaatacttagtagcattttagcctgagtacactttctcagttcctcaactctttgtatacctttccaccaatatagacattctagaatctgcttcagatgcatttgaaattttcacccccatggaactagtgattaatatcagagcccactcttgcagttggtaatggggtggcaatcaaacgttcagatgatgataaaggagagataatggataattctttttcagagttctcacttaacagctctgttgtggaatgttttaaatagtcttataaataatttgtttatagtattgttgttagtttaattgaattttatgtaagaagctgtccaacatcagagaaatgaaattcctcccactttctgtgtagaacaaggtctctgacagtattgattcatggaagtactaatggacttagaaaacattaagagaatgtcatttctcatagtgtttctgtttctgaaaatgaatctcctgaattattatctttctccctgttacttggctggggaaagagatagaagctgtataaacaaattctcttccatgctcaaagcaagtgttccatgtgcacaacctgctgcagactggggcccttctcagttaattgggtttcacaagcaataatttctccacaacaaaaaccacaacttgaagtgagttgaaaagagatcaatagtggaaacagtcgcctcagtactttttctttctggatttcatctctagaaatttgaagtgtttgagacagagtccaccctttgtgcaaggcgagaaccaatgaatggactccttgtgtgaattattgcatcttcttccaaagcaggttcatcaagactttcacagagattcatttttgttgagaagtaagggttaataggaggatagaatttggatccaaatctagtgataaaagtgtccaagcaatcaaaaagtaagatattttagggacataccaacatcttccctttctgctaatttcatgctccaaagatatggcaaaaaaaaaattttgtaattacatccagaatatagtgtatattttgttcctcaaactttattacattggatggatattgttgaactggggcactggtgcctatattcaaggctctttcctatcaacgtgtctgtccacgatttgttgtgtttaaagcttcattttgaaaaatcactgtccccctgtggggtagtgactgtattgttttgttcatgtctatgtgggacacattgcatcacatggcaaaccaactctctgtggatgtgagataagtacttataaaaccagcttgaaaacatcgtcttatgtattatgtcatcctgcatcataatgcaattatgtgtatcataacatgctcatttaaaaaaagagaaaccagcaaattcatgtttgtccatagaagaatgtactcagaactttgtgttgtgaaacgatgagaacagaccacctttaagatacccacctgccacttaaaatgacttagttataattagtagtagtctagacgttgttcttggtgtgtgggggtcaattctaacgtcatgttcttttgaataaatctctcagtcatatttgaaaaaaaaatacatgggaataaagaaaaatatcatctttggccaaatcaagcaggcatcttttttcttttccttgacgtttagctcattatacgtggtgattggatcacgagatctgtccgtgtgaaaatacagaaacatcctttagtttacaaaacagttattctaggcttgaagcctctgaacagcaaattgaatagatgggctgcatctgatttgctttatggatgtaattttacaaaacactcttgggtctctgaccccagggagttaagagtgcccagaggaggtcctacacattaaaggataaagccccccagtgatgctggcaagcaaatgtgttgagttcttaaatcttcatttggttttctgttcaggattttaattgcaaatgaatttatttctccagtttatctaaagacctaatttcccaatagtttcctctgcatttatatactctgtagtgtttaggcaaccctgttataagtttattaatattatgtaagtgttgttcttgtatttatgtatagtgtatgtattgtaaatatactcagagcttttttccttttactgtaaaatggtgatttttttgccctatgataatgtaaagggagaccctcctaatgagattctctcagaggatgattattccagtctattctcagagatttaaatgaacaagtgttattgtttttaatggtgtctcagacatattctgttggtgcattgcttttctgtattcaactttcctatgaattgagctgtgaactgaaatagagtttaaacctttaactgtatgcatttgtataattatctgaatgaaggcatgaaggttaaataaagcattttgtatggaacaaaactccctaactgactcagacactttggaaatcatagttattaaccattctaattaaacctttgttatgaaaagttttac

SEQ ID NO: 736283 - DNA, 10928 bp, Homo sapiens
  misc_feature (9015)..(9015): n is a, c, g, or t
agccgctgagaggctctgcgtgtgcgtgtgcgcgggtgacgccgtgtgtgtgcgagtgtgtgtgtgtgtgcgcgcgcgcgtgtgagagagagaaagggagagagagagggggactctgtgtgagggaaagaaaacaatttctcctgctctgcagcttctgttcaggatcaatgtgactctaagaacaaatggatgaatgaatatccatatgaagagaaaaacaataaagaatatcaacacctttgagaacagaatgttaatgcttgatgggatgccggcagtcagagtcaaaacagagcttttggaatctgaacaagggtctccaaacgtccacaactatcccgatatggaagccgttcccctgttgctaaataatgtgaaaggggagcccccggaggactcgttatctgtagatcacttccaaacacaaactgagccagtggacttgtcaataaacaaagccaggacgtcccctactgccgtttcatcctccccagtttccatgacagcatctgcctcctcaccttcttcaacttcaacctcttcatcgtcttctagtcgtctagcctcatccccaactgttatcacatcagtatcttcagcgtcatcttcgtcaacagtattaactccagggccccttgtggcctctgcatctggtgttggaggccagcagtttttgcacattatccatcccgtaccgccttcaagtcccatgaatttacagtctaacaaactgagtcatgttcaccgcatccccgtggtggtacagtcggtgcctgttgtctacacagctgtaaggtcacctggaaatgtgaacaacactattgtcgtgccgcttttggaggatgggagaggccatggcaaagcacaaatggacccccgaggcctatctcccagacaaagtaaaagtgacagtgatgatgatgacctgccaaatgtgaccttagatagcgttaatgaaactggatctacggccctttccatagccagagcagtacaagaggtacatccgtccccagtatcaagggtccggggcaatcgaatgaataatcaaaagtttccttgttcaatttcaccatttagtattgagagcacaagacgccagagacggtctgaatccccagactccagaaaacggcgtatccacagatgtgattttgagggatgcaacaaagtgtacacaaaaagttctcacctgaaggctcaccggaggacacatacaggagagaaaccttacaagtgtacctgggaaggctgcacctggaagttcgctcgttcagatgaactgacgaggcattaccgcaaacatacgggagtgaagccattcaagtgcgcggactgtgatcgcagcttttcccggtcagatcatttggccctgcaccgccggaggcatatgttggtgtgaggaatgctacctgtccagctgagcgtaagagctggatctcttagcggcacccaattcagcagggctgaatccccttcacagtgttaacacaaaagggcatcaccatcccacgatgtctgaaaccagagcaggaaaaagaaggcacacttcttttggtctgaaggtaacccccatcatgactagacgagaaccgtctttacgcgggcctgggagctcagtgacataaatgctgaagagacaggcattgttttccgtgctgtgtcctctgccatttaaagatgtttgtagcttgtacattttctgagctgtcagacattttgttattgataccttaaaggtcacctaccacaaattgatggctagagcaagaccttttaaatttggatgaatctcccatcatcccatcccttaacccctttttacagaaattttagttacaatctgagtaagctagaacacacatccaatctgttaccagcaagcagcatgaaagtagaaacgaagaagcagatggagaggtcccattacctgcaaagaaagggcactcaggcagccctttgcaatcgcgatggcagccactagatatcactctcaacttgtcattctgccatgccctgaagaaaaccaacattgaatctttcatttgtttgtcgttgattgtttttgttttgtttcgattctgttttgttcatctgttcgagcagaggggcagttgaagtctcgtcctggtctctgccctggcatggactggcacagaggtgttctgtagttgaataggaagagcctgtctaaaaaactactgccccacttcaaattgcagtgttctgtcacctaggcatcatctcttcctgcccctagtatttgattacaaggaaccaggggaaaaaaactttcttagacacactggcaccaaggtaagaggtggggctgcccaggcaaagtcagtgaacatgaaaactcagacaaagcagagatggaaataatgcgcctcttgaggagaaaagcaataatgaataaaaggactttcctacaataacttcactgaggactcacgttaccaattttcatacttactaaagggattgtaaaaaacaccccagcattttaggtgtcttggttccatttacagcactgaggtaatctttctgctgtttgttgtcctgcttggttgagtaccacaattaaagattatgctccccttttcttgtttgaaaacagttatttggtgactagaaaggcaagggaggcatagccgggaattaactcttcggttaatgggtcagttctccttggaactgaatcagtggaaagagaatgcttcccatagaaagcccgacatggtgctagtttcctctcttggagagccaaggataagtgactctccaataggttcttctataccgatttcattttctaaactgtatcaggacccaggtgtcctgcattggcatctgcagggatattgaacccactcatcctgtgcagaggatgagaggaaggtgttagttccatcagccccataaaattatgaacctttttgcaactaggaacatatacagtaaacaagcaatacatcaccaacgagcattctttcagaaaaattaccatatttttgtccccaccacaagctgggtttttttccagctttctgtggctgaggggctggtgagattttttgttgttattgttgttgttgctagaattttttatagcttagatataaaaggtctccaacaaagacctttgcaatatattttaattaccaaccacttgatttgggaattgcacatattaccctcacaatattactagcctcatttttaaatgtctggacattctgaaataatttccgggttacagaattaccctttttaggatcatcttctaattcagataatcttattctgatgaagcgagaactatgaacgttgaaacaaggacaatttgtgttggatggtattcaaaaggaattttttaaaacattaagcaacagtgtaatgattttcaggtcaaattatggcttcacaaatatgtgctctatattgtctgccaggtctcaaaaattcatcaagcaatttccctccaacaagggctgcagttctagtgataaatagcatctttagctgcacagtctactactcatcaaccagtgggttttttttagcacctggaaagtttttttgtactatatgcaactcctacttcacattgcctgtgaccattcagaatagaaaaaggtctgttgatgcatgccagtgctggttactagtcagtgacagagaacacagagagggacaaacacagccatgaaccccctggcactagtaccagcacctagttggcaagtagtgggtgcatctctcaagtgaagtgtagatttgtatttagtcctgcttgctctcataaaaagagccagttcttttctctgctgaaagatgtcttgagagtattacaggtagacttggtttttagaattcataaaactgacaggcaggggaatcttcctgagtgacagcttggtttaaatttagcacagaactagatgagttgcacttttctaataacataggatggatttggggaagggaacattttccctcatcctctgaaagtggaaaccagactgagatggtaagttaactgataaaacctgtcagcattccatcattttccccttttgacgtatcagtacttctaagaagggatctaagcacaattaagtgaattgagtccctggtctagcctcaggaactgaaacttctttggggcttgtcttgagacgtggcaaattctccttggtgagttttctaaaagtatttccccatggaaaggagaaagtggtttgggacagaaagaaatggaatgtcttcagtcatggaagagcctccatttcatctcatgtccatttctagcctctttcaaaaagcacagtgcatcatgagcaacagaaaagcagtagaatcctaaaggacataacagttgttccgtaactagaagcattctttgattttaaatttgaagctgttcagtttgcagctggggatatgtgcatggttgggaacttatacacatagagccattaactacttaagcagctgcagtagacctgattttctgtttgcagtatagagattgatttcaagggagttacattatttgaaaagttatgactttcagcctttgaggttttaagaatcccttttcatggtctgatcttaagttgtttgaaaaaagattcacgcttctgcatccacctctgccctcattctgtcaattgtgtgtggactctgagaagcctgcttgataacttgtcttaagttctattaaggcagttagactgagatttctaatgacttcaccataaagattatacttctgcctggcgtcgtttctataaaacactataggacatttgttttcaaaagcagttgagtaacagcaacataaaccacattttttaaaaaaatgagcacttttcattcacttgaaagcttaagtgggaaaaaggaagatgattgtcaggggaaaaacttacaaaatgctacagtgtttacaaatgccagttccaggtgattagaaaggccgttttcattatggttcaaatttggaatagcttatgcaaagattgtgttcatttttatacaattctttttaactttaaattgccatctgtgttttaaacataattctgcactttggaatcagttcattagaatgataacatttatatggataaagatgcagtattccttattctgtacttgatttattatacttaccaaagctgcaactgaataaatctggtgaggtgaggccttcaaaatgtattaatacgcctttgttatgttgttatgactgcttagaaatgtagccatgatgttgttctaaagatgtcttaacatttatagtgaggattgacagaaattaagcagtgttaagaataccagcatccatgttacagtctgcgtataagggactgaatgtgaggtaactcttatgaatcataataggcccagaaagccttaatattcatagttcataatccagtctcagattttgctcttcaatgttgcctgtaaacttagcaggtaaatgtattctagtataaaacatcattgaccaaatctcttcctttagtttttctgaggtagtgcatcccattaaaaaagtctcttcaattagatttggctttagtttagaaaggggtttggtaagtcatgtcttccatatgacatttctactcatccccacactgccttccacttaacctgtacagacagccccaacacatgcacatgtgtgtacacaactgtatatgcagcagccagtgggctaacaaatatcagcaaagaacttttttaaaaagaatttgtaataatccgtgctgtctagaaatgtgagttacttaccttattaggaaaccggcttataatactatatatgactctgcctgcattttatagttaagaaatgtacataaaaattgctatattttcacagtttcattataatgtctgtttagtaacccatgtccactgatactttaaatatgctaattactgagcaattgcaatagaaatccagattttcataagaaaatgaaatagaaggatactgcatctttaaaaaatagagtgaagatattttactgtattcgtaacatatgtgatagtggaaaaagtattttcaaactcacaaattttacagaggttgtaaatagtttgatgaagtatgttgggaaagagagcttctagttttcatcacaataaaaagaaaaaacttgttcagatatgccttgtatatcttacacacaatgagtgaaattgccatgggaactctgtccaactttgtcagagcatgctcttcgtgttctgttcaaaatagagtggccacttgtcatggtttagccaggatggtttaaaatataatgaagtcattttaagttgcagacaactgattccaaactagtaatgtcttttcctgaaaagggcaaaacagctgcacaggattttgcttgtactaaagaggagcatcttacaattgttctcttttctcagttatctccctcctcaacagagtgtgaacaaccatacaggtgtttattcttgttttattccaggagactgcttttaggtataactacatgttgaaagattaagtgctgtgcatatggccacgtgttaaaggaatctatactcgcaataggaataagctaatgcccattttcagaaataaattaaatgctgaaagtgcctgtcagtaaaccttatgaccaatgagatattcctatacttttacacagcaataattcttaataagactgggttttttcctgcacatgtgaacacacacacacatacacacagagagagtaaatacatacacatagtaaatcaaatctgttcacatgcccacaaaaaacgcttttatagctttcaaatatacctaatcttgtttacattaacatttcttaatttgatctttctaacttgcagaacgttaagaacacaaatctgaacattaagtttatcttcagtgaacactattgcatatggtaattataatttccagataaaaagttgactgtcatttgccccaaacttatgaaacagtatgtatgattcaaaaagttttgctcagttaaaaacaccaatttatttggcgcaaaagactgaaggatatttgtttgcttgttcattttatccactcatatcaaacgcacaaattcatctttacatttcttcattcccctttcccctaatatttcctattatcatcttaagaatcattttggaatgaatattgacagaatcatttctccccaaaaagtctgttgaagtaccactgacacttagtaagcctagcctttaaccatctttgcagttagtcctaaaaattaccagatgcacattcagaagctcacaggttttttcctgtaattactgtactgctaaaagtggagtcatggatagaaatatacaatgagactatatgaatagacatgaaccctggaaattctccaaccctgccatctcagagcacaaattcacccaaacaagctactgaggctatcagtaaaattatactcatggagagtcacacatcgggtaagggcaattttaaaagtaggactgtgattaaacattcaggctttagacttccatgatggactcagaccacaggcctcaaaaaaacatccactgttttctcctcccaatgttagaaagaagaaaagggagaaggaaatgtaccaggataagggggtaaaataaccaattaagtgtcaaaggaaagctgctgggttccttaatctcactgaagtcaagtcttctgactgggcttctttccatgtgttgtctgaaaaaactaaagtaccttgaaaggttacacattcagcaaaccatgaagataatagctattctttattaaacactgtgtgccaagcaatagactaggcaatttttagatacgttacctgcaacctgtacaacatttctacactttatggatgggaaacggagacatgggaagtgtggctgagttgttcatggatgtagaaatagtaaacggcaaagtaggaaagtgaaaccgcctatctctgacctggaggtctgcctgtatctttcccactccaccacactgcacgtgggtgtcccgaaaccaccttcccagattcctgactctcagtaattttattatggacaacatgcatgagtagtcatcatatttttcaagtgaaatatcgggacatgatataacacatgacttaacaatggtactgaatatttgaaatcaggcctttcccggaaaatcatgcatgaaggatcattataaacaaacaatagcaaccagttgtctccccgaacttgtcacttttctcataaatgtctggcctggagctccaaaatcatccaaatacttagtagcattttagcctgagtacactttctcagttcctcaactctttgtatacctttccaccaatatagacattctagaatctgcttcagatgcatttgaaattttcacccccatggaactagtgattaatatcagagcccactcttgcagttggtaatggggtggcaatcaaacgttcagatgatgataaaggagagataatggataattctttttcagagttctcacttaacagctctgttgtggaatgttttaaatagtcttataaataatttgtttatagtattgttgttagtttaattgaattttatgtaagaagctgtccaacatcagagaaatgaaattcctcccactttctgtgtagaacaaggtctctgacagtattgattcatggaagtactaatggacttagaaaacattaagagaatgtcatttctcatagtgtttctgtttctgaaaatgaatctcctgaattattatctttctccctgttacttggctggggaaagagatagaagctgtataaacaaattctcttccatgctcaaagcaagtgttccatgtgcacaacctgctgcagactggggcccttctcagttaattgggtttcacaagcaataatttctccacaacaaaaaccacaacttgaagtgagaaagggggtttcttgggaaaaaaaaaaggcaagnatcccaacaattgaaaagagatcaatagtggaaacagtcgcctcagtactttttctttctggatttcatctctagaaatttgaagtgtttgagacagagtccaccctttgtgcaaggcgagaaccaatgaatggactccttgtgtgaattattgcatcttcttccaaagcaggttcatcaagactttcacagagattcatttttgttgagaagtaagggttaataggaggatagaatttggatccaaatctagtgataaaagtgtccaagcaatcaaaaagtaagatattttagggacataccaacatcttccctttctgctaatttcatgctccaaagatatggcaaaaaaaaaaatcataaaaagtgcttttgccctacttgtgttctagttttcccatggcagaattttgtaattacatccagaatatagtgtatattttgttcctcaaactttattacattggatggatattgttgaactggggcactggtgcctatattcaaggctctttcctatcaacgtgtctgtccacgatttgttgtgtttaaagcttcattttgaaaaatcactgtccccctgtggggtagtgactgtattgttttgttcatgtctatgtgggacacattgcatcacatggcaaaccaactctctgtggatgtgagataagtacttataaaaccagcttgaaaacatcgtcttatgtattatgtcatcctgcatcataatgcaattatgtgtatcataacatgctcatttaaaaaaagagaaaccagcaaattcatgtttgtccatagaagaatgtactcagaactttgtgttgtgaaacgatgagaacagaccacctttaagatacccacctgccacttaaaatgacttagttataattagtagtagtctagacgttgttcttggtgtgtgggggtcaattctaacgtcatgttcttttgaataaatctctcagtcatatttgaaaaaaaaatacatgggaataaagaaaaatatcatctttggccaaatcaagcaggcatcttttttcttttccttgacgtttagctcattatacgtggtgattggatcacgagatctgtccgtgtgaaaatacagaaacatcctttagtttacaaaacagttattctaggcttgaagcctctgaacagcaaattgaatagatgggctgcatctgatttgctttatggatgtaattttacaaaacactcttgggtctctgaccccagggagttaagagtgcccagaggaggtcctacacattaaaggataaagccccccagtgatgctggcaagcaaatgtgttgagttcttaaatcttcatttggttttctgttcaggattttaattgcaaatgaatttatttctccagtttatctaaagacctaatttcccaatagtttcctctgcatttatatactctgtagtgtttaggcaaccctgttataagtttattaatattatgtaagtgttgttcttgtatttatgtatagtgtatgtattgtaaatatactcagagcttttttccttttactgtaaaatggtgatttttttgccctatgataatgtaaagggagaccctcctaatgagattctctcagaggatgattattccagtctattctcagagatttaaatgaacaagtgttattgtttttaatggtgtctcagacatattctgttggtgcattgcttttctgtattcaactttcctatgaattgagctgtgaactgaaatagagtttaaacctttaactgtatgcatttgtataattatctgaatgaaggcatgaaggttaaataaagcattttgtatggaacaaaactccctaactgactcagacactttggaaatcatagttattaaccattctaattaaacctttgttatgaaaagttttac

SEQ ID NO: 736284 - DNA, 3477 bp, Homo sapiens
taaatggtggctgctttaggcctactatgggtgtaaatttcttactctccaaacaagctactgaggctatcagtaaaattatactcatggagagtcacacatcgggtaagggcaattttaaaagtaggactgtgattaaacattcaggctttagacttccatgatggactcagaccacaggcctcaaaaaaacatccactgttttctcctcccaatgttagaaagaagaaaagggagaaggaaatgtaccaggataagggggtaaaataaccaattaagtgtcaaaggaaagctgctgggttccttaatctcactgaagtcaagtcttctgactgggcttctttccatgtgttgtctgaaaaaactaaagtaccttgaaaggttacacattcagcaaaccatgaagataatagctattctttattaaacactgtgtgccaagcaatagactaggcaatttttagatacgttacctgcaacctgtacaacatttctacactttatggatgggaaacggagacatgggaagtgtggctgagttgttcatggatgtagaaatagtaaacggcaaagtaggaaagtgaaaccgcctatctctgacctggaggtctgcctgtatctttcccactccaccacactgcacgtgggtgtcccgaaaccaccttcccagattcctgactctcagtaattttattatggacaacatgcatgagtagtcatcatatttttcaagtgaaatatcgggacatgatataacacatgacttaacaatggtactgaatatttgaaatcaggcctttcccggaaaatcatgcatgaaggatcattataaacaaacaatagcaaccagttgtctccccgaacttgtcacttttctcataaatgtctggcctggagctccaaaatcatccaaatacttagtagcattttagcctgagtacactttctcagttcctcaactctttgtatacctttccaccaatatagacattctagaatctgcttcagatgcatttgaaattttcacccccatggaactagtgattaatatcagagcccactcttgcagttggtaatggggtggcaatcaaacgttcagatgatgataaaggagagataatggataattctttttcagagttctcacttaacagctctgttgtggaatgttttaaatagtcttataaataatttgtttatagtattgttgttagtttaattgaattttatgtaagaagctgtccaacatcagagaaatgaaattcctcccactttctgtgtagaacaaggtctctgacagtattgattcatggaagtactaatggacttagaaaacattaagagaatgtcatttctcatagtgtttctgtttctgaaaatgaatctcctgaattattatctttctccctgttacttggctggggaaagagatagaagctgtataaacaaattctcttccatgctcaaagcaagtgttccatgtgcacaacctgctgcagactggggcccttctcagttaattgggtttcacaagcaataatttctccacaacaaaaaccacaacttgaagtgagttgaaaagagatcaatagtggaaacagtcgcctcagtactttttctttctggatttcatctctagaaatttgaagtgtttgagacagagtccaccctttgtgcaaggcgagaaccaatgaatggactccttgtgtgaattattgcatcttcttccaaagcaggttcatcaagactttcacagagattcatttttgttgagaagtaagggttaataggaggatagaatttggatccaaatctagtgataaaagtgtccaagcaatcaaaaagtaagatattttagggacataccaacatcttccctttctgctaatttcatgctccaaagatatggcaaaaaaaaaaatcataaaaagtgcttttgccctacttgtgttctagttttcccatggcagaattttgtaattacatccagaatatagtgtatattttgttcctcaaactttattacattggatggatattgttgaactggggcactggtgcctatattcaaggctctttcctatcaacgtgtctgtccacgatttgttgtgtttaaagcttcattttgaaaaatcactgtccccctgtggggtagtgactgtattgttttgttcatgtctatgtgggacacattgcatcacatggcaaaccaactctctgtggatgtgagataagtacttataaaaccagcttgaaaacatcgtcttatgtattatgtcatcctgcatcataatgcaattatgtgtatcataacatgctcatttaaaaaaagagaaaccagcaaattcatgtttgtccatagaagaatgtactcagaactttgtgttgtgaaacgatgagaacagaccacctttaagatacccacctgccacttaaaatgacttagttataattagtagtagtctagacgttgttcttggtgtgtgggggtcaattctaacgtcatgttcttttgaataaatctctcagtcatatttgaaaaaaaaatacatgggaataaagaaaaatatcatctttggccaaatcaagcaggcatcttttttcttttccttgacgtttagctcattatacgtggtgattggatcacgagatctgtccgtgtgaaaatacagaaacatcctttagtttacaaaacagttattctaggcttgaagcctctgaacagcaaattgaatagatgggctgcatctgatttgctttatggatgtaattttacaaaacactcttgggtctctgaccccagggagttaagagtgcccagaggaggtcctacacattaaaggataaagccccccagtgatgctggcaagcaaatgtgttgagttcttaaatcttcatttggttttctgttcaggattttaattgcaaatgaatttatttctccagtttatctaaagacctaatttcccaatagtttcctctgcatttatatactctgtagtgtttaggcaaccctgttataagtttattaatattatgtaagtgttgttcttgtatttatgtatagtgtatgtattgtaaatatactcagagcttttttccttttactgtaaaatggtgatttttttgccctatgataatgtaaagggagaccctcctaatgagattctctcagaggatgattattccagtctattctcagagatttaaatgaacaagtgttattgtttttaatggtgtctcagacatattctgttggtgcattgcttttctgtattcaactttcctatgaattgagctgtgaactgaaatagagtttaaacctttaactgtatgcatttgtataattatctgaatgaaggcatgaaggttaaataaagcattttgtatggaacaaaactccctaactgactcagacactttggaaatcatagttattaaccattctaattaaacctttgttatgaaaagttttac

SEQ ID NO: 736285 - DNA, 10688 bp, Homo sapiens
tatggagtctccctctgttgcccaagctggagagcagtggcatgatcttggctcactgcagcctccacctcctgggttcaagcgattcttctgcctcaccttcctgagtagctcggattacagtctccaaacgtccacaactatcccgatatggaagccgttcccctgttgctaaataatgtgaaaggggagcccccggaggactcgttatctgtagatcacttccaaacacaaactgagccagtggacttgtcaataaacaaagccaggacgtcccctactgccgtttcatcctccccagtttccatgacagcatctgcctcctcaccttcttcaacttcaacctcttcatcgtcttctagtcgtctagcctcatccccaactgttatcacatcagtatcttcagcgtcatcttcgtcaacagtattaactccagggccccttgtggcctctgcatctggtgttggaggccagcagtttttgcacattatccatcccgtaccgccttcaagtcccatgaatttacagtctaacaaactgagtcatgttcaccgcatccccgtggtggtacagtcggtgcctgttgtctacacagctgtaaggtcacctggaaatgtgaacaacactattgtcgtgccgcttttggaggatgggagaggccatggcaaagcacaaatggacccccgaggcctatctcccagacaaagtaaaagtgacagtgatgatgatgacctgccaaatgtgaccttagatagcgttaatgaaactggatctacggccctttccatagccagagcagtacaagaggtacatccgtccccagtatcaagggtccggggcaatcgaatgaataatcaaaagtttccttgttcaatttcaccatttagtattgagagcacaagacgccagagacggtctgaatccccagactccagaaaacggcgtatccacagatgtgattttgagggatgcaacaaagtgtacacaaaaagttctcacctgaaggctcaccggaggacacatacaggagagaaaccttacaagtgtacctgggaaggctgcacctggaagttcgctcgttcagatgaactgacgaggcattaccgcaaacatacgggagtgaagccattcaagtgcgcggactgtgatcgcagcttttcccggtcagatcatttggccctgcaccgccggaggcatatgttggtgtgaggaatgctacctgtccagctgagcgtaagagctggatctcttagcggcacccaattcagcagggctgaatccccttcacagtgttaacacaaaagggcatcaccatcccacgatgtctgaaaccagagcaggaaaaagaaggcacacttcttttggtctgaaggtaacccccatcatgactagacgagaaccgtctttacgcgggcctgggagctcagtgacataaatgctgaagagacaggcattgttttccgtgctgtgtcctctgccatttaaagatgtttgtagcttgtacattttctgagctgtcagacattttgttattgataccttaaaggtcacctaccacaaattgatggctagagcaagaccttttaaatttggatgaatctcccatcatcccatcccttaacccctttttacagaaattttagttacaatctgagtaagctagaacacacatccaatctgttaccagcaagcagcatgaaagtagaaacgaagaagcagatggagaggtcccattacctgcaaagaaagggcactcaggcagccctttgcaatcgcgatggcagccactagatatcactctcaacttgtcattctgccatgccctgaagaaaaccaacattgaatctttcatttgtttgtcgttgattgtttttgttttgtttcgattctgttttgttcatctgttcgagcagaggggcagttgaagtctcgtcctggtctctgccctggcatggactggcacagaggtgttctgtagttgaataggaagagcctgtctaaaaaactactgccccacttcaaattgcagtgttctgtcacctaggcatcatctcttcctgcccctagtatttgattacaaggaaccaggggaaaaaaactttcttagacacactggcaccaaggtaagaggtggggctgcccaggcaaagtcagtgaacatgaaaactcagacaaagcagagatggaaataatgcgcctcttgaggagaaaagcaataatgaataaaaggactttcctacaataacttcactgaggactcacgttaccaattttcatacttactaaagggattgtaaaaaacaccccagcattttaggtgtcttggttccatttacagcactgaggtaatctttctgctgtttgttgtcctgcttggttgagtaccacaattaaagattatgctccccttttcttgtttgaaaacagttatttggtgactagaaaggcaagggaggcatagccgggaattaactcttcggttaatgggtcagttctccttggaactgaatcagtggaaagagaatgcttcccatagaaagcccgacatggtgctagtttcctctcttggagagccaaggataagtgactctccaataggttcttctataccgatttcattttctaaactgtatcaggacccaggtgtcctgcattggcatctgcagggatattgaacccactcatcctgtgcagaggatgagaggaaggtgttagttccatcagccccataaaattatgaacctttttgcaactaggaacatatacagtaaacaagcaatacatcaccaacgagcattctttcagaaaaattaccatatttttgtccccaccacaagctgggtttttttccagctttctgtggctgaggggctggtgagattttttgttgttattgttgttgttgctagaattttttatagcttagatataaaaggtctccaacaaagacctttgcaatatattttaattaccaaccacttgatttgggaattgcacatattaccctcacaatattactagcctcatttttaaatgtctggacattctgaaataatttccgggttacagaattaccctttttaggatcatcttctaattcagataatcttattctgatgaagcgagaactatgaacgttgaaacaaggacaatttgtgttggatggtattcaaaaggaattttttaaaacattaagcaacagtgtaatgattttcaggtcaaattatggcttcacaaatatgtgctctatattgtctgccaggtctcaaaaattcatcaagcaatttccctccaacaagggctgcagttctagtgataaatagcatctttagctgcacagtctactactcatcaaccagtgggttttttttagcacctggaaagtttttttgtactatatgcaactcctacttcacattgcctgtgaccattcagaatagaaaaaggtctgttgatgcatgccagtgctggttactagtcagtgacagagaacacagagagggacaaacacagccatgaaccccctggcactagtaccagcacctagttggcaagtagtgggtgcatctctcaagtgaagtgtagatttgtatttagtcctgcttgctctcataaaaagagccagttcttttctctgctgaaagatgtcttgagagtattacaggtagacttggtttttagaattcataaaactgacaggcaggggaatcttcctgagtgacagcttggtttaaatttagcacagaactagatgagttgcacttttctaataacataggatggatttggggaagggaacattttccctcatcctctgaaagtggaaaccagactgagatggtaagttaactgataaaacctgtcagcattccatcattttccccttttgacgtatcagtacttctaagaagggatctaagcacaattaagtgaattgagtccctggtctagcctcaggaactgaaacttctttggggcttgtcttgagacgtggcaaattctccttggtgagttttctaaaagtatttccccatggaaaggagaaagtggtttgggacagaaagaaatggaatgtcttcagtcatggaagagcctccatttcatctcatgtccatttctagcctctttcaaaaagcacagtgcatcatgagcaacagaaaagcagtagaatcctaaaggacataacagttgttccgtaactagaagcattctttgattttaaatttgaagctgttcagtttgcagctggggatatgtgcatggttgggaacttatacacatagagccattaactacttaagcagctgcagtagacctgattttctgtttgcagtatagagattgatttcaagggagttacattatttgaaaagttatgactttcagcctttgaggttttaagaatcccttttcatggtctgatcttaagttgtttgaaaaaagattcacgcttctgcatccacctctgccctcattctgtcaattgtgtgtggactctgagaagcctgcttgataacttgtcttaagttctattaaggcagttagactgagatttctaatgacttcaccataaagattatacttctgcctggcgtcgtttctataaaacactataggacatttgttttcaaaagcagttgagtaacagcaacataaaccacattttttaaaaaaatgagcacttttcattcacttgaaagcttaagtgggaaaaaggaagatgattgtcaggggaaaaacttacaaaatgctacagtgtttacaaatgccagttccaggtgattagaaaggccgttttcattatggttcaaatttggaatagcttatgcaaagattgtgttcatttttatacaattctttttaactttaaattgccatctgtgttttaaacataattctgcactttggaatcagttcattagaatgataacatttatatggataaagatgcagtattccttattctgtacttgatttattatacttaccaaagctgcaactgaataaatctggtgaggtgaggccttcaaaatgtattaatacgcctttgttatgttgttatgactgcttagaaatgtagccatgatgttgttctaaagatgtcttaacatttatagtgaggattgacagaaattaagcagtgttaagaataccagcatccatgttacagtctgcgtataagggactgaatgtgaggtaactcttatgaatcataataggcccagaaagccttaatattcatagttcataatccagtctcagattttgctcttcaatgttgcctgtaaacttagcaggtaaatgtattctagtataaaacatcattgaccaaatctcttcctttagtttttctgaggtagtgcatcccattaaaaaagtctcttcaattagatttggctttagtttagaaaggggtttggtaagtcatgtcttccatatgacatttctactcatccccacactgccttccacttaacctgtacagacagccccaacacatgcacatgtgtgtacacaactgtatatgcagcagccagtgggctaacaaatatcagcaaagaacttttttaaaaagaatttgtaataatccgtgctgtctagaaatgtgagttacttaccttattaggaaaccggcttataatactatatatgactctgcctgcattttatagttaagaaatgtacataaaaattgctatattttcacagtttcattataatgtctgtttagtaacccatgtccactgatactttaaatatgctaattactgagcaattgcaatagaaatccagattttcataagaaaatgaaatagaaggatactgcatctttaaaaaatagagtgaagatattttactgtattcgtaacatatgtgatagtggaaaaagtattttcaaactcacaaattttacagaggttgtaaatagtttgatgaagtatgttgggaaagagagcttctagttttcatcacaataaaaagaaaaaacttgttcagatatgccttgtatatcttacacacaatgagtgaaattgccatgggaactctgtccaactttgtcagagcatgctcttcgtgttctgttcaaaatagagtggccacttgtcatggtttagccaggatggtttaaaatataatgaagtcattttaagttgcagacaactgattccaaactagtaatgtcttttcctgaaaagggcaaaacagctgcacaggattttgcttgtactaaagaggagcatcttacaattgttctcttttctcagttatctccctcctcaacagagtgtgaacaaccatacaggtgtttattcttgttttattccaggagactgcttttaggtataactacatgttgaaagattaagtgctgtgcatatggccacgtgttaaaggaatctatactcgcaataggaataagctaatgcccattttcagaaataaattaaatgctgaaagtgcctgtcagtaaaccttatgaccaatgagatattcctatacttttacacagcaataattcttaataagactgggttttttcctgcacatgtgaacacacacacacatacacacagagagagtaaatacatacacatagtaaatcaaatctgttcacatgcccacaaaaaacgcttttatagctttcaaatatacctaatcttgtttacattaacatttcttaatttgatctttctaacttgcagaacgttaagaacacaaatctgaacattaagtttatcttcagtgaacactattgcatatggtaattataatttccagataaaaagttgactgtcatttgccccaaacttatgaaacagtatgtatgattcaaaaagttttgctcagttaaaaacaccaatttatttggcgcaaaagactgaaggatatttgtttgcttgttcattttatccactcatatcaaacgcacaaattcatctttacatttcttcattcccctttcccctaatatttcctattatcatcttaagaatcattttggaatgaatattgacagaatcatttctccccaaaaagtctgttgaagtaccactgacacttagtaagcctagcctttaaccatctttgcagttagtcctaaaaattaccagatgcacattcagaagctcacaggttttttcctgtaattactgtactgctaaaagtggagtcatggatagaaatatacaatgagactatatgaatagacatgaaccctggaaattctccaaccctgccatctcagagcacaaattcacccaaacaagctactgaggctatcagtaaaattatactcatggagagtcacacatcgggtaagggcaattttaaaagtaggactgtgattaaacattcaggctttagacttccatgatggactcagaccacaggcctcaaaaaaacatccactgttttctcctcccaatgttagaaagaagaaaagggagaaggaaatgtaccaggataagggggtaaaataaccaattaagtgtcaaaggaaagctgctgggttccttaatctcactgaagtcaagtcttctgactgggcttctttccatgtgttgtctgaaaaaactaaagtaccttgaaaggttacacattcagcaaaccatgaagataatagctattctttattaaacactgtgtgccaagcaatagactaggcaatttttagatacgttacctgcaacctgtacaacatttctacactttatggatgggaaacggagacatgggaagtgtggctgagttgttcatggatgtagaaatagtaaacggcaaagtaggaaagtgaaaccgcctatctctgacctggaggtctgcctgtatctttcccactccaccacactgcacgtgggtgtcccgaaaccaccttcccagattcctgactctcagtaattttattatggacaacatgcatgagtagtcatcatatttttcaagtgaaatatcgggacatgatataacacatgacttaacaatggtactgaatatttgaaatcaggcctttcccggaaaatcatgcatgaaggatcattataaacaaacaatagcaaccagttgtctccccgaacttgtcacttttctcataaatgtctggcctggagctccaaaatcatccaaatacttagtagcattttagcctgagtacactttctcagttcctcaactctttgtatacctttccaccaatatagacattctagaatctgcttcagatgcatttgaaattttcacccccatggaactagtgattaatatcagagcccactcttgcagttggtaatggggtggcaatcaaacgttcagatgatgataaaggagagataatggataattctttttcagagttctcacttaacagctctgttgtggaatgttttaaatagtcttataaataatttgtttatagtattgttgttagtttaattgaattttatgtaagaagctgtccaacatcagagaaatgaaattcctcccactttctgtgtagaacaaggtctctgacagtattgattcatggaagtactaatggacttagaaaacattaagagaatgtcatttctcatagtgtttctgtttctgaaaatgaatctcctgaattattatctttctccctgttacttggctggggaaagagatagaagctgtataaacaaattctcttccatgctcaaagcaagtgttccatgtgcacaacctgctgcagactggggcccttctcagttaattgggtttcacaagcaataatttctccacaacaaaaaccacaacttgaagtgagttgaaaagagatcaatagtggaaacagtcgcctcagtactttttctttctggatttcatctctagaaatttgaagtgtttgagacagagtccaccctttgtgcaaggcgagaaccaatgaatggactccttgtgtgaattattgcatcttcttccaaagcaggttcatcaagactttcacagagattcatttttgttgagaagtaagggttaataggaggatagaatttggatccaaatctagtgataaaagtgtccaagcaatcaaaaagtaagatattttagggacataccaacatcttccctttctgctaatttcatgctccaaagatatggcaaaaaaaaaaatcataaaaagtgcttttgccctacttgtgttctagttttcccatggcagaattttgtaattacatccagaatatagtgtatattttgttcctcaaactttattacattggatggatattgttgaactggggcactggtgcctatattcaaggctctttcctatcaacgtgtctgtccacgatttgttgtgtttaaagcttcattttgaaaaatcactgtccccctgtggggtagtgactgtattgttttgttcatgtctatgtgggacacattgcatcacatggcaaaccaactctctgtggatgtgagataagtacttataaaaccagcttgaaaacatcgtcttatgtattatgtcatcctgcatcataatgcaattatgtgtatcataacatgctcatttaaaaaaagagaaaccagcaaattcatgtttgtccatagaagaatgtactcagaactttgtgttgtgaaacgatgagaacagaccacctttaagatacccacctgccacttaaaatgacttagttataattagtagtagtctagacgttgttcttggtgtgtgggggtcaattctaacgtcatgttcttttgaataaatctctcagtcatatttgaaaaaaaaatacatgggaataaagaaaaatatcatctttggccaaatcaagcaggcatcttttttcttttccttgacgtttagctcattatacgtggtgattggatcacgagatctgtccgtgtgaaaatacagaaacatcctttagtttacaaaacagttattctaggcttgaagcctctgaacagcaaattgaatagatgggctgcatctgatttgctttatggatgtaattttacaaaacactcttgggtctctgaccccagggagttaagagtgcccagaggaggtcctacacattaaaggataaagccccccagtgatgctggcaagcaaatgtgttgagttcttaaatcttcatttggttttctgttcaggattttaattgcaaatgaatttatttctccagtttatctaaagacctaatttcccaatagtttcctctgcatttatatactctgtagtgtttaggcaaccctgttataagtttattaatattatgtaagtgttgttcttgtatttatgtatagtgtatgtattgtaaatatactcagagcttttttccttttactgtaaaatggtgatttttttgccctatgataatgtaaagggagaccctcctaatgagattctctcagaggatgattattccagtctattctcagagatttaaatgaacaagtgttattgtttttaatggtgtctcagacatattctgttggtgcattgcttttctgtattcaactttcctatgaattgagctgtgaactgaaatagagtttaaacctttaactgtatgcatttgtataattatctgaatgaaggcatgaaggttaaataaagcattttgtatggaacaaaactccctaactgactcagacactttggaaatcatagttattaaccattctaattaaacctttgttatgaaaagttttac

SEQ ID NO: 736286 - DNA, 629 bp, Homo sapiens
ggggctctgctggcagaaagggggtccatcctaggcatgggtactgacacaggtgacagcatctgcataccagccagcttctgtggtgtttatggcctctggaccacaggttcccgcctcagctacactggaattgcctctgccatcaaggggaaaaaaatcggtgaccacggtggctggccccatggcccaggacgtggagagcctggcgctgtgcctgcaagccctgctgagtgaagacatgtaccgactggaccccactgtgctccagatgccctttagggaggaggtgaagaccccctttcccaccccaggctgcagtgagtgagaagcccacatgctcagtccagtttgtttccttcccctgctggacaccagctgctttggcttcttggctatctggagccatagcttgtaagtgcccccaaagagggcctccagtgccatatacccaacccatgcagttagaatactcagcaagtgtggttgagagggtgtggcatccagttaagctgggtttttaaccctctaggtaaccctggccaagtcacatctcttctttcagccttagcctccccatcaatacaataaagaggttaggctgggagattactccacacccttctgtc

SEQ ID NO: 736287 - DNA, 1268 bp, Homo sapiens
ggggctctgctggcagaaagggggtccatcctaggcatgggtactgacacaggtgacagcatctgcataccagccagcttctgtggtgtttatggcctctggaccacaggttcccgcctcagctacactggaattgcctctgccatcaaggggaaaaaaatcggtgaccacggtggctggccccatggcccaggacgtggagagcctggcgctgtgcctgcaagccctgctgagtgaagacatgtaccgactggaccccactgtgctccagatgccctttagggaggaggtgaagaccccctttcccaccccaggctgcagtgagtgagaagcccacatgctcagtccagtttgtttccttcccctgctggacaccagctgctttggcttcttggctatctggagccatagcttcccccctctaggatccccaaactagccagcatcttgaagagattcgtggagtggggacacccaagaaactgtgggaacagcacacagcagtggaggaatatgagcaagagttcatagccaagtggaggtccctggacctggatgtgctgctggtgccagttctgggctctgccttctatataggctcttcctccctagcatcagaaagtcagtcttatgtgaccctgtacaacctcctggactttcccgcgggcgtggtgcctgtcactatcgtgacactacaggacgaggaggaactggccttctacaaggggtgctacggagatagttctgacaaaaatttctcagaggcggtaagaggatccgtcggagttctggtgactgtgcagtgcattgctttgccatgggaagaggagctgtgtctccggttcatgaaggaggtggacaccttggtcaagaatcagagggggcccaagtgataggctcctggaatggagtaacagctcatgaaacacggggctggttgtggtggctcatacttgtaatcccagcagttcaggaggcagaggctggcagatcgcttgaggccacgagtttgagaccaacctgggcaacatagtgagaccctgcttctaaagcattttcttggtgttactcctgtagatcctcacccaagtgtgctcctgatgccccttccttctcatgaataccatgtccaccttatgtctcctccttctggaaccccaccaggttccttttctttgttggtccctctgtgtgggtgctcaatattcctcagatgggcccaggatggggagcagggtgaggagctcaataaacattttctgactggc

SEQ ID NO: 736288 - DNA, 1062 bp, Homo sapiens
ggggctctgctggcagaaagggggtccatcctaggcatgggtactgacacaggtgacagcatctgcataccagccagcttctgtggtgtttatggcctctggaccacaggttcccgcctcagctacactggaattgcctctgccatcaaggggaaaaaaatcggtgaccacggtggctggccccatggcccaggacgtggagagcctggcgctgtgcctgcaagccctgctgagtgaagacatgtaccgactggaccccactgtgctccagatgccctttagggaggaggtgaagaccccctttcccaccccaggctgcagtgagtgagaagcccacatgctcagtccagtttgtttccttcccctgctggacaccagctgctttggcttcttggctatctggagccatagcttcccccctctaggatccccaaactagccagcatcttgaagagattcgtggagtggggacacccaagaaactgtgggaacagcacacagcagtggaggaatatgagcaagagttcatagccaagtggaggtccctggacctggatgtgctgctggtgccagttctgggctctgccttctatataggctcttcctccctagcatcagaaagtcagtcttatgtgaccctgtacaacctcctggactttcccgcgggcgtggtgcctgtcactatcgtgacactacaggacgaggaggaactggccttctacaaggggtgctacggagatagttctgacaaaaatttctcagagccaccatataaagaagtccaggctatactcctagaggccacatgcaagagaactgaggcatcccagctgacagccagcaccaactgccgggcatgtgagtgaactttcctagaatacgaccctccagctcccatcaatcaagactgaagatgatatagccctggacagtgcggcttgactgcagcctcatgagacacccagagtcagaccacccagctaagctgctcctggatttctgaccctcagaaactatgatacaataaatatttggcctcgtaggcctcagtttgggggtaat

SEQ ID NO: 736289 - DNA, 433 bp, Homo sapiens
tggctccactagcttcagcactgccgaacttcctgccccagtccggcaggggccgaccttgcccagtggctaaaccacagaagccttggggagcccggctccttctcccaactttacctgaataatacagcagttcaggaggcagaggctggcagatcgcttgaggccacgagtttgagaccaacctgggcaacatagtgagaccctgcttctaaagcattttcttggtgttactcctgtagatcctcacccaagtgtgctcctgatgccccttccttctcatgaataccatgtccaccttatgtctcctccttctggaaccccaccaggttccttttctttgttggtccctctgtgtgggtgctcaatattcctcagatgggcccaggatggggagcagggtgaggagctcaataaacattttctgactggc

SEQ ID NO: 736290 - DNA, 386 bp, Homo sapiens
tacccaccccagtgtgtgccaccctcaggagcccctggcaggaccaagactcagggtcctcattgtgggcctctgcagcttgtggaagccaccatataaagaagtccaggctatactcctagaggccacatgcaagagaactgaggcatcccagctgacagccagcaccaactgccgggcatgtgagtgaactttcctagaatacgaccctccagctcccatcaatcaagactgaagatgatatagccctggacagtgcggcttgactgcagcctcatgagacacccagagtcagaccacccagctaagctgctcctggatttctgaccctcagaaactatgatacaataaatatttggcctcgtaggcctcagtttgggggtaat

SEQ ID NO: 736291 - DNA, 2035 bp, Homo sapiens
tgggggttataatatacccttcgaggccatctatctccctcatcacacatacaccaacttaatataaacccttttcagagaagataaaggaattagctgtttaatgactacattgtggtgaagttttaaagccactaaatgggaggtccattcccatggcaccattgctagcagcccaaacacagtctgcagaaacactcatttcagtggctgacttcagtcagtaattgatacagcaaaatttcattctaacatttcaaagctgtctcacagaatttctgagaaaaaagtgttcccaatcactgatttcatcatatcgcgtcaatattacttcagcacctttaatgaggaaatcattgaaacacactcatcatctttggctagagagatttatgttactcagaggttttgcagctggtgtggcagtgggtggcaatagtgaatttgcagttttgaaaaaaattaaaaagttacgagaagaaaagagaataaacaaagagaaagggaaatgaagcaagaacaaaagagactcaatcatagtgttagaaaattcctgcaaacttcttgatcctgaagtctccaaaaaacctcagacctcccaccgatgttacagtatctttcatctggggctcaatctaagaatcttttcggttcctggtaattcctctgagtgcttcatgtctgtcatcacagttttattaaagaactttacttgtgtttggaaagattgtgtgcatgcgtgtctgtagccagttgcagacgtattgtctcagtaagaaaataaatcctatttgttttatgaaatcagtacacaaataacagttgccacagtgtaccagtatttcaatttctaaagaataccatagagtctgaattagaacctttaactagattgcaaaggaatatactaaattgaaaacttgtaaaagggaagtaataaacaccataatcctagataagatcctatggtctttcagagtttttccatatacagtaattatttgatgtacagtaattattgataaccaaaatgacaaaaactgaatctactcttcaaattcaaccatgtatcttaaaaaggagtaaaatgtactgttttcagtgtttcctttggtttcttacagtttataattttataaattaacttcatagaacatattttataaatgttctgtctctcctaacataaattttgaattataccattgttatttgatagtacaaattatgtaaagtaatatgcaaaataagaacacattttgccttaaattgtattttgatattttagaaccatttctgaaaacagctcattttaacaagacgagatgtctgataacagaagagaaaacctgtctgacttaggtttaagctcaggcgaaaaagaagtgttttaagcatttgaaggaactgataatacctttattagagttcatctgttcttttactatatgaaagtatgtcacggagctgaactgtacctgtttgtgatgtgatacctccttttctcagtcaactgcacgttttcaacttaagtttacttaaaattttctgaaaagaaatgtacaaagacagccttcaattaaggattaatcactatggcaactgagatgtggtgactgaagggggaggatgtattctcccctcagtttcctgccagctgtcatagtcaacctctgctgcctgaatccaagccaaaatatagactgtgaccaactctaagaaactatatctgtatttttataaattggtacaagtatcagactataaaagaagacttaatcccttgaattggatgacagacacttggcactcttgcaagtgtttgacagagaaataacgggtcgctttgtagtaaaacctggattaatagtaagcccctctttatgttattgcagtgtggtgtaaatgagagaactaagcatgctgtcagcctggggtgggaggtagcgtgggggagtgtcttttatataaccagtgcaggtttaagcactgttcagaatactgtaaatacaaaatattgtgttagtaaaaaaaa

SEQ ID NO: 736292 - DNA, 452 bp, Homo sapiens
attgaaacaatgttctaatttcagtgtatttgttaattagagataattattatttgaagttggatatatcttaaggtttttttccttgaaagcaaaagtttccaaaaaagtatttctttaaaaaatatttgtctgtaggtgattggatgtgtccagttaataaaggagatgataagaaaaagaaagatacaaacaaagatgaagaagaatgtaatgagcccaaaggagatccggaaatggcacccatatacttgaaaaggttattgccagtgtttgcacaaacatttcagcaaactatgctgccttcaataaggaaagcaagtcttgctctaattcgaaaaatgattcatttttgctctgaagcactgttaaaagaagtttgtgattctgatgttggtcacaatttgcctacaatactagtggaaatcactgcaactgtcctggatcaagag

SEQ ID NO: 736293 - DNA, 753 bp, Homo sapiens
cgccgccgccgccgtcgcccgcagcaccgcgcgggcctctgagttgcagggcctgaggagccgcgtgctggggactggacgtccgctggctgctgccgcacgcgagaacctctcgcttccctgtcaccaggtcctcgcggaggaaggggagggacgaggcgcggcttttcctgtgccgcctgcccggttcgacctgcgcggcctgcggcttcttgggaactctagggccgcggccgggcctggctctgccggcggcctgttgggagctggatcggagcggtttggaacgacaagcccgacaaagagacttttaaaaaaccatggcagatgtggacccagatacattgctggaatggctacagatgggacagggagatgaaagggacatgcaactaatagcccttgaacagctatgcatgctgcttttgatgtctgacaacgtggatcgttgttttgaaacgctttattcatatatagtatgatgtaatttttaagagactggggcctcactatgttgcccagtctggcctcgagctcctgggttcaagcgattctcctgcctcggcctcttcagtagctgggactataggctgtgccaccacacctggctttataatgtaattttaaggaaatgaacctaaagttaagtcagatatgatttactatatgaagatacaagagtatttcaagttgaaggggttagccgtgtttggggtagtgtaccagtaacctccaaaaactagacatttggtt

SEQ ID NO: 736294 - DNA, 433 bp, Homo sapiens; identical to SEQ ID NO: 461242

SEQ ID NO: 736295 - DNA, 814 bp, Homo sapiens
cggacgcccggcgagtggcggaaagcgagaccccggcgccgagtgaggtcggccaggctgctgccgacttccccgctggcccctttgttcccctcccggggccctgccggcggcgggtcccggttgcccgcgccagagcctcaggccggctccttttgcccttgagaagggttcgctgccaggccttcgagttccgggcgcagctcccgggagagccggcgccctgcctggcccggcggcctcctctcgggcacgaaggcttgctgctgcttctccagaacttcccttcctcgtagacacagcaaagagacttttaaaaaaccatggcagatgtggacccagatacattgctggaatggctacagatgggacagggagatgaaagggacatgcaactaatagcccttgaacagctatgcatgctgcttttgatgtctgacaacgtggatcgttgttttgaaacatgtcctcctcgcactttcttaccagccctttgcaaaatttttcttgatgaaagtgctccagacaatgtattagaggtgacagcccgtgccataacatactacctggatgtatctgcggaatgtacccgaaggattgttggggtagatggagctataaaagcactttgtaatcgtttggttgtagttgaacttaacaacaggactagcagagacttagctgaacagtgtgtaaaggtaagtattacttattggctcattacttatttttctcagacctctcagggatgagtattggctcatttaaacatcacttagagactgaaaaatgtatttactaaaaaaaaaaaatt

SEQ ID NO: 736296 - DNA, 1589 bp, Homo sapiens; identical to SEQ ID NO: 461243
